United States Patent Application Publication US 2014/0004565 A1 - sequence listing, part 22

SEQ ID NO: 434497 - RNA, 19 nt, Artificial Sequence
  Description of Artificial Sequence: Synthetic oligonucleotide
aggacaucgcugcauauag

SEQ ID NO: 434498 - RNA, 19 nt, Artificial Sequence
  Description of Artificial Sequence: Synthetic oligonucleotide
uguggacccagccaaacac

SEQ ID NO: 434499 - RNA, 19 nt, Artificial Sequence
  Description of Artificial Sequence: Synthetic oligonucleotide
aguaccaucccugcggucg

SEQ ID NO: 434500 - RNA, 19 nt, Artificial Sequence
  Description of Artificial Sequence: Synthetic oligonucleotide
agauucaguaagucgagga

SEQ ID NO: 434501 - RNA, 19 nt, Artificial Sequence
  Description of Artificial Sequence: Synthetic oligonucleotide
agugauuguaaccuacagu

SEQ ID NO: 434502 - RNA, 19 nt, Artificial Sequence
  Description of Artificial Sequence: Synthetic oligonucleotide
aucucgcaacaccagaaac

SEQ ID NO: 434503 - RNA, 19 nt, Artificial Sequence
  Description of Artificial Sequence: Synthetic oligonucleotide
acgguguggauuuagaaaa

SEQ ID NO: 434504 - RNA, 19 nt, Artificial Sequence
  Description of Artificial Sequence: Synthetic oligonucleotide
cucgaucagagacauacag

SEQ ID NO: 434505 - RNA, 19 nt, Artificial Sequence
  Description of Artificial Sequence: Synthetic oligonucleotide
aagauuaauagcgaaugua

SEQ ID NO: 434506 - RNA, 19 nt, Artificial Sequence
  Description of Artificial Sequence: Synthetic oligonucleotide
ucgaucagagacauacagc

SEQ ID NO: 434507 - RNA, 19 nt, Artificial Sequence
  Description of Artificial Sequence: Synthetic oligonucleotide
uucgggaauaucaucucca

SEQ ID NO: 434508 - RNA, 19 nt, Artificial Sequence
  Description of Artificial Sequence: Synthetic oligonucleotide
ucauacaccuagaaucaga

SEQ ID NO: 434509 - RNA, 19 nt, Artificial Sequence
  Description of Artificial Sequence: Synthetic oligonucleotide
gguuagugggaauacagcc

SEQ ID NO: 434510 - RNA, 19 nt, Artificial Sequence
  Description of Artificial Sequence: Synthetic oligonucleotide
gacuguucagcccuguaug

SEQ ID NO: 434511 - RNA, 19 nt, Artificial Sequence
  Description of Artificial Sequence: Synthetic oligonucleotide
ucuccucggaucaucaugu

SEQ ID NO: 434512 - RNA, 19 nt, Artificial Sequence
  Description of Artificial Sequence: Synthetic oligonucleotide
ucaacacgucaacagauuc

SEQ ID NO: 434513 - RNA, 19 nt, Artificial Sequence
  Description of Artificial Sequence: Synthetic oligonucleotide
uccaacuuaggaaucuuuc

SEQ ID NO: 434514 - RNA, 19 nt, Artificial Sequence
  Description of Artificial Sequence: Synthetic oligonucleotide
gaaucgaggguacaagcac

SEQ ID NO: 434515 - RNA, 19 nt, Artificial Sequence
  Description of Artificial Sequence: Synthetic oligonucleotide
ucggguugaggucauacac

SEQ ID NO: 434516 - RNA, 19 nt, Artificial Sequence
  Description of Artificial Sequence: Synthetic oligonucleotide
acaugagugaauucagcca

SEQ ID NO: 434517 - RNA, 19 nt, Artificial Sequence
  Description of Artificial Sequence: Synthetic oligonucleotide
uacagugauuguaaccuac

SEQ ID NO: 434518 - RNA, 19 nt, Artificial Sequence
  Description of Artificial Sequence: Synthetic oligonucleotide
gauagcaucugaauaguuc

SEQ ID NO: 434519 - RNA, 19 nt, Artificial Sequence
  Description of Artificial Sequence: Synthetic oligonucleotide
gacuacuccauuguaacac

SEQ ID NO: 434520 - RNA, 19 nt, Artificial Sequence
  Description of Artificial Sequence: Synthetic oligonucleotide
aaaucagaccauaaguaaa

SEQ ID NO: 434521 - RNA, 19 nt, Artificial Sequence
  Description of Artificial Sequence: Synthetic oligonucleotide
uaugauaccuguucagaau

SEQ ID NO: 434522 - RNA, 19 nt, Artificial Sequence
  Description of Artificial Sequence: Synthetic oligonucleotide
acaucucggauaugauacc

SEQ ID NO: 434523 - RNA, 19 nt, Artificial Sequence
  Description of Artificial Sequence: Synthetic oligonucleotide
guggauuuagaaaagauua

SEQ ID NO: 434524 - RNA, 19 nt, Artificial Sequence
  Description of Artificial Sequence: Synthetic oligonucleotide
uaaacgguucaggaggucc

SEQ ID NO: 434525 - RNA, 19 nt, Artificial Sequence
  Description of Artificial Sequence: Synthetic oligonucleotide
ugggaauacagcccaucag

SEQ ID NO: 434526 - RNA, 19 nt, Artificial Sequence
  Description of Artificial Sequence: Synthetic oligonucleotide
ugcauauagaaggacuuga

SEQ ID NO: 434527 - RNA, 19 nt, Artificial Sequence
  Description of Artificial Sequence: Synthetic oligonucleotide
cccaagagcgcauagagcc

SEQ ID NO: 434528 - RNA, 19 nt, Artificial Sequence
  Description of Artificial Sequence: Synthetic oligonucleotide
ucaacgugcacagaaggcu

SEQ ID NO: 434529 - RNA, 19 nt, Artificial Sequence
  Description of Artificial Sequence: Synthetic oligonucleotide
aguaguaacuucacaguag

SEQ ID NO: 434530 - RNA, 19 nt, Artificial Sequence
  Description of Artificial Sequence: Synthetic oligonucleotide
uccagguacagcugcgagg

SEQ ID NO: 434531 - RNA, 19 nt, Artificial Sequence
  Description of Artificial Sequence: Synthetic oligonucleotide
agauuaauagcgaauguaa

SEQ ID NO: 434532 - RNA, 19 nt, Artificial Sequence
  Description of Artificial Sequence: Synthetic oligonucleotide
aagcacacaucucggauau

SEQ ID NO: 434533 - RNA, 19 nt, Artificial Sequence
  Description of Artificial Sequence: Synthetic oligonucleotide
auaugauaccuguucagaa

SEQ ID NO: 434534 - RNA, 19 nt, Artificial Sequence
  Description of Artificial Sequence: Synthetic oligonucleotide
uugggcaucaacacgucaa

SEQ ID NO: 434535 - RNA, 19 nt, Artificial Sequence
  Description of Artificial Sequence: Synthetic oligonucleotide
caggauugguucauuaaug

SEQ ID NO: 434536 - RNA, 19 nt, Artificial Sequence
  Description of Artificial Sequence: Synthetic oligonucleotide
ucucggauaugauaccugu

SEQ ID NO: 434537 - RNA, 19 nt, Artificial Sequence
  Description of Artificial Sequence: Synthetic oligonucleotide
uuagguuuaguguuccaua

SEQ ID NO: 434538 - RNA, 19 nt, Artificial Sequence
  Description of Artificial Sequence: Synthetic oligonucleotide
cacacuagguccucuaaac

SEQ ID NO: 434539 - RNA, 19 nt, Artificial Sequence
  Description of Artificial Sequence: Synthetic oligonucleotide
ugauuguaaccuacaguac

SEQ ID NO: 434540 - RNA, 19 nt, Artificial Sequence
  Description of Artificial Sequence: Synthetic oligonucleotide
auagcgaauguaaaggacu

SEQ ID NO: 434541 - RNA, 19 nt, Artificial Sequence
  Description of Artificial Sequence: Synthetic oligonucleotide
cauacacuaugcuugccac

SEQ ID NO: 434542 - RNA, 19 nt, Artificial Sequence
  Description of Artificial Sequence: Synthetic oligonucleotide
gacaucgcugcauauagaa

SEQ ID NO: 434543 - RNA, 19 nt, Artificial Sequence
  Description of Artificial Sequence: Synthetic oligonucleotide
ucguguucuggacuguuca

SEQ ID NO: 434544 - RNA, 19 nt, Artificial Sequence
  Description of Artificial Sequence: Synthetic oligonucleotide
guaugacugggcaauacag

SEQ ID NO: 434545 - RNA, 19 nt, Artificial Sequence
  Description of Artificial Sequence: Synthetic oligonucleotide
cuauauccuucuaaugcac

SEQ ID NO: 434546 - RNA, 19 nt, Artificial Sequence
  Description of Artificial Sequence: Synthetic oligonucleotide
  modified_base (3)..(3): a, c, u, g, unknown or other
canaaauuuucuuuaucaa

SEQ ID NO: 434547 - RNA, 19 nt, Artificial Sequence
  Description of Artificial Sequence: Synthetic oligonucleotide
ucuaaacgguucaggaggu

SEQ ID NO: 434548 - RNA, 19 nt, Artificial Sequence
  Description of Artificial Sequence: Synthetic oligonucleotide
uaaaguucggguugagguc

SEQ ID NO: 434549 - RNA, 19 nt, Artificial Sequence
  Description of Artificial Sequence: Synthetic oligonucleotide
caacauugggcaucaacac

SEQ ID NO: 434550 - RNA, 19 nt, Artificial Sequence
  Description of Artificial Sequence: Synthetic oligonucleotide
agugacaugccauguauuu

SEQ ID NO: 434551 - RNA, 19 nt, Artificial Sequence
  Description of Artificial Sequence: Synthetic oligonucleotide
agaagugaucccugaagca

SEQ ID NO: 434552 - RNA, 19 nt, Artificial Sequence
  Description of Artificial Sequence: Synthetic oligonucleotide
uacuccauuguaacacuga

SEQ ID NO: 434553 - RNA, 19 nt, Artificial Sequence
  Description of Artificial Sequence: Synthetic oligonucleotide
gucaccucaacgugcacag

SEQ ID NO: 434554 - RNA, 19 nt, Artificial Sequence
  Description of Artificial Sequence: Synthetic oligonucleotide
ggcaucaacacgucaacag

SEQ ID NO: 434555 - RNA, 19 nt, Artificial Sequence
  Description of Artificial Sequence: Synthetic oligonucleotide
cucaacgugcacagaaggc

SEQ ID NO: 434556 - RNA, 19 nt, Artificial Sequence
  Description of Artificial Sequence: Synthetic oligonucleotide
agccuucuagaauuucuuc

SEQ ID NO: 434557 - RNA, 19 nt, Artificial Sequence
  Description of Artificial Sequence: Synthetic oligonucleotide
auucauacaccuagaauca

SEQ ID NO: 434558 - RNA, 19 nt, Artificial Sequence
  Description of Artificial Sequence: Synthetic oligonucleotide
uuguuaaaggggcaucgau

SEQ ID NO: 434559 - RNA, 19 nt, Artificial Sequence
  Description of Artificial Sequence: Synthetic oligonucleotide
accucuauauccuucuaau

SEQ ID NO: 434560 - RNA, 19 nt, Artificial Sequence
  Description of Artificial Sequence: Synthetic oligonucleotide
aaaccgacacagcaggauu

SEQ ID NO: 434561 - RNA, 19 nt, Artificial Sequence
  Description of Artificial Sequence: Synthetic oligonucleotide
uagguuuaguguuccauau

SEQ ID NO: 434562 - RNA, 19 nt, Artificial Sequence
  Description of Artificial Sequence: Synthetic oligonucleotide
uuggaguaguaacuucaca

SEQ ID NO: 434563 - RNA, 19 nt, Artificial Sequence
  Description of Artificial Sequence: Synthetic oligonucleotide
caaagggacaucaagagau

SEQ ID NO: 434564 - RNA, 19 nt, Artificial Sequence
  Description of Artificial Sequence: Synthetic oligonucleotide
uguucacugcaaauuuuaa

SEQ ID NO: 434565 - RNA, 19 nt, Artificial Sequence
  Description of Artificial Sequence: Synthetic oligonucleotide
ucugggacuuagaaaugac

SEQ ID NO: 434566 - RNA, 19 nt, Artificial Sequence
  Description of Artificial Sequence: Synthetic oligonucleotide
gugacuucaagacucuguc

SEQ ID NO: 434567 - RNA, 19 nt, Artificial Sequence
  Description of Artificial Sequence: Synthetic oligonucleotide
caggaaaccgacacagcag

SEQ ID NO: 434568 - RNA, 19 nt, Artificial Sequence
  Description of Artificial Sequence: Synthetic oligonucleotide
uuauugguuagugggaaua

SEQ ID NO: 434569 - RNA, 19 nt, Artificial Sequence
  Description of Artificial Sequence: Synthetic oligonucleotide
cuucgggaauaucaucucc

SEQ ID NO: 434570 - RNA, 19 nt, Artificial Sequence
  Description of Artificial Sequence: Synthetic oligonucleotide
ucgaggauccucaggacau

SEQ ID NO: 434571 - RNA, 19 nt, Artificial Sequence
  Description of Artificial Sequence: Synthetic oligonucleotide
caguacgauaaaaugucuc

SEQ ID NO: 434572 - RNA, 19 nt, Artificial Sequence
  Description of Artificial Sequence: Synthetic oligonucleotide
aucaucaugugccgguugu

SEQ ID NO: 434573 - RNA, 19 nt, Artificial Sequence
  Description of Artificial Sequence: Synthetic oligonucleotide
acucgauagcaucugaaua

SEQ ID NO: 434574 - RNA, 19 nt, Artificial Sequence
  Description of Artificial Sequence: Synthetic oligonucleotide
gauuaauagcgaauguaaa

SEQ ID NO: 434575 - RNA, 19 nt, Artificial Sequence
  Description of Artificial Sequence: Synthetic oligonucleotide
cauuuauugguuaguggga

SEQ ID NO: 434576 - RNA, 19 nt, Artificial Sequence
  Description of Artificial Sequence: Synthetic oligonucleotide
auagucaagcuugaagagu

SEQ ID NO: 434577 - RNA, 19 nt, Artificial Sequence
  Description of Artificial Sequence: Synthetic oligonucleotide
caagucaucugacaagaca

SEQ ID NO: 434578 - RNA, 19 nt, Artificial Sequence
  Description of Artificial Sequence: Synthetic oligonucleotide
guaaccuguggacccagcc

SEQ ID NO: 434579 - RNA, 19 nt, Artificial Sequence
  Description of Artificial Sequence: Synthetic oligonucleotide
uugccugcguaaccugugg

SEQ ID NO: 434580 - RNA, 19 nt, Artificial Sequence
  Description of Artificial Sequence: Synthetic oligonucleotide
aguaagucgaggauccuca

SEQ ID NO: 434581 - RNA, 19 nt, Artificial Sequence
  Description of Artificial Sequence: Synthetic oligonucleotide
auuguaaccuacaguacga

SEQ ID NO: 434582 - RNA, 19 nt, Artificial Sequence
  Description of Artificial Sequence: Synthetic oligonucleotide
aucgaugucacuugauguu

SEQ ID NO: 434583 - RNA, 19 nt, Artificial Sequence
  Description of Artificial Sequence: Synthetic oligonucleotide
uguucaagucacaccuacu

SEQ ID NO: 434584 - RNA, 19 nt, Artificial Sequence
  Description of Artificial Sequence: Synthetic oligonucleotide
acaagcacacaucucggau

SEQ ID NO: 434585 - RNA, 19 nt, Artificial Sequence
  Description of Artificial Sequence: Synthetic oligonucleotide
uaccauauuuucucugauc

SEQ ID NO: 434586 - RNA, 19 nt, Artificial Sequence
  Description of Artificial Sequence: Synthetic oligonucleotide
auacaccuagaaucagaag

SEQ ID NO: 434587 - RNA, 19 nt, Artificial Sequence
  Description of Artificial Sequence: Synthetic oligonucleotide
acuacuccauuguaacacu

SEQ ID NO: 434588 - RNA, 19 nt, Artificial Sequence
  Description of Artificial Sequence: Synthetic oligonucleotide
cauacaccuagaaucagaa

SEQ ID NO: 434589 - RNA, 19 nt, Artificial Sequence
  Description of Artificial Sequence: Synthetic oligonucleotide
caucaagagaugguuucgg

SEQ ID NO: 434590 - RNA, 19 nt, Artificial Sequence
  Description of Artificial Sequence: Synthetic oligonucleotide
uagcgaauguaaaggacua

SEQ ID NO: 434591 - RNA, 19 nt, Artificial Sequence
  Description of Artificial Sequence: Synthetic oligonucleotide
uauugguuagugggaauac

SEQ ID NO: 434592 - RNA, 19 nt, Artificial Sequence
  Description of Artificial Sequence: Synthetic oligonucleotide
cagugauuguaaccuacag

SEQ ID NO: 434593 - RNA, 19 nt, Artificial Sequence
  Description of Artificial Sequence: Synthetic oligonucleotide
uacaagcacacaucucgga

SEQ ID NO: 434594 - RNA, 19 nt, Artificial Sequence
  Description of Artificial Sequence: Synthetic oligonucleotide
cacgucaacagauucagua

SEQ ID NO: 434595 - RNA, 19 nt, Artificial Sequence
  Description of Artificial Sequence: Synthetic oligonucleotide
ucacuaucccaagagcgca

SEQ ID NO: 434596 - RNA, 19 nt, Artificial Sequence
  Description of Artificial Sequence: Synthetic oligonucleotide
uuuguuaaaggggcaucga

SEQ ID NO: 434597 - RNA, 19 nt, Artificial Sequence
  Description of Artificial Sequence: Synthetic oligonucleotide
uguaaccuacaguacgaua

SEQ ID NO: 434598 - RNA, 19 nt, Artificial Sequence
  Description of Artificial Sequence: Synthetic oligonucleotide
agucgaggauccucaggac

SEQ ID NO: 434599 - RNA, 19 nt, Artificial Sequence
  Description of Artificial Sequence: Synthetic oligonucleotide
accuagaaucagaagcacg

SEQ ID NO: 434600 - RNA, 19 nt, Artificial Sequence
  Description of Artificial Sequence: Synthetic oligonucleotide
aucaagagaugguuucggu

SEQ ID NO: 434601 - RNA, 19 nt, Artificial Sequence
  Description of Artificial Sequence: Synthetic oligonucleotide
cugucgaagaagugauccc

SEQ ID NO: 434602 - RNA, 19 nt, Artificial Sequence
  Description of Artificial Sequence: Synthetic oligonucleotide
cugcguaaccuguggaccc

SEQ ID NO: 434603 - RNA, 19 nt, Artificial Sequence
  Description of Artificial Sequence: Synthetic oligonucleotide
ugguucauuaauggugucu

SEQ ID NO: 434604 - RNA, 19 nt, Artificial Sequence
  Description of Artificial Sequence: Synthetic oligonucleotide
cauacagcucugcuaguac

SEQ ID NO: 434605 - RNA, 19 nt, Artificial Sequence
  Description of Artificial Sequence: Synthetic oligonucleotide
ucccaagagcgcauagagc

SEQ ID NO: 434606 - RNA, 19 nt, Artificial Sequence
  Description of Artificial Sequence: Synthetic oligonucleotide
uuaacccaauuccccuuca

SEQ ID NO: 434607 - RNA, 19 nt, Artificial Sequence
  Description of Artificial Sequence: Synthetic oligonucleotide
ugaucauggagcgugcuuu

SEQ ID NO: 434608 - RNA, 19 nt, Artificial Sequence
  Description of Artificial Sequence: Synthetic oligonucleotide
uucauacaccuagaaucag

SEQ ID NO: 434609 - RNA, 19 nt, Artificial Sequence
  Description of Artificial Sequence: Synthetic oligonucleotide
agaauccaacuuaggaauc

SEQ ID NO: 434610 - RNA, 19 nt, Artificial Sequence
  Description of Artificial Sequence: Synthetic oligonucleotide
uaccaucucgcaacaccag

SEQ ID NO: 434611 - RNA, 19 nt, Artificial Sequence
  Description of Artificial Sequence: Synthetic oligonucleotide
uucggguugaggucauaca

SEQ ID NO: 434612 - RNA, 19 nt, Artificial Sequence
  Description of Artificial Sequence: Synthetic oligonucleotide
cugacacaagucaucugac

SEQ ID NO: 434613 - RNA, 19 nt, Artificial Sequence
  Description of Artificial Sequence: Synthetic oligonucleotide
gacuauguauaauuccagu

SEQ ID NO: 434614 - RNA, 19 nt, Artificial Sequence
  Description of Artificial Sequence: Synthetic oligonucleotide
uucauccgccugaaaggcc

SEQ ID NO: 434615 - RNA, 19 nt, Artificial Sequence
  Description of Artificial Sequence: Synthetic oligonucleotide
uuguucuuuugcagaggca

SEQ ID NO: 434616 - RNA, 19 nt, Artificial Sequence
  Description of Artificial Sequence: Synthetic oligonucleotide
ggacauguaccauauuuuc

SEQ ID NO: 434617 - RNA, 19 nt, Artificial Sequence
  Description of Artificial Sequence: Synthetic oligonucleotide
auacagcccaucagaacac

SEQ ID NO: 434618 - RNA, 19 nt, Artificial Sequence
  Description of Artificial Sequence: Synthetic oligonucleotide
guucauccgccugaaaggc

SEQ ID NO: 434619 - RNA, 19 nt, Artificial Sequence
  Description of Artificial Sequence: Synthetic oligonucleotide
aacgugcacagaaggcuuc

SEQ ID NO: 434620 - RNA, 19 nt, Artificial Sequence
  Description of Artificial Sequence: Synthetic oligonucleotide
cugggcaauacagaaaaca

SEQ ID NO: 434621 - RNA, 19 nt, Artificial Sequence
  Description of Artificial Sequence: Synthetic oligonucleotide
agacuacuccauuguaaca

SEQ ID NO: 434622 - RNA, 19 nt, Artificial Sequence
  Description of Artificial Sequence: Synthetic oligonucleotide
ugacugggcaauacagaaa

SEQ ID NO: 434623 - RNA, 19 nt, Artificial Sequence
  Description of Artificial Sequence: Synthetic oligonucleotide
ucauggagcgugcuuucaa

SEQ ID NO: 434624 - RNA, 19 nt, Artificial Sequence
  Description of Artificial Sequence: Synthetic oligonucleotide
aucgaggguacaagcacac

SEQ ID NO: 434625 - RNA, 19 nt, Artificial Sequence
  Description of Artificial Sequence: Synthetic oligonucleotide
gaguuagguuuaguguucc

SEQ ID NO: 434626 - RNA, 19 nt, Artificial Sequence
  Description of Artificial Sequence: Synthetic oligonucleotide
ucgguggacaagacuacuc

SEQ ID NO: 434627 - RNA, 19 nt, Artificial Sequence
  Description of Artificial Sequence: Synthetic oligonucleotide
agcaggauugguucauuaa

SEQ ID NO: 434628 - RNA, 19 nt, Artificial Sequence
  Description of Artificial Sequence: Synthetic oligonucleotide
aagucacaccuacugcuuu

SEQ ID NO: 434629 - RNA, 19 nt, Artificial Sequence
  Description of Artificial Sequence: Synthetic oligonucleotide
cuauauaagcauuuaucau

SEQ ID NO: 434630 - RNA, 19 nt, Artificial Sequence
  Description of Artificial Sequence: Synthetic oligonucleotide
acuagguccucuaaacggu

SEQ ID NO: 434631 - RNA, 19 nt, Artificial Sequence
  Description of Artificial Sequence: Synthetic oligonucleotide
ucucgguggacaagacuac

SEQ ID NO: 434632 - RNA, 19 nt, Artificial Sequence
  Description of Artificial Sequence: Synthetic oligonucleotide
cacugcaaauuuuaaccca

SEQ ID NO: 434633 - RNA, 19 nt, Artificial Sequence
  Description of Artificial Sequence: Synthetic oligonucleotide
ucgaugucacuugauguuc

SEQ ID NO: 434634 - RNA, 19 nt, Artificial Sequence
  Description of Artificial Sequence: Synthetic oligonucleotide
gagugaauucagccaggug

SEQ ID NO: 434635 - RNA, 19 nt, Artificial Sequence
  Description of Artificial Sequence: Synthetic oligonucleotide
aaacgguucaggagguccu

SEQ ID NO: 434636 - RNA, 19 nt, Artificial Sequence
  Description of Artificial Sequence: Synthetic oligonucleotide
ucgggaauaucaucuccaa

SEQ ID NO: 434637 - RNA, 19 nt, Artificial Sequence
  Description of Artificial Sequence: Synthetic oligonucleotide
gcaucgaugucacuugaug

SEQ ID NO: 434638 - RNA, 19 nt, Artificial Sequence
  Description of Artificial Sequence: Synthetic oligonucleotide
aacgguucaggagguccuc

SEQ ID NO: 434639 - RNA, 19 nt, Artificial Sequence
  Description of Artificial Sequence: Synthetic oligonucleotide
acugcaaauuuuaacccaa

SEQ ID NO: 434640 - RNA, 19 nt, Artificial Sequence
  Description of Artificial Sequence: Synthetic oligonucleotide
auugguuagugggaauaca

SEQ ID NO: 434641 - RNA, 19 nt, Artificial Sequence
  Description of Artificial Sequence: Synthetic oligonucleotide
accuggucaccucaacgug

SEQ ID NO: 434642 - RNA, 19 nt, Artificial Sequence
  Description of Artificial Sequence: Synthetic oligonucleotide
ucggaucaucaugugccgg

SEQ ID NO: 434643 - RNA, 19 nt, Artificial Sequence
  Description of Artificial Sequence: Synthetic oligonucleotide
gaccucuauauccuucuaa

SEQ ID NO: 434644 - RNA, 19 nt, Artificial Sequence
  Description of Artificial Sequence: Synthetic oligonucleotide
acaagacacacugaagaua

SEQ ID NO: 434645 - RNA, 19 nt, Artificial Sequence
  Description of Artificial Sequence: Synthetic oligonucleotide
auauacugccacacugcuc

SEQ ID NO: 434646 - RNA, 19 nt, Artificial Sequence
  Description of Artificial Sequence: Synthetic oligonucleotide
ccgagaaucauucuucauc

SEQ ID NO: 434647 - RNA, 19 nt, Artificial Sequence
  Description of Artificial Sequence: Synthetic oligonucleotide
cuggacgucuacgucagac

SEQ ID NO: 434648 - RNA, 19 nt, Artificial Sequence
  Description of Artificial Sequence: Synthetic oligonucleotide
cucaccaacauugggcauc

SEQ ID NO: 434649 - RNA, 19 nt, Artificial Sequence
  Description of Artificial Sequence: Synthetic oligonucleotide
gcccugaucaccuccgagg

SEQ ID NO: 434650 - RNA, 19 nt, Artificial Sequence
  Description of Artificial Sequence: Synthetic oligonucleotide
cugcuaguaccaucccugc

SEQ ID NO: 434651 - RNA, 19 nt, Artificial Sequence
  Description of Artificial Sequence: Synthetic oligonucleotide
gcuacuacacccaaaggga

SEQ ID NO: 434652 - RNA, 19 nt, Artificial Sequence
  Description of Artificial Sequence: Synthetic oligonucleotide
gucgaggauccucaggaca

SEQ ID NO: 434653 - RNA, 19 nt, Artificial Sequence
  Description of Artificial Sequence: Synthetic oligonucleotide
uucguguucuggacuguuc

SEQ ID NO: 434654 - RNA, 19 nt, Artificial Sequence
  Description of Artificial Sequence: Synthetic oligonucleotide
acacacuagguccucuaaa

SEQ ID NO: 434655 - RNA, 19 nt, Artificial Sequence
  Description of Artificial Sequence: Synthetic oligonucleotide
caaaggucaggaagggaca

SEQ ID NO: 434656 - RNA, 19 nt, Artificial Sequence
  Description of Artificial Sequence: Synthetic oligonucleotide
accuacaguacgauaaaau

SEQ ID NO: 434657 - RNA, 19 nt, Artificial Sequence
  Description of Artificial Sequence: Synthetic oligonucleotide
aaccuacaguacgauaaaa

SEQ ID NO: 434658 - RNA, 19 nt, Artificial Sequence
  Description of Artificial Sequence: Synthetic oligonucleotide
cacgguguggauuuagaaa

SEQ ID NO: 434659 - RNA, 19 nt, Artificial Sequence
  Description of Artificial Sequence: Synthetic oligonucleotide
gucaagcuugaagagugug

SEQ ID NO: 434660 - RNA, 19 nt, Artificial Sequence
  Description of Artificial Sequence: Synthetic oligonucleotide
auagccuccaugaggacau

SEQ ID NO: 434661 - RNA, 19 nt, Artificial Sequence
  Description of Artificial Sequence: Synthetic oligonucleotide
cagauucaguaagucgagg

SEQ ID NO: 434662 - RNA, 19 nt, Artificial Sequence
  Description of Artificial Sequence: Synthetic oligonucleotide
aucuuuacacaugcuggcu

SEQ ID NO: 434663 - RNA, 19 nt, Artificial Sequence
  Description of Artificial Sequence: Synthetic oligonucleotide
uaauaaggagcagggucaa

SEQ ID NO: 434664 - RNA, 19 nt, Artificial Sequence
  Description of Artificial Sequence: Synthetic oligonucleotide
uaauggugucugucaucag

SEQ ID NO: 434665 - RNA, 19 nt, Artificial Sequence
  Description of Artificial Sequence: Synthetic oligonucleotide
ccucaacgugcacagaagg

SEQ ID NO: 434666 - RNA, 19 nt, Artificial Sequence
  Description of Artificial Sequence: Synthetic oligonucleotide
gacaucuacucugcacccc

SEQ ID NO: 434667 - RNA, 19 nt, Artificial Sequence
  Description of Artificial Sequence: Synthetic oligonucleotide
cccuuuuauagccuucuag

SEQ ID NO: 434668 - RNA, 19 nt, Artificial Sequence
  Description of Artificial Sequence: Synthetic oligonucleotide
guaccaucucgcaacacca

SEQ ID NO: 434669 - RNA, 19 nt, Artificial Sequence
  Description of Artificial Sequence: Synthetic oligonucleotide
cugaucuguauaccaauaa

SEQ ID NO: 434670 - RNA, 19 nt, Artificial Sequence
  Description of Artificial Sequence: Synthetic oligonucleotide
aagcacgguguggauuuag

SEQ ID NO: 434671 - RNA, 19 nt, Artificial Sequence
  Description of Artificial Sequence: Synthetic oligonucleotide
auguauaauuccagugaca

SEQ ID NO: 434672 - RNA, 19 nt, Artificial Sequence
  Description of Artificial Sequence: Synthetic oligonucleotide
aguuagguuuaguguucca

SEQ ID NO: 434673 - RNA, 19 nt, Artificial Sequence
  Description of Artificial Sequence: Synthetic oligonucleotide
gcgaauguaaaggacuaug

SEQ ID NO: 434674 - RNA, 19 nt, Artificial Sequence
  Description of Artificial Sequence: Synthetic oligonucleotide
auuuggagaagaacugaau

SEQ ID NO: 434675 - RNA, 19 nt, Artificial Sequence
  Description of Artificial Sequence: Synthetic oligonucleotide
cagcgcuggacgaaucgag

SEQ ID NO: 434676 - RNA, 19 nt, Artificial Sequence
  Description of Artificial Sequence: Synthetic oligonucleotide
cugcauauagaaggacuug

SEQ ID NO: 434677 - RNA, 19 nt, Artificial Sequence
  Description of Artificial Sequence: Synthetic oligonucleotide
caucgaugucacuugaugu

SEQ ID NO: 434678 - RNA, 19 nt, Artificial Sequence
  Description of Artificial Sequence: Synthetic oligonucleotide
acaucgcugcauauagaag

SEQ ID NO: 434679 - RNA, 19 nt, Artificial Sequence
  Description of Artificial Sequence: Synthetic oligonucleotide
acagugauuguaaccuaca

SEQ ID NO: 434680 - RNA, 19 nt, Artificial Sequence
  Description of Artificial Sequence: Synthetic oligonucleotide
cuuuaggccuguuuuaaau

SEQ ID NO: 434681 - RNA, 19 nt, Artificial Sequence
  Description of Artificial Sequence: Synthetic oligonucleotide
acaguacgauaaaaugucu

SEQ ID NO: 434682 - RNA, 19 nt, Artificial Sequence
  Description of Artificial Sequence: Synthetic oligonucleotide
ugccugcguaaccugugga

SEQ ID NO: 434683 - RNA, 19 nt, Artificial Sequence
  Description of Artificial Sequence: Synthetic oligonucleotide
auguucacugcaaauuuua

SEQ ID NO: 434684 - RNA, 19 nt, Artificial Sequence
  Description of Artificial Sequence: Synthetic oligonucleotide
agugucccgucuucuuucu

SEQ ID NO: 434685 - RNA, 19 nt, Artificial Sequence
  Description of Artificial Sequence: Synthetic oligonucleotide
ggacaucuacucugcaccc

SEQ ID NO: 434686 - RNA, 19 nt, Artificial Sequence
  Description of Artificial Sequence: Synthetic oligonucleotide
gucgaagaagugaucccug

SEQ ID NO: 434687 - RNA, 19 nt, Artificial Sequence
  Description of Artificial Sequence: Synthetic oligonucleotide
caugugccgguuguugagc

SEQ ID NO: 434688 - RNA, 19 nt, Artificial Sequence
  Description of Artificial Sequence: Synthetic oligonucleotide
agcgcuggacgaaucgagg

SEQ ID NO: 434689 - RNA, 19 nt, Artificial Sequence
  Description of Artificial Sequence: Synthetic oligonucleotide
ccaacuaaagagugacaug

SEQ ID NO: 434690 - RNA, 19 nt, Artificial Sequence
  Description of Artificial Sequence: Synthetic oligonucleotide
cuuuacacaugcuggcucu

SEQ ID NO: 434691 - RNA, 19 nt, Artificial Sequence
  Description of Artificial Sequence: Synthetic oligonucleotide
uuguaaccuacaguacgau

SEQ ID NO: 434692 - RNA, 19 nt, Artificial Sequence
  Description of Artificial Sequence: Synthetic oligonucleotide
agucacaccuacugcuuuu

SEQ ID NO: 434693 - RNA, 19 nt, Artificial Sequence
  Description of Artificial Sequence: Synthetic oligonucleotide
gcgcuggacgaaucgaggg

SEQ ID NO: 434694 - RNA, 19 nt, Artificial Sequence
  Description of Artificial Sequence: Synthetic oligonucleotide
ggaguaguaacuucacagu

SEQ ID NO: 434695 - RNA, 19 nt, Artificial Sequence
  Description of Artificial Sequence: Synthetic oligonucleotide
agguuuaguguuccauaua

SEQ ID NO: 434696 - RNA, 19 nt, Artificial Sequence
  Description of Artificial Sequence: Synthetic oligonucleotide
agggucaauuccuucccuu

SEQ ID NO: 434697 - RNA, 19 nt, Artificial Sequence
  Description of Artificial Sequence: Synthetic oligonucleotide
caguaagucgaggauccuc

SEQ ID NO: 434698 - RNA, 19 nt, Artificial Sequence
  Description of Artificial Sequence: Synthetic oligonucleotide
aucucggauaugauaccug

SEQ ID NO: 434699 - RNA, 19 nt, Artificial Sequence
  Description of Artificial Sequence: Synthetic oligonucleotide
acuaugcuugccacuggug

SEQ ID NO: 434700 - RNA, 19 nt, Artificial Sequence
  Description of Artificial Sequence: Synthetic oligonucleotide
cuggucaccucaacgugca

SEQ ID NO: 434701 - RNA, 19 nt, Artificial Sequence
  Description of Artificial Sequence: Synthetic oligonucleotide
caucaacacgucaacagau

SEQ ID NO: 434702 - RNA, 19 nt, Artificial Sequence
  Description of Artificial Sequence: Synthetic oligonucleotide
ccucuauauccuucuaaug

SEQ ID NO: 434703 - RNA, 19 nt, Artificial Sequence
  Description of Artificial Sequence: Synthetic oligonucleotide
gguggacaagacuacucca

SEQ ID NO: 434704 - RNA, 19 nt, Artificial Sequence
  Description of Artificial Sequence: Synthetic oligonucleotide
cuguucagcccuguaugac

SEQ ID NO: 434705 - RNA, 19 nt, Artificial Sequence
  Description of Artificial Sequence: Synthetic oligonucleotide
caccuagaaucagaagcac

SEQ ID NO: 434706 - RNA, 19 nt, Artificial Sequence
  Description of Artificial Sequence: Synthetic oligonucleotide
agccuuuaggccuguuuua

SEQ ID NO: 434707 - RNA, 19 nt, Artificial Sequence
  Description of Artificial Sequence: Synthetic oligonucleotide
uagagugucccgucuucuu

SEQ ID NO: 434708 - RNA, 19 nt, Artificial Sequence
  Description of Artificial Sequence: Synthetic oligonucleotide
ugaccucuauauccuucua

SEQ ID NO: 434709 - RNA, 19 nt, Artificial Sequence
  Description of Artificial Sequence: Synthetic oligonucleotide
ugaauucagccaggugccu

SEQ ID NO: 434710 - RNA, 19 nt, Artificial Sequence
  Description of Artificial Sequence: Synthetic oligonucleotide
ugguuauggccugcagcgc

SEQ ID NO: 434711 - RNA, 19 nt, Artificial Sequence
  Description of Artificial Sequence: Synthetic oligonucleotide
auacugccacacugcucuc

SEQ ID NO: 434712 - RNA, 19 nt, Artificial Sequence
  Description of Artificial Sequence: Synthetic oligonucleotide
gccuucguguucuggacug

SEQ ID NO: 434713 - RNA, 19 nt, Artificial Sequence
  Description of Artificial Sequence: Synthetic oligonucleotide
ugcgaggacuggguuaaaa

SEQ ID NO: 434714 - RNA, 19 nt, Artificial Sequence
  Description of Artificial Sequence: Synthetic oligonucleotide
guaccaucccugcggucgc

SEQ ID NO: 434715 - RNA, 19 nt, Artificial Sequence
  Description of Artificial Sequence: Synthetic oligonucleotide
ccaccuggucaccucaacg

SEQ ID NO: 434716 - RNA, 19 nt, Artificial Sequence
  Description of Artificial Sequence: Synthetic oligonucleotide
ucucaccaacauugggcau

SEQ ID NO: 434717 - RNA, 19 nt, Artificial Sequence
  Description of Artificial Sequence: Synthetic oligonucleotide
uggacgaaucgaggguaca

SEQ ID NO: 434718 - RNA, 19 nt, Artificial Sequence
  Description of Artificial Sequence: Synthetic oligonucleotide
ugcguaaccuguggaccca

SEQ ID NO: 434719 - RNA, 19 nt, Artificial Sequence
  Description of Artificial Sequence: Synthetic oligonucleotide
uggacuguucagcccugua

SEQ ID NO: 434720 - RNA, 19 nt, Artificial Sequence
  Description of Artificial Sequence: Synthetic oligonucleotide
agcugcgaggacuggguua

SEQ ID NO: 434721 - RNA, 19 nt, Artificial Sequence
  Description of Artificial Sequence: Synthetic oligonucleotide
ccugcguaaccuguggacc

SEQ ID NO: 434722 - RNA, 19 nt, Artificial Sequence
  Description of Artificial Sequence: Synthetic oligonucleotide
ucgcugcauauagaaggac

SEQ ID NO: 434723 - RNA, 19 nt, Artificial Sequence
  Description of Artificial Sequence: Synthetic oligonucleotide
gaaaccgacacagcaggau

SEQ ID NO: 434724 - RNA, 19 nt, Artificial Sequence
  Description of Artificial Sequence: Synthetic oligonucleotide
ugcggucgcccugaucacc

SEQ ID NO: 434725 - RNA, 19 nt, Artificial Sequence
  Description of Artificial Sequence: Synthetic oligonucleotide
ggauugguucauuaauggu

SEQ ID NO: 434726 - RNA, 19 nt, Artificial Sequence
  Description of Artificial Sequence: Synthetic oligonucleotide
caccuggucaccucaacgu

SEQ ID NO: 434727 - RNA, 19 nt, Artificial Sequence
  Description of Artificial Sequence: Synthetic oligonucleotide
caucucgcaacaccagaaa

SEQ ID NO: 434728 - RNA, 19 nt, Artificial Sequence
  Description of Artificial Sequence: Synthetic oligonucleotide
ccgaggacaucuacucugc

SEQ ID NO: 434729 - RNA, 19 nt, Artificial Sequence
  Description of Artificial Sequence: Synthetic oligonucleotide
gauguucaagucacaccua

SEQ ID NO: 434730 - RNA, 19 nt, Artificial Sequence
  Description of Artificial Sequence: Synthetic oligonucleotide
gagcgugcuuucaagauuu

SEQ ID NO: 434731 - RNA, 19 nt, Artificial Sequence
  Description of Artificial Sequence: Synthetic oligonucleotide
agcgaauguaaaggacuau

SEQ ID NO: 434732 - RNA, 19 nt, Artificial Sequence
  Description of Artificial Sequence: Synthetic oligonucleotide
agcacgguguggauuuaga

SEQ ID NO: 434733 - RNA, 19 nt, Artificial Sequence
  Description of Artificial Sequence: Synthetic oligonucleotide
gccugcguaaccuguggac

SEQ ID NO: 434734 - RNA, 19 nt, Artificial Sequence
  Description of Artificial Sequence: Synthetic oligonucleotide
gcaggauugguucauuaau

SEQ ID NO: 434735 - RNA, 19 nt, Artificial Sequence
  Description of Artificial Sequence: Synthetic oligonucleotide
auccaacuuaggaaucuuu

SEQ ID NO: 434736 - RNA, 19 nt, Artificial Sequence
  Description of Artificial Sequence: Synthetic oligonucleotide
agucaagcuugaagagugu

SEQ ID NO: 434737 - RNA, 19 nt, Artificial Sequence
  Description of Artificial Sequence: Synthetic oligonucleotide
cacauaaauggugggaaau

SEQ ID NO: 434738 - RNA, 19 nt, Artificial Sequence
  Description of Artificial Sequence: Synthetic oligonucleotide
ggucaccucaacgugcaca

SEQ ID NO: 434739 - RNA, 19 nt, Artificial Sequence
  Description of Artificial Sequence: Synthetic oligonucleotide
cuccucggaucaucaugug

SEQ ID NO: 434740 - RNA, 19 nt, Artificial Sequence
  Description of Artificial Sequence: Synthetic oligonucleotide
cuaaacgguucaggagguc

SEQ ID NO: 434741 - RNA, 19 nt, Artificial Sequence
  Description of Artificial Sequence: Synthetic oligonucleotide
cucgcaacaccagaaacau

SEQ ID NO: 434742 - RNA, 19 nt, Artificial Sequence
  Description of Artificial Sequence: Synthetic oligonucleotide
gguuauggccugcagcgcu

SEQ ID NO: 434743 - RNA, 19 nt, Artificial Sequence
  Description of Artificial Sequence: Synthetic oligonucleotide
acuaucccaagagcgcaua

SEQ ID NO: 434744 - RNA, 19 nt, Artificial Sequence
  Description of Artificial Sequence: Synthetic oligonucleotide
gguccucuaaacgguucag

SEQ ID NO: 434745 - RNA, 19 nt, Artificial Sequence
  Description of Artificial Sequence: Synthetic oligonucleotide
gucuccccaacuaaagagu

SEQ ID NO: 434746 - RNA, 19 nt, Artificial Sequence
  Description of Artificial Sequence: Synthetic oligonucleotide
gggguuuaaaguucggguu

SEQ ID NO: 434747 - RNA, 19 nt, Artificial Sequence
  Description of Artificial Sequence: Synthetic oligonucleotide
ucgcccugaucaccuccga

SEQ ID NO: 434748 - RNA, 19 nt, Artificial Sequence
  Description of Artificial Sequence: Synthetic oligonucleotide
cugcucucgguggacaaga

SEQ ID NO: 434749 - RNA, 19 nt, Artificial Sequence
  Description of Artificial Sequence: Synthetic oligonucleotide
uaguaccaucccugcgguc

SEQ ID NO: 434750 - RNA, 19 nt, Artificial Sequence
  Description of Artificial Sequence: Synthetic oligonucleotide
uggucaccucaacgugcac

SEQ ID NO: 434751 - RNA, 19 nt, Artificial Sequence
  Description of Artificial Sequence: Synthetic oligonucleotide
caucucggauaugauaccu

SEQ ID NO: 434752 - RNA, 19 nt, Artificial Sequence
  Description of Artificial Sequence: Synthetic oligonucleotide
cgaaucgaggguacaagca

SEQ ID NO: 434753 - RNA, 19 nt, Artificial Sequence
  Description of Artificial Sequence: Synthetic oligonucleotide
ggugacuucaagacucugu

SEQ ID NO: 434754 - RNA, 19 nt, Artificial Sequence
  Description of Artificial Sequence: Synthetic oligonucleotide
cacuaugcuugccacuggu

SEQ ID NO: 434755 - RNA, 19 nt, Artificial Sequence
  Description of Artificial Sequence: Synthetic oligonucleotide
ucaccucaacgugcacaga

SEQ ID NO: 434756 - RNA, 19 nt, Artificial Sequence
  Description of Artificial Sequence: Synthetic oligonucleotide
cuagaaucagaagcacggu

SEQ ID NO: 434757 - RNA, 19 nt, Artificial Sequence
  Description of Artificial Sequence: Synthetic oligonucleotide
gcacgguguggauuuagaa

SEQ ID NO: 434758 - RNA, 19 nt, Artificial Sequence
  Description of Artificial Sequence: Synthetic oligonucleotide
caagucacaccuacugcuu

SEQ ID NO: 434759 - RNA, 19 nt, Artificial Sequence
  Description of Artificial Sequence: Synthetic oligonucleotide
cuguaccaucucgcaacac

SEQ ID NO: 434760 - RNA, 19 nt, Artificial Sequence
  Description of Artificial Sequence: Synthetic oligonucleotide
uccgccugaaaggccguuu

SEQ ID NO: 434761 - RNA, 19 nt, Artificial Sequence
  Description of Artificial Sequence: Synthetic oligonucleotide
aucccugcggucgcccuga

SEQ ID NO: 434762 - RNA, 19 nt, Artificial Sequence
  Description of Artificial Sequence: Synthetic oligonucleotide
ggacuguucagcccuguau

SEQ ID NO: 434763 - RNA, 19 nt, Artificial Sequence
  Description of Artificial Sequence: Synthetic oligonucleotide
ccaucucgcaacaccagaa

SEQ ID NO: 434764 - RNA, 19 nt, Artificial Sequence
  Description of Artificial Sequence: Synthetic oligonucleotide
  modified_base (8)..(8): a, c, u, g, unknown or other
cccuucanaaauuuucuuu

SEQ ID NO: 434765 - RNA, 19 nt, Artificial Sequence
  Description of Artificial Sequence: Synthetic oligonucleotide
caggacaucgcugcauaua

SEQ ID NO: 434766 - RNA, 19 nt, Artificial Sequence
  Description of Artificial Sequence: Synthetic oligonucleotide
gcucugcuaguaccauccc

SEQ ID NO: 434767 - RNA, 19 nt, Artificial Sequence
  Description of Artificial Sequence: Synthetic oligonucleotide
uguuugccuuuuggaguua

SEQ ID NO: 434768 - RNA, 19 nt, Artificial Sequence
  Description of Artificial Sequence: Synthetic oligonucleotide
cgguguggauuuagaaaag

SEQ ID NO: 434769 - RNA, 19 nt, Artificial Sequence
  Description of Artificial Sequence: Synthetic oligonucleotide
ggacgaaucgaggguacaa

SEQ ID NO: 434770 - RNA, 19 nt, Artificial Sequence
  Description of Artificial Sequence: Synthetic oligonucleotide
cccugaucaccuccgagga

SEQ ID NO: 434771 - RNA, 19 nt, Artificial Sequence
  Description of Artificial Sequence: Synthetic oligonucleotide
gugaucauggagcgugcuu

SEQ ID NO: 434772 - RNA, 19 nt, Artificial Sequence
  Description of Artificial Sequence: Synthetic oligonucleotide
  modified_base (15)..(15): a, c, u, g, unknown or other
ccaauuccccuucanaaau

SEQ ID NO: 434773 - RNA, 19 nt, Artificial Sequence
  Description of Artificial Sequence: Synthetic oligonucleotide
ccacauaaauggugggaaa

SEQ ID NO: 434774 - RNA, 19 nt, Artificial Sequence
  Description of Artificial Sequence: Synthetic oligonucleotide
cccaacuaaagagugacau

SEQ ID NO: 434775 - RNA, 19 nt, Artificial Sequence
  Description of Artificial Sequence: Synthetic oligonucleotide
gccacucgauagcaucuga

SEQ ID NO: 434776 - RNA, 19 nt, Artificial Sequence
  Description of Artificial Sequence: Synthetic oligonucleotide
ggugucugucaucagucuu

SEQ ID NO: 434777 - RNA, 19 nt, Artificial Sequence
  Description of Artificial Sequence: Synthetic oligonucleotide
ccaagagcgcauagagcca

SEQ ID NO: 434778 - RNA, 19 nt, Artificial Sequence
  Description of Artificial Sequence: Synthetic oligonucleotide
ggaaaccgacacagcagga

SEQ ID NO: 434779 - RNA, 19 nt, Artificial Sequence
  Description of Artificial Sequence: Synthetic oligonucleotide
cuuugaccucuauauccuu

SEQ ID NO: 434780 - RNA, 19 nt, Artificial Sequence
  Description of Artificial Sequence: Synthetic oligonucleotide
gagugacaugccauguauu

SEQ ID NO: 434781 - RNA, 19 nt, Artificial Sequence
  Description of Artificial Sequence: Synthetic oligonucleotide
ggguacaagcacacaucuc

SEQ ID NO: 434782 - RNA, 19 nt, Artificial Sequence
  Description of Artificial Sequence: Synthetic oligonucleotide
gggcaucaacacgucaaca

SEQ ID NO: 434783 - RNA, 19 nt, Artificial Sequence
  Description of Artificial Sequence: Synthetic oligonucleotide
cuucacucuuugaccucua

SEQ ID NO: 434784 - RNA, 19 nt, Artificial Sequence
  Description of Artificial Sequence: Synthetic oligonucleotide
ggagcgugcuuucaagauu

SEQ ID NO: 434785 - RNA, 19 nt, Artificial Sequence
  Description of Artificial Sequence: Synthetic oligonucleotide
ccacucgauagcaucugaa

SEQ ID NO: 434786 - RNA, 19 nt, Artificial Sequence
  Description of Artificial Sequence: Synthetic oligonucleotide
gcauauagaaggacuugau

SEQ ID NO: 434787 - RNA, 19 nt, Artificial Sequence
  Description of Artificial Sequence: Synthetic oligonucleotide
cucggauaugauaccuguu

SEQ ID NO: 434788 - RNA, 19 nt, Artificial Sequence
  Description of Artificial Sequence: Synthetic oligonucleotide
ggacaucgcugcauauaga

SEQ ID NO: 434789 - RNA, 19 nt, Artificial Sequence
  Description of Artificial Sequence: Synthetic oligonucleotide
gcagcgcuggacgaaucga

SEQ ID NO: 434790 - RNA, 19 nt, Artificial Sequence
  Description of Artificial Sequence: Synthetic oligonucleotide
cguaaccuguggacccagc

SEQ ID NO: 434791 - RNA, 19 nt, Artificial Sequence
  Description of Artificial Sequence: Synthetic oligonucleotide
cacuaucccaagagcgcau

SEQ ID NO: 434792 - RNA, 19 nt, Artificial Sequence
  Description of Artificial Sequence: Synthetic oligonucleotide
cucgguggacaagacuacu

SEQ ID NO: 434793 - RNA, 19 nt, Artificial Sequence
  Description of Artificial Sequence: Synthetic oligonucleotide
gaagcacgguguggauuua

SEQ ID NO: 434794 - RNA, 19 nt, Artificial Sequence
  Description of Artificial Sequence: Synthetic oligonucleotide
gcguaaccuguggacccag

SEQ ID NO: 434795 - RNA, 19 nt, Artificial Sequence
  Description of Artificial Sequence: Synthetic oligonucleotide
cgcugcauauagaaggacu

SEQ ID NO: 434796 - RNA, 19 nt, Artificial Sequence
  Description of Artificial Sequence: Synthetic oligonucleotide
cuacgucagacuccucauu

SEQ ID NO: 434797 - RNA, 19 nt, Artificial Sequence
  Description of Artificial Sequence: Synthetic oligonucleotide
cgaggguacaagcacacau

SEQ ID NO: 434798 - RNA, 19 nt, Artificial Sequence
  Description of Artificial Sequence: Synthetic oligonucleotide
caccaguguuggaguagua

SEQ ID NO: 434799 - RNA, 19 nt, Artificial Sequence
  Description of Artificial Sequence: Synthetic oligonucleotide
ccccaacuaaagagugaca

SEQ ID NO: 434800 - RNA, 19 nt, Artificial Sequence
  Description of Artificial Sequence: Synthetic oligonucleotide
aguucggguugaggucaua

SEQ ID NO: 434801 - RNA, 19 nt, Artificial Sequence
  Description of Artificial Sequence: Synthetic oligonucleotide
cgcccugaucaccuccgag

SEQ ID NO: 434802 - RNA, 19 nt, Artificial Sequence
  Description of Artificial Sequence: Synthetic oligonucleotide
cuucguguucuggacuguu

SEQ ID NO: 434803 - RNA, 19 nt, Artificial Sequence
  Description of Artificial Sequence: Synthetic oligonucleotide
auccgccugaaaggccguu

SEQ ID NO: 434804 - RNA, 19 nt, Artificial Sequence
  Description of Artificial Sequence: Synthetic oligonucleotide
cccgccaccuggucaccuc

SEQ ID NO: 434805 - RNA, 19 nt, Artificial Sequence
  Description of Artificial Sequence: Synthetic oligonucleotide
ggaucaucaugugccgguu

SEQ ID NO: 434806 - RNA, 19 nt, Artificial Sequence
  Description of Artificial Sequence: Synthetic oligonucleotide
gguugaggucauacacuau

SEQ ID NO: 434807 - RNA, 19 nt, Artificial Sequence
  Description of Artificial Sequence: Synthetic oligonucleotide
  modified_base (9)..(9): a, c, u, g, unknown or other
ccccuucanaaauuuucuu

SEQ ID NO: 434808 - RNA, 19 nt, Artificial Sequence
  Description of Artificial Sequence: Synthetic oligonucleotide
ccgccugaaaggccguuua

SEQ ID NO: 434809 - RNA, 19 nt, Artificial Sequence
  Description of Artificial Sequence: Synthetic oligonucleotide
gcggucgcccugaucaccu

SEQ ID NO: 434810 - RNA, 19 nt, Artificial Sequence
  Description of Artificial Sequence: Synthetic oligonucleotide
cgaggacaucuacucugca

SEQ ID NO: 434811 - RNA, 19 nt, Artificial Sequence
  Description of Artificial Sequence: Synthetic oligonucleotide
cgaggauccucaggacauc

SEQ ID NO: 434812 - RNA, 19 nt, Artificial Sequence
  Description of Artificial Sequence: Synthetic oligonucleotide
gugucccgucuucuuucuu

SEQ ID NO: 434813 - RNA, 19 nt, Artificial Sequence
  Description of Artificial Sequence: Synthetic oligonucleotide
cgauagcaucugaauaguu

SEQ ID NO: 434814 - RNA, 19 nt, Artificial Sequence
  Description of Artificial Sequence: Synthetic oligonucleotide
cugcgaggacuggguuaaa

SEQ ID NO: 434815 - RNA, 19 nt, Artificial Sequence
  Description of Artificial Sequence: Synthetic oligonucleotide
ggacccagccaaacaccuu

SEQ ID NO: 434816 - RNA, 19 nt, Artificial Sequence
  Description of Artificial Sequence: Synthetic oligonucleotide
caccaacauugggcaucaa

SEQ ID NO: 434817 - RNA, 19 nt, Artificial Sequence
  Description of Artificial Sequence: Synthetic oligonucleotide
cggucgcccugaucaccuc

SEQ ID NO: 434818 - RNA, 19 nt, Artificial Sequence
  Description of Artificial Sequence: Synthetic oligonucleotide
ccgacacagcaggauuggu

SEQ ID NO: 434819 - RNA, 19 nt, Artificial Sequence
  Description of Artificial Sequence: Synthetic oligonucleotide
ccccgccaccuggucaccu

SEQ ID NO: 434820 - RNA, 19 nt, Artificial Sequence
  Description of Artificial Sequence: Synthetic oligonucleotide
aacgucuuauaacugaugc

SEQ ID NO: 434821 - RNA, 19 nt, Artificial Sequence
  Description of Artificial Sequence: Synthetic oligonucleotide
uguacuagcaccuggaacg

SEQ ID NO: 434822 - RNA, 19 nt, Artificial Sequence
  Description of Artificial Sequence: Synthetic oligonucleotide
aaaguuagagguucaaagg

SEQ ID NO: 434823 - RNA, 19 nt, Artificial Sequence
  Description of Artificial Sequence: Synthetic oligonucleotide
uguaagagaauccacaucu

SEQ ID NO: 434824 - RNA, 19 nt, Artificial Sequence
  Description of Artificial Sequence: Synthetic oligonucleotide
agaacaacguucucgaugc

SEQ ID NO: 434825 - RNA, 19 nt, Artificial Sequence
  Description of Artificial Sequence: Synthetic oligonucleotide
acaucuaucauuuuggucu

SEQ ID NO: 434826 - RNA, 19 nt, Artificial Sequence
  Description of Artificial Sequence: Synthetic oligonucleotide
ugaaaucucaguuacacca

SEQ ID NO: 434827 - RNA, 19 nt, Artificial Sequence
  Description of Artificial Sequence: Synthetic oligonucleotide
uaaucugugggaaugauga

SEQ ID NO: 434828 - RNA, 19 nt, Artificial Sequence
  Description of Artificial Sequence: Synthetic oligonucleotide
uggaacgagaccaucaugg

SEQ ID NO: 434829 - RNA, 19 nt, Artificial Sequence
  Description of Artificial Sequence: Synthetic oligonucleotide
aaacacaggauugugcucc

SEQ ID NO: 434830 - RNA, 19 nt, Artificial Sequence
  Description of Artificial Sequence: Synthetic oligonucleotide
aacgagaccaucauggagc

SEQ ID NO: 434831 - RNA, 19 nt, Artificial Sequence
  Description of Artificial Sequence: Synthetic oligonucleotide
aauccagacacaaacgccc

SEQ ID NO: 434832 - RNA, 19 nt, Artificial Sequence
  Description of Artificial Sequence: Synthetic oligonucleotide
ucuauauucggccuccagg

SEQ ID NO: 434833 - RNA, 19 nt, Artificial Sequence
  Description of Artificial Sequence: Synthetic oligonucleotide
augauauaggccuggaucg

SEQ ID NO: 434834 - RNA, 19 nt, Artificial Sequence
  Description of Artificial Sequence: Synthetic oligonucleotide
gaugaguggguccacaccg

SEQ ID NO: 434835 - RNA, 19 nt, Artificial Sequence
  Description of Artificial Sequence: Synthetic oligonucleotide
gaugauauaggccuggauc

SEQ ID NO: 434836 - RNA, 19 nt, Artificial Sequence
  Description of Artificial Sequence: Synthetic oligonucleotide
ucgguuauugaaauuauac

SEQ ID NO: 434837 - RNA, 19 nt, Artificial Sequence
  Description of Artificial Sequence: Synthetic oligonucleotide
aguggguccacaccgaccc

SEQ ID NO: 434838 - RNA, 19 nt, Artificial Sequence
  Description of Artificial Sequence: Synthetic oligonucleotide
aaguuagagguucaaaggu

SEQ ID NO: 434839 - RNA, 19 nt, Artificial Sequence
  Description of Artificial Sequence: Synthetic oligonucleotide
agagaauccacaucuauca

SEQ ID NO: 434840 - RNA, 19 nt, Artificial Sequence
  Description of Artificial Sequence: Synthetic oligonucleotide
agcaugauagccucuaguc

SEQ ID NO: 434841 - RNA, 19 nt, Artificial Sequence
  Description of Artificial Sequence: Synthetic oligonucleotide
aguuacaccaccuuuggga

SEQ ID NO: 434842 - RNA, 19 nt, Artificial Sequence
  Description of Artificial Sequence: Synthetic oligonucleotide
gagaaaguagcgcccaucg

SEQ ID NO: 434843 - RNA, 19 nt, Artificial Sequence
  Description of Artificial Sequence: Synthetic oligonucleotide
caagucaaggaguaggugc

SEQ ID NO: 434844 - RNA, 19 nt, Artificial Sequence
  Description of Artificial Sequence: Synthetic oligonucleotide
agcuauguggccuuugagg

SEQ ID NO: 434845 - RNA, 19 nt, Artificial Sequence
  Description of Artificial Sequence: Synthetic oligonucleotide
agcauuccuucucauaagc

SEQ ID NO: 434846 - RNA, 19 nt, Artificial Sequence
  Description of Artificial Sequence: Synthetic oligonucleotide
agagguucaaaggucaggc

SEQ ID NO: 434847 - RNA, 19 nt, Artificial Sequence
  Description of Artificial Sequence: Synthetic oligonucleotide
aaagauccaacaccauguc

SEQ ID NO: 434848 - RNA, 19 nt, Artificial Sequence
  Description of Artificial Sequence: Synthetic oligonucleotide
cuauauucggccuccaggc

SEQ ID NO: 434849 - RNA, 19 nt, Artificial Sequence
  Description of Artificial Sequence: Synthetic oligonucleotide
uauaacugaugccgcaagg

SEQ ID NO: 434850 - RNA, 19 nt, Artificial Sequence
  Description of Artificial Sequence: Synthetic oligonucleotide
auauucggccuccaggccc

SEQ ID NO: 434851 - RNA, 19 nt, Artificial Sequence
  Description of Artificial Sequence: Synthetic oligonucleotide
ugacugauguacuagcacc

SEQ ID NO: 434852 - RNA, 19 nt, Artificial Sequence
  Description of Artificial Sequence: Synthetic oligonucleotide
ugguguagcaguuuuauuc

SEQ ID NO: 434853 - RNA, 19 nt, Artificial Sequence
  Description of Artificial Sequence: Synthetic oligonucleotide
ucgggaaggaagaagaggu

SEQ ID NO: 434854 - RNA, 19 nt, Artificial Sequence
  Description of Artificial Sequence: Synthetic oligonucleotide
uaguccuacaaucgcauag

SEQ ID NO: 434855 - RNA, 19 nt, Artificial Sequence
  Description of Artificial Sequence: Synthetic oligonucleotide
cuucucauaagccguaggg

SEQ ID NO: 434856 - RNA, 19 nt, Artificial Sequence
  Description of Artificial Sequence: Synthetic oligonucleotide
guaaggagaaagaagucgg

SEQ ID NO: 434857 - RNA, 19 nt, Artificial Sequence
  Description of Artificial Sequence: Synthetic oligonucleotide
cuggauucuauauucggcc

SEQ ID NO: 434858 - RNA, 19 nt, Artificial Sequence
  Description of Artificial Sequence: Synthetic oligonucleotide
aauacccugguucaucagu

SEQ ID NO: 434859 - RNA, 19 nt, Artificial Sequence
  Description of Artificial Sequence: Synthetic oligonucleotide
uucgguucuucuuagaguc

SEQ ID NO: 434860 - RNA, 19 nt, Artificial Sequence
  Description of Artificial Sequence: Synthetic oligonucleotide
accggagucaaugagguac

SEQ ID NO: 434861 - RNA, 19 nt, Artificial Sequence
  Description of Artificial Sequence: Synthetic oligonucleotide
acauaugugaagcauuccu

SEQ ID NO: 434862 - RNA, 19 nt, Artificial Sequence
  Description of Artificial Sequence: Synthetic oligonucleotide
uccuauucgucucagggac

SEQ ID NO: 434863 - RNA, 19 nt, Artificial Sequence
  Description of Artificial Sequence: Synthetic oligonucleotide
aagggcucgucagagaacg

SEQ ID NO: 434864 - RNA, 19 nt, Artificial Sequence
  Description of Artificial Sequence: Synthetic oligonucleotide
ucucauaagccguaggggu

SEQ ID NO: 434865 - RNA, 19 nt, Artificial Sequence
  Description of Artificial Sequence: Synthetic oligonucleotide
ucuaagaggugaccuuugg

SEQ ID NO: 434866 - RNA, 19 nt, Artificial Sequence
  Description of Artificial Sequence: Synthetic oligonucleotide
acgucuuauaacugaugcc

SEQ ID NO: 434867 - RNA, 19 nt, Artificial Sequence
  Description of Artificial Sequence: Synthetic oligonucleotide
guagcaguuuuauucuugg

SEQ ID NO: 434868 - RNA, 19 nt, Artificial Sequence
  Description of Artificial Sequence: Synthetic oligonucleotide
aaccuuuggagccauccug

SEQ ID NO: 434869 - RNA, 19 nt, Artificial Sequence
  Description of Artificial Sequence: Synthetic oligonucleotide
ucgguguucgccaucacug

SEQ ID NO: 434870 - RNA, 19 nt, Artificial Sequence
  Description of Artificial Sequence: Synthetic oligonucleotide
ugaaauuauacuuggucuu

SEQ ID NO: 434871 - RNA, 19 nt, Artificial Sequence
  Description of Artificial Sequence: Synthetic oligonucleotide
auguacuagcaccuggaac

SEQ ID NO: 434872 - RNA, 19 nt, Artificial Sequence
  Description of Artificial Sequence: Synthetic oligonucleotide
uuagagucuaaaaguaaaa

SEQ ID NO: 434873 - RNA, 19 nt, Artificial Sequence
  Description of Artificial Sequence: Synthetic oligonucleotide
ugggaagagggucucauga

SEQ ID NO: 434874 - RNA, 19 nt, Artificial Sequence
  Description of Artificial Sequence: Synthetic oligonucleotide
aacaacguucucgaugcgg

SEQ ID NO: 434875 - RNA, 19 nt, Artificial Sequence
  Description of Artificial Sequence: Synthetic oligonucleotide
uccgacucagccaaguucu

SEQ ID NO: 434876 - RNA, 19 nt, Artificial Sequence
  Description of Artificial Sequence: Synthetic oligonucleotide
aggagaugccuguauaauc

SEQ ID NO: 434877 - RNA, 19 nt, Artificial Sequence
  Description of Artificial Sequence: Synthetic oligonucleotide
uaagaggugaccuuugguu

SEQ ID NO: 434878 - RNA, 19 nt, Artificial Sequence
  Description of Artificial Sequence: Synthetic oligonucleotide
uucucauaagccguagggg

SEQ ID NO: 434879 - RNA, 19 nt, Artificial Sequence
  Description of Artificial Sequence: Synthetic oligonucleotide
cauagcuugucgcagcugc

SEQ ID NO: 434880 - RNA, 19 nt, Artificial Sequence
  Description of Artificial Sequence: Synthetic oligonucleotide
guaagaagaguuucgguuc

SEQ ID NO: 434881 - RNA, 19 nt, Artificial Sequence
  Description of Artificial Sequence: Synthetic oligonucleotide
ugauguacuagcaccugga

SEQ ID NO: 434882 - RNA, 19 nt, Artificial Sequence
  Description of Artificial Sequence: Synthetic oligonucleotide
guauaauccaggcccagug

SEQ ID NO: 434883 - RNA, 19 nt, Artificial Sequence
  Description of Artificial Sequence: Synthetic oligonucleotide
cauucagaaaagauccaac

SEQ ID NO: 434884 - RNA, 19 nt, Artificial Sequence
  Description of Artificial Sequence: Synthetic oligonucleotide
ucgaugcggaucccgaagg

SEQ ID NO: 434885 - RNA, 19 nt, Artificial Sequence
  Description of Artificial Sequence: Synthetic oligonucleotide
gaagaguucgcagagggca

SEQ ID NO: 434886 - RNA, 19 nt, Artificial Sequence
  Description of Artificial Sequence: Synthetic oligonucleotide
gguccuauucgucucaggg

SEQ ID NO: 434887 - RNA, 19 nt, Artificial Sequence
  Description of Artificial Sequence: Synthetic oligonucleotide
gaacgagaccaucauggag

SEQ ID NO: 434888 - RNA, 19 nt, Artificial Sequence
  Description of Artificial Sequence: Synthetic oligonucleotide
ucuuauaacugaugccgca

SEQ ID NO: 434889 - RNA, 19 nt, Artificial Sequence
  Description of Artificial Sequence: Synthetic oligonucleotide
uccuacaaucgcauaggag

SEQ ID NO: 434890 - RNA, 19 nt, Artificial Sequence
  Description of Artificial Sequence: Synthetic oligonucleotide
uuauucacugaugggaaga

SEQ ID NO: 434891 - RNA, 19 nt, Artificial Sequence
  Description of Artificial Sequence: Synthetic oligonucleotide
uucgcagagggcaacggca

SEQ ID NO: 434892 - RNA, 19 nt, Artificial Sequence
  Description of Artificial Sequence: Synthetic oligonucleotide
aacggcauccuuaauguga

SEQ ID NO: 434893 - RNA, 19 nt, Artificial Sequence
  Description of Artificial Sequence: Synthetic oligonucleotide
aucgauucgguccccauca

SEQ ID NO: 434894 - RNA, 19 nt, Artificial Sequence
  Description of Artificial Sequence: Synthetic oligonucleotide
uaugugaagcauuccuucu

SEQ ID NO: 434895 - RNA, 19 nt, Artificial Sequence
  Description of Artificial Sequence: Synthetic oligonucleotide
gauucuauauucggccucc

SEQ ID NO: 434896 - RNA, 19 nt, Artificial Sequence
  Description of Artificial Sequence: Synthetic oligonucleotide
cuucgaaguaccuuggcca

SEQ ID NO: 434897 - RNA, 19 nt, Artificial Sequence
  Description of Artificial Sequence: Synthetic oligonucleotide
gauggccucgcucacagca

SEQ ID NO: 434898 - RNA, 19 nt, Artificial Sequence
  Description of Artificial Sequence: Synthetic oligonucleotide
uuucgguucuucuuagagu

SEQ ID NO: 434899 - RNA, 19 nt, Artificial Sequence
  Description of Artificial Sequence: Synthetic oligonucleotide
cuuguaagggaggaccugg

SEQ ID NO: 434900 - RNA, 19 nt, Artificial Sequence
  Description of Artificial Sequence: Synthetic oligonucleotide
ucggagauugaacagccau

SEQ ID NO: 434901 - RNA, 19 nt, Artificial Sequence
  Description of Artificial Sequence: Synthetic oligonucleotide
ucuaguccuacaaucgcau

SEQ ID NO: 434902 - RNA, 19 nt, Artificial Sequence
  Description of Artificial Sequence: Synthetic oligonucleotide
agcaccuggaacgagacca

SEQ ID NO: 434903 - RNA, 19 nt, Artificial Sequence
  Description of Artificial Sequence: Synthetic oligonucleotide
ccuacaaucgcauaggaga

SEQ ID NO: 434904 - RNA, 19 nt, Artificial Sequence
  Description of Artificial Sequence: Synthetic oligonucleotide
uuccagucgggaaaauggc

SEQ ID NO: 434905 - RNA, 19 nt, Artificial Sequence
  Description of Artificial Sequence: Synthetic oligonucleotide
uuuucaaccgaaggucugc

SEQ ID NO: 434906 - RNA, 19 nt, Artificial Sequence
  Description of Artificial Sequence: Synthetic oligonucleotide
aaagacuguuugcaagaaa

SEQ ID NO: 434907 - RNA, 19 nt, Artificial Sequence
  Description of Artificial Sequence: Synthetic oligonucleotide
uucuauauucggccuccag

SEQ ID NO: 434908 - RNA, 19 nt, Artificial Sequence
  Description of Artificial Sequence: Synthetic oligonucleotide
uauauucggccuccaggcc

SEQ ID NO: 434909 - RNA, 19 nt, Artificial Sequence
  Description of Artificial Sequence: Synthetic oligonucleotide
uauucacugaugggaagag

SEQ ID NO: 434910 - RNA, 19 nt, Artificial Sequence
  Description of Artificial Sequence: Synthetic oligonucleotide
cucgagagcuuccuggcgg

SEQ ID NO: 434911 - RNA, 19 nt, Artificial Sequence
  Description of Artificial Sequence: Synthetic oligonucleotide
cugaaaucucaguuacacc

SEQ ID NO: 434912 - RNA, 19 nt, Artificial Sequence
  Description of Artificial Sequence: Synthetic oligonucleotide
aaggagucuaagaggugac

SEQ ID NO: 434913 - RNA, 19 nt, Artificial Sequence
  Description of Artificial Sequence: Synthetic oligonucleotide
cuauucgucucagggaccg

SEQ ID NO: 434914 - RNA, 19 nt, Artificial Sequence
  Description of Artificial Sequence: Synthetic oligonucleotide
agaguuucgguucuucuua

SEQ ID NO: 434915 - RNA, 19 nt, Artificial Sequence
  Description of Artificial Sequence: Synthetic oligonucleotide
ucuccggacgggaugauau

SEQ ID NO: 434916 - RNA, 19 nt, Artificial Sequence
  Description of Artificial Sequence: Synthetic oligonucleotide
ugauauaggccuggaucgg

SEQ ID NO: 434917 - RNA, 19 nt, Artificial Sequence
  Description of Artificial Sequence: Synthetic oligonucleotide
uugucgcugacccacacuu

SEQ ID NO: 434918 - RNA, 19 nt, Artificial Sequence
  Description of Artificial Sequence: Synthetic oligonucleotide
ugagccucggagauugaac

SEQ ID NO: 434919 - RNA, 19 nt, Artificial Sequence
  Description of Artificial Sequence: Synthetic oligonucleotide
ucauaagccguaggggucc

SEQ ID NO: 434920 - RNA, 19 nt, Artificial Sequence
  Description of Artificial Sequence: Synthetic oligonucleotide
uggauucuauauucggccu

SEQ ID NO: 434921 - RNA, 19 nt, Artificial Sequence
  Description of Artificial Sequence: Synthetic oligonucleotide
auucgucucagggaccggc

SEQ ID NO: 434922 - RNA, 19 nt, Artificial Sequence
  Description of Artificial Sequence: Synthetic oligonucleotide
cacacgauguuccucucag

SEQ ID NO: 434923 - RNA, 19 nt, Artificial Sequence
  Description of Artificial Sequence: Synthetic oligonucleotide
uucgucucagggaccggcg

SEQ ID NO: 434924 - RNA, 19 nt, Artificial Sequence
  Description of Artificial Sequence: Synthetic oligonucleotide
augcggaucccgaaggccc

SEQ ID NO: 434925 - RNA, 19 nt, Artificial Sequence
  Description of Artificial Sequence: Synthetic oligonucleotide
ucugccacguacucaacau

SEQ ID NO: 434926 - RNA, 19 nt, Artificial Sequence
  Description of Artificial Sequence: Synthetic oligonucleotide
gauggacuuguaagggagg

SEQ ID NO: 434927 - RNA, 19 nt, Artificial Sequence
  Description of Artificial Sequence: Synthetic oligonucleotide
ugccuguauaauccaggcc

SEQ ID NO: 434928 - RNA, 19 nt, Artificial Sequence
  Description of Artificial Sequence: Synthetic oligonucleotide
ccucauaauacccugguuc

SEQ ID NO: 434929 - RNA, 19 nt, Artificial Sequence
  Description of Artificial Sequence: Synthetic oligonucleotide
cgucuuauaacugaugccg

SEQ ID NO: 434930 - RNA, 19 nt, Artificial Sequence
  Description of Artificial Sequence: Synthetic oligonucleotide
uccagucgggaaaauggcu

SEQ ID NO: 434931 - RNA, 19 nt, Artificial Sequence
  Description of Artificial Sequence: Synthetic oligonucleotide
ggcaacggcauccuuaaug

SEQ ID NO: 434932 - RNA, 19 nt, Artificial Sequence
  Description of Artificial Sequence: Synthetic oligonucleotide
uguucgccaucacuggcca

SEQ ID NO: 434933 - RNA, 19 nt, Artificial Sequence
  Description of Artificial Sequence: Synthetic oligonucleotide
gaguuucgguucuucuuag

SEQ ID NO: 434934 - RNA, 19 nt, Artificial Sequence
  Description of Artificial Sequence: Synthetic oligonucleotide
ggagauugaacagccaugc

SEQ ID NO: 434935 - RNA, 19 nt, Artificial Sequence
  Description of Artificial Sequence: Synthetic oligonucleotide
gaaaucucaguuacaccac

SEQ ID NO: 434936 - RNA, 19 nt, Artificial Sequence
  Description of Artificial Sequence: Synthetic oligonucleotide
gugaccagcacuucgaagu

SEQ ID NO: 434937 - RNA, 19 nt, Artificial Sequence
  Description of Artificial Sequence: Synthetic oligonucleotide
gauauaggccuggaucggc

SEQ ID NO: 434938 - RNA, 19 nt, Artificial Sequence
  Description of Artificial Sequence: Synthetic oligonucleotide
agggucuugagcucacuca

SEQ ID NO: 434939 - RNA, 19 nt, Artificial Sequence
  Description of Artificial Sequence: Synthetic oligonucleotide
gaugccgcaaggacccucg

SEQ ID NO: 434940 - RNA, 19 nt, Artificial Sequence
  Description of Artificial Sequence: Synthetic oligonucleotide
ucgggaaaauggcugcacu

SEQ ID NO: 434941 - RNA, 19 nt, Artificial Sequence
  Description of Artificial Sequence: Synthetic oligonucleotide
cagccaguugaagaguucg

SEQ ID NO: 434942 - RNA, 19 nt, Artificial Sequence
  Description of Artificial Sequence: Synthetic oligonucleotide
aggagucuaagaggugacc

SEQ ID NO: 434943 - RNA, 19 nt, Artificial Sequence
  Description of Artificial Sequence: Synthetic oligonucleotide
caucuaucauuuuggucug

SEQ ID NO: 434944 - RNA, 19 nt, Artificial Sequence
  Description of Artificial Sequence: Synthetic oligonucleotide
auuccuccgcuuugucagc

SEQ ID NO: 434945 - RNA, 19 nt, Artificial Sequence
  Description of Artificial Sequence: Synthetic oligonucleotide
agcaccggagucaaugagg

SEQ ID NO: 434946 - RNA, 19 nt, Artificial Sequence
  Description of Artificial Sequence: Synthetic oligonucleotide
guuacaccaccuuugggaa

SEQ ID NO: 434947 - RNA, 19 nt, Artificial Sequence
  Description of Artificial Sequence: Synthetic oligonucleotide
ugagcaccggagucaauga

SEQ ID NO: 434948 - RNA, 19 nt, Artificial Sequence
  Description of Artificial Sequence: Synthetic oligonucleotide
uccggacgggaugauauag

SEQ ID NO: 434949 - RNA, 19 nt, Artificial Sequence
  Description of Artificial Sequence: Synthetic oligonucleotide
cuagcaccuggaacgagac

SEQ ID NO: 434950 - RNA, 19 nt, Artificial Sequence
  Description of Artificial Sequence: Synthetic oligonucleotide
ugcuuggcggcuuggagaa

SEQ ID NO: 434951 - RNA, 19 nt, Artificial Sequence
  Description of Artificial Sequence: Synthetic oligonucleotide
cucauaagccguagggguc

SEQ ID NO: 434952 - RNA, 19 nt, Artificial Sequence
  Description of Artificial Sequence: Synthetic oligonucleotide
cucagccaaguucuucacg

SEQ ID NO: 434953 - RNA, 19 nt, Artificial Sequence
  Description of Artificial Sequence: Synthetic oligonucleotide
acucgagagcuuccuggcg

SEQ ID NO: 434954 - RNA, 19 nt, Artificial Sequence
  Description of Artificial Sequence: Synthetic oligonucleotide
guagugaaugauggcgccg

SEQ ID NO: 434955 - RNA, 19 nt, Artificial Sequence
  Description of Artificial Sequence: Synthetic oligonucleotide
cagucgggaaaauggcugc

SEQ ID NO: 434956 - RNA, 19 nt, Artificial Sequence
  Description of Artificial Sequence: Synthetic oligonucleotide
acaaucgcauaggagaaaa

SEQ ID NO: 434957 - RNA, 19 nt, Artificial Sequence
  Description of Artificial Sequence: Synthetic oligonucleotide
gaugcggaucccgaaggcc

SEQ ID NO: 434958 - RNA, 19 nt, Artificial Sequence
  Description of Artificial Sequence: Synthetic oligonucleotide
uuguaagggaggaccugga

SEQ ID NO: 434959 - RNA, 19 nt, Artificial Sequence
  Description of Artificial Sequence: Synthetic oligonucleotide
cuuggggagagguccgagc

SEQ ID NO: 434960 - RNA, 19 nt, Artificial Sequence
  Description of Artificial Sequence: Synthetic oligonucleotide
cugagcaccggagucaaug

SEQ ID NO: 434961 - RNA, 19 nt, Artificial Sequence
  Description of Artificial Sequence: Synthetic oligonucleotide
ucaaggaguaggugcugcu

SEQ ID NO: 434962 - RNA, 19 nt, Artificial Sequence
  Description of Artificial Sequence: Synthetic oligonucleotide
ggcgcguagugaaugaugg

SEQ ID NO: 434963 - RNA, 19 nt, Artificial Sequence
  Description of Artificial Sequence: Synthetic oligonucleotide
uucgccaucacuggccaga

SEQ ID NO: 434964 - RNA, 19 nt, Artificial Sequence
  Description of Artificial Sequence: Synthetic oligonucleotide
ccuuugaggacauauguga

SEQ ID NO: 434965 - RNA, 19 nt, Artificial Sequence
  Description of Artificial Sequence: Synthetic oligonucleotide
uccgacagucgcagggugc

SEQ ID NO: 434966 - RNA, 19 nt, Artificial Sequence
  Description of Artificial Sequence: Synthetic oligonucleotide
gagcaccggagucaaugag

SEQ ID NO: 434967 - RNA, 19 nt, Artificial Sequence
  Description of Artificial Sequence: Synthetic oligonucleotide
cuacaaucgcauaggagaa

SEQ ID NO: 434968 - RNA, 19 nt, Artificial Sequence
  Description of Artificial Sequence: Synthetic oligonucleotide
gaacgucuuauaacugaug

SEQ ID NO: 434969 - RNA, 19 nt, Artificial Sequence
  Description of Artificial Sequence: Synthetic oligonucleotide
ugucccgucccaugcaggu

SEQ ID NO: 434970 - RNA, 19 nt, Artificial Sequence
  Description of Artificial Sequence: Synthetic oligonucleotide
ugaguggguccacaccgac

SEQ ID NO: 434971 - RNA, 19 nt, Artificial Sequence
  Description of Artificial Sequence: Synthetic oligonucleotide
auagcuugucgcagcugcc

SEQ ID NO: 434972 - RNA, 19 nt, Artificial Sequence
  Description of Artificial Sequence: Synthetic oligonucleotide
uuccuggcggccuuguauc

SEQ ID NO: 434973 - RNA, 19 nt, Artificial Sequence
  Description of Artificial Sequence: Synthetic oligonucleotide
cuauguggccuuugaggac

SEQ ID NO: 434974 - RNA, 19 nt, Artificial Sequence
  Description of Artificial Sequence: Synthetic oligonucleotide
gagccagucacacucuuua

SEQ ID NO: 434975 - RNA, 19 nt, Artificial Sequence
  Description of Artificial Sequence: Synthetic oligonucleotide
cucuaguccuacaaucgca

SEQ ID NO: 434976 - RNA, 19 nt, Artificial Sequence
  Description of Artificial Sequence: Synthetic oligonucleotide
uuucaaccgaaggucugca

SEQ ID NO: 434977 - RNA, 19 nt, Artificial Sequence
  Description of Artificial Sequence: Synthetic oligonucleotide
agcuuuguggggccuccuc

SEQ ID NO: 434978 - RNA, 19 nt, Artificial Sequence
  Description of Artificial Sequence: Synthetic oligonucleotide
auuuucaaccgaaggucug

SEQ ID NO: 434979 - RNA, 19 nt, Artificial Sequence
  Description of Artificial Sequence: Synthetic oligonucleotide
auacccugguucaucagug

SEQ ID NO: 434980 - RNA, 19 nt, Artificial Sequence
  Description of Artificial Sequence: Synthetic oligonucleotide
acggcauccuuaaugugag

SEQ ID NO: 434981 - RNA, 19 nt, Artificial Sequence
  Description of Artificial Sequence: Synthetic oligonucleotide
agccucggagauugaacag

SEQ ID NO: 434982 - RNA, 19 nt, Artificial Sequence
  Description of Artificial Sequence: Synthetic oligonucleotide
ggaugggaaccaaaguuag

SEQ ID NO: 434983 - RNA, 19 nt, Artificial Sequence
  Description of Artificial Sequence: Synthetic oligonucleotide
agagggucucaugaacauc

SEQ ID NO: 434984 - RNA, 19 nt, Artificial Sequence
  Description of Artificial Sequence: Synthetic oligonucleotide
gaucggcucugccacguac

SEQ ID NO: 434985 - RNA, 19 nt, Artificial Sequence
  Description of Artificial Sequence: Synthetic oligonucleotide
uccuuaaugugagcccgcc

SEQ ID NO: 434986 - RNA, 19 nt, Artificial Sequence
  Description of Artificial Sequence: Synthetic oligonucleotide
caugucccgucccaugcag

SEQ ID NO: 434987 - RNA, 19 nt, Artificial Sequence
  Description of Artificial Sequence: Synthetic oligonucleotide
acgagaccaucauggagca

SEQ ID NO: 434988 - RNA, 19 nt, Artificial Sequence
  Description of Artificial Sequence: Synthetic oligonucleotide
agagcugaccgggcaaagg

SEQ ID NO: 434989 - RNA, 19 nt, Artificial Sequence
  Description of Artificial Sequence: Synthetic oligonucleotide
uucgguccccaucaaugaa

SEQ ID NO: 434990 - RNA, 19 nt, Artificial Sequence
  Description of Artificial Sequence: Synthetic oligonucleotide
gguaagaagaguuucgguu

SEQ ID NO: 434991 - RNA, 19 nt, Artificial Sequence
  Description of Artificial Sequence: Synthetic oligonucleotide
agaaaauaucaaagugggu

SEQ ID NO: 434992 - RNA, 19 nt, Artificial Sequence
  Description of Artificial Sequence: Synthetic oligonucleotide
agccaguugaagaguucgc

SEQ ID NO: 434993 - RNA, 19 nt, Artificial Sequence
  Description of Artificial Sequence: Synthetic oligonucleotide
agaguucgcagagggcaac

SEQ ID NO: 434994 - RNA, 19 nt, Artificial Sequence
  Description of Artificial Sequence: Synthetic oligonucleotide
gaacaacguucucgaugcg

SEQ ID NO: 434995 - RNA, 19 nt, Artificial Sequence
  Description of Artificial Sequence: Synthetic oligonucleotide
gucgcugacccacacuuuc

SEQ ID NO: 434996 - RNA, 19 nt, Artificial Sequence
  Description of Artificial Sequence: Synthetic oligonucleotide
agggcaacggcauccuuaa

SEQ ID NO: 434997 - RNA, 19 nt, Artificial Sequence
  Description of Artificial Sequence: Synthetic oligonucleotide
gaagucggggucugccgug

SEQ ID NO: 434998 - RNA, 19 nt, Artificial Sequence
  Description of Artificial Sequence: Synthetic oligonucleotide
auaggccuggaucggcucu

SEQ ID NO: 434999 - RNA, 19 nt, Artificial Sequence
  Description of Artificial Sequence: Synthetic oligonucleotide
gggucaaugcugcuuggag

SEQ ID NO: 435000 - RNA, 19 nt, Artificial Sequence
  Description of Artificial Sequence: Synthetic oligonucleotide
cagacacaaacgcccuccg

SEQ ID NO: 435001 - RNA, 19 nt, Artificial Sequence
  Description of Artificial Sequence: Synthetic oligonucleotide
acuagcaccuggaacgaga

SEQ ID NO: 435002 - RNA, 19 nt, Artificial Sequence
  Description of Artificial Sequence: Synthetic oligonucleotide
uuacaccaccuuugggaac

SEQ ID NO: 435003 - RNA, 19 nt, Artificial Sequence
  Description of Artificial Sequence: Synthetic oligonucleotide
auccuuaaugugagcccgc

SEQ ID NO: 435004 - RNA, 19 nt, Artificial Sequence
  Description of Artificial Sequence: Synthetic oligonucleotide
agaaagaagucggggucug

SEQ ID NO: 435005 - RNA, 19 nt, Artificial Sequence
  Description of Artificial Sequence: Synthetic oligonucleotide
gaguucgcagagggcaacg

SEQ ID NO: 435006 - RNA, 19 nt, Artificial Sequence
  Description of Artificial Sequence: Synthetic oligonucleotide
agaugccuguauaauccag

SEQ ID NO: 435007 - RNA, 19 nt, Artificial Sequence
  Description of Artificial Sequence: Synthetic oligonucleotide
ugcggaucccgaaggcccc

SEQ ID NO: 435008 - RNA, 19 nt, Artificial Sequence
  Description of Artificial Sequence: Synthetic oligonucleotide
aucucaguuacaccaccuu

SEQ ID NO: 435009 - RNA, 19 nt, Artificial Sequence
  Description of Artificial Sequence: Synthetic oligonucleotide
ccuggaucccucuggaagc

SEQ ID NO: 435010 - RNA, 19 nt, Artificial Sequence
  Description of Artificial Sequence: Synthetic oligonucleotide
gccucuaguccuacaaucg

SEQ ID NO: 435011 - RNA, 19 nt, Artificial Sequence
  Description of Artificial Sequence: Synthetic oligonucleotide
ucgguucuucuuagagucu

SEQ ID NO: 435012 - RNA, 19 nt, Artificial Sequence
  Description of Artificial Sequence: Synthetic oligonucleotide
ugucucucugaggagccac

SEQ ID NO: 435013 - RNA, 19 nt, Artificial Sequence
  Description of Artificial Sequence: Synthetic oligonucleotide
ugggaaugaugaguggguc

SEQ ID NO: 435014 - RNA, 19 nt, Artificial Sequence
  Description of Artificial Sequence: Synthetic oligonucleotide
uccucauaauacccugguu

SEQ ID NO: 435015 - RNA, 19 nt, Artificial Sequence
  Description of Artificial Sequence: Synthetic oligonucleotide
gucccgaagugcauagucc

SEQ ID NO: 435016 - RNA, 19 nt, Artificial Sequence
  Description of Artificial Sequence: Synthetic oligonucleotide
ccagucgggaaaauggcug

SEQ ID NO: 435017 - RNA, 19 nt, Artificial Sequence
  Description of Artificial Sequence: Synthetic oligonucleotide
acuuguaagggaggaccug

SEQ ID NO: 435018 - RNA, 19 nt, Artificial Sequence
  Description of Artificial Sequence: Synthetic oligonucleotide
guguucgccaucacuggcc

SEQ ID NO: 435019 - RNA, 19 nt, Artificial Sequence
  Description of Artificial Sequence: Synthetic oligonucleotide
aaccaaaguuagagguuca

SEQ ID NO: 435020 - RNA, 19 nt, Artificial Sequence
  Description of Artificial Sequence: Synthetic oligonucleotide
uaagccguaggggucccga

SEQ ID NO: 435021 - RNA, 19 nt, Artificial Sequence
  Description of Artificial Sequence: Synthetic oligonucleotide
guacucaacauuccucaua

SEQ ID NO: 435022 - RNA, 19 nt, Artificial Sequence
  Description of Artificial Sequence: Synthetic oligonucleotide
caaacgcccuccgacaguc

SEQ ID NO: 435023 - RNA, 19 nt, Artificial Sequence
  Description of Artificial Sequence: Synthetic oligonucleotide
gcggcuuggagaaaguagc

SEQ ID NO: 435024 - RNA, 19 nt, Artificial Sequence
  Description of Artificial Sequence: Synthetic oligonucleotide
aguaaucugugggaaugau

SEQ ID NO: 435025 - RNA, 19 nt, Artificial Sequence
  Description of Artificial Sequence: Synthetic oligonucleotide
ccucggagauugaacagcc

SEQ ID NO: 435026 - RNA, 19 nt, Artificial Sequence
  Description of Artificial Sequence: Synthetic oligonucleotide
caucgauucgguccccauc

SEQ ID NO: 435027 - RNA, 19 nt, Artificial Sequence
  Description of Artificial Sequence: Synthetic oligonucleotide
ugccgcaaggacccucgug

SEQ ID NO: 435028 - RNA, 19 nt, Artificial Sequence
  Description of Artificial Sequence: Synthetic oligonucleotide
ggacauaugugaagcauuc

SEQ ID NO: 435029 - RNA, 19 nt, Artificial Sequence
  Description of Artificial Sequence: Synthetic oligonucleotide
ggggcaucgauucgguccc

SEQ ID NO: 435030 - RNA, 19 nt, Artificial Sequence
  Description of Artificial Sequence: Synthetic oligonucleotide
ucgcagagggcaacggcau

SEQ ID NO: 435031 - RNA, 19 nt, Artificial Sequence
  Description of Artificial Sequence: Synthetic oligonucleotide
gauagccucuaguccuaca

SEQ ID NO: 435032 - RNA, 19 nt, Artificial Sequence
  Description of Artificial Sequence: Synthetic oligonucleotide
agccaugcaaucucaucua

SEQ ID NO: 435033 - RNA, 19 nt, Artificial Sequence
  Description of Artificial Sequence: Synthetic oligonucleotide
ggauucuauauucggccuc

SEQ ID NO: 435034 - RNA, 19 nt, Artificial Sequence
  Description of Artificial Sequence: Synthetic oligonucleotide
ggugguaacuguugagcca

SEQ ID NO: 435035 - RNA, 19 nt, Artificial Sequence
  Description of Artificial Sequence: Synthetic oligonucleotide
uggugaccagcacuucgaa

SEQ ID NO: 435036 - RNA, 19 nt, Artificial Sequence
  Description of Artificial Sequence: Synthetic oligonucleotide
accacacgauguuccucuc

SEQ ID NO: 435037 - RNA, 19 nt, Artificial Sequence
  Description of Artificial Sequence: Synthetic oligonucleotide
uacaaucgcauaggagaaa

SEQ ID NO: 435038 - RNA, 19 nt, Artificial Sequence
  Description of Artificial Sequence: Synthetic oligonucleotide
gguguucgccaucacuggc

SEQ ID NO: 435039 - RNA, 19 nt, Artificial Sequence
  Description of Artificial Sequence: Synthetic oligonucleotide
guaggggucccgaagugca

SEQ ID NO: 435040 - RNA, 19 nt, Artificial Sequence
  Description of Artificial Sequence: Synthetic oligonucleotide
ucagggaccggcgcguagu

SEQ ID NO: 435041 - RNA, 19 nt, Artificial Sequence
  Description of Artificial Sequence: Synthetic oligonucleotide
aagaguucgcagagggcaa

SEQ ID NO: 435042 - RNA, 19 nt, Artificial Sequence
  Description of Artificial Sequence: Synthetic oligonucleotide
uauucgucucagggaccgg

SEQ ID NO: 435043 - RNA, 19 nt, Artificial Sequence
  Description of Artificial Sequence: Synthetic oligonucleotide
cccuggaucccucuggaag

SEQ ID NO: 435044 - RNA, 19 nt, Artificial Sequence
  Description of Artificial Sequence: Synthetic oligonucleotide
gagaaagaagucggggucu

SEQ ID NO: 435045 - RNA, 19 nt, Artificial Sequence
  Description of Artificial Sequence: Synthetic oligonucleotide
ggucccgaagugcauaguc

SEQ ID NO: 435046 - RNA, 19 nt, Artificial Sequence
  Description of Artificial Sequence: Synthetic oligonucleotide
ccucuaguccuacaaucgc

SEQ ID NO: 435047 - RNA, 19 nt, Artificial Sequence
  Description of Artificial Sequence: Synthetic oligonucleotide
gaccaugacugauguacua

SEQ ID NO: 435048 - RNA, 19 nt, Artificial Sequence
  Description of Artificial Sequence: Synthetic oligonucleotide
gccgcaaggacccucguga

SEQ ID NO: 435049 - RNA, 19 nt, Artificial Sequence
  Description of Artificial Sequence: Synthetic oligonucleotide
cauaugugaagcauuccuu

SEQ ID NO: 435050 - RNA, 19 nt, Artificial Sequence
  Description of Artificial Sequence: Synthetic oligonucleotide
cauaguccgggucacgucu

SEQ ID NO: 435051 - RNA, 19 nt, Artificial Sequence
  Description of Artificial Sequence: Synthetic oligonucleotide
guccuacaaucgcauagga

SEQ ID NO: 435052 - RNA, 19 nt, Artificial Sequence
  Description of Artificial Sequence: Synthetic oligonucleotide
uccacauggccgcguguuc

SEQ ID NO: 435053 - RNA, 19 nt, Artificial Sequence
  Description of Artificial Sequence: Synthetic oligonucleotide
agucgcagggugcaaugua

SEQ ID NO: 435054 - RNA, 19 nt, Artificial Sequence
  Description of Artificial Sequence: Synthetic oligonucleotide
gaguggguccacaccgacc

SEQ ID NO: 435055 - RNA, 19 nt, Artificial Sequence
  Description of Artificial Sequence: Synthetic oligonucleotide
agcugaccgggcaaaggag

SEQ ID NO: 435056 - RNA, 19 nt, Artificial Sequence
  Description of Artificial Sequence: Synthetic oligonucleotide
uacuagcaccuggaacgag

SEQ ID NO: 435057 - RNA, 19 nt, Artificial Sequence
  Description of Artificial Sequence: Synthetic oligonucleotide
acuuucucccuuggggaga

SEQ ID NO: 435058 - RNA, 19 nt, Artificial Sequence
  Description of Artificial Sequence: Synthetic oligonucleotide
gacccuggaucccucugga

SEQ ID NO: 435059 - RNA, 19 nt, Artificial Sequence
  Description of Artificial Sequence: Synthetic oligonucleotide
cacgucugagccucggaga

SEQ ID NO: 435060 - RNA, 19 nt, Artificial Sequence
  Description of Artificial Sequence: Synthetic oligonucleotide
ucacggcuuuggcaaugca

SEQ ID NO: 435061 - RNA, 19 nt, Artificial Sequence
  Description of Artificial Sequence: Synthetic oligonucleotide
ggcuuugucgcugacccac

SEQ ID NO: 435062 - RNA, 19 nt, Artificial Sequence
  Description of Artificial Sequence: Synthetic oligonucleotide
gccuuguaucugcaguucc

SEQ ID NO: 435063 - RNA, 19 nt, Artificial Sequence
  Description of Artificial Sequence: Synthetic oligonucleotide
guaagggaggaccuggauu

SEQ ID NO: 435064 - RNA, 19 nt, Artificial Sequence
  Description of Artificial Sequence: Synthetic oligonucleotide
cucgguuauugaaauuaua

SEQ ID NO: 435065 - RNA, 19 nt, Artificial Sequence
  Description of Artificial Sequence: Synthetic oligonucleotide
gcguagugaaugauggcgc

SEQ ID NO: 435066 - RNA, 19 nt, Artificial Sequence
  Description of Artificial Sequence: Synthetic oligonucleotide
auggccgcguguucuucug

SEQ ID NO: 435067 - RNA, 19 nt, Artificial Sequence
  Description of Artificial Sequence: Synthetic oligonucleotide
accaaaguuagagguucaa

SEQ ID NO: 435068 - RNA, 19 nt, Artificial Sequence
  Description of Artificial Sequence: Synthetic oligonucleotide
ggaacgagaccaucaugga

SEQ ID NO: 435069 - RNA, 19 nt, Artificial Sequence
  Description of Artificial Sequence: Synthetic oligonucleotide
ccuucucauaagccguagg

SEQ ID NO: 435070 - RNA, 19 nt, Artificial Sequence
  Description of Artificial Sequence: Synthetic oligonucleotide
ucgccaucacuggccagag

SEQ ID NO: 435071 - RNA, 19 nt, Artificial Sequence
  Description of Artificial Sequence: Synthetic oligonucleotide
ggcaucuccggacgggaug

SEQ ID NO: 435072 - RNA, 19 nt, Artificial Sequence
  Description of Artificial Sequence: Synthetic oligonucleotide
cguagugaaugauggcgcc

SEQ ID NO: 435073 - RNA, 19 nt, Artificial Sequence
  Description of Artificial Sequence: Synthetic oligonucleotide
caugaacaucaaggugacc

SEQ ID NO: 435074 - RNA, 19 nt, Artificial Sequence
  Description of Artificial Sequence: Synthetic oligonucleotide
gccuuugaggacauaugug

SEQ ID NO: 435075 - RNA, 19 nt, Artificial Sequence
  Description of Artificial Sequence: Synthetic oligonucleotide
aaacgcccuccgacagucg

SEQ ID NO: 435076 - RNA, 19 nt, Artificial Sequence
  Description of Artificial Sequence: Synthetic oligonucleotide
guaggugcugcuucacacu

SEQ ID NO: 435077 - RNA, 19 nt, Artificial Sequence
  Description of Artificial Sequence: Synthetic oligonucleotide
cugcacucacagcuaugug

SEQ ID NO: 435078 - RNA, 19 nt, Artificial Sequence
  Description of Artificial Sequence: Synthetic oligonucleotide
uaguccgggucacgucugu

SEQ ID NO: 435079 - RNA, 19 nt, Artificial Sequence
  Description of Artificial Sequence: Synthetic oligonucleotide
ucgauucgguccccaucaa

SEQ ID NO: 435080 - RNA, 19 nt, Artificial Sequence
  Description of Artificial Sequence: Synthetic oligonucleotide
accggcgcguagugaauga

SEQ ID NO: 435081 - RNA, 19 nt, Artificial Sequence
  Description of Artificial Sequence: Synthetic oligonucleotide
ccgaaggucugcaaccuuc

SEQ ID NO: 435082 - RNA, 19 nt, Artificial Sequence
  Description of Artificial Sequence: Synthetic oligonucleotide
cccuccgacagucgcaggg

SEQ ID NO: 435083 - RNA, 19 nt, Artificial Sequence
  Description of Artificial Sequence: Synthetic oligonucleotide
aaggccccguccucauaau

SEQ ID NO: 435084 - RNA, 19 nt, Artificial Sequence
  Description of Artificial Sequence: Synthetic oligonucleotide
ccggacgggaugauauagg

SEQ ID NO: 435085 - RNA, 19 nt, Artificial Sequence
  Description of Artificial Sequence: Synthetic oligonucleotide
ggacgggaugauauaggcc

SEQ ID NO: 435086 - RNA, 19 nt, Artificial Sequence
  Description of Artificial Sequence: Synthetic oligonucleotide
cuccgacagucgcagggug

SEQ ID NO: 435087 - RNA, 19 nt, Artificial Sequence
  Description of Artificial Sequence: Synthetic oligonucleotide
gcguguucuucugugauga

SEQ ID NO: 435088 - RNA, 19 nt, Artificial Sequence
  Description of Artificial Sequence: Synthetic oligonucleotide
ggucugccguguuucuucc

SEQ ID NO: 435089 - RNA, 19 nt, Artificial Sequence
  Description of Artificial Sequence: Synthetic oligonucleotide
ggggucccgaagugcauag

SEQ ID NO: 435090 - RNA, 19 nt, Artificial Sequence
  Description of Artificial Sequence: Synthetic oligonucleotide
ugucgcugacccacacuuu

SEQ ID NO: 435091 - RNA, 19 nt, Artificial Sequence
  Description of Artificial Sequence: Synthetic oligonucleotide
cauuuuggucuggauggga

SEQ ID NO: 435092 - RNA, 19 nt, Artificial Sequence
  Description of Artificial Sequence: Synthetic oligonucleotide
gccccguccucauaauacc

SEQ ID NO: 435093 - RNA, 19 nt, Artificial Sequence
  Description of Artificial Sequence: Synthetic oligonucleotide
augucccgucccaugcagg

SEQ ID NO: 435094 - RNA, 19 nt, Artificial Sequence
  Description of Artificial Sequence: Synthetic oligonucleotide
ccacgucugagccucggag

SEQ ID NO: 435095 - RNA, 19 nt, Artificial Sequence
  Description of Artificial Sequence: Synthetic oligonucleotide
ccuauucgucucagggacc

SEQ ID NO: 435096 - RNA, 19 nt, Artificial Sequence
  Description of Artificial Sequence: Synthetic oligonucleotide
agaaucccacagagcugac

SEQ ID NO: 435097 - RNA, 19 nt, Artificial Sequence
  Description of Artificial Sequence: Synthetic oligonucleotide
guaagagaauccacaucua

SEQ ID NO: 435098 - RNA, 19 nt, Artificial Sequence
  Description of Artificial Sequence: Synthetic oligonucleotide
auaguccgggucacgucug

SEQ ID NO: 435099 - RNA, 19 nt, Artificial Sequence
  Description of Artificial Sequence: Synthetic oligonucleotide
auaagccguaggggucccg

SEQ ID NO: 435100 - RNA, 19 nt, Artificial Sequence
  Description of Artificial Sequence: Synthetic oligonucleotide
ugaugccgcaaggacccuc

SEQ ID NO: 435101 - RNA, 19 nt, Artificial Sequence
  Description of Artificial Sequence: Synthetic oligonucleotide
cauaagccguagggguccc

SEQ ID NO: 435102 - RNA, 19 nt, Artificial Sequence
  Description of Artificial Sequence: Synthetic oligonucleotide
ggauugugcuccacgucug

SEQ ID NO: 435103 - RNA, 19 nt, Artificial Sequence
  Description of Artificial Sequence: Synthetic oligonucleotide
ugucaaccuuuggagccau

SEQ ID NO: 435104 - RNA, 19 nt, Artificial Sequence
  Description of Artificial Sequence: Synthetic oligonucleotide
cccgaagugcauaguccgg

SEQ ID NO: 435105 - RNA, 19 nt, Artificial Sequence
  Description of Artificial Sequence: Synthetic oligonucleotide
ggccccguccucauaauac

SEQ ID NO: 435106 - RNA, 19 nt, Artificial Sequence
  Description of Artificial Sequence: Synthetic oligonucleotide
caguaaucugugggaauga

SEQ ID NO: 435107 - RNA, 19 nt, Artificial Sequence
  Description of Artificial Sequence: Synthetic oligonucleotide
guucgccaucacuggccag

SEQ ID NO: 435108 - RNA, 19 nt, Artificial Sequence
  Description of Artificial Sequence: Synthetic oligonucleotide
uggccgcguguucuucugu

SEQ ID NO: 435109 - RNA, 19 nt, Artificial Sequence
  Description of Artificial Sequence: Synthetic oligonucleotide
ggagaaaguagcgcccauc

SEQ ID NO: 435110 - RNA, 19 nt, Artificial Sequence
  Description of Artificial Sequence: Synthetic oligonucleotide
cuaguccuacaaucgcaua

SEQ ID NO: 435111 - RNA, 19 nt, Artificial Sequence
  Description of Artificial Sequence: Synthetic oligonucleotide
cgucccaugcagguaaucc

SEQ ID NO: 435112 - RNA, 19 nt, Artificial Sequence
  Description of Artificial Sequence: Synthetic oligonucleotide
cucggagauugaacagcca

SEQ ID NO: 435113 - RNA, 19 nt, Artificial Sequence
  Description of Artificial Sequence: Synthetic oligonucleotide
augaguggguccacaccga

SEQ ID NO: 435114 - RNA, 19 nt, Artificial Sequence
  Description of Artificial Sequence: Synthetic oligonucleotide
cacucgguguucgccauca

SEQ ID NO: 435115 - RNA, 19 nt, Artificial Sequence
  Description of Artificial Sequence: Synthetic oligonucleotide
cucuggccggucuguccag

SEQ ID NO: 435116 - RNA, 19 nt, Artificial Sequence
  Description of Artificial Sequence: Synthetic oligonucleotide
ggccgcguguucuucugug

SEQ ID NO: 435117 - RNA, 19 nt, Artificial Sequence
  Description of Artificial Sequence: Synthetic oligonucleotide
gggaccggcgcguagugaa

SEQ ID NO: 435118 - RNA, 19 nt, Artificial Sequence
  Description of Artificial Sequence: Synthetic oligonucleotide
augauagccucuaguccua

SEQ ID NO: 435119 - RNA, 19 nt, Artificial Sequence
  Description of Artificial Sequence: Synthetic oligonucleotide
gaccgggcaaaggagucua

SEQ ID NO: 435120 - RNA, 19 nt, Artificial Sequence
  Description of Artificial Sequence: Synthetic oligonucleotide
aaggacccucgugaacauu

SEQ ID NO: 435121 - RNA, 19 nt, Artificial Sequence
  Description of Artificial Sequence: Synthetic oligonucleotide
ccaagucaaggaguaggug

SEQ ID NO: 435122 - RNA, 19 nt, Artificial Sequence
  Description of Artificial Sequence: Synthetic oligonucleotide
aguccgggucacgucugug

SEQ ID NO: 435123 - RNA, 19 nt, Artificial Sequence
  Description of Artificial Sequence: Synthetic oligonucleotide
cagggaccggcgcguagug

SEQ ID NO: 435124 - RNA, 19 nt, Artificial Sequence
  Description of Artificial Sequence: Synthetic oligonucleotide
caaucacaucccugcaggu

SEQ ID NO: 435125 - RNA, 19 nt, Artificial Sequence
  Description of Artificial Sequence: Synthetic oligonucleotide
aggccccguccucauaaua

SEQ ID NO: 435126 - RNA, 19 nt, Artificial Sequence
  Description of Artificial Sequence: Synthetic oligonucleotide
cucgucagagaacgucuua

SEQ ID NO: 435127 - RNA, 19 nt, Artificial Sequence
  Description of Artificial Sequence: Synthetic oligonucleotide
cgguguucgccaucacugg

SEQ ID NO: 435128 - RNA, 19 nt, Artificial Sequence
  Description of Artificial Sequence: Synthetic oligonucleotide
acccuggaucccucuggaa

SEQ ID NO: 435129 - RNA, 19 nt, Artificial Sequence
  Description of Artificial Sequence: Synthetic oligonucleotide
gcauaguccgggucacguc

SEQ ID NO: 435130 - RNA, 19 nt, Artificial Sequence
  Description of Artificial Sequence: Synthetic oligonucleotide
gcgcguagugaaugauggc

SEQ ID NO: 435131 - RNA, 19 nt, Artificial Sequence
  Description of Artificial Sequence: Synthetic oligonucleotide
gauggcgccguuggguccu

SEQ ID NO: 435132 - RNA, 19 nt, Artificial Sequence
  Description of Artificial Sequence: Synthetic oligonucleotide
ggaucccucuggaagcaca

SEQ ID NO: 435133 - RNA, 19 nt, Artificial Sequence
  Description of Artificial Sequence: Synthetic oligonucleotide
gcugcacucacagcuaugu

SEQ ID NO: 435134 - RNA, 19 nt, Artificial Sequence
  Description of Artificial Sequence: Synthetic oligonucleotide
gggcucgucagagaacguc

SEQ ID NO: 435135 - RNA, 19 nt, Artificial Sequence
  Description of Artificial Sequence: Synthetic oligonucleotide
guagcgcccaucgguccac

SEQ ID NO: 435136 - RNA, 19 nt, Artificial Sequence
  Description of Artificial Sequence: Synthetic oligonucleotide
gcgcccaucgguccacaug

SEQ ID NO: 435137 - RNA, 19 nt, Artificial Sequence
  Description of Artificial Sequence: Synthetic oligonucleotide
caaggugaccaugacugau

SEQ ID NO: 435138 - RNA, 19 nt, Artificial Sequence
  Description of Artificial Sequence: Synthetic oligonucleotide
ccgagcagagggucuugag

SEQ ID NO: 435139 - RNA, 19 nt, Artificial Sequence
  Description of Artificial Sequence: Synthetic oligonucleotide
caccuggaacgagaccauc

SEQ ID NO: 435140 - RNA, 19 nt, Artificial Sequence
  Description of Artificial Sequence: Synthetic oligonucleotide
cugagccucggagauugaa

SEQ ID NO: 435141 - RNA, 19 nt, Artificial Sequence
  Description of Artificial Sequence: Synthetic oligonucleotide
ggguccuguacuggagaug

SEQ ID NO: 435142 - RNA, 19 nt, Artificial Sequence
  Description of Artificial Sequence: Synthetic oligonucleotide
gcgccguuggguccuguac

SEQ ID NO: 435143 - RNA, 19 nt, Artificial Sequence
  Description of Artificial Sequence: Synthetic oligonucleotide
auggccucgcucacagcau

SEQ ID NO: 435144 - RNA, 19 nt, Artificial Sequence
  Description of Artificial Sequence: Synthetic oligonucleotide
augccgcaaggacccucgu

SEQ ID NO: 435145 - RNA, 19 nt, Artificial Sequence
  Description of Artificial Sequence: Synthetic oligonucleotide
ggccggucuguccagauuu

SEQ ID NO: 435146 - RNA, 19 nt, Artificial Sequence
  Description of Artificial Sequence: Synthetic oligonucleotide
ggccucgcucacagcauag

SEQ ID NO: 435147 - RNA, 19 nt, Artificial Sequence
  Description of Artificial Sequence: Synthetic oligonucleotide
gcggccuuguaucugcagu

SEQ ID NO: 435148 - RNA, 19 nt, Artificial Sequence
  Description of Artificial Sequence: Synthetic oligonucleotide
ggcucgucagagaacgucu

SEQ ID NO: 435149 - RNA, 19 nt, Artificial Sequence
  Description of Artificial Sequence: Synthetic oligonucleotide
gcaccggagucaaugaggu

SEQ ID NO: 435150 - RNA, 19 nt, Artificial Sequence
  Description of Artificial Sequence: Synthetic oligonucleotide
cgaugcggaucccgaaggc

SEQ ID NO: 435151 - RNA, 19 nt, Artificial Sequence
  Description of Artificial Sequence: Synthetic oligonucleotide
cgcguguucuucugugaug

SEQ ID NO: 435152 - RNA, 19 nt, Artificial Sequence
  Description of Artificial Sequence: Synthetic oligonucleotide
agggaccggcgcguaguga

SEQ ID NO: 435153 - RNA, 19 nt, Artificial Sequence
  Description of Artificial Sequence: Synthetic oligonucleotide
ggcccaagucaaggaguag

SEQ ID NO: 435154 - RNA, 19 nt, Artificial Sequence
  Description of Artificial Sequence: Synthetic oligonucleotide
gccguaggggucccgaagu

SEQ ID NO: 435155 - RNA, 19 nt, Artificial Sequence
  Description of Artificial Sequence: Synthetic oligonucleotide
gggucacgucugugguucc

SEQ ID NO: 435156 - RNA, 19 nt, Artificial Sequence
  Description of Artificial Sequence: Synthetic oligonucleotide
cuccggacgggaugauaua

SEQ ID NO: 435157 - RNA, 19 nt, Artificial Sequence
  Description of Artificial Sequence: Synthetic oligonucleotide
cgggucacgucugugguuc

SEQ ID NO: 435158 - RNA, 19 nt, Artificial Sequence
  Description of Artificial Sequence: Synthetic oligonucleotide
cggcgcguagugaaugaug

SEQ ID NO: 435159 - RNA, 19 nt, Artificial Sequence
  Description of Artificial Sequence: Synthetic oligonucleotide
ccguuggguccuguacugg

SEQ ID NO: 435160 - RNA, 19 nt, Artificial Sequence
  Description of Artificial Sequence: Synthetic oligonucleotide
ccucgugaacauucagaaa

SEQ ID NO: 435161 - RNA, 19 nt, Artificial Sequence
  Description of Artificial Sequence: Synthetic oligonucleotide
ccguaggggucccgaagug

SEQ ID NO: 435162 - RNA, 19 nt, Artificial Sequence
  Description of Artificial Sequence: Synthetic oligonucleotide
gacccacacuuucucccuu

SEQ ID NO: 435163 - RNA, 19 nt, Artificial Sequence
  Description of Artificial Sequence: Synthetic oligonucleotide
ccuuugguuccagucggga

SEQ ID NO: 435164 - RNA, 19 nt, Artificial Sequence
  Description of Artificial Sequence: Synthetic oligonucleotide
ccuuggggagagguccgag

SEQ ID NO: 435165 - RNA, 19 nt, Artificial Sequence
  Description of Artificial Sequence: Synthetic oligonucleotide
ccggucuguccagauuuug

SEQ ID NO: 435166 - RNA, 19 nt, Artificial Sequence
  Description of Artificial Sequence: Synthetic oligonucleotide
ggucacgucugugguucca

SEQ ID NO: 435167 - RNA, 19 nt, Artificial Sequence
  Description of Artificial Sequence: Synthetic oligonucleotide
agggcucgucagagaacgu

SEQ ID NO: 435168 - RNA, 19 nt, Artificial Sequence
  Description of Artificial Sequence: Synthetic oligonucleotide
gcggaucccgaaggccccg

SEQ ID NO: 435169 - RNA, 19 nt, Artificial Sequence
  Description of Artificial Sequence: Synthetic oligonucleotide
ggcaucgauucggucccca

SEQ ID NO: 435170 - RNA, 19 nt, Artificial Sequence
  Description of Artificial Sequence: Synthetic oligonucleotide
ccgcuuugucagcagcuga

SEQ ID NO: 435171 - RNA, 19 nt, Artificial Sequence
  Description of Artificial Sequence: Synthetic oligonucleotide
ccgacccuggaucccucug

SEQ ID NO: 435172 - RNA, 19 nt, Artificial Sequence
  Description of Artificial Sequence: Synthetic oligonucleotide
ggaucccgaaggccccguc

SEQ ID NO: 435173 - RNA, 19 nt, Artificial Sequence
  Description of Artificial Sequence: Synthetic oligonucleotide
gucacgucugugguuccau

SEQ ID NO: 435174 - RNA, 19 nt, Artificial Sequence
  Description of Artificial Sequence: Synthetic oligonucleotide
ccgacagucgcagggugca

SEQ ID NO: 435175 - RNA, 19 nt, Artificial Sequence
  Description of Artificial Sequence: Synthetic oligonucleotide
cugccacguacucaacauu

SEQ ID NO: 435176 - RNA, 19 nt, Artificial Sequence
  Description of Artificial Sequence: Synthetic oligonucleotide
ccucgcucacagcauagcu

SEQ ID NO: 435177 - RNA, 19 nt, Artificial Sequence
  Description of Artificial Sequence: Synthetic oligonucleotide
ccucgguuauugaaauuau

SEQ ID NO: 435178 - RNA, 19 nt, Artificial Sequence
  Description of Artificial Sequence: Synthetic oligonucleotide
caccggagucaaugaggua

SEQ ID NO: 435179 - RNA, 19 nt, Artificial Sequence
  Description of Artificial Sequence: Synthetic oligonucleotide
gcccuccgacagucgcagg

SEQ ID NO: 435180 - RNA, 19 nt, Artificial Sequence
  Description of Artificial Sequence: Synthetic oligonucleotide
gcacucgguguucgccauc

SEQ ID NO: 435181 - RNA, 19 nt, Artificial Sequence
  Description of Artificial Sequence: Synthetic oligonucleotide
cagucgcagggugcaaugu

SEQ ID NO: 435182 - RNA, 19 nt, Artificial Sequence
  Description of Artificial Sequence: Synthetic oligonucleotide
cagagggcaacggcauccu

SEQ ID NO: 435183 - RNA, 19 nt, Artificial Sequence
  Description of Artificial Sequence: Synthetic oligonucleotide
ccuuaaugugagcccgccu

SEQ ID NO: 435184 - RNA, 19 nt, Artificial Sequence
  Description of Artificial Sequence: Synthetic oligonucleotide
cgcccuccgacagucgcag

SEQ ID NO: 435185 - RNA, 19 nt, Artificial Sequence
  Description of Artificial Sequence: Synthetic oligonucleotide
gucccgucccaugcaggua

SEQ ID NO: 435186 - RNA, 19 nt, Artificial Sequence
  Description of Artificial Sequence: Synthetic oligonucleotide
gcaucgauucgguccccau

SEQ ID NO: 435187 - RNA, 19 nt, Artificial Sequence
  Description of Artificial Sequence: Synthetic oligonucleotide
ccugcaggucuggugguaa

SEQ ID NO: 435188 - RNA, 19 nt, Artificial Sequence
  Description of Artificial Sequence: Synthetic oligonucleotide
cuggccggucuguccagau

SEQ ID NO: 435189 - RNA, 19 nt, Artificial Sequence
  Description of Artificial Sequence: Synthetic oligonucleotide
ggcgccguuggguccugua

SEQ ID NO: 435190 - RNA, 19 nt, Artificial Sequence
  Description of Artificial Sequence: Synthetic oligonucleotide
auggcgccguuggguccug

SEQ ID NO: 435191 - RNA, 19 nt, Artificial Sequence
  Description of Artificial Sequence: Synthetic oligonucleotide
cggucuguccagauuuugu

SEQ ID NO: 435192 - RNA, 19 nt, Artificial Sequence
  Description of Artificial Sequence: Synthetic oligonucleotide
cccgaaggccccguccuca

SEQ ID NO: 435193 - RNA, 19 nt, Artificial Sequence
  Description of Artificial Sequence: Synthetic oligonucleotide
ccgcaaggacccucgugaa

SEQ ID NO: 435194 - RNA, 19 nt, Artificial Sequence
  Description of Artificial Sequence: Synthetic oligonucleotide
uggcgccguuggguccugu

SEQ ID NO: 435195 - RNA, 19 nt, Artificial Sequence
  Description of Artificial Sequence: Synthetic oligonucleotide
ccacauggccgcguguucu

SEQ ID NO: 435196 - RNA, 19 nt, Artificial Sequence
  Description of Artificial Sequence: Synthetic oligonucleotide
gugugucuuucaagcccau

SEQ ID NO: 435197 - RNA, 19 nt, Artificial Sequence
  Description of Artificial Sequence: Synthetic oligonucleotide
ccgucccaugcagguaauc

SEQ ID NO: 435198 - RNA, 19 nt, Artificial Sequence
  Description of Artificial Sequence: Synthetic oligonucleotide
ccgcguguucuucugugau

SEQ ID NO: 435199 - RNA, 19 nt, Artificial Sequence
  Description of Artificial Sequence: Synthetic oligonucleotide
gcucgucagagaacgucuu

SEQ ID NO: 435200 - RNA, 19 nt, Artificial Sequence
  Description of Artificial Sequence: Synthetic oligonucleotide
cgccucaugccuuccgacu

SEQ ID NO: 435201 - RNA, 19 nt, Artificial Sequence
  Description of Artificial Sequence: Synthetic oligonucleotide
cgccguuggguccuguacu

SEQ ID NO: 435202 - RNA, 19 nt, Artificial Sequence
  Description of Artificial Sequence: Synthetic oligonucleotide
gcaccuggaacgagaccau

SEQ ID NO: 435203 - RNA, 19 nt, Artificial Sequence
  Description of Artificial Sequence: Synthetic oligonucleotide
cugaugccgcaaggacccu

SEQ ID NO: 435204 - RNA, 19 nt, Artificial Sequence
  Description of Artificial Sequence: Synthetic oligonucleotide
gggucccgaagugcauagu

SEQ ID NO: 435205 - RNA, 19 nt, Artificial Sequence
  Description of Artificial Sequence: Synthetic oligonucleotide
ggaccggcgcguagugaau

SEQ ID NO: 435206 - RNA, 19 nt, Artificial Sequence
  Description of Artificial Sequence: Synthetic oligonucleotide
gcuuggcggcuuggagaaa

SEQ ID NO: 435207 - RNA, 19 nt, Artificial Sequence
  Description of Artificial Sequence: Synthetic oligonucleotide
gggcaucuccggacgggau

SEQ ID NO: 435208 - RNA, 19 nt, Artificial Sequence
  Description of Artificial Sequence: Synthetic oligonucleotide
ccaguccuccugaguuggu

SEQ ID NO: 435209 - RNA, 19 nt, Artificial Sequence
  Description of Artificial Sequence: Synthetic oligonucleotide
gggcaacggcauccuuaau

SEQ ID NO: 435210 - RNA, 19 nt, Artificial Sequence
  Description of Artificial Sequence: Synthetic oligonucleotide
gccggucuguccagauuuu

SEQ ID NO: 435211 - RNA, 19 nt, Artificial Sequence
  Description of Artificial Sequence: Synthetic oligonucleotide
cccgucccaugcagguaau

SEQ ID NO: 435212 - RNA, 19 nt, Artificial Sequence
  Description of Artificial Sequence: Synthetic oligonucleotide
ccggcgcguagugaaugau

SEQ ID NO: 435213 - RNA, 19 nt, Artificial Sequence
  Description of Artificial Sequence: Synthetic oligonucleotide
auuccaaucacucauaaag

SEQ ID NO: 435214 - RNA, 19 nt, Artificial Sequence
  Description of Artificial Sequence: Synthetic oligonucleotide
aacaauguuccauuuaagg

SEQ ID NO: 435215 - RNA, 19 nt, Artificial Sequence
  Description of Artificial Sequence: Synthetic oligonucleotide
ucuaaagaaccauauaagg

SEQ ID NO: 435216 - RNA, 19 nt, Artificial Sequence
  Description of Artificial Sequence: Synthetic oligonucleotide
acaauguuccauuuaaggc

SEQ ID NO: 435217 - RNA, 19 nt, Artificial Sequence
  Description of Artificial Sequence: Synthetic oligonucleotide
aaaguaaccguauucaaca

SEQ ID NO: 435218 - RNA, 19 nt, Artificial Sequence
  Description of Artificial Sequence: Synthetic oligonucleotide
aauagcucuggcuaauagc

SEQ ID NO: 435219 - RNA, 19 nt, Artificial Sequence
  Description of Artificial Sequence: Synthetic oligonucleotide
uccaauucaauuuagaaaa

SEQ ID NO: 435220 - RNA, 19 nt, Artificial Sequence
  Description of Artificial Sequence: Synthetic oligonucleotide
cuagauaaaucaaugacag

SEQ ID NO: 435221 - RNA, 19 nt, Artificial Sequence
  Description of Artificial Sequence: Synthetic oligonucleotide
gauuaaucgauguuuaccc

SEQ ID NO: 435222 - RNA, 19 nt, Artificial Sequence
  Description of Artificial Sequence: Synthetic oligonucleotide
uucauuaugaucaaguaau

SEQ ID NO: 435223 - RNA, 19 nt, Artificial Sequence
  Description of Artificial Sequence: Synthetic oligonucleotide
auauuaaggaaucauagcu

SEQ ID NO: 435224 - RNA, 19 nt, Artificial Sequence
  Description of Artificial Sequence: Synthetic oligonucleotide
ucggcaaucauucagaggu

SEQ ID NO: 435225 - RNA, 19 nt, Artificial Sequence
  Description of Artificial Sequence: Synthetic oligonucleotide
gguaaugaaacuuaauugg

SEQ ID NO: 435226 - RNA, 19 nt, Artificial Sequence
  Description of Artificial Sequence: Synthetic oligonucleotide
uucuacauaaaaguaaccg

SEQ ID NO: 435227 - RNA, 19 nt, Artificial Sequence
  Description of Artificial Sequence: Synthetic oligonucleotide
aacacugccgcccaguuuc

SEQ ID NO: 435228 - RNA, 19 nt, Artificial Sequence
  Description of Artificial Sequence: Synthetic oligonucleotide
agaucaguuaaacauauug

SEQ ID NO: 435229 - RNA, 19 nt, Artificial Sequence
  Description of Artificial Sequence: Synthetic oligonucleotide
aguacucuaagcuauucac

SEQ ID NO: 435230 - RNA, 19 nt, Artificial Sequence
  Description of Artificial Sequence: Synthetic oligonucleotide
uugcuaauguuuaagacug

SEQ ID NO: 435231 - RNA, 19 nt, Artificial Sequence
  Description of Artificial Sequence: Synthetic oligonucleotide
aaacauaaaacuccuacau

SEQ ID NO: 435232 - RNA, 19 nt, Artificial Sequence
  Description of Artificial Sequence: Synthetic oligonucleotide
uucuaaagaaccauauaag

SEQ ID NO: 435233 - RNA, 19 nt, Artificial Sequence
  Description of Artificial Sequence: Synthetic oligonucleotide
aaaauaggcuugccaaggc

SEQ ID NO: 435234 - RNA, 19 nt, Artificial Sequence
  Description of Artificial Sequence: Synthetic oligonucleotide
uuuuaagggauuaaacaca

SEQ ID NO: 435235 - RNA, 19 nt, Artificial Sequence
  Description of Artificial Sequence: Synthetic oligonucleotide
aacgcauaguguuaaaucu

SEQ ID NO: 435236 - RNA, 19 nt, Artificial Sequence
  Description of Artificial Sequence: Synthetic oligonucleotide
cauacgguaaacauaaaac

SEQ ID NO: 435237 - RNA, 19 nt, Artificial Sequence
  Description of Artificial Sequence: Synthetic oligonucleotide
  modified_base (12)..(12): a, c, u, g, unknown or other
auguguuugccnuaaauag

SEQ ID NO: 435238 - RNA, 19 nt, Artificial Sequence
  Description of Artificial Sequence: Synthetic oligonucleotide
uuuaccauaugaccagugg

SEQ ID NO: 435239 - RNA, 19 nt, Artificial Sequence
  Description of Artificial Sequence: Synthetic oligonucleotide
ugaaauuauucuaaagaac

SEQ ID NO: 435240 - RNA, 19 nt, Artificial Sequence
  Description of Artificial Sequence: Synthetic oligonucleotide
aaaaguaaccguauucaac

SEQ ID NO: 435241 - RNA, 19 nt, Artificial Sequence
  Description of Artificial Sequence: Synthetic oligonucleotide
aguguuaaaucugugcugc

SEQ ID NO: 435242 - RNA, 19 nt, Artificial Sequence
  Description of Artificial Sequence: Synthetic oligonucleotide
agauuaaucgauguuuacc

SEQ ID NO: 435243 - RNA, 19 nt, Artificial Sequence
  Description of Artificial Sequence: Synthetic oligonucleotide
aacagcuauguuuuaaugu

SEQ ID NO: 435244 - RNA, 19 nt, Artificial Sequence
  Description of Artificial Sequence: Synthetic oligonucleotide
aaugaaacuuaauuggcau

SEQ ID NO: 435245 - RNA, 19 nt, Artificial Sequence
  Description of Artificial Sequence: Synthetic oligonucleotide
auugcuaauguuuaagacu

SEQ ID NO: 435246 - RNA, 19 nt, Artificial Sequence
  Description of Artificial Sequence: Synthetic oligonucleotide
uuagagcuagcauaaauca

SEQ ID NO: 435247 - RNA, 19 nt, Artificial Sequence
  Description of Artificial Sequence: Synthetic oligonucleotide
ucaagugcaacuauaaaua

SEQ ID NO: 435248 - RNA, 19 nt, Artificial Sequence
  Description of Artificial Sequence: Synthetic oligonucleotide
uguuuaguacacauuacca

SEQ ID NO: 435249 - RNA, 19 nt, Artificial Sequence
  Description of Artificial Sequence: Synthetic oligonucleotide
uuuagagcuagcauaaauc

SEQ ID NO: 435250 - RNA, 19 nt, Artificial Sequence
  Description of Artificial Sequence: Synthetic oligonucleotide
cauauaaggaaauugagaa

SEQ ID NO: 435251 - RNA, 19 nt, Artificial Sequence
  Description of Artificial Sequence: Synthetic oligonucleotide
auuaugaucaaguaauaaa

SEQ ID NO: 435252 - RNA, 19 nt, Artificial Sequence
  Description of Artificial Sequence: Synthetic oligonucleotide
aaugggaaaccaaagaugu

SEQ ID NO: 435253 - RNA, 19 nt, Artificial Sequence
  Description of Artificial Sequence: Synthetic oligonucleotide
uuuaaauggaagccuagac

SEQ ID NO: 435254 - RNA, 19 nt, Artificial Sequence
  Description of Artificial Sequence: Synthetic oligonucleotide
ugcacuuuaaagaugaauu

SEQ ID NO: 435255 - RNA, 19 nt, Artificial Sequence
  Description of Artificial Sequence: Synthetic oligonucleotide
uuaaggcucuuuuauacag

SEQ ID NO: 435256 - RNA, 19 nt, Artificial Sequence
  Description of Artificial Sequence: Synthetic oligonucleotide
aaguuuaccauaugaccag

SEQ ID NO: 435257 - RNA, 19 nt, Artificial Sequence
  Description of Artificial Sequence: Synthetic oligonucleotide
gaugacuaugacaagauac

SEQ ID NO: 435258 - RNA, 19 nt, Artificial Sequence
  Description of Artificial Sequence: Synthetic oligonucleotide
uguaauaugccacaauuuu

SEQ ID NO: 435259 - RNA, 19 nt, Artificial Sequence
  Description of Artificial Sequence: Synthetic oligonucleotide
ucuacauaaaaguaaccgu

SEQ ID NO: 435260 - RNA, 19 nt, Artificial Sequence
  Description of Artificial Sequence: Synthetic oligonucleotide
aauggaagccccuuaagau

SEQ ID NO: 435261 - RNA, 19 nt, Artificial Sequence
  Description of Artificial Sequence: Synthetic oligonucleotide
agccuagacauuuaacagc

SEQ ID NO: 435262 - RNA, 19 nt, Artificial Sequence
  Description of Artificial Sequence: Synthetic oligonucleotide
uggauaauacuuucaaggc

SEQ ID NO: 435263 - RNA, 19 nt, Artificial Sequence
  Description of Artificial Sequence: Synthetic oligonucleotide
uuugcaaaauuuccaagga

SEQ ID NO: 435264 - RNA, 19 nt, Artificial Sequence
  Description of Artificial Sequence: Synthetic oligonucleotide
auacgguaaacauaaaacu

SEQ ID NO: 435265 - RNA, 19 nt, Artificial Sequence
  Description of Artificial Sequence: Synthetic oligonucleotide
uuuuauugcaacguggcca

SEQ ID NO: 435266 - RNA, 19 nt, Artificial Sequence
  Description of Artificial Sequence: Synthetic oligonucleotide
  modified_base (7)..(7): a, c, u, g, unknown or other
uuugccnuaaauagcucug

SEQ ID NO: 435267 - RNA, 19 nt, Artificial Sequence
  Description of Artificial Sequence: Synthetic oligonucleotide
auuaaggaaucauagcuga

SEQ ID NO: 435268 - RNA, 19 nt, Artificial Sequence
  Description of Artificial Sequence: Synthetic oligonucleotide
uaaugaaacuuaauuggca

SEQ ID NO: 435269 - RNA, 19 nt, Artificial Sequence
  Description of Artificial Sequence: Synthetic oligonucleotide
aaggcauguaaccaguugu

SEQ ID NO: 435270 - RNA, 19 nt, Artificial Sequence
  Description of Artificial Sequence: Synthetic oligonucleotide
uuaacggugcacuuucagg

SEQ ID NO: 435271 - RNA, 19 nt, Artificial Sequence
  Description of Artificial Sequence: Synthetic oligonucleotide
agaauaaaauaacucggug

SEQ ID NO: 435272 - RNA, 19 nt, Artificial Sequence
  Description of Artificial Sequence: Synthetic oligonucleotide
  modified_base (11)..(11): a, c, u, g, unknown or other
uguguuugccnuaaauagc

SEQ ID NO: 435273 - RNA, 19 nt, Artificial Sequence
  Description of Artificial Sequence: Synthetic oligonucleotide
aaauagcucuggcuaauag

SEQ ID NO: 435274 - RNA, 19 nt, Artificial Sequence
  Description of Artificial Sequence: Synthetic oligonucleotide
uguugaaagggcccagugg

SEQ ID NO: 435275 - RNA, 19 nt, Artificial Sequence
  Description of Artificial Sequence: Synthetic oligonucleotide
aucaagugcaacuauaaau

SEQ ID NO: 435276 - RNA, 19 nt, Artificial Sequence
  Description of Artificial Sequence: Synthetic oligonucleotide
aagucaaaguaucauaauu

SEQ ID NO: 435277 - RNA, 19 nt, Artificial Sequence
  Description of Artificial Sequence: Synthetic oligonucleotide
uucauuguguugaaagggc

SEQ ID NO: 435278 - RNA, 19 nt, Artificial Sequence
  Description of Artificial Sequence: Synthetic oligonucleotide
acuguaaucaagugcaacu

SEQ ID NO: 435279 - RNA, 19 nt, Artificial Sequence
  Description of Artificial Sequence: Synthetic oligonucleotide
uacgguaaacauaaaacuc

SEQ ID NO: 435280 - RNA, 19 nt, Artificial Sequence
  Description of Artificial Sequence: Synthetic oligonucleotide
agauauucagguaagagga

SEQ ID NO: 435281 - RNA, 19 nt, Artificial Sequence
  Description of Artificial Sequence: Synthetic oligonucleotide
uuuacccuaaaauuucaca

SEQ ID NO: 435282 - RNA, 19 nt, Artificial Sequence
  Description of Artificial Sequence: Synthetic oligonucleotide
ucaaguaauaaaacauccu

SEQ ID NO: 435283 - RNA, 19 nt, Artificial Sequence
  Description of Artificial Sequence: Synthetic oligonucleotide
ucuacaguaucaccaaugu

SEQ ID NO: 435284 - RNA, 19 nt, Artificial Sequence
  Description of Artificial Sequence: Synthetic oligonucleotide
auucauuguguugaaaggg

SEQ ID NO: 435285 - RNA, 19 nt, Artificial Sequence
  Description of Artificial Sequence: Synthetic oligonucleotide
cucuaagcuauucacauug

SEQ ID NO: 435286 - RNA, 19 nt, Artificial Sequence
  Description of Artificial Sequence: Synthetic oligonucleotide
ugaucucaaaacaauguuc

SEQ ID NO: 435287 - RNA, 19 nt, Artificial Sequence
  Description of Artificial Sequence: Synthetic oligonucleotide
uuuaagggauuaaacacau

SEQ ID NO: 435288 - RNA, 19 nt, Artificial Sequence
  Description of Artificial Sequence: Synthetic oligonucleotide
auaucuguaguguuucaag

SEQ ID NO: 435289 - RNA, 19 nt, Artificial Sequence
  Description of Artificial Sequence: Synthetic oligonucleotide
uuccaauucaauuuagaaa

SEQ ID NO: 435290 - RNA, 19 nt, Artificial Sequence
  Description of Artificial Sequence: Synthetic oligonucleotide
uuacccuaaaauuucacau

SEQ ID NO: 435291 - RNA, 19 nt, Artificial Sequence
  Description of Artificial Sequence: Synthetic oligonucleotide
uggaacaacucacagggac

SEQ ID NO: 435292 - RNA, 19 nt, Artificial Sequence
  Description of Artificial Sequence: Synthetic oligonucleotide
aguggaaaggggaauaaac

SEQ ID NO: 435293 - RNA, 19 nt, Artificial Sequence
  Description of Artificial Sequence: Synthetic oligonucleotide
ucgauguuuacccuaaaau

SEQ ID NO: 435294 - RNA, 19 nt, Artificial Sequence
  Description of Artificial Sequence: Synthetic oligonucleotide
ucauacgguaaacauaaaa

SEQ ID NO: 435295 - RNA, 19 nt, Artificial Sequence
  Description of Artificial Sequence: Synthetic oligonucleotide
uuaauauauuugccaaucu

SEQ ID NO: 435296 - RNA, 19 nt, Artificial Sequence
  Description of Artificial Sequence: Synthetic oligonucleotide
uuaccauaugaccagugga

SEQ ID NO: 435297 - RNA, 19 nt, Artificial Sequence
  Description of Artificial Sequence: Synthetic oligonucleotide
aacauccuauuucuacuuc

SEQ ID NO: 435298 - RNA, 19 nt, Artificial Sequence
  Description of Artificial Sequence: Synthetic oligonucleotide
uaauauauuugccaaucua

SEQ ID NO: 435299 - RNA, 19 nt, Artificial Sequence
  Description of Artificial Sequence: Synthetic oligonucleotide
uuuauacagaaacugccau

SEQ ID NO: 435300 - RNA, 19 nt, Artificial Sequence
  Description of Artificial Sequence: Synthetic oligonucleotide
aaccauauaaggaaauuga

SEQ ID NO: 435301 - RNA, 19 nt, Artificial Sequence
  Description of Artificial Sequence: Synthetic oligonucleotide
uuuaacggugcacuuucag

SEQ ID NO: 435302 - RNA, 19 nt, Artificial Sequence
  Description of Artificial Sequence: Synthetic oligonucleotide
uaacggugcacuuucagga

SEQ ID NO: 435303 - RNA, 19 nt, Artificial Sequence
  Description of Artificial Sequence: Synthetic oligonucleotide
uuacuugccacucauguuu

SEQ ID NO: 435304 - RNA, 19 nt, Artificial Sequence
  Description of Artificial Sequence: Synthetic oligonucleotide
aacuguaaucaagugcaac

SEQ ID NO: 435305 - RNA, 19 nt, Artificial Sequence
  Description of Artificial Sequence: Synthetic oligonucleotide
agagcuagcauaaaucauc

SEQ ID NO: 435306 - RNA, 19 nt, Artificial Sequence
  Description of Artificial Sequence: Synthetic oligonucleotide
aagaauaaaauaacucggu

SEQ ID NO: 435307 - RNA, 19 nt, Artificial Sequence
  Description of Artificial Sequence: Synthetic oligonucleotide
uuuauugcaacguggccac

SEQ ID NO: 435308 - RNA, 19 nt, Artificial Sequence
  Description of Artificial Sequence: Synthetic oligonucleotide
gcuacuauuuuauaguggc

SEQ ID NO: 435309 - RNA, 19 nt, Artificial Sequence
  Description of Artificial Sequence: Synthetic oligonucleotide
gaugccauaguguccgcgg

SEQ ID NO: 435310 - RNA, 19 nt, Artificial Sequence
  Description of Artificial Sequence: Synthetic oligonucleotide
acuagauaaaucaaugaca

SEQ ID NO: 435311 - RNA, 19 nt, Artificial Sequence
  Description of Artificial Sequence: Synthetic oligonucleotide
cauaucggcaaucauucag

SEQ ID NO: 435312 - RNA, 19 nt, Artificial Sequence
  Description of Artificial Sequence: Synthetic oligonucleotide
guaaccguauucaacagcc

SEQ ID NO: 435313 - RNA, 19 nt, Artificial Sequence
  Description of Artificial Sequence: Synthetic oligonucleotide
aucaguuaaacauauuguu

SEQ ID NO: 435314 - RNA, 19 nt, Artificial Sequence
  Description of Artificial Sequence: Synthetic oligonucleotide
ugguacucaaaauaucugu

SEQ ID NO: 435315 - RNA, 19 nt, Artificial Sequence
  Description of Artificial Sequence: Synthetic oligonucleotide
aacaaaaggucauuccuuu

SEQ ID NO: 435316 - RNA, 19 nt, Artificial Sequence
  Description of Artificial Sequence: Synthetic oligonucleotide
gcuagcauaaaucaucuug

SEQ ID NO: 435317 - RNA, 19 nt, Artificial Sequence
  Description of Artificial Sequence: Synthetic oligonucleotide
ucaauuagcuuacccuuug

SEQ ID NO: 435318 - RNA, 19 nt, Artificial Sequence
  Description of Artificial Sequence: Synthetic oligonucleotide
cauguaaccaguuguuuug

SEQ ID NO: 435319 - RNA, 19 nt, Artificial Sequence
  Description of Artificial Sequence: Synthetic oligonucleotide
aacguucuguaauaugcca

SEQ ID NO: 435320 - RNA, 19 nt, Artificial Sequence
  Description of Artificial Sequence: Synthetic oligonucleotide
uauuuuauaguggcuuucc

SEQ ID NO: 435321 - RNA, 19 nt, Artificial Sequence
  Description of Artificial Sequence: Synthetic oligonucleotide
ucuuagacucuuuuguuuc

SEQ ID NO: 435322 - RNA, 19 nt, Artificial Sequence
  Description of Artificial Sequence: Synthetic oligonucleotide
uguuuaagacugcuauacc

SEQ ID NO: 435323 - RNA, 19 nt, Artificial Sequence
  Description of Artificial Sequence: Synthetic oligonucleotide
uuuguaguacucuaagcua

SEQ ID NO: 435324 - RNA, 19 nt, Artificial Sequence
  Description of Artificial Sequence: Synthetic oligonucleotide
agguaagaggaaugaacac

SEQ ID NO: 435325 - RNA, 19 nt, Artificial Sequence
  Description of Artificial Sequence: Synthetic oligonucleotide
ugacaagauacaaaagcau

SEQ ID NO: 435326 - RNA, 19 nt, Artificial Sequence
  Description of Artificial Sequence: Synthetic oligonucleotide
guaaugaaacuuaauuggc

SEQ ID NO: 435327 - RNA, 19 nt, Artificial Sequence
  Description of Artificial Sequence: Synthetic oligonucleotide
ucacaacuuauuuucauua

SEQ ID NO: 435328 - RNA, 19 nt, Artificial Sequence
  Description of Artificial Sequence: Synthetic oligonucleotide
aaguaaccguauucaacag

SEQ ID NO: 435329 - RNA, 19 nt, Artificial Sequence
  Description of Artificial Sequence: Synthetic oligonucleotide
ugaacacugagguacuaga

SEQ ID NO: 435330 - RNA, 19 nt, Artificial Sequence
  Description of Artificial Sequence: Synthetic oligonucleotide
ucgcuuaaacagaagagaa

SEQ ID NO: 435331 - RNA, 19 nt, Artificial Sequence
  Description of Artificial Sequence: Synthetic oligonucleotide
ugaccaguggauaauacuu

SEQ ID NO: 435332 - RNA, 19 nt, Artificial Sequence
  Description of Artificial Sequence: Synthetic oligonucleotide
uaacgcauaguguuaaauc

SEQ ID NO: 435333 - RNA, 19 nt, Artificial Sequence
  Description of Artificial Sequence: Synthetic oligonucleotide
ccaguguagagauuaaucg

SEQ ID NO: 435334 - RNA, 19 nt, Artificial Sequence
  Description of Artificial Sequence: Synthetic oligonucleotide
uuguaguacucuaagcuau

SEQ ID NO: 435335 - RNA, 19 nt, Artificial Sequence
  Description of Artificial Sequence: Synthetic oligonucleotide
ucauguuuaaugccuguaa

SEQ ID NO: 435336 - RNA, 19 nt, Artificial Sequence
  Description of Artificial Sequence: Synthetic oligonucleotide
caucgcuuaaacagaagag

SEQ ID NO: 435337 - RNA, 19 nt, Artificial Sequence
  Description of Artificial Sequence: Synthetic oligonucleotide
uccuacauuuauucaguag

SEQ ID NO: 435338 - RNA, 19 nt, Artificial Sequence
  Description of Artificial Sequence: Synthetic oligonucleotide
gacgagaagaaggagggcc

SEQ ID NO: 435339 - RNA, 19 nt, Artificial Sequence
  Description of Artificial Sequence: Synthetic oligonucleotide
ugucgagcgguccuuaaug

SEQ ID NO: 435340 - RNA, 19 nt, Artificial Sequence
  Description of Artificial Sequence: Synthetic oligonucleotide
uuaaugucguccaauccau

SEQ ID NO: 435341 - RNA, 19 nt, Artificial Sequence
  Description of Artificial Sequence: Synthetic oligonucleotide
caauccauuuacuugccac

SEQ ID NO: 435342 - RNA, 19 nt, Artificial Sequence
  Description of Artificial Sequence: Synthetic oligonucleotide
guugaaagggcccagugga

SEQ ID NO: 435343 - RNA, 19 nt, Artificial Sequence
  Description of Artificial Sequence: Synthetic oligonucleotide
gggaauuugaucucaaaac

SEQ ID NO: 435344 - RNA, 19 nt, Artificial Sequence
  Description of Artificial Sequence: Synthetic oligonucleotide
uguuuacccuaaaauuuca

SEQ ID NO: 435345 - RNA, 19 nt, Artificial Sequence
  Description of Artificial Sequence: Synthetic oligonucleotide
aaacuacaacacugccgcc

SEQ ID NO: 435346 - RNA, 19 nt, Artificial Sequence
  Description of Artificial Sequence: Synthetic oligonucleotide
gccccuuaagaucagaugg

SEQ ID NO: 435347 - RNA, 19 nt, Artificial Sequence
  Description of Artificial Sequence: Synthetic oligonucleotide
uaaaaguaaccguauucaa

SEQ ID NO: 435348 - RNA, 19 nt, Artificial Sequence
  Description of Artificial Sequence: Synthetic oligonucleotide
aaggcucuuuuauacagaa

SEQ ID NO: 435349 - RNA, 19 nt, Artificial Sequence
  Description of Artificial Sequence: Synthetic oligonucleotide
aacccaauacgauuccagu

SEQ ID NO: 435350 - RNA, 19 nt, Artificial Sequence
  Description of Artificial Sequence: Synthetic oligonucleotide
ugcacaaaugcuccagcgc

SEQ ID NO: 435351 - RNA, 19 nt, Artificial Sequence
  Description of Artificial Sequence: Synthetic oligonucleotide
uguuuaaugccuguaaauu

SEQ ID NO: 435352 - RNA, 19 nt, Artificial Sequence
  Description of Artificial Sequence: Synthetic oligonucleotide
uaguguuaaaucugugcug

SEQ ID NO: 435353 - RNA, 19 nt, Artificial Sequence
  Description of Artificial Sequence: Synthetic oligonucleotide
uccuucaagggaaacuaca

SEQ ID NO: 435354 - RNA, 19 nt, Artificial Sequence
  Description of Artificial Sequence: Synthetic oligonucleotide
aaagugcgcacacggagga

SEQ ID NO: 435355 - RNA, 19 nt, Artificial Sequence
  Description of Artificial Sequence: Synthetic oligonucleotide
ugcuuuuaacgcauagugu

SEQ ID NO: 435356 - RNA, 19 nt, Artificial Sequence
  Description of Artificial Sequence: Synthetic oligonucleotide
uguuucguauguggcaucg

SEQ ID NO: 435357 - RNA, 19 nt, Artificial Sequence
  Description of Artificial Sequence: Synthetic oligonucleotide
ugcaaggaaggcauguaac

SEQ ID NO: 435358 - RNA, 19 nt, Artificial Sequence
  Description of Artificial Sequence: Synthetic oligonucleotide
uguagaagauuuucuuacu

SEQ ID NO: 435359 - RNA, 19 nt, Artificial Sequence
  Description of Artificial Sequence: Synthetic oligonucleotide
agugcaacuauaaauaaua

SEQ ID NO: 435360 - RNA, 19 nt, Artificial Sequence
  Description of Artificial Sequence: Synthetic oligonucleotide
ggaauuugaucucaaaaca

SEQ ID NO: 435361 - RNA, 19 nt, Artificial Sequence
  Description of Artificial Sequence: Synthetic oligonucleotide
aaacccaauacgauuccag

SEQ ID NO: 435362 - RNA, 19 nt, Artificial Sequence
  Description of Artificial Sequence: Synthetic oligonucleotide
uguaaucaagugcaacuau

SEQ ID NO: 435363 - RNA, 19 nt, Artificial Sequence
  Description of Artificial Sequence: Synthetic oligonucleotide
auagcucuggcuaauagca

SEQ ID NO: 435364 - RNA, 19 nt, Artificial Sequence
  Description of Artificial Sequence: Synthetic oligonucleotide
agggaauuugaucucaaaa

SEQ ID NO: 435365 - RNA, 19 nt, Artificial Sequence
  Description of Artificial Sequence: Synthetic oligonucleotide
uuaaucgauguuuacccua

SEQ ID NO: 435366 - RNA, 19 nt, Artificial Sequence
  Description of Artificial Sequence: Synthetic oligonucleotide
caaagugcgcacacggagg

SEQ ID NO: 435367 - RNA, 19 nt, Artificial Sequence
  Description of Artificial Sequence: Synthetic oligonucleotide
uucaagacucauacgguaa

SEQ ID NO: 435368 - RNA, 19 nt, Artificial Sequence
  Description of Artificial Sequence: Synthetic oligonucleotide
gaaauugagaaaucagcua

SEQ ID NO: 435369 - RNA, 19 nt, Artificial Sequence
  Description of Artificial Sequence: Synthetic oligonucleotide
uggcuacuauuuuauagug

SEQ ID NO: 435370 - RNA, 19 nt, Artificial Sequence
  Description of Artificial Sequence: Synthetic oligonucleotide
acucauacgguaaacauaa

SEQ ID NO: 435371 - RNA, 19 nt, Artificial Sequence
  Description of Artificial Sequence: Synthetic oligonucleotide
ugucguccaauccauuuac

SEQ ID NO: 435372 - RNA, 19 nt, Artificial Sequence
  Description of Artificial Sequence: Synthetic oligonucleotide
ucaugacugguacucaaaa

SEQ ID NO: 435373 - RNA, 19 nt, Artificial Sequence
  Description of Artificial Sequence: Synthetic oligonucleotide
uuucuuacuuucauaucau

SEQ ID NO: 435374 - RNA, 19 nt, Artificial Sequence
  Description of Artificial Sequence: Synthetic oligonucleotide
uuuaacagcuauguuuuaa

SEQ ID NO: 435375 - RNA, 19 nt, Artificial Sequence
  Description of Artificial Sequence: Synthetic oligonucleotide
uaaccaguuguuuuggcua

SEQ ID NO: 435376 - RNA, 19 nt, Artificial Sequence
  Description of Artificial Sequence: Synthetic oligonucleotide
cucuacaguaucaccaaug

SEQ ID NO: 435377 - RNA, 19 nt, Artificial Sequence
  Description of Artificial Sequence: Synthetic oligonucleotide
uuucaagacucauacggua

SEQ ID NO: 435378 - RNA, 19 nt, Artificial Sequence
  Description of Artificial Sequence: Synthetic oligonucleotide
gaacaacucacagggacag

SEQ ID NO: 435379 - RNA, 19 nt, Artificial Sequence
  Description of Artificial Sequence: Synthetic oligonucleotide
uacuauuuuauaguggcuu

SEQ ID NO: 435380 - RNA, 19 nt, Artificial Sequence
  Description of Artificial Sequence: Synthetic oligonucleotide
aagacucauacgguaaaca

SEQ ID NO: 435381 - RNA, 19 nt, Artificial Sequence
  Description of Artificial Sequence: Synthetic oligonucleotide
uucguauguggcaucguac

SEQ ID NO: 435382 - RNA, 19 nt, Artificial Sequence
  Description of Artificial Sequence: Synthetic oligonucleotide
cuaauagcaaagugcgcac

SEQ ID NO: 435383 - RNA, 19 nt, Artificial Sequence
  Description of Artificial Sequence: Synthetic oligonucleotide
auguuuaaugccuguaaau

SEQ ID NO: 435384 - RNA, 19 nt, Artificial Sequence
  Description of Artificial Sequence: Synthetic oligonucleotide
auuaaucgauguuuacccu

SEQ ID NO: 435385 - RNA, 19 nt, Artificial Sequence
  Description of Artificial Sequence: Synthetic oligonucleotide
ugcaacguggccacuuuug

SEQ ID NO: 435386 - RNA, 19 nt, Artificial Sequence
  Description of Artificial Sequence: Synthetic oligonucleotide
  modified_base (5)..(5): a, c, u, g, unknown or other
ugccnuaaauagcucuggc

SEQ ID NO: 435387 - RNA, 19 nt, Artificial Sequence
  Description of Artificial Sequence: Synthetic oligonucleotide
uaaggaaucauagcugaaa

SEQ ID NO: 435388 - RNA, 19 nt, Artificial Sequence
  Description of Artificial Sequence: Synthetic oligonucleotide
ucuauaaggagagcacucu

SEQ ID NO: 435389 - RNA, 19 nt, Artificial Sequence
  Description of Artificial Sequence: Synthetic oligonucleotide
aaagaaccauauaaggaaa

SEQ ID NO: 435390 - RNA, 19 nt, Artificial Sequence
  Description of Artificial Sequence: Synthetic oligonucleotide
aucgcuuaaacagaagaga

SEQ ID NO: 435391 - RNA, 19 nt, Artificial Sequence
  Description of Artificial Sequence: Synthetic oligonucleotide
uaugaccaguggauaauac

SEQ ID NO: 435392 - RNA, 19 nt, Artificial Sequence
  Description of Artificial Sequence: Synthetic oligonucleotide
acauccuauuucuacuucu

SEQ ID NO: 435393 - RNA, 19 nt, Artificial Sequence
  Description of Artificial Sequence: Synthetic oligonucleotide
uuuguuucguauguggcau

SEQ ID NO: 435394 - RNA, 19 nt, Artificial Sequence
  Description of Artificial Sequence: Synthetic oligonucleotide
caacguucuguaauaugcc

SEQ ID NO: 435395 - RNA, 19 nt, Artificial Sequence
  Description of Artificial Sequence: Synthetic oligonucleotide
aguggacugaacuggagaa

SEQ ID NO: 435396 - RNA, 19 nt, Artificial Sequence
  Description of Artificial Sequence: Synthetic oligonucleotide
aaccguauucaacagccua

SEQ ID NO: 435397 - RNA, 19 nt, Artificial Sequence
  Description of Artificial Sequence: Synthetic oligonucleotide
accauauaaggaaauugag

SEQ ID NO: 435398 - RNA, 19 nt, Artificial Sequence
  Description of Artificial Sequence: Synthetic oligonucleotide
auacgauuccaguggacug

SEQ ID NO: 435399 - RNA, 19 nt, Artificial Sequence
  Description of Artificial Sequence: Synthetic oligonucleotide
uuuuaacgcauaguguuaa

SEQ ID NO: 435400 - RNA, 19 nt, Artificial Sequence
  Description of Artificial Sequence: Synthetic oligonucleotide
agacucauacgguaaacau

SEQ ID NO: 435401 - RNA, 19 nt, Artificial Sequence
  Description of Artificial Sequence: Synthetic oligonucleotide
uggguucuacauaaaagua

SEQ ID NO: 435402 - RNA, 19 nt, Artificial Sequence
  Description of Artificial Sequence: Synthetic oligonucleotide
acagccuaauggcaaucac

SEQ ID NO: 435403 - RNA, 19 nt, Artificial Sequence
  Description of Artificial Sequence: Synthetic oligonucleotide
acccaauacgauuccagug

SEQ ID NO: 435404 - RNA, 19 nt, Artificial Sequence
  Description of Artificial Sequence: Synthetic oligonucleotide
agcugaaaugaacauuccu

SEQ ID NO: 435405 - RNA, 19 nt, Artificial Sequence
  Description of Artificial Sequence: Synthetic oligonucleotide
cauuauuaaaccuuuggau

SEQ ID NO: 435406 - RNA, 19 nt, Artificial Sequence
  Description of Artificial Sequence: Synthetic oligonucleotide
ggaaacuacaacacugccg

SEQ ID NO: 435407 - RNA, 19 nt, Artificial Sequence
  Description of Artificial Sequence: Synthetic oligonucleotide
  modified_base (6)..(6): a, c, u, g, unknown or other
uugccnuaaauagcucugg

SEQ ID NO: 435408 - RNA, 19 nt, Artificial Sequence
  Description of Artificial Sequence: Synthetic oligonucleotide
aaggcaacguucuguaaua

SEQ ID NO: 435409 - RNA, 19 nt, Artificial Sequence
  Description of Artificial Sequence: Synthetic oligonucleotide
gaggguagggaauuugauc

SEQ ID NO: 435410 - RNA, 19 nt, Artificial Sequence
  Description of Artificial Sequence: Synthetic oligonucleotide
aucucaaauaccaguguag

SEQ ID NO: 435411 - RNA, 19 nt, Artificial Sequence
  Description of Artificial Sequence: Synthetic oligonucleotide
uuauaguggcuuuccuuca

SEQ ID NO: 435412 - RNA, 19 nt, Artificial Sequence
  Description of Artificial Sequence: Synthetic oligonucleotide
gagauuaaucgauguuuac

SEQ ID NO: 435413 - RNA, 19 nt, Artificial Sequence
  Description of Artificial Sequence: Synthetic oligonucleotide
agccuaauggcaaucacug

SEQ ID NO: 435414 - RNA, 19 nt, Artificial Sequence
  Description of Artificial Sequence: Synthetic oligonucleotide
caucuuuagagcuagcaua

SEQ ID NO: 435415 - RNA, 19 nt, Artificial Sequence
  Description of Artificial Sequence: Synthetic oligonucleotide
augacuaugacaagauaca

SEQ ID NO: 435416 - RNA, 19 nt, Artificial Sequence
  Description of Artificial Sequence: Synthetic oligonucleotide
cuuaagaucagauggcacu

SEQ ID NO: 435417 - RNA, 19 nt, Artificial Sequence
  Description of Artificial Sequence: Synthetic oligonucleotide
ucucucccagugucgagcg

SEQ ID NO: 435418 - RNA, 19 nt, Artificial Sequence
  Description of Artificial Sequence: Synthetic oligonucleotide
cuccagaugccauaguguc

SEQ ID NO: 435419 - RNA, 19 nt, Artificial Sequence
  Description of Artificial Sequence: Synthetic oligonucleotide
ucauagcugaaaugaacau

SEQ ID NO: 435420 - RNA, 19 nt, Artificial Sequence
  Description of Artificial Sequence: Synthetic oligonucleotide
acuauuuuauaguggcuuu

SEQ ID NO: 435421 - RNA, 19 nt, Artificial Sequence
  Description of Artificial Sequence: Synthetic oligonucleotide
ucauuaugaucaaguaaua

SEQ ID NO: 435422 - RNA, 19 nt, Artificial Sequence
  Description of Artificial Sequence: Synthetic oligonucleotide
gauguuuacccuaaaauuu

SEQ ID NO: 435423 - RNA, 19 nt, Artificial Sequence
  Description of Artificial Sequence: Synthetic oligonucleotide
cccaauacgauuccagugg

SEQ ID NO: 435424 - RNA, 19 nt, Artificial Sequence
  Description of Artificial Sequence: Synthetic oligonucleotide
aaagccacggaaaggucug

SEQ ID NO: 435425 - RNA, 19 nt, Artificial Sequence
  Description of Artificial Sequence: Synthetic oligonucleotide
aguguagagauuaaucgau

SEQ ID NO: 435426 - RNA, 19 nt, Artificial Sequence
  Description of Artificial Sequence: Synthetic oligonucleotide
gucaaaguaucauaauuua

SEQ ID NO: 435427 - RNA, 19 nt, Artificial Sequence
  Description of Artificial Sequence: Synthetic oligonucleotide
acguucuguaauaugccac

SEQ ID NO: 435428 - RNA, 19 nt, Artificial Sequence
  Description of Artificial Sequence: Synthetic oligonucleotide
uuaacgcauaguguuaaau

SEQ ID NO: 435429 - RNA, 19 nt, Artificial Sequence
  Description of Artificial Sequence: Synthetic oligonucleotide
aaucauucagagguagcaa

SEQ ID NO: 435430 - RNA, 19 nt, Artificial Sequence
  Description of Artificial Sequence: Synthetic oligonucleotide
guaacuccagaugccauag

SEQ ID NO: 435431 - RNA, 19 nt, Artificial Sequence
  Description of Artificial Sequence: Synthetic oligonucleotide
aaccaguuguuuuggcuaa

SEQ ID NO: 435432 - RNA, 19 nt, Artificial Sequence
  Description of Artificial Sequence: Synthetic oligonucleotide
uagagcuagcauaaaucau

SEQ ID NO: 435433 - RNA, 19 nt, Artificial Sequence
  Description of Artificial Sequence: Synthetic oligonucleotide
uccauuuacuugccacuca

SEQ ID NO: 435434 - RNA, 19 nt, Artificial Sequence
  Description of Artificial Sequence: Synthetic oligonucleotide
ccuaauggcaaucacugac

SEQ ID NO: 435435 - RNA, 19 nt, Artificial Sequence
  Description of Artificial Sequence: Synthetic oligonucleotide
ggauaauacuuucaaggca

SEQ ID NO: 435436 - RNA, 19 nt, Artificial Sequence
  Description of Artificial Sequence: Synthetic oligonucleotide
uccauuuaaggcucuuuua

SEQ ID NO: 435437 - RNA, 19 nt, Artificial Sequence
  Description of Artificial Sequence: Synthetic oligonucleotide
uccaauccauuuacuugcc

SEQ ID NO: 435438 - RNA, 19 nt, Artificial Sequence
  Description of Artificial Sequence: Synthetic oligonucleotide
gcacaaaugcuccagcgcc

SEQ ID NO: 435439 - RNA, 19 nt, Artificial Sequence
  Description of Artificial Sequence: Synthetic oligonucleotide
aaaacccaauacgauucca

SEQ ID NO: 435440 - RNA, 19 nt, Artificial Sequence
  Description of Artificial Sequence: Synthetic oligonucleotide
gauacaaaagcauguguuu

SEQ ID NO: 435441 - RNA, 19 nt, Artificial Sequence
  Description of Artificial Sequence: Synthetic oligonucleotide
agaugaauuuaacuacauu

SEQ ID NO: 435442 - RNA, 19 nt, Artificial Sequence
  Description of Artificial Sequence: Synthetic oligonucleotide
uauaguggcuuuccuucaa

SEQ ID NO: 435443 - RNA, 19 nt, Artificial Sequence
  Description of Artificial Sequence: Synthetic oligonucleotide
auugagaaaucagcuauaa

SEQ ID NO: 435444 - RNA, 19 nt, Artificial Sequence
  Description of Artificial Sequence: Synthetic oligonucleotide
uuuacuugccacucauguu

SEQ ID NO: 435445 - RNA, 19 nt, Artificial Sequence
  Description of Artificial Sequence: Synthetic oligonucleotide
aguguauacucaaugggaa

SEQ ID NO: 435446 - RNA, 19 nt, Artificial Sequence
  Description of Artificial Sequence: Synthetic oligonucleotide
acuacaacacugccgccca

SEQ ID NO: 435447 - RNA, 19 nt, Artificial Sequence
  Description of Artificial Sequence: Synthetic oligonucleotide
uagcugaaaugaacauucc

SEQ ID NO: 435448 - RNA, 19 nt, Artificial Sequence
  Description of Artificial Sequence: Synthetic oligonucleotide
caguguagagauuaaucga

SEQ ID NO: 435449 - RNA, 19 nt, Artificial Sequence
  Description of Artificial Sequence: Synthetic oligonucleotide
aacagccuaauggcaauca

SEQ ID NO: 435450 - RNA, 19 nt, Artificial Sequence
  Description of Artificial Sequence: Synthetic oligonucleotide
uaguguuucaagacucaua

SEQ ID NO: 435451 - RNA, 19 nt, Artificial Sequence
  Description of Artificial Sequence: Synthetic oligonucleotide
uuuuaacggugcacuuuca

SEQ ID NO: 435452 - RNA, 19 nt, Artificial Sequence
  Description of Artificial Sequence: Synthetic oligonucleotide
agugcucacugcaaggaag

SEQ ID NO: 435453 - RNA, 19 nt, Artificial Sequence
  Description of Artificial Sequence: Synthetic oligonucleotide
gcuaauagcaaagugcgca

SEQ ID NO: 435454 - RNA, 19 nt, Artificial Sequence
  Description of Artificial Sequence: Synthetic oligonucleotide
  modified_base (2)..(2): a, c, u, g, unknown or other
cnuaaauagcucuggcuaa

SEQ ID NO: 435455 - RNA, 19 nt, Artificial Sequence
  Description of Artificial Sequence: Synthetic oligonucleotide
ugaggguagggaauuugau

SEQ ID NO: 435456 - RNA, 19 nt, Artificial Sequence
  Description of Artificial Sequence: Synthetic oligonucleotide
gcaaagugcgcacacggag

SEQ ID NO: 435457 - RNA, 19 nt, Artificial Sequence
  Description of Artificial Sequence: Synthetic oligonucleotide
aucgauguuuacccuaaaa

SEQ ID NO: 435458 - RNA, 19 nt, Artificial Sequence
  Description of Artificial Sequence: Synthetic oligonucleotide
uggacugaacuggagaaau

SEQ ID NO: 435459 - RNA, 19 nt, Artificial Sequence
  Description of Artificial Sequence: Synthetic oligonucleotide
agaucagauggcacuuggc

SEQ ID NO: 435460 - RNA, 19 nt, Artificial Sequence
  Description of Artificial Sequence: Synthetic oligonucleotide
ugacuaugacaagauacaa

SEQ ID NO: 435461 - RNA, 19 nt, Artificial Sequence
  Description of Artificial Sequence: Synthetic oligonucleotide
agcuauguuuuaauguucu

SEQ ID NO: 435462 - RNA, 19 nt, Artificial Sequence
  Description of Artificial Sequence: Synthetic oligonucleotide
agugcuuuuaacgcauagu

SEQ ID NO: 435463 - RNA, 19 nt, Artificial Sequence
  Description of Artificial Sequence: Synthetic oligonucleotide
uacgauuccaguggacuga

SEQ ID NO: 435464 - RNA, 19 nt, Artificial Sequence
  Description of Artificial Sequence: Synthetic oligonucleotide
ugcuaauguuuaagacugc

SEQ ID NO: 435465 - RNA, 19 nt, Artificial Sequence
  Description of Artificial Sequence: Synthetic oligonucleotide
auaucggcaaucauucaga

SEQ ID NO: 435466 - RNA, 19 nt, Artificial Sequence
  Description of Artificial Sequence: Synthetic oligonucleotide
uaguguccgcggcugaggc

SEQ ID NO: 435467 - RNA, 19 nt, Artificial Sequence
  Description of Artificial Sequence: Synthetic oligonucleotide
acucauucauucauugugu

SEQ ID NO: 435468 - RNA, 19 nt, Artificial Sequence
  Description of Artificial Sequence: Synthetic oligonucleotide
agccccuuaagaucagaug

SEQ ID NO: 435469 - RNA, 19 nt, Artificial Sequence
  Description of Artificial Sequence: Synthetic oligonucleotide
augaaacuuaauuggcauu

SEQ ID NO: 435470 - RNA, 19 nt, Artificial Sequence
  Description of Artificial Sequence: Synthetic oligonucleotide
guuuaguacacauuaccau

SEQ ID NO: 435471 - RNA, 19 nt, Artificial Sequence
  Description of Artificial Sequence: Synthetic oligonucleotide
caaucauucagagguagca

SEQ ID NO: 435472 - RNA, 19 nt, Artificial Sequence
  Description of Artificial Sequence: Synthetic oligonucleotide
ucguccaauccauuuacuu

SEQ ID NO: 435473 - RNA, 19 nt, Artificial Sequence
  Description of Artificial Sequence: Synthetic oligonucleotide
  modified_base (9)..(9): a, c, u, g, unknown or other
uguuugccnuaaauagcuc

SEQ ID NO: 435474 - RNA, 19 nt, Artificial Sequence
  Description of Artificial Sequence: Synthetic oligonucleotide
uaauagcaaagugcgcaca

SEQ ID NO: 435475 - RNA, 19 nt, Artificial Sequence
  Description of Artificial Sequence: Synthetic oligonucleotide
cauguuuaaugccuguaaa

SEQ ID NO: 435476 - RNA, 19 nt, Artificial Sequence
  Description of Artificial Sequence: Synthetic oligonucleotide
cacucauguuuaaugccug

SEQ ID NO: 435477 - RNA, 19 nt, Artificial Sequence
  Description of Artificial Sequence: Synthetic oligonucleotide
gcauucaauuagcuuaccc

SEQ ID NO: 435478 - RNA, 19 nt, Artificial Sequence
  Description of Artificial Sequence: Synthetic oligonucleotide
uuuaacgcauaguguuaaa

SEQ ID NO: 435479 - RNA, 19 nt, Artificial Sequence
  Description of Artificial Sequence: Synthetic oligonucleotide
  modified_base (8)..(8): a, c, u, g, unknown or other
guuugccnuaaauagcucu

SEQ ID NO: 435480 - RNA, 19 nt, Artificial Sequence
  Description of Artificial Sequence: Synthetic oligonucleotide
gacuaugacaagauacaaa

SEQ ID NO: 435481 - RNA, 19 nt, Artificial Sequence
  Description of Artificial Sequence: Synthetic oligonucleotide
uaaaccuuuggaugacauu

SEQ ID NO: 435482 - RNA, 19 nt, Artificial Sequence
  Description of Artificial Sequence: Synthetic oligonucleotide
ugcuuauuagcagccuuac

SEQ ID NO: 435483 - RNA, 19 nt, Artificial Sequence
  Description of Artificial Sequence: Synthetic oligonucleotide
augacauuucacaacuuau

SEQ ID NO: 435484 - RNA, 19 nt, Artificial Sequence
  Description of Artificial Sequence: Synthetic oligonucleotide
acucauguuuaaugccugu

SEQ ID NO: 435485 - RNA, 19 nt, Artificial Sequence
  Description of Artificial Sequence: Synthetic oligonucleotide
cagcuauguuuuaauguuc

SEQ ID NO: 435486 - RNA, 19 nt, Artificial Sequence
  Description of Artificial Sequence: Synthetic oligonucleotide
uaaccguauucaacagccu

SEQ ID NO: 435487 - RNA, 19 nt, Artificial Sequence
  Description of Artificial Sequence: Synthetic oligonucleotide
ccauauaaggaaauugaga

SEQ ID NO: 435488 - RNA, 19 nt, Artificial Sequence
  Description of Artificial Sequence: Synthetic oligonucleotide
caaauaccaguguagagau

SEQ ID NO: 435489 - RNA, 19 nt, Artificial Sequence
  Description of Artificial Sequence: Synthetic oligonucleotide
cauuaugaucaaguaauaa

SEQ ID NO: 435490 - RNA, 19 nt, Artificial Sequence
  Description of Artificial Sequence: Synthetic oligonucleotide
uagggaauuugaucucaaa

SEQ ID NO: 435491 - RNA, 19 nt, Artificial Sequence
  Description of Artificial Sequence: Synthetic oligonucleotide
cuagacauuuaacagcuau

SEQ ID NO: 435492 - RNA, 19 nt, Artificial Sequence
  Description of Artificial Sequence: Synthetic oligonucleotide
agaaccauauaaggaaauu

SEQ ID NO: 435493 - RNA, 19 nt, Artificial Sequence
  Description of Artificial Sequence: Synthetic oligonucleotide
caauacgauuccaguggac

SEQ ID NO: 435494 - RNA, 19 nt, Artificial Sequence
  Description of Artificial Sequence: Synthetic oligonucleotide
agcgccucagaacuguaau

SEQ ID NO: 435495 - RNA, 19 nt, Artificial Sequence
  Description of Artificial Sequence: Synthetic oligonucleotide
ucucccagugucgagcggu

SEQ ID NO: 435496 - RNA, 19 nt, Artificial Sequence
  Description of Artificial Sequence: Synthetic oligonucleotide
auaguguccgcggcugagg

SEQ ID NO: 435497 - RNA, 19 nt, Artificial Sequence
  Description of Artificial Sequence: Synthetic oligonucleotide
cuuuuaacgcauaguguua

SEQ ID NO: 435498 - RNA, 19 nt, Artificial Sequence
  Description of Artificial Sequence: Synthetic oligonucleotide
acgcauaguguuaaaucug

SEQ ID NO: 435499 - RNA, 19 nt, Artificial Sequence
  Description of Artificial Sequence: Synthetic oligonucleotide
guuuacccuaaaauuucac

SEQ ID NO: 435500 - RNA, 19 nt, Artificial Sequence
  Description of Artificial Sequence: Synthetic oligonucleotide
caacguggccacuuuugug

SEQ ID NO: 435501 - RNA, 19 nt, Artificial Sequence
  Description of Artificial Sequence: Synthetic oligonucleotide
aaucgauguuuacccuaaa

SEQ ID NO: 435502 - RNA, 19 nt, Artificial Sequence
  Description of Artificial Sequence: Synthetic oligonucleotide
gggaaacuacaacacugcc

SEQ ID NO: 435503 - RNA, 19 nt, Artificial Sequence
  Description of Artificial Sequence: Synthetic oligonucleotide
guaaucaagugcaacuaua

SEQ ID NO: 435504 - RNA, 19 nt, Artificial Sequence
  Description of Artificial Sequence: Synthetic oligonucleotide
guacucuaagcuauucaca

SEQ ID NO: 435505 - RNA, 19 nt, Artificial Sequence
  Description of Artificial Sequence: Synthetic oligonucleotide
gacucauacgguaaacaua

SEQ ID NO: 435506 - RNA, 19 nt, Artificial Sequence
  Description of Artificial Sequence: Synthetic oligonucleotide
  modified_base (3)..(3): a, c, u, g, unknown or other
ccnuaaauagcucuggcua

SEQ ID NO: 435507 - RNA, 19 nt, Artificial Sequence
  Description of Artificial Sequence: Synthetic oligonucleotide
augucguccaauccauuua

SEQ ID NO: 435508 - RNA, 19 nt, Artificial Sequence
  Description of Artificial Sequence: Synthetic oligonucleotide
cgagcgguccuuaaugucg

SEQ ID NO: 435509 - RNA, 19 nt, Artificial Sequence
  Description of Artificial Sequence: Synthetic oligonucleotide
gcuuuuaacgcauaguguu

SEQ ID NO: 435510 - RNA, 19 nt, Artificial Sequence
  Description of Artificial Sequence: Synthetic oligonucleotide
acuccagaugccauagugu

SEQ ID NO: 435511 - RNA, 19 nt, Artificial Sequence
  Description of Artificial Sequence: Synthetic oligonucleotide
uuaagggauuaaacacauu

SEQ ID NO: 435512 - RNA, 19 nt, Artificial Sequence
  Description of Artificial Sequence: Synthetic oligonucleotide
guguauacucaaugggaaa

SEQ ID NO: 435513 - RNA, 19 nt, Artificial Sequence
  Description of Artificial Sequence: Synthetic oligonucleotide
gcugaaaugaacauuccua

SEQ ID NO: 435514 - RNA, 19 nt, Artificial Sequence
  Description of Artificial Sequence: Synthetic oligonucleotide
cacuuuugugaggguaggg

SEQ ID NO: 435515 - RNA, 19 nt, Artificial Sequence
  Description of Artificial Sequence: Synthetic oligonucleotide
uagggguccucuacaguau

SEQ ID NO: 435516 - RNA, 19 nt, Artificial Sequence
  Description of Artificial Sequence: Synthetic oligonucleotide
ucgagcgguccuuaauguc

SEQ ID NO: 435517 - RNA, 19 nt, Artificial Sequence
  Description of Artificial Sequence: Synthetic oligonucleotide
gauauucagguaagaggaa

SEQ ID NO: 435518 - RNA, 19 nt, Artificial Sequence
  Description of Artificial Sequence: Synthetic oligonucleotide
uacaacacugccgcccagu

SEQ ID NO: 435519 - RNA, 19 nt, Artificial Sequence
  Description of Artificial Sequence: Synthetic oligonucleotide
gguaagaggaaugaacacu

SEQ ID NO: 435520 - RNA, 19 nt, Artificial Sequence
  Description of Artificial Sequence: Synthetic oligonucleotide
aagccacggaaaggucugg

SEQ ID NO: 435521 - RNA, 19 nt, Artificial Sequence
  Description of Artificial Sequence: Synthetic oligonucleotide
guaguacucuaagcuauuc

SEQ ID NO: 435522 - RNA, 19 nt, Artificial Sequence
  Description of Artificial Sequence: Synthetic oligonucleotide
cauaguguccgcggcugag

SEQ ID NO: 435523 - RNA, 19 nt, Artificial Sequence
  Description of Artificial Sequence: Synthetic oligonucleotide
uaacuccagaugccauagu

SEQ ID NO: 435524 - RNA, 19 nt, Artificial Sequence
  Description of Artificial Sequence: Synthetic oligonucleotide
ccuuaagaucagauggcac

SEQ ID NO: 435525 - RNA, 19 nt, Artificial Sequence
  Description of Artificial Sequence: Synthetic oligonucleotide
agacugcuauaccaauuuu

SEQ ID NO: 435526 - RNA, 19 nt, Artificial Sequence
  Description of Artificial Sequence: Synthetic oligonucleotide
auaugaccaguggauaaua

SEQ ID NO: 435527 - RNA, 19 nt, Artificial Sequence
  Description of Artificial Sequence: Synthetic oligonucleotide
uuguuucguauguggcauc

SEQ ID NO: 435528 - RNA, 19 nt, Artificial Sequence
  Description of Artificial Sequence: Synthetic oligonucleotide
uccucuuguguagaagauu

SEQ ID NO: 435529 - RNA, 19 nt, Artificial Sequence
  Description of Artificial Sequence: Synthetic oligonucleotide
caucaugacugguacucaa

SEQ ID NO: 435530 - RNA, 19 nt, Artificial Sequence
  Description of Artificial Sequence: Synthetic oligonucleotide
ggguucuacauaaaaguaa

SEQ ID NO: 435531 - RNA, 19 nt, Artificial Sequence
  Description of Artificial Sequence: Synthetic oligonucleotide
uaaugucguccaauccauu

SEQ ID NO: 435532 - RNA, 19 nt, Artificial Sequence
  Description of Artificial Sequence: Synthetic oligonucleotide
acagguaaugaaacuuaau

SEQ ID NO: 435533 - RNA, 19 nt, Artificial Sequence
  Description of Artificial Sequence: Synthetic oligonucleotide
agcccagaauauaaauacu

SEQ ID NO: 435534 - RNA, 19 nt, Artificial Sequence
  Description of Artificial Sequence: Synthetic oligonucleotide
gugaggguagggaauuuga

SEQ ID NO: 435535 - RNA, 19 nt, Artificial Sequence
  Description of Artificial Sequence: Synthetic oligonucleotide
gccacuuuugugaggguag

SEQ ID NO: 435536 - RNA, 19 nt, Artificial Sequence
  Description of Artificial Sequence: Synthetic oligonucleotide
ugcucacugcaaggaaggc

SEQ ID NO: 435537 - RNA, 19 nt, Artificial Sequence
  Description of Artificial Sequence: Synthetic oligonucleotide
cuguaaucaagugcaacua

SEQ ID NO: 435538 - RNA, 19 nt, Artificial Sequence
  Description of Artificial Sequence: Synthetic oligonucleotide
gaggugcacaaaugcucca

SEQ ID NO: 435539 - RNA, 19 nt, Artificial Sequence
  Description of Artificial Sequence: Synthetic oligonucleotide
aagaucaguuaaacauauu

SEQ ID NO: 435540 - RNA, 19 nt, Artificial Sequence
  Description of Artificial Sequence: Synthetic oligonucleotide
aagugcgcacacggaggag

SEQ ID NO: 435541 - RNA, 19 nt, Artificial Sequence
  Description of Artificial Sequence: Synthetic oligonucleotide
gguagggaauuugaucuca

SEQ ID NO: 435542 - RNA, 19 nt, Artificial Sequence
  Description of Artificial Sequence: Synthetic oligonucleotide
  modified_base (4)..(4): a, c, u, g, unknown or other
gccnuaaauagcucuggcu

SEQ ID NO: 435543 - RNA, 19 nt, Artificial Sequence
  Description of Artificial Sequence: Synthetic oligonucleotide
cucgguggcacugggacga

SEQ ID NO: 435544 - RNA, 19 nt, Artificial Sequence
  Description of Artificial Sequence: Synthetic oligonucleotide
cugggacgagaagaaggag

SEQ ID NO: 435545 - RNA, 19 nt, Artificial Sequence
  Description of Artificial Sequence: Synthetic oligonucleotide
ggaagccuagacauuuaac

SEQ ID NO: 435546 - RNA, 19 nt, Artificial Sequence
  Description of Artificial Sequence: Synthetic oligonucleotide
cuacuauuuuauaguggcu

SEQ ID NO: 435547 - RNA, 19 nt, Artificial Sequence
  Description of Artificial Sequence: Synthetic oligonucleotide
uugcaacguggccacuuuu

SEQ ID NO: 435548 - RNA, 19 nt, Artificial Sequence
  Description of Artificial Sequence: Synthetic oligonucleotide
aucaugacugguacucaaa

SEQ ID NO: 435549 - RNA, 19 nt, Artificial Sequence
  Description of Artificial Sequence: Synthetic oligonucleotide
cagccuaauggcaaucacu

SEQ ID NO: 435550 - RNA, 19 nt, Artificial Sequence
  Description of Artificial Sequence: Synthetic oligonucleotide
gcaaucauucagagguagc

SEQ ID NO: 435551 - RNA, 19 nt, Artificial Sequence
  Description of Artificial Sequence: Synthetic oligonucleotide
aguguccgcggcugaggcu

SEQ ID NO: 435552 - RNA, 19 nt, Artificial Sequence
  Description of Artificial Sequence: Synthetic oligonucleotide
cacaacuuauuuucauuau

SEQ ID NO: 435553 - RNA, 19 nt, Artificial Sequence
  Description of Artificial Sequence: Synthetic oligonucleotide
acggaaaggucuggaacaa

SEQ ID NO: 435554 - RNA, 19 nt, Artificial Sequence
  Description of Artificial Sequence: Synthetic oligonucleotide
cgcuuaaacagaagagaac

SEQ ID NO: 435555 - RNA, 19 nt, Artificial Sequence
  Description of Artificial Sequence: Synthetic oligonucleotide
agugucgagcgguccuuaa

SEQ ID NO: 435556 - RNA, 19 nt, Artificial Sequence
  Description of Artificial Sequence: Synthetic oligonucleotide
ugccgcccaguuucucucc

SEQ ID NO: 435557 - RNA, 19 nt, Artificial Sequence
  Description of Artificial Sequence: Synthetic oligonucleotide
caaaucccauugcuaaugu

SEQ ID NO: 435558 - RNA, 19 nt, Artificial Sequence
  Description of Artificial Sequence: Synthetic oligonucleotide
agcuagcauaaaucaucuu

SEQ ID NO: 435559 - RNA, 19 nt, Artificial Sequence
  Description of Artificial Sequence: Synthetic oligonucleotide
cuacaacacugccgcccag

SEQ ID NO: 435560 - RNA, 19 nt, Artificial Sequence
  Description of Artificial Sequence: Synthetic oligonucleotide
gucgagcgguccuuaaugu

SEQ ID NO: 435561 - RNA, 19 nt, Artificial Sequence
  Description of Artificial Sequence: Synthetic oligonucleotide
cucauguuuaaugccugua

SEQ ID NO: 435562 - RNA, 19 nt, Artificial Sequence
  Description of Artificial Sequence: Synthetic oligonucleotide
cauagcugaaaugaacauu

SEQ ID NO: 435563 - RNA, 19 nt, Artificial Sequence
  Description of Artificial Sequence: Synthetic oligonucleotide
gcauaguguuaaaucugug

SEQ ID NO: 435564 - RNA, 19 nt, Artificial Sequence
  Description of Artificial Sequence: Synthetic oligonucleotide
caggagcccagaauauaaa

SEQ ID NO: 435565 - RNA, 19 nt, Artificial Sequence
  Description of Artificial Sequence: Synthetic oligonucleotide
gcuaauguuuaagacugcu

SEQ ID NO: 435566 - RNA, 19 nt, Artificial Sequence
  Description of Artificial Sequence: Synthetic oligonucleotide
ggcuaauagcaaagugcgc

SEQ ID NO: 435567 - RNA, 19 nt, Artificial Sequence
  Description of Artificial Sequence: Synthetic oligonucleotide
cacugagguacuagauaaa

SEQ ID NO: 435568 - RNA, 19 nt, Artificial Sequence
  Description of Artificial Sequence: Synthetic oligonucleotide
cguucuguaauaugccaca

SEQ ID NO: 435569 - RNA, 19 nt, Artificial Sequence
  Description of Artificial Sequence: Synthetic oligonucleotide
cuggaacaacucacaggga

SEQ ID NO: 435570 - RNA, 19 nt, Artificial Sequence
  Description of Artificial Sequence: Synthetic oligonucleotide
acgauuccaguggacugaa

SEQ ID NO: 435571 - RNA, 19 nt, Artificial Sequence
  Description of Artificial Sequence: Synthetic oligonucleotide
uuauugcaacguggccacu

SEQ ID NO: 435572 - RNA, 19 nt, Artificial Sequence
  Description of Artificial Sequence: Synthetic oligonucleotide
ggguagggaauuugaucuc

SEQ ID NO: 435573 - RNA, 19 nt, Artificial Sequence
  Description of Artificial Sequence: Synthetic oligonucleotide
uguccgcggcugaggcugc

SEQ ID NO: 435574 - RNA, 19 nt, Artificial Sequence
  Description of Artificial Sequence: Synthetic oligonucleotide
gcauguaaccaguuguuuu

SEQ ID NO: 435575 - RNA, 19 nt, Artificial Sequence
  Description of Artificial Sequence: Synthetic oligonucleotide
cucccagugucgagcgguc

SEQ ID NO: 435576 - RNA, 19 nt, Artificial Sequence
  Description of Artificial Sequence: Synthetic oligonucleotide
cacaaaugcuccagcgccu

SEQ ID NO: 435577 - RNA, 19 nt, Artificial Sequence
  Description of Artificial Sequence: Synthetic oligonucleotide
ccacuuuugugaggguagg

SEQ ID NO: 435578 - RNA, 19 nt, Artificial Sequence
  Description of Artificial Sequence: Synthetic oligonucleotide
cauaugaccaguggauaau

SEQ ID NO: 435579 - RNA, 19 nt, Artificial Sequence
  Description of Artificial Sequence: Synthetic oligonucleotide
ggguccucuacaguaucac

SEQ ID NO: 435580 - RNA, 19 nt, Artificial Sequence
  Description of Artificial Sequence: Synthetic oligonucleotide
ccaauacgauuccagugga

SEQ ID NO: 435581 - RNA, 19 nt, Artificial Sequence
  Description of Artificial Sequence: Synthetic oligonucleotide
aggcaacguucuguaauau

SEQ ID NO: 435582 - RNA, 19 nt, Artificial Sequence
  Description of Artificial Sequence: Synthetic oligonucleotide
agccacggaaaggucugga

SEQ ID NO: 435583 - RNA, 19 nt, Artificial Sequence
  Description of Artificial Sequence: Synthetic oligonucleotide
gguaaacauaaaacuccua

SEQ ID NO: 435584 - RNA, 19 nt, Artificial Sequence
  Description of Artificial Sequence: Synthetic oligonucleotide
cgauguuuacccuaaaauu

SEQ ID NO: 435585 - RNA, 19 nt, Artificial Sequence
  Description of Artificial Sequence: Synthetic oligonucleotide
gcgccucagaacuguaauc

SEQ ID NO: 435586 - RNA, 19 nt, Artificial Sequence
  Description of Artificial Sequence: Synthetic oligonucleotide
gccuaauggcaaucacuga

SEQ ID NO: 435587 - RNA, 19 nt, Artificial Sequence
  Description of Artificial Sequence: Synthetic oligonucleotide
gcauaucggcaaucauuca

SEQ ID NO: 435588 - RNA, 19 nt, Artificial Sequence
  Description of Artificial Sequence: Synthetic oligonucleotide
cucauacgguaaacauaaa

SEQ ID NO: 435589 - RNA, 19 nt, Artificial Sequence
  Description of Artificial Sequence: Synthetic oligonucleotide
caguuguuuuggcuaaaau

SEQ ID NO: 435590 - RNA, 19 nt, Artificial Sequence
  Description of Artificial Sequence: Synthetic oligonucleotide
aggcucuuuuauacagaaa

SEQ ID NO: 435591 - RNA, 19 nt, Artificial Sequence
  Description of Artificial Sequence: Synthetic oligonucleotide
caaucacugacaggcuucu

SEQ ID NO: 435592 - RNA, 19 nt, Artificial Sequence
  Description of Artificial Sequence: Synthetic oligonucleotide
gcaacguggccacuuuugu

SEQ ID NO: 435593 - RNA, 19 nt, Artificial Sequence
  Description of Artificial Sequence: Synthetic oligonucleotide
gacagggaaggcauuccuu

SEQ ID NO: 435594 - RNA, 19 nt, Artificial Sequence
  Description of Artificial Sequence: Synthetic oligonucleotide
accaguuguuuuggcuaaa

SEQ ID NO: 435595 - RNA, 19 nt, Artificial Sequence
  Description of Artificial Sequence: Synthetic oligonucleotide
cgcauaguguuaaaucugu

SEQ ID NO: 435596 - RNA, 19 nt, Artificial Sequence
  Description of Artificial Sequence: Synthetic oligonucleotide
gugucgagcgguccuuaau

SEQ ID NO: 435597 - RNA, 19 nt, Artificial Sequence
  Description of Artificial Sequence: Synthetic oligonucleotide
gucguccaauccauuuacu

SEQ ID NO: 435598 - RNA, 19 nt, Artificial Sequence
  Description of Artificial Sequence: Synthetic oligonucleotide
acacugccgcccaguuucu

SEQ ID NO: 435599 - RNA, 19 nt, Artificial Sequence
  Description of Artificial Sequence: Synthetic oligonucleotide
ugcggcggcggcggcggcu

SEQ ID NO: 435600 - RNA, 19 nt, Artificial Sequence
  Description of Artificial Sequence: Synthetic oligonucleotide
ggcauguaaccaguuguuu

SEQ ID NO: 435601 - RNA, 19 nt, Artificial Sequence
  Description of Artificial Sequence: Synthetic oligonucleotide
cacugccgcccaguuucuc

SEQ ID NO: 435602 - RNA, 19 nt, Artificial Sequence
  Description of Artificial Sequence: Synthetic oligonucleotide
caacacugccgcccaguuu

SEQ ID NO: 435603 - RNA, 19 nt, Artificial Sequence
  Description of Artificial Sequence: Synthetic oligonucleotide
ccauaguguccgcggcuga

SEQ ID NO: 435604 - RNA, 19 nt, Artificial Sequence
  Description of Artificial Sequence: Synthetic oligonucleotide
cggaaaggucuggaacaac

SEQ ID NO: 435605 - RNA, 19 nt, Artificial Sequence
  Description of Artificial Sequence: Synthetic oligonucleotide
gugcgcacacggaggagau

SEQ ID NO: 435606 - RNA, 19 nt, Artificial Sequence
  Description of Artificial Sequence: Synthetic oligonucleotide
cagugucgagcgguccuua

SEQ ID NO: 435607 - RNA, 19 nt, Artificial Sequence
  Description of Artificial Sequence: Synthetic oligonucleotide
cugcggcggcggcggcggc

SEQ ID NO: 435608 - RNA, 19 nt, Artificial Sequence
  Description of Artificial Sequence: Synthetic oligonucleotide
ccgcccaguuucucuccca

SEQ ID NO: 435609 - RNA, 19 nt, Artificial Sequence
  Description of Artificial Sequence: Synthetic oligonucleotide
gcggcggcggcggcggcuc

SEQ ID NO: 435610 - RNA, 19 nt, Artificial Sequence
  Description of Artificial Sequence: Synthetic oligonucleotide
  modified_base (1)..(1): a, c, u, g, unknown or other
nuaaauagcucuggcuaau

SEQ ID NO: 435611 - RNA, 19 nt, Artificial Sequence
  Description of Artificial Sequence: Synthetic oligonucleotide
aagaguaccaaguucagcc

SEQ ID NO: 435612 - RNA, 19 nt, Artificial Sequence
  Description of Artificial Sequence: Synthetic oligonucleotide
aaaacuucaagauauaaga

SEQ ID NO: 435613 - RNA, 19 nt, Artificial Sequence
  Description of Artificial Sequence: Synthetic oligonucleotide
aauuauaucauguuuguga

SEQ ID NO: 435614 - RNA, 19 nt, Artificial Sequence
  Description of Artificial Sequence: Synthetic oligonucleotide
ucaaauuauaucauguuug

SEQ ID NO: 435615 - RNA, 19 nt, Artificial Sequence
  Description of Artificial Sequence: Synthetic oligonucleotide
ucaaguauaaaacuucaag

SEQ ID NO: 435616 - RNA, 19 nt, Artificial Sequence
  Description of Artificial Sequence: Synthetic oligonucleotide
acagcugugaaacaugucc

SEQ ID NO: 435617 - RNA, 19 nt, Artificial Sequence
  Description of Artificial Sequence: Synthetic oligonucleotide
aaauucuuagcccucuuac

SEQ ID NO: 435618 - RNA, 19 nt, Artificial Sequence
  Description of Artificial Sequence: Synthetic oligonucleotide
uauaagaaggaucaaauua

SEQ ID NO: 435619 - RNA, 19 nt, Artificial Sequence
  Description of Artificial Sequence: Synthetic oligonucleotide
ugucauguaguaauggagg

SEQ ID NO: 435620 - RNA, 19 nt, Artificial Sequence
  Description of Artificial Sequence: Synthetic oligonucleotide
acuccuaaaauuucugugc

SEQ ID NO: 435621 - RNA, 19 nt, Artificial Sequence
  Description of Artificial Sequence: Synthetic oligonucleotide
aaucaauagaaaucuaagu

SEQ ID NO: 435622 - RNA, 19 nt, Artificial Sequence
  Description of Artificial Sequence: Synthetic oligonucleotide
auauccauaauauuggcca

SEQ ID NO: 435623 - RNA, 19 nt, Artificial Sequence
  Description of Artificial Sequence: Synthetic oligonucleotide
auuaucuagauuauaauag

SEQ ID NO: 435624 - RNA, 19 nt, Artificial Sequence
  Description of Artificial Sequence: Synthetic oligonucleotide
aguaauggaggucccaugc

SEQ ID NO: 435625 - RNA, 19 nt, Artificial Sequence
  Description of Artificial Sequence: Synthetic oligonucleotide
gauucaguaucccacaccc

SEQ ID NO: 435626 - RNA, 19 nt, Artificial Sequence
  Description of Artificial Sequence: Synthetic oligonucleotide
uucuaaacugucaaugaag

SEQ ID NO: 435627 - RNA, 19 nt, Artificial Sequence
  Description of Artificial Sequence: Synthetic oligonucleotide
uuaauuucuggcuuaaauc

SEQ ID NO: 435628 - RNA, 19 nt, Artificial Sequence
  Description of Artificial Sequence: Synthetic oligonucleotide
ucuaaacugucaaugaagu

SEQ ID NO: 435629 - RNA, 19 nt, Artificial Sequence
  Description of Artificial Sequence: Synthetic oligonucleotide
gaaaguccgcacuucaucg

SEQ ID NO: 435630 - RNA, 19 nt, Artificial Sequence
  Description of Artificial Sequence: Synthetic oligonucleotide
uuaauuugacuuuuccaag

SEQ ID NO: 435631 - RNA, 19 nt, Artificial Sequence
  Description of Artificial Sequence: Synthetic oligonucleotide
aaacacucuuauuccaaac

SEQ ID NO: 435632 - RNA, 19 nt, Artificial Sequence
  Description of Artificial Sequence: Synthetic oligonucleotide
uuuaccagagagaauguga

SEQ ID NO: 435633 - RNA, 19 nt, Artificial Sequence
  Description of Artificial Sequence: Synthetic oligonucleotide
ucaucucgauaucaaaacg

SEQ ID NO: 435634 - RNA, 19 nt, Artificial Sequence
  Description of Artificial Sequence: Synthetic oligonucleotide
aucaauagaaaucuaaguu

SEQ ID NO: 435635 - RNA, 19 nt, Artificial Sequence
  Description of Artificial Sequence: Synthetic oligonucleotide
uguaaaacucccuucaguc

SEQ ID NO: 435636 - RNA, 19 nt, Artificial Sequence
  Description of Artificial Sequence: Synthetic oligonucleotide
ucaaaauaaacucccguuc

SEQ ID NO: 435637 - RNA, 19 nt, Artificial Sequence
  Description of Artificial Sequence: Synthetic oligonucleotide
auaaccgagaagucuggcc

SEQ ID NO: 435638 - RNA, 19 nt, Artificial Sequence
  Description of Artificial Sequence: Synthetic oligonucleotide
uucauuaucaguccagaaa

SEQ ID NO: 435639 - RNA, 19 nt, Artificial Sequence
  Description of Artificial Sequence: Synthetic oligonucleotide
ugcucaaaacaauuuggcg

SEQ ID NO: 435640 - RNA, 19 nt, Artificial Sequence
  Description of Artificial Sequence: Synthetic oligonucleotide
aaugaaagucccaacaacu

SEQ ID NO: 435641 - RNA, 19 nt, Artificial Sequence
  Description of Artificial Sequence: Synthetic oligonucleotide
aacacucuuauuccaaaca

SEQ ID NO: 435642 - RNA, 19 nt, Artificial Sequence
  Description of Artificial Sequence: Synthetic oligonucleotide
gaugauucauuaucagucc

SEQ ID NO: 435643 - RNA, 19 nt, Artificial Sequence
  Description of Artificial Sequence: Synthetic oligonucleotide
aaguuaaccaccagggcgg

SEQ ID NO: 435644 - RNA, 19 nt, Artificial Sequence
  Description of Artificial Sequence: Synthetic oligonucleotide
uaaagguccagguagaauu

SEQ ID NO: 435645 - RNA, 19 nt, Artificial Sequence
  Description of Artificial Sequence: Synthetic oligonucleotide
uuaucuagauuauaauagu

SEQ ID NO: 435646 - RNA, 19 nt, Artificial Sequence
  Description of Artificial Sequence: Synthetic oligonucleotide
cauguaguaauggaggucc

SEQ ID NO: 435647 - RNA, 19 nt, Artificial Sequence
  Description of Artificial Sequence: Synthetic oligonucleotide
auuuagcguauucacucgc

SEQ ID NO: 435648 - RNA, 19 nt, Artificial Sequence
  Description of Artificial Sequence: Synthetic oligonucleotide
agaaguuaaccaccagggc

SEQ ID NO: 435649 - RNA, 19 nt, Artificial Sequence
  Description of Artificial Sequence: Synthetic oligonucleotide
uauuuagcguauucacucg

SEQ ID NO: 435650 - RNA, 19 nt, Artificial Sequence
  Description of Artificial Sequence: Synthetic oligonucleotide
uuuauaauguuuugacagu

SEQ ID NO: 435651 - RNA, 19 nt, Artificial Sequence
  Description of Artificial Sequence: Synthetic oligonucleotide
guagccuuauccuucacag

SEQ ID NO: 435652 - RNA, 19 nt, Artificial Sequence
  Description of Artificial Sequence: Synthetic oligonucleotide
gacugaucaacuuugcuca

SEQ ID NO: 435653 - RNA, 19 nt, Artificial Sequence
  Description of Artificial Sequence: Synthetic oligonucleotide
ucucaaguauaaaacuuca

SEQ ID NO: 435654 - RNA, 19 nt, Artificial Sequence
  Description of Artificial Sequence: Synthetic oligonucleotide
gaugggaaaguauuccuug

SEQ ID NO: 435655 - RNA, 19 nt, Artificial Sequence
  Description of Artificial Sequence: Synthetic oligonucleotide
agaauuacaguguuuuccu

SEQ ID NO: 435656 - RNA, 19 nt, Artificial Sequence
  Description of Artificial Sequence: Synthetic oligonucleotide
uuuucguauaaauggacaa

SEQ ID NO: 435657 - RNA, 19 nt, Artificial Sequence
  Description of Artificial Sequence: Synthetic oligonucleotide
uaaccgagaagucuggcca

SEQ ID NO: 435658 - RNA, 19 nt, Artificial Sequence
  Description of Artificial Sequence: Synthetic oligonucleotide
aaucaucuagaaaggcugc

SEQ ID NO: 435659 - RNA, 19 nt, Artificial Sequence
  Description of Artificial Sequence: Synthetic oligonucleotide
uugcucaaaacaauuuggc

SEQ ID NO: 435660 - RNA, 19 nt, Artificial Sequence
  Description of Artificial Sequence: Synthetic oligonucleotide
uaaaacucccuucagucuc

SEQ ID NO: 435661 - RNA, 19 nt, Artificial Sequence
  Description of Artificial Sequence: Synthetic oligonucleotide
uggucuaggaagcauucag

SEQ ID NO: 435662 - RNA, 19 nt, Artificial Sequence
  Description of Artificial Sequence: Synthetic oligonucleotide
uucaugacaggaaaauagu

SEQ ID NO: 435663 - RNA, 19 nt, Artificial Sequence
  Description of Artificial Sequence: Synthetic oligonucleotide
uuauaaccgagaagucugg

SEQ ID NO: 435664 - RNA, 19 nt, Artificial Sequence
  Description of Artificial Sequence: Synthetic oligonucleotide
aguggggauacuuuaaggu

SEQ ID NO: 435665 - RNA, 19 nt, Artificial Sequence
  Description of Artificial Sequence: Synthetic oligonucleotide
guuauaaccgagaagucug

SEQ ID NO: 435666 - RNA, 19 nt, Artificial Sequence
  Description of Artificial Sequence: Synthetic oligonucleotide
gagagaauauuuaccagag

SEQ ID NO: 435667 - RNA, 19 nt, Artificial Sequence
  Description of Artificial Sequence: Synthetic oligonucleotide
guugauuuguccuccagac

SEQ ID NO: 435668 - RNA, 19 nt, Artificial Sequence
  Description of Artificial Sequence: Synthetic oligonucleotide
uucuccgguagccuuaucc

SEQ ID NO: 435669 - RNA, 19 nt, Artificial Sequence
  Description of Artificial Sequence: Synthetic oligonucleotide
cucgauaucaaaacgagaa

SEQ ID NO: 435670 - RNA, 19 nt, Artificial Sequence
  Description of Artificial Sequence: Synthetic oligonucleotide
cuaaaucgugcaaagucag

SEQ ID NO: 435671 - RNA, 19 nt, Artificial Sequence
  Description of Artificial Sequence: Synthetic oligonucleotide
guguugaccagucuggaag

SEQ ID NO: 435672 - RNA, 19 nt, Artificial Sequence
  Description of Artificial Sequence: Synthetic oligonucleotide
uguuauaaccgagaagucu

SEQ ID NO: 435673 - RNA, 19 nt, Artificial Sequence
  Description of Artificial Sequence: Synthetic oligonucleotide
ugccaaauguccaaaagua

SEQ ID NO: 435674 - RNA, 19 nt, Artificial Sequence
  Description of Artificial Sequence: Synthetic oligonucleotide
cacuaaaucgugcaaaguc

SEQ ID NO: 435675 - RNA, 19 nt, Artificial Sequence
  Description of Artificial Sequence: Synthetic oligonucleotide
aaucgugcaaagucagucu

SEQ ID NO: 435676 - RNA, 19 nt, Artificial Sequence
  Description of Artificial Sequence: Synthetic oligonucleotide
uccaucuuuauaauguuuu

SEQ ID NO: 435677 - RNA, 19 nt, Artificial Sequence
  Description of Artificial Sequence: Synthetic oligonucleotide
aaagauggaguccauuauu

SEQ ID NO: 435678 - RNA, 19 nt, Artificial Sequence
  Description of Artificial Sequence: Synthetic oligonucleotide
aaagccucgcucuucacau

SEQ ID NO: 435679 - RNA, 19 nt, Artificial Sequence
  Description of Artificial Sequence: Synthetic oligonucleotide
cugaugcaugacaugaccg

SEQ ID NO: 435680 - RNA, 19 nt, Artificial Sequence
  Description of Artificial Sequence: Synthetic oligonucleotide
aaguagcuggcauauuugu

SEQ ID NO: 435681 - RNA, 19 nt, Artificial Sequence
  Description of Artificial Sequence: Synthetic oligonucleotide
auuuguuccacuaaaucgu

SEQ ID NO: 435682 - RNA, 19 nt, Artificial Sequence
  Description of Artificial Sequence: Synthetic oligonucleotide
auauuaucuagauuauaau

SEQ ID NO: 435683 - RNA, 19 nt, Artificial Sequence
  Description of Artificial Sequence: Synthetic oligonucleotide
uuagcguauucacucgcag

SEQ ID NO: 435684 - RNA, 19 nt, Artificial Sequence
  Description of Artificial Sequence: Synthetic oligonucleotide
aucucaaguauaaaacuuc

SEQ ID NO: 435685 - RNA, 19 nt, Artificial Sequence
  Description of Artificial Sequence: Synthetic oligonucleotide
uaguggggauacuuuaagg

SEQ ID NO: 435686 - RNA, 19 nt, Artificial Sequence
  Description of Artificial Sequence: Synthetic oligonucleotide
ucuacauuuguuccacuaa

SEQ ID NO: 435687 - RNA, 19 nt, Artificial Sequence
  Description of Artificial Sequence: Synthetic oligonucleotide
guauaaauggacaauucuc

SEQ ID NO: 435688 - RNA, 19 nt, Artificial Sequence
  Description of Artificial Sequence: Synthetic oligonucleotide
uuaccagagagaaugugau

SEQ ID NO: 435689 - RNA, 19 nt, Artificial Sequence
  Description of Artificial Sequence: Synthetic oligonucleotide
agcguauucacucgcagca

SEQ ID NO: 435690 - RNA, 19 nt, Artificial Sequence
  Description of Artificial Sequence: Synthetic oligonucleotide
uuuguuccacuaaaucgug

SEQ ID NO: 435691 - RNA, 19 nt, Artificial Sequence
  Description of Artificial Sequence: Synthetic oligonucleotide
auaagaaggaucaaauuau

SEQ ID NO: 435692 - RNA, 19 nt, Artificial Sequence
  Description of Artificial Sequence: Synthetic oligonucleotide
uggggauacuuuaagguaa

SEQ ID NO: 435693 - RNA, 19 nt, Artificial Sequence
  Description of Artificial Sequence: Synthetic oligonucleotide
gucuaggaagcauucaggc

SEQ ID NO: 435694 - RNA, 19 nt, Artificial Sequence
  Description of Artificial Sequence: Synthetic oligonucleotide
auaguggggauacuuuaag

SEQ ID NO: 435695 - RNA, 19 nt, Artificial Sequence
  Description of Artificial Sequence: Synthetic oligonucleotide
ucauguuugugauucaauu

SEQ ID NO: 435696 - RNA, 19 nt, Artificial Sequence
  Description of Artificial Sequence: Synthetic oligonucleotide
uacuuuaagguaaccuugu

SEQ ID NO: 435697 - RNA, 19 nt, Artificial Sequence
  Description of Artificial Sequence: Synthetic oligonucleotide
gguauggagagacugauca

SEQ ID NO: 435698 - RNA, 19 nt, Artificial Sequence
  Description of Artificial Sequence: Synthetic oligonucleotide
ugaucaacuuugcucaaaa

SEQ ID NO: 435699 - RNA, 19 nt, Artificial Sequence
  Description of Artificial Sequence: Synthetic oligonucleotide
auucuuagcccucuuacau

SEQ ID NO: 435700 - RNA, 19 nt, Artificial Sequence
  Description of Artificial Sequence: Synthetic oligonucleotide
aggauuagguuucuguacu

SEQ ID NO: 435701 - RNA, 19 nt, Artificial Sequence
  Description of Artificial Sequence: Synthetic oligonucleotide
caaaucaauagaaaucuaa

SEQ ID NO: 435702 - RNA, 19 nt, Artificial Sequence
  Description of Artificial Sequence: Synthetic oligonucleotide
uuugcaccuuguaugaaaa

SEQ ID NO: 435703 - RNA, 19 nt, Artificial Sequence
  Description of Artificial Sequence: Synthetic oligonucleotide
aaccgagaagucuggccac

SEQ ID NO: 435704 - RNA, 19 nt, Artificial Sequence
  Description of Artificial Sequence: Synthetic oligonucleotide
uuggcgaagcgucaggaga

SEQ ID NO: 435705 - RNA, 19 nt, Artificial Sequence
  Description of Artificial Sequence: Synthetic oligonucleotide
ugaugcaugacaugaccga

SEQ ID NO: 435706 - RNA, 19 nt, Artificial Sequence
  Description of Artificial Sequence: Synthetic oligonucleotide
acaaagucaguuucuacau

SEQ ID NO: 435707 - RNA, 19 nt, Artificial Sequence
  Description of Artificial Sequence: Synthetic oligonucleotide
uguuucagggauacaacau

SEQ ID NO: 435708 - RNA, 19 nt, Artificial Sequence
  Description of Artificial Sequence: Synthetic oligonucleotide
uuaucaguccagaaaucuc

SEQ ID NO: 435709 - RNA, 19 nt, Artificial Sequence
  Description of Artificial Sequence: Synthetic oligonucleotide
aaaguagcuggcauauuug

SEQ ID NO: 435710 - RNA, 19 nt, Artificial Sequence
  Description of Artificial Sequence: Synthetic oligonucleotide
uuuagcguauucacucgca

SEQ ID NO: 435711 - RNA, 19 nt, Artificial Sequence
  Description of Artificial Sequence: Synthetic oligonucleotide
gauacuuuaagguaaccuu

SEQ ID NO: 435712 - RNA, 19 nt, Artificial Sequence
  Description of Artificial Sequence: Synthetic oligonucleotide
acuaaaucgugcaaaguca

SEQ ID NO: 435713 - RNA, 19 nt, Artificial Sequence
  Description of Artificial Sequence: Synthetic oligonucleotide
auacuuuaagguaaccuug

SEQ ID NO: 435714 - RNA, 19 nt, Artificial Sequence
  Description of Artificial Sequence: Synthetic oligonucleotide
ugaccgaacucauggaaga

SEQ ID NO: 435715 - RNA, 19 nt, Artificial Sequence
  Description of Artificial Sequence: Synthetic oligonucleotide
aagucaaugcacaguucac

SEQ ID NO: 435716 - RNA, 19 nt, Artificial Sequence
  Description of Artificial Sequence: Synthetic oligonucleotide
ucguauaaauggacaauuc

SEQ ID NO: 435717 - RNA, 19 nt, Artificial Sequence
  Description of Artificial Sequence: Synthetic oligonucleotide
uaagaaggaucaaauuaua

SEQ ID NO: 435718 - RNA, 19 nt, Artificial Sequence
  Description of Artificial Sequence: Synthetic oligonucleotide
ucucgauaucaaaacgaga

SEQ ID NO: 435719 - RNA, 19 nt, Artificial Sequence
  Description of Artificial Sequence: Synthetic oligonucleotide
gcucaaaacaauuuggcga

SEQ ID NO: 435720 - RNA, 19 nt, Artificial Sequence
  Description of Artificial Sequence: Synthetic oligonucleotide
auauaagaaggaucaaauu

SEQ ID NO: 435721 - RNA, 19 nt, Artificial Sequence
  Description of Artificial Sequence: Synthetic oligonucleotide
aucaaaacgagaaagucuu

SEQ ID NO: 435722 - RNA, 19 nt, Artificial Sequence
  Description of Artificial Sequence: Synthetic oligonucleotide
ucuuagcccucuuacauua

SEQ ID NO: 435723 - RNA, 19 nt, Artificial Sequence
  Description of Artificial Sequence: Synthetic oligonucleotide
uccuaaaauuucugugcag

SEQ ID NO: 435724 - RNA, 19 nt, Artificial Sequence
  Description of Artificial Sequence: Synthetic oligonucleotide
agauauaagaaggaucaaa

SEQ ID NO: 435725 - RNA, 19 nt, Artificial Sequence
  Description of Artificial Sequence: Synthetic oligonucleotide
gauauaagaaggaucaaau

SEQ ID NO: 435726 - RNA, 19 nt, Artificial Sequence
  Description of Artificial Sequence: Synthetic oligonucleotide
uccauaauauuggccauca

SEQ ID NO: 435727 - RNA, 19 nt, Artificial Sequence
  Description of Artificial Sequence: Synthetic oligonucleotide
aguaucccacacccaauuc

SEQ ID NO: 435728 - RNA, 19 nt, Artificial Sequence
  Description of Artificial Sequence: Synthetic oligonucleotide
aaguccgcacuucaucgug

SEQ ID NO: 435729 - RNA, 19 nt, Artificial Sequence
  Description of Artificial Sequence: Synthetic oligonucleotide
caucucgauaucaaaacga

SEQ ID NO: 435730 - RNA, 19 nt, Artificial Sequence
  Description of Artificial Sequence: Synthetic oligonucleotide
agccuuauccuucacagua

SEQ ID NO: 435731 - RNA, 19 nt, Artificial Sequence
  Description of Artificial Sequence: Synthetic oligonucleotide
augaaagucccaacaacuc

SEQ ID NO: 435732 - RNA, 19 nt, Artificial Sequence
  Description of Artificial Sequence: Synthetic oligonucleotide
ucaaugcacaguucacuca

SEQ ID NO: 435733 - RNA, 19 nt, Artificial Sequence
  Description of Artificial Sequence: Synthetic oligonucleotide
ucgauaucaaaacgagaaa

SEQ ID NO: 435734 - RNA, 19 nt, Artificial Sequence
  Description of Artificial Sequence: Synthetic oligonucleotide
aaguugaagaagggcgccg

SEQ ID NO: 435735 - RNA, 19 nt, Artificial Sequence
  Description of Artificial Sequence: Synthetic oligonucleotide
caggauuagguuucuguac

SEQ ID NO: 435736 - RNA, 19 nt, Artificial Sequence
  Description of Artificial Sequence: Synthetic oligonucleotide
cucaaaacaauuuggcgaa

SEQ ID NO: 435737 - RNA, 19 nt, Artificial Sequence
  Description of Artificial Sequence: Synthetic oligonucleotide
uucguauaaauggacaauu

SEQ ID NO: 435738 - RNA, 19 nt, Artificial Sequence
  Description of Artificial Sequence: Synthetic oligonucleotide
gucaaaguugaagaagggc

SEQ ID NO: 435739 - RNA, 19 nt, Artificial Sequence
  Description of Artificial Sequence: Synthetic oligonucleotide
gugucauguaguaauggag

SEQ ID NO: 435740 - RNA, 19 nt, Artificial Sequence
  Description of Artificial Sequence: Synthetic oligonucleotide
aucucgauaucaaaacgag

SEQ ID NO: 435741 - RNA, 19 nt, Artificial Sequence
  Description of Artificial Sequence: Synthetic oligonucleotide
ucuauugauuugauuucau

SEQ ID NO: 435742 - RNA, 19 nt, Artificial Sequence
  Description of Artificial Sequence: Synthetic oligonucleotide
acccaaggguuuuaauuuc

SEQ ID NO: 435743 - RNA, 19 nt, Artificial Sequence
  Description of Artificial Sequence: Synthetic oligonucleotide
aaaguccgcacuucaucgu

SEQ ID NO: 435744 - RNA, 19 nt, Artificial Sequence
  Description of Artificial Sequence: Synthetic oligonucleotide
ucuuaggucacaguauuua

SEQ ID NO: 435745 - RNA, 19 nt, Artificial Sequence
  Description of Artificial Sequence: Synthetic oligonucleotide
ucgaugggaaaguauuccu

SEQ ID NO: 435746 - RNA, 19 nt, Artificial Sequence
  Description of Artificial Sequence: Synthetic oligonucleotide
uuccgaaagauggagucca

SEQ ID NO: 435747 - RNA, 19 nt, Artificial Sequence
  Description of Artificial Sequence: Synthetic oligonucleotide
uccuguuugcaccuuguau

SEQ ID NO: 435748 - RNA, 19 nt, Artificial Sequence
  Description of Artificial Sequence: Synthetic oligonucleotide
uuaagguaaccuuguacuu

SEQ ID NO: 435749 - RNA, 19 nt, Artificial Sequence
  Description of Artificial Sequence: Synthetic oligonucleotide
gaagcauucaggccccgac

SEQ ID NO: 435750 - RNA, 19 nt, Artificial Sequence
  Description of Artificial Sequence: Synthetic oligonucleotide
ugcucagcaagccuucggu

SEQ ID NO: 435751 - RNA, 19 nt, Artificial Sequence
  Description of Artificial Sequence: Synthetic oligonucleotide
uccagcgacgcauugguau

SEQ ID NO: 435752 - RNA, 19 nt, Artificial Sequence
  Description of Artificial Sequence: Synthetic oligonucleotide
uggcuuaaaucaucuagaa

SEQ ID NO: 435753 - RNA, 19 nt, Artificial Sequence
  Description of Artificial Sequence: Synthetic oligonucleotide
uuuggcgaagcgucaggag

SEQ ID NO: 435754 - RNA, 19 nt, Artificial Sequence
  Description of Artificial Sequence: Synthetic oligonucleotide
uguagcugcaacuccuaaa

SEQ ID NO: 435755 - RNA, 19 nt, Artificial Sequence
  Description of Artificial Sequence: Synthetic oligonucleotide
aguauuuagcguauucacu

SEQ ID NO: 435756 - RNA, 19 nt, Artificial Sequence
  Description of Artificial Sequence: Synthetic oligonucleotide
ugguguagcugcaacuccu

SEQ ID NO: 435757 - RNA, 19 nt, Artificial Sequence
  Description of Artificial Sequence: Synthetic oligonucleotide
ucuccgguagccuuauccu

SEQ ID NO: 435758 - RNA, 19 nt, Artificial Sequence
  Description of Artificial Sequence: Synthetic oligonucleotide
uggacaauucucugaaaua

SEQ ID NO: 435759 - RNA, 19 nt, Artificial Sequence
  Description of Artificial Sequence: Synthetic oligonucleotide
cuggcuuaaaucaucuaga

SEQ ID NO: 435760 - RNA, 19 nt, Artificial Sequence
  Description of Artificial Sequence: Synthetic oligonucleotide
cucgaugggaaaguauucc

SEQ ID NO: 435761 - RNA, 19 nt, Artificial Sequence
  Description of Artificial Sequence: Synthetic oligonucleotide
cugacacuuagcugugagg

SEQ ID NO: 435762 - RNA, 19 nt, Artificial Sequence
  Description of Artificial Sequence: Synthetic oligonucleotide
gucaaugcacaguucacuc

SEQ ID NO: 435763 - RNA, 19 nt, Artificial Sequence
  Description of Artificial Sequence: Synthetic oligonucleotide
cucuuauuccaaacaugag

SEQ ID NO: 435764 - RNA, 19 nt, Artificial Sequence
  Description of Artificial Sequence: Synthetic oligonucleotide
uuguuccacuaaaucgugc

SEQ ID NO: 435765 - RNA, 19 nt, Artificial Sequence
  Description of Artificial Sequence: Synthetic oligonucleotide
aagauggaguccauuauuu

SEQ ID NO: 435766 - RNA, 19 nt, Artificial Sequence
  Description of Artificial Sequence: Synthetic oligonucleotide
uagcguauucacucgcagc

SEQ ID NO: 435767 - RNA, 19 nt, Artificial Sequence
  Description of Artificial Sequence: Synthetic oligonucleotide
auauuugugccugguguag

SEQ ID NO: 435768 - RNA, 19 nt, Artificial Sequence
  Description of Artificial Sequence: Synthetic oligonucleotide
uuucguauaaauggacaau

SEQ ID NO: 435769 - RNA, 19 nt, Artificial Sequence
  Description of Artificial Sequence: Synthetic oligonucleotide
aauaguggggauacuuuaa

SEQ ID NO: 435770 - RNA, 19 nt, Artificial Sequence
  Description of Artificial Sequence: Synthetic oligonucleotide
cauggguguuauaaccgag

SEQ ID NO: 435771 - RNA, 19 nt, Artificial Sequence
  Description of Artificial Sequence: Synthetic oligonucleotide
auuacaguguuuuccuguu

SEQ ID NO: 435772 - RNA, 19 nt, Artificial Sequence
  Description of Artificial Sequence: Synthetic oligonucleotide
uugugaugguaccucuaca

SEQ ID NO: 435773 - RNA, 19 nt, Artificial Sequence
  Description of Artificial Sequence: Synthetic oligonucleotide
cagcgauucaguaucccac

SEQ ID NO: 435774 - RNA, 19 nt, Artificial Sequence
  Description of Artificial Sequence: Synthetic oligonucleotide
ugcucuuugcaguguuuag

SEQ ID NO: 435775 - RNA, 19 nt, Artificial Sequence
  Description of Artificial Sequence: Synthetic oligonucleotide
guuuucguauaaauggaca

SEQ ID NO: 435776 - RNA, 19 nt, Artificial Sequence
  Description of Artificial Sequence: Synthetic oligonucleotide
agagacugaucaacuuugc

SEQ ID NO: 435777 - RNA, 19 nt, Artificial Sequence
  Description of Artificial Sequence: Synthetic oligonucleotide
ugcucaaaugaaaguccca

SEQ ID NO: 435778 - RNA, 19 nt, Artificial Sequence
  Description of Artificial Sequence: Synthetic oligonucleotide
gaagaguaccaaguucagc

SEQ ID NO: 435779 - RNA, 19 nt, Artificial Sequence
  Description of Artificial Sequence: Synthetic oligonucleotide
uuguuccgaaagauggagu

SEQ ID NO: 435780 - RNA, 19 nt, Artificial Sequence
  Description of Artificial Sequence: Synthetic oligonucleotide
uaguaauggaggucccaug

SEQ ID NO: 435781 - RNA, 19 nt, Artificial Sequence
  Description of Artificial Sequence: Synthetic oligonucleotide
agaguaccaaguucagccu

SEQ ID NO: 435782 - RNA, 19 nt, Artificial Sequence
  Description of Artificial Sequence: Synthetic oligonucleotide
ucgugucucaggagagagg

SEQ ID NO: 435783 - RNA, 19 nt, Artificial Sequence
  Description of Artificial Sequence: Synthetic oligonucleotide
uggcgaagcgucaggagac

SEQ ID NO: 435784 - RNA, 19 nt, Artificial Sequence
  Description of Artificial Sequence: Synthetic oligonucleotide
auuuaccagagagaaugug

SEQ ID NO: 435785 - RNA, 19 nt, Artificial Sequence
  Description of Artificial Sequence: Synthetic oligonucleotide
uccgguagccuuauccuuc

SEQ ID NO: 435786 - RNA, 19 nt, Artificial Sequence
  Description of Artificial Sequence: Synthetic oligonucleotide
cauuaucaguccagaaauc

SEQ ID NO: 435787 - RNA, 19 nt, Artificial Sequence
  Description of Artificial Sequence: Synthetic oligonucleotide
caaguaucgccuuggcuuc

SEQ ID NO: 435788 - RNA, 19 nt, Artificial Sequence
  Description of Artificial Sequence: Synthetic oligonucleotide
cagcauuugugaugguacc

SEQ ID NO: 435789 - RNA, 19 nt, Artificial Sequence
  Description of Artificial Sequence: Synthetic oligonucleotide
ugcacaguucacucauucu

SEQ ID NO: 435790 - RNA, 19 nt, Artificial Sequence
  Description of Artificial Sequence: Synthetic oligonucleotide
agucaaugcacaguucacu

SEQ ID NO: 435791 - RNA, 19 nt, Artificial Sequence
  Description of Artificial Sequence: Synthetic oligonucleotide
ugugcucgcagcccguacu

SEQ ID NO: 435792 - RNA, 19 nt, Artificial Sequence
  Description of Artificial Sequence: Synthetic oligonucleotide
uauaaccgagaagucuggc

SEQ ID NO: 435793 - RNA, 19 nt, Artificial Sequence
  Description of Artificial Sequence: Synthetic oligonucleotide
agcgauucaguaucccaca

SEQ ID NO: 435794 - RNA, 19 nt, Artificial Sequence
  Description of Artificial Sequence: Synthetic oligonucleotide
augaccgaacucauggaag

SEQ ID NO: 435795 - RNA, 19 nt, Artificial Sequence
  Description of Artificial Sequence: Synthetic oligonucleotide
uagcccucuuacauuauau

SEQ ID NO: 435796 - RNA, 19 nt, Artificial Sequence
  Description of Artificial Sequence: Synthetic oligonucleotide
aucgccuuggcuuccggcu

SEQ ID NO: 435797 - RNA, 19 nt, Artificial Sequence
  Description of Artificial Sequence: Synthetic oligonucleotide
aaguaucgccuuggcuucc

SEQ ID NO: 435798 - RNA, 19 nt, Artificial Sequence
  Description of Artificial Sequence: Synthetic oligonucleotide
uauuugugccugguguagc

SEQ ID NO: 435799 - RNA, 19 nt, Artificial Sequence
  Description of Artificial Sequence: Synthetic oligonucleotide
agguagaauugucccagca

SEQ ID NO: 435800 - RNA, 19 nt, Artificial Sequence
  Description of Artificial Sequence: Synthetic oligonucleotide
uguaguaauggagguccca

SEQ ID NO: 435801 - RNA, 19 nt, Artificial Sequence
  Description of Artificial Sequence: Synthetic oligonucleotide
guauucacucgcagcaucc

SEQ ID NO: 435802 - RNA, 19 nt, Artificial Sequence
  Description of Artificial Sequence: Synthetic oligonucleotide
uagaauugucccagcacuu

SEQ ID NO: 435803 - RNA, 19 nt, Artificial Sequence
  Description of Artificial Sequence: Synthetic oligonucleotide
uugcaccuuguaugaaaag

SEQ ID NO: 435804 - RNA, 19 nt, Artificial Sequence
  Description of Artificial Sequence: Synthetic oligonucleotide
uggcucgugcucuuugcag

SEQ ID NO: 435805 - RNA, 19 nt, Artificial Sequence
  Description of Artificial Sequence: Synthetic oligonucleotide
uuagcccucuuacauuaua

SEQ ID NO: 435806 - RNA, 19 nt, Artificial Sequence
  Description of Artificial Sequence: Synthetic oligonucleotide
agcucaaaauaaacucccg

SEQ ID NO: 435807 - RNA, 19 nt, Artificial Sequence
  Description of Artificial Sequence: Synthetic oligonucleotide
cuccuaaaauuucugugca

SEQ ID NO: 435808 - RNA, 19 nt, Artificial Sequence
  Description of Artificial Sequence: Synthetic oligonucleotide
caggccccgacucauuagg

SEQ ID NO: 435809 - RNA, 19 nt, Artificial Sequence
  Description of Artificial Sequence: Synthetic oligonucleotide
ugugcucgaagcgggagga

SEQ ID NO: 435810 - RNA, 19 nt, Artificial Sequence
  Description of Artificial Sequence: Synthetic oligonucleotide
uuccaaguaucgccuuggc

SEQ ID NO: 435811 - RNA, 19 nt, Artificial Sequence
  Description of Artificial Sequence: Synthetic oligonucleotide
cuggagcauguccaugccg

SEQ ID NO: 435812 - RNA, 19 nt, Artificial Sequence
  Description of Artificial Sequence: Synthetic oligonucleotide
ucgugcaaagucagucugu

SEQ ID NO: 435813 - RNA, 19 nt, Artificial Sequence
  Description of Artificial Sequence: Synthetic oligonucleotide
aggucaucugagauagcac

SEQ ID NO: 435814 - RNA, 19 nt, Artificial Sequence
  Description of Artificial Sequence: Synthetic oligonucleotide
uaccucuacaaagucaguu

SEQ ID NO: 435815 - RNA, 19 nt, Artificial Sequence
  Description of Artificial Sequence: Synthetic oligonucleotide
guaaccuuguacuugucau

SEQ ID NO: 435816 - RNA, 19 nt, Artificial Sequence
  Description of Artificial Sequence: Synthetic oligonucleotide
agcgucaggagaccugugu

SEQ ID NO: 435817 - RNA, 19 nt, Artificial Sequence
  Description of Artificial Sequence: Synthetic oligonucleotide
acauucauaugaaacuuuu

SEQ ID NO: 435818 - RNA, 19 nt, Artificial Sequence
  Description of Artificial Sequence: Synthetic oligonucleotide
gacuucacuccaaagauau

SEQ ID NO: 435819 - RNA, 19 nt, Artificial Sequence
  Description of Artificial Sequence: Synthetic oligonucleotide
auaaagugaaacacucuua

SEQ ID NO: 435820 - RNA, 19 nt, Artificial Sequence
  Description of Artificial Sequence: Synthetic oligonucleotide
gaaaauaguggggauacuu

SEQ ID NO: 435821 - RNA, 19 nt, Artificial Sequence
  Description of Artificial Sequence: Synthetic oligonucleotide
aguuaaccaccagggcggc

SEQ ID NO: 435822 - RNA, 19 nt, Artificial Sequence
  Description of Artificial Sequence: Synthetic oligonucleotide
cuuuguuccgaaagaugga

SEQ ID NO: 435823 - RNA, 19 nt, Artificial Sequence
  Description of Artificial Sequence: Synthetic oligonucleotide
uaucgccuuggcuuccggc

SEQ ID NO: 435824 - RNA, 19 nt, Artificial Sequence
  Description of Artificial Sequence: Synthetic oligonucleotide
aguagcuggcauauuugug

SEQ ID NO: 435825 - RNA, 19 nt, Artificial Sequence
  Description of Artificial Sequence: Synthetic oligonucleotide
aguaccaaguucagccuug

SEQ ID NO: 435826 - RNA, 19 nt, Artificial Sequence
  Description of Artificial Sequence: Synthetic oligonucleotide
guuccgaaagauggagucc

SEQ ID NO: 435827 - RNA, 19 nt, Artificial Sequence
  Description of Artificial Sequence: Synthetic oligonucleotide
aggucccaugcauugauuu

SEQ ID NO: 435828 - RNA, 19 nt, Artificial Sequence
  Description of Artificial Sequence: Synthetic oligonucleotide
ucaggccccgacucauuag

SEQ ID NO: 435829 - RNA, 19 nt, Artificial Sequence
  Description of Artificial Sequence: Synthetic oligonucleotide
caauuuggcgaagcgucag

SEQ ID NO: 435830 - RNA, 19 nt, Artificial Sequence
  Description of Artificial Sequence: Synthetic oligonucleotide
cuucaucgugucucaggag

SEQ ID NO: 435831 - RNA, 19 nt, Artificial Sequence
  Description of Artificial Sequence: Synthetic oligonucleotide
agagggccugccugcuacc

SEQ ID NO: 435832 - RNA, 19 nt, Artificial Sequence
  Description of Artificial Sequence: Synthetic oligonucleotide
caggagaccuguguugacc

SEQ ID NO: 435833 - RNA, 19 nt, Artificial Sequence
  Description of Artificial Sequence: Synthetic oligonucleotide
guggggauacuuuaaggua

SEQ ID NO: 435834 - RNA, 19 nt, Artificial Sequence
  Description of Artificial Sequence: Synthetic oligonucleotide
auuuggcgaagcgucagga

SEQ ID NO: 435835 - RNA, 19 nt, Artificial Sequence
  Description of Artificial Sequence: Synthetic oligonucleotide
guaaaacucccuucagucu

SEQ ID NO: 435836 - RNA, 19 nt, Artificial Sequence
  Description of Artificial Sequence: Synthetic oligonucleotide
guaauggaggucccaugca

SEQ ID NO: 435837 - RNA, 19 nt, Artificial Sequence
  Description of Artificial Sequence: Synthetic oligonucleotide
cugccaucagggagaaggc

SEQ ID NO: 435838 - RNA, 19 nt, Artificial Sequence
  Description of Artificial Sequence: Synthetic oligonucleotide
guccauuauuuuaauuuga

SEQ ID NO: 435839 - RNA, 19 nt, Artificial Sequence
  Description of Artificial Sequence: Synthetic oligonucleotide
aagaaaguccgcacuucau

SEQ ID NO: 435840 - RNA, 19 nt, Artificial Sequence
  Description of Artificial Sequence: Synthetic oligonucleotide
cucaaguauaaaacuucaa

SEQ ID NO: 435841 - RNA, 19 nt, Artificial Sequence
  Description of Artificial Sequence: Synthetic oligonucleotide
uacuugucaucaucuguuu

SEQ ID NO: 435842 - RNA, 19 nt, Artificial Sequence
  Description of Artificial Sequence: Synthetic oligonucleotide
aauggaggucccaugcauu

SEQ ID NO: 435843 - RNA, 19 nt, Artificial Sequence
  Description of Artificial Sequence: Synthetic oligonucleotide
gaugcaugacaugaccgaa

SEQ ID NO: 435844 - RNA, 19 nt, Artificial Sequence
  Description of Artificial Sequence: Synthetic oligonucleotide
gucggcauggguguuauaa

SEQ ID NO: 435845 - RNA, 19 nt, Artificial Sequence
  Description of Artificial Sequence: Synthetic oligonucleotide
guaucccacacccaauucu

SEQ ID NO: 435846 - RNA, 19 nt, Artificial Sequence
  Description of Artificial Sequence: Synthetic oligonucleotide
uggcucacguugcaagaaa

SEQ ID NO: 435847 - RNA, 19 nt, Artificial Sequence
  Description of Artificial Sequence: Synthetic oligonucleotide
ggguguuauaaccgagaag

SEQ ID NO: 435848 - RNA, 19 nt, Artificial Sequence
  Description of Artificial Sequence: Synthetic oligonucleotide
uggccacuugugcucgaag

SEQ ID NO: 435849 - RNA, 19 nt, Artificial Sequence
  Description of Artificial Sequence: Synthetic oligonucleotide
uggcgguguugauuugucc

SEQ ID NO: 435850 - RNA, 19 nt, Artificial Sequence
  Description of Artificial Sequence: Synthetic oligonucleotide
uuccgcagcgauucaguau

SEQ ID NO: 435851 - RNA, 19 nt, Artificial Sequence
  Description of Artificial Sequence: Synthetic oligonucleotide
ucccuuggauaaaggucca

SEQ ID NO: 435852 - RNA, 19 nt, Artificial Sequence
  Description of Artificial Sequence: Synthetic oligonucleotide
ggaucaaauuauaucaugu

SEQ ID NO: 435853 - RNA, 19 nt, Artificial Sequence
  Description of Artificial Sequence: Synthetic oligonucleotide
ggucaucugagauagcacu

SEQ ID NO: 435854 - RNA, 19 nt, Artificial Sequence
  Description of Artificial Sequence: Synthetic oligonucleotide
auagcacuuccaucuuuau

SEQ ID NO: 435855 - RNA, 19 nt, Artificial Sequence
  Description of Artificial Sequence: Synthetic oligonucleotide
accucgaugggaaaguauu

SEQ ID NO: 435856 - RNA, 19 nt, Artificial Sequence
  Description of Artificial Sequence: Synthetic oligonucleotide
aguaucgccuuggcuuccg

SEQ ID NO: 435857 - RNA, 19 nt, Artificial Sequence
  Description of Artificial Sequence: Synthetic oligonucleotide
uccugccaaauguccaaaa

SEQ ID NO: 435858 - RNA, 19 nt, Artificial Sequence
  Description of Artificial Sequence: Synthetic oligonucleotide
acaauuuggcgaagcguca

SEQ ID NO: 435859 - RNA, 19 nt, Artificial Sequence
  Description of Artificial Sequence: Synthetic oligonucleotide
gagaaugugaugauucauu

SEQ ID NO: 435860 - RNA, 19 nt, Artificial Sequence
  Description of Artificial Sequence: Synthetic oligonucleotide
ggcauauuugugccuggug

SEQ ID NO: 435861 - RNA, 19 nt, Artificial Sequence
  Description of Artificial Sequence: Synthetic oligonucleotide
agcccguacuucucuguca

SEQ ID NO: 435862 - RNA, 19 nt, Artificial Sequence
  Description of Artificial Sequence: Synthetic oligonucleotide
gaagaagggcgccgagaga

SEQ ID NO: 435863 - RNA, 19 nt, Artificial Sequence
  Description of Artificial Sequence: Synthetic oligonucleotide
acugaucaacuuugcucaa

SEQ ID NO: 435864 - RNA, 19 nt, Artificial Sequence
  Description of Artificial Sequence: Synthetic oligonucleotide
cagcacuucuccgguagcc

SEQ ID NO: 435865 - RNA, 19 nt, Artificial Sequence
  Description of Artificial Sequence: Synthetic oligonucleotide
cuuagcugugaggcacagg

SEQ ID NO: 435866 - RNA, 19 nt, Artificial Sequence
  Description of Artificial Sequence: Synthetic oligonucleotide
uccgcacuucaucgugucu

SEQ ID NO: 435867 - RNA, 19 nt, Artificial Sequence
  Description of Artificial Sequence: Synthetic oligonucleotide
acuuagcugugaggcacag

SEQ ID NO: 435868 - RNA, 19 nt, Artificial Sequence
  Description of Artificial Sequence: Synthetic oligonucleotide
gccuucggugaccaccucg

SEQ ID NO: 435869 - RNA, 19 nt, Artificial Sequence
  Description of Artificial Sequence: Synthetic oligonucleotide
gcccguacuucucugucag

SEQ ID NO: 435870 - RNA, 19 nt, Artificial Sequence
  Description of Artificial Sequence: Synthetic oligonucleotide
ggauacuuuaagguaaccu

SEQ ID NO: 435871 - RNA, 19 nt, Artificial Sequence
  Description of Artificial Sequence: Synthetic oligonucleotide
ggauacaacauuucuucau

SEQ ID NO: 435872 - RNA, 19 nt, Artificial Sequence
  Description of Artificial Sequence: Synthetic oligonucleotide
ggacaauucucugaaauau

SEQ ID NO: 435873 - RNA, 19 nt, Artificial Sequence
  Description of Artificial Sequence: Synthetic oligonucleotide
gaaagucuuuugucugccu

SEQ ID NO: 435874 - RNA, 19 nt, Artificial Sequence
  Description of Artificial Sequence: Synthetic oligonucleotide
guaucgccuuggcuuccgg

SEQ ID NO: 435875 - RNA, 19 nt, Artificial Sequence
  Description of Artificial Sequence: Synthetic oligonucleotide
guguuauaaccgagaaguc

SEQ ID NO: 435876 - RNA, 19 nt, Artificial Sequence
  Description of Artificial Sequence: Synthetic oligonucleotide
uccgaaagauggaguccau

SEQ ID NO: 435877 - RNA, 19 nt, Artificial Sequence
  Description of Artificial Sequence: Synthetic oligonucleotide
cagcgacgcauugguaugg

SEQ ID NO: 435878 - RNA, 19 nt, Artificial Sequence
  Description of Artificial Sequence: Synthetic oligonucleotide
cucuuugcaguguuuaguu

SEQ ID NO: 435879 - RNA, 19 nt, Artificial Sequence
  Description of Artificial Sequence: Synthetic oligonucleotide
caaugcacaguucacucau

SEQ ID NO: 435880 - RNA, 19 nt, Artificial Sequence
  Description of Artificial Sequence: Synthetic oligonucleotide
cacauggcgguguugauuu

SEQ ID NO: 435881 - RNA, 19 nt, Artificial Sequence
  Description of Artificial Sequence: Synthetic oligonucleotide
aggaucccuggucuaggaa

SEQ ID NO: 435882 - RNA, 19 nt, Artificial Sequence
  Description of Artificial Sequence: Synthetic oligonucleotide
ccaaguaucgccuuggcuu

SEQ ID NO: 435883 - RNA, 19 nt, Artificial Sequence
  Description of Artificial Sequence: Synthetic oligonucleotide
cggcauggguguuauaacc

SEQ ID NO: 435884 - RNA, 19 nt, Artificial Sequence
  Description of Artificial Sequence: Synthetic oligonucleotide
aagggcgccgagagaauau

SEQ ID NO: 435885 - RNA, 19 nt, Artificial Sequence
  Description of Artificial Sequence: Synthetic oligonucleotide
cacagacaucauccggcug

SEQ ID NO: 435886 - RNA, 19 nt, Artificial Sequence
  Description of Artificial Sequence: Synthetic oligonucleotide
gcgccgagagaauauuuac

SEQ ID NO: 435887 - RNA, 19 nt, Artificial Sequence
  Description of Artificial Sequence: Synthetic oligonucleotide
guucaaggacaaagucggc

SEQ ID NO: 435888 - RNA, 19 nt, Artificial Sequence
  Description of Artificial Sequence: Synthetic oligonucleotide
cguugcaagaaauucugga

SEQ ID NO: 435889 - RNA, 19 nt, Artificial Sequence
  Description of Artificial Sequence: Synthetic oligonucleotide
aaugcacaguucacucauu

SEQ ID NO: 435890 - RNA, 19 nt, Artificial Sequence
  Description of Artificial Sequence: Synthetic oligonucleotide
caucauccggcugccauca

SEQ ID NO: 435891 - RNA, 19 nt, Artificial Sequence
  Description of Artificial Sequence: Synthetic oligonucleotide
ggcgguguugauuuguccu

SEQ ID NO: 435892 - RNA, 19 nt, Artificial Sequence
  Description of Artificial Sequence: Synthetic oligonucleotide
auucaguaucccacaccca

SEQ ID NO: 435893 - RNA, 19 nt, Artificial Sequence
  Description of Artificial Sequence: Synthetic oligonucleotide
ccuggucuaggaagcauuc

SEQ ID NO: 435894 - RNA, 19 nt, Artificial Sequence
  Description of Artificial Sequence: Synthetic oligonucleotide
uccaugccguccagagauc

SEQ ID NO: 435895 - RNA, 19 nt, Artificial Sequence
  Description of Artificial Sequence: Synthetic oligonucleotide
acauggcgguguugauuug

SEQ ID NO: 435896 - RNA, 19 nt, Artificial Sequence
  Description of Artificial Sequence: Synthetic oligonucleotide
gaguaccaaguucagccuu

SEQ ID NO: 435897 - RNA, 19 nt, Artificial Sequence
  Description of Artificial Sequence: Synthetic oligonucleotide
cagcccguacuucucuguc

SEQ ID NO: 435898 - RNA, 19 nt, Artificial Sequence
  Description of Artificial Sequence: Synthetic oligonucleotide
ucgccuuggcuuccggcuu

SEQ ID NO: 435899 - RNA, 19 nt, Artificial Sequence
  Description of Artificial Sequence: Synthetic oligonucleotide
ccucgaugggaaaguauuc

SEQ ID NO: 435900 - RNA, 19 nt, Artificial Sequence
  Description of Artificial Sequence: Synthetic oligonucleotide
guccgcacuucaucguguc

SEQ ID NO: 435901 - RNA, 19 nt, Artificial Sequence
  Description of Artificial Sequence: Synthetic oligonucleotide
ccagcgacgcauugguaug

SEQ ID NO: 435902 - RNA, 19 nt, Artificial Sequence
  Description of Artificial Sequence: Synthetic oligonucleotide
cacuuagcugugaggcaca

SEQ ID NO: 435903 - RNA, 19 nt, Artificial Sequence
  Description of Artificial Sequence: Synthetic oligonucleotide
ggggauacuuuaagguaac

SEQ ID NO: 435904 - RNA, 19 nt, Artificial Sequence
  Description of Artificial Sequence: Synthetic oligonucleotide
gcgauucaguaucccacac

SEQ ID NO: 435905 - RNA, 19 nt, Artificial Sequence
  Description of Artificial Sequence: Synthetic oligonucleotide
aguccgcacuucaucgugu

SEQ ID NO: 435906 - RNA, 19 nt, Artificial Sequence
  Description of Artificial Sequence: Synthetic oligonucleotide
ugcuaccggcugugagaag

SEQ ID NO: 435907 - RNA, 19 nt, Artificial Sequence
  Description of Artificial Sequence: Synthetic oligonucleotide
ccuaaaauuucugugcagu

SEQ ID NO: 435908 - RNA, 19 nt, Artificial Sequence
  Description of Artificial Sequence: Synthetic oligonucleotide
ccggcugugagaaguuaac

SEQ ID NO: 435909 - RNA, 19 nt, Artificial Sequence
  Description of Artificial Sequence: Synthetic oligonucleotide
gggauacuuuaagguaacc

SEQ ID NO: 435910 - RNA, 19 nt, Artificial Sequence
  Description of Artificial Sequence: Synthetic oligonucleotide
accggcugugagaaguuaa

SEQ ID NO: 435911 - RNA, 19 nt, Artificial Sequence
  Description of Artificial Sequence: Synthetic oligonucleotide
ccugcuaccggcugugaga

SEQ ID NO: 435912 - RNA, 19 nt, Artificial Sequence
  Description of Artificial Sequence: Synthetic oligonucleotide
ggauucaugaucccuucuu

SEQ ID NO: 435913 - RNA, 19 nt, Artificial Sequence
  Description of Artificial Sequence: Synthetic oligonucleotide
caggaucccuggucuagga

SEQ ID NO: 435914 - RNA, 19 nt, Artificial Sequence
  Description of Artificial Sequence: Synthetic oligonucleotide
guuaaccaccagggcggcc

SEQ ID NO: 435915 - RNA, 19 nt, Artificial Sequence
  Description of Artificial Sequence: Synthetic oligonucleotide
cucgaagcgggaggagcug

SEQ ID NO: 435916 - RNA, 19 nt, Artificial Sequence
  Description of Artificial Sequence: Synthetic oligonucleotide
cugugcucgcagcccguac

SEQ ID NO: 435917 - RNA, 19 nt, Artificial Sequence
  Description of Artificial Sequence: Synthetic oligonucleotide
cgucaggagaccuguguug

SEQ ID NO: 435918 - RNA, 19 nt, Artificial Sequence
  Description of Artificial Sequence: Synthetic oligonucleotide
cugcuaccggcugugagaa

SEQ ID NO: 435919 - RNA, 19 nt, Artificial Sequence
  Description of Artificial Sequence: Synthetic oligonucleotide
aagcgucaggagaccugug

SEQ ID NO: 435920 - RNA, 19 nt, Artificial Sequence
  Description of Artificial Sequence: Synthetic oligonucleotide
cguauucacucgcagcauc

SEQ ID NO: 435921 - RNA, 19 nt, Artificial Sequence
  Description of Artificial Sequence: Synthetic oligonucleotide
cccucuuacauuauauuau

SEQ ID NO: 435922 - RNA, 19 nt, Artificial Sequence
  Description of Artificial Sequence: Synthetic oligonucleotide
gccugcuaccggcugugag

SEQ ID NO: 435923 - RNA, 19 nt, Artificial Sequence
  Description of Artificial Sequence: Synthetic oligonucleotide
cuggucuaggaagcauuca

SEQ ID NO: 435924 - RNA, 19 nt, Artificial Sequence
  Description of Artificial Sequence: Synthetic oligonucleotide
agcgacgcauugguaugga

SEQ ID NO: 435925 - RNA, 19 nt, Artificial Sequence
  Description of Artificial Sequence: Synthetic oligonucleotide
cgacgcauugguauggaga

SEQ ID NO: 435926 - RNA, 19 nt, Artificial Sequence
  Description of Artificial Sequence: Synthetic oligonucleotide
gcgacgcauugguauggag

SEQ ID NO: 435927 - RNA, 19 nt, Artificial Sequence
  Description of Artificial Sequence: Synthetic oligonucleotide
gcuaccggcugugagaagu

SEQ ID NO: 435928 - RNA, 19 nt, Artificial Sequence
  Description of Artificial Sequence: Synthetic oligonucleotide
aucccuggucuaggaagca

SEQ ID NO: 435929 - RNA, 19 nt, Artificial Sequence
  Description of Artificial Sequence: Synthetic oligonucleotide
caucgugucucaggagaga

SEQ ID NO: 435930 - RNA, 19 nt, Artificial Sequence
  Description of Artificial Sequence: Synthetic oligonucleotide
ccgcacuucaucgugucuc

SEQ ID NO: 435931 - RNA, 19 nt, Artificial Sequence
  Description of Artificial Sequence: Synthetic oligonucleotide
acgcauugguauggagaga

SEQ ID NO: 435932 - RNA, 19 nt, Artificial Sequence
  Description of Artificial Sequence: Synthetic oligonucleotide
ugcucgcagcccguacuuc

SEQ ID NO: 435933 - RNA, 19 nt, Artificial Sequence
  Description of Artificial Sequence: Synthetic oligonucleotide
cccgacucauuaggaaugc

SEQ ID NO: 435934 - RNA, 19 nt, Artificial Sequence
  Description of Artificial Sequence: Synthetic oligonucleotide
ccaggaucccuggucuagg

SEQ ID NO: 435935 - RNA, 19 nt, Artificial Sequence
  Description of Artificial Sequence: Synthetic oligonucleotide
caguaucccacacccaauu

SEQ ID NO: 435936 - RNA, 19 nt, Artificial Sequence
  Description of Artificial Sequence: Synthetic oligonucleotide
ccuucccuuggauaaaggu

SEQ ID NO: 435937 - RNA, 19 nt, Artificial Sequence
  Description of Artificial Sequence: Synthetic oligonucleotide
cauggcgguguugauuugu

SEQ ID NO: 435938 - RNA, 19 nt, Artificial Sequence
  Description of Artificial Sequence: Synthetic oligonucleotide
ccuuguaugaaaagcuguu

SEQ ID NO: 435939 - RNA, 19 nt, Artificial Sequence
  Description of Artificial Sequence: Synthetic oligonucleotide
ccagcacuucuccgguagc

SEQ ID NO: 435940 - RNA, 19 nt, Artificial Sequence
  Description of Artificial Sequence: Synthetic oligonucleotide
gugcucgaagcgggaggag

SEQ ID NO: 435941 - RNA, 19 nt, Artificial Sequence
  Description of Artificial Sequence: Synthetic oligonucleotide
ggcgaagcgucaggagacc

SEQ ID NO: 435942 - RNA, 19 nt, Artificial Sequence
  Description of Artificial Sequence: Synthetic oligonucleotide
aggccccgacucauuagga

SEQ ID NO: 435943 - RNA, 19 nt, Artificial Sequence
  Description of Artificial Sequence: Synthetic oligonucleotide
agggcgccgagagaauauu

SEQ ID NO: 435944 - RNA, 19 nt, Artificial Sequence
  Description of Artificial Sequence: Synthetic oligonucleotide
ggcgccgagagaauauuua

SEQ ID NO: 435945 - RNA, 19 nt, Artificial Sequence
  Description of Artificial Sequence: Synthetic oligonucleotide
ggccccgacucauuaggaa

SEQ ID NO: 435946 - RNA, 19 nt, Artificial Sequence
  Description of Artificial Sequence: Synthetic oligonucleotide
ggauuagguuucuguacuu

SEQ ID NO: 435947 - RNA, 19 nt, Artificial Sequence
  Description of Artificial Sequence: Synthetic oligonucleotide
ugccugcuaccggcuguga

SEQ ID NO: 435948 - RNA, 19 nt, Artificial Sequence
  Description of Artificial Sequence: Synthetic oligonucleotide
caccucgaugggaaaguau

SEQ ID NO: 435949 - RNA, 19 nt, Artificial Sequence
  Description of Artificial Sequence: Synthetic oligonucleotide
cucacccaaggguuuuaau

SEQ ID NO: 435950 - RNA, 19 nt, Artificial Sequence
  Description of Artificial Sequence: Synthetic oligonucleotide
cuuagcccucuuacauuau

SEQ ID NO: 435951 - RNA, 19 nt, Artificial Sequence
  Description of Artificial Sequence: Synthetic oligonucleotide
cuucuccgguagccuuauc

SEQ ID NO: 435952 - RNA, 19 nt, Artificial Sequence
  Description of Artificial Sequence: Synthetic oligonucleotide
ggucccaugcauugauuuu

SEQ ID NO: 435953 - RNA, 19 nt, Artificial Sequence
  Description of Artificial Sequence: Synthetic oligonucleotide
cuccgguagccuuauccuu

SEQ ID NO: 435954 - RNA, 19 nt, Artificial Sequence
  Description of Artificial Sequence: Synthetic oligonucleotide
auucaggccccgacucauu

SEQ ID NO: 435955 - RNA, 19 nt, Artificial Sequence
  Description of Artificial Sequence: Synthetic oligonucleotide
ccgguagccuuauccuuca

SEQ ID NO: 435956 - RNA, 19 nt, Artificial Sequence
  Description of Artificial Sequence: Synthetic oligonucleotide
guaccucuacaaagucagu

SEQ ID NO: 435957 - RNA, 19 nt, Artificial Sequence
  Description of Artificial Sequence: Synthetic oligonucleotide
cgcacuucaucgugucuca

SEQ ID NO: 435958 - RNA, 19 nt, Artificial Sequence
  Description of Artificial Sequence: Synthetic oligonucleotide
cuaccggcugugagaaguu

SEQ ID NO: 435959 - RNA, 19 nt, Artificial Sequence
  Description of Artificial Sequence: Synthetic oligonucleotide
gugcucgcagcccguacuu

SEQ ID NO: 435960 - RNA, 19 nt, Artificial Sequence
  Description of Artificial Sequence: Synthetic oligonucleotide
ccacagacaucauccggcu

SEQ ID NO: 435961 - RNA, 19 nt, Artificial Sequence
  Description of Artificial Sequence: Synthetic oligonucleotide
auccagcgacgcauuggua

SEQ ID NO: 435962 - RNA, 19 nt, Artificial Sequence
  Description of Artificial Sequence: Synthetic oligonucleotide
gcagcccguacuucucugu

SEQ ID NO: 435963 - RNA, 19 nt, Artificial Sequence
  Description of Artificial Sequence: Synthetic oligonucleotide
gaggucccaugcauugauu

SEQ ID NO: 435964 - RNA, 19 nt, Artificial Sequence
  Description of Artificial Sequence: Synthetic oligonucleotide
gcgucaggagaccuguguu

SEQ ID NO: 435965 - RNA, 19 nt, Artificial Sequence
  Description of Artificial Sequence: Synthetic oligonucleotide
cgacucauuaggaaugcuu

SEQ ID NO: 435966 - RNA, 19 nt, Artificial Sequence
  Description of Artificial Sequence: Synthetic oligonucleotide
cccguucugccucacccaa

SEQ ID NO: 435967 - RNA, 19 nt, Artificial Sequence
  Description of Artificial Sequence: Synthetic oligonucleotide
caaaaguagcuggcauauu

SEQ ID NO: 435968 - RNA, 19 nt, Artificial Sequence
  Description of Artificial Sequence: Synthetic oligonucleotide
ccacuaaaucgugcaaagu

SEQ ID NO: 435969 - RNA, 19 nt, Artificial Sequence
  Description of Artificial Sequence: Synthetic oligonucleotide
cagccuggcuggagaccaa

SEQ ID NO: 435970 - RNA, 19 nt, Artificial Sequence
  Description of Artificial Sequence: Synthetic oligonucleotide
gcgaagcgucaggagaccu

SEQ ID NO: 435971 - RNA, 19 nt, Artificial Sequence
  Description of Artificial Sequence: Synthetic oligonucleotide
gcguauucacucgcagcau

SEQ ID NO: 435972 - RNA, 19 nt, Artificial Sequence
  Description of Artificial Sequence: Synthetic oligonucleotide
ccacauggcgguguugauu

SEQ ID NO: 435973 - RNA, 19 nt, Artificial Sequence
  Description of Artificial Sequence: Synthetic oligonucleotide
gggcgccgagagaauauuu

SEQ ID NO: 435974 - RNA, 19 nt, Artificial Sequence
  Description of Artificial Sequence: Synthetic oligonucleotide
ccgacucauuaggaaugcu

SEQ ID NO: 435975 - RNA, 19 nt, Artificial Sequence
  Description of Artificial Sequence: Synthetic oligonucleotide
uguacgaauauaaaccugg

SEQ ID NO: 435976 - RNA, 19 nt, Artificial Sequence
  Description of Artificial Sequence: Synthetic oligonucleotide
aaggauugcagcugaaugc

SEQ ID NO: 435977 - RNA, 19 nt, Artificial Sequence
  Description of Artificial Sequence: Synthetic oligonucleotide
aauacauuguuaauaaagg

SEQ ID NO: 435978 - RNA, 19 nt, Artificial Sequence
  Description of Artificial Sequence: Synthetic oligonucleotide
uuuagaacgucucauuggg

SEQ ID NO: 435979 - RNA, 19 nt, Artificial Sequence
  Description of Artificial Sequence: Synthetic oligonucleotide
uccucaagcaguuacaacg

SEQ ID NO: 435980 - RNA, 19 nt, Artificial Sequence
  Description of Artificial Sequence: Synthetic oligonucleotide
ugaccaacaaaauacauug

SEQ ID NO: 435981 - RNA, 19 nt, Artificial Sequence
  Description of Artificial Sequence: Synthetic oligonucleotide
  modified_base (2)..(2): a, c, u, g, unknown or other
anguugauggucugcaugg

SEQ ID NO: 435982 - RNA, 19 nt, Artificial Sequence
  Description of Artificial Sequence: Synthetic oligonucleotide
aacauccucaagcaguuac

SEQ ID NO: 435983 - RNA, 19 nt, Artificial Sequence
  Description of Artificial Sequence: Synthetic oligonucleotide
agguguacgaauauaaacc

SEQ ID NO: 435984 - RNA, 19 nt, Artificial Sequence
  Description of Artificial Sequence: Synthetic oligonucleotide
uauacaauauacacuguac

SEQ ID NO: 435985 - RNA, 19 nt, Artificial Sequence
  Description of Artificial Sequence: Synthetic oligonucleotide
uuuaaaacaugucguagac

SEQ ID NO: 435986 - RNA, 19 nt, Artificial Sequence
  Description of Artificial Sequence: Synthetic oligonucleotide
acccaggccaaucagaugg

SEQ ID NO: 435987 - RNA, 19 nt, Artificial Sequence
  Description of Artificial Sequence: Synthetic oligonucleotide
uacacaauagagcuugggc

SEQ ID NO: 435988 - RNA, 19 nt, Artificial Sequence
  Description of Artificial Sequence: Synthetic oligonucleotide
uguaaggcaacauucucca

SEQ ID NO: 435989 - RNA, 19 nt, Artificial Sequence
  Description of Artificial Sequence: Synthetic oligonucleotide
uucuucgugacuagguggg

SEQ ID NO: 435990 - RNA, 19 nt, Artificial Sequence
  Description of Artificial Sequence: Synthetic oligonucleotide
uauggccggaugaugaggg

SEQ ID NO: 435991 - RNA, 19 nt, Artificial Sequence
  Description of Artificial Sequence: Synthetic oligonucleotide
guuuagaacgucucauugg

SEQ ID NO: 435992 - RNA, 19 nt, Artificial Sequence
  Description of Artificial Sequence: Synthetic oligonucleotide
uggaauaaggguccccacg

SEQ ID NO: 435993 - RNA, 19 nt, Artificial Sequence
  Description of Artificial Sequence: Synthetic oligonucleotide
ucacuuugcuccucgacgg

SEQ ID NO: 435994 - RNA, 19 nt, Artificial Sequence
  Description of Artificial Sequence: Synthetic oligonucleotide
aagcguuucugacacuggg

SEQ ID NO: 435995 - RNA, 19 nt, Artificial Sequence
  Description of Artificial Sequence: Synthetic oligonucleotide
uguugcucggccuuagggg

SEQ ID NO: 435996 - RNA, 19 nt, Artificial Sequence
  Description of Artificial Sequence: Synthetic oligonucleotide
aaggcaacauucuccauga

SEQ ID NO: 435997 - RNA, 19 nt, Artificial Sequence
  Description of Artificial Sequence: Synthetic oligonucleotide
  modified_base (6)..(6): a, c, u, g, unknown or other
ugaugnucccugcaggugc

SEQ ID NO: 435998 - RNA, 19 nt, Artificial Sequence
  Description of Artificial Sequence: Synthetic oligonucleotide
acaaucgucuauuauacaa

SEQ ID NO: 435999 - RNA, 19 nt, Artificial Sequence
  Description of Artificial Sequence: Synthetic oligonucleotide
cucagugaggagcugagcg

SEQ ID NO: 436000 - RNA, 19 nt, Artificial Sequence
  Description of Artificial Sequence: Synthetic oligonucleotide
uggccuuacaaguucuucg

SEQ ID NO: 436001 - RNA, 19 nt, Artificial Sequence
  Description of Artificial Sequence: Synthetic oligonucleotide
ucguauuugacuucuggac

SEQ ID NO: 436002 - RNA, 19 nt, Artificial Sequence
  Description of Artificial Sequence: Synthetic oligonucleotide
uagaacgucucauugggca

SEQ ID NO: 436003 - RNA, 19 nt, Artificial Sequence
  Description of Artificial Sequence: Synthetic oligonucleotide
  modified_base (3)..(3): a, c, u, g, unknown or other
ganguugauggucugcaug

SEQ ID NO: 436004 - RNA, 19 nt, Artificial Sequence
  Description of Artificial Sequence: Synthetic oligonucleotide
aguguaaggcaacauucuc

SEQ ID NO: 436005 - RNA, 19 nt, Artificial Sequence
  Description of Artificial Sequence: Synthetic oligonucleotide
aaacaugucguagacacaa

SEQ ID NO: 436006 - RNA, 19 nt, Artificial Sequence
  Description of Artificial Sequence: Synthetic oligonucleotide
agucguauuugacuucugg

SEQ ID NO: 436007 - RNA, 19 nt, Artificial Sequence
  Description of Artificial Sequence: Synthetic oligonucleotide
acacaaucgucuauuauac

SEQ ID NO: 436008 - RNA, 19 nt, Artificial Sequence
  Description of Artificial Sequence: Synthetic oligonucleotide
ucgucuauuauacaauaua

SEQ ID NO: 436009 - RNA, 19 nt, Artificial Sequence
  Description of Artificial Sequence: Synthetic oligonucleotide
aaucgucuauuauacaaua

SEQ ID NO: 436010 - RNA, 19 nt, Artificial Sequence
  Description of Artificial Sequence: Synthetic oligonucleotide
aauaaggguccccacgcgu

SEQ ID NO: 436011 - RNA, 19 nt, Artificial Sequence
  Description of Artificial Sequence: Synthetic oligonucleotide
gacacaaucgucuauuaua

SEQ ID NO: 436012 - RNA, 19 nt, Artificial Sequence
  Description of Artificial Sequence: Synthetic oligonucleotide
ggcaacuaaauuuauuagc

SEQ ID NO: 436013 - RNA, 19 nt, Artificial Sequence
  Description of Artificial Sequence: Synthetic oligonucleotide
  modified_base (6)..(6): a, c, u, g, unknown or other
auuganguugauggucugc

SEQ ID NO: 436014 - RNA, 19 nt, Artificial Sequence
  Description of Artificial Sequence: Synthetic oligonucleotide
cuuuccgaaggauugcagc

SEQ ID NO: 436015 - RNA, 19 nt, Artificial Sequence
  Description of Artificial Sequence: Synthetic oligonucleotide
ugcacuuggacuccauuga

SEQ ID NO: 436016 - RNA, 19 nt, Artificial Sequence
  Description of Artificial Sequence: Synthetic oligonucleotide
gagagugagugucacguug

SEQ ID NO: 436017 - RNA, 19 nt, Artificial Sequence
  Description of Artificial Sequence: Synthetic oligonucleotide
uguggguucgagcgugucg

SEQ ID NO: 436018 - RNA, 19 nt, Artificial Sequence
  Description of Artificial Sequence: Synthetic oligonucleotide
agaccucuuuuccccaucc

SEQ ID NO: 436019 - RNA, 19 nt, Artificial Sequence
  Description of Artificial Sequence: Synthetic oligonucleotide
ugaagcguuucugacacug

SEQ ID NO: 436020 - RNA, 19 nt, Artificial Sequence
  Description of Artificial Sequence: Synthetic oligonucleotide
uacgaauauaaaccugggu

SEQ ID NO: 436021 - RNA, 19 nt, Artificial Sequence
  Description of Artificial Sequence: Synthetic oligonucleotide
ucaagcaguuacaacgaaa

SEQ ID NO: 436022 - RNA, 19 nt, Artificial Sequence
  Description of Artificial Sequence: Synthetic oligonucleotide
uacgugugaaccucuuucc

SEQ ID NO: 436023 - RNA, 19 nt, Artificial Sequence
  Description of Artificial Sequence: Synthetic oligonucleotide
uugaccgggagagugagug

SEQ ID NO: 436024 - RNA, 19 nt, Artificial Sequence
  Description of Artificial Sequence: Synthetic oligonucleotide
caauuagcagguuguuucc

SEQ ID NO: 436025 - RNA, 19 nt, Artificial Sequence
  Description of Artificial Sequence: Synthetic oligonucleotide
ugauucaguugucuggauc

SEQ ID NO: 436026 - RNA, 19 nt, Artificial Sequence
  Description of Artificial Sequence: Synthetic oligonucleotide
gaauaaggguccccacgcg

SEQ ID NO: 436027 - RNA, 19 nt, Artificial Sequence
  Description of Artificial Sequence: Synthetic oligonucleotide
ucucauugggcauggccag

SEQ ID NO: 436028 - RNA, 19 nt, Artificial Sequence
  Description of Artificial Sequence: Synthetic oligonucleotide
acaaaucugucacuuaauu

SEQ ID NO: 436029 - RNA, 19 nt, Artificial Sequence
  Description of Artificial Sequence: Synthetic oligonucleotide
uguaccggagugguagucg

SEQ ID NO: 436030 - RNA, 19 nt, Artificial Sequence
  Description of Artificial Sequence: Synthetic oligonucleotide
agagugagugucacguugc

SEQ ID NO: 436031 - RNA, 19 nt, Artificial Sequence
  Description of Artificial Sequence: Synthetic oligonucleotide
cuacgugugaaccucuuuc

SEQ ID NO: 436032 - RNA, 19 nt, Artificial Sequence
  Description of Artificial Sequence: Synthetic oligonucleotide
uguaccucaccagaaggug

SEQ ID NO: 436033 - RNA, 19 nt, Artificial Sequence
  Description of Artificial Sequence: Synthetic oligonucleotide
aaugucuggaggagagccg

SEQ ID NO: 436034 - RNA, 19 nt, Artificial Sequence
  Description of Artificial Sequence: Synthetic oligonucleotide
uuagaacgucucauugggc

SEQ ID NO: 436035 - RNA, 19 nt, Artificial Sequence
  Description of Artificial Sequence: Synthetic oligonucleotide
gguuuagaacgucucauug

SEQ ID NO: 436036 - RNA, 19 nt, Artificial Sequence
  Description of Artificial Sequence: Synthetic oligonucleotide
  modified_base (9)..(9): a, c, u, g, unknown or other
uccauuganguugaugguc

SEQ ID NO: 436037 - RNA, 19 nt, Artificial Sequence
  Description of Artificial Sequence: Synthetic oligonucleotide
ugguagucguauuugacuu

SEQ ID NO: 436038 - RNA, 19 nt, Artificial Sequence
  Description of Artificial Sequence: Synthetic oligonucleotide
guguucgugauggugacag

SEQ ID NO: 436039 - RNA, 19 nt, Artificial Sequence
  Description of Artificial Sequence: Synthetic oligonucleotide
cucuguaccggagugguag

SEQ ID NO: 436040 - RNA, 19 nt, Artificial Sequence
  Description of Artificial Sequence: Synthetic oligonucleotide
uuauggccggaugaugagg

SEQ ID NO: 436041 - RNA, 19 nt, Artificial Sequence
  Description of Artificial Sequence: Synthetic oligonucleotide
ggaauaaggguccccacgc

SEQ ID NO: 436042 - RNA, 19 nt, Artificial Sequence
  Description of Artificial Sequence: Synthetic oligonucleotide
acuaggugggucuuguaau

SEQ ID NO: 436043 - RNA, 19 nt, Artificial Sequence
  Description of Artificial Sequence: Synthetic oligonucleotide
caugcgucgcuucuuuucc

SEQ ID NO: 436044 - RNA, 19 nt, Artificial Sequence
  Description of Artificial Sequence: Synthetic oligonucleotide
ucaucgcuacgugugaacc

SEQ ID NO: 436045 - RNA, 19 nt, Artificial Sequence
  Description of Artificial Sequence: Synthetic oligonucleotide
ucgagcgugucguuggagc

SEQ ID NO: 436046 - RNA, 19 nt, Artificial Sequence
  Description of Artificial Sequence: Synthetic oligonucleotide
gcaacuaaauuuauuagca

SEQ ID NO: 436047 - RNA, 19 nt, Artificial Sequence
  Description of Artificial Sequence: Synthetic oligonucleotide
ugucguuggagcucaucgc

SEQ ID NO: 436048 - RNA, 19 nt, Artificial Sequence
  Description of Artificial Sequence: Synthetic oligonucleotide
ugcgucgcuucuuuucccg

SEQ ID NO: 436049 - RNA, 19 nt, Artificial Sequence
  Description of Artificial Sequence: Synthetic oligonucleotide
uucuagacuuugccucagg

SEQ ID NO: 436050 - RNA, 19 nt, Artificial Sequence
  Description of Artificial Sequence: Synthetic oligonucleotide
uguaaugcuuggugagaug

SEQ ID NO: 436051 - RNA, 19 nt, Artificial Sequence
  Description of Artificial Sequence: Synthetic oligonucleotide
agggcucuggacaauuagc

SEQ ID NO: 436052 - RNA, 19 nt, Artificial Sequence
  Description of Artificial Sequence: Synthetic oligonucleotide
uggggugagggccacccag

SEQ ID NO: 436053 - RNA, 19 nt, Artificial Sequence
  Description of Artificial Sequence: Synthetic oligonucleotide
uguggagaggggucguuug

SEQ ID NO: 436054 - RNA, 19 nt, Artificial Sequence
  Description of Artificial Sequence: Synthetic oligonucleotide
aguacagggcccuggggug

SEQ ID NO: 436055 - RNA, 19 nt, Artificial Sequence
  Description of Artificial Sequence: Synthetic oligonucleotide
cuuauggccggaugaugag

SEQ ID NO: 436056 - RNA, 19 nt, Artificial Sequence
  Description of Artificial Sequence: Synthetic oligonucleotide
  modified_base (18)..(18): a, c, u, g, unknown or other
cacuuggacuccauugang

SEQ ID NO: 436057 - RNA, 19 nt, Artificial Sequence
  Description of Artificial Sequence: Synthetic oligonucleotide
aacgucucauugggcaugg

SEQ ID NO: 436058 - RNA, 19 nt, Artificial Sequence
  Description of Artificial Sequence: Synthetic oligonucleotide
guucgugauggugacaggc

SEQ ID NO: 436059 - RNA, 19 nt, Artificial Sequence
  Description of Artificial Sequence: Synthetic oligonucleotide
aucgcuacgugugaaccuc

SEQ ID NO: 436060 - RNA, 19 nt, Artificial Sequence
  Description of Artificial Sequence: Synthetic oligonucleotide
guacgaauauaaaccuggg

SEQ ID NO: 436061 - RNA, 19 nt, Artificial Sequence
  Description of Artificial Sequence: Synthetic oligonucleotide
agaagggaucaauuaaaua

SEQ ID NO: 436062 - RNA, 19 nt, Artificial Sequence
  Description of Artificial Sequence: Synthetic oligonucleotide
gucuuguaaugcuugguga

SEQ ID NO: 436063 - RNA, 19 nt, Artificial Sequence
  Description of Artificial Sequence: Synthetic oligonucleotide
guggucucgaucagcaccg

SEQ ID NO: 436064 - RNA, 19 nt, Artificial Sequence
  Description of Artificial Sequence: Synthetic oligonucleotide
uccucgacggagugaaaug

SEQ ID NO: 436065 - RNA, 19 nt, Artificial Sequence
  Description of Artificial Sequence: Synthetic oligonucleotide
uguugaccgggagagugag

SEQ ID NO: 436066 - RNA, 19 nt, Artificial Sequence
  Description of Artificial Sequence: Synthetic oligonucleotide
cgucuauuauacaauauac

SEQ ID NO: 436067 - RNA, 19 nt, Artificial Sequence
  Description of Artificial Sequence: Synthetic oligonucleotide
aggugcaaucuuuggcagg

SEQ ID NO: 436068 - RNA, 19 nt, Artificial Sequence
  Description of Artificial Sequence: Synthetic oligonucleotide
uggugagauggucacuccu

SEQ ID NO: 436069 - RNA, 19 nt, Artificial Sequence
  Description of Artificial Sequence: Synthetic oligonucleotide
gacggagugaaaugcaugu

SEQ ID NO: 436070 - RNA, 19 nt, Artificial Sequence
  Description of Artificial Sequence: Synthetic oligonucleotide
gacuaggugggucuuguaa

SEQ ID NO: 436071 - RNA, 19 nt, Artificial Sequence
  Description of Artificial Sequence: Synthetic oligonucleotide
aggauugcagcugaaugcu

SEQ ID NO: 436072 - RNA, 19 nt, Artificial Sequence
  Description of Artificial Sequence: Synthetic oligonucleotide
gguucgagcgugucguugg

SEQ ID NO: 436073 - RNA, 19 nt, Artificial Sequence
  Description of Artificial Sequence: Synthetic oligonucleotide
uccucaugaagcguuucug

SEQ ID NO: 436074 - RNA, 19 nt, Artificial Sequence
  Description of Artificial Sequence: Synthetic oligonucleotide
guacacaauagagcuuggg

SEQ ID NO: 436075 - RNA, 19 nt, Artificial Sequence
  Description of Artificial Sequence: Synthetic oligonucleotide
  modified_base (7)..(7): a, c, u, g, unknown or other
cauuganguugauggucug

SEQ ID NO: 436076 - RNA, 19 nt, Artificial Sequence
  Description of Artificial Sequence: Synthetic oligonucleotide
caguguucaucaucugaag

SEQ ID NO: 436077 - RNA, 19 nt, Artificial Sequence
  Description of Artificial Sequence: Synthetic oligonucleotide
auuggaggggcauggcaca

SEQ ID NO: 436078 - RNA, 19 nt, Artificial Sequence
  Description of Artificial Sequence: Synthetic oligonucleotide
uuguugaccgggagaguga

SEQ ID NO: 436079 - RNA, 19 nt, Artificial Sequence
  Description of Artificial Sequence: Synthetic oligonucleotide
  modified_base (8)..(8): a, c, u, g, unknown or other
gaugaugnucccugcaggu

SEQ ID NO: 436080 - RNA, 19 nt, Artificial Sequence
  Description of Artificial Sequence: Synthetic oligonucleotide
auaaggguccccacgcguc

SEQ ID NO: 436081 - RNA, 19 nt, Artificial Sequence
  Description of Artificial Sequence: Synthetic oligonucleotide
gccuaguagagaaaggaag

SEQ ID NO: 436082 - RNA, 19 nt, Artificial Sequence
  Description of Artificial Sequence: Synthetic oligonucleotide
guugcagacaaagggucgc

SEQ ID NO: 436083 - RNA, 19 nt, Artificial Sequence
  Description of Artificial Sequence: Synthetic oligonucleotide
gaagcguuucugacacugg

SEQ ID NO: 436084 - RNA, 19 nt, Artificial Sequence
  Description of Artificial Sequence: Synthetic oligonucleotide
  modified_base (2)..(2): a, c, u, g, unknown or other
gnucccugcaggugcaauc

SEQ ID NO: 436085 - RNA, 19 nt, Artificial Sequence
  Description of Artificial Sequence: Synthetic oligonucleotide
ugagugucacguugccacc

SEQ ID NO: 436086 - RNA, 19 nt, Artificial Sequence
  Description of Artificial Sequence: Synthetic oligonucleotide
auguugucugcuguggucu

SEQ ID NO: 436087 - RNA, 19 nt, Artificial Sequence
  Description of Artificial Sequence: Synthetic oligonucleotide
uguucgugauggugacagg

SEQ ID NO: 436088 - RNA, 19 nt, Artificial Sequence
  Description of Artificial Sequence: Synthetic oligonucleotide
ucacguugccaccccaccu

SEQ ID NO: 436089 - RNA, 19 nt, Artificial Sequence
  Description of Artificial Sequence: Synthetic oligonucleotide
  modified_base (7)..(7): a, c, u, g, unknown or other
augaugnucccugcaggug

SEQ ID NO: 436090 - RNA, 19 nt, Artificial Sequence
  Description of Artificial Sequence: Synthetic oligonucleotide
agaagagccccucccugug

SEQ ID NO: 436091 - RNA, 19 nt, Artificial Sequence
  Description of Artificial Sequence: Synthetic oligonucleotide
cuagaggcagccuguacca

SEQ ID NO: 436092 - RNA, 19 nt, Artificial Sequence
  Description of Artificial Sequence: Synthetic oligonucleotide
uggagcucaucgcuacgug

SEQ ID NO: 436093 - RNA, 19 nt, Artificial Sequence
  Description of Artificial Sequence: Synthetic oligonucleotide
agacacaaucgucuauuau

SEQ ID NO: 436094 - RNA, 19 nt, Artificial Sequence
  Description of Artificial Sequence: Synthetic oligonucleotide
ucgacggagugaaaugcau

SEQ ID NO: 436095 - RNA, 19 nt, Artificial Sequence
  Description of Artificial Sequence: Synthetic oligonucleotide
aagcgcuuguccccugugu

SEQ ID NO: 436096 - RNA, 19 nt, Artificial Sequence
  Description of Artificial Sequence: Synthetic oligonucleotide
uuucuagacuuugccucag

SEQ ID NO: 436097 - RNA, 19 nt, Artificial Sequence
  Description of Artificial Sequence: Synthetic oligonucleotide
uaccucaccagaaggugua

SEQ ID NO: 436098 - RNA, 19 nt, Artificial Sequence
  Description of Artificial Sequence: Synthetic oligonucleotide
  modified_base (4)..(4): a, c, u, g, unknown or other
uganguugauggucugcau

SEQ ID NO: 436099 - RNA, 19 nt, Artificial Sequence
  Description of Artificial Sequence: Synthetic oligonucleotide
agaacgucucauugggcau

SEQ ID NO: 436100 - RNA, 19 nt, Artificial Sequence
  Description of Artificial Sequence: Synthetic oligonucleotide
ggcgaugagaugcucagca

SEQ ID NO: 436101 - RNA, 19 nt, Artificial Sequence
  Description of Artificial Sequence: Synthetic oligonucleotide
ugucacguugccaccccac

SEQ ID NO: 436102 - RNA, 19 nt, Artificial Sequence
  Description of Artificial Sequence: Synthetic oligonucleotide
aggacuguuacagguggug

SEQ ID NO: 436103 - RNA, 19 nt, Artificial Sequence
  Description of Artificial Sequence: Synthetic oligonucleotide
ggaacggugggaagggugg

SEQ ID NO: 436104 - RNA, 19 nt, Artificial Sequence
  Description of Artificial Sequence: Synthetic oligonucleotide
agacacguucugcacugug

SEQ ID NO: 436105 - RNA, 19 nt, Artificial Sequence
  Description of Artificial Sequence: Synthetic oligonucleotide
acgugcaggccaugcgucg

SEQ ID NO: 436106 - RNA, 19 nt, Artificial Sequence
  Description of Artificial Sequence: Synthetic oligonucleotide
acgcguccugguuuagaac

SEQ ID NO: 436107 - RNA, 19 nt, Artificial Sequence
  Description of Artificial Sequence: Synthetic oligonucleotide
acaggcuuauggccggaug

SEQ ID NO: 436108 - RNA, 19 nt, Artificial Sequence
  Description of Artificial Sequence: Synthetic oligonucleotide
cucaucgcuacgugugaac

SEQ ID NO: 436109 - RNA, 19 nt, Artificial Sequence
  Description of Artificial Sequence: Synthetic oligonucleotide
gaacgucucauugggcaug

SEQ ID NO: 436110 - RNA, 19 nt, Artificial Sequence
  Description of Artificial Sequence: Synthetic oligonucleotide
ccuaguagagaaaggaaga

SEQ ID NO: 436111 - RNA, 19 nt, Artificial Sequence
  Description of Artificial Sequence: Synthetic oligonucleotide
uggacgaggacugucugua

SEQ ID NO: 436112 - RNA, 19 nt, Artificial Sequence
  Description of Artificial Sequence: Synthetic oligonucleotide
ggaauggguucggauaggg

SEQ ID NO: 436113 - RNA, 19 nt, Artificial Sequence
  Description of Artificial Sequence: Synthetic oligonucleotide
cgcguccugguuuagaacg

SEQ ID NO: 436114 - RNA, 19 nt, Artificial Sequence
  Description of Artificial Sequence: Synthetic oligonucleotide
cuuggacuugcugaaccac

SEQ ID NO: 436115 - RNA, 19 nt, Artificial Sequence
  Description of Artificial Sequence: Synthetic oligonucleotide
ugggcaccuguccaccaug

SEQ ID NO: 436116 - RNA, 19 nt, Artificial Sequence
  Description of Artificial Sequence: Synthetic oligonucleotide
ugccucaggcaacuaaauu

SEQ ID NO: 436117 - RNA, 19 nt, Artificial Sequence
  Description of Artificial Sequence: Synthetic oligonucleotide
ccucaguuggccuuacaag

SEQ ID NO: 436118 - RNA, 19 nt, Artificial Sequence
  Description of Artificial Sequence: Synthetic oligonucleotide
ucguagacacaaucgucua

SEQ ID NO: 436119 - RNA, 19 nt, Artificial Sequence
  Description of Artificial Sequence: Synthetic oligonucleotide
cacguugccaccccaccug

SEQ ID NO: 436120 - RNA, 19 nt, Artificial Sequence
  Description of Artificial Sequence: Synthetic oligonucleotide
uugccucaggcaacuaaau

SEQ ID NO: 436121 - RNA, 19 nt, Artificial Sequence
  Description of Artificial Sequence: Synthetic oligonucleotide
  modified_base (13)..(13): a, c, u, g, unknown or other
aggcugaugaugnucccug

SEQ ID NO: 436122 - RNA, 19 nt, Artificial Sequence
  Description of Artificial Sequence: Synthetic oligonucleotide
ggacuguuacagguggugg

SEQ ID NO: 436123 - RNA, 19 nt, Artificial Sequence
  Description of Artificial Sequence: Synthetic oligonucleotide
gacacguucugcacuguga

SEQ ID NO: 436124 - RNA, 19 nt, Artificial Sequence
  Description of Artificial Sequence: Synthetic oligonucleotide
caggcuuauggccggauga

SEQ ID NO: 436125 - RNA, 19 nt, Artificial Sequence
  Description of Artificial Sequence: Synthetic oligonucleotide
ucuguaccggagugguagu

SEQ ID NO: 436126 - RNA, 19 nt, Artificial Sequence
  Description of Artificial Sequence: Synthetic oligonucleotide
ggcucuggacaauuagcag

SEQ ID NO: 436127 - RNA, 19 nt, Artificial Sequence
  Description of Artificial Sequence: Synthetic oligonucleotide
cuaguagagaaaggaagaa

SEQ ID NO: 436128 - RNA, 19 nt, Artificial Sequence
  Description of Artificial Sequence: Synthetic oligonucleotide
cuguaccacccgcagugcc

SEQ ID NO: 436129 - RNA, 19 nt, Artificial Sequence
  Description of Artificial Sequence: Synthetic oligonucleotide
gcgucugaccuuucaagag

SEQ ID NO: 436130 - RNA, 19 nt, Artificial Sequence
  Description of Artificial Sequence: Synthetic oligonucleotide
gucguagacacaaucgucu

SEQ ID NO: 436131 - RNA, 19 nt, Artificial Sequence
  Description of Artificial Sequence: Synthetic oligonucleotide
ccuuacaaguucuucguga

SEQ ID NO: 436132 - RNA, 19 nt, Artificial Sequence
  Description of Artificial Sequence: Synthetic oligonucleotide
guaccacucaggaugggga

SEQ ID NO: 436133 - RNA, 19 nt, Artificial Sequence
  Description of Artificial Sequence: Synthetic oligonucleotide
guuacagguggugguugag

SEQ ID NO: 436134 - RNA, 19 nt, Artificial Sequence
  Description of Artificial Sequence: Synthetic oligonucleotide
gaccgggagagugaguguc

SEQ ID NO: 436135 - RNA, 19 nt, Artificial Sequence
  Description of Artificial Sequence: Synthetic oligonucleotide
  modified_base (5)..(5): a, c, u, g, unknown or other
gaugnucccugcaggugca

SEQ ID NO: 436136 - RNA, 19 nt, Artificial Sequence
  Description of Artificial Sequence: Synthetic oligonucleotide
aucgucuauuauacaauau

SEQ ID NO: 436137 - RNA, 19 nt, Artificial Sequence
  Description of Artificial Sequence: Synthetic oligonucleotide
agucugggauguggcacac

SEQ ID NO: 436138 - RNA, 19 nt, Artificial Sequence
  Description of Artificial Sequence: Synthetic oligonucleotide
caaucgucuauuauacaau

SEQ ID NO: 436139 - RNA, 19 nt, Artificial Sequence
  Description of Artificial Sequence: Synthetic oligonucleotide
ggcgucugaccuuucaaga

SEQ ID NO: 436140 - RNA, 19 nt, Artificial Sequence
  Description of Artificial Sequence: Synthetic oligonucleotide
acuguuacagguggugguu

SEQ ID NO: 436141 - RNA, 19 nt, Artificial Sequence
  Description of Artificial Sequence: Synthetic oligonucleotide
gucguuggagcucaucgcu

SEQ ID NO: 436142 - RNA, 19 nt, Artificial Sequence
  Description of Artificial Sequence: Synthetic oligonucleotide
cucgacggagugaaaugca

SEQ ID NO: 436143 - RNA, 19 nt, Artificial Sequence
  Description of Artificial Sequence: Synthetic oligonucleotide
cuucgugacuagguggguc

SEQ ID NO: 436144 - RNA, 19 nt, Artificial Sequence
  Description of Artificial Sequence: Synthetic oligonucleotide
cacgugcaggccaugcguc

SEQ ID NO: 436145 - RNA, 19 nt, Artificial Sequence
  Description of Artificial Sequence: Synthetic oligonucleotide
cuguuacagguggugguug

SEQ ID NO: 436146 - RNA, 19 nt, Artificial Sequence
  Description of Artificial Sequence: Synthetic oligonucleotide
cuguguggguucgagcgug

SEQ ID NO: 436147 - RNA, 19 nt, Artificial Sequence
  Description of Artificial Sequence: Synthetic oligonucleotide
agcgagggccugcuccauc

SEQ ID NO: 436148 - RNA, 19 nt, Artificial Sequence
  Description of Artificial Sequence: Synthetic oligonucleotide
cauuggccccacucuguac

SEQ ID NO: 436149 - RNA, 19 nt, Artificial Sequence
  Description of Artificial Sequence: Synthetic oligonucleotide
gcuuauggccggaugauga

SEQ ID NO: 436150 - RNA, 19 nt, Artificial Sequence
  Description of Artificial Sequence: Synthetic oligonucleotide
guagucguauuugacuucu

SEQ ID NO: 436151 - RNA, 19 nt, Artificial Sequence
  Description of Artificial Sequence: Synthetic oligonucleotide
cacaaucgucuauuauaca

SEQ ID NO: 436152 - RNA, 19 nt, Artificial Sequence
  Description of Artificial Sequence: Synthetic oligonucleotide
gguagucguauuugacuuc

SEQ ID NO: 436153 - RNA, 19 nt, Artificial Sequence
  Description of Artificial Sequence: Synthetic oligonucleotide
ggcacgugcaggccaugcg

SEQ ID NO: 436154 - RNA, 19 nt, Artificial Sequence
  Description of Artificial Sequence: Synthetic oligonucleotide
gaccuuucaagaggaagcu

SEQ ID NO: 436155 - RNA, 19 nt, Artificial Sequence
  Description of Artificial Sequence: Synthetic oligonucleotide
auggcacaaugggacuccg

SEQ ID NO: 436156 - RNA, 19 nt, Artificial Sequence
  Description of Artificial Sequence: Synthetic oligonucleotide
ucgcuacgugugaaccucu

SEQ ID NO: 436157 - RNA, 19 nt, Artificial Sequence
  Description of Artificial Sequence: Synthetic oligonucleotide
gcggacaugggcccggagc

SEQ ID NO: 436158 - RNA, 19 nt, Artificial Sequence
  Description of Artificial Sequence: Synthetic oligonucleotide
ugaccgggagagugagugu

SEQ ID NO: 436159 - RNA, 19 nt, Artificial Sequence
  Description of Artificial Sequence: Synthetic oligonucleotide
caucugaagucugagugua

SEQ ID NO: 436160 - RNA, 19 nt, Artificial Sequence
  Description of Artificial Sequence: Synthetic oligonucleotide
caaucuuuggcaggggucu

SEQ ID NO: 436161 - RNA, 19 nt, Artificial Sequence
  Description of Artificial Sequence: Synthetic oligonucleotide
accggagugguagucguau

SEQ ID NO: 436162 - RNA, 19 nt, Artificial Sequence
  Description of Artificial Sequence: Synthetic oligonucleotide
gucucgaucagcaccgucu

SEQ ID NO: 436163 - RNA, 19 nt, Artificial Sequence
  Description of Artificial Sequence: Synthetic oligonucleotide
accucaccagaagguguac

SEQ ID NO: 436164 - RNA, 19 nt, Artificial Sequence
  Description of Artificial Sequence: Synthetic oligonucleotide
ccgccaguguucgugaugg

SEQ ID NO: 436165 - RNA, 19 nt, Artificial Sequence
  Description of Artificial Sequence: Synthetic oligonucleotide
gaacggugggaaggguggc

SEQ ID NO: 436166 - RNA, 19 nt, Artificial Sequence
  Description of Artificial Sequence: Synthetic oligonucleotide
uccccacgcguccugguuu

SEQ ID NO: 436167 - RNA, 19 nt, Artificial Sequence
  Description of Artificial Sequence: Synthetic oligonucleotide
ggggagggcgccuaguaga

SEQ ID NO: 436168 - RNA, 19 nt, Artificial Sequence
  Description of Artificial Sequence: Synthetic oligonucleotide
acguugccaccccaccugu

SEQ ID NO: 436169 - RNA, 19 nt, Artificial Sequence
  Description of Artificial Sequence: Synthetic oligonucleotide
cacgcguccugguuuagaa

SEQ ID NO: 436170 - RNA, 19 nt, Artificial Sequence
  Description of Artificial Sequence: Synthetic oligonucleotide
ccucgacggagugaaaugc

SEQ ID NO: 436171 - RNA, 19 nt, Artificial Sequence
  Description of Artificial Sequence: Synthetic oligonucleotide
ugcccgccaguguucguga

SEQ ID NO: 436172 - RNA, 19 nt, Artificial Sequence
  Description of Artificial Sequence: Synthetic oligonucleotide
ucuucgugacuaggugggu

SEQ ID NO: 436173 - RNA, 19 nt, Artificial Sequence
  Description of Artificial Sequence: Synthetic oligonucleotide
gccucaggcaacuaaauuu

SEQ ID NO: 436174 - RNA, 19 nt, Artificial Sequence
  Description of Artificial Sequence: Synthetic oligonucleotide
ggcacaggauuggaggggc

SEQ ID NO: 436175 - RNA, 19 nt, Artificial Sequence
  Description of Artificial Sequence: Synthetic oligonucleotide
cgucucauugggcauggcc

SEQ ID NO: 436176 - RNA, 19 nt, Artificial Sequence
  Description of Artificial Sequence: Synthetic oligonucleotide
ugcauggccugagcagcug

SEQ ID NO: 436177 - RNA, 19 nt, Artificial Sequence
  Description of Artificial Sequence: Synthetic oligonucleotide
gccuuacaaguucuucgug

SEQ ID NO: 436178 - RNA, 19 nt, Artificial Sequence
  Description of Artificial Sequence: Synthetic oligonucleotide
cugaguguaaggcaacauu

SEQ ID NO: 436179 - RNA, 19 nt, Artificial Sequence
  Description of Artificial Sequence: Synthetic oligonucleotide
gaguccgccggcgucugac

SEQ ID NO: 436180 - RNA, 19 nt, Artificial Sequence
  Description of Artificial Sequence: Synthetic oligonucleotide
aaacauccucaagcaguua

SEQ ID NO: 436181 - RNA, 19 nt, Artificial Sequence
  Description of Artificial Sequence: Synthetic oligonucleotide
gggagagugagugucacgu

SEQ ID NO: 436182 - RNA, 19 nt, Artificial Sequence
  Description of Artificial Sequence: Synthetic oligonucleotide
ccucaagcaguuacaacga

SEQ ID NO: 436183 - RNA, 19 nt, Artificial Sequence
  Description of Artificial Sequence: Synthetic oligonucleotide
ccaugcgucgcuucuuuuc

SEQ ID NO: 436184 - RNA, 19 nt, Artificial Sequence
  Description of Artificial Sequence: Synthetic oligonucleotide
  modified_base (3)..(3): a, c, u, g, unknown or other
ugnucccugcaggugcaau

SEQ ID NO: 436185 - RNA, 19 nt, Artificial Sequence
  Description of Artificial Sequence: Synthetic oligonucleotide
gcgccuaguagagaaagga

SEQ ID NO: 436186 - RNA, 19 nt, Artificial Sequence
  Description of Artificial Sequence: Synthetic oligonucleotide
cucaagcaguuacaacgaa

SEQ ID NO: 436187 - RNA, 19 nt, Artificial Sequence
  Description of Artificial Sequence: Synthetic oligonucleotide
gggaacggugggaagggug

SEQ ID NO: 436188 - RNA, 19 nt, Artificial Sequence
  Description of Artificial Sequence: Synthetic oligonucleotide
aggcuuauggccggaugau

SEQ ID NO: 436189 - RNA, 19 nt, Artificial Sequence
  Description of Artificial Sequence: Synthetic oligonucleotide
gugcaaucuuuggcagggg

SEQ ID NO: 436190 - RNA, 19 nt, Artificial Sequence
  Description of Artificial Sequence: Synthetic oligonucleotide
uggccccacucuguaccgg

SEQ ID NO: 436191 - RNA, 19 nt, Artificial Sequence
  Description of Artificial Sequence: Synthetic oligonucleotide
cacacccugcacuuggacu

SEQ ID NO: 436192 - RNA, 19 nt, Artificial Sequence
  Description of Artificial Sequence: Synthetic oligonucleotide
guggguucgagcgugucgu

SEQ ID NO: 436193 - RNA, 19 nt, Artificial Sequence
  Description of Artificial Sequence: Synthetic oligonucleotide
ggcgccuaguagagaaagg

SEQ ID NO: 436194 - RNA, 19 nt, Artificial Sequence
  Description of Artificial Sequence: Synthetic oligonucleotide
gacuuugccucaggcaacu

SEQ ID NO: 436195 - RNA, 19 nt, Artificial Sequence
  Description of Artificial Sequence: Synthetic oligonucleotide
guaccggagugguagucgu

SEQ ID NO: 436196 - RNA, 19 nt, Artificial Sequence
  Description of Artificial Sequence: Synthetic oligonucleotide
  modified_base (8)..(8): a, c, u, g, unknown or other
ccauuganguugauggucu

SEQ ID NO: 436197 - RNA, 19 nt, Artificial Sequence
  Description of Artificial Sequence: Synthetic oligonucleotide
ggccuuacaaguucuucgu

SEQ ID NO: 436198 - RNA, 19 nt, Artificial Sequence
  Description of Artificial Sequence: Synthetic oligonucleotide
uaccggagugguagucgua

SEQ ID NO: 436199 - RNA, 19 nt, Artificial Sequence
  Description of Artificial Sequence: Synthetic oligonucleotide
augggcccggagcaaggau

SEQ ID NO: 436200 - RNA, 19 nt, Artificial Sequence
  Description of Artificial Sequence: Synthetic oligonucleotide
ggcgcacucaaagcgcuug

SEQ ID NO: 436201 - RNA, 19 nt, Artificial Sequence
  Description of Artificial Sequence: Synthetic oligonucleotide
gugaggggagggcgccuag

SEQ ID NO: 436202 - RNA, 19 nt, Artificial Sequence
  Description of Artificial Sequence: Synthetic oligonucleotide
gcgucgcuucuuuucccgg

SEQ ID NO: 436203 - RNA, 19 nt, Artificial Sequence
  Description of Artificial Sequence: Synthetic oligonucleotide
caguugucuggaucugaaa

SEQ ID NO: 436204 - RNA, 19 nt, Artificial Sequence
  Description of Artificial Sequence: Synthetic oligonucleotide
cuguaccggagugguaguc

SEQ ID NO: 436205 - RNA, 19 nt, Artificial Sequence
  Description of Artificial Sequence: Synthetic oligonucleotide
ccucaccagaagguguacg

SEQ ID NO: 436206 - RNA, 19 nt, Artificial Sequence
  Description of Artificial Sequence: Synthetic oligonucleotide
guucgagcgugucguugga

SEQ ID NO: 436207 - RNA, 19 nt, Artificial Sequence
  Description of Artificial Sequence: Synthetic oligonucleotide
guaccucaccagaaggugu

SEQ ID NO: 436208 - RNA, 19 nt, Artificial Sequence
  Description of Artificial Sequence: Synthetic oligonucleotide
  modified_base (16)..(16): a, c, u, g, unknown or other
cuuggacuccauuganguu

SEQ ID NO: 436209 - RNA, 19 nt, Artificial Sequence
  Description of Artificial Sequence: Synthetic oligonucleotide
cacccugcacuuggacucc

SEQ ID NO: 436210 - RNA, 19 nt, Artificial Sequence
  Description of Artificial Sequence: Synthetic oligonucleotide
gugugcaggcggacauggg

SEQ ID NO: 436211 - RNA, 19 nt, Artificial Sequence
  Description of Artificial Sequence: Synthetic oligonucleotide
caucgcuacgugugaaccu

SEQ ID NO: 436212 - RNA, 19 nt, Artificial Sequence
  Description of Artificial Sequence: Synthetic oligonucleotide
uguuuccugccuggaugau

SEQ ID NO: 436213 - RNA, 19 nt, Artificial Sequence
  Description of Artificial Sequence: Synthetic oligonucleotide
cggagcaaggaugucuucc

SEQ ID NO: 436214 - RNA, 19 nt, Artificial Sequence
  Description of Artificial Sequence: Synthetic oligonucleotide
acggagugaaaugcauguu

SEQ ID NO: 436215 - RNA, 19 nt, Artificial Sequence
  Description of Artificial Sequence: Synthetic oligonucleotide
cgacggagugaaaugcaug

SEQ ID NO: 436216 - RNA, 19 nt, Artificial Sequence
  Description of Artificial Sequence: Synthetic oligonucleotide
ggagcucaucgcuacgugu

SEQ ID NO: 436217 - RNA, 19 nt, Artificial Sequence
  Description of Artificial Sequence: Synthetic oligonucleotide
gcaguugugggcaccuguc

SEQ ID NO: 436218 - RNA, 19 nt, Artificial Sequence
  Description of Artificial Sequence: Synthetic oligonucleotide
cacucuguaccggaguggu

SEQ ID NO: 436219 - RNA, 19 nt, Artificial Sequence
  Description of Artificial Sequence: Synthetic oligonucleotide
aucugaagucugaguguaa

SEQ ID NO: 436220 - RNA, 19 nt, Artificial Sequence
  Description of Artificial Sequence: Synthetic oligonucleotide
  modified_base (14)..(14): a, c, u, g, unknown or other
caggcugaugaugnucccu

SEQ ID NO: 436221 - RNA, 19 nt, Artificial Sequence
  Description of Artificial Sequence: Synthetic oligonucleotide
ggguucgagcgugucguug

SEQ ID NO: 436222 - RNA, 19 nt, Artificial Sequence
  Description of Artificial Sequence: Synthetic oligonucleotide
ccuggacgaggacugucug

SEQ ID NO: 436223 - RNA, 19 nt, Artificial Sequence
  Description of Artificial Sequence: Synthetic oligonucleotide
ggacgaggacugucuguac

SEQ ID NO: 436224 - RNA, 19 nt, Artificial Sequence
  Description of Artificial Sequence: Synthetic oligonucleotide
cuggacgaggacugucugu

SEQ ID NO: 436225 - RNA, 19 nt, Artificial Sequence
  Description of Artificial Sequence: Synthetic oligonucleotide
ggucucgaucagcaccguc

SEQ ID NO: 436226 - RNA, 19 nt, Artificial Sequence
  Description of Artificial Sequence: Synthetic oligonucleotide
gaggaguccgccggcgucu

SEQ ID NO: 436227 - RNA, 19 nt, Artificial Sequence
  Description of Artificial Sequence: Synthetic oligonucleotide
uccgccggcgucugaccuu

SEQ ID NO: 436228 - RNA, 19 nt, Artificial Sequence
  Description of Artificial Sequence: Synthetic oligonucleotide
uggguucgagcgugucguu

SEQ ID NO: 436229 - RNA, 19 nt, Artificial Sequence
  Description of Artificial Sequence: Synthetic oligonucleotide
gcacgugcaggccaugcgu

SEQ ID NO: 436230 - RNA, 19 nt, Artificial Sequence
  Description of Artificial Sequence: Synthetic oligonucleotide
gguuguuuccugccuggau

SEQ ID NO: 436231 - RNA, 19 nt, Artificial Sequence
  Description of Artificial Sequence: Synthetic oligonucleotide
cuccucgacggagugaaau

SEQ ID NO: 436232 - RNA, 19 nt, Artificial Sequence
  Description of Artificial Sequence: Synthetic oligonucleotide
aggaguccgccggcgucug

SEQ ID NO: 436233 - RNA, 19 nt, Artificial Sequence
  Description of Artificial Sequence: Synthetic oligonucleotide
  modified_base (4)..(4): a, c, u, g, unknown or other
augnucccugcaggugcaa

SEQ ID NO: 436234 - RNA, 19 nt, Artificial Sequence
  Description of Artificial Sequence: Synthetic oligonucleotide
cggacaugggcccggagca

SEQ ID NO: 436235 - RNA, 19 nt, Artificial Sequence
  Description of Artificial Sequence: Synthetic oligonucleotide
caggccaugcgucgcuucu

SEQ ID NO: 436236 - RNA, 19 nt, Artificial Sequence
  Description of Artificial Sequence: Synthetic oligonucleotide
gggcacgugcaggccaugc

SEQ ID NO: 436237 - RNA, 19 nt, Artificial Sequence
  Description of Artificial Sequence: Synthetic oligonucleotide
gcaggcggacaugggcccg

SEQ ID NO: 436238 - RNA, 19 nt, Artificial Sequence
  Description of Artificial Sequence: Synthetic oligonucleotide
gcagggaauggguucggau

SEQ ID NO: 436239 - RNA, 19 nt, Artificial Sequence
  Description of Artificial Sequence: Synthetic oligonucleotide
ggcaccuguccaccaugga

SEQ ID NO: 436240 - RNA, 19 nt, Artificial Sequence
  Description of Artificial Sequence: Synthetic oligonucleotide
cgccuaguagagaaaggaa

SEQ ID NO: 436241 - RNA, 19 nt, Artificial Sequence
  Description of Artificial Sequence: Synthetic oligonucleotide
guccgccggcgucugaccu

SEQ ID NO: 436242 - RNA, 19 nt, Artificial Sequence
  Description of Artificial Sequence: Synthetic oligonucleotide
ccauggacccaggccaauc

SEQ ID NO: 436243 - RNA, 19 nt, Artificial Sequence
  Description of Artificial Sequence: Synthetic oligonucleotide
ggcggacaugggcccggag

SEQ ID NO: 436244 - RNA, 19 nt, Artificial Sequence
  Description of Artificial Sequence: Synthetic oligonucleotide
gccggcgucugaccuuuca

SEQ ID NO: 436245 - RNA, 19 nt, Artificial Sequence
  Description of Artificial Sequence: Synthetic oligonucleotide
gcucaucgcuacgugugaa

SEQ ID NO: 436246 - RNA, 19 nt, Artificial Sequence
  Description of Artificial Sequence: Synthetic oligonucleotide
cgugcaggccaugcgucgc

SEQ ID NO: 436247 - RNA, 19 nt, Artificial Sequence
  Description of Artificial Sequence: Synthetic oligonucleotide
gcgaugagaugcucagcau

SEQ ID NO: 436248 - RNA, 19 nt, Artificial Sequence
  Description of Artificial Sequence: Synthetic oligonucleotide
gcuacgugugaaccucuuu

SEQ ID NO: 436249 - RNA, 19 nt, Artificial Sequence
  Description of Artificial Sequence: Synthetic oligonucleotide
ggacaauuagcagguuguu

SEQ ID NO: 436250 - RNA, 19 nt, Artificial Sequence
  Description of Artificial Sequence: Synthetic oligonucleotide
cuccugccucaguuggccu

SEQ ID NO: 436251 - RNA, 19 nt, Artificial Sequence
  Description of Artificial Sequence: Synthetic oligonucleotide
guugaccgggagagugagu

SEQ ID NO: 436252 - RNA, 19 nt, Artificial Sequence
  Description of Artificial Sequence: Synthetic oligonucleotide
ccggcgucugaccuuucaa

SEQ ID NO: 436253 - RNA, 19 nt, Artificial Sequence
  Description of Artificial Sequence: Synthetic oligonucleotide
gggcccggagcaaggaugu

SEQ ID NO: 436254 - RNA, 19 nt, Artificial Sequence
  Description of Artificial Sequence: Synthetic oligonucleotide
gguuguugaccgggagagu

SEQ ID NO: 436255 - RNA, 19 nt, Artificial Sequence
  Description of Artificial Sequence: Synthetic oligonucleotide
ggccaugcgucgcuucuuu

SEQ ID NO: 436256 - RNA, 19 nt, Artificial Sequence
  Description of Artificial Sequence: Synthetic oligonucleotide
cgagcgugucguuggagcu

SEQ ID NO: 436257 - RNA, 19 nt, Artificial Sequence
  Description of Artificial Sequence: Synthetic oligonucleotide
ggcaccacuuggacuugcu

SEQ ID NO: 436258 - RNA, 19 nt, Artificial Sequence
  Description of Artificial Sequence: Synthetic oligonucleotide
ccgaaggauugcagcugaa

SEQ ID NO: 436259 - RNA, 19 nt, Artificial Sequence
  Description of Artificial Sequence: Synthetic oligonucleotide
gcguccugguuuagaacgu

SEQ ID NO: 436260 - RNA, 19 nt, Artificial Sequence
  Description of Artificial Sequence: Synthetic oligonucleotide
cguagacacaaucgucuau

SEQ ID NO: 436261 - RNA, 19 nt, Artificial Sequence
  Description of Artificial Sequence: Synthetic oligonucleotide
ggaguccgccggcgucuga

SEQ ID NO: 436262 - RNA, 19 nt, Artificial Sequence
  Description of Artificial Sequence: Synthetic oligonucleotide
ccccacgcguccugguuua

SEQ ID NO: 436263 - RNA, 19 nt, Artificial Sequence
  Description of Artificial Sequence: Synthetic oligonucleotide
ccacgcguccugguuuaga

SEQ ID NO: 436264 - RNA, 19 nt, Artificial Sequence
  Description of Artificial Sequence: Synthetic oligonucleotide
cgaaggauugcagcugaau

SEQ ID NO: 436265 - RNA, 19 nt, Artificial Sequence
  Description of Artificial Sequence: Synthetic oligonucleotide
cccacgcguccugguuuag

SEQ ID NO: 436266 - RNA, 19 nt, Artificial Sequence
  Description of Artificial Sequence: Synthetic oligonucleotide
gccaugcgucgcuucuuuu

SEQ ID NO: 436267 - RNA, 19 nt, Artificial Sequence
  Description of Artificial Sequence: Synthetic oligonucleotide
ggcccggagcaaggauguc

SEQ ID NO: 436268 - RNA, 19 nt, Artificial Sequence
  Description of Artificial Sequence: Synthetic oligonucleotide
gcuccucgacggagugaaa

SEQ ID NO: 436269 - RNA, 19 nt, Artificial Sequence
  Description of Artificial Sequence: Synthetic oligonucleotide
gcugcccgccaguguucgu

SEQ ID NO: 436270 - RNA, 19 nt, Artificial Sequence
  Description of Artificial Sequence: Synthetic oligonucleotide
ccggagugguagucguauu

SEQ ID NO: 436271 - RNA, 19 nt, Artificial Sequence
  Description of Artificial Sequence: Synthetic oligonucleotide
gcccgccaguguucgugau

SEQ ID NO: 436272 - RNA, 19 nt, Artificial Sequence
  Description of Artificial Sequence: Synthetic oligonucleotide
cagcgagggccugcuccau

SEQ ID NO: 436273 - RNA, 19 nt, Artificial Sequence
  Description of Artificial Sequence: Synthetic oligonucleotide
cgcuacgugugaaccucuu

SEQ ID NO: 436274 - RNA, 19 nt, Artificial Sequence
  Description of Artificial Sequence: Synthetic oligonucleotide
ccgccggcgucugaccuuu

SEQ ID NO: 436275 - RNA, 19 nt, Artificial Sequence
  Description of Artificial Sequence: Synthetic oligonucleotide
gcgugucguuggagcucau

SEQ ID NO: 436276 - RNA, 19 nt, Artificial Sequence
  Description of Artificial Sequence: Synthetic oligonucleotide
  modified_base (1)..(1): a, c, u, g, unknown or other
nucccugcaggugcaaucu

SEQ ID NO: 436277 - RNA, 19 nt, Artificial Sequence
  Description of Artificial Sequence: Synthetic oligonucleotide
uuaaucgucauuaagugug

SEQ ID NO: 436278 - RNA, 19 nt, Artificial Sequence
  Description of Artificial Sequence: Synthetic oligonucleotide
ugugaguucuguauaaacg

SEQ ID NO: 436279 - RNA, 19 nt, Artificial Sequence
  Description of Artificial Sequence: Synthetic oligonucleotide
aaaugaagguuauguacgc

SEQ ID NO: 436280 - RNA, 19 nt, Artificial Sequence
  Description of Artificial Sequence: Synthetic oligonucleotide
ucauuaauagcuuacccag

SEQ ID NO: 436281 - RNA, 19 nt, Artificial Sequence
  Description of Artificial Sequence: Synthetic oligonucleotide
agguguauagcuuaacacc

SEQ ID NO: 436282 - RNA, 19 nt, Artificial Sequence
  Description of Artificial Sequence: Synthetic oligonucleotide
uucacagugguucauauca

SEQ ID NO: 436283 - RNA, 19 nt, Artificial Sequence
  Description of Artificial Sequence: Synthetic oligonucleotide
uguauaaacggguggacgg

SEQ ID NO: 436284 - RNA, 19 nt, Artificial Sequence
  Description of Artificial Sequence: Synthetic oligonucleotide
acuauuuguacauaacaag

SEQ ID NO: 436285 - RNA, 19 nt, Artificial Sequence
  Description of Artificial Sequence: Synthetic oligonucleotide
agcacuaaaucacuauugc

SEQ ID NO: 436286 - RNA, 19 nt, Artificial Sequence
  Description of Artificial Sequence: Synthetic oligonucleotide
ucaagugacaucuauuucu

SEQ ID NO: 436287 - RNA, 19 nt, Artificial Sequence
  Description of Artificial Sequence: Synthetic oligonucleotide
uuaaaacagucugugaacg

SEQ ID NO: 436288 - RNA, 19 nt, Artificial Sequence
  Description of Artificial Sequence: Synthetic oligonucleotide
uacgcuauguuacaagucc

SEQ ID NO: 436289 - RNA, 19 nt, Artificial Sequence
  Description of Artificial Sequence: Synthetic oligonucleotide
uuuaacaggucguagauua

SEQ ID NO: 436290 - RNA, 19 nt, Artificial Sequence
  Description of Artificial Sequence: Synthetic oligonucleotide
ugaucauaccccuuggcgg

SEQ ID NO: 436291 - RNA, 19 nt, Artificial Sequence
  Description of Artificial Sequence: Synthetic oligonucleotide
uauggagaaauuuugcaac

SEQ ID NO: 436292 - RNA, 19 nt, Artificial Sequence
  Description of Artificial Sequence: Synthetic oligonucleotide
ggauacuugauuuuguagg

SEQ ID NO: 436293 - RNA, 19 nt, Artificial Sequence
  Description of Artificial Sequence: Synthetic oligonucleotide
agcaaaucauaguacugcc

SEQ ID NO: 436294 - RNA, 19 nt, Artificial Sequence
  Description of Artificial Sequence: Synthetic oligonucleotide
aagauuacucagugaauag

SEQ ID NO: 436295 - RNA, 19 nt, Artificial Sequence
  Description of Artificial Sequence: Synthetic oligonucleotide
cuuuaaucgucauuaagug

SEQ ID NO: 436296 - RNA, 19 nt, Artificial Sequence
  Description of Artificial Sequence: Synthetic oligonucleotide
guaaccaaaauggaggagg

SEQ ID NO: 436297 - RNA, 19 nt, Artificial Sequence
  Description of Artificial Sequence: Synthetic oligonucleotide
ucgauauccgccaucgccg

SEQ ID NO: 436298 - RNA, 19 nt, Artificial Sequence
  Description of Artificial Sequence: Synthetic oligonucleotide
uguuacaagucccaaccag

SEQ ID NO: 436299 - RNA, 19 nt, Artificial Sequence
  Description of Artificial Sequence: Synthetic oligonucleotide
ugaguucuguauaaacggg

SEQ ID NO: 436300 - RNA, 19 nt, Artificial Sequence
  Description of Artificial Sequence: Synthetic oligonucleotide
uuaucgauauccgccaucg

SEQ ID NO: 436301 - RNA, 19 nt, Artificial Sequence
  Description of Artificial Sequence: Synthetic oligonucleotide
uggacggcaaguuaguucc

SEQ ID NO: 436302 - RNA, 19 nt, Artificial Sequence
  Description of Artificial Sequence: Synthetic oligonucleotide
aucauuaauagcuuaccca

SEQ ID NO: 436303 - RNA, 19 nt, Artificial Sequence
  Description of Artificial Sequence: Synthetic oligonucleotide
gaauaaagaauguagccaa

SEQ ID NO: 436304 - RNA, 19 nt, Artificial Sequence
  Description of Artificial Sequence: Synthetic oligonucleotide
cucgcauuuaauaagucug

SEQ ID NO: 436305 - RNA, 19 nt, Artificial Sequence
  Description of Artificial Sequence: Synthetic oligonucleotide
uagauucuauugaugcugg

SEQ ID NO: 436306 - RNA, 19 nt, Artificial Sequence
  Description of Artificial Sequence: Synthetic oligonucleotide
guccccaagaaacaaauag

SEQ ID NO: 436307 - RNA, 19 nt, Artificial Sequence
  Description of Artificial Sequence: Synthetic oligonucleotide
agcuuaauguuguaucuuc

SEQ ID NO: 436308 - RNA, 19 nt, Artificial Sequence
  Description of Artificial Sequence: Synthetic oligonucleotide
agaauguagccaaagaaag

SEQ ID NO: 436309 - RNA, 19 nt, Artificial Sequence
  Description of Artificial Sequence: Synthetic oligonucleotide
uaauagcuuacccagcacu

SEQ ID NO: 436310 - RNA, 19 nt, Artificial Sequence
  Description of Artificial Sequence: Synthetic oligonucleotide
aaauagccggagcaaauca

SEQ ID NO: 436311 - RNA, 19 nt, Artificial Sequence
  Description of Artificial Sequence: Synthetic oligonucleotide
ucguaaaauccguagauuc

SEQ ID NO: 436312 - RNA, 19 nt, Artificial Sequence
  Description of Artificial Sequence: Synthetic oligonucleotide
auagauugaagaucuggug

SEQ ID NO: 436313 - RNA, 19 nt, Artificial Sequence
  Description of Artificial Sequence: Synthetic oligonucleotide
uacacuugccccucgacag

SEQ ID NO: 436314 - RNA, 19 nt, Artificial Sequence
  Description of Artificial Sequence: Synthetic oligonucleotide
augcauuuaugacaaugac

SEQ ID NO: 436315 - RNA, 19 nt, Artificial Sequence
  Description of Artificial Sequence: Synthetic oligonucleotide
uacauauaagauccaaauc

SEQ ID NO: 436316 - RNA, 19 nt, Artificial Sequence
  Description of Artificial Sequence: Synthetic oligonucleotide
uggugauaaaccuccauga

SEQ ID NO: 436317 - RNA, 19 nt, Artificial Sequence
  Description of Artificial Sequence: Synthetic oligonucleotide
cuaucggucacucguauag

SEQ ID NO: 436318 - RNA, 19 nt, Artificial Sequence
  Description of Artificial Sequence: Synthetic oligonucleotide
gugaucauaccccuuggcg

SEQ ID NO: 436319 - RNA, 19 nt, Artificial Sequence
  Description of Artificial Sequence: Synthetic oligonucleotide
ucuacauauaagauccaaa

SEQ ID NO: 436320 - RNA, 19 nt, Artificial Sequence
  Description of Artificial Sequence: Synthetic oligonucleotide
ucauaauucgccgaaucug

SEQ ID NO: 436321 - RNA, 19 nt, Artificial Sequence
  Description of Artificial Sequence: Synthetic oligonucleotide
gacaggauaaccugccgag

SEQ ID NO: 436322 - RNA, 19 nt, Artificial Sequence
  Description of Artificial Sequence: Synthetic oligonucleotide
ucaucguaaaauccguaga

SEQ ID NO: 436323 - RNA, 19 nt, Artificial Sequence
  Description of Artificial Sequence: Synthetic oligonucleotide
uguacgcuauguuacaagu

SEQ ID NO: 436324 - RNA, 19 nt, Artificial Sequence
  Description of Artificial Sequence: Synthetic oligonucleotide
uguacagacucacgcaccc

SEQ ID NO: 436325 - RNA, 19 nt, Artificial Sequence
  Description of Artificial Sequence: Synthetic oligonucleotide
caucauuaauagcuuaccc

SEQ ID NO: 436326 - RNA, 19 nt, Artificial Sequence
  Description of Artificial Sequence: Synthetic oligonucleotide
ugucaagugacaucuauuu

SEQ ID NO: 436327 - RNA, 19 nt, Artificial Sequence
  Description of Artificial Sequence: Synthetic oligonucleotide
guuauguacgcuauguuac

SEQ ID NO: 436328 - RNA, 19 nt, Artificial Sequence
  Description of Artificial Sequence: Synthetic oligonucleotide
gagcaaaucauaguacugc

SEQ ID NO: 436329 - RNA, 19 nt, Artificial Sequence
  Description of Artificial Sequence: Synthetic oligonucleotide
gauuucguucuccuguagc

SEQ ID NO: 436330 - RNA, 19 nt, Artificial Sequence
  Description of Artificial Sequence: Synthetic oligonucleotide
aguuuaucgauauccgcca

SEQ ID NO: 436331 - RNA, 19 nt, Artificial Sequence
  Description of Artificial Sequence: Synthetic oligonucleotide
aagguuauguacgcuaugu

SEQ ID NO: 436332 - RNA, 19 nt, Artificial Sequence
  Description of Artificial Sequence: Synthetic oligonucleotide
ucauuaagugugcgguggg

SEQ ID NO: 436333 - RNA, 19 nt, Artificial Sequence
  Description of Artificial Sequence: Synthetic oligonucleotide
uucuauaauuugaagcuuu

SEQ ID NO: 436334 - RNA, 19 nt, Artificial Sequence
  Description of Artificial Sequence: Synthetic oligonucleotide
caaaucauaguacugccca

SEQ ID NO: 436335 - RNA, 19 nt, Artificial Sequence
  Description of Artificial Sequence: Synthetic oligonucleotide
uuucaccccagccuaagac

SEQ ID NO: 436336 - RNA, 19 nt, Artificial Sequence
  Description of Artificial Sequence: Synthetic oligonucleotide
aucaccgcagaauaaagaa

SEQ ID NO: 436337 - RNA, 19 nt, Artificial Sequence
  Description of Artificial Sequence: Synthetic oligonucleotide
uuguacauaacaagacaaa

SEQ ID NO: 436338 - RNA, 19 nt, Artificial Sequence
  Description of Artificial Sequence: Synthetic oligonucleotide
gcuauaaccagugagugcc

SEQ ID NO: 436339 - RNA, 19 nt, Artificial Sequence
  Description of Artificial Sequence: Synthetic oligonucleotide
uguacacgggcaucugugg

SEQ ID NO: 436340 - RNA, 19 nt, Artificial Sequence
  Description of Artificial Sequence: Synthetic oligonucleotide
ucucccgagacuucaagca

SEQ ID NO: 436341 - RNA, 19 nt, Artificial Sequence
  Description of Artificial Sequence: Synthetic oligonucleotide
uuugauuuauaagccucag

SEQ ID NO: 436342 - RNA, 19 nt, Artificial Sequence
  Description of Artificial Sequence: Synthetic oligonucleotide
uccacucgcugcuauaacc

SEQ ID NO: 436343 - RNA, 19 nt, Artificial Sequence
  Description of Artificial Sequence: Synthetic oligonucleotide
ucucauaauucgccgaauc

SEQ ID NO: 436344 - RNA, 19 nt, Artificial Sequence
  Description of Artificial Sequence: Synthetic oligonucleotide
ucgcauuuaauaagucuga

SEQ ID NO: 436345 - RNA, 19 nt, Artificial Sequence
  Description of Artificial Sequence: Synthetic oligonucleotide
uuaugacaaugacauguac

SEQ ID NO: 436346 - RNA, 19 nt, Artificial Sequence
  Description of Artificial Sequence: Synthetic oligonucleotide
uucuguauaaacgggugga

SEQ ID NO: 436347 - RNA, 19 nt, Artificial Sequence
  Description of Artificial Sequence: Synthetic oligonucleotide
agcgcuaucggucacucgu

SEQ ID NO: 436348 - RNA, 19 nt, Artificial Sequence
  Description of Artificial Sequence: Synthetic oligonucleotide
gucauuaagugugcggugg

SEQ ID NO: 436349 - RNA, 19 nt, Artificial Sequence
  Description of Artificial Sequence: Synthetic oligonucleotide
aagaccaauaguacacuug

SEQ ID NO: 436350 - RNA, 19 nt, Artificial Sequence
  Description of Artificial Sequence: Synthetic oligonucleotide
uaaucgucauuaagugugc

SEQ ID NO: 436351 - RNA, 19 nt, Artificial Sequence
  Description of Artificial Sequence: Synthetic oligonucleotide
ugugaucauaccccuuggc

SEQ ID NO: 436352 - RNA, 19 nt, Artificial Sequence
  Description of Artificial Sequence: Synthetic oligonucleotide
uuauguacgcuauguuaca

SEQ ID NO: 436353 - RNA, 19 nt, Artificial Sequence
  Description of Artificial Sequence: Synthetic oligonucleotide
agggcgugccaauacaguc

SEQ ID NO: 436354 - RNA, 19 nt, Artificial Sequence
  Description of Artificial Sequence: Synthetic oligonucleotide
ugguacaucaguuggucuc

SEQ ID NO: 436355 - RNA, 19 nt, Artificial Sequence
  Description of Artificial Sequence: Synthetic oligonucleotide
uccguagauucuauugaug

SEQ ID NO: 436356 - RNA, 19 nt, Artificial Sequence
  Description of Artificial Sequence: Synthetic oligonucleotide
ucgucauuaagugugcggu

SEQ ID NO: 436357 - RNA, 19 nt, Artificial Sequence
  Description of Artificial Sequence: Synthetic oligonucleotide
agacucacgcacccuaggg

SEQ ID NO: 436358 - RNA, 19 nt, Artificial Sequence
  Description of Artificial Sequence: Synthetic oligonucleotide
uuaauagcuuacccagcac

SEQ ID NO: 436359 - RNA, 19 nt, Artificial Sequence
  Description of Artificial Sequence: Synthetic oligonucleotide
ugaagguuauguacgcuau

SEQ ID NO: 436360 - RNA, 19 nt, Artificial Sequence
  Description of Artificial Sequence: Synthetic oligonucleotide
ugaugggcucuacauauaa

SEQ ID NO: 436361 - RNA, 19 nt, Artificial Sequence
  Description of Artificial Sequence: Synthetic oligonucleotide
agaaugacgcgcuuccacu

SEQ ID NO: 436362 - RNA, 19 nt, Artificial Sequence
  Description of Artificial Sequence: Synthetic oligonucleotide
uucuugagaaugacgcgcu

SEQ ID NO: 436363 - RNA, 19 nt, Artificial Sequence
  Description of Artificial Sequence: Synthetic oligonucleotide
ugcuauaaccagugagugc

SEQ ID NO: 436364 - RNA, 19 nt, Artificial Sequence
  Description of Artificial Sequence: Synthetic oligonucleotide
auggcugcuaucgguaagc

SEQ ID NO: 436365 - RNA, 19 nt, Artificial Sequence
  Description of Artificial Sequence: Synthetic oligonucleotide
auaaaccuccaugacagca

SEQ ID NO: 436366 - RNA, 19 nt, Artificial Sequence
  Description of Artificial Sequence: Synthetic oligonucleotide
auuaagugugcggugggag

SEQ ID NO: 436367 - RNA, 19 nt, Artificial Sequence
  Description of Artificial Sequence: Synthetic oligonucleotide
uagacuaucugggaauugu

SEQ ID NO: 436368 - RNA, 19 nt, Artificial Sequence
  Description of Artificial Sequence: Synthetic oligonucleotide
gauucuauugaugcuggca

SEQ ID NO: 436369 - RNA, 19 nt, Artificial Sequence
  Description of Artificial Sequence: Synthetic oligonucleotide
auguacgcuauguuacaag

SEQ ID NO: 436370 - RNA, 19 nt, Artificial Sequence
  Description of Artificial Sequence: Synthetic oligonucleotide
aaagcgcuaucggucacuc

SEQ ID NO: 436371 - RNA, 19 nt, Artificial Sequence
  Description of Artificial Sequence: Synthetic oligonucleotide
caaugacauguacagacuc

SEQ ID NO: 436372 - RNA, 19 nt, Artificial Sequence
  Description of Artificial Sequence: Synthetic oligonucleotide
gagaaugacgcgcuuccac

SEQ ID NO: 436373 - RNA, 19 nt, Artificial Sequence
  Description of Artificial Sequence: Synthetic oligonucleotide
ccguagauucuauugaugc

SEQ ID NO: 436374 - RNA, 19 nt, Artificial Sequence
  Description of Artificial Sequence: Synthetic oligonucleotide
augaagguuauguacgcua

SEQ ID NO: 436375 - RNA, 19 nt, Artificial Sequence
  Description of Artificial Sequence: Synthetic oligonucleotide
cucgacaggauaaccugcc

SEQ ID NO: 436376 - RNA, 19 nt, Artificial Sequence
  Description of Artificial Sequence: Synthetic oligonucleotide
aaugaagguuauguacgcu

SEQ ID NO: 436377 - RNA, 19 nt, Artificial Sequence
  Description of Artificial Sequence: Synthetic oligonucleotide
ucgacaggauaaccugccg

SEQ ID NO: 436378 - RNA, 19 nt, Artificial Sequence
  Description of Artificial Sequence: Synthetic oligonucleotide
uucuccggauacuugauuu

SEQ ID NO: 436379 - RNA, 19 nt, Artificial Sequence
  Description of Artificial Sequence: Synthetic oligonucleotide
gaguccucggauuucguuc

SEQ ID NO: 436380 - RNA, 19 nt, Artificial Sequence
  Description of Artificial Sequence: Synthetic oligonucleotide
agcgguaaccaaaauggag

SEQ ID NO: 436381 - RNA, 19 nt, Artificial Sequence
  Description of Artificial Sequence: Synthetic oligonucleotide
gacucacgcacccuagggc

SEQ ID NO: 436382 - RNA, 19 nt, Artificial Sequence
  Description of Artificial Sequence: Synthetic oligonucleotide
uaaacggguggacggcaag

SEQ ID NO: 436383 - RNA, 19 nt, Artificial Sequence
  Description of Artificial Sequence: Synthetic oligonucleotide
gaagguuauguacgcuaug

SEQ ID NO: 436384 - RNA, 19 nt, Artificial Sequence
  Description of Artificial Sequence: Synthetic oligonucleotide
uauaaccagugagugccag

SEQ ID NO: 436385 - RNA, 19 nt, Artificial Sequence
  Description of Artificial Sequence: Synthetic oligonucleotide
uucaaauagccggagcaaa

SEQ ID NO: 436386 - RNA, 19 nt, Artificial Sequence
  Description of Artificial Sequence: Synthetic oligonucleotide
aaaacgcuuucuugagaau

SEQ ID NO: 436387 - RNA, 19 nt, Artificial Sequence
  Description of Artificial Sequence: Synthetic oligonucleotide
auguacagacucacgcacc

SEQ ID NO: 436388 - RNA, 19 nt, Artificial Sequence
  Description of Artificial Sequence: Synthetic oligonucleotide
gacuaucugggaauuguac

SEQ ID NO: 436389 - RNA, 19 nt, Artificial Sequence
  Description of Artificial Sequence: Synthetic oligonucleotide
aauagcuuacccagcacua

SEQ ID NO: 436390 - RNA, 19 nt, Artificial Sequence
  Description of Artificial Sequence: Synthetic oligonucleotide
gauggcugcuaucgguaag

SEQ ID NO: 436391 - RNA, 19 nt, Artificial Sequence
  Description of Artificial Sequence: Synthetic oligonucleotide
uggagaaauuuugcaacca

SEQ ID NO: 436392 - RNA, 19 nt, Artificial Sequence
  Description of Artificial Sequence: Synthetic oligonucleotide
ucacucguauaggacagug

SEQ ID NO: 436393 - RNA, 19 nt, Artificial Sequence
  Description of Artificial Sequence: Synthetic oligonucleotide
uguucacagugguucauau

SEQ ID NO: 436394 - RNA, 19 nt, Artificial Sequence
  Description of Artificial Sequence: Synthetic oligonucleotide
aucggucacucguauagga

SEQ ID NO: 436395 - RNA, 19 nt, Artificial Sequence
  Description of Artificial Sequence: Synthetic oligonucleotide
acgcgcuuccacucgcugc

SEQ ID NO: 436396 - RNA, 19 nt, Artificial Sequence
  Description of Artificial Sequence: Synthetic oligonucleotide
uauaaacggguggacggca

SEQ ID NO: 436397 - RNA, 19 nt, Artificial Sequence
  Description of Artificial Sequence: Synthetic oligonucleotide
acgcuauguuacaaguccc

SEQ ID NO: 436398 - RNA, 19 nt, Artificial Sequence
  Description of Artificial Sequence: Synthetic oligonucleotide
aguccucggauuucguucu

SEQ ID NO: 436399 - RNA, 19 nt, Artificial Sequence
  Description of Artificial Sequence: Synthetic oligonucleotide
uccggauacuugauuuugu

SEQ ID NO: 436400 - RNA, 19 nt, Artificial Sequence
  Description of Artificial Sequence: Synthetic oligonucleotide
ucuguauaaacggguggac

SEQ ID NO: 436401 - RNA, 19 nt, Artificial Sequence
  Description of Artificial Sequence: Synthetic oligonucleotide
uuucuauaauuugaagcuu

SEQ ID NO: 436402 - RNA, 19 nt, Artificial Sequence
  Description of Artificial Sequence: Synthetic oligonucleotide
cacagugguucauaucaac

SEQ ID NO: 436403 - RNA, 19 nt, Artificial Sequence
  Description of Artificial Sequence: Synthetic oligonucleotide
ucggucacucguauaggac

SEQ ID NO: 436404 - RNA, 19 nt, Artificial Sequence
  Description of Artificial Sequence: Synthetic oligonucleotide
ugcacgcagccucaaugcc

SEQ ID NO: 436405 - RNA, 19 nt, Artificial Sequence
  Description of Artificial Sequence: Synthetic oligonucleotide
uaucggucacucguauagg

SEQ ID NO: 436406 - RNA, 19 nt, Artificial Sequence
  Description of Artificial Sequence: Synthetic oligonucleotide
uacccagcacuaaaucacu

SEQ ID NO: 436407 - RNA, 19 nt, Artificial Sequence
  Description of Artificial Sequence: Synthetic oligonucleotide
uaaaaucuggaaggagcac

SEQ ID NO: 436408 - RNA, 19 nt, Artificial Sequence
  Description of Artificial Sequence: Synthetic oligonucleotide
cuccauagauugaagaucu

SEQ ID NO: 436409 - RNA, 19 nt, Artificial Sequence
  Description of Artificial Sequence: Synthetic oligonucleotide
agccaaagaaagcgcuauc

SEQ ID NO: 436410 - RNA, 19 nt, Artificial Sequence
  Description of Artificial Sequence: Synthetic oligonucleotide
auaguacacuugccccucg

SEQ ID NO: 436411 - RNA, 19 nt, Artificial Sequence
  Description of Artificial Sequence: Synthetic oligonucleotide
auccguagauucuauugau

SEQ ID NO: 436412 - RNA, 19 nt, Artificial Sequence
  Description of Artificial Sequence: Synthetic oligonucleotide
cugcuauaaccagugagug

SEQ ID NO: 436413 - RNA, 19 nt, Artificial Sequence
  Description of Artificial Sequence: Synthetic oligonucleotide
aauagccggagcaaaucau

SEQ ID NO: 436414 - RNA, 19 nt, Artificial Sequence
  Description of Artificial Sequence: Synthetic oligonucleotide
guauagcuuaacaccauca

SEQ ID NO: 436415 - RNA, 19 nt, Artificial Sequence
  Description of Artificial Sequence: Synthetic oligonucleotide
gaugggcucuacauauaag

SEQ ID NO: 436416 - RNA, 19 nt, Artificial Sequence
  Description of Artificial Sequence: Synthetic oligonucleotide
gguuauguacgcuauguua

SEQ ID NO: 436417 - RNA, 19 nt, Artificial Sequence
  Description of Artificial Sequence: Synthetic oligonucleotide
uccagggcgugccaauaca

SEQ ID NO: 436418 - RNA, 19 nt, Artificial Sequence
  Description of Artificial Sequence: Synthetic oligonucleotide
uauguacgcuauguuacaa

SEQ ID NO: 436419 - RNA, 19 nt, Artificial Sequence
  Description of Artificial Sequence: Synthetic oligonucleotide
uccauagauugaagaucug

SEQ ID NO: 436420 - RNA, 19 nt, Artificial Sequence
  Description of Artificial Sequence: Synthetic oligonucleotide
ucacagugguucauaucaa

SEQ ID NO: 436421 - RNA, 19 nt, Artificial Sequence
  Description of Artificial Sequence: Synthetic oligonucleotide
aagcgcuaucggucacucg

SEQ ID NO: 436422 - RNA, 19 nt, Artificial Sequence
  Description of Artificial Sequence: Synthetic oligonucleotide
guacacuugccccucgaca

SEQ ID NO: 436423 - RNA, 19 nt, Artificial Sequence
  Description of Artificial Sequence: Synthetic oligonucleotide
gcuuauggagaaauuuugc

SEQ ID NO: 436424 - RNA, 19 nt, Artificial Sequence
  Description of Artificial Sequence: Synthetic oligonucleotide
aaacggguggacggcaagu

SEQ ID NO: 436425 - RNA, 19 nt, Artificial Sequence
  Description of Artificial Sequence: Synthetic oligonucleotide
uagccaaagaaagcgcuau

SEQ ID NO: 436426 - RNA, 19 nt, Artificial Sequence
  Description of Artificial Sequence: Synthetic oligonucleotide
gagaaauuuugcaaccacu

SEQ ID NO: 436427 - RNA, 19 nt, Artificial Sequence
  Description of Artificial Sequence: Synthetic oligonucleotide
uaucgauauccgccaucgc

SEQ ID NO: 436428 - RNA, 19 nt, Artificial Sequence
  Description of Artificial Sequence: Synthetic oligonucleotide
gcuuuaaucgucauuaagu

SEQ ID NO: 436429 - RNA, 19 nt, Artificial Sequence
  Description of Artificial Sequence: Synthetic oligonucleotide
gaccaauaguacacuugcc

SEQ ID NO: 436430 - RNA, 19 nt, Artificial Sequence
  Description of Artificial Sequence: Synthetic oligonucleotide
auagacuaucugggaauug

SEQ ID NO: 436431 - RNA, 19 nt, Artificial Sequence
  Description of Artificial Sequence: Synthetic oligonucleotide
gggcucuacauauaagauc

SEQ ID NO: 436432 - RNA, 19 nt, Artificial Sequence
  Description of Artificial Sequence: Synthetic oligonucleotide
cuccggauacuugauuuug

SEQ ID NO: 436433 - RNA, 19 nt, Artificial Sequence
  Description of Artificial Sequence: Synthetic oligonucleotide
ugccgagguguauagcuua

SEQ ID NO: 436434 - RNA, 19 nt, Artificial Sequence
  Description of Artificial Sequence: Synthetic oligonucleotide
aucguaaaauccguagauu

SEQ ID NO: 436435 - RNA, 19 nt, Artificial Sequence
  Description of Artificial Sequence: Synthetic oligonucleotide
agguuauguacgcuauguu

SEQ ID NO: 436436 - RNA, 19 nt, Artificial Sequence
  Description of Artificial Sequence: Synthetic oligonucleotide
ggagcaaaucauaguacug

SEQ ID NO: 436437 - RNA, 19 nt, Artificial Sequence
  Description of Artificial Sequence: Synthetic oligonucleotide
gacggguucaggccugauc

SEQ ID NO: 436438 - RNA, 19 nt, Artificial Sequence
  Description of Artificial Sequence: Synthetic oligonucleotide
cucauaauucgccgaaucu

SEQ ID NO: 436439 - RNA, 19 nt, Artificial Sequence
  Description of Artificial Sequence: Synthetic oligonucleotide
agccggagcaaaucauagu

SEQ ID NO: 436440 - RNA, 19 nt, Artificial Sequence
  Description of Artificial Sequence: Synthetic oligonucleotide
ggucacucguauaggacag

SEQ ID NO: 436441 - RNA, 19 nt, Artificial Sequence
  Description of Artificial Sequence: Synthetic oligonucleotide
caucguaaaauccguagau

SEQ ID NO: 436442 - RNA, 19 nt, Artificial Sequence
  Description of Artificial Sequence: Synthetic oligonucleotide
auccacgauggcugcuauc

SEQ ID NO: 436443 - RNA, 19 nt, Artificial Sequence
  Description of Artificial Sequence: Synthetic oligonucleotide
gcaaaucauaguacugccc

SEQ ID NO: 436444 - RNA, 19 nt, Artificial Sequence
  Description of Artificial Sequence: Synthetic oligonucleotide
ugagaaugacgcgcuucca

SEQ ID NO: 436445 - RNA, 19 nt, Artificial Sequence
  Description of Artificial Sequence: Synthetic oligonucleotide
gcugcuaucgguaagcagu

SEQ ID NO: 436446 - RNA, 19 nt, Artificial Sequence
  Description of Artificial Sequence: Synthetic oligonucleotide
gguaaccaaaauggaggag

SEQ ID NO: 436447 - RNA, 19 nt, Artificial Sequence
  Description of Artificial Sequence: Synthetic oligonucleotide
gcuaucgguaagcaguuaa

SEQ ID NO: 436448 - RNA, 19 nt, Artificial Sequence
  Description of Artificial Sequence: Synthetic oligonucleotide
ucgccacuggaaccacgag

SEQ ID NO: 436449 - RNA, 19 nt, Artificial Sequence
  Description of Artificial Sequence: Synthetic oligonucleotide
accugaugggcucuacaua

SEQ ID NO: 436450 - RNA, 19 nt, Artificial Sequence
  Description of Artificial Sequence: Synthetic oligonucleotide
auagcuuacccagcacuaa

SEQ ID NO: 436451 - RNA, 19 nt, Artificial Sequence
  Description of Artificial Sequence: Synthetic oligonucleotide
guacgcuauguuacaaguc

SEQ ID NO: 436452 - RNA, 19 nt, Artificial Sequence
  Description of Artificial Sequence: Synthetic oligonucleotide
cucuacauauaagauccaa

SEQ ID NO: 436453 - RNA, 19 nt, Artificial Sequence
  Description of Artificial Sequence: Synthetic oligonucleotide
caaguuaguuccuuuugau

SEQ ID NO: 436454 - RNA, 19 nt, Artificial Sequence
  Description of Artificial Sequence: Synthetic oligonucleotide
gccggagcaaaucauagua

SEQ ID NO: 436455 - RNA, 19 nt, Artificial Sequence
  Description of Artificial Sequence: Synthetic oligonucleotide
gacgcgcuuccacucgcug

SEQ ID NO: 436456 - RNA, 19 nt, Artificial Sequence
  Description of Artificial Sequence: Synthetic oligonucleotide
accgcagaauaaagaaugu

SEQ ID NO: 436457 - RNA, 19 nt, Artificial Sequence
  Description of Artificial Sequence: Synthetic oligonucleotide
caugcuuauggagaaauuu

SEQ ID NO: 436458 - RNA, 19 nt, Artificial Sequence
  Description of Artificial Sequence: Synthetic oligonucleotide
auagccggagcaaaucaua

SEQ ID NO: 436459 - RNA, 19 nt, Artificial Sequence
  Description of Artificial Sequence: Synthetic oligonucleotide
auggcgccugcauugucaa

SEQ ID NO: 436460 - RNA, 19 nt, Artificial Sequence
  Description of Artificial Sequence: Synthetic oligonucleotide
cuauaaccagugagugcca

SEQ ID NO: 436461 - RNA, 19 nt, Artificial Sequence
  Description of Artificial Sequence: Synthetic oligonucleotide
ucgcugcuauaaccaguga

SEQ ID NO: 436462 - RNA, 19 nt, Artificial Sequence
  Description of Artificial Sequence: Synthetic oligonucleotide
acgggcaucuguggaaaca

SEQ ID NO: 436463 - RNA, 19 nt, Artificial Sequence
  Description of Artificial Sequence: Synthetic oligonucleotide
cacccuagggcuuucugua

SEQ ID NO: 436464 - RNA, 19 nt, Artificial Sequence
  Description of Artificial Sequence: Synthetic oligonucleotide
cccucgacaggauaaccug

SEQ ID NO: 436465 - RNA, 19 nt, Artificial Sequence
  Description of Artificial Sequence: Synthetic oligonucleotide
ccggagcaaaucauaguac

SEQ ID NO: 436466 - RNA, 19 nt, Artificial Sequence
  Description of Artificial Sequence: Synthetic oligonucleotide
ugacgcgcuuccacucgcu

SEQ ID NO: 436467 - RNA, 19 nt, Artificial Sequence
  Description of Artificial Sequence: Synthetic oligonucleotide
gcugcuauaaccagugagu

SEQ ID NO: 436468 - RNA, 19 nt, Artificial Sequence
  Description of Artificial Sequence: Synthetic oligonucleotide
ggcgugccaauacagucca

SEQ ID NO: 436469 - RNA, 19 nt, Artificial Sequence
  Description of Artificial Sequence: Synthetic oligonucleotide
gcucgcauuuaauaagucu

SEQ ID NO: 436470 - RNA, 19 nt, Artificial Sequence
  Description of Artificial Sequence: Synthetic oligonucleotide
cagcgguaaccaaaaugga

SEQ ID NO: 436471 - RNA, 19 nt, Artificial Sequence
  Description of Artificial Sequence: Synthetic oligonucleotide
cuggaaccacgagaagaac

SEQ ID NO: 436472 - RNA, 19 nt, Artificial Sequence
  Description of Artificial Sequence: Synthetic oligonucleotide
cagccuaagacaucuuuau

SEQ ID NO: 436473 - RNA, 19 nt, Artificial Sequence
  Description of Artificial Sequence: Synthetic oligonucleotide
gggcgugccaauacagucc

SEQ ID NO: 436474 - RNA, 19 nt, Artificial Sequence
  Description of Artificial Sequence: Synthetic oligonucleotide
cccgagacuucaagcagag

SEQ ID NO: 436475 - RNA, 19 nt, Artificial Sequence
  Description of Artificial Sequence: Synthetic oligonucleotide
ggcggugugacgggucucg

SEQ ID NO: 436476 - RNA, 19 nt, Artificial Sequence
  Description of Artificial Sequence: Synthetic oligonucleotide
acccuagggcuuucuguau

SEQ ID NO: 436477 - RNA, 19 nt, Artificial Sequence
  Description of Artificial Sequence: Synthetic oligonucleotide
auaaacggguggacggcaa

SEQ ID NO: 436478 - RNA, 19 nt, Artificial Sequence
  Description of Artificial Sequence: Synthetic oligonucleotide
cacgauggcugcuaucggu

SEQ ID NO: 436479 - RNA, 19 nt, Artificial Sequence
  Description of Artificial Sequence: Synthetic oligonucleotide
acgauggcugcuaucggua

SEQ ID NO: 436480 - RNA, 19 nt, Artificial Sequence
  Description of Artificial Sequence: Synthetic oligonucleotide
ggcguugggcuucuucuuc

SEQ ID NO: 436481 - RNA, 19 nt, Artificial Sequence
  Description of Artificial Sequence: Synthetic oligonucleotide
gcacgcagccucaaugccc

SEQ ID NO: 436482 - RNA, 19 nt, Artificial Sequence
  Description of Artificial Sequence: Synthetic oligonucleotide
gaaagcgcuaucggucacu

SEQ ID NO: 436483 - RNA, 19 nt, Artificial Sequence
  Description of Artificial Sequence: Synthetic oligonucleotide
gauaaccugccgaggugua

SEQ ID NO: 436484 - RNA, 19 nt, Artificial Sequence
  Description of Artificial Sequence: Synthetic oligonucleotide
ugacgggucucguggcguu

SEQ ID NO: 436485 - RNA, 19 nt, Artificial Sequence
  Description of Artificial Sequence: Synthetic oligonucleotide
cacgggcaucuguggaaac

SEQ ID NO: 436486 - RNA, 19 nt, Artificial Sequence
  Description of Artificial Sequence: Synthetic oligonucleotide
cguauucaaauagccggag

SEQ ID NO: 436487 - RNA, 19 nt, Artificial Sequence
  Description of Artificial Sequence: Synthetic oligonucleotide
cgugccaauacaguccaac

SEQ ID NO: 436488 - RNA, 19 nt, Artificial Sequence
  Description of Artificial Sequence: Synthetic oligonucleotide
ggauaaccugccgaggugu

SEQ ID NO: 436489 - RNA, 19 nt, Artificial Sequence
  Description of Artificial Sequence: Synthetic oligonucleotide
cgucauuaagugugcggug

SEQ ID NO: 436490 - RNA, 19 nt, Artificial Sequence
  Description of Artificial Sequence: Synthetic oligonucleotide
cacucguauaggacagugu

SEQ ID NO: 436491 - RNA, 19 nt, Artificial Sequence
  Description of Artificial Sequence: Synthetic oligonucleotide
acgccacgagccccacgag

SEQ ID NO: 436492 - RNA, 19 nt, Artificial Sequence
  Description of Artificial Sequence: Synthetic oligonucleotide
auggacggguucaggccug

SEQ ID NO: 436493 - RNA, 19 nt, Artificial Sequence
  Description of Artificial Sequence: Synthetic oligonucleotide
ccagccuaagacaucuuua

SEQ ID NO: 436494 - RNA, 19 nt, Artificial Sequence
  Description of Artificial Sequence: Synthetic oligonucleotide
ugcuaucgguaagcaguua

SEQ ID NO: 436495 - RNA, 19 nt, Artificial Sequence
  Description of Artificial Sequence: Synthetic oligonucleotide
ccacgauggcugcuaucgg

SEQ ID NO: 436496 - RNA, 19 nt, Artificial Sequence
  Description of Artificial Sequence: Synthetic oligonucleotide
guucuccggauacuugauu

SEQ ID NO: 436497 - RNA, 19 nt, Artificial Sequence
  Description of Artificial Sequence: Synthetic oligonucleotide
cugcuaucgguaagcaguu

SEQ ID NO: 436498 - RNA, 19 nt, Artificial Sequence
  Description of Artificial Sequence: Synthetic oligonucleotide
cgcuauguuacaaguccca

SEQ ID NO: 436499 - RNA, 19 nt, Artificial Sequence
  Description of Artificial Sequence: Synthetic oligonucleotide
guguauagcuuaacaccau

SEQ ID NO: 436500 - RNA, 19 nt, Artificial Sequence
  Description of Artificial Sequence: Synthetic oligonucleotide
cggagcaaaucauaguacu

SEQ ID NO: 436501 - RNA, 19 nt, Artificial Sequence
  Description of Artificial Sequence: Synthetic oligonucleotide
gcuaucggucacucguaua

SEQ ID NO: 436502 - RNA, 19 nt, Artificial Sequence
  Description of Artificial Sequence: Synthetic oligonucleotide
gacggcaaguuaguuccuu

SEQ ID NO: 436503 - RNA, 19 nt, Artificial Sequence
  Description of Artificial Sequence: Synthetic oligonucleotide
gucgccgcagacacuauuu

SEQ ID NO: 436504 - RNA, 19 nt, Artificial Sequence
  Description of Artificial Sequence: Synthetic oligonucleotide
ggguucaggccugauccaa

SEQ ID NO: 436505 - RNA, 19 nt, Artificial Sequence
  Description of Artificial Sequence: Synthetic oligonucleotide
cugccgagguguauagcuu

SEQ ID NO: 436506 - RNA, 19 nt, Artificial Sequence
  Description of Artificial Sequence: Synthetic oligonucleotide
ccgagguguauagcuuaac

SEQ ID NO: 436507 - RNA, 19 nt, Artificial Sequence
  Description of Artificial Sequence: Synthetic oligonucleotide
gucacucguauaggacagu

SEQ ID NO: 436508 - RNA, 19 nt, Artificial Sequence
  Description of Artificial Sequence: Synthetic oligonucleotide
cagaguccucggauuucgu

SEQ ID NO: 436509 - RNA, 19 nt, Artificial Sequence
  Description of Artificial Sequence: Synthetic oligonucleotide
ccucacgccacgagcccca

SEQ ID NO: 436510 - RNA, 19 nt, Artificial Sequence
  Description of Artificial Sequence: Synthetic oligonucleotide
acgcacccuagggcuuucu

SEQ ID NO: 436511 - RNA, 19 nt, Artificial Sequence
  Description of Artificial Sequence: Synthetic oligonucleotide
gccgagguguauagcuuaa

SEQ ID NO: 436512 - RNA, 19 nt, Artificial Sequence
  Description of Artificial Sequence: Synthetic oligonucleotide
ccccacgagcggugguggc

SEQ ID NO: 436513 - RNA, 19 nt, Artificial Sequence
  Description of Artificial Sequence: Synthetic oligonucleotide
cacgcacccuagggcuuuc

SEQ ID NO: 436514 - RNA, 19 nt, Artificial Sequence
  Description of Artificial Sequence: Synthetic oligonucleotide
cacgagccccacgagcggu

SEQ ID NO: 436515 - RNA, 19 nt, Artificial Sequence
  Description of Artificial Sequence: Synthetic oligonucleotide
cgauggcugcuaucgguaa

SEQ ID NO: 436516 - RNA, 19 nt, Artificial Sequence
  Description of Artificial Sequence: Synthetic oligonucleotide
cgccaucgccguccugccg

SEQ ID NO: 436517 - RNA, 19 nt, Artificial Sequence
  Description of Artificial Sequence: Synthetic oligonucleotide
gcgcuaucggucacucgua

SEQ ID NO: 436518 - RNA, 19 nt, Artificial Sequence
  Description of Artificial Sequence: Synthetic oligonucleotide
cgccgcagacacuauuugu

SEQ ID NO: 436519 - RNA, 19 nt, Artificial Sequence
  Description of Artificial Sequence: Synthetic oligonucleotide
cgauauccgccaucgccgu

SEQ ID NO: 436520 - RNA, 19 nt, Artificial Sequence
  Description of Artificial Sequence: Synthetic oligonucleotide
cugucgccgcagacacuau

SEQ ID NO: 436521 - RNA, 19 nt, Artificial Sequence
  Description of Artificial Sequence: Synthetic oligonucleotide
ggacggcaaguuaguuccu

SEQ ID NO: 436522 - RNA, 19 nt, Artificial Sequence
  Description of Artificial Sequence: Synthetic oligonucleotide
cgcuaucggucacucguau

SEQ ID NO: 436523 - RNA, 19 nt, Artificial Sequence
  Description of Artificial Sequence: Synthetic oligonucleotide
gcgugccaauacaguccaa

SEQ ID NO: 436524 - RNA, 19 nt, Artificial Sequence
  Description of Artificial Sequence: Synthetic oligonucleotide
aaaacgaagagguccaggc

SEQ ID NO: 436525 - RNA, 19 nt, Artificial Sequence
  Description of Artificial Sequence: Synthetic oligonucleotide
uucaugauaaaauuugccg

SEQ ID NO: 436526 - RNA, 19 nt, Artificial Sequence
  Description of Artificial Sequence: Synthetic oligonucleotide
agggucagcaauuugaaac

SEQ ID NO: 436527 - RNA, 19 nt, Artificial Sequence
  Description of Artificial Sequence: Synthetic oligonucleotide
ucagcaauuugaaacgugg

SEQ ID NO: 436528 - RNA, 19 nt, Artificial Sequence
  Description of Artificial Sequence: Synthetic oligonucleotide
uauucagggacauggagcg

SEQ ID NO: 436529 - RNA, 19 nt, Artificial Sequence
  Description of Artificial Sequence: Synthetic oligonucleotide
ucuucaucgagguagaugu

SEQ ID NO: 436530 - RNA, 19 nt, Artificial Sequence
  Description of Artificial Sequence: Synthetic oligonucleotide
ucaugauaaaauuugccgc

SEQ ID NO: 436531 - RNA, 19 nt, Artificial Sequence
  Description of Artificial Sequence: Synthetic oligonucleotide
uuaaacuuggcuagauacg

SEQ ID NO: 436532 - RNA, 19 nt, Artificial Sequence
  Description of Artificial Sequence: Synthetic oligonucleotide
uguacucacgcacauagcc

SEQ ID NO: 436533 - RNA, 19 nt, Artificial Sequence
  Description of Artificial Sequence: Synthetic oligonucleotide
uuagggaagggcuugauga

SEQ ID NO: 436534 - RNA, 19 nt, Artificial Sequence
  Description of Artificial Sequence: Synthetic oligonucleotide
uacuaacugcuccagaagg

SEQ ID NO: 436535 - RNA, 19 nt, Artificial Sequence
  Description of Artificial Sequence: Synthetic oligonucleotide
uauagggucgcacagccag

SEQ ID NO: 436536 - RNA, 19 nt, Artificial Sequence
  Description of Artificial Sequence: Synthetic oligonucleotide
gacgacugcauccauauag

SEQ ID NO: 436537 - RNA, 19 nt, Artificial Sequence
  Description of Artificial Sequence: Synthetic oligonucleotide
uucggauaaaguuguagcg

SEQ ID NO: 436538 - RNA, 19 nt, Artificial Sequence
  Description of Artificial Sequence: Synthetic oligonucleotide
guagucaaugucuagcacg

SEQ ID NO: 436539 - RNA, 19 nt, Artificial Sequence
  Description of Artificial Sequence: Synthetic oligonucleotide
agagcuacaguacuuggcg

SEQ ID NO: 436540 - RNA, 19 nt, Artificial Sequence
  Description of Artificial Sequence: Synthetic oligonucleotide
aagguuaccacccggugag

SEQ ID NO: 436541 - RNA, 19 nt, Artificial Sequence
  Description of Artificial Sequence: Synthetic oligonucleotide
caugauaaaauuugccgcc

SEQ ID NO: 436542 - RNA, 19 nt, Artificial Sequence
  Description of Artificial Sequence: Synthetic oligonucleotide
aucacuaacagcuccuggg

SEQ ID NO: 436543 - RNA, 19 nt, Artificial Sequence
  Description of Artificial Sequence: Synthetic oligonucleotide
cauauuccagauaaacugg

SEQ ID NO: 436544 - RNA, 19 nt, Artificial Sequence
  Description of Artificial Sequence: Synthetic oligonucleotide
uucaaguucgcucacucca

SEQ ID NO: 436545 - RNA, 19 nt, Artificial Sequence
  Description of Artificial Sequence: Synthetic oligonucleotide
uagauguuaguuuucauau

SEQ ID NO: 436546 - RNA, 19 nt, Artificial Sequence
  Description of Artificial Sequence: Synthetic oligonucleotide
auauucagggacauggagc

SEQ ID NO: 436547 - RNA, 19 nt, Artificial Sequence
  Description of Artificial Sequence: Synthetic oligonucleotide
agcaauuugaaacgugguc

SEQ ID NO: 436548 - RNA, 19 nt, Artificial Sequence
  Description of Artificial Sequence: Synthetic oligonucleotide
aaggucuaggcugacuugc

SEQ ID NO: 436549 - RNA, 19 nt, Artificial Sequence
  Description of Artificial Sequence: Synthetic oligonucleotide
caugcuucggauaaaguug

SEQ ID NO: 436550 - RNA, 19 nt, Artificial Sequence
  Description of Artificial Sequence: Synthetic oligonucleotide
cuucggauaaaguuguagc

SEQ ID NO: 436551 - RNA, 19 nt, Artificial Sequence
  Description of Artificial Sequence: Synthetic oligonucleotide
auacugugcagugagaggg

SEQ ID NO: 436552 - RNA, 19 nt, Artificial Sequence
  Description of Artificial Sequence: Synthetic oligonucleotide
uucaccuuaaacuuggcua

SEQ ID NO: 436553 - RNA, 19 nt, Artificial Sequence
  Description of Artificial Sequence: Synthetic oligonucleotide
accucggacacacaucucc

SEQ ID NO: 436554 - RNA, 19 nt, Artificial Sequence
  Description of Artificial Sequence: Synthetic oligonucleotide
augaacggcacuucuacuc

SEQ ID NO: 436555 - RNA, 19 nt, Artificial Sequence
  Description of Artificial Sequence: Synthetic oligonucleotide
aacgagacgggucacuuca

SEQ ID NO: 436556 - RNA, 19 nt, Artificial Sequence
  Description of Artificial Sequence: Synthetic oligonucleotide
agugacaacaguagcgucc

SEQ ID NO: 436557 - RNA, 19 nt, Artificial Sequence
  Description of Artificial Sequence: Synthetic oligonucleotide
ucuacuaacugcuccagaa

SEQ ID NO: 436558 - RNA, 19 nt, Artificial Sequence
  Description of Artificial Sequence: Synthetic oligonucleotide
ucaccuuuagggaagggcu

SEQ ID NO: 436559 - RNA, 19 nt, Artificial Sequence
  Description of Artificial Sequence: Synthetic oligonucleotide
aacgugguccgauggcugc

SEQ ID NO: 436560 - RNA, 19 nt, Artificial Sequence
  Description of Artificial Sequence: Synthetic oligonucleotide
cuagauacggcgcuuuugc

SEQ ID NO: 436561 - RNA, 19 nt, Artificial Sequence
  Description of Artificial Sequence: Synthetic oligonucleotide
agauacggcgcuuuugcgg

SEQ ID NO: 436562 - RNA, 19 nt, Artificial Sequence
  Description of Artificial Sequence: Synthetic oligonucleotide
aacaugaguguaacuaggg

SEQ ID NO: 436563 - RNA, 19 nt, Artificial Sequence
  Description of Artificial Sequence: Synthetic oligonucleotide
uucagggacaucacuaaca

SEQ ID NO: 436564 - RNA, 19 nt, Artificial Sequence
  Description of Artificial Sequence: Synthetic oligonucleotide
uuggcgaucucaaagcgcu

SEQ ID NO: 436565 - RNA, 19 nt, Artificial Sequence
  Description of Artificial Sequence: Synthetic oligonucleotide
ucggaaacagggcaggccc

SEQ ID NO: 436566 - RNA, 19 nt, Artificial Sequence
  Description of Artificial Sequence: Synthetic oligonucleotide
uuggugaucuuguuaaaga

SEQ ID NO: 436567 - RNA, 19 nt, Artificial Sequence
  Description of Artificial Sequence: Synthetic oligonucleotide
ucaucgagguagauguuag

SEQ ID NO: 436568 - RNA, 19 nt, Artificial Sequence
  Description of Artificial Sequence: Synthetic oligonucleotide
ucgauccagauguaguggg

SEQ ID NO: 436569 - RNA, 19 nt, Artificial Sequence
  Description of Artificial Sequence: Synthetic oligonucleotide
gauacggcgcuuuugcggc

SEQ ID NO: 436570 - RNA, 19 nt, Artificial Sequence
  Description of Artificial Sequence: Synthetic oligonucleotide
gagcucucaaacaugaagc

SEQ ID NO: 436571 - RNA, 19 nt, Artificial Sequence
  Description of Artificial Sequence: Synthetic oligonucleotide
aacaguagcguccugcguu

SEQ ID NO: 436572 - RNA, 19 nt, Artificial Sequence
  Description of Artificial Sequence: Synthetic oligonucleotide
uguggcuuccaucuugccc

SEQ ID NO: 436573 - RNA, 19 nt, Artificial Sequence
  Description of Artificial Sequence: Synthetic oligonucleotide
acaacaguagcguccugcg

SEQ ID NO: 436574 - RNA, 19 nt, Artificial Sequence
  Description of Artificial Sequence: Synthetic oligonucleotide
uccgguaugcacucaauca

SEQ ID NO: 436575 - RNA, 19 nt, Artificial Sequence
  Description of Artificial Sequence: Synthetic oligonucleotide
uaaaguuguagcgugccug

SEQ ID NO: 436576 - RNA, 19 nt, Artificial Sequence
  Description of Artificial Sequence: Synthetic oligonucleotide
accauuugaaggguguggc

SEQ ID NO: 436577 - RNA, 19 nt, Artificial Sequence
  Description of Artificial Sequence: Synthetic oligonucleotide
uuuucaaguucgcucacuc

SEQ ID NO: 436578 - RNA, 19 nt, Artificial Sequence
  Description of Artificial Sequence: Synthetic oligonucleotide
uuguaccaagugaugaggc

SEQ ID NO: 436579 - RNA, 19 nt, Artificial Sequence
  Description of Artificial Sequence: Synthetic oligonucleotide
gauaaaguuguagcgugcc

SEQ ID NO: 436580 - RNA, 19 nt, Artificial Sequence
  Description of Artificial Sequence: Synthetic oligonucleotide
ugaacggcacuucuacucc

SEQ ID NO: 436581 - RNA, 19 nt, Artificial Sequence
  Description of Artificial Sequence: Synthetic oligonucleotide
ugaaccauuugaagggugu

SEQ ID NO: 436582 - RNA, 19 nt, Artificial Sequence
  Description of Artificial Sequence: Synthetic oligonucleotide
uccaacaugaguguaacua

SEQ ID NO: 436583 - RNA, 19 nt, Artificial Sequence
  Description of Artificial Sequence: Synthetic oligonucleotide
uucccguugauagaaaucu

SEQ ID NO: 436584 - RNA, 19 nt, Artificial Sequence
  Description of Artificial Sequence: Synthetic oligonucleotide
ucgauggugugccagguga

SEQ ID NO: 436585 - RNA, 19 nt, Artificial Sequence
  Description of Artificial Sequence: Synthetic oligonucleotide
aauuugccgccucucgcuc

SEQ ID NO: 436586 - RNA, 19 nt, Artificial Sequence
  Description of Artificial Sequence: Synthetic oligonucleotide
uuuagggaagggcuugaug

SEQ ID NO: 436587 - RNA, 19 nt, Artificial Sequence
  Description of Artificial Sequence: Synthetic oligonucleotide
aaccgaacgagacggguca

SEQ ID NO: 436588 - RNA, 19 nt, Artificial Sequence
  Description of Artificial Sequence: Synthetic oligonucleotide
ucauguuagggcugaaccu

SEQ ID NO: 436589 - RNA, 19 nt, Artificial Sequence
  Description of Artificial Sequence: Synthetic oligonucleotide
agauguaguggggaguuac

SEQ ID NO: 436590 - RNA, 19 nt, Artificial Sequence
  Description of Artificial Sequence: Synthetic oligonucleotide
uucauguaguacuugugaa

SEQ ID NO: 436591 - RNA, 19 nt, Artificial Sequence
  Description of Artificial Sequence: Synthetic oligonucleotide
guugaguagaucuucucuc

SEQ ID NO: 436592 - RNA, 19 nt, Artificial Sequence
  Description of Artificial Sequence: Synthetic oligonucleotide
uauuccagauaaacuggug

SEQ ID NO: 436593 - RNA, 19 nt, Artificial Sequence
  Description of Artificial Sequence: Synthetic oligonucleotide
agacgggucacuucauuuc

SEQ ID NO: 436594 - RNA, 19 nt, Artificial Sequence
  Description of Artificial Sequence: Synthetic oligonucleotide
aaagucaguuuggcggccc

SEQ ID NO: 436595 - RNA, 19 nt, Artificial Sequence
  Description of Artificial Sequence: Synthetic oligonucleotide
acaucgcuucaccuuaaac

SEQ ID NO: 436596 - RNA, 19 nt, Artificial Sequence
  Description of Artificial Sequence: Synthetic oligonucleotide
ugaaacgugguccgauggc

SEQ ID NO: 436597 - RNA, 19 nt, Artificial Sequence
  Description of Artificial Sequence: Synthetic oligonucleotide
uacucacgcacauagccca

SEQ ID NO: 436598 - RNA, 19 nt, Artificial Sequence
  Description of Artificial Sequence: Synthetic oligonucleotide
uccaauuggccacacugcu

SEQ ID NO: 436599 - RNA, 19 nt, Artificial Sequence
  Description of Artificial Sequence: Synthetic oligonucleotide
uagcacgauugcuucaggg

SEQ ID NO: 436600 - RNA, 19 nt, Artificial Sequence
  Description of Artificial Sequence: Synthetic oligonucleotide
agggcuaacauguccuguc

SEQ ID NO: 436601 - RNA, 19 nt, Artificial Sequence
  Description of Artificial Sequence: Synthetic oligonucleotide
aucgcuucaccuuaaacuu

SEQ ID NO: 436602 - RNA, 19 nt, Artificial Sequence
  Description of Artificial Sequence: Synthetic oligonucleotide
ucucgggaggugcaguccg

SEQ ID NO: 436603 - RNA, 19 nt, Artificial Sequence
  Description of Artificial Sequence: Synthetic oligonucleotide
ucuagcacgauugcuucag

SEQ ID NO: 436604 - RNA, 19 nt, Artificial Sequence
  Description of Artificial Sequence: Synthetic oligonucleotide
aaugucuagcacgauugcu

SEQ ID NO: 436605 - RNA, 19 nt, Artificial Sequence
  Description of Artificial Sequence: Synthetic oligonucleotide
cauggagcgcuguagcagg

SEQ ID NO: 436606 - RNA, 19 nt, Artificial Sequence
  Description of Artificial Sequence: Synthetic oligonucleotide
ugacaaggaacuugauggc

SEQ ID NO: 436607 - RNA, 19 nt, Artificial Sequence
  Description of Artificial Sequence: Synthetic oligonucleotide
uguagucaaugucuagcac

SEQ ID NO: 436608 - RNA, 19 nt, Artificial Sequence
  Description of Artificial Sequence: Synthetic oligonucleotide
uuuugcggcacucugcauu

SEQ ID NO: 436609 - RNA, 19 nt, Artificial Sequence
  Description of Artificial Sequence: Synthetic oligonucleotide
uuucaaguucgcucacucc

SEQ ID NO: 436610 - RNA, 19 nt, Artificial Sequence
  Description of Artificial Sequence: Synthetic oligonucleotide
ugccaaagucaguuuggcg

SEQ ID NO: 436611 - RNA, 19 nt, Artificial Sequence
  Description of Artificial Sequence: Synthetic oligonucleotide
gggucagcaauuugaaacg

SEQ ID NO: 436612 - RNA, 19 nt, Artificial Sequence
  Description of Artificial Sequence: Synthetic oligonucleotide
guagauguuaguuuucaua

SEQ ID NO: 436613 - RNA, 19 nt, Artificial Sequence
  Description of Artificial Sequence: Synthetic oligonucleotide
uuucgaaugguugcauuug

SEQ ID NO: 436614 - RNA, 19 nt, Artificial Sequence
  Description of Artificial Sequence: Synthetic oligonucleotide
gacaacaguagcguccugc

SEQ ID NO: 436615 - RNA, 19 nt, Artificial Sequence
  Description of Artificial Sequence: Synthetic oligonucleotide
aggccaaccagcuggaaga

SEQ ID NO: 436616 - RNA, 19 nt, Artificial Sequence
  Description of Artificial Sequence: Synthetic oligonucleotide
uucacauuguccuuccauu

SEQ ID NO: 436617 - RNA, 19 nt, Artificial Sequence
  Description of Artificial Sequence: Synthetic oligonucleotide
caacauagaacauggcuga

SEQ ID NO: 436618 - RNA, 19 nt, Artificial Sequence
  Description of Artificial Sequence: Synthetic oligonucleotide
ucggauaaaguuguagcgu

SEQ ID NO: 436619 - RNA, 19 nt, Artificial Sequence
  Description of Artificial Sequence: Synthetic oligonucleotide
gacgggucacuucauuucc

SEQ ID NO: 436620 - RNA, 19 nt, Artificial Sequence
  Description of Artificial Sequence: Synthetic oligonucleotide
acccggugagcucucaaac

SEQ ID NO: 436621 - RNA, 19 nt, Artificial Sequence
  Description of Artificial Sequence: Synthetic oligonucleotide
uagauacggcgcuuuugcg

SEQ ID NO: 436622 - RNA, 19 nt, Artificial Sequence
  Description of Artificial Sequence: Synthetic oligonucleotide
acaaggucuaggcugacuu

SEQ ID NO: 436623 - RNA, 19 nt, Artificial Sequence
  Description of Artificial Sequence: Synthetic oligonucleotide
caggaaaucgauccagaug

SEQ ID NO: 436624 - RNA, 19 nt, Artificial Sequence
  Description of Artificial Sequence: Synthetic oligonucleotide
agcacgauugcuucagggu

SEQ ID NO: 436625 - RNA, 19 nt, Artificial Sequence
  Description of Artificial Sequence: Synthetic oligonucleotide
cuuggcgaucucaaagcgc

SEQ ID NO: 436626 - RNA, 19 nt, Artificial Sequence
  Description of Artificial Sequence: Synthetic oligonucleotide
aguggggaguuacuucggg

SEQ ID NO: 436627 - RNA, 19 nt, Artificial Sequence
  Description of Artificial Sequence: Synthetic oligonucleotide
cuccaauuggccacacugc

SEQ ID NO: 436628 - RNA, 19 nt, Artificial Sequence
  Description of Artificial Sequence: Synthetic oligonucleotide
cauccggagggaaggaccg

SEQ ID NO: 436629 - RNA, 19 nt, Artificial Sequence
  Description of Artificial Sequence: Synthetic oligonucleotide
cagagcuacaguacuuggc

SEQ ID NO: 436630 - RNA, 19 nt, Artificial Sequence
  Description of Artificial Sequence: Synthetic oligonucleotide
aggaccgcaggacuuucac

SEQ ID NO: 436631 - RNA, 19 nt, Artificial Sequence
  Description of Artificial Sequence: Synthetic oligonucleotide
gcuccaccaauauucaggg

SEQ ID NO: 436632 - RNA, 19 nt, Artificial Sequence
  Description of Artificial Sequence: Synthetic oligonucleotide
uuagggcugaaccuguguu

SEQ ID NO: 436633 - RNA, 19 nt, Artificial Sequence
  Description of Artificial Sequence: Synthetic oligonucleotide
aucgauccagauguagugg

SEQ ID NO: 436634 - RNA, 19 nt, Artificial Sequence
  Description of Artificial Sequence: Synthetic oligonucleotide
ugauaaaauuugccgccuc

SEQ ID NO: 436635 - RNA, 19 nt, Artificial Sequence
  Description of Artificial Sequence: Synthetic oligonucleotide
guaccaagugaugaggcgc

SEQ ID NO: 436636 - RNA, 19 nt, Artificial Sequence
  Description of Artificial Sequence: Synthetic oligonucleotide
ucaaguucgcucacuccac

SEQ ID NO: 436637 - RNA, 19 nt, Artificial Sequence
  Description of Artificial Sequence: Synthetic oligonucleotide
ggauguagaacagaauggc

SEQ ID NO: 436638 - RNA, 19 nt, Artificial Sequence
  Description of Artificial Sequence: Synthetic oligonucleotide
aggcgcucgauuucagugg

SEQ ID NO: 436639 - RNA, 19 nt, Artificial Sequence
  Description of Artificial Sequence: Synthetic oligonucleotide
uccacaucgcuucaccuua

SEQ ID NO: 436640 - RNA, 19 nt, Artificial Sequence
  Description of Artificial Sequence: Synthetic oligonucleotide
ugucuagcacgauugcuuc

SEQ ID NO: 436641 - RNA, 19 nt, Artificial Sequence
  Description of Artificial Sequence: Synthetic oligonucleotide
auguaggagggacagccca

SEQ ID NO: 436642 - RNA, 19 nt, Artificial Sequence
  Description of Artificial Sequence: Synthetic oligonucleotide
uaucugagggccugcacaa

SEQ ID NO: 436643 - RNA, 19 nt, Artificial Sequence
  Description of Artificial Sequence: Synthetic oligonucleotide
caucgcuucaccuuaaacu

SEQ ID NO: 436644 - RNA, 19 nt, Artificial Sequence
  Description of Artificial Sequence: Synthetic oligonucleotide
uagcgugccugcugaaagg

SEQ ID NO: 436645 - RNA, 19 nt, Artificial Sequence
  Description of Artificial Sequence: Synthetic oligonucleotide
guacuuggaccuccaauug

SEQ ID NO: 436646 - RNA, 19 nt, Artificial Sequence
  Description of Artificial Sequence: Synthetic oligonucleotide
ucgagguagauguuaguuu

SEQ ID NO: 436647 - RNA, 19 nt, Artificial Sequence
  Description of Artificial Sequence: Synthetic oligonucleotide
caucacuaacagcuccugg

SEQ ID NO: 436648 - RNA, 19 nt, Artificial Sequence
  Description of Artificial Sequence: Synthetic oligonucleotide
agaauguacucacgcacau

SEQ ID NO: 436649 - RNA, 19 nt, Artificial Sequence
  Description of Artificial Sequence: Synthetic oligonucleotide
aguuguagcgugccugcug

SEQ ID NO: 436650 - RNA, 19 nt, Artificial Sequence
  Description of Artificial Sequence: Synthetic oligonucleotide
guaggggaugucauucugg

SEQ ID NO: 436651 - RNA, 19 nt, Artificial Sequence
  Description of Artificial Sequence: Synthetic oligonucleotide
uguccaacaugaguguaac

SEQ ID NO: 436652 - RNA, 19 nt, Artificial Sequence
  Description of Artificial Sequence: Synthetic oligonucleotide
ugucauaucugagggccug

SEQ ID NO: 436653 - RNA, 19 nt, Artificial Sequence
  Description of Artificial Sequence: Synthetic oligonucleotide
ucauagguccggcuccugu

SEQ ID NO: 436654 - RNA, 19 nt, Artificial Sequence
  Description of Artificial Sequence: Synthetic oligonucleotide
auaaccucggacacacauc

SEQ ID NO: 436655 - RNA, 19 nt, Artificial Sequence
  Description of Artificial Sequence: Synthetic oligonucleotide
auucccguugauagaaauc

SEQ ID NO: 436656 - RNA, 19 nt, Artificial Sequence
  Description of Artificial Sequence: Synthetic oligonucleotide
caugcuggagaaguaggag

SEQ ID NO: 436657 - RNA, 19 nt, Artificial Sequence
  Description of Artificial Sequence: Synthetic oligonucleotide
ccaggcaagguucacauug

SEQ ID NO: 436658 - RNA, 19 nt, Artificial Sequence
  Description of Artificial Sequence: Synthetic oligonucleotide
cacgauugcuucaggguug

SEQ ID NO: 436659 - RNA, 19 nt, Artificial Sequence
  Description of Artificial Sequence: Synthetic oligonucleotide
ccaacaugaguguaacuag

SEQ ID NO: 436660 - RNA, 19 nt, Artificial Sequence
  Description of Artificial Sequence: Synthetic oligonucleotide
caggcuugagaagaucucc

SEQ ID NO: 436661 - RNA, 19 nt, Artificial Sequence
  Description of Artificial Sequence: Synthetic oligonucleotide
acgccuucuuucuuucauc

SEQ ID NO: 436662 - RNA, 19 nt, Artificial Sequence
  Description of Artificial Sequence: Synthetic oligonucleotide
ucacgcacauagcccaucu

SEQ ID NO: 436663 - RNA, 19 nt, Artificial Sequence
  Description of Artificial Sequence: Synthetic oligonucleotide
cccguguccaacaugagug

SEQ ID NO: 436664 - RNA, 19 nt, Artificial Sequence
  Description of Artificial Sequence: Synthetic oligonucleotide
ugaguguaacuagggagac

SEQ ID NO: 436665 - RNA, 19 nt, Artificial Sequence
  Description of Artificial Sequence: Synthetic oligonucleotide
acgauugcuucaggguugc

SEQ ID NO: 436666 - RNA, 19 nt, Artificial Sequence
  Description of Artificial Sequence: Synthetic oligonucleotide
agcuacaguacuuggcgau

SEQ ID NO: 436667 - RNA, 19 nt, Artificial Sequence
  Description of Artificial Sequence: Synthetic oligonucleotide
auagguccggcuccuguug

SEQ ID NO: 436668 - RNA, 19 nt, Artificial Sequence
  Description of Artificial Sequence: Synthetic oligonucleotide
gacagcggguuguaccaag

SEQ ID NO: 436669 - RNA, 19 nt, Artificial Sequence
  Description of Artificial Sequence: Synthetic oligonucleotide
uucaucgagguagauguua

SEQ ID NO: 436670 - RNA, 19 nt, Artificial Sequence
  Description of Artificial Sequence: Synthetic oligonucleotide
ucgcacagccagauaaccu

SEQ ID NO: 436671 - RNA, 19 nt, Artificial Sequence
  Description of Artificial Sequence: Synthetic oligonucleotide
ucagggucuuucuggugcc

SEQ ID NO: 436672 - RNA, 19 nt, Artificial Sequence
  Description of Artificial Sequence: Synthetic oligonucleotide
aucggagcggcacugcaga

SEQ ID NO: 436673 - RNA, 19 nt, Artificial Sequence
  Description of Artificial Sequence: Synthetic oligonucleotide
ggcaguagccaccacccgg

SEQ ID NO: 436674 - RNA, 19 nt, Artificial Sequence
  Description of Artificial Sequence: Synthetic oligonucleotide
caaucacuccacacccagg

SEQ ID NO: 436675 - RNA, 19 nt, Artificial Sequence
  Description of Artificial Sequence: Synthetic oligonucleotide
aaguucgcucacuccacau

SEQ ID NO: 436676 - RNA, 19 nt, Artificial Sequence
  Description of Artificial Sequence: Synthetic oligonucleotide
guacuggaucaugucauag

SEQ ID NO: 436677 - RNA, 19 nt, Artificial Sequence
  Description of Artificial Sequence: Synthetic oligonucleotide
uccaaccgaacgagacggg

SEQ ID NO: 436678 - RNA, 19 nt, Artificial Sequence
  Description of Artificial Sequence: Synthetic oligonucleotide
agcguccugcguuucaugu

SEQ ID NO: 436679 - RNA, 19 nt, Artificial Sequence
  Description of Artificial Sequence: Synthetic oligonucleotide
uaggcggccaugcuucgga

SEQ ID NO: 436680 - RNA, 19 nt, Artificial Sequence
  Description of Artificial Sequence: Synthetic oligonucleotide
gucuaggcugacuugcuuc

SEQ ID NO: 436681 - RNA, 19 nt, Artificial Sequence
  Description of Artificial Sequence: Synthetic oligonucleotide
uucagacagagcugacaga

SEQ ID NO: 436682 - RNA, 19 nt, Artificial Sequence
  Description of Artificial Sequence: Synthetic oligonucleotide
uguuagggcugaaccugug

SEQ ID NO: 436683 - RNA, 19 nt, Artificial Sequence
  Description of Artificial Sequence: Synthetic oligonucleotide
gguccaaccgaacgagacg

SEQ ID NO: 436684 - RNA, 19 nt, Artificial Sequence
  Description of Artificial Sequence: Synthetic oligonucleotide
guacucacgcacauagccc

SEQ ID NO: 436685 - RNA, 19 nt, Artificial Sequence
  Description of Artificial Sequence: Synthetic oligonucleotide
uuugccgccucucgcucug

SEQ ID NO: 436686 - RNA, 19 nt, Artificial Sequence
  Description of Artificial Sequence: Synthetic oligonucleotide
caaauucccguugauagaa

SEQ ID NO: 436687 - RNA, 19 nt, Artificial Sequence
  Description of Artificial Sequence: Synthetic oligonucleotide
uuaccacccggugagcucu

SEQ ID NO: 436688 - RNA, 19 nt, Artificial Sequence
  Description of Artificial Sequence: Synthetic oligonucleotide
gcuguagcaggcuugagaa

SEQ ID NO: 436689 - RNA, 19 nt, Artificial Sequence
  Description of Artificial Sequence: Synthetic oligonucleotide
gacauggagcgcuguagca

SEQ ID NO: 436690 - RNA, 19 nt, Artificial Sequence
  Description of Artificial Sequence: Synthetic oligonucleotide
ucgcucugucauguuaggg

SEQ ID NO: 436691 - RNA, 19 nt, Artificial Sequence
  Description of Artificial Sequence: Synthetic oligonucleotide
uugucauaucugagggccu

SEQ ID NO: 436692 - RNA, 19 nt, Artificial Sequence
  Description of Artificial Sequence: Synthetic oligonucleotide
aaacgugguccgauggcug

SEQ ID NO: 436693 - RNA, 19 nt, Artificial Sequence
  Description of Artificial Sequence: Synthetic oligonucleotide
gacacucguccucagcauc

SEQ ID NO: 436694 - RNA, 19 nt, Artificial Sequence
  Description of Artificial Sequence: Synthetic oligonucleotide
agcgcuguaccaggaaauc

SEQ ID NO: 436695 - RNA, 19 nt, Artificial Sequence
  Description of Artificial Sequence: Synthetic oligonucleotide
gcaugaacggcacuucuac

SEQ ID NO: 436696 - RNA, 19 nt, Artificial Sequence
  Description of Artificial Sequence: Synthetic oligonucleotide
ccaaagucaguuuggcggc

SEQ ID NO: 436697 - RNA, 19 nt, Artificial Sequence
  Description of Artificial Sequence: Synthetic oligonucleotide
auguacucacgcacauagc

SEQ ID NO: 436698 - RNA, 19 nt, Artificial Sequence
  Description of Artificial Sequence: Synthetic oligonucleotide
agcggcacugcagaccuuc

SEQ ID NO: 436699 - RNA, 19 nt, Artificial Sequence
  Description of Artificial Sequence: Synthetic oligonucleotide
uucgcucacuccacaucgc

SEQ ID NO: 436700 - RNA, 19 nt, Artificial Sequence
  Description of Artificial Sequence: Synthetic oligonucleotide
cacagccagauaaccucgg

SEQ ID NO: 436701 - RNA, 19 nt, Artificial Sequence
  Description of Artificial Sequence: Synthetic oligonucleotide
cugcguuucauguaguacu

SEQ ID NO: 436702 - RNA, 19 nt, Artificial Sequence
  Description of Artificial Sequence: Synthetic oligonucleotide
gggugcccaacauagaaca

SEQ ID NO: 436703 - RNA, 19 nt, Artificial Sequence
  Description of Artificial Sequence: Synthetic oligonucleotide
ucgcucacuccacaucgcu

SEQ ID NO: 436704 - RNA, 19 nt, Artificial Sequence
  Description of Artificial Sequence: Synthetic oligonucleotide
caaggucuaggcugacuug

SEQ ID NO: 436705 - RNA, 19 nt, Artificial Sequence
  Description of Artificial Sequence: Synthetic oligonucleotide
gagacgacugcauccauau

SEQ ID NO: 436706 - RNA, 19 nt, Artificial Sequence
  Description of Artificial Sequence: Synthetic oligonucleotide
uagguccggcuccuguugc

SEQ ID NO: 436707 - RNA, 19 nt, Artificial Sequence
  Description of Artificial Sequence: Synthetic oligonucleotide
caaccgaacgagacggguc

SEQ ID NO: 436708 - RNA, 19 nt, Artificial Sequence
  Description of Artificial Sequence: Synthetic oligonucleotide
ggcuaacauguccugucgg

SEQ ID NO: 436709 - RNA, 19 nt, Artificial Sequence
  Description of Artificial Sequence: Synthetic oligonucleotide
caagguuaccacccgguga

SEQ ID NO: 436710 - RNA, 19 nt, Artificial Sequence
  Description of Artificial Sequence: Synthetic oligonucleotide
gaagcuuguugaguagauc

SEQ ID NO: 436711 - RNA, 19 nt, Artificial Sequence
  Description of Artificial Sequence: Synthetic oligonucleotide
cucggaaacagggcaggcc

SEQ ID NO: 436712 - RNA, 19 nt, Artificial Sequence
  Description of Artificial Sequence: Synthetic oligonucleotide
ggugcaguccgguaugcac

SEQ ID NO: 436713 - RNA, 19 nt, Artificial Sequence
  Description of Artificial Sequence: Synthetic oligonucleotide
caucggagcggcacugcag

SEQ ID NO: 436714 - RNA, 19 nt, Artificial Sequence
  Description of Artificial Sequence: Synthetic oligonucleotide
cauccauauagggucgcac

SEQ ID NO: 436715 - RNA, 19 nt, Artificial Sequence
  Description of Artificial Sequence: Synthetic oligonucleotide
aguacuggaucaugucaua

SEQ ID NO: 436716 - RNA, 19 nt, Artificial Sequence
  Description of Artificial Sequence: Synthetic oligonucleotide
augucuagcacgauugcuu

SEQ ID NO: 436717 - RNA, 19 nt, Artificial Sequence
  Description of Artificial Sequence: Synthetic oligonucleotide
ggacauggagcgcuguagc

SEQ ID NO: 436718 - RNA, 19 nt, Artificial Sequence
  Description of Artificial Sequence: Synthetic oligonucleotide
ugcaguccgguaugcacuc

SEQ ID NO: 436719 - RNA, 19 nt, Artificial Sequence
  Description of Artificial Sequence: Synthetic oligonucleotide
gcuucggauaaaguuguag

SEQ ID NO: 436720 - RNA, 19 nt, Artificial Sequence
  Description of Artificial Sequence: Synthetic oligonucleotide
cuggguccaaccgaacgag

SEQ ID NO: 436721 - RNA, 19 nt, Artificial Sequence
  Description of Artificial Sequence: Synthetic oligonucleotide
gggcuaacauguccugucg

SEQ ID NO: 436722 - RNA, 19 nt, Artificial Sequence
  Description of Artificial Sequence: Synthetic oligonucleotide
ugcggcacucugcauuggu

SEQ ID NO: 436723 - RNA, 19 nt, Artificial Sequence
  Description of Artificial Sequence: Synthetic oligonucleotide
cacacccaggggcaguagc

SEQ ID NO: 436724 - RNA, 19 nt, Artificial Sequence
  Description of Artificial Sequence: Synthetic oligonucleotide
ugauagggacccugugauc

SEQ ID NO: 436725 - RNA, 19 nt, Artificial Sequence
  Description of Artificial Sequence: Synthetic oligonucleotide
gaacauggcugagcuccgg

SEQ ID NO: 436726 - RNA, 19 nt, Artificial Sequence
  Description of Artificial Sequence: Synthetic oligonucleotide
cacuaacagcuccuggguc

SEQ ID NO: 436727 - RNA, 19 nt, Artificial Sequence
  Description of Artificial Sequence: Synthetic oligonucleotide
guccgguaugcacucaauc

SEQ ID NO: 436728 - RNA, 19 nt, Artificial Sequence
  Description of Artificial Sequence: Synthetic oligonucleotide
ccgugggugcccaacauag

SEQ ID NO: 436729 - RNA, 19 nt, Artificial Sequence
  Description of Artificial Sequence: Synthetic oligonucleotide
uguagcgugccugcugaaa

SEQ ID NO: 436730 - RNA, 19 nt, Artificial Sequence
  Description of Artificial Sequence: Synthetic oligonucleotide
uacuggcgugugaaguagu

SEQ ID NO: 436731 - RNA, 19 nt, Artificial Sequence
  Description of Artificial Sequence: Synthetic oligonucleotide
gaacggcacuucuacucca

SEQ ID NO: 436732 - RNA, 19 nt, Artificial Sequence
  Description of Artificial Sequence: Synthetic oligonucleotide
cgaagcacguuucgaaugg

SEQ ID NO: 436733 - RNA, 19 nt, Artificial Sequence
  Description of Artificial Sequence: Synthetic oligonucleotide
agcaucggagcggcacugc

SEQ ID NO: 436734 - RNA, 19 nt, Artificial Sequence
  Description of Artificial Sequence: Synthetic oligonucleotide
gaaacgugguccgauggcu

SEQ ID NO: 436735 - RNA, 19 nt, Artificial Sequence
  Description of Artificial Sequence: Synthetic oligonucleotide
gacugcauccauauagggu

SEQ ID NO: 436736 - RNA, 19 nt, Artificial Sequence
  Description of Artificial Sequence: Synthetic oligonucleotide
agggagacgacugcaucca

SEQ ID NO: 436737 - RNA, 19 nt, Artificial Sequence
  Description of Artificial Sequence: Synthetic oligonucleotide
cagauaaacuggugugcca

SEQ ID NO: 436738 - RNA, 19 nt, Artificial Sequence
  Description of Artificial Sequence: Synthetic oligonucleotide
acaguagcguccugcguuu

SEQ ID NO: 436739 - RNA, 19 nt, Artificial Sequence
  Description of Artificial Sequence: Synthetic oligonucleotide
gccagauaaccucggacac

SEQ ID NO: 436740 - RNA, 19 nt, Artificial Sequence
  Description of Artificial Sequence: Synthetic oligonucleotide
uccugcguuucauguagua

SEQ ID NO: 436741 - RNA, 19 nt, Artificial Sequence
  Description of Artificial Sequence: Synthetic oligonucleotide
ccgguaugcacucaaucac

SEQ ID NO: 436742 - RNA, 19 nt, Artificial Sequence
  Description of Artificial Sequence: Synthetic oligonucleotide
ggaucaugucauagguccg

SEQ ID NO: 436743 - RNA, 19 nt, Artificial Sequence
  Description of Artificial Sequence: Synthetic oligonucleotide
accaauauucagggacaug

SEQ ID NO: 436744 - RNA, 19 nt, Artificial Sequence
  Description of Artificial Sequence: Synthetic oligonucleotide
caagugaugaggcgcucga

SEQ ID NO: 436745 - RNA, 19 nt, Artificial Sequence
  Description of Artificial Sequence: Synthetic oligonucleotide
gcuuuugcggcacucugca

SEQ ID NO: 436746 - RNA, 19 nt, Artificial Sequence
  Description of Artificial Sequence: Synthetic oligonucleotide
uccgugggugcccaacaua

SEQ ID NO: 436747 - RNA, 19 nt, Artificial Sequence
  Description of Artificial Sequence: Synthetic oligonucleotide
gaaguaggagaggccugug

SEQ ID NO: 436748 - RNA, 19 nt, Artificial Sequence
  Description of Artificial Sequence: Synthetic oligonucleotide
gggucgcacagccagauaa

SEQ ID NO: 436749 - RNA, 19 nt, Artificial Sequence
  Description of Artificial Sequence: Synthetic oligonucleotide
cagugacaacaguagcguc

SEQ ID NO: 436750 - RNA, 19 nt, Artificial Sequence
  Description of Artificial Sequence: Synthetic oligonucleotide
aaauucccguugauagaaa

SEQ ID NO: 436751 - RNA, 19 nt, Artificial Sequence
  Description of Artificial Sequence: Synthetic oligonucleotide
acgugguccgauggcugcc

SEQ ID NO: 436752 - RNA, 19 nt, Artificial Sequence
  Description of Artificial Sequence: Synthetic oligonucleotide
ugccgcccagagaauguac

SEQ ID NO: 436753 - RNA, 19 nt, Artificial Sequence
  Description of Artificial Sequence: Synthetic oligonucleotide
ugccacgugccuguucaug

SEQ ID NO: 436754 - RNA, 19 nt, Artificial Sequence
  Description of Artificial Sequence: Synthetic oligonucleotide
auggagcgcuguagcaggc

SEQ ID NO: 436755 - RNA, 19 nt, Artificial Sequence
  Description of Artificial Sequence: Synthetic oligonucleotide
cugauagggacccugugau

SEQ ID NO: 436756 - RNA, 19 nt, Artificial Sequence
  Description of Artificial Sequence: Synthetic oligonucleotide
uagcguccugcguuucaug

SEQ ID NO: 436757 - RNA, 19 nt, Artificial Sequence
  Description of Artificial Sequence: Synthetic oligonucleotide
ucccguugauagaaaucuu

SEQ ID NO: 436758 - RNA, 19 nt, Artificial Sequence
  Description of Artificial Sequence: Synthetic oligonucleotide
accuuaaacuuggcuagau

SEQ ID NO: 436759 - RNA, 19 nt, Artificial Sequence
  Description of Artificial Sequence: Synthetic oligonucleotide
cucgggaggugcaguccgg

SEQ ID NO: 436760 - RNA, 19 nt, Artificial Sequence
  Description of Artificial Sequence: Synthetic oligonucleotide
uccccauacuggcguguga

SEQ ID NO: 436761 - RNA, 19 nt, Artificial Sequence
  Description of Artificial Sequence: Synthetic oligonucleotide
ucaccaaugucagggucuu

SEQ ID NO: 436762 - RNA, 19 nt, Artificial Sequence
  Description of Artificial Sequence: Synthetic oligonucleotide
gggacauggagcgcuguag

SEQ ID NO: 436763 - RNA, 19 nt, Artificial Sequence
  Description of Artificial Sequence: Synthetic oligonucleotide
ugucaugugccaggccccu

SEQ ID NO: 436764 - RNA, 19 nt, Artificial Sequence
  Description of Artificial Sequence: Synthetic oligonucleotide
aaccucggacacacaucuc

SEQ ID NO: 436765 - RNA, 19 nt, Artificial Sequence
  Description of Artificial Sequence: Synthetic oligonucleotide
accaggaaaucgauccaga

SEQ ID NO: 436766 - RNA, 19 nt, Artificial Sequence
  Description of Artificial Sequence: Synthetic oligonucleotide
uggcgaucucaaagcgcug

SEQ ID NO: 436767 - RNA, 19 nt, Artificial Sequence
  Description of Artificial Sequence: Synthetic oligonucleotide
aggguagacucauccccau

SEQ ID NO: 436768 - RNA, 19 nt, Artificial Sequence
  Description of Artificial Sequence: Synthetic oligonucleotide
ugacaacaguagcguccug

SEQ ID NO: 436769 - RNA, 19 nt, Artificial Sequence
  Description of Artificial Sequence: Synthetic oligonucleotide
gagacgggucacuucauuu

SEQ ID NO: 436770 - RNA, 19 nt, Artificial Sequence
  Description of Artificial Sequence: Synthetic oligonucleotide
agaauggcauccggaggga

SEQ ID NO: 436771 - RNA, 19 nt, Artificial Sequence
  Description of Artificial Sequence: Synthetic oligonucleotide
cuacuccauucuugccagc

SEQ ID NO: 436772 - RNA, 19 nt, Artificial Sequence
  Description of Artificial Sequence: Synthetic oligonucleotide
agcgcuguagcaggcuuga

SEQ ID NO: 436773 - RNA, 19 nt, Artificial Sequence
  Description of Artificial Sequence: Synthetic oligonucleotide
cuuggcuagauacggcgcu

SEQ ID NO: 436774 - RNA, 19 nt, Artificial Sequence
  Description of Artificial Sequence: Synthetic oligonucleotide
gcuagauacggcgcuuuug

SEQ ID NO: 436775 - RNA, 19 nt, Artificial Sequence
  Description of Artificial Sequence: Synthetic oligonucleotide
uagggucgcacagccagau

SEQ ID NO: 436776 - RNA, 19 nt, Artificial Sequence
  Description of Artificial Sequence: Synthetic oligonucleotide
gaggugcaguccgguaugc

SEQ ID NO: 436777 - RNA, 19 nt, Artificial Sequence
  Description of Artificial Sequence: Synthetic oligonucleotide
gcgcuguaccaggaaaucg

SEQ ID NO: 436778 - RNA, 19 nt, Artificial Sequence
  Description of Artificial Sequence: Synthetic oligonucleotide
cucauccccauacuggcgu

SEQ ID NO: 436779 - RNA, 19 nt, Artificial Sequence
  Description of Artificial Sequence: Synthetic oligonucleotide
gcauccggagggaaggacc

SEQ ID NO: 436780 - RNA, 19 nt, Artificial Sequence
  Description of Artificial Sequence: Synthetic oligonucleotide
aaggaccgcaggacuuuca

SEQ ID NO: 436781 - RNA, 19 nt, Artificial Sequence
  Description of Artificial Sequence: Synthetic oligonucleotide
accgaacgagacgggucac

SEQ ID NO: 436782 - RNA, 19 nt, Artificial Sequence
  Description of Artificial Sequence: Synthetic oligonucleotide
guuagggcugaaccugugu

SEQ ID NO: 436783 - RNA, 19 nt, Artificial Sequence
  Description of Artificial Sequence: Synthetic oligonucleotide
gaauguacucacgcacaua

SEQ ID NO: 436784 - RNA, 19 nt, Artificial Sequence
  Description of Artificial Sequence: Synthetic oligonucleotide
ggguccaaccgaacgagac

SEQ ID NO: 436785 - RNA, 19 nt, Artificial Sequence
  Description of Artificial Sequence: Synthetic oligonucleotide
cgacugcauccauauaggg

SEQ ID NO: 436786 - RNA, 19 nt, Artificial Sequence
  Description of Artificial Sequence: Synthetic oligonucleotide
agggacauggagcgcugua

SEQ ID NO: 436787 - RNA, 19 nt, Artificial Sequence
  Description of Artificial Sequence: Synthetic oligonucleotide
ccaagugaugaggcgcucg

SEQ ID NO: 436788 - RNA, 19 nt, Artificial Sequence
  Description of Artificial Sequence: Synthetic oligonucleotide
gugacaacaguagcguccu

SEQ ID NO: 436789 - RNA, 19 nt, Artificial Sequence
  Description of Artificial Sequence: Synthetic oligonucleotide
cggagcgucagcaucgaug

SEQ ID NO: 436790 - RNA, 19 nt, Artificial Sequence
  Description of Artificial Sequence: Synthetic oligonucleotide
auccccauacuggcgugug

SEQ ID NO: 436791 - RNA, 19 nt, Artificial Sequence
  Description of Artificial Sequence: Synthetic oligonucleotide
ucggagcggcacugcagac

SEQ ID NO: 436792 - RNA, 19 nt, Artificial Sequence
  Description of Artificial Sequence: Synthetic oligonucleotide
accuccaauuggccacacu

SEQ ID NO: 436793 - RNA, 19 nt, Artificial Sequence
  Description of Artificial Sequence: Synthetic oligonucleotide
ggaccugauagggacccug

SEQ ID NO: 436794 - RNA, 19 nt, Artificial Sequence
  Description of Artificial Sequence: Synthetic oligonucleotide
ccugcguuucauguaguac

SEQ ID NO: 436795 - RNA, 19 nt, Artificial Sequence
  Description of Artificial Sequence: Synthetic oligonucleotide
gucucgggaggugcagucc

SEQ ID NO: 436796 - RNA, 19 nt, Artificial Sequence
  Description of Artificial Sequence: Synthetic oligonucleotide
acaucuccaugaaccauuu

SEQ ID NO: 436797 - RNA, 19 nt, Artificial Sequence
  Description of Artificial Sequence: Synthetic oligonucleotide
ccaagguuaccacccggug

SEQ ID NO: 436798 - RNA, 19 nt, Artificial Sequence
  Description of Artificial Sequence: Synthetic oligonucleotide
uuggcuagauacggcgcuu

SEQ ID NO: 436799 - RNA, 19 nt, Artificial Sequence
  Description of Artificial Sequence: Synthetic oligonucleotide
acagcggguuguaccaagu

SEQ ID NO: 436800 - RNA, 19 nt, Artificial Sequence
  Description of Artificial Sequence: Synthetic oligonucleotide
uggagcgcuguagcaggcu

SEQ ID NO: 436801 - RNA, 19 nt, Artificial Sequence
  Description of Artificial Sequence: Synthetic oligonucleotide
cgauccagauguagugggg

SEQ ID NO: 436802 - RNA, 19 nt, Artificial Sequence
  Description of Artificial Sequence: Synthetic oligonucleotide
uccugucggcagucauccc

SEQ ID NO: 436803 - RNA, 19 nt, Artificial Sequence
  Description of Artificial Sequence: Synthetic oligonucleotide
gguugcugggcaaguagca

SEQ ID NO: 436804 - RNA, 19 nt, Artificial Sequence
  Description of Artificial Sequence: Synthetic oligonucleotide
ucgggaggugcaguccggu

SEQ ID NO: 436805 - RNA, 19 nt, Artificial Sequence
  Description of Artificial Sequence: Synthetic oligonucleotide
ggagcggcacugcagaccu

SEQ ID NO: 436806 - RNA, 19 nt, Artificial Sequence
  Description of Artificial Sequence: Synthetic oligonucleotide
uacggcgcuuuugcggcac

SEQ ID NO: 436807 - RNA, 19 nt, Artificial Sequence
  Description of Artificial Sequence: Synthetic oligonucleotide
uuguagcgugccugcugaa

SEQ ID NO: 436808 - RNA, 19 nt, Artificial Sequence
  Description of Artificial Sequence: Synthetic oligonucleotide
caugaacggcacuucuacu

SEQ ID NO: 436809 - RNA, 19 nt, Artificial Sequence
  Description of Artificial Sequence: Synthetic oligonucleotide
gggacaaggucuaggcuga

SEQ ID NO: 436810 - RNA, 19 nt, Artificial Sequence
  Description of Artificial Sequence: Synthetic oligonucleotide
auacggcgcuuuugcggca

SEQ ID NO: 436811 - RNA, 19 nt, Artificial Sequence
  Description of Artificial Sequence: Synthetic oligonucleotide
acguuucgaaugguugcau

SEQ ID NO: 436812 - RNA, 19 nt, Artificial Sequence
  Description of Artificial Sequence: Synthetic oligonucleotide
ggucucgggaggugcaguc

SEQ ID NO: 436813 - RNA, 19 nt, Artificial Sequence
  Description of Artificial Sequence: Synthetic oligonucleotide
aggucuaggcugacuugcu

SEQ ID NO: 436814 - RNA, 19 nt, Artificial Sequence
  Description of Artificial Sequence: Synthetic oligonucleotide
uggcuagauacggcgcuuu

SEQ ID NO: 436815 - RNA, 19 nt, Artificial Sequence
  Description of Artificial Sequence: Synthetic oligonucleotide
gcgcuuuugcggcacucug

SEQ ID NO: 436816 - RNA, 19 nt, Artificial Sequence
  Description of Artificial Sequence: Synthetic oligonucleotide
acgggucacuucauuucca

SEQ ID NO: 436817 - RNA, 19 nt, Artificial Sequence
  Description of Artificial Sequence: Synthetic oligonucleotide
cuacaguacuuggcgaucu

SEQ ID NO: 436818 - RNA, 19 nt, Artificial Sequence
  Description of Artificial Sequence: Synthetic oligonucleotide
uccggagcgucagcaucga

SEQ ID NO: 436819 - RNA, 19 nt, Artificial Sequence
  Description of Artificial Sequence: Synthetic oligonucleotide
agacgacugcauccauaua

SEQ ID NO: 436820 - RNA, 19 nt, Artificial Sequence
  Description of Artificial Sequence: Synthetic oligonucleotide
gcuccggagcgucagcauc

SEQ ID NO: 436821 - RNA, 19 nt, Artificial Sequence
  Description of Artificial Sequence: Synthetic oligonucleotide
cgcuuuugcggcacucugc

SEQ ID NO: 436822 - RNA, 19 nt, Artificial Sequence
  Description of Artificial Sequence: Synthetic oligonucleotide
acggcacuucuacuccauu

SEQ ID NO: 436823 - RNA, 19 nt, Artificial Sequence
  Description of Artificial Sequence: Synthetic oligonucleotide
ggccucggaaacagggcag

SEQ ID NO: 436824 - RNA, 19 nt, Artificial Sequence
  Description of Artificial Sequence: Synthetic oligonucleotide
caguccgguaugcacucaa

SEQ ID NO: 436825 - RNA, 19 nt, Artificial Sequence
  Description of Artificial Sequence: Synthetic oligonucleotide
gacaaggucuaggcugacu

SEQ ID NO: 436826 - RNA, 19 nt, Artificial Sequence
  Description of Artificial Sequence: Synthetic oligonucleotide
guguaacuagggagacgac

SEQ ID NO: 436827 - RNA, 19 nt, Artificial Sequence
  Description of Artificial Sequence: Synthetic oligonucleotide
agucaaugucuagcacgau

SEQ ID NO: 436828 - RNA, 19 nt, Artificial Sequence
  Description of Artificial Sequence: Synthetic oligonucleotide
gaagcacguuucgaauggu

SEQ ID NO: 436829 - RNA, 19 nt, Artificial Sequence
  Description of Artificial Sequence: Synthetic oligonucleotide
gcuggaccugauagggacc

SEQ ID NO: 436830 - RNA, 19 nt, Artificial Sequence
  Description of Artificial Sequence: Synthetic oligonucleotide
gguagauguuaguuuucau

SEQ ID NO: 436831 - RNA, 19 nt, Artificial Sequence
  Description of Artificial Sequence: Synthetic oligonucleotide
aggugcaguccgguaugca

SEQ ID NO: 436832 - RNA, 19 nt, Artificial Sequence
  Description of Artificial Sequence: Synthetic oligonucleotide
gguccgugggugcccaaca

SEQ ID NO: 436833 - RNA, 19 nt, Artificial Sequence
  Description of Artificial Sequence: Synthetic oligonucleotide
gcacgauugcuucaggguu

SEQ ID NO: 436834 - RNA, 19 nt, Artificial Sequence
  Description of Artificial Sequence: Synthetic oligonucleotide
gaccugauagggacccugu

SEQ ID NO: 436835 - RNA, 19 nt, Artificial Sequence
  Description of Artificial Sequence: Synthetic oligonucleotide
aguccgguaugcacucaau

SEQ ID NO: 436836 - RNA, 19 nt, Artificial Sequence
  Description of Artificial Sequence: Synthetic oligonucleotide
cuccacaucgcuucaccuu

SEQ ID NO: 436837 - RNA, 19 nt, Artificial Sequence
  Description of Artificial Sequence: Synthetic oligonucleotide
cauagguccggcuccuguu

SEQ ID NO: 436838 - RNA, 19 nt, Artificial Sequence
  Description of Artificial Sequence: Synthetic oligonucleotide
gcugaaccuguguuucaaa

SEQ ID NO: 436839 - RNA, 19 nt, Artificial Sequence
  Description of Artificial Sequence: Synthetic oligonucleotide
caucgagguagauguuagu

SEQ ID NO: 436840 - RNA, 19 nt, Artificial Sequence
  Description of Artificial Sequence: Synthetic oligonucleotide
gugguccgauggcugccac

SEQ ID NO: 436841 - RNA, 19 nt, Artificial Sequence
  Description of Artificial Sequence: Synthetic oligonucleotide
guccaacaugaguguaacu

SEQ ID NO: 436842 - RNA, 19 nt, Artificial Sequence
  Description of Artificial Sequence: Synthetic oligonucleotide
cacaucgcuucaccuuaaa

SEQ ID NO: 436843 - RNA, 19 nt, Artificial Sequence
  Description of Artificial Sequence: Synthetic oligonucleotide
gucauagguccggcuccug

SEQ ID NO: 436844 - RNA, 19 nt, Artificial Sequence
  Description of Artificial Sequence: Synthetic oligonucleotide
gguccgauggcugccacgu

SEQ ID NO: 436845 - RNA, 19 nt, Artificial Sequence
  Description of Artificial Sequence: Synthetic oligonucleotide
ccucggacacacaucucca

SEQ ID NO: 436846 - RNA, 19 nt, Artificial Sequence
  Description of Artificial Sequence: Synthetic oligonucleotide
ccuuaaacuuggcuagaua

SEQ ID NO: 436847 - RNA, 19 nt, Artificial Sequence
  Description of Artificial Sequence: Synthetic oligonucleotide
gcaucggagcggcacugca

SEQ ID NO: 436848 - RNA, 19 nt, Artificial Sequence
  Description of Artificial Sequence: Synthetic oligonucleotide
gggaggugcaguccgguau

SEQ ID NO: 436849 - RNA, 19 nt, Artificial Sequence
  Description of Artificial Sequence: Synthetic oligonucleotide
cccggugagcucucaaaca

SEQ ID NO: 436850 - RNA, 19 nt, Artificial Sequence
  Description of Artificial Sequence: Synthetic oligonucleotide
ccgcccagagaauguacuc

SEQ ID NO: 436851 - RNA, 19 nt, Artificial Sequence
  Description of Artificial Sequence: Synthetic oligonucleotide
gucaugugccaggccccug

SEQ ID NO: 436852 - RNA, 19 nt, Artificial Sequence
  Description of Artificial Sequence: Synthetic oligonucleotide
ggcugaaccuguguuucaa

SEQ ID NO: 436853 - RNA, 19 nt, Artificial Sequence
  Description of Artificial Sequence: Synthetic oligonucleotide
gaccuccaauuggccacac

SEQ ID NO: 436854 - RNA, 19 nt, Artificial Sequence
  Description of Artificial Sequence: Synthetic oligonucleotide
uaccacccggugagcucuc

SEQ ID NO: 436855 - RNA, 19 nt, Artificial Sequence
  Description of Artificial Sequence: Synthetic oligonucleotide
ggcauccggagggaaggac

SEQ ID NO: 436856 - RNA, 19 nt, Artificial Sequence
  Description of Artificial Sequence: Synthetic oligonucleotide
gcggcacucugcauuggug

SEQ ID NO: 436857 - RNA, 19 nt, Artificial Sequence
  Description of Artificial Sequence: Synthetic oligonucleotide
cggguuguaccaagugaug

SEQ ID NO: 436858 - RNA, 19 nt, Artificial Sequence
  Description of Artificial Sequence: Synthetic oligonucleotide
agggucgcacagccagaua

SEQ ID NO: 436859 - RNA, 19 nt, Artificial Sequence
  Description of Artificial Sequence: Synthetic oligonucleotide
ggucagcaauuugaaacgu

SEQ ID NO: 436860 - RNA, 19 nt, Artificial Sequence
  Description of Artificial Sequence: Synthetic oligonucleotide
gcggguuguaccaagugau

SEQ ID NO: 436861 - RNA, 19 nt, Artificial Sequence
  Description of Artificial Sequence: Synthetic oligonucleotide
caacaguagcguccugcgu

SEQ ID NO: 436862 - RNA, 19 nt, Artificial Sequence
  Description of Artificial Sequence: Synthetic oligonucleotide
ccggagggaaggaccgcag

SEQ ID NO: 436863 - RNA, 19 nt, Artificial Sequence
  Description of Artificial Sequence: Synthetic oligonucleotide
ggagacgacugcauccaua

SEQ ID NO: 436864 - RNA, 19 nt, Artificial Sequence
  Description of Artificial Sequence: Synthetic oligonucleotide
caccuuuagggaagggcuu

SEQ ID NO: 436865 - RNA, 19 nt, Artificial Sequence
  Description of Artificial Sequence: Synthetic oligonucleotide
ggcgaucucaaagcgcugu

SEQ ID NO: 436866 - RNA, 19 nt, Artificial Sequence
  Description of Artificial Sequence: Synthetic oligonucleotide
ccugcccucgacacucguc

SEQ ID NO: 436867 - RNA, 19 nt, Artificial Sequence
  Description of Artificial Sequence: Synthetic oligonucleotide
gugccaggccccugccauc

SEQ ID NO: 436868 - RNA, 19 nt, Artificial Sequence
  Description of Artificial Sequence: Synthetic oligonucleotide
cccguugauagaaaucuuu

SEQ ID NO: 436869 - RNA, 19 nt, Artificial Sequence
  Description of Artificial Sequence: Synthetic oligonucleotide
gcccguguccaacaugagu

SEQ ID NO: 436870 - RNA, 19 nt, Artificial Sequence
  Description of Artificial Sequence: Synthetic oligonucleotide
ccucggaaacagggcaggc

SEQ ID NO: 436871 - RNA, 19 nt, Artificial Sequence
  Description of Artificial Sequence: Synthetic oligonucleotide
ggaccgcaggacuuucacu

SEQ ID NO: 436872 - RNA, 19 nt, Artificial Sequence
  Description of Artificial Sequence: Synthetic oligonucleotide
caccaauauucagggacau

SEQ ID NO: 436873 - RNA, 19 nt, Artificial Sequence
  Description of Artificial Sequence: Synthetic oligonucleotide
gcccucgacacucguccuc

SEQ ID NO: 436874 - RNA, 19 nt, Artificial Sequence
  Description of Artificial Sequence: Synthetic oligonucleotide
gcgaucucaaagcgcugua

SEQ ID NO: 436875 - RNA, 19 nt, Artificial Sequence
  Description of Artificial Sequence: Synthetic oligonucleotide
acgagacgggucacuucau

SEQ ID NO: 436876 - RNA, 19 nt, Artificial Sequence
  Description of Artificial Sequence: Synthetic oligonucleotide
ggaaaucgauccagaugua

SEQ ID NO: 436877 - RNA, 19 nt, Artificial Sequence
  Description of Artificial Sequence: Synthetic oligonucleotide
cagggcuaacauguccugu

SEQ ID NO: 436878 - RNA, 19 nt, Artificial Sequence
  Description of Artificial Sequence: Synthetic oligonucleotide
cuucaucgagguagauguu

SEQ ID NO: 436879 - RNA, 19 nt, Artificial Sequence
  Description of Artificial Sequence: Synthetic oligonucleotide
ccauuugaaggguguggcu

SEQ ID NO: 436880 - RNA, 19 nt, Artificial Sequence
  Description of Artificial Sequence: Synthetic oligonucleotide
guggguccgugggugccca

SEQ ID NO: 436881 - RNA, 19 nt, Artificial Sequence
  Description of Artificial Sequence: Synthetic oligonucleotide
cuuuugcggcacucugcau

SEQ ID NO: 436882 - RNA, 19 nt, Artificial Sequence
  Description of Artificial Sequence: Synthetic oligonucleotide
cagcaucgauggugugcca

SEQ ID NO: 436883 - RNA, 19 nt, Artificial Sequence
  Description of Artificial Sequence: Synthetic oligonucleotide
ccucgacacucguccucag

SEQ ID NO: 436884 - RNA, 19 nt, Artificial Sequence
  Description of Artificial Sequence: Synthetic oligonucleotide
ggguccgugggugcccaac

SEQ ID NO: 436885 - RNA, 19 nt, Artificial Sequence
  Description of Artificial Sequence: Synthetic oligonucleotide
guccgugggugcccaacau

SEQ ID NO: 436886 - RNA, 19 nt, Artificial Sequence
  Description of Artificial Sequence: Synthetic oligonucleotide
gggucacuucauuuccaau

SEQ ID NO: 436887 - RNA, 19 nt, Artificial Sequence
  Description of Artificial Sequence: Synthetic oligonucleotide
gcguccugcguuucaugua

SEQ ID NO: 436888 - RNA, 19 nt, Artificial Sequence
  Description of Artificial Sequence: Synthetic oligonucleotide
ccccauacuggcgugugaa

SEQ ID NO: 436889 - RNA, 19 nt, Artificial Sequence
  Description of Artificial Sequence: Synthetic oligonucleotide
cccgcaugaacggcacuuc

SEQ ID NO: 436890 - RNA, 19 nt, Artificial Sequence
  Description of Artificial Sequence: Synthetic oligonucleotide
caccacccgguagggaaaa

SEQ ID NO: 436891 - RNA, 19 nt, Artificial Sequence
  Description of Artificial Sequence: Synthetic oligonucleotide
cagauguaguggggaguua

SEQ ID NO: 436892 - RNA, 19 nt, Artificial Sequence
  Description of Artificial Sequence: Synthetic oligonucleotide
cgguaugcacucaaucacu

SEQ ID NO: 436893 - RNA, 19 nt, Artificial Sequence
  Description of Artificial Sequence: Synthetic oligonucleotide
ggcggccaugcuucggaua

SEQ ID NO: 436894 - RNA, 19 nt, Artificial Sequence
  Description of Artificial Sequence: Synthetic oligonucleotide
cccucgacacucguccuca

SEQ ID NO: 436895 - RNA, 19 nt, Artificial Sequence
  Description of Artificial Sequence: Synthetic oligonucleotide
cauccccauacuggcgugu

SEQ ID NO: 436896 - RNA, 19 nt, Artificial Sequence
  Description of Artificial Sequence: Synthetic oligonucleotide
ggcgcuuuugcggcacucu

SEQ ID NO: 436897 - RNA, 19 nt, Artificial Sequence
  Description of Artificial Sequence: Synthetic oligonucleotide
gccgcccagagaauguacu

SEQ ID NO: 436898 - RNA, 19 nt, Artificial Sequence
  Description of Artificial Sequence: Synthetic oligonucleotide
gcgcucgauuucaguggcc

SEQ ID NO: 436899 - RNA, 19 nt, Artificial Sequence
  Description of Artificial Sequence: Synthetic oligonucleotide
cgcaugaacggcacuucua

SEQ ID NO: 436900 - RNA, 19 nt, Artificial Sequence
  Description of Artificial Sequence: Synthetic oligonucleotide
ccagauguaguggggaguu

SEQ ID NO: 436901 - RNA, 19 nt, Artificial Sequence
  Description of Artificial Sequence: Synthetic oligonucleotide
ccguguccaacaugagugu

SEQ ID NO: 436902 - RNA, 19 nt, Artificial Sequence
  Description of Artificial Sequence: Synthetic oligonucleotide
guccugcguuucauguagu

SEQ ID NO: 436903 - RNA, 19 nt, Artificial Sequence
  Description of Artificial Sequence: Synthetic oligonucleotide
ccaaccgaacgagacgggu

SEQ ID NO: 436904 - RNA, 19 nt, Artificial Sequence
  Description of Artificial Sequence: Synthetic oligonucleotide
ggcuagauacggcgcuuuu

SEQ ID NO: 436905 - RNA, 19 nt, Artificial Sequence
  Description of Artificial Sequence: Synthetic oligonucleotide
ccacaucgcuucaccuuaa

SEQ ID NO: 436906 - RNA, 19 nt, Artificial Sequence
  Description of Artificial Sequence: Synthetic oligonucleotide
gcgcuguagcaggcuugag

SEQ ID NO: 436907 - RNA, 19 nt, Artificial Sequence
  Description of Artificial Sequence: Synthetic oligonucleotide
gcaguccgguaugcacuca

SEQ ID NO: 436908 - RNA, 19 nt, Artificial Sequence
  Description of Artificial Sequence: Synthetic oligonucleotide
ccgcaugaacggcacuucu

SEQ ID NO: 436909 - RNA, 19 nt, Artificial Sequence
  Description of Artificial Sequence: Synthetic oligonucleotide
gggagacgacugcauccau

SEQ ID NO: 436910 - RNA, 19 nt, Artificial Sequence
  Description of Artificial Sequence: Synthetic oligonucleotide
cgaagagguccaggccaac

SEQ ID NO: 436911 - RNA, 19 nt, Artificial Sequence
  Description of Artificial Sequence: Synthetic oligonucleotide
cguguccaacaugagugua

SEQ ID NO: 436912 - RNA, 19 nt, Artificial Sequence
  Description of Artificial Sequence: Synthetic oligonucleotide
ccgccucucgcucugucau

SEQ ID NO: 436913 - RNA, 19 nt, Artificial Sequence
  Description of Artificial Sequence: Synthetic oligonucleotide
cugccacgugccuguucau

SEQ ID NO: 436914 - RNA, 19 nt, Artificial Sequence
  Description of Artificial Sequence: Synthetic oligonucleotide
cgugguccgauggcugcca

SEQ ID NO: 436915 - RNA, 19 nt, Artificial Sequence
  Description of Artificial Sequence: Synthetic oligonucleotide
gggcugacagcggguugua

SEQ ID NO: 436916 - RNA, 19 nt, Artificial Sequence
  Description of Artificial Sequence: Synthetic oligonucleotide
cgacacucguccucagcau

SEQ ID NO: 436917 - RNA, 19 nt, Artificial Sequence
  Description of Artificial Sequence: Synthetic oligonucleotide
ccgaacgagacgggucacu

SEQ ID NO: 436918 - RNA, 19 nt, Artificial Sequence
  Description of Artificial Sequence: Synthetic oligonucleotide
cggcgcuuuugcggcacuc

SEQ ID NO: 436919 - RNA, 19 nt, Artificial Sequence
  Description of Artificial Sequence: Synthetic oligonucleotide
cgagacgggucacuucauu

SEQ ID NO: 436920 - RNA, 19 nt, Artificial Sequence
  Description of Artificial Sequence: Synthetic oligonucleotide
caccaaugucagggucuuu

SEQ ID NO: 436921 - RNA, 19 nt, Artificial Sequence
  Description of Artificial Sequence: Synthetic oligonucleotide
gagcggcacugcagaccuu

SEQ ID NO: 436922 - RNA, 19 nt, Artificial Sequence
  Description of Artificial Sequence: Synthetic oligonucleotide
auacauucggcccagguuc

SEQ ID NO: 436923 - RNA, 19 nt, Artificial Sequence
  Description of Artificial Sequence: Synthetic oligonucleotide
aauauuagcgucucucugu

SEQ ID NO: 436924 - RNA, 19 nt, Artificial Sequence
  Description of Artificial Sequence: Synthetic oligonucleotide
uguuuauucgcucacaaua

SEQ ID NO: 436925 - RNA, 19 nt, Artificial Sequence
  Description of Artificial Sequence: Synthetic oligonucleotide
uauucgcucacaauaauac

SEQ ID NO: 436926 - RNA, 19 nt, Artificial Sequence
  Description of Artificial Sequence: Synthetic oligonucleotide
ugauauauguggacaacag

SEQ ID NO: 436927 - RNA, 19 nt, Artificial Sequence
  Description of Artificial Sequence: Synthetic oligonucleotide
uuaaugacgguaucaaugu

SEQ ID NO: 436928 - RNA, 19 nt, Artificial Sequence
  Description of Artificial Sequence: Synthetic oligonucleotide
acuguucuuacacacgaac

SEQ ID NO: 436929 - RNA, 19 nt, Artificial Sequence
  Description of Artificial Sequence: Synthetic oligonucleotide
uguaaacagcagcagauga

SEQ ID NO: 436930 - RNA, 19 nt, Artificial Sequence
  Description of Artificial Sequence: Synthetic oligonucleotide
gaagagauacauucggccc

SEQ ID NO: 436931 - RNA, 19 nt, Artificial Sequence
  Description of Artificial Sequence: Synthetic oligonucleotide
uucgcucacaauaauacac

SEQ ID NO: 436932 - RNA, 19 nt, Artificial Sequence
  Description of Artificial Sequence: Synthetic oligonucleotide
agcaaucaaauucccaaac

SEQ ID NO: 436933 - RNA, 19 nt, Artificial Sequence
  Description of Artificial Sequence: Synthetic oligonucleotide
ucucggauggcauagucag

SEQ ID NO: 436934 - RNA, 19 nt, Artificial Sequence
  Description of Artificial Sequence: Synthetic oligonucleotide
gacgguaucaaugugaguc

SEQ ID NO: 436935 - RNA, 19 nt, Artificial Sequence
  Description of Artificial Sequence: Synthetic oligonucleotide
cauacgagaggucagcugc

SEQ ID NO: 436936 - RNA, 19 nt, Artificial Sequence
  Description of Artificial Sequence: Synthetic oligonucleotide
aauacacggccccaggaug

SEQ ID NO: 436937 - RNA, 19 nt, Artificial Sequence
  Description of Artificial Sequence: Synthetic oligonucleotide
ucgcucacaauaauacacg

SEQ ID NO: 436938 - RNA, 19 nt, Artificial Sequence
  Description of Artificial Sequence: Synthetic oligonucleotide
agugacgggagacaggcuc

SEQ ID NO: 436939 - RNA, 19 nt, Artificial Sequence
  Description of Artificial Sequence: Synthetic oligonucleotide
aaaggccagaggaagcucc

SEQ ID NO: 436940 - RNA, 19 nt, Artificial Sequence
  Description of Artificial Sequence: Synthetic oligonucleotide
gaagcuuggccuuaguaac

SEQ ID NO: 436941 - RNA, 19 nt, Artificial Sequence
  Description of Artificial Sequence: Synthetic oligonucleotide
ucggacuugacuccaaucu

SEQ ID NO: 436942 - RNA, 19 nt, Artificial Sequence
  Description of Artificial Sequence: Synthetic oligonucleotide
aaugacgguaucaauguga

SEQ ID NO: 436943 - RNA, 19 nt, Artificial Sequence
  Description of Artificial Sequence: Synthetic oligonucleotide
aucggcauugcgcagcugg

SEQ ID NO: 436944 - RNA, 19 nt, Artificial Sequence
  Description of Artificial Sequence: Synthetic oligonucleotide
aucggugcuggcuacagag

SEQ ID NO: 436945 - RNA, 19 nt, Artificial Sequence
  Description of Artificial Sequence: Synthetic oligonucleotide
agaagucucgcagacacuc

SEQ ID NO: 436946 - RNA, 19 nt, Artificial Sequence
  Description of Artificial Sequence: Synthetic oligonucleotide
ucuucuaguacaguagcca

SEQ ID NO: 436947 - RNA, 19 nt, Artificial Sequence
  Description of Artificial Sequence: Synthetic oligonucleotide
uguggacaacagcagggcg

SEQ ID NO: 436948 - RNA, 19 nt, Artificial Sequence
  Description of Artificial Sequence: Synthetic oligonucleotide
aacgguggcgucaagaagu

SEQ ID NO: 436949 - RNA, 19 nt, Artificial Sequence
  Description of Artificial Sequence: Synthetic oligonucleotide
ucuguuuauucgcucacaa

SEQ ID NO: 436950 - RNA, 19 nt, Artificial Sequence
  Description of Artificial Sequence: Synthetic oligonucleotide
cuucuaguacaguagccag

SEQ ID NO: 436951 - RNA, 19 nt, Artificial Sequence
  Description of Artificial Sequence: Synthetic oligonucleotide
ccauagaagagauacauuc

SEQ ID NO: 436952 - RNA, 19 nt, Artificial Sequence
  Description of Artificial Sequence: Synthetic oligonucleotide
cagcagaugaacaaaauaa

SEQ ID NO: 436953 - RNA, 19 nt, Artificial Sequence
  Description of Artificial Sequence: Synthetic oligonucleotide
gaaguucucaggguugggg

SEQ ID NO: 436954 - RNA, 19 nt, Artificial Sequence
  Description of Artificial Sequence: Synthetic oligonucleotide
ucucaaacaagaccccacu

SEQ ID NO: 436955 - RNA, 19 nt, Artificial Sequence
  Description of Artificial Sequence: Synthetic oligonucleotide
acccacgaaguucucaggg

SEQ ID NO: 436956 - RNA, 19 nt, Artificial Sequence
  Description of Artificial Sequence: Synthetic oligonucleotide
ucagcaguucaucugcuuc

SEQ ID NO: 436957 - RNA, 19 nt, Artificial Sequence
  Description of Artificial Sequence: Synthetic oligonucleotide
aggcgagaagcucuggaac

SEQ ID NO: 436958 - RNA, 19 nt, Artificial Sequence
  Description of Artificial Sequence: Synthetic oligonucleotide
acacgcuucgucugcaccg

SEQ ID NO: 436959 - RNA, 19 nt, Artificial Sequence
  Description of Artificial Sequence: Synthetic oligonucleotide
ggagguaccgacuuccccg

SEQ ID NO: 436960 - RNA, 19 nt, Artificial Sequence
  Description of Artificial Sequence: Synthetic oligonucleotide
ucuaguacaguagccagaa

SEQ ID NO: 436961 - RNA, 19 nt, Artificial Sequence
  Description of Artificial Sequence: Synthetic oligonucleotide
guuacaggcacggaccagg

SEQ ID NO: 436962 - RNA, 19 nt, Artificial Sequence
  Description of Artificial Sequence: Synthetic oligonucleotide
uuuauucgcucacaauaau

SEQ ID NO: 436963 - RNA, 19 nt, Artificial Sequence
  Description of Artificial Sequence: Synthetic oligonucleotide
uuuguuaugaugggguaau

SEQ ID NO: 436964 - RNA, 19 nt, Artificial Sequence
  Description of Artificial Sequence: Synthetic oligonucleotide
ccagcuauaguccacugcg

SEQ ID NO: 436965 - RNA, 19 nt, Artificial Sequence
  Description of Artificial Sequence: Synthetic oligonucleotide
agcgucucucuguuuauuc

SEQ ID NO: 436966 - RNA, 19 nt, Artificial Sequence
  Description of Artificial Sequence: Synthetic oligonucleotide
guagccaccgaccuucacc

SEQ ID NO: 436967 - RNA, 19 nt, Artificial Sequence
  Description of Artificial Sequence: Synthetic oligonucleotide
cacacgaacuuauucagca

SEQ ID NO: 436968 - RNA, 19 nt, Artificial Sequence
  Description of Artificial Sequence: Synthetic oligonucleotide
accggaagcgcaccgacag

SEQ ID NO: 436969 - RNA, 19 nt, Artificial Sequence
  Description of Artificial Sequence: Synthetic oligonucleotide
uaauacacggccccaggau

SEQ ID NO: 436970 - RNA, 19 nt, Artificial Sequence
  Description of Artificial Sequence: Synthetic oligonucleotide
ucgcgcucaggaaaugggg

SEQ ID NO: 436971 - RNA, 19 nt, Artificial Sequence
  Description of Artificial Sequence: Synthetic oligonucleotide
caggcgguacauuugggcc

SEQ ID NO: 436972 - RNA, 19 nt, Artificial Sequence
  Description of Artificial Sequence: Synthetic oligonucleotide
agcuacacgcuucgucugc

SEQ ID NO: 436973 - RNA, 19 nt, Artificial Sequence
  Description of Artificial Sequence: Synthetic oligonucleotide
cugauuuuggaggucuccg

SEQ ID NO: 436974 - RNA, 19 nt, Artificial Sequence
  Description of Artificial Sequence: Synthetic oligonucleotide
uaaugacgguaucaaugug

SEQ ID NO: 436975 - RNA, 19 nt, Artificial Sequence
  Description of Artificial Sequence: Synthetic oligonucleotide
auaauacacggccccagga

SEQ ID NO: 436976 - RNA, 19 nt, Artificial Sequence
  Description of Artificial Sequence: Synthetic oligonucleotide
uaacgguggcgucaagaag

SEQ ID NO: 436977 - RNA, 19 nt, Artificial Sequence
  Description of Artificial Sequence: Synthetic oligonucleotide
uagccaccgaccuucacca

SEQ ID NO: 436978 - RNA, 19 nt, Artificial Sequence
  Description of Artificial Sequence: Synthetic oligonucleotide
acaugcauacgagagguca

SEQ ID NO: 436979 - RNA, 19 nt, Artificial Sequence
  Description of Artificial Sequence: Synthetic oligonucleotide
gucccuacggcugucaucc

SEQ ID NO: 436980 - RNA, 19 nt, Artificial Sequence
  Description of Artificial Sequence: Synthetic oligonucleotide
gaccccacuguucuuacac

SEQ ID NO: 436981 - RNA, 19 nt, Artificial Sequence
  Description of Artificial Sequence: Synthetic oligonucleotide
gaugggagggccuaugucu

SEQ ID NO: 436982 - RNA, 19 nt, Artificial Sequence
  Description of Artificial Sequence: Synthetic oligonucleotide
aagcgcaccgacaguaacg

SEQ ID NO: 436983 - RNA, 19 nt, Artificial Sequence
  Description of Artificial Sequence: Synthetic oligonucleotide
uguuaugaugggguaauau

SEQ ID NO: 436984 - RNA, 19 nt, Artificial Sequence
  Description of Artificial Sequence: Synthetic oligonucleotide
aaagucuugggcggccauc

SEQ ID NO: 436985 - RNA, 19 nt, Artificial Sequence
  Description of Artificial Sequence: Synthetic oligonucleotide
aggagguucccaccuacag

SEQ ID NO: 436986 - RNA, 19 nt, Artificial Sequence
  Description of Artificial Sequence: Synthetic oligonucleotide
caugcauacgagaggucag

SEQ ID NO: 436987 - RNA, 19 nt, Artificial Sequence
  Description of Artificial Sequence: Synthetic oligonucleotide
auucgcucacaauaauaca

SEQ ID NO: 436988 - RNA, 19 nt, Artificial Sequence
  Description of Artificial Sequence: Synthetic oligonucleotide
gucaagaagucucgcagac

SEQ ID NO: 436989 - RNA, 19 nt, Artificial Sequence
  Description of Artificial Sequence: Synthetic oligonucleotide
agaacaucggugcuggcua

SEQ ID NO: 436990 - RNA, 19 nt, Artificial Sequence
  Description of Artificial Sequence: Synthetic oligonucleotide
gguaauauuagcgucucuc

SEQ ID NO: 436991 - RNA, 19 nt, Artificial Sequence
  Description of Artificial Sequence: Synthetic oligonucleotide
gagguaccgacuuccccgg

SEQ ID NO: 436992 - RNA, 19 nt, Artificial Sequence
  Description of Artificial Sequence: Synthetic oligonucleotide
augcauacgagaggucagc

SEQ ID NO: 436993 - RNA, 19 nt, Artificial Sequence
  Description of Artificial Sequence: Synthetic oligonucleotide
augacgguaucaaugugag

SEQ ID NO: 436994 - RNA, 19 nt, Artificial Sequence
  Description of Artificial Sequence: Synthetic oligonucleotide
ugugccgugggaccaucag

SEQ ID NO: 436995 - RNA, 19 nt, Artificial Sequence
  Description of Artificial Sequence: Synthetic oligonucleotide
gacacaauuugcuuggcau

SEQ ID NO: 436996 - RNA, 19 nt, Artificial Sequence
  Description of Artificial Sequence: Synthetic oligonucleotide
acacgaacuuauucagcag

SEQ ID NO: 436997 - RNA, 19 nt, Artificial Sequence
  Description of Artificial Sequence: Synthetic oligonucleotide
ugcagcuacacgcuucguc

SEQ ID NO: 436998 - RNA, 19 nt, Artificial Sequence
  Description of Artificial Sequence: Synthetic oligonucleotide
ucucgcagacacucaaugu

SEQ ID NO: 436999 - RNA, 19 nt, Artificial Sequence
  Description of Artificial Sequence: Synthetic oligonucleotide
ugucgacacgguacugggg

SEQ ID NO: 437000 - RNA, 19 nt, Artificial Sequence
  Description of Artificial Sequence: Synthetic oligonucleotide
augacucgcgcucaggaaa

SEQ ID NO: 437001 - RNA, 19 nt, Artificial Sequence
  Description of Artificial Sequence: Synthetic oligonucleotide
agauacauucggcccaggu

SEQ ID NO: 437002 - RNA, 19 nt, Artificial Sequence
  Description of Artificial Sequence: Synthetic oligonucleotide
gugucgacacgguacuggg

SEQ ID NO: 437003 - RNA, 19 nt, Artificial Sequence
  Description of Artificial Sequence: Synthetic oligonucleotide
ugcagcgguaggcucagcu

SEQ ID NO: 437004 - RNA, 19 nt, Artificial Sequence
  Description of Artificial Sequence: Synthetic oligonucleotide
gucucgcagacacucaaug

SEQ ID NO: 437005 - RNA, 19 nt, Artificial Sequence
  Description of Artificial Sequence: Synthetic oligonucleotide
ucacacaagugacgggaga

SEQ ID NO: 437006 - RNA, 19 nt, Artificial Sequence
  Description of Artificial Sequence: Synthetic oligonucleotide
cuugauauauguggacaac

SEQ ID NO: 437007 - RNA, 19 nt, Artificial Sequence
  Description of Artificial Sequence: Synthetic oligonucleotide
agcgcaccgacaguaacgg

SEQ ID NO: 437008 - RNA, 19 nt, Artificial Sequence
  Description of Artificial Sequence: Synthetic oligonucleotide
cagaauggaugacucgcgc

SEQ ID NO: 437009 - RNA, 19 nt, Artificial Sequence
  Description of Artificial Sequence: Synthetic oligonucleotide
uuucgucuggaugauucca

SEQ ID NO: 437010 - RNA, 19 nt, Artificial Sequence
  Description of Artificial Sequence: Synthetic oligonucleotide
ucggcauugcgcagcuggg

SEQ ID NO: 437011 - RNA, 19 nt, Artificial Sequence
  Description of Artificial Sequence: Synthetic oligonucleotide
ucggaacucggacuugacu

SEQ ID NO: 437012 - RNA, 19 nt, Artificial Sequence
  Description of Artificial Sequence: Synthetic oligonucleotide
agcacucgguaccacaccu

SEQ ID NO: 437013 - RNA, 19 nt, Artificial Sequence
  Description of Artificial Sequence: Synthetic oligonucleotide
ugguuggcuuugaagauuu

SEQ ID NO: 437014 - RNA, 19 nt, Artificial Sequence
  Description of Artificial Sequence: Synthetic oligonucleotide
agguugggcaugguguccc

SEQ ID NO: 437015 - RNA, 19 nt, Artificial Sequence
  Description of Artificial Sequence: Synthetic oligonucleotide
acgguaucaaugugagucu

SEQ ID NO: 437016 - RNA, 19 nt, Artificial Sequence
  Description of Artificial Sequence: Synthetic oligonucleotide
gagggugcuucccuuggcc

SEQ ID NO: 437017 - RNA, 19 nt, Artificial Sequence
  Description of Artificial Sequence: Synthetic oligonucleotide
cauaccagcuauaguccac

SEQ ID NO: 437018 - RNA, 19 nt, Artificial Sequence
  Description of Artificial Sequence: Synthetic oligonucleotide
ggucaggcgguacauuugg

SEQ ID NO: 437019 - RNA, 19 nt, Artificial Sequence
  Description of Artificial Sequence: Synthetic oligonucleotide
guaauauuagcgucucucu

SEQ ID NO: 437020 - RNA, 19 nt, Artificial Sequence
  Description of Artificial Sequence: Synthetic oligonucleotide
agcacgaucuccucucgga

SEQ ID NO: 437021 - RNA, 19 nt, Artificial Sequence
  Description of Artificial Sequence: Synthetic oligonucleotide
auauuagcgucucucuguu

SEQ ID NO: 437022 - RNA, 19 nt, Artificial Sequence
  Description of Artificial Sequence: Synthetic oligonucleotide
cagcgguaggcucagcugc

SEQ ID NO: 437023 - RNA, 19 nt, Artificial Sequence
  Description of Artificial Sequence: Synthetic oligonucleotide
aagucuugggcggccaucu

SEQ ID NO: 437024 - RNA, 19 nt, Artificial Sequence
  Description of Artificial Sequence: Synthetic oligonucleotide
gagggugucgacacgguac

SEQ ID NO: 437025 - RNA, 19 nt, Artificial Sequence
  Description of Artificial Sequence: Synthetic oligonucleotide
agcugguucucaaacaaga

SEQ ID NO: 437026 - RNA, 19 nt, Artificial Sequence
  Description of Artificial Sequence: Synthetic oligonucleotide
guuuauucgcucacaauaa

SEQ ID NO: 437027 - RNA, 19 nt, Artificial Sequence
  Description of Artificial Sequence: Synthetic oligonucleotide
cauugcgcagcugggagcc

SEQ ID NO: 437028 - RNA, 19 nt, Artificial Sequence
  Description of Artificial Sequence: Synthetic oligonucleotide
ggagguucccaccuacagg

SEQ ID NO: 437029 - RNA, 19 nt, Artificial Sequence
  Description of Artificial Sequence: Synthetic oligonucleotide
auacacggccccaggaugg

SEQ ID NO: 437030 - RNA, 19 nt, Artificial Sequence
  Description of Artificial Sequence: Synthetic oligonucleotide
uaucaaugugagucuugac

SEQ ID NO: 437031 - RNA, 19 nt, Artificial Sequence
  Description of Artificial Sequence: Synthetic oligonucleotide
aguaacgguggcgucaaga

SEQ ID NO: 437032 - RNA, 19 nt, Artificial Sequence
  Description of Artificial Sequence: Synthetic oligonucleotide
cacgaaguucucaggguug

SEQ ID NO: 437033 - RNA, 19 nt, Artificial Sequence
  Description of Artificial Sequence: Synthetic oligonucleotide
agggugagguacuccacug

SEQ ID NO: 437034 - RNA, 19 nt, Artificial Sequence
  Description of Artificial Sequence: Synthetic oligonucleotide
guucugucggaacucggac

SEQ ID NO: 437035 - RNA, 19 nt, Artificial Sequence
  Description of Artificial Sequence: Synthetic oligonucleotide
guaacgguggcgucaagaa

SEQ ID NO: 437036 - RNA, 19 nt, Artificial Sequence
  Description of Artificial Sequence: Synthetic oligonucleotide
uggccagaauggaugacuc

SEQ ID NO: 437037 - RNA, 19 nt, Artificial Sequence
  Description of Artificial Sequence: Synthetic oligonucleotide
aaaagucuugggcggccau

SEQ ID NO: 437038 - RNA, 19 nt, Artificial Sequence
  Description of Artificial Sequence: Synthetic oligonucleotide
auucggcccagguucuguc

SEQ ID NO: 437039 - RNA, 19 nt, Artificial Sequence
  Description of Artificial Sequence: Synthetic oligonucleotide
cuacggcugucauccaggg

SEQ ID NO: 437040 - RNA, 19 nt, Artificial Sequence
  Description of Artificial Sequence: Synthetic oligonucleotide
gaagcgcaccgacaguaac

SEQ ID NO: 437041 - RNA, 19 nt, Artificial Sequence
  Description of Artificial Sequence: Synthetic oligonucleotide
cacacaagugacgggagac

SEQ ID NO: 437042 - RNA, 19 nt, Artificial Sequence
  Description of Artificial Sequence: Synthetic oligonucleotide
gcgucaagaagucucgcag

SEQ ID NO: 437043 - RNA, 19 nt, Artificial Sequence
  Description of Artificial Sequence: Synthetic oligonucleotide
cucacacaagugacgggag

SEQ ID NO: 437044 - RNA, 19 nt, Artificial Sequence
  Description of Artificial Sequence: Synthetic oligonucleotide
acgggagacaggcucuuug

SEQ ID NO: 437045 - RNA, 19 nt, Artificial Sequence
  Description of Artificial Sequence: Synthetic oligonucleotide
agagauacauucggcccag

SEQ ID NO: 437046 - RNA, 19 nt, Artificial Sequence
  Description of Artificial Sequence: Synthetic oligonucleotide
agcuauaguccacugcgua

SEQ ID NO: 437047 - RNA, 19 nt, Artificial Sequence
  Description of Artificial Sequence: Synthetic oligonucleotide
acaauaauacacggcccca

SEQ ID NO: 437048 - RNA, 19 nt, Artificial Sequence
  Description of Artificial Sequence: Synthetic oligonucleotide
guuaugaugggguaauauu

SEQ ID NO: 437049 - RNA, 19 nt, Artificial Sequence
  Description of Artificial Sequence: Synthetic oligonucleotide
gacaguaacgguggcguca

SEQ ID NO: 437050 - RNA, 19 nt, Artificial Sequence
  Description of Artificial Sequence: Synthetic oligonucleotide
cugagggugagguacucca

SEQ ID NO: 437051 - RNA, 19 nt, Artificial Sequence
  Description of Artificial Sequence: Synthetic oligonucleotide
ugagucuugacagcuucau

SEQ ID NO: 437052 - RNA, 19 nt, Artificial Sequence
  Description of Artificial Sequence: Synthetic oligonucleotide
ggugcgcagggucaggcgg

SEQ ID NO: 437053 - RNA, 19 nt, Artificial Sequence
  Description of Artificial Sequence: Synthetic oligonucleotide
agggugucgacacgguacu

SEQ ID NO: 437054 - RNA, 19 nt, Artificial Sequence
  Description of Artificial Sequence: Synthetic oligonucleotide
guaccgacuuccccggacc

SEQ ID NO: 437055 - RNA, 19 nt, Artificial Sequence
  Description of Artificial Sequence: Synthetic oligonucleotide
caccuacagggacuggagg

SEQ ID NO: 437056 - RNA, 19 nt, Artificial Sequence
  Description of Artificial Sequence: Synthetic oligonucleotide
gguaccgcagcauuucuga

SEQ ID NO: 437057 - RNA, 19 nt, Artificial Sequence
  Description of Artificial Sequence: Synthetic oligonucleotide
gagggcauuaaugacggua

SEQ ID NO: 437058 - RNA, 19 nt, Artificial Sequence
  Description of Artificial Sequence: Synthetic oligonucleotide
aggcgguacauuugggccu

SEQ ID NO: 437059 - RNA, 19 nt, Artificial Sequence
  Description of Artificial Sequence: Synthetic oligonucleotide
cagagugagggacugggca

SEQ ID NO: 437060 - RNA, 19 nt, Artificial Sequence
  Description of Artificial Sequence: Synthetic oligonucleotide
acgcagaacuccuuggaua

SEQ ID NO: 437061 - RNA, 19 nt, Artificial Sequence
  Description of Artificial Sequence: Synthetic oligonucleotide
uccgcggagggugagggug

SEQ ID NO: 437062 - RNA, 19 nt, Artificial Sequence
  Description of Artificial Sequence: Synthetic oligonucleotide
cuaugucuucaggaccugg

SEQ ID NO: 437063 - RNA, 19 nt, Artificial Sequence
  Description of Artificial Sequence: Synthetic oligonucleotide
ggugucgacacgguacugg

SEQ ID NO: 437064 - RNA, 19 nt, Artificial Sequence
  Description of Artificial Sequence: Synthetic oligonucleotide
ucucucuguuuauucgcuc

SEQ ID NO: 437065 - RNA, 19 nt, Artificial Sequence
  Description of Artificial Sequence: Synthetic oligonucleotide
ggccacgcugcacaggugg

SEQ ID NO: 437066 - RNA, 19 nt, Artificial Sequence
  Description of Artificial Sequence: Synthetic oligonucleotide
guggcgucaagaagucucg

SEQ ID NO: 437067 - RNA, 19 nt, Artificial Sequence
  Description of Artificial Sequence: Synthetic oligonucleotide
accgacaguaacgguggcg

SEQ ID NO: 437068 - RNA, 19 nt, Artificial Sequence
  Description of Artificial Sequence: Synthetic oligonucleotide
ugacucgcgcucaggaaau

SEQ ID NO: 437069 - RNA, 19 nt, Artificial Sequence
  Description of Artificial Sequence: Synthetic oligonucleotide
uccgggguggaccacggua

SEQ ID NO: 437070 - RNA, 19 nt, Artificial Sequence
  Description of Artificial Sequence: Synthetic oligonucleotide
gauacauucggcccagguu

SEQ ID NO: 437071 - RNA, 19 nt, Artificial Sequence
  Description of Artificial Sequence: Synthetic oligonucleotide
uaccgacuuccccggaccc

SEQ ID NO: 437072 - RNA, 19 nt, Artificial Sequence
  Description of Artificial Sequence: Synthetic oligonucleotide
gcgucucucuguuuauucg

SEQ ID NO: 437073 - RNA, 19 nt, Artificial Sequence
  Description of Artificial Sequence: Synthetic oligonucleotide
gaagucuuguugccauaga

SEQ ID NO: 437074 - RNA, 19 nt, Artificial Sequence
  Description of Artificial Sequence: Synthetic oligonucleotide
ggcauugcgcagcugggag

SEQ ID NO: 437075 - RNA, 19 nt, Artificial Sequence
  Description of Artificial Sequence: Synthetic oligonucleotide
gcuauaguccacugcguac

SEQ ID NO: 437076 - RNA, 19 nt, Artificial Sequence
  Description of Artificial Sequence: Synthetic oligonucleotide
cagggcuuucgucuggaug

SEQ ID NO: 437077 - RNA, 19 nt, Artificial Sequence
  Description of Artificial Sequence: Synthetic oligonucleotide
gaugacucgcgcucaggaa

SEQ ID NO: 437078 - RNA, 19 nt, Artificial Sequence
  Description of Artificial Sequence: Synthetic oligonucleotide
cacaucggcauugcgcagc

SEQ ID NO: 437079 - RNA, 19 nt, Artificial Sequence
  Description of Artificial Sequence: Synthetic oligonucleotide
ccagaauggaugacucgcg

SEQ ID NO: 437080 - RNA, 19 nt, Artificial Sequence
  Description of Artificial Sequence: Synthetic oligonucleotide
ugcauacgagaggucagcu

SEQ ID NO: 437081 - RNA, 19 nt, Artificial Sequence
  Description of Artificial Sequence: Synthetic oligonucleotide
gcacccacgaaguucucag

SEQ ID NO: 437082 - RNA, 19 nt, Artificial Sequence
  Description of Artificial Sequence: Synthetic oligonucleotide
gacagcuucaugggagaac

SEQ ID NO: 437083 - RNA, 19 nt, Artificial Sequence
  Description of Artificial Sequence: Synthetic oligonucleotide
guaggcgagaagcucugga

SEQ ID NO: 437084 - RNA, 19 nt, Artificial Sequence
  Description of Artificial Sequence: Synthetic oligonucleotide
ccagcaaucaaauucccaa

SEQ ID NO: 437085 - RNA, 19 nt, Artificial Sequence
  Description of Artificial Sequence: Synthetic oligonucleotide
gacaagggagggagggugc

SEQ ID NO: 437086 - RNA, 19 nt, Artificial Sequence
  Description of Artificial Sequence: Synthetic oligonucleotide
cucggacuugacuccaauc

SEQ ID NO: 437087 - RNA, 19 nt, Artificial Sequence
  Description of Artificial Sequence: Synthetic oligonucleotide
cuuccccggacccucuccc

SEQ ID NO: 437088 - RNA, 19 nt, Artificial Sequence
  Description of Artificial Sequence: Synthetic oligonucleotide
ggaggagguaccgacuucc

SEQ ID NO: 437089 - RNA, 19 nt, Artificial Sequence
  Description of Artificial Sequence: Synthetic oligonucleotide
ccuacggcugucauccagg

SEQ ID NO: 437090 - RNA, 19 nt, Artificial Sequence
  Description of Artificial Sequence: Synthetic oligonucleotide
ggcacgcagaacuccuugg

SEQ ID NO: 437091 - RNA, 19 nt, Artificial Sequence
  Description of Artificial Sequence: Synthetic oligonucleotide
gaacaucggugcuggcuac

SEQ ID NO: 437092 - RNA, 19 nt, Artificial Sequence
  Description of Artificial Sequence: Synthetic oligonucleotide
ggggcauuucuucuaguac

SEQ ID NO: 437093 - RNA, 19 nt, Artificial Sequence
  Description of Artificial Sequence: Synthetic oligonucleotide
gguacauuugggccuggac

SEQ ID NO: 437094 - RNA, 19 nt, Artificial Sequence
  Description of Artificial Sequence: Synthetic oligonucleotide
acaacagcagggcgcgagu

SEQ ID NO: 437095 - RNA, 19 nt, Artificial Sequence
  Description of Artificial Sequence: Synthetic oligonucleotide
ggccuaugucuucaggacc

SEQ ID NO: 437096 - RNA, 19 nt, Artificial Sequence
  Description of Artificial Sequence: Synthetic oligonucleotide
uucccaccuacagggacug

SEQ ID NO: 437097 - RNA, 19 nt, Artificial Sequence
  Description of Artificial Sequence: Synthetic oligonucleotide
ugcaccgccagcugauuuu

SEQ ID NO: 437098 - RNA, 19 nt, Artificial Sequence
  Description of Artificial Sequence: Synthetic oligonucleotide
uggaugauuccagcaccca

SEQ ID NO: 437099 - RNA, 19 nt, Artificial Sequence
  Description of Artificial Sequence: Synthetic oligonucleotide
gguggcgucaagaagucuc

SEQ ID NO: 437100 - RNA, 19 nt, Artificial Sequence
  Description of Artificial Sequence: Synthetic oligonucleotide
cacccacgaaguucucagg

SEQ ID NO: 437101 - RNA, 19 nt, Artificial Sequence
  Description of Artificial Sequence: Synthetic oligonucleotide
cucggauggcauagucagc

SEQ ID NO: 437102 - RNA, 19 nt, Artificial Sequence
  Description of Artificial Sequence: Synthetic oligonucleotide
acgagaggucagcugcucu

SEQ ID NO: 437103 - RNA, 19 nt, Artificial Sequence
  Description of Artificial Sequence: Synthetic oligonucleotide
guaccggaagcgcaccgac

SEQ ID NO: 437104 - RNA, 19 nt, Artificial Sequence
  Description of Artificial Sequence: Synthetic oligonucleotide
ugccucacacugacauccc

SEQ ID NO: 437105 - RNA, 19 nt, Artificial Sequence
  Description of Artificial Sequence: Synthetic oligonucleotide
cgcagaacuccuuggauag

SEQ ID NO: 437106 - RNA, 19 nt, Artificial Sequence
  Description of Artificial Sequence: Synthetic oligonucleotide
uguugagcaccugcugcac

SEQ ID NO: 437107 - RNA, 19 nt, Artificial Sequence
  Description of Artificial Sequence: Synthetic oligonucleotide
gcaccgacaguaacggugg

SEQ ID NO: 437108 - RNA, 19 nt, Artificial Sequence
  Description of Artificial Sequence: Synthetic oligonucleotide
cggaacucggacuugacuc

SEQ ID NO: 437109 - RNA, 19 nt, Artificial Sequence
  Description of Artificial Sequence: Synthetic oligonucleotide
auaguggccuuggucucag

SEQ ID NO: 437110 - RNA, 19 nt, Artificial Sequence
  Description of Artificial Sequence: Synthetic oligonucleotide
agggagggugcuucccuug

SEQ ID NO: 437111 - RNA, 19 nt, Artificial Sequence
  Description of Artificial Sequence: Synthetic oligonucleotide
accguaccggaagcgcacc

SEQ ID NO: 437112 - RNA, 19 nt, Artificial Sequence
  Description of Artificial Sequence: Synthetic oligonucleotide
acgguaggcgagaagcucu

SEQ ID NO: 437113 - RNA, 19 nt, Artificial Sequence
  Description of Artificial Sequence: Synthetic oligonucleotide
agccggcacgcagaacucc

SEQ ID NO: 437114 - RNA, 19 nt, Artificial Sequence
  Description of Artificial Sequence: Synthetic oligonucleotide
acaucggugcuggcuacag

SEQ ID NO: 437115 - RNA, 19 nt, Artificial Sequence
  Description of Artificial Sequence: Synthetic oligonucleotide
acacaagugacgggagaca

SEQ ID NO: 437116 - RNA, 19 nt, Artificial Sequence
  Description of Artificial Sequence: Synthetic oligonucleotide
ggccagaauggaugacucg

SEQ ID NO: 437117 - RNA, 19 nt, Artificial Sequence
  Description of Artificial Sequence: Synthetic oligonucleotide
gaacugcacagaagucuug

SEQ ID NO: 437118 - RNA, 19 nt, Artificial Sequence
  Description of Artificial Sequence: Synthetic oligonucleotide
uacacggccccaggauggg

SEQ ID NO: 437119 - RNA, 19 nt, Artificial Sequence
  Description of Artificial Sequence: Synthetic oligonucleotide
cagcaaucaaauucccaaa

SEQ ID NO: 437120 - RNA, 19 nt, Artificial Sequence
  Description of Artificial Sequence: Synthetic oligonucleotide
aacaucggugcuggcuaca

SEQ ID NO: 437121 - RNA, 19 nt, Artificial Sequence
  Description of Artificial Sequence: Synthetic oligonucleotide
gcucacaauaauacacggc

SEQ ID NO: 437122 - RNA, 19 nt, Artificial Sequence
  Description of Artificial Sequence: Synthetic oligonucleotide
ugacgguaucaaugugagu

SEQ ID NO: 437123 - RNA, 19 nt, Artificial Sequence
  Description of Artificial Sequence: Synthetic oligonucleotide
agccagaacaucggugcug

SEQ ID NO: 437124 - RNA, 19 nt, Artificial Sequence
  Description of Artificial Sequence: Synthetic oligonucleotide
acgcuucgucugcaccgcc

SEQ ID NO: 437125 - RNA, 19 nt, Artificial Sequence
  Description of Artificial Sequence: Synthetic oligonucleotide
cuuugcugucaccacugga

SEQ ID NO: 437126 - RNA, 19 nt, Artificial Sequence
  Description of Artificial Sequence: Synthetic oligonucleotide
ggagccggcacgcagaacu

SEQ ID NO: 437127 - RNA, 19 nt, Artificial Sequence
  Description of Artificial Sequence: Synthetic oligonucleotide
caccguaccggaagcgcac

SEQ ID NO: 437128 - RNA, 19 nt, Artificial Sequence
  Description of Artificial Sequence: Synthetic oligonucleotide
uccuuggauaguggccuug

SEQ ID NO: 437129 - RNA, 19 nt, Artificial Sequence
  Description of Artificial Sequence: Synthetic oligonucleotide
cgcucacaauaauacacgg

SEQ ID NO: 437130 - RNA, 19 nt, Artificial Sequence
  Description of Artificial Sequence: Synthetic oligonucleotide
accccacuguucuuacaca

SEQ ID NO: 437131 - RNA, 19 nt, Artificial Sequence
  Description of Artificial Sequence: Synthetic oligonucleotide
gguaucaaugugagucuug

SEQ ID NO: 437132 - RNA, 19 nt, Artificial Sequence
  Description of Artificial Sequence: Synthetic oligonucleotide
ugcuuccagcgcuggaaaa

SEQ ID NO: 437133 - RNA, 19 nt, Artificial Sequence
  Description of Artificial Sequence: Synthetic oligonucleotide
gguucucaaacaagacccc

SEQ ID NO: 437134 - RNA, 19 nt, Artificial Sequence
  Description of Artificial Sequence: Synthetic oligonucleotide
gcauuaaugacgguaucaa

SEQ ID NO: 437135 - RNA, 19 nt, Artificial Sequence
  Description of Artificial Sequence: Synthetic oligonucleotide
gcauacgagaggucagcug

SEQ ID NO: 437136 - RNA, 19 nt, Artificial Sequence
  Description of Artificial Sequence: Synthetic oligonucleotide
gcucacacaagugacggga

SEQ ID NO: 437137 - RNA, 19 nt, Artificial Sequence
  Description of Artificial Sequence: Synthetic oligonucleotide
cuaguacaguagccagaac

SEQ ID NO: 437138 - RNA, 19 nt, Artificial Sequence
  Description of Artificial Sequence: Synthetic oligonucleotide
gcagacaccccaccugcag

SEQ ID NO: 437139 - RNA, 19 nt, Artificial Sequence
  Description of Artificial Sequence: Synthetic oligonucleotide
acgaacuuauucagcaguu

SEQ ID NO: 437140 - RNA, 19 nt, Artificial Sequence
  Description of Artificial Sequence: Synthetic oligonucleotide
acaguaacgguggcgucaa

SEQ ID NO: 437141 - RNA, 19 nt, Artificial Sequence
  Description of Artificial Sequence: Synthetic oligonucleotide
uccgucuugagggcauuaa

SEQ ID NO: 437142 - RNA, 19 nt, Artificial Sequence
  Description of Artificial Sequence: Synthetic oligonucleotide
gaccacgguaggcgagaag

SEQ ID NO: 437143 - RNA, 19 nt, Artificial Sequence
  Description of Artificial Sequence: Synthetic oligonucleotide
gcugauuuuggaggucucc

SEQ ID NO: 437144 - RNA, 19 nt, Artificial Sequence
  Description of Artificial Sequence: Synthetic oligonucleotide
acucggacuugacuccaau

SEQ ID NO: 437145 - RNA, 19 nt, Artificial Sequence
  Description of Artificial Sequence: Synthetic oligonucleotide
cgcaccgacaguaacggug

SEQ ID NO: 437146 - RNA, 19 nt, Artificial Sequence
  Description of Artificial Sequence: Synthetic oligonucleotide
cuacacgcuucgucugcac

SEQ ID NO: 437147 - RNA, 19 nt, Artificial Sequence
  Description of Artificial Sequence: Synthetic oligonucleotide
gaacucggacuugacucca

SEQ ID NO: 437148 - RNA, 19 nt, Artificial Sequence
  Description of Artificial Sequence: Synthetic oligonucleotide
acgguggcgucaagaaguc

SEQ ID NO: 437149 - RNA, 19 nt, Artificial Sequence
  Description of Artificial Sequence: Synthetic oligonucleotide
gcagcuacacgcuucgucu

SEQ ID NO: 437150 - RNA, 19 nt, Artificial Sequence
  Description of Artificial Sequence: Synthetic oligonucleotide
caaaccccagaagcuuggc

SEQ ID NO: 437151 - RNA, 19 nt, Artificial Sequence
  Description of Artificial Sequence: Synthetic oligonucleotide
gucuccgggguggaccacg

SEQ ID NO: 437152 - RNA, 19 nt, Artificial Sequence
  Description of Artificial Sequence: Synthetic oligonucleotide
ugcuccggucacacaugca

SEQ ID NO: 437153 - RNA, 19 nt, Artificial Sequence
  Description of Artificial Sequence: Synthetic oligonucleotide
aguggccacgcugcacagg

SEQ ID NO: 437154 - RNA, 19 nt, Artificial Sequence
  Description of Artificial Sequence: Synthetic oligonucleotide
ugggagccggcacgcagaa

SEQ ID NO: 437155 - RNA, 19 nt, Artificial Sequence
  Description of Artificial Sequence: Synthetic oligonucleotide
cacaugcauacgagagguc

SEQ ID NO: 437156 - RNA, 19 nt, Artificial Sequence
  Description of Artificial Sequence: Synthetic oligonucleotide
gacaucccgcuccgucuug

SEQ ID NO: 437157 - RNA, 19 nt, Artificial Sequence
  Description of Artificial Sequence: Synthetic oligonucleotide
gagcagagccaaaccccag

SEQ ID NO: 437158 - RNA, 19 nt, Artificial Sequence
  Description of Artificial Sequence: Synthetic oligonucleotide
agguucugucggaacucgg

SEQ ID NO: 437159 - RNA, 19 nt, Artificial Sequence
  Description of Artificial Sequence: Synthetic oligonucleotide
cuggugcgcagggucaggc

SEQ ID NO: 437160 - RNA, 19 nt, Artificial Sequence
  Description of Artificial Sequence: Synthetic oligonucleotide
gagauacauucggcccagg

SEQ ID NO: 437161 - RNA, 19 nt, Artificial Sequence
  Description of Artificial Sequence: Synthetic oligonucleotide
agcacccacgaaguucuca

SEQ ID NO: 437162 - RNA, 19 nt, Artificial Sequence
  Description of Artificial Sequence: Synthetic oligonucleotide
cuucgucugcaccgccagc

SEQ ID NO: 437163 - RNA, 19 nt, Artificial Sequence
  Description of Artificial Sequence: Synthetic oligonucleotide
cacgcuucgucugcaccgc

SEQ ID NO: 437164 - RNA, 19 nt, Artificial Sequence
  Description of Artificial Sequence: Synthetic oligonucleotide
cucgcagacacucaauguu

SEQ ID NO: 437165 - RNA, 19 nt, Artificial Sequence
  Description of Artificial Sequence: Synthetic oligonucleotide
gugccaccguaccggaagc

SEQ ID NO: 437166 - RNA, 19 nt, Artificial Sequence
  Description of Artificial Sequence: Synthetic oligonucleotide
gcagcgguaggcucagcug

SEQ ID NO: 437167 - RNA, 19 nt, Artificial Sequence
  Description of Artificial Sequence: Synthetic oligonucleotide
ccccacuguucuuacacac

SEQ ID NO: 437168 - RNA, 19 nt, Artificial Sequence
  Description of Artificial Sequence: Synthetic oligonucleotide
ggugacaaucugcagcacu

SEQ ID NO: 437169 - RNA, 19 nt, Artificial Sequence
  Description of Artificial Sequence: Synthetic oligonucleotide
cucacacugacaucccgcu

SEQ ID NO: 437170 - RNA, 19 nt, Artificial Sequence
  Description of Artificial Sequence: Synthetic oligonucleotide
uacgagaggucagcugcuc

SEQ ID NO: 437171 - RNA, 19 nt, Artificial Sequence
  Description of Artificial Sequence: Synthetic oligonucleotide
cuuggccagaauggaugac

SEQ ID NO: 437172 - RNA, 19 nt, Artificial Sequence
  Description of Artificial Sequence: Synthetic oligonucleotide
guggccacgcugcacaggu

SEQ ID NO: 437173 - RNA, 19 nt, Artificial Sequence
  Description of Artificial Sequence: Synthetic oligonucleotide
uuguuaugaugggguaaua

SEQ ID NO: 437174 - RNA, 19 nt, Artificial Sequence
  Description of Artificial Sequence: Synthetic oligonucleotide
auacgagaggucagcugcu

SEQ ID NO: 437175 - RNA, 19 nt, Artificial Sequence
  Description of Artificial Sequence: Synthetic oligonucleotide
ccaagagguccgcggaggg

SEQ ID NO: 437176 - RNA, 19 nt, Artificial Sequence
  Description of Artificial Sequence: Synthetic oligonucleotide
caccgccagcugauuuugg

SEQ ID NO: 437177 - RNA, 19 nt, Artificial Sequence
  Description of Artificial Sequence: Synthetic oligonucleotide
agaccccacuguucuuaca

SEQ ID NO: 437178 - RNA, 19 nt, Artificial Sequence
  Description of Artificial Sequence: Synthetic oligonucleotide
ccgggguggaccacgguag

SEQ ID NO: 437179 - RNA, 19 nt, Artificial Sequence
  Description of Artificial Sequence: Synthetic oligonucleotide
ggcacggaccaggagguug

SEQ ID NO: 437180 - RNA, 19 nt, Artificial Sequence
  Description of Artificial Sequence: Synthetic oligonucleotide
gguucugucggaacucgga

SEQ ID NO: 437181 - RNA, 19 nt, Artificial Sequence
  Description of Artificial Sequence: Synthetic oligonucleotide
cucuguuuauucgcucaca

SEQ ID NO: 437182 - RNA, 19 nt, Artificial Sequence
  Description of Artificial Sequence: Synthetic oligonucleotide
gaccaucagagaagacauc

SEQ ID NO: 437183 - RNA, 19 nt, Artificial Sequence
  Description of Artificial Sequence: Synthetic oligonucleotide
ccuuggauaguggccuugg

SEQ ID NO: 437184 - RNA, 19 nt, Artificial Sequence
  Description of Artificial Sequence: Synthetic oligonucleotide
ggcgagaagcucuggaacu

SEQ ID NO: 437185 - RNA, 19 nt, Artificial Sequence
  Description of Artificial Sequence: Synthetic oligonucleotide
accguccacuugugcagcu

SEQ ID NO: 437186 - RNA, 19 nt, Artificial Sequence
  Description of Artificial Sequence: Synthetic oligonucleotide
gacaccccaccugcagggc

SEQ ID NO: 437187 - RNA, 19 nt, Artificial Sequence
  Description of Artificial Sequence: Synthetic oligonucleotide
acaagaccccacuguucuu

SEQ ID NO: 437188 - RNA, 19 nt, Artificial Sequence
  Description of Artificial Sequence: Synthetic oligonucleotide
cagugagaacugcacaggu

SEQ ID NO: 437189 - RNA, 19 nt, Artificial Sequence
  Description of Artificial Sequence: Synthetic oligonucleotide
gguggaccacgguaggcga

SEQ ID NO: 437190 - RNA, 19 nt, Artificial Sequence
  Description of Artificial Sequence: Synthetic oligonucleotide
gcugucaccacuggagguc

SEQ ID NO: 437191 - RNA, 19 nt, Artificial Sequence
  Description of Artificial Sequence: Synthetic oligonucleotide
cacggccccaggaugggga

SEQ ID NO: 437192 - RNA, 19 nt, Artificial Sequence
  Description of Artificial Sequence: Synthetic oligonucleotide
cacuguucuuacacacgaa

SEQ ID NO: 437193 - RNA, 19 nt, Artificial Sequence
  Description of Artificial Sequence: Synthetic oligonucleotide
ccuacagggacuggaggug

SEQ ID NO: 437194 - RNA, 19 nt, Artificial Sequence
  Description of Artificial Sequence: Synthetic oligonucleotide
caggagguucccaccuaca

SEQ ID NO: 437195 - RNA, 19 nt, Artificial Sequence
  Description of Artificial Sequence: Synthetic oligonucleotide
cuguuuauucgcucacaau

SEQ ID NO: 437196 - RNA, 19 nt, Artificial Sequence
  Description of Artificial Sequence: Synthetic oligonucleotide
ggagggugcuucccuuggc

SEQ ID NO: 437197 - RNA, 19 nt, Artificial Sequence
  Description of Artificial Sequence: Synthetic oligonucleotide
uggccacgcugcacaggug

SEQ ID NO: 437198 - RNA, 19 nt, Artificial Sequence
  Description of Artificial Sequence: Synthetic oligonucleotide
cagaacaucggugcuggcu

SEQ ID NO: 437199 - RNA, 19 nt, Artificial Sequence
  Description of Artificial Sequence: Synthetic oligonucleotide
ccaggagguucccaccuac

SEQ ID NO: 437200 - RNA, 19 nt, Artificial Sequence
  Description of Artificial Sequence: Synthetic oligonucleotide
auugcgcagcugggagccg

SEQ ID NO: 437201 - RNA, 19 nt, Artificial Sequence
  Description of Artificial Sequence: Synthetic oligonucleotide
cccaagagguccgcggagg

SEQ ID NO: 437202 - RNA, 19 nt, Artificial Sequence
  Description of Artificial Sequence: Synthetic oligonucleotide
gguaggcgagaagcucugg

SEQ ID NO: 437203 - RNA, 19 nt, Artificial Sequence
  Description of Artificial Sequence: Synthetic oligonucleotide
gacucgcgcucaggaaaug

SEQ ID NO: 437204 - RNA, 19 nt, Artificial Sequence
  Description of Artificial Sequence: Synthetic oligonucleotide
cagcuucaugggagaacuc

SEQ ID NO: 437205 - RNA, 19 nt, Artificial Sequence
  Description of Artificial Sequence: Synthetic oligonucleotide
caccgacaguaacgguggc

SEQ ID NO: 437206 - RNA, 19 nt, Artificial Sequence
  Description of Artificial Sequence: Synthetic oligonucleotide
gggcggccaucucuguagg

SEQ ID NO: 437207 - RNA, 19 nt, Artificial Sequence
  Description of Artificial Sequence: Synthetic oligonucleotide
uagcgucucucuguuuauu

SEQ ID NO: 437208 - RNA, 19 nt, Artificial Sequence
  Description of Artificial Sequence: Synthetic oligonucleotide
agguccgcggagggugagg

SEQ ID NO: 437209 - RNA, 19 nt, Artificial Sequence
  Description of Artificial Sequence: Synthetic oligonucleotide
ggcgguacauuugggccug

SEQ ID NO: 437210 - RNA, 19 nt, Artificial Sequence
  Description of Artificial Sequence: Synthetic oligonucleotide
cggacuugacuccaaucug

SEQ ID NO: 437211 - RNA, 19 nt, Artificial Sequence
  Description of Artificial Sequence: Synthetic oligonucleotide
agcgguaggcucagcugcu

SEQ ID NO: 437212 - RNA, 19 nt, Artificial Sequence
  Description of Artificial Sequence: Synthetic oligonucleotide
gggcauuaaugacgguauc

SEQ ID NO: 437213 - RNA, 19 nt, Artificial Sequence
  Description of Artificial Sequence: Synthetic oligonucleotide
gggugagggugucgacacg

SEQ ID NO: 437214 - RNA, 19 nt, Artificial Sequence
  Description of Artificial Sequence: Synthetic oligonucleotide
ccgaccuucaccauguuuu

SEQ ID NO: 437215 - RNA, 19 nt, Artificial Sequence
  Description of Artificial Sequence: Synthetic oligonucleotide
cuggagggccucaaacacu

SEQ ID NO: 437216 - RNA, 19 nt, Artificial Sequence
  Description of Artificial Sequence: Synthetic oligonucleotide
acucgguaccacaccuccu

SEQ ID NO: 437217 - RNA, 19 nt, Artificial Sequence
  Description of Artificial Sequence: Synthetic oligonucleotide
ucccaccuacagggacugg

SEQ ID NO: 437218 - RNA, 19 nt, Artificial Sequence
  Description of Artificial Sequence: Synthetic oligonucleotide
gccaccguaccggaagcgc

SEQ ID NO: 437219 - RNA, 19 nt, Artificial Sequence
  Description of Artificial Sequence: Synthetic oligonucleotide
cccuacggcugucauccag

SEQ ID NO: 437220 - RNA, 19 nt, Artificial Sequence
  Description of Artificial Sequence: Synthetic oligonucleotide
gguugggcauggugucccc

SEQ ID NO: 437221 - RNA, 19 nt, Artificial Sequence
  Description of Artificial Sequence: Synthetic oligonucleotide
cagcugauuuuggaggucu

SEQ ID NO: 437222 - RNA, 19 nt, Artificial Sequence
  Description of Artificial Sequence: Synthetic oligonucleotide
gucggaacucggacuugac

SEQ ID NO: 437223 - RNA, 19 nt, Artificial Sequence
  Description of Artificial Sequence: Synthetic oligonucleotide
gagguccgcggagggugag

SEQ ID NO: 437224 - RNA, 19 nt, Artificial Sequence
  Description of Artificial Sequence: Synthetic oligonucleotide
acggccccaggauggggaa

SEQ ID NO: 437225 - RNA, 19 nt, Artificial Sequence
  Description of Artificial Sequence: Synthetic oligonucleotide
gccuaugucuucaggaccu

SEQ ID NO: 437226 - RNA, 19 nt, Artificial Sequence
  Description of Artificial Sequence: Synthetic oligonucleotide
agguaccgacuuccccgga

SEQ ID NO: 437227 - RNA, 19 nt, Artificial Sequence
  Description of Artificial Sequence: Synthetic oligonucleotide
caucggugcuggcuacaga

SEQ ID NO: 437228 - RNA, 19 nt, Artificial Sequence
  Description of Artificial Sequence: Synthetic oligonucleotide
gagcguggguccccagcaa

SEQ ID NO: 437229 - RNA, 19 nt, Artificial Sequence
  Description of Artificial Sequence: Synthetic oligonucleotide
gagccggcacgcagaacuc

SEQ ID NO: 437230 - RNA, 19 nt, Artificial Sequence
  Description of Artificial Sequence: Synthetic oligonucleotide
gugcaccaccguccacuug

SEQ ID NO: 437231 - RNA, 19 nt, Artificial Sequence
  Description of Artificial Sequence: Synthetic oligonucleotide
ccgugggaccaucagagaa

SEQ ID NO: 437232 - RNA, 19 nt, Artificial Sequence
  Description of Artificial Sequence: Synthetic oligonucleotide
ucugcaccgccagcugauu

SEQ ID NO: 437233 - RNA, 19 nt, Artificial Sequence
  Description of Artificial Sequence: Synthetic oligonucleotide
cagccccaagagguccgcg

SEQ ID NO: 437234 - RNA, 19 nt, Artificial Sequence
  Description of Artificial Sequence: Synthetic oligonucleotide
gcaccgccagcugauuuug

SEQ ID NO: 437235 - RNA, 19 nt, Artificial Sequence
  Description of Artificial Sequence: Synthetic oligonucleotide
cgucaagaagucucgcaga

SEQ ID NO: 437236 - RNA, 19 nt, Artificial Sequence
  Description of Artificial Sequence: Synthetic oligonucleotide
cgaacuuauucagcaguuc

SEQ ID NO: 437237 - RNA, 19 nt, Artificial Sequence
  Description of Artificial Sequence: Synthetic oligonucleotide
caguaacgguggcgucaag

SEQ ID NO: 437238 - RNA, 19 nt, Artificial Sequence
  Description of Artificial Sequence: Synthetic oligonucleotide
ccggucacacaugcauacg

SEQ ID NO: 437239 - RNA, 19 nt, Artificial Sequence
  Description of Artificial Sequence: Synthetic oligonucleotide
ccguaccggaagcgcaccg

SEQ ID NO: 437240 - RNA, 19 nt, Artificial Sequence
  Description of Artificial Sequence: Synthetic oligonucleotide
cugugccgugggaccauca

SEQ ID NO: 437241 - RNA, 19 nt, Artificial Sequence
  Description of Artificial Sequence: Synthetic oligonucleotide
cgaguggccacgcugcaca

SEQ ID NO: 437242 - RNA, 19 nt, Artificial Sequence
  Description of Artificial Sequence: Synthetic oligonucleotide
gccccaagagguccgcgga

SEQ ID NO: 437243 - RNA, 19 nt, Artificial Sequence
  Description of Artificial Sequence: Synthetic oligonucleotide
ccaccguaccggaagcgca

SEQ ID NO: 437244 - RNA, 19 nt, Artificial Sequence
  Description of Artificial Sequence: Synthetic oligonucleotide
ccacaucggcauugcgcag

SEQ ID NO: 437245 - RNA, 19 nt, Artificial Sequence
  Description of Artificial Sequence: Synthetic oligonucleotide
cagagcugagggugaggua

SEQ ID NO: 437246 - RNA, 19 nt, Artificial Sequence
  Description of Artificial Sequence: Synthetic oligonucleotide
ccccaagagguccgcggag

SEQ ID NO: 437247 - RNA, 19 nt, Artificial Sequence
  Description of Artificial Sequence: Synthetic oligonucleotide
gcuacacgcuucgucugca

SEQ ID NO: 437248 - RNA, 19 nt, Artificial Sequence
  Description of Artificial Sequence: Synthetic oligonucleotide
cuugugcagcuacacgcuu

SEQ ID NO: 437249 - RNA, 19 nt, Artificial Sequence
  Description of Artificial Sequence: Synthetic oligonucleotide
agccaccgaccuucaccau

SEQ ID NO: 437250 - RNA, 19 nt, Artificial Sequence
  Description of Artificial Sequence: Synthetic oligonucleotide
cgcagccccaagagguccg

SEQ ID NO: 437251 - RNA, 19 nt, Artificial Sequence
  Description of Artificial Sequence: Synthetic oligonucleotide
ccagaacaucggugcuggc

SEQ ID NO: 437252 - RNA, 19 nt, Artificial Sequence
  Description of Artificial Sequence: Synthetic oligonucleotide
ccgacaguaacgguggcgu

SEQ ID NO: 437253 - RNA, 19 nt, Artificial Sequence
  Description of Artificial Sequence: Synthetic oligonucleotide
ggugucccuacggcuguca

SEQ ID NO: 437254 - RNA, 19 nt, Artificial Sequence
  Description of Artificial Sequence: Synthetic oligonucleotide
ggaagcgcaccgacaguaa

SEQ ID NO: 437255 - RNA, 19 nt, Artificial Sequence
  Description of Artificial Sequence: Synthetic oligonucleotide
ccaccgaccuucaccaugu

SEQ ID NO: 437256 - RNA, 19 nt, Artificial Sequence
  Description of Artificial Sequence: Synthetic oligonucleotide
gcggccaucucuguaggcu

SEQ ID NO: 437257 - RNA, 19 nt, Artificial Sequence
  Description of Artificial Sequence: Synthetic oligonucleotide
ggguaauauuagcgucucu

SEQ ID NO: 437258 - RNA, 19 nt, Artificial Sequence
  Description of Artificial Sequence: Synthetic oligonucleotide
cgguaggcgagaagcucug

SEQ ID NO: 437259 - RNA, 19 nt, Artificial Sequence
  Description of Artificial Sequence: Synthetic oligonucleotide
gccgugggaccaucagaga

SEQ ID NO: 437260 - RNA, 19 nt, Artificial Sequence
  Description of Artificial Sequence: Synthetic oligonucleotide
cggcacgcagaacuccuug

SEQ ID NO: 437261 - RNA, 19 nt, Artificial Sequence
  Description of Artificial Sequence: Synthetic oligonucleotide
caucggcauugcgcagcug

SEQ ID NO: 437262 - RNA, 19 nt, Artificial Sequence
  Description of Artificial Sequence: Synthetic oligonucleotide
caagagguccgcggagggu

SEQ ID NO: 437263 - RNA, 19 nt, Artificial Sequence
  Description of Artificial Sequence: Synthetic oligonucleotide
cagugccaccguaccggaa

SEQ ID NO: 437264 - RNA, 19 nt, Artificial Sequence
  Description of Artificial Sequence: Synthetic oligonucleotide
gcaccaccguccacuugug

SEQ ID NO: 437265 - RNA, 19 nt, Artificial Sequence
  Description of Artificial Sequence: Synthetic oligonucleotide
cuccgucuugagggcauua

SEQ ID NO: 437266 - RNA, 19 nt, Artificial Sequence
  Description of Artificial Sequence: Synthetic oligonucleotide
cugcaccgccagcugauuu

SEQ ID NO: 437267 - RNA, 19 nt, Artificial Sequence
  Description of Artificial Sequence: Synthetic oligonucleotide
cgaagcagacaccccaccu

SEQ ID NO: 437268 - RNA, 19 nt, Artificial Sequence
  Description of Artificial Sequence: Synthetic oligonucleotide
cugcagcgguaggcucagc

SEQ ID NO: 437269 - RNA, 19 nt, Artificial Sequence
  Description of Artificial Sequence: Synthetic oligonucleotide
gcgguacauuugggccugg

SEQ ID NO: 437270 - RNA, 19 nt, Artificial Sequence
  Description of Artificial Sequence: Synthetic oligonucleotide
cggaagcgcaccgacagua

SEQ ID NO: 437271 - RNA, 19 nt, Artificial Sequence
  Description of Artificial Sequence: Synthetic oligonucleotide
gcugugccgugggaccauc

SEQ ID NO: 437272 - RNA, 19 nt, Artificial Sequence
  Description of Artificial Sequence: Synthetic oligonucleotide
guccgcggagggugagggu

SEQ ID NO: 437273 - RNA, 19 nt, Artificial Sequence
  Description of Artificial Sequence: Synthetic oligonucleotide
ccgucuugagggcauuaau

SEQ ID NO: 437274 - RNA, 19 nt, Artificial Sequence
  Description of Artificial Sequence: Synthetic oligonucleotide
gccggcacgcagaacuccu

SEQ ID NO: 437275 - RNA, 19 nt, Artificial Sequence
  Description of Artificial Sequence: Synthetic oligonucleotide
cguaccggaagcgcaccga

SEQ ID NO: 437276 - RNA, 19 nt, Artificial Sequence
  Description of Artificial Sequence: Synthetic oligonucleotide
cccuggggucuuugcuguc

SEQ ID NO: 437277 - RNA, 19 nt, Artificial Sequence
  Description of Artificial Sequence: Synthetic oligonucleotide
ggacaacagcagggcgcga

SEQ ID NO: 437278 - RNA, 19 nt, Artificial Sequence
  Description of Artificial Sequence: Synthetic oligonucleotide
gugcagcuacacgcuucgu

SEQ ID NO: 437279 - RNA, 19 nt, Artificial Sequence
  Description of Artificial Sequence: Synthetic oligonucleotide
cuccgggguggaccacggu

SEQ ID NO: 437280 - RNA, 19 nt, Artificial Sequence
  Description of Artificial Sequence: Synthetic oligonucleotide
ccggacccucuccccucug

SEQ ID NO: 437281 - RNA, 19 nt, Artificial Sequence
  Description of Artificial Sequence: Synthetic oligonucleotide
cagggucaggcgguacauu

SEQ ID NO: 437282 - RNA, 19 nt, Artificial Sequence
  Description of Artificial Sequence: Synthetic oligonucleotide
gggcuuucgucuggaugau

SEQ ID NO: 437283 - RNA, 19 nt, Artificial Sequence
  Description of Artificial Sequence: Synthetic oligonucleotide
cggcauugcgcagcuggga

SEQ ID NO: 437284 - RNA, 19 nt, Artificial Sequence
  Description of Artificial Sequence: Synthetic oligonucleotide
gcgcaccgacaguaacggu

SEQ ID NO: 437285 - RNA, 19 nt, Artificial Sequence
  Description of Artificial Sequence: Synthetic oligonucleotide
gguuggcuuugaagauuuu

SEQ ID NO: 437286 - RNA, 19 nt, Artificial Sequence
  Description of Artificial Sequence: Synthetic oligonucleotide
ccgcuccgucuugagggca

SEQ ID NO: 437287 - RNA, 19 nt, Artificial Sequence
  Description of Artificial Sequence: Synthetic oligonucleotide
cgcgaguggccacgcugca

SEQ ID NO: 437288 - RNA, 19 nt, Artificial Sequence
  Description of Artificial Sequence: Synthetic oligonucleotide
ccggaagcgcaccgacagu

SEQ ID NO: 437289 - RNA, 19 nt, Artificial Sequence
  Description of Artificial Sequence: Synthetic oligonucleotide
ccguccacuugugcagcua

SEQ ID NO: 437290 - RNA, 19 nt, Artificial Sequence
  Description of Artificial Sequence: Synthetic oligonucleotide
caccgaccuucaccauguu

SEQ ID NO: 437291 - RNA, 19 nt, Artificial Sequence
  Description of Artificial Sequence: Synthetic oligonucleotide
cgguaucaaugugagucuu

SEQ ID NO: 437292 - RNA, 19 nt, Artificial Sequence
  Description of Artificial Sequence: Synthetic oligonucleotide
cccggacccucuccccucu

SEQ ID NO: 437293 - RNA, 19 nt, Artificial Sequence
  Description of Artificial Sequence: Synthetic oligonucleotide
gggcgcgaguggccacgcu

SEQ ID NO: 437294 - RNA, 19 nt, Artificial Sequence
  Description of Artificial Sequence: Synthetic oligonucleotide
cgcuccgucuugagggcau

SEQ ID NO: 437295 - RNA, 19 nt, Artificial Sequence
  Description of Artificial Sequence: Synthetic oligonucleotide
ccggcacgcagaacuccuu

SEQ ID NO: 437296 - RNA, 19 nt, Artificial Sequence
  Description of Artificial Sequence: Synthetic oligonucleotide
gcuccgucuugagggcauu

SEQ ID NO: 437297 - RNA, 19 nt, Artificial Sequence
  Description of Artificial Sequence: Synthetic oligonucleotide
cgacuuccccggacccucu

SEQ ID NO: 437298 - RNA, 19 nt, Artificial Sequence
  Description of Artificial Sequence: Synthetic oligonucleotide
cgguggcgucaagaagucu

SEQ ID NO: 437299 - RNA, 19 nt, Artificial Sequence
  Description of Artificial Sequence: Synthetic oligonucleotide
ccccaucccuggggucuuu

SEQ ID NO: 437300 - RNA, 19 nt, Artificial Sequence
  Description of Artificial Sequence: Synthetic oligonucleotide
uauuuuauggcacauuugg

SEQ ID NO: 437301 - RNA, 19 nt, Artificial Sequence
  Description of Artificial Sequence: Synthetic oligonucleotide
cuuccuaucuucaagaagg

SEQ ID NO: 437302 - RNA, 19 nt, Artificial Sequence
  Description of Artificial Sequence: Synthetic oligonucleotide
uuaugagucaccaggaggg

SEQ ID NO: 437303 - RNA, 19 nt, Artificial Sequence
  Description of Artificial Sequence: Synthetic oligonucleotide
aauucgacaaggucugggc

SEQ ID NO: 437304 - RNA, 19 nt, Artificial Sequence
  Description of Artificial Sequence: Synthetic oligonucleotide
gaugacacagccuuagugg

SEQ ID NO: 437305 - RNA, 19 nt, Artificial Sequence
  Description of Artificial Sequence: Synthetic oligonucleotide
uuugaguugugccacaucc

SEQ ID NO: 437306 - RNA, 19 nt, Artificial Sequence
  Description of Artificial Sequence: Synthetic oligonucleotide
aaucugagcacuccugagc

SEQ ID NO: 437307 - RNA, 19 nt, Artificial Sequence
  Description of Artificial Sequence: Synthetic oligonucleotide
uuuaauucgacaaggucug

SEQ ID NO: 437308 - RNA, 19 nt, Artificial Sequence
  Description of Artificial Sequence: Synthetic oligonucleotide
ucaguuuuacgucugagca

SEQ ID NO: 437309 - RNA, 19 nt, Artificial Sequence
  Description of Artificial Sequence: Synthetic oligonucleotide
uauauucaaaggaagaguc

SEQ ID NO: 437310 - RNA, 19 nt, Artificial Sequence
  Description of Artificial Sequence: Synthetic oligonucleotide
aaaacucccagccccauuc

SEQ ID NO: 437311 - RNA, 19 nt, Artificial Sequence
  Description of Artificial Sequence: Synthetic oligonucleotide
uuuaggaucuugcuauugg

SEQ ID NO: 437312 - RNA, 19 nt, Artificial Sequence
  Description of Artificial Sequence: Synthetic oligonucleotide
uguugcgacacuuuguggg

SEQ ID NO: 437313 - RNA, 19 nt, Artificial Sequence
  Description of Artificial Sequence: Synthetic oligonucleotide
ugccuuaugagucaccagg

SEQ ID NO: 437314 - RNA, 19 nt, Artificial Sequence
  Description of Artificial Sequence: Synthetic oligonucleotide
aagagaggaacaucuuggc

SEQ ID NO: 437315 - RNA, 19 nt, Artificial Sequence
  Description of Artificial Sequence: Synthetic oligonucleotide
uucaaguuugagcaacucg

SEQ ID NO: 437316 - RNA, 19 nt, Artificial Sequence
  Description of Artificial Sequence: Synthetic oligonucleotide
uguuaaaauccagaguugg

SEQ ID NO: 437317 - RNA, 19 nt, Artificial Sequence
  Description of Artificial Sequence: Synthetic oligonucleotide
gauagcaagaccuauaacu

SEQ ID NO: 437318 - RNA, 19 nt, Artificial Sequence
  Description of Artificial Sequence: Synthetic oligonucleotide
aacuggauuacuucuuuug

SEQ ID NO: 437319 - RNA, 19 nt, Artificial Sequence
  Description of Artificial Sequence: Synthetic oligonucleotide
ucaguaacaugacagacau

SEQ ID NO: 437320 - RNA, 19 nt, Artificial Sequence
  Description of Artificial Sequence: Synthetic oligonucleotide
acuacagaagucauuagcg

SEQ ID NO: 437321 - RNA, 19 nt, Artificial Sequence
  Description of Artificial Sequence: Synthetic oligonucleotide
uccuuaagacguuuguugg

SEQ ID NO: 437322 - RNA, 19 nt, Artificial Sequence
  Description of Artificial Sequence: Synthetic oligonucleotide
agucucuaggcuuucaauc

SEQ ID NO: 437323 - RNA, 19 nt, Artificial Sequence
  Description of Artificial Sequence: Synthetic oligonucleotide
cucggaauaacacuguagc

SEQ ID NO: 437324 - RNA, 19 nt, Artificial Sequence
  Description of Artificial Sequence: Synthetic oligonucleotide
guuguuugggguuggaggg

SEQ ID NO: 437325 - RNA, 19 nt, Artificial Sequence
  Description of Artificial Sequence: Synthetic oligonucleotide
guugcuaugcccauaagag

SEQ ID NO: 437326 - RNA, 19 nt, Artificial Sequence
  Description of Artificial Sequence: Synthetic oligonucleotide
ucucucgauagcaagaccu

SEQ ID NO: 437327 - RNA, 19 nt, Artificial Sequence
  Description of Artificial Sequence: Synthetic oligonucleotide
ugagcuaagguuuauuuau

SEQ ID NO: 437328 - RNA, 19 nt, Artificial Sequence
  Description of Artificial Sequence: Synthetic oligonucleotide
uuaggaucuugcuauuggg

SEQ ID NO: 437329 - RNA, 19 nt, Artificial Sequence
  Description of Artificial Sequence: Synthetic oligonucleotide
agacaauucaacugcucac

SEQ ID NO: 437330 - RNA, 19 nt, Artificial Sequence
  Description of Artificial Sequence: Synthetic oligonucleotide
ucguacuucaucacgugag

SEQ ID NO: 437331 - RNA, 19 nt, Artificial Sequence
  Description of Artificial Sequence: Synthetic oligonucleotide
ugaugacacagccuuagug

SEQ ID NO: 437332 - RNA, 19 nt, Artificial Sequence
  Description of Artificial Sequence: Synthetic oligonucleotide
gguucucuccgauagaugg

SEQ ID NO: 437333 - RNA, 19 nt, Artificial Sequence
  Description of Artificial Sequence: Synthetic oligonucleotide
ucuuuaauucgacaagguc

SEQ ID NO: 437334 - RNA, 19 nt, Artificial Sequence
  Description of Artificial Sequence: Synthetic oligonucleotide
gguggaauauauucaaagg

SEQ ID NO: 437335 - RNA, 19 nt, Artificial Sequence
  Description of Artificial Sequence: Synthetic oligonucleotide
aaccucguacuucaucacg

SEQ ID NO: 437336 - RNA, 19 nt, Artificial Sequence
  Description of Artificial Sequence: Synthetic oligonucleotide
acuaacugacuccuccggc

SEQ ID NO: 437337 - RNA, 19 nt, Artificial Sequence
  Description of Artificial Sequence: Synthetic oligonucleotide
uuuacgucugagcacauua

SEQ ID NO: 437338 - RNA, 19 nt, Artificial Sequence
  Description of Artificial Sequence: Synthetic oligonucleotide
uucuuggacaccuugacua

SEQ ID NO: 437339 - RNA, 19 nt, Artificial Sequence
  Description of Artificial Sequence: Synthetic oligonucleotide
cucucucucaguaagauga

SEQ ID NO: 437340 - RNA, 19 nt, Artificial Sequence
  Description of Artificial Sequence: Synthetic oligonucleotide
ucggaauaacacuguagcg

SEQ ID NO: 437341 - RNA, 19 nt, Artificial Sequence
  Description of Artificial Sequence: Synthetic oligonucleotide
aagucauuagcgcccuuuc

SEQ ID NO: 437342 - RNA, 19 nt, Artificial Sequence
  Description of Artificial Sequence: Synthetic oligonucleotide
cuuagugggacucuucuug

SEQ ID NO: 437343 - RNA, 19 nt, Artificial Sequence
  Description of Artificial Sequence: Synthetic oligonucleotide
aguaaaggccaacauucag

SEQ ID NO: 437344 - RNA, 19 nt, Artificial Sequence
  Description of Artificial Sequence: Synthetic oligonucleotide
auuguggcaauagucuccc

SEQ ID NO: 437345 - RNA, 19 nt, Artificial Sequence
  Description of Artificial Sequence: Synthetic oligonucleotide
uuaaaauccagaguuggau

SEQ ID NO: 437346 - RNA, 19 nt, Artificial Sequence
  Description of Artificial Sequence: Synthetic oligonucleotide
uccagaguuggauuggagc

SEQ ID NO: 437347 - RNA, 19 nt, Artificial Sequence
  Description of Artificial Sequence: Synthetic oligonucleotide
acucguauugccucuuacg

SEQ ID NO: 437348 - RNA, 19 nt, Artificial Sequence
  Description of Artificial Sequence: Synthetic oligonucleotide
aucugcguuauccuggcuc

SEQ ID NO: 437349 - RNA, 19 nt, Artificial Sequence
  Description of Artificial Sequence: Synthetic oligonucleotide
cuaacugacuccuccggcg

SEQ ID NO: 437350 - RNA, 19 nt, Artificial Sequence
  Description of Artificial Sequence: Synthetic oligonucleotide
caucccacggcuuugaguc

SEQ ID NO: 437351 - RNA, 19 nt, Artificial Sequence
  Description of Artificial Sequence: Synthetic oligonucleotide
aguugcuaugcccauaaga

SEQ ID NO: 437352 - RNA, 19 nt, Artificial Sequence
  Description of Artificial Sequence: Synthetic oligonucleotide
accuugacuaauuuuggug

SEQ ID NO: 437353 - RNA, 19 nt, Artificial Sequence
  Description of Artificial Sequence: Synthetic oligonucleotide
uucuccauuaaguugcuau

SEQ ID NO: 437354 - RNA, 19 nt, Artificial Sequence
  Description of Artificial Sequence: Synthetic oligonucleotide
ucugcaaccuccuuuugcu

SEQ ID NO: 437355 - RNA, 19 nt, Artificial Sequence
  Description of Artificial Sequence: Synthetic oligonucleotide
uucuguuaaaauccagagu

SEQ ID NO: 437356 - RNA, 19 nt, Artificial Sequence
  Description of Artificial Sequence: Synthetic oligonucleotide
cuucaggcugcuuucaagc

SEQ ID NO: 437357 - RNA, 19 nt, Artificial Sequence
  Description of Artificial Sequence: Synthetic oligonucleotide
ucucucaguaagaugauuu

SEQ ID NO: 437358 - RNA, 19 nt, Artificial Sequence
  Description of Artificial Sequence: Synthetic oligonucleotide
gagacaauucaacugcuca

SEQ ID NO: 437359 - RNA, 19 nt, Artificial Sequence
  Description of Artificial Sequence: Synthetic oligonucleotide
auauauucaaaggaagagu

SEQ ID NO: 437360 - RNA, 19 nt, Artificial Sequence
  Description of Artificial Sequence: Synthetic oligonucleotide
gucugagcacauuagacug

SEQ ID NO: 437361 - RNA, 19 nt, Artificial Sequence
  Description of Artificial Sequence: Synthetic oligonucleotide
aacucucucucucucucag

SEQ ID NO: 437362 - RNA, 19 nt, Artificial Sequence
  Description of Artificial Sequence: Synthetic oligonucleotide
cucaguuuuacgucugagc

SEQ ID NO: 437363 - RNA, 19 nt, Artificial Sequence
  Description of Artificial Sequence: Synthetic oligonucleotide
cuacagaagucauuagcgc

SEQ ID NO: 437364 - RNA, 19 nt, Artificial Sequence
  Description of Artificial Sequence: Synthetic oligonucleotide
ucgauagcaagaccuauaa

SEQ ID NO: 437365 - RNA, 19 nt, Artificial Sequence
  Description of Artificial Sequence: Synthetic oligonucleotide
uagguccgcaaucugagca

SEQ ID NO: 437366 - RNA, 19 nt, Artificial Sequence
  Description of Artificial Sequence: Synthetic oligonucleotide
uccgauagauggcuuagca

SEQ ID NO: 437367 - RNA, 19 nt, Artificial Sequence
  Description of Artificial Sequence: Synthetic oligonucleotide
uaauucgacaaggucuggg

SEQ ID NO: 437368 - RNA, 19 nt, Artificial Sequence
  Description of Artificial Sequence: Synthetic oligonucleotide
aguuuuacgucugagcaca

SEQ ID NO: 437369 - RNA, 19 nt, Artificial Sequence
  Description of Artificial Sequence: Synthetic oligonucleotide
uucuuuaauucgacaaggu

SEQ ID NO: 437370 - RNA, 19 nt, Artificial Sequence
  Description of Artificial Sequence: Synthetic oligonucleotide
agguuuaaauccugcauga

SEQ ID NO: 437371 - RNA, 19 nt, Artificial Sequence
  Description of Artificial Sequence: Synthetic oligonucleotide
aucacgugagaaugugcgc

SEQ ID NO: 437372 - RNA, 19 nt, Artificial Sequence
  Description of Artificial Sequence: Synthetic oligonucleotide
ugagcaacucguauugccu

SEQ ID NO: 437373 - RNA, 19 nt, Artificial Sequence
  Description of Artificial Sequence: Synthetic oligonucleotide
ugggacucuucuuggauag

SEQ ID NO: 437374 - RNA, 19 nt, Artificial Sequence
  Description of Artificial Sequence: Synthetic oligonucleotide
uuacgucugagcacauuag

SEQ ID NO: 437375 - RNA, 19 nt, Artificial Sequence
  Description of Artificial Sequence: Synthetic oligonucleotide
guaaaggccaacauucagc

SEQ ID NO: 437376 - RNA, 19 nt, Artificial Sequence
  Description of Artificial Sequence: Synthetic oligonucleotide
gagcacauuagacuguuuc

SEQ ID NO: 437377 - RNA, 19 nt, Artificial Sequence
  Description of Artificial Sequence: Synthetic oligonucleotide
acuggauuacuucuuuugu

SEQ ID NO: 437378 - RNA, 19 nt, Artificial Sequence
  Description of Artificial Sequence: Synthetic oligonucleotide
aagcuuaguucugagguca

SEQ ID NO: 437379 - RNA, 19 nt, Artificial Sequence
  Description of Artificial Sequence: Synthetic oligonucleotide
uuugcuguagguccgcaau

SEQ ID NO: 437380 - RNA, 19 nt, Artificial Sequence
  Description of Artificial Sequence: Synthetic oligonucleotide
ugaccauaaccucaauuuc

SEQ ID NO: 437381 - RNA, 19 nt, Artificial Sequence
  Description of Artificial Sequence: Synthetic oligonucleotide
uugcucacauauuucuugc

SEQ ID NO: 437382 - RNA, 19 nt, Artificial Sequence
  Description of Artificial Sequence: Synthetic oligonucleotide
aaguuugagcaacucguau

SEQ ID NO: 437383 - RNA, 19 nt, Artificial Sequence
  Description of Artificial Sequence: Synthetic oligonucleotide
gaauuguggcaauagucuc

SEQ ID NO: 437384 - RNA, 19 nt, Artificial Sequence
  Description of Artificial Sequence: Synthetic oligonucleotide
ucacgugagaaugugcgcc

SEQ ID NO: 437385 - RNA, 19 nt, Artificial Sequence
  Description of Artificial Sequence: Synthetic oligonucleotide
gauggcuuagcaccuuuug

SEQ ID NO: 437386 - RNA, 19 nt, Artificial Sequence
  Description of Artificial Sequence: Synthetic oligonucleotide
uguugcuggcuagagcucg

SEQ ID NO: 437387 - RNA, 19 nt, Artificial Sequence
  Description of Artificial Sequence: Synthetic oligonucleotide
uauaacuacagaagucauu

SEQ ID NO: 437388 - RNA, 19 nt, Artificial Sequence
  Description of Artificial Sequence: Synthetic oligonucleotide
uggauuggagcaagaaaac

SEQ ID NO: 437389 - RNA, 19 nt, Artificial Sequence
  Description of Artificial Sequence: Synthetic oligonucleotide
agcacaaucaucacuguca

SEQ ID NO: 437390 - RNA, 19 nt, Artificial Sequence
  Description of Artificial Sequence: Synthetic oligonucleotide
aaaguucuguuaaaaucca

SEQ ID NO: 437391 - RNA, 19 nt, Artificial Sequence
  Description of Artificial Sequence: Synthetic oligonucleotide
agcacauuagacuguuucu

SEQ ID NO: 437392 - RNA, 19 nt, Artificial Sequence
  Description of Artificial Sequence: Synthetic oligonucleotide
ugguauccacuccucauca

SEQ ID NO: 437393 - RNA, 19 nt, Artificial Sequence
  Description of Artificial Sequence: Synthetic oligonucleotide
uuaagacguuuguuggcag

SEQ ID NO: 437394 - RNA, 19 nt, Artificial Sequence
  Description of Artificial Sequence: Synthetic oligonucleotide
uuaacuggauuacuucuuu

SEQ ID NO: 437395 - RNA, 19 nt, Artificial Sequence
  Description of Artificial Sequence: Synthetic oligonucleotide
guugcgacacuuugugggg

SEQ ID NO: 437396 - RNA, 19 nt, Artificial Sequence
  Description of Artificial Sequence: Synthetic oligonucleotide
cuggguuugcucaauagca

SEQ ID NO: 437397 - RNA, 19 nt, Artificial Sequence
  Description of Artificial Sequence: Synthetic oligonucleotide
aguagaugagcuaagguuu

SEQ ID NO: 437398 - RNA, 19 nt, Artificial Sequence
  Description of Artificial Sequence: Synthetic oligonucleotide
aguacugaccauaaccuca

SEQ ID NO: 437399 - RNA, 19 nt, Artificial Sequence
  Description of Artificial Sequence: Synthetic oligonucleotide
ucugcguuauccuggcucu

SEQ ID NO: 437400 - RNA, 19 nt, Artificial Sequence
  Description of Artificial Sequence: Synthetic oligonucleotide
ucuuucauuugacgcauua

SEQ ID NO: 437401 - RNA, 19 nt, Artificial Sequence
  Description of Artificial Sequence: Synthetic oligonucleotide
accuauaacuacagaaguc

SEQ ID NO: 437402 - RNA, 19 nt, Artificial Sequence
  Description of Artificial Sequence: Synthetic oligonucleotide
aguugggccagguuuaaau

SEQ ID NO: 437403 - RNA, 19 nt, Artificial Sequence
  Description of Artificial Sequence: Synthetic oligonucleotide
cucucucucucucaguaag

SEQ ID NO: 437404 - RNA, 19 nt, Artificial Sequence
  Description of Artificial Sequence: Synthetic oligonucleotide
gacguuuguuggcagcugc

SEQ ID NO: 437405 - RNA, 19 nt, Artificial Sequence
  Description of Artificial Sequence: Synthetic oligonucleotide
acgucugagcacauuagac

SEQ ID NO: 437406 - RNA, 19 nt, Artificial Sequence
  Description of Artificial Sequence: Synthetic oligonucleotide
uguaacucucucucucucu

SEQ ID NO: 437407 - RNA, 19 nt, Artificial Sequence
  Description of Artificial Sequence: Synthetic oligonucleotide
uguuguuuccacugucuaa

SEQ ID NO: 437408 - RNA, 19 nt, Artificial Sequence
  Description of Artificial Sequence: Synthetic oligonucleotide
gagaugaugacacagccuu

SEQ ID NO: 437409 - RNA, 19 nt, Artificial Sequence
  Description of Artificial Sequence: Synthetic oligonucleotide
uugcuaugcccauaagaga

SEQ ID NO: 437410 - RNA, 19 nt, Artificial Sequence
  Description of Artificial Sequence: Synthetic oligonucleotide
aauagucucccagcguugu

SEQ ID NO: 437411 - RNA, 19 nt, Artificial Sequence
  Description of Artificial Sequence: Synthetic oligonucleotide
gaccauaaccucaauuuca

SEQ ID NO: 437412 - RNA, 19 nt, Artificial Sequence
  Description of Artificial Sequence: Synthetic oligonucleotide
gacaauucaacugcucaca

SEQ ID NO: 437413 - RNA, 19 nt, Artificial Sequence
  Description of Artificial Sequence: Synthetic oligonucleotide
agguccgcaaucugagcac

SEQ ID NO: 437414 - RNA, 19 nt, Artificial Sequence
  Description of Artificial Sequence: Synthetic oligonucleotide
cucguauugccucuuacga

SEQ ID NO: 437415 - RNA, 19 nt, Artificial Sequence
  Description of Artificial Sequence: Synthetic oligonucleotide
gagaaugugcgccuucgga

SEQ ID NO: 437416 - RNA, 19 nt, Artificial Sequence
  Description of Artificial Sequence: Synthetic oligonucleotide
gaccuauaacuacagaagu

SEQ ID NO: 437417 - RNA, 19 nt, Artificial Sequence
  Description of Artificial Sequence: Synthetic oligonucleotide
uuauggcacauuuggcuuc

SEQ ID NO: 437418 - RNA, 19 nt, Artificial Sequence
  Description of Artificial Sequence: Synthetic oligonucleotide
acauuagacuguuucugaa

SEQ ID NO: 437419 - RNA, 19 nt, Artificial Sequence
  Description of Artificial Sequence: Synthetic oligonucleotide
ggaacuaaaacaggccucc

SEQ ID NO: 437420 - RNA, 19 nt, Artificial Sequence
  Description of Artificial Sequence: Synthetic oligonucleotide
auucgacaaggucugggcu

SEQ ID NO: 437421 - RNA, 19 nt, Artificial Sequence
  Description of Artificial Sequence: Synthetic oligonucleotide
uucagaugccguuuggcuu

SEQ ID NO: 437422 - RNA, 19 nt, Artificial Sequence
  Description of Artificial Sequence: Synthetic oligonucleotide
cacuaacugacuccuccgg

SEQ ID NO: 437423 - RNA, 19 nt, Artificial Sequence
  Description of Artificial Sequence: Synthetic oligonucleotide
uucucucgauagcaagacc

SEQ ID NO: 437424 - RNA, 19 nt, Artificial Sequence
  Description of Artificial Sequence: Synthetic oligonucleotide
guuggauuggagcaagaaa

SEQ ID NO: 437425 - RNA, 19 nt, Artificial Sequence
  Description of Artificial Sequence: Synthetic oligonucleotide
augagcuaagguuuauuua

SEQ ID NO: 437426 - RNA, 19 nt, Artificial Sequence
  Description of Artificial Sequence: Synthetic oligonucleotide
auuagcgcccuuucucucu

SEQ ID NO: 437427 - RNA, 19 nt, Artificial Sequence
  Description of Artificial Sequence: Synthetic oligonucleotide
ucuccgauagauggcuuag

SEQ ID NO: 437428 - RNA, 19 nt, Artificial Sequence
  Description of Artificial Sequence: Synthetic oligonucleotide
uuguuguuuccacugucua

SEQ ID NO: 437429 - RNA, 19 nt, Artificial Sequence
  Description of Artificial Sequence: Synthetic oligonucleotide
ccguuuaucugcaaccucc

SEQ ID NO: 437430 - RNA, 19 nt, Artificial Sequence
  Description of Artificial Sequence: Synthetic oligonucleotide
agcaagaccuauaacuaca

SEQ ID NO: 437431 - RNA, 19 nt, Artificial Sequence
  Description of Artificial Sequence: Synthetic oligonucleotide
uuguaacucucucucucuc

SEQ ID NO: 437432 - RNA, 19 nt, Artificial Sequence
  Description of Artificial Sequence: Synthetic oligonucleotide
uuaguucugaggucaucuc

SEQ ID NO: 437433 - RNA, 19 nt, Artificial Sequence
  Description of Artificial Sequence: Synthetic oligonucleotide
uuccuaucuucaagaaggu

SEQ ID NO: 437434 - RNA, 19 nt, Artificial Sequence
  Description of Artificial Sequence: Synthetic oligonucleotide
acaccuugacuaauuuugg

SEQ ID NO: 437435 - RNA, 19 nt, Artificial Sequence
  Description of Artificial Sequence: Synthetic oligonucleotide
agcuaagguuuauuuauuu

SEQ ID NO: 437436 - RNA, 19 nt, Artificial Sequence
  Description of Artificial Sequence: Synthetic oligonucleotide
guaacucucucucucucuc

SEQ ID NO: 437437 - RNA, 19 nt, Artificial Sequence
  Description of Artificial Sequence: Synthetic oligonucleotide
ucggaguuuaggaggugga

SEQ ID NO: 437438 - RNA, 19 nt, Artificial Sequence
  Description of Artificial Sequence: Synthetic oligonucleotide
uuaauucgacaaggucugg

SEQ ID NO: 437439 - RNA, 19 nt, Artificial Sequence
  Description of Artificial Sequence: Synthetic oligonucleotide
gaugagcuaagguuuauuu

SEQ ID NO: 437440 - RNA, 19 nt, Artificial Sequence
  Description of Artificial Sequence: Synthetic oligonucleotide
ucucucucucucaguaaga

SEQ ID NO: 437441 - RNA, 19 nt, Artificial Sequence
  Description of Artificial Sequence: Synthetic oligonucleotide
uagguggaauauauucaaa

SEQ ID NO: 437442 - RNA, 19 nt, Artificial Sequence
  Description of Artificial Sequence: Synthetic oligonucleotide
aguugcacagacaggguug

SEQ ID NO: 437443 - RNA, 19 nt, Artificial Sequence
  Description of Artificial Sequence: Synthetic oligonucleotide
agaguuggauuggagcaag

SEQ ID NO: 437444 - RNA, 19 nt, Artificial Sequence
  Description of Artificial Sequence: Synthetic oligonucleotide
aaggucauucagaugccgu

SEQ ID NO: 437445 - RNA, 19 nt, Artificial Sequence
  Description of Artificial Sequence: Synthetic oligonucleotide
ugcaggccacauuacaguc

SEQ ID NO: 437446 - RNA, 19 nt, Artificial Sequence
  Description of Artificial Sequence: Synthetic oligonucleotide
ucaguugguucucuccgau

SEQ ID NO: 437447 - RNA, 19 nt, Artificial Sequence
  Description of Artificial Sequence: Synthetic oligonucleotide
cauugcuuguucccacacc

SEQ ID NO: 437448 - RNA, 19 nt, Artificial Sequence
  Description of Artificial Sequence: Synthetic oligonucleotide
uugguucucuccgauagau

SEQ ID NO: 437449 - RNA, 19 nt, Artificial Sequence
  Description of Artificial Sequence: Synthetic oligonucleotide
uuagcgcccuuucucucug

SEQ ID NO: 437450 - RNA, 19 nt, Artificial Sequence
  Description of Artificial Sequence: Synthetic oligonucleotide
cuucucucgauagcaagac

SEQ ID NO: 437451 - RNA, 19 nt, Artificial Sequence
  Description of Artificial Sequence: Synthetic oligonucleotide
uucgacaaggucugggcuu

SEQ ID NO: 437452 - RNA, 19 nt, Artificial Sequence
  Description of Artificial Sequence: Synthetic oligonucleotide
ucuuacgaucucuuucuuu

SEQ ID NO: 437453 - RNA, 19 nt, Artificial Sequence
  Description of Artificial Sequence: Synthetic oligonucleotide
uuccguuuaucugcaaccu

SEQ ID NO: 437454 - RNA, 19 nt, Artificial Sequence
  Description of Artificial Sequence: Synthetic oligonucleotide
agucacugaaugcucggaa

SEQ ID NO: 437455 - RNA, 19 nt, Artificial Sequence
  Description of Artificial Sequence: Synthetic oligonucleotide
uugagucucuuuccguuua

SEQ ID NO: 437456 - RNA, 19 nt, Artificial Sequence
  Description of Artificial Sequence: Synthetic oligonucleotide
aguaguuguuugggguugg

SEQ ID NO: 437457 - RNA, 19 nt, Artificial Sequence
  Description of Artificial Sequence: Synthetic oligonucleotide
agugggacucuucuuggau

SEQ ID NO: 437458 - RNA, 19 nt, Artificial Sequence
  Description of Artificial Sequence: Synthetic oligonucleotide
cuguugcgacacuuugugg

SEQ ID NO: 437459 - RNA, 19 nt, Artificial Sequence
  Description of Artificial Sequence: Synthetic oligonucleotide
guuaaaauccagaguugga

SEQ ID NO: 437460 - RNA, 19 nt, Artificial Sequence
  Description of Artificial Sequence: Synthetic oligonucleotide
gacuaauuuuggugguauc

SEQ ID NO: 437461 - RNA, 19 nt, Artificial Sequence
  Description of Artificial Sequence: Synthetic oligonucleotide
gcuuagacaguaaaggcca

SEQ ID NO: 437462 - RNA, 19 nt, Artificial Sequence
  Description of Artificial Sequence: Synthetic oligonucleotide
uaacucucucucucucuca

SEQ ID NO: 437463 - RNA, 19 nt, Artificial Sequence
  Description of Artificial Sequence: Synthetic oligonucleotide
uggugguauccacuccuca

SEQ ID NO: 437464 - RNA, 19 nt, Artificial Sequence
  Description of Artificial Sequence: Synthetic oligonucleotide
uccccauggcuuuauuuuc

SEQ ID NO: 437465 - RNA, 19 nt, Artificial Sequence
  Description of Artificial Sequence: Synthetic oligonucleotide
uccguuuaucugcaaccuc

SEQ ID NO: 437466 - RNA, 19 nt, Artificial Sequence
  Description of Artificial Sequence: Synthetic oligonucleotide
caauagucucccagcguug

SEQ ID NO: 437467 - RNA, 19 nt, Artificial Sequence
  Description of Artificial Sequence: Synthetic oligonucleotide
cauuagacuguuucugaaa

SEQ ID NO: 437468 - RNA, 19 nt, Artificial Sequence
  Description of Artificial Sequence: Synthetic oligonucleotide
ccuauaacuacagaaguca

SEQ ID NO: 437469 - RNA, 19 nt, Artificial Sequence
  Description of Artificial Sequence: Synthetic oligonucleotide
cuugcuauugggaguugca

SEQ ID NO: 437470 - RNA, 19 nt, Artificial Sequence
  Description of Artificial Sequence: Synthetic oligonucleotide
uuucaaguuugagcaacuc

SEQ ID NO: 437471 - RNA, 19 nt, Artificial Sequence
  Description of Artificial Sequence: Synthetic oligonucleotide
uccaagcuuuccucugggc

SEQ ID NO: 437472 - RNA, 19 nt, Artificial Sequence
  Description of Artificial Sequence: Synthetic oligonucleotide
accugaucugcaucagaca

SEQ ID NO: 437473 - RNA, 19 nt, Artificial Sequence
  Description of Artificial Sequence: Synthetic oligonucleotide
uggguggucagaggaagga

SEQ ID NO: 437474 - RNA, 19 nt, Artificial Sequence
  Description of Artificial Sequence: Synthetic oligonucleotide
uggacaccuugacuaauuu

SEQ ID NO: 437475 - RNA, 19 nt, Artificial Sequence
  Description of Artificial Sequence: Synthetic oligonucleotide
uucacucgagcugcagugc

SEQ ID NO: 437476 - RNA, 19 nt, Artificial Sequence
  Description of Artificial Sequence: Synthetic oligonucleotide
ugcguuauccuggcucugc

SEQ ID NO: 437477 - RNA, 19 nt, Artificial Sequence
  Description of Artificial Sequence: Synthetic oligonucleotide
cacuguagcgccucgaugu

SEQ ID NO: 437478 - RNA, 19 nt, Artificial Sequence
  Description of Artificial Sequence: Synthetic oligonucleotide
ucugggcuuagguggaaua

SEQ ID NO: 437479 - RNA, 19 nt, Artificial Sequence
  Description of Artificial Sequence: Synthetic oligonucleotide
cuguagguccgcaaucuga

SEQ ID NO: 437480 - RNA, 19 nt, Artificial Sequence
  Description of Artificial Sequence: Synthetic oligonucleotide
aguuggauuggagcaagaa

SEQ ID NO: 437481 - RNA, 19 nt, Artificial Sequence
  Description of Artificial Sequence: Synthetic oligonucleotide
ccuggguuugcucaauagc

SEQ ID NO: 437482 - RNA, 19 nt, Artificial Sequence
  Description of Artificial Sequence: Synthetic oligonucleotide
gcacauuagacuguuucug

SEQ ID NO: 437483 - RNA, 19 nt, Artificial Sequence
  Description of Artificial Sequence: Synthetic oligonucleotide
uuacgaucucuuucuuuua

SEQ ID NO: 437484 - RNA, 19 nt, Artificial Sequence
  Description of Artificial Sequence: Synthetic oligonucleotide
accauaaccucaauuucau

SEQ ID NO: 437485 - RNA, 19 nt, Artificial Sequence
  Description of Artificial Sequence: Synthetic oligonucleotide
ccuuaagacguuuguuggc

SEQ ID NO: 437486 - RNA, 19 nt, Artificial Sequence
  Description of Artificial Sequence: Synthetic oligonucleotide
gacaaggucugggcuuagg

SEQ ID NO: 437487 - RNA, 19 nt, Artificial Sequence
  Description of Artificial Sequence: Synthetic oligonucleotide
cguauugccucuuacgauc

SEQ ID NO: 437488 - RNA, 19 nt, Artificial Sequence
  Description of Artificial Sequence: Synthetic oligonucleotide
uaugcccauaagagaggaa

SEQ ID NO: 437489 - RNA, 19 nt, Artificial Sequence
  Description of Artificial Sequence: Synthetic oligonucleotide
ucucucucucucucaguaa

SEQ ID NO: 437490 - RNA, 19 nt, Artificial Sequence
  Description of Artificial Sequence: Synthetic oligonucleotide
cuuaguucugaggucaucu

SEQ ID NO: 437491 - RNA, 19 nt, Artificial Sequence
  Description of Artificial Sequence: Synthetic oligonucleotide
uugacuaauuuugguggua

SEQ ID NO: 437492 - RNA, 19 nt, Artificial Sequence
  Description of Artificial Sequence: Synthetic oligonucleotide
ggcacauuuggcuuccaga

SEQ ID NO: 437493 - RNA, 19 nt, Artificial Sequence
  Description of Artificial Sequence: Synthetic oligonucleotide
ucucgauagcaagaccuau

SEQ ID NO: 437494 - RNA, 19 nt, Artificial Sequence
  Description of Artificial Sequence: Synthetic oligonucleotide
ugagucucuuuccguuuau

SEQ ID NO: 437495 - RNA, 19 nt, Artificial Sequence
  Description of Artificial Sequence: Synthetic oligonucleotide
uuaaguugcuaugcccaua

SEQ ID NO: 437496 - RNA, 19 nt, Artificial Sequence
  Description of Artificial Sequence: Synthetic oligonucleotide
uaugagucaccaggagggu

SEQ ID NO: 437497 - RNA, 19 nt, Artificial Sequence
  Description of Artificial Sequence: Synthetic oligonucleotide
agaguguguccauggcaga

SEQ ID NO: 437498 - RNA, 19 nt, Artificial Sequence
  Description of Artificial Sequence: Synthetic oligonucleotide
guagguccgcaaucugagc

SEQ ID NO: 437499 - RNA, 19 nt, Artificial Sequence
  Description of Artificial Sequence: Synthetic oligonucleotide
cauuagcgcccuuucucuc

SEQ ID NO: 437500 - RNA, 19 nt, Artificial Sequence
  Description of Artificial Sequence: Synthetic oligonucleotide
uccuaucuucaagaagguc

SEQ ID NO: 437501 - RNA, 19 nt, Artificial Sequence
  Description of Artificial Sequence: Synthetic oligonucleotide
guucucuccgauagauggc

SEQ ID NO: 437502 - RNA, 19 nt, Artificial Sequence
  Description of Artificial Sequence: Synthetic oligonucleotide
uugccucuuacgaucucuu

SEQ ID NO: 437503 - RNA, 19 nt, Artificial Sequence
  Description of Artificial Sequence: Synthetic oligonucleotide
ccauaagagaggaacaucu

SEQ ID NO: 437504 - RNA, 19 nt, Artificial Sequence
  Description of Artificial Sequence: Synthetic oligonucleotide
aacacccuugguuguucuu

SEQ ID NO: 437505 - RNA, 19 nt, Artificial Sequence
  Description of Artificial Sequence: Synthetic oligonucleotide
ugcgacacuuugugggguc

SEQ ID NO: 437506 - RNA, 19 nt, Artificial Sequence
  Description of Artificial Sequence: Synthetic oligonucleotide
cagucugaccuuugcuuuc

SEQ ID NO: 437507 - RNA, 19 nt, Artificial Sequence
  Description of Artificial Sequence: Synthetic oligonucleotide
ccacauuacagucugaccu

SEQ ID NO: 437508 - RNA, 19 nt, Artificial Sequence
  Description of Artificial Sequence: Synthetic oligonucleotide
gugccuuaugagucaccag

SEQ ID NO: 437509 - RNA, 19 nt, Artificial Sequence
  Description of Artificial Sequence: Synthetic oligonucleotide
gaaucugaaccucguacuu

SEQ ID NO: 437510 - RNA, 19 nt, Artificial Sequence
  Description of Artificial Sequence: Synthetic oligonucleotide
cuccucaguuuuacgucug

SEQ ID NO: 437511 - RNA, 19 nt, Artificial Sequence
  Description of Artificial Sequence: Synthetic oligonucleotide
cuugacuaauuuugguggu

SEQ ID NO: 437512 - RNA, 19 nt, Artificial Sequence
  Description of Artificial Sequence: Synthetic oligonucleotide
gccucuuacgaucucuuuc

SEQ ID NO: 437513 - RNA, 19 nt, Artificial Sequence
  Description of Artificial Sequence: Synthetic oligonucleotide
gccacauuacagucugacc

SEQ ID NO: 437514 - RNA, 19 nt, Artificial Sequence
  Description of Artificial Sequence: Synthetic oligonucleotide
cuaugcccauaagagagga

SEQ ID NO: 437515 - RNA, 19 nt, Artificial Sequence
  Description of Artificial Sequence: Synthetic oligonucleotide
ggguuugcucaauagcauc

SEQ ID NO: 437516 - RNA, 19 nt, Artificial Sequence
  Description of Artificial Sequence: Synthetic oligonucleotide
cuuguaacucucucucucu

SEQ ID NO: 437517 - RNA, 19 nt, Artificial Sequence
  Description of Artificial Sequence: Synthetic oligonucleotide
agcauccuuaagacguuug

SEQ ID NO: 437518 - RNA, 19 nt, Artificial Sequence
  Description of Artificial Sequence: Synthetic oligonucleotide
uaacacuguagcgccucga

SEQ ID NO: 437519 - RNA, 19 nt, Artificial Sequence
  Description of Artificial Sequence: Synthetic oligonucleotide
ugggcuuagguggaauaua

SEQ ID NO: 437520 - RNA, 19 nt, Artificial Sequence
  Description of Artificial Sequence: Synthetic oligonucleotide
cucucucucucucucagua

SEQ ID NO: 437521 - RNA, 19 nt, Artificial Sequence
  Description of Artificial Sequence: Synthetic oligonucleotide
cucgauagcaagaccuaua

SEQ ID NO: 437522 - RNA, 19 nt, Artificial Sequence
  Description of Artificial Sequence: Synthetic oligonucleotide
caaguuugagcaacucgua

SEQ ID NO: 437523 - RNA, 19 nt, Artificial Sequence
  Description of Artificial Sequence: Synthetic oligonucleotide
agucugaccuuugcuuucu

SEQ ID NO: 437524 - RNA, 19 nt, Artificial Sequence
  Description of Artificial Sequence: Synthetic oligonucleotide
ggugccuuaugagucacca

SEQ ID NO: 437525 - RNA, 19 nt, Artificial Sequence
  Description of Artificial Sequence: Synthetic oligonucleotide
agcacuccugagcuccagu

SEQ ID NO: 437526 - RNA, 19 nt, Artificial Sequence
  Description of Artificial Sequence: Synthetic oligonucleotide
gcuaugcccauaagagagg

SEQ ID NO: 437527 - RNA, 19 nt, Artificial Sequence
  Description of Artificial Sequence: Synthetic oligonucleotide
acucucucucucucucagu

SEQ ID NO: 437528 - RNA, 19 nt, Artificial Sequence
  Description of Artificial Sequence: Synthetic oligonucleotide
cuauaacuacagaagucau

SEQ ID NO: 437529 - RNA, 19 nt, Artificial Sequence
  Description of Artificial Sequence: Synthetic oligonucleotide
agaugcagagagggaguug

SEQ ID NO: 437530 - RNA, 19 nt, Artificial Sequence
  Description of Artificial Sequence: Synthetic oligonucleotide
uuuuacgucugagcacauu

SEQ ID NO: 437531 - RNA, 19 nt, Artificial Sequence
  Description of Artificial Sequence: Synthetic oligonucleotide
gcaucugcguuauccuggc

SEQ ID NO: 437532 - RNA, 19 nt, Artificial Sequence
  Description of Artificial Sequence: Synthetic oligonucleotide
cuguagcgccucgaugucc

SEQ ID NO: 437533 - RNA, 19 nt, Artificial Sequence
  Description of Artificial Sequence: Synthetic oligonucleotide
uugcgacacuuuguggggu

SEQ ID NO: 437534 - RNA, 19 nt, Artificial Sequence
  Description of Artificial Sequence: Synthetic oligonucleotide
cuccgauagauggcuuagc

SEQ ID NO: 437535 - RNA, 19 nt, Artificial Sequence
  Description of Artificial Sequence: Synthetic oligonucleotide
guagaugagcuaagguuua

SEQ ID NO: 437536 - RNA, 19 nt, Artificial Sequence
  Description of Artificial Sequence: Synthetic oligonucleotide
ugagcacauuagacuguuu

SEQ ID NO: 437537 - RNA, 19 nt, Artificial Sequence
  Description of Artificial Sequence: Synthetic oligonucleotide
acagccuuagugggacucu

SEQ ID NO: 437538 - RNA, 19 nt, Artificial Sequence
  Description of Artificial Sequence: Synthetic oligonucleotide
ucccagcguuguuucugcc

SEQ ID NO: 437539 - RNA, 19 nt, Artificial Sequence
  Description of Artificial Sequence: Synthetic oligonucleotide
agccuuagugggacucuuc

SEQ ID NO: 437540 - RNA, 19 nt, Artificial Sequence
  Description of Artificial Sequence: Synthetic oligonucleotide
cucucgauagcaagaccua

SEQ ID NO: 437541 - RNA, 19 nt, Artificial Sequence
  Description of Artificial Sequence: Synthetic oligonucleotide
gaagucauuagcgcccuuu

SEQ ID NO: 437542 - RNA, 19 nt, Artificial Sequence
  Description of Artificial Sequence: Synthetic oligonucleotide
gcaauagucucccagcguu

SEQ ID NO: 437543 - RNA, 19 nt, Artificial Sequence
  Description of Artificial Sequence: Synthetic oligonucleotide
ugggguuggagggcuuaga

SEQ ID NO: 437544 - RNA, 19 nt, Artificial Sequence
  Description of Artificial Sequence: Synthetic oligonucleotide
gcgccuucggaguuuagga

SEQ ID NO: 437545 - RNA, 19 nt, Artificial Sequence
  Description of Artificial Sequence: Synthetic oligonucleotide
ucaacacagcuggccuuac

SEQ ID NO: 437546 - RNA, 19 nt, Artificial Sequence
  Description of Artificial Sequence: Synthetic oligonucleotide
auagucucccagcguuguu

SEQ ID NO: 437547 - RNA, 19 nt, Artificial Sequence
  Description of Artificial Sequence: Synthetic oligonucleotide
gaacacccuugguuguucu

SEQ ID NO: 437548 - RNA, 19 nt, Artificial Sequence
  Description of Artificial Sequence: Synthetic oligonucleotide
ggagacaauucaacugcuc

SEQ ID NO: 437549 - RNA, 19 nt, Artificial Sequence
  Description of Artificial Sequence: Synthetic oligonucleotide
gcuaagguuuauuuauuuu

SEQ ID NO: 437550 - RNA, 19 nt, Artificial Sequence
  Description of Artificial Sequence: Synthetic oligonucleotide
cacauuacagucugaccuu

SEQ ID NO: 437551 - RNA, 19 nt, Artificial Sequence
  Description of Artificial Sequence: Synthetic oligonucleotide
aucccacggcuuugagucu

SEQ ID NO: 437552 - RNA, 19 nt, Artificial Sequence
  Description of Artificial Sequence: Synthetic oligonucleotide
gucaacacagcuggccuua

SEQ ID NO: 437553 - RNA, 19 nt, Artificial Sequence
  Description of Artificial Sequence: Synthetic oligonucleotide
accagccuuugcaggaaca

SEQ ID NO: 437554 - RNA, 19 nt, Artificial Sequence
  Description of Artificial Sequence: Synthetic oligonucleotide
ccucuuacgaucucuuucu

SEQ ID NO: 437555 - RNA, 19 nt, Artificial Sequence
  Description of Artificial Sequence: Synthetic oligonucleotide
gccauuuggcauuguugca

SEQ ID NO: 437556 - RNA, 19 nt, Artificial Sequence
  Description of Artificial Sequence: Synthetic oligonucleotide
gaguuggauuggagcaaga

SEQ ID NO: 437557 - RNA, 19 nt, Artificial Sequence
  Description of Artificial Sequence: Synthetic oligonucleotide
gcauccuuaagacguuugu

SEQ ID NO: 437558 - RNA, 19 nt, Artificial Sequence
  Description of Artificial Sequence: Synthetic oligonucleotide
gccuuaugagucaccagga

SEQ ID NO: 437559 - RNA, 19 nt, Artificial Sequence
  Description of Artificial Sequence: Synthetic oligonucleotide
cccauaagagaggaacauc

SEQ ID NO: 437560 - RNA, 19 nt, Artificial Sequence
  Description of Artificial Sequence: Synthetic oligonucleotide
ccugaucugcaucagacau

SEQ ID NO: 437561 - RNA, 19 nt, Artificial Sequence
  Description of Artificial Sequence: Synthetic oligonucleotide
gaacuaaaacaggccuccu

SEQ ID NO: 437562 - RNA, 19 nt, Artificial Sequence
  Description of Artificial Sequence: Synthetic oligonucleotide
guaguuguuugggguugga

SEQ ID NO: 437563 - RNA, 19 nt, Artificial Sequence
  Description of Artificial Sequence: Synthetic oligonucleotide
cuuuugcuguagguccgca

SEQ ID NO: 437564 - RNA, 19 nt, Artificial Sequence
  Description of Artificial Sequence: Synthetic oligonucleotide
cagucacugaaugcucgga

SEQ ID NO: 437565 - RNA, 19 nt, Artificial Sequence
  Description of Artificial Sequence: Synthetic oligonucleotide
ccuccggcggcuucccugc

SEQ ID NO: 437566 - RNA, 19 nt, Artificial Sequence
  Description of Artificial Sequence: Synthetic oligonucleotide
ggccaacauucagcaaagg

SEQ ID NO: 437567 - RNA, 19 nt, Artificial Sequence
  Description of Artificial Sequence: Synthetic oligonucleotide
ggaacacccuugguuguuc

SEQ ID NO: 437568 - RNA, 19 nt, Artificial Sequence
  Description of Artificial Sequence: Synthetic oligonucleotide
agaagucauuagcgcccuu

SEQ ID NO: 437569 - RNA, 19 nt, Artificial Sequence
  Description of Artificial Sequence: Synthetic oligonucleotide
cgauagcaagaccuauaac

SEQ ID NO: 437570 - RNA, 19 nt, Artificial Sequence
  Description of Artificial Sequence: Synthetic oligonucleotide
guguugcuggcuagagcuc

SEQ ID NO: 437571 - RNA, 19 nt, Artificial Sequence
  Description of Artificial Sequence: Synthetic oligonucleotide
agcuuaguucugaggucau

SEQ ID NO: 437572 - RNA, 19 nt, Artificial Sequence
  Description of Artificial Sequence: Synthetic oligonucleotide
cacccuugguuguucuucu

SEQ ID NO: 437573 - RNA, 19 nt, Artificial Sequence
  Description of Artificial Sequence: Synthetic oligonucleotide
caguugguucucuccgaua

SEQ ID NO: 437574 - RNA, 19 nt, Artificial Sequence
  Description of Artificial Sequence: Synthetic oligonucleotide
caauagcaucugcguuauc

SEQ ID NO: 437575 - RNA, 19 nt, Artificial Sequence
  Description of Artificial Sequence: Synthetic oligonucleotide
cuagagcucgcuucuucuu

SEQ ID NO: 437576 - RNA, 19 nt, Artificial Sequence
  Description of Artificial Sequence: Synthetic oligonucleotide
ccucaguacugaccauaac

SEQ ID NO: 437577 - RNA, 19 nt, Artificial Sequence
  Description of Artificial Sequence: Synthetic oligonucleotide
cugcguuauccuggcucug

SEQ ID NO: 437578 - RNA, 19 nt, Artificial Sequence
  Description of Artificial Sequence: Synthetic oligonucleotide
cgucugagcacauuagacu

SEQ ID NO: 437579 - RNA, 19 nt, Artificial Sequence
  Description of Artificial Sequence: Synthetic oligonucleotide
gcggcuucccugccauuug

SEQ ID NO: 437580 - RNA, 19 nt, Artificial Sequence
  Description of Artificial Sequence: Synthetic oligonucleotide
gaguugggccagguuuaaa

SEQ ID NO: 437581 - RNA, 19 nt, Artificial Sequence
  Description of Artificial Sequence: Synthetic oligonucleotide
guccgcaaucugagcacuc

SEQ ID NO: 437582 - RNA, 19 nt, Artificial Sequence
  Description of Artificial Sequence: Synthetic oligonucleotide
acgugagaaugugcgccuu

SEQ ID NO: 437583 - RNA, 19 nt, Artificial Sequence
  Description of Artificial Sequence: Synthetic oligonucleotide
gcuuaguucugaggucauc

SEQ ID NO: 437584 - RNA, 19 nt, Artificial Sequence
  Description of Artificial Sequence: Synthetic oligonucleotide
ccuccucaguuuuacgucu

SEQ ID NO: 437585 - RNA, 19 nt, Artificial Sequence
  Description of Artificial Sequence: Synthetic oligonucleotide
gcucacaaagaaagagcua

SEQ ID NO: 437586 - RNA, 19 nt, Artificial Sequence
  Description of Artificial Sequence: Synthetic oligonucleotide
guuggagggcuuagacagu

SEQ ID NO: 437587 - RNA, 19 nt, Artificial Sequence
  Description of Artificial Sequence: Synthetic oligonucleotide
uggcuagagcucgcuucuu

SEQ ID NO: 437588 - RNA, 19 nt, Artificial Sequence
  Description of Artificial Sequence: Synthetic oligonucleotide
ggguggucagaggaaggaa

SEQ ID NO: 437589 - RNA, 19 nt, Artificial Sequence
  Description of Artificial Sequence: Synthetic oligonucleotide
gagcauccuuaagacguuu

SEQ ID NO: 437590 - RNA, 19 nt, Artificial Sequence
  Description of Artificial Sequence: Synthetic oligonucleotide
cucuuacgaucucuuucuu

SEQ ID NO: 437591 - RNA, 19 nt, Artificial Sequence
  Description of Artificial Sequence: Synthetic oligonucleotide
cugcaaccuccuuuugcuu

SEQ ID NO: 437592 - RNA, 19 nt, Artificial Sequence
  Description of Artificial Sequence: Synthetic oligonucleotide
gguccgcaaucugagcacu

SEQ ID NO: 437593 - RNA, 19 nt, Artificial Sequence
  Description of Artificial Sequence: Synthetic oligonucleotide
guuuuacgucugagcacau

SEQ ID NO: 437594 - RNA, 19 nt, Artificial Sequence
  Description of Artificial Sequence: Synthetic oligonucleotide
gcguuguuucugccugucu

SEQ ID NO: 437595 - RNA, 19 nt, Artificial Sequence
  Description of Artificial Sequence: Synthetic oligonucleotide
caucugcguuauccuggcu

SEQ ID NO: 437596 - RNA, 19 nt, Artificial Sequence
  Description of Artificial Sequence: Synthetic oligonucleotide
ggcggcuucccugccauuu

SEQ ID NO: 437597 - RNA, 19 nt, Artificial Sequence
  Description of Artificial Sequence: Synthetic oligonucleotide
ccgcaaucugagcacuccu

SEQ ID NO: 437598 - RNA, 19 nt, Artificial Sequence
  Description of Artificial Sequence: Synthetic oligonucleotide
cagccuuagugggacucuu

SEQ ID NO: 437599 - RNA, 19 nt, Artificial Sequence
  Description of Artificial Sequence: Synthetic oligonucleotide
gcaacucguauugccucuu

SEQ ID NO: 437600 - RNA, 19 nt, Artificial Sequence
  Description of Artificial Sequence: Synthetic oligonucleotide
cugacuccuccggcggcuu

SEQ ID NO: 437601 - RNA, 19 nt, Artificial Sequence
  Description of Artificial Sequence: Synthetic oligonucleotide
cccacggcuuugagucucu

SEQ ID NO: 437602 - RNA, 19 nt, Artificial Sequence
  Description of Artificial Sequence: Synthetic oligonucleotide
cggaguuuaggagguggau

SEQ ID NO: 437603 - RNA, 19 nt, Artificial Sequence
  Description of Artificial Sequence: Synthetic oligonucleotide
cgccucgauguccaagcuu

SEQ ID NO: 437604 - RNA, 19 nt, Artificial Sequence
  Description of Artificial Sequence: Synthetic oligonucleotide
aauaaaacgcacuaacugg

SEQ ID NO: 437605 - RNA, 19 nt, Artificial Sequence
  Description of Artificial Sequence: Synthetic oligonucleotide
ucaucuaugaacuuuagug

SEQ ID NO: 437606 - RNA, 19 nt, Artificial Sequence
  Description of Artificial Sequence: Synthetic oligonucleotide
acaaccuuagacuuuaugg

SEQ ID NO: 437607 - RNA, 19 nt, Artificial Sequence
  Description of Artificial Sequence: Synthetic oligonucleotide
gacguuuucacauaggcag

SEQ ID NO: 437608 - RNA, 19 nt, Artificial Sequence
  Description of Artificial Sequence: Synthetic oligonucleotide
aaagaaccaaguuuugcac

SEQ ID NO: 437609 - RNA, 19 nt, Artificial Sequence
  Description of Artificial Sequence: Synthetic oligonucleotide
ucaauaaugaggcuaaagu

SEQ ID NO: 437610 - RNA, 19 nt, Artificial Sequence
  Description of Artificial Sequence: Synthetic oligonucleotide
cuaagaaugaagcaguugc

SEQ ID NO: 437611 - RNA, 19 nt, Artificial Sequence
  Description of Artificial Sequence: Synthetic oligonucleotide
ggaacuaugaaccauagcc

SEQ ID NO: 437612 - RNA, 19 nt, Artificial Sequence
  Description of Artificial Sequence: Synthetic oligonucleotide
uauaacaagcuuagaaagg

SEQ ID NO: 437613 - RNA, 19 nt, Artificial Sequence
  Description of Artificial Sequence: Synthetic oligonucleotide
aauaaugaggcuaaaguug

SEQ ID NO: 437614 - RNA, 19 nt, Artificial Sequence
  Description of Artificial Sequence: Synthetic oligonucleotide
uaagcuauaacaagcuuag

SEQ ID NO: 437615 - RNA, 19 nt, Artificial Sequence
  Description of Artificial Sequence: Synthetic oligonucleotide
uaguguaaaacauuuaugu

SEQ ID NO: 437616 - RNA, 19 nt, Artificial Sequence
  Description of Artificial Sequence: Synthetic oligonucleotide
uuauguuuccuuucuaggg

SEQ ID NO: 437617 - RNA, 19 nt, Artificial Sequence
  Description of Artificial Sequence: Synthetic oligonucleotide
uuuuaauccugaaagagaa

SEQ ID NO: 437618 - RNA, 19 nt, Artificial Sequence
  Description of Artificial Sequence: Synthetic oligonucleotide
auugagaggaugcagaaug

SEQ ID NO: 437619 - RNA, 19 nt, Artificial Sequence
  Description of Artificial Sequence: Synthetic oligonucleotide
accggaucaaaccagacac

SEQ ID NO: 437620 - RNA, 19 nt, Artificial Sequence
  Description of Artificial Sequence: Synthetic oligonucleotide
ugguacaguauucuaaggg

SEQ ID NO: 437621 - RNA, 19 nt, Artificial Sequence
  Description of Artificial Sequence: Synthetic oligonucleotide
caaaggauacaucacaccg

SEQ ID NO: 437622 - RNA, 19 nt, Artificial Sequence
  Description of Artificial Sequence: Synthetic oligonucleotide
agaaaugugcacaaaagac

SEQ ID NO: 437623 - RNA, 19 nt, Artificial Sequence
  Description of Artificial Sequence: Synthetic oligonucleotide
ugucaguaaagcaacacug

SEQ ID NO: 437624 - RNA, 19 nt, Artificial Sequence
  Description of Artificial Sequence: Synthetic oligonucleotide
auuaagaugccaaagacug

SEQ ID NO: 437625 - RNA, 19 nt, Artificial Sequence
  Description of Artificial Sequence: Synthetic oligonucleotide
aggacuauaccucuguggg

SEQ ID NO: 437626 - RNA, 19 nt, Artificial Sequence
  Description of Artificial Sequence: Synthetic oligonucleotide
uuaguguaaaacauuuaug

SEQ ID NO: 437627 - RNA, 19 nt, Artificial Sequence
  Description of Artificial Sequence: Synthetic oligonucleotide
cugauaagcuauaacaagc

SEQ ID NO: 437628 - RNA, 19 nt, Artificial Sequence
  Description of Artificial Sequence: Synthetic oligonucleotide
auaacaagcuuagaaaggg

SEQ ID NO: 437629 - RNA, 19 nt, Artificial Sequence
  Description of Artificial Sequence: Synthetic oligonucleotide
uguucucuaauucaugcca

SEQ ID NO: 437630 - RNA, 19 nt, Artificial Sequence
  Description of Artificial Sequence: Synthetic oligonucleotide
acauuuauguacaagacug

SEQ ID NO: 437631 - RNA, 19 nt, Artificial Sequence
  Description of Artificial Sequence: Synthetic oligonucleotide
uuucacauaggcaguagag

SEQ ID NO: 437632 - RNA, 19 nt, Artificial Sequence
  Description of Artificial Sequence: Synthetic oligonucleotide
uuuaagaacccucauuuau

SEQ ID NO: 437633 - RNA, 19 nt, Artificial Sequence
  Description of Artificial Sequence: Synthetic oligonucleotide
uggcugauaagcuauaaca

SEQ ID NO: 437634 - RNA, 19 nt, Artificial Sequence
  Description of Artificial Sequence: Synthetic oligonucleotide
aacuaugaaccauagcccu

SEQ ID NO: 437635 - RNA, 19 nt, Artificial Sequence
  Description of Artificial Sequence: Synthetic oligonucleotide
aauggacagaccccauccc

SEQ ID NO: 437636 - RNA, 19 nt, Artificial Sequence
  Description of Artificial Sequence: Synthetic oligonucleotide
aagacuguucucuaauuca

SEQ ID NO: 437637 - RNA, 19 nt, Artificial Sequence
  Description of Artificial Sequence: Synthetic oligonucleotide
ucuaaggguauccaaagaa

SEQ ID NO: 437638 - RNA, 19 nt, Artificial Sequence
  Description of Artificial Sequence: Synthetic oligonucleotide
ugaguauauugcuugagga

SEQ ID NO: 437639 - RNA, 19 nt, Artificial Sequence
  Description of Artificial Sequence: Synthetic oligonucleotide
aauuggaggcaggagaagg

SEQ ID NO: 437640 - RNA, 19 nt, Artificial Sequence
  Description of Artificial Sequence: Synthetic oligonucleotide
acaauuauuaccccugaca

SEQ ID NO: 437641 - RNA, 19 nt, Artificial Sequence
  Description of Artificial Sequence: Synthetic oligonucleotide
gaacuugauaaucaaagga

SEQ ID NO: 437642 - RNA, 19 nt, Artificial Sequence
  Description of Artificial Sequence: Synthetic oligonucleotide
agaauguggcaauuggagg

SEQ ID NO: 437643 - RNA, 19 nt, Artificial Sequence
  Description of Artificial Sequence: Synthetic oligonucleotide
ugauaagcuauaacaagcu

SEQ ID NO: 437644 - RNA, 19 nt, Artificial Sequence
  Description of Artificial Sequence: Synthetic oligonucleotide
uauucuaaggguauccaaa

SEQ ID NO: 437645 - RNA, 19 nt, Artificial Sequence
  Description of Artificial Sequence: Synthetic oligonucleotide
cugaaccaaaaccacaucc

SEQ ID NO: 437646 - RNA, 19 nt, Artificial Sequence
  Description of Artificial Sequence: Synthetic oligonucleotide
gaguauauugcuugaggag

SEQ ID NO: 437647 - RNA, 19 nt, Artificial Sequence
  Description of Artificial Sequence: Synthetic oligonucleotide
aaggauacaucacaccgga

SEQ ID NO: 437648 - RNA, 19 nt, Artificial Sequence
  Description of Artificial Sequence: Synthetic oligonucleotide
uuaucaugcaggacuauac

SEQ ID NO: 437649 - RNA, 19 nt, Artificial Sequence
  Description of Artificial Sequence: Synthetic oligonucleotide
uaaagcauaaggcaaugua

SEQ ID NO: 437650 - RNA, 19 nt, Artificial Sequence
  Description of Artificial Sequence: Synthetic oligonucleotide
uacauaguacucauaacuc

SEQ ID NO: 437651 - RNA, 19 nt, Artificial Sequence
  Description of Artificial Sequence: Synthetic oligonucleotide
gauaguguuagagaaauaa

SEQ ID NO: 437652 - RNA, 19 nt, Artificial Sequence
  Description of Artificial Sequence: Synthetic oligonucleotide
aagcauaaggcaauguaag

SEQ ID NO: 437653 - RNA, 19 nt, Artificial Sequence
  Description of Artificial Sequence: Synthetic oligonucleotide
agcuauaacaagcuuagaa

SEQ ID NO: 437654 - RNA, 19 nt, Artificial Sequence
  Description of Artificial Sequence: Synthetic oligonucleotide
aaaggauacaucacaccgg

SEQ ID NO: 437655 - RNA, 19 nt, Artificial Sequence
  Description of Artificial Sequence: Synthetic oligonucleotide
cagaauguggcaauuggag

SEQ ID NO: 437656 - RNA, 19 nt, Artificial Sequence
  Description of Artificial Sequence: Synthetic oligonucleotide
ugagucuucuuguaaaggu

SEQ ID NO: 437657 - RNA, 19 nt, Artificial Sequence
  Description of Artificial Sequence: Synthetic oligonucleotide
uagagaaauaaaacgcacu

SEQ ID NO: 437658 - RNA, 19 nt, Artificial Sequence
  Description of Artificial Sequence: Synthetic oligonucleotide
uugauaucuuggcuggcgg

SEQ ID NO: 437659 - RNA, 19 nt, Artificial Sequence
  Description of Artificial Sequence: Synthetic oligonucleotide
guucaauacuccucgagcc

SEQ ID NO: 437660 - RNA, 19 nt, Artificial Sequence
  Description of Artificial Sequence: Synthetic oligonucleotide
cucuaauucaugccaaggc

SEQ ID NO: 437661 - RNA, 19 nt, Artificial Sequence
  Description of Artificial Sequence: Synthetic oligonucleotide
gugaguauauugcuugagg

SEQ ID NO: 437662 - RNA, 19 nt, Artificial Sequence
  Description of Artificial Sequence: Synthetic oligonucleotide
agcauaaggcaauguaagg

SEQ ID NO: 437663 - RNA, 19 nt, Artificial Sequence
  Description of Artificial Sequence: Synthetic oligonucleotide
uaucaugcaggacuauacc

SEQ ID NO: 437664 - RNA, 19 nt, Artificial Sequence
  Description of Artificial Sequence: Synthetic oligonucleotide
acuuaaauggacagacccc

SEQ ID NO: 437665 - RNA, 19 nt, Artificial Sequence
  Description of Artificial Sequence: Synthetic oligonucleotide
uacucauaacucauuuaag

SEQ ID NO: 437666 - RNA, 19 nt, Artificial Sequence
  Description of Artificial Sequence: Synthetic oligonucleotide
uccucggugaguauauugc

SEQ ID NO: 437667 - RNA, 19 nt, Artificial Sequence
  Description of Artificial Sequence: Synthetic oligonucleotide
aaagcauaaggcaauguaa

SEQ ID NO: 437668 - RNA, 19 nt, Artificial Sequence
  Description of Artificial Sequence: Synthetic oligonucleotide
gaacuaugaaccauagccc

SEQ ID NO: 437669 - RNA, 19 nt, Artificial Sequence
  Description of Artificial Sequence: Synthetic oligonucleotide
caugauccgauaauggcug

SEQ ID NO: 437670 - RNA, 19 nt, Artificial Sequence
  Description of Artificial Sequence: Synthetic oligonucleotide
uuuaauccugaaagagaag

SEQ ID NO: 437671 - RNA, 19 nt, Artificial Sequence
  Description of Artificial Sequence: Synthetic oligonucleotide
uugaagguugcagaguucc

SEQ ID NO: 437672 - RNA, 19 nt, Artificial Sequence
  Description of Artificial Sequence: Synthetic oligonucleotide
auuauuaccccugacaauu

SEQ ID NO: 437673 - RNA, 19 nt, Artificial Sequence
  Description of Artificial Sequence: Synthetic oligonucleotide
ugugggauguauuccucgg

SEQ ID NO: 437674 - RNA, 19 nt, Artificial Sequence
  Description of Artificial Sequence: Synthetic oligonucleotide
auccugaaagagaagacac

SEQ ID NO: 437675 - RNA, 19 nt, Artificial Sequence
  Description of Artificial Sequence: Synthetic oligonucleotide
aauuauuaccccugacaau

SEQ ID NO: 437676 - RNA, 19 nt, Artificial Sequence
  Description of Artificial Sequence: Synthetic oligonucleotide
uucaauacuccucgagccc

SEQ ID NO: 437677 - RNA, 19 nt, Artificial Sequence
  Description of Artificial Sequence: Synthetic oligonucleotide
aacucuacauaguacucau

SEQ ID NO: 437678 - RNA, 19 nt, Artificial Sequence
  Description of Artificial Sequence: Synthetic oligonucleotide
ugauguaagcuugaauuca

SEQ ID NO: 437679 - RNA, 19 nt, Artificial Sequence
  Description of Artificial Sequence: Synthetic oligonucleotide
guacucauaacucauuuaa

SEQ ID NO: 437680 - RNA, 19 nt, Artificial Sequence
  Description of Artificial Sequence: Synthetic oligonucleotide
ucugcuacccacaaccuua

SEQ ID NO: 437681 - RNA, 19 nt, Artificial Sequence
  Description of Artificial Sequence: Synthetic oligonucleotide
aaacucuacauaguacuca

SEQ ID NO: 437682 - RNA, 19 nt, Artificial Sequence
  Description of Artificial Sequence: Synthetic oligonucleotide
aaaggucagacugggucac

SEQ ID NO: 437683 - RNA, 19 nt, Artificial Sequence
  Description of Artificial Sequence: Synthetic oligonucleotide
aacuauuaucaugcaggac

SEQ ID NO: 437684 - RNA, 19 nt, Artificial Sequence
  Description of Artificial Sequence: Synthetic oligonucleotide
aaggcuugauguaagcuug

SEQ ID NO: 437685 - RNA, 19 nt, Artificial Sequence
  Description of Artificial Sequence: Synthetic oligonucleotide
cuugauguaagcuugaauu

SEQ ID NO: 437686 - RNA, 19 nt, Artificial Sequence
  Description of Artificial Sequence: Synthetic oligonucleotide
uagggucucagaaaauaga

SEQ ID NO: 437687 - RNA, 19 nt, Artificial Sequence
  Description of Artificial Sequence: Synthetic oligonucleotide
aggaacuaugaaccauagc

SEQ ID NO: 437688 - RNA, 19 nt, Artificial Sequence
  Description of Artificial Sequence: Synthetic oligonucleotide
ucagacguuuucacauagg

SEQ ID NO: 437689 - RNA, 19 nt, Artificial Sequence
  Description of Artificial Sequence: Synthetic oligonucleotide
caggacuauaccucugugg

SEQ ID NO: 437690 - RNA, 19 nt, Artificial Sequence
  Description of Artificial Sequence: Synthetic oligonucleotide
aucacaccggaucaaacca

SEQ ID NO: 437691 - RNA, 19 nt, Artificial Sequence
  Description of Artificial Sequence: Synthetic oligonucleotide
gagaucguaggcacgacag

SEQ ID NO: 437692 - RNA, 19 nt, Artificial Sequence
  Description of Artificial Sequence: Synthetic oligonucleotide
auggguaugacugucuuca

SEQ ID NO: 437693 - RNA, 19 nt, Artificial Sequence
  Description of Artificial Sequence: Synthetic oligonucleotide
guauauugcuugaggaggg

SEQ ID NO: 437694 - RNA, 19 nt, Artificial Sequence
  Description of Artificial Sequence: Synthetic oligonucleotide
caauuauuaccccugacaa

SEQ ID NO: 437695 - RNA, 19 nt, Artificial Sequence
  Description of Artificial Sequence: Synthetic oligonucleotide
uccugaaagagaagacacc

SEQ ID NO: 437696 - RNA, 19 nt, Artificial Sequence
  Description of Artificial Sequence: Synthetic oligonucleotide
aguguaaaacauuuaugua

SEQ ID NO: 437697 - RNA, 19 nt, Artificial Sequence
  Description of Artificial Sequence: Synthetic oligonucleotide
agucaugaaaucagacagc

SEQ ID NO: 437698 - RNA, 19 nt, Artificial Sequence
  Description of Artificial Sequence: Synthetic oligonucleotide
gcugauaagcuauaacaag

SEQ ID NO: 437699 - RNA, 19 nt, Artificial Sequence
  Description of Artificial Sequence: Synthetic oligonucleotide
acuuuaugguccccacucg

SEQ ID NO: 437700 - RNA, 19 nt, Artificial Sequence
  Description of Artificial Sequence: Synthetic oligonucleotide
auaaugaggcuaaaguugu

SEQ ID NO: 437701 - RNA, 19 nt, Artificial Sequence
  Description of Artificial Sequence: Synthetic oligonucleotide
gauaucuuggcuggcggag

SEQ ID NO: 437702 - RNA, 19 nt, Artificial Sequence
  Description of Artificial Sequence: Synthetic oligonucleotide
uugacaaguugccuguuau

SEQ ID NO: 437703 - RNA, 19 nt, Artificial Sequence
  Description of Artificial Sequence: Synthetic oligonucleotide
aucagucaugaaaucagac

SEQ ID NO: 437704 - RNA, 19 nt, Artificial Sequence
  Description of Artificial Sequence: Synthetic oligonucleotide
uucacauaggcaguagaga

SEQ ID NO: 437705 - RNA, 19 nt, Artificial Sequence
  Description of Artificial Sequence: Synthetic oligonucleotide
ugacaauuauuaccccuga

SEQ ID NO: 437706 - RNA, 19 nt, Artificial Sequence
  Description of Artificial Sequence: Synthetic oligonucleotide
aagggaacauugcuccugu

SEQ ID NO: 437707 - RNA, 19 nt, Artificial Sequence
  Description of Artificial Sequence: Synthetic oligonucleotide
auaagcuauaacaagcuua

SEQ ID NO: 437708 - RNA, 19 nt, Artificial Sequence
  Description of Artificial Sequence: Synthetic oligonucleotide
auaaaacgcacuaacuggu

SEQ ID NO: 437709 - RNA, 19 nt, Artificial Sequence
  Description of Artificial Sequence: Synthetic oligonucleotide
ucggucuucaaaugacuug

SEQ ID NO: 437710 - RNA, 19 nt, Artificial Sequence
  Description of Artificial Sequence: Synthetic oligonucleotide
aaaguuguuuugccucacu

SEQ ID NO: 437711 - RNA, 19 nt, Artificial Sequence
  Description of Artificial Sequence: Synthetic oligonucleotide
uuagacuuuauggucccca

SEQ ID NO: 437712 - RNA, 19 nt, Artificial Sequence
  Description of Artificial Sequence: Synthetic oligonucleotide
ugccauucuucaaaagaac

SEQ ID NO: 437713 - RNA, 19 nt, Artificial Sequence
  Description of Artificial Sequence: Synthetic oligonucleotide
gaagggagguuaucgcugc

SEQ ID NO: 437714 - RNA, 19 nt, Artificial Sequence
  Description of Artificial Sequence: Synthetic oligonucleotide
agcccguagcucuucuucc

SEQ ID NO: 437715 - RNA, 19 nt, Artificial Sequence
  Description of Artificial Sequence: Synthetic oligonucleotide
cagaguaugagaugggcca

SEQ ID NO: 437716 - RNA, 19 nt, Artificial Sequence
  Description of Artificial Sequence: Synthetic oligonucleotide
cauugcuccuguucaauac

SEQ ID NO: 437717 - RNA, 19 nt, Artificial Sequence
  Description of Artificial Sequence: Synthetic oligonucleotide
agggucucagaaaauagag

SEQ ID NO: 437718 - RNA, 19 nt, Artificial Sequence
  Description of Artificial Sequence: Synthetic oligonucleotide
gcuuauguuuccuuucuag

SEQ ID NO: 437719 - RNA, 19 nt, Artificial Sequence
  Description of Artificial Sequence: Synthetic oligonucleotide
aacgcacuaacugguacug

SEQ ID NO: 437720 - RNA, 19 nt, Artificial Sequence
  Description of Artificial Sequence: Synthetic oligonucleotide
agaccaugccucccaacac

SEQ ID NO: 437721 - RNA, 19 nt, Artificial Sequence
  Description of Artificial Sequence: Synthetic oligonucleotide
cuaugaaccauagcccugc

SEQ ID NO: 437722 - RNA, 19 nt, Artificial Sequence
  Description of Artificial Sequence: Synthetic oligonucleotide
cuuaaauggacagacccca

SEQ ID NO: 437723 - RNA, 19 nt, Artificial Sequence
  Description of Artificial Sequence: Synthetic oligonucleotide
ucguaggcacgacaggagc

SEQ ID NO: 437724 - RNA, 19 nt, Artificial Sequence
  Description of Artificial Sequence: Synthetic oligonucleotide
gcuauaacaagcuuagaaa

SEQ ID NO: 437725 - RNA, 19 nt, Artificial Sequence
  Description of Artificial Sequence: Synthetic oligonucleotide
uuccucggugaguauauug

SEQ ID NO: 437726 - RNA, 19 nt, Artificial Sequence
  Description of Artificial Sequence: Synthetic oligonucleotide
auugcuccuguucaauacu

SEQ ID NO: 437727 - RNA, 19 nt, Artificial Sequence
  Description of Artificial Sequence: Synthetic oligonucleotide
uauuccucggugaguauau

SEQ ID NO: 437728 - RNA, 19 nt, Artificial Sequence
  Description of Artificial Sequence: Synthetic oligonucleotide
aaguagagaggcccagccu

SEQ ID NO: 437729 - RNA, 19 nt, Artificial Sequence
  Description of Artificial Sequence: Synthetic oligonucleotide
ggauacaucacaccggauc

SEQ ID NO: 437730 - RNA, 19 nt, Artificial Sequence
  Description of Artificial Sequence: Synthetic oligonucleotide
ccucccaacacucagggcc

SEQ ID NO: 437731 - RNA, 19 nt, Artificial Sequence
  Description of Artificial Sequence: Synthetic oligonucleotide
uucuugagucuucuuguaa

SEQ ID NO: 437732 - RNA, 19 nt, Artificial Sequence
  Description of Artificial Sequence: Synthetic oligonucleotide
uccgauaauggcuggucac

SEQ ID NO: 437733 - RNA, 19 nt, Artificial Sequence
  Description of Artificial Sequence: Synthetic oligonucleotide
ggcauaucccauuaagaug

SEQ ID NO: 437734 - RNA, 19 nt, Artificial Sequence
  Description of Artificial Sequence: Synthetic oligonucleotide
uugaaaaguccaucacacu

SEQ ID NO: 437735 - RNA, 19 nt, Artificial Sequence
  Description of Artificial Sequence: Synthetic oligonucleotide
uguacaagacuguucucua

SEQ ID NO: 437736 - RNA, 19 nt, Artificial Sequence
  Description of Artificial Sequence: Synthetic oligonucleotide
gguucugcuuuucauuuag

SEQ ID NO: 437737 - RNA, 19 nt, Artificial Sequence
  Description of Artificial Sequence: Synthetic oligonucleotide
cucagacguuuucacauag

SEQ ID NO: 437738 - RNA, 19 nt, Artificial Sequence
  Description of Artificial Sequence: Synthetic oligonucleotide
ggaacauugcuccuguuca

SEQ ID NO: 437739 - RNA, 19 nt, Artificial Sequence
  Description of Artificial Sequence: Synthetic oligonucleotide
gacaauuauuaccccugac

SEQ ID NO: 437740 - RNA, 19 nt, Artificial Sequence
  Description of Artificial Sequence: Synthetic oligonucleotide
gguaugacugucuucaaaa

SEQ ID NO: 437741 - RNA, 19 nt, Artificial Sequence
  Description of Artificial Sequence: Synthetic oligonucleotide
gguaaaacucuacauagua

SEQ ID NO: 437742 - RNA, 19 nt, Artificial Sequence
  Description of Artificial Sequence: Synthetic oligonucleotide
uuaugguccccacucgguc

SEQ ID NO: 437743 - RNA, 19 nt, Artificial Sequence
  Description of Artificial Sequence: Synthetic oligonucleotide
ugguugcucugucaugcag

SEQ ID NO: 437744 - RNA, 19 nt, Artificial Sequence
  Description of Artificial Sequence: Synthetic oligonucleotide
acacuuaaauggacagacc

SEQ ID NO: 437745 - RNA, 19 nt, Artificial Sequence
  Description of Artificial Sequence: Synthetic oligonucleotide
ugauaucuuggcuggcgga

SEQ ID NO: 437746 - RNA, 19 nt, Artificial Sequence
  Description of Artificial Sequence: Synthetic oligonucleotide
cacagugccucucuuuagc

SEQ ID NO: 437747 - RNA, 19 nt, Artificial Sequence
  Description of Artificial Sequence: Synthetic oligonucleotide
gacaaaguauuugcccugc

SEQ ID NO: 437748 - RNA, 19 nt, Artificial Sequence
  Description of Artificial Sequence: Synthetic oligonucleotide
cuaaggguauccaaagaaa

SEQ ID NO: 437749 - RNA, 19 nt, Artificial Sequence
  Description of Artificial Sequence: Synthetic oligonucleotide
ugcacaccaggagauagug

SEQ ID NO: 437750 - RNA, 19 nt, Artificial Sequence
  Description of Artificial Sequence: Synthetic oligonucleotide
acucauuuaagaacccuca

SEQ ID NO: 437751 - RNA, 19 nt, Artificial Sequence
  Description of Artificial Sequence: Synthetic oligonucleotide
aguugcuuauguuuccuuu

SEQ ID NO: 437752 - RNA, 19 nt, Artificial Sequence
  Description of Artificial Sequence: Synthetic oligonucleotide
aguauucuaaggguaucca

SEQ ID NO: 437753 - RNA, 19 nt, Artificial Sequence
  Description of Artificial Sequence: Synthetic oligonucleotide
uuauuaccccugacaauuc

SEQ ID NO: 437754 - RNA, 19 nt, Artificial Sequence
  Description of Artificial Sequence: Synthetic oligonucleotide
uaaaacgcacuaacuggua

SEQ ID NO: 437755 - RNA, 19 nt, Artificial Sequence
  Description of Artificial Sequence: Synthetic oligonucleotide
caucuaugaacuuuagugu

SEQ ID NO: 437756 - RNA, 19 nt, Artificial Sequence
  Description of Artificial Sequence: Synthetic oligonucleotide
aguacucauaacucauuua

SEQ ID NO: 437757 - RNA, 19 nt, Artificial Sequence
  Description of Artificial Sequence: Synthetic oligonucleotide
cagaguugcagcugugaug

SEQ ID NO: 437758 - RNA, 19 nt, Artificial Sequence
  Description of Artificial Sequence: Synthetic oligonucleotide
gcggaguccauauucagug

SEQ ID NO: 437759 - RNA, 19 nt, Artificial Sequence
  Description of Artificial Sequence: Synthetic oligonucleotide
uagauggguaugacugucu

SEQ ID NO: 437760 - RNA, 19 nt, Artificial Sequence
  Description of Artificial Sequence: Synthetic oligonucleotide
gagcccaugguggacaaug

SEQ ID NO: 437761 - RNA, 19 nt, Artificial Sequence
  Description of Artificial Sequence: Synthetic oligonucleotide
uccucgagccccuccaccc

SEQ ID NO: 437762 - RNA, 19 nt, Artificial Sequence
  Description of Artificial Sequence: Synthetic oligonucleotide
auacaucagugaccugcac

SEQ ID NO: 437763 - RNA, 19 nt, Artificial Sequence
  Description of Artificial Sequence: Synthetic oligonucleotide
cauuaagaugccaaagacu

SEQ ID NO: 437764 - RNA, 19 nt, Artificial Sequence
  Description of Artificial Sequence: Synthetic oligonucleotide
augaaccauagcccugcuc

SEQ ID NO: 437765 - RNA, 19 nt, Artificial Sequence
  Description of Artificial Sequence: Synthetic oligonucleotide
aagcuuagaaaggggcaug

SEQ ID NO: 437766 - RNA, 19 nt, Artificial Sequence
  Description of Artificial Sequence: Synthetic oligonucleotide
ugugugguacaguauucua

SEQ ID NO: 437767 - RNA, 19 nt, Artificial Sequence
  Description of Artificial Sequence: Synthetic oligonucleotide
uggcagaguaugagauggg

SEQ ID NO: 437768 - RNA, 19 nt, Artificial Sequence
  Description of Artificial Sequence: Synthetic oligonucleotide
ucggcacggagaucguagg

SEQ ID NO: 437769 - RNA, 19 nt, Artificial Sequence
  Description of Artificial Sequence: Synthetic oligonucleotide
uucaaaugacuugaagguu

SEQ ID NO: 437770 - RNA, 19 nt, Artificial Sequence
  Description of Artificial Sequence: Synthetic oligonucleotide
uucuaagaaugaagcaguu

SEQ ID NO: 437771 - RNA, 19 nt, Artificial Sequence
  Description of Artificial Sequence: Synthetic oligonucleotide
uauauugcuugaggagggc

SEQ ID NO: 437772 - RNA, 19 nt, Artificial Sequence
  Description of Artificial Sequence: Synthetic oligonucleotide
cuaaaguagagaggcccag

SEQ ID NO: 437773 - RNA, 19 nt, Artificial Sequence
  Description of Artificial Sequence: Synthetic oligonucleotide
uucucauuccacucuccaa

SEQ ID NO: 437774 - RNA, 19 nt, Artificial Sequence
  Description of Artificial Sequence: Synthetic oligonucleotide
ggcaauuggaggcaggaga

SEQ ID NO: 437775 - RNA, 19 nt, Artificial Sequence
  Description of Artificial Sequence: Synthetic oligonucleotide
uuaaauggacagaccccau

SEQ ID NO: 437776 - RNA, 19 nt, Artificial Sequence
  Description of Artificial Sequence: Synthetic oligonucleotide
cucauuuauagggauauua

SEQ ID NO: 437777 - RNA, 19 nt, Artificial Sequence
  Description of Artificial Sequence: Synthetic oligonucleotide
augauccgauaauggcugg

SEQ ID NO: 437778 - RNA, 19 nt, Artificial Sequence
  Description of Artificial Sequence: Synthetic oligonucleotide
cacaaccuuagacuuuaug

SEQ ID NO: 437779 - RNA, 19 nt, Artificial Sequence
  Description of Artificial Sequence: Synthetic oligonucleotide
acaagcuuagaaaggggca

SEQ ID NO: 437780 - RNA, 19 nt, Artificial Sequence
  Description of Artificial Sequence: Synthetic oligonucleotide
auaguguuagagaaauaaa

SEQ ID NO: 437781 - RNA, 19 nt, Artificial Sequence
  Description of Artificial Sequence: Synthetic oligonucleotide
ggcgucggcacggagaucg

SEQ ID NO: 437782 - RNA, 19 nt, Artificial Sequence
  Description of Artificial Sequence: Synthetic oligonucleotide
auccgauaauggcugguca

SEQ ID NO: 437783 - RNA, 19 nt, Artificial Sequence
  Description of Artificial Sequence: Synthetic oligonucleotide
caaccuuagacuuuauggu

SEQ ID NO: 437784 - RNA, 19 nt, Artificial Sequence
  Description of Artificial Sequence: Synthetic oligonucleotide
agcucgggaggccacaccu

SEQ ID NO: 437785 - RNA, 19 nt, Artificial Sequence
  Description of Artificial Sequence: Synthetic oligonucleotide
cacaccuuuguuaggagaa

SEQ ID NO: 437786 - RNA, 19 nt, Artificial Sequence
  Description of Artificial Sequence: Synthetic oligonucleotide
guauucuaaggguauccaa

SEQ ID NO: 437787 - RNA, 19 nt, Artificial Sequence
  Description of Artificial Sequence: Synthetic oligonucleotide
agaguaugagaugggccag

SEQ ID NO: 437788 - RNA, 19 nt, Artificial Sequence
  Description of Artificial Sequence: Synthetic oligonucleotide
uaucuuggcuggcggaguc

SEQ ID NO: 437789 - RNA, 19 nt, Artificial Sequence
  Description of Artificial Sequence: Synthetic oligonucleotide
guauucuguggcugauaag

SEQ ID NO: 437790 - RNA, 19 nt, Artificial Sequence
  Description of Artificial Sequence: Synthetic oligonucleotide
uuaucgcugccauucucuc

SEQ ID NO: 437791 - RNA, 19 nt, Artificial Sequence
  Description of Artificial Sequence: Synthetic oligonucleotide
gacuguucucuaauucaug

SEQ ID NO: 437792 - RNA, 19 nt, Artificial Sequence
  Description of Artificial Sequence: Synthetic oligonucleotide
ccuggcauugagaggaugc

SEQ ID NO: 437793 - RNA, 19 nt, Artificial Sequence
  Description of Artificial Sequence: Synthetic oligonucleotide
agcacaccuuuguuaggag

SEQ ID NO: 437794 - RNA, 19 nt, Artificial Sequence
  Description of Artificial Sequence: Synthetic oligonucleotide
cuucuguauucuguggcug

SEQ ID NO: 437795 - RNA, 19 nt, Artificial Sequence
  Description of Artificial Sequence: Synthetic oligonucleotide
gauccgauaauggcugguc

SEQ ID NO: 437796 - RNA, 19 nt, Artificial Sequence
  Description of Artificial Sequence: Synthetic oligonucleotide
agacguuuucacauaggca

SEQ ID NO: 437797 - RNA, 19 nt, Artificial Sequence
  Description of Artificial Sequence: Synthetic oligonucleotide
agggcauaucccauuaaga

SEQ ID NO: 437798 - RNA, 19 nt, Artificial Sequence
  Description of Artificial Sequence: Synthetic oligonucleotide
agauggguaugacugucuu

SEQ ID NO: 437799 - RNA, 19 nt, Artificial Sequence
  Description of Artificial Sequence: Synthetic oligonucleotide
guucuggcugaaccaaaac

SEQ ID NO: 437800 - RNA, 19 nt, Artificial Sequence
  Description of Artificial Sequence: Synthetic oligonucleotide
acuaugaaccauagcccug

SEQ ID NO: 437801 - RNA, 19 nt, Artificial Sequence
  Description of Artificial Sequence: Synthetic oligonucleotide
ucucagacguuuucacaua

SEQ ID NO: 437802 - RNA, 19 nt, Artificial Sequence
  Description of Artificial Sequence: Synthetic oligonucleotide
ugcuuauguuuccuuucua

SEQ ID NO: 437803 - RNA, 19 nt, Artificial Sequence
  Description of Artificial Sequence: Synthetic oligonucleotide
uaugaaccauagcccugcu

SEQ ID NO: 437804 - RNA, 19 nt, Artificial Sequence
  Description of Artificial Sequence: Synthetic oligonucleotide
gucggcacggagaucguag

SEQ ID NO: 437805 - RNA, 19 nt, Artificial Sequence
  Description of Artificial Sequence: Synthetic oligonucleotide
gacuauaccucugugggau

SEQ ID NO: 437806 - RNA, 19 nt, Artificial Sequence
  Description of Artificial Sequence: Synthetic oligonucleotide
cccuaaaguagagaggccc

SEQ ID NO: 437807 - RNA, 19 nt, Artificial Sequence
  Description of Artificial Sequence: Synthetic oligonucleotide
cacggagaucguaggcacg

SEQ ID NO: 437808 - RNA, 19 nt, Artificial Sequence
  Description of Artificial Sequence: Synthetic oligonucleotide
gggaacauugcuccuguuc

SEQ ID NO: 437809 - RNA, 19 nt, Artificial Sequence
  Description of Artificial Sequence: Synthetic oligonucleotide
cuagacagguucugcuuca

SEQ ID NO: 437810 - RNA, 19 nt, Artificial Sequence
  Description of Artificial Sequence: Synthetic oligonucleotide
agacuguucucuaauucau

SEQ ID NO: 437811 - RNA, 19 nt, Artificial Sequence
  Description of Artificial Sequence: Synthetic oligonucleotide
agguaaaacucuacauagu

SEQ ID NO: 437812 - RNA, 19 nt, Artificial Sequence
  Description of Artificial Sequence: Synthetic oligonucleotide
agcuuagaaaggggcauga

SEQ ID NO: 437813 - RNA, 19 nt, Artificial Sequence
  Description of Artificial Sequence: Synthetic oligonucleotide
aucguaggcacgacaggag

SEQ ID NO: 437814 - RNA, 19 nt, Artificial Sequence
  Description of Artificial Sequence: Synthetic oligonucleotide
ccuguuauucuuuguagga

SEQ ID NO: 437815 - RNA, 19 nt, Artificial Sequence
  Description of Artificial Sequence: Synthetic oligonucleotide
gggcaugauccgauaaugg

SEQ ID NO: 437816 - RNA, 19 nt, Artificial Sequence
  Description of Artificial Sequence: Synthetic oligonucleotide
ugauccgauaauggcuggu

SEQ ID NO: 437817 - RNA, 19 nt, Artificial Sequence
  Description of Artificial Sequence: Synthetic oligonucleotide
agccuugugccagagugga

SEQ ID NO: 437818 - RNA, 19 nt, Artificial Sequence
  Description of Artificial Sequence: Synthetic oligonucleotide
gcuggcggaguccauauuc

SEQ ID NO: 437819 - RNA, 19 nt, Artificial Sequence
  Description of Artificial Sequence: Synthetic oligonucleotide
ggaagggagguuaucgcug

SEQ ID NO: 437820 - RNA, 19 nt, Artificial Sequence
  Description of Artificial Sequence: Synthetic oligonucleotide
acggagaucguaggcacga

SEQ ID NO: 437821 - RNA, 19 nt, Artificial Sequence
  Description of Artificial Sequence: Synthetic oligonucleotide
cauccccuaucugaccugc

SEQ ID NO: 437822 - RNA, 19 nt, Artificial Sequence
  Description of Artificial Sequence: Synthetic oligonucleotide
uaaugaggcuaaaguuguu

SEQ ID NO: 437823 - RNA, 19 nt, Artificial Sequence
  Description of Artificial Sequence: Synthetic oligonucleotide
acaccggaucaaaccagac

SEQ ID NO: 437824 - RNA, 19 nt, Artificial Sequence
  Description of Artificial Sequence: Synthetic oligonucleotide
cuaucugaccugcagggcu

SEQ ID NO: 437825 - RNA, 19 nt, Artificial Sequence
  Description of Artificial Sequence: Synthetic oligonucleotide
aggaugcagaauguggcaa

SEQ ID NO: 437826 - RNA, 19 nt, Artificial Sequence
  Description of Artificial Sequence: Synthetic oligonucleotide
acauccccuaucugaccug

SEQ ID NO: 437827 - RNA, 19 nt, Artificial Sequence
  Description of Artificial Sequence: Synthetic oligonucleotide
aagcuauaacaagcuuaga

SEQ ID NO: 437828 - RNA, 19 nt, Artificial Sequence
  Description of Artificial Sequence: Synthetic oligonucleotide
aggcaggaacuaugaacca

SEQ ID NO: 437829 - RNA, 19 nt, Artificial Sequence
  Description of Artificial Sequence: Synthetic oligonucleotide
cuuagacuuuauggucccc

SEQ ID NO: 437830 - RNA, 19 nt, Artificial Sequence
  Description of Artificial Sequence: Synthetic oligonucleotide
auaaggcaauguaaggcuu

SEQ ID NO: 437831 - RNA, 19 nt, Artificial Sequence
  Description of Artificial Sequence: Synthetic oligonucleotide
guacaagacuguucucuaa

SEQ ID NO: 437832 - RNA, 19 nt, Artificial Sequence
  Description of Artificial Sequence: Synthetic oligonucleotide
ggcugauaagcuauaacaa

SEQ ID NO: 437833 - RNA, 19 nt, Artificial Sequence
  Description of Artificial Sequence: Synthetic oligonucleotide
guuaucgcugccauucucu

SEQ ID NO: 437834 - RNA, 19 nt, Artificial Sequence
  Description of Artificial Sequence: Synthetic oligonucleotide
cagagguaaaacucuacau

SEQ ID NO: 437835 - RNA, 19 nt, Artificial Sequence
  Description of Artificial Sequence: Synthetic oligonucleotide
caccggaucaaaccagaca

SEQ ID NO: 437836 - RNA, 19 nt, Artificial Sequence
  Description of Artificial Sequence: Synthetic oligonucleotide
cacaccggaucaaaccaga

SEQ ID NO: 437837 - RNA, 19 nt, Artificial Sequence
  Description of Artificial Sequence: Synthetic oligonucleotide
auaucuuggcuggcggagu

SEQ ID NO: 437838 - RNA, 19 nt, Artificial Sequence
  Description of Artificial Sequence: Synthetic oligonucleotide
ccccugacaauucuucccc

SEQ ID NO: 437839 - RNA, 19 nt, Artificial Sequence
  Description of Artificial Sequence: Synthetic oligonucleotide
agggaacuuagaaaucuuu

SEQ ID NO: 437840 - RNA, 19 nt, Artificial Sequence
  Description of Artificial Sequence: Synthetic oligonucleotide
caacacucagggcccuggc

SEQ ID NO: 437841 - RNA, 19 nt, Artificial Sequence
  Description of Artificial Sequence: Synthetic oligonucleotide
agaugggccagagguaaaa

SEQ ID NO: 437842 - RNA, 19 nt, Artificial Sequence
  Description of Artificial Sequence: Synthetic oligonucleotide
acgcacuaacugguacugg

SEQ ID NO: 437843 - RNA, 19 nt, Artificial Sequence
  Description of Artificial Sequence: Synthetic oligonucleotide
cagcacaccuuuguuagga

SEQ ID NO: 437844 - RNA, 19 nt, Artificial Sequence
  Description of Artificial Sequence: Synthetic oligonucleotide
gcugacaauuauuaccccu

SEQ ID NO: 437845 - RNA, 19 nt, Artificial Sequence
  Description of Artificial Sequence: Synthetic oligonucleotide
acguuuucacauaggcagu

SEQ ID NO: 437846 - RNA, 19 nt, Artificial Sequence
  Description of Artificial Sequence: Synthetic oligonucleotide
cuuuauugacaaguugccu

SEQ ID NO: 437847 - RNA, 19 nt, Artificial Sequence
  Description of Artificial Sequence: Synthetic oligonucleotide
ggagaucguaggcacgaca

SEQ ID NO: 437848 - RNA, 19 nt, Artificial Sequence
  Description of Artificial Sequence: Synthetic oligonucleotide
guauuccucggugaguaua

SEQ ID NO: 437849 - RNA, 19 nt, Artificial Sequence
  Description of Artificial Sequence: Synthetic oligonucleotide
gcacggagaucguaggcac

SEQ ID NO: 437850 - RNA, 19 nt, Artificial Sequence
  Description of Artificial Sequence: Synthetic oligonucleotide
agaccagcaaagggaacau

SEQ ID NO: 437851 - RNA, 19 nt, Artificial Sequence
  Description of Artificial Sequence: Synthetic oligonucleotide
ccuaaaguagagaggccca

SEQ ID NO: 437852 - RNA, 19 nt, Artificial Sequence
  Description of Artificial Sequence: Synthetic oligonucleotide
gguuaucgcugccauucuc

SEQ ID NO: 437853 - RNA, 19 nt, Artificial Sequence
  Description of Artificial Sequence: Synthetic oligonucleotide
gguugcucugucaugcaga

SEQ ID NO: 437854 - RNA, 19 nt, Artificial Sequence
  Description of Artificial Sequence: Synthetic oligonucleotide
gcaggacuauaccucugug

SEQ ID NO: 437855 - RNA, 19 nt, Artificial Sequence
  Description of Artificial Sequence: Synthetic oligonucleotide
ccgauaauggcuggucacc

SEQ ID NO: 437856 - RNA, 19 nt, Artificial Sequence
  Description of Artificial Sequence: Synthetic oligonucleotide
agugaccugcacuccugua

SEQ ID NO: 437857 - RNA, 19 nt, Artificial Sequence
  Description of Artificial Sequence: Synthetic oligonucleotide
cagcuccccuaaaguagag

SEQ ID NO: 437858 - RNA, 19 nt, Artificial Sequence
  Description of Artificial Sequence: Synthetic oligonucleotide
gcacaccuuuguuaggaga

SEQ ID NO: 437859 - RNA, 19 nt, Artificial Sequence
  Description of Artificial Sequence: Synthetic oligonucleotide
ggacuauaccucuguggga

SEQ ID NO: 437860 - RNA, 19 nt, Artificial Sequence
  Description of Artificial Sequence: Synthetic oligonucleotide
ggcacggagaucguaggca

SEQ ID NO: 437861 - RNA, 19 nt, Artificial Sequence
  Description of Artificial Sequence: Synthetic oligonucleotide
ucgagccccuccacccugu

SEQ ID NO: 437862 - RNA, 19 nt, Artificial Sequence
  Description of Artificial Sequence: Synthetic oligonucleotide
cucgagccccuccacccug

SEQ ID NO: 437863 - RNA, 19 nt, Artificial Sequence
  Description of Artificial Sequence: Synthetic oligonucleotide
augguccccacucggucuu

SEQ ID NO: 437864 - RNA, 19 nt, Artificial Sequence
  Description of Artificial Sequence: Synthetic oligonucleotide
cacccuguccacuuccugu

SEQ ID NO: 437865 - RNA, 19 nt, Artificial Sequence
  Description of Artificial Sequence: Synthetic oligonucleotide
gcuuccuacugauggcaga

SEQ ID NO: 437866 - RNA, 19 nt, Artificial Sequence
  Description of Artificial Sequence: Synthetic oligonucleotide
gcaggaacuaugaaccaua

SEQ ID NO: 437867 - RNA, 19 nt, Artificial Sequence
  Description of Artificial Sequence: Synthetic oligonucleotide
cucggucuucaaaugacuu

SEQ ID NO: 437868 - RNA, 19 nt, Artificial Sequence
  Description of Artificial Sequence: Synthetic oligonucleotide
agauaguguuagagaaaua

SEQ ID NO: 437869 - RNA, 19 nt, Artificial Sequence
  Description of Artificial Sequence: Synthetic oligonucleotide
ccaaagcaagguuguuuuc

SEQ ID NO: 437870 - RNA, 19 nt, Artificial Sequence
  Description of Artificial Sequence: Synthetic oligonucleotide
gaugcagaauguggcaauu

SEQ ID NO: 437871 - RNA, 19 nt, Artificial Sequence
  Description of Artificial Sequence: Synthetic oligonucleotide
caguagagaccugcacauc

SEQ ID NO: 437872 - RNA, 19 nt, Artificial Sequence
  Description of Artificial Sequence: Synthetic oligonucleotide
acaaugcagcagaugucuu

SEQ ID NO: 437873 - RNA, 19 nt, Artificial Sequence
  Description of Artificial Sequence: Synthetic oligonucleotide
ccccuaaaguagagaggcc

SEQ ID NO: 437874 - RNA, 19 nt, Artificial Sequence
  Description of Artificial Sequence: Synthetic oligonucleotide
acaccaggagauaguguua

SEQ ID NO: 437875 - RNA, 19 nt, Artificial Sequence
  Description of Artificial Sequence: Synthetic oligonucleotide
ccuugugccagaguggaaa

SEQ ID NO: 437876 - RNA, 19 nt, Artificial Sequence
  Description of Artificial Sequence: Synthetic oligonucleotide
gcuugauguaagcuugaau

SEQ ID NO: 437877 - RNA, 19 nt, Artificial Sequence
  Description of Artificial Sequence: Synthetic oligonucleotide
gcugccauucucucugcua

SEQ ID NO: 437878 - RNA, 19 nt, Artificial Sequence
  Description of Artificial Sequence: Synthetic oligonucleotide
ccacucggucuucaaauga

SEQ ID NO: 437879 - RNA, 19 nt, Artificial Sequence
  Description of Artificial Sequence: Synthetic oligonucleotide
acucuacauaguacucaua

SEQ ID NO: 437880 - RNA, 19 nt, Artificial Sequence
  Description of Artificial Sequence: Synthetic oligonucleotide
agggaacauugcuccuguu

SEQ ID NO: 437881 - RNA, 19 nt, Artificial Sequence
  Description of Artificial Sequence: Synthetic oligonucleotide
ggaugcagaauguggcaau

SEQ ID NO: 437882 - RNA, 19 nt, Artificial Sequence
  Description of Artificial Sequence: Synthetic oligonucleotide
ggcaggagaagggaacuua

SEQ ID NO: 437883 - RNA, 19 nt, Artificial Sequence
  Description of Artificial Sequence: Synthetic oligonucleotide
gaccuggcgcagagugaug

SEQ ID NO: 437884 - RNA, 19 nt, Artificial Sequence
  Description of Artificial Sequence: Synthetic oligonucleotide
gcuggcgucggcacggaga

SEQ ID NO: 437885 - RNA, 19 nt, Artificial Sequence
  Description of Artificial Sequence: Synthetic oligonucleotide
aggauacaucacaccggau

SEQ ID NO: 437886 - RNA, 19 nt, Artificial Sequence
  Description of Artificial Sequence: Synthetic oligonucleotide
cagagcccaugguggacaa

SEQ ID NO: 437887 - RNA, 19 nt, Artificial Sequence
  Description of Artificial Sequence: Synthetic oligonucleotide
cuguauucuguggcugaua

SEQ ID NO: 437888 - RNA, 19 nt, Artificial Sequence
  Description of Artificial Sequence: Synthetic oligonucleotide
ccuguucaauacuccucga

SEQ ID NO: 437889 - RNA, 19 nt, Artificial Sequence
  Description of Artificial Sequence: Synthetic oligonucleotide
cucugcuacccacaaccuu

SEQ ID NO: 437890 - RNA, 19 nt, Artificial Sequence
  Description of Artificial Sequence: Synthetic oligonucleotide
cagcuccuagacagguucu

SEQ ID NO: 437891 - RNA, 19 nt, Artificial Sequence
  Description of Artificial Sequence: Synthetic oligonucleotide
ggcaggaacuaugaaccau

SEQ ID NO: 437892 - RNA, 19 nt, Artificial Sequence
  Description of Artificial Sequence: Synthetic oligonucleotide
uagcuggcgucggcacgga

SEQ ID NO: 437893 - RNA, 19 nt, Artificial Sequence
  Description of Artificial Sequence: Synthetic oligonucleotide
ggcggaguccauauucagu

SEQ ID NO: 437894 - RNA, 19 nt, Artificial Sequence
  Description of Artificial Sequence: Synthetic oligonucleotide
cagugaccugcacuccugu

SEQ ID NO: 437895 - RNA, 19 nt, Artificial Sequence
  Description of Artificial Sequence: Synthetic oligonucleotide
ccucggugaguauauugcu

SEQ ID NO: 437896 - RNA, 19 nt, Artificial Sequence
  Description of Artificial Sequence: Synthetic oligonucleotide
cccucauuuauagggauau

SEQ ID NO: 437897 - RNA, 19 nt, Artificial Sequence
  Description of Artificial Sequence: Synthetic oligonucleotide
gcucgggaggccacaccug

SEQ ID NO: 437898 - RNA, 19 nt, Artificial Sequence
  Description of Artificial Sequence: Synthetic oligonucleotide
ugguccccacucggucuuc

SEQ ID NO: 437899 - RNA, 19 nt, Artificial Sequence
  Description of Artificial Sequence: Synthetic oligonucleotide
ccaugccucccaacacuca

SEQ ID NO: 437900 - RNA, 19 nt, Artificial Sequence
  Description of Artificial Sequence: Synthetic oligonucleotide
cuggcgcagagugaugauu

SEQ ID NO: 437901 - RNA, 19 nt, Artificial Sequence
  Description of Artificial Sequence: Synthetic oligonucleotide
gcuuugugugguacaguau

SEQ ID NO: 437902 - RNA, 19 nt, Artificial Sequence
  Description of Artificial Sequence: Synthetic oligonucleotide
ggagguuaucgcugccauu

SEQ ID NO: 437903 - RNA, 19 nt, Artificial Sequence
  Description of Artificial Sequence: Synthetic oligonucleotide
cguuuucacauaggcagua

SEQ ID NO: 437904 - RNA, 19 nt, Artificial Sequence
  Description of Artificial Sequence: Synthetic oligonucleotide
uggcgucggcacggagauc

SEQ ID NO: 437905 - RNA, 19 nt, Artificial Sequence
  Description of Artificial Sequence: Synthetic oligonucleotide
cccugcuaagagccacuaa

SEQ ID NO: 437906 - RNA, 19 nt, Artificial Sequence
  Description of Artificial Sequence: Synthetic oligonucleotide
cggaucaaaccagacacuu

SEQ ID NO: 437907 - RNA, 19 nt, Artificial Sequence
  Description of Artificial Sequence: Synthetic oligonucleotide
cggagaucguaggcacgac

SEQ ID NO: 437908 - RNA, 19 nt, Artificial Sequence
  Description of Artificial Sequence: Synthetic oligonucleotide
gccuugugccagaguggaa

SEQ ID NO: 437909 - RNA, 19 nt, Artificial Sequence
  Description of Artificial Sequence: Synthetic oligonucleotide
ccucgagccccuccacccu

SEQ ID NO: 437910 - RNA, 19 nt, Artificial Sequence
  Description of Artificial Sequence: Synthetic oligonucleotide
ccucauuuauagggauauu

SEQ ID NO: 437911 - RNA, 19 nt, Artificial Sequence
  Description of Artificial Sequence: Synthetic oligonucleotide
gcgucggcacggagaucgu

SEQ ID NO: 437912 - RNA, 19 nt, Artificial Sequence
  Description of Artificial Sequence: Synthetic oligonucleotide
agcauauuacguuacaacc

SEQ ID NO: 437913 - RNA, 19 nt, Artificial Sequence
  Description of Artificial Sequence: Synthetic oligonucleotide
uaucaaaaguaauaggugg

SEQ ID NO: 437914 - RNA, 19 nt, Artificial Sequence
  Description of Artificial Sequence: Synthetic oligonucleotide
aaaagcaugagcuaacugu

SEQ ID NO: 437915 - RNA, 19 nt, Artificial Sequence
  Description of Artificial Sequence: Synthetic oligonucleotide
uuuaccuuaaccagagagg

SEQ ID NO: 437916 - RNA, 19 nt, Artificial Sequence
  Description of Artificial Sequence: Synthetic oligonucleotide
accaaagucggauauaagg

SEQ ID NO: 437917 - RNA, 19 nt, Artificial Sequence
  Description of Artificial Sequence: Synthetic oligonucleotide
ugugguuacacaauaagcu

SEQ ID NO: 437918 - RNA, 19 nt, Artificial Sequence
  Description of Artificial Sequence: Synthetic oligonucleotide
aacuuaucgggaccgaaac

SEQ ID NO: 437919 - RNA, 19 nt, Artificial Sequence
  Description of Artificial Sequence: Synthetic oligonucleotide
gauacauucuaccaaaguc

SEQ ID NO: 437920 - RNA, 19 nt, Artificial Sequence
  Description of Artificial Sequence: Synthetic oligonucleotide
cuuaaagggaaccagugcc

SEQ ID NO: 437921 - RNA, 19 nt, Artificial Sequence
  Description of Artificial Sequence: Synthetic oligonucleotide
uuuuggagaacaucuaaag

SEQ ID NO: 437922 - RNA, 19 nt, Artificial Sequence
  Description of Artificial Sequence: Synthetic oligonucleotide
cuauaugaauuacugaacc

SEQ ID NO: 437923 - RNA, 19 nt, Artificial Sequence
  Description of Artificial Sequence: Synthetic oligonucleotide
aauucuauaccaggcauuc

SEQ ID NO: 437924 - RNA, 19 nt, Artificial Sequence
  Description of Artificial Sequence: Synthetic oligonucleotide
uaucccuauguuuaaaucc

SEQ ID NO: 437925 - RNA, 19 nt, Artificial Sequence
  Description of Artificial Sequence: Synthetic oligonucleotide
aagugaaucaaugagagua

SEQ ID NO: 437926 - RNA, 19 nt, Artificial Sequence
  Description of Artificial Sequence: Synthetic oligonucleotide
uccacuuagccuuucaucc

SEQ ID NO: 437927 - RNA, 19 nt, Artificial Sequence
  Description of Artificial Sequence: Synthetic oligonucleotide
acgagaacucgacaaaugc

SEQ ID NO: 437928 - RNA, 19 nt, Artificial Sequence
  Description of Artificial Sequence: Synthetic oligonucleotide
cauuacaaggcucugauuc

SEQ ID NO: 437929 - RNA, 19 nt, Artificial Sequence
  Description of Artificial Sequence: Synthetic oligonucleotide
ugugugguuacacaauaag

SEQ ID NO: 437930 - RNA, 19 nt, Artificial Sequence
  Description of Artificial Sequence: Synthetic oligonucleotide
auacauucuaccaaagucg

SEQ ID NO: 437931 - RNA, 19 nt, Artificial Sequence
  Description of Artificial Sequence: Synthetic oligonucleotide
acaauaagcuuaucugccc

SEQ ID NO: 437932 - RNA, 19 nt, Artificial Sequence
  Description of Artificial Sequence: Synthetic oligonucleotide
augagcacgugauacauuc

SEQ ID NO: 437933 - RNA, 19 nt, Artificial Sequence
  Description of Artificial Sequence: Synthetic oligonucleotide
aaauacacggcuugagucu

SEQ ID NO: 437934 - RNA, 19 nt, Artificial Sequence
  Description of Artificial Sequence: Synthetic oligonucleotide
ucggauauaaggcaauuac

SEQ ID NO: 437935 - RNA, 19 nt, Artificial Sequence
  Description of Artificial Sequence: Synthetic oligonucleotide
uuaucugccccauaagaag

SEQ ID NO: 437936 - RNA, 19 nt, Artificial Sequence
  Description of Artificial Sequence: Synthetic oligonucleotide
ugagaccucuuuaagagca

SEQ ID NO: 437937 - RNA, 19 nt, Artificial Sequence
  Description of Artificial Sequence: Synthetic oligonucleotide
gauaauauggaauguuaca

SEQ ID NO: 437938 - RNA, 19 nt, Artificial Sequence
  Description of Artificial Sequence: Synthetic oligonucleotide
ucuauaugaauuacugaac

SEQ ID NO: 437939 - RNA, 19 nt, Artificial Sequence
  Description of Artificial Sequence: Synthetic oligonucleotide
ugcuaucaccauuacaagg

SEQ ID NO: 437940 - RNA, 19 nt, Artificial Sequence
  Description of Artificial Sequence: Synthetic oligonucleotide
aaccaauucuauaccaggc

SEQ ID NO: 437941 - RNA, 19 nt, Artificial Sequence
  Description of Artificial Sequence: Synthetic oligonucleotide
gauaagauuggcguauggg

SEQ ID NO: 437942 - RNA, 19 nt, Artificial Sequence
  Description of Artificial Sequence: Synthetic oligonucleotide
auaagauuggcguauggga

SEQ ID NO: 437943 - RNA, 19 nt, Artificial Sequence
  Description of Artificial Sequence: Synthetic oligonucleotide
gauauaaggcaauuaccug

SEQ ID NO: 437944 - RNA, 19 nt, Artificial Sequence
  Description of Artificial Sequence: Synthetic oligonucleotide
uggagaacaucuaaagcug

SEQ ID NO: 437945 - RNA, 19 nt, Artificial Sequence
  Description of Artificial Sequence: Synthetic oligonucleotide
uuaccuuaaccagagaggc

SEQ ID NO: 437946 - RNA, 19 nt, Artificial Sequence
  Description of Artificial Sequence: Synthetic oligonucleotide
agcagauccuaacaccugc

SEQ ID NO: 437947 - RNA, 19 nt, Artificial Sequence
  Description of Artificial Sequence: Synthetic oligonucleotide
aggaauaaagguuagcuua

SEQ ID NO: 437948 - RNA, 19 nt, Artificial Sequence
  Description of Artificial Sequence: Synthetic oligonucleotide
cacaauaagcuuaucugcc

SEQ ID NO: 437949 - RNA, 19 nt, Artificial Sequence
  Description of Artificial Sequence: Synthetic oligonucleotide
aaaaguaauagguggcuuu

SEQ ID NO: 437950 - RNA, 19 nt, Artificial Sequence
  Description of Artificial Sequence: Synthetic oligonucleotide
aguacaauucuguacuuga

SEQ ID NO: 437951 - RNA, 19 nt, Artificial Sequence
  Description of Artificial Sequence: Synthetic oligonucleotide
agcuggguacauuaucugc

SEQ ID NO: 437952 - RNA, 19 nt, Artificial Sequence
  Description of Artificial Sequence: Synthetic oligonucleotide
augauuugggucaucgugc

SEQ ID NO: 437953 - RNA, 19 nt, Artificial Sequence
  Description of Artificial Sequence: Synthetic oligonucleotide
aauccuuaaagggaaccag

SEQ ID NO: 437954 - RNA, 19 nt, Artificial Sequence
  Description of Artificial Sequence: Synthetic oligonucleotide
gauagcacagucuaugaaa

SEQ ID NO: 437955 - RNA, 19 nt, Artificial Sequence
  Description of Artificial Sequence: Synthetic oligonucleotide
cuuaucgggaccgaaacag

SEQ ID NO: 437956 - RNA, 19 nt, Artificial Sequence
  Description of Artificial Sequence: Synthetic oligonucleotide
aauaugacucccaacuugu

SEQ ID NO: 437957 - RNA, 19 nt, Artificial Sequence
  Description of Artificial Sequence: Synthetic oligonucleotide
aacuuuaguacaauucugu

SEQ ID NO: 437958 - RNA, 19 nt, Artificial Sequence
  Description of Artificial Sequence: Synthetic oligonucleotide
gcuaauucuggccacaugc

SEQ ID NO: 437959 - RNA, 19 nt, Artificial Sequence
  Description of Artificial Sequence: Synthetic oligonucleotide
aaaguaauagguggcuuug

SEQ ID NO: 437960 - RNA, 19 nt, Artificial Sequence
  Description of Artificial Sequence: Synthetic oligonucleotide
aguauaucaguucccuuug

SEQ ID NO: 437961 - RNA, 19 nt, Artificial Sequence
  Description of Artificial Sequence: Synthetic oligonucleotide
augcaucugaacuuaucgg

SEQ ID NO: 437962 - RNA, 19 nt, Artificial Sequence
  Description of Artificial Sequence: Synthetic oligonucleotide
uuacguuacaaccuguguu

SEQ ID NO: 437963 - RNA, 19 nt, Artificial Sequence
  Description of Artificial Sequence: Synthetic oligonucleotide
uagcuuaucaaaaguaaua

SEQ ID NO: 437964 - RNA, 19 nt, Artificial Sequence
  Description of Artificial Sequence: Synthetic oligonucleotide
agaugcuaccgccaguuuc

SEQ ID NO: 437965 - RNA, 19 nt, Artificial Sequence
  Description of Artificial Sequence: Synthetic oligonucleotide
agcuuuuaugugcugguag

SEQ ID NO: 437966 - RNA, 19 nt, Artificial Sequence
  Description of Artificial Sequence: Synthetic oligonucleotide
ugaagauaugguagcaggu

SEQ ID NO: 437967 - RNA, 19 nt, Artificial Sequence
  Description of Artificial Sequence: Synthetic oligonucleotide
auuaccugugcccagguau

SEQ ID NO: 437968 - RNA, 19 nt, Artificial Sequence
  Description of Artificial Sequence: Synthetic oligonucleotide
uuguguaagucauccaugu

SEQ ID NO: 437969 - RNA, 19 nt, Artificial Sequence
  Description of Artificial Sequence: Synthetic oligonucleotide
ucgacaaaugccaguaacu

SEQ ID NO: 437970 - RNA, 19 nt, Artificial Sequence
  Description of Artificial Sequence: Synthetic oligonucleotide
uaugacucccaacuugugu

SEQ ID NO: 437971 - RNA, 19 nt, Artificial Sequence
  Description of Artificial Sequence: Synthetic oligonucleotide
uuuacacgagaacucgaca

SEQ ID NO: 437972 - RNA, 19 nt, Artificial Sequence
  Description of Artificial Sequence: Synthetic oligonucleotide
aaagguuagcuuaucaaaa

SEQ ID NO: 437973 - RNA, 19 nt, Artificial Sequence
  Description of Artificial Sequence: Synthetic oligonucleotide
ucuggagguaugcuuuuag

SEQ ID NO: 437974 - RNA, 19 nt, Artificial Sequence
  Description of Artificial Sequence: Synthetic oligonucleotide
caauaugacucccaacuug

SEQ ID NO: 437975 - RNA, 19 nt, Artificial Sequence
  Description of Artificial Sequence: Synthetic oligonucleotide
aauguuacaguaccaccuu

SEQ ID NO: 437976 - RNA, 19 nt, Artificial Sequence
  Description of Artificial Sequence: Synthetic oligonucleotide
gauacuuuauccgugauau

SEQ ID NO: 437977 - RNA, 19 nt, Artificial Sequence
  Description of Artificial Sequence: Synthetic oligonucleotide
acugauagcacagucuaug

SEQ ID NO: 437978 - RNA, 19 nt, Artificial Sequence
  Description of Artificial Sequence: Synthetic oligonucleotide
guaaacuuguuagaacugc

SEQ ID NO: 437979 - RNA, 19 nt, Artificial Sequence
  Description of Artificial Sequence: Synthetic oligonucleotide
accgaaacagcacugugca

SEQ ID NO: 437980 - RNA, 19 nt, Artificial Sequence
  Description of Artificial Sequence: Synthetic oligonucleotide
aguauaagauggaaggaug

SEQ ID NO: 437981 - RNA, 19 nt, Artificial Sequence
  Description of Artificial Sequence: Synthetic oligonucleotide
agugaaucaaugagaguac

SEQ ID NO: 437982 - RNA, 19 nt, Artificial Sequence
  Description of Artificial Sequence: Synthetic oligonucleotide
ugaggagagaugcuaccgc

SEQ ID NO: 437983 - RNA, 19 nt, Artificial Sequence
  Description of Artificial Sequence: Synthetic oligonucleotide
caauaagcuuaucugcccc

SEQ ID NO: 437984 - RNA, 19 nt, Artificial Sequence
  Description of Artificial Sequence: Synthetic oligonucleotide
uaucgggaccgaaacagca

SEQ ID NO: 437985 - RNA, 19 nt, Artificial Sequence
  Description of Artificial Sequence: Synthetic oligonucleotide
acgacucuccguuuugaac

SEQ ID NO: 437986 - RNA, 19 nt, Artificial Sequence
  Description of Artificial Sequence: Synthetic oligonucleotide
cagcauauuacguuacaac

SEQ ID NO: 437987 - RNA, 19 nt, Artificial Sequence
  Description of Artificial Sequence: Synthetic oligonucleotide
gagaacucgacaaaugcca

SEQ ID NO: 437988 - RNA, 19 nt, Artificial Sequence
  Description of Artificial Sequence: Synthetic oligonucleotide
auuacguuacaaccugugu

SEQ ID NO: 437989 - RNA, 19 nt, Artificial Sequence
  Description of Artificial Sequence: Synthetic oligonucleotide
ccaaagucggauauaaggc

SEQ ID NO: 437990 - RNA, 19 nt, Artificial Sequence
  Description of Artificial Sequence: Synthetic oligonucleotide
ggcucuagggauaagauug

SEQ ID NO: 437991 - RNA, 19 nt, Artificial Sequence
  Description of Artificial Sequence: Synthetic oligonucleotide
acuaacaacggacguaaaa

SEQ ID NO: 437992 - RNA, 19 nt, Artificial Sequence
  Description of Artificial Sequence: Synthetic oligonucleotide
uacguuacaaccuguguuu

SEQ ID NO: 437993 - RNA, 19 nt, Artificial Sequence
  Description of Artificial Sequence: Synthetic oligonucleotide
uguagauaauauggaaugu

SEQ ID NO: 437994 - RNA, 19 nt, Artificial Sequence
  Description of Artificial Sequence: Synthetic oligonucleotide
uggcuaggaauaaagguua

SEQ ID NO: 437995 - RNA, 19 nt, Artificial Sequence
  Description of Artificial Sequence: Synthetic oligonucleotide
aagauuaucuggagguaug

SEQ ID NO: 437996 - RNA, 19 nt, Artificial Sequence
  Description of Artificial Sequence: Synthetic oligonucleotide
agguuuacacgagaacucg

SEQ ID NO: 437997 - RNA, 19 nt, Artificial Sequence
  Description of Artificial Sequence: Synthetic oligonucleotide
ucaucgugcuacaauguau

SEQ ID NO: 437998 - RNA, 19 nt, Artificial Sequence
  Description of Artificial Sequence: Synthetic oligonucleotide
caucgugcuacaauguauc

SEQ ID NO: 437999 - RNA, 19 nt, Artificial Sequence
  Description of Artificial Sequence: Synthetic oligonucleotide
uaucucagcauauuacguu

SEQ ID NO: 438000 - RNA, 19 nt, Artificial Sequence
  Description of Artificial Sequence: Synthetic oligonucleotide
uacaaccuguguuuccaag

SEQ ID NO: 438001 - RNA, 19 nt, Artificial Sequence
  Description of Artificial Sequence: Synthetic oligonucleotide
agucuaugaaaugccauug

SEQ ID NO: 438002 - RNA, 19 nt, Artificial Sequence
  Description of Artificial Sequence: Synthetic oligonucleotide
aaaucaccaacugaagaua

SEQ ID NO: 438003 - RNA, 19 nt, Artificial Sequence
  Description of Artificial Sequence: Synthetic oligonucleotide
ugagcuaacugugugguua

SEQ ID NO: 438004 - RNA, 19 nt, Artificial Sequence
  Description of Artificial Sequence: Synthetic oligonucleotide
ugauacuuuauccgugaua

SEQ ID NO: 438005 - RNA, 19 nt, Artificial Sequence
  Description of Artificial Sequence: Synthetic oligonucleotide
auucgugagauguagccuu

SEQ ID NO: 438006 - RNA, 19 nt, Artificial Sequence
  Description of Artificial Sequence: Synthetic oligonucleotide
uuaucgggaccgaaacagc

SEQ ID NO: 438007 - RNA, 19 nt, Artificial Sequence
  Description of Artificial Sequence: Synthetic oligonucleotide
agaaccaauucuauaccag

SEQ ID NO: 438008 - RNA, 19 nt, Artificial Sequence
  Description of Artificial Sequence: Synthetic oligonucleotide
ugauagcacagucuaugaa

SEQ ID NO: 438009 - RNA, 19 nt, Artificial Sequence
  Description of Artificial Sequence: Synthetic oligonucleotide
caaagucggauauaaggca

SEQ ID NO: 438010 - RNA, 19 nt, Artificial Sequence
  Description of Artificial Sequence: Synthetic oligonucleotide
aaagucggauauaaggcaa

SEQ ID NO: 438011 - RNA, 19 nt, Artificial Sequence
  Description of Artificial Sequence: Synthetic oligonucleotide
aaagggugcaaaacaccag

SEQ ID NO: 438012 - RNA, 19 nt, Artificial Sequence
  Description of Artificial Sequence: Synthetic oligonucleotide
uccuguaaacuuguuagaa

SEQ ID NO: 438013 - RNA, 19 nt, Artificial Sequence
  Description of Artificial Sequence: Synthetic oligonucleotide
ugaaauccuuaaagggaac

SEQ ID NO: 438014 - RNA, 19 nt, Artificial Sequence
  Description of Artificial Sequence: Synthetic oligonucleotide
ugcuacaauguaucucagc

SEQ ID NO: 438015 - RNA, 19 nt, Artificial Sequence
  Description of Artificial Sequence: Synthetic oligonucleotide
uauaagauggaaggaugaa

SEQ ID NO: 438016 - RNA, 19 nt, Artificial Sequence
  Description of Artificial Sequence: Synthetic oligonucleotide
cuuaucugccccauaagaa

SEQ ID NO: 438017 - RNA, 19 nt, Artificial Sequence
  Description of Artificial Sequence: Synthetic oligonucleotide
aacucgacaaaugccagua

SEQ ID NO: 438018 - RNA, 19 nt, Artificial Sequence
  Description of Artificial Sequence: Synthetic oligonucleotide
ucucagcauauuacguuac

SEQ ID NO: 438019 - RNA, 19 nt, Artificial Sequence
  Description of Artificial Sequence: Synthetic oligonucleotide
gaauguuacaguaccaccu

SEQ ID NO: 438020 - RNA, 19 nt, Artificial Sequence
  Description of Artificial Sequence: Synthetic oligonucleotide
uaguacaauucuguacuug

SEQ ID NO: 438021 - RNA, 19 nt, Artificial Sequence
  Description of Artificial Sequence: Synthetic oligonucleotide
agcgccauucgugagaugu

SEQ ID NO: 438022 - RNA, 19 nt, Artificial Sequence
  Description of Artificial Sequence: Synthetic oligonucleotide
ucacuaucccucccauugc

SEQ ID NO: 438023 - RNA, 19 nt, Artificial Sequence
  Description of Artificial Sequence: Synthetic oligonucleotide
ucgggaccgaaacagcacu

SEQ ID NO: 438024 - RNA, 19 nt, Artificial Sequence
  Description of Artificial Sequence: Synthetic oligonucleotide
acacaguauaucaguuccc

SEQ ID NO: 438025 - RNA, 19 nt, Artificial Sequence
  Description of Artificial Sequence: Synthetic oligonucleotide
ugaugucgagcucacuauc

SEQ ID NO: 438026 - RNA, 19 nt, Artificial Sequence
  Description of Artificial Sequence: Synthetic oligonucleotide
gcagcaacguuucaaaaca

SEQ ID NO: 438027 - RNA, 19 nt, Artificial Sequence
  Description of Artificial Sequence: Synthetic oligonucleotide
auuggcguaugggaguauc

SEQ ID NO: 438028 - RNA, 19 nt, Artificial Sequence
  Description of Artificial Sequence: Synthetic oligonucleotide
caaugagaguacugacugc

SEQ ID NO: 438029 - RNA, 19 nt, Artificial Sequence
  Description of Artificial Sequence: Synthetic oligonucleotide
guauaagauggaaggauga

SEQ ID NO: 438030 - RNA, 19 nt, Artificial Sequence
  Description of Artificial Sequence: Synthetic oligonucleotide
agggugcaaaacaccagcc

SEQ ID NO: 438031 - RNA, 19 nt, Artificial Sequence
  Description of Artificial Sequence: Synthetic oligonucleotide
auccugagaccucuuuaag

SEQ ID NO: 438032 - RNA, 19 nt, Artificial Sequence
  Description of Artificial Sequence: Synthetic oligonucleotide
acacuaacaacggacguaa

SEQ ID NO: 438033 - RNA, 19 nt, Artificial Sequence
  Description of Artificial Sequence: Synthetic oligonucleotide
gagguuuacacgagaacuc

SEQ ID NO: 438034 - RNA, 19 nt, Artificial Sequence
  Description of Artificial Sequence: Synthetic oligonucleotide
agguaugaugucgagcuca

SEQ ID NO: 438035 - RNA, 19 nt, Artificial Sequence
  Description of Artificial Sequence: Synthetic oligonucleotide
cagaagaagcaugcugucg

SEQ ID NO: 438036 - RNA, 19 nt, Artificial Sequence
  Description of Artificial Sequence: Synthetic oligonucleotide
guuuacacgagaacucgac

SEQ ID NO: 438037 - RNA, 19 nt, Artificial Sequence
  Description of Artificial Sequence: Synthetic oligonucleotide
agcacgugauacauucuac

SEQ ID NO: 438038 - RNA, 19 nt, Artificial Sequence
  Description of Artificial Sequence: Synthetic oligonucleotide
aguaacuaggucaaauaua

SEQ ID NO: 438039 - RNA, 19 nt, Artificial Sequence
  Description of Artificial Sequence: Synthetic oligonucleotide
cacgagaacucgacaaaug

SEQ ID NO: 438040 - RNA, 19 nt, Artificial Sequence
  Description of Artificial Sequence: Synthetic oligonucleotide
uggguacauuaucugcaug

SEQ ID NO: 438041 - RNA, 19 nt, Artificial Sequence
  Description of Artificial Sequence: Synthetic oligonucleotide
gcugaguuuucuuaaguga

SEQ ID NO: 438042 - RNA, 19 nt, Artificial Sequence
  Description of Artificial Sequence: Synthetic oligonucleotide
acuuaucgggaccgaaaca

SEQ ID NO: 438043 - RNA, 19 nt, Artificial Sequence
  Description of Artificial Sequence: Synthetic oligonucleotide
caagagugcuggcuaauuc

SEQ ID NO: 438044 - RNA, 19 nt, Artificial Sequence
  Description of Artificial Sequence: Synthetic oligonucleotide
uuacaccuuuaagaaacac

SEQ ID NO: 438045 - RNA, 19 nt, Artificial Sequence
  Description of Artificial Sequence: Synthetic oligonucleotide
ugggucaucgugcuacaau

SEQ ID NO: 438046 - RNA, 19 nt, Artificial Sequence
  Description of Artificial Sequence: Synthetic oligonucleotide
uuuauccgugauaucccua

SEQ ID NO: 438047 - RNA, 19 nt, Artificial Sequence
  Description of Artificial Sequence: Synthetic oligonucleotide
ggauauaaggcaauuaccu

SEQ ID NO: 438048 - RNA, 19 nt, Artificial Sequence
  Description of Artificial Sequence: Synthetic oligonucleotide
cugagagucuuaauaaugu

SEQ ID NO: 438049 - RNA, 19 nt, Artificial Sequence
  Description of Artificial Sequence: Synthetic oligonucleotide
gcuaccgccaguuuccaug

SEQ ID NO: 438050 - RNA, 19 nt, Artificial Sequence
  Description of Artificial Sequence: Synthetic oligonucleotide
aauacacggcuugagucua

SEQ ID NO: 438051 - RNA, 19 nt, Artificial Sequence
  Description of Artificial Sequence: Synthetic oligonucleotide
ggauaagauuggcguaugg

SEQ ID NO: 438052 - RNA, 19 nt, Artificial Sequence
  Description of Artificial Sequence: Synthetic oligonucleotide
agauaugguagcagguaug

SEQ ID NO: 438053 - RNA, 19 nt, Artificial Sequence
  Description of Artificial Sequence: Synthetic oligonucleotide
uuaguacaauucuguacuu

SEQ ID NO: 438054 - RNA, 19 nt, Artificial Sequence
  Description of Artificial Sequence: Synthetic oligonucleotide
aaggcucuagggauaagau

SEQ ID NO: 438055 - RNA, 19 nt, Artificial Sequence
  Description of Artificial Sequence: Synthetic oligonucleotide
acggcuugagucuauuauu

SEQ ID NO: 438056 - RNA, 19 nt, Artificial Sequence
  Description of Artificial Sequence: Synthetic oligonucleotide
guauggagccccuguugag

SEQ ID NO: 438057 - RNA, 19 nt, Artificial Sequence
  Description of Artificial Sequence: Synthetic oligonucleotide
aucgugcuacaauguaucu

SEQ ID NO: 438058 - RNA, 19 nt, Artificial Sequence
  Description of Artificial Sequence: Synthetic oligonucleotide
ggagagaugcuaccgccag

SEQ ID NO: 438059 - RNA, 19 nt, Artificial Sequence
  Description of Artificial Sequence: Synthetic oligonucleotide
aauuaccugugcccaggua

SEQ ID NO: 438060 - RNA, 19 nt, Artificial Sequence
  Description of Artificial Sequence: Synthetic oligonucleotide
gcuuaucugccccauaaga

SEQ ID NO: 438061 - RNA, 19 nt, Artificial Sequence
  Description of Artificial Sequence: Synthetic oligonucleotide
aaggagcguccuuccagcu

SEQ ID NO: 438062 - RNA, 19 nt, Artificial Sequence
  Description of Artificial Sequence: Synthetic oligonucleotide
auguuuaaauccacaagua

SEQ ID NO: 438063 - RNA, 19 nt, Artificial Sequence
  Description of Artificial Sequence: Synthetic oligonucleotide
agggauaagauuggcguau

SEQ ID NO: 438064 - RNA, 19 nt, Artificial Sequence
  Description of Artificial Sequence: Synthetic oligonucleotide
ugagcacgugauacauucu

SEQ ID NO: 438065 - RNA, 19 nt, Artificial Sequence
  Description of Artificial Sequence: Synthetic oligonucleotide
aucgggaccgaaacagcac

SEQ ID NO: 438066 - RNA, 19 nt, Artificial Sequence
  Description of Artificial Sequence: Synthetic oligonucleotide
cugauagcacagucuauga

SEQ ID NO: 438067 - RNA, 19 nt, Artificial Sequence
  Description of Artificial Sequence: Synthetic oligonucleotide
gacagcgccauucgugaga

SEQ ID NO: 438068 - RNA, 19 nt, Artificial Sequence
  Description of Artificial Sequence: Synthetic oligonucleotide
acguuacaaccuguguuuc

SEQ ID NO: 438069 - RNA, 19 nt, Artificial Sequence
  Description of Artificial Sequence: Synthetic oligonucleotide
cauccugagaccucuuuaa

SEQ ID NO: 438070 - RNA, 19 nt, Artificial Sequence
  Description of Artificial Sequence: Synthetic oligonucleotide
agagaugcuaccgccaguu

SEQ ID NO: 438071 - RNA, 19 nt, Artificial Sequence
  Description of Artificial Sequence: Synthetic oligonucleotide
cggauauaaggcaauuacc

SEQ ID NO: 438072 - RNA, 19 nt, Artificial Sequence
  Description of Artificial Sequence: Synthetic oligonucleotide
ucgugcuacaauguaucuc

SEQ ID NO: 438073 - RNA, 19 nt, Artificial Sequence
  Description of Artificial Sequence: Synthetic oligonucleotide
uagcagguaugaugucgag

SEQ ID NO: 438074 - RNA, 19 nt, Artificial Sequence
  Description of Artificial Sequence: Synthetic oligonucleotide
caaacggaugucaaucucu

SEQ ID NO: 438075 - RNA, 19 nt, Artificial Sequence
  Description of Artificial Sequence: Synthetic oligonucleotide
cagacagcgccauucguga

SEQ ID NO: 438076 - RNA, 19 nt, Artificial Sequence
  Description of Artificial Sequence: Synthetic oligonucleotide
aggacauccugagaccucu

SEQ ID NO: 438077 - RNA, 19 nt, Artificial Sequence
  Description of Artificial Sequence: Synthetic oligonucleotide
uucgugagauguagccuuc

SEQ ID NO: 438078 - RNA, 19 nt, Artificial Sequence
  Description of Artificial Sequence: Synthetic oligonucleotide
aggcaauuaccugugccca

SEQ ID NO: 438079 - RNA, 19 nt, Artificial Sequence
  Description of Artificial Sequence: Synthetic oligonucleotide
ucuaccaaagucggauaua

SEQ ID NO: 438080 - RNA, 19 nt, Artificial Sequence
  Description of Artificial Sequence: Synthetic oligonucleotide
guagcagguaugaugucga

SEQ ID NO: 438081 - RNA, 19 nt, Artificial Sequence
  Description of Artificial Sequence: Synthetic oligonucleotide
gacacuaacaacggacgua

SEQ ID NO: 438082 - RNA, 19 nt, Artificial Sequence
  Description of Artificial Sequence: Synthetic oligonucleotide
uuaaccagagaggcuuaaa

SEQ ID NO: 438083 - RNA, 19 nt, Artificial Sequence
  Description of Artificial Sequence: Synthetic oligonucleotide
gaacuuaucgggaccgaaa

SEQ ID NO: 438084 - RNA, 19 nt, Artificial Sequence
  Description of Artificial Sequence: Synthetic oligonucleotide
cgugcuacaauguaucuca

SEQ ID NO: 438085 - RNA, 19 nt, Artificial Sequence
  Description of Artificial Sequence: Synthetic oligonucleotide
ccuauguuuaaauccacaa

SEQ ID NO: 438086 - RNA, 19 nt, Artificial Sequence
  Description of Artificial Sequence: Synthetic oligonucleotide
cgagaacucgacaaaugcc

SEQ ID NO: 438087 - RNA, 19 nt, Artificial Sequence
  Description of Artificial Sequence: Synthetic oligonucleotide
ggucaaauauagcugggua

SEQ ID NO: 438088 - RNA, 19 nt, Artificial Sequence
  Description of Artificial Sequence: Synthetic oligonucleotide
aggagcguccuuccagcug

SEQ ID NO: 438089 - RNA, 19 nt, Artificial Sequence
  Description of Artificial Sequence: Synthetic oligonucleotide
ggguacauuaucugcaugu

SEQ ID NO: 438090 - RNA, 19 nt, Artificial Sequence
  Description of Artificial Sequence: Synthetic oligonucleotide
ugccgagaaugacuucagu

SEQ ID NO: 438091 - RNA, 19 nt, Artificial Sequence
  Description of Artificial Sequence: Synthetic oligonucleotide
cauucuaccaaagucggau

SEQ ID NO: 438092 - RNA, 19 nt, Artificial Sequence
  Description of Artificial Sequence: Synthetic oligonucleotide
gugcaauaugacucccaac

SEQ ID NO: 438093 - RNA, 19 nt, Artificial Sequence
  Description of Artificial Sequence: Synthetic oligonucleotide
acacgagaacucgacaaau

SEQ ID NO: 438094 - RNA, 19 nt, Artificial Sequence
  Description of Artificial Sequence: Synthetic oligonucleotide
cauccucuauguagcgaug

SEQ ID NO: 438095 - RNA, 19 nt, Artificial Sequence
  Description of Artificial Sequence: Synthetic oligonucleotide
agacagcgccauucgugag

SEQ ID NO: 438096 - RNA, 19 nt, Artificial Sequence
  Description of Artificial Sequence: Synthetic oligonucleotide
uggcguaugggaguaucuc

SEQ ID NO: 438097 - RNA, 19 nt, Artificial Sequence
  Description of Artificial Sequence: Synthetic oligonucleotide
ucacgacucuccguuuuga

SEQ ID NO: 438098 - RNA, 19 nt, Artificial Sequence
  Description of Artificial Sequence: Synthetic oligonucleotide
gugguuacacaauaagcuu

SEQ ID NO: 438099 - RNA, 19 nt, Artificial Sequence
  Description of Artificial Sequence: Synthetic oligonucleotide
aaggcuggcuaggaauaaa

SEQ ID NO: 438100 - RNA, 19 nt, Artificial Sequence
  Description of Artificial Sequence: Synthetic oligonucleotide
ggcaauuaccugugcccag

SEQ ID NO: 438101 - RNA, 19 nt, Artificial Sequence
  Description of Artificial Sequence: Synthetic oligonucleotide
cuuuauccgugauaucccu

SEQ ID NO: 438102 - RNA, 19 nt, Artificial Sequence
  Description of Artificial Sequence: Synthetic oligonucleotide
cucaaacggaugucaaucu

SEQ ID NO: 438103 - RNA, 19 nt, Artificial Sequence
  Description of Artificial Sequence: Synthetic oligonucleotide
ccacaaguaaauauaucaa

SEQ ID NO: 438104 - RNA, 19 nt, Artificial Sequence
  Description of Artificial Sequence: Synthetic oligonucleotide
guaucucagcauauuacgu

SEQ ID NO: 438105 - RNA, 19 nt, Artificial Sequence
  Description of Artificial Sequence: Synthetic oligonucleotide
ggaccgaaacagcacugug

SEQ ID NO: 438106 - RNA, 19 nt, Artificial Sequence
  Description of Artificial Sequence: Synthetic oligonucleotide
auaugacucccaacuugug

SEQ ID NO: 438107 - RNA, 19 nt, Artificial Sequence
  Description of Artificial Sequence: Synthetic oligonucleotide
acucgacaaaugccaguaa

SEQ ID NO: 438108 - RNA, 19 nt, Artificial Sequence
  Description of Artificial Sequence: Synthetic oligonucleotide
caugagcuaacuguguggu

SEQ ID NO: 438109 - RNA, 19 nt, Artificial Sequence
  Description of Artificial Sequence: Synthetic oligonucleotide
uaauguucuggaggacuuu

SEQ ID NO: 438110 - RNA, 19 nt, Artificial Sequence
  Description of Artificial Sequence: Synthetic oligonucleotide
caccuugcauaaaacuuua

SEQ ID NO: 438111 - RNA, 19 nt, Artificial Sequence
  Description of Artificial Sequence: Synthetic oligonucleotide
gcguaugggaguaucucug

SEQ ID NO: 438112 - RNA, 19 nt, Artificial Sequence
  Description of Artificial Sequence: Synthetic oligonucleotide
caggacauccugagaccuc

SEQ ID NO: 438113 - RNA, 19 nt, Artificial Sequence
  Description of Artificial Sequence: Synthetic oligonucleotide
cacaguauaucaguucccu

SEQ ID NO: 438114 - RNA, 19 nt, Artificial Sequence
  Description of Artificial Sequence: Synthetic oligonucleotide
gagccccuguugagcaugg

SEQ ID NO: 438115 - RNA, 19 nt, Artificial Sequence
  Description of Artificial Sequence: Synthetic oligonucleotide
cacugauaagcuggaccac

SEQ ID NO: 438116 - RNA, 19 nt, Artificial Sequence
  Description of Artificial Sequence: Synthetic oligonucleotide
uguagcgaugcaggacauc

SEQ ID NO: 438117 - RNA, 19 nt, Artificial Sequence
  Description of Artificial Sequence: Synthetic oligonucleotide
agucggauauaaggcaauu

SEQ ID NO: 438118 - RNA, 19 nt, Artificial Sequence
  Description of Artificial Sequence: Synthetic oligonucleotide
auaugguagcagguaugau

SEQ ID NO: 438119 - RNA, 19 nt, Artificial Sequence
  Description of Artificial Sequence: Synthetic oligonucleotide
gguaugaugucgagcucac

SEQ ID NO: 438120 - RNA, 19 nt, Artificial Sequence
  Description of Artificial Sequence: Synthetic oligonucleotide
acauucuaccaaagucgga

SEQ ID NO: 438121 - RNA, 19 nt, Artificial Sequence
  Description of Artificial Sequence: Synthetic oligonucleotide
ggcuaggaauaaagguuag

SEQ ID NO: 438122 - RNA, 19 nt, Artificial Sequence
  Description of Artificial Sequence: Synthetic oligonucleotide
gucggauauaaggcaauua

SEQ ID NO: 438123 - RNA, 19 nt, Artificial Sequence
  Description of Artificial Sequence: Synthetic oligonucleotide
gugaaucaaugagaguacu

SEQ ID NO: 438124 - RNA, 19 nt, Artificial Sequence
  Description of Artificial Sequence: Synthetic oligonucleotide
guauaucaguucccuuugu

SEQ ID NO: 438125 - RNA, 19 nt, Artificial Sequence
  Description of Artificial Sequence: Synthetic oligonucleotide
cuaucccucccauugcuau

SEQ ID NO: 438126 - RNA, 19 nt, Artificial Sequence
  Description of Artificial Sequence: Synthetic oligonucleotide
acacggcuugagucuauua

SEQ ID NO: 438127 - RNA, 19 nt, Artificial Sequence
  Description of Artificial Sequence: Synthetic oligonucleotide
gcuggcuaauucuggccac

SEQ ID NO: 438128 - RNA, 19 nt, Artificial Sequence
  Description of Artificial Sequence: Synthetic oligonucleotide
gauuugggucaucgugcua

SEQ ID NO: 438129 - RNA, 19 nt, Artificial Sequence
  Description of Artificial Sequence: Synthetic oligonucleotide
uaccgccaguuuccaugug

SEQ ID NO: 438130 - RNA, 19 nt, Artificial Sequence
  Description of Artificial Sequence: Synthetic oligonucleotide
ggaauaaagguuagcuuau

SEQ ID NO: 438131 - RNA, 19 nt, Artificial Sequence
  Description of Artificial Sequence: Synthetic oligonucleotide
gggauaagauuggcguaug

SEQ ID NO: 438132 - RNA, 19 nt, Artificial Sequence
  Description of Artificial Sequence: Synthetic oligonucleotide
cccuauguuuaaauccaca

SEQ ID NO: 438133 - RNA, 19 nt, Artificial Sequence
  Description of Artificial Sequence: Synthetic oligonucleotide
ggcguaugggaguaucucu

SEQ ID NO: 438134 - RNA, 19 nt, Artificial Sequence
  Description of Artificial Sequence: Synthetic oligonucleotide
ugacuucaguaaggagcgu

SEQ ID NO: 438135 - RNA, 19 nt, Artificial Sequence
  Description of Artificial Sequence: Synthetic oligonucleotide
cacgacucuccguuuugaa

SEQ ID NO: 438136 - RNA, 19 nt, Artificial Sequence
  Description of Artificial Sequence: Synthetic oligonucleotide
cuaccgccaguuuccaugu

SEQ ID NO: 438137 - RNA, 19 nt, Artificial Sequence
  Description of Artificial Sequence: Synthetic oligonucleotide
cagcccgauggaaaggacu

SEQ ID NO: 438138 - RNA, 19 nt, Artificial Sequence
  Description of Artificial Sequence: Synthetic oligonucleotide
ggacacuaacaacggacgu

SEQ ID NO: 438139 - RNA, 19 nt, Artificial Sequence
  Description of Artificial Sequence: Synthetic oligonucleotide
agcuaacugugugguuaca

SEQ ID NO: 438140 - RNA, 19 nt, Artificial Sequence
  Description of Artificial Sequence: Synthetic oligonucleotide
ccagguaauuacacuuuaa

SEQ ID NO: 438141 - RNA, 19 nt, Artificial Sequence
  Description of Artificial Sequence: Synthetic oligonucleotide
gaacccugagagucuuaau

SEQ ID NO: 438142 - RNA, 19 nt, Artificial Sequence
  Description of Artificial Sequence: Synthetic oligonucleotide
gccuccuuaagagcacaac

SEQ ID NO: 438143 - RNA, 19 nt, Artificial Sequence
  Description of Artificial Sequence: Synthetic oligonucleotide
ggaugagcacgugauacau

SEQ ID NO: 438144 - RNA, 19 nt, Artificial Sequence
  Description of Artificial Sequence: Synthetic oligonucleotide
caauuaccugugcccaggu

SEQ ID NO: 438145 - RNA, 19 nt, Artificial Sequence
  Description of Artificial Sequence: Synthetic oligonucleotide
cacuaacaacggacguaaa

SEQ ID NO: 438146 - RNA, 19 nt, Artificial Sequence
  Description of Artificial Sequence: Synthetic oligonucleotide
gaugagcacgugauacauu

SEQ ID NO: 438147 - RNA, 19 nt, Artificial Sequence
  Description of Artificial Sequence: Synthetic oligonucleotide
ccgauggaaaggacuuuga

SEQ ID NO: 438148 - RNA, 19 nt, Artificial Sequence
  Description of Artificial Sequence: Synthetic oligonucleotide
cacugauagcacagucuau

SEQ ID NO: 438149 - RNA, 19 nt, Artificial Sequence
  Description of Artificial Sequence: Synthetic oligonucleotide
cagauccuaacaccugcuu

SEQ ID NO: 438150 - RNA, 19 nt, Artificial Sequence
  Description of Artificial Sequence: Synthetic oligonucleotide
gagaugcuaccgccaguuu

SEQ ID NO: 438151 - RNA, 19 nt, Artificial Sequence
  Description of Artificial Sequence: Synthetic oligonucleotide
cgggaccgaaacagcacug

SEQ ID NO: 438152 - RNA, 19 nt, Artificial Sequence
  Description of Artificial Sequence: Synthetic oligonucleotide
guaugaugucgagcucacu

SEQ ID NO: 438153 - RNA, 19 nt, Artificial Sequence
  Description of Artificial Sequence: Synthetic oligonucleotide
gauuggcguaugggaguau

SEQ ID NO: 438154 - RNA, 19 nt, Artificial Sequence
  Description of Artificial Sequence: Synthetic oligonucleotide
ccgccaguuuccaugugcu

SEQ ID NO: 438155 - RNA, 19 nt, Artificial Sequence
  Description of Artificial Sequence: Synthetic oligonucleotide
aaauuugagguccaguugg

SEQ ID NO: 438156 - RNA, 19 nt, Artificial Sequence
  Description of Artificial Sequence: Synthetic oligonucleotide
aagcgauuaacaaagaggc

SEQ ID NO: 438157 - RNA, 19 nt, Artificial Sequence
  Description of Artificial Sequence: Synthetic oligonucleotide
auuuauauugcuuagguaa

SEQ ID NO: 438158 - RNA, 19 nt, Artificial Sequence
  Description of Artificial Sequence: Synthetic oligonucleotide
aaagcgauuaacaaagagg

SEQ ID NO: 438159 - RNA, 19 nt, Artificial Sequence
  Description of Artificial Sequence: Synthetic oligonucleotide
aguguuauagccaaacugc

SEQ ID NO: 438160 - RNA, 19 nt, Artificial Sequence
  Description of Artificial Sequence: Synthetic oligonucleotide
agaucugucaguuuggaag

SEQ ID NO: 438161 - RNA, 19 nt, Artificial Sequence
  Description of Artificial Sequence: Synthetic oligonucleotide
uuaacaaagaggcccacag

SEQ ID NO: 438162 - RNA, 19 nt, Artificial Sequence
  Description of Artificial Sequence: Synthetic oligonucleotide
gaagcgaucucaucgaagg

SEQ ID NO: 438163 - RNA, 19 nt, Artificial Sequence
  Description of Artificial Sequence: Synthetic oligonucleotide
aguauguugguguauuuac

SEQ ID NO: 438164 - RNA, 19 nt, Artificial Sequence
  Description of Artificial Sequence: Synthetic oligonucleotide
auaggggccacacaguugc

SEQ ID NO: 438165 - RNA, 19 nt, Artificial Sequence
  Description of Artificial Sequence: Synthetic oligonucleotide
ucauaguucgauuagugug

SEQ ID NO: 438166 - RNA, 19 nt, Artificial Sequence
  Description of Artificial Sequence: Synthetic oligonucleotide
gauacugagcagcagaggc

SEQ ID NO: 438167 - RNA, 19 nt, Artificial Sequence
  Description of Artificial Sequence: Synthetic oligonucleotide
aauucagugguugggaagg

SEQ ID NO: 438168 - RNA, 19 nt, Artificial Sequence
  Description of Artificial Sequence: Synthetic oligonucleotide
auuagcuuggugaagaagg

SEQ ID NO: 438169 - RNA, 19 nt, Artificial Sequence
  Description of Artificial Sequence: Synthetic oligonucleotide
auuaguguguccuugguca

SEQ ID NO: 438170 - RNA, 19 nt, Artificial Sequence
  Description of Artificial Sequence: Synthetic oligonucleotide
ugggcgaauccuaaaaugg

SEQ ID NO: 438171 - RNA, 19 nt, Artificial Sequence
  Description of Artificial Sequence: Synthetic oligonucleotide
cauacaugggcacaaagcc

SEQ ID NO: 438172 - RNA, 19 nt, Artificial Sequence
  Description of Artificial Sequence: Synthetic oligonucleotide
aacgacgaugcccagcugg

SEQ ID NO: 438173 - RNA, 19 nt, Artificial Sequence
  Description of Artificial Sequence: Synthetic oligonucleotide
gauauacuauaacuuagug

SEQ ID NO: 438174 - RNA, 19 nt, Artificial Sequence
  Description of Artificial Sequence: Synthetic oligonucleotide
ggaaagauuaauucagugg

SEQ ID NO: 438175 - RNA, 19 nt, Artificial Sequence
  Description of Artificial Sequence: Synthetic oligonucleotide
uaaaguuacaggaguaugu

SEQ ID NO: 438176 - RNA, 19 nt, Artificial Sequence
  Description of Artificial Sequence: Synthetic oligonucleotide
auauacuauaacuuagugu

SEQ ID NO: 438177 - RNA, 19 nt, Artificial Sequence
  Description of Artificial Sequence: Synthetic oligonucleotide
gaaagauuaauucaguggu

SEQ ID NO: 438178 - RNA, 19 nt, Artificial Sequence
  Description of Artificial Sequence: Synthetic oligonucleotide
auuugagcaacagucuugc

SEQ ID NO: 438179 - RNA, 19 nt, Artificial Sequence
  Description of Artificial Sequence: Synthetic oligonucleotide
aaggaaccaaucaugcccc

SEQ ID NO: 438180 - RNA, 19 nt, Artificial Sequence
  Description of Artificial Sequence: Synthetic oligonucleotide
ugcauugcccauaauggag

SEQ ID NO: 438181 - RNA, 19 nt, Artificial Sequence
  Description of Artificial Sequence: Synthetic oligonucleotide
gauuaauucagugguuggg

SEQ ID NO: 438182 - RNA, 19 nt, Artificial Sequence
  Description of Artificial Sequence: Synthetic oligonucleotide
gagacuagaaccuggcagc

SEQ ID NO: 438183 - RNA, 19 nt, Artificial Sequence
  Description of Artificial Sequence: Synthetic oligonucleotide
uauugcuuagguaaaguua

SEQ ID NO: 438184 - RNA, 19 nt, Artificial Sequence
  Description of Artificial Sequence: Synthetic oligonucleotide
ugugaagauaggagagugg

SEQ ID NO: 438185 - RNA, 19 nt, Artificial Sequence
  Description of Artificial Sequence: Synthetic oligonucleotide
uggaagaggucucaucuag

SEQ ID NO: 438186 - RNA, 19 nt, Artificial Sequence
  Description of Artificial Sequence: Synthetic oligonucleotide
agauuaauucagugguugg

SEQ ID NO: 438187 - RNA, 19 nt, Artificial Sequence
  Description of Artificial Sequence: Synthetic oligonucleotide
uugaguaauagaacacagc

SEQ ID NO: 438188 - RNA, 19 nt, Artificial Sequence
  Description of Artificial Sequence: Synthetic oligonucleotide
uguuauagccaaacugcag

SEQ ID NO: 438189 - RNA, 19 nt, Artificial Sequence
  Description of Artificial Sequence: Synthetic oligonucleotide
cagauauacuauaacuuag

SEQ ID NO: 438190 - RNA, 19 nt, Artificial Sequence
  Description of Artificial Sequence: Synthetic oligonucleotide
ugucuugucacuuuggcuu

SEQ ID NO: 438191 - RNA, 19 nt, Artificial Sequence
  Description of Artificial Sequence: Synthetic oligonucleotide
aguuccgccugccaaagcg

SEQ ID NO: 438192 - RNA, 19 nt, Artificial Sequence
  Description of Artificial Sequence: Synthetic oligonucleotide
uccagauauacuauaacuu

SEQ ID NO: 438193 - RNA, 19 nt, Artificial Sequence
  Description of Artificial Sequence: Synthetic oligonucleotide
gaaauuugagguccaguug

SEQ ID NO: 438194 - RNA, 19 nt, Artificial Sequence
  Description of Artificial Sequence: Synthetic oligonucleotide
agcccuacagauuagcuug

SEQ ID NO: 438195 - RNA, 19 nt, Artificial Sequence
  Description of Artificial Sequence: Synthetic oligonucleotide
gaugauacugagcagcaga

SEQ ID NO: 438196 - RNA, 19 nt, Artificial Sequence
  Description of Artificial Sequence: Synthetic oligonucleotide
uccgaggcccuucucaugg

SEQ ID NO: 438197 - RNA, 19 nt, Artificial Sequence
  Description of Artificial Sequence: Synthetic oligonucleotide
gaagaaggcaugugucugg

SEQ ID NO: 438198 - RNA, 19 nt, Artificial Sequence
  Description of Artificial Sequence: Synthetic oligonucleotide
uaguucauaguucgauuag

SEQ ID NO: 438199 - RNA, 19 nt, Artificial Sequence
  Description of Artificial Sequence: Synthetic oligonucleotide
aaguuacaggaguauguug

SEQ ID NO: 438200 - RNA, 19 nt, Artificial Sequence
  Description of Artificial Sequence: Synthetic oligonucleotide
uguguugacgauacccgag

SEQ ID NO: 438201 - RNA, 19 nt, Artificial Sequence
  Description of Artificial Sequence: Synthetic oligonucleotide
cucagauaggacauccagg

SEQ ID NO: 438202 - RNA, 19 nt, Artificial Sequence
  Description of Artificial Sequence: Synthetic oligonucleotide
uaauucagugguugggaag

SEQ ID NO: 438203 - RNA, 19 nt, Artificial Sequence
  Description of Artificial Sequence: Synthetic oligonucleotide
gauaggaaugggcgaaucc

SEQ ID NO: 438204 - RNA, 19 nt, Artificial Sequence
  Description of Artificial Sequence: Synthetic oligonucleotide
caguguuauagccaaacug

SEQ ID NO: 438205 - RNA, 19 nt, Artificial Sequence
  Description of Artificial Sequence: Synthetic oligonucleotide
agccauucaaggugaagac

SEQ ID NO: 438206 - RNA, 19 nt, Artificial Sequence
  Description of Artificial Sequence: Synthetic oligonucleotide
ugggcaauaaggaugccaa

SEQ ID NO: 438207 - RNA, 19 nt, Artificial Sequence
  Description of Artificial Sequence: Synthetic oligonucleotide
gaacaccugggcaauaagg

SEQ ID NO: 438208 - RNA, 19 nt, Artificial Sequence
  Description of Artificial Sequence: Synthetic oligonucleotide
uuagugucuguauuuaaua

SEQ ID NO: 438209 - RNA, 19 nt, Artificial Sequence
  Description of Artificial Sequence: Synthetic oligonucleotide
gaugccaacgacgaugccc

SEQ ID NO: 438210 - RNA, 19 nt, Artificial Sequence
  Description of Artificial Sequence: Synthetic oligonucleotide
aaugggcgaauccuaaaau

SEQ ID NO: 438211 - RNA, 19 nt, Artificial Sequence
  Description of Artificial Sequence: Synthetic oligonucleotide
aaagacuugcccaguuugg

SEQ ID NO: 438212 - RNA, 19 nt, Artificial Sequence
  Description of Artificial Sequence: Synthetic oligonucleotide
uacuauaacuuagugucug

SEQ ID NO: 438213 - RNA, 19 nt, Artificial Sequence
  Description of Artificial Sequence: Synthetic oligonucleotide
cauagguccagcccuacag

SEQ ID NO: 438214 - RNA, 19 nt, Artificial Sequence
  Description of Artificial Sequence: Synthetic oligonucleotide
guugaguaauagaacacag

SEQ ID NO: 438215 - RNA, 19 nt, Artificial Sequence
  Description of Artificial Sequence: Synthetic oligonucleotide
cucguugaguaauagaaca

SEQ ID NO: 438216 - RNA, 19 nt, Artificial Sequence
  Description of Artificial Sequence: Synthetic oligonucleotide
ucgauuaguguguccuugg

SEQ ID NO: 438217 - RNA, 19 nt, Artificial Sequence
  Description of Artificial Sequence: Synthetic oligonucleotide
auaacuuagugucuguauu

SEQ ID NO: 438218 - RNA, 19 nt, Artificial Sequence
  Description of Artificial Sequence: Synthetic oligonucleotide
gccagaagcgaucucaucg

SEQ ID NO: 438219 - RNA, 19 nt, Artificial Sequence
  Description of Artificial Sequence: Synthetic oligonucleotide
auaguucauaguucgauua

SEQ ID NO: 438220 - RNA, 19 nt, Artificial Sequence
  Description of Artificial Sequence: Synthetic oligonucleotide
acgaugcucagauaggaca

SEQ ID NO: 438221 - RNA, 19 nt, Artificial Sequence
  Description of Artificial Sequence: Synthetic oligonucleotide
ugcuuagguaaaguuacag

SEQ ID NO: 438222 - RNA, 19 nt, Artificial Sequence
  Description of Artificial Sequence: Synthetic oligonucleotide
aguucgauuaguguguccu

SEQ ID NO: 438223 - RNA, 19 nt, Artificial Sequence
  Description of Artificial Sequence: Synthetic oligonucleotide
augggcgaauccuaaaaug

SEQ ID NO: 438224 - RNA, 19 nt, Artificial Sequence
  Description of Artificial Sequence: Synthetic oligonucleotide
aacaccugggcaauaagga

SEQ ID NO: 438225 - RNA, 19 nt, Artificial Sequence
  Description of Artificial Sequence: Synthetic oligonucleotide
aagaggucucaucuagcug

SEQ ID NO: 438226 - RNA, 19 nt, Artificial Sequence
  Description of Artificial Sequence: Synthetic oligonucleotide
agcguggugaguguggugg

SEQ ID NO: 438227 - RNA, 19 nt, Artificial Sequence
  Description of Artificial Sequence: Synthetic oligonucleotide
uggagcccgaccccuaugg

SEQ ID NO: 438228 - RNA, 19 nt, Artificial Sequence
  Description of Artificial Sequence: Synthetic oligonucleotide
gguaaagccucauaguuca

SEQ ID NO: 438229 - RNA, 19 nt, Artificial Sequence
  Description of Artificial Sequence: Synthetic oligonucleotide
agcauugaugcccgacagc

SEQ ID NO: 438230 - RNA, 19 nt, Artificial Sequence
  Description of Artificial Sequence: Synthetic oligonucleotide
auuaauucagugguuggga

SEQ ID NO: 438231 - RNA, 19 nt, Artificial Sequence
  Description of Artificial Sequence: Synthetic oligonucleotide
ucguugaguaauagaacac

SEQ ID NO: 438232 - RNA, 19 nt, Artificial Sequence
  Description of Artificial Sequence: Synthetic oligonucleotide
gcuuagguaaaguuacagg

SEQ ID NO: 438233 - RNA, 19 nt, Artificial Sequence
  Description of Artificial Sequence: Synthetic oligonucleotide
uuaauucagugguugggaa

SEQ ID NO: 438234 - RNA, 19 nt, Artificial Sequence
  Description of Artificial Sequence: Synthetic oligonucleotide
gauuugagcaacagucuug

SEQ ID NO: 438235 - RNA, 19 nt, Artificial Sequence
  Description of Artificial Sequence: Synthetic oligonucleotide
gccaaagcgauuaacaaag

SEQ ID NO: 438236 - RNA, 19 nt, Artificial Sequence
  Description of Artificial Sequence: Synthetic oligonucleotide
guugacgauacccgagccg

SEQ ID NO: 438237 - RNA, 19 nt, Artificial Sequence
  Description of Artificial Sequence: Synthetic oligonucleotide
caggaugcacuguagcagg

SEQ ID NO: 438238 - RNA, 19 nt, Artificial Sequence
  Description of Artificial Sequence: Synthetic oligonucleotide
uugacgauacccgagccga

SEQ ID NO: 438239 - RNA, 19 nt, Artificial Sequence
  Description of Artificial Sequence: Synthetic oligonucleotide
ucucgggucacaucggcug

SEQ ID NO: 438240 - RNA, 19 nt, Artificial Sequence
  Description of Artificial Sequence: Synthetic oligonucleotide
aguuuggagaagcccauga

SEQ ID NO: 438241 - RNA, 19 nt, Artificial Sequence
  Description of Artificial Sequence: Synthetic oligonucleotide
cucguugcgauugaugagc

SEQ ID NO: 438242 - RNA, 19 nt, Artificial Sequence
  Description of Artificial Sequence: Synthetic oligonucleotide
gcgauuaacaaagaggccc

SEQ ID NO: 438243 - RNA, 19 nt, Artificial Sequence
  Description of Artificial Sequence: Synthetic oligonucleotide
ugaacagauuugagcaaca

SEQ ID NO: 438244 - RNA, 19 nt, Artificial Sequence
  Description of Artificial Sequence: Synthetic oligonucleotide
aaugggcucuccauagcgg

SEQ ID NO: 438245 - RNA, 19 nt, Artificial Sequence
  Description of Artificial Sequence: Synthetic oligonucleotide
agcgaucucaucgaagguc

SEQ ID NO: 438246 - RNA, 19 nt, Artificial Sequence
  Description of Artificial Sequence: Synthetic oligonucleotide
ggcaauaaggaugccaacg

SEQ ID NO: 438247 - RNA, 19 nt, Artificial Sequence
  Description of Artificial Sequence: Synthetic oligonucleotide
auauugcuuagguaaaguu

SEQ ID NO: 438248 - RNA, 19 nt, Artificial Sequence
  Description of Artificial Sequence: Synthetic oligonucleotide
agccucauaguucauaguu

SEQ ID NO: 438249 - RNA, 19 nt, Artificial Sequence
  Description of Artificial Sequence: Synthetic oligonucleotide
uugcgauugaugagcagga

SEQ ID NO: 438250 - RNA, 19 nt, Artificial Sequence
  Description of Artificial Sequence: Synthetic oligonucleotide
uguugacgauacccgagcc

SEQ ID NO: 438251 - RNA, 19 nt, Artificial Sequence
  Description of Artificial Sequence: Synthetic oligonucleotide
guaaaguuacaggaguaug

SEQ ID NO: 438252 - RNA, 19 nt, Artificial Sequence
  Description of Artificial Sequence: Synthetic oligonucleotide
gaagauggccaccgagagg

SEQ ID NO: 438253 - RNA, 19 nt, Artificial Sequence
  Description of Artificial Sequence: Synthetic oligonucleotide
auaggagaguggcugauaa

SEQ ID NO: 438254 - RNA, 19 nt, Artificial Sequence
  Description of Artificial Sequence: Synthetic oligonucleotide
ugccaaagcgauuaacaaa

SEQ ID NO: 438255 - RNA, 19 nt, Artificial Sequence
  Description of Artificial Sequence: Synthetic oligonucleotide
auagccaaacugcagggau

SEQ ID NO: 438256 - RNA, 19 nt, Artificial Sequence
  Description of Artificial Sequence: Synthetic oligonucleotide
agugcgauggucaugagua

SEQ ID NO: 438257 - RNA, 19 nt, Artificial Sequence
  Description of Artificial Sequence: Synthetic oligonucleotide
ggucucaggaacuuugaag

SEQ ID NO: 438258 - RNA, 19 nt, Artificial Sequence
  Description of Artificial Sequence: Synthetic oligonucleotide
gaauccuaaaauggagccc

SEQ ID NO: 438259 - RNA, 19 nt, Artificial Sequence
  Description of Artificial Sequence: Synthetic oligonucleotide
agccauuuauauugcuuag

SEQ ID NO: 438260 - RNA, 19 nt, Artificial Sequence
  Description of Artificial Sequence: Synthetic oligonucleotide
guaauagaacacagcauug

SEQ ID NO: 438261 - RNA, 19 nt, Artificial Sequence
  Description of Artificial Sequence: Synthetic oligonucleotide
uaacuuagugucuguauuu

SEQ ID NO: 438262 - RNA, 19 nt, Artificial Sequence
  Description of Artificial Sequence: Synthetic oligonucleotide
acgauacccgagccgaugg

SEQ ID NO: 438263 - RNA, 19 nt, Artificial Sequence
  Description of Artificial Sequence: Synthetic oligonucleotide
uguugcuuaucugaacaga

SEQ ID NO: 438264 - RNA, 19 nt, Artificial Sequence
  Description of Artificial Sequence: Synthetic oligonucleotide
uacaaguggguuuguccag

SEQ ID NO: 438265 - RNA, 19 nt, Artificial Sequence
  Description of Artificial Sequence: Synthetic oligonucleotide
guucauaguucgauuagug

SEQ ID NO: 438266 - RNA, 19 nt, Artificial Sequence
  Description of Artificial Sequence: Synthetic oligonucleotide
ccaucuauacacagcaggg

SEQ ID NO: 438267 - RNA, 19 nt, Artificial Sequence
  Description of Artificial Sequence: Synthetic oligonucleotide
gagccauucaaggugaaga

SEQ ID NO: 438268 - RNA, 19 nt, Artificial Sequence
  Description of Artificial Sequence: Synthetic oligonucleotide
acagcauugaugcccgaca

SEQ ID NO: 438269 - RNA, 19 nt, Artificial Sequence
  Description of Artificial Sequence: Synthetic oligonucleotide
uggugcagcgugccuaggg

SEQ ID NO: 438270 - RNA, 19 nt, Artificial Sequence
  Description of Artificial Sequence: Synthetic oligonucleotide
agauauacuauaacuuagu

SEQ ID NO: 438271 - RNA, 19 nt, Artificial Sequence
  Description of Artificial Sequence: Synthetic oligonucleotide
ugauacugagcagcagagg

SEQ ID NO: 438272 - RNA, 19 nt, Artificial Sequence
  Description of Artificial Sequence: Synthetic oligonucleotide
agauuugagcaacagucuu

SEQ ID NO: 438273 - RNA, 19 nt, Artificial Sequence
  Description of Artificial Sequence: Synthetic oligonucleotide
agacuugcccaguuuggag

SEQ ID NO: 438274 - RNA, 19 nt, Artificial Sequence
  Description of Artificial Sequence: Synthetic oligonucleotide
accuguugcuuaucugaac

SEQ ID NO: 438275 - RNA, 19 nt, Artificial Sequence
  Description of Artificial Sequence: Synthetic oligonucleotide
acuauaacuuagugucugu

SEQ ID NO: 438276 - RNA, 19 nt, Artificial Sequence
  Description of Artificial Sequence: Synthetic oligonucleotide
gaaugggcgaauccuaaaa

SEQ ID NO: 438277 - RNA, 19 nt, Artificial Sequence
  Description of Artificial Sequence: Synthetic oligonucleotide
agcgauuaacaaagaggcc

SEQ ID NO: 438278 - RNA, 19 nt, Artificial Sequence
  Description of Artificial Sequence: Synthetic oligonucleotide
gggccuacuucaaagaagg

SEQ ID NO: 438279 - RNA, 19 nt, Artificial Sequence
  Description of Artificial Sequence: Synthetic oligonucleotide
uggguuuguccagauauac

SEQ ID NO: 438280 - RNA, 19 nt, Artificial Sequence
  Description of Artificial Sequence: Synthetic oligonucleotide
ugggguaaagccucauagu

SEQ ID NO: 438281 - RNA, 19 nt, Artificial Sequence
  Description of Artificial Sequence: Synthetic oligonucleotide
guagaacuccucaauuacc

SEQ ID NO: 438282 - RNA, 19 nt, Artificial Sequence
  Description of Artificial Sequence: Synthetic oligonucleotide
uuccaucuauacacagcag

SEQ ID NO: 438283 - RNA, 19 nt, Artificial Sequence
  Description of Artificial Sequence: Synthetic oligonucleotide
gguuuguccagauauacua

SEQ ID NO: 438284 - RNA, 19 nt, Artificial Sequence
  Description of Artificial Sequence: Synthetic oligonucleotide
augauacugagcagcagag

SEQ ID NO: 438285 - RNA, 19 nt, Artificial Sequence
  Description of Artificial Sequence: Synthetic oligonucleotide
agccgaugguggcauacac

SEQ ID NO: 438286 - RNA, 19 nt, Artificial Sequence
  Description of Artificial Sequence: Synthetic oligonucleotide
gaugcucguugaguaauag

SEQ ID NO: 438287 - RNA, 19 nt, Artificial Sequence
  Description of Artificial Sequence: Synthetic oligonucleotide
caugggaugggaccagggc

SEQ ID NO: 438288 - RNA, 19 nt, Artificial Sequence
  Description of Artificial Sequence: Synthetic oligonucleotide
agcauggaguuccgccugc

SEQ ID NO: 438289 - RNA, 19 nt, Artificial Sequence
  Description of Artificial Sequence: Synthetic oligonucleotide
uuccucguugcgauugaug

SEQ ID NO: 438290 - RNA, 19 nt, Artificial Sequence
  Description of Artificial Sequence: Synthetic oligonucleotide
guguugacgauacccgagc

SEQ ID NO: 438291 - RNA, 19 nt, Artificial Sequence
  Description of Artificial Sequence: Synthetic oligonucleotide
gaacagcgacaccacagug

SEQ ID NO: 438292 - RNA, 19 nt, Artificial Sequence
  Description of Artificial Sequence: Synthetic oligonucleotide
gaagguccggccuuugguc

SEQ ID NO: 438293 - RNA, 19 nt, Artificial Sequence
  Description of Artificial Sequence: Synthetic oligonucleotide
gaagaggucucaucuagcu

SEQ ID NO: 438294 - RNA, 19 nt, Artificial Sequence
  Description of Artificial Sequence: Synthetic oligonucleotide
aguucauaguucgauuagu

SEQ ID NO: 438295 - RNA, 19 nt, Artificial Sequence
  Description of Artificial Sequence: Synthetic oligonucleotide
uguccgugucuucagcagu

SEQ ID NO: 438296 - RNA, 19 nt, Artificial Sequence
  Description of Artificial Sequence: Synthetic oligonucleotide
gcugggacgaagaugauac

SEQ ID NO: 438297 - RNA, 19 nt, Artificial Sequence
  Description of Artificial Sequence: Synthetic oligonucleotide
caaugaaccaugggauggg

SEQ ID NO: 438298 - RNA, 19 nt, Artificial Sequence
  Description of Artificial Sequence: Synthetic oligonucleotide
cacaagucugcauugccca

SEQ ID NO: 438299 - RNA, 19 nt, Artificial Sequence
  Description of Artificial Sequence: Synthetic oligonucleotide
cauaguucgauuagugugu

SEQ ID NO: 438300 - RNA, 19 nt, Artificial Sequence
  Description of Artificial Sequence: Synthetic oligonucleotide
aagcgaucucaucgaaggu

SEQ ID NO: 438301 - RNA, 19 nt, Artificial Sequence
  Description of Artificial Sequence: Synthetic oligonucleotide
agagauaggaaugggcgaa

SEQ ID NO: 438302 - RNA, 19 nt, Artificial Sequence
  Description of Artificial Sequence: Synthetic oligonucleotide
acgaacagcgacaccacag

SEQ ID NO: 438303 - RNA, 19 nt, Artificial Sequence
  Description of Artificial Sequence: Synthetic oligonucleotide
aagccucauaguucauagu

SEQ ID NO: 438304 - RNA, 19 nt, Artificial Sequence
  Description of Artificial Sequence: Synthetic oligonucleotide
agcccgaccccuauggugg

SEQ ID NO: 438305 - RNA, 19 nt, Artificial Sequence
  Description of Artificial Sequence: Synthetic oligonucleotide
gauacccgagccgauggug

SEQ ID NO: 438306 - RNA, 19 nt, Artificial Sequence
  Description of Artificial Sequence: Synthetic oligonucleotide
gucaguuuggaagaggucu

SEQ ID NO: 438307 - RNA, 19 nt, Artificial Sequence
  Description of Artificial Sequence: Synthetic oligonucleotide
ucguugcgauugaugagca

SEQ ID NO: 438308 - RNA, 19 nt, Artificial Sequence
  Description of Artificial Sequence: Synthetic oligonucleotide
gcgauugaugagcaggaag

SEQ ID NO: 438309 - RNA, 19 nt, Artificial Sequence
  Description of Artificial Sequence: Synthetic oligonucleotide
acauaggggccacacaguu

SEQ ID NO: 438310 - RNA, 19 nt, Artificial Sequence
  Description of Artificial Sequence: Synthetic oligonucleotide
uugcuuaucugaacagauu

SEQ ID NO: 438311 - RNA, 19 nt, Artificial Sequence
  Description of Artificial Sequence: Synthetic oligonucleotide
augaggugcagaguccguc

SEQ ID NO: 438312 - RNA, 19 nt, Artificial Sequence
  Description of Artificial Sequence: Synthetic oligonucleotide
augggcucuccauagcggu

SEQ ID NO: 438313 - RNA, 19 nt, Artificial Sequence
  Description of Artificial Sequence: Synthetic oligonucleotide
cagcauugaugcccgacag

SEQ ID NO: 438314 - RNA, 19 nt, Artificial Sequence
  Description of Artificial Sequence: Synthetic oligonucleotide
acagauuagcuuggugaag

SEQ ID NO: 438315 - RNA, 19 nt, Artificial Sequence
  Description of Artificial Sequence: Synthetic oligonucleotide
auacccgagccgauggugg

SEQ ID NO: 438316 - RNA, 19 nt, Artificial Sequence
  Description of Artificial Sequence: Synthetic oligonucleotide
aauggagcccgaccccuau

SEQ ID NO: 438317 - RNA, 19 nt, Artificial Sequence
  Description of Artificial Sequence: Synthetic oligonucleotide
ucauagguccagcccuaca

SEQ ID NO: 438318 - RNA, 19 nt, Artificial Sequence
  Description of Artificial Sequence: Synthetic oligonucleotide
ugagccauucaaggugaag

SEQ ID NO: 438319 - RNA, 19 nt, Artificial Sequence
  Description of Artificial Sequence: Synthetic oligonucleotide
ugggaguaggccgggcugg

SEQ ID NO: 438320 - RNA, 19 nt, Artificial Sequence
  Description of Artificial Sequence: Synthetic oligonucleotide
aaggcucccaagcccggcu

SEQ ID NO: 438321 - RNA, 19 nt, Artificial Sequence
  Description of Artificial Sequence: Synthetic oligonucleotide
cagauuagcuuggugaaga

SEQ ID NO: 438322 - RNA, 19 nt, Artificial Sequence
  Description of Artificial Sequence: Synthetic oligonucleotide
ucaucgaagguccggccuu

SEQ ID NO: 438323 - RNA, 19 nt, Artificial Sequence
  Description of Artificial Sequence: Synthetic oligonucleotide
ggcugagcggaacagcucc

SEQ ID NO: 438324 - RNA, 19 nt, Artificial Sequence
  Description of Artificial Sequence: Synthetic oligonucleotide
ucccucgaagcuucuucag

SEQ ID NO: 438325 - RNA, 19 nt, Artificial Sequence
  Description of Artificial Sequence: Synthetic oligonucleotide
agggccuacuucaaagaag

SEQ ID NO: 438326 - RNA, 19 nt, Artificial Sequence
  Description of Artificial Sequence: Synthetic oligonucleotide
ggcgaauccuaaaauggag

SEQ ID NO: 438327 - RNA, 19 nt, Artificial Sequence
  Description of Artificial Sequence: Synthetic oligonucleotide
augccaacgacgaugccca

SEQ ID NO: 438328 - RNA, 19 nt, Artificial Sequence
  Description of Artificial Sequence: Synthetic oligonucleotide
cauaggggccacacaguug

SEQ ID NO: 438329 - RNA, 19 nt, Artificial Sequence
  Description of Artificial Sequence: Synthetic oligonucleotide
aaaggccaauagguucauc

SEQ ID NO: 438330 - RNA, 19 nt, Artificial Sequence
  Description of Artificial Sequence: Synthetic oligonucleotide
uggaguuccgccugccaaa

SEQ ID NO: 438331 - RNA, 19 nt, Artificial Sequence
  Description of Artificial Sequence: Synthetic oligonucleotide
gggcucucggggcagaagg

SEQ ID NO: 438332 - RNA, 19 nt, Artificial Sequence
  Description of Artificial Sequence: Synthetic oligonucleotide
ucgcuggcugaagaaaggc

SEQ ID NO: 438333 - RNA, 19 nt, Artificial Sequence
  Description of Artificial Sequence: Synthetic oligonucleotide
acgccugccuucucgaaga

SEQ ID NO: 438334 - RNA, 19 nt, Artificial Sequence
  Description of Artificial Sequence: Synthetic oligonucleotide
cacgaugcucagauaggac

SEQ ID NO: 438335 - RNA, 19 nt, Artificial Sequence
  Description of Artificial Sequence: Synthetic oligonucleotide
acgccaguguuauagccaa

SEQ ID NO: 438336 - RNA, 19 nt, Artificial Sequence
  Description of Artificial Sequence: Synthetic oligonucleotide
uuaguguguccuuggucau

SEQ ID NO: 438337 - RNA, 19 nt, Artificial Sequence
  Description of Artificial Sequence: Synthetic oligonucleotide
agcggaacagcuccaggau

SEQ ID NO: 438338 - RNA, 19 nt, Artificial Sequence
  Description of Artificial Sequence: Synthetic oligonucleotide
aggccgaacaccugggcaa

SEQ ID NO: 438339 - RNA, 19 nt, Artificial Sequence
  Description of Artificial Sequence: Synthetic oligonucleotide
cuuagugucuguauuuaau

SEQ ID NO: 438340 - RNA, 19 nt, Artificial Sequence
  Description of Artificial Sequence: Synthetic oligonucleotide
guauguugguguauuuaca

SEQ ID NO: 438341 - RNA, 19 nt, Artificial Sequence
  Description of Artificial Sequence: Synthetic oligonucleotide
aguacacuccaaugaugaa

SEQ ID NO: 438342 - RNA, 19 nt, Artificial Sequence
  Description of Artificial Sequence: Synthetic oligonucleotide
gauuaacaaagaggcccac

SEQ ID NO: 438343 - RNA, 19 nt, Artificial Sequence
  Description of Artificial Sequence: Synthetic oligonucleotide
ucacaucggcugucccucg

SEQ ID NO: 438344 - RNA, 19 nt, Artificial Sequence
  Description of Artificial Sequence: Synthetic oligonucleotide
cugcauugcccauaaugga

SEQ ID NO: 438345 - RNA, 19 nt, Artificial Sequence
  Description of Artificial Sequence: Synthetic oligonucleotide
gacgauacccgagccgaug

SEQ ID NO: 438346 - RNA, 19 nt, Artificial Sequence
  Description of Artificial Sequence: Synthetic oligonucleotide
aggugcagaguccgucguc

SEQ ID NO: 438347 - RNA, 19 nt, Artificial Sequence
  Description of Artificial Sequence: Synthetic oligonucleotide
gcgaauccuaaaauggagc

SEQ ID NO: 438348 - RNA, 19 nt, Artificial Sequence
  Description of Artificial Sequence: Synthetic oligonucleotide
cauugaugcccgacagcug

SEQ ID NO: 438349 - RNA, 19 nt, Artificial Sequence
  Description of Artificial Sequence: Synthetic oligonucleotide
ccagauauacuauaacuua

SEQ ID NO: 438350 - RNA, 19 nt, Artificial Sequence
  Description of Artificial Sequence: Synthetic oligonucleotide
gaguauguugguguauuua

SEQ ID NO: 438351 - RNA, 19 nt, Artificial Sequence
  Description of Artificial Sequence: Synthetic oligonucleotide
ugcccacgaugaaauuuga

SEQ ID NO: 438352 - RNA, 19 nt, Artificial Sequence
  Description of Artificial Sequence: Synthetic oligonucleotide
ccugccaaagcgauuaaca

SEQ ID NO: 438353 - RNA, 19 nt, Artificial Sequence
  Description of Artificial Sequence: Synthetic oligonucleotide
cacgccugccuucucgaag

SEQ ID NO: 438354 - RNA, 19 nt, Artificial Sequence
  Description of Artificial Sequence: Synthetic oligonucleotide
cugccgacccucuucuuuc

SEQ ID NO: 438355 - RNA, 19 nt, Artificial Sequence
  Description of Artificial Sequence: Synthetic oligonucleotide
uccuaaaauggagcccgac

SEQ ID NO: 438356 - RNA, 19 nt, Artificial Sequence
  Description of Artificial Sequence: Synthetic oligonucleotide
caaugaugaagcggcccag

SEQ ID NO: 438357 - RNA, 19 nt, Artificial Sequence
  Description of Artificial Sequence: Synthetic oligonucleotide
auaauggaguccaggccga

SEQ ID NO: 438358 - RNA, 19 nt, Artificial Sequence
  Description of Artificial Sequence: Synthetic oligonucleotide
ggcacaaagccagugguca

SEQ ID NO: 438359 - RNA, 19 nt, Artificial Sequence
  Description of Artificial Sequence: Synthetic oligonucleotide
agguccggccuuuggucuc

SEQ ID NO: 438360 - RNA, 19 nt, Artificial Sequence
  Description of Artificial Sequence: Synthetic oligonucleotide
cugggaguaggccgggcug

SEQ ID NO: 438361 - RNA, 19 nt, Artificial Sequence
  Description of Artificial Sequence: Synthetic oligonucleotide
gguccagcccuacagauua

SEQ ID NO: 438362 - RNA, 19 nt, Artificial Sequence
  Description of Artificial Sequence: Synthetic oligonucleotide
cuguguugacgauacccga

SEQ ID NO: 438363 - RNA, 19 nt, Artificial Sequence
  Description of Artificial Sequence: Synthetic oligonucleotide
uacccgagccgaugguggc

SEQ ID NO: 438364 - RNA, 19 nt, Artificial Sequence
  Description of Artificial Sequence: Synthetic oligonucleotide
gacuagaaccuggcagccc

SEQ ID NO: 438365 - RNA, 19 nt, Artificial Sequence
  Description of Artificial Sequence: Synthetic oligonucleotide
ccauucaaggugaagacua

SEQ ID NO: 438366 - RNA, 19 nt, Artificial Sequence
  Description of Artificial Sequence: Synthetic oligonucleotide
gucacaucggcugucccuc

SEQ ID NO: 438367 - RNA, 19 nt, Artificial Sequence
  Description of Artificial Sequence: Synthetic oligonucleotide
aaguggguuuguccagaua

SEQ ID NO: 438368 - RNA, 19 nt, Artificial Sequence
  Description of Artificial Sequence: Synthetic oligonucleotide
uccgucguccagcucgcuc

SEQ ID NO: 438369 - RNA, 19 nt, Artificial Sequence
  Description of Artificial Sequence: Synthetic oligonucleotide
caucggcugucccucgaag

SEQ ID NO: 438370 - RNA, 19 nt, Artificial Sequence
  Description of Artificial Sequence: Synthetic oligonucleotide
gucccucgaagcuucuuca

SEQ ID NO: 438371 - RNA, 19 nt, Artificial Sequence
  Description of Artificial Sequence: Synthetic oligonucleotide
acaagucugcauugcccau

SEQ ID NO: 438372 - RNA, 19 nt, Artificial Sequence
  Description of Artificial Sequence: Synthetic oligonucleotide
gaguaauagaacacagcau

SEQ ID NO: 438373 - RNA, 19 nt, Artificial Sequence
  Description of Artificial Sequence: Synthetic oligonucleotide
aguccgucguccagcucgc

SEQ ID NO: 438374 - RNA, 19 nt, Artificial Sequence
  Description of Artificial Sequence: Synthetic oligonucleotide
guuacaggaguauguuggu

SEQ ID NO: 438375 - RNA, 19 nt, Artificial Sequence
  Description of Artificial Sequence: Synthetic oligonucleotide
ggcaugugucuggacaggg

SEQ ID NO: 438376 - RNA, 19 nt, Artificial Sequence
  Description of Artificial Sequence: Synthetic oligonucleotide
aggcaugugucuggacagg

SEQ ID NO: 438377 - RNA, 19 nt, Artificial Sequence
  Description of Artificial Sequence: Synthetic oligonucleotide
aggggccacacaguugcuc

SEQ ID NO: 438378 - RNA, 19 nt, Artificial Sequence
  Description of Artificial Sequence: Synthetic oligonucleotide
gguguggggcuccucacac

SEQ ID NO: 438379 - RNA, 19 nt, Artificial Sequence
  Description of Artificial Sequence: Synthetic oligonucleotide
cagcauggaguuccgccug

SEQ ID NO: 438380 - RNA, 19 nt, Artificial Sequence
  Description of Artificial Sequence: Synthetic oligonucleotide
gucuggacagggcuuuguc

SEQ ID NO: 438381 - RNA, 19 nt, Artificial Sequence
  Description of Artificial Sequence: Synthetic oligonucleotide
gcgauggucaugaguacag

SEQ ID NO: 438382 - RNA, 19 nt, Artificial Sequence
  Description of Artificial Sequence: Synthetic oligonucleotide
cccuaugguggggagaucc

SEQ ID NO: 438383 - RNA, 19 nt, Artificial Sequence
  Description of Artificial Sequence: Synthetic oligonucleotide
cauaguucauaguucgauu

SEQ ID NO: 438384 - RNA, 19 nt, Artificial Sequence
  Description of Artificial Sequence: Synthetic oligonucleotide
cuauaacuuagugucugua

SEQ ID NO: 438385 - RNA, 19 nt, Artificial Sequence
  Description of Artificial Sequence: Synthetic oligonucleotide
uaccacgaacagcgacacc

SEQ ID NO: 438386 - RNA, 19 nt, Artificial Sequence
  Description of Artificial Sequence: Synthetic oligonucleotide
gagauucuuggggcugcug

SEQ ID NO: 438387 - RNA, 19 nt, Artificial Sequence
  Description of Artificial Sequence: Synthetic oligonucleotide
aggaaugggcgaauccuaa

SEQ ID NO: 438388 - RNA, 19 nt, Artificial Sequence
  Description of Artificial Sequence: Synthetic oligonucleotide
ggucucgggucacaucggc

SEQ ID NO: 438389 - RNA, 19 nt, Artificial Sequence
  Description of Artificial Sequence: Synthetic oligonucleotide
ugcgauugaugagcaggaa

SEQ ID NO: 438390 - RNA, 19 nt, Artificial Sequence
  Description of Artificial Sequence: Synthetic oligonucleotide
agaguccgucguccagcuc

SEQ ID NO: 438391 - RNA, 19 nt, Artificial Sequence
  Description of Artificial Sequence: Synthetic oligonucleotide
caggccgaacaccugggca

SEQ ID NO: 438392 - RNA, 19 nt, Artificial Sequence
  Description of Artificial Sequence: Synthetic oligonucleotide
gaguuccgccugccaaagc

SEQ ID NO: 438393 - RNA, 19 nt, Artificial Sequence
  Description of Artificial Sequence: Synthetic oligonucleotide
ugccgacccucuucuuuca

SEQ ID NO: 438394 - RNA, 19 nt, Artificial Sequence
  Description of Artificial Sequence: Synthetic oligonucleotide
ugacgauacccgagccgau

SEQ ID NO: 438395 - RNA, 19 nt, Artificial Sequence
  Description of Artificial Sequence: Synthetic oligonucleotide
uccgugucuucagcaguga

SEQ ID NO: 438396 - RNA, 19 nt, Artificial Sequence
  Description of Artificial Sequence: Synthetic oligonucleotide
gcucguugaguaauagaac

SEQ ID NO: 438397 - RNA, 19 nt, Artificial Sequence
  Description of Artificial Sequence: Synthetic oligonucleotide
gggguaaagccucauaguu

SEQ ID NO: 438398 - RNA, 19 nt, Artificial Sequence
  Description of Artificial Sequence: Synthetic oligonucleotide
gagcguggugaguguggug

SEQ ID NO: 438399 - RNA, 19 nt, Artificial Sequence
  Description of Artificial Sequence: Synthetic oligonucleotide
acaucggcugucccucgaa

SEQ ID NO: 438400 - RNA, 19 nt, Artificial Sequence
  Description of Artificial Sequence: Synthetic oligonucleotide
agugcacaggagacuagaa

SEQ ID NO: 438401 - RNA, 19 nt, Artificial Sequence
  Description of Artificial Sequence: Synthetic oligonucleotide
gcucgcucuaccacgaaca

SEQ ID NO: 438402 - RNA, 19 nt, Artificial Sequence
  Description of Artificial Sequence: Synthetic oligonucleotide
ccucguugcgauugaugag

SEQ ID NO: 438403 - RNA, 19 nt, Artificial Sequence
  Description of Artificial Sequence: Synthetic oligonucleotide
caucagcauggaguuccgc

SEQ ID NO: 438404 - RNA, 19 nt, Artificial Sequence
  Description of Artificial Sequence: Synthetic oligonucleotide
ggaguuccgccugccaaag

SEQ ID NO: 438405 - RNA, 19 nt, Artificial Sequence
  Description of Artificial Sequence: Synthetic oligonucleotide
ccagaagcgaucucaucga

SEQ ID NO: 438406 - RNA, 19 nt, Artificial Sequence
  Description of Artificial Sequence: Synthetic oligonucleotide
gccucauaguucauaguuc

SEQ ID NO: 438407 - RNA, 19 nt, Artificial Sequence
  Description of Artificial Sequence: Synthetic oligonucleotide
cgauuaacaaagaggccca

SEQ ID NO: 438408 - RNA, 19 nt, Artificial Sequence
  Description of Artificial Sequence: Synthetic oligonucleotide
cauggaguuccgccugcca

SEQ ID NO: 438409 - RNA, 19 nt, Artificial Sequence
  Description of Artificial Sequence: Synthetic oligonucleotide
aaauggagcccgaccccua

SEQ ID NO: 438410 - RNA, 19 nt, Artificial Sequence
  Description of Artificial Sequence: Synthetic oligonucleotide
gggcgaauccuaaaaugga

SEQ ID NO: 438411 - RNA, 19 nt, Artificial Sequence
  Description of Artificial Sequence: Synthetic oligonucleotide
cucaucgaagguccggccu

SEQ ID NO: 438412 - RNA, 19 nt, Artificial Sequence
  Description of Artificial Sequence: Synthetic oligonucleotide
uaguguguccuuggucaua

SEQ ID NO: 438413 - RNA, 19 nt, Artificial Sequence
  Description of Artificial Sequence: Synthetic oligonucleotide
uaauggaguccaggccgaa

SEQ ID NO: 438414 - RNA, 19 nt, Artificial Sequence
  Description of Artificial Sequence: Synthetic oligonucleotide
gugccuagggcuccacgaa

SEQ ID NO: 438415 - RNA, 19 nt, Artificial Sequence
  Description of Artificial Sequence: Synthetic oligonucleotide
ggcccgguuuuccucguug

SEQ ID NO: 438416 - RNA, 19 nt, Artificial Sequence
  Description of Artificial Sequence: Synthetic oligonucleotide
gggcaauaaggaugccaac

SEQ ID NO: 438417 - RNA, 19 nt, Artificial Sequence
  Description of Artificial Sequence: Synthetic oligonucleotide
gacauaggggccacacagu

SEQ ID NO: 438418 - RNA, 19 nt, Artificial Sequence
  Description of Artificial Sequence: Synthetic oligonucleotide
guggggagauccaggccug

SEQ ID NO: 438419 - RNA, 19 nt, Artificial Sequence
  Description of Artificial Sequence: Synthetic oligonucleotide
cauagcgguggacccaugu

SEQ ID NO: 438420 - RNA, 19 nt, Artificial Sequence
  Description of Artificial Sequence: Synthetic oligonucleotide
ugccaacgacgaugcccag

SEQ ID NO: 438421 - RNA, 19 nt, Artificial Sequence
  Description of Artificial Sequence: Synthetic oligonucleotide
cguugaguaauagaacaca

SEQ ID NO: 438422 - RNA, 19 nt, Artificial Sequence
  Description of Artificial Sequence: Synthetic oligonucleotide
gcguggugagugugguggg

SEQ ID NO: 438423 - RNA, 19 nt, Artificial Sequence
  Description of Artificial Sequence: Synthetic oligonucleotide
aggcggcugagcggaacag

SEQ ID NO: 438424 - RNA, 19 nt, Artificial Sequence
  Description of Artificial Sequence: Synthetic oligonucleotide
uccgccugccaaagcgauu

SEQ ID NO: 438425 - RNA, 19 nt, Artificial Sequence
  Description of Artificial Sequence: Synthetic oligonucleotide
cagcgacaccacagugaag

SEQ ID NO: 438426 - RNA, 19 nt, Artificial Sequence
  Description of Artificial Sequence: Synthetic oligonucleotide
gagccgaugguggcauaca

SEQ ID NO: 438427 - RNA, 19 nt, Artificial Sequence
  Description of Artificial Sequence: Synthetic oligonucleotide
caaaagacuugcccaguuu

SEQ ID NO: 438428 - RNA, 19 nt, Artificial Sequence
  Description of Artificial Sequence: Synthetic oligonucleotide
cuggcgguaggcggcugag

SEQ ID NO: 438429 - RNA, 19 nt, Artificial Sequence
  Description of Artificial Sequence: Synthetic oligonucleotide
ggucacaucggcugucccu

SEQ ID NO: 438430 - RNA, 19 nt, Artificial Sequence
  Description of Artificial Sequence: Synthetic oligonucleotide
auccuaaaauggagcccga

SEQ ID NO: 438431 - RNA, 19 nt, Artificial Sequence
  Description of Artificial Sequence: Synthetic oligonucleotide
aucgaagguccggccuuug

SEQ ID NO: 438432 - RNA, 19 nt, Artificial Sequence
  Description of Artificial Sequence: Synthetic oligonucleotide
cccgacggagaagauggcc

SEQ ID NO: 438433 - RNA, 19 nt, Artificial Sequence
  Description of Artificial Sequence: Synthetic oligonucleotide
ccggaagccagaagcgauc

SEQ ID NO: 438434 - RNA, 19 nt, Artificial Sequence
  Description of Artificial Sequence: Synthetic oligonucleotide
cagugcgauggucaugagu

SEQ ID NO: 438435 - RNA, 19 nt, Artificial Sequence
  Description of Artificial Sequence: Synthetic oligonucleotide
caacgacgaugcccagcug

SEQ ID NO: 438436 - RNA, 19 nt, Artificial Sequence
  Description of Artificial Sequence: Synthetic oligonucleotide
ccaacgacgaugcccagcu

SEQ ID NO: 438437 - RNA, 19 nt, Artificial Sequence
  Description of Artificial Sequence: Synthetic oligonucleotide
cagcccuacagauuagcuu

SEQ ID NO: 438438 - RNA, 19 nt, Artificial Sequence
  Description of Artificial Sequence: Synthetic oligonucleotide
guggguuuguccagauaua

SEQ ID NO: 438439 - RNA, 19 nt, Artificial Sequence
  Description of Artificial Sequence: Synthetic oligonucleotide
ccaaagcgauuaacaaaga

SEQ ID NO: 438440 - RNA, 19 nt, Artificial Sequence
  Description of Artificial Sequence: Synthetic oligonucleotide
gcgugccuagggcuccacg

SEQ ID NO: 438441 - RNA, 19 nt, Artificial Sequence
  Description of Artificial Sequence: Synthetic oligonucleotide
gagauaggaaugggcgaau

SEQ ID NO: 438442 - RNA, 19 nt, Artificial Sequence
  Description of Artificial Sequence: Synthetic oligonucleotide
gccaacgacgaugcccagc

SEQ ID NO: 438443 - RNA, 19 nt, Artificial Sequence
  Description of Artificial Sequence: Synthetic oligonucleotide
cacaucggcugucccucga

SEQ ID NO: 438444 - RNA, 19 nt, Artificial Sequence
  Description of Artificial Sequence: Synthetic oligonucleotide
ggacgaggccccuggcuga

SEQ ID NO: 438445 - RNA, 19 nt, Artificial Sequence
  Description of Artificial Sequence: Synthetic oligonucleotide
ggccuacuucaaagaaggc

SEQ ID NO: 438446 - RNA, 19 nt, Artificial Sequence
  Description of Artificial Sequence: Synthetic oligonucleotide
ggcggcugagcggaacagc

SEQ ID NO: 438447 - RNA, 19 nt, Artificial Sequence
  Description of Artificial Sequence: Synthetic oligonucleotide
agcacacucuuggcccggu

SEQ ID NO: 438448 - RNA, 19 nt, Artificial Sequence
  Description of Artificial Sequence: Synthetic oligonucleotide
cgugccuagggcuccacga

SEQ ID NO: 438449 - RNA, 19 nt, Artificial Sequence
  Description of Artificial Sequence: Synthetic oligonucleotide
gccgaugguggcauacaca

SEQ ID NO: 438450 - RNA, 19 nt, Artificial Sequence
  Description of Artificial Sequence: Synthetic oligonucleotide
gccauucaaggugaagacu

SEQ ID NO: 438451 - RNA, 19 nt, Artificial Sequence
  Description of Artificial Sequence: Synthetic oligonucleotide
ggguuuguccagauauacu

SEQ ID NO: 438452 - RNA, 19 nt, Artificial Sequence
  Description of Artificial Sequence: Synthetic oligonucleotide
gacgaggccccuggcugaa

SEQ ID NO: 438453 - RNA, 19 nt, Artificial Sequence
  Description of Artificial Sequence: Synthetic oligonucleotide
cguugcgauugaugagcag

SEQ ID NO: 438454 - RNA, 19 nt, Artificial Sequence
  Description of Artificial Sequence: Synthetic oligonucleotide
gcccagucuggcccuuccc

SEQ ID NO: 438455 - RNA, 19 nt, Artificial Sequence
  Description of Artificial Sequence: Synthetic oligonucleotide
gcccgaccccuaugguggg

SEQ ID NO: 438456 - RNA, 19 nt, Artificial Sequence
  Description of Artificial Sequence: Synthetic oligonucleotide
uggcccgguuuuccucguu

SEQ ID NO: 438457 - RNA, 19 nt, Artificial Sequence
  Description of Artificial Sequence: Synthetic oligonucleotide
cgaugaaauuugaggucca

SEQ ID NO: 438458 - RNA, 19 nt, Artificial Sequence
  Description of Artificial Sequence: Synthetic oligonucleotide
caagcccggcucgccugag

SEQ ID NO: 438459 - RNA, 19 nt, Artificial Sequence
  Description of Artificial Sequence: Synthetic oligonucleotide
ccaguguuauagccaaacu

SEQ ID NO: 438460 - RNA, 19 nt, Artificial Sequence
  Description of Artificial Sequence: Synthetic oligonucleotide
ggcugggacgaagaugaua

SEQ ID NO: 438461 - RNA, 19 nt, Artificial Sequence
  Description of Artificial Sequence: Synthetic oligonucleotide
gcuggcgguaggcggcuga

SEQ ID NO: 438462 - RNA, 19 nt, Artificial Sequence
  Description of Artificial Sequence: Synthetic oligonucleotide
cucaggugucuugucacuu

SEQ ID NO: 438463 - RNA, 19 nt, Artificial Sequence
  Description of Artificial Sequence: Synthetic oligonucleotide
ccagcccuacagauuagcu

SEQ ID NO: 438464 - RNA, 19 nt, Artificial Sequence
  Description of Artificial Sequence: Synthetic oligonucleotide
cucggccacaaugaaccau

SEQ ID NO: 438465 - RNA, 19 nt, Artificial Sequence
  Description of Artificial Sequence: Synthetic oligonucleotide
cgagccgaugguggcauac

SEQ ID NO: 438466 - RNA, 19 nt, Artificial Sequence
  Description of Artificial Sequence: Synthetic oligonucleotide
ccgucguccagcucgcucu

SEQ ID NO: 438467 - RNA, 19 nt, Artificial Sequence
  Description of Artificial Sequence: Synthetic oligonucleotide
ccagugcgauggucaugag

SEQ ID NO: 438468 - RNA, 19 nt, Artificial Sequence
  Description of Artificial Sequence: Synthetic oligonucleotide
ccgccugccaaagcgauua

SEQ ID NO: 438469 - RNA, 19 nt, Artificial Sequence
  Description of Artificial Sequence: Synthetic oligonucleotide
cccggcucgccugagaucu

SEQ ID NO: 438470 - RNA, 19 nt, Artificial Sequence
  Description of Artificial Sequence: Synthetic oligonucleotide
cguccagcucgcucuacca

SEQ ID NO: 438471 - RNA, 19 nt, Artificial Sequence
  Description of Artificial Sequence: Synthetic oligonucleotide
ccccgacggagaagauggc

SEQ ID NO: 438472 - RNA, 19 nt, Artificial Sequence
  Description of Artificial Sequence: Synthetic oligonucleotide
ccgaacaccugggcaauaa

SEQ ID NO: 438473 - RNA, 19 nt, Artificial Sequence
  Description of Artificial Sequence: Synthetic oligonucleotide
cccugccggaagccagaag

SEQ ID NO: 438474 - RNA, 19 nt, Artificial Sequence
  Description of Artificial Sequence: Synthetic oligonucleotide
cgaagguccggccuuuggu

SEQ ID NO: 438475 - RNA, 19 nt, Artificial Sequence
  Description of Artificial Sequence: Synthetic oligonucleotide
ccauagcgguggacccaug

SEQ ID NO: 438476 - RNA, 19 nt, Artificial Sequence
  Description of Artificial Sequence: Synthetic oligonucleotide
ggcucgccugagaucuguc

SEQ ID NO: 438477 - RNA, 19 nt, Artificial Sequence
  Description of Artificial Sequence: Synthetic oligonucleotide
gcccggcucgccugagauc

SEQ ID NO: 438478 - RNA, 19 nt, Artificial Sequence
  Description of Artificial Sequence: Synthetic oligonucleotide
caucgaagguccggccuuu

SEQ ID NO: 438479 - RNA, 19 nt, Artificial Sequence
  Description of Artificial Sequence: Synthetic oligonucleotide
ccggcucgccugagaucug

SEQ ID NO: 438480 - RNA, 19 nt, Artificial Sequence
  Description of Artificial Sequence: Synthetic oligonucleotide
ccuuuggucucaggaacuu

SEQ ID NO: 438481 - RNA, 19 nt, Artificial Sequence
  Description of Artificial Sequence: Synthetic oligonucleotide
ggccgaacaccugggcaau

SEQ ID NO: 438482 - RNA, 19 nt, Artificial Sequence
  Description of Artificial Sequence: Synthetic oligonucleotide
ggagcaccgugaagaugau

SEQ ID NO: 438483 - RNA, 19 nt, Artificial Sequence
  Description of Artificial Sequence: Synthetic oligonucleotide
gccgaacaccugggcaaua

SEQ ID NO: 438484 - RNA, 19 nt, Artificial Sequence
  Description of Artificial Sequence: Synthetic oligonucleotide
cccuacagauuagcuuggu

SEQ ID NO: 438485 - RNA, 19 nt, Artificial Sequence
  Description of Artificial Sequence: Synthetic oligonucleotide
ccccuaugguggggagauc

SEQ ID NO: 438486 - RNA, 19 nt, Artificial Sequence
  Description of Artificial Sequence: Synthetic oligonucleotide
cgauacccgagccgauggu

SEQ ID NO: 438487 - RNA, 19 nt, Artificial Sequence
  Description of Artificial Sequence: Synthetic oligonucleotide
guccgucguccagcucgcu

SEQ ID NO: 438488 - RNA, 19 nt, Artificial Sequence
  Description of Artificial Sequence: Synthetic oligonucleotide
cgccugccaaagcgauuaa

SEQ ID NO: 438489 - RNA, 19 nt, Artificial Sequence
  Description of Artificial Sequence: Synthetic oligonucleotide
ccgagccgaugguggcaua

SEQ ID NO: 438490 - RNA, 19 nt, Artificial Sequence
  Description of Artificial Sequence: Synthetic oligonucleotide
cggcucgccugagaucugu

SEQ ID NO: 438491 - RNA, 19 nt, Artificial Sequence
  Description of Artificial Sequence: Synthetic oligonucleotide
aauacuagaaacuaugcug

SEQ ID NO: 438492 - RNA, 19 nt, Artificial Sequence
  Description of Artificial Sequence: Synthetic oligonucleotide
gaaauuaggauagagaugg

SEQ ID NO: 438493 - RNA, 19 nt, Artificial Sequence
  Description of Artificial Sequence: Synthetic oligonucleotide
aauaacacugcucuaaguc

SEQ ID NO: 438494 - RNA, 19 nt, Artificial Sequence
  Description of Artificial Sequence: Synthetic oligonucleotide
auuaauaugacccuugaag

SEQ ID NO: 438495 - RNA, 19 nt, Artificial Sequence
  Description of Artificial Sequence: Synthetic oligonucleotide
uuauaguacagguagaggg

SEQ ID NO: 438496 - RNA, 19 nt, Artificial Sequence
  Description of Artificial Sequence: Synthetic oligonucleotide
aucauaucaaagcagaugg

SEQ ID NO: 438497 - RNA, 19 nt, Artificial Sequence
  Description of Artificial Sequence: Synthetic oligonucleotide
uuaauaugacccuugaagg

SEQ ID NO: 438498 - RNA, 19 nt, Artificial Sequence
  Description of Artificial Sequence: Synthetic oligonucleotide
uguagaaucaauaauacua

SEQ ID NO: 438499 - RNA, 19 nt, Artificial Sequence
  Description of Artificial Sequence: Synthetic oligonucleotide
aagaaauuaggauagagau

SEQ ID NO: 438500 - RNA, 19 nt, Artificial Sequence
  Description of Artificial Sequence: Synthetic oligonucleotide
uaugcuggaaccauuauag

SEQ ID NO: 438501 - RNA, 19 nt, Artificial Sequence
  Description of Artificial Sequence: Synthetic oligonucleotide
aacaauaugguuuccccac

SEQ ID NO: 438502 - RNA, 19 nt, Artificial Sequence
  Description of Artificial Sequence: Synthetic oligonucleotide
acaucuauuauuauugucc

SEQ ID NO: 438503 - RNA, 19 nt, Artificial Sequence
  Description of Artificial Sequence: Synthetic oligonucleotide
acuguaucaaacuuaaaag

SEQ ID NO: 438504 - RNA, 19 nt, Artificial Sequence
  Description of Artificial Sequence: Synthetic oligonucleotide
aaauugguagaccacagcu

SEQ ID NO: 438505 - RNA, 19 nt, Artificial Sequence
  Description of Artificial Sequence: Synthetic oligonucleotide
caaauuaaagucaacacuc

SEQ ID NO: 438506 - RNA, 19 nt, Artificial Sequence
  Description of Artificial Sequence: Synthetic oligonucleotide
gaauugucuaaauugguag

SEQ ID NO: 438507 - RNA, 19 nt, Artificial Sequence
  Description of Artificial Sequence: Synthetic oligonucleotide
ucuauuauuauuguccucc

SEQ ID NO: 438508 - RNA, 19 nt, Artificial Sequence
  Description of Artificial Sequence: Synthetic oligonucleotide
aaacccuuuacaccaauuc

SEQ ID NO: 438509 - RNA, 19 nt, Artificial Sequence
  Description of Artificial Sequence: Synthetic oligonucleotide
aauucaucuaacuggcuug

SEQ ID NO: 438510 - RNA, 19 nt, Artificial Sequence
  Description of Artificial Sequence: Synthetic oligonucleotide
aaucaauaauacuacugug

SEQ ID NO: 438511 - RNA, 19 nt, Artificial Sequence
  Description of Artificial Sequence: Synthetic oligonucleotide
auaagguugacauuggcca

SEQ ID NO: 438512 - RNA, 19 nt, Artificial Sequence
  Description of Artificial Sequence: Synthetic oligonucleotide
agaacauucucuaaagccc

SEQ ID NO: 438513 - RNA, 19 nt, Artificial Sequence
  Description of Artificial Sequence: Synthetic oligonucleotide
uaauacuacugugugaugg

SEQ ID NO: 438514 - RNA, 19 nt, Artificial Sequence
  Description of Artificial Sequence: Synthetic oligonucleotide
uacacuuguagcaaaagcu

SEQ ID NO: 438515 - RNA, 19 nt, Artificial Sequence
  Description of Artificial Sequence: Synthetic oligonucleotide
aauauuguccacaacauaa

SEQ ID NO: 438516 - RNA, 19 nt, Artificial Sequence
  Description of Artificial Sequence: Synthetic oligonucleotide
cauagauacacugauggcg

SEQ ID NO: 438517 - RNA, 19 nt, Artificial Sequence
  Description of Artificial Sequence: Synthetic oligonucleotide
ucaccacuaacaaacuugg

SEQ ID NO: 438518 - RNA, 19 nt, Artificial Sequence
  Description of Artificial Sequence: Synthetic oligonucleotide
aguaauuccaacauaaggu

SEQ ID NO: 438519 - RNA, 19 nt, Artificial Sequence
  Description of Artificial Sequence: Synthetic oligonucleotide
aacacgauuugacuucagg

SEQ ID NO: 438520 - RNA, 19 nt, Artificial Sequence
  Description of Artificial Sequence: Synthetic oligonucleotide
aauuaggauagagaugguc

SEQ ID NO: 438521 - RNA, 19 nt, Artificial Sequence
  Description of Artificial Sequence: Synthetic oligonucleotide
aauuaaagucaacacucca

SEQ ID NO: 438522 - RNA, 19 nt, Artificial Sequence
  Description of Artificial Sequence: Synthetic oligonucleotide
ugaaauauuugccaccuau

SEQ ID NO: 438523 - RNA, 19 nt, Artificial Sequence
  Description of Artificial Sequence: Synthetic oligonucleotide
aaucauaucaaagcagaug

SEQ ID NO: 438524 - RNA, 19 nt, Artificial Sequence
  Description of Artificial Sequence: Synthetic oligonucleotide
ugaaggaacgcaaacaaua

SEQ ID NO: 438525 - RNA, 19 nt, Artificial Sequence
  Description of Artificial Sequence: Synthetic oligonucleotide
aauugucuaaauugguaga

SEQ ID NO: 438526 - RNA, 19 nt, Artificial Sequence
  Description of Artificial Sequence: Synthetic oligonucleotide
aggaacgcaaacaauaugg

SEQ ID NO: 438527 - RNA, 19 nt, Artificial Sequence
  Description of Artificial Sequence: Synthetic oligonucleotide
ugcacuaguaauuccaaca

SEQ ID NO: 438528 - RNA, 19 nt, Artificial Sequence
  Description of Artificial Sequence: Synthetic oligonucleotide
aaguuuaggauccaucaaa

SEQ ID NO: 438529 - RNA, 19 nt, Artificial Sequence
  Description of Artificial Sequence: Synthetic oligonucleotide
uuauuauuguccuccaaac

SEQ ID NO: 438530 - RNA, 19 nt, Artificial Sequence
  Description of Artificial Sequence: Synthetic oligonucleotide
ucuuaugguaacuacucca

SEQ ID NO: 438531 - RNA, 19 nt, Artificial Sequence
  Description of Artificial Sequence: Synthetic oligonucleotide
ugucuaaauugguagacca

SEQ ID NO: 438532 - RNA, 19 nt, Artificial Sequence
  Description of Artificial Sequence: Synthetic oligonucleotide
acauuuuaguuccuucugg

SEQ ID NO: 438533 - RNA, 19 nt, Artificial Sequence
  Description of Artificial Sequence: Synthetic oligonucleotide
cauaagguugacauuggcc

SEQ ID NO: 438534 - RNA, 19 nt, Artificial Sequence
  Description of Artificial Sequence: Synthetic oligonucleotide
aauucaauacuagaaacua

SEQ ID NO: 438535 - RNA, 19 nt, Artificial Sequence
  Description of Artificial Sequence: Synthetic oligonucleotide
uauaguacagguagaggga

SEQ ID NO: 438536 - RNA, 19 nt, Artificial Sequence
  Description of Artificial Sequence: Synthetic oligonucleotide
ucuggaaagacaucacuug

SEQ ID NO: 438537 - RNA, 19 nt, Artificial Sequence
  Description of Artificial Sequence: Synthetic oligonucleotide
uuuucauuaauaugacccu

SEQ ID NO: 438538 - RNA, 19 nt, Artificial Sequence
  Description of Artificial Sequence: Synthetic oligonucleotide
cuagaaacuaugcuggaac

SEQ ID NO: 438539 - RNA, 19 nt, Artificial Sequence
  Description of Artificial Sequence: Synthetic oligonucleotide
ucuaaauugguagaccaca

SEQ ID NO: 438540 - RNA, 19 nt, Artificial Sequence
  Description of Artificial Sequence: Synthetic oligonucleotide
accgaguaaacuuggacag

SEQ ID NO: 438541 - RNA, 19 nt, Artificial Sequence
  Description of Artificial Sequence: Synthetic oligonucleotide
acuacuccaacugauacag

SEQ ID NO: 438542 - RNA, 19 nt, Artificial Sequence
  Description of Artificial Sequence: Synthetic oligonucleotide
auugucuaaauugguagac

SEQ ID NO: 438543 - RNA, 19 nt, Artificial Sequence
  Description of Artificial Sequence: Synthetic oligonucleotide
auacgagacauccuuguag

SEQ ID NO: 438544 - RNA, 19 nt, Artificial Sequence
  Description of Artificial Sequence: Synthetic oligonucleotide
ugugccauauucauagacu

SEQ ID NO: 438545 - RNA, 19 nt, Artificial Sequence
  Description of Artificial Sequence: Synthetic oligonucleotide
ucuagcaccuuaauuguac

SEQ ID NO: 438546 - RNA, 19 nt, Artificial Sequence
  Description of Artificial Sequence: Synthetic oligonucleotide
auuggaagcaaguccuacg

SEQ ID NO: 438547 - RNA, 19 nt, Artificial Sequence
  Description of Artificial Sequence: Synthetic oligonucleotide
ucuugaaauauuugccacc

SEQ ID NO: 438548 - RNA, 19 nt, Artificial Sequence
  Description of Artificial Sequence: Synthetic oligonucleotide
aacgcucuuaacuguauca

SEQ ID NO: 438549 - RNA, 19 nt, Artificial Sequence
  Description of Artificial Sequence: Synthetic oligonucleotide
uucaccaagaaauuaggau

SEQ ID NO: 438550 - RNA, 19 nt, Artificial Sequence
  Description of Artificial Sequence: Synthetic oligonucleotide
aauacuacugugugaugga

SEQ ID NO: 438551 - RNA, 19 nt, Artificial Sequence
  Description of Artificial Sequence: Synthetic oligonucleotide
uaacaaacuuggcauaaga

SEQ ID NO: 438552 - RNA, 19 nt, Artificial Sequence
  Description of Artificial Sequence: Synthetic oligonucleotide
aacgcaaacaauaugguuu

SEQ ID NO: 438553 - RNA, 19 nt, Artificial Sequence
  Description of Artificial Sequence: Synthetic oligonucleotide
uaccgaguaaacuuggaca

SEQ ID NO: 438554 - RNA, 19 nt, Artificial Sequence
  Description of Artificial Sequence: Synthetic oligonucleotide
uaauaugacccuugaagga

SEQ ID NO: 438555 - RNA, 19 nt, Artificial Sequence
  Description of Artificial Sequence: Synthetic oligonucleotide
aguguuacggagaucauag

SEQ ID NO: 438556 - RNA, 19 nt, Artificial Sequence
  Description of Artificial Sequence: Synthetic oligonucleotide
aguaaacuuggacagacau

SEQ ID NO: 438557 - RNA, 19 nt, Artificial Sequence
  Description of Artificial Sequence: Synthetic oligonucleotide
ucaucuaacuggcuugcag

SEQ ID NO: 438558 - RNA, 19 nt, Artificial Sequence
  Description of Artificial Sequence: Synthetic oligonucleotide
aacccuuuacaccaauucu

SEQ ID NO: 438559 - RNA, 19 nt, Artificial Sequence
  Description of Artificial Sequence: Synthetic oligonucleotide
ugagauacgagacauccuu

SEQ ID NO: 438560 - RNA, 19 nt, Artificial Sequence
  Description of Artificial Sequence: Synthetic oligonucleotide
cuuaguguuacggagauca

SEQ ID NO: 438561 - RNA, 19 nt, Artificial Sequence
  Description of Artificial Sequence: Synthetic oligonucleotide
cauucaccaagaaauuagg

SEQ ID NO: 438562 - RNA, 19 nt, Artificial Sequence
  Description of Artificial Sequence: Synthetic oligonucleotide
ucauaucaaagcagauggg

SEQ ID NO: 438563 - RNA, 19 nt, Artificial Sequence
  Description of Artificial Sequence: Synthetic oligonucleotide
ugacaggagaguacaaacc

SEQ ID NO: 438564 - RNA, 19 nt, Artificial Sequence
  Description of Artificial Sequence: Synthetic oligonucleotide
auagauacacugauggcgg

SEQ ID NO: 438565 - RNA, 19 nt, Artificial Sequence
  Description of Artificial Sequence: Synthetic oligonucleotide
uggaaagacaucacuugcc

SEQ ID NO: 438566 - RNA, 19 nt, Artificial Sequence
  Description of Artificial Sequence: Synthetic oligonucleotide
acuagcauaugacaaugug

SEQ ID NO: 438567 - RNA, 19 nt, Artificial Sequence
  Description of Artificial Sequence: Synthetic oligonucleotide
guuacggagaucauaguag

SEQ ID NO: 438568 - RNA, 19 nt, Artificial Sequence
  Description of Artificial Sequence: Synthetic oligonucleotide
cuuuguacggagcagccag

SEQ ID NO: 438569 - RNA, 19 nt, Artificial Sequence
  Description of Artificial Sequence: Synthetic oligonucleotide
agcucauucaccaagaaau

SEQ ID NO: 438570 - RNA, 19 nt, Artificial Sequence
  Description of Artificial Sequence: Synthetic oligonucleotide
uguuacggagaucauagua

SEQ ID NO: 438571 - RNA, 19 nt, Artificial Sequence
  Description of Artificial Sequence: Synthetic oligonucleotide
aaggaacgcaaacaauaug

SEQ ID NO: 438572 - RNA, 19 nt, Artificial Sequence
  Description of Artificial Sequence: Synthetic oligonucleotide
ggaaccauuauagagauca

SEQ ID NO: 438573 - RNA, 19 nt, Artificial Sequence
  Description of Artificial Sequence: Synthetic oligonucleotide
acgcaaacaauaugguuuc

SEQ ID NO: 438574 - RNA, 19 nt, Artificial Sequence
  Description of Artificial Sequence: Synthetic oligonucleotide
ucauuaauaugacccuuga

SEQ ID NO: 438575 - RNA, 19 nt, Artificial Sequence
  Description of Artificial Sequence: Synthetic oligonucleotide
agagauggucaauauuguc

SEQ ID NO: 438576 - RNA, 19 nt, Artificial Sequence
  Description of Artificial Sequence: Synthetic oligonucleotide
cuaaauugguagaccacag

SEQ ID NO: 438577 - RNA, 19 nt, Artificial Sequence
  Description of Artificial Sequence: Synthetic oligonucleotide
aaaguuuaggauccaucaa

SEQ ID NO: 438578 - RNA, 19 nt, Artificial Sequence
  Description of Artificial Sequence: Synthetic oligonucleotide
agcauaugacaauguggcc

SEQ ID NO: 438579 - RNA, 19 nt, Artificial Sequence
  Description of Artificial Sequence: Synthetic oligonucleotide
auagacuuuaaucuucuuu

SEQ ID NO: 438580 - RNA, 19 nt, Artificial Sequence
  Description of Artificial Sequence: Synthetic oligonucleotide
cuuacagaguuguaccgag

SEQ ID NO: 438581 - RNA, 19 nt, Artificial Sequence
  Description of Artificial Sequence: Synthetic oligonucleotide
cuuaaccccagccagaaca

SEQ ID NO: 438582 - RNA, 19 nt, Artificial Sequence
  Description of Artificial Sequence: Synthetic oligonucleotide
guagaaucaauaauacuac

SEQ ID NO: 438583 - RNA, 19 nt, Artificial Sequence
  Description of Artificial Sequence: Synthetic oligonucleotide
agguucuuaugguaacuac

SEQ ID NO: 438584 - RNA, 19 nt, Artificial Sequence
  Description of Artificial Sequence: Synthetic oligonucleotide
uggugcuacucacugagug

SEQ ID NO: 438585 - RNA, 19 nt, Artificial Sequence
  Description of Artificial Sequence: Synthetic oligonucleotide
ucuuaacuguaucaaacuu

SEQ ID NO: 438586 - RNA, 19 nt, Artificial Sequence
  Description of Artificial Sequence: Synthetic oligonucleotide
acacgauuugacuucagga

SEQ ID NO: 438587 - RNA, 19 nt, Artificial Sequence
  Description of Artificial Sequence: Synthetic oligonucleotide
uggaucccguugcagagcg

SEQ ID NO: 438588 - RNA, 19 nt, Artificial Sequence
  Description of Artificial Sequence: Synthetic oligonucleotide
gaauuuguuucccuaucac

SEQ ID NO: 438589 - RNA, 19 nt, Artificial Sequence
  Description of Artificial Sequence: Synthetic oligonucleotide
caaaaugagcagugagucg

SEQ ID NO: 438590 - RNA, 19 nt, Artificial Sequence
  Description of Artificial Sequence: Synthetic oligonucleotide
cuaaugugcuguuauacca

SEQ ID NO: 438591 - RNA, 19 nt, Artificial Sequence
  Description of Artificial Sequence: Synthetic oligonucleotide
uccacaacauaauuacacu

SEQ ID NO: 438592 - RNA, 19 nt, Artificial Sequence
  Description of Artificial Sequence: Synthetic oligonucleotide
uuguaccgaguaaacuugg

SEQ ID NO: 438593 - RNA, 19 nt, Artificial Sequence
  Description of Artificial Sequence: Synthetic oligonucleotide
uaugacccuugaaggaacg

SEQ ID NO: 438594 - RNA, 19 nt, Artificial Sequence
  Description of Artificial Sequence: Synthetic oligonucleotide
aauauccacugcauccugg

SEQ ID NO: 438595 - RNA, 19 nt, Artificial Sequence
  Description of Artificial Sequence: Synthetic oligonucleotide
gauggggcagacgaagucg

SEQ ID NO: 438596 - RNA, 19 nt, Artificial Sequence
  Description of Artificial Sequence: Synthetic oligonucleotide
aaaauuagccacacagcca

SEQ ID NO: 438597 - RNA, 19 nt, Artificial Sequence
  Description of Artificial Sequence: Synthetic oligonucleotide
acuacugugugauggagaa

SEQ ID NO: 438598 - RNA, 19 nt, Artificial Sequence
  Description of Artificial Sequence: Synthetic oligonucleotide
agaagucccacugaaaccu

SEQ ID NO: 438599 - RNA, 19 nt, Artificial Sequence
  Description of Artificial Sequence: Synthetic oligonucleotide
cuggaaagacaucacuugc

SEQ ID NO: 438600 - RNA, 19 nt, Artificial Sequence
  Description of Artificial Sequence: Synthetic oligonucleotide
cacaagcuauauaaucucc

SEQ ID NO: 438601 - RNA, 19 nt, Artificial Sequence
  Description of Artificial Sequence: Synthetic oligonucleotide
uggcggagaauucucuggg

SEQ ID NO: 438602 - RNA, 19 nt, Artificial Sequence
  Description of Artificial Sequence: Synthetic oligonucleotide
uguuauaccaagguuguuu

SEQ ID NO: 438603 - RNA, 19 nt, Artificial Sequence
  Description of Artificial Sequence: Synthetic oligonucleotide
uuacaccaauucuagcacc

SEQ ID NO: 438604 - RNA, 19 nt, Artificial Sequence
  Description of Artificial Sequence: Synthetic oligonucleotide
gucuuacagaguuguaccg

SEQ ID NO: 438605 - RNA, 19 nt, Artificial Sequence
  Description of Artificial Sequence: Synthetic oligonucleotide
uggcauaagagacugcuuu

SEQ ID NO: 438606 - RNA, 19 nt, Artificial Sequence
  Description of Artificial Sequence: Synthetic oligonucleotide
uuaggauagagauggucaa

SEQ ID NO: 438607 - RNA, 19 nt, Artificial Sequence
  Description of Artificial Sequence: Synthetic oligonucleotide
auaaucacugcuggcuagc

SEQ ID NO: 438608 - RNA, 19 nt, Artificial Sequence
  Description of Artificial Sequence: Synthetic oligonucleotide
uccugaucaguuccuagca

SEQ ID NO: 438609 - RNA, 19 nt, Artificial Sequence
  Description of Artificial Sequence: Synthetic oligonucleotide
uuccuagcaaaucuugaaa

SEQ ID NO: 438610 - RNA, 19 nt, Artificial Sequence
  Description of Artificial Sequence: Synthetic oligonucleotide
uacaccaauucuagcaccu

SEQ ID NO: 438611 - RNA, 19 nt, Artificial Sequence
  Description of Artificial Sequence: Synthetic oligonucleotide
aaaucaagguuauccugau

SEQ ID NO: 438612 - RNA, 19 nt, Artificial Sequence
  Description of Artificial Sequence: Synthetic oligonucleotide
ggaagcaaguccuacgaag

SEQ ID NO: 438613 - RNA, 19 nt, Artificial Sequence
  Description of Artificial Sequence: Synthetic oligonucleotide
auacagcugauuuuggaau

SEQ ID NO: 438614 - RNA, 19 nt, Artificial Sequence
  Description of Artificial Sequence: Synthetic oligonucleotide
aaucacugcuggcuagcag

SEQ ID NO: 438615 - RNA, 19 nt, Artificial Sequence
  Description of Artificial Sequence: Synthetic oligonucleotide
acauuuugucauguacgcc

SEQ ID NO: 438616 - RNA, 19 nt, Artificial Sequence
  Description of Artificial Sequence: Synthetic oligonucleotide
aauugcaggucauuucauu

SEQ ID NO: 438617 - RNA, 19 nt, Artificial Sequence
  Description of Artificial Sequence: Synthetic oligonucleotide
ugaauauccacugcauccu

SEQ ID NO: 438618 - RNA, 19 nt, Artificial Sequence
  Description of Artificial Sequence: Synthetic oligonucleotide
uguacccuggcuguuagca

SEQ ID NO: 438619 - RNA, 19 nt, Artificial Sequence
  Description of Artificial Sequence: Synthetic oligonucleotide
ugagugguccaauuugaac

SEQ ID NO: 438620 - RNA, 19 nt, Artificial Sequence
  Description of Artificial Sequence: Synthetic oligonucleotide
cacaaucccggucaaauuc

SEQ ID NO: 438621 - RNA, 19 nt, Artificial Sequence
  Description of Artificial Sequence: Synthetic oligonucleotide
guagugaacacagugaucu

SEQ ID NO: 438622 - RNA, 19 nt, Artificial Sequence
  Description of Artificial Sequence: Synthetic oligonucleotide
uagagauggucaauauugu

SEQ ID NO: 438623 - RNA, 19 nt, Artificial Sequence
  Description of Artificial Sequence: Synthetic oligonucleotide
aucuauuauuauuguccuc

SEQ ID NO: 438624 - RNA, 19 nt, Artificial Sequence
  Description of Artificial Sequence: Synthetic oligonucleotide
ugcuaaugugcuguuauac

SEQ ID NO: 438625 - RNA, 19 nt, Artificial Sequence
  Description of Artificial Sequence: Synthetic oligonucleotide
ucuaggugguuuucaggag

SEQ ID NO: 438626 - RNA, 19 nt, Artificial Sequence
  Description of Artificial Sequence: Synthetic oligonucleotide
aagucagcaaagucuuaga

SEQ ID NO: 438627 - RNA, 19 nt, Artificial Sequence
  Description of Artificial Sequence: Synthetic oligonucleotide
cuauauaaucuccauugga

SEQ ID NO: 438628 - RNA, 19 nt, Artificial Sequence
  Description of Artificial Sequence: Synthetic oligonucleotide
uggccaauggucuuacaga

SEQ ID NO: 438629 - RNA, 19 nt, Artificial Sequence
  Description of Artificial Sequence: Synthetic oligonucleotide
aauucucuggguauuccca

SEQ ID NO: 438630 - RNA, 19 nt, Artificial Sequence
  Description of Artificial Sequence: Synthetic oligonucleotide
agaaauuaggauagagaug

SEQ ID NO: 438631 - RNA, 19 nt, Artificial Sequence
  Description of Artificial Sequence: Synthetic oligonucleotide
gagaucacuagcauaugac

SEQ ID NO: 438632 - RNA, 19 nt, Artificial Sequence
  Description of Artificial Sequence: Synthetic oligonucleotide
uacgccuccucaaucauau

SEQ ID NO: 438633 - RNA, 19 nt, Artificial Sequence
  Description of Artificial Sequence: Synthetic oligonucleotide
acgauuugacuucaggaaa

SEQ ID NO: 438634 - RNA, 19 nt, Artificial Sequence
  Description of Artificial Sequence: Synthetic oligonucleotide
acugaaaccugaagguugg

SEQ ID NO: 438635 - RNA, 19 nt, Artificial Sequence
  Description of Artificial Sequence: Synthetic oligonucleotide
auaguagugaacacaguga

SEQ ID NO: 438636 - RNA, 19 nt, Artificial Sequence
  Description of Artificial Sequence: Synthetic oligonucleotide
gcauacauuagccuuugcc

SEQ ID NO: 438637 - RNA, 19 nt, Artificial Sequence
  Description of Artificial Sequence: Synthetic oligonucleotide
uugucuaaauugguagacc

SEQ ID NO: 438638 - RNA, 19 nt, Artificial Sequence
  Description of Artificial Sequence: Synthetic oligonucleotide
cucuaggugguuuucagga

SEQ ID NO: 438639 - RNA, 19 nt, Artificial Sequence
  Description of Artificial Sequence: Synthetic oligonucleotide
gcuauauaaucuccauugg

SEQ ID NO: 438640 - RNA, 19 nt, Artificial Sequence
  Description of Artificial Sequence: Synthetic oligonucleotide
aggucauuucauucucagg

SEQ ID NO: 438641 - RNA, 19 nt, Artificial Sequence
  Description of Artificial Sequence: Synthetic oligonucleotide
ucccggucaaauucaauac

SEQ ID NO: 438642 - RNA, 19 nt, Artificial Sequence
  Description of Artificial Sequence: Synthetic oligonucleotide
aguuguucucacuuccaca

SEQ ID NO: 438643 - RNA, 19 nt, Artificial Sequence
  Description of Artificial Sequence: Synthetic oligonucleotide
cuagcaccuuaauuguacc

SEQ ID NO: 438644 - RNA, 19 nt, Artificial Sequence
  Description of Artificial Sequence: Synthetic oligonucleotide
aagucuuagaaaguccuuu

SEQ ID NO: 438645 - RNA, 19 nt, Artificial Sequence
  Description of Artificial Sequence: Synthetic oligonucleotide
ugguaacuacuccaacuga

SEQ ID NO: 438646 - RNA, 19 nt, Artificial Sequence
  Description of Artificial Sequence: Synthetic oligonucleotide
caccuaugcccauuggugc

SEQ ID NO: 438647 - RNA, 19 nt, Artificial Sequence
  Description of Artificial Sequence: Synthetic oligonucleotide
cauuuugucauguacgccu

SEQ ID NO: 438648 - RNA, 19 nt, Artificial Sequence
  Description of Artificial Sequence: Synthetic oligonucleotide
caguuguggcucaauaaac

SEQ ID NO: 438649 - RNA, 19 nt, Artificial Sequence
  Description of Artificial Sequence: Synthetic oligonucleotide
acggagaucauaguaguga

SEQ ID NO: 438650 - RNA, 19 nt, Artificial Sequence
  Description of Artificial Sequence: Synthetic oligonucleotide
uccaucccauaguauaaca

SEQ ID NO: 438651 - RNA, 19 nt, Artificial Sequence
  Description of Artificial Sequence: Synthetic oligonucleotide
uagcaccuuaauuguaccc

SEQ ID NO: 438652 - RNA, 19 nt, Artificial Sequence
  Description of Artificial Sequence: Synthetic oligonucleotide
gagaguacaaaccacucau

SEQ ID NO: 438653 - RNA, 19 nt, Artificial Sequence
  Description of Artificial Sequence: Synthetic oligonucleotide
agugcucuuguucacucga

SEQ ID NO: 438654 - RNA, 19 nt, Artificial Sequence
  Description of Artificial Sequence: Synthetic oligonucleotide
ucguaggaguuguggaucc

SEQ ID NO: 438655 - RNA, 19 nt, Artificial Sequence
  Description of Artificial Sequence: Synthetic oligonucleotide
agugagucgcuuucgucug

SEQ ID NO: 438656 - RNA, 19 nt, Artificial Sequence
  Description of Artificial Sequence: Synthetic oligonucleotide
ggaauugcaggucauuuca

SEQ ID NO: 438657 - RNA, 19 nt, Artificial Sequence
  Description of Artificial Sequence: Synthetic oligonucleotide
ugcuuaguguuacggagau

SEQ ID NO: 438658 - RNA, 19 nt, Artificial Sequence
  Description of Artificial Sequence: Synthetic oligonucleotide
uguaccgaguaaacuugga

SEQ ID NO: 438659 - RNA, 19 nt, Artificial Sequence
  Description of Artificial Sequence: Synthetic oligonucleotide
ucuguuugagaaugagcuc

SEQ ID NO: 438660 - RNA, 19 nt, Artificial Sequence
  Description of Artificial Sequence: Synthetic oligonucleotide
aacauucucuaaagcccac

SEQ ID NO: 438661 - RNA, 19 nt, Artificial Sequence
  Description of Artificial Sequence: Synthetic oligonucleotide
acucuuuuaauauccucuu

SEQ ID NO: 438662 - RNA, 19 nt, Artificial Sequence
  Description of Artificial Sequence: Synthetic oligonucleotide
uguugaggcagagacaauu

SEQ ID NO: 438663 - RNA, 19 nt, Artificial Sequence
  Description of Artificial Sequence: Synthetic oligonucleotide
augugauucugcuuccagu

SEQ ID NO: 438664 - RNA, 19 nt, Artificial Sequence
  Description of Artificial Sequence: Synthetic oligonucleotide
cuguuugagaaugagcuca

SEQ ID NO: 438665 - RNA, 19 nt, Artificial Sequence
  Description of Artificial Sequence: Synthetic oligonucleotide
uacggagaucauaguagug

SEQ ID NO: 438666 - RNA, 19 nt, Artificial Sequence
  Description of Artificial Sequence: Synthetic oligonucleotide
acacuugggacaucuauua

SEQ ID NO: 438667 - RNA, 19 nt, Artificial Sequence
  Description of Artificial Sequence: Synthetic oligonucleotide
auguacgccuccucaauca

SEQ ID NO: 438668 - RNA, 19 nt, Artificial Sequence
  Description of Artificial Sequence: Synthetic oligonucleotide
gaauauccacugcauccug

SEQ ID NO: 438669 - RNA, 19 nt, Artificial Sequence
  Description of Artificial Sequence: Synthetic oligonucleotide
gcuaaugugcuguuauacc

SEQ ID NO: 438670 - RNA, 19 nt, Artificial Sequence
  Description of Artificial Sequence: Synthetic oligonucleotide
auaugacccuugaaggaac

SEQ ID NO: 438671 - RNA, 19 nt, Artificial Sequence
  Description of Artificial Sequence: Synthetic oligonucleotide
augugcuacuucuucaaaa

SEQ ID NO: 438672 - RNA, 19 nt, Artificial Sequence
  Description of Artificial Sequence: Synthetic oligonucleotide
ucuggguauucccaauguc

SEQ ID NO: 438673 - RNA, 19 nt, Artificial Sequence
  Description of Artificial Sequence: Synthetic oligonucleotide
guaccgaguaaacuuggac

SEQ ID NO: 438674 - RNA, 19 nt, Artificial Sequence
  Description of Artificial Sequence: Synthetic oligonucleotide
agcaccuuaauuguacccu

SEQ ID NO: 438675 - RNA, 19 nt, Artificial Sequence
  Description of Artificial Sequence: Synthetic oligonucleotide
auauccacugcauccugga

SEQ ID NO: 438676 - RNA, 19 nt, Artificial Sequence
  Description of Artificial Sequence: Synthetic oligonucleotide
uuguaaccccagcaauugc

SEQ ID NO: 438677 - RNA, 19 nt, Artificial Sequence
  Description of Artificial Sequence: Synthetic oligonucleotide
gaguuguucucacuuccac

SEQ ID NO: 438678 - RNA, 19 nt, Artificial Sequence
  Description of Artificial Sequence: Synthetic oligonucleotide
ggugcuacucacugagugg

SEQ ID NO: 438679 - RNA, 19 nt, Artificial Sequence
  Description of Artificial Sequence: Synthetic oligonucleotide
cacgauuugacuucaggaa

SEQ ID NO: 438680 - RNA, 19 nt, Artificial Sequence
  Description of Artificial Sequence: Synthetic oligonucleotide
cuccccgucugauagugcc

SEQ ID NO: 438681 - RNA, 19 nt, Artificial Sequence
  Description of Artificial Sequence: Synthetic oligonucleotide
ugguccaauuugaaccucu

SEQ ID NO: 438682 - RNA, 19 nt, Artificial Sequence
  Description of Artificial Sequence: Synthetic oligonucleotide
gaugcuaaugugcuguuau

SEQ ID NO: 438683 - RNA, 19 nt, Artificial Sequence
  Description of Artificial Sequence: Synthetic oligonucleotide
uuauuucuccuugcaaccu

SEQ ID NO: 438684 - RNA, 19 nt, Artificial Sequence
  Description of Artificial Sequence: Synthetic oligonucleotide
caugugauucugcuuccag

SEQ ID NO: 438685 - RNA, 19 nt, Artificial Sequence
  Description of Artificial Sequence: Synthetic oligonucleotide
aauccaucccauaguauaa

SEQ ID NO: 438686 - RNA, 19 nt, Artificial Sequence
  Description of Artificial Sequence: Synthetic oligonucleotide
cauaaggaucugaagcuga

SEQ ID NO: 438687 - RNA, 19 nt, Artificial Sequence
  Description of Artificial Sequence: Synthetic oligonucleotide
uguacggagcagccagugc

SEQ ID NO: 438688 - RNA, 19 nt, Artificial Sequence
  Description of Artificial Sequence: Synthetic oligonucleotide
caccuuaauuguacccugg

SEQ ID NO: 438689 - RNA, 19 nt, Artificial Sequence
  Description of Artificial Sequence: Synthetic oligonucleotide
agaaacuaugcuggaacca

SEQ ID NO: 438690 - RNA, 19 nt, Artificial Sequence
  Description of Artificial Sequence: Synthetic oligonucleotide
cauccuggaugacugugcc

SEQ ID NO: 438691 - RNA, 19 nt, Artificial Sequence
  Description of Artificial Sequence: Synthetic oligonucleotide
uaggauccaucaaauuaaa

SEQ ID NO: 438692 - RNA, 19 nt, Artificial Sequence
  Description of Artificial Sequence: Synthetic oligonucleotide
uuaaccccagccagaacau

SEQ ID NO: 438693 - RNA, 19 nt, Artificial Sequence
  Description of Artificial Sequence: Synthetic oligonucleotide
guaggaguuguggaucccg

SEQ ID NO: 438694 - RNA, 19 nt, Artificial Sequence
  Description of Artificial Sequence: Synthetic oligonucleotide
acaagcuauauaaucucca

SEQ ID NO: 438695 - RNA, 19 nt, Artificial Sequence
  Description of Artificial Sequence: Synthetic oligonucleotide
uuucgucuggaugcuaaug

SEQ ID NO: 438696 - RNA, 19 nt, Artificial Sequence
  Description of Artificial Sequence: Synthetic oligonucleotide
uguuugagaaugagcucau

SEQ ID NO: 438697 - RNA, 19 nt, Artificial Sequence
  Description of Artificial Sequence: Synthetic oligonucleotide
acuaacaaacuuggcauaa

SEQ ID NO: 438698 - RNA, 19 nt, Artificial Sequence
  Description of Artificial Sequence: Synthetic oligonucleotide
acaauaugguuuccccaca

SEQ ID NO: 438699 - RNA, 19 nt, Artificial Sequence
  Description of Artificial Sequence: Synthetic oligonucleotide
aauugguagaccacagcuu

SEQ ID NO: 438700 - RNA, 19 nt, Artificial Sequence
  Description of Artificial Sequence: Synthetic oligonucleotide
ugauagugcccgccaacac

SEQ ID NO: 438701 - RNA, 19 nt, Artificial Sequence
  Description of Artificial Sequence: Synthetic oligonucleotide
agaaggagcuucaaacuga

SEQ ID NO: 438702 - RNA, 19 nt, Artificial Sequence
  Description of Artificial Sequence: Synthetic oligonucleotide
guaauuccaacauaagguu

SEQ ID NO: 438703 - RNA, 19 nt, Artificial Sequence
  Description of Artificial Sequence: Synthetic oligonucleotide
aggagaguacaaaccacuc

SEQ ID NO: 438704 - RNA, 19 nt, Artificial Sequence
  Description of Artificial Sequence: Synthetic oligonucleotide
agucguugcuuuuguccuc

SEQ ID NO: 438705 - RNA, 19 nt, Artificial Sequence
  Description of Artificial Sequence: Synthetic oligonucleotide
aguuuaggauccaucaaau

SEQ ID NO: 438706 - RNA, 19 nt, Artificial Sequence
  Description of Artificial Sequence: Synthetic oligonucleotide
cuaacaaacuuggcauaag

SEQ ID NO: 438707 - RNA, 19 nt, Artificial Sequence
  Description of Artificial Sequence: Synthetic oligonucleotide
auacuacugugugauggag

SEQ ID NO: 438708 - RNA, 19 nt, Artificial Sequence
  Description of Artificial Sequence: Synthetic oligonucleotide
cuugccacggaauugucua

SEQ ID NO: 438709 - RNA, 19 nt, Artificial Sequence
  Description of Artificial Sequence: Synthetic oligonucleotide
caccacgccugacaaaggc

SEQ ID NO: 438710 - RNA, 19 nt, Artificial Sequence
  Description of Artificial Sequence: Synthetic oligonucleotide
uuuguacggagcagccagu

SEQ ID NO: 438711 - RNA, 19 nt, Artificial Sequence
  Description of Artificial Sequence: Synthetic oligonucleotide
gcaaacacgauuugacuuc

SEQ ID NO: 438712 - RNA, 19 nt, Artificial Sequence
  Description of Artificial Sequence: Synthetic oligonucleotide
gauacacugauggcggaga

SEQ ID NO: 438713 - RNA, 19 nt, Artificial Sequence
  Description of Artificial Sequence: Synthetic oligonucleotide
augacccuugaaggaacgc

SEQ ID NO: 438714 - RNA, 19 nt, Artificial Sequence
  Description of Artificial Sequence: Synthetic oligonucleotide
gagauacgagacauccuug

SEQ ID NO: 438715 - RNA, 19 nt, Artificial Sequence
  Description of Artificial Sequence: Synthetic oligonucleotide
uuucauucucaggguaaug

SEQ ID NO: 438716 - RNA, 19 nt, Artificial Sequence
  Description of Artificial Sequence: Synthetic oligonucleotide
agauacacugauggcggag

SEQ ID NO: 438717 - RNA, 19 nt, Artificial Sequence
  Description of Artificial Sequence: Synthetic oligonucleotide
acauuggacuccccgucug

SEQ ID NO: 438718 - RNA, 19 nt, Artificial Sequence
  Description of Artificial Sequence: Synthetic oligonucleotide
gucguugcuuuuguccucg

SEQ ID NO: 438719 - RNA, 19 nt, Artificial Sequence
  Description of Artificial Sequence: Synthetic oligonucleotide
auucaccaagaaauuagga

SEQ ID NO: 438720 - RNA, 19 nt, Artificial Sequence
  Description of Artificial Sequence: Synthetic oligonucleotide
gcauaugacaauguggcca

SEQ ID NO: 438721 - RNA, 19 nt, Artificial Sequence
  Description of Artificial Sequence: Synthetic oligonucleotide
uggcuguuagcagcaauca

SEQ ID NO: 438722 - RNA, 19 nt, Artificial Sequence
  Description of Artificial Sequence: Synthetic oligonucleotide
acgccugacaaaggcauuc

SEQ ID NO: 438723 - RNA, 19 nt, Artificial Sequence
  Description of Artificial Sequence: Synthetic oligonucleotide
accuaugcccauuggugcu

SEQ ID NO: 438724 - RNA, 19 nt, Artificial Sequence
  Description of Artificial Sequence: Synthetic oligonucleotide
cauaguauaacagugccuu

SEQ ID NO: 438725 - RNA, 19 nt, Artificial Sequence
  Description of Artificial Sequence: Synthetic oligonucleotide
acugagugguccaauuuga

SEQ ID NO: 438726 - RNA, 19 nt, Artificial Sequence
  Description of Artificial Sequence: Synthetic oligonucleotide
uugccaccuaugcccauug

SEQ ID NO: 438727 - RNA, 19 nt, Artificial Sequence
  Description of Artificial Sequence: Synthetic oligonucleotide
gaacgcucuuaacuguauc

SEQ ID NO: 438728 - RNA, 19 nt, Artificial Sequence
  Description of Artificial Sequence: Synthetic oligonucleotide
uucucacuuccacaagcua

SEQ ID NO: 438729 - RNA, 19 nt, Artificial Sequence
  Description of Artificial Sequence: Synthetic oligonucleotide
gaggagcaaacacgauuug

SEQ ID NO: 438730 - RNA, 19 nt, Artificial Sequence
  Description of Artificial Sequence: Synthetic oligonucleotide
aggagcaaacacgauuuga

SEQ ID NO: 438731 - RNA, 19 nt, Artificial Sequence
  Description of Artificial Sequence: Synthetic oligonucleotide
uagugaacacagugaucug

SEQ ID NO: 438732 - RNA, 19 nt, Artificial Sequence
  Description of Artificial Sequence: Synthetic oligonucleotide
cauuggaagcaaguccuac

SEQ ID NO: 438733 - RNA, 19 nt, Artificial Sequence
  Description of Artificial Sequence: Synthetic oligonucleotide
aaagucuuagaaaguccuu

SEQ ID NO: 438734 - RNA, 19 nt, Artificial Sequence
  Description of Artificial Sequence: Synthetic oligonucleotide
gaagcaaguccuacgaagu

SEQ ID NO: 438735 - RNA, 19 nt, Artificial Sequence
  Description of Artificial Sequence: Synthetic oligonucleotide
uagauacacugauggcgga

SEQ ID NO: 438736 - RNA, 19 nt, Artificial Sequence
  Description of Artificial Sequence: Synthetic oligonucleotide
cauguacgccuccucaauc

SEQ ID NO: 438737 - RNA, 19 nt, Artificial Sequence
  Description of Artificial Sequence: Synthetic oligonucleotide
cuuugccucaaugcuugcc

SEQ ID NO: 438738 - RNA, 19 nt, Artificial Sequence
  Description of Artificial Sequence: Synthetic oligonucleotide
ugguagaccacagcuucac

SEQ ID NO: 438739 - RNA, 19 nt, Artificial Sequence
  Description of Artificial Sequence: Synthetic oligonucleotide
cucaguuguggcucaauaa

SEQ ID NO: 438740 - RNA, 19 nt, Artificial Sequence
  Description of Artificial Sequence: Synthetic oligonucleotide
uuguacggagcagccagug

SEQ ID NO: 438741 - RNA, 19 nt, Artificial Sequence
  Description of Artificial Sequence: Synthetic oligonucleotide
cacaguuuuaguuggcugu

SEQ ID NO: 438742 - RNA, 19 nt, Artificial Sequence
  Description of Artificial Sequence: Synthetic oligonucleotide
acaaucccggucaaauuca

SEQ ID NO: 438743 - RNA, 19 nt, Artificial Sequence
  Description of Artificial Sequence: Synthetic oligonucleotide
cuugaaauauuugccaccu

SEQ ID NO: 438744 - RNA, 19 nt, Artificial Sequence
  Description of Artificial Sequence: Synthetic oligonucleotide
cucuuaacuguaucaaacu

SEQ ID NO: 438745 - RNA, 19 nt, Artificial Sequence
  Description of Artificial Sequence: Synthetic oligonucleotide
uuaguguuacggagaucau

SEQ ID NO: 438746 - RNA, 19 nt, Artificial Sequence
  Description of Artificial Sequence: Synthetic oligonucleotide
acuaugcuggaaccauuau

SEQ ID NO: 438747 - RNA, 19 nt, Artificial Sequence
  Description of Artificial Sequence: Synthetic oligonucleotide
gucuaaauugguagaccac

SEQ ID NO: 438748 - RNA, 19 nt, Artificial Sequence
  Description of Artificial Sequence: Synthetic oligonucleotide
gacuccccgucugauagug

SEQ ID NO: 438749 - RNA, 19 nt, Artificial Sequence
  Description of Artificial Sequence: Synthetic oligonucleotide
ggagaguacaaaccacuca

SEQ ID NO: 438750 - RNA, 19 nt, Artificial Sequence
  Description of Artificial Sequence: Synthetic oligonucleotide
gaaacuaugcuggaaccau

SEQ ID NO: 438751 - RNA, 19 nt, Artificial Sequence
  Description of Artificial Sequence: Synthetic oligonucleotide
cuuugaucucuguccugug

SEQ ID NO: 438752 - RNA, 19 nt, Artificial Sequence
  Description of Artificial Sequence: Synthetic oligonucleotide
guacggagcagccagugcu

SEQ ID NO: 438753 - RNA, 19 nt, Artificial Sequence
  Description of Artificial Sequence: Synthetic oligonucleotide
gcucuaggugguuuucagg

SEQ ID NO: 438754 - RNA, 19 nt, Artificial Sequence
  Description of Artificial Sequence: Synthetic oligonucleotide
uugaaccucuuuuccucaa

SEQ ID NO: 438755 - RNA, 19 nt, Artificial Sequence
  Description of Artificial Sequence: Synthetic oligonucleotide
aaauuaggauagagauggu

SEQ ID NO: 438756 - RNA, 19 nt, Artificial Sequence
  Description of Artificial Sequence: Synthetic oligonucleotide
uagagaucacuagcauaug

SEQ ID NO: 438757 - RNA, 19 nt, Artificial Sequence
  Description of Artificial Sequence: Synthetic oligonucleotide
gagcagugagucgcuuucg

SEQ ID NO: 438758 - RNA, 19 nt, Artificial Sequence
  Description of Artificial Sequence: Synthetic oligonucleotide
caccacuaacaaacuuggc

SEQ ID NO: 438759 - RNA, 19 nt, Artificial Sequence
  Description of Artificial Sequence: Synthetic oligonucleotide
uccccgucugauagugccc

SEQ ID NO: 438760 - RNA, 19 nt, Artificial Sequence
  Description of Artificial Sequence: Synthetic oligonucleotide
gaacgcaaacaauaugguu

SEQ ID NO: 438761 - RNA, 19 nt, Artificial Sequence
  Description of Artificial Sequence: Synthetic oligonucleotide
auacacugauggcggagaa

SEQ ID NO: 438762 - RNA, 19 nt, Artificial Sequence
  Description of Artificial Sequence: Synthetic oligonucleotide
cucaaugcuugccacggaa

SEQ ID NO: 438763 - RNA, 19 nt, Artificial Sequence
  Description of Artificial Sequence: Synthetic oligonucleotide
agcaaguccuacgaaguuu

SEQ ID NO: 438764 - RNA, 19 nt, Artificial Sequence
  Description of Artificial Sequence: Synthetic oligonucleotide
ccaggaugacucuggaaag

SEQ ID NO: 438765 - RNA, 19 nt, Artificial Sequence
  Description of Artificial Sequence: Synthetic oligonucleotide
gaaccauuauagagaucac

SEQ ID NO: 438766 - RNA, 19 nt, Artificial Sequence
  Description of Artificial Sequence: Synthetic oligonucleotide
guagagggaguuguucuca

SEQ ID NO: 438767 - RNA, 19 nt, Artificial Sequence
  Description of Artificial Sequence: Synthetic oligonucleotide
cuuuccggucuuuguccag

SEQ ID NO: 438768 - RNA, 19 nt, Artificial Sequence
  Description of Artificial Sequence: Synthetic oligonucleotide
aaacuaugcuggaaccauu

SEQ ID NO: 438769 - RNA, 19 nt, Artificial Sequence
  Description of Artificial Sequence: Synthetic oligonucleotide
cuacuccaacugauacagc

SEQ ID NO: 438770 - RNA, 19 nt, Artificial Sequence
  Description of Artificial Sequence: Synthetic oligonucleotide
gcaccuuaauuguacccug

SEQ ID NO: 438771 - RNA, 19 nt, Artificial Sequence
  Description of Artificial Sequence: Synthetic oligonucleotide
cuguagaaucaauaauacu

SEQ ID NO: 438772 - RNA, 19 nt, Artificial Sequence
  Description of Artificial Sequence: Synthetic oligonucleotide
gugagucgcuuucgucugg

SEQ ID NO: 438773 - RNA, 19 nt, Artificial Sequence
  Description of Artificial Sequence: Synthetic oligonucleotide
gacccuugaaggaacgcaa

SEQ ID NO: 438774 - RNA, 19 nt, Artificial Sequence
  Description of Artificial Sequence: Synthetic oligonucleotide
guagaccacagcuucacuu

SEQ ID NO: 438775 - RNA, 19 nt, Artificial Sequence
  Description of Artificial Sequence: Synthetic oligonucleotide
ggaauugucuaaauuggua

SEQ ID NO: 438776 - RNA, 19 nt, Artificial Sequence
  Description of Artificial Sequence: Synthetic oligonucleotide
gcuacucacugaguggucc

SEQ ID NO: 438777 - RNA, 19 nt, Artificial Sequence
  Description of Artificial Sequence: Synthetic oligonucleotide
cacagcauacauuagccuu

SEQ ID NO: 438778 - RNA, 19 nt, Artificial Sequence
  Description of Artificial Sequence: Synthetic oligonucleotide
uucaucuaacuggcuugca

SEQ ID NO: 438779 - RNA, 19 nt, Artificial Sequence
  Description of Artificial Sequence: Synthetic oligonucleotide
acgcucuuaacuguaucaa

SEQ ID NO: 438780 - RNA, 19 nt, Artificial Sequence
  Description of Artificial Sequence: Synthetic oligonucleotide
guaacuacuccaacugaua

SEQ ID NO: 438781 - RNA, 19 nt, Artificial Sequence
  Description of Artificial Sequence: Synthetic oligonucleotide
ggagaaggagcuucaaacu

SEQ ID NO: 438782 - RNA, 19 nt, Artificial Sequence
  Description of Artificial Sequence: Synthetic oligonucleotide
augcuaaugugcuguuaua

SEQ ID NO: 438783 - RNA, 19 nt, Artificial Sequence
  Description of Artificial Sequence: Synthetic oligonucleotide
gugccauauucauagacuu

SEQ ID NO: 438784 - RNA, 19 nt, Artificial Sequence
  Description of Artificial Sequence: Synthetic oligonucleotide
aaugucccaauggcauaaa

SEQ ID NO: 438785 - RNA, 19 nt, Artificial Sequence
  Description of Artificial Sequence: Synthetic oligonucleotide
gaguaaacuuggacagaca

SEQ ID NO: 438786 - RNA, 19 nt, Artificial Sequence
  Description of Artificial Sequence: Synthetic oligonucleotide
cugauagugcccgccaaca

SEQ ID NO: 438787 - RNA, 19 nt, Artificial Sequence
  Description of Artificial Sequence: Synthetic oligonucleotide
aaugagcagugagucgcuu

SEQ ID NO: 438788 - RNA, 19 nt, Artificial Sequence
  Description of Artificial Sequence: Synthetic oligonucleotide
ugccacggaauugucuaaa

SEQ ID NO: 438789 - RNA, 19 nt, Artificial Sequence
  Description of Artificial Sequence: Synthetic oligonucleotide
uugccacggaauugucuaa

SEQ ID NO: 438790 - RNA, 19 nt, Artificial Sequence
  Description of Artificial Sequence: Synthetic oligonucleotide
uguucacucgagccuccuu

SEQ ID NO: 438791 - RNA, 19 nt, Artificial Sequence
  Description of Artificial Sequence: Synthetic oligonucleotide
cacuaacaaacuuggcaua

SEQ ID NO: 438792 - RNA, 19 nt, Artificial Sequence
  Description of Artificial Sequence: Synthetic oligonucleotide
cuggaugcuaaugugcugu

SEQ ID NO: 438793 - RNA, 19 nt, Artificial Sequence
  Description of Artificial Sequence: Synthetic oligonucleotide
ucgagccuccuuuccuuaa

SEQ ID NO: 438794 - RNA, 19 nt, Artificial Sequence
  Description of Artificial Sequence: Synthetic oligonucleotide
cggucaaauucaauacuag

SEQ ID NO: 438795 - RNA, 19 nt, Artificial Sequence
  Description of Artificial Sequence: Synthetic oligonucleotide
gguucuuaugguaacuacu

SEQ ID NO: 438796 - RNA, 19 nt, Artificial Sequence
  Description of Artificial Sequence: Synthetic oligonucleotide
guaaccccagcaauugcaa

SEQ ID NO: 438797 - RNA, 19 nt, Artificial Sequence
  Description of Artificial Sequence: Synthetic oligonucleotide
uggaugcuaaugugcuguu

SEQ ID NO: 438798 - RNA, 19 nt, Artificial Sequence
  Description of Artificial Sequence: Synthetic oligonucleotide
gcauaagagacugcuuuuc

SEQ ID NO: 438799 - RNA, 19 nt, Artificial Sequence
  Description of Artificial Sequence: Synthetic oligonucleotide
gucuuagaaaguccuuuau

SEQ ID NO: 438800 - RNA, 19 nt, Artificial Sequence
  Description of Artificial Sequence: Synthetic oligonucleotide
caaugucccaauggcauaa

SEQ ID NO: 438801 - RNA, 19 nt, Artificial Sequence
  Description of Artificial Sequence: Synthetic oligonucleotide
cgaguaaacuuggacagac

SEQ ID NO: 438802 - RNA, 19 nt, Artificial Sequence
  Description of Artificial Sequence: Synthetic oligonucleotide
cugagugguccaauuugaa

SEQ ID NO: 438803 - RNA, 19 nt, Artificial Sequence
  Description of Artificial Sequence: Synthetic oligonucleotide
uguggccaauggucuuaca

SEQ ID NO: 438804 - RNA, 19 nt, Artificial Sequence
  Description of Artificial Sequence: Synthetic oligonucleotide
auuggacuccccgucugau

SEQ ID NO: 438805 - RNA, 19 nt, Artificial Sequence
  Description of Artificial Sequence: Synthetic oligonucleotide
guuuaggauccaucaaauu

SEQ ID NO: 438806 - RNA, 19 nt, Artificial Sequence
  Description of Artificial Sequence: Synthetic oligonucleotide
ggagaucauaguagugaac

SEQ ID NO: 438807 - RNA, 19 nt, Artificial Sequence
  Description of Artificial Sequence: Synthetic oligonucleotide
accacgccugacaaaggca

SEQ ID NO: 438808 - RNA, 19 nt, Artificial Sequence
  Description of Artificial Sequence: Synthetic oligonucleotide
caugugcuacuucuucaaa

SEQ ID NO: 438809 - RNA, 19 nt, Artificial Sequence
  Description of Artificial Sequence: Synthetic oligonucleotide
acuccccgucugauagugc

SEQ ID NO: 438810 - RNA, 19 nt, Artificial Sequence
  Description of Artificial Sequence: Synthetic oligonucleotide
caggaugacucuggaaaga

SEQ ID NO: 438811 - RNA, 19 nt, Artificial Sequence
  Description of Artificial Sequence: Synthetic oligonucleotide
agaacgcucuuaacuguau

SEQ ID NO: 438812 - RNA, 19 nt, Artificial Sequence
  Description of Artificial Sequence: Synthetic oligonucleotide
ccacaugugcuacuucuuc

SEQ ID NO: 438813 - RNA, 19 nt, Artificial Sequence
  Description of Artificial Sequence: Synthetic oligonucleotide
cuaugcccauuggugcuac

SEQ ID NO: 438814 - RNA, 19 nt, Artificial Sequence
  Description of Artificial Sequence: Synthetic oligonucleotide
guggaucccguugcagagc

SEQ ID NO: 438815 - RNA, 19 nt, Artificial Sequence
  Description of Artificial Sequence: Synthetic oligonucleotide
gugcuacucacugaguggu

SEQ ID NO: 438816 - RNA, 19 nt, Artificial Sequence
  Description of Artificial Sequence: Synthetic oligonucleotide
cauuggacuccccgucuga

SEQ ID NO: 438817 - RNA, 19 nt, Artificial Sequence
  Description of Artificial Sequence: Synthetic oligonucleotide
ccuagcaaaucuugaaaua

SEQ ID NO: 438818 - RNA, 19 nt, Artificial Sequence
  Description of Artificial Sequence: Synthetic oligonucleotide
uuguucacucgagccuccu

SEQ ID NO: 438819 - RNA, 19 nt, Artificial Sequence
  Description of Artificial Sequence: Synthetic oligonucleotide
ccuuuauaguacagguaga

SEQ ID NO: 438820 - RNA, 19 nt, Artificial Sequence
  Description of Artificial Sequence: Synthetic oligonucleotide
caucagaaccugaggccaa

SEQ ID NO: 438821 - RNA, 19 nt, Artificial Sequence
  Description of Artificial Sequence: Synthetic oligonucleotide
ucgcuuucgucuggaugcu

SEQ ID NO: 438822 - RNA, 19 nt, Artificial Sequence
  Description of Artificial Sequence: Synthetic oligonucleotide
agguugacauuggccaaau

SEQ ID NO: 438823 - RNA, 19 nt, Artificial Sequence
  Description of Artificial Sequence: Synthetic oligonucleotide
caaucccggucaaauucaa

SEQ ID NO: 438824 - RNA, 19 nt, Artificial Sequence
  Description of Artificial Sequence: Synthetic oligonucleotide
ccggucaaauucaauacua

SEQ ID NO: 438825 - RNA, 19 nt, Artificial Sequence
  Description of Artificial Sequence: Synthetic oligonucleotide
caaccuugaggaauuccau

SEQ ID NO: 438826 - RNA, 19 nt, Artificial Sequence
  Description of Artificial Sequence: Synthetic oligonucleotide
gcggagaauucucugggua

SEQ ID NO: 438827 - RNA, 19 nt, Artificial Sequence
  Description of Artificial Sequence: Synthetic oligonucleotide
ggaacgcaaacaauauggu

SEQ ID NO: 438828 - RNA, 19 nt, Artificial Sequence
  Description of Artificial Sequence: Synthetic oligonucleotide
gcucaguuguggcucaaua

SEQ ID NO: 438829 - RNA, 19 nt, Artificial Sequence
  Description of Artificial Sequence: Synthetic oligonucleotide
uccccacauuccacaguuu

SEQ ID NO: 438830 - RNA, 19 nt, Artificial Sequence
  Description of Artificial Sequence: Synthetic oligonucleotide
ccccgucugauagugcccg

SEQ ID NO: 438831 - RNA, 19 nt, Artificial Sequence
  Description of Artificial Sequence: Synthetic oligonucleotide
ccgccaacacacugcacug

SEQ ID NO: 438832 - RNA, 19 nt, Artificial Sequence
  Description of Artificial Sequence: Synthetic oligonucleotide
acaccaauucuagcaccuu

SEQ ID NO: 438833 - RNA, 19 nt, Artificial Sequence
  Description of Artificial Sequence: Synthetic oligonucleotide
ggaauuccauaaggaucug

SEQ ID NO: 438834 - RNA, 19 nt, Artificial Sequence
  Description of Artificial Sequence: Synthetic oligonucleotide
uggccaaaucaagguuauc

SEQ ID NO: 438835 - RNA, 19 nt, Artificial Sequence
  Description of Artificial Sequence: Synthetic oligonucleotide
gccaccuaugcccauuggu

SEQ ID NO: 438836 - RNA, 19 nt, Artificial Sequence
  Description of Artificial Sequence: Synthetic oligonucleotide
ggcauaagagacugcuuuu

SEQ ID NO: 438837 - RNA, 19 nt, Artificial Sequence
  Description of Artificial Sequence: Synthetic oligonucleotide
ccacaacauaauuacacuu

SEQ ID NO: 438838 - RNA, 19 nt, Artificial Sequence
  Description of Artificial Sequence: Synthetic oligonucleotide
cacucgagccuccuuuccu

SEQ ID NO: 438839 - RNA, 19 nt, Artificial Sequence
  Description of Artificial Sequence: Synthetic oligonucleotide
cucgagccuccuuuccuua

SEQ ID NO: 438840 - RNA, 19 nt, Artificial Sequence
  Description of Artificial Sequence: Synthetic oligonucleotide
cuuucgucuggaugcuaau

SEQ ID NO: 438841 - RNA, 19 nt, Artificial Sequence
  Description of Artificial Sequence: Synthetic oligonucleotide
ccuuaauuguacccuggcu

SEQ ID NO: 438842 - RNA, 19 nt, Artificial Sequence
  Description of Artificial Sequence: Synthetic oligonucleotide
ccauaguauaacagugccu

SEQ ID NO: 438843 - RNA, 19 nt, Artificial Sequence
  Description of Artificial Sequence: Synthetic oligonucleotide
cccgccaacacacugcacu

SEQ ID NO: 438844 - RNA, 19 nt, Artificial Sequence
  Description of Artificial Sequence: Synthetic oligonucleotide
ccgucugauagugcccgcc

SEQ ID NO: 438845 - RNA, 19 nt, Artificial Sequence
  Description of Artificial Sequence: Synthetic oligonucleotide
guacgccuccucaaucaua

SEQ ID NO: 438846 - RNA, 19 nt, Artificial Sequence
  Description of Artificial Sequence: Synthetic oligonucleotide
gguagaccacagcuucacu

SEQ ID NO: 438847 - RNA, 19 nt, Artificial Sequence
  Description of Artificial Sequence: Synthetic oligonucleotide
ccagaacgcucuuaacugu

SEQ ID NO: 438848 - RNA, 19 nt, Artificial Sequence
  Description of Artificial Sequence: Synthetic oligonucleotide
ccaaugucccaauggcaua

SEQ ID NO: 438849 - RNA, 19 nt, Artificial Sequence
  Description of Artificial Sequence: Synthetic oligonucleotide
caguuuuaguuggcugucu

SEQ ID NO: 438850 - RNA, 19 nt, Artificial Sequence
  Description of Artificial Sequence: Synthetic oligonucleotide
ccuuaaccccagccagaac

SEQ ID NO: 438851 - RNA, 19 nt, Artificial Sequence
  Description of Artificial Sequence: Synthetic oligonucleotide
guggcucaauaaacuuuua

SEQ ID NO: 438852 - RNA, 19 nt, Artificial Sequence
  Description of Artificial Sequence: Synthetic oligonucleotide
ggcggagaauucucugggu

SEQ ID NO: 438853 - RNA, 19 nt, Artificial Sequence
  Description of Artificial Sequence: Synthetic oligonucleotide
ggaugcuaaugugcuguua

SEQ ID NO: 438854 - RNA, 19 nt, Artificial Sequence
  Description of Artificial Sequence: Synthetic oligonucleotide
ggaucccguugcagagcgg

SEQ ID NO: 438855 - RNA, 19 nt, Artificial Sequence
  Description of Artificial Sequence: Synthetic oligonucleotide
cccggucaaauucaauacu

SEQ ID NO: 438856 - RNA, 19 nt, Artificial Sequence
  Description of Artificial Sequence: Synthetic oligonucleotide
gagucgcuuucgucuggau

SEQ ID NO: 438857 - RNA, 19 nt, Artificial Sequence
  Description of Artificial Sequence: Synthetic oligonucleotide
gcuuaguguuacggagauc

SEQ ID NO: 438858 - RNA, 19 nt, Artificial Sequence
  Description of Artificial Sequence: Synthetic oligonucleotide
ccuuuguacggagcagcca

SEQ ID NO: 438859 - RNA, 19 nt, Artificial Sequence
  Description of Artificial Sequence: Synthetic oligonucleotide
cccgucugauagugcccgc

SEQ ID NO: 438860 - RNA, 19 nt, Artificial Sequence
  Description of Artificial Sequence: Synthetic oligonucleotide
gccacggaauugucuaaau

SEQ ID NO: 438861 - RNA, 19 nt, Artificial Sequence
  Description of Artificial Sequence: Synthetic oligonucleotide
cccguugcagagcggggca

SEQ ID NO: 438862 - RNA, 19 nt, Artificial Sequence
  Description of Artificial Sequence: Synthetic oligonucleotide
ccauuggaagcaaguccua

SEQ ID NO: 438863 - RNA, 19 nt, Artificial Sequence
  Description of Artificial Sequence: Synthetic oligonucleotide
ccgaguaaacuuggacaga

SEQ ID NO: 438864 - RNA, 19 nt, Artificial Sequence
  Description of Artificial Sequence: Synthetic oligonucleotide
cccauuggugcuacucacu

SEQ ID NO: 438865 - RNA, 19 nt, Artificial Sequence
  Description of Artificial Sequence: Synthetic oligonucleotide
cuguugaggcagagacaau

SEQ ID NO: 438866 - RNA, 19 nt, Artificial Sequence
  Description of Artificial Sequence: Synthetic oligonucleotide
gcagacgaagucguugcuu

SEQ ID NO: 438867 - RNA, 19 nt, Artificial Sequence
  Description of Artificial Sequence: Synthetic oligonucleotide
cggagaauucucuggguau

SEQ ID NO: 438868 - RNA, 19 nt, Artificial Sequence
  Description of Artificial Sequence: Synthetic oligonucleotide
ccucaaugcuugccacgga

SEQ ID NO: 438869 - RNA, 19 nt, Artificial Sequence
  Description of Artificial Sequence: Synthetic oligonucleotide
ccacggaauugucuaaauu

SEQ ID NO: 438870 - RNA, 19 nt, Artificial Sequence
  Description of Artificial Sequence: Synthetic oligonucleotide
cacgccugacaaaggcauu

SEQ ID NO: 438871 - RNA, 19 nt, Artificial Sequence
  Description of Artificial Sequence: Synthetic oligonucleotide
cuguuauaccaagguuguu

SEQ ID NO: 438872 - RNA, 19 nt, Artificial Sequence
  Description of Artificial Sequence: Synthetic oligonucleotide
ggacuccccgucugauagu

SEQ ID NO: 438873 - RNA, 19 nt, Artificial Sequence
  Description of Artificial Sequence: Synthetic oligonucleotide
gcccgccaacacacugcac

SEQ ID NO: 438874 - RNA, 19 nt, Artificial Sequence
  Description of Artificial Sequence: Synthetic oligonucleotide
auaaucauggacuuauacc

SEQ ID NO: 438875 - RNA, 19 nt, Artificial Sequence
  Description of Artificial Sequence: Synthetic oligonucleotide
uauaugaaaguuauucccg

SEQ ID NO: 438876 - RNA, 19 nt, Artificial Sequence
  Description of Artificial Sequence: Synthetic oligonucleotide
uuuuauaugaaaguuauuc

SEQ ID NO: 438877 - RNA, 19 nt, Artificial Sequence
  Description of Artificial Sequence: Synthetic oligonucleotide
cuggcaaucacacaaaagg

SEQ ID NO: 438878 - RNA, 19 nt, Artificial Sequence
  Description of Artificial Sequence: Synthetic oligonucleotide
cugacuugcgcuaaaaucc

SEQ ID NO: 438879 - RNA, 19 nt, Artificial Sequence
  Description of Artificial Sequence: Synthetic oligonucleotide
auaaacgucaaacggaucu

SEQ ID NO: 438880 - RNA, 19 nt, Artificial Sequence
  Description of Artificial Sequence: Synthetic oligonucleotide
uugaaguaaccaaugcugg

SEQ ID NO: 438881 - RNA, 19 nt, Artificial Sequence
  Description of Artificial Sequence: Synthetic oligonucleotide
uauaugaugaccacccaca

SEQ ID NO: 438882 - RNA, 19 nt, Artificial Sequence
  Description of Artificial Sequence: Synthetic oligonucleotide
gagaugacaaauaacuagg

SEQ ID NO: 438883 - RNA, 19 nt, Artificial Sequence
  Description of Artificial Sequence: Synthetic oligonucleotide
uauuagacgccucaauuug

SEQ ID NO: 438884 - RNA, 19 nt, Artificial Sequence
  Description of Artificial Sequence: Synthetic oligonucleotide
uguugucacacgaaagggg

SEQ ID NO: 438885 - RNA, 19 nt, Artificial Sequence
  Description of Artificial Sequence: Synthetic oligonucleotide
uauaccauuaauuuacaua

SEQ ID NO: 438886 - RNA, 19 nt, Artificial Sequence
  Description of Artificial Sequence: Synthetic oligonucleotide
auaugaaaguuauucccgg

SEQ ID NO: 438887 - RNA, 19 nt, Artificial Sequence
  Description of Artificial Sequence: Synthetic oligonucleotide
uccauuagagcuauccuug

SEQ ID NO: 438888 - RNA, 19 nt, Artificial Sequence
  Description of Artificial Sequence: Synthetic oligonucleotide
ggagauaaacgucaaacgg

SEQ ID NO: 438889 - RNA, 19 nt, Artificial Sequence
  Description of Artificial Sequence: Synthetic oligonucleotide
aagaguuacuugaaguaac

SEQ ID NO: 438890 - RNA, 19 nt, Artificial Sequence
  Description of Artificial Sequence: Synthetic oligonucleotide
ugugauuuuccucccgggg

SEQ ID NO: 438891 - RNA, 19 nt, Artificial Sequence
  Description of Artificial Sequence: Synthetic oligonucleotide
aaguaaccaaugcuggcuc

SEQ ID NO: 438892 - RNA, 19 nt, Artificial Sequence
  Description of Artificial Sequence: Synthetic oligonucleotide
uggacuuauaccauuaauu

SEQ ID NO: 438893 - RNA, 19 nt, Artificial Sequence
  Description of Artificial Sequence: Synthetic oligonucleotide
uugauguauuuaaaugcag

SEQ ID NO: 438894 - RNA, 19 nt, Artificial Sequence
  Description of Artificial Sequence: Synthetic oligonucleotide
aaguacacgggaccugugg

SEQ ID NO: 438895 - RNA, 19 nt, Artificial Sequence
  Description of Artificial Sequence: Synthetic oligonucleotide
aaugcguccaaaccaguga

SEQ ID NO: 438896 - RNA, 19 nt, Artificial Sequence
  Description of Artificial Sequence: Synthetic oligonucleotide
uuaaacauggagucugaac

SEQ ID NO: 438897 - RNA, 19 nt, Artificial Sequence
  Description of Artificial Sequence: Synthetic oligonucleotide
uuccaaugcguccaaacca

SEQ ID NO: 438898 - RNA, 19 nt, Artificial Sequence
  Description of Artificial Sequence: Synthetic oligonucleotide
aaugcgguuucccuggagu

SEQ ID NO: 438899 - RNA, 19 nt, Artificial Sequence
  Description of Artificial Sequence: Synthetic oligonucleotide
ucaggcaucacgugcauac

SEQ ID NO: 438900 - RNA, 19 nt, Artificial Sequence
  Description of Artificial Sequence: Synthetic oligonucleotide
uuggacauuucacacgugu

SEQ ID NO: 438901 - RNA, 19 nt, Artificial Sequence
  Description of Artificial Sequence: Synthetic oligonucleotide
auuucacacguguacuuuc

SEQ ID NO: 438902 - RNA, 19 nt, Artificial Sequence
  Description of Artificial Sequence: Synthetic oligonucleotide
aguuauucccgguauaaaa

SEQ ID NO: 438903 - RNA, 19 nt, Artificial Sequence
  Description of Artificial Sequence: Synthetic oligonucleotide
ucgaaugcgguuucccugg

SEQ ID NO: 438904 - RNA, 19 nt, Artificial Sequence
  Description of Artificial Sequence: Synthetic oligonucleotide
ugaaaguuauucccgguau

SEQ ID NO: 438905 - RNA, 19 nt, Artificial Sequence
  Description of Artificial Sequence: Synthetic oligonucleotide
agaguuacuugaaguaacc

SEQ ID NO: 438906 - RNA, 19 nt, Artificial Sequence
  Description of Artificial Sequence: Synthetic oligonucleotide
cuugcgcuaaaauccaaag

SEQ ID NO: 438907 - RNA, 19 nt, Artificial Sequence
  Description of Artificial Sequence: Synthetic oligonucleotide
ugaaguaaccaaugcuggc

SEQ ID NO: 438908 - RNA, 19 nt, Artificial Sequence
  Description of Artificial Sequence: Synthetic oligonucleotide
uaaaauccaaagaggacuu

SEQ ID NO: 438909 - RNA, 19 nt, Artificial Sequence
  Description of Artificial Sequence: Synthetic oligonucleotide
ucacgagcuuucuugagug

SEQ ID NO: 438910 - RNA, 19 nt, Artificial Sequence
  Description of Artificial Sequence: Synthetic oligonucleotide
cuagauguuccaaugcguc

SEQ ID NO: 438911 - RNA, 19 nt, Artificial Sequence
  Description of Artificial Sequence: Synthetic oligonucleotide
guacccaugaaagaguuac

SEQ ID NO: 438912 - RNA, 19 nt, Artificial Sequence
  Description of Artificial Sequence: Synthetic oligonucleotide
uaccauuaauuuacauaag

SEQ ID NO: 438913 - RNA, 19 nt, Artificial Sequence
  Description of Artificial Sequence: Synthetic oligonucleotide
auauacuucccuucaagua

SEQ ID NO: 438914 - RNA, 19 nt, Artificial Sequence
  Description of Artificial Sequence: Synthetic oligonucleotide
uugcgcuaaaauccaaaga

SEQ ID NO: 438915 - RNA, 19 nt, Artificial Sequence
  Description of Artificial Sequence: Synthetic oligonucleotide
guugucacacgaaaggggc

SEQ ID NO: 438916 - RNA, 19 nt, Artificial Sequence
  Description of Artificial Sequence: Synthetic oligonucleotide
uucacacguguacuuuccg

SEQ ID NO: 438917 - RNA, 19 nt, Artificial Sequence
  Description of Artificial Sequence: Synthetic oligonucleotide
cacacguguacuuuccggc

SEQ ID NO: 438918 - RNA, 19 nt, Artificial Sequence
  Description of Artificial Sequence: Synthetic oligonucleotide
aacuagggauaucggccgg

SEQ ID NO: 438919 - RNA, 19 nt, Artificial Sequence
  Description of Artificial Sequence: Synthetic oligonucleotide
gguauuggacauuucacac

SEQ ID NO: 438920 - RNA, 19 nt, Artificial Sequence
  Description of Artificial Sequence: Synthetic oligonucleotide
uaugaaaguuauucccggu

SEQ ID NO: 438921 - RNA, 19 nt, Artificial Sequence
  Description of Artificial Sequence: Synthetic oligonucleotide
ugacuugcgcuaaaaucca

SEQ ID NO: 438922 - RNA, 19 nt, Artificial Sequence
  Description of Artificial Sequence: Synthetic oligonucleotide
uugguaauacugcagucuu

SEQ ID NO: 438923 - RNA, 19 nt, Artificial Sequence
  Description of Artificial Sequence: Synthetic oligonucleotide
agaucgaaugcgguuuccc

SEQ ID NO: 438924 - RNA, 19 nt, Artificial Sequence
  Description of Artificial Sequence: Synthetic oligonucleotide
aggucuagauguuccaaug

SEQ ID NO: 438925 - RNA, 19 nt, Artificial Sequence
  Description of Artificial Sequence: Synthetic oligonucleotide
aggguauuggacauuucac

SEQ ID NO: 438926 - RNA, 19 nt, Artificial Sequence
  Description of Artificial Sequence: Synthetic oligonucleotide
agauguacccauccugucu

SEQ ID NO: 438927 - RNA, 19 nt, Artificial Sequence
  Description of Artificial Sequence: Synthetic oligonucleotide
aucgaaugcgguuucccug

SEQ ID NO: 438928 - RNA, 19 nt, Artificial Sequence
  Description of Artificial Sequence: Synthetic oligonucleotide
uccugugagugucuaauau

SEQ ID NO: 438929 - RNA, 19 nt, Artificial Sequence
  Description of Artificial Sequence: Synthetic oligonucleotide
aucgucuaaggacggggcg

SEQ ID NO: 438930 - RNA, 19 nt, Artificial Sequence
  Description of Artificial Sequence: Synthetic oligonucleotide
uuagacgccucaauuuguc

SEQ ID NO: 438931 - RNA, 19 nt, Artificial Sequence
  Description of Artificial Sequence: Synthetic oligonucleotide
agcuaauguucccugagau

SEQ ID NO: 438932 - RNA, 19 nt, Artificial Sequence
  Description of Artificial Sequence: Synthetic oligonucleotide
uuauaccauuaauuuacau

SEQ ID NO: 438933 - RNA, 19 nt, Artificial Sequence
  Description of Artificial Sequence: Synthetic oligonucleotide
ucauggacuuauaccauua

SEQ ID NO: 438934 - RNA, 19 nt, Artificial Sequence
  Description of Artificial Sequence: Synthetic oligonucleotide
ucccugagaugacaaauaa

SEQ ID NO: 438935 - RNA, 19 nt, Artificial Sequence
  Description of Artificial Sequence: Synthetic oligonucleotide
ucgucuaaggacggggcgg

SEQ ID NO: 438936 - RNA, 19 nt, Artificial Sequence
  Description of Artificial Sequence: Synthetic oligonucleotide
agacgccucaauuugucca

SEQ ID NO: 438937 - RNA, 19 nt, Artificial Sequence
  Description of Artificial Sequence: Synthetic oligonucleotide
aacacugcccgcacuguuc

SEQ ID NO: 438938 - RNA, 19 nt, Artificial Sequence
  Description of Artificial Sequence: Synthetic oligonucleotide
uaaacgucaaacggaucug

SEQ ID NO: 438939 - RNA, 19 nt, Artificial Sequence
  Description of Artificial Sequence: Synthetic oligonucleotide
aguucacgagcuuucuuga

SEQ ID NO: 438940 - RNA, 19 nt, Artificial Sequence
  Description of Artificial Sequence: Synthetic oligonucleotide
ucgguuucacugcuguugu

SEQ ID NO: 438941 - RNA, 19 nt, Artificial Sequence
  Description of Artificial Sequence: Synthetic oligonucleotide
gaagaaguaacgaacuggu

SEQ ID NO: 438942 - RNA, 19 nt, Artificial Sequence
  Description of Artificial Sequence: Synthetic oligonucleotide
uuuugguaacagaucgaau

SEQ ID NO: 438943 - RNA, 19 nt, Artificial Sequence
  Description of Artificial Sequence: Synthetic oligonucleotide
ucucagcuaauguucccug

SEQ ID NO: 438944 - RNA, 19 nt, Artificial Sequence
  Description of Artificial Sequence: Synthetic oligonucleotide
cauccgucaucgucuaagg

SEQ ID NO: 438945 - RNA, 19 nt, Artificial Sequence
  Description of Artificial Sequence: Synthetic oligonucleotide
aguacacgggaccugugga

SEQ ID NO: 438946 - RNA, 19 nt, Artificial Sequence
  Description of Artificial Sequence: Synthetic oligonucleotide
cauucgcggaaacacugcc

SEQ ID NO: 438947 - RNA, 19 nt, Artificial Sequence
  Description of Artificial Sequence: Synthetic oligonucleotide
ugcaaccugggagauaaac

SEQ ID NO: 438948 - RNA, 19 nt, Artificial Sequence
  Description of Artificial Sequence: Synthetic oligonucleotide
caaugcguccaaaccagug

SEQ ID NO: 438949 - RNA, 19 nt, Artificial Sequence
  Description of Artificial Sequence: Synthetic oligonucleotide
ggacauuucacacguguac

SEQ ID NO: 438950 - RNA, 19 nt, Artificial Sequence
  Description of Artificial Sequence: Synthetic oligonucleotide
cauucugagaguacaugga

SEQ ID NO: 438951 - RNA, 19 nt, Artificial Sequence
  Description of Artificial Sequence: Synthetic oligonucleotide
caucgucuaaggacggggc

SEQ ID NO: 438952 - RNA, 19 nt, Artificial Sequence
  Description of Artificial Sequence: Synthetic oligonucleotide
uuguuuaaacauggagucu

SEQ ID NO: 438953 - RNA, 19 nt, Artificial Sequence
  Description of Artificial Sequence: Synthetic oligonucleotide
cuguugguaaguacaucug

SEQ ID NO: 438954 - RNA, 19 nt, Artificial Sequence
  Description of Artificial Sequence: Synthetic oligonucleotide
ccuugugugguauaugaug

SEQ ID NO: 438955 - RNA, 19 nt, Artificial Sequence
  Description of Artificial Sequence: Synthetic oligonucleotide
aagaaguaacgaacuggug

SEQ ID NO: 438956 - RNA, 19 nt, Artificial Sequence
  Description of Artificial Sequence: Synthetic oligonucleotide
aagguacccaugaaagagu

SEQ ID NO: 438957 - RNA, 19 nt, Artificial Sequence
  Description of Artificial Sequence: Synthetic oligonucleotide
uguccauguggcagguccc

SEQ ID NO: 438958 - RNA, 19 nt, Artificial Sequence
  Description of Artificial Sequence: Synthetic oligonucleotide
cauggagucugaaccgcag

SEQ ID NO: 438959 - RNA, 19 nt, Artificial Sequence
  Description of Artificial Sequence: Synthetic oligonucleotide
acuagggauaucggccggc

SEQ ID NO: 438960 - RNA, 19 nt, Artificial Sequence
  Description of Artificial Sequence: Synthetic oligonucleotide
gugauuuuccucccgggga

SEQ ID NO: 438961 - RNA, 19 nt, Artificial Sequence
  Description of Artificial Sequence: Synthetic oligonucleotide
uagacgccucaauuugucc

SEQ ID NO: 438962 - RNA, 19 nt, Artificial Sequence
  Description of Artificial Sequence: Synthetic oligonucleotide
ugcguccaaaccagugaag

SEQ ID NO: 438963 - RNA, 19 nt, Artificial Sequence
  Description of Artificial Sequence: Synthetic oligonucleotide
ccgucaucgucuaaggacg

SEQ ID NO: 438964 - RNA, 19 nt, Artificial Sequence
  Description of Artificial Sequence: Synthetic oligonucleotide
gucaaacggaucugggcug

SEQ ID NO: 438965 - RNA, 19 nt, Artificial Sequence
  Description of Artificial Sequence: Synthetic oligonucleotide
aguaacgaacuggugguga

SEQ ID NO: 438966 - RNA, 19 nt, Artificial Sequence
  Description of Artificial Sequence: Synthetic oligonucleotide
guaacgaacugguggugac

SEQ ID NO: 438967 - RNA, 19 nt, Artificial Sequence
  Description of Artificial Sequence: Synthetic oligonucleotide
guacacgggaccuguggag

SEQ ID NO: 438968 - RNA, 19 nt, Artificial Sequence
  Description of Artificial Sequence: Synthetic oligonucleotide
gugguauaugaugaccacc

SEQ ID NO: 438969 - RNA, 19 nt, Artificial Sequence
  Description of Artificial Sequence: Synthetic oligonucleotide
agggauaucggccggcaaa

SEQ ID NO: 438970 - RNA, 19 nt, Artificial Sequence
  Description of Artificial Sequence: Synthetic oligonucleotide
aaucauggacuuauaccau

SEQ ID NO: 438971 - RNA, 19 nt, Artificial Sequence
  Description of Artificial Sequence: Synthetic oligonucleotide
acacgagggaugugccuac

SEQ ID NO: 438972 - RNA, 19 nt, Artificial Sequence
  Description of Artificial Sequence: Synthetic oligonucleotide
gaaguaaccaaugcuggcu

SEQ ID NO: 438973 - RNA, 19 nt, Artificial Sequence
  Description of Artificial Sequence: Synthetic oligonucleotide
acguguacuuuccggcauc

SEQ ID NO: 438974 - RNA, 19 nt, Artificial Sequence
  Description of Artificial Sequence: Synthetic oligonucleotide
uuuaaacauggagucugaa

SEQ ID NO: 438975 - RNA, 19 nt, Artificial Sequence
  Description of Artificial Sequence: Synthetic oligonucleotide
aacgaacugguggugacuu

SEQ ID NO: 438976 - RNA, 19 nt, Artificial Sequence
  Description of Artificial Sequence: Synthetic oligonucleotide
uggcauuuaugaagcucug

SEQ ID NO: 438977 - RNA, 19 nt, Artificial Sequence
  Description of Artificial Sequence: Synthetic oligonucleotide
caugaaagaguuacuugaa

SEQ ID NO: 438978 - RNA, 19 nt, Artificial Sequence
  Description of Artificial Sequence: Synthetic oligonucleotide
aucauggacuuauaccauu

SEQ ID NO: 438979 - RNA, 19 nt, Artificial Sequence
  Description of Artificial Sequence: Synthetic oligonucleotide
ggguauuggacauuucaca

SEQ ID NO: 438980 - RNA, 19 nt, Artificial Sequence
  Description of Artificial Sequence: Synthetic oligonucleotide
aaguaacgaacugguggug

SEQ ID NO: 438981 - RNA, 19 nt, Artificial Sequence
  Description of Artificial Sequence: Synthetic oligonucleotide
gugagugucuaauaucugu

SEQ ID NO: 438982 - RNA, 19 nt, Artificial Sequence
  Description of Artificial Sequence: Synthetic oligonucleotide
caaccugggagauaaacgu

SEQ ID NO: 438983 - RNA, 19 nt, Artificial Sequence
  Description of Artificial Sequence: Synthetic oligonucleotide
augcguccaaaccagugaa

SEQ ID NO: 438984 - RNA, 19 nt, Artificial Sequence
  Description of Artificial Sequence: Synthetic oligonucleotide
ucgcauucgcggaaacacu

SEQ ID NO: 438985 - RNA, 19 nt, Artificial Sequence
  Description of Artificial Sequence: Synthetic oligonucleotide
uccugacuugcgcuaaaau

SEQ ID NO: 438986 - RNA, 19 nt, Artificial Sequence
  Description of Artificial Sequence: Synthetic oligonucleotide
gaguuacuugaaguaacca

SEQ ID NO: 438987 - RNA, 19 nt, Artificial Sequence
  Description of Artificial Sequence: Synthetic oligonucleotide
ugauggcguugucacucag

SEQ ID NO: 438988 - RNA, 19 nt, Artificial Sequence
  Description of Artificial Sequence: Synthetic oligonucleotide
gcuguauauacuucccuuc

SEQ ID NO: 438989 - RNA, 19 nt, Artificial Sequence
  Description of Artificial Sequence: Synthetic oligonucleotide
uguugaggcuccguucaca

SEQ ID NO: 438990 - RNA, 19 nt, Artificial Sequence
  Description of Artificial Sequence: Synthetic oligonucleotide
gaaugcgguuucccuggag

SEQ ID NO: 438991 - RNA, 19 nt, Artificial Sequence
  Description of Artificial Sequence: Synthetic oligonucleotide
cugagacgcauguugccuc

SEQ ID NO: 438992 - RNA, 19 nt, Artificial Sequence
  Description of Artificial Sequence: Synthetic oligonucleotide
guauuagacgccucaauuu

SEQ ID NO: 438993 - RNA, 19 nt, Artificial Sequence
  Description of Artificial Sequence: Synthetic oligonucleotide
auuagacgccucaauuugu

SEQ ID NO: 438994 - RNA, 19 nt, Artificial Sequence
  Description of Artificial Sequence: Synthetic oligonucleotide
gcgcuaaaauccaaagagg

SEQ ID NO: 438995 - RNA, 19 nt, Artificial Sequence
  Description of Artificial Sequence: Synthetic oligonucleotide
ggacuuauaccauuaauuu

SEQ ID NO: 438996 - RNA, 19 nt, Artificial Sequence
  Description of Artificial Sequence: Synthetic oligonucleotide
uguccuacggcagcacacu

SEQ ID NO: 438997 - RNA, 19 nt, Artificial Sequence
  Description of Artificial Sequence: Synthetic oligonucleotide
ucaaacggaucugggcugu

SEQ ID NO: 438998 - RNA, 19 nt, Artificial Sequence
  Description of Artificial Sequence: Synthetic oligonucleotide
ggucggaacugcaaccugg

SEQ ID NO: 438999 - RNA, 19 nt, Artificial Sequence
  Description of Artificial Sequence: Synthetic oligonucleotide
aaaccagugaaggccuuuu

SEQ ID NO: 439000 - RNA, 19 nt, Artificial Sequence
  Description of Artificial Sequence: Synthetic oligonucleotide
gaucgaaugcgguuucccu

SEQ ID NO: 439001 - RNA, 19 nt, Artificial Sequence
  Description of Artificial Sequence: Synthetic oligonucleotide
gauaaacgucaaacggauc

SEQ ID NO: 439002 - RNA, 19 nt, Artificial Sequence
  Description of Artificial Sequence: Synthetic oligonucleotide
ggcauuuaugaagcucugg

SEQ ID NO: 439003 - RNA, 19 nt, Artificial Sequence
  Description of Artificial Sequence: Synthetic oligonucleotide
ggucaugugaggggagucg

SEQ ID NO: 439004 - RNA, 19 nt, Artificial Sequence
  Description of Artificial Sequence: Synthetic oligonucleotide
uaacgaacugguggugacu

SEQ ID NO: 439005 - RNA, 19 nt, Artificial Sequence
  Description of Artificial Sequence: Synthetic oligonucleotide
gcuaugaucacgacgccca

SEQ ID NO: 439006 - RNA, 19 nt, Artificial Sequence
  Description of Artificial Sequence: Synthetic oligonucleotide
gagccauuuuagcuggcaa

SEQ ID NO: 439007 - RNA, 19 nt, Artificial Sequence
  Description of Artificial Sequence: Synthetic oligonucleotide
auccgucaucgucuaagga

SEQ ID NO: 439008 - RNA, 19 nt, Artificial Sequence
  Description of Artificial Sequence: Synthetic oligonucleotide
ccggcaaaucaucacacac

SEQ ID NO: 439009 - RNA, 19 nt, Artificial Sequence
  Description of Artificial Sequence: Synthetic oligonucleotide
ggaaaacgcauugcuuugc

SEQ ID NO: 439010 - RNA, 19 nt, Artificial Sequence
  Description of Artificial Sequence: Synthetic oligonucleotide
acuuuccggcaucgcugac

SEQ ID NO: 439011 - RNA, 19 nt, Artificial Sequence
  Description of Artificial Sequence: Synthetic oligonucleotide
uccuugggucggaacugca

SEQ ID NO: 439012 - RNA, 19 nt, Artificial Sequence
  Description of Artificial Sequence: Synthetic oligonucleotide
cuaugaucacgacgcccac

SEQ ID NO: 439013 - RNA, 19 nt, Artificial Sequence
  Description of Artificial Sequence: Synthetic oligonucleotide
gguaguguguagaagauuu

SEQ ID NO: 439014 - RNA, 19 nt, Artificial Sequence
  Description of Artificial Sequence: Synthetic oligonucleotide
ucgucugaggggugagcac

SEQ ID NO: 439015 - RNA, 19 nt, Artificial Sequence
  Description of Artificial Sequence: Synthetic oligonucleotide
acgagggaugugccuacca

SEQ ID NO: 439016 - RNA, 19 nt, Artificial Sequence
  Description of Artificial Sequence: Synthetic oligonucleotide
ggggcggucaugugagggg

SEQ ID NO: 439017 - RNA, 19 nt, Artificial Sequence
  Description of Artificial Sequence: Synthetic oligonucleotide
acuugcgcuaaaauccaaa

SEQ ID NO: 439018 - RNA, 19 nt, Artificial Sequence
  Description of Artificial Sequence: Synthetic oligonucleotide
caaguacacgggaccugug

SEQ ID NO: 439019 - RNA, 19 nt, Artificial Sequence
  Description of Artificial Sequence: Synthetic oligonucleotide
uccgccuugugugguauau

SEQ ID NO: 439020 - RNA, 19 nt, Artificial Sequence
  Description of Artificial Sequence: Synthetic oligonucleotide
gcgcaacuggcauuuauga

SEQ ID NO: 439021 - RNA, 19 nt, Artificial Sequence
  Description of Artificial Sequence: Synthetic oligonucleotide
ccauccgucaucgucuaag

SEQ ID NO: 439022 - RNA, 19 nt, Artificial Sequence
  Description of Artificial Sequence: Synthetic oligonucleotide
cauggacuuauaccauuaa

SEQ ID NO: 439023 - RNA, 19 nt, Artificial Sequence
  Description of Artificial Sequence: Synthetic oligonucleotide
cuggaguauuagacgccuc

SEQ ID NO: 439024 - RNA, 19 nt, Artificial Sequence
  Description of Artificial Sequence: Synthetic oligonucleotide
ggcgcaacuggcauuuaug

SEQ ID NO: 439025 - RNA, 19 nt, Artificial Sequence
  Description of Artificial Sequence: Synthetic oligonucleotide
ccccggaaggccaacaauc

SEQ ID NO: 439026 - RNA, 19 nt, Artificial Sequence
  Description of Artificial Sequence: Synthetic oligonucleotide
cucgucugaggggugagca

SEQ ID NO: 439027 - RNA, 19 nt, Artificial Sequence
  Description of Artificial Sequence: Synthetic oligonucleotide
ugaucacgacgcccacggu

SEQ ID NO: 439028 - RNA, 19 nt, Artificial Sequence
  Description of Artificial Sequence: Synthetic oligonucleotide
uguacccauccugucucuc

SEQ ID NO: 439029 - RNA, 19 nt, Artificial Sequence
  Description of Artificial Sequence: Synthetic oligonucleotide
cagaucgaaugcgguuucc

SEQ ID NO: 439030 - RNA, 19 nt, Artificial Sequence
  Description of Artificial Sequence: Synthetic oligonucleotide
ucacgacgcccacgguggc

SEQ ID NO: 439031 - RNA, 19 nt, Artificial Sequence
  Description of Artificial Sequence: Synthetic oligonucleotide
gcauacgccgcucccgggc

SEQ ID NO: 439032 - RNA, 19 nt, Artificial Sequence
  Description of Artificial Sequence: Synthetic oligonucleotide
ggcaucgcugacauccgag

SEQ ID NO: 439033 - RNA, 19 nt, Artificial Sequence
  Description of Artificial Sequence: Synthetic oligonucleotide
ugucgguuucacugcuguu

SEQ ID NO: 439034 - RNA, 19 nt, Artificial Sequence
  Description of Artificial Sequence: Synthetic oligonucleotide
cuguauaccccgaugucuu

SEQ ID NO: 439035 - RNA, 19 nt, Artificial Sequence
  Description of Artificial Sequence: Synthetic oligonucleotide
agguaguguguagaagauu

SEQ ID NO: 439036 - RNA, 19 nt, Artificial Sequence
  Description of Artificial Sequence: Synthetic oligonucleotide
ucccaccagcgaugcacug

SEQ ID NO: 439037 - RNA, 19 nt, Artificial Sequence
  Description of Artificial Sequence: Synthetic oligonucleotide
auacgccgcucccgggcag

SEQ ID NO: 439038 - RNA, 19 nt, Artificial Sequence
  Description of Artificial Sequence: Synthetic oligonucleotide
auuggacauuucacacgug

SEQ ID NO: 439039 - RNA, 19 nt, Artificial Sequence
  Description of Artificial Sequence: Synthetic oligonucleotide
cgcauucgcggaaacacug

SEQ ID NO: 439040 - RNA, 19 nt, Artificial Sequence
  Description of Artificial Sequence: Synthetic oligonucleotide
cuucaaguacacgggaccu

SEQ ID NO: 439041 - RNA, 19 nt, Artificial Sequence
  Description of Artificial Sequence: Synthetic oligonucleotide
cucggcugacagucuggug

SEQ ID NO: 439042 - RNA, 19 nt, Artificial Sequence
  Description of Artificial Sequence: Synthetic oligonucleotide
accacccacacgagggaug

SEQ ID NO: 439043 - RNA, 19 nt, Artificial Sequence
  Description of Artificial Sequence: Synthetic oligonucleotide
gcuauccuugggucggaac

SEQ ID NO: 439044 - RNA, 19 nt, Artificial Sequence
  Description of Artificial Sequence: Synthetic oligonucleotide
ccucucucggugcccaggg

SEQ ID NO: 439045 - RNA, 19 nt, Artificial Sequence
  Description of Artificial Sequence: Synthetic oligonucleotide
gguccauuagagcuauccu

SEQ ID NO: 439046 - RNA, 19 nt, Artificial Sequence
  Description of Artificial Sequence: Synthetic oligonucleotide
auaccccgaugucuucgau

SEQ ID NO: 439047 - RNA, 19 nt, Artificial Sequence
  Description of Artificial Sequence: Synthetic oligonucleotide
cccgcaaaugggcagagaa

SEQ ID NO: 439048 - RNA, 19 nt, Artificial Sequence
  Description of Artificial Sequence: Synthetic oligonucleotide
cauacgccgcucccgggca

SEQ ID NO: 439049 - RNA, 19 nt, Artificial Sequence
  Description of Artificial Sequence: Synthetic oligonucleotide
gaguccugugagugucuaa

SEQ ID NO: 439050 - RNA, 19 nt, Artificial Sequence
  Description of Artificial Sequence: Synthetic oligonucleotide
acggggcggucaugugagg

SEQ ID NO: 439051 - RNA, 19 nt, Artificial Sequence
  Description of Artificial Sequence: Synthetic oligonucleotide
gaaaggggcucggcugaca

SEQ ID NO: 439052 - RNA, 19 nt, Artificial Sequence
  Description of Artificial Sequence: Synthetic oligonucleotide
cccacacgagggaugugcc

SEQ ID NO: 439053 - RNA, 19 nt, Artificial Sequence
  Description of Artificial Sequence: Synthetic oligonucleotide
gcauucgcggaaacacugc

SEQ ID NO: 439054 - RNA, 19 nt, Artificial Sequence
  Description of Artificial Sequence: Synthetic oligonucleotide
gcuguauaccccgaugucu

SEQ ID NO: 439055 - RNA, 19 nt, Artificial Sequence
  Description of Artificial Sequence: Synthetic oligonucleotide
acgguggcccauccgucau

SEQ ID NO: 439056 - RNA, 19 nt, Artificial Sequence
  Description of Artificial Sequence: Synthetic oligonucleotide
ccggaaggccaacaaucag

SEQ ID NO: 439057 - RNA, 19 nt, Artificial Sequence
  Description of Artificial Sequence: Synthetic oligonucleotide
ggccacgggaugcuguuga

SEQ ID NO: 439058 - RNA, 19 nt, Artificial Sequence
  Description of Artificial Sequence: Synthetic oligonucleotide
guccugugagugucuaaua

SEQ ID NO: 439059 - RNA, 19 nt, Artificial Sequence
  Description of Artificial Sequence: Synthetic oligonucleotide
cccgaugucuucgaucuuc

SEQ ID NO: 439060 - RNA, 19 nt, Artificial Sequence
  Description of Artificial Sequence: Synthetic oligonucleotide
ggaguauuagacgccucaa

SEQ ID NO: 439061 - RNA, 19 nt, Artificial Sequence
  Description of Artificial Sequence: Synthetic oligonucleotide
ugccucucucggugcccag

SEQ ID NO: 439062 - RNA, 19 nt, Artificial Sequence
  Description of Artificial Sequence: Synthetic oligonucleotide
gacuugcgcuaaaauccaa

SEQ ID NO: 439063 - RNA, 19 nt, Artificial Sequence
  Description of Artificial Sequence: Synthetic oligonucleotide
agcccgcaaaugggcagag

SEQ ID NO: 439064 - RNA, 19 nt, Artificial Sequence
  Description of Artificial Sequence: Synthetic oligonucleotide
cacgagggaugugccuacc

SEQ ID NO: 439065 - RNA, 19 nt, Artificial Sequence
  Description of Artificial Sequence: Synthetic oligonucleotide
cacgacgcccacgguggcc

SEQ ID NO: 439066 - RNA, 19 nt, Artificial Sequence
  Description of Artificial Sequence: Synthetic oligonucleotide
gggcucggcugacagucug

SEQ ID NO: 439067 - RNA, 19 nt, Artificial Sequence
  Description of Artificial Sequence: Synthetic oligonucleotide
uggccacgggaugcuguug

SEQ ID NO: 439068 - RNA, 19 nt, Artificial Sequence
  Description of Artificial Sequence: Synthetic oligonucleotide
ggcucggcugacagucugg

SEQ ID NO: 439069 - RNA, 19 nt, Artificial Sequence
  Description of Artificial Sequence: Synthetic oligonucleotide
cguguacuuuccggcaucg

SEQ ID NO: 439070 - RNA, 19 nt, Artificial Sequence
  Description of Artificial Sequence: Synthetic oligonucleotide
cgucaaacggaucugggcu

SEQ ID NO: 439071 - RNA, 19 nt, Artificial Sequence
  Description of Artificial Sequence: Synthetic oligonucleotide
gggcuguauauacuucccu

SEQ ID NO: 439072 - RNA, 19 nt, Artificial Sequence
  Description of Artificial Sequence: Synthetic oligonucleotide
ggucgcauucgcggaaaca

SEQ ID NO: 439073 - RNA, 19 nt, Artificial Sequence
  Description of Artificial Sequence: Synthetic oligonucleotide
cuaaggacggggcggucau

SEQ ID NO: 439074 - RNA, 19 nt, Artificial Sequence
  Description of Artificial Sequence: Synthetic oligonucleotide
ggaccuguggagcccgcaa

SEQ ID NO: 439075 - RNA, 19 nt, Artificial Sequence
  Description of Artificial Sequence: Synthetic oligonucleotide
gccucucucggugcccagg

SEQ ID NO: 439076 - RNA, 19 nt, Artificial Sequence
  Description of Artificial Sequence: Synthetic oligonucleotide
cacguguacuuuccggcau

SEQ ID NO: 439077 - RNA, 19 nt, Artificial Sequence
  Description of Artificial Sequence: Synthetic oligonucleotide
agcuauccuugggucggaa

SEQ ID NO: 439078 - RNA, 19 nt, Artificial Sequence
  Description of Artificial Sequence: Synthetic oligonucleotide
ggcccauccgucaucgucu

SEQ ID NO: 439079 - RNA, 19 nt, Artificial Sequence
  Description of Artificial Sequence: Synthetic oligonucleotide
ggcggucaugugaggggag

SEQ ID NO: 439080 - RNA, 19 nt, Artificial Sequence
  Description of Artificial Sequence: Synthetic oligonucleotide
ggcucgucugaggggugag

SEQ ID NO: 439081 - RNA, 19 nt, Artificial Sequence
  Description of Artificial Sequence: Synthetic oligonucleotide
gggucgcauucgcggaaac

SEQ ID NO: 439082 - RNA, 19 nt, Artificial Sequence
  Description of Artificial Sequence: Synthetic oligonucleotide
ccuugggucggaacugcaa

SEQ ID NO: 439083 - RNA, 19 nt, Artificial Sequence
  Description of Artificial Sequence: Synthetic oligonucleotide
gcucgucugaggggugagc

SEQ ID NO: 439084 - RNA, 19 nt, Artificial Sequence
  Description of Artificial Sequence: Synthetic oligonucleotide
cggggcggucaugugaggg

SEQ ID NO: 439085 - RNA, 19 nt, Artificial Sequence
  Description of Artificial Sequence: Synthetic oligonucleotide
gguacccaugaaagaguua

SEQ ID NO: 439086 - RNA, 19 nt, Artificial Sequence
  Description of Artificial Sequence: Synthetic oligonucleotide
guggccacgggaugcuguu

SEQ ID NO: 439087 - RNA, 19 nt, Artificial Sequence
  Description of Artificial Sequence: Synthetic oligonucleotide
gucuaaggacggggcgguc

SEQ ID NO: 439088 - RNA, 19 nt, Artificial Sequence
  Description of Artificial Sequence: Synthetic oligonucleotide
cucaggcaucacgugcaua

SEQ ID NO: 439089 - RNA, 19 nt, Artificial Sequence
  Description of Artificial Sequence: Synthetic oligonucleotide
caaaccagugaaggccuuu

SEQ ID NO: 439090 - RNA, 19 nt, Artificial Sequence
  Description of Artificial Sequence: Synthetic oligonucleotide
cauccaggugaggucuccu

SEQ ID NO: 439091 - RNA, 19 nt, Artificial Sequence
  Description of Artificial Sequence: Synthetic oligonucleotide
caaagccgucugggcugac

SEQ ID NO: 439092 - RNA, 19 nt, Artificial Sequence
  Description of Artificial Sequence: Synthetic oligonucleotide
gcuccugacuugcgcuaaa

SEQ ID NO: 439093 - RNA, 19 nt, Artificial Sequence
  Description of Artificial Sequence: Synthetic oligonucleotide
gggcgcaacuggcauuuau

SEQ ID NO: 439094 - RNA, 19 nt, Artificial Sequence
  Description of Artificial Sequence: Synthetic oligonucleotide
ugggcgcaacuggcauuua

SEQ ID NO: 439095 - RNA, 19 nt, Artificial Sequence
  Description of Artificial Sequence: Synthetic oligonucleotide
ccgccuugugugguauaug

SEQ ID NO: 439096 - RNA, 19 nt, Artificial Sequence
  Description of Artificial Sequence: Synthetic oligonucleotide
ggugggcgcaacuggcauu

SEQ ID NO: 439097 - RNA, 19 nt, Artificial Sequence
  Description of Artificial Sequence: Synthetic oligonucleotide
ccaaugcguccaaaccagu

SEQ ID NO: 439098 - RNA, 19 nt, Artificial Sequence
  Description of Artificial Sequence: Synthetic oligonucleotide
gcccauccgucaucgucua

SEQ ID NO: 439099 - RNA, 19 nt, Artificial Sequence
  Description of Artificial Sequence: Synthetic oligonucleotide
cggucaugugaggggaguc

SEQ ID NO: 439100 - RNA, 19 nt, Artificial Sequence
  Description of Artificial Sequence: Synthetic oligonucleotide
cacccacugugggagccau

SEQ ID NO: 439101 - RNA, 19 nt, Artificial Sequence
  Description of Artificial Sequence: Synthetic oligonucleotide
cgaaugcgguuucccugga

SEQ ID NO: 439102 - RNA, 19 nt, Artificial Sequence
  Description of Artificial Sequence: Synthetic oligonucleotide
gcccgcaaaugggcagaga

SEQ ID NO: 439103 - RNA, 19 nt, Artificial Sequence
  Description of Artificial Sequence: Synthetic oligonucleotide
cgucuaaggacggggcggu

SEQ ID NO: 439104 - RNA, 19 nt, Artificial Sequence
  Description of Artificial Sequence: Synthetic oligonucleotide
cccauccgucaucgucuaa

SEQ ID NO: 439105 - RNA, 19 nt, Artificial Sequence
  Description of Artificial Sequence: Synthetic oligonucleotide
cgaugaucagcagcugauu

SEQ ID NO: 439106 - RNA, 19 nt, Artificial Sequence
  Description of Artificial Sequence: Synthetic oligonucleotide
cgacgcccacgguggccca

SEQ ID NO: 439107 - RNA, 19 nt, Artificial Sequence
  Description of Artificial Sequence: Synthetic oligonucleotide
ccccgaugucuucgaucuu

SEQ ID NO: 439108 - RNA, 19 nt, Artificial Sequence
  Description of Artificial Sequence: Synthetic oligonucleotide
aaaucuaaacacaaugucc

SEQ ID NO: 439109 - RNA, 19 nt, Artificial Sequence
  Description of Artificial Sequence: Synthetic oligonucleotide
aaacaaauucaguauuccc

SEQ ID NO: 439110 - RNA, 19 nt, Artificial Sequence
  Description of Artificial Sequence: Synthetic oligonucleotide
gauaauuucuuguugagac

SEQ ID NO: 439111 - RNA, 19 nt, Artificial Sequence
  Description of Artificial Sequence: Synthetic oligonucleotide
agucacaucaacuuguugg

SEQ ID NO: 439112 - RNA, 19 nt, Artificial Sequence
  Description of Artificial Sequence: Synthetic oligonucleotide
aaggcaucgauauucagag

SEQ ID NO: 439113 - RNA, 19 nt, Artificial Sequence
  Description of Artificial Sequence: Synthetic oligonucleotide
uaguaauucauacugaggu

SEQ ID NO: 439114 - RNA, 19 nt, Artificial Sequence
  Description of Artificial Sequence: Synthetic oligonucleotide
aaaucaucaaguaugugcg

SEQ ID NO: 439115 - RNA, 19 nt, Artificial Sequence
  Description of Artificial Sequence: Synthetic oligonucleotide
uguuaagagguucaucugg

SEQ ID NO: 439116 - RNA, 19 nt, Artificial Sequence
  Description of Artificial Sequence: Synthetic oligonucleotide
aaucccuugagacagguca

SEQ ID NO: 439117 - RNA, 19 nt, Artificial Sequence
  Description of Artificial Sequence: Synthetic oligonucleotide
agaugaaaagaucuguaac

SEQ ID NO: 439118 - RNA, 19 nt, Artificial Sequence
  Description of Artificial Sequence: Synthetic oligonucleotide
gaguuaguaauucauacug

SEQ ID NO: 439119 - RNA, 19 nt, Artificial Sequence
  Description of Artificial Sequence: Synthetic oligonucleotide
aguguuaagagguucaucu

SEQ ID NO: 439120 - RNA, 19 nt, Artificial Sequence
  Description of Artificial Sequence: Synthetic oligonucleotide
aagucgacaaaauuucauc

SEQ ID NO: 439121 - RNA, 19 nt, Artificial Sequence
  Description of Artificial Sequence: Synthetic oligonucleotide
uaaguuugcauacuuauaa

SEQ ID NO: 439122 - RNA, 19 nt, Artificial Sequence
  Description of Artificial Sequence: Synthetic oligonucleotide
caguaaaucaucaaguaug

SEQ ID NO: 439123 - RNA, 19 nt, Artificial Sequence
  Description of Artificial Sequence: Synthetic oligonucleotide
caucauucaacccaaacag

SEQ ID NO: 439124 - RNA, 19 nt, Artificial Sequence
  Description of Artificial Sequence: Synthetic oligonucleotide
uuaguaauucauacugagg

SEQ ID NO: 439125 - RNA, 19 nt, Artificial Sequence
  Description of Artificial Sequence: Synthetic oligonucleotide
cugguuucggauaaaaucc

SEQ ID NO: 439126 - RNA, 19 nt, Artificial Sequence
  Description of Artificial Sequence: Synthetic oligonucleotide
agugguagccauuucuugc

SEQ ID NO: 439127 - RNA, 19 nt, Artificial Sequence
  Description of Artificial Sequence: Synthetic oligonucleotide
aguugaacggcuuuauuuc

SEQ ID NO: 439128 - RNA, 19 nt, Artificial Sequence
  Description of Artificial Sequence: Synthetic oligonucleotide
uaugagggcaaagugaccg

SEQ ID NO: 439129 - RNA, 19 nt, Artificial Sequence
  Description of Artificial Sequence: Synthetic oligonucleotide
aaacucuuguaaucuugcc

SEQ ID NO: 439130 - RNA, 19 nt, Artificial Sequence
  Description of Artificial Sequence: Synthetic oligonucleotide
ugauacuguaaacauacac

SEQ ID NO: 439131 - RNA, 19 nt, Artificial Sequence
  Description of Artificial Sequence: Synthetic oligonucleotide
aaucuaaacacaauguccu

SEQ ID NO: 439132 - RNA, 19 nt, Artificial Sequence
  Description of Artificial Sequence: Synthetic oligonucleotide
aaacuacuauuucacauca

SEQ ID NO: 439133 - RNA, 19 nt, Artificial Sequence
  Description of Artificial Sequence: Synthetic oligonucleotide
agaucuagggagcugaaag

SEQ ID NO: 439134 - RNA, 19 nt, Artificial Sequence
  Description of Artificial Sequence: Synthetic oligonucleotide
uuuucgguugcauaguuca

SEQ ID NO: 439135 - RNA, 19 nt, Artificial Sequence
  Description of Artificial Sequence: Synthetic oligonucleotide
ugaauaaacccucuucucu

SEQ ID NO: 439136 - RNA, 19 nt, Artificial Sequence
  Description of Artificial Sequence: Synthetic oligonucleotide
aaaauccgaacacaacuug

SEQ ID NO: 439137 - RNA, 19 nt, Artificial Sequence
  Description of Artificial Sequence: Synthetic oligonucleotide
gagaucauagcugagauca

SEQ ID NO: 439138 - RNA, 19 nt, Artificial Sequence
  Description of Artificial Sequence: Synthetic oligonucleotide
aauggcuucaaguuuucga

SEQ ID NO: 439139 - RNA, 19 nt, Artificial Sequence
  Description of Artificial Sequence: Synthetic oligonucleotide
ucgaaaacuacuauuucac

SEQ ID NO: 439140 - RNA, 19 nt, Artificial Sequence
  Description of Artificial Sequence: Synthetic oligonucleotide
gaauccaucauucaaccca

SEQ ID NO: 439141 - RNA, 19 nt, Artificial Sequence
  Description of Artificial Sequence: Synthetic oligonucleotide
aacaaauucaguauuccca

SEQ ID NO: 439142 - RNA, 19 nt, Artificial Sequence
  Description of Artificial Sequence: Synthetic oligonucleotide
aagggauuagugcaugaag

SEQ ID NO: 439143 - RNA, 19 nt, Artificial Sequence
  Description of Artificial Sequence: Synthetic oligonucleotide
aguuaagauucuucauugc

SEQ ID NO: 439144 - RNA, 19 nt, Artificial Sequence
  Description of Artificial Sequence: Synthetic oligonucleotide
uucgauaauuucuuguuga

SEQ ID NO: 439145 - RNA, 19 nt, Artificial Sequence
  Description of Artificial Sequence: Synthetic oligonucleotide
ucuaguaucuguuuagcuc

SEQ ID NO: 439146 - RNA, 19 nt, Artificial Sequence
  Description of Artificial Sequence: Synthetic oligonucleotide
gauuaggaggagcaguggg

SEQ ID NO: 439147 - RNA, 19 nt, Artificial Sequence
  Description of Artificial Sequence: Synthetic oligonucleotide
auugguacaccgaucagcc

SEQ ID NO: 439148 - RNA, 19 nt, Artificial Sequence
  Description of Artificial Sequence: Synthetic oligonucleotide
auugacuucauugguacac

SEQ ID NO: 439149 - RNA, 19 nt, Artificial Sequence
  Description of Artificial Sequence: Synthetic oligonucleotide
ucugucauugcacaagaac

SEQ ID NO: 439150 - RNA, 19 nt, Artificial Sequence
  Description of Artificial Sequence: Synthetic oligonucleotide
ugcaaaucccuugagacag

SEQ ID NO: 439151 - RNA, 19 nt, Artificial Sequence
  Description of Artificial Sequence: Synthetic oligonucleotide
uuuacugaguccaguaugu

SEQ ID NO: 439152 - RNA, 19 nt, Artificial Sequence
  Description of Artificial Sequence: Synthetic oligonucleotide
uucuuaagagcuuugaguu

SEQ ID NO: 439153 - RNA, 19 nt, Artificial Sequence
  Description of Artificial Sequence: Synthetic oligonucleotide
ucggauaaaauccagucua

SEQ ID NO: 439154 - RNA, 19 nt, Artificial Sequence
  Description of Artificial Sequence: Synthetic oligonucleotide
ugugcguaguaacugagca

SEQ ID NO: 439155 - RNA, 19 nt, Artificial Sequence
  Description of Artificial Sequence: Synthetic oligonucleotide
aguaauucauacugagguc

SEQ ID NO: 439156 - RNA, 19 nt, Artificial Sequence
  Description of Artificial Sequence: Synthetic oligonucleotide
gaauaaacccucuucucug

SEQ ID NO: 439157 - RNA, 19 nt, Artificial Sequence
  Description of Artificial Sequence: Synthetic oligonucleotide
ugaacaaaucagcuuauaa

SEQ ID NO: 439158 - RNA, 19 nt, Artificial Sequence
  Description of Artificial Sequence: Synthetic oligonucleotide
acuacuauuucacaucagu

SEQ ID NO: 439159 - RNA, 19 nt, Artificial Sequence
  Description of Artificial Sequence: Synthetic oligonucleotide
cuauaugcuuauuuaauuc

SEQ ID NO: 439160 - RNA, 19 nt, Artificial Sequence
  Description of Artificial Sequence: Synthetic oligonucleotide
uuucgauaauuucuuguug

SEQ ID NO: 439161 - RNA, 19 nt, Artificial Sequence
  Description of Artificial Sequence: Synthetic oligonucleotide
uguugagacugaagcaugg

SEQ ID NO: 439162 - RNA, 19 nt, Artificial Sequence
  Description of Artificial Sequence: Synthetic oligonucleotide
aacggcuuuauuucuuaag

SEQ ID NO: 439163 - RNA, 19 nt, Artificial Sequence
  Description of Artificial Sequence: Synthetic oligonucleotide
cuagggagcugaaagacag

SEQ ID NO: 439164 - RNA, 19 nt, Artificial Sequence
  Description of Artificial Sequence: Synthetic oligonucleotide
ugggaauaaaagaaagggu

SEQ ID NO: 439165 - RNA, 19 nt, Artificial Sequence
  Description of Artificial Sequence: Synthetic oligonucleotide
agagaugaguuuccagccc

SEQ ID NO: 439166 - RNA, 19 nt, Artificial Sequence
  Description of Artificial Sequence: Synthetic oligonucleotide
ccuucuacaguuaagauuc

SEQ ID NO: 439167 - RNA, 19 nt, Artificial Sequence
  Description of Artificial Sequence: Synthetic oligonucleotide
ugcuaugagggcaaaguga

SEQ ID NO: 439168 - RNA, 19 nt, Artificial Sequence
  Description of Artificial Sequence: Synthetic oligonucleotide
aggucauuaccacagucuc

SEQ ID NO: 439169 - RNA, 19 nt, Artificial Sequence
  Description of Artificial Sequence: Synthetic oligonucleotide
agucgacaaaauuucaucu

SEQ ID NO: 439170 - RNA, 19 nt, Artificial Sequence
  Description of Artificial Sequence: Synthetic oligonucleotide
aauccuuccgcaagugccc

SEQ ID NO: 439171 - RNA, 19 nt, Artificial Sequence
  Description of Artificial Sequence: Synthetic oligonucleotide
auucaacccaaacaguuca

SEQ ID NO: 439172 - RNA, 19 nt, Artificial Sequence
  Description of Artificial Sequence: Synthetic oligonucleotide
ucuauaugcuuauuuaauu

SEQ ID NO: 439173 - RNA, 19 nt, Artificial Sequence
  Description of Artificial Sequence: Synthetic oligonucleotide
uggauaaucuagcaauuuc

SEQ ID NO: 439174 - RNA, 19 nt, Artificial Sequence
  Description of Artificial Sequence: Synthetic oligonucleotide
uggauuaggaggagcagug

SEQ ID NO: 439175 - RNA, 19 nt, Artificial Sequence
  Description of Artificial Sequence: Synthetic oligonucleotide
cuuguggaaauugagauca

SEQ ID NO: 439176 - RNA, 19 nt, Artificial Sequence
  Description of Artificial Sequence: Synthetic oligonucleotide
guuuacugaguccaguaug

SEQ ID NO: 439177 - RNA, 19 nt, Artificial Sequence
  Description of Artificial Sequence: Synthetic oligonucleotide
ugugcaaugccugagccca

SEQ ID NO: 439178 - RNA, 19 nt, Artificial Sequence
  Description of Artificial Sequence: Synthetic oligonucleotide
uuauacacuuucaguacac

SEQ ID NO: 439179 - RNA, 19 nt, Artificial Sequence
  Description of Artificial Sequence: Synthetic oligonucleotide
gauuacauucugugcaaug

SEQ ID NO: 439180 - RNA, 19 nt, Artificial Sequence
  Description of Artificial Sequence: Synthetic oligonucleotide
agaguuaguaauucauacu

SEQ ID NO: 439181 - RNA, 19 nt, Artificial Sequence
  Description of Artificial Sequence: Synthetic oligonucleotide
aaagugcaaaucccuugag

SEQ ID NO: 439182 - RNA, 19 nt, Artificial Sequence
  Description of Artificial Sequence: Synthetic oligonucleotide
uaugcuuucgggaguugag

SEQ ID NO: 439183 - RNA, 19 nt, Artificial Sequence
  Description of Artificial Sequence: Synthetic oligonucleotide
ugcaugaaguuuauucugu

SEQ ID NO: 439184 - RNA, 19 nt, Artificial Sequence
  Description of Artificial Sequence: Synthetic oligonucleotide
ucugugcaaugccugagcc

SEQ ID NO: 439185 - RNA, 19 nt, Artificial Sequence
  Description of Artificial Sequence: Synthetic oligonucleotide
uaugugcguaguaacugag

SEQ ID NO: 439186 - RNA, 19 nt, Artificial Sequence
  Description of Artificial Sequence: Synthetic oligonucleotide
uuaguagugguuacauccu

SEQ ID NO: 439187 - RNA, 19 nt, Artificial Sequence
  Description of Artificial Sequence: Synthetic oligonucleotide
cauugaauaaacccucuuc

SEQ ID NO: 439188 - RNA, 19 nt, Artificial Sequence
  Description of Artificial Sequence: Synthetic oligonucleotide
uugagaucauagcugagau

SEQ ID NO: 439189 - RNA, 19 nt, Artificial Sequence
  Description of Artificial Sequence: Synthetic oligonucleotide
acggcuuuauuucuuaaga

SEQ ID NO: 439190 - RNA, 19 nt, Artificial Sequence
  Description of Artificial Sequence: Synthetic oligonucleotide
aucuagggagcugaaagac

SEQ ID NO: 439191 - RNA, 19 nt, Artificial Sequence
  Description of Artificial Sequence: Synthetic oligonucleotide
ucuuuagcacgguuagucc

SEQ ID NO: 439192 - RNA, 19 nt, Artificial Sequence
  Description of Artificial Sequence: Synthetic oligonucleotide
gaaucgaugcaccagggaa

SEQ ID NO: 439193 - RNA, 19 nt, Artificial Sequence
  Description of Artificial Sequence: Synthetic oligonucleotide
gacaagucgacaaaauuuc

SEQ ID NO: 439194 - RNA, 19 nt, Artificial Sequence
  Description of Artificial Sequence: Synthetic oligonucleotide
uauaccagcuggaaguaau

SEQ ID NO: 439195 - RNA, 19 nt, Artificial Sequence
  Description of Artificial Sequence: Synthetic oligonucleotide
aagugguagccauuucuug

SEQ ID NO: 439196 - RNA, 19 nt, Artificial Sequence
  Description of Artificial Sequence: Synthetic oligonucleotide
uugccugaaauccuuccgc

SEQ ID NO: 439197 - RNA, 19 nt, Artificial Sequence
  Description of Artificial Sequence: Synthetic oligonucleotide
guaguaacugagcaguaac

SEQ ID NO: 439198 - RNA, 19 nt, Artificial Sequence
  Description of Artificial Sequence: Synthetic oligonucleotide
cuaaugacguaucauguca

SEQ ID NO: 439199 - RNA, 19 nt, Artificial Sequence
  Description of Artificial Sequence: Synthetic oligonucleotide
cagcuaaugacguaucaug

SEQ ID NO: 439200 - RNA, 19 nt, Artificial Sequence
  Description of Artificial Sequence: Synthetic oligonucleotide
ugagagcccaagcagcacc

SEQ ID NO: 439201 - RNA, 19 nt, Artificial Sequence
  Description of Artificial Sequence: Synthetic oligonucleotide
aaucgaugcaccagggaag

SEQ ID NO: 439202 - RNA, 19 nt, Artificial Sequence
  Description of Artificial Sequence: Synthetic oligonucleotide
guaauucauacugagguca

SEQ ID NO: 439203 - RNA, 19 nt, Artificial Sequence
  Description of Artificial Sequence: Synthetic oligonucleotide
aaguaauggcuucaaguuu

SEQ ID NO: 439204 - RNA, 19 nt, Artificial Sequence
  Description of Artificial Sequence: Synthetic oligonucleotide
ugggaguugaagcuagaga

SEQ ID NO: 439205 - RNA, 19 nt, Artificial Sequence
  Description of Artificial Sequence: Synthetic oligonucleotide
uccgaacacaacuugugga

SEQ ID NO: 439206 - RNA, 19 nt, Artificial Sequence
  Description of Artificial Sequence: Synthetic oligonucleotide
ucuuaagagcuuugaguug

SEQ ID NO: 439207 - RNA, 19 nt, Artificial Sequence
  Description of Artificial Sequence: Synthetic oligonucleotide
ucaaguaugugcguaguaa

SEQ ID NO: 439208 - RNA, 19 nt, Artificial Sequence
  Description of Artificial Sequence: Synthetic oligonucleotide
cuuaacauccaguguuaag

SEQ ID NO: 439209 - RNA, 19 nt, Artificial Sequence
  Description of Artificial Sequence: Synthetic oligonucleotide
caaguaugugcguaguaac

SEQ ID NO: 439210 - RNA, 19 nt, Artificial Sequence
  Description of Artificial Sequence: Synthetic oligonucleotide
uaaaggaauccaucauuca

SEQ ID NO: 439211 - RNA, 19 nt, Artificial Sequence
  Description of Artificial Sequence: Synthetic oligonucleotide
uuagcucugauagugugcu

SEQ ID NO: 439212 - RNA, 19 nt, Artificial Sequence
  Description of Artificial Sequence: Synthetic oligonucleotide
cacagucgagcaaaagugg

SEQ ID NO: 439213 - RNA, 19 nt, Artificial Sequence
  Description of Artificial Sequence: Synthetic oligonucleotide
cacucuuauacacuuucag

SEQ ID NO: 439214 - RNA, 19 nt, Artificial Sequence
  Description of Artificial Sequence: Synthetic oligonucleotide
gaaaacuacuauuucacau

SEQ ID NO: 439215 - RNA, 19 nt, Artificial Sequence
  Description of Artificial Sequence: Synthetic oligonucleotide
uuguugagacugaagcaug

SEQ ID NO: 439216 - RNA, 19 nt, Artificial Sequence
  Description of Artificial Sequence: Synthetic oligonucleotide
caacuuguuggcacagucg

SEQ ID NO: 439217 - RNA, 19 nt, Artificial Sequence
  Description of Artificial Sequence: Synthetic oligonucleotide
acuucauugguacaccgau

SEQ ID NO: 439218 - RNA, 19 nt, Artificial Sequence
  Description of Artificial Sequence: Synthetic oligonucleotide
gaccguaggacacucagga

SEQ ID NO: 439219 - RNA, 19 nt, Artificial Sequence
  Description of Artificial Sequence: Synthetic oligonucleotide
uugaauaaacccucuucuc

SEQ ID NO: 439220 - RNA, 19 nt, Artificial Sequence
  Description of Artificial Sequence: Synthetic oligonucleotide
aauccgaacacaacuugug

SEQ ID NO: 439221 - RNA, 19 nt, Artificial Sequence
  Description of Artificial Sequence: Synthetic oligonucleotide
agugguuacauccuugcua

SEQ ID NO: 439222 - RNA, 19 nt, Artificial Sequence
  Description of Artificial Sequence: Synthetic oligonucleotide
uauucagaguuaguaauuc

SEQ ID NO: 439223 - RNA, 19 nt, Artificial Sequence
  Description of Artificial Sequence: Synthetic oligonucleotide
gguaggaugaaacucagaa

SEQ ID NO: 439224 - RNA, 19 nt, Artificial Sequence
  Description of Artificial Sequence: Synthetic oligonucleotide
aguuuauucuguauaccag

SEQ ID NO: 439225 - RNA, 19 nt, Artificial Sequence
  Description of Artificial Sequence: Synthetic oligonucleotide
cuugccugaaauccuuccg

SEQ ID NO: 439226 - RNA, 19 nt, Artificial Sequence
  Description of Artificial Sequence: Synthetic oligonucleotide
agauacaaagcuccauaca

SEQ ID NO: 439227 - RNA, 19 nt, Artificial Sequence
  Description of Artificial Sequence: Synthetic oligonucleotide
uuuggauaaucuagcaauu

SEQ ID NO: 439228 - RNA, 19 nt, Artificial Sequence
  Description of Artificial Sequence: Synthetic oligonucleotide
ucuagggagcugaaagaca

SEQ ID NO: 439229 - RNA, 19 nt, Artificial Sequence
  Description of Artificial Sequence: Synthetic oligonucleotide
auggcuucaaguuuucgau

SEQ ID NO: 439230 - RNA, 19 nt, Artificial Sequence
  Description of Artificial Sequence: Synthetic oligonucleotide
aguaugugcguaguaacug

SEQ ID NO: 439231 - RNA, 19 nt, Artificial Sequence
  Description of Artificial Sequence: Synthetic oligonucleotide
uuaaggacacagagaugag

SEQ ID NO: 439232 - RNA, 19 nt, Artificial Sequence
  Description of Artificial Sequence: Synthetic oligonucleotide
ugacguaucaugucacuuc

SEQ ID NO: 439233 - RNA, 19 nt, Artificial Sequence
  Description of Artificial Sequence: Synthetic oligonucleotide
cauugguacaccgaucagc

SEQ ID NO: 439234 - RNA, 19 nt, Artificial Sequence
  Description of Artificial Sequence: Synthetic oligonucleotide
gugucuaguaucuguuuag

SEQ ID NO: 439235 - RNA, 19 nt, Artificial Sequence
  Description of Artificial Sequence: Synthetic oligonucleotide
ucgggaguugagaacuucc

SEQ ID NO: 439236 - RNA, 19 nt, Artificial Sequence
  Description of Artificial Sequence: Synthetic oligonucleotide
ucccauaccaucuucuaua

SEQ ID NO: 439237 - RNA, 19 nt, Artificial Sequence
  Description of Artificial Sequence: Synthetic oligonucleotide
uguguuuaguagugguuac

SEQ ID NO: 439238 - RNA, 19 nt, Artificial Sequence
  Description of Artificial Sequence: Synthetic oligonucleotide
uacagcuaaugacguauca

SEQ ID NO: 439239 - RNA, 19 nt, Artificial Sequence
  Description of Artificial Sequence: Synthetic oligonucleotide
cagucuaucaaucuggucu

SEQ ID NO: 439240 - RNA, 19 nt, Artificial Sequence
  Description of Artificial Sequence: Synthetic oligonucleotide
gaaguaauggcuucaaguu

SEQ ID NO: 439241 - RNA, 19 nt, Artificial Sequence
  Description of Artificial Sequence: Synthetic oligonucleotide
ugugaagcucacaaucauc

SEQ ID NO: 439242 - RNA, 19 nt, Artificial Sequence
  Description of Artificial Sequence: Synthetic oligonucleotide
cauccccugggcuuuaugc

SEQ ID NO: 439243 - RNA, 19 nt, Artificial Sequence
  Description of Artificial Sequence: Synthetic oligonucleotide
aaauccgaacacaacuugu

SEQ ID NO: 439244 - RNA, 19 nt, Artificial Sequence
  Description of Artificial Sequence: Synthetic oligonucleotide
uuugaacaaaucagcuuau

SEQ ID NO: 439245 - RNA, 19 nt, Artificial Sequence
  Description of Artificial Sequence: Synthetic oligonucleotide
uguuuagcucugauagugu

SEQ ID NO: 439246 - RNA, 19 nt, Artificial Sequence
  Description of Artificial Sequence: Synthetic oligonucleotide
guauucccacuaaagaaag

SEQ ID NO: 439247 - RNA, 19 nt, Artificial Sequence
  Description of Artificial Sequence: Synthetic oligonucleotide
agcacgguuaguccagguc

SEQ ID NO: 439248 - RNA, 19 nt, Artificial Sequence
  Description of Artificial Sequence: Synthetic oligonucleotide
ggaaauugagaucauagcu

SEQ ID NO: 439249 - RNA, 19 nt, Artificial Sequence
  Description of Artificial Sequence: Synthetic oligonucleotide
auagugugcuguucaaacu

SEQ ID NO: 439250 - RNA, 19 nt, Artificial Sequence
  Description of Artificial Sequence: Synthetic oligonucleotide
uguccucuugaaaauccga

SEQ ID NO: 439251 - RNA, 19 nt, Artificial Sequence
  Description of Artificial Sequence: Synthetic oligonucleotide
gacguaucaugucacuuca

SEQ ID NO: 439252 - RNA, 19 nt, Artificial Sequence
  Description of Artificial Sequence: Synthetic oligonucleotide
caguuugcacuugugaagc

SEQ ID NO: 439253 - RNA, 19 nt, Artificial Sequence
  Description of Artificial Sequence: Synthetic oligonucleotide
cucuuuagcacgguuaguc

SEQ ID NO: 439254 - RNA, 19 nt, Artificial Sequence
  Description of Artificial Sequence: Synthetic oligonucleotide
ugucucgaaaacuacuauu

SEQ ID NO: 439255 - RNA, 19 nt, Artificial Sequence
  Description of Artificial Sequence: Synthetic oligonucleotide
gaucuagggagcugaaaga

SEQ ID NO: 439256 - RNA, 19 nt, Artificial Sequence
  Description of Artificial Sequence: Synthetic oligonucleotide
aaguaugugcguaguaacu

SEQ ID NO: 439257 - RNA, 19 nt, Artificial Sequence
  Description of Artificial Sequence: Synthetic oligonucleotide
gauuagugcaugaaguuua

SEQ ID NO: 439258 - RNA, 19 nt, Artificial Sequence
  Description of Artificial Sequence: Synthetic oligonucleotide
agacaagucgacaaaauuu

SEQ ID NO: 439259 - RNA, 19 nt, Artificial Sequence
  Description of Artificial Sequence: Synthetic oligonucleotide
ugucuaguaucuguuuagc

SEQ ID NO: 439260 - RNA, 19 nt, Artificial Sequence
  Description of Artificial Sequence: Synthetic oligonucleotide
acaaaucagcuuauaaaca

SEQ ID NO: 439261 - RNA, 19 nt, Artificial Sequence
  Description of Artificial Sequence: Synthetic oligonucleotide
cuaguaucuguuuagcucu

SEQ ID NO: 439262 - RNA, 19 nt, Artificial Sequence
  Description of Artificial Sequence: Synthetic oligonucleotide
cuucgagaaguucuccagc

SEQ ID NO: 439263 - RNA, 19 nt, Artificial Sequence
  Description of Artificial Sequence: Synthetic oligonucleotide
caauccugugaucaaggug

SEQ ID NO: 439264 - RNA, 19 nt, Artificial Sequence
  Description of Artificial Sequence: Synthetic oligonucleotide
gagaugaguuuccagccca

SEQ ID NO: 439265 - RNA, 19 nt, Artificial Sequence
  Description of Artificial Sequence: Synthetic oligonucleotide
agucuuuacuccaggcuac

SEQ ID NO: 439266 - RNA, 19 nt, Artificial Sequence
  Description of Artificial Sequence: Synthetic oligonucleotide
uugugaagcucacaaucau

SEQ ID NO: 439267 - RNA, 19 nt, Artificial Sequence
  Description of Artificial Sequence: Synthetic oligonucleotide
agggauuagugcaugaagu

SEQ ID NO: 439268 - RNA, 19 nt, Artificial Sequence
  Description of Artificial Sequence: Synthetic oligonucleotide
uccgagaugugagggaugc

SEQ ID NO: 439269 - RNA, 19 nt, Artificial Sequence
  Description of Artificial Sequence: Synthetic oligonucleotide
ugaagcucacaaucaucug

SEQ ID NO: 439270 - RNA, 19 nt, Artificial Sequence
  Description of Artificial Sequence: Synthetic oligonucleotide
uccagucuaucaaucuggu

SEQ ID NO: 439271 - RNA, 19 nt, Artificial Sequence
  Description of Artificial Sequence: Synthetic oligonucleotide
gaugcaccagggaagacca

SEQ ID NO: 439272 - RNA, 19 nt, Artificial Sequence
  Description of Artificial Sequence: Synthetic oligonucleotide
cuuuagcacgguuagucca

SEQ ID NO: 439273 - RNA, 19 nt, Artificial Sequence
  Description of Artificial Sequence: Synthetic oligonucleotide
caucgauauucagaguuag

SEQ ID NO: 439274 - RNA, 19 nt, Artificial Sequence
  Description of Artificial Sequence: Synthetic oligonucleotide
uuaugcuuucgggaguuga

SEQ ID NO: 439275 - RNA, 19 nt, Artificial Sequence
  Description of Artificial Sequence: Synthetic oligonucleotide
aaagugguagccauuucuu

SEQ ID NO: 439276 - RNA, 19 nt, Artificial Sequence
  Description of Artificial Sequence: Synthetic oligonucleotide
aauccaucauucaacccaa

SEQ ID NO: 439277 - RNA, 19 nt, Artificial Sequence
  Description of Artificial Sequence: Synthetic oligonucleotide
ugcuuucgggaguugagaa

SEQ ID NO: 439278 - RNA, 19 nt, Artificial Sequence
  Description of Artificial Sequence: Synthetic oligonucleotide
ucgguugcauaguucacaa

SEQ ID NO: 439279 - RNA, 19 nt, Artificial Sequence
  Description of Artificial Sequence: Synthetic oligonucleotide
agucuaucaaucuggucuu

SEQ ID NO: 439280 - RNA, 19 nt, Artificial Sequence
  Description of Artificial Sequence: Synthetic oligonucleotide
aguuaguaauucauacuga

SEQ ID NO: 439281 - RNA, 19 nt, Artificial Sequence
  Description of Artificial Sequence: Synthetic oligonucleotide
acugaguccaguauguuuu

SEQ ID NO: 439282 - RNA, 19 nt, Artificial Sequence
  Description of Artificial Sequence: Synthetic oligonucleotide
guguuaagagguucaucug

SEQ ID NO: 439283 - RNA, 19 nt, Artificial Sequence
  Description of Artificial Sequence: Synthetic oligonucleotide
uccgagcuuccaaaggagu

SEQ ID NO: 439284 - RNA, 19 nt, Artificial Sequence
  Description of Artificial Sequence: Synthetic oligonucleotide
aaagugaccguaggacacu

SEQ ID NO: 439285 - RNA, 19 nt, Artificial Sequence
  Description of Artificial Sequence: Synthetic oligonucleotide
auaaagauacaaagcucca

SEQ ID NO: 439286 - RNA, 19 nt, Artificial Sequence
  Description of Artificial Sequence: Synthetic oligonucleotide
agcuaaugacguaucaugu

SEQ ID NO: 439287 - RNA, 19 nt, Artificial Sequence
  Description of Artificial Sequence: Synthetic oligonucleotide
guaacagucaugauuacau

SEQ ID NO: 439288 - RNA, 19 nt, Artificial Sequence
  Description of Artificial Sequence: Synthetic oligonucleotide
guaugugcguaguaacuga

SEQ ID NO: 439289 - RNA, 19 nt, Artificial Sequence
  Description of Artificial Sequence: Synthetic oligonucleotide
uccgauuccgagcuuccaa

SEQ ID NO: 439290 - RNA, 19 nt, Artificial Sequence
  Description of Artificial Sequence: Synthetic oligonucleotide
uauacacuuucaguacacu

SEQ ID NO: 439291 - RNA, 19 nt, Artificial Sequence
  Description of Artificial Sequence: Synthetic oligonucleotide
augugcguaguaacugagc

SEQ ID NO: 439292 - RNA, 19 nt, Artificial Sequence
  Description of Artificial Sequence: Synthetic oligonucleotide
cuucuuaacauccaguguu

SEQ ID NO: 439293 - RNA, 19 nt, Artificial Sequence
  Description of Artificial Sequence: Synthetic oligonucleotide
ugaacggcuuuauuucuua

SEQ ID NO: 439294 - RNA, 19 nt, Artificial Sequence
  Description of Artificial Sequence: Synthetic oligonucleotide
cuuaaaugcucucucuuua

SEQ ID NO: 439295 - RNA, 19 nt, Artificial Sequence
  Description of Artificial Sequence: Synthetic oligonucleotide
caccgaucagccaaauuuc

SEQ ID NO: 439296 - RNA, 19 nt, Artificial Sequence
  Description of Artificial Sequence: Synthetic oligonucleotide
agcucugauagugugcugu

SEQ ID NO: 439297 - RNA, 19 nt, Artificial Sequence
  Description of Artificial Sequence: Synthetic oligonucleotide
aagaucauacaaaguuuau

SEQ ID NO: 439298 - RNA, 19 nt, Artificial Sequence
  Description of Artificial Sequence: Synthetic oligonucleotide
auacuuaaggacacagaga

SEQ ID NO: 439299 - RNA, 19 nt, Artificial Sequence
  Description of Artificial Sequence: Synthetic oligonucleotide
agaucauacaaaguuuaua

SEQ ID NO: 439300 - RNA, 19 nt, Artificial Sequence
  Description of Artificial Sequence: Synthetic oligonucleotide
cuuuucgguugcauaguuc

SEQ ID NO: 439301 - RNA, 19 nt, Artificial Sequence
  Description of Artificial Sequence: Synthetic oligonucleotide
aacuacuauuucacaucag

SEQ ID NO: 439302 - RNA, 19 nt, Artificial Sequence
  Description of Artificial Sequence: Synthetic oligonucleotide
agggaaaaucuaaacacaa

SEQ ID NO: 439303 - RNA, 19 nt, Artificial Sequence
  Description of Artificial Sequence: Synthetic oligonucleotide
acuuucaaguugaacggcu

SEQ ID NO: 439304 - RNA, 19 nt, Artificial Sequence
  Description of Artificial Sequence: Synthetic oligonucleotide
uuucgguugcauaguucac

SEQ ID NO: 439305 - RNA, 19 nt, Artificial Sequence
  Description of Artificial Sequence: Synthetic oligonucleotide
gugcguaguaacugagcag

SEQ ID NO: 439306 - RNA, 19 nt, Artificial Sequence
  Description of Artificial Sequence: Synthetic oligonucleotide
ugccaauccugugaucaag

SEQ ID NO: 439307 - RNA, 19 nt, Artificial Sequence
  Description of Artificial Sequence: Synthetic oligonucleotide
uuccuucuacaguuaagau

SEQ ID NO: 439308 - RNA, 19 nt, Artificial Sequence
  Description of Artificial Sequence: Synthetic oligonucleotide
uucaaguugaacggcuuua

SEQ ID NO: 439309 - RNA, 19 nt, Artificial Sequence
  Description of Artificial Sequence: Synthetic oligonucleotide
aaacugcugcuuaaaugcu

SEQ ID NO: 439310 - RNA, 19 nt, Artificial Sequence
  Description of Artificial Sequence: Synthetic oligonucleotide
ccguaggacacucaggagc

SEQ ID NO: 439311 - RNA, 19 nt, Artificial Sequence
  Description of Artificial Sequence: Synthetic oligonucleotide
gcacagucgagcaaaagug

SEQ ID NO: 439312 - RNA, 19 nt, Artificial Sequence
  Description of Artificial Sequence: Synthetic oligonucleotide
uugaacggcuuuauuucuu

SEQ ID NO: 439313 - RNA, 19 nt, Artificial Sequence
  Description of Artificial Sequence: Synthetic oligonucleotide
agagaugcuggcucccagu

SEQ ID NO: 439314 - RNA, 19 nt, Artificial Sequence
  Description of Artificial Sequence: Synthetic oligonucleotide
cugagcaguaacagucaug

SEQ ID NO: 439315 - RNA, 19 nt, Artificial Sequence
  Description of Artificial Sequence: Synthetic oligonucleotide
aguccgcuuccuucuacag

SEQ ID NO: 439316 - RNA, 19 nt, Artificial Sequence
  Description of Artificial Sequence: Synthetic oligonucleotide
uuagcacgguuaguccagg

SEQ ID NO: 439317 - RNA, 19 nt, Artificial Sequence
  Description of Artificial Sequence: Synthetic oligonucleotide
ggcaaagugaccguaggac

SEQ ID NO: 439318 - RNA, 19 nt, Artificial Sequence
  Description of Artificial Sequence: Synthetic oligonucleotide
ugcgagauacacuccucaa

SEQ ID NO: 439319 - RNA, 19 nt, Artificial Sequence
  Description of Artificial Sequence: Synthetic oligonucleotide
gcaguaacagucaugauua

SEQ ID NO: 439320 - RNA, 19 nt, Artificial Sequence
  Description of Artificial Sequence: Synthetic oligonucleotide
uaacagucaugauuacauu

SEQ ID NO: 439321 - RNA, 19 nt, Artificial Sequence
  Description of Artificial Sequence: Synthetic oligonucleotide
uccgcaagugccccgccac

SEQ ID NO: 439322 - RNA, 19 nt, Artificial Sequence
  Description of Artificial Sequence: Synthetic oligonucleotide
acagcuaaugacguaucau

SEQ ID NO: 439323 - RNA, 19 nt, Artificial Sequence
  Description of Artificial Sequence: Synthetic oligonucleotide
acguuuacugaguccagua

SEQ ID NO: 439324 - RNA, 19 nt, Artificial Sequence
  Description of Artificial Sequence: Synthetic oligonucleotide
ucuuaacauccaguguuaa

SEQ ID NO: 439325 - RNA, 19 nt, Artificial Sequence
  Description of Artificial Sequence: Synthetic oligonucleotide
uugguagcugcaguuugca

SEQ ID NO: 439326 - RNA, 19 nt, Artificial Sequence
  Description of Artificial Sequence: Synthetic oligonucleotide
cuuaagagcuuugaguugu

SEQ ID NO: 439327 - RNA, 19 nt, Artificial Sequence
  Description of Artificial Sequence: Synthetic oligonucleotide
uugcaagggauuagugcau

SEQ ID NO: 439328 - RNA, 19 nt, Artificial Sequence
  Description of Artificial Sequence: Synthetic oligonucleotide
ugauagugugcuguucaaa

SEQ ID NO: 439329 - RNA, 19 nt, Artificial Sequence
  Description of Artificial Sequence: Synthetic oligonucleotide
gauacacuccucaaaaguu

SEQ ID NO: 439330 - RNA, 19 nt, Artificial Sequence
  Description of Artificial Sequence: Synthetic oligonucleotide
ugccacguuuacugagucc

SEQ ID NO: 439331 - RNA, 19 nt, Artificial Sequence
  Description of Artificial Sequence: Synthetic oligonucleotide
gugaucaugagcucuuccu

SEQ ID NO: 439332 - RNA, 19 nt, Artificial Sequence
  Description of Artificial Sequence: Synthetic oligonucleotide
gugguuacauccuugcuau

SEQ ID NO: 439333 - RNA, 19 nt, Artificial Sequence
  Description of Artificial Sequence: Synthetic oligonucleotide
uguauaccagcuggaagua

SEQ ID NO: 439334 - RNA, 19 nt, Artificial Sequence
  Description of Artificial Sequence: Synthetic oligonucleotide
guaacugagcaguaacagu

SEQ ID NO: 439335 - RNA, 19 nt, Artificial Sequence
  Description of Artificial Sequence: Synthetic oligonucleotide
cacaagaaccuuguuuguc

SEQ ID NO: 439336 - RNA, 19 nt, Artificial Sequence
  Description of Artificial Sequence: Synthetic oligonucleotide
ugacugcgagauacacucc

SEQ ID NO: 439337 - RNA, 19 nt, Artificial Sequence
  Description of Artificial Sequence: Synthetic oligonucleotide
uaguagugguuacauccuu

SEQ ID NO: 439338 - RNA, 19 nt, Artificial Sequence
  Description of Artificial Sequence: Synthetic oligonucleotide
uuuccagcccacuguuuuc

SEQ ID NO: 439339 - RNA, 19 nt, Artificial Sequence
  Description of Artificial Sequence: Synthetic oligonucleotide
acagucgagcaaaaguggu

SEQ ID NO: 439340 - RNA, 19 nt, Artificial Sequence
  Description of Artificial Sequence: Synthetic oligonucleotide
uccagcugaucuauuucuu

SEQ ID NO: 439341 - RNA, 19 nt, Artificial Sequence
  Description of Artificial Sequence: Synthetic oligonucleotide
gcuaaugacguaucauguc

SEQ ID NO: 439342 - RNA, 19 nt, Artificial Sequence
  Description of Artificial Sequence: Synthetic oligonucleotide
cauucugugcaaugccuga

SEQ ID NO: 439343 - RNA, 19 nt, Artificial Sequence
  Description of Artificial Sequence: Synthetic oligonucleotide
agcuccauacauacuuaag

SEQ ID NO: 439344 - RNA, 19 nt, Artificial Sequence
  Description of Artificial Sequence: Synthetic oligonucleotide
gcucacaaucaucugcagc

SEQ ID NO: 439345 - RNA, 19 nt, Artificial Sequence
  Description of Artificial Sequence: Synthetic oligonucleotide
aucauucaacccaaacagu

SEQ ID NO: 439346 - RNA, 19 nt, Artificial Sequence
  Description of Artificial Sequence: Synthetic oligonucleotide
agcccugguuaggagcugc

SEQ ID NO: 439347 - RNA, 19 nt, Artificial Sequence
  Description of Artificial Sequence: Synthetic oligonucleotide
agaugaguuuccagcccac

SEQ ID NO: 439348 - RNA, 19 nt, Artificial Sequence
  Description of Artificial Sequence: Synthetic oligonucleotide
ggaauccaucauucaaccc

SEQ ID NO: 439349 - RNA, 19 nt, Artificial Sequence
  Description of Artificial Sequence: Synthetic oligonucleotide
gugggaguugaagcuagag

SEQ ID NO: 439350 - RNA, 19 nt, Artificial Sequence
  Description of Artificial Sequence: Synthetic oligonucleotide
uucuggcauccccugggcu

SEQ ID NO: 439351 - RNA, 19 nt, Artificial Sequence
  Description of Artificial Sequence: Synthetic oligonucleotide
acaagucgacaaaauuuca

SEQ ID NO: 439352 - RNA, 19 nt, Artificial Sequence
  Description of Artificial Sequence: Synthetic oligonucleotide
gcacgguuaguccagguca

SEQ ID NO: 439353 - RNA, 19 nt, Artificial Sequence
  Description of Artificial Sequence: Synthetic oligonucleotide
aucaaccaaaacagacaag

SEQ ID NO: 439354 - RNA, 19 nt, Artificial Sequence
  Description of Artificial Sequence: Synthetic oligonucleotide
gacugcgagauacacuccu

SEQ ID NO: 439355 - RNA, 19 nt, Artificial Sequence
  Description of Artificial Sequence: Synthetic oligonucleotide
ucauugcuuggguguaaaa

SEQ ID NO: 439356 - RNA, 19 nt, Artificial Sequence
  Description of Artificial Sequence: Synthetic oligonucleotide
cuugcuaugagggcaaagu

SEQ ID NO: 439357 - RNA, 19 nt, Artificial Sequence
  Description of Artificial Sequence: Synthetic oligonucleotide
guuugcacuugugaagcuc

SEQ ID NO: 439358 - RNA, 19 nt, Artificial Sequence
  Description of Artificial Sequence: Synthetic oligonucleotide
ggauaaucuagcaauuucu

SEQ ID NO: 439359 - RNA, 19 nt, Artificial Sequence
  Description of Artificial Sequence: Synthetic oligonucleotide
uggcuucaaguuuucgaua

SEQ ID NO: 439360 - RNA, 19 nt, Artificial Sequence
  Description of Artificial Sequence: Synthetic oligonucleotide
cuuucgggaguugagaacu

SEQ ID NO: 439361 - RNA, 19 nt, Artificial Sequence
  Description of Artificial Sequence: Synthetic oligonucleotide
acuaaagaaagggcaucaa

SEQ ID NO: 439362 - RNA, 19 nt, Artificial Sequence
  Description of Artificial Sequence: Synthetic oligonucleotide
gacuucauugguacaccga

SEQ ID NO: 439363 - RNA, 19 nt, Artificial Sequence
  Description of Artificial Sequence: Synthetic oligonucleotide
gcacuugugaagcucacaa

SEQ ID NO: 439364 - RNA, 19 nt, Artificial Sequence
  Description of Artificial Sequence: Synthetic oligonucleotide
uugguacaccgaucagcca

SEQ ID NO: 439365 - RNA, 19 nt, Artificial Sequence
  Description of Artificial Sequence: Synthetic oligonucleotide
ggcaucgauauucagaguu

SEQ ID NO: 439366 - RNA, 19 nt, Artificial Sequence
  Description of Artificial Sequence: Synthetic oligonucleotide
gucuaguaucuguuuagcu

SEQ ID NO: 439367 - RNA, 19 nt, Artificial Sequence
  Description of Artificial Sequence: Synthetic oligonucleotide
uuccgcaagugccccgcca

SEQ ID NO: 439368 - RNA, 19 nt, Artificial Sequence
  Description of Artificial Sequence: Synthetic oligonucleotide
gccaauccugugaucaagg

SEQ ID NO: 439369 - RNA, 19 nt, Artificial Sequence
  Description of Artificial Sequence: Synthetic oligonucleotide
gccacguuuacugagucca

SEQ ID NO: 439370 - RNA, 19 nt, Artificial Sequence
  Description of Artificial Sequence: Synthetic oligonucleotide
ggauuaggaggagcagugg

SEQ ID NO: 439371 - RNA, 19 nt, Artificial Sequence
  Description of Artificial Sequence: Synthetic oligonucleotide
gaacggcuuuauuucuuaa

SEQ ID NO: 439372 - RNA, 19 nt, Artificial Sequence
  Description of Artificial Sequence: Synthetic oligonucleotide
caagucgacaaaauuucau

SEQ ID NO: 439373 - RNA, 19 nt, Artificial Sequence
  Description of Artificial Sequence: Synthetic oligonucleotide
gucucgaaaacuacuauuu

SEQ ID NO: 439374 - RNA, 19 nt, Artificial Sequence
  Description of Artificial Sequence: Synthetic oligonucleotide
accgaucagccaaauuucu

SEQ ID NO: 439375 - RNA, 19 nt, Artificial Sequence
  Description of Artificial Sequence: Synthetic oligonucleotide
caaguccgcuuccuucuac

SEQ ID NO: 439376 - RNA, 19 nt, Artificial Sequence
  Description of Artificial Sequence: Synthetic oligonucleotide
agcuuuucgguugcauagu

SEQ ID NO: 439377 - RNA, 19 nt, Artificial Sequence
  Description of Artificial Sequence: Synthetic oligonucleotide
caccagggaagaccagccc

SEQ ID NO: 439378 - RNA, 19 nt, Artificial Sequence
  Description of Artificial Sequence: Synthetic oligonucleotide
gcugaucuauuucuuugga

SEQ ID NO: 439379 - RNA, 19 nt, Artificial Sequence
  Description of Artificial Sequence: Synthetic oligonucleotide
uucgggaguugagaacuuc

SEQ ID NO: 439380 - RNA, 19 nt, Artificial Sequence
  Description of Artificial Sequence: Synthetic oligonucleotide
uuucgggaguugagaacuu

SEQ ID NO: 439381 - RNA, 19 nt, Artificial Sequence
  Description of Artificial Sequence: Synthetic oligonucleotide
guguuuaguagugguuaca

SEQ ID NO: 439382 - RNA, 19 nt, Artificial Sequence
  Description of Artificial Sequence: Synthetic oligonucleotide
ugugaccugcuuguauuuu

SEQ ID NO: 439383 - RNA, 19 nt, Artificial Sequence
  Description of Artificial Sequence: Synthetic oligonucleotide
uggcucccaguauuucaac

SEQ ID NO: 439384 - RNA, 19 nt, Artificial Sequence
  Description of Artificial Sequence: Synthetic oligonucleotide
guuuccagcccacuguuuu

SEQ ID NO: 439385 - RNA, 19 nt, Artificial Sequence
  Description of Artificial Sequence: Synthetic oligonucleotide
caguguuaagagguucauc

SEQ ID NO: 439386 - RNA, 19 nt, Artificial Sequence
  Description of Artificial Sequence: Synthetic oligonucleotide
gcuuucgggaguugagaac

SEQ ID NO: 439387 - RNA, 19 nt, Artificial Sequence
  Description of Artificial Sequence: Synthetic oligonucleotide
cugccacguuuacugaguc

SEQ ID NO: 439388 - RNA, 19 nt, Artificial Sequence
  Description of Artificial Sequence: Synthetic oligonucleotide
cugcuucgagaaguucucc

SEQ ID NO: 439389 - RNA, 19 nt, Artificial Sequence
  Description of Artificial Sequence: Synthetic oligonucleotide
uagcacgguuaguccaggu

SEQ ID NO: 439390 - RNA, 19 nt, Artificial Sequence
  Description of Artificial Sequence: Synthetic oligonucleotide
ggaguugaagcuagagauc

SEQ ID NO: 439391 - RNA, 19 nt, Artificial Sequence
  Description of Artificial Sequence: Synthetic oligonucleotide
ggaaucgaugcaccaggga

SEQ ID NO: 439392 - RNA, 19 nt, Artificial Sequence
  Description of Artificial Sequence: Synthetic oligonucleotide
gguuugaacaaaucagcuu

SEQ ID NO: 439393 - RNA, 19 nt, Artificial Sequence
  Description of Artificial Sequence: Synthetic oligonucleotide
cugugcauuugaggagccc

SEQ ID NO: 439394 - RNA, 19 nt, Artificial Sequence
  Description of Artificial Sequence: Synthetic oligonucleotide
cucugauagugugcuguuc

SEQ ID NO: 439395 - RNA, 19 nt, Artificial Sequence
  Description of Artificial Sequence: Synthetic oligonucleotide
agcccacacucccugguuu

SEQ ID NO: 439396 - RNA, 19 nt, Artificial Sequence
  Description of Artificial Sequence: Synthetic oligonucleotide
ggcucccaguauuucaaca

SEQ ID NO: 439397 - RNA, 19 nt, Artificial Sequence
  Description of Artificial Sequence: Synthetic oligonucleotide
ccgagcuuccaaaggaguc

SEQ ID NO: 439398 - RNA, 19 nt, Artificial Sequence
  Description of Artificial Sequence: Synthetic oligonucleotide
gcuggauuaggaggagcag

SEQ ID NO: 439399 - RNA, 19 nt, Artificial Sequence
  Description of Artificial Sequence: Synthetic oligonucleotide
agcccagggaaaaucuaaa

SEQ ID NO: 439400 - RNA, 19 nt, Artificial Sequence
  Description of Artificial Sequence: Synthetic oligonucleotide
cgaugcaccagggaagacc

SEQ ID NO: 439401 - RNA, 19 nt, Artificial Sequence
  Description of Artificial Sequence: Synthetic oligonucleotide
ccgaacacaacuuguggaa

SEQ ID NO: 439402 - RNA, 19 nt, Artificial Sequence
  Description of Artificial Sequence: Synthetic oligonucleotide
gcgagauacacuccucaaa

SEQ ID NO: 439403 - RNA, 19 nt, Artificial Sequence
  Description of Artificial Sequence: Synthetic oligonucleotide
gcaccagggaagaccagcc

SEQ ID NO: 439404 - RNA, 19 nt, Artificial Sequence
  Description of Artificial Sequence: Synthetic oligonucleotide
gguuaguccaggucagccu

SEQ ID NO: 439405 - RNA, 19 nt, Artificial Sequence
  Description of Artificial Sequence: Synthetic oligonucleotide
ccugucucgaaaacuacua

SEQ ID NO: 439406 - RNA, 19 nt, Artificial Sequence
  Description of Artificial Sequence: Synthetic oligonucleotide
gacaggucauuaccacagu

SEQ ID NO: 439407 - RNA, 19 nt, Artificial Sequence
  Description of Artificial Sequence: Synthetic oligonucleotide
gcaagggauuagugcauga

SEQ ID NO: 439408 - RNA, 19 nt, Artificial Sequence
  Description of Artificial Sequence: Synthetic oligonucleotide
aucccuugagacaggucau

SEQ ID NO: 439409 - RNA, 19 nt, Artificial Sequence
  Description of Artificial Sequence: Synthetic oligonucleotide
agcacccucugugcauuug

SEQ ID NO: 439410 - RNA, 19 nt, Artificial Sequence
  Description of Artificial Sequence: Synthetic oligonucleotide
gcaaaucccuugagacagg

SEQ ID NO: 439411 - RNA, 19 nt, Artificial Sequence
  Description of Artificial Sequence: Synthetic oligonucleotide
cguaucaugucacuucaaa

SEQ ID NO: 439412 - RNA, 19 nt, Artificial Sequence
  Description of Artificial Sequence: Synthetic oligonucleotide
agagaucuagggagcugaa

SEQ ID NO: 439413 - RNA, 19 nt, Artificial Sequence
  Description of Artificial Sequence: Synthetic oligonucleotide
agugaccguaggacacuca

SEQ ID NO: 439414 - RNA, 19 nt, Artificial Sequence
  Description of Artificial Sequence: Synthetic oligonucleotide
cugaaacucuuguaaucuu

SEQ ID NO: 439415 - RNA, 19 nt, Artificial Sequence
  Description of Artificial Sequence: Synthetic oligonucleotide
ucgaugcaccagggaagac

SEQ ID NO: 439416 - RNA, 19 nt, Artificial Sequence
  Description of Artificial Sequence: Synthetic oligonucleotide
agugggaguugaagcuaga

SEQ ID NO: 439417 - RNA, 19 nt, Artificial Sequence
  Description of Artificial Sequence: Synthetic oligonucleotide
cugucucgaaaacuacuau

SEQ ID NO: 439418 - RNA, 19 nt, Artificial Sequence
  Description of Artificial Sequence: Synthetic oligonucleotide
ggauuagugcaugaaguuu

SEQ ID NO: 439419 - RNA, 19 nt, Artificial Sequence
  Description of Artificial Sequence: Synthetic oligonucleotide
cuuuaugcuuucgggaguu

SEQ ID NO: 439420 - RNA, 19 nt, Artificial Sequence
  Description of Artificial Sequence: Synthetic oligonucleotide
ccacguuuacugaguccag

SEQ ID NO: 439421 - RNA, 19 nt, Artificial Sequence
  Description of Artificial Sequence: Synthetic oligonucleotide
cuugcaugguagagaugcu

SEQ ID NO: 439422 - RNA, 19 nt, Artificial Sequence
  Description of Artificial Sequence: Synthetic oligonucleotide
guccgcuuccuucuacagu

SEQ ID NO: 439423 - RNA, 19 nt, Artificial Sequence
  Description of Artificial Sequence: Synthetic oligonucleotide
acugaagcauggaggcauu

SEQ ID NO: 439424 - RNA, 19 nt, Artificial Sequence
  Description of Artificial Sequence: Synthetic oligonucleotide
ggucagccuuucauaaaga

SEQ ID NO: 439425 - RNA, 19 nt, Artificial Sequence
  Description of Artificial Sequence: Synthetic oligonucleotide
caucaaguaugugcguagu

SEQ ID NO: 439426 - RNA, 19 nt, Artificial Sequence
  Description of Artificial Sequence: Synthetic oligonucleotide
cacuugugaagcucacaau

SEQ ID NO: 439427 - RNA, 19 nt, Artificial Sequence
  Description of Artificial Sequence: Synthetic oligonucleotide
cgguuaguccaggucagcc

SEQ ID NO: 439428 - RNA, 19 nt, Artificial Sequence
  Description of Artificial Sequence: Synthetic oligonucleotide
gcaucgauauucagaguua

SEQ ID NO: 439429 - RNA, 19 nt, Artificial Sequence
  Description of Artificial Sequence: Synthetic oligonucleotide
uccuugcuaugagggcaaa

SEQ ID NO: 439430 - RNA, 19 nt, Artificial Sequence
  Description of Artificial Sequence: Synthetic oligonucleotide
gggaugccaauccugugau

SEQ ID NO: 439431 - RNA, 19 nt, Artificial Sequence
  Description of Artificial Sequence: Synthetic oligonucleotide
ccuugcuaugagggcaaag

SEQ ID NO: 439432 - RNA, 19 nt, Artificial Sequence
  Description of Artificial Sequence: Synthetic oligonucleotide
acguaucaugucacuucaa

SEQ ID NO: 439433 - RNA, 19 nt, Artificial Sequence
  Description of Artificial Sequence: Synthetic oligonucleotide
auccugugaucaaggugau

SEQ ID NO: 439434 - RNA, 19 nt, Artificial Sequence
  Description of Artificial Sequence: Synthetic oligonucleotide
ccgauuccgagcuuccaaa

SEQ ID NO: 439435 - RNA, 19 nt, Artificial Sequence
  Description of Artificial Sequence: Synthetic oligonucleotide
cacguuuacugaguccagu

SEQ ID NO: 439436 - RNA, 19 nt, Artificial Sequence
  Description of Artificial Sequence: Synthetic oligonucleotide
cccaggaaucgaugcacca

SEQ ID NO: 439437 - RNA, 19 nt, Artificial Sequence
  Description of Artificial Sequence: Synthetic oligonucleotide
cacccucaggggcuacaca

SEQ ID NO: 439438 - RNA, 19 nt, Artificial Sequence
  Description of Artificial Sequence: Synthetic oligonucleotide
augcuggcucccaguauuu

SEQ ID NO: 439439 - RNA, 19 nt, Artificial Sequence
  Description of Artificial Sequence: Synthetic oligonucleotide
gcuuuucgguugcauaguu

SEQ ID NO: 439440 - RNA, 19 nt, Artificial Sequence
  Description of Artificial Sequence: Synthetic oligonucleotide
gcugacugcgagauacacu

SEQ ID NO: 439441 - RNA, 19 nt, Artificial Sequence
  Description of Artificial Sequence: Synthetic oligonucleotide
ccgagaugugagggaugcc

SEQ ID NO: 439442 - RNA, 19 nt, Artificial Sequence
  Description of Artificial Sequence: Synthetic oligonucleotide
gacccacccucaggggcua

SEQ ID NO: 439443 - RNA, 19 nt, Artificial Sequence
  Description of Artificial Sequence: Synthetic oligonucleotide
cguuuacugaguccaguau

SEQ ID NO: 439444 - RNA, 19 nt, Artificial Sequence
  Description of Artificial Sequence: Synthetic oligonucleotide
gcguaguaacugagcagua

SEQ ID NO: 439445 - RNA, 19 nt, Artificial Sequence
  Description of Artificial Sequence: Synthetic oligonucleotide
cccuugagacaggucauua

SEQ ID NO: 439446 - RNA, 19 nt, Artificial Sequence
  Description of Artificial Sequence: Synthetic oligonucleotide
cggauaaaauccagucuau

SEQ ID NO: 439447 - RNA, 19 nt, Artificial Sequence
  Description of Artificial Sequence: Synthetic oligonucleotide
uggcauccccugggcuuua

SEQ ID NO: 439448 - RNA, 19 nt, Artificial Sequence
  Description of Artificial Sequence: Synthetic oligonucleotide
caacaacgaugaugcccau

SEQ ID NO: 439449 - RNA, 19 nt, Artificial Sequence
  Description of Artificial Sequence: Synthetic oligonucleotide
ccgaucagccaaauuucuu

SEQ ID NO: 439450 - RNA, 19 nt, Artificial Sequence
  Description of Artificial Sequence: Synthetic oligonucleotide
ccaaguccgcuuccuucua

SEQ ID NO: 439451 - RNA, 19 nt, Artificial Sequence
  Description of Artificial Sequence: Synthetic oligonucleotide
cagcacccucugugcauuu

SEQ ID NO: 439452 - RNA, 19 nt, Artificial Sequence
  Description of Artificial Sequence: Synthetic oligonucleotide
aaaugguucauacauaugg

SEQ ID NO: 439453 - RNA, 19 nt, Artificial Sequence
  Description of Artificial Sequence: Synthetic oligonucleotide
aaucuuauaagauucugac

SEQ ID NO: 439454 - RNA, 19 nt, Artificial Sequence
  Description of Artificial Sequence: Synthetic oligonucleotide
auuacuaacagacuagacc

SEQ ID NO: 439455 - RNA, 19 nt, Artificial Sequence
  Description of Artificial Sequence: Synthetic oligonucleotide
aagucaaugauucagcuuc

SEQ ID NO: 439456 - RNA, 19 nt, Artificial Sequence
  Description of Artificial Sequence: Synthetic oligonucleotide
aaaaguaagaaucuaauuu

SEQ ID NO: 439457 - RNA, 19 nt, Artificial Sequence
  Description of Artificial Sequence: Synthetic oligonucleotide
ucuuauaagauucugacaa

SEQ ID NO: 439458 - RNA, 19 nt, Artificial Sequence
  Description of Artificial Sequence: Synthetic oligonucleotide
ucuuaaaccacacaggaug

SEQ ID NO: 439459 - RNA, 19 nt, Artificial Sequence
  Description of Artificial Sequence: Synthetic oligonucleotide
uuuagcauaauaaagguuu

SEQ ID NO: 439460 - RNA, 19 nt, Artificial Sequence
  Description of Artificial Sequence: Synthetic oligonucleotide
aaccguuccauacacuugc

SEQ ID NO: 439461 - RNA, 19 nt, Artificial Sequence
  Description of Artificial Sequence: Synthetic oligonucleotide
uucucaaccauaaaaugag

SEQ ID NO: 439462 - RNA, 19 nt, Artificial Sequence
  Description of Artificial Sequence: Synthetic oligonucleotide
auagcaaaagaagacaugg

SEQ ID NO: 439463 - RNA, 19 nt, Artificial Sequence
  Description of Artificial Sequence: Synthetic oligonucleotide
ugcucuuuaaucuagggga

SEQ ID NO: 439464 - RNA, 19 nt, Artificial Sequence
  Description of Artificial Sequence: Synthetic oligonucleotide
aacagacuagaccggaagc

SEQ ID NO: 439465 - RNA, 19 nt, Artificial Sequence
  Description of Artificial Sequence: Synthetic oligonucleotide
aaaguaagcauuuggaauu

SEQ ID NO: 439466 - RNA, 19 nt, Artificial Sequence
  Description of Artificial Sequence: Synthetic oligonucleotide
ugggguuuaacacagaaaa

SEQ ID NO: 439467 - RNA, 19 nt, Artificial Sequence
  Description of Artificial Sequence: Synthetic oligonucleotide
ucuguacucacguuaauag

SEQ ID NO: 439468 - RNA, 19 nt, Artificial Sequence
  Description of Artificial Sequence: Synthetic oligonucleotide
aacuaacucauucuaucuc

SEQ ID NO: 439469 - RNA, 19 nt, Artificial Sequence
  Description of Artificial Sequence: Synthetic oligonucleotide
gacaauaggaauaaagaug

SEQ ID NO: 439470 - RNA, 19 nt, Artificial Sequence
  Description of Artificial Sequence: Synthetic oligonucleotide
cuugguaagucaaugauuc

SEQ ID NO: 439471 - RNA, 19 nt, Artificial Sequence
  Description of Artificial Sequence: Synthetic oligonucleotide
gacacaauauauuaaguuc

SEQ ID NO: 439472 - RNA, 19 nt, Artificial Sequence
  Description of Artificial Sequence: Synthetic oligonucleotide
aguaauaggagcuccagga

SEQ ID NO: 439473 - RNA, 19 nt, Artificial Sequence
  Description of Artificial Sequence: Synthetic oligonucleotide
acauaugguauagagaccg

SEQ ID NO: 439474 - RNA, 19 nt, Artificial Sequence
  Description of Artificial Sequence: Synthetic oligonucleotide
uuuguugagauaaaagaau

SEQ ID NO: 439475 - RNA, 19 nt, Artificial Sequence
  Description of Artificial Sequence: Synthetic oligonucleotide
ucacuaaucagguauacaa

SEQ ID NO: 439476 - RNA, 19 nt, Artificial Sequence
  Description of Artificial Sequence: Synthetic oligonucleotide
gauauaggaagccagcaac

SEQ ID NO: 439477 - RNA, 19 nt, Artificial Sequence
  Description of Artificial Sequence: Synthetic oligonucleotide
uccauaagggaaaacuucc

SEQ ID NO: 439478 - RNA, 19 nt, Artificial Sequence
  Description of Artificial Sequence: Synthetic oligonucleotide
uaauacaugucuaugugaa

SEQ ID NO: 439479 - RNA, 19 nt, Artificial Sequence
  Description of Artificial Sequence: Synthetic oligonucleotide
uauaagauucugacaaccc

SEQ ID NO: 439480 - RNA, 19 nt, Artificial Sequence
  Description of Artificial Sequence: Synthetic oligonucleotide
uaacuaugcucuuagggag

SEQ ID NO: 439481 - RNA, 19 nt, Artificial Sequence
  Description of Artificial Sequence: Synthetic oligonucleotide
auacacuugcucuuuaauc

SEQ ID NO: 439482 - RNA, 19 nt, Artificial Sequence
  Description of Artificial Sequence: Synthetic oligonucleotide
uacacuugcucuuuaaucu

SEQ ID NO: 439483 - RNA, 19 nt, Artificial Sequence
  Description of Artificial Sequence: Synthetic oligonucleotide
caaccauaaaaugagaaag

SEQ ID NO: 439484 - RNA, 19 nt, Artificial Sequence
  Description of Artificial Sequence: Synthetic oligonucleotide
auaagggaaaacuuccuug

SEQ ID NO: 439485 - RNA, 19 nt, Artificial Sequence
  Description of Artificial Sequence: Synthetic oligonucleotide
cacguuaauaguaaacaag

SEQ ID NO: 439486 - RNA, 19 nt, Artificial Sequence
  Description of Artificial Sequence: Synthetic oligonucleotide
aacagaaucugauuacuaa

SEQ ID NO: 439487 - RNA, 19 nt, Artificial Sequence
  Description of Artificial Sequence: Synthetic oligonucleotide
uguacucacguuaauagua

SEQ ID NO: 439488 - RNA, 19 nt, Artificial Sequence
  Description of Artificial Sequence: Synthetic oligonucleotide
auauugaaugggugguugc

SEQ ID NO: 439489 - RNA, 19 nt, Artificial Sequence
  Description of Artificial Sequence: Synthetic oligonucleotide
ugcaagaucauccaucuuu

SEQ ID NO: 439490 - RNA, 19 nt, Artificial Sequence
  Description of Artificial Sequence: Synthetic oligonucleotide
uuuuccucuugauucaacc

SEQ ID NO: 439491 - RNA, 19 nt, Artificial Sequence
  Description of Artificial Sequence: Synthetic oligonucleotide
ugaacucccacauugguuc

SEQ ID NO: 439492 - RNA, 19 nt, Artificial Sequence
  Description of Artificial Sequence: Synthetic oligonucleotide
ugguauagagaccggauca

SEQ ID NO: 439493 - RNA, 19 nt, Artificial Sequence
  Description of Artificial Sequence: Synthetic oligonucleotide
uauagcaaaagaagacaug

SEQ ID NO: 439494 - RNA, 19 nt, Artificial Sequence
  Description of Artificial Sequence: Synthetic oligonucleotide
uucuuuagugugcugggag

SEQ ID NO: 439495 - RNA, 19 nt, Artificial Sequence
  Description of Artificial Sequence: Synthetic oligonucleotide
gaauggauacuguggaugc

SEQ ID NO: 439496 - RNA, 19 nt, Artificial Sequence
  Description of Artificial Sequence: Synthetic oligonucleotide
ugugaaagauucaaacuaa

SEQ ID NO: 439497 - RNA, 19 nt, Artificial Sequence
  Description of Artificial Sequence: Synthetic oligonucleotide
ugguauagcaaaagaagac

SEQ ID NO: 439498 - RNA, 19 nt, Artificial Sequence
  Description of Artificial Sequence: Synthetic oligonucleotide
ugauccauaagggaaaacu

SEQ ID NO: 439499 - RNA, 19 nt, Artificial Sequence
  Description of Artificial Sequence: Synthetic oligonucleotide
agauucgagcagcaaaugg

SEQ ID NO: 439500 - RNA, 19 nt, Artificial Sequence
  Description of Artificial Sequence: Synthetic oligonucleotide
ugugcaucacuaaucaggu

SEQ ID NO: 439501 - RNA, 19 nt, Artificial Sequence
  Description of Artificial Sequence: Synthetic oligonucleotide
aaauauccauaggauacuc

SEQ ID NO: 439502 - RNA, 19 nt, Artificial Sequence
  Description of Artificial Sequence: Synthetic oligonucleotide
ucagguauacaauccagcu

SEQ ID NO: 439503 - RNA, 19 nt, Artificial Sequence
  Description of Artificial Sequence: Synthetic oligonucleotide
uaacagacuagaccggaag

SEQ ID NO: 439504 - RNA, 19 nt, Artificial Sequence
  Description of Artificial Sequence: Synthetic oligonucleotide
cacaagucaaucuuauaag

SEQ ID NO: 439505 - RNA, 19 nt, Artificial Sequence
  Description of Artificial Sequence: Synthetic oligonucleotide
auaugcaaacuuuacauua

SEQ ID NO: 439506 - RNA, 19 nt, Artificial Sequence
  Description of Artificial Sequence: Synthetic oligonucleotide
augugcaucacuaaucagg

SEQ ID NO: 439507 - RNA, 19 nt, Artificial Sequence
  Description of Artificial Sequence: Synthetic oligonucleotide
gaaguugugguauagcaaa

SEQ ID NO: 439508 - RNA, 19 nt, Artificial Sequence
  Description of Artificial Sequence: Synthetic oligonucleotide
guaacuaugcucuuaggga

SEQ ID NO: 439509 - RNA, 19 nt, Artificial Sequence
  Description of Artificial Sequence: Synthetic oligonucleotide
cuucgguacaaccuggucc

SEQ ID NO: 439510 - RNA, 19 nt, Artificial Sequence
  Description of Artificial Sequence: Synthetic oligonucleotide
cauaauaaagguuuucuaa

SEQ ID NO: 439511 - RNA, 19 nt, Artificial Sequence
  Description of Artificial Sequence: Synthetic oligonucleotide
aaaacuuccuugcuugaaa

SEQ ID NO: 439512 - RNA, 19 nt, Artificial Sequence
  Description of Artificial Sequence: Synthetic oligonucleotide
uugugguauagcaaaagaa

SEQ ID NO: 439513 - RNA, 19 nt, Artificial Sequence
  Description of Artificial Sequence: Synthetic oligonucleotide
uaauaguaaacaagguaaa

SEQ ID NO: 439514 - RNA, 19 nt, Artificial Sequence
  Description of Artificial Sequence: Synthetic oligonucleotide
auaagauucugacaacccu

SEQ ID NO: 439515 - RNA, 19 nt, Artificial Sequence
  Description of Artificial Sequence: Synthetic oligonucleotide
gaccggaucacacaugccc

SEQ ID NO: 439516 - RNA, 19 nt, Artificial Sequence
  Description of Artificial Sequence: Synthetic oligonucleotide
ugaccuuuagcauaauaaa

SEQ ID NO: 439517 - RNA, 19 nt, Artificial Sequence
  Description of Artificial Sequence: Synthetic oligonucleotide
gaccuuuagcauaauaaag

SEQ ID NO: 439518 - RNA, 19 nt, Artificial Sequence
  Description of Artificial Sequence: Synthetic oligonucleotide
uugaaagacacaaggguua

SEQ ID NO: 439519 - RNA, 19 nt, Artificial Sequence
  Description of Artificial Sequence: Synthetic oligonucleotide
cauuuggaauucuuuagug

SEQ ID NO: 439520 - RNA, 19 nt, Artificial Sequence
  Description of Artificial Sequence: Synthetic oligonucleotide
uucgguacaaccuggucca

SEQ ID NO: 439521 - RNA, 19 nt, Artificial Sequence
  Description of Artificial Sequence: Synthetic oligonucleotide
agacacaauauauuaaguu

SEQ ID NO: 439522 - RNA, 19 nt, Artificial Sequence
  Description of Artificial Sequence: Synthetic oligonucleotide
uacuauguaccacaagaaa

SEQ ID NO: 439523 - RNA, 19 nt, Artificial Sequence
  Description of Artificial Sequence: Synthetic oligonucleotide
aauggauacuguggaugcc

SEQ ID NO: 439524 - RNA, 19 nt, Artificial Sequence
  Description of Artificial Sequence: Synthetic oligonucleotide
uaaugcacaagucaaucuu

SEQ ID NO: 439525 - RNA, 19 nt, Artificial Sequence
  Description of Artificial Sequence: Synthetic oligonucleotide
guugguaugaacauccuca

SEQ ID NO: 439526 - RNA, 19 nt, Artificial Sequence
  Description of Artificial Sequence: Synthetic oligonucleotide
uaagauucugacaacccua

SEQ ID NO: 439527 - RNA, 19 nt, Artificial Sequence
  Description of Artificial Sequence: Synthetic oligonucleotide
cuucucaaccauaaaauga

SEQ ID NO: 439528 - RNA, 19 nt, Artificial Sequence
  Description of Artificial Sequence: Synthetic oligonucleotide
acuaccuugaaagacacaa

SEQ ID NO: 439529 - RNA, 19 nt, Artificial Sequence
  Description of Artificial Sequence: Synthetic oligonucleotide
gauucugaccaccacggac

SEQ ID NO: 439530 - RNA, 19 nt, Artificial Sequence
  Description of Artificial Sequence: Synthetic oligonucleotide
ugccccuccaaacagaauc

SEQ ID NO: 439531 - RNA, 19 nt, Artificial Sequence
  Description of Artificial Sequence: Synthetic oligonucleotide
uucaacuaccuugaaagac

SEQ ID NO: 439532 - RNA, 19 nt, Artificial Sequence
  Description of Artificial Sequence: Synthetic oligonucleotide
aaucagguauacaauccag

SEQ ID NO: 439533 - RNA, 19 nt, Artificial Sequence
  Description of Artificial Sequence: Synthetic oligonucleotide
gagaccggaucacacaugc

SEQ ID NO: 439534 - RNA, 19 nt, Artificial Sequence
  Description of Artificial Sequence: Synthetic oligonucleotide
aucagguauacaauccagc

SEQ ID NO: 439535 - RNA, 19 nt, Artificial Sequence
  Description of Artificial Sequence: Synthetic oligonucleotide
uaggauacucuucuccagc

SEQ ID NO: 439536 - RNA, 19 nt, Artificial Sequence
  Description of Artificial Sequence: Synthetic oligonucleotide
ucgaugaugccgcaugucu

SEQ ID NO: 439537 - RNA, 19 nt, Artificial Sequence
  Description of Artificial Sequence: Synthetic oligonucleotide
uuuauucauguucugccua

SEQ ID NO: 439538 - RNA, 19 nt, Artificial Sequence
  Description of Artificial Sequence: Synthetic oligonucleotide
aaguaagcauuuggaauuc

SEQ ID NO: 439539 - RNA, 19 nt, Artificial Sequence
  Description of Artificial Sequence: Synthetic oligonucleotide
aacagcaccaguugggguu

SEQ ID NO: 439540 - RNA, 19 nt, Artificial Sequence
  Description of Artificial Sequence: Synthetic oligonucleotide
aacccuaucaccugcuuua

SEQ ID NO: 439541 - RNA, 19 nt, Artificial Sequence
  Description of Artificial Sequence: Synthetic oligonucleotide
ucuuuaaucuaggggacug

SEQ ID NO: 439542 - RNA, 19 nt, Artificial Sequence
  Description of Artificial Sequence: Synthetic oligonucleotide
uccaggacgacuugcacac

SEQ ID NO: 439543 - RNA, 19 nt, Artificial Sequence
  Description of Artificial Sequence: Synthetic oligonucleotide
agacugaucuuucaugagu

SEQ ID NO: 439544 - RNA, 19 nt, Artificial Sequence
  Description of Artificial Sequence: Synthetic oligonucleotide
uccucauauugaaugggug

SEQ ID NO: 439545 - RNA, 19 nt, Artificial Sequence
  Description of Artificial Sequence: Synthetic oligonucleotide
uggucgaagccgcaaaggc

SEQ ID NO: 439546 - RNA, 19 nt, Artificial Sequence
  Description of Artificial Sequence: Synthetic oligonucleotide
uuauucauguucugccuac

SEQ ID NO: 439547 - RNA, 19 nt, Artificial Sequence
  Description of Artificial Sequence: Synthetic oligonucleotide
uaugguauagagaccggau

SEQ ID NO: 439548 - RNA, 19 nt, Artificial Sequence
  Description of Artificial Sequence: Synthetic oligonucleotide
ucacguuaauaguaaacaa

SEQ ID NO: 439549 - RNA, 19 nt, Artificial Sequence
  Description of Artificial Sequence: Synthetic oligonucleotide
uccuugcuugaaaaguaag

SEQ ID NO: 439550 - RNA, 19 nt, Artificial Sequence
  Description of Artificial Sequence: Synthetic oligonucleotide
aaugguucauacauauggu

SEQ ID NO: 439551 - RNA, 19 nt, Artificial Sequence
  Description of Artificial Sequence: Synthetic oligonucleotide
auaguaaacaagguaaaua

SEQ ID NO: 439552 - RNA, 19 nt, Artificial Sequence
  Description of Artificial Sequence: Synthetic oligonucleotide
ugauuacuaacagacuaga

SEQ ID NO: 439553 - RNA, 19 nt, Artificial Sequence
  Description of Artificial Sequence: Synthetic oligonucleotide
acuauguaccacaagaaaa

SEQ ID NO: 439554 - RNA, 19 nt, Artificial Sequence
  Description of Artificial Sequence: Synthetic oligonucleotide
gacugaucuuucaugagug

SEQ ID NO: 439555 - RNA, 19 nt, Artificial Sequence
  Description of Artificial Sequence: Synthetic oligonucleotide
aucuuauaagauucugaca

SEQ ID NO: 439556 - RNA, 19 nt, Artificial Sequence
  Description of Artificial Sequence: Synthetic oligonucleotide
acuugagccgcuuuccucu

SEQ ID NO: 439557 - RNA, 19 nt, Artificial Sequence
  Description of Artificial Sequence: Synthetic oligonucleotide
acucacguuaauaguaaac

SEQ ID NO: 439558 - RNA, 19 nt, Artificial Sequence
  Description of Artificial Sequence: Synthetic oligonucleotide
aaugaccuuuagcauaaua

SEQ ID NO: 439559 - RNA, 19 nt, Artificial Sequence
  Description of Artificial Sequence: Synthetic oligonucleotide
ugaaagacacaaggguuag

SEQ ID NO: 439560 - RNA, 19 nt, Artificial Sequence
  Description of Artificial Sequence: Synthetic oligonucleotide
gacggauauaggaagccag

SEQ ID NO: 439561 - RNA, 19 nt, Artificial Sequence
  Description of Artificial Sequence: Synthetic oligonucleotide
caaagagccgaacacugug

SEQ ID NO: 439562 - RNA, 19 nt, Artificial Sequence
  Description of Artificial Sequence: Synthetic oligonucleotide
agaaagagccuccucugca

SEQ ID NO: 439563 - RNA, 19 nt, Artificial Sequence
  Description of Artificial Sequence: Synthetic oligonucleotide
ucuuuagugugcugggagu

SEQ ID NO: 439564 - RNA, 19 nt, Artificial Sequence
  Description of Artificial Sequence: Synthetic oligonucleotide
aagggaaaacuuccuugcu

SEQ ID NO: 439565 - RNA, 19 nt, Artificial Sequence
  Description of Artificial Sequence: Synthetic oligonucleotide
ucucaaccauaaaaugaga

SEQ ID NO: 439566 - RNA, 19 nt, Artificial Sequence
  Description of Artificial Sequence: Synthetic oligonucleotide
aggacggauauaggaagcc

SEQ ID NO: 439567 - RNA, 19 nt, Artificial Sequence
  Description of Artificial Sequence: Synthetic oligonucleotide
gucgaagccgcaaaggcag

SEQ ID NO: 439568 - RNA, 19 nt, Artificial Sequence
  Description of Artificial Sequence: Synthetic oligonucleotide
cucacguuaauaguaaaca

SEQ ID NO: 439569 - RNA, 19 nt, Artificial Sequence
  Description of Artificial Sequence: Synthetic oligonucleotide
uagagaccggaucacacau

SEQ ID NO: 439570 - RNA, 19 nt, Artificial Sequence
  Description of Artificial Sequence: Synthetic oligonucleotide
agaagcauccagcguguag

SEQ ID NO: 439571 - RNA, 19 nt, Artificial Sequence
  Description of Artificial Sequence: Synthetic oligonucleotide
gacaguguccgaaugcggc

SEQ ID NO: 439572 - RNA, 19 nt, Artificial Sequence
  Description of Artificial Sequence: Synthetic oligonucleotide
uuuuacuacuauguaccac

SEQ ID NO: 439573 - RNA, 19 nt, Artificial Sequence
  Description of Artificial Sequence: Synthetic oligonucleotide
ccucauauugaaugggugg

SEQ ID NO: 439574 - RNA, 19 nt, Artificial Sequence
  Description of Artificial Sequence: Synthetic oligonucleotide
gcagauucugaccaccacg

SEQ ID NO: 439575 - RNA, 19 nt, Artificial Sequence
  Description of Artificial Sequence: Synthetic oligonucleotide
ugcauggaccagcaguucu

SEQ ID NO: 439576 - RNA, 19 nt, Artificial Sequence
  Description of Artificial Sequence: Synthetic oligonucleotide
agagccgaacacuguguac

SEQ ID NO: 439577 - RNA, 19 nt, Artificial Sequence
  Description of Artificial Sequence: Synthetic oligonucleotide
aauauccauaggauacucu

SEQ ID NO: 439578 - RNA, 19 nt, Artificial Sequence
  Description of Artificial Sequence: Synthetic oligonucleotide
auagagaccggaucacaca

SEQ ID NO: 439579 - RNA, 19 nt, Artificial Sequence
  Description of Artificial Sequence: Synthetic oligonucleotide
cagccaaauauccauagga

SEQ ID NO: 439580 - RNA, 19 nt, Artificial Sequence
  Description of Artificial Sequence: Synthetic oligonucleotide
uauugaaugggugguugca

SEQ ID NO: 439581 - RNA, 19 nt, Artificial Sequence
  Description of Artificial Sequence: Synthetic oligonucleotide
uccaguaauaggagcucca

SEQ ID NO: 439582 - RNA, 19 nt, Artificial Sequence
  Description of Artificial Sequence: Synthetic oligonucleotide
uucuuaaaccacacaggau

SEQ ID NO: 439583 - RNA, 19 nt, Artificial Sequence
  Description of Artificial Sequence: Synthetic oligonucleotide
caguaauaggagcuccagg

SEQ ID NO: 439584 - RNA, 19 nt, Artificial Sequence
  Description of Artificial Sequence: Synthetic oligonucleotide
gagaaagguuucaacuacc

SEQ ID NO: 439585 - RNA, 19 nt, Artificial Sequence
  Description of Artificial Sequence: Synthetic oligonucleotide
uucuugacccguccagacc

SEQ ID NO: 439586 - RNA, 19 nt, Artificial Sequence
  Description of Artificial Sequence: Synthetic oligonucleotide
ucagacggcucacccaccc

SEQ ID NO: 439587 - RNA, 19 nt, Artificial Sequence
  Description of Artificial Sequence: Synthetic oligonucleotide
caacuaccuugaaagacac

SEQ ID NO: 439588 - RNA, 19 nt, Artificial Sequence
  Description of Artificial Sequence: Synthetic oligonucleotide
cucaaccauaaaaugagaa

SEQ ID NO: 439589 - RNA, 19 nt, Artificial Sequence
  Description of Artificial Sequence: Synthetic oligonucleotide
cauaugguauagagaccgg

SEQ ID NO: 439590 - RNA, 19 nt, Artificial Sequence
  Description of Artificial Sequence: Synthetic oligonucleotide
gguaugaacauccucauau

SEQ ID NO: 439591 - RNA, 19 nt, Artificial Sequence
  Description of Artificial Sequence: Synthetic oligonucleotide
uugggguuuaacacagaaa

SEQ ID NO: 439592 - RNA, 19 nt, Artificial Sequence
  Description of Artificial Sequence: Synthetic oligonucleotide
ugcaagugacaguccaagc

SEQ ID NO: 439593 - RNA, 19 nt, Artificial Sequence
  Description of Artificial Sequence: Synthetic oligonucleotide
uugaacucccacauugguu

SEQ ID NO: 439594 - RNA, 19 nt, Artificial Sequence
  Description of Artificial Sequence: Synthetic oligonucleotide
uuccuugcuugaaaaguaa

SEQ ID NO: 439595 - RNA, 19 nt, Artificial Sequence
  Description of Artificial Sequence: Synthetic oligonucleotide
acaaaucagggaaaauuca

SEQ ID NO: 439596 - RNA, 19 nt, Artificial Sequence
  Description of Artificial Sequence: Synthetic oligonucleotide
ugucuaugugaaagauuca

SEQ ID NO: 439597 - RNA, 19 nt, Artificial Sequence
  Description of Artificial Sequence: Synthetic oligonucleotide
cagguauacaauccagcug

SEQ ID NO: 439598 - RNA, 19 nt, Artificial Sequence
  Description of Artificial Sequence: Synthetic oligonucleotide
aagcauccagcguguagug

SEQ ID NO: 439599 - RNA, 19 nt, Artificial Sequence
  Description of Artificial Sequence: Synthetic oligonucleotide
ggaaaauucacaauguccu

SEQ ID NO: 439600 - RNA, 19 nt, Artificial Sequence
  Description of Artificial Sequence: Synthetic oligonucleotide
agucaaagagccgaacacu

SEQ ID NO: 439601 - RNA, 19 nt, Artificial Sequence
  Description of Artificial Sequence: Synthetic oligonucleotide
gguuuaacacagaaaauga

SEQ ID NO: 439602 - RNA, 19 nt, Artificial Sequence
  Description of Artificial Sequence: Synthetic oligonucleotide
uaaucggccacggucacuc

SEQ ID NO: 439603 - RNA, 19 nt, Artificial Sequence
  Description of Artificial Sequence: Synthetic oligonucleotide
uccucaggacggauauagg

SEQ ID NO: 439604 - RNA, 19 nt, Artificial Sequence
  Description of Artificial Sequence: Synthetic oligonucleotide
acuagaccggaagcugucc

SEQ ID NO: 439605 - RNA, 19 nt, Artificial Sequence
  Description of Artificial Sequence: Synthetic oligonucleotide
gguauagcaaaagaagaca

SEQ ID NO: 439606 - RNA, 19 nt, Artificial Sequence
  Description of Artificial Sequence: Synthetic oligonucleotide
caaaugguucauacauaug

SEQ ID NO: 439607 - RNA, 19 nt, Artificial Sequence
  Description of Artificial Sequence: Synthetic oligonucleotide
accaccacggacaggagag

SEQ ID NO: 439608 - RNA, 19 nt, Artificial Sequence
  Description of Artificial Sequence: Synthetic oligonucleotide
aagagccgaacacugugua

SEQ ID NO: 439609 - RNA, 19 nt, Artificial Sequence
  Description of Artificial Sequence: Synthetic oligonucleotide
acagacuagaccggaagcu

SEQ ID NO: 439610 - RNA, 19 nt, Artificial Sequence
  Description of Artificial Sequence: Synthetic oligonucleotide
ucaugagugcuuuccuccu

SEQ ID NO: 439611 - RNA, 19 nt, Artificial Sequence
  Description of Artificial Sequence: Synthetic oligonucleotide
ugcucuuagggagaaugga

SEQ ID NO: 439612 - RNA, 19 nt, Artificial Sequence
  Description of Artificial Sequence: Synthetic oligonucleotide
caggacgacuugcacaccc

SEQ ID NO: 439613 - RNA, 19 nt, Artificial Sequence
  Description of Artificial Sequence: Synthetic oligonucleotide
aaagagccgaacacugugu

SEQ ID NO: 439614 - RNA, 19 nt, Artificial Sequence
  Description of Artificial Sequence: Synthetic oligonucleotide
gauccgaguuggcauaauc

SEQ ID NO: 439615 - RNA, 19 nt, Artificial Sequence
  Description of Artificial Sequence: Synthetic oligonucleotide
caggacggauauaggaagc

SEQ ID NO: 439616 - RNA, 19 nt, Artificial Sequence
  Description of Artificial Sequence: Synthetic oligonucleotide
cuagaccggaagcuguccc

SEQ ID NO: 439617 - RNA, 19 nt, Artificial Sequence
  Description of Artificial Sequence: Synthetic oligonucleotide
caaucuuucugcaccagaa

SEQ ID NO: 439618 - RNA, 19 nt, Artificial Sequence
  Description of Artificial Sequence: Synthetic oligonucleotide
uugguaagucaaugauuca

SEQ ID NO: 439619 - RNA, 19 nt, Artificial Sequence
  Description of Artificial Sequence: Synthetic oligonucleotide
cuuuagugugcugggagug

SEQ ID NO: 439620 - RNA, 19 nt, Artificial Sequence
  Description of Artificial Sequence: Synthetic oligonucleotide
gauucgagcagcaaauggu

SEQ ID NO: 439621 - RNA, 19 nt, Artificial Sequence
  Description of Artificial Sequence: Synthetic oligonucleotide
agguaaauaucauccccau

SEQ ID NO: 439622 - RNA, 19 nt, Artificial Sequence
  Description of Artificial Sequence: Synthetic oligonucleotide
auaugguauagagaccgga

SEQ ID NO: 439623 - RNA, 19 nt, Artificial Sequence
  Description of Artificial Sequence: Synthetic oligonucleotide
uucgagcagcaaaugguuc

SEQ ID NO: 439624 - RNA, 19 nt, Artificial Sequence
  Description of Artificial Sequence: Synthetic oligonucleotide
auauaggaagccagcaaca

SEQ ID NO: 439625 - RNA, 19 nt, Artificial Sequence
  Description of Artificial Sequence: Synthetic oligonucleotide
auuuuacuuccugcugaac

SEQ ID NO: 439626 - RNA, 19 nt, Artificial Sequence
  Description of Artificial Sequence: Synthetic oligonucleotide
acuaacagacuagaccgga

SEQ ID NO: 439627 - RNA, 19 nt, Artificial Sequence
  Description of Artificial Sequence: Synthetic oligonucleotide
agugccuucgguacaaccu

SEQ ID NO: 439628 - RNA, 19 nt, Artificial Sequence
  Description of Artificial Sequence: Synthetic oligonucleotide
caaucaauauucauguaau

SEQ ID NO: 439629 - RNA, 19 nt, Artificial Sequence
  Description of Artificial Sequence: Synthetic oligonucleotide
cacauugguucuugucugc

SEQ ID NO: 439630 - RNA, 19 nt, Artificial Sequence
  Description of Artificial Sequence: Synthetic oligonucleotide
augagugcuuuccuccuga

SEQ ID NO: 439631 - RNA, 19 nt, Artificial Sequence
  Description of Artificial Sequence: Synthetic oligonucleotide
cuacuauguaccacaagaa

SEQ ID NO: 439632 - RNA, 19 nt, Artificial Sequence
  Description of Artificial Sequence: Synthetic oligonucleotide
caugugcaucacuaaucag

SEQ ID NO: 439633 - RNA, 19 nt, Artificial Sequence
  Description of Artificial Sequence: Synthetic oligonucleotide
gccgcaaaggcagagaagc

SEQ ID NO: 439634 - RNA, 19 nt, Artificial Sequence
  Description of Artificial Sequence: Synthetic oligonucleotide
cacucgaugaugccgcaug

SEQ ID NO: 439635 - RNA, 19 nt, Artificial Sequence
  Description of Artificial Sequence: Synthetic oligonucleotide
caauggagcaaccauuuua

SEQ ID NO: 439636 - RNA, 19 nt, Artificial Sequence
  Description of Artificial Sequence: Synthetic oligonucleotide
gucuaugugaaagauucaa

SEQ ID NO: 439637 - RNA, 19 nt, Artificial Sequence
  Description of Artificial Sequence: Synthetic oligonucleotide
caugacgucagacggcuca

SEQ ID NO: 439638 - RNA, 19 nt, Artificial Sequence
  Description of Artificial Sequence: Synthetic oligonucleotide
acaauccagcugccccucc

SEQ ID NO: 439639 - RNA, 19 nt, Artificial Sequence
  Description of Artificial Sequence: Synthetic oligonucleotide
caugucuguacucacguua

SEQ ID NO: 439640 - RNA, 19 nt, Artificial Sequence
  Description of Artificial Sequence: Synthetic oligonucleotide
cacaugcccggagacagcg

SEQ ID NO: 439641 - RNA, 19 nt, Artificial Sequence
  Description of Artificial Sequence: Synthetic oligonucleotide
cucucuugggcauggcgac

SEQ ID NO: 439642 - RNA, 19 nt, Artificial Sequence
  Description of Artificial Sequence: Synthetic oligonucleotide
accggaucacacaugcccg

SEQ ID NO: 439643 - RNA, 19 nt, Artificial Sequence
  Description of Artificial Sequence: Synthetic oligonucleotide
ggcagcaguaacuaugcuc

SEQ ID NO: 439644 - RNA, 19 nt, Artificial Sequence
  Description of Artificial Sequence: Synthetic oligonucleotide
uuagugugcugggagugcu

SEQ ID NO: 439645 - RNA, 19 nt, Artificial Sequence
  Description of Artificial Sequence: Synthetic oligonucleotide
gacacaaggguuagagaca

SEQ ID NO: 439646 - RNA, 19 nt, Artificial Sequence
  Description of Artificial Sequence: Synthetic oligonucleotide
uagaccggaagcuguccca

SEQ ID NO: 439647 - RNA, 19 nt, Artificial Sequence
  Description of Artificial Sequence: Synthetic oligonucleotide
gaugaugccgcaugucugu

SEQ ID NO: 439648 - RNA, 19 nt, Artificial Sequence
  Description of Artificial Sequence: Synthetic oligonucleotide
ugagugcuuuccuccugag

SEQ ID NO: 439649 - RNA, 19 nt, Artificial Sequence
  Description of Artificial Sequence: Synthetic oligonucleotide
aguguccgaaugcggcccg

SEQ ID NO: 439650 - RNA, 19 nt, Artificial Sequence
  Description of Artificial Sequence: Synthetic oligonucleotide
guaaugcacaagucaaucu

SEQ ID NO: 439651 - RNA, 19 nt, Artificial Sequence
  Description of Artificial Sequence: Synthetic oligonucleotide
caaccguuccauacacuug

SEQ ID NO: 439652 - RNA, 19 nt, Artificial Sequence
  Description of Artificial Sequence: Synthetic oligonucleotide
ggcauggcgacaguguccg

SEQ ID NO: 439653 - RNA, 19 nt, Artificial Sequence
  Description of Artificial Sequence: Synthetic oligonucleotide
caccaguugggguuuaaca

SEQ ID NO: 439654 - RNA, 19 nt, Artificial Sequence
  Description of Artificial Sequence: Synthetic oligonucleotide
ugcgcagauucugaccacc

SEQ ID NO: 439655 - RNA, 19 nt, Artificial Sequence
  Description of Artificial Sequence: Synthetic oligonucleotide
aggguuagagacacaauau

SEQ ID NO: 439656 - RNA, 19 nt, Artificial Sequence
  Description of Artificial Sequence: Synthetic oligonucleotide
aucacuaaucagguauaca

SEQ ID NO: 439657 - RNA, 19 nt, Artificial Sequence
  Description of Artificial Sequence: Synthetic oligonucleotide
uggccuugguaagucaaug

SEQ ID NO: 439658 - RNA, 19 nt, Artificial Sequence
  Description of Artificial Sequence: Synthetic oligonucleotide
cuccaguaauaggagcucc

SEQ ID NO: 439659 - RNA, 19 nt, Artificial Sequence
  Description of Artificial Sequence: Synthetic oligonucleotide
caucacuaaucagguauac

SEQ ID NO: 439660 - RNA, 19 nt, Artificial Sequence
  Description of Artificial Sequence: Synthetic oligonucleotide
ggauucuuggagauucgag

SEQ ID NO: 439661 - RNA, 19 nt, Artificial Sequence
  Description of Artificial Sequence: Synthetic oligonucleotide
gagcaaccauuuuaaaccu

SEQ ID NO: 439662 - RNA, 19 nt, Artificial Sequence
  Description of Artificial Sequence: Synthetic oligonucleotide
caacaaucuuucugcacca

SEQ ID NO: 439663 - RNA, 19 nt, Artificial Sequence
  Description of Artificial Sequence: Synthetic oligonucleotide
ucccacauugguucuuguc

SEQ ID NO: 439664 - RNA, 19 nt, Artificial Sequence
  Description of Artificial Sequence: Synthetic oligonucleotide
ugggugguugcaaccguuc

SEQ ID NO: 439665 - RNA, 19 nt, Artificial Sequence
  Description of Artificial Sequence: Synthetic oligonucleotide
gacccguccagaccucacc

SEQ ID NO: 439666 - RNA, 19 nt, Artificial Sequence
  Description of Artificial Sequence: Synthetic oligonucleotide
uccgaaugcggcccgcuua

SEQ ID NO: 439667 - RNA, 19 nt, Artificial Sequence
  Description of Artificial Sequence: Synthetic oligonucleotide
guccaggacgacuugcaca

SEQ ID NO: 439668 - RNA, 19 nt, Artificial Sequence
  Description of Artificial Sequence: Synthetic oligonucleotide
cagacuagaccggaagcug

SEQ ID NO: 439669 - RNA, 19 nt, Artificial Sequence
  Description of Artificial Sequence: Synthetic oligonucleotide
uuagcuguccggggccccg

SEQ ID NO: 439670 - RNA, 19 nt, Artificial Sequence
  Description of Artificial Sequence: Synthetic oligonucleotide
uccauaggauacucuucuc

SEQ ID NO: 439671 - RNA, 19 nt, Artificial Sequence
  Description of Artificial Sequence: Synthetic oligonucleotide
gaugccgcaugucuguacu

SEQ ID NO: 439672 - RNA, 19 nt, Artificial Sequence
  Description of Artificial Sequence: Synthetic oligonucleotide
ugccgcaugucuguacuca

SEQ ID NO: 439673 - RNA, 19 nt, Artificial Sequence
  Description of Artificial Sequence: Synthetic oligonucleotide
augucucggccccgagagc

SEQ ID NO: 439674 - RNA, 19 nt, Artificial Sequence
  Description of Artificial Sequence: Synthetic oligonucleotide
gguucauacauaugguaua

SEQ ID NO: 439675 - RNA, 19 nt, Artificial Sequence
  Description of Artificial Sequence: Synthetic oligonucleotide
ugguaugaacauccucaua

SEQ ID NO: 439676 - RNA, 19 nt, Artificial Sequence
  Description of Artificial Sequence: Synthetic oligonucleotide
agcaaccauuuuaaaccuc

SEQ ID NO: 439677 - RNA, 19 nt, Artificial Sequence
  Description of Artificial Sequence: Synthetic oligonucleotide
guauagcaaaagaagacau

SEQ ID NO: 439678 - RNA, 19 nt, Artificial Sequence
  Description of Artificial Sequence: Synthetic oligonucleotide
ggggcacauaaucauugcc

SEQ ID NO: 439679 - RNA, 19 nt, Artificial Sequence
  Description of Artificial Sequence: Synthetic oligonucleotide
augacgucagacggcucac

SEQ ID NO: 439680 - RNA, 19 nt, Artificial Sequence
  Description of Artificial Sequence: Synthetic oligonucleotide
ugcacaagucaaucuuaua

SEQ ID NO: 439681 - RNA, 19 nt, Artificial Sequence
  Description of Artificial Sequence: Synthetic oligonucleotide
ugaugccgcaugucuguac

SEQ ID NO: 439682 - RNA, 19 nt, Artificial Sequence
  Description of Artificial Sequence: Synthetic oligonucleotide
ucauauugaaugggugguu

SEQ ID NO: 439683 - RNA, 19 nt, Artificial Sequence
  Description of Artificial Sequence: Synthetic oligonucleotide
cauaaucggccacggucac

SEQ ID NO: 439684 - RNA, 19 nt, Artificial Sequence
  Description of Artificial Sequence: Synthetic oligonucleotide
caugagugcuuuccuccug

SEQ ID NO: 439685 - RNA, 19 nt, Artificial Sequence
  Description of Artificial Sequence: Synthetic oligonucleotide
agcguguagugccuucggu

SEQ ID NO: 439686 - RNA, 19 nt, Artificial Sequence
  Description of Artificial Sequence: Synthetic oligonucleotide
agauucugaccaccacgga

SEQ ID NO: 439687 - RNA, 19 nt, Artificial Sequence
  Description of Artificial Sequence: Synthetic oligonucleotide
uucccuagugcaagaucau

SEQ ID NO: 439688 - RNA, 19 nt, Artificial Sequence
  Description of Artificial Sequence: Synthetic oligonucleotide
aggaacccaaacagcaugu

SEQ ID NO: 439689 - RNA, 19 nt, Artificial Sequence
  Description of Artificial Sequence: Synthetic oligonucleotide
auucgagcagcaaaugguu

SEQ ID NO: 439690 - RNA, 19 nt, Artificial Sequence
  Description of Artificial Sequence: Synthetic oligonucleotide
uccauacacuugcucuuua

SEQ ID NO: 439691 - RNA, 19 nt, Artificial Sequence
  Description of Artificial Sequence: Synthetic oligonucleotide
accaaccucacucgaugau

SEQ ID NO: 439692 - RNA, 19 nt, Artificial Sequence
  Description of Artificial Sequence: Synthetic oligonucleotide
agacaugggucagaauccu

SEQ ID NO: 439693 - RNA, 19 nt, Artificial Sequence
  Description of Artificial Sequence: Synthetic oligonucleotide
gcgacaguguccgaaugcg

SEQ ID NO: 439694 - RNA, 19 nt, Artificial Sequence
  Description of Artificial Sequence: Synthetic oligonucleotide
acccguccagaccucacca

SEQ ID NO: 439695 - RNA, 19 nt, Artificial Sequence
  Description of Artificial Sequence: Synthetic oligonucleotide
gccgcuuuccucucuuggg

SEQ ID NO: 439696 - RNA, 19 nt, Artificial Sequence
  Description of Artificial Sequence: Synthetic oligonucleotide
agacuagaccggaagcugu

SEQ ID NO: 439697 - RNA, 19 nt, Artificial Sequence
  Description of Artificial Sequence: Synthetic oligonucleotide
gcagcaguaacuaugcucu

SEQ ID NO: 439698 - RNA, 19 nt, Artificial Sequence
  Description of Artificial Sequence: Synthetic oligonucleotide
gagccgaacacuguguacu

SEQ ID NO: 439699 - RNA, 19 nt, Artificial Sequence
  Description of Artificial Sequence: Synthetic oligonucleotide
ggcgacaguguccgaaugc

SEQ ID NO: 439700 - RNA, 19 nt, Artificial Sequence
  Description of Artificial Sequence: Synthetic oligonucleotide
augccgcaugucuguacuc

SEQ ID NO: 439701 - RNA, 19 nt, Artificial Sequence
  Description of Artificial Sequence: Synthetic oligonucleotide
ucgugggcccggaacuuga

SEQ ID NO: 439702 - RNA, 19 nt, Artificial Sequence
  Description of Artificial Sequence: Synthetic oligonucleotide
aguaagcauuuggaauucu

SEQ ID NO: 439703 - RNA, 19 nt, Artificial Sequence
  Description of Artificial Sequence: Synthetic oligonucleotide
gguugguaugaacauccuc

SEQ ID NO: 439704 - RNA, 19 nt, Artificial Sequence
  Description of Artificial Sequence: Synthetic oligonucleotide
guauagagaccggaucaca

SEQ ID NO: 439705 - RNA, 19 nt, Artificial Sequence
  Description of Artificial Sequence: Synthetic oligonucleotide
ccgaguuggcauaaucggc

SEQ ID NO: 439706 - RNA, 19 nt, Artificial Sequence
  Description of Artificial Sequence: Synthetic oligonucleotide
guacucacguuaauaguaa

SEQ ID NO: 439707 - RNA, 19 nt, Artificial Sequence
  Description of Artificial Sequence: Synthetic oligonucleotide
agaugaaauugaggguggu

SEQ ID NO: 439708 - RNA, 19 nt, Artificial Sequence
  Description of Artificial Sequence: Synthetic oligonucleotide
acaauggagcaaccauuuu

SEQ ID NO: 439709 - RNA, 19 nt, Artificial Sequence
  Description of Artificial Sequence: Synthetic oligonucleotide
uuaaaccucuggguuccuc

SEQ ID NO: 439710 - RNA, 19 nt, Artificial Sequence
  Description of Artificial Sequence: Synthetic oligonucleotide
cuaacagacuagaccggaa

SEQ ID NO: 439711 - RNA, 19 nt, Artificial Sequence
  Description of Artificial Sequence: Synthetic oligonucleotide
auggcgacaguguccgaau

SEQ ID NO: 439712 - RNA, 19 nt, Artificial Sequence
  Description of Artificial Sequence: Synthetic oligonucleotide
accaaucaauauucaugua

SEQ ID NO: 439713 - RNA, 19 nt, Artificial Sequence
  Description of Artificial Sequence: Synthetic oligonucleotide
caguguccgaaugcggccc

SEQ ID NO: 439714 - RNA, 19 nt, Artificial Sequence
  Description of Artificial Sequence: Synthetic oligonucleotide
agaccggaucacacaugcc

SEQ ID NO: 439715 - RNA, 19 nt, Artificial Sequence
  Description of Artificial Sequence: Synthetic oligonucleotide
gguauagagaccggaucac

SEQ ID NO: 439716 - RNA, 19 nt, Artificial Sequence
  Description of Artificial Sequence: Synthetic oligonucleotide
acucccacauugguucuug

SEQ ID NO: 439717 - RNA, 19 nt, Artificial Sequence
  Description of Artificial Sequence: Synthetic oligonucleotide
gcauaaucggccacgguca

SEQ ID NO: 439718 - RNA, 19 nt, Artificial Sequence
  Description of Artificial Sequence: Synthetic oligonucleotide
acccuguucacugcgcaga

SEQ ID NO: 439719 - RNA, 19 nt, Artificial Sequence
  Description of Artificial Sequence: Synthetic oligonucleotide
cagcguguagugccuucgg

SEQ ID NO: 439720 - RNA, 19 nt, Artificial Sequence
  Description of Artificial Sequence: Synthetic oligonucleotide
gaaugcggcccgcuuagcu

SEQ ID NO: 439721 - RNA, 19 nt, Artificial Sequence
  Description of Artificial Sequence: Synthetic oligonucleotide
ucgaagccgcaaaggcaga

SEQ ID NO: 439722 - RNA, 19 nt, Artificial Sequence
  Description of Artificial Sequence: Synthetic oligonucleotide
aacuaccuugaaagacaca

SEQ ID NO: 439723 - RNA, 19 nt, Artificial Sequence
  Description of Artificial Sequence: Synthetic oligonucleotide
gacuagaccggaagcuguc

SEQ ID NO: 439724 - RNA, 19 nt, Artificial Sequence
  Description of Artificial Sequence: Synthetic oligonucleotide
ccucaggacggauauagga

SEQ ID NO: 439725 - RNA, 19 nt, Artificial Sequence
  Description of Artificial Sequence: Synthetic oligonucleotide
uggcauaaucggccacggu

SEQ ID NO: 439726 - RNA, 19 nt, Artificial Sequence
  Description of Artificial Sequence: Synthetic oligonucleotide
agucaaugauucagcuucu

SEQ ID NO: 439727 - RNA, 19 nt, Artificial Sequence
  Description of Artificial Sequence: Synthetic oligonucleotide
ggugguugcaaccguucca

SEQ ID NO: 439728 - RNA, 19 nt, Artificial Sequence
  Description of Artificial Sequence: Synthetic oligonucleotide
cacccaccccagaaagagc

SEQ ID NO: 439729 - RNA, 19 nt, Artificial Sequence
  Description of Artificial Sequence: Synthetic oligonucleotide
gucuguacucacguuaaua

SEQ ID NO: 439730 - RNA, 19 nt, Artificial Sequence
  Description of Artificial Sequence: Synthetic oligonucleotide
ucgcccugcauggaccagc

SEQ ID NO: 439731 - RNA, 19 nt, Artificial Sequence
  Description of Artificial Sequence: Synthetic oligonucleotide
ugacccguccagaccucac

SEQ ID NO: 439732 - RNA, 19 nt, Artificial Sequence
  Description of Artificial Sequence: Synthetic oligonucleotide
acggcuuucuugacccguc

SEQ ID NO: 439733 - RNA, 19 nt, Artificial Sequence
  Description of Artificial Sequence: Synthetic oligonucleotide
gcagagaaaagccacuaau

SEQ ID NO: 439734 - RNA, 19 nt, Artificial Sequence
  Description of Artificial Sequence: Synthetic oligonucleotide
cuguacucacguuaauagu

SEQ ID NO: 439735 - RNA, 19 nt, Artificial Sequence
  Description of Artificial Sequence: Synthetic oligonucleotide
cacuaaucagguauacaau

SEQ ID NO: 439736 - RNA, 19 nt, Artificial Sequence
  Description of Artificial Sequence: Synthetic oligonucleotide
gggugguugcaaccguucc

SEQ ID NO: 439737 - RNA, 19 nt, Artificial Sequence
  Description of Artificial Sequence: Synthetic oligonucleotide
guccaugacgucagacggc

SEQ ID NO: 439738 - RNA, 19 nt, Artificial Sequence
  Description of Artificial Sequence: Synthetic oligonucleotide
ggucacucggcccgagcag

SEQ ID NO: 439739 - RNA, 19 nt, Artificial Sequence
  Description of Artificial Sequence: Synthetic oligonucleotide
auacucuucuccagcccca

SEQ ID NO: 439740 - RNA, 19 nt, Artificial Sequence
  Description of Artificial Sequence: Synthetic oligonucleotide
cauacacuugcucuuuaau

SEQ ID NO: 439741 - RNA, 19 nt, Artificial Sequence
  Description of Artificial Sequence: Synthetic oligonucleotide
caccaaccucacucgauga

SEQ ID NO: 439742 - RNA, 19 nt, Artificial Sequence
  Description of Artificial Sequence: Synthetic oligonucleotide
agagaccggaucacacaug

SEQ ID NO: 439743 - RNA, 19 nt, Artificial Sequence
  Description of Artificial Sequence: Synthetic oligonucleotide
guguagugccuucgguaca

SEQ ID NO: 439744 - RNA, 19 nt, Artificial Sequence
  Description of Artificial Sequence: Synthetic oligonucleotide
agauucaaacuaacucauu

SEQ ID NO: 439745 - RNA, 19 nt, Artificial Sequence
  Description of Artificial Sequence: Synthetic oligonucleotide
ccaguaauaggagcuccag

SEQ ID NO: 439746 - RNA, 19 nt, Artificial Sequence
  Description of Artificial Sequence: Synthetic oligonucleotide
cucgaugaugccgcauguc

SEQ ID NO: 439747 - RNA, 19 nt, Artificial Sequence
  Description of Artificial Sequence: Synthetic oligonucleotide
auaaucggccacggucacu

SEQ ID NO: 439748 - RNA, 19 nt, Artificial Sequence
  Description of Artificial Sequence: Synthetic oligonucleotide
ccgcuuuccucucuugggc

SEQ ID NO: 439749 - RNA, 19 nt, Artificial Sequence
  Description of Artificial Sequence: Synthetic oligonucleotide
agccgcaaaggcagagaag

SEQ ID NO: 439750 - RNA, 19 nt, Artificial Sequence
  Description of Artificial Sequence: Synthetic oligonucleotide
caccacggacaggagaguc

SEQ ID NO: 439751 - RNA, 19 nt, Artificial Sequence
  Description of Artificial Sequence: Synthetic oligonucleotide
cagacggcucacccacccc

SEQ ID NO: 439752 - RNA, 19 nt, Artificial Sequence
  Description of Artificial Sequence: Synthetic oligonucleotide
cauggcgacaguguccgaa

SEQ ID NO: 439753 - RNA, 19 nt, Artificial Sequence
  Description of Artificial Sequence: Synthetic oligonucleotide
cuugacccguccagaccuc

SEQ ID NO: 439754 - RNA, 19 nt, Artificial Sequence
  Description of Artificial Sequence: Synthetic oligonucleotide
ggucgaagccgcaaaggca

SEQ ID NO: 439755 - RNA, 19 nt, Artificial Sequence
  Description of Artificial Sequence: Synthetic oligonucleotide
ccgcaugucuguacucacg

SEQ ID NO: 439756 - RNA, 19 nt, Artificial Sequence
  Description of Artificial Sequence: Synthetic oligonucleotide
agguuucaacuaccuugaa

SEQ ID NO: 439757 - RNA, 19 nt, Artificial Sequence
  Description of Artificial Sequence: Synthetic oligonucleotide
ggaacccaaacagcaugug

SEQ ID NO: 439758 - RNA, 19 nt, Artificial Sequence
  Description of Artificial Sequence: Synthetic oligonucleotide
ggagauucgagcagcaaau

SEQ ID NO: 439759 - RNA, 19 nt, Artificial Sequence
  Description of Artificial Sequence: Synthetic oligonucleotide
uagugugcugggagugcuu

SEQ ID NO: 439760 - RNA, 19 nt, Artificial Sequence
  Description of Artificial Sequence: Synthetic oligonucleotide
cugcgcagauucugaccac

SEQ ID NO: 439761 - RNA, 19 nt, Artificial Sequence
  Description of Artificial Sequence: Synthetic oligonucleotide
aacucccacauugguucuu

SEQ ID NO: 439762 - RNA, 19 nt, Artificial Sequence
  Description of Artificial Sequence: Synthetic oligonucleotide
gcaaccguuccauacacuu

SEQ ID NO: 439763 - RNA, 19 nt, Artificial Sequence
  Description of Artificial Sequence: Synthetic oligonucleotide
cgucagacggcucacccac

SEQ ID NO: 439764 - RNA, 19 nt, Artificial Sequence
  Description of Artificial Sequence: Synthetic oligonucleotide
gaacucccacauugguucu

SEQ ID NO: 439765 - RNA, 19 nt, Artificial Sequence
  Description of Artificial Sequence: Synthetic oligonucleotide
gaacaguaccaggggcaca

SEQ ID NO: 439766 - RNA, 19 nt, Artificial Sequence
  Description of Artificial Sequence: Synthetic oligonucleotide
ccgaaugcggcccgcuuag

SEQ ID NO: 439767 - RNA, 19 nt, Artificial Sequence
  Description of Artificial Sequence: Synthetic oligonucleotide
ucacucgaugaugccgcau

SEQ ID NO: 439768 - RNA, 19 nt, Artificial Sequence
  Description of Artificial Sequence: Synthetic oligonucleotide
ggcgucgugggcccggaac

SEQ ID NO: 439769 - RNA, 19 nt, Artificial Sequence
  Description of Artificial Sequence: Synthetic oligonucleotide
ugguugcaaccguuccaua

SEQ ID NO: 439770 - RNA, 19 nt, Artificial Sequence
  Description of Artificial Sequence: Synthetic oligonucleotide
ggacggauauaggaagcca

SEQ ID NO: 439771 - RNA, 19 nt, Artificial Sequence
  Description of Artificial Sequence: Synthetic oligonucleotide
cuuagggagaauggauacu

SEQ ID NO: 439772 - RNA, 19 nt, Artificial Sequence
  Description of Artificial Sequence: Synthetic oligonucleotide
cucggcccgagcaggcguc

SEQ ID NO: 439773 - RNA, 19 nt, Artificial Sequence
  Description of Artificial Sequence: Synthetic oligonucleotide
ccagcguguagugccuucg

SEQ ID NO: 439774 - RNA, 19 nt, Artificial Sequence
  Description of Artificial Sequence: Synthetic oligonucleotide
gugguugcaaccguuccau

SEQ ID NO: 439775 - RNA, 19 nt, Artificial Sequence
  Description of Artificial Sequence: Synthetic oligonucleotide
gguccggguugguaugaac

SEQ ID NO: 439776 - RNA, 19 nt, Artificial Sequence
  Description of Artificial Sequence: Synthetic oligonucleotide
gccuugguaagucaaugau

SEQ ID NO: 439777 - RNA, 19 nt, Artificial Sequence
  Description of Artificial Sequence: Synthetic oligonucleotide
gcguguagugccuucggua

SEQ ID NO: 439778 - RNA, 19 nt, Artificial Sequence
  Description of Artificial Sequence: Synthetic oligonucleotide
cucacucgaugaugccgca

SEQ ID NO: 439779 - RNA, 19 nt, Artificial Sequence
  Description of Artificial Sequence: Synthetic oligonucleotide
gccgcaugucuguacucac

SEQ ID NO: 439780 - RNA, 19 nt, Artificial Sequence
  Description of Artificial Sequence: Synthetic oligonucleotide
caccagucaaagagccgaa

SEQ ID NO: 439781 - RNA, 19 nt, Artificial Sequence
  Description of Artificial Sequence: Synthetic oligonucleotide
gaacagcguuggccacggc

SEQ ID NO: 439782 - RNA, 19 nt, Artificial Sequence
  Description of Artificial Sequence: Synthetic oligonucleotide
uuccucucuugggcauggc

SEQ ID NO: 439783 - RNA, 19 nt, Artificial Sequence
  Description of Artificial Sequence: Synthetic oligonucleotide
gcccgagcaggcgucgugg

SEQ ID NO: 439784 - RNA, 19 nt, Artificial Sequence
  Description of Artificial Sequence: Synthetic oligonucleotide
augggugguugcaaccguu

SEQ ID NO: 439785 - RNA, 19 nt, Artificial Sequence
  Description of Artificial Sequence: Synthetic oligonucleotide
ccuucgguacaaccugguc

SEQ ID NO: 439786 - RNA, 19 nt, Artificial Sequence
  Description of Artificial Sequence: Synthetic oligonucleotide
cguuaauaguaaacaaggu

SEQ ID NO: 439787 - RNA, 19 nt, Artificial Sequence
  Description of Artificial Sequence: Synthetic oligonucleotide
ggaugccaccagucaaaga

SEQ ID NO: 439788 - RNA, 19 nt, Artificial Sequence
  Description of Artificial Sequence: Synthetic oligonucleotide
ugguccggguugguaugaa

SEQ ID NO: 439789 - RNA, 19 nt, Artificial Sequence
  Description of Artificial Sequence: Synthetic oligonucleotide
caccgccggauccgaguug

SEQ ID NO: 439790 - RNA, 19 nt, Artificial Sequence
  Description of Artificial Sequence: Synthetic oligonucleotide
augaugccgcaugucugua

SEQ ID NO: 439791 - RNA, 19 nt, Artificial Sequence
  Description of Artificial Sequence: Synthetic oligonucleotide
cauccagcguguagugccu

SEQ ID NO: 439792 - RNA, 19 nt, Artificial Sequence
  Description of Artificial Sequence: Synthetic oligonucleotide
caacccuaucaccugcuuu

SEQ ID NO: 439793 - RNA, 19 nt, Artificial Sequence
  Description of Artificial Sequence: Synthetic oligonucleotide
ggccccgggccaugucucg

SEQ ID NO: 439794 - RNA, 19 nt, Artificial Sequence
  Description of Artificial Sequence: Synthetic oligonucleotide
cccgagcaggcgucguggg

SEQ ID NO: 439795 - RNA, 19 nt, Artificial Sequence
  Description of Artificial Sequence: Synthetic oligonucleotide
ucgguacaaccugguccaa

SEQ ID NO: 439796 - RNA, 19 nt, Artificial Sequence
  Description of Artificial Sequence: Synthetic oligonucleotide
guguccgaaugcggcccgc

SEQ ID NO: 439797 - RNA, 19 nt, Artificial Sequence
  Description of Artificial Sequence: Synthetic oligonucleotide
cucgcccugcauggaccag

SEQ ID NO: 439798 - RNA, 19 nt, Artificial Sequence
  Description of Artificial Sequence: Synthetic oligonucleotide
cccguccagaccucaccac

SEQ ID NO: 439799 - RNA, 19 nt, Artificial Sequence
  Description of Artificial Sequence: Synthetic oligonucleotide
cugguccggguugguauga

SEQ ID NO: 439800 - RNA, 19 nt, Artificial Sequence
  Description of Artificial Sequence: Synthetic oligonucleotide
cgcagauucugaccaccac

SEQ ID NO: 439801 - RNA, 19 nt, Artificial Sequence
  Description of Artificial Sequence: Synthetic oligonucleotide
gccggauccgaguuggcau

SEQ ID NO: 439802 - RNA, 19 nt, Artificial Sequence
  Description of Artificial Sequence: Synthetic oligonucleotide
ccacggcuuucuugacccg

SEQ ID NO: 439803 - RNA, 19 nt, Artificial Sequence
  Description of Artificial Sequence: Synthetic oligonucleotide
ggcccgagcaggcgucgug

SEQ ID NO: 439804 - RNA, 19 nt, Artificial Sequence
  Description of Artificial Sequence: Synthetic oligonucleotide
ccgagcaggcgucgugggc

SEQ ID NO: 439805 - RNA, 19 nt, Artificial Sequence
  Description of Artificial Sequence: Synthetic oligonucleotide
gggguuuaacacagaaaau

SEQ ID NO: 439806 - RNA, 19 nt, Artificial Sequence
  Description of Artificial Sequence: Synthetic oligonucleotide
cacggucacucggcccgag

SEQ ID NO: 439807 - RNA, 19 nt, Artificial Sequence
  Description of Artificial Sequence: Synthetic oligonucleotide
ccgcaaaggcagagaagca

SEQ ID NO: 439808 - RNA, 19 nt, Artificial Sequence
  Description of Artificial Sequence: Synthetic oligonucleotide
gcgcagauucugaccacca

SEQ ID NO: 439809 - RNA, 19 nt, Artificial Sequence
  Description of Artificial Sequence: Synthetic oligonucleotide
guacuggguccaggacgac

SEQ ID NO: 439810 - RNA, 19 nt, Artificial Sequence
  Description of Artificial Sequence: Synthetic oligonucleotide
ccgagagccggcucccgga

SEQ ID NO: 439811 - RNA, 19 nt, Artificial Sequence
  Description of Artificial Sequence: Synthetic oligonucleotide
ggggccccgggccaugucu

SEQ ID NO: 439812 - RNA, 19 nt, Artificial Sequence
  Description of Artificial Sequence: Synthetic oligonucleotide
gugcaagaucauccaucuu

SEQ ID NO: 439813 - RNA, 19 nt, Artificial Sequence
  Description of Artificial Sequence: Synthetic oligonucleotide
ccggauccgaguuggcaua

SEQ ID NO: 439814 - RNA, 19 nt, Artificial Sequence
  Description of Artificial Sequence: Synthetic oligonucleotide
ccaugacgucagacggcuc

SEQ ID NO: 439815 - RNA, 19 nt, Artificial Sequence
  Description of Artificial Sequence: Synthetic oligonucleotide
ccaggacgacuugcacacc

SEQ ID NO: 439816 - RNA, 19 nt, Artificial Sequence
  Description of Artificial Sequence: Synthetic oligonucleotide
aggcgucgugggcccggaa

SEQ ID NO: 439817 - RNA, 19 nt, Artificial Sequence
  Description of Artificial Sequence: Synthetic oligonucleotide
cugccccuccaaacagaau

SEQ ID NO: 439818 - RNA, 19 nt, Artificial Sequence
  Description of Artificial Sequence: Synthetic oligonucleotide
gccuucgguacaaccuggu

SEQ ID NO: 439819 - RNA, 19 nt, Artificial Sequence
  Description of Artificial Sequence: Synthetic oligonucleotide
ccgccggauccgaguuggc

SEQ ID NO: 439820 - RNA, 19 nt, Artificial Sequence
  Description of Artificial Sequence: Synthetic oligonucleotide
gcauggcgacaguguccga

SEQ ID NO: 439821 - RNA, 19 nt, Artificial Sequence
  Description of Artificial Sequence: Synthetic oligonucleotide
ccacggacaggagagucuu

SEQ ID NO: 439822 - RNA, 19 nt, Artificial Sequence
  Description of Artificial Sequence: Synthetic oligonucleotide
cgccggauccgaguuggca

SEQ ID NO: 439823 - RNA, 19 nt, Artificial Sequence
  Description of Artificial Sequence: Synthetic oligonucleotide
ggauccgaguuggcauaau

SEQ ID NO: 439824 - RNA, 19 nt, Artificial Sequence
  Description of Artificial Sequence: Synthetic oligonucleotide
ccaccgccggauccgaguu

SEQ ID NO: 439825 - RNA, 19 nt, Artificial Sequence
  Description of Artificial Sequence: Synthetic oligonucleotide
cggauccgaguuggcauaa

SEQ ID NO: 439826 - RNA, 19 nt, Artificial Sequence
  Description of Artificial Sequence: Synthetic oligonucleotide
cccuaucaccugcuuuauu

SEQ ID NO: 439827 - RNA, 19 nt, Artificial Sequence
  Description of Artificial Sequence: Synthetic oligonucleotide
ccacggucacucggcccga

SEQ ID NO: 439828 - RNA, 19 nt, Artificial Sequence
  Description of Artificial Sequence: Synthetic oligonucleotide
cgucgugggcccggaacuu

SEQ ID NO: 439829 - RNA, 19 nt, Artificial Sequence
  Description of Artificial Sequence: Synthetic oligonucleotide
aauguauuaggcuucaggc

SEQ ID NO: 439830 - RNA, 19 nt, Artificial Sequence
  Description of Artificial Sequence: Synthetic oligonucleotide
uuuucaaugaucaugauga

SEQ ID NO: 439831 - RNA, 19 nt, Artificial Sequence
  Description of Artificial Sequence: Synthetic oligonucleotide
aauaaggaaaacaaguugc

SEQ ID NO: 439832 - RNA, 19 nt, Artificial Sequence
  Description of Artificial Sequence: Synthetic oligonucleotide
aauauggccauucagauga

SEQ ID NO: 439833 - RNA, 19 nt, Artificial Sequence
  Description of Artificial Sequence: Synthetic oligonucleotide
uauauuaugaaacauuuac

SEQ ID NO: 439834 - RNA, 19 nt, Artificial Sequence
  Description of Artificial Sequence: Synthetic oligonucleotide
aaaguauauauuaugaaac

SEQ ID NO: 439835 - RNA, 19 nt, Artificial Sequence
  Description of Artificial Sequence: Synthetic oligonucleotide
aauucaacuuuccaaggcc

SEQ ID NO: 439836 - RNA, 19 nt, Artificial Sequence
  Description of Artificial Sequence: Synthetic oligonucleotide
uuuacuauggcacagaaua

SEQ ID NO: 439837 - RNA, 19 nt, Artificial Sequence
  Description of Artificial Sequence: Synthetic oligonucleotide
aaggaaaucaguuauaguu

SEQ ID NO: 439838 - RNA, 19 nt, Artificial Sequence
  Description of Artificial Sequence: Synthetic oligonucleotide
ucaaugaucaugaugauau

SEQ ID NO: 439839 - RNA, 19 nt, Artificial Sequence
  Description of Artificial Sequence: Synthetic oligonucleotide
aaaauauuauugagaaugc

SEQ ID NO: 439840 - RNA, 19 nt, Artificial Sequence
  Description of Artificial Sequence: Synthetic oligonucleotide
ugagaauacuaauagaaca

SEQ ID NO: 439841 - RNA, 19 nt, Artificial Sequence
  Description of Artificial Sequence: Synthetic oligonucleotide
aauugcuaagaguagaagu

SEQ ID NO: 439842 - RNA, 19 nt, Artificial Sequence
  Description of Artificial Sequence: Synthetic oligonucleotide
guaauaaaagaaaugaccc

SEQ ID NO: 439843 - RNA, 19 nt, Artificial Sequence
  Description of Artificial Sequence: Synthetic oligonucleotide
ucaguuauaguuacaaaug

SEQ ID NO: 439844 - RNA, 19 nt, Artificial Sequence
  Description of Artificial Sequence: Synthetic oligonucleotide
gaauauaccaaccacaaaa

SEQ ID NO: 439845 - RNA, 19 nt, Artificial Sequence
  Description of Artificial Sequence: Synthetic oligonucleotide
aauaaaagaaaugacccca

SEQ ID NO: 439846 - RNA, 19 nt, Artificial Sequence
  Description of Artificial Sequence: Synthetic oligonucleotide
ucuuguauaauuuuauagu

SEQ ID NO: 439847 - RNA, 19 nt, Artificial Sequence
  Description of Artificial Sequence: Synthetic oligonucleotide
uuugauacacacaugauuu

SEQ ID NO: 439848 - RNA, 19 nt, Artificial Sequence
  Description of Artificial Sequence: Synthetic oligonucleotide
auacuaauagaacauuuuc

SEQ ID NO: 439849 - RNA, 19 nt, Artificial Sequence
  Description of Artificial Sequence: Synthetic oligonucleotide
uuuaggguuaucaaaccag

SEQ ID NO: 439850 - RNA, 19 nt, Artificial Sequence
  Description of Artificial Sequence: Synthetic oligonucleotide
aauauuauugagaaugcug

SEQ ID NO: 439851 - RNA, 19 nt, Artificial Sequence
  Description of Artificial Sequence: Synthetic oligonucleotide
aaguaaaugcccuucucuc

SEQ ID NO: 439852 - RNA, 19 nt, Artificial Sequence
  Description of Artificial Sequence: Synthetic oligonucleotide
uuuagacucaccaacuuca

SEQ ID NO: 439853 - RNA, 19 nt, Artificial Sequence
  Description of Artificial Sequence: Synthetic oligonucleotide
aaugucauuaauucccgug

SEQ ID NO: 439854 - RNA, 19 nt, Artificial Sequence
  Description of Artificial Sequence: Synthetic oligonucleotide
auauuauugagaaugcugg

SEQ ID NO: 439855 - RNA, 19 nt, Artificial Sequence
  Description of Artificial Sequence: Synthetic oligonucleotide
uuauaguuacaaaugagaa

SEQ ID NO: 439856 - RNA, 19 nt, Artificial Sequence
  Description of Artificial Sequence: Synthetic oligonucleotide
aaaacaaguugcuaucaug

SEQ ID NO: 439857 - RNA, 19 nt, Artificial Sequence
  Description of Artificial Sequence: Synthetic oligonucleotide
uaugaugucagcauuucga

SEQ ID NO: 439858 - RNA, 19 nt, Artificial Sequence
  Description of Artificial Sequence: Synthetic oligonucleotide
agcauuucgaacuguagac

SEQ ID NO: 439859 - RNA, 19 nt, Artificial Sequence
  Description of Artificial Sequence: Synthetic oligonucleotide
cacuauauauacuuuauac

SEQ ID NO: 439860 - RNA, 19 nt, Artificial Sequence
  Description of Artificial Sequence: Synthetic oligonucleotide
aaguuugaaguaaaugccc

SEQ ID NO: 439861 - RNA, 19 nt, Artificial Sequence
  Description of Artificial Sequence: Synthetic oligonucleotide
aaguauauauuaugaaaca

SEQ ID NO: 439862 - RNA, 19 nt, Artificial Sequence
  Description of Artificial Sequence: Synthetic oligonucleotide
uguauuaggcuucaggccu

SEQ ID NO: 439863 - RNA, 19 nt, Artificial Sequence
  Description of Artificial Sequence: Synthetic oligonucleotide
aguugguuuacuucuuugc

SEQ ID NO: 439864 - RNA, 19 nt, Artificial Sequence
  Description of Artificial Sequence: Synthetic oligonucleotide
ucuagccuuauccagagca

SEQ ID NO: 439865 - RNA, 19 nt, Artificial Sequence
  Description of Artificial Sequence: Synthetic oligonucleotide
aaaauauggccauucagau

SEQ ID NO: 439866 - RNA, 19 nt, Artificial Sequence
  Description of Artificial Sequence: Synthetic oligonucleotide
acaaguugcuaucaugucg

SEQ ID NO: 439867 - RNA, 19 nt, Artificial Sequence
  Description of Artificial Sequence: Synthetic oligonucleotide
uacuaauagaacauuuuca

SEQ ID NO: 439868 - RNA, 19 nt, Artificial Sequence
  Description of Artificial Sequence: Synthetic oligonucleotide
aagacaauagcugagaaua

SEQ ID NO: 439869 - RNA, 19 nt, Artificial Sequence
  Description of Artificial Sequence: Synthetic oligonucleotide
caaguuugaaguaaaugcc

SEQ ID NO: 439870 - RNA, 19 nt, Artificial Sequence
  Description of Artificial Sequence: Synthetic oligonucleotide
acuauauauacuuuauaca

SEQ ID NO: 439871 - RNA, 19 nt, Artificial Sequence
  Description of Artificial Sequence: Synthetic oligonucleotide
uucaugauuuccuugcucc

SEQ ID NO: 439872 - RNA, 19 nt, Artificial Sequence
  Description of Artificial Sequence: Synthetic oligonucleotide
uuaugaaacauuuacuuuu

SEQ ID NO: 439873 - RNA, 19 nt, Artificial Sequence
  Description of Artificial Sequence: Synthetic oligonucleotide
auaagcgauguucucagcg

SEQ ID NO: 439874 - RNA, 19 nt, Artificial Sequence
  Description of Artificial Sequence: Synthetic oligonucleotide
uuuauagugcaauuuaaau

SEQ ID NO: 439875 - RNA, 19 nt, Artificial Sequence
  Description of Artificial Sequence: Synthetic oligonucleotide
aaaguauaaauaaaaguau

SEQ ID NO: 439876 - RNA, 19 nt, Artificial Sequence
  Description of Artificial Sequence: Synthetic oligonucleotide
uucugauuagacuggaugc

SEQ ID NO: 439877 - RNA, 19 nt, Artificial Sequence
  Description of Artificial Sequence: Synthetic oligonucleotide
aaaauguaauaaaagaaau

SEQ ID NO: 439878 - RNA, 19 nt, Artificial Sequence
  Description of Artificial Sequence: Synthetic oligonucleotide
uagcugagaauacuaauag

SEQ ID NO: 439879 - RNA, 19 nt, Artificial Sequence
  Description of Artificial Sequence: Synthetic oligonucleotide
acuaauagaacauuuucaa

SEQ ID NO: 439880 - RNA, 19 nt, Artificial Sequence
  Description of Artificial Sequence: Synthetic oligonucleotide
uuauagugcaauuuaaaua

SEQ ID NO: 439881 - RNA, 19 nt, Artificial Sequence
  Description of Artificial Sequence: Synthetic oligonucleotide
gaugcugaaucuuuugaag

SEQ ID NO: 439882 - RNA, 19 nt, Artificial Sequence
  Description of Artificial Sequence: Synthetic oligonucleotide
aucaguuauaguuacaaau

SEQ ID NO: 439883 - RNA, 19 nt, Artificial Sequence
  Description of Artificial Sequence: Synthetic oligonucleotide
auuagggauaugaugauuc

SEQ ID NO: 439884 - RNA, 19 nt, Artificial Sequence
  Description of Artificial Sequence: Synthetic oligonucleotide
acaaaauauggccauucag

SEQ ID NO: 439885 - RNA, 19 nt, Artificial Sequence
  Description of Artificial Sequence: Synthetic oligonucleotide
ucgaacuguagacaagcgg

SEQ ID NO: 439886 - RNA, 19 nt, Artificial Sequence
  Description of Artificial Sequence: Synthetic oligonucleotide
ucuaaauuaucaauuucau

SEQ ID NO: 439887 - RNA, 19 nt, Artificial Sequence
  Description of Artificial Sequence: Synthetic oligonucleotide
uauuccuugugaaaacccc

SEQ ID NO: 439888 - RNA, 19 nt, Artificial Sequence
  Description of Artificial Sequence: Synthetic oligonucleotide
aacaaguugcuaucauguc

SEQ ID NO: 439889 - RNA, 19 nt, Artificial Sequence
  Description of Artificial Sequence: Synthetic oligonucleotide
aauagcugagaauacuaau

SEQ ID NO: 439890 - RNA, 19 nt, Artificial Sequence
  Description of Artificial Sequence: Synthetic oligonucleotide
aaaucaguuauaguuacaa

SEQ ID NO: 439891 - RNA, 19 nt, Artificial Sequence
  Description of Artificial Sequence: Synthetic oligonucleotide
uuaggguuaucaaaccagc

SEQ ID NO: 439892 - RNA, 19 nt, Artificial Sequence
  Description of Artificial Sequence: Synthetic oligonucleotide
agaaaugaccccaaggauc

SEQ ID NO: 439893 - RNA, 19 nt, Artificial Sequence
  Description of Artificial Sequence: Synthetic oligonucleotide
caaaauauggccauucaga

SEQ ID NO: 439894 - RNA, 19 nt, Artificial Sequence
  Description of Artificial Sequence: Synthetic oligonucleotide
aguauuccuugugaaaacc

SEQ ID NO: 439895 - RNA, 19 nt, Artificial Sequence
  Description of Artificial Sequence: Synthetic oligonucleotide
aucuuuugaagacaugucu

SEQ ID NO: 439896 - RNA, 19 nt, Artificial Sequence
  Description of Artificial Sequence: Synthetic oligonucleotide
gagaaugcugguugcaagg

SEQ ID NO: 439897 - RNA, 19 nt, Artificial Sequence
  Description of Artificial Sequence: Synthetic oligonucleotide
uaccaaccacaaaauaugg

SEQ ID NO: 439898 - RNA, 19 nt, Artificial Sequence
  Description of Artificial Sequence: Synthetic oligonucleotide
aacauuagcggcaucguug

SEQ ID NO: 439899 - RNA, 19 nt, Artificial Sequence
  Description of Artificial Sequence: Synthetic oligonucleotide
ugcacacugaccauggaga

SEQ ID NO: 439900 - RNA, 19 nt, Artificial Sequence
  Description of Artificial Sequence: Synthetic oligonucleotide
aaucuuuugaagacauguc

SEQ ID NO: 439901 - RNA, 19 nt, Artificial Sequence
  Description of Artificial Sequence: Synthetic oligonucleotide
aaugugaagcccugaagaa

SEQ ID NO: 439902 - RNA, 19 nt, Artificial Sequence
  Description of Artificial Sequence: Synthetic oligonucleotide
aucaaacccagcuaugaug

SEQ ID NO: 439903 - RNA, 19 nt, Artificial Sequence
  Description of Artificial Sequence: Synthetic oligonucleotide
auugcuaagaguagaagug

SEQ ID NO: 439904 - RNA, 19 nt, Artificial Sequence
  Description of Artificial Sequence: Synthetic oligonucleotide
ucccgugccaccaaguaag

SEQ ID NO: 439905 - RNA, 19 nt, Artificial Sequence
  Description of Artificial Sequence: Synthetic oligonucleotide
uuucgaacuguagacaagc

SEQ ID NO: 439906 - RNA, 19 nt, Artificial Sequence
  Description of Artificial Sequence: Synthetic oligonucleotide
guuauaguuacaaaugaga

SEQ ID NO: 439907 - RNA, 19 nt, Artificial Sequence
  Description of Artificial Sequence: Synthetic oligonucleotide
cuucugauuagacuggaug

SEQ ID NO: 439908 - RNA, 19 nt, Artificial Sequence
  Description of Artificial Sequence: Synthetic oligonucleotide
aagaaaugaccccaaggau

SEQ ID NO: 439909 - RNA, 19 nt, Artificial Sequence
  Description of Artificial Sequence: Synthetic oligonucleotide
aaugcugguugcaaggcuc

SEQ ID NO: 439910 - RNA, 19 nt, Artificial Sequence
  Description of Artificial Sequence: Synthetic oligonucleotide
aaccccuacaaccuuagaa

SEQ ID NO: 439911 - RNA, 19 nt, Artificial Sequence
  Description of Artificial Sequence: Synthetic oligonucleotide
uuuuagacucaccaacuuc

SEQ ID NO: 439912 - RNA, 19 nt, Artificial Sequence
  Description of Artificial Sequence: Synthetic oligonucleotide
uugguuacuaagcuuccug

SEQ ID NO: 439913 - RNA, 19 nt, Artificial Sequence
  Description of Artificial Sequence: Synthetic oligonucleotide
augucguuugguuucauca

SEQ ID NO: 439914 - RNA, 19 nt, Artificial Sequence
  Description of Artificial Sequence: Synthetic oligonucleotide
uucauuuccuaauucaauu

SEQ ID NO: 439915 - RNA, 19 nt, Artificial Sequence
  Description of Artificial Sequence: Synthetic oligonucleotide
gaugucagcauuucgaacu

SEQ ID NO: 439916 - RNA, 19 nt, Artificial Sequence
  Description of Artificial Sequence: Synthetic oligonucleotide
uacuucugcgaguugaucu

SEQ ID NO: 439917 - RNA, 19 nt, Artificial Sequence
  Description of Artificial Sequence: Synthetic oligonucleotide
aaauauuauugagaaugcu

SEQ ID NO: 439918 - RNA, 19 nt, Artificial Sequence
  Description of Artificial Sequence: Synthetic oligonucleotide
ugucuaaauuaucaauuuc

SEQ ID NO: 439919 - RNA, 19 nt, Artificial Sequence
  Description of Artificial Sequence: Synthetic oligonucleotide
guugguuuacuucuuugcc

SEQ ID NO: 439920 - RNA, 19 nt, Artificial Sequence
  Description of Artificial Sequence: Synthetic oligonucleotide
cugagaauacuaauagaac

SEQ ID NO: 439921 - RNA, 19 nt, Artificial Sequence
  Description of Artificial Sequence: Synthetic oligonucleotide
ugucauuaauucccgugcc

SEQ ID NO: 439922 - RNA, 19 nt, Artificial Sequence
  Description of Artificial Sequence: Synthetic oligonucleotide
augacaccaccaucaaacc

SEQ ID NO: 439923 - RNA, 19 nt, Artificial Sequence
  Description of Artificial Sequence: Synthetic oligonucleotide
ccaaccacaaaauauggcc

SEQ ID NO: 439924 - RNA, 19 nt, Artificial Sequence
  Description of Artificial Sequence: Synthetic oligonucleotide
gucaugacaaguuugaagu

SEQ ID NO: 439925 - RNA, 19 nt, Artificial Sequence
  Description of Artificial Sequence: Synthetic oligonucleotide
aauacuaauagaacauuuu

SEQ ID NO: 439926 - RNA, 19 nt, Artificial Sequence
  Description of Artificial Sequence: Synthetic oligonucleotide
uugaagacaugucuaaauu

SEQ ID NO: 439927 - RNA, 19 nt, Artificial Sequence
  Description of Artificial Sequence: Synthetic oligonucleotide
ugagaaugcugguugcaag

SEQ ID NO: 439928 - RNA, 19 nt, Artificial Sequence
  Description of Artificial Sequence: Synthetic oligonucleotide
aauauaccaaccacaaaau

SEQ ID NO: 439929 - RNA, 19 nt, Artificial Sequence
  Description of Artificial Sequence: Synthetic oligonucleotide
ccuaauucaauuucauucc

SEQ ID NO: 439930 - RNA, 19 nt, Artificial Sequence
  Description of Artificial Sequence: Synthetic oligonucleotide
uaucacaaugguaguccgg

SEQ ID NO: 439931 - RNA, 19 nt, Artificial Sequence
  Description of Artificial Sequence: Synthetic oligonucleotide
auaccaaccacaaaauaug

SEQ ID NO: 439932 - RNA, 19 nt, Artificial Sequence
  Description of Artificial Sequence: Synthetic oligonucleotide
ucagcauuucgaacuguag

SEQ ID NO: 439933 - RNA, 19 nt, Artificial Sequence
  Description of Artificial Sequence: Synthetic oligonucleotide
cauuuaguugguuuacuuc

SEQ ID NO: 439934 - RNA, 19 nt, Artificial Sequence
  Description of Artificial Sequence: Synthetic oligonucleotide
agaacauuuucaaauguca

SEQ ID NO: 439935 - RNA, 19 nt, Artificial Sequence
  Description of Artificial Sequence: Synthetic oligonucleotide
ugauuagacuggaugcuga

SEQ ID NO: 439936 - RNA, 19 nt, Artificial Sequence
  Description of Artificial Sequence: Synthetic oligonucleotide
uucgaacuguagacaagcg

SEQ ID NO: 439937 - RNA, 19 nt, Artificial Sequence
  Description of Artificial Sequence: Synthetic oligonucleotide
aacuguagacaagcggugg

SEQ ID NO: 439938 - RNA, 19 nt, Artificial Sequence
  Description of Artificial Sequence: Synthetic oligonucleotide
uuggucaugugguccacgg

SEQ ID NO: 439939 - RNA, 19 nt, Artificial Sequence
  Description of Artificial Sequence: Synthetic oligonucleotide
aguuauaguuacaaaugag

SEQ ID NO: 439940 - RNA, 19 nt, Artificial Sequence
  Description of Artificial Sequence: Synthetic oligonucleotide
ugcugaaucuuuugaagac

SEQ ID NO: 439941 - RNA, 19 nt, Artificial Sequence
  Description of Artificial Sequence: Synthetic oligonucleotide
acaugucuaaauuaucaau

SEQ ID NO: 439942 - RNA, 19 nt, Artificial Sequence
  Description of Artificial Sequence: Synthetic oligonucleotide
ucguuugguuucaucauca

SEQ ID NO: 439943 - RNA, 19 nt, Artificial Sequence
  Description of Artificial Sequence: Synthetic oligonucleotide
uggaugcugaaucuuuuga

SEQ ID NO: 439944 - RNA, 19 nt, Artificial Sequence
  Description of Artificial Sequence: Synthetic oligonucleotide
uacuuuauacaaacauuuc

SEQ ID NO: 439945 - RNA, 19 nt, Artificial Sequence
  Description of Artificial Sequence: Synthetic oligonucleotide
uauugagaaugcugguugc

SEQ ID NO: 439946 - RNA, 19 nt, Artificial Sequence
  Description of Artificial Sequence: Synthetic oligonucleotide
uucucuagccuuauccaga

SEQ ID NO: 439947 - RNA, 19 nt, Artificial Sequence
  Description of Artificial Sequence: Synthetic oligonucleotide
gauggggacaauugcuaag

SEQ ID NO: 439948 - RNA, 19 nt, Artificial Sequence
  Description of Artificial Sequence: Synthetic oligonucleotide
aguccggccuucucuagcc

SEQ ID NO: 439949 - RNA, 19 nt, Artificial Sequence
  Description of Artificial Sequence: Synthetic oligonucleotide
aagacaugucuaaauuauc

SEQ ID NO: 439950 - RNA, 19 nt, Artificial Sequence
  Description of Artificial Sequence: Synthetic oligonucleotide
ugauuuguuuagcaaggaa

SEQ ID NO: 439951 - RNA, 19 nt, Artificial Sequence
  Description of Artificial Sequence: Synthetic oligonucleotide
aaugaacugaccugcccaa

SEQ ID NO: 439952 - RNA, 19 nt, Artificial Sequence
  Description of Artificial Sequence: Synthetic oligonucleotide
cacagaauauaccaaccac

SEQ ID NO: 439953 - RNA, 19 nt, Artificial Sequence
  Description of Artificial Sequence: Synthetic oligonucleotide
uauuauugagaaugcuggu

SEQ ID NO: 439954 - RNA, 19 nt, Artificial Sequence
  Description of Artificial Sequence: Synthetic oligonucleotide
cuaucacaaugguaguccg

SEQ ID NO: 439955 - RNA, 19 nt, Artificial Sequence
  Description of Artificial Sequence: Synthetic oligonucleotide
aguaaaugcccuucucucu

SEQ ID NO: 439956 - RNA, 19 nt, Artificial Sequence
  Description of Artificial Sequence: Synthetic oligonucleotide
augcugaaucuuuugaaga

SEQ ID NO: 439957 - RNA, 19 nt, Artificial Sequence
  Description of Artificial Sequence: Synthetic oligonucleotide
agaaugcugguugcaaggc

SEQ ID NO: 439958 - RNA, 19 nt, Artificial Sequence
  Description of Artificial Sequence: Synthetic oligonucleotide
ucucuagccuuauccagag

SEQ ID NO: 439959 - RNA, 19 nt, Artificial Sequence
  Description of Artificial Sequence: Synthetic oligonucleotide
uugaaguaaaugcccuucu

SEQ ID NO: 439960 - RNA, 19 nt, Artificial Sequence
  Description of Artificial Sequence: Synthetic oligonucleotide
uaagcgauguucucagcga

SEQ ID NO: 439961 - RNA, 19 nt, Artificial Sequence
  Description of Artificial Sequence: Synthetic oligonucleotide
agacaugucuaaauuauca

SEQ ID NO: 439962 - RNA, 19 nt, Artificial Sequence
  Description of Artificial Sequence: Synthetic oligonucleotide
uugauacacacaugauuug

SEQ ID NO: 439963 - RNA, 19 nt, Artificial Sequence
  Description of Artificial Sequence: Synthetic oligonucleotide
ucauuaauucccgugccac

SEQ ID NO: 439964 - RNA, 19 nt, Artificial Sequence
  Description of Artificial Sequence: Synthetic oligonucleotide
cuucucuagccuuauccag

SEQ ID NO: 439965 - RNA, 19 nt, Artificial Sequence
  Description of Artificial Sequence: Synthetic oligonucleotide
ugauacacacaugauuugu

SEQ ID NO: 439966 - RNA, 19 nt, Artificial Sequence
  Description of Artificial Sequence: Synthetic oligonucleotide
aaccacuccugcuauugca

SEQ ID NO: 439967 - RNA, 19 nt, Artificial Sequence
  Description of Artificial Sequence: Synthetic oligonucleotide
uuggugaggaucucuccag

SEQ ID NO: 439968 - RNA, 19 nt, Artificial Sequence
  Description of Artificial Sequence: Synthetic oligonucleotide
aaacccagcuaugauguca

SEQ ID NO: 439969 - RNA, 19 nt, Artificial Sequence
  Description of Artificial Sequence: Synthetic oligonucleotide
uggcacagaauauaccaac

SEQ ID NO: 439970 - RNA, 19 nt, Artificial Sequence
  Description of Artificial Sequence: Synthetic oligonucleotide
ugcgaguugaucuccuucu

SEQ ID NO: 439971 - RNA, 19 nt, Artificial Sequence
  Description of Artificial Sequence: Synthetic oligonucleotide
ugguuuacuucuuugccau

SEQ ID NO: 439972 - RNA, 19 nt, Artificial Sequence
  Description of Artificial Sequence: Synthetic oligonucleotide
uccauuuacuauggcacag

SEQ ID NO: 439973 - RNA, 19 nt, Artificial Sequence
  Description of Artificial Sequence: Synthetic oligonucleotide
uaagaguagaaguguuaac

SEQ ID NO: 439974 - RNA, 19 nt, Artificial Sequence
  Description of Artificial Sequence: Synthetic oligonucleotide
ugguuacuaagcuuccugu

SEQ ID NO: 439975 - RNA, 19 nt, Artificial Sequence
  Description of Artificial Sequence: Synthetic oligonucleotide
aaggcuccauuuacuaugg

SEQ ID NO: 439976 - RNA, 19 nt, Artificial Sequence
  Description of Artificial Sequence: Synthetic oligonucleotide
ucugauuagacuggaugcu

SEQ ID NO: 439977 - RNA, 19 nt, Artificial Sequence
  Description of Artificial Sequence: Synthetic oligonucleotide
accccuacaaccuuagaaa

SEQ ID NO: 439978 - RNA, 19 nt, Artificial Sequence
  Description of Artificial Sequence: Synthetic oligonucleotide
gaaguaaaugcccuucucu

SEQ ID NO: 439979 - RNA, 19 nt, Artificial Sequence
  Description of Artificial Sequence: Synthetic oligonucleotide
cuauggcacagaauauacc

SEQ ID NO: 439980 - RNA, 19 nt, Artificial Sequence
  Description of Artificial Sequence: Synthetic oligonucleotide
uugaucuccuucugauuag

SEQ ID NO: 439981 - RNA, 19 nt, Artificial Sequence
  Description of Artificial Sequence: Synthetic oligonucleotide
ggaaaucaguuauaguuac

SEQ ID NO: 439982 - RNA, 19 nt, Artificial Sequence
  Description of Artificial Sequence: Synthetic oligonucleotide
ucaaccacuccugcuauug

SEQ ID NO: 439983 - RNA, 19 nt, Artificial Sequence
  Description of Artificial Sequence: Synthetic oligonucleotide
caaaugaacugaccugccc

SEQ ID NO: 439984 - RNA, 19 nt, Artificial Sequence
  Description of Artificial Sequence: Synthetic oligonucleotide
auuaauucccgugccacca

SEQ ID NO: 439985 - RNA, 19 nt, Artificial Sequence
  Description of Artificial Sequence: Synthetic oligonucleotide
ucuuaucuuuuagugcuug

SEQ ID NO: 439986 - RNA, 19 nt, Artificial Sequence
  Description of Artificial Sequence: Synthetic oligonucleotide
cauuaauucccgugccacc

SEQ ID NO: 439987 - RNA, 19 nt, Artificial Sequence
  Description of Artificial Sequence: Synthetic oligonucleotide
uuagcggcaucguuggcga

SEQ ID NO: 439988 - RNA, 19 nt, Artificial Sequence
  Description of Artificial Sequence: Synthetic oligonucleotide
uuacuaagcuuccugucuu

SEQ ID NO: 439989 - RNA, 19 nt, Artificial Sequence
  Description of Artificial Sequence: Synthetic oligonucleotide
uccaaggccucuuugguua

SEQ ID NO: 439990 - RNA, 19 nt, Artificial Sequence
  Description of Artificial Sequence: Synthetic oligonucleotide
cuugugaaaaccccuacaa

SEQ ID NO: 439991 - RNA, 19 nt, Artificial Sequence
  Description of Artificial Sequence: Synthetic oligonucleotide
aaaaccccuacaaccuuag

SEQ ID NO: 439992 - RNA, 19 nt, Artificial Sequence
  Description of Artificial Sequence: Synthetic oligonucleotide
acaauaaggaaaacaaguu

SEQ ID NO: 439993 - RNA, 19 nt, Artificial Sequence
  Description of Artificial Sequence: Synthetic oligonucleotide
ucugugucaugacaaguuu

SEQ ID NO: 439994 - RNA, 19 nt, Artificial Sequence
  Description of Artificial Sequence: Synthetic oligonucleotide
uuguccagacaacauuuuc

SEQ ID NO: 439995 - RNA, 19 nt, Artificial Sequence
  Description of Artificial Sequence: Synthetic oligonucleotide
uuccaauguauuaggcuuc

SEQ ID NO: 439996 - RNA, 19 nt, Artificial Sequence
  Description of Artificial Sequence: Synthetic oligonucleotide
gacaauugcuaagaguaga

SEQ ID NO: 439997 - RNA, 19 nt, Artificial Sequence
  Description of Artificial Sequence: Synthetic oligonucleotide
caugaugauaugcgaugcc

SEQ ID NO: 439998 - RNA, 19 nt, Artificial Sequence
  Description of Artificial Sequence: Synthetic oligonucleotide
uaggguuaucaaaccagcu

SEQ ID NO: 439999 - RNA, 19 nt, Artificial Sequence
  Description of Artificial Sequence: Synthetic oligonucleotide
guaaaugcccuucucucuc

SEQ ID NO: 440000 - RNA, 19 nt, Artificial Sequence
  Description of Artificial Sequence: Synthetic oligonucleotide
uaauucccgugccaccaag

SEQ ID NO: 440001 - RNA, 19 nt, Artificial Sequence
  Description of Artificial Sequence: Synthetic oligonucleotide
uccugcuauugcaaugaug

SEQ ID NO: 440002 - RNA, 19 nt, Artificial Sequence
  Description of Artificial Sequence: Synthetic oligonucleotide
gaacugaccugcccaacug

SEQ ID NO: 440003 - RNA, 19 nt, Artificial Sequence
  Description of Artificial Sequence: Synthetic oligonucleotide
augaugucagcauuucgaa

SEQ ID NO: 440004 - RNA, 19 nt, Artificial Sequence
  Description of Artificial Sequence: Synthetic oligonucleotide
uuacuauggcacagaauau

SEQ ID NO: 440005 - RNA, 19 nt, Artificial Sequence
  Description of Artificial Sequence: Synthetic oligonucleotide
ggguuaucaaaccagcuca

SEQ ID NO: 440006 - RNA, 19 nt, Artificial Sequence
  Description of Artificial Sequence: Synthetic oligonucleotide
acauuuaguugguuuacuu

SEQ ID NO: 440007 - RNA, 19 nt, Artificial Sequence
  Description of Artificial Sequence: Synthetic oligonucleotide
acacugaccauggagaaau

SEQ ID NO: 440008 - RNA, 19 nt, Artificial Sequence
  Description of Artificial Sequence: Synthetic oligonucleotide
aacccagcuaugaugucag

SEQ ID NO: 440009 - RNA, 19 nt, Artificial Sequence
  Description of Artificial Sequence: Synthetic oligonucleotide
uccacggauacuucugcga

SEQ ID NO: 440010 - RNA, 19 nt, Artificial Sequence
  Description of Artificial Sequence: Synthetic oligonucleotide
cugugucaugacaaguuug

SEQ ID NO: 440011 - RNA, 19 nt, Artificial Sequence
  Description of Artificial Sequence: Synthetic oligonucleotide
acugaccugcccaacugcc

SEQ ID NO: 440012 - RNA, 19 nt, Artificial Sequence
  Description of Artificial Sequence: Synthetic oligonucleotide
auuuuauagugcaauuuaa

SEQ ID NO: 440013 - RNA, 19 nt, Artificial Sequence
  Description of Artificial Sequence: Synthetic oligonucleotide
ucaugauuuccuugcucca

SEQ ID NO: 440014 - RNA, 19 nt, Artificial Sequence
  Description of Artificial Sequence: Synthetic oligonucleotide
cuaauagaacauuuucaaa

SEQ ID NO: 440015 - RNA, 19 nt, Artificial Sequence
  Description of Artificial Sequence: Synthetic oligonucleotide
ggaucagaaacaauaagga

SEQ ID NO: 440016 - RNA, 19 nt, Artificial Sequence
  Description of Artificial Sequence: Synthetic oligonucleotide
uuuaguugguuuacuucuu

SEQ ID NO: 440017 - RNA, 19 nt, Artificial Sequence
  Description of Artificial Sequence: Synthetic oligonucleotide
uuuguuuagcaaggaaauc

SEQ ID NO: 440018 - RNA, 19 nt, Artificial Sequence
  Description of Artificial Sequence: Synthetic oligonucleotide
auauaccaaccacaaaaua

SEQ ID NO: 440019 - RNA, 19 nt, Artificial Sequence
  Description of Artificial Sequence: Synthetic oligonucleotide
cuuuugaagacaugucuaa

SEQ ID NO: 440020 - RNA, 19 nt, Artificial Sequence
  Description of Artificial Sequence: Synthetic oligonucleotide
agugcuuguccagacaaca

SEQ ID NO: 440021 - RNA, 19 nt, Artificial Sequence
  Description of Artificial Sequence: Synthetic oligonucleotide
auuauugagaaugcugguu

SEQ ID NO: 440022 - RNA, 19 nt, Artificial Sequence
  Description of Artificial Sequence: Synthetic oligonucleotide
gcaaggaaaucaguuauag

SEQ ID NO: 440023 - RNA, 19 nt, Artificial Sequence
  Description of Artificial Sequence: Synthetic oligonucleotide
uucaacuuuccaaggccuc

SEQ ID NO: 440024 - RNA, 19 nt, Artificial Sequence
  Description of Artificial Sequence: Synthetic oligonucleotide
ucacaguucacuagcgcuu

SEQ ID NO: 440025 - RNA, 19 nt, Artificial Sequence
  Description of Artificial Sequence: Synthetic oligonucleotide
agacaauagcugagaauac

SEQ ID NO: 440026 - RNA, 19 nt, Artificial Sequence
  Description of Artificial Sequence: Synthetic oligonucleotide
aagcgauguucucagcgau

SEQ ID NO: 440027 - RNA, 19 nt, Artificial Sequence
  Description of Artificial Sequence: Synthetic oligonucleotide
ugucguuugguuucaucau

SEQ ID NO: 440028 - RNA, 19 nt, Artificial Sequence
  Description of Artificial Sequence: Synthetic oligonucleotide
ugguccacggauacuucug

SEQ ID NO: 440029 - RNA, 19 nt, Artificial Sequence
  Description of Artificial Sequence: Synthetic oligonucleotide
gcuaucacaaugguagucc

SEQ ID NO: 440030 - RNA, 19 nt, Artificial Sequence
  Description of Artificial Sequence: Synthetic oligonucleotide
gggacaauugcuaagagua

SEQ ID NO: 440031 - RNA, 19 nt, Artificial Sequence
  Description of Artificial Sequence: Synthetic oligonucleotide
uccuugugaaaaccccuac

SEQ ID NO: 440032 - RNA, 19 nt, Artificial Sequence
  Description of Artificial Sequence: Synthetic oligonucleotide
caguauuccuugugaaaac

SEQ ID NO: 440033 - RNA, 19 nt, Artificial Sequence
  Description of Artificial Sequence: Synthetic oligonucleotide
caauugcuaagaguagaag

SEQ ID NO: 440034 - RNA, 19 nt, Artificial Sequence
  Description of Artificial Sequence: Synthetic oligonucleotide
caaggaucagaaacaauaa

SEQ ID NO: 440035 - RNA, 19 nt, Artificial Sequence
  Description of Artificial Sequence: Synthetic oligonucleotide
uuccuugcuccacaaugac

SEQ ID NO: 440036 - RNA, 19 nt, Artificial Sequence
  Description of Artificial Sequence: Synthetic oligonucleotide
guuacuaagcuuccugucu

SEQ ID NO: 440037 - RNA, 19 nt, Artificial Sequence
  Description of Artificial Sequence: Synthetic oligonucleotide
cauucagaugaauucaacu

SEQ ID NO: 440038 - RNA, 19 nt, Artificial Sequence
  Description of Artificial Sequence: Synthetic oligonucleotide
gagaauacuaauagaacau

SEQ ID NO: 440039 - RNA, 19 nt, Artificial Sequence
  Description of Artificial Sequence: Synthetic oligonucleotide
caccaaagacaauagcuga

SEQ ID NO: 440040 - RNA, 19 nt, Artificial Sequence
  Description of Artificial Sequence: Synthetic oligonucleotide
agaauacuaauagaacauu

SEQ ID NO: 440041 - RNA, 19 nt, Artificial Sequence
  Description of Artificial Sequence: Synthetic oligonucleotide
agaauauaccaaccacaaa

SEQ ID NO: 440042 - RNA, 19 nt, Artificial Sequence
  Description of Artificial Sequence: Synthetic oligonucleotide
gaacuguagacaagcggug

SEQ ID NO: 440043 - RNA, 19 nt, Artificial Sequence
  Description of Artificial Sequence: Synthetic oligonucleotide
uacuaagcuuccugucuug

SEQ ID NO: 440044 - RNA, 19 nt, Artificial Sequence
  Description of Artificial Sequence: Synthetic oligonucleotide
cuaagaguagaaguguuaa

SEQ ID NO: 440045 - RNA, 19 nt, Artificial Sequence
  Description of Artificial Sequence: Synthetic oligonucleotide
uuagacucaccaacuucau

SEQ ID NO: 440046 - RNA, 19 nt, Artificial Sequence
  Description of Artificial Sequence: Synthetic oligonucleotide
gacucaccaacuucauuuc

SEQ ID NO: 440047 - RNA, 19 nt, Artificial Sequence
  Description of Artificial Sequence: Synthetic oligonucleotide
acaagcggugggcuaucac

SEQ ID NO: 440048 - RNA, 19 nt, Artificial Sequence
  Description of Artificial Sequence: Synthetic oligonucleotide
uuccuugugaaaaccccua

SEQ ID NO: 440049 - RNA, 19 nt, Artificial Sequence
  Description of Artificial Sequence: Synthetic oligonucleotide
uguagacaagcggugggcu

SEQ ID NO: 440050 - RNA, 19 nt, Artificial Sequence
  Description of Artificial Sequence: Synthetic oligonucleotide
cacauccugucucagcaug

SEQ ID NO: 440051 - RNA, 19 nt, Artificial Sequence
  Description of Artificial Sequence: Synthetic oligonucleotide
cugcuauugcaaugauggg

SEQ ID NO: 440052 - RNA, 19 nt, Artificial Sequence
  Description of Artificial Sequence: Synthetic oligonucleotide
ucaugacaaguuugaagua

SEQ ID NO: 440053 - RNA, 19 nt, Artificial Sequence
  Description of Artificial Sequence: Synthetic oligonucleotide
ggagcaaaugaacugaccu

SEQ ID NO: 440054 - RNA, 19 nt, Artificial Sequence
  Description of Artificial Sequence: Synthetic oligonucleotide
aggaaaucaguuauaguua

SEQ ID NO: 440055 - RNA, 19 nt, Artificial Sequence
  Description of Artificial Sequence: Synthetic oligonucleotide
ugccaaaugugaagcccug

SEQ ID NO: 440056 - RNA, 19 nt, Artificial Sequence
  Description of Artificial Sequence: Synthetic oligonucleotide
auggggacaauugcuaaga

SEQ ID NO: 440057 - RNA, 19 nt, Artificial Sequence
  Description of Artificial Sequence: Synthetic oligonucleotide
caagcggugggcuaucaca

SEQ ID NO: 440058 - RNA, 19 nt, Artificial Sequence
  Description of Artificial Sequence: Synthetic oligonucleotide
uucauuccugcugucugug

SEQ ID NO: 440059 - RNA, 19 nt, Artificial Sequence
  Description of Artificial Sequence: Synthetic oligonucleotide
ugucugugucaugacaagu

SEQ ID NO: 440060 - RNA, 19 nt, Artificial Sequence
  Description of Artificial Sequence: Synthetic oligonucleotide
uccaauguauuaggcuuca

SEQ ID NO: 440061 - RNA, 19 nt, Artificial Sequence
  Description of Artificial Sequence: Synthetic oligonucleotide
uugagaaugcugguugcaa

SEQ ID NO: 440062 - RNA, 19 nt, Artificial Sequence
  Description of Artificial Sequence: Synthetic oligonucleotide
cauuccugcugucuguguc

SEQ ID NO: 440063 - RNA, 19 nt, Artificial Sequence
  Description of Artificial Sequence: Synthetic oligonucleotide
uuucaaugaucaugaugau

SEQ ID NO: 440064 - RNA, 19 nt, Artificial Sequence
  Description of Artificial Sequence: Synthetic oligonucleotide
cuuccaauguauuaggcuu

SEQ ID NO: 440065 - RNA, 19 nt, Artificial Sequence
  Description of Artificial Sequence: Synthetic oligonucleotide
ucucaaccacuccugcuau

SEQ ID NO: 440066 - RNA, 19 nt, Artificial Sequence
  Description of Artificial Sequence: Synthetic oligonucleotide
ugaccugcccaacugccau

SEQ ID NO: 440067 - RNA, 19 nt, Artificial Sequence
  Description of Artificial Sequence: Synthetic oligonucleotide
cugauuagacuggaugcug

SEQ ID NO: 440068 - RNA, 19 nt, Artificial Sequence
  Description of Artificial Sequence: Synthetic oligonucleotide
ggugggguaguugaacacg

SEQ ID NO: 440069 - RNA, 19 nt, Artificial Sequence
  Description of Artificial Sequence: Synthetic oligonucleotide
gauuagacuggaugcugaa

SEQ ID NO: 440070 - RNA, 19 nt, Artificial Sequence
  Description of Artificial Sequence: Synthetic oligonucleotide
guccacggauacuucugcg

SEQ ID NO: 440071 - RNA, 19 nt, Artificial Sequence
  Description of Artificial Sequence: Synthetic oligonucleotide
auuucgaacuguagacaag

SEQ ID NO: 440072 - RNA, 19 nt, Artificial Sequence
  Description of Artificial Sequence: Synthetic oligonucleotide
uaguccggccuucucuagc

SEQ ID NO: 440073 - RNA, 19 nt, Artificial Sequence
  Description of Artificial Sequence: Synthetic oligonucleotide
aggccuccggugcuguagc

SEQ ID NO: 440074 - RNA, 19 nt, Artificial Sequence
  Description of Artificial Sequence: Synthetic oligonucleotide
caugauuuccuugcuccac

SEQ ID NO: 440075 - RNA, 19 nt, Artificial Sequence
  Description of Artificial Sequence: Synthetic oligonucleotide
uuaauucccgugccaccaa

SEQ ID NO: 440076 - RNA, 19 nt, Artificial Sequence
  Description of Artificial Sequence: Synthetic oligonucleotide
gucauuaauucccgugcca

SEQ ID NO: 440077 - RNA, 19 nt, Artificial Sequence
  Description of Artificial Sequence: Synthetic oligonucleotide
aaugcuccagugguguuuu

SEQ ID NO: 440078 - RNA, 19 nt, Artificial Sequence
  Description of Artificial Sequence: Synthetic oligonucleotide
caugacaaguuugaaguaa

SEQ ID NO: 440079 - RNA, 19 nt, Artificial Sequence
  Description of Artificial Sequence: Synthetic oligonucleotide
guucacuagcgcuuugcuc

SEQ ID NO: 440080 - RNA, 19 nt, Artificial Sequence
  Description of Artificial Sequence: Synthetic oligonucleotide
uucccgugccaccaaguaa

SEQ ID NO: 440081 - RNA, 19 nt, Artificial Sequence
  Description of Artificial Sequence: Synthetic oligonucleotide
gguaguugaacacgacuuc

SEQ ID NO: 440082 - RNA, 19 nt, Artificial Sequence
  Description of Artificial Sequence: Synthetic oligonucleotide
ugaucuccuucugauuaga

SEQ ID NO: 440083 - RNA, 19 nt, Artificial Sequence
  Description of Artificial Sequence: Synthetic oligonucleotide
agcugucaauggaagggac

SEQ ID NO: 440084 - RNA, 19 nt, Artificial Sequence
  Description of Artificial Sequence: Synthetic oligonucleotide
aggaucucuccagcuuugc

SEQ ID NO: 440085 - RNA, 19 nt, Artificial Sequence
  Description of Artificial Sequence: Synthetic oligonucleotide
uagugcuuguccagacaac

SEQ ID NO: 440086 - RNA, 19 nt, Artificial Sequence
  Description of Artificial Sequence: Synthetic oligonucleotide
acaaugguaguccggccuu

SEQ ID NO: 440087 - RNA, 19 nt, Artificial Sequence
  Description of Artificial Sequence: Synthetic oligonucleotide
cacuccugcuauugcaaug

SEQ ID NO: 440088 - RNA, 19 nt, Artificial Sequence
  Description of Artificial Sequence: Synthetic oligonucleotide
cuauugcaaugauggggac

SEQ ID NO: 440089 - RNA, 19 nt, Artificial Sequence
  Description of Artificial Sequence: Synthetic oligonucleotide
uucuuaucuuuuagugcuu

SEQ ID NO: 440090 - RNA, 19 nt, Artificial Sequence
  Description of Artificial Sequence: Synthetic oligonucleotide
augaacugaccugcccaac

SEQ ID NO: 440091 - RNA, 19 nt, Artificial Sequence
  Description of Artificial Sequence: Synthetic oligonucleotide
aaaccccuacaaccuuaga

SEQ ID NO: 440092 - RNA, 19 nt, Artificial Sequence
  Description of Artificial Sequence: Synthetic oligonucleotide
gguuacuaagcuuccuguc

SEQ ID NO: 440093 - RNA, 19 nt, Artificial Sequence
  Description of Artificial Sequence: Synthetic oligonucleotide
uagacaagcggugggcuau

SEQ ID NO: 440094 - RNA, 19 nt, Artificial Sequence
  Description of Artificial Sequence: Synthetic oligonucleotide
augguaguccggccuucuc

SEQ ID NO: 440095 - RNA, 19 nt, Artificial Sequence
  Description of Artificial Sequence: Synthetic oligonucleotide
aggcuccauuuacuauggc

SEQ ID NO: 440096 - RNA, 19 nt, Artificial Sequence
  Description of Artificial Sequence: Synthetic oligonucleotide
ggcacagaauauaccaacc

SEQ ID NO: 440097 - RNA, 19 nt, Artificial Sequence
  Description of Artificial Sequence: Synthetic oligonucleotide
cuccauuuacuauggcaca

SEQ ID NO: 440098 - RNA, 19 nt, Artificial Sequence
  Description of Artificial Sequence: Synthetic oligonucleotide
caguucacuagcgcuuugc

SEQ ID NO: 440099 - RNA, 19 nt, Artificial Sequence
  Description of Artificial Sequence: Synthetic oligonucleotide
ucacuagcgcuuugcucca

SEQ ID NO: 440100 - RNA, 19 nt, Artificial Sequence
  Description of Artificial Sequence: Synthetic oligonucleotide
ccagcuuugccaaauguga

SEQ ID NO: 440101 - RNA, 19 nt, Artificial Sequence
  Description of Artificial Sequence: Synthetic oligonucleotide
uggucaugugguccacgga

SEQ ID NO: 440102 - RNA, 19 nt, Artificial Sequence
  Description of Artificial Sequence: Synthetic oligonucleotide
gaucuccuucugauuagac

SEQ ID NO: 440103 - RNA, 19 nt, Artificial Sequence
  Description of Artificial Sequence: Synthetic oligonucleotide
caaccacuccugcuauugc

SEQ ID NO: 440104 - RNA, 19 nt, Artificial Sequence
  Description of Artificial Sequence: Synthetic oligonucleotide
aucguuggcgagccuggug

SEQ ID NO: 440105 - RNA, 19 nt, Artificial Sequence
  Description of Artificial Sequence: Synthetic oligonucleotide
ugugguccacggauacuuc

SEQ ID NO: 440106 - RNA, 19 nt, Artificial Sequence
  Description of Artificial Sequence: Synthetic oligonucleotide
cuucugcgaguugaucucc

SEQ ID NO: 440107 - RNA, 19 nt, Artificial Sequence
  Description of Artificial Sequence: Synthetic oligonucleotide
guuaucaaaccagcucaca

SEQ ID NO: 440108 - RNA, 19 nt, Artificial Sequence
  Description of Artificial Sequence: Synthetic oligonucleotide
uccuucugauuagacugga

SEQ ID NO: 440109 - RNA, 19 nt, Artificial Sequence
  Description of Artificial Sequence: Synthetic oligonucleotide
augugaagcccugaagaaa

SEQ ID NO: 440110 - RNA, 19 nt, Artificial Sequence
  Description of Artificial Sequence: Synthetic oligonucleotide
ugggguaguugaacacgac

SEQ ID NO: 440111 - RNA, 19 nt, Artificial Sequence
  Description of Artificial Sequence: Synthetic oligonucleotide
ggaugcugaaucuuuugaa

SEQ ID NO: 440112 - RNA, 19 nt, Artificial Sequence
  Description of Artificial Sequence: Synthetic oligonucleotide
auggccauucagaugaauu

SEQ ID NO: 440113 - RNA, 19 nt, Artificial Sequence
  Description of Artificial Sequence: Synthetic oligonucleotide
auucccgugccaccaagua

SEQ ID NO: 440114 - RNA, 19 nt, Artificial Sequence
  Description of Artificial Sequence: Synthetic oligonucleotide
cugcgaguugaucuccuuc

SEQ ID NO: 440115 - RNA, 19 nt, Artificial Sequence
  Description of Artificial Sequence: Synthetic oligonucleotide
cuuggucaugugguccacg

SEQ ID NO: 440116 - RNA, 19 nt, Artificial Sequence
  Description of Artificial Sequence: Synthetic oligonucleotide
aaaugaccccaaggaucag

SEQ ID NO: 440117 - RNA, 19 nt, Artificial Sequence
  Description of Artificial Sequence: Synthetic oligonucleotide
auuuacuauggcacagaau

SEQ ID NO: 440118 - RNA, 19 nt, Artificial Sequence
  Description of Artificial Sequence: Synthetic oligonucleotide
auuagacuggaugcugaau

SEQ ID NO: 440119 - RNA, 19 nt, Artificial Sequence
  Description of Artificial Sequence: Synthetic oligonucleotide
acggauacuucugcgaguu

SEQ ID NO: 440120 - RNA, 19 nt, Artificial Sequence
  Description of Artificial Sequence: Synthetic oligonucleotide
ggacaauugcuaagaguag

SEQ ID NO: 440121 - RNA, 19 nt, Artificial Sequence
  Description of Artificial Sequence: Synthetic oligonucleotide
gaggaucucuccagcuuug

SEQ ID NO: 440122 - RNA, 19 nt, Artificial Sequence
  Description of Artificial Sequence: Synthetic oligonucleotide
ugcuaucaugucguuuggu

SEQ ID NO: 440123 - RNA, 19 nt, Artificial Sequence
  Description of Artificial Sequence: Synthetic oligonucleotide
guccagacaacauuuucau

SEQ ID NO: 440124 - RNA, 19 nt, Artificial Sequence
  Description of Artificial Sequence: Synthetic oligonucleotide
guaguccggccuucucuag

SEQ ID NO: 440125 - RNA, 19 nt, Artificial Sequence
  Description of Artificial Sequence: Synthetic oligonucleotide
accuucuagcuccuucuua

SEQ ID NO: 440126 - RNA, 19 nt, Artificial Sequence
  Description of Artificial Sequence: Synthetic oligonucleotide
ccacggauacuucugcgag

SEQ ID NO: 440127 - RNA, 19 nt, Artificial Sequence
  Description of Artificial Sequence: Synthetic oligonucleotide
ucacauccugucucagcau

SEQ ID NO: 440128 - RNA, 19 nt, Artificial Sequence
  Description of Artificial Sequence: Synthetic oligonucleotide
acaguucacuagcgcuuug

SEQ ID NO: 440129 - RNA, 19 nt, Artificial Sequence
  Description of Artificial Sequence: Synthetic oligonucleotide
ugguugcaaggcuccauuu

SEQ ID NO: 440130 - RNA, 19 nt, Artificial Sequence
  Description of Artificial Sequence: Synthetic oligonucleotide
ggacauuuaguugguuuac

SEQ ID NO: 440131 - RNA, 19 nt, Artificial Sequence
  Description of Artificial Sequence: Synthetic oligonucleotide
aaggccucuuugguuacua

SEQ ID NO: 440132 - RNA, 19 nt, Artificial Sequence
  Description of Artificial Sequence: Synthetic oligonucleotide
gacauuuaguugguuuacu

SEQ ID NO: 440133 - RNA, 19 nt, Artificial Sequence
  Description of Artificial Sequence: Synthetic oligonucleotide
augaccccaaggaucagaa

SEQ ID NO: 440134 - RNA, 19 nt, Artificial Sequence
  Description of Artificial Sequence: Synthetic oligonucleotide
cuaucaugucguuugguuu

SEQ ID NO: 440135 - RNA, 19 nt, Artificial Sequence
  Description of Artificial Sequence: Synthetic oligonucleotide
auggcacagaauauaccaa

SEQ ID NO: 440136 - RNA, 19 nt, Artificial Sequence
  Description of Artificial Sequence: Synthetic oligonucleotide
gauacacacaugauuuguu

SEQ ID NO: 440137 - RNA, 19 nt, Artificial Sequence
  Description of Artificial Sequence: Synthetic oligonucleotide
aguugcuaucaugucguuu

SEQ ID NO: 440138 - RNA, 19 nt, Artificial Sequence
  Description of Artificial Sequence: Synthetic oligonucleotide
uccggugcuguagcuguca

SEQ ID NO: 440139 - RNA, 19 nt, Artificial Sequence
  Description of Artificial Sequence: Synthetic oligonucleotide
ucaaugcuccagugguguu

SEQ ID NO: 440140 - RNA, 19 nt, Artificial Sequence
  Description of Artificial Sequence: Synthetic oligonucleotide
gugggguaguugaacacga

SEQ ID NO: 440141 - RNA, 19 nt, Artificial Sequence
  Description of Artificial Sequence: Synthetic oligonucleotide
gaccugcccaacugccaug

SEQ ID NO: 440142 - RNA, 19 nt, Artificial Sequence
  Description of Artificial Sequence: Synthetic oligonucleotide
gguuaucaaaccagcucac

SEQ ID NO: 440143 - RNA, 19 nt, Artificial Sequence
  Description of Artificial Sequence: Synthetic oligonucleotide
caaggaaaucaguuauagu

SEQ ID NO: 440144 - RNA, 19 nt, Artificial Sequence
  Description of Artificial Sequence: Synthetic oligonucleotide
ccagcucacauccugucuc

SEQ ID NO: 440145 - RNA, 19 nt, Artificial Sequence
  Description of Artificial Sequence: Synthetic oligonucleotide
cacaaugguaguccggccu

SEQ ID NO: 440146 - RNA, 19 nt, Artificial Sequence
  Description of Artificial Sequence: Synthetic oligonucleotide
ggcaucguuggcgagccug

SEQ ID NO: 440147 - RNA, 19 nt, Artificial Sequence
  Description of Artificial Sequence: Synthetic oligonucleotide
cuuaucuuuuagugcuugu

SEQ ID NO: 440148 - RNA, 19 nt, Artificial Sequence
  Description of Artificial Sequence: Synthetic oligonucleotide
guagacaagcggugggcua

SEQ ID NO: 440149 - RNA, 19 nt, Artificial Sequence
  Description of Artificial Sequence: Synthetic oligonucleotide
cucuagccuuauccagagc

SEQ ID NO: 440150 - RNA, 19 nt, Artificial Sequence
  Description of Artificial Sequence: Synthetic oligonucleotide
ggucaugugguccacggau

SEQ ID NO: 440151 - RNA, 19 nt, Artificial Sequence
  Description of Artificial Sequence: Synthetic oligonucleotide
gcaaaugaacugaccugcc

SEQ ID NO: 440152 - RNA, 19 nt, Artificial Sequence
  Description of Artificial Sequence: Synthetic oligonucleotide
ccuacaaccuuagaaaaua

SEQ ID NO: 440153 - RNA, 19 nt, Artificial Sequence
  Description of Artificial Sequence: Synthetic oligonucleotide
agcaaggaaaucaguuaua

SEQ ID NO: 440154 - RNA, 19 nt, Artificial Sequence
  Description of Artificial Sequence: Synthetic oligonucleotide
caccaucaaacccagcuau

SEQ ID NO: 440155 - RNA, 19 nt, Artificial Sequence
  Description of Artificial Sequence: Synthetic oligonucleotide
agacaagcggugggcuauc

SEQ ID NO: 440156 - RNA, 19 nt, Artificial Sequence
  Description of Artificial Sequence: Synthetic oligonucleotide
cggugggcuaucacaaugg

SEQ ID NO: 440157 - RNA, 19 nt, Artificial Sequence
  Description of Artificial Sequence: Synthetic oligonucleotide
gcuaugaugucagcauuuc

SEQ ID NO: 440158 - RNA, 19 nt, Artificial Sequence
  Description of Artificial Sequence: Synthetic oligonucleotide
accacuccugcuauugcaa

SEQ ID NO: 440159 - RNA, 19 nt, Artificial Sequence
  Description of Artificial Sequence: Synthetic oligonucleotide
gcauuucgaacuguagaca

SEQ ID NO: 440160 - RNA, 19 nt, Artificial Sequence
  Description of Artificial Sequence: Synthetic oligonucleotide
cgaacuguagacaagcggu

SEQ ID NO: 440161 - RNA, 19 nt, Artificial Sequence
  Description of Artificial Sequence: Synthetic oligonucleotide
cugaccugcccaacugcca

SEQ ID NO: 440162 - RNA, 19 nt, Artificial Sequence
  Description of Artificial Sequence: Synthetic oligonucleotide
gcaucguuggcgagccugg

SEQ ID NO: 440163 - RNA, 19 nt, Artificial Sequence
  Description of Artificial Sequence: Synthetic oligonucleotide
gguugcaaggcuccauuua

SEQ ID NO: 440164 - RNA, 19 nt, Artificial Sequence
  Description of Artificial Sequence: Synthetic oligonucleotide
gguaguccggccuucucua

SEQ ID NO: 440165 - RNA, 19 nt, Artificial Sequence
  Description of Artificial Sequence: Synthetic oligonucleotide
gggguaguugaacacgacu

SEQ ID NO: 440166 - RNA, 19 nt, Artificial Sequence
  Description of Artificial Sequence: Synthetic oligonucleotide
uuccugcugucugugucau

SEQ ID NO: 440167 - RNA, 19 nt, Artificial Sequence
  Description of Artificial Sequence: Synthetic oligonucleotide
gcuccacaaugacaccacc

SEQ ID NO: 440168 - RNA, 19 nt, Artificial Sequence
  Description of Artificial Sequence: Synthetic oligonucleotide
gcuaucaugucguuugguu

SEQ ID NO: 440169 - RNA, 19 nt, Artificial Sequence
  Description of Artificial Sequence: Synthetic oligonucleotide
ggggacaauugcuaagagu

SEQ ID NO: 440170 - RNA, 19 nt, Artificial Sequence
  Description of Artificial Sequence: Synthetic oligonucleotide
ccuugugaaaaccccuaca

SEQ ID NO: 440171 - RNA, 19 nt, Artificial Sequence
  Description of Artificial Sequence: Synthetic oligonucleotide
gcgaguugaucuccuucug

SEQ ID NO: 440172 - RNA, 19 nt, Artificial Sequence
  Description of Artificial Sequence: Synthetic oligonucleotide
ccugucuuggucauguggu

SEQ ID NO: 440173 - RNA, 19 nt, Artificial Sequence
  Description of Artificial Sequence: Synthetic oligonucleotide
agcggugggcuaucacaau

SEQ ID NO: 440174 - RNA, 19 nt, Artificial Sequence
  Description of Artificial Sequence: Synthetic oligonucleotide
gucugugucaugacaaguu

SEQ ID NO: 440175 - RNA, 19 nt, Artificial Sequence
  Description of Artificial Sequence: Synthetic oligonucleotide
gguuuacuucuuugccauc

SEQ ID NO: 440176 - RNA, 19 nt, Artificial Sequence
  Description of Artificial Sequence: Synthetic oligonucleotide
ccuuccaauguauuaggcu

SEQ ID NO: 440177 - RNA, 19 nt, Artificial Sequence
  Description of Artificial Sequence: Synthetic oligonucleotide
gcuaagaguagaaguguua

SEQ ID NO: 440178 - RNA, 19 nt, Artificial Sequence
  Description of Artificial Sequence: Synthetic oligonucleotide
ggccgggugggguaguuga

SEQ ID NO: 440179 - RNA, 19 nt, Artificial Sequence
  Description of Artificial Sequence: Synthetic oligonucleotide
caucaaacccagcuaugau

SEQ ID NO: 440180 - RNA, 19 nt, Artificial Sequence
  Description of Artificial Sequence: Synthetic oligonucleotide
gugucaugacaaguuugaa

SEQ ID NO: 440181 - RNA, 19 nt, Artificial Sequence
  Description of Artificial Sequence: Synthetic oligonucleotide
ggguaguugaacacgacuu

SEQ ID NO: 440182 - RNA, 19 nt, Artificial Sequence
  Description of Artificial Sequence: Synthetic oligonucleotide
gucaugugguccacggaua

SEQ ID NO: 440183 - RNA, 19 nt, Artificial Sequence
  Description of Artificial Sequence: Synthetic oligonucleotide
gacaagcggugggcuauca

SEQ ID NO: 440184 - RNA, 19 nt, Artificial Sequence
  Description of Artificial Sequence: Synthetic oligonucleotide
ccccuacaaccuuagaaaa

SEQ ID NO: 440185 - RNA, 19 nt, Artificial Sequence
  Description of Artificial Sequence: Synthetic oligonucleotide
gccauucagaugaauucaa

SEQ ID NO: 440186 - RNA, 19 nt, Artificial Sequence
  Description of Artificial Sequence: Synthetic oligonucleotide
ccagcuaugaugucagcau

SEQ ID NO: 440187 - RNA, 19 nt, Artificial Sequence
  Description of Artificial Sequence: Synthetic oligonucleotide
gcggcaucguuggcgagcc

SEQ ID NO: 440188 - RNA, 19 nt, Artificial Sequence
  Description of Artificial Sequence: Synthetic oligonucleotide
guuggcgagccuggugguc

SEQ ID NO: 440189 - RNA, 19 nt, Artificial Sequence
  Description of Artificial Sequence: Synthetic oligonucleotide
cccagcuaugaugucagca

SEQ ID NO: 440190 - RNA, 19 nt, Artificial Sequence
  Description of Artificial Sequence: Synthetic oligonucleotide
cacggauacuucugcgagu

SEQ ID NO: 440191 - RNA, 19 nt, Artificial Sequence
  Description of Artificial Sequence: Synthetic oligonucleotide
ccucuuugguuacuaagcu

SEQ ID NO: 440192 - RNA, 19 nt, Artificial Sequence
  Description of Artificial Sequence: Synthetic oligonucleotide
ggugggcuaucacaauggu

SEQ ID NO: 440193 - RNA, 19 nt, Artificial Sequence
  Description of Artificial Sequence: Synthetic oligonucleotide
ccaaggccucuuugguuac

SEQ ID NO: 440194 - RNA, 19 nt, Artificial Sequence
  Description of Artificial Sequence: Synthetic oligonucleotide
cugguugcaaggcuccauu

SEQ ID NO: 440195 - RNA, 19 nt, Artificial Sequence
  Description of Artificial Sequence: Synthetic oligonucleotide
cagcuaugaugucagcauu

SEQ ID NO: 440196 - RNA, 19 nt, Artificial Sequence
  Description of Artificial Sequence: Synthetic oligonucleotide
gcaaggcuccauuuacuau

SEQ ID NO: 440197 - RNA, 19 nt, Artificial Sequence
  Description of Artificial Sequence: Synthetic oligonucleotide
auauggccauucagaugaa

SEQ ID NO: 440198 - RNA, 19 nt, Artificial Sequence
  Description of Artificial Sequence: Synthetic oligonucleotide
cccgugccaccaaguaagc

SEQ ID NO: 440199 - RNA, 19 nt, Artificial Sequence
  Description of Artificial Sequence: Synthetic oligonucleotide
uugcaaugauggggacaau

SEQ ID NO: 440200 - RNA, 19 nt, Artificial Sequence
  Description of Artificial Sequence: Synthetic oligonucleotide
aggccgggugggguaguug

SEQ ID NO: 440201 - RNA, 19 nt, Artificial Sequence
  Description of Artificial Sequence: Synthetic oligonucleotide
gccaaaugugaagcccuga

SEQ ID NO: 440202 - RNA, 19 nt, Artificial Sequence
  Description of Artificial Sequence: Synthetic oligonucleotide
caaugcuccagugguguuu

SEQ ID NO: 440203 - RNA, 19 nt, Artificial Sequence
  Description of Artificial Sequence: Synthetic oligonucleotide
caugugguccacggauacu

SEQ ID NO: 440204 - RNA, 19 nt, Artificial Sequence
  Description of Artificial Sequence: Synthetic oligonucleotide
cacaguucacuagcgcuuu

SEQ ID NO: 440205 - RNA, 19 nt, Artificial Sequence
  Description of Artificial Sequence: Synthetic oligonucleotide
cccuacaaccuuagaaaau

SEQ ID NO: 440206 - RNA, 19 nt, Artificial Sequence
  Description of Artificial Sequence: Synthetic oligonucleotide
caacuuuccaaggccucuu

SEQ ID NO: 440207 - RNA, 19 nt, Artificial Sequence
  Description of Artificial Sequence: Synthetic oligonucleotide
ccccaaggaucagaaacaa

SEQ ID NO: 440208 - RNA, 19 nt, Artificial Sequence
  Description of Artificial Sequence: Synthetic oligonucleotide
ccugcccaacugccauggc

SEQ ID NO: 440209 - RNA, 19 nt, Artificial Sequence
  Description of Artificial Sequence: Synthetic oligonucleotide
cucaaccacuccugcuauu

SEQ ID NO: 440210 - RNA, 19 nt, Artificial Sequence
  Description of Artificial Sequence: Synthetic oligonucleotide
cccaacugccauggcacca

SEQ ID NO: 440211 - RNA, 19 nt, Artificial Sequence
  Description of Artificial Sequence: Synthetic oligonucleotide
cuccugcuauugcaaugau

SEQ ID NO: 440212 - RNA, 19 nt, Artificial Sequence
  Description of Artificial Sequence: Synthetic oligonucleotide
ccugcacacugaccaugga

SEQ ID NO: 440213 - RNA, 19 nt, Artificial Sequence
  Description of Artificial Sequence: Synthetic oligonucleotide
cggauacuucugcgaguug

SEQ ID NO: 440214 - RNA, 19 nt, Artificial Sequence
  Description of Artificial Sequence: Synthetic oligonucleotide
ccggccuucucuagccuua

SEQ ID NO: 440215 - RNA, 19 nt, Artificial Sequence
  Description of Artificial Sequence: Synthetic oligonucleotide
caaggccucuuugguuacu

SEQ ID NO: 440216 - RNA, 19 nt, Artificial Sequence
  Description of Artificial Sequence: Synthetic oligonucleotide
caucguuggcgagccuggu

SEQ ID NO: 440217 - RNA, 19 nt, Artificial Sequence
  Description of Artificial Sequence: Synthetic oligonucleotide
gcugguugcaaggcuccau

SEQ ID NO: 440218 - RNA, 19 nt, Artificial Sequence
  Description of Artificial Sequence: Synthetic oligonucleotide
ccgugccaccaaguaagca

SEQ ID NO: 440219 - RNA, 19 nt, Artificial Sequence
  Description of Artificial Sequence: Synthetic oligonucleotide
ccacuccugcuauugcaau

SEQ ID NO: 440220 - RNA, 19 nt, Artificial Sequence
  Description of Artificial Sequence: Synthetic oligonucleotide
ccagaaccuucuagcuccu

SEQ ID NO: 440221 - RNA, 19 nt, Artificial Sequence
  Description of Artificial Sequence: Synthetic oligonucleotide
ggccuccggugcuguagcu

SEQ ID NO: 440222 - RNA, 19 nt, Artificial Sequence
  Description of Artificial Sequence: Synthetic oligonucleotide
cagaaccuucuagcuccuu

SEQ ID NO: 440223 - RNA, 19 nt, Artificial Sequence
  Description of Artificial Sequence: Synthetic oligonucleotide
ccauggcaccaaagacaau

SEQ ID NO: 440224 - RNA, 19 nt, Artificial Sequence
  Description of Artificial Sequence: Synthetic oligonucleotide
caggccgggugggguaguu

SEQ ID NO: 440225 - RNA, 19 nt, Artificial Sequence
  Description of Artificial Sequence: Synthetic oligonucleotide
cggcaucguuggcgagccu

SEQ ID NO: 440226 - RNA, 19 nt, Artificial Sequence
  Description of Artificial Sequence: Synthetic oligonucleotide
aaagaugggacacucaauc

SEQ ID NO: 440227 - RNA, 19 nt, Artificial Sequence
  Description of Artificial Sequence: Synthetic oligonucleotide
  modified_base (8)..(8): a, c, u, g, unknown or other
ucagguanagcccugaucc

SEQ ID NO: 440228 - RNA, 19 nt, Artificial Sequence
  Description of Artificial Sequence: Synthetic oligonucleotide
aacuccauuacgcucgucc

SEQ ID NO: 440229 - RNA, 19 nt, Artificial Sequence
  Description of Artificial Sequence: Synthetic oligonucleotide
aguaggauagggaagaggc

SEQ ID NO: 440230 - RNA, 19 nt, Artificial Sequence
  Description of Artificial Sequence: Synthetic oligonucleotide
uucagaacggcaauccugg

SEQ ID NO: 440231 - RNA, 19 nt, Artificial Sequence
  Description of Artificial Sequence: Synthetic oligonucleotide
ucugcaucguuaaagcagg

SEQ ID NO: 440232 - RNA, 19 nt, Artificial Sequence
  Description of Artificial Sequence: Synthetic oligonucleotide
agauauguaaagaugggac

SEQ ID NO: 440233 - RNA, 19 nt, Artificial Sequence
  Description of Artificial Sequence: Synthetic oligonucleotide
aaccucaucggauucauca

SEQ ID NO: 440234 - RNA, 19 nt, Artificial Sequence
  Description of Artificial Sequence: Synthetic oligonucleotide
cauucuaagccuuugguac

SEQ ID NO: 440235 - RNA, 19 nt, Artificial Sequence
  Description of Artificial Sequence: Synthetic oligonucleotide
uuacacacgaaucucuuug

SEQ ID NO: 440236 - RNA, 19 nt, Artificial Sequence
  Description of Artificial Sequence: Synthetic oligonucleotide
aaugucugaaguaggauag

SEQ ID NO: 440237 - RNA, 19 nt, Artificial Sequence
  Description of Artificial Sequence: Synthetic oligonucleotide
aagccuuugguacugggag

SEQ ID NO: 440238 - RNA, 19 nt, Artificial Sequence
  Description of Artificial Sequence: Synthetic oligonucleotide
ugugcauuauccacgaaga

SEQ ID NO: 440239 - RNA, 19 nt, Artificial Sequence
  Description of Artificial Sequence: Synthetic oligonucleotide
uuucacgacaggcacauca

SEQ ID NO: 440240 - RNA, 19 nt, Artificial Sequence
  Description of Artificial Sequence: Synthetic oligonucleotide
auauguaaagaugggacac

SEQ ID NO: 440241 - RNA, 19 nt, Artificial Sequence
  Description of Artificial Sequence: Synthetic oligonucleotide
agcaggauaguguugagug

SEQ ID NO: 440242 - RNA, 19 nt, Artificial Sequence
  Description of Artificial Sequence: Synthetic oligonucleotide
gagaugaugaacugccggg

SEQ ID NO: 440243 - RNA, 19 nt, Artificial Sequence
  Description of Artificial Sequence: Synthetic oligonucleotide
aacauucuaagccuuuggu

SEQ ID NO: 440244 - RNA, 19 nt, Artificial Sequence
  Description of Artificial Sequence: Synthetic oligonucleotide
uguagagaugguaaagcca

SEQ ID NO: 440245 - RNA, 19 nt, Artificial Sequence
  Description of Artificial Sequence: Synthetic oligonucleotide
agauccacuuuucacauug

SEQ ID NO: 440246 - RNA, 19 nt, Artificial Sequence
  Description of Artificial Sequence: Synthetic oligonucleotide
uugagugugugcaccauag

SEQ ID NO: 440247 - RNA, 19 nt, Artificial Sequence
  Description of Artificial Sequence: Synthetic oligonucleotide
gaacuuguaaaaguaggag

SEQ ID NO: 440248 - RNA, 19 nt, Artificial Sequence
  Description of Artificial Sequence: Synthetic oligonucleotide
gauguagagaugguaaagc

SEQ ID NO: 440249 - RNA, 19 nt, Artificial Sequence
  Description of Artificial Sequence: Synthetic oligonucleotide
ugccggaacaucuugcggg

SEQ ID NO: 440250 - RNA, 19 nt, Artificial Sequence
  Description of Artificial Sequence: Synthetic oligonucleotide
cacgagaugaugaacugcc

SEQ ID NO: 440251 - RNA, 19 nt, Artificial Sequence
  Description of Artificial Sequence: Synthetic oligonucleotide
ugugcuacgggcuuuggcu

SEQ ID NO: 440252 - RNA, 19 nt, Artificial Sequence
  Description of Artificial Sequence: Synthetic oligonucleotide
ggucuagaaguucagaucc

SEQ ID NO: 440253 - RNA, 19 nt, Artificial Sequence
  Description of Artificial Sequence: Synthetic oligonucleotide
ugaaguaggauagggaaga

SEQ ID NO: 440254 - RNA, 19 nt, Artificial Sequence
  Description of Artificial Sequence: Synthetic oligonucleotide
aguagcgcagccuacuguc

SEQ ID NO: 440255 - RNA, 19 nt, Artificial Sequence
  Description of Artificial Sequence: Synthetic oligonucleotide
  modified_base (2)..(2): a, c, u, g, unknown or other
anagcccugauccuugcca

SEQ ID NO: 440256 - RNA, 19 nt, Artificial Sequence
  Description of Artificial Sequence: Synthetic oligonucleotide
aacagagugacacgguggu

SEQ ID NO: 440257 - RNA, 19 nt, Artificial Sequence
  Description of Artificial Sequence: Synthetic oligonucleotide
agaugggacacucaaucag

SEQ ID NO: 440258 - RNA, 19 nt, Artificial Sequence
  Description of Artificial Sequence: Synthetic oligonucleotide
cguagauauguaaagaugg

SEQ ID NO: 440259 - RNA, 19 nt, Artificial Sequence
  Description of Artificial Sequence: Synthetic oligonucleotide
aauguccuuuaaaagucgg

SEQ ID NO: 440260 - RNA, 19 nt, Artificial Sequence
  Description of Artificial Sequence: Synthetic oligonucleotide
uaggcguagauauguaaag

SEQ ID NO: 440261 - RNA, 19 nt, Artificial Sequence
  Description of Artificial Sequence: Synthetic oligonucleotide
cagauaaugucugaaguag

SEQ ID NO: 440262 - RNA, 19 nt, Artificial Sequence
  Description of Artificial Sequence: Synthetic oligonucleotide
gugugcauuauccacgaag

SEQ ID NO: 440263 - RNA, 19 nt, Artificial Sequence
  Description of Artificial Sequence: Synthetic oligonucleotide
agccaacuuacucagcccg

SEQ ID NO: 440264 - RNA, 19 nt, Artificial Sequence
  Description of Artificial Sequence: Synthetic oligonucleotide
acacacgaaucucuuugcc

SEQ ID NO: 440265 - RNA, 19 nt, Artificial Sequence
  Description of Artificial Sequence: Synthetic oligonucleotide
gucacaauguccuuuaaaa

SEQ ID NO: 440266 - RNA, 19 nt, Artificial Sequence
  Description of Artificial Sequence: Synthetic oligonucleotide
ucggaagucaggaccauca

SEQ ID NO: 440267 - RNA, 19 nt, Artificial Sequence
  Description of Artificial Sequence: Synthetic oligonucleotide
ugugccggaacaucuugcg

SEQ ID NO: 440268 - RNA, 19 nt, Artificial Sequence
  Description of Artificial Sequence: Synthetic oligonucleotide
uuucuggacuuucucgaag

SEQ ID NO: 440269 - RNA, 19 nt, Artificial Sequence
  Description of Artificial Sequence: Synthetic oligonucleotide
ugauguagagaugguaaag

SEQ ID NO: 440270 - RNA, 19 nt, Artificial Sequence
  Description of Artificial Sequence: Synthetic oligonucleotide
aaguaggauagggaagagg

SEQ ID NO: 440271 - RNA, 19 nt, Artificial Sequence
  Description of Artificial Sequence: Synthetic oligonucleotide
aagacaaccucaucggauu

SEQ ID NO: 440272 - RNA, 19 nt, Artificial Sequence
  Description of Artificial Sequence: Synthetic oligonucleotide
ugaacugccgggcguauug

SEQ ID NO: 440273 - RNA, 19 nt, Artificial Sequence
  Description of Artificial Sequence: Synthetic oligonucleotide
agggcgauagagcaggcag

SEQ ID NO: 440274 - RNA, 19 nt, Artificial Sequence
  Description of Artificial Sequence: Synthetic oligonucleotide
uccucccgaagcaagaugu

SEQ ID NO: 440275 - RNA, 19 nt, Artificial Sequence
  Description of Artificial Sequence: Synthetic oligonucleotide
acuggagccggugagagag

SEQ ID NO: 440276 - RNA, 19 nt, Artificial Sequence
  Description of Artificial Sequence: Synthetic oligonucleotide
gucaguacuggcucgauca

SEQ ID NO: 440277 - RNA, 19 nt, Artificial Sequence
  Description of Artificial Sequence: Synthetic oligonucleotide
gaggucauaggcgugucgg

SEQ ID NO: 440278 - RNA, 19 nt, Artificial Sequence
  Description of Artificial Sequence: Synthetic oligonucleotide
accuggaacuccauuacgc

SEQ ID NO: 440279 - RNA, 19 nt, Artificial Sequence
  Description of Artificial Sequence: Synthetic oligonucleotide
uucacgacaggcacaucag

SEQ ID NO: 440280 - RNA, 19 nt, Artificial Sequence
  Description of Artificial Sequence: Synthetic oligonucleotide
uuguagagggccucgcaag

SEQ ID NO: 440281 - RNA, 19 nt, Artificial Sequence
  Description of Artificial Sequence: Synthetic oligonucleotide
gacuugcacaaucccaucc

SEQ ID NO: 440282 - RNA, 19 nt, Artificial Sequence
  Description of Artificial Sequence: Synthetic oligonucleotide
uguaaagaugggacacuca

SEQ ID NO: 440283 - RNA, 19 nt, Artificial Sequence
  Description of Artificial Sequence: Synthetic oligonucleotide
aucccauccagguguaggg

SEQ ID NO: 440284 - RNA, 19 nt, Artificial Sequence
  Description of Artificial Sequence: Synthetic oligonucleotide
cacggugacuuccaggucc

SEQ ID NO: 440285 - RNA, 19 nt, Artificial Sequence
  Description of Artificial Sequence: Synthetic oligonucleotide
uguagagggccucgcaagc

SEQ ID NO: 440286 - RNA, 19 nt, Artificial Sequence
  Description of Artificial Sequence: Synthetic oligonucleotide
cuugcggggaguuuugaug

SEQ ID NO: 440287 - RNA, 19 nt, Artificial Sequence
  Description of Artificial Sequence: Synthetic oligonucleotide
ucaagacaaccucaucgga

SEQ ID NO: 440288 - RNA, 19 nt, Artificial Sequence
  Description of Artificial Sequence: Synthetic oligonucleotide
uaauguccggcaccgacac

SEQ ID NO: 440289 - RNA, 19 nt, Artificial Sequence
  Description of Artificial Sequence: Synthetic oligonucleotide
ggagcuagaguugacagag

SEQ ID NO: 440290 - RNA, 19 nt, Artificial Sequence
  Description of Artificial Sequence: Synthetic oligonucleotide
augaaugggccucuggccu

SEQ ID NO: 440291 - RNA, 19 nt, Artificial Sequence
  Description of Artificial Sequence: Synthetic oligonucleotide
guuaauguccggcaccgac

SEQ ID NO: 440292 - RNA, 19 nt, Artificial Sequence
  Description of Artificial Sequence: Synthetic oligonucleotide
ucauccucgggagugacca

SEQ ID NO: 440293 - RNA, 19 nt, Artificial Sequence
  Description of Artificial Sequence: Synthetic oligonucleotide
agcacauugaaguguggca

SEQ ID NO: 440294 - RNA, 19 nt, Artificial Sequence
  Description of Artificial Sequence: Synthetic oligonucleotide
aggucuuugugcuggcccg

SEQ ID NO: 440295 - RNA, 19 nt, Artificial Sequence
  Description of Artificial Sequence: Synthetic oligonucleotide
uugcggggaguuuugaugu

SEQ ID NO: 440296 - RNA, 19 nt, Artificial Sequence
  Description of Artificial Sequence: Synthetic oligonucleotide
uggcccgugugcauuaucc

SEQ ID NO: 440297 - RNA, 19 nt, Artificial Sequence
  Description of Artificial Sequence: Synthetic oligonucleotide
ggaguuuugauguagagau

SEQ ID NO: 440298 - RNA, 19 nt, Artificial Sequence
  Description of Artificial Sequence: Synthetic oligonucleotide
uuucuuuuauuggggcagg

SEQ ID NO: 440299 - RNA, 19 nt, Artificial Sequence
  Description of Artificial Sequence: Synthetic oligonucleotide
uucuggacuuucucgaagu

SEQ ID NO: 440300 - RNA, 19 nt, Artificial Sequence
  Description of Artificial Sequence: Synthetic oligonucleotide
ugucuuacuuccaggugcu

SEQ ID NO: 440301 - RNA, 19 nt, Artificial Sequence
  Description of Artificial Sequence: Synthetic oligonucleotide
  modified_base (9)..(9): a, c, u, g, unknown or other
uucagguanagcccugauc

SEQ ID NO: 440302 - RNA, 19 nt, Artificial Sequence
  Description of Artificial Sequence: Synthetic oligonucleotide
ugugugccggaacaucuug

SEQ ID NO: 440303 - RNA, 19 nt, Artificial Sequence
  Description of Artificial Sequence: Synthetic oligonucleotide
uguaggcguagauauguaa

SEQ ID NO: 440304 - RNA, 19 nt, Artificial Sequence
  Description of Artificial Sequence: Synthetic oligonucleotide
gucaucauuccaauggcug

SEQ ID NO: 440305 - RNA, 19 nt, Artificial Sequence
  Description of Artificial Sequence: Synthetic oligonucleotide
auagaguggaagauguucu

SEQ ID NO: 440306 - RNA, 19 nt, Artificial Sequence
  Description of Artificial Sequence: Synthetic oligonucleotide
aacuuacucagcccgucaa

SEQ ID NO: 440307 - RNA, 19 nt, Artificial Sequence
  Description of Artificial Sequence: Synthetic oligonucleotide
aguucagauccacuuuuca

SEQ ID NO: 440308 - RNA, 19 nt, Artificial Sequence
  Description of Artificial Sequence: Synthetic oligonucleotide
agguuaauguccggcaccg

SEQ ID NO: 440309 - RNA, 19 nt, Artificial Sequence
  Description of Artificial Sequence: Synthetic oligonucleotide
aguggacgcgaacuugagg

SEQ ID NO: 440310 - RNA, 19 nt, Artificial Sequence
  Description of Artificial Sequence: Synthetic oligonucleotide
gaggcuauggccugacuca

SEQ ID NO: 440311 - RNA, 19 nt, Artificial Sequence
  Description of Artificial Sequence: Synthetic oligonucleotide
uuuaggauucugucauuuc

SEQ ID NO: 440312 - RNA, 19 nt, Artificial Sequence
  Description of Artificial Sequence: Synthetic oligonucleotide
agagugacacgguggugac

SEQ ID NO: 440313 - RNA, 19 nt, Artificial Sequence
  Description of Artificial Sequence: Synthetic oligonucleotide
acauucuaagccuuuggua

SEQ ID NO: 440314 - RNA, 19 nt, Artificial Sequence
  Description of Artificial Sequence: Synthetic oligonucleotide
agacggucccucccuauac

SEQ ID NO: 440315 - RNA, 19 nt, Artificial Sequence
  Description of Artificial Sequence: Synthetic oligonucleotide
gugucgguaguucugggug

SEQ ID NO: 440316 - RNA, 19 nt, Artificial Sequence
  Description of Artificial Sequence: Synthetic oligonucleotide
aauguccggcaccgacacc

SEQ ID NO: 440317 - RNA, 19 nt, Artificial Sequence
  Description of Artificial Sequence: Synthetic oligonucleotide
caucggauucaucagauaa

SEQ ID NO: 440318 - RNA, 19 nt, Artificial Sequence
  Description of Artificial Sequence: Synthetic oligonucleotide
uuacgcucgucccuccugc

SEQ ID NO: 440319 - RNA, 19 nt, Artificial Sequence
  Description of Artificial Sequence: Synthetic oligonucleotide
aguaaauccucucccgcaa

SEQ ID NO: 440320 - RNA, 19 nt, Artificial Sequence
  Description of Artificial Sequence: Synthetic oligonucleotide
ucaguacuggcucgaucag

SEQ ID NO: 440321 - RNA, 19 nt, Artificial Sequence
  Description of Artificial Sequence: Synthetic oligonucleotide
ucuggacuuucucgaagug

SEQ ID NO: 440322 - RNA, 19 nt, Artificial Sequence
  Description of Artificial Sequence: Synthetic oligonucleotide
agccagguguagcugacag

SEQ ID NO: 440323 - RNA, 19 nt, Artificial Sequence
  Description of Artificial Sequence: Synthetic oligonucleotide
uaaauccucucccgcaaaa

SEQ ID NO: 440324 - RNA, 19 nt, Artificial Sequence
  Description of Artificial Sequence: Synthetic oligonucleotide
gaucgccacgcccacugcg

SEQ ID NO: 440325 - RNA, 19 nt, Artificial Sequence
  Description of Artificial Sequence: Synthetic oligonucleotide
agacaaccucaucggauuc

SEQ ID NO: 440326 - RNA, 19 nt, Artificial Sequence
  Description of Artificial Sequence: Synthetic oligonucleotide
uuugguacugggaggguuu

SEQ ID NO: 440327 - RNA, 19 nt, Artificial Sequence
  Description of Artificial Sequence: Synthetic oligonucleotide
ugcaccauaguggacgcga

SEQ ID NO: 440328 - RNA, 19 nt, Artificial Sequence
  Description of Artificial Sequence: Synthetic oligonucleotide
ucuuacuuccaggugcugu

SEQ ID NO: 440329 - RNA, 19 nt, Artificial Sequence
  Description of Artificial Sequence: Synthetic oligonucleotide
ugaaguguggcagcacagc

SEQ ID NO: 440330 - RNA, 19 nt, Artificial Sequence
  Description of Artificial Sequence: Synthetic oligonucleotide
agauccuucaagacaaccu

SEQ ID NO: 440331 - RNA, 19 nt, Artificial Sequence
  Description of Artificial Sequence: Synthetic oligonucleotide
guagcugacagugcucggg

SEQ ID NO: 440332 - RNA, 19 nt, Artificial Sequence
  Description of Artificial Sequence: Synthetic oligonucleotide
cagguuaauguccggcacc

SEQ ID NO: 440333 - RNA, 19 nt, Artificial Sequence
  Description of Artificial Sequence: Synthetic oligonucleotide
caccaggagcgauacaggc

SEQ ID NO: 440334 - RNA, 19 nt, Artificial Sequence
  Description of Artificial Sequence: Synthetic oligonucleotide
uaguucugggugaggaaac

SEQ ID NO: 440335 - RNA, 19 nt, Artificial Sequence
  Description of Artificial Sequence: Synthetic oligonucleotide
uucuuuuauuggggcaggg

SEQ ID NO: 440336 - RNA, 19 nt, Artificial Sequence
  Description of Artificial Sequence: Synthetic oligonucleotide
ugcaccaauuuguccaccu

SEQ ID NO: 440337 - RNA, 19 nt, Artificial Sequence
  Description of Artificial Sequence: Synthetic oligonucleotide
agcauaagcaggccauaca

SEQ ID NO: 440338 - RNA, 19 nt, Artificial Sequence
  Description of Artificial Sequence: Synthetic oligonucleotide
  modified_base (3)..(3): a, c, u, g, unknown or other
uanagcccugauccuugcc

SEQ ID NO: 440339 - RNA, 19 nt, Artificial Sequence
  Description of Artificial Sequence: Synthetic oligonucleotide
uauugguuguuggaguaaa

SEQ ID NO: 440340 - RNA, 19 nt, Artificial Sequence
  Description of Artificial Sequence: Synthetic oligonucleotide
uguagcugacagugcucgg

SEQ ID NO: 440341 - RNA, 19 nt, Artificial Sequence
  Description of Artificial Sequence: Synthetic oligonucleotide
auccacgagaugaugaacu

SEQ ID NO: 440342 - RNA, 19 nt, Artificial Sequence
  Description of Artificial Sequence: Synthetic oligonucleotide
cuuugacgauguuguagag

SEQ ID NO: 440343 - RNA, 19 nt, Artificial Sequence
  Description of Artificial Sequence: Synthetic oligonucleotide
aggucaaacuuguugcuuu

SEQ ID NO: 440344 - RNA, 19 nt, Artificial Sequence
  Description of Artificial Sequence: Synthetic oligonucleotide
ugccauagaguggaagaug

SEQ ID NO: 440345 - RNA, 19 nt, Artificial Sequence
  Description of Artificial Sequence: Synthetic oligonucleotide
uccggcaccgacaccagaa

SEQ ID NO: 440346 - RNA, 19 nt, Artificial Sequence
  Description of Artificial Sequence: Synthetic oligonucleotide
ugucgguaguucuggguga

SEQ ID NO: 440347 - RNA, 19 nt, Artificial Sequence
  Description of Artificial Sequence: Synthetic oligonucleotide
ucacgacaggcacaucaga

SEQ ID NO: 440348 - RNA, 19 nt, Artificial Sequence
  Description of Artificial Sequence: Synthetic oligonucleotide
augaugaacugccgggcgu

SEQ ID NO: 440349 - RNA, 19 nt, Artificial Sequence
  Description of Artificial Sequence: Synthetic oligonucleotide
ucgcaagcguaguagcgca

SEQ ID NO: 440350 - RNA, 19 nt, Artificial Sequence
  Description of Artificial Sequence: Synthetic oligonucleotide
auuacgcucgucccuccug

SEQ ID NO: 440351 - RNA, 19 nt, Artificial Sequence
  Description of Artificial Sequence: Synthetic oligonucleotide
auguccggcaccgacacca

SEQ ID NO: 440352 - RNA, 19 nt, Artificial Sequence
  Description of Artificial Sequence: Synthetic oligonucleotide
uaguggacgcgaacuugag

SEQ ID NO: 440353 - RNA, 19 nt, Artificial Sequence
  Description of Artificial Sequence: Synthetic oligonucleotide
uaguagcgcagccuacugu

SEQ ID NO: 440354 - RNA, 19 nt, Artificial Sequence
  Description of Artificial Sequence: Synthetic oligonucleotide
gugaucgccacgcccacug

SEQ ID NO: 440355 - RNA, 19 nt, Artificial Sequence
  Description of Artificial Sequence: Synthetic oligonucleotide
cagcacauugaaguguggc

SEQ ID NO: 440356 - RNA, 19 nt, Artificial Sequence
  Description of Artificial Sequence: Synthetic oligonucleotide
ggacaagcucuucucacag

SEQ ID NO: 440357 - RNA, 19 nt, Artificial Sequence
  Description of Artificial Sequence: Synthetic oligonucleotide
cucgcaagcguaguagcgc

SEQ ID NO: 440358 - RNA, 19 nt, Artificial Sequence
  Description of Artificial Sequence: Synthetic oligonucleotide
cauaguggacgcgaacuug

SEQ ID NO: 440359 - RNA, 19 nt, Artificial Sequence
  Description of Artificial Sequence: Synthetic oligonucleotide
agaucuacacauacauaca

SEQ ID NO: 440360 - RNA, 19 nt, Artificial Sequence
  Description of Artificial Sequence: Synthetic oligonucleotide
ucauaggcgugucgguagu

SEQ ID NO: 440361 - RNA, 19 nt, Artificial Sequence
  Description of Artificial Sequence: Synthetic oligonucleotide
agcguaguagcgcagccua

SEQ ID NO: 440362 - RNA, 19 nt, Artificial Sequence
  Description of Artificial Sequence: Synthetic oligonucleotide
auaguggacgcgaacuuga

SEQ ID NO: 440363 - RNA, 19 nt, Artificial Sequence
  Description of Artificial Sequence: Synthetic oligonucleotide
agcugccugaugaugaaug

SEQ ID NO: 440364 - RNA, 19 nt, Artificial Sequence
  Description of Artificial Sequence: Synthetic oligonucleotide
  modified_base (4)..(4): a, c, u, g, unknown or other
guanagcccugauccuugc

SEQ ID NO: 440365 - RNA, 19 nt, Artificial Sequence
  Description of Artificial Sequence: Synthetic oligonucleotide
guaguagcgcagccuacug

SEQ ID NO: 440366 - RNA, 19 nt, Artificial Sequence
  Description of Artificial Sequence: Synthetic oligonucleotide
ugagugugugcaccauagu

SEQ ID NO: 440367 - RNA, 19 nt, Artificial Sequence
  Description of Artificial Sequence: Synthetic oligonucleotide
uaggcgugucgguaguucu

SEQ ID NO: 440368 - RNA, 19 nt, Artificial Sequence
  Description of Artificial Sequence: Synthetic oligonucleotide
accgacaccagaaccagga

SEQ ID NO: 440369 - RNA, 19 nt, Artificial Sequence
  Description of Artificial Sequence: Synthetic oligonucleotide
guuguaggcguagauaugu

SEQ ID NO: 440370 - RNA, 19 nt, Artificial Sequence
  Description of Artificial Sequence: Synthetic oligonucleotide
aacugccgggcguauuggu

SEQ ID NO: 440371 - RNA, 19 nt, Artificial Sequence
  Description of Artificial Sequence: Synthetic oligonucleotide
uccauuacgcucgucccuc

SEQ ID NO: 440372 - RNA, 19 nt, Artificial Sequence
  Description of Artificial Sequence: Synthetic oligonucleotide
guagagggccucgcaagcg

SEQ ID NO: 440373 - RNA, 19 nt, Artificial Sequence
  Description of Artificial Sequence: Synthetic oligonucleotide
agaggacaacucugcgguc

SEQ ID NO: 440374 - RNA, 19 nt, Artificial Sequence
  Description of Artificial Sequence: Synthetic oligonucleotide
augucugaaguaggauagg

SEQ ID NO: 440375 - RNA, 19 nt, Artificial Sequence
  Description of Artificial Sequence: Synthetic oligonucleotide
cugccgggcguauugguug

SEQ ID NO: 440376 - RNA, 19 nt, Artificial Sequence
  Description of Artificial Sequence: Synthetic oligonucleotide
guacugggaggguuuagca

SEQ ID NO: 440377 - RNA, 19 nt, Artificial Sequence
  Description of Artificial Sequence: Synthetic oligonucleotide
aggacuugcacaaucccau

SEQ ID NO: 440378 - RNA, 19 nt, Artificial Sequence
  Description of Artificial Sequence: Synthetic oligonucleotide
guaggcguagauauguaaa

SEQ ID NO: 440379 - RNA, 19 nt, Artificial Sequence
  Description of Artificial Sequence: Synthetic oligonucleotide
cugguuacacacgaaucuc

SEQ ID NO: 440380 - RNA, 19 nt, Artificial Sequence
  Description of Artificial Sequence: Synthetic oligonucleotide
ucguuaaagcaggucagua

SEQ ID NO: 440381 - RNA, 19 nt, Artificial Sequence
  Description of Artificial Sequence: Synthetic oligonucleotide
acggucccucccuauacug

SEQ ID NO: 440382 - RNA, 19 nt, Artificial Sequence
  Description of Artificial Sequence: Synthetic oligonucleotide
cagagugacacggugguga

SEQ ID NO: 440383 - RNA, 19 nt, Artificial Sequence
  Description of Artificial Sequence: Synthetic oligonucleotide
aacggcaauccuggucauc

SEQ ID NO: 440384 - RNA, 19 nt, Artificial Sequence
  Description of Artificial Sequence: Synthetic oligonucleotide
cagaacggcaauccugguc

SEQ ID NO: 440385 - RNA, 19 nt, Artificial Sequence
  Description of Artificial Sequence: Synthetic oligonucleotide
cagcccgucaaacagcaca

SEQ ID NO: 440386 - RNA, 19 nt, Artificial Sequence
  Description of Artificial Sequence: Synthetic oligonucleotide
gcugacagugcucgggucc

SEQ ID NO: 440387 - RNA, 19 nt, Artificial Sequence
  Description of Artificial Sequence: Synthetic oligonucleotide
aaaagucggucuagaaguu

SEQ ID NO: 440388 - RNA, 19 nt, Artificial Sequence
  Description of Artificial Sequence: Synthetic oligonucleotide
acuuacucagcccgucaaa

SEQ ID NO: 440389 - RNA, 19 nt, Artificial Sequence
  Description of Artificial Sequence: Synthetic oligonucleotide
ucuuugugcuggcccgugu

SEQ ID NO: 440390 - RNA, 19 nt, Artificial Sequence
  Description of Artificial Sequence: Synthetic oligonucleotide
aagcguaguagcgcagccu

SEQ ID NO: 440391 - RNA, 19 nt, Artificial Sequence
  Description of Artificial Sequence: Synthetic oligonucleotide
ugcuacgggcuuuggcuca

SEQ ID NO: 440392 - RNA, 19 nt, Artificial Sequence
  Description of Artificial Sequence: Synthetic oligonucleotide
cccgugugcauuauccacg

SEQ ID NO: 440393 - RNA, 19 nt, Artificial Sequence
  Description of Artificial Sequence: Synthetic oligonucleotide
cugacucggaagucaggac

SEQ ID NO: 440394 - RNA, 19 nt, Artificial Sequence
  Description of Artificial Sequence: Synthetic oligonucleotide
caggugaucgccacgccca

SEQ ID NO: 440395 - RNA, 19 nt, Artificial Sequence
  Description of Artificial Sequence: Synthetic oligonucleotide
ugcguucagcaggaggcag

SEQ ID NO: 440396 - RNA, 19 nt, Artificial Sequence
  Description of Artificial Sequence: Synthetic oligonucleotide
gaacugccgggcguauugg

SEQ ID NO: 440397 - RNA, 19 nt, Artificial Sequence
  Description of Artificial Sequence: Synthetic oligonucleotide
gcguagauauguaaagaug

SEQ ID NO: 440398 - RNA, 19 nt, Artificial Sequence
  Description of Artificial Sequence: Synthetic oligonucleotide
acgaagaucuacacauaca

SEQ ID NO: 440399 - RNA, 19 nt, Artificial Sequence
  Description of Artificial Sequence: Synthetic oligonucleotide
  modified_base (5)..(5): a, c, u, g, unknown or other
gguanagcccugauccuug

SEQ ID NO: 440400 - RNA, 19 nt, Artificial Sequence
  Description of Artificial Sequence: Synthetic oligonucleotide
agggccuugaucagguaug

SEQ ID NO: 440401 - RNA, 19 nt, Artificial Sequence
  Description of Artificial Sequence: Synthetic oligonucleotide
agcgauacaggcagcagaa

SEQ ID NO: 440402 - RNA, 19 nt, Artificial Sequence
  Description of Artificial Sequence: Synthetic oligonucleotide
aggcacuccacugggagga

SEQ ID NO: 440403 - RNA, 19 nt, Artificial Sequence
  Description of Artificial Sequence: Synthetic oligonucleotide
uuguaggcguagauaugua

SEQ ID NO: 440404 - RNA, 19 nt, Artificial Sequence
  Description of Artificial Sequence: Synthetic oligonucleotide
cgagaugaugaacugccgg

SEQ ID NO: 440405 - RNA, 19 nt, Artificial Sequence
  Description of Artificial Sequence: Synthetic oligonucleotide
aguggcugacucggaaguc

SEQ ID NO: 440406 - RNA, 19 nt, Artificial Sequence
  Description of Artificial Sequence: Synthetic oligonucleotide
agcccugauccuugccagg

SEQ ID NO: 440407 - RNA, 19 nt, Artificial Sequence
  Description of Artificial Sequence: Synthetic oligonucleotide
gaucagguauggguuguuc

SEQ ID NO: 440408 - RNA, 19 nt, Artificial Sequence
  Description of Artificial Sequence: Synthetic oligonucleotide
acgcccacugcgcuggugu

SEQ ID NO: 440409 - RNA, 19 nt, Artificial Sequence
  Description of Artificial Sequence: Synthetic oligonucleotide
acgagaugaugaacugccg

SEQ ID NO: 440410 - RNA, 19 nt, Artificial Sequence
  Description of Artificial Sequence: Synthetic oligonucleotide
uuguugcuuucugucacaa

SEQ ID NO: 440411 - RNA, 19 nt, Artificial Sequence
  Description of Artificial Sequence: Synthetic oligonucleotide
aggacaacucugcggucca

SEQ ID NO: 440412 - RNA, 19 nt, Artificial Sequence
  Description of Artificial Sequence: Synthetic oligonucleotide
aggaccaucaggagugccu

SEQ ID NO: 440413 - RNA, 19 nt, Artificial Sequence
  Description of Artificial Sequence: Synthetic oligonucleotide
cguuaaagcaggucaguac

SEQ ID NO: 440414 - RNA, 19 nt, Artificial Sequence
  Description of Artificial Sequence: Synthetic oligonucleotide
uccaggugaucgccacgcc

SEQ ID NO: 440415 - RNA, 19 nt, Artificial Sequence
  Description of Artificial Sequence: Synthetic oligonucleotide
gaguggcugacucggaagu

SEQ ID NO: 440416 - RNA, 19 nt, Artificial Sequence
  Description of Artificial Sequence: Synthetic oligonucleotide
gaucuccggcagguaaucc

SEQ ID NO: 440417 - RNA, 19 nt, Artificial Sequence
  Description of Artificial Sequence: Synthetic oligonucleotide
ggaggugagcaggauagug

SEQ ID NO: 440418 - RNA, 19 nt, Artificial Sequence
  Description of Artificial Sequence: Synthetic oligonucleotide
uggacgcgaacuugagguc

SEQ ID NO: 440419 - RNA, 19 nt, Artificial Sequence
  Description of Artificial Sequence: Synthetic oligonucleotide
uguccggcaccgacaccag

SEQ ID NO: 440420 - RNA, 19 nt, Artificial Sequence
  Description of Artificial Sequence: Synthetic oligonucleotide
cagcauaagcaggccauac

SEQ ID NO: 440421 - RNA, 19 nt, Artificial Sequence
  Description of Artificial Sequence: Synthetic oligonucleotide
aggagcgauacaggcagca

SEQ ID NO: 440422 - RNA, 19 nt, Artificial Sequence
  Description of Artificial Sequence: Synthetic oligonucleotide
caguacuggcucgaucagc

SEQ ID NO: 440423 - RNA, 19 nt, Artificial Sequence
  Description of Artificial Sequence: Synthetic oligonucleotide
auacugggcugguggucag

SEQ ID NO: 440424 - RNA, 19 nt, Artificial Sequence
  Description of Artificial Sequence: Synthetic oligonucleotide
ucagaacggcaauccuggu

SEQ ID NO: 440425 - RNA, 19 nt, Artificial Sequence
  Description of Artificial Sequence: Synthetic oligonucleotide
acgguggugacuggguugu

SEQ ID NO: 440426 - RNA, 19 nt, Artificial Sequence
  Description of Artificial Sequence: Synthetic oligonucleotide
ccggugagagagcagcugg

SEQ ID NO: 440427 - RNA, 19 nt, Artificial Sequence
  Description of Artificial Sequence: Synthetic oligonucleotide
ucaucaggcucugguuaca

SEQ ID NO: 440428 - RNA, 19 nt, Artificial Sequence
  Description of Artificial Sequence: Synthetic oligonucleotide
cccgucaaacagcacauug

SEQ ID NO: 440429 - RNA, 19 nt, Artificial Sequence
  Description of Artificial Sequence: Synthetic oligonucleotide
gcacccgaagcuccgagug

SEQ ID NO: 440430 - RNA, 19 nt, Artificial Sequence
  Description of Artificial Sequence: Synthetic oligonucleotide
  modified_base (6)..(6): a, c, u, g, unknown or other
agguanagcccugauccuu

SEQ ID NO: 440431 - RNA, 19 nt, Artificial Sequence
  Description of Artificial Sequence: Synthetic oligonucleotide
ccucgcaagcguaguagcg

SEQ ID NO: 440432 - RNA, 19 nt, Artificial Sequence
  Description of Artificial Sequence: Synthetic oligonucleotide
gcuagaguugacagagcag

SEQ ID NO: 440433 - RNA, 19 nt, Artificial Sequence
  Description of Artificial Sequence: Synthetic oligonucleotide
gcgcuggugucuuacuucc

SEQ ID NO: 440434 - RNA, 19 nt, Artificial Sequence
  Description of Artificial Sequence: Synthetic oligonucleotide
uggggccaaggacaagcuc

SEQ ID NO: 440435 - RNA, 19 nt, Artificial Sequence
  Description of Artificial Sequence: Synthetic oligonucleotide
gaagcuccgaguggcugac

SEQ ID NO: 440436 - RNA, 19 nt, Artificial Sequence
  Description of Artificial Sequence: Synthetic oligonucleotide
gggaguuuugauguagaga

SEQ ID NO: 440437 - RNA, 19 nt, Artificial Sequence
  Description of Artificial Sequence: Synthetic oligonucleotide
ggacgcgaacuugaggucc

SEQ ID NO: 440438 - RNA, 19 nt, Artificial Sequence
  Description of Artificial Sequence: Synthetic oligonucleotide
cuccucccgaagcaagaug

SEQ ID NO: 440439 - RNA, 19 nt, Artificial Sequence
  Description of Artificial Sequence: Synthetic oligonucleotide
acugcgcuggugucuuacu

SEQ ID NO: 440440 - RNA, 19 nt, Artificial Sequence
  Description of Artificial Sequence: Synthetic oligonucleotide
caccgacaccagaaccagg

SEQ ID NO: 440441 - RNA, 19 nt, Artificial Sequence
  Description of Artificial Sequence: Synthetic oligonucleotide
caccauaguggacgcgaac

SEQ ID NO: 440442 - RNA, 19 nt, Artificial Sequence
  Description of Artificial Sequence: Synthetic oligonucleotide
guaaauccucucccgcaaa

SEQ ID NO: 440443 - RNA, 19 nt, Artificial Sequence
  Description of Artificial Sequence: Synthetic oligonucleotide
ggcgugucgguaguucugg

SEQ ID NO: 440444 - RNA, 19 nt, Artificial Sequence
  Description of Artificial Sequence: Synthetic oligonucleotide
caggaucuggaagagccca

SEQ ID NO: 440445 - RNA, 19 nt, Artificial Sequence
  Description of Artificial Sequence: Synthetic oligonucleotide
ugugcuggcccgugugcau

SEQ ID NO: 440446 - RNA, 19 nt, Artificial Sequence
  Description of Artificial Sequence: Synthetic oligonucleotide
gggucauccgucuggccug

SEQ ID NO: 440447 - RNA, 19 nt, Artificial Sequence
  Description of Artificial Sequence: Synthetic oligonucleotide
gugugccggaacaucuugc

SEQ ID NO: 440448 - RNA, 19 nt, Artificial Sequence
  Description of Artificial Sequence: Synthetic oligonucleotide
agucggucuagaaguucag

SEQ ID NO: 440449 - RNA, 19 nt, Artificial Sequence
  Description of Artificial Sequence: Synthetic oligonucleotide
cucggguccaggcacucca

SEQ ID NO: 440450 - RNA, 19 nt, Artificial Sequence
  Description of Artificial Sequence: Synthetic oligonucleotide
caacuuacucagcccguca

SEQ ID NO: 440451 - RNA, 19 nt, Artificial Sequence
  Description of Artificial Sequence: Synthetic oligonucleotide
ucccauccagguguagggu

SEQ ID NO: 440452 - RNA, 19 nt, Artificial Sequence
  Description of Artificial Sequence: Synthetic oligonucleotide
gagcuagaguugacagagc

SEQ ID NO: 440453 - RNA, 19 nt, Artificial Sequence
  Description of Artificial Sequence: Synthetic oligonucleotide
gcuccgaguggcugacucg

SEQ ID NO: 440454 - RNA, 19 nt, Artificial Sequence
  Description of Artificial Sequence: Synthetic oligonucleotide
gugacacgguggugacugg

SEQ ID NO: 440455 - RNA, 19 nt, Artificial Sequence
  Description of Artificial Sequence: Synthetic oligonucleotide
ugccgggcguauugguugu

SEQ ID NO: 440456 - RNA, 19 nt, Artificial Sequence
  Description of Artificial Sequence: Synthetic oligonucleotide
ccaggugaucgccacgccc

SEQ ID NO: 440457 - RNA, 19 nt, Artificial Sequence
  Description of Artificial Sequence: Synthetic oligonucleotide
cuuuucacgacaggcacau

SEQ ID NO: 440458 - RNA, 19 nt, Artificial Sequence
  Description of Artificial Sequence: Synthetic oligonucleotide
guggcaccaggagcgauac

SEQ ID NO: 440459 - RNA, 19 nt, Artificial Sequence
  Description of Artificial Sequence: Synthetic oligonucleotide
ucgccacgcccacugcgcu

SEQ ID NO: 440460 - RNA, 19 nt, Artificial Sequence
  Description of Artificial Sequence: Synthetic oligonucleotide
cugggugcuucaugggcca

SEQ ID NO: 440461 - RNA, 19 nt, Artificial Sequence
  Description of Artificial Sequence: Synthetic oligonucleotide
ggccucgcaagcguaguag

SEQ ID NO: 440462 - RNA, 19 nt, Artificial Sequence
  Description of Artificial Sequence: Synthetic oligonucleotide
gcaagcguaguagcgcagc

SEQ ID NO: 440463 - RNA, 19 nt, Artificial Sequence
  Description of Artificial Sequence: Synthetic oligonucleotide
gccucgcaagcguaguagc

SEQ ID NO: 440464 - RNA, 19 nt, Artificial Sequence
  Description of Artificial Sequence: Synthetic oligonucleotide
ccaugccagugcuuugggg

SEQ ID NO: 440465 - RNA, 19 nt, Artificial Sequence
  Description of Artificial Sequence: Synthetic oligonucleotide
guuacacacgaaucucuuu

SEQ ID NO: 440466 - RNA, 19 nt, Artificial Sequence
  Description of Artificial Sequence: Synthetic oligonucleotide
agcccgucaaacagcacau

SEQ ID NO: 440467 - RNA, 19 nt, Artificial Sequence
  Description of Artificial Sequence: Synthetic oligonucleotide
uacgcucgucccuccugcu

SEQ ID NO: 440468 - RNA, 19 nt, Artificial Sequence
  Description of Artificial Sequence: Synthetic oligonucleotide
ccucccuauacugggcugg

SEQ ID NO: 440469 - RNA, 19 nt, Artificial Sequence
  Description of Artificial Sequence: Synthetic oligonucleotide
cacugcgcuggugucuuac

SEQ ID NO: 440470 - RNA, 19 nt, Artificial Sequence
  Description of Artificial Sequence: Synthetic oligonucleotide
uggaggugagcaggauagu

SEQ ID NO: 440471 - RNA, 19 nt, Artificial Sequence
  Description of Artificial Sequence: Synthetic oligonucleotide
cuggagccggugagagagc

SEQ ID NO: 440472 - RNA, 19 nt, Artificial Sequence
  Description of Artificial Sequence: Synthetic oligonucleotide
ucccuauacugggcuggug

SEQ ID NO: 440473 - RNA, 19 nt, Artificial Sequence
  Description of Artificial Sequence: Synthetic oligonucleotide
gccauagaguggaagaugu

SEQ ID NO: 440474 - RNA, 19 nt, Artificial Sequence
  Description of Artificial Sequence: Synthetic oligonucleotide
ggucaguacuggcucgauc

SEQ ID NO: 440475 - RNA, 19 nt, Artificial Sequence
  Description of Artificial Sequence: Synthetic oligonucleotide
gagugccugggucauccgu

SEQ ID NO: 440476 - RNA, 19 nt, Artificial Sequence
  Description of Artificial Sequence: Synthetic oligonucleotide
uuauuggggcagggaugga

SEQ ID NO: 440477 - RNA, 19 nt, Artificial Sequence
  Description of Artificial Sequence: Synthetic oligonucleotide
ugcggggaguuuugaugua

SEQ ID NO: 440478 - RNA, 19 nt, Artificial Sequence
  Description of Artificial Sequence: Synthetic oligonucleotide
cucggaagucaggaccauc

SEQ ID NO: 440479 - RNA, 19 nt, Artificial Sequence
  Description of Artificial Sequence: Synthetic oligonucleotide
gacggucccucccuauacu

SEQ ID NO: 440480 - RNA, 19 nt, Artificial Sequence
  Description of Artificial Sequence: Synthetic oligonucleotide
gcggggaguuuugauguag

SEQ ID NO: 440481 - RNA, 19 nt, Artificial Sequence
  Description of Artificial Sequence: Synthetic oligonucleotide
  modified_base (7)..(7): a, c, u, g, unknown or other
cagguanagcccugauccu

SEQ ID NO: 440482 - RNA, 19 nt, Artificial Sequence
  Description of Artificial Sequence: Synthetic oligonucleotide
cgaagaucuacacauacau

SEQ ID NO: 440483 - RNA, 19 nt, Artificial Sequence
  Description of Artificial Sequence: Synthetic oligonucleotide
aggcgugucgguaguucug

SEQ ID NO: 440484 - RNA, 19 nt, Artificial Sequence
  Description of Artificial Sequence: Synthetic oligonucleotide
cgaguggcugacucggaag

SEQ ID NO: 440485 - RNA, 19 nt, Artificial Sequence
  Description of Artificial Sequence: Synthetic oligonucleotide
gccacgcccacugcgcugg

SEQ ID NO: 440486 - RNA, 19 nt, Artificial Sequence
  Description of Artificial Sequence: Synthetic oligonucleotide
cugggugaggaaacagagu

SEQ ID NO: 440487 - RNA, 19 nt, Artificial Sequence
  Description of Artificial Sequence: Synthetic oligonucleotide
cgggcguauugguuguugg

SEQ ID NO: 440488 - RNA, 19 nt, Artificial Sequence
  Description of Artificial Sequence: Synthetic oligonucleotide
gucccucccuauacugggc

SEQ ID NO: 440489 - RNA, 19 nt, Artificial Sequence
  Description of Artificial Sequence: Synthetic oligonucleotide
  modified_base (10)..(10): a, c, u, g, unknown or other
cuucagguanagcccugau

SEQ ID NO: 440490 - RNA, 19 nt, Artificial Sequence
  Description of Artificial Sequence: Synthetic oligonucleotide
gcguauugguuguuggagu

SEQ ID NO: 440491 - RNA, 19 nt, Artificial Sequence
  Description of Artificial Sequence: Synthetic oligonucleotide
uuuucacgacaggcacauc

SEQ ID NO: 440492 - RNA, 19 nt, Artificial Sequence
  Description of Artificial Sequence: Synthetic oligonucleotide
ccagcaguuguaggcguag

SEQ ID NO: 440493 - RNA, 19 nt, Artificial Sequence
  Description of Artificial Sequence: Synthetic oligonucleotide
ccuuuucacgacaggcaca

SEQ ID NO: 440494 - RNA, 19 nt, Artificial Sequence
  Description of Artificial Sequence: Synthetic oligonucleotide
acugccgggcguauugguu

SEQ ID NO: 440495 - RNA, 19 nt, Artificial Sequence
  Description of Artificial Sequence: Synthetic oligonucleotide
gcgugucgguaguucuggg

SEQ ID NO: 440496 - RNA, 19 nt, Artificial Sequence
  Description of Artificial Sequence: Synthetic oligonucleotide
cuccauuacgcucgucccu

SEQ ID NO: 440497 - RNA, 19 nt, Artificial Sequence
  Description of Artificial Sequence: Synthetic oligonucleotide
gucuuacuuccaggugcug

SEQ ID NO: 440498 - RNA, 19 nt, Artificial Sequence
  Description of Artificial Sequence: Synthetic oligonucleotide
agggccucgcaagcguagu

SEQ ID NO: 440499 - RNA, 19 nt, Artificial Sequence
  Description of Artificial Sequence: Synthetic oligonucleotide
cggucccucccuauacugg

SEQ ID NO: 440500 - RNA, 19 nt, Artificial Sequence
  Description of Artificial Sequence: Synthetic oligonucleotide
cuggcccgugugcauuauc

SEQ ID NO: 440501 - RNA, 19 nt, Artificial Sequence
  Description of Artificial Sequence: Synthetic oligonucleotide
acgcgaacuugagguccuc

SEQ ID NO: 440502 - RNA, 19 nt, Artificial Sequence
  Description of Artificial Sequence: Synthetic oligonucleotide
acaaucccauccaggugua

SEQ ID NO: 440503 - RNA, 19 nt, Artificial Sequence
  Description of Artificial Sequence: Synthetic oligonucleotide
gacgcgaacuugagguccu

SEQ ID NO: 440504 - RNA, 19 nt, Artificial Sequence
  Description of Artificial Sequence: Synthetic oligonucleotide
caggucaguacuggcucga

SEQ ID NO: 440505 - RNA, 19 nt, Artificial Sequence
  Description of Artificial Sequence: Synthetic oligonucleotide
ccaacuuacucagcccguc

SEQ ID NO: 440506 - RNA, 19 nt, Artificial Sequence
  Description of Artificial Sequence: Synthetic oligonucleotide
gggcacccgaagcuccgag

SEQ ID NO: 440507 - RNA, 19 nt, Artificial Sequence
  Description of Artificial Sequence: Synthetic oligonucleotide
gcgauacaggcagcagaag

SEQ ID NO: 440508 - RNA, 19 nt, Artificial Sequence
  Description of Artificial Sequence: Synthetic oligonucleotide
cagacggucccucccuaua

SEQ ID NO: 440509 - RNA, 19 nt, Artificial Sequence
  Description of Artificial Sequence: Synthetic oligonucleotide
gguggcaguucaggacuug

SEQ ID NO: 440510 - RNA, 19 nt, Artificial Sequence
  Description of Artificial Sequence: Synthetic oligonucleotide
ccgugugcauuauccacga

SEQ ID NO: 440511 - RNA, 19 nt, Artificial Sequence
  Description of Artificial Sequence: Synthetic oligonucleotide
ugcucggguccaggcacuc

SEQ ID NO: 440512 - RNA, 19 nt, Artificial Sequence
  Description of Artificial Sequence: Synthetic oligonucleotide
ggaaacagagugacacggu

SEQ ID NO: 440513 - RNA, 19 nt, Artificial Sequence
  Description of Artificial Sequence: Synthetic oligonucleotide
aggucaguacuggcucgau

SEQ ID NO: 440514 - RNA, 19 nt, Artificial Sequence
  Description of Artificial Sequence: Synthetic oligonucleotide
agccuacugucugcaucgu

SEQ ID NO: 440515 - RNA, 19 nt, Artificial Sequence
  Description of Artificial Sequence: Synthetic oligonucleotide
cccugauccuugccagggc

SEQ ID NO: 440516 - RNA, 19 nt, Artificial Sequence
  Description of Artificial Sequence: Synthetic oligonucleotide
cagggcgauagagcaggca

SEQ ID NO: 440517 - RNA, 19 nt, Artificial Sequence
  Description of Artificial Sequence: Synthetic oligonucleotide
gaacggcaauccuggucau

SEQ ID NO: 440518 - RNA, 19 nt, Artificial Sequence
  Description of Artificial Sequence: Synthetic oligonucleotide
gauccuugccagggcgaua

SEQ ID NO: 440519 - RNA, 19 nt, Artificial Sequence
  Description of Artificial Sequence: Synthetic oligonucleotide
cauuacgcucgucccuccu

SEQ ID NO: 440520 - RNA, 19 nt, Artificial Sequence
  Description of Artificial Sequence: Synthetic oligonucleotide
guagcgcagccuacugucu

SEQ ID NO: 440521 - RNA, 19 nt, Artificial Sequence
  Description of Artificial Sequence: Synthetic oligonucleotide
ggacaacucugcgguccag

SEQ ID NO: 440522 - RNA, 19 nt, Artificial Sequence
  Description of Artificial Sequence: Synthetic oligonucleotide
ggcaauccuggucaucauu

SEQ ID NO: 440523 - RNA, 19 nt, Artificial Sequence
  Description of Artificial Sequence: Synthetic oligonucleotide
ccuauacugggcugguggu

SEQ ID NO: 440524 - RNA, 19 nt, Artificial Sequence
  Description of Artificial Sequence: Synthetic oligonucleotide
  modified_base (11)..(11): a, c, u, g, unknown or other
ccuucagguanagcccuga

SEQ ID NO: 440525 - RNA, 19 nt, Artificial Sequence
  Description of Artificial Sequence: Synthetic oligonucleotide
ccgaagcuccgaguggcug

SEQ ID NO: 440526 - RNA, 19 nt, Artificial Sequence
  Description of Artificial Sequence: Synthetic oligonucleotide
ccagggcgauagagcaggc

SEQ ID NO: 440527 - RNA, 19 nt, Artificial Sequence
  Description of Artificial Sequence: Synthetic oligonucleotide
cgcaagcguaguagcgcag

SEQ ID NO: 440528 - RNA, 19 nt, Artificial Sequence
  Description of Artificial Sequence: Synthetic oligonucleotide
gagugacacgguggugacu

SEQ ID NO: 440529 - RNA, 19 nt, Artificial Sequence
  Description of Artificial Sequence: Synthetic oligonucleotide
cacgaaucucuuugccauu

SEQ ID NO: 440530 - RNA, 19 nt, Artificial Sequence
  Description of Artificial Sequence: Synthetic oligonucleotide
ggaacuccauuacgcucgu

SEQ ID NO: 440531 - RNA, 19 nt, Artificial Sequence
  Description of Artificial Sequence: Synthetic oligonucleotide
ggcacuccacugggaggag

SEQ ID NO: 440532 - RNA, 19 nt, Artificial Sequence
  Description of Artificial Sequence: Synthetic oligonucleotide
ccgggcguauugguuguug

SEQ ID NO: 440533 - RNA, 19 nt, Artificial Sequence
  Description of Artificial Sequence: Synthetic oligonucleotide
gcguaguagcgcagccuac

SEQ ID NO: 440534 - RNA, 19 nt, Artificial Sequence
  Description of Artificial Sequence: Synthetic oligonucleotide
cugcgcuggugucuuacuu

SEQ ID NO: 440535 - RNA, 19 nt, Artificial Sequence
  Description of Artificial Sequence: Synthetic oligonucleotide
ggcacccgaagcuccgagu

SEQ ID NO: 440536 - RNA, 19 nt, Artificial Sequence
  Description of Artificial Sequence: Synthetic oligonucleotide
cucccuauacugggcuggu

SEQ ID NO: 440537 - RNA, 19 nt, Artificial Sequence
  Description of Artificial Sequence: Synthetic oligonucleotide
ccaggauccacgagaugau

SEQ ID NO: 440538 - RNA, 19 nt, Artificial Sequence
  Description of Artificial Sequence: Synthetic oligonucleotide
gggccucgcaagcguagua

SEQ ID NO: 440539 - RNA, 19 nt, Artificial Sequence
  Description of Artificial Sequence: Synthetic oligonucleotide
gccaacuuacucagcccgu

SEQ ID NO: 440540 - RNA, 19 nt, Artificial Sequence
  Description of Artificial Sequence: Synthetic oligonucleotide
ccauaguggacgcgaacuu

SEQ ID NO: 440541 - RNA, 19 nt, Artificial Sequence
  Description of Artificial Sequence: Synthetic oligonucleotide
cauaggcgugucgguaguu

SEQ ID NO: 440542 - RNA, 19 nt, Artificial Sequence
  Description of Artificial Sequence: Synthetic oligonucleotide
cguaguagcgcagccuacu

SEQ ID NO: 440543 - RNA, 19 nt, Artificial Sequence
  Description of Artificial Sequence: Synthetic oligonucleotide
gcgccucgggccacuuuga

SEQ ID NO: 440544 - RNA, 19 nt, Artificial Sequence
  Description of Artificial Sequence: Synthetic oligonucleotide
ccggaacaucuugcgggga

SEQ ID NO: 440545 - RNA, 19 nt, Artificial Sequence
  Description of Artificial Sequence: Synthetic oligonucleotide
cacagcgccucgggccacu

SEQ ID NO: 440546 - RNA, 19 nt, Artificial Sequence
  Description of Artificial Sequence: Synthetic oligonucleotide
gcuacgggcuuuggcucau

SEQ ID NO: 440547 - RNA, 19 nt, Artificial Sequence
  Description of Artificial Sequence: Synthetic oligonucleotide
ccgacaccagaaccaggau

SEQ ID NO: 440548 - RNA, 19 nt, Artificial Sequence
  Description of Artificial Sequence: Synthetic oligonucleotide
cgugugcauuauccacgaa

SEQ ID NO: 440549 - RNA, 19 nt, Artificial Sequence
  Description of Artificial Sequence: Synthetic oligonucleotide
gcuccggguugggcacaca

SEQ ID NO: 440550 - RNA, 19 nt, Artificial Sequence
  Description of Artificial Sequence: Synthetic oligonucleotide
gcccgucaaacagcacauu

SEQ ID NO: 440551 - RNA, 19 nt, Artificial Sequence
  Description of Artificial Sequence: Synthetic oligonucleotide
ccacugcgcuggugucuua

SEQ ID NO: 440552 - RNA, 19 nt, Artificial Sequence
  Description of Artificial Sequence: Synthetic oligonucleotide
cggcaauccuggucaucau

SEQ ID NO: 440553 - RNA, 19 nt, Artificial Sequence
  Description of Artificial Sequence: Synthetic oligonucleotide
gccgggcguauugguuguu

SEQ ID NO: 440554 - RNA, 19 nt, Artificial Sequence
  Description of Artificial Sequence: Synthetic oligonucleotide
ugcaauacaagucugcacg

SEQ ID NO: 440555 - RNA, 19 nt, Artificial Sequence
  Description of Artificial Sequence: Synthetic oligonucleotide
aguaccacaagacagacag

SEQ ID NO: 440556 - RNA, 19 nt, Artificial Sequence
  Description of Artificial Sequence: Synthetic oligonucleotide
uaacauagauguaucaggg

SEQ ID NO: 440557 - RNA, 19 nt, Artificial Sequence
  Description of Artificial Sequence: Synthetic oligonucleotide
uuaaauuauccucacauuc

SEQ ID NO: 440558 - RNA, 19 nt, Artificial Sequence
  Description of Artificial Sequence: Synthetic oligonucleotide
guaacauagauguaucagg

SEQ ID NO: 440559 - RNA, 19 nt, Artificial Sequence
  Description of Artificial Sequence: Synthetic oligonucleotide
ugucauguccauauaaggc

SEQ ID NO: 440560 - RNA, 19 nt, Artificial Sequence
  Description of Artificial Sequence: Synthetic oligonucleotide
uucagauacauaaggcagg

SEQ ID NO: 440561 - RNA, 19 nt, Artificial Sequence
  Description of Artificial Sequence: Synthetic oligonucleotide
gaagugguaacauagaugu

SEQ ID NO: 440562 - RNA, 19 nt, Artificial Sequence
  Description of Artificial Sequence: Synthetic oligonucleotide
uggaugcucacaaagcacg

SEQ ID NO: 440563 - RNA, 19 nt, Artificial Sequence
  Description of Artificial Sequence: Synthetic oligonucleotide
agaaauaaggcugagggug

SEQ ID NO: 440564 - RNA, 19 nt, Artificial Sequence
  Description of Artificial Sequence: Synthetic oligonucleotide
uacuaagaaaguaaaagua

SEQ ID NO: 440565 - RNA, 19 nt, Artificial Sequence
  Description of Artificial Sequence: Synthetic oligonucleotide
aagcaguccuuucuugucc

SEQ ID NO: 440566 - RNA, 19 nt, Artificial Sequence
  Description of Artificial Sequence: Synthetic oligonucleotide
aaagccaagccaaagguag

SEQ ID NO: 440567 - RNA, 19 nt, Artificial Sequence
  Description of Artificial Sequence: Synthetic oligonucleotide
auaugucauagguugcugc

SEQ ID NO: 440568 - RNA, 19 nt, Artificial Sequence
  Description of Artificial Sequence: Synthetic oligonucleotide
auagaugccauuagcaccc

SEQ ID NO: 440569 - RNA, 19 nt, Artificial Sequence
  Description of Artificial Sequence: Synthetic oligonucleotide
agaccagcauagcagaacc

SEQ ID NO: 440570 - RNA, 19 nt, Artificial Sequence
  Description of Artificial Sequence: Synthetic oligonucleotide
aguaaagcugugcaccagc

SEQ ID NO: 440571 - RNA, 19 nt, Artificial Sequence
  Description of Artificial Sequence: Synthetic oligonucleotide
auauacccaguuuacagag

SEQ ID NO: 440572 - RNA, 19 nt, Artificial Sequence
  Description of Artificial Sequence: Synthetic oligonucleotide
agcuauagaugccauuagc

SEQ ID NO: 440573 - RNA, 19 nt, Artificial Sequence
  Description of Artificial Sequence: Synthetic oligonucleotide
caucagagaaauaaggcug

SEQ ID NO: 440574 - RNA, 19 nt, Artificial Sequence
  Description of Artificial Sequence: Synthetic oligonucleotide
ucacuauguucccaggacg

SEQ ID NO: 440575 - RNA, 19 nt, Artificial Sequence
  Description of Artificial Sequence: Synthetic oligonucleotide
cugugaacaucaaacaagc

SEQ ID NO: 440576 - RNA, 19 nt, Artificial Sequence
  Description of Artificial Sequence: Synthetic oligonucleotide
uguugagaucccaauaugu

SEQ ID NO: 440577 - RNA, 19 nt, Artificial Sequence
  Description of Artificial Sequence: Synthetic oligonucleotide
ucaucgguuacucggacgc

SEQ ID NO: 440578 - RNA, 19 nt, Artificial Sequence
  Description of Artificial Sequence: Synthetic oligonucleotide
ugcagcuagcuucagauac

SEQ ID NO: 440579 - RNA, 19 nt, Artificial Sequence
  Description of Artificial Sequence: Synthetic oligonucleotide
auacccaguuuacagaguc

SEQ ID NO: 440580 - RNA, 19 nt, Artificial Sequence
  Description of Artificial Sequence: Synthetic oligonucleotide
ugagguauccagaacagau

SEQ ID NO: 440581 - RNA, 19 nt, Artificial Sequence
  Description of Artificial Sequence: Synthetic oligonucleotide
aucacacuuagccagggag

SEQ ID NO: 440582 - RNA, 19 nt, Artificial Sequence
  Description of Artificial Sequence: Synthetic oligonucleotide
aauagcaccaugguaagaa

SEQ ID NO: 440583 - RNA, 19 nt, Artificial Sequence
  Description of Artificial Sequence: Synthetic oligonucleotide
cacgcugugaacaucaaac

SEQ ID NO: 440584 - RNA, 19 nt, Artificial Sequence
  Description of Artificial Sequence: Synthetic oligonucleotide
aggguuacaaggcuacugg

SEQ ID NO: 440585 - RNA, 19 nt, Artificial Sequence
  Description of Artificial Sequence: Synthetic oligonucleotide
uugagaucccaauauguca

SEQ ID NO: 440586 - RNA, 19 nt, Artificial Sequence
  Description of Artificial Sequence: Synthetic oligonucleotide
uccuguaucgugucagugg

SEQ ID NO: 440587 - RNA, 19 nt, Artificial Sequence
  Description of Artificial Sequence: Synthetic oligonucleotide
aguaccugcuuccuguggg

SEQ ID NO: 440588 - RNA, 19 nt, Artificial Sequence
  Description of Artificial Sequence: Synthetic oligonucleotide
aaugccauaggcugcccug

SEQ ID NO: 440589 - RNA, 19 nt, Artificial Sequence
  Description of Artificial Sequence: Synthetic oligonucleotide
uguguguguguguggaugg

SEQ ID NO: 440590 - RNA, 19 nt, Artificial Sequence
  Description of Artificial Sequence: Synthetic oligonucleotide
cuuggauccuucuccaucc

SEQ ID NO: 440591 - RNA, 19 nt, Artificial Sequence
  Description of Artificial Sequence: Synthetic oligonucleotide
aucccaauaugucauaggu

SEQ ID NO: 440592 - RNA, 19 nt, Artificial Sequence
  Description of Artificial Sequence: Synthetic oligonucleotide
gugucauguccauauaagg

SEQ ID NO: 440593 - RNA, 19 nt, Artificial Sequence
  Description of Artificial Sequence: Synthetic oligonucleotide
cagaauagcaccaugguaa

SEQ ID NO: 440594 - RNA, 19 nt, Artificial Sequence
  Description of Artificial Sequence: Synthetic oligonucleotide
uggccuauguaccacuucc

SEQ ID NO: 440595 - RNA, 19 nt, Artificial Sequence
  Description of Artificial Sequence: Synthetic oligonucleotide
agaucaugcaauacaaguc

SEQ ID NO: 440596 - RNA, 19 nt, Artificial Sequence
  Description of Artificial Sequence: Synthetic oligonucleotide
ucaugcaauacaagucugc

SEQ ID NO: 440597 - RNA, 19 nt, Artificial Sequence
  Description of Artificial Sequence: Synthetic oligonucleotide
ugagaucccaauaugucau

SEQ ID NO: 440598 - RNA, 19 nt, Artificial Sequence
  Description of Artificial Sequence: Synthetic oligonucleotide
uucucuagguuucuucccc

SEQ ID NO: 440599 - RNA, 19 nt, Artificial Sequence
  Description of Artificial Sequence: Synthetic oligonucleotide
uguaugguaaaggacugug

SEQ ID NO: 440600 - RNA, 19 nt, Artificial Sequence
  Description of Artificial Sequence: Synthetic oligonucleotide
cucaguaaagcugugcacc

SEQ ID NO: 440601 - RNA, 19 nt, Artificial Sequence
  Description of Artificial Sequence: Synthetic oligonucleotide
uuagcacccagcaccaccc

SEQ ID NO: 440602 - RNA, 19 nt, Artificial Sequence
  Description of Artificial Sequence: Synthetic oligonucleotide
gaggcgauugugcagcuag

SEQ ID NO: 440603 - RNA, 19 nt, Artificial Sequence
  Description of Artificial Sequence: Synthetic oligonucleotide
gaucccaauaugucauagg

SEQ ID NO: 440604 - RNA, 19 nt, Artificial Sequence
  Description of Artificial Sequence: Synthetic oligonucleotide
uuaguuuacuaagaaagua

SEQ ID NO: 440605 - RNA, 19 nt, Artificial Sequence
  Description of Artificial Sequence: Synthetic oligonucleotide
uccauguaugguaaaggac

SEQ ID NO: 440606 - RNA, 19 nt, Artificial Sequence
  Description of Artificial Sequence: Synthetic oligonucleotide
cucgggauagcccugguag

SEQ ID NO: 440607 - RNA, 19 nt, Artificial Sequence
  Description of Artificial Sequence: Synthetic oligonucleotide
aaauaaggcugaggguggc

SEQ ID NO: 440608 - RNA, 19 nt, Artificial Sequence
  Description of Artificial Sequence: Synthetic oligonucleotide
aagagugcugugcgguugg

SEQ ID NO: 440609 - RNA, 19 nt, Artificial Sequence
  Description of Artificial Sequence: Synthetic oligonucleotide
augcaauacaagucugcac

SEQ ID NO: 440610 - RNA, 19 nt, Artificial Sequence
  Description of Artificial Sequence: Synthetic oligonucleotide
cccaauaugucauagguug

SEQ ID NO: 440611 - RNA, 19 nt, Artificial Sequence
  Description of Artificial Sequence: Synthetic oligonucleotide
ucaauguacaugugugugu

SEQ ID NO: 440612 - RNA, 19 nt, Artificial Sequence
  Description of Artificial Sequence: Synthetic oligonucleotide
gagaucaugcaauacaagu

SEQ ID NO: 440613 - RNA, 19 nt, Artificial Sequence
  Description of Artificial Sequence: Synthetic oligonucleotide
ugagaaccagggaaacuag

SEQ ID NO: 440614 - RNA, 19 nt, Artificial Sequence
  Description of Artificial Sequence: Synthetic oligonucleotide
acuaagaaaguaaaaguaa

SEQ ID NO: 440615 - RNA, 19 nt, Artificial Sequence
  Description of Artificial Sequence: Synthetic oligonucleotide
aaagccaagaggcgauugu

SEQ ID NO: 440616 - RNA, 19 nt, Artificial Sequence
  Description of Artificial Sequence: Synthetic oligonucleotide
agaauagcaccaugguaag

SEQ ID NO: 440617 - RNA, 19 nt, Artificial Sequence
  Description of Artificial Sequence: Synthetic oligonucleotide
uccauauaaggccgcagga

SEQ ID NO: 440618 - RNA, 19 nt, Artificial Sequence
  Description of Artificial Sequence: Synthetic oligonucleotide
uuccuuugaagaaugggua

SEQ ID NO: 440619 - RNA, 19 nt, Artificial Sequence
  Description of Artificial Sequence: Synthetic oligonucleotide
gaaccagggaaacuaguac

SEQ ID NO: 440620 - RNA, 19 nt, Artificial Sequence
  Description of Artificial Sequence: Synthetic oligonucleotide
gccauuagcacccagcacc

SEQ ID NO: 440621 - RNA, 19 nt, Artificial Sequence
  Description of Artificial Sequence: Synthetic oligonucleotide
auugaggcucaacacaggu

SEQ ID NO: 440622 - RNA, 19 nt, Artificial Sequence
  Description of Artificial Sequence: Synthetic oligonucleotide
cacggucacccauagagcc

SEQ ID NO: 440623 - RNA, 19 nt, Artificial Sequence
  Description of Artificial Sequence: Synthetic oligonucleotide
ugugaacaucaaacaagcc

SEQ ID NO: 440624 - RNA, 19 nt, Artificial Sequence
  Description of Artificial Sequence: Synthetic oligonucleotide
ucaguaaagcugugcacca

SEQ ID NO: 440625 - RNA, 19 nt, Artificial Sequence
  Description of Artificial Sequence: Synthetic oligonucleotide
ucacauugaggcucaacac

SEQ ID NO: 440626 - RNA, 19 nt, Artificial Sequence
  Description of Artificial Sequence: Synthetic oligonucleotide
agagacuuggaccuccaca

SEQ ID NO: 440627 - RNA, 19 nt, Artificial Sequence
  Description of Artificial Sequence: Synthetic oligonucleotide
uugcguaccaggcagcuau

SEQ ID NO: 440628 - RNA, 19 nt, Artificial Sequence
  Description of Artificial Sequence: Synthetic oligonucleotide
auauaaggccgcaggaugg

SEQ ID NO: 440629 - RNA, 19 nt, Artificial Sequence
  Description of Artificial Sequence: Synthetic oligonucleotide
ucagccucgggauagcccu

SEQ ID NO: 440630 - RNA, 19 nt, Artificial Sequence
  Description of Artificial Sequence: Synthetic oligonucleotide
aaggcuacuggaugacucu

SEQ ID NO: 440631 - RNA, 19 nt, Artificial Sequence
  Description of Artificial Sequence: Synthetic oligonucleotide
agguggaucggucugugug

SEQ ID NO: 440632 - RNA, 19 nt, Artificial Sequence
  Description of Artificial Sequence: Synthetic oligonucleotide
acauugaggcucaacacag

SEQ ID NO: 440633 - RNA, 19 nt, Artificial Sequence
  Description of Artificial Sequence: Synthetic oligonucleotide
uuuuccuccagcacacaaa

SEQ ID NO: 440634 - RNA, 19 nt, Artificial Sequence
  Description of Artificial Sequence: Synthetic oligonucleotide
agaagugguaacauagaug

SEQ ID NO: 440635 - RNA, 19 nt, Artificial Sequence
  Description of Artificial Sequence: Synthetic oligonucleotide
acucggacgcgcugcagcc

SEQ ID NO: 440636 - RNA, 19 nt, Artificial Sequence
  Description of Artificial Sequence: Synthetic oligonucleotide
aacuaguaccugcuuccug

SEQ ID NO: 440637 - RNA, 19 nt, Artificial Sequence
  Description of Artificial Sequence: Synthetic oligonucleotide
ugguaacauagauguauca

SEQ ID NO: 440638 - RNA, 19 nt, Artificial Sequence
  Description of Artificial Sequence: Synthetic oligonucleotide
auguuaguuuacuaagaaa

SEQ ID NO: 440639 - RNA, 19 nt, Artificial Sequence
  Description of Artificial Sequence: Synthetic oligonucleotide
ucgaguagggagcugccac

SEQ ID NO: 440640 - RNA, 19 nt, Artificial Sequence
  Description of Artificial Sequence: Synthetic oligonucleotide
aaaagccaagaggcgauug

SEQ ID NO: 440641 - RNA, 19 nt, Artificial Sequence
  Description of Artificial Sequence: Synthetic oligonucleotide
caggaugguuccuguaucg

SEQ ID NO: 440642 - RNA, 19 nt, Artificial Sequence
  Description of Artificial Sequence: Synthetic oligonucleotide
acgggauccacacucguca

SEQ ID NO: 440643 - RNA, 19 nt, Artificial Sequence
  Description of Artificial Sequence: Synthetic oligonucleotide
uacaugugugugugugugg

SEQ ID NO: 440644 - RNA, 19 nt, Artificial Sequence
  Description of Artificial Sequence: Synthetic oligonucleotide
acacucgucagaacaaagg

SEQ ID NO: 440645 - RNA, 19 nt, Artificial Sequence
  Description of Artificial Sequence: Synthetic oligonucleotide
uguaucgugucaguggaaa

SEQ ID NO: 440646 - RNA, 19 nt, Artificial Sequence
  Description of Artificial Sequence: Synthetic oligonucleotide
cuagguuucuuccccuacc

SEQ ID NO: 440647 - RNA, 19 nt, Artificial Sequence
  Description of Artificial Sequence: Synthetic oligonucleotide
uguguguguguggaugggg

SEQ ID NO: 440648 - RNA, 19 nt, Artificial Sequence
  Description of Artificial Sequence: Synthetic oligonucleotide
aucgguuacucggacgcgc

SEQ ID NO: 440649 - RNA, 19 nt, Artificial Sequence
  Description of Artificial Sequence: Synthetic oligonucleotide
acaagucugcacgcguucc

SEQ ID NO: 440650 - RNA, 19 nt, Artificial Sequence
  Description of Artificial Sequence: Synthetic oligonucleotide
gcugugaacaucaaacaag

SEQ ID NO: 440651 - RNA, 19 nt, Artificial Sequence
  Description of Artificial Sequence: Synthetic oligonucleotide
gaauggguagaccagcaua

SEQ ID NO: 440652 - RNA, 19 nt, Artificial Sequence
  Description of Artificial Sequence: Synthetic oligonucleotide
uguacaugugugugugugu

SEQ ID NO: 440653 - RNA, 19 nt, Artificial Sequence
  Description of Artificial Sequence: Synthetic oligonucleotide
agaggagaucaugcaauac

SEQ ID NO: 440654 - RNA, 19 nt, Artificial Sequence
  Description of Artificial Sequence: Synthetic oligonucleotide
caaggcuacuggaugacuc

SEQ ID NO: 440655 - RNA, 19 nt, Artificial Sequence
  Description of Artificial Sequence: Synthetic oligonucleotide
auguacaugugugugugug

SEQ ID NO: 440656 - RNA, 19 nt, Artificial Sequence
  Description of Artificial Sequence: Synthetic oligonucleotide
uuggcauaggcacugccuu

SEQ ID NO: 440657 - RNA, 19 nt, Artificial Sequence
  Description of Artificial Sequence: Synthetic oligonucleotide
ugcaacaccggguugcgua

SEQ ID NO: 440658 - RNA, 19 nt, Artificial Sequence
  Description of Artificial Sequence: Synthetic oligonucleotide
cucaucgguuacucggacg

SEQ ID NO: 440659 - RNA, 19 nt, Artificial Sequence
  Description of Artificial Sequence: Synthetic oligonucleotide
ggaugaugggaauuaaguc

SEQ ID NO: 440660 - RNA, 19 nt, Artificial Sequence
  Description of Artificial Sequence: Synthetic oligonucleotide
guugagaucccaauauguc

SEQ ID NO: 440661 - RNA, 19 nt, Artificial Sequence
  Description of Artificial Sequence: Synthetic oligonucleotide
cauccgggcugucagagac

SEQ ID NO: 440662 - RNA, 19 nt, Artificial Sequence
  Description of Artificial Sequence: Synthetic oligonucleotide
caauacaagucugcacgcg

SEQ ID NO: 440663 - RNA, 19 nt, Artificial Sequence
  Description of Artificial Sequence: Synthetic oligonucleotide
gauacauaaggcaggguua

SEQ ID NO: 440664 - RNA, 19 nt, Artificial Sequence
  Description of Artificial Sequence: Synthetic oligonucleotide
gaugcauugcccugcucca

SEQ ID NO: 440665 - RNA, 19 nt, Artificial Sequence
  Description of Artificial Sequence: Synthetic oligonucleotide
agaucccaauaugucauag

SEQ ID NO: 440666 - RNA, 19 nt, Artificial Sequence
  Description of Artificial Sequence: Synthetic oligonucleotide
agauguuaguuuacuaaga

SEQ ID NO: 440667 - RNA, 19 nt, Artificial Sequence
  Description of Artificial Sequence: Synthetic oligonucleotide
cauugaggcucaacacagg

SEQ ID NO: 440668 - RNA, 19 nt, Artificial Sequence
  Description of Artificial Sequence: Synthetic oligonucleotide
uacccaguuuacagagucc

SEQ ID NO: 440669 - RNA, 19 nt, Artificial Sequence
  Description of Artificial Sequence: Synthetic oligonucleotide
aagaauggguagaccagca

SEQ ID NO: 440670 - RNA, 19 nt, Artificial Sequence
  Description of Artificial Sequence: Synthetic oligonucleotide
guacaugugugugugugug

SEQ ID NO: 440671 - RNA, 19 nt, Artificial Sequence
  Description of Artificial Sequence: Synthetic oligonucleotide
cucagcgccugcauucucc

SEQ ID NO: 440672 - RNA, 19 nt, Artificial Sequence
  Description of Artificial Sequence: Synthetic oligonucleotide
acgcugugaacaucaaaca

SEQ ID NO: 440673 - RNA, 19 nt, Artificial Sequence
  Description of Artificial Sequence: Synthetic oligonucleotide
cacacucgucagaacaaag

SEQ ID NO: 440674 - RNA, 19 nt, Artificial Sequence
  Description of Artificial Sequence: Synthetic oligonucleotide
ucgucagaacaaagguuga

SEQ ID NO: 440675 - RNA, 19 nt, Artificial Sequence
  Description of Artificial Sequence: Synthetic oligonucleotide
cauguccauauaaggccgc

SEQ ID NO: 440676 - RNA, 19 nt, Artificial Sequence
  Description of Artificial Sequence: Synthetic oligonucleotide
cuauguucccaggacgaag

SEQ ID NO: 440677 - RNA, 19 nt, Artificial Sequence
  Description of Artificial Sequence: Synthetic oligonucleotide
aucagagaaauaaggcuga

SEQ ID NO: 440678 - RNA, 19 nt, Artificial Sequence
  Description of Artificial Sequence: Synthetic oligonucleotide
auguguguguguguggaug

SEQ ID NO: 440679 - RNA, 19 nt, Artificial Sequence
  Description of Artificial Sequence: Synthetic oligonucleotide
aaacuaguaccugcuuccu

SEQ ID NO: 440680 - RNA, 19 nt, Artificial Sequence
  Description of Artificial Sequence: Synthetic oligonucleotide
guaugguaaaggacugugc

SEQ ID NO: 440681 - RNA, 19 nt, Artificial Sequence
  Description of Artificial Sequence: Synthetic oligonucleotide
ucccaauaugucauagguu

SEQ ID NO: 440682 - RNA, 19 nt, Artificial Sequence
  Description of Artificial Sequence: Synthetic oligonucleotide
cugcacgcguuccagcacg

SEQ ID NO: 440683 - RNA, 19 nt, Artificial Sequence
  Description of Artificial Sequence: Synthetic oligonucleotide
guaccugcuuccugugggg

SEQ ID NO: 440684 - RNA, 19 nt, Artificial Sequence
  Description of Artificial Sequence: Synthetic oligonucleotide
gcccucaucgguuacucgg

SEQ ID NO: 440685 - RNA, 19 nt, Artificial Sequence
  Description of Artificial Sequence: Synthetic oligonucleotide
acaugugugugugugugga

SEQ ID NO: 440686 - RNA, 19 nt, Artificial Sequence
  Description of Artificial Sequence: Synthetic oligonucleotide
gauugugcagcuagcuuca

SEQ ID NO: 440687 - RNA, 19 nt, Artificial Sequence
  Description of Artificial Sequence: Synthetic oligonucleotide
acauaaggcaggguuacaa

SEQ ID NO: 440688 - RNA, 19 nt, Artificial Sequence
  Description of Artificial Sequence: Synthetic oligonucleotide
uguccauauaaggccgcag

SEQ ID NO: 440689 - RNA, 19 nt, Artificial Sequence
  Description of Artificial Sequence: Synthetic oligonucleotide
gcuauagaugccauuagca

SEQ ID NO: 440690 - RNA, 19 nt, Artificial Sequence
  Description of Artificial Sequence: Synthetic oligonucleotide
agucgggaugaagacuugg

SEQ ID NO: 440691 - RNA, 19 nt, Artificial Sequence
  Description of Artificial Sequence: Synthetic oligonucleotide
gcugucagagacaagccag

SEQ ID NO: 440692 - RNA, 19 nt, Artificial Sequence
  Description of Artificial Sequence: Synthetic oligonucleotide
cacuauguucccaggacga

SEQ ID NO: 440693 - RNA, 19 nt, Artificial Sequence
  Description of Artificial Sequence: Synthetic oligonucleotide
aacaccggguugcguacca

SEQ ID NO: 440694 - RNA, 19 nt, Artificial Sequence
  Description of Artificial Sequence: Synthetic oligonucleotide
aggagaucaugcaauacaa

SEQ ID NO: 440695 - RNA, 19 nt, Artificial Sequence
  Description of Artificial Sequence: Synthetic oligonucleotide
ucucuagguuucuuccccu

SEQ ID NO: 440696 - RNA, 19 nt, Artificial Sequence
  Description of Artificial Sequence: Synthetic oligonucleotide
gagaagugguaacauagau

SEQ ID NO: 440697 - RNA, 19 nt, Artificial Sequence
  Description of Artificial Sequence: Synthetic oligonucleotide
ucgggauagcccugguagc

SEQ ID NO: 440698 - RNA, 19 nt, Artificial Sequence
  Description of Artificial Sequence: Synthetic oligonucleotide
caccaacgccaccacaggg

SEQ ID NO: 440699 - RNA, 19 nt, Artificial Sequence
  Description of Artificial Sequence: Synthetic oligonucleotide
accggguugcguaccaggc

SEQ ID NO: 440700 - RNA, 19 nt, Artificial Sequence
  Description of Artificial Sequence: Synthetic oligonucleotide
caugcaauacaagucugca

SEQ ID NO: 440701 - RNA, 19 nt, Artificial Sequence
  Description of Artificial Sequence: Synthetic oligonucleotide
aagagacgggauccacacu

SEQ ID NO: 440702 - RNA, 19 nt, Artificial Sequence
  Description of Artificial Sequence: Synthetic oligonucleotide
ucagagacuuggaccucca

SEQ ID NO: 440703 - RNA, 19 nt, Artificial Sequence
  Description of Artificial Sequence: Synthetic oligonucleotide
ggcuauuucuuguccauca

SEQ ID NO: 440704 - RNA, 19 nt, Artificial Sequence
  Description of Artificial Sequence: Synthetic oligonucleotide
uuccuguaucgugucagug

SEQ ID NO: 440705 - RNA, 19 nt, Artificial Sequence
  Description of Artificial Sequence: Synthetic oligonucleotide
ugugucgccccaguuguac

SEQ ID NO: 440706 - RNA, 19 nt, Artificial Sequence
  Description of Artificial Sequence: Synthetic oligonucleotide
cagcuauagaugccauuag

SEQ ID NO: 440707 - RNA, 19 nt, Artificial Sequence
  Description of Artificial Sequence: Synthetic oligonucleotide
aucaugcaauacaagucug

SEQ ID NO: 440708 - RNA, 19 nt, Artificial Sequence
  Description of Artificial Sequence: Synthetic oligonucleotide
gcaauacaagucugcacgc

SEQ ID NO: 440709 - RNA, 19 nt, Artificial Sequence
  Description of Artificial Sequence: Synthetic oligonucleotide
agagucaugcugggcuucg

SEQ ID NO: 440710 - RNA, 19 nt, Artificial Sequence
  Description of Artificial Sequence: Synthetic oligonucleotide
cuucgaguagggagcugcc

SEQ ID NO: 440711 - RNA, 19 nt, Artificial Sequence
  Description of Artificial Sequence: Synthetic oligonucleotide
agaauggguagaccagcau

SEQ ID NO: 440712 - RNA, 19 nt, Artificial Sequence
  Description of Artificial Sequence: Synthetic oligonucleotide
ggaugguuccuguaucgug

SEQ ID NO: 440713 - RNA, 19 nt, Artificial Sequence
  Description of Artificial Sequence: Synthetic oligonucleotide
agugugccccaucacacuu

SEQ ID NO: 440714 - RNA, 19 nt, Artificial Sequence
  Description of Artificial Sequence: Synthetic oligonucleotide
ugcgguuggcauaggcacu

SEQ ID NO: 440715 - RNA, 19 nt, Artificial Sequence
  Description of Artificial Sequence: Synthetic oligonucleotide
ucgguuacucggacgcgcu

SEQ ID NO: 440716 - RNA, 19 nt, Artificial Sequence
  Description of Artificial Sequence: Synthetic oligonucleotide
caccggguugcguaccagg

SEQ ID NO: 440717 - RNA, 19 nt, Artificial Sequence
  Description of Artificial Sequence: Synthetic oligonucleotide
gccgguaucaauguacaug

SEQ ID NO: 440718 - RNA, 19 nt, Artificial Sequence
  Description of Artificial Sequence: Synthetic oligonucleotide
ucugcacgcguuccagcac

SEQ ID NO: 440719 - RNA, 19 nt, Artificial Sequence
  Description of Artificial Sequence: Synthetic oligonucleotide
agacagagagccccacggu

SEQ ID NO: 440720 - RNA, 19 nt, Artificial Sequence
  Description of Artificial Sequence: Synthetic oligonucleotide
ccaauaugucauagguugc

SEQ ID NO: 440721 - RNA, 19 nt, Artificial Sequence
  Description of Artificial Sequence: Synthetic oligonucleotide
agcauccgggcugucagag

SEQ ID NO: 440722 - RNA, 19 nt, Artificial Sequence
  Description of Artificial Sequence: Synthetic oligonucleotide
ccauuuguugggguuaggg

SEQ ID NO: 440723 - RNA, 19 nt, Artificial Sequence
  Description of Artificial Sequence: Synthetic oligonucleotide
uggaccuccacagcuccug

SEQ ID NO: 440724 - RNA, 19 nt, Artificial Sequence
  Description of Artificial Sequence: Synthetic oligonucleotide
gugguaacauagauguauc

SEQ ID NO: 440725 - RNA, 19 nt, Artificial Sequence
  Description of Artificial Sequence: Synthetic oligonucleotide
ccauguaugguaaaggacu

SEQ ID NO: 440726 - RNA, 19 nt, Artificial Sequence
  Description of Artificial Sequence: Synthetic oligonucleotide
aacccauuuguugggguua

SEQ ID NO: 440727 - RNA, 19 nt, Artificial Sequence
  Description of Artificial Sequence: Synthetic oligonucleotide
auagauguaucagggccau

SEQ ID NO: 440728 - RNA, 19 nt, Artificial Sequence
  Description of Artificial Sequence: Synthetic oligonucleotide
cacgugauggucacuaugu

SEQ ID NO: 440729 - RNA, 19 nt, Artificial Sequence
  Description of Artificial Sequence: Synthetic oligonucleotide
cuuccccuaccccagguca

SEQ ID NO: 440730 - RNA, 19 nt, Artificial Sequence
  Description of Artificial Sequence: Synthetic oligonucleotide
ggcauaggcacugccuugg

SEQ ID NO: 440731 - RNA, 19 nt, Artificial Sequence
  Description of Artificial Sequence: Synthetic oligonucleotide
cgauugugcagcuagcuuc

SEQ ID NO: 440732 - RNA, 19 nt, Artificial Sequence
  Description of Artificial Sequence: Synthetic oligonucleotide
ggagaucaugcaauacaag

SEQ ID NO: 440733 - RNA, 19 nt, Artificial Sequence
  Description of Artificial Sequence: Synthetic oligonucleotide
acucccagugcugugcgca

SEQ ID NO: 440734 - RNA, 19 nt, Artificial Sequence
  Description of Artificial Sequence: Synthetic oligonucleotide
uucgaguagggagcugcca

SEQ ID NO: 440735 - RNA, 19 nt, Artificial Sequence
  Description of Artificial Sequence: Synthetic oligonucleotide
gcuucgaguagggagcugc

SEQ ID NO: 440736 - RNA, 19 nt, Artificial Sequence
  Description of Artificial Sequence: Synthetic oligonucleotide
ugccauaggcugcccugug

SEQ ID NO: 440737 - RNA, 19 nt, Artificial Sequence
  Description of Artificial Sequence: Synthetic oligonucleotide
gaucggucugugugucaug

SEQ ID NO: 440738 - RNA, 19 nt, Artificial Sequence
  Description of Artificial Sequence: Synthetic oligonucleotide
cacucgucagaacaaaggu

SEQ ID NO: 440739 - RNA, 19 nt, Artificial Sequence
  Description of Artificial Sequence: Synthetic oligonucleotide
uugccagucaagggcaguc

SEQ ID NO: 440740 - RNA, 19 nt, Artificial Sequence
  Description of Artificial Sequence: Synthetic oligonucleotide
ugauggugacugagccaug

SEQ ID NO: 440741 - RNA, 19 nt, Artificial Sequence
  Description of Artificial Sequence: Synthetic oligonucleotide
uacauaaggcaggguuaca

SEQ ID NO: 440742 - RNA, 19 nt, Artificial Sequence
  Description of Artificial Sequence: Synthetic oligonucleotide
augagguauccagaacaga

SEQ ID NO: 440743 - RNA, 19 nt, Artificial Sequence
  Description of Artificial Sequence: Synthetic oligonucleotide
auguaugguaaaggacugu

SEQ ID NO: 440744 - RNA, 19 nt, Artificial Sequence
  Description of Artificial Sequence: Synthetic oligonucleotide
cagucaagggcagucccug

SEQ ID NO: 440745 - RNA, 19 nt, Artificial Sequence
  Description of Artificial Sequence: Synthetic oligonucleotide
agacgggauccacacucgu

SEQ ID NO: 440746 - RNA, 19 nt, Artificial Sequence
  Description of Artificial Sequence: Synthetic oligonucleotide
gggagugugccccaucaca

SEQ ID NO: 440747 - RNA, 19 nt, Artificial Sequence
  Description of Artificial Sequence: Synthetic oligonucleotide
acccauuuguugggguuag

SEQ ID NO: 440748 - RNA, 19 nt, Artificial Sequence
  Description of Artificial Sequence: Synthetic oligonucleotide
gguuacucggacgcgcugc

SEQ ID NO: 440749 - RNA, 19 nt, Artificial Sequence
  Description of Artificial Sequence: Synthetic oligonucleotide
cugaagagacgggauccac

SEQ ID NO: 440750 - RNA, 19 nt, Artificial Sequence
  Description of Artificial Sequence: Synthetic oligonucleotide
guaucgugucaguggaaaa

SEQ ID NO: 440751 - RNA, 19 nt, Artificial Sequence
  Description of Artificial Sequence: Synthetic oligonucleotide
aggcgauugugcagcuagc

SEQ ID NO: 440752 - RNA, 19 nt, Artificial Sequence
  Description of Artificial Sequence: Synthetic oligonucleotide
ggagugugccccaucacac

SEQ ID NO: 440753 - RNA, 19 nt, Artificial Sequence
  Description of Artificial Sequence: Synthetic oligonucleotide
guguguguguguggauggg

SEQ ID NO: 440754 - RNA, 19 nt, Artificial Sequence
  Description of Artificial Sequence: Synthetic oligonucleotide
guuacucggacgcgcugca

SEQ ID NO: 440755 - RNA, 19 nt, Artificial Sequence
  Description of Artificial Sequence: Synthetic oligonucleotide
ccgcucauuggccaucugg

SEQ ID NO: 440756 - RNA, 19 nt, Artificial Sequence
  Description of Artificial Sequence: Synthetic oligonucleotide
gcagcuauagaugccauua

SEQ ID NO: 440757 - RNA, 19 nt, Artificial Sequence
  Description of Artificial Sequence: Synthetic oligonucleotide
aggaugguuccuguaucgu

SEQ ID NO: 440758 - RNA, 19 nt, Artificial Sequence
  Description of Artificial Sequence: Synthetic oligonucleotide
caguaaagcugugcaccag

SEQ ID NO: 440759 - RNA, 19 nt, Artificial Sequence
  Description of Artificial Sequence: Synthetic oligonucleotide
ccaucagagaaauaaggcu

SEQ ID NO: 440760 - RNA, 19 nt, Artificial Sequence
  Description of Artificial Sequence: Synthetic oligonucleotide
uggaucggucuguguguca

SEQ ID NO: 440761 - RNA, 19 nt, Artificial Sequence
  Description of Artificial Sequence: Synthetic oligonucleotide
gagcacgugauggucacua

SEQ ID NO: 440762 - RNA, 19 nt, Artificial Sequence
  Description of Artificial Sequence: Synthetic oligonucleotide
caucgguuacucggacgcg

SEQ ID NO: 440763 - RNA, 19 nt, Artificial Sequence
  Description of Artificial Sequence: Synthetic oligonucleotide
ggcuacuggaugacucugg

SEQ ID NO: 440764 - RNA, 19 nt, Artificial Sequence
  Description of Artificial Sequence: Synthetic oligonucleotide
ucauagguugcugccccua

SEQ ID NO: 440765 - RNA, 19 nt, Artificial Sequence
  Description of Artificial Sequence: Synthetic oligonucleotide
acuauguucccaggacgaa

SEQ ID NO: 440766 - RNA, 19 nt, Artificial Sequence
  Description of Artificial Sequence: Synthetic oligonucleotide
gacgggauccacacucguc

SEQ ID NO: 440767 - RNA, 19 nt, Artificial Sequence
  Description of Artificial Sequence: Synthetic oligonucleotide
ccuguaucgugucagugga

SEQ ID NO: 440768 - RNA, 19 nt, Artificial Sequence
  Description of Artificial Sequence: Synthetic oligonucleotide
agagagccccacggucacc

SEQ ID NO: 440769 - RNA, 19 nt, Artificial Sequence
  Description of Artificial Sequence: Synthetic oligonucleotide
gagaucccaauaugucaua

SEQ ID NO: 440770 - RNA, 19 nt, Artificial Sequence
  Description of Artificial Sequence: Synthetic oligonucleotide
ggcuagugugggcugagga

SEQ ID NO: 440771 - RNA, 19 nt, Artificial Sequence
  Description of Artificial Sequence: Synthetic oligonucleotide
ugcacgcguuccagcacgu

SEQ ID NO: 440772 - RNA, 19 nt, Artificial Sequence
  Description of Artificial Sequence: Synthetic oligonucleotide
gccagucaagggcaguccc

SEQ ID NO: 440773 - RNA, 19 nt, Artificial Sequence
  Description of Artificial Sequence: Synthetic oligonucleotide
gcuacuggaugacucugga

SEQ ID NO: 440774 - RNA, 19 nt, Artificial Sequence
  Description of Artificial Sequence: Synthetic oligonucleotide
gaacccauuuguugggguu

SEQ ID NO: 440775 - RNA, 19 nt, Artificial Sequence
  Description of Artificial Sequence: Synthetic oligonucleotide
ucagcacgcugugaacauc

SEQ ID NO: 440776 - RNA, 19 nt, Artificial Sequence
  Description of Artificial Sequence: Synthetic oligonucleotide
auugccagucaagggcagu

SEQ ID NO: 440777 - RNA, 19 nt, Artificial Sequence
  Description of Artificial Sequence: Synthetic oligonucleotide
ugccgguaucaauguacau

SEQ ID NO: 440778 - RNA, 19 nt, Artificial Sequence
  Description of Artificial Sequence: Synthetic oligonucleotide
uccucagcgccugcauucu

SEQ ID NO: 440779 - RNA, 19 nt, Artificial Sequence
  Description of Artificial Sequence: Synthetic oligonucleotide
agccucgggauagcccugg

SEQ ID NO: 440780 - RNA, 19 nt, Artificial Sequence
  Description of Artificial Sequence: Synthetic oligonucleotide
augccauaggcugcccugu

SEQ ID NO: 440781 - RNA, 19 nt, Artificial Sequence
  Description of Artificial Sequence: Synthetic oligonucleotide
agcacgugauggucacuau

SEQ ID NO: 440782 - RNA, 19 nt, Artificial Sequence
  Description of Artificial Sequence: Synthetic oligonucleotide
cagagacuuggaccuccac

SEQ ID NO: 440783 - RNA, 19 nt, Artificial Sequence
  Description of Artificial Sequence: Synthetic oligonucleotide
gcacucccagugcugugcg

SEQ ID NO: 440784 - RNA, 19 nt, Artificial Sequence
  Description of Artificial Sequence: Synthetic oligonucleotide
uagauguaucagggccaug

SEQ ID NO: 440785 - RNA, 19 nt, Artificial Sequence
  Description of Artificial Sequence: Synthetic oligonucleotide
gagaaccagggaaacuagu

SEQ ID NO: 440786 - RNA, 19 nt, Artificial Sequence
  Description of Artificial Sequence: Synthetic oligonucleotide
gcaacaccggguugcguac

SEQ ID NO: 440787 - RNA, 19 nt, Artificial Sequence
  Description of Artificial Sequence: Synthetic oligonucleotide
cagguacaagccccagcuc

SEQ ID NO: 440788 - RNA, 19 nt, Artificial Sequence
  Description of Artificial Sequence: Synthetic oligonucleotide
gagugugccccaucacacu

SEQ ID NO: 440789 - RNA, 19 nt, Artificial Sequence
  Description of Artificial Sequence: Synthetic oligonucleotide
gccagguacaagccccagc

SEQ ID NO: 440790 - RNA, 19 nt, Artificial Sequence
  Description of Artificial Sequence: Synthetic oligonucleotide
caacaccggguugcguacc

SEQ ID NO: 440791 - RNA, 19 nt, Artificial Sequence
  Description of Artificial Sequence: Synthetic oligonucleotide
gagucgggaugaagacuug

SEQ ID NO: 440792 - RNA, 19 nt, Artificial Sequence
  Description of Artificial Sequence: Synthetic oligonucleotide
ugcguaccaggcagcuaua

SEQ ID NO: 440793 - RNA, 19 nt, Artificial Sequence
  Description of Artificial Sequence: Synthetic oligonucleotide
cacucccagugcugugcgc

SEQ ID NO: 440794 - RNA, 19 nt, Artificial Sequence
  Description of Artificial Sequence: Synthetic oligonucleotide
guggaucggucuguguguc

SEQ ID NO: 440795 - RNA, 19 nt, Artificial Sequence
  Description of Artificial Sequence: Synthetic oligonucleotide
ccaccaacgccaccacagg

SEQ ID NO: 440796 - RNA, 19 nt, Artificial Sequence
  Description of Artificial Sequence: Synthetic oligonucleotide
gguggaucggucugugugu

SEQ ID NO: 440797 - RNA, 19 nt, Artificial Sequence
  Description of Artificial Sequence: Synthetic oligonucleotide
uagaugccauuagcaccca

SEQ ID NO: 440798 - RNA, 19 nt, Artificial Sequence
  Description of Artificial Sequence: Synthetic oligonucleotide
ggucccgccccucaguaaa

SEQ ID NO: 440799 - RNA, 19 nt, Artificial Sequence
  Description of Artificial Sequence: Synthetic oligonucleotide
cucggacgcgcugcagccg

SEQ ID NO: 440800 - RNA, 19 nt, Artificial Sequence
  Description of Artificial Sequence: Synthetic oligonucleotide
gaguagggagcugccaccu

SEQ ID NO: 440801 - RNA, 19 nt, Artificial Sequence
  Description of Artificial Sequence: Synthetic oligonucleotide
cgaguagggagcugccacc

SEQ ID NO: 440802 - RNA, 19 nt, Artificial Sequence
  Description of Artificial Sequence: Synthetic oligonucleotide
guugggguuagggcucaca

SEQ ID NO: 440803 - RNA, 19 nt, Artificial Sequence
  Description of Artificial Sequence: Synthetic oligonucleotide
ccagguacaagccccagcu

SEQ ID NO: 440804 - RNA, 19 nt, Artificial Sequence
  Description of Artificial Sequence: Synthetic oligonucleotide
ccgcaaggaugcauugccc

SEQ ID NO: 440805 - RNA, 19 nt, Artificial Sequence
  Description of Artificial Sequence: Synthetic oligonucleotide
ccagaauagcaccauggua

SEQ ID NO: 440806 - RNA, 19 nt, Artificial Sequence
  Description of Artificial Sequence: Synthetic oligonucleotide
cucuagguuucuuccccua

SEQ ID NO: 440807 - RNA, 19 nt, Artificial Sequence
  Description of Artificial Sequence: Synthetic oligonucleotide
ccgccccucaguaaagcug

SEQ ID NO: 440808 - RNA, 19 nt, Artificial Sequence
  Description of Artificial Sequence: Synthetic oligonucleotide
ggagucgggaugaagacuu

SEQ ID NO: 440809 - RNA, 19 nt, Artificial Sequence
  Description of Artificial Sequence: Synthetic oligonucleotide
acuuagccagggagggaga

SEQ ID NO: 440810 - RNA, 19 nt, Artificial Sequence
  Description of Artificial Sequence: Synthetic oligonucleotide
gcgguuggcauaggcacug

SEQ ID NO: 440811 - RNA, 19 nt, Artificial Sequence
  Description of Artificial Sequence: Synthetic oligonucleotide
cauuagcacccagcaccac

SEQ ID NO: 440812 - RNA, 19 nt, Artificial Sequence
  Description of Artificial Sequence: Synthetic oligonucleotide
acaccggguugcguaccag

SEQ ID NO: 440813 - RNA, 19 nt, Artificial Sequence
  Description of Artificial Sequence: Synthetic oligonucleotide
auaaggccgcaggaugguu

SEQ ID NO: 440814 - RNA, 19 nt, Artificial Sequence
  Description of Artificial Sequence: Synthetic oligonucleotide
ugccccuauccaggucugc

SEQ ID NO: 440815 - RNA, 19 nt, Artificial Sequence
  Description of Artificial Sequence: Synthetic oligonucleotide
gugcagcuagcuucagaua

SEQ ID NO: 440816 - RNA, 19 nt, Artificial Sequence
  Description of Artificial Sequence: Synthetic oligonucleotide
cuguaucgugucaguggaa

SEQ ID NO: 440817 - RNA, 19 nt, Artificial Sequence
  Description of Artificial Sequence: Synthetic oligonucleotide
gcuagugugggcugaggau

SEQ ID NO: 440818 - RNA, 19 nt, Artificial Sequence
  Description of Artificial Sequence: Synthetic oligonucleotide
ccagaugagguugagcugu

SEQ ID NO: 440819 - RNA, 19 nt, Artificial Sequence
  Description of Artificial Sequence: Synthetic oligonucleotide
gcagcuagcuucagauaca

SEQ ID NO: 440820 - RNA, 19 nt, Artificial Sequence
  Description of Artificial Sequence: Synthetic oligonucleotide
gcguaccaggcagcuauag

SEQ ID NO: 440821 - RNA, 19 nt, Artificial Sequence
  Description of Artificial Sequence: Synthetic oligonucleotide
cucagcacgcugugaacau

SEQ ID NO: 440822 - RNA, 19 nt, Artificial Sequence
  Description of Artificial Sequence: Synthetic oligonucleotide
gagucccauguuucguuuu

SEQ ID NO: 440823 - RNA, 19 nt, Artificial Sequence
  Description of Artificial Sequence: Synthetic oligonucleotide
ccucaucgguuacucggac

SEQ ID NO: 440824 - RNA, 19 nt, Artificial Sequence
  Description of Artificial Sequence: Synthetic oligonucleotide
gucccgccccucaguaaag

SEQ ID NO: 440825 - RNA, 19 nt, Artificial Sequence
  Description of Artificial Sequence: Synthetic oligonucleotide
agccccgcucauuggccau

SEQ ID NO: 440826 - RNA, 19 nt, Artificial Sequence
  Description of Artificial Sequence: Synthetic oligonucleotide
gagucaugcugggcuucga

SEQ ID NO: 440827 - RNA, 19 nt, Artificial Sequence
  Description of Artificial Sequence: Synthetic oligonucleotide
gucauagguugcugccccu

SEQ ID NO: 440828 - RNA, 19 nt, Artificial Sequence
  Description of Artificial Sequence: Synthetic oligonucleotide
cgcugugaacaucaaacaa

SEQ ID NO: 440829 - RNA, 19 nt, Artificial Sequence
  Description of Artificial Sequence: Synthetic oligonucleotide
cauagguugcugccccuau

SEQ ID NO: 440830 - RNA, 19 nt, Artificial Sequence
  Description of Artificial Sequence: Synthetic oligonucleotide
cccucaucgguuacucgga

SEQ ID NO: 440831 - RNA, 19 nt, Artificial Sequence
  Description of Artificial Sequence: Synthetic oligonucleotide
gugucgccccaguuguacu

SEQ ID NO: 440832 - RNA, 19 nt, Artificial Sequence
  Description of Artificial Sequence: Synthetic oligonucleotide
gggcuagugugggcugagg

SEQ ID NO: 440833 - RNA, 19 nt, Artificial Sequence
  Description of Artificial Sequence: Synthetic oligonucleotide
ggcgauugugcagcuagcu

SEQ ID NO: 440834 - RNA, 19 nt, Artificial Sequence
  Description of Artificial Sequence: Synthetic oligonucleotide
cauguguguguguguggau

SEQ ID NO: 440835 - RNA, 19 nt, Artificial Sequence
  Description of Artificial Sequence: Synthetic oligonucleotide
gcugaggguggccuaugua

SEQ ID NO: 440836 - RNA, 19 nt, Artificial Sequence
  Description of Artificial Sequence: Synthetic oligonucleotide
ggguugcguaccaggcagc

SEQ ID NO: 440837 - RNA, 19 nt, Artificial Sequence
  Description of Artificial Sequence: Synthetic oligonucleotide
guugcguaccaggcagcua

SEQ ID NO: 440838 - RNA, 19 nt, Artificial Sequence
  Description of Artificial Sequence: Synthetic oligonucleotide
gccccuauccaggucugca

SEQ ID NO: 440839 - RNA, 19 nt, Artificial Sequence
  Description of Artificial Sequence: Synthetic oligonucleotide
agcuagcuucagauacaua

SEQ ID NO: 440840 - RNA, 19 nt, Artificial Sequence
  Description of Artificial Sequence: Synthetic oligonucleotide
cccauuuguugggguuagg

SEQ ID NO: 440841 - RNA, 19 nt, Artificial Sequence
  Description of Artificial Sequence: Synthetic oligonucleotide
gcgauugugcagcuagcuu

SEQ ID NO: 440842 - RNA, 19 nt, Artificial Sequence
  Description of Artificial Sequence: Synthetic oligonucleotide
guacugggacucacucugu

SEQ ID NO: 440843 - RNA, 19 nt, Artificial Sequence
  Description of Artificial Sequence: Synthetic oligonucleotide
cgcaaggaugcauugcccu

SEQ ID NO: 440844 - RNA, 19 nt, Artificial Sequence
  Description of Artificial Sequence: Synthetic oligonucleotide
cggucacccauagagccuc

SEQ ID NO: 440845 - RNA, 19 nt, Artificial Sequence
  Description of Artificial Sequence: Synthetic oligonucleotide
ccggguugcguaccaggca

SEQ ID NO: 440846 - RNA, 19 nt, Artificial Sequence
  Description of Artificial Sequence: Synthetic oligonucleotide
cgugcagcugccgguauca

SEQ ID NO: 440847 - RNA, 19 nt, Artificial Sequence
  Description of Artificial Sequence: Synthetic oligonucleotide
ccagucaagggcagucccu

SEQ ID NO: 440848 - RNA, 19 nt, Artificial Sequence
  Description of Artificial Sequence: Synthetic oligonucleotide
cugugucgccccaguugua

SEQ ID NO: 440849 - RNA, 19 nt, Artificial Sequence
  Description of Artificial Sequence: Synthetic oligonucleotide
ggcuucgaguagggagcug

SEQ ID NO: 440850 - RNA, 19 nt, Artificial Sequence
  Description of Artificial Sequence: Synthetic oligonucleotide
cgccccucaguaaagcugu

SEQ ID NO: 440851 - RNA, 19 nt, Artificial Sequence
  Description of Artificial Sequence: Synthetic oligonucleotide
cgguuacucggacgcgcug

SEQ ID NO: 440852 - RNA, 19 nt, Artificial Sequence
  Description of Artificial Sequence: Synthetic oligonucleotide
ggucacccauagagccuca

SEQ ID NO: 440853 - RNA, 19 nt, Artificial Sequence
  Description of Artificial Sequence: Synthetic oligonucleotide
ccucgggauagcccuggua

SEQ ID NO: 440854 - RNA, 19 nt, Artificial Sequence
  Description of Artificial Sequence: Synthetic oligonucleotide
cagagcugucuuggauccu

SEQ ID NO: 440855 - RNA, 19 nt, Artificial Sequence
  Description of Artificial Sequence: Synthetic oligonucleotide
cccgccccucaguaaagcu

SEQ ID NO: 440856 - RNA, 19 nt, Artificial Sequence
  Description of Artificial Sequence: Synthetic oligonucleotide
cccgcucauuggccaucug

SEQ ID NO: 440857 - RNA, 19 nt, Artificial Sequence
  Description of Artificial Sequence: Synthetic oligonucleotide
gccucgggauagcccuggu

SEQ ID NO: 440858 - RNA, 19 nt, Artificial Sequence
  Description of Artificial Sequence: Synthetic oligonucleotide
ccccacggucacccauaga

SEQ ID NO: 440859 - RNA, 19 nt, Artificial Sequence
  Description of Artificial Sequence: Synthetic oligonucleotide
uguagaauuauagagaagg

SEQ ID NO: 440860 - RNA, 19 nt, Artificial Sequence
  Description of Artificial Sequence: Synthetic oligonucleotide
agaauaauuaacaauauac

SEQ ID NO: 440861 - RNA, 19 nt, Artificial Sequence
  Description of Artificial Sequence: Synthetic oligonucleotide
aaugacaccaauccaaaac

SEQ ID NO: 440862 - RNA, 19 nt, Artificial Sequence
  Description of Artificial Sequence: Synthetic oligonucleotide
uuaaugauagcuuagcacc

SEQ ID NO: 440863 - RNA, 19 nt, Artificial Sequence
  Description of Artificial Sequence: Synthetic oligonucleotide
gagaacauaaucaacaagg

SEQ ID NO: 440864 - RNA, 19 nt, Artificial Sequence
  Description of Artificial Sequence: Synthetic oligonucleotide
uccaacaacauucacacag

SEQ ID NO: 440865 - RNA, 19 nt, Artificial Sequence
  Description of Artificial Sequence: Synthetic oligonucleotide
aacaucauaaacauagucg

SEQ ID NO: 440866 - RNA, 19 nt, Artificial Sequence
  Description of Artificial Sequence: Synthetic oligonucleotide
uuauagauaacuacuguag

SEQ ID NO: 440867 - RNA, 19 nt, Artificial Sequence
  Description of Artificial Sequence: Synthetic oligonucleotide
uuagaauucagaaaaggcu

SEQ ID NO: 440868 - RNA, 19 nt, Artificial Sequence
  Description of Artificial Sequence: Synthetic oligonucleotide
cuuucuacaauucuugugg

SEQ ID NO: 440869 - RNA, 19 nt, Artificial Sequence
  Description of Artificial Sequence: Synthetic oligonucleotide
aauauguaccaccaacgac

SEQ ID NO: 440870 - RNA, 19 nt, Artificial Sequence
  Description of Artificial Sequence: Synthetic oligonucleotide
ugaauauguaccaccaacg

SEQ ID NO: 440871 - RNA, 19 nt, Artificial Sequence
  Description of Artificial Sequence: Synthetic oligonucleotide
uucguuagaauucagaaaa

SEQ ID NO: 440872 - RNA, 19 nt, Artificial Sequence
  Description of Artificial Sequence: Synthetic oligonucleotide
uuuguuaucgcucucuuca

SEQ ID NO: 440873 - RNA, 19 nt, Artificial Sequence
  Description of Artificial Sequence: Synthetic oligonucleotide
uuaauacucauuuaaucag

SEQ ID NO: 440874 - RNA, 19 nt, Artificial Sequence
  Description of Artificial Sequence: Synthetic oligonucleotide
uuaugaaccaacuccaugc

SEQ ID NO: 440875 - RNA, 19 nt, Artificial Sequence
  Description of Artificial Sequence: Synthetic oligonucleotide
uauauaguauuacaaguug

SEQ ID NO: 440876 - RNA, 19 nt, Artificial Sequence
  Description of Artificial Sequence: Synthetic oligonucleotide
aaauuuugcaaauguagca

SEQ ID NO: 440877 - RNA, 19 nt, Artificial Sequence
  Description of Artificial Sequence: Synthetic oligonucleotide
uucaaaugaguacaaaggc

SEQ ID NO: 440878 - RNA, 19 nt, Artificial Sequence
  Description of Artificial Sequence: Synthetic oligonucleotide
aacgacaagauuuggauga

SEQ ID NO: 440879 - RNA, 19 nt, Artificial Sequence
  Description of Artificial Sequence: Synthetic oligonucleotide
ugaaguuacagcuacugcc

SEQ ID NO: 440880 - RNA, 19 nt, Artificial Sequence
  Description of Artificial Sequence: Synthetic oligonucleotide
uagauuaugagcauuuugu

SEQ ID NO: 440881 - RNA, 19 nt, Artificial Sequence
  Description of Artificial Sequence: Synthetic oligonucleotide
aaauguagcagacauuaca

SEQ ID NO: 440882 - RNA, 19 nt, Artificial Sequence
  Description of Artificial Sequence: Synthetic oligonucleotide
ucauauaugauaaucuguc

SEQ ID NO: 440883 - RNA, 19 nt, Artificial Sequence
  Description of Artificial Sequence: Synthetic oligonucleotide
aacgaaaugaauauaauau

SEQ ID NO: 440884 - RNA, 19 nt, Artificial Sequence
  Description of Artificial Sequence: Synthetic oligonucleotide
aacuuauuuagucugugcu

SEQ ID NO: 440885 - RNA, 19 nt, Artificial Sequence
  Description of Artificial Sequence: Synthetic oligonucleotide
uuuaaugauagcuuagcac

SEQ ID NO: 440886 - RNA, 19 nt, Artificial Sequence
  Description of Artificial Sequence: Synthetic oligonucleotide
ugcauaauaaggaauugug

SEQ ID NO: 440887 - RNA, 19 nt, Artificial Sequence
  Description of Artificial Sequence: Synthetic oligonucleotide
aacaacucgaugcuuugac

SEQ ID NO: 440888 - RNA, 19 nt, Artificial Sequence
  Description of Artificial Sequence: Synthetic oligonucleotide
cuguuuaugaaccaacucc

SEQ ID NO: 440889 - RNA, 19 nt, Artificial Sequence
  Description of Artificial Sequence: Synthetic oligonucleotide
agagaugcuaauuagauua

SEQ ID NO: 440890 - RNA, 19 nt, Artificial Sequence
  Description of Artificial Sequence: Synthetic oligonucleotide
ugcuaauuagauuaugagc

SEQ ID NO: 440891 - RNA, 19 nt, Artificial Sequence
  Description of Artificial Sequence: Synthetic oligonucleotide
cuaagaacaauguugcuac

SEQ ID NO: 440892 - RNA, 19 nt, Artificial Sequence
  Description of Artificial Sequence: Synthetic oligonucleotide
uuguguuccaacaacauuc

SEQ ID NO: 440893 - RNA, 19 nt, Artificial Sequence
  Description of Artificial Sequence: Synthetic oligonucleotide
uuuauugcuacgguuaucc

SEQ ID NO: 440894 - RNA, 19 nt, Artificial Sequence
  Description of Artificial Sequence: Synthetic oligonucleotide
aaauugucgauuuaaugau

SEQ ID NO: 440895 - RNA, 19 nt, Artificial Sequence
  Description of Artificial Sequence: Synthetic oligonucleotide
aauguugcuacacagcaaa

SEQ ID NO: 440896 - RNA, 19 nt, Artificial Sequence
  Description of Artificial Sequence: Synthetic oligonucleotide
augacaccaauccaaaacg

SEQ ID NO: 440897 - RNA, 19 nt, Artificial Sequence
  Description of Artificial Sequence: Synthetic oligonucleotide
acaauauacaccuauucgu

SEQ ID NO: 440898 - RNA, 19 nt, Artificial Sequence
  Description of Artificial Sequence: Synthetic oligonucleotide
aguuguuacaucaucuucc

SEQ ID NO: 440899 - RNA, 19 nt, Artificial Sequence
  Description of Artificial Sequence: Synthetic oligonucleotide
uguuuaugaaccaacucca

SEQ ID NO: 440900 - RNA, 19 nt, Artificial Sequence
  Description of Artificial Sequence: Synthetic oligonucleotide
auaaaaggggcauuguaag

SEQ ID NO: 440901 - RNA, 19 nt, Artificial Sequence
  Description of Artificial Sequence: Synthetic oligonucleotide
uacuguauugcauaauaag

SEQ ID NO: 440902 - RNA, 19 nt, Artificial Sequence
  Description of Artificial Sequence: Synthetic oligonucleotide
aauguagcagacauuacag

SEQ ID NO: 440903 - RNA, 19 nt, Artificial Sequence
  Description of Artificial Sequence: Synthetic oligonucleotide
uguuccaacaacauucaca

SEQ ID NO: 440904 - RNA, 19 nt, Artificial Sequence
  Description of Artificial Sequence: Synthetic oligonucleotide
auauaugauaaucuguccu

SEQ ID NO: 440905 - RNA, 19 nt, Artificial Sequence
  Description of Artificial Sequence: Synthetic oligonucleotide
uuagauuaugagcauuuug

SEQ ID NO: 440906 - RNA, 19 nt, Artificial Sequence
  Description of Artificial Sequence: Synthetic oligonucleotide
uauucguuagaauucagaa

SEQ ID NO: 440907 - RNA, 19 nt, Artificial Sequence
  Description of Artificial Sequence: Synthetic oligonucleotide
uauagauaacuacuguaga

SEQ ID NO: 440908 - RNA, 19 nt, Artificial Sequence
  Description of Artificial Sequence: Synthetic oligonucleotide
uauuauaggaagccacaag

SEQ ID NO: 440909 - RNA, 19 nt, Artificial Sequence
  Description of Artificial Sequence: Synthetic oligonucleotide
uguauauacagaaccuucu

SEQ ID NO: 440910 - RNA, 19 nt, Artificial Sequence
  Description of Artificial Sequence: Synthetic oligonucleotide
uagaauuauagagaaggag

SEQ ID NO: 440911 - RNA, 19 nt, Artificial Sequence
  Description of Artificial Sequence: Synthetic oligonucleotide
aguucuuuuauugcuacgg

SEQ ID NO: 440912 - RNA, 19 nt, Artificial Sequence
  Description of Artificial Sequence: Synthetic oligonucleotide
uaugugacgauuucucgag

SEQ ID NO: 440913 - RNA, 19 nt, Artificial Sequence
  Description of Artificial Sequence: Synthetic oligonucleotide
uugcauagaaacagcagcc

SEQ ID NO: 440914 - RNA, 19 nt, Artificial Sequence
  Description of Artificial Sequence: Synthetic oligonucleotide
agaauuauagagaaggaga

SEQ ID NO: 440915 - RNA, 19 nt, Artificial Sequence
  Description of Artificial Sequence: Synthetic oligonucleotide
uuuacuguccagucaaaug

SEQ ID NO: 440916 - RNA, 19 nt, Artificial Sequence
  Description of Artificial Sequence: Synthetic oligonucleotide
ugaagaagugacaaacaga

SEQ ID NO: 440917 - RNA, 19 nt, Artificial Sequence
  Description of Artificial Sequence: Synthetic oligonucleotide
gaagauguugaucugcuca

SEQ ID NO: 440918 - RNA, 19 nt, Artificial Sequence
  Description of Artificial Sequence: Synthetic oligonucleotide
uccaaaacgaaaugaauau

SEQ ID NO: 440919 - RNA, 19 nt, Artificial Sequence
  Description of Artificial Sequence: Synthetic oligonucleotide
ugcaaauaguuuaggaugu

SEQ ID NO: 440920 - RNA, 19 nt, Artificial Sequence
  Description of Artificial Sequence: Synthetic oligonucleotide
uacuuaaucaucugugcca

SEQ ID NO: 440921 - RNA, 19 nt, Artificial Sequence
  Description of Artificial Sequence: Synthetic oligonucleotide
acaauguugcuacacagca

SEQ ID NO: 440922 - RNA, 19 nt, Artificial Sequence
  Description of Artificial Sequence: Synthetic oligonucleotide
uauucuuaguuguccaaag

SEQ ID NO: 440923 - RNA, 19 nt, Artificial Sequence
  Description of Artificial Sequence: Synthetic oligonucleotide
uacuucauauuccacacaa

SEQ ID NO: 440924 - RNA, 19 nt, Artificial Sequence
  Description of Artificial Sequence: Synthetic oligonucleotide
guugcuacacagcaaaggc

SEQ ID NO: 440925 - RNA, 19 nt, Artificial Sequence
  Description of Artificial Sequence: Synthetic oligonucleotide
augcuaauuagauuaugag

SEQ ID NO: 440926 - RNA, 19 nt, Artificial Sequence
  Description of Artificial Sequence: Synthetic oligonucleotide
ugucgauuuaaugauagcu

SEQ ID NO: 440927 - RNA, 19 nt, Artificial Sequence
  Description of Artificial Sequence: Synthetic oligonucleotide
ucacagauuuggaggaugg

SEQ ID NO: 440928 - RNA, 19 nt, Artificial Sequence
  Description of Artificial Sequence: Synthetic oligonucleotide
cauuguuauuauaggaagc

SEQ ID NO: 440929 - RNA, 19 nt, Artificial Sequence
  Description of Artificial Sequence: Synthetic oligonucleotide
gauuuaaugauagcuuagc

SEQ ID NO: 440930 - RNA, 19 nt, Artificial Sequence
  Description of Artificial Sequence: Synthetic oligonucleotide
auauguaccaccaacgaca

SEQ ID NO: 440931 - RNA, 19 nt, Artificial Sequence
  Description of Artificial Sequence: Synthetic oligonucleotide
aucauuucggggaacagcg

SEQ ID NO: 440932 - RNA, 19 nt, Artificial Sequence
  Description of Artificial Sequence: Synthetic oligonucleotide
aaaugcuggcagucgguac

SEQ ID NO: 440933 - RNA, 19 nt, Artificial Sequence
  Description of Artificial Sequence: Synthetic oligonucleotide
auuuaaugauagcuuagca

SEQ ID NO: 440934 - RNA, 19 nt, Artificial Sequence
  Description of Artificial Sequence: Synthetic oligonucleotide
aaugaaacuugaaaagggu

SEQ ID NO: 440935 - RNA, 19 nt, Artificial Sequence
  Description of Artificial Sequence: Synthetic oligonucleotide
gacauuacagcugacuggc

SEQ ID NO: 440936 - RNA, 19 nt, Artificial Sequence
  Description of Artificial Sequence: Synthetic oligonucleotide
cauauaugauaaucugucc

SEQ ID NO: 440937 - RNA, 19 nt, Artificial Sequence
  Description of Artificial Sequence: Synthetic oligonucleotide
acaacucgaugcuuugacc

SEQ ID NO: 440938 - RNA, 19 nt, Artificial Sequence
  Description of Artificial Sequence: Synthetic oligonucleotide
uauugcuacgguuauccca

SEQ ID NO: 440939 - RNA, 19 nt, Artificial Sequence
  Description of Artificial Sequence: Synthetic oligonucleotide
aguuuauccauggaauuuc

SEQ ID NO: 440940 - RNA, 19 nt, Artificial Sequence
  Description of Artificial Sequence: Synthetic oligonucleotide
auagauaacuacuguagaa

SEQ ID NO: 440941 - RNA, 19 nt, Artificial Sequence
  Description of Artificial Sequence: Synthetic oligonucleotide
ucuguaaagucgucagcgg

SEQ ID NO: 440942 - RNA, 19 nt, Artificial Sequence
  Description of Artificial Sequence: Synthetic oligonucleotide
cauuguugagauuccacag

SEQ ID NO: 440943 - RNA, 19 nt, Artificial Sequence
  Description of Artificial Sequence: Synthetic oligonucleotide
uguuauucuuaguugucca

SEQ ID NO: 440944 - RNA, 19 nt, Artificial Sequence
  Description of Artificial Sequence: Synthetic oligonucleotide
agauuaugagcauuuugug

SEQ ID NO: 440945 - RNA, 19 nt, Artificial Sequence
  Description of Artificial Sequence: Synthetic oligonucleotide
augauagcuuagcaccugc

SEQ ID NO: 440946 - RNA, 19 nt, Artificial Sequence
  Description of Artificial Sequence: Synthetic oligonucleotide
ucuuaguuguccaaaguuu

SEQ ID NO: 440947 - RNA, 19 nt, Artificial Sequence
  Description of Artificial Sequence: Synthetic oligonucleotide
agauccagucuccccaugc

SEQ ID NO: 440948 - RNA, 19 nt, Artificial Sequence
  Description of Artificial Sequence: Synthetic oligonucleotide
agaauucagaaaaggcugc

SEQ ID NO: 440949 - RNA, 19 nt, Artificial Sequence
  Description of Artificial Sequence: Synthetic oligonucleotide
auaggaagccacaaguaac

SEQ ID NO: 440950 - RNA, 19 nt, Artificial Sequence
  Description of Artificial Sequence: Synthetic oligonucleotide
uuuaauagguccucgucua

SEQ ID NO: 440951 - RNA, 19 nt, Artificial Sequence
  Description of Artificial Sequence: Synthetic oligonucleotide
ucaguuaguucaugagggg

SEQ ID NO: 440952 - RNA, 19 nt, Artificial Sequence
  Description of Artificial Sequence: Synthetic oligonucleotide
aacagcuaacaacucgaug

SEQ ID NO: 440953 - RNA, 19 nt, Artificial Sequence
  Description of Artificial Sequence: Synthetic oligonucleotide
aaccuucuucacuacccac

SEQ ID NO: 440954 - RNA, 19 nt, Artificial Sequence
  Description of Artificial Sequence: Synthetic oligonucleotide
cuguauugcauaauaagga

SEQ ID NO: 440955 - RNA, 19 nt, Artificial Sequence
  Description of Artificial Sequence: Synthetic oligonucleotide
guacuuaaucaucugugcc

SEQ ID NO: 440956 - RNA, 19 nt, Artificial Sequence
  Description of Artificial Sequence: Synthetic oligonucleotide
auaauaaggaauugugguu

SEQ ID NO: 440957 - RNA, 19 nt, Artificial Sequence
  Description of Artificial Sequence: Synthetic oligonucleotide
aaucuguccuucagaaucg

SEQ ID NO: 440958 - RNA, 19 nt, Artificial Sequence
  Description of Artificial Sequence: Synthetic oligonucleotide
uacaauucuuguggaaugg

SEQ ID NO: 440959 - RNA, 19 nt, Artificial Sequence
  Description of Artificial Sequence: Synthetic oligonucleotide
gagguuuaggaguuguuac

SEQ ID NO: 440960 - RNA, 19 nt, Artificial Sequence
  Description of Artificial Sequence: Synthetic oligonucleotide
gaacuuauuuagucugugc

SEQ ID NO: 440961 - RNA, 19 nt, Artificial Sequence
  Description of Artificial Sequence: Synthetic oligonucleotide
auugucgauuuaaugauag

SEQ ID NO: 440962 - RNA, 19 nt, Artificial Sequence
  Description of Artificial Sequence: Synthetic oligonucleotide
uaauaaggaauugugguua

SEQ ID NO: 440963 - RNA, 19 nt, Artificial Sequence
  Description of Artificial Sequence: Synthetic oligonucleotide
aaguuuaauagguccucgu

SEQ ID NO: 440964 - RNA, 19 nt, Artificial Sequence
  Description of Artificial Sequence: Synthetic oligonucleotide
auaugugacgauuucucga

SEQ ID NO: 440965 - RNA, 19 nt, Artificial Sequence
  Description of Artificial Sequence: Synthetic oligonucleotide
aacacauacucugggguag

SEQ ID NO: 440966 - RNA, 19 nt, Artificial Sequence
  Description of Artificial Sequence: Synthetic oligonucleotide
auugaaguuacagcuacug

SEQ ID NO: 440967 - RNA, 19 nt, Artificial Sequence
  Description of Artificial Sequence: Synthetic oligonucleotide
cauagucggaauuaucuuc

SEQ ID NO: 440968 - RNA, 19 nt, Artificial Sequence
  Description of Artificial Sequence: Synthetic oligonucleotide
acaauaggggaaucuguag

SEQ ID NO: 440969 - RNA, 19 nt, Artificial Sequence
  Description of Artificial Sequence: Synthetic oligonucleotide
aauuagauuaugagcauuu

SEQ ID NO: 440970 - RNA, 19 nt, Artificial Sequence
  Description of Artificial Sequence: Synthetic oligonucleotide
gaauauguaccaccaacga

SEQ ID NO: 440971 - RNA, 19 nt, Artificial Sequence
  Description of Artificial Sequence: Synthetic oligonucleotide
uguccagucaaaugaagaa

SEQ ID NO: 440972 - RNA, 19 nt, Artificial Sequence
  Description of Artificial Sequence: Synthetic oligonucleotide
aacagcgaucugcucuccc

SEQ ID NO: 440973 - RNA, 19 nt, Artificial Sequence
  Description of Artificial Sequence: Synthetic oligonucleotide
uaaugauagcuuagcaccu

SEQ ID NO: 440974 - RNA, 19 nt, Artificial Sequence
  Description of Artificial Sequence: Synthetic oligonucleotide
aauagguccucgucuagau

SEQ ID NO: 440975 - RNA, 19 nt, Artificial Sequence
  Description of Artificial Sequence: Synthetic oligonucleotide
uuguuauucuuaguugucc

SEQ ID NO: 440976 - RNA, 19 nt, Artificial Sequence
  Description of Artificial Sequence: Synthetic oligonucleotide
uaggauguacuuaaucauc

SEQ ID NO: 440977 - RNA, 19 nt, Artificial Sequence
  Description of Artificial Sequence: Synthetic oligonucleotide
ugaccaacgcucaucaaaa

SEQ ID NO: 440978 - RNA, 19 nt, Artificial Sequence
  Description of Artificial Sequence: Synthetic oligonucleotide
aauaaggaauugugguuau

SEQ ID NO: 440979 - RNA, 19 nt, Artificial Sequence
  Description of Artificial Sequence: Synthetic oligonucleotide
uguguuccaacaacauuca

SEQ ID NO: 440980 - RNA, 19 nt, Artificial Sequence
  Description of Artificial Sequence: Synthetic oligonucleotide
uaugauaaucuguccuuca

SEQ ID NO: 440981 - RNA, 19 nt, Artificial Sequence
  Description of Artificial Sequence: Synthetic oligonucleotide
ugaaaagggucggugaaug

SEQ ID NO: 440982 - RNA, 19 nt, Artificial Sequence
  Description of Artificial Sequence: Synthetic oligonucleotide
auuguugagauuccacaga

SEQ ID NO: 440983 - RNA, 19 nt, Artificial Sequence
  Description of Artificial Sequence: Synthetic oligonucleotide
ucgucuagaucccacggca

SEQ ID NO: 440984 - RNA, 19 nt, Artificial Sequence
  Description of Artificial Sequence: Synthetic oligonucleotide
cuguauauacagaaccuuc

SEQ ID NO: 440985 - RNA, 19 nt, Artificial Sequence
  Description of Artificial Sequence: Synthetic oligonucleotide
uguaguuagccccaugcuu

SEQ ID NO: 440986 - RNA, 19 nt, Artificial Sequence
  Description of Artificial Sequence: Synthetic oligonucleotide
gaauuauagagaaggagaa

SEQ ID NO: 440987 - RNA, 19 nt, Artificial Sequence
  Description of Artificial Sequence: Synthetic oligonucleotide
uaggggaaucuguaguuag

SEQ ID NO: 440988 - RNA, 19 nt, Artificial Sequence
  Description of Artificial Sequence: Synthetic oligonucleotide
uuaauagguccucgucuag

SEQ ID NO: 440989 - RNA, 19 nt, Artificial Sequence
  Description of Artificial Sequence: Synthetic oligonucleotide
caguggaacacauacucug

SEQ ID NO: 440990 - RNA, 19 nt, Artificial Sequence
  Description of Artificial Sequence: Synthetic oligonucleotide
ucguuagaauucagaaaag

SEQ ID NO: 440991 - RNA, 19 nt, Artificial Sequence
  Description of Artificial Sequence: Synthetic oligonucleotide
cauuacagcugacuggcag

SEQ ID NO: 440992 - RNA, 19 nt, Artificial Sequence
  Description of Artificial Sequence: Synthetic oligonucleotide
gaccaauccaaacagcuaa

SEQ ID NO: 440993 - RNA, 19 nt, Artificial Sequence
  Description of Artificial Sequence: Synthetic oligonucleotide
uguugacaucuccaacagg

SEQ ID NO: 440994 - RNA, 19 nt, Artificial Sequence
  Description of Artificial Sequence: Synthetic oligonucleotide
uguucggccaaaucuugcc

SEQ ID NO: 440995 - RNA, 19 nt, Artificial Sequence
  Description of Artificial Sequence: Synthetic oligonucleotide
acgaaaugaauauaauaua

SEQ ID NO: 440996 - RNA, 19 nt, Artificial Sequence
  Description of Artificial Sequence: Synthetic oligonucleotide
uccucugaguguaaaauuu

SEQ ID NO: 440997 - RNA, 19 nt, Artificial Sequence
  Description of Artificial Sequence: Synthetic oligonucleotide
uguaaagucgucagcggua

SEQ ID NO: 440998 - RNA, 19 nt, Artificial Sequence
  Description of Artificial Sequence: Synthetic oligonucleotide
gauuaugagcauuuugugu

SEQ ID NO: 440999 - RNA, 19 nt, Artificial Sequence
  Description of Artificial Sequence: Synthetic oligonucleotide
agauaacuacuguagaauu

SEQ ID NO: 441000 - RNA, 19 nt, Artificial Sequence
  Description of Artificial Sequence: Synthetic oligonucleotide
auauaaaaggggcauugua

SEQ ID NO: 441001 - RNA, 19 nt, Artificial Sequence
  Description of Artificial Sequence: Synthetic oligonucleotide
uacgguuaucccaaagcac

SEQ ID NO: 441002 - RNA, 19 nt, Artificial Sequence
  Description of Artificial Sequence: Synthetic oligonucleotide
auucguuagaauucagaaa

SEQ ID NO: 441003 - RNA, 19 nt, Artificial Sequence
  Description of Artificial Sequence: Synthetic oligonucleotide
gauucgagcagccgccucc

SEQ ID NO: 441004 - RNA, 19 nt, Artificial Sequence
  Description of Artificial Sequence: Synthetic oligonucleotide
aucauaaacauagucggaa

SEQ ID NO: 441005 - RNA, 19 nt, Artificial Sequence
  Description of Artificial Sequence: Synthetic oligonucleotide
uuucuacaauucuugugga

SEQ ID NO: 441006 - RNA, 19 nt, Artificial Sequence
  Description of Artificial Sequence: Synthetic oligonucleotide
uaaaaggggcauuguaagu

SEQ ID NO: 441007 - RNA, 19 nt, Artificial Sequence
  Description of Artificial Sequence: Synthetic oligonucleotide
guuuaggauguacuuaauc

SEQ ID NO: 441008 - RNA, 19 nt, Artificial Sequence
  Description of Artificial Sequence: Synthetic oligonucleotide
aaggaauugugguuauuua

SEQ ID NO: 441009 - RNA, 19 nt, Artificial Sequence
  Description of Artificial Sequence: Synthetic oligonucleotide
uuggccugaauauguacca

SEQ ID NO: 441010 - RNA, 19 nt, Artificial Sequence
  Description of Artificial Sequence: Synthetic oligonucleotide
uuaagagccggguuucccu

SEQ ID NO: 441011 - RNA, 19 nt, Artificial Sequence
  Description of Artificial Sequence: Synthetic oligonucleotide
auauauaguauuacaaguu

SEQ ID NO: 441012 - RNA, 19 nt, Artificial Sequence
  Description of Artificial Sequence: Synthetic oligonucleotide
ucauaaacauagucggaau

SEQ ID NO: 441013 - RNA, 19 nt, Artificial Sequence
  Description of Artificial Sequence: Synthetic oligonucleotide
aaugauagcuuagcaccug

SEQ ID NO: 441014 - RNA, 19 nt, Artificial Sequence
  Description of Artificial Sequence: Synthetic oligonucleotide
gaagugacaaacagaugug

SEQ ID NO: 441015 - RNA, 19 nt, Artificial Sequence
  Description of Artificial Sequence: Synthetic oligonucleotide
acuaagaacaauguugcua

SEQ ID NO: 441016 - RNA, 19 nt, Artificial Sequence
  Description of Artificial Sequence: Synthetic oligonucleotide
augugagaagucuacugcu

SEQ ID NO: 441017 - RNA, 19 nt, Artificial Sequence
  Description of Artificial Sequence: Synthetic oligonucleotide
uuuauccauggaauuuccu

SEQ ID NO: 441018 - RNA, 19 nt, Artificial Sequence
  Description of Artificial Sequence: Synthetic oligonucleotide
aagugacaaacagauguga

SEQ ID NO: 441019 - RNA, 19 nt, Artificial Sequence
  Description of Artificial Sequence: Synthetic oligonucleotide
aaugcaugcugggacuaag

SEQ ID NO: 441020 - RNA, 19 nt, Artificial Sequence
  Description of Artificial Sequence: Synthetic oligonucleotide
cagaaaugcuggcagucgg

SEQ ID NO: 441021 - RNA, 19 nt, Artificial Sequence
  Description of Artificial Sequence: Synthetic oligonucleotide
ggacuaagaacaauguugc

SEQ ID NO: 441022 - RNA, 19 nt, Artificial Sequence
  Description of Artificial Sequence: Synthetic oligonucleotide
auucuuaguuguccaaagu

SEQ ID NO: 441023 - RNA, 19 nt, Artificial Sequence
  Description of Artificial Sequence: Synthetic oligonucleotide
gauacugggaugaccaauc

SEQ ID NO: 441024 - RNA, 19 nt, Artificial Sequence
  Description of Artificial Sequence: Synthetic oligonucleotide
gaagucuacugcuccaaca

SEQ ID NO: 441025 - RNA, 19 nt, Artificial Sequence
  Description of Artificial Sequence: Synthetic oligonucleotide
agggucggugaaugcaugc

SEQ ID NO: 441026 - RNA, 19 nt, Artificial Sequence
  Description of Artificial Sequence: Synthetic oligonucleotide
guauaugugacgauuucuc

SEQ ID NO: 441027 - RNA, 19 nt, Artificial Sequence
  Description of Artificial Sequence: Synthetic oligonucleotide
cacgggaguucuuuuauug

SEQ ID NO: 441028 - RNA, 19 nt, Artificial Sequence
  Description of Artificial Sequence: Synthetic oligonucleotide
gaaaagggucggugaaugc

SEQ ID NO: 441029 - RNA, 19 nt, Artificial Sequence
  Description of Artificial Sequence: Synthetic oligonucleotide
uccucgucuagaucccacg

SEQ ID NO: 441030 - RNA, 19 nt, Artificial Sequence
  Description of Artificial Sequence: Synthetic oligonucleotide
uucggccaaaucuugccca

SEQ ID NO: 441031 - RNA, 19 nt, Artificial Sequence
  Description of Artificial Sequence: Synthetic oligonucleotide
caccuauucguuagaauuc

SEQ ID NO: 441032 - RNA, 19 nt, Artificial Sequence
  Description of Artificial Sequence: Synthetic oligonucleotide
uuagccccaugcuuugaag

SEQ ID NO: 441033 - RNA, 19 nt, Artificial Sequence
  Description of Artificial Sequence: Synthetic oligonucleotide
cuaacaacucgaugcuuug

SEQ ID NO: 441034 - RNA, 19 nt, Artificial Sequence
  Description of Artificial Sequence: Synthetic oligonucleotide
guuuaauagguccucgucu

SEQ ID NO: 441035 - RNA, 19 nt, Artificial Sequence
  Description of Artificial Sequence: Synthetic oligonucleotide
cuauucguuagaauucaga

SEQ ID NO: 441036 - RNA, 19 nt, Artificial Sequence
  Description of Artificial Sequence: Synthetic oligonucleotide
ugcaugcugggacuaagaa

SEQ ID NO: 441037 - RNA, 19 nt, Artificial Sequence
  Description of Artificial Sequence: Synthetic oligonucleotide
cucgaugcuuugaccaacg

SEQ ID NO: 441038 - RNA, 19 nt, Artificial Sequence
  Description of Artificial Sequence: Synthetic oligonucleotide
ggugaaugcaugcugggac

SEQ ID NO: 441039 - RNA, 19 nt, Artificial Sequence
  Description of Artificial Sequence: Synthetic oligonucleotide
uaguuguccaaaguuuuac

SEQ ID NO: 441040 - RNA, 19 nt, Artificial Sequence
  Description of Artificial Sequence: Synthetic oligonucleotide
acgguuaucccaaagcaca

SEQ ID NO: 441041 - RNA, 19 nt, Artificial Sequence
  Description of Artificial Sequence: Synthetic oligonucleotide
ucggggaacagcgaucugc

SEQ ID NO: 441042 - RNA, 19 nt, Artificial Sequence
  Description of Artificial Sequence: Synthetic oligonucleotide
auagucggaauuaucuuca

SEQ ID NO: 441043 - RNA, 19 nt, Artificial Sequence
  Description of Artificial Sequence: Synthetic oligonucleotide
ccaaacagcuaacaacucg

SEQ ID NO: 441044 - RNA, 19 nt, Artificial Sequence
  Description of Artificial Sequence: Synthetic oligonucleotide
uugucgauuuaaugauagc

SEQ ID NO: 441045 - RNA, 19 nt, Artificial Sequence
  Description of Artificial Sequence: Synthetic oligonucleotide
uuauugcuacgguuauccc

SEQ ID NO: 441046 - RNA, 19 nt, Artificial Sequence
  Description of Artificial Sequence: Synthetic oligonucleotide
cuacgguuaucccaaagca

SEQ ID NO: 441047 - RNA, 19 nt, Artificial Sequence
  Description of Artificial Sequence: Synthetic oligonucleotide
agaacuuauuuagucugug

SEQ ID NO: 441048 - RNA, 19 nt, Artificial Sequence
  Description of Artificial Sequence: Synthetic oligonucleotide
ugggugggugaccacauaa

SEQ ID NO: 441049 - RNA, 19 nt, Artificial Sequence
  Description of Artificial Sequence: Synthetic oligonucleotide
gcuacgguuaucccaaagc

SEQ ID NO: 441050 - RNA, 19 nt, Artificial Sequence
  Description of Artificial Sequence: Synthetic oligonucleotide
ggcaguggaacacauacuc

SEQ ID NO: 441051 - RNA, 19 nt, Artificial Sequence
  Description of Artificial Sequence: Synthetic oligonucleotide
ucucacugauuccagcuuu

SEQ ID NO: 441052 - RNA, 19 nt, Artificial Sequence
  Description of Artificial Sequence: Synthetic oligonucleotide
auagguccucgucuagauc

SEQ ID NO: 441053 - RNA, 19 nt, Artificial Sequence
  Description of Artificial Sequence: Synthetic oligonucleotide
ugcuacgguuaucccaaag

SEQ ID NO: 441054 - RNA, 19 nt, Artificial Sequence
  Description of Artificial Sequence: Synthetic oligonucleotide
aacucgaugcuuugaccaa

SEQ ID NO: 441055 - RNA, 19 nt, Artificial Sequence
  Description of Artificial Sequence: Synthetic oligonucleotide
caaguguucggccaaaucu

SEQ ID NO: 441056 - RNA, 19 nt, Artificial Sequence
  Description of Artificial Sequence: Synthetic oligonucleotide
acccaguuuauccauggaa

SEQ ID NO: 441057 - RNA, 19 nt, Artificial Sequence
  Description of Artificial Sequence: Synthetic oligonucleotide
uguuaucgcucucuucauc

SEQ ID NO: 441058 - RNA, 19 nt, Artificial Sequence
  Description of Artificial Sequence: Synthetic oligonucleotide
auugcuacgguuaucccaa

SEQ ID NO: 441059 - RNA, 19 nt, Artificial Sequence
  Description of Artificial Sequence: Synthetic oligonucleotide
ugauagcuuagcaccugcu

SEQ ID NO: 441060 - RNA, 19 nt, Artificial Sequence
  Description of Artificial Sequence: Synthetic oligonucleotide
cacauaacaucauaaacau

SEQ ID NO: 441061 - RNA, 19 nt, Artificial Sequence
  Description of Artificial Sequence: Synthetic oligonucleotide
uaauagguccucgucuaga

SEQ ID NO: 441062 - RNA, 19 nt, Artificial Sequence
  Description of Artificial Sequence: Synthetic oligonucleotide
gauaacuacuguagaauua

SEQ ID NO: 441063 - RNA, 19 nt, Artificial Sequence
  Description of Artificial Sequence: Synthetic oligonucleotide
ugcauagaaacagcagccu

SEQ ID NO: 441064 - RNA, 19 nt, Artificial Sequence
  Description of Artificial Sequence: Synthetic oligonucleotide
agcaugcaaauaguuuagg

SEQ ID NO: 441065 - RNA, 19 nt, Artificial Sequence
  Description of Artificial Sequence: Synthetic oligonucleotide
guuaucgcucucuucaucu

SEQ ID NO: 441066 - RNA, 19 nt, Artificial Sequence
  Description of Artificial Sequence: Synthetic oligonucleotide
agaucagauucuucuugca

SEQ ID NO: 441067 - RNA, 19 nt, Artificial Sequence
  Description of Artificial Sequence: Synthetic oligonucleotide
cugccuuugacuguuuaug

SEQ ID NO: 441068 - RNA, 19 nt, Artificial Sequence
  Description of Artificial Sequence: Synthetic oligonucleotide
ucuagaucccacggcacca

SEQ ID NO: 441069 - RNA, 19 nt, Artificial Sequence
  Description of Artificial Sequence: Synthetic oligonucleotide
ugaccaauccaaacagcua

SEQ ID NO: 441070 - RNA, 19 nt, Artificial Sequence
  Description of Artificial Sequence: Synthetic oligonucleotide
acauagucggaauuaucuu

SEQ ID NO: 441071 - RNA, 19 nt, Artificial Sequence
  Description of Artificial Sequence: Synthetic oligonucleotide
caugcaaauaguuuaggau

SEQ ID NO: 441072 - RNA, 19 nt, Artificial Sequence
  Description of Artificial Sequence: Synthetic oligonucleotide
aucccacggcaccaucucc

SEQ ID NO: 441073 - RNA, 19 nt, Artificial Sequence
  Description of Artificial Sequence: Synthetic oligonucleotide
gucuagaucccacggcacc

SEQ ID NO: 441074 - RNA, 19 nt, Artificial Sequence
  Description of Artificial Sequence: Synthetic oligonucleotide
augugacgauuucucgagg

SEQ ID NO: 441075 - RNA, 19 nt, Artificial Sequence
  Description of Artificial Sequence: Synthetic oligonucleotide
acuuaaucaucugugccaa

SEQ ID NO: 441076 - RNA, 19 nt, Artificial Sequence
  Description of Artificial Sequence: Synthetic oligonucleotide
ugcacgggaguucuuuuau

SEQ ID NO: 441077 - RNA, 19 nt, Artificial Sequence
  Description of Artificial Sequence: Synthetic oligonucleotide
aaguguucggccaaaucuu

SEQ ID NO: 441078 - RNA, 19 nt, Artificial Sequence
  Description of Artificial Sequence: Synthetic oligonucleotide
cucgucuagaucccacggc

SEQ ID NO: 441079 - RNA, 19 nt, Artificial Sequence
  Description of Artificial Sequence: Synthetic oligonucleotide
guucggccaaaucuugccc

SEQ ID NO: 441080 - RNA, 19 nt, Artificial Sequence
  Description of Artificial Sequence: Synthetic oligonucleotide
uacaccuauucguuagaau

SEQ ID NO: 441081 - RNA, 19 nt, Artificial Sequence
  Description of Artificial Sequence: Synthetic oligonucleotide
aaguccacuugaguaauuu

SEQ ID NO: 441082 - RNA, 19 nt, Artificial Sequence
  Description of Artificial Sequence: Synthetic oligonucleotide
gggaaaguccacuugagua

SEQ ID NO: 441083 - RNA, 19 nt, Artificial Sequence
  Description of Artificial Sequence: Synthetic oligonucleotide
aaucgcccacggcaaucuc

SEQ ID NO: 441084 - RNA, 19 nt, Artificial Sequence
  Description of Artificial Sequence: Synthetic oligonucleotide
accuauucguuagaauuca

SEQ ID NO: 441085 - RNA, 19 nt, Artificial Sequence
  Description of Artificial Sequence: Synthetic oligonucleotide
aauugucgauuuaaugaua

SEQ ID NO: 441086 - RNA, 19 nt, Artificial Sequence
  Description of Artificial Sequence: Synthetic oligonucleotide
auuucggggaacagcgauc

SEQ ID NO: 441087 - RNA, 19 nt, Artificial Sequence
  Description of Artificial Sequence: Synthetic oligonucleotide
ucgaugcuuugaccaacgc

SEQ ID NO: 441088 - RNA, 19 nt, Artificial Sequence
  Description of Artificial Sequence: Synthetic oligonucleotide
gacaauaggggaaucugua

SEQ ID NO: 441089 - RNA, 19 nt, Artificial Sequence
  Description of Artificial Sequence: Synthetic oligonucleotide
uuauuuagucugugcuuua

SEQ ID NO: 441090 - RNA, 19 nt, Artificial Sequence
  Description of Artificial Sequence: Synthetic oligonucleotide
agaaucgcccacggcaauc

SEQ ID NO: 441091 - RNA, 19 nt, Artificial Sequence
  Description of Artificial Sequence: Synthetic oligonucleotide
acaccaauccaaaacgaaa

SEQ ID NO: 441092 - RNA, 19 nt, Artificial Sequence
  Description of Artificial Sequence: Synthetic oligonucleotide
ucauuucggggaacagcga

SEQ ID NO: 441093 - RNA, 19 nt, Artificial Sequence
  Description of Artificial Sequence: Synthetic oligonucleotide
ugccguggcggcaugcugu

SEQ ID NO: 441094 - RNA, 19 nt, Artificial Sequence
  Description of Artificial Sequence: Synthetic oligonucleotide
ggaaggacauugaaguuac

SEQ ID NO: 441095 - RNA, 19 nt, Artificial Sequence
  Description of Artificial Sequence: Synthetic oligonucleotide
guuaagagccggguuuccc

SEQ ID NO: 441096 - RNA, 19 nt, Artificial Sequence
  Description of Artificial Sequence: Synthetic oligonucleotide
cauggcuaggcagggauuc

SEQ ID NO: 441097 - RNA, 19 nt, Artificial Sequence
  Description of Artificial Sequence: Synthetic oligonucleotide
acaauucuuguggaauggu

SEQ ID NO: 441098 - RNA, 19 nt, Artificial Sequence
  Description of Artificial Sequence: Synthetic oligonucleotide
ggcagcgagaacauaauca

SEQ ID NO: 441099 - RNA, 19 nt, Artificial Sequence
  Description of Artificial Sequence: Synthetic oligonucleotide
cuucacuuggugugcucac

SEQ ID NO: 441100 - RNA, 19 nt, Artificial Sequence
  Description of Artificial Sequence: Synthetic oligonucleotide
accaacgacaagauuugga

SEQ ID NO: 441101 - RNA, 19 nt, Artificial Sequence
  Description of Artificial Sequence: Synthetic oligonucleotide
gaaccaacuccaugcuauc

SEQ ID NO: 441102 - RNA, 19 nt, Artificial Sequence
  Description of Artificial Sequence: Synthetic oligonucleotide
cacggcaccaucuccagaa

SEQ ID NO: 441103 - RNA, 19 nt, Artificial Sequence
  Description of Artificial Sequence: Synthetic oligonucleotide
cuucagaaucgcccacggc

SEQ ID NO: 441104 - RNA, 19 nt, Artificial Sequence
  Description of Artificial Sequence: Synthetic oligonucleotide
gaucccacggcaccaucuc

SEQ ID NO: 441105 - RNA, 19 nt, Artificial Sequence
  Description of Artificial Sequence: Synthetic oligonucleotide
cuuaguuguccaaaguuuu

SEQ ID NO: 441106 - RNA, 19 nt, Artificial Sequence
  Description of Artificial Sequence: Synthetic oligonucleotide
ggugggugaccacauaaca

SEQ ID NO: 441107 - RNA, 19 nt, Artificial Sequence
  Description of Artificial Sequence: Synthetic oligonucleotide
uggugugcucacagauuug

SEQ ID NO: 441108 - RNA, 19 nt, Artificial Sequence
  Description of Artificial Sequence: Synthetic oligonucleotide
auuagauuaugagcauuuu

SEQ ID NO: 441109 - RNA, 19 nt, Artificial Sequence
  Description of Artificial Sequence: Synthetic oligonucleotide
aagucgucagcgguauuaa

SEQ ID NO: 441110 - RNA, 19 nt, Artificial Sequence
  Description of Artificial Sequence: Synthetic oligonucleotide
aguguucggccaaaucuug

SEQ ID NO: 441111 - RNA, 19 nt, Artificial Sequence
  Description of Artificial Sequence: Synthetic oligonucleotide
cuuaaucaucugugccaac

SEQ ID NO: 441112 - RNA, 19 nt, Artificial Sequence
  Description of Artificial Sequence: Synthetic oligonucleotide
gucgucagcgguauuaaaa

SEQ ID NO: 441113 - RNA, 19 nt, Artificial Sequence
  Description of Artificial Sequence: Synthetic oligonucleotide
uucacuuggugugcucaca

SEQ ID NO: 441114 - RNA, 19 nt, Artificial Sequence
  Description of Artificial Sequence: Synthetic oligonucleotide
cucacacgguuaagagccg

SEQ ID NO: 441115 - RNA, 19 nt, Artificial Sequence
  Description of Artificial Sequence: Synthetic oligonucleotide
guuaucccaaagcacaauu

SEQ ID NO: 441116 - RNA, 19 nt, Artificial Sequence
  Description of Artificial Sequence: Synthetic oligonucleotide
gcaugcugggacuaagaac

SEQ ID NO: 441117 - RNA, 19 nt, Artificial Sequence
  Description of Artificial Sequence: Synthetic oligonucleotide
gugaccacauaacaucaua

SEQ ID NO: 441118 - RNA, 19 nt, Artificial Sequence
  Description of Artificial Sequence: Synthetic oligonucleotide
aaagcacaauuuggccuga

SEQ ID NO: 441119 - RNA, 19 nt, Artificial Sequence
  Description of Artificial Sequence: Synthetic oligonucleotide
cgauuuaaugauagcuuag

SEQ ID NO: 441120 - RNA, 19 nt, Artificial Sequence
  Description of Artificial Sequence: Synthetic oligonucleotide
uuacagcuacugccuuuga

SEQ ID NO: 441121 - RNA, 19 nt, Artificial Sequence
  Description of Artificial Sequence: Synthetic oligonucleotide
ggaacagcgaucugcucuc

SEQ ID NO: 441122 - RNA, 19 nt, Artificial Sequence
  Description of Artificial Sequence: Synthetic oligonucleotide
ccacuugaguaauuuuggc

SEQ ID NO: 441123 - RNA, 19 nt, Artificial Sequence
  Description of Artificial Sequence: Synthetic oligonucleotide
gauagcuuagcaccugcuu

SEQ ID NO: 441124 - RNA, 19 nt, Artificial Sequence
  Description of Artificial Sequence: Synthetic oligonucleotide
ggguugagcuguaacuggg

SEQ ID NO: 441125 - RNA, 19 nt, Artificial Sequence
  Description of Artificial Sequence: Synthetic oligonucleotide
ugcucucccacaucauaua

SEQ ID NO: 441126 - RNA, 19 nt, Artificial Sequence
  Description of Artificial Sequence: Synthetic oligonucleotide
agguccucgucuagauccc

SEQ ID NO: 441127 - RNA, 19 nt, Artificial Sequence
  Description of Artificial Sequence: Synthetic oligonucleotide
auacaccuauucguuagaa

SEQ ID NO: 441128 - RNA, 19 nt, Artificial Sequence
  Description of Artificial Sequence: Synthetic oligonucleotide
ugaaugcaugcugggacua

SEQ ID NO: 441129 - RNA, 19 nt, Artificial Sequence
  Description of Artificial Sequence: Synthetic oligonucleotide
uuugaccaacgcucaucaa

SEQ ID NO: 441130 - RNA, 19 nt, Artificial Sequence
  Description of Artificial Sequence: Synthetic oligonucleotide
agccgcaugacaguggauu

SEQ ID NO: 441131 - RNA, 19 nt, Artificial Sequence
  Description of Artificial Sequence: Synthetic oligonucleotide
aagggucggugaaugcaug

SEQ ID NO: 441132 - RNA, 19 nt, Artificial Sequence
  Description of Artificial Sequence: Synthetic oligonucleotide
aucuguaguuagccccaug

SEQ ID NO: 441133 - RNA, 19 nt, Artificial Sequence
  Description of Artificial Sequence: Synthetic oligonucleotide
uccaucucacacgguuaag

SEQ ID NO: 441134 - RNA, 19 nt, Artificial Sequence
  Description of Artificial Sequence: Synthetic oligonucleotide
ccucugaguguaaaauuug

SEQ ID NO: 441135 - RNA, 19 nt, Artificial Sequence
  Description of Artificial Sequence: Synthetic oligonucleotide
cuuauuuagucugugcuuu

SEQ ID NO: 441136 - RNA, 19 nt, Artificial Sequence
  Description of Artificial Sequence: Synthetic oligonucleotide
uuaucgcucucuucaucuu

SEQ ID NO: 441137 - RNA, 19 nt, Artificial Sequence
  Description of Artificial Sequence: Synthetic oligonucleotide
uugcacgggaguucuuuua

SEQ ID NO: 441138 - RNA, 19 nt, Artificial Sequence
  Description of Artificial Sequence: Synthetic oligonucleotide
gguugagcuguaacugggg

SEQ ID NO: 441139 - RNA, 19 nt, Artificial Sequence
  Description of Artificial Sequence: Synthetic oligonucleotide
cuaauuagauuaugagcau

SEQ ID NO: 441140 - RNA, 19 nt, Artificial Sequence
  Description of Artificial Sequence: Synthetic oligonucleotide
ccaccaacgacaagauuug

SEQ ID NO: 441141 - RNA, 19 nt, Artificial Sequence
  Description of Artificial Sequence: Synthetic oligonucleotide
augaguacaaaggcuuguu

SEQ ID NO: 441142 - RNA, 19 nt, Artificial Sequence
  Description of Artificial Sequence: Synthetic oligonucleotide
guuagccccaugcuuugaa

SEQ ID NO: 441143 - RNA, 19 nt, Artificial Sequence
  Description of Artificial Sequence: Synthetic oligonucleotide
caacagccgcaugacagug

SEQ ID NO: 441144 - RNA, 19 nt, Artificial Sequence
  Description of Artificial Sequence: Synthetic oligonucleotide
guccaucucacacgguuaa

SEQ ID NO: 441145 - RNA, 19 nt, Artificial Sequence
  Description of Artificial Sequence: Synthetic oligonucleotide
cauaaacauagucggaauu

SEQ ID NO: 441146 - RNA, 19 nt, Artificial Sequence
  Description of Artificial Sequence: Synthetic oligonucleotide
gugaaugcaugcugggacu

SEQ ID NO: 441147 - RNA, 19 nt, Artificial Sequence
  Description of Artificial Sequence: Synthetic oligonucleotide
ccuucagaaucgcccacgg

SEQ ID NO: 441148 - RNA, 19 nt, Artificial Sequence
  Description of Artificial Sequence: Synthetic oligonucleotide
gacuaagaacaauguugcu

SEQ ID NO: 441149 - RNA, 19 nt, Artificial Sequence
  Description of Artificial Sequence: Synthetic oligonucleotide
gcuaggcagggauucgagc

SEQ ID NO: 441150 - RNA, 19 nt, Artificial Sequence
  Description of Artificial Sequence: Synthetic oligonucleotide
gucgauuuaaugauagcuu

SEQ ID NO: 441151 - RNA, 19 nt, Artificial Sequence
  Description of Artificial Sequence: Synthetic oligonucleotide
guguucggccaaaucuugc

SEQ ID NO: 441152 - RNA, 19 nt, Artificial Sequence
  Description of Artificial Sequence: Synthetic oligonucleotide
agaucccacggcaccaucu

SEQ ID NO: 441153 - RNA, 19 nt, Artificial Sequence
  Description of Artificial Sequence: Synthetic oligonucleotide
uggcuaggcagggauucga

SEQ ID NO: 441154 - RNA, 19 nt, Artificial Sequence
  Description of Artificial Sequence: Synthetic oligonucleotide
cagucuccccaugccaucc

SEQ ID NO: 441155 - RNA, 19 nt, Artificial Sequence
  Description of Artificial Sequence: Synthetic oligonucleotide
ccacaaguaacucuggaua

SEQ ID NO: 441156 - RNA, 19 nt, Artificial Sequence
  Description of Artificial Sequence: Synthetic oligonucleotide
acacgguuaagagccgggu

SEQ ID NO: 441157 - RNA, 19 nt, Artificial Sequence
  Description of Artificial Sequence: Synthetic oligonucleotide
ccucgucuagaucccacgg

SEQ ID NO: 441158 - RNA, 19 nt, Artificial Sequence
  Description of Artificial Sequence: Synthetic oligonucleotide
caccaacgacaagauuugg

SEQ ID NO: 441159 - RNA, 19 nt, Artificial Sequence
  Description of Artificial Sequence: Synthetic oligonucleotide
cuguaaagucgucagcggu

SEQ ID NO: 441160 - RNA, 19 nt, Artificial Sequence
  Description of Artificial Sequence: Synthetic oligonucleotide
gaaaguccacuugaguaau

SEQ ID NO: 441161 - RNA, 19 nt, Artificial Sequence
  Description of Artificial Sequence: Synthetic oligonucleotide
ggauuccagugaugggucc

SEQ ID NO: 441162 - RNA, 19 nt, Artificial Sequence
  Description of Artificial Sequence: Synthetic oligonucleotide
aggggcauuguaaguuuug

SEQ ID NO: 441163 - RNA, 19 nt, Artificial Sequence
  Description of Artificial Sequence: Synthetic oligonucleotide
uagaucccacggcaccauc

SEQ ID NO: 441164 - RNA, 19 nt, Artificial Sequence
  Description of Artificial Sequence: Synthetic oligonucleotide
auggucaaagaaacuuaaa

SEQ ID NO: 441165 - RNA, 19 nt, Artificial Sequence
  Description of Artificial Sequence: Synthetic oligonucleotide
ccuauucguuagaauucag

SEQ ID NO: 441166 - RNA, 19 nt, Artificial Sequence
  Description of Artificial Sequence: Synthetic oligonucleotide
uccugacuggguccaucuc

SEQ ID NO: 441167 - RNA, 19 nt, Artificial Sequence
  Description of Artificial Sequence: Synthetic oligonucleotide
gcgagaacauaaucaacaa

SEQ ID NO: 441168 - RNA, 19 nt, Artificial Sequence
  Description of Artificial Sequence: Synthetic oligonucleotide
agucgucagcgguauuaaa

SEQ ID NO: 441169 - RNA, 19 nt, Artificial Sequence
  Description of Artificial Sequence: Synthetic oligonucleotide
cucuuucuacaauucuugu

SEQ ID NO: 441170 - RNA, 19 nt, Artificial Sequence
  Description of Artificial Sequence: Synthetic oligonucleotide
ccaucaguagagaugcuaa

SEQ ID NO: 441171 - RNA, 19 nt, Artificial Sequence
  Description of Artificial Sequence: Synthetic oligonucleotide
cagaacuuauuuagucugu

SEQ ID NO: 441172 - RNA, 19 nt, Artificial Sequence
  Description of Artificial Sequence: Synthetic oligonucleotide
aaaguccacuugaguaauu

SEQ ID NO: 441173 - RNA, 19 nt, Artificial Sequence
  Description of Artificial Sequence: Synthetic oligonucleotide
aucgcccacggcaaucucu

SEQ ID NO: 441174 - RNA, 19 nt, Artificial Sequence
  Description of Artificial Sequence: Synthetic oligonucleotide
cauaaucaacaaggaauua

SEQ ID NO: 441175 - RNA, 19 nt, Artificial Sequence
  Description of Artificial Sequence: Synthetic oligonucleotide
agcucgguuugcauuaauu

SEQ ID NO: 441176 - RNA, 19 nt, Artificial Sequence
  Description of Artificial Sequence: Synthetic oligonucleotide
ccaaagcacaauuuggccu

SEQ ID NO: 441177 - RNA, 19 nt, Artificial Sequence
  Description of Artificial Sequence: Synthetic oligonucleotide
agccggguuucccuccaca

SEQ ID NO: 441178 - RNA, 19 nt, Artificial Sequence
  Description of Artificial Sequence: Synthetic oligonucleotide
aguuuaggauguacuuaau

SEQ ID NO: 441179 - RNA, 19 nt, Artificial Sequence
  Description of Artificial Sequence: Synthetic oligonucleotide
agguucaacaggagguuua

SEQ ID NO: 441180 - RNA, 19 nt, Artificial Sequence
  Description of Artificial Sequence: Synthetic oligonucleotide
auucgagcagccgccuccu

SEQ ID NO: 441181 - RNA, 19 nt, Artificial Sequence
  Description of Artificial Sequence: Synthetic oligonucleotide
gccugaauauguaccacca

SEQ ID NO: 441182 - RNA, 19 nt, Artificial Sequence
  Description of Artificial Sequence: Synthetic oligonucleotide
gaacagcgaucugcucucc

SEQ ID NO: 441183 - RNA, 19 nt, Artificial Sequence
  Description of Artificial Sequence: Synthetic oligonucleotide
augcaugcugggacuaaga

SEQ ID NO: 441184 - RNA, 19 nt, Artificial Sequence
  Description of Artificial Sequence: Synthetic oligonucleotide
ugcaaguguucggccaaau

SEQ ID NO: 441185 - RNA, 19 nt, Artificial Sequence
  Description of Artificial Sequence: Synthetic oligonucleotide
gaaucgcccacggcaaucu

SEQ ID NO: 441186 - RNA, 19 nt, Artificial Sequence
  Description of Artificial Sequence: Synthetic oligonucleotide
ccaacgacaagauuuggau

SEQ ID NO: 441187 - RNA, 19 nt, Artificial Sequence
  Description of Artificial Sequence: Synthetic oligonucleotide
gggugaccacauaacauca

SEQ ID NO: 441188 - RNA, 19 nt, Artificial Sequence
  Description of Artificial Sequence: Synthetic oligonucleotide
guaaagucgucagcgguau

SEQ ID NO: 441189 - RNA, 19 nt, Artificial Sequence
  Description of Artificial Sequence: Synthetic oligonucleotide
gaaugcaugcugggacuaa

SEQ ID NO: 441190 - RNA, 19 nt, Artificial Sequence
  Description of Artificial Sequence: Synthetic oligonucleotide
acgacaagauuuggaugaa

SEQ ID NO: 441191 - RNA, 19 nt, Artificial Sequence
  Description of Artificial Sequence: Synthetic oligonucleotide
cagcuaacaacucgaugcu

SEQ ID NO: 441192 - RNA, 19 nt, Artificial Sequence
  Description of Artificial Sequence: Synthetic oligonucleotide
cuguaguuagccccaugcu

SEQ ID NO: 441193 - RNA, 19 nt, Artificial Sequence
  Description of Artificial Sequence: Synthetic oligonucleotide
cauugaaguuacagcuacu

SEQ ID NO: 441194 - RNA, 19 nt, Artificial Sequence
  Description of Artificial Sequence: Synthetic oligonucleotide
agcuaacaacucgaugcuu

SEQ ID NO: 441195 - RNA, 19 nt, Artificial Sequence
  Description of Artificial Sequence: Synthetic oligonucleotide
gccgcaugacaguggauuc

SEQ ID NO: 441196 - RNA, 19 nt, Artificial Sequence
  Description of Artificial Sequence: Synthetic oligonucleotide
aagcacaauuuggccugaa

SEQ ID NO: 441197 - RNA, 19 nt, Artificial Sequence
  Description of Artificial Sequence: Synthetic oligonucleotide
ggcuaggcagggauucgag

SEQ ID NO: 441198 - RNA, 19 nt, Artificial Sequence
  Description of Artificial Sequence: Synthetic oligonucleotide
gucgguaccucugugucau

SEQ ID NO: 441199 - RNA, 19 nt, Artificial Sequence
  Description of Artificial Sequence: Synthetic oligonucleotide
caucaguagagaugcuaau

SEQ ID NO: 441200 - RNA, 19 nt, Artificial Sequence
  Description of Artificial Sequence: Synthetic oligonucleotide
gaaggacauugaaguuaca

SEQ ID NO: 441201 - RNA, 19 nt, Artificial Sequence
  Description of Artificial Sequence: Synthetic oligonucleotide
gguuucccuccacagaaau

SEQ ID NO: 441202 - RNA, 19 nt, Artificial Sequence
  Description of Artificial Sequence: Synthetic oligonucleotide
caucagcucgguuugcauu

SEQ ID NO: 441203 - RNA, 19 nt, Artificial Sequence
  Description of Artificial Sequence: Synthetic oligonucleotide
caguagacagggugugugu

SEQ ID NO: 441204 - RNA, 19 nt, Artificial Sequence
  Description of Artificial Sequence: Synthetic oligonucleotide
ugcuauccuguggguggga

SEQ ID NO: 441205 - RNA, 19 nt, Artificial Sequence
  Description of Artificial Sequence: Synthetic oligonucleotide
ggacaauaggggaaucugu

SEQ ID NO: 441206 - RNA, 19 nt, Artificial Sequence
  Description of Artificial Sequence: Synthetic oligonucleotide
gcuaacaacucgaugcuuu

SEQ ID NO: 441207 - RNA, 19 nt, Artificial Sequence
  Description of Artificial Sequence: Synthetic oligonucleotide
ccaauccaaacagcuaaca

SEQ ID NO: 441208 - RNA, 19 nt, Artificial Sequence
  Description of Artificial Sequence: Synthetic oligonucleotide
ccacggcaaucucucuucc

SEQ ID NO: 441209 - RNA, 19 nt, Artificial Sequence
  Description of Artificial Sequence: Synthetic oligonucleotide
cuuugcacgggaguucuuu

SEQ ID NO: 441210 - RNA, 19 nt, Artificial Sequence
  Description of Artificial Sequence: Synthetic oligonucleotide
guggcggcaugcuguauau

SEQ ID NO: 441211 - RNA, 19 nt, Artificial Sequence
  Description of Artificial Sequence: Synthetic oligonucleotide
ggauucgagcagccgccuc

SEQ ID NO: 441212 - RNA, 19 nt, Artificial Sequence
  Description of Artificial Sequence: Synthetic oligonucleotide
guaccaccaacgacaagau

SEQ ID NO: 441213 - RNA, 19 nt, Artificial Sequence
  Description of Artificial Sequence: Synthetic oligonucleotide
cgucuagaucccacggcac

SEQ ID NO: 441214 - RNA, 19 nt, Artificial Sequence
  Description of Artificial Sequence: Synthetic oligonucleotide
gagccggguuucccuccac

SEQ ID NO: 441215 - RNA, 19 nt, Artificial Sequence
  Description of Artificial Sequence: Synthetic oligonucleotide
cacuacccacaacaaaguu

SEQ ID NO: 441216 - RNA, 19 nt, Artificial Sequence
  Description of Artificial Sequence: Synthetic oligonucleotide
ggauacugggaugaccaau

SEQ ID NO: 441217 - RNA, 19 nt, Artificial Sequence
  Description of Artificial Sequence: Synthetic oligonucleotide
gcuauccugugggugggaa

SEQ ID NO: 441218 - RNA, 19 nt, Artificial Sequence
  Description of Artificial Sequence: Synthetic oligonucleotide
uggcggcaugcuguauaua

SEQ ID NO: 441219 - RNA, 19 nt, Artificial Sequence
  Description of Artificial Sequence: Synthetic oligonucleotide
cgggaguucuuuuauugcu

SEQ ID NO: 441220 - RNA, 19 nt, Artificial Sequence
  Description of Artificial Sequence: Synthetic oligonucleotide
ucgguaccucugugucauu

SEQ ID NO: 441221 - RNA, 19 nt, Artificial Sequence
  Description of Artificial Sequence: Synthetic oligonucleotide
ccaacagccgcaugacagu

SEQ ID NO: 441222 - RNA, 19 nt, Artificial Sequence
  Description of Artificial Sequence: Synthetic oligonucleotide
gguuaucccaaagcacaau

SEQ ID NO: 441223 - RNA, 19 nt, Artificial Sequence
  Description of Artificial Sequence: Synthetic oligonucleotide
cgaugcuuugaccaacgcu

SEQ ID NO: 441224 - RNA, 19 nt, Artificial Sequence
  Description of Artificial Sequence: Synthetic oligonucleotide
ccggguuucccuccacaga

SEQ ID NO: 441225 - RNA, 19 nt, Artificial Sequence
  Description of Artificial Sequence: Synthetic oligonucleotide
gcgaucugcucucccacau

SEQ ID NO: 441226 - RNA, 19 nt, Artificial Sequence
  Description of Artificial Sequence: Synthetic oligonucleotide
cuagaucccacggcaccau

SEQ ID NO: 441227 - RNA, 19 nt, Artificial Sequence
  Description of Artificial Sequence: Synthetic oligonucleotide
ggugaccacauaacaucau

SEQ ID NO: 441228 - RNA, 19 nt, Artificial Sequence
  Description of Artificial Sequence: Synthetic oligonucleotide
cgguuaucccaaagcacaa

SEQ ID NO: 441229 - RNA, 19 nt, Artificial Sequence
  Description of Artificial Sequence: Synthetic oligonucleotide
cagaaucgcccacggcaau

SEQ ID NO: 441230 - RNA, 19 nt, Artificial Sequence
  Description of Artificial Sequence: Synthetic oligonucleotide
ccuuuguauaugugacgau

SEQ ID NO: 441231 - RNA, 19 nt, Artificial Sequence
  Description of Artificial Sequence: Synthetic oligonucleotide
ggguuucccuccacagaaa

SEQ ID NO: 441232 - RNA, 19 nt, Artificial Sequence
  Description of Artificial Sequence: Synthetic oligonucleotide
cguggcggcaugcuguaua

SEQ ID NO: 441233 - RNA, 19 nt, Artificial Sequence
  Description of Artificial Sequence: Synthetic oligonucleotide
gcacgggaguucuuuuauu

SEQ ID NO: 441234 - RNA, 19 nt, Artificial Sequence
  Description of Artificial Sequence: Synthetic oligonucleotide
gcccacggcaaucucucuu

SEQ ID NO: 441235 - RNA, 19 nt, Artificial Sequence
  Description of Artificial Sequence: Synthetic oligonucleotide
gccguggcggcaugcugua

SEQ ID NO: 441236 - RNA, 19 nt, Artificial Sequence
  Description of Artificial Sequence: Synthetic oligonucleotide
cagcucgguuugcauuaau

SEQ ID NO: 441237 - RNA, 19 nt, Artificial Sequence
  Description of Artificial Sequence: Synthetic oligonucleotide
gggauucgagcagccgccu

SEQ ID NO: 441238 - RNA, 19 nt, Artificial Sequence
  Description of Artificial Sequence: Synthetic oligonucleotide
cgacaagauuuggaugaaa

SEQ ID NO: 441239 - RNA, 19 nt, Artificial Sequence
  Description of Artificial Sequence: Synthetic oligonucleotide
cagccgcaugacaguggau

SEQ ID NO: 441240 - RNA, 19 nt, Artificial Sequence
  Description of Artificial Sequence: Synthetic oligonucleotide
ggcucaugaggagccucuu

SEQ ID NO: 441241 - RNA, 19 nt, Artificial Sequence
  Description of Artificial Sequence: Synthetic oligonucleotide
ccguggcggcaugcuguau

SEQ ID NO: 441242 - RNA, 19 nt, Artificial Sequence
  Description of Artificial Sequence: Synthetic oligonucleotide
uuuacucuggucaaggaag

SEQ ID NO: 441243 - RNA, 19 nt, Artificial Sequence
  Description of Artificial Sequence: Synthetic oligonucleotide
aaaguuacuguacuuuguc

SEQ ID NO: 441244 - RNA, 19 nt, Artificial Sequence
  Description of Artificial Sequence: Synthetic oligonucleotide
gacacgagaacccagugcg

SEQ ID NO: 441245 - RNA, 19 nt, Artificial Sequence
  Description of Artificial Sequence: Synthetic oligonucleotide
aguuacuguacuuugucac

SEQ ID NO: 441246 - RNA, 19 nt, Artificial Sequence
  Description of Artificial Sequence: Synthetic oligonucleotide
aacguaacgguagaauucc

SEQ ID NO: 441247 - RNA, 19 nt, Artificial Sequence
  Description of Artificial Sequence: Synthetic oligonucleotide
ucaugaacaagccauaauc

SEQ ID NO: 441248 - RNA, 19 nt, Artificial Sequence
  Description of Artificial Sequence: Synthetic oligonucleotide
auaucuguagccuuggucu

SEQ ID NO: 441249 - RNA, 19 nt, Artificial Sequence
  Description of Artificial Sequence: Synthetic oligonucleotide
ucaauguuucucuagggcc

SEQ ID NO: 441250 - RNA, 19 nt, Artificial Sequence
  Description of Artificial Sequence: Synthetic oligonucleotide
auuauuuuggucccagguc

SEQ ID NO: 441251 - RNA, 19 nt, Artificial Sequence
  Description of Artificial Sequence: Synthetic oligonucleotide
uaauugagguaaauaaagc

SEQ ID NO: 441252 - RNA, 19 nt, Artificial Sequence
  Description of Artificial Sequence: Synthetic oligonucleotide
ugauagacuggucagcugc

SEQ ID NO: 441253 - RNA, 19 nt, Artificial Sequence
  Description of Artificial Sequence: Synthetic oligonucleotide
uuccauuaagguacaaggg

SEQ ID NO: 441254 - RNA, 19 nt, Artificial Sequence
  Description of Artificial Sequence: Synthetic oligonucleotide
ugaaugcucagccagguga

SEQ ID NO: 441255 - RNA, 19 nt, Artificial Sequence
  Description of Artificial Sequence: Synthetic oligonucleotide
ugugucaucccaaugccag

SEQ ID NO: 441256 - RNA, 19 nt, Artificial Sequence
  Description of Artificial Sequence: Synthetic oligonucleotide
uuguaugcggcccuuaacc

SEQ ID NO: 441257 - RNA, 19 nt, Artificial Sequence
  Description of Artificial Sequence: Synthetic oligonucleotide
aauugcucguagcagaaga

SEQ ID NO: 441258 - RNA, 19 nt, Artificial Sequence
  Description of Artificial Sequence: Synthetic oligonucleotide
aauccgguuuaauugaggu

SEQ ID NO: 441259 - RNA, 19 nt, Artificial Sequence
  Description of Artificial Sequence: Synthetic oligonucleotide
uggccaaugaucuugcugc

SEQ ID NO: 441260 - RNA, 19 nt, Artificial Sequence
  Description of Artificial Sequence: Synthetic oligonucleotide
ucugcaguggucacaaugc

SEQ ID NO: 441261 - RNA, 19 nt, Artificial Sequence
  Description of Artificial Sequence: Synthetic oligonucleotide
guaaauaaagcugagcuca

SEQ ID NO: 441262 - RNA, 19 nt, Artificial Sequence
  Description of Artificial Sequence: Synthetic oligonucleotide
aauagaaacccacuccaaa

SEQ ID NO: 441263 - RNA, 19 nt, Artificial Sequence
  Description of Artificial Sequence: Synthetic oligonucleotide
uccugugucaucccaaugc

SEQ ID NO: 441264 - RNA, 19 nt, Artificial Sequence
  Description of Artificial Sequence: Synthetic oligonucleotide
ucaaauugcucguagcaga

SEQ ID NO: 441265 - RNA, 19 nt, Artificial Sequence
  Description of Artificial Sequence: Synthetic oligonucleotide
cugaguacaaggaacgggc

SEQ ID NO: 441266 - RNA, 19 nt, Artificial Sequence
  Description of Artificial Sequence: Synthetic oligonucleotide
agucugaagaugaaucucc

SEQ ID NO: 441267 - RNA, 19 nt, Artificial Sequence
  Description of Artificial Sequence: Synthetic oligonucleotide
aacgacgaugucugucucc

SEQ ID NO: 441268 - RNA, 19 nt, Artificial Sequence
  Description of Artificial Sequence: Synthetic oligonucleotide
acagguaauagauguugcg

SEQ ID NO: 441269 - RNA, 19 nt, Artificial Sequence
  Description of Artificial Sequence: Synthetic oligonucleotide
aaaguaagcucaucaaauu

SEQ ID NO: 441270 - RNA, 19 nt, Artificial Sequence
  Description of Artificial Sequence: Synthetic oligonucleotide
aacgguagaauuccucaug

SEQ ID NO: 441271 - RNA, 19 nt, Artificial Sequence
  Description of Artificial Sequence: Synthetic oligonucleotide
ugaagaugcagaacgggcu

SEQ ID NO: 441272 - RNA, 19 nt, Artificial Sequence
  Description of Artificial Sequence: Synthetic oligonucleotide
cuggauaaggaccuugcgg

SEQ ID NO: 441273 - RNA, 19 nt, Artificial Sequence
  Description of Artificial Sequence: Synthetic oligonucleotide
ugcaaaguguuaauccgcc

SEQ ID NO: 441274 - RNA, 19 nt, Artificial Sequence
  Description of Artificial Sequence: Synthetic oligonucleotide
auaaagcugagcucaagca

SEQ ID NO: 441275 - RNA, 19 nt, Artificial Sequence
  Description of Artificial Sequence: Synthetic oligonucleotide
agcuucggcgauuucaaac

SEQ ID NO: 441276 - RNA, 19 nt, Artificial Sequence
  Description of Artificial Sequence: Synthetic oligonucleotide
ugucaauguuucucuaggg

SEQ ID NO: 441277 - RNA, 19 nt, Artificial Sequence
  Description of Artificial Sequence: Synthetic oligonucleotide
cucguuagcaaaauccuug

SEQ ID NO: 441278 - RNA, 19 nt, Artificial Sequence
  Description of Artificial Sequence: Synthetic oligonucleotide
agcgggguuugucauaagc

SEQ ID NO: 441279 - RNA, 19 nt, Artificial Sequence
  Description of Artificial Sequence: Synthetic oligonucleotide
aaacauggaugguuucguc

SEQ ID NO: 441280 - RNA, 19 nt, Artificial Sequence
  Description of Artificial Sequence: Synthetic oligonucleotide
uccgguuuaauugagguaa

SEQ ID NO: 441281 - RNA, 19 nt, Artificial Sequence
  Description of Artificial Sequence: Synthetic oligonucleotide
aaguuacuguacuuuguca

SEQ ID NO: 441282 - RNA, 19 nt, Artificial Sequence
  Description of Artificial Sequence: Synthetic oligonucleotide
cuugcggcuauacagugcc

SEQ ID NO: 441283 - RNA, 19 nt, Artificial Sequence
  Description of Artificial Sequence: Synthetic oligonucleotide
uuaagguacaaggggaagc

SEQ ID NO: 441284 - RNA, 19 nt, Artificial Sequence
  Description of Artificial Sequence: Synthetic oligonucleotide
uggguugcauacuaggcgc

SEQ ID NO: 441285 - RNA, 19 nt, Artificial Sequence
  Description of Artificial Sequence: Synthetic oligonucleotide
ucaacgacgaugucugucu

SEQ ID NO: 441286 - RNA, 19 nt, Artificial Sequence
  Description of Artificial Sequence: Synthetic oligonucleotide
uagcaguugagcacguucc

SEQ ID NO: 441287 - RNA, 19 nt, Artificial Sequence
  Description of Artificial Sequence: Synthetic oligonucleotide
aaguguuaauccgccuucc

SEQ ID NO: 441288 - RNA, 19 nt, Artificial Sequence
  Description of Artificial Sequence: Synthetic oligonucleotide
gaagccaggcauuguaugc

SEQ ID NO: 441289 - RNA, 19 nt, Artificial Sequence
  Description of Artificial Sequence: Synthetic oligonucleotide
aguacggugaaugcucagc

SEQ ID NO: 441290 - RNA, 19 nt, Artificial Sequence
  Description of Artificial Sequence: Synthetic oligonucleotide
gauaucuguagccuugguc

SEQ ID NO: 441291 - RNA, 19 nt, Artificial Sequence
  Description of Artificial Sequence: Synthetic oligonucleotide
augccaguguccuggaugg

SEQ ID NO: 441292 - RNA, 19 nt, Artificial Sequence
  Description of Artificial Sequence: Synthetic oligonucleotide
uccuagguuagacaccagc

SEQ ID NO: 441293 - RNA, 19 nt, Artificial Sequence
  Description of Artificial Sequence: Synthetic oligonucleotide
ucaucaaauugcucguagc

SEQ ID NO: 441294 - RNA, 19 nt, Artificial Sequence
  Description of Artificial Sequence: Synthetic oligonucleotide
ggcauagucugauagacug

SEQ ID NO: 441295 - RNA, 19 nt, Artificial Sequence
  Description of Artificial Sequence: Synthetic oligonucleotide
auuguaugcggcccuuaac

SEQ ID NO: 441296 - RNA, 19 nt, Artificial Sequence
  Description of Artificial Sequence: Synthetic oligonucleotide
aaacacuccagaaccaucu

SEQ ID NO: 441297 - RNA, 19 nt, Artificial Sequence
  Description of Artificial Sequence: Synthetic oligonucleotide
ugcauucgcaggaaguggc

SEQ ID NO: 441298 - RNA, 19 nt, Artificial Sequence
  Description of Artificial Sequence: Synthetic oligonucleotide
uaguggucaacgacgaugu

SEQ ID NO: 441299 - RNA, 19 nt, Artificial Sequence
  Description of Artificial Sequence: Synthetic oligonucleotide
uggcauuaucuguauauca

SEQ ID NO: 441300 - RNA, 19 nt, Artificial Sequence
  Description of Artificial Sequence: Synthetic oligonucleotide
agcgggaauagacuucaac

SEQ ID NO: 441301 - RNA, 19 nt, Artificial Sequence
  Description of Artificial Sequence: Synthetic oligonucleotide
cugagcaacguaacgguag

SEQ ID NO: 441302 - RNA, 19 nt, Artificial Sequence
  Description of Artificial Sequence: Synthetic oligonucleotide
ucgcuuaugucuuuugggu

SEQ ID NO: 441303 - RNA, 19 nt, Artificial Sequence
  Description of Artificial Sequence: Synthetic oligonucleotide
ucggcgauuucaaacacuc

SEQ ID NO: 441304 - RNA, 19 nt, Artificial Sequence
  Description of Artificial Sequence: Synthetic oligonucleotide
ugaagcuucggcgauuuca

SEQ ID NO: 441305 - RNA, 19 nt, Artificial Sequence
  Description of Artificial Sequence: Synthetic oligonucleotide
acggugaaugcucagccag

SEQ ID NO: 441306 - RNA, 19 nt, Artificial Sequence
  Description of Artificial Sequence: Synthetic oligonucleotide
ugaggacucauaccguagc

SEQ ID NO: 441307 - RNA, 19 nt, Artificial Sequence
  Description of Artificial Sequence: Synthetic oligonucleotide
aaggccuuugaccccgauc

SEQ ID NO: 441308 - RNA, 19 nt, Artificial Sequence
  Description of Artificial Sequence: Synthetic oligonucleotide
aaauccuugcagucugacu

SEQ ID NO: 441309 - RNA, 19 nt, Artificial Sequence
  Description of Artificial Sequence: Synthetic oligonucleotide
uguccuguagagauccgug

SEQ ID NO: 441310 - RNA, 19 nt, Artificial Sequence
  Description of Artificial Sequence: Synthetic oligonucleotide
ucgaauaaacaccucuuuu

SEQ ID NO: 441311 - RNA, 19 nt, Artificial Sequence
  Description of Artificial Sequence: Synthetic oligonucleotide
agggcugaggacucauacc

SEQ ID NO: 441312 - RNA, 19 nt, Artificial Sequence
  Description of Artificial Sequence: Synthetic oligonucleotide
ugacacgagaacccagugc

SEQ ID NO: 441313 - RNA, 19 nt, Artificial Sequence
  Description of Artificial Sequence: Synthetic oligonucleotide
ugcguuucucauccaagcc

SEQ ID NO: 441314 - RNA, 19 nt, Artificial Sequence
  Description of Artificial Sequence: Synthetic oligonucleotide
uguuaauccgccuuccauu

SEQ ID NO: 441315 - RNA, 19 nt, Artificial Sequence
  Description of Artificial Sequence: Synthetic oligonucleotide
ucgucucuggcacauagaa

SEQ ID NO: 441316 - RNA, 19 nt, Artificial Sequence
  Description of Artificial Sequence: Synthetic oligonucleotide
uucgcaauguccuccuuga

SEQ ID NO: 441317 - RNA, 19 nt, Artificial Sequence
  Description of Artificial Sequence: Synthetic oligonucleotide
aaauccgguuuaauugagg

SEQ ID NO: 441318 - RNA, 19 nt, Artificial Sequence
  Description of Artificial Sequence: Synthetic oligonucleotide
uguuccuagguuagacacc

SEQ ID NO: 441319 - RNA, 19 nt, Artificial Sequence
  Description of Artificial Sequence: Synthetic oligonucleotide
gaauuccucaugcugcaac

SEQ ID NO: 441320 - RNA, 19 nt, Artificial Sequence
  Description of Artificial Sequence: Synthetic oligonucleotide
aucaaauugcucguagcag

SEQ ID NO: 441321 - RNA, 19 nt, Artificial Sequence
  Description of Artificial Sequence: Synthetic oligonucleotide
ucugauagacuggucagcu

SEQ ID NO: 441322 - RNA, 19 nt, Artificial Sequence
  Description of Artificial Sequence: Synthetic oligonucleotide
ugaguacaaggaacgggcc

SEQ ID NO: 441323 - RNA, 19 nt, Artificial Sequence
  Description of Artificial Sequence: Synthetic oligonucleotide
cucaucaaauugcucguag

SEQ ID NO: 441324 - RNA, 19 nt, Artificial Sequence
  Description of Artificial Sequence: Synthetic oligonucleotide
uucacguuggugacacgag

SEQ ID NO: 441325 - RNA, 19 nt, Artificial Sequence
  Description of Artificial Sequence: Synthetic oligonucleotide
gaguuuccggaugagugcg

SEQ ID NO: 441326 - RNA, 19 nt, Artificial Sequence
  Description of Artificial Sequence: Synthetic oligonucleotide
uaagguacaaggggaagcu

SEQ ID NO: 441327 - RNA, 19 nt, Artificial Sequence
  Description of Artificial Sequence: Synthetic oligonucleotide
gaagaccuggguugcauac

SEQ ID NO: 441328 - RNA, 19 nt, Artificial Sequence
  Description of Artificial Sequence: Synthetic oligonucleotide
agccugagcaacguaacgg

SEQ ID NO: 441329 - RNA, 19 nt, Artificial Sequence
  Description of Artificial Sequence: Synthetic oligonucleotide
ucgaacgaagcgcagccac

SEQ ID NO: 441330 - RNA, 19 nt, Artificial Sequence
  Description of Artificial Sequence: Synthetic oligonucleotide
acuaggcgcagucucuggg

SEQ ID NO: 441331 - RNA, 19 nt, Artificial Sequence
  Description of Artificial Sequence: Synthetic oligonucleotide
uaagccugagcaacguaac

SEQ ID NO: 441332 - RNA, 19 nt, Artificial Sequence
  Description of Artificial Sequence: Synthetic oligonucleotide
aacgaguccugcugcuauc

SEQ ID NO: 441333 - RNA, 19 nt, Artificial Sequence
  Description of Artificial Sequence: Synthetic oligonucleotide
ugucgaauucccucaggug

SEQ ID NO: 441334 - RNA, 19 nt, Artificial Sequence
  Description of Artificial Sequence: Synthetic oligonucleotide
acguuggugacacgagaac

SEQ ID NO: 441335 - RNA, 19 nt, Artificial Sequence
  Description of Artificial Sequence: Synthetic oligonucleotide
gauguugcgggugccagcc

SEQ ID NO: 441336 - RNA, 19 nt, Artificial Sequence
  Description of Artificial Sequence: Synthetic oligonucleotide
ugaucagucucugcuguag

SEQ ID NO: 441337 - RNA, 19 nt, Artificial Sequence
  Description of Artificial Sequence: Synthetic oligonucleotide
guacggugaaugcucagcc

SEQ ID NO: 441338 - RNA, 19 nt, Artificial Sequence
  Description of Artificial Sequence: Synthetic oligonucleotide
gagcucucgaauaaacacc

SEQ ID NO: 441339 - RNA, 19 nt, Artificial Sequence
  Description of Artificial Sequence: Synthetic oligonucleotide
agcaaaguaagcucaucaa

SEQ ID NO: 441340 - RNA, 19 nt, Artificial Sequence
  Description of Artificial Sequence: Synthetic oligonucleotide
ccugcaaaguguuaauccg

SEQ ID NO: 441341 - RNA, 19 nt, Artificial Sequence
  Description of Artificial Sequence: Synthetic oligonucleotide
gauguugaguggugcgucc

SEQ ID NO: 441342 - RNA, 19 nt, Artificial Sequence
  Description of Artificial Sequence: Synthetic oligonucleotide
aauccgccuuccauuaagg

SEQ ID NO: 441343 - RNA, 19 nt, Artificial Sequence
  Description of Artificial Sequence: Synthetic oligonucleotide
agaugaaucuccaucucug

SEQ ID NO: 441344 - RNA, 19 nt, Artificial Sequence
  Description of Artificial Sequence: Synthetic oligonucleotide
uaccguagcagcuucgcaa

SEQ ID NO: 441345 - RNA, 19 nt, Artificial Sequence
  Description of Artificial Sequence: Synthetic oligonucleotide
caucaaauugcucguagca

SEQ ID NO: 441346 - RNA, 19 nt, Artificial Sequence
  Description of Artificial Sequence: Synthetic oligonucleotide
uggugcguccgucuuguag

SEQ ID NO: 441347 - RNA, 19 nt, Artificial Sequence
  Description of Artificial Sequence: Synthetic oligonucleotide
uggguuguagcaguugagc

SEQ ID NO: 441348 - RNA, 19 nt, Artificial Sequence
  Description of Artificial Sequence: Synthetic oligonucleotide
ucauaccguagcagcuucg

SEQ ID NO: 441349 - RNA, 19 nt, Artificial Sequence
  Description of Artificial Sequence: Synthetic oligonucleotide
guagugcaaagugaagcgg

SEQ ID NO: 441350 - RNA, 19 nt, Artificial Sequence
  Description of Artificial Sequence: Synthetic oligonucleotide
ugcucguagcagaagagua

SEQ ID NO: 441351 - RNA, 19 nt, Artificial Sequence
  Description of Artificial Sequence: Synthetic oligonucleotide
cuagguuagacaccagcuc

SEQ ID NO: 441352 - RNA, 19 nt, Artificial Sequence
  Description of Artificial Sequence: Synthetic oligonucleotide
gaacgggcuuuccucgucg

SEQ ID NO: 441353 - RNA, 19 nt, Artificial Sequence
  Description of Artificial Sequence: Synthetic oligonucleotide
gguaaauaaagcugagcuc

SEQ ID NO: 441354 - RNA, 19 nt, Artificial Sequence
  Description of Artificial Sequence: Synthetic oligonucleotide
auucgcaggaaguggcgag

SEQ ID NO: 441355 - RNA, 19 nt, Artificial Sequence
  Description of Artificial Sequence: Synthetic oligonucleotide
aacucgcuuaugucuuuug

SEQ ID NO: 441356 - RNA, 19 nt, Artificial Sequence
  Description of Artificial Sequence: Synthetic oligonucleotide
gaaauccgguuuaauugag

SEQ ID NO: 441357 - RNA, 19 nt, Artificial Sequence
  Description of Artificial Sequence: Synthetic oligonucleotide
ucacguuggugacacgaga

SEQ ID NO: 441358 - RNA, 19 nt, Artificial Sequence
  Description of Artificial Sequence: Synthetic oligonucleotide
guacaacuguccuguagag

SEQ ID NO: 441359 - RNA, 19 nt, Artificial Sequence
  Description of Artificial Sequence: Synthetic oligonucleotide
ggcgauuucaaacacucca

SEQ ID NO: 441360 - RNA, 19 nt, Artificial Sequence
  Description of Artificial Sequence: Synthetic oligonucleotide
cucguaguacggugaaugc

SEQ ID NO: 441361 - RNA, 19 nt, Artificial Sequence
  Description of Artificial Sequence: Synthetic oligonucleotide
aacgggcuuuccucgucgg

SEQ ID NO: 441362 - RNA, 19 nt, Artificial Sequence
  Description of Artificial Sequence: Synthetic oligonucleotide
uugcauacuaggcgcaguc

SEQ ID NO: 441363 - RNA, 19 nt, Artificial Sequence
  Description of Artificial Sequence: Synthetic oligonucleotide
guagcaguugagcacguuc

SEQ ID NO: 441364 - RNA, 19 nt, Artificial Sequence
  Description of Artificial Sequence: Synthetic oligonucleotide
uccuguagagauccgugaa

SEQ ID NO: 441365 - RNA, 19 nt, Artificial Sequence
  Description of Artificial Sequence: Synthetic oligonucleotide
caggauaucuguagccuug

SEQ ID NO: 441366 - RNA, 19 nt, Artificial Sequence
  Description of Artificial Sequence: Synthetic oligonucleotide
aggaacgggccacaauguc

SEQ ID NO: 441367 - RNA, 19 nt, Artificial Sequence
  Description of Artificial Sequence: Synthetic oligonucleotide
ugaucuccagaguggguug

SEQ ID NO: 441368 - RNA, 19 nt, Artificial Sequence
  Description of Artificial Sequence: Synthetic oligonucleotide
ugcaacucgcuuaugucuu

SEQ ID NO: 441369 - RNA, 19 nt, Artificial Sequence
  Description of Artificial Sequence: Synthetic oligonucleotide
auagacuggucagcugccc

SEQ ID NO: 441370 - RNA, 19 nt, Artificial Sequence
  Description of Artificial Sequence: Synthetic oligonucleotide
uccuuauaguggucaacga

SEQ ID NO: 441371 - RNA, 19 nt, Artificial Sequence
  Description of Artificial Sequence: Synthetic oligonucleotide
aaacucauguuuggagaca

SEQ ID NO: 441372 - RNA, 19 nt, Artificial Sequence
  Description of Artificial Sequence: Synthetic oligonucleotide
caguguagucugcagcccg

SEQ ID NO: 441373 - RNA, 19 nt, Artificial Sequence
  Description of Artificial Sequence: Synthetic oligonucleotide
agauguauccucaaacuuu

SEQ ID NO: 441374 - RNA, 19 nt, Artificial Sequence
  Description of Artificial Sequence: Synthetic oligonucleotide
caaaguaagcucaucaaau

SEQ ID NO: 441375 - RNA, 19 nt, Artificial Sequence
  Description of Artificial Sequence: Synthetic oligonucleotide
gagcacgcaguguagucug

SEQ ID NO: 441376 - RNA, 19 nt, Artificial Sequence
  Description of Artificial Sequence: Synthetic oligonucleotide
uccgccuuccauuaaggua

SEQ ID NO: 441377 - RNA, 19 nt, Artificial Sequence
  Description of Artificial Sequence: Synthetic oligonucleotide
ucuggcgauuguuccuagg

SEQ ID NO: 441378 - RNA, 19 nt, Artificial Sequence
  Description of Artificial Sequence: Synthetic oligonucleotide
agaaggucguucaggcggc

SEQ ID NO: 441379 - RNA, 19 nt, Artificial Sequence
  Description of Artificial Sequence: Synthetic oligonucleotide
caugaacaagccauaaucu

SEQ ID NO: 441380 - RNA, 19 nt, Artificial Sequence
  Description of Artificial Sequence: Synthetic oligonucleotide
cuucgcaauguccuccuug

SEQ ID NO: 441381 - RNA, 19 nt, Artificial Sequence
  Description of Artificial Sequence: Synthetic oligonucleotide
gaguacaaggaacgggcca

SEQ ID NO: 441382 - RNA, 19 nt, Artificial Sequence
  Description of Artificial Sequence: Synthetic oligonucleotide
agauccgugaagccaggca

SEQ ID NO: 441383 - RNA, 19 nt, Artificial Sequence
  Description of Artificial Sequence: Synthetic oligonucleotide
ugggcugucaauguuucuc

SEQ ID NO: 441384 - RNA, 19 nt, Artificial Sequence
  Description of Artificial Sequence: Synthetic oligonucleotide
caggggaauguccucacug

SEQ ID NO: 441385 - RNA, 19 nt, Artificial Sequence
  Description of Artificial Sequence: Synthetic oligonucleotide
accucgaacgaagcgcagc

SEQ ID NO: 441386 - RNA, 19 nt, Artificial Sequence
  Description of Artificial Sequence: Synthetic oligonucleotide
auaagccugagcaacguaa

SEQ ID NO: 441387 - RNA, 19 nt, Artificial Sequence
  Description of Artificial Sequence: Synthetic oligonucleotide
agccaggcauuguaugcgg

SEQ ID NO: 441388 - RNA, 19 nt, Artificial Sequence
  Description of Artificial Sequence: Synthetic oligonucleotide
cuggccaaugaucuugcug

SEQ ID NO: 441389 - RNA, 19 nt, Artificial Sequence
  Description of Artificial Sequence: Synthetic oligonucleotide
cugaggacucauaccguag

SEQ ID NO: 441390 - RNA, 19 nt, Artificial Sequence
  Description of Artificial Sequence: Synthetic oligonucleotide
cuuaaccuggacugugguc

SEQ ID NO: 441391 - RNA, 19 nt, Artificial Sequence
  Description of Artificial Sequence: Synthetic oligonucleotide
aguguagucugcagcccgc

SEQ ID NO: 441392 - RNA, 19 nt, Artificial Sequence
  Description of Artificial Sequence: Synthetic oligonucleotide
gucuuuuggguccaucauc

SEQ ID NO: 441393 - RNA, 19 nt, Artificial Sequence
  Description of Artificial Sequence: Synthetic oligonucleotide
guuccuagguuagacacca

SEQ ID NO: 441394 - RNA, 19 nt, Artificial Sequence
  Description of Artificial Sequence: Synthetic oligonucleotide
uagauguugcgggugccag

SEQ ID NO: 441395 - RNA, 19 nt, Artificial Sequence
  Description of Artificial Sequence: Synthetic oligonucleotide
agcucucgaauaaacaccu

SEQ ID NO: 441396 - RNA, 19 nt, Artificial Sequence
  Description of Artificial Sequence: Synthetic oligonucleotide
ccgccuuccauuaagguac

SEQ ID NO: 441397 - RNA, 19 nt, Artificial Sequence
  Description of Artificial Sequence: Synthetic oligonucleotide
agaacgggcuuuccucguc

SEQ ID NO: 441398 - RNA, 19 nt, Artificial Sequence
  Description of Artificial Sequence: Synthetic oligonucleotide
guaugcggcccuuaaccug

SEQ ID NO: 441399 - RNA, 19 nt, Artificial Sequence
  Description of Artificial Sequence: Synthetic oligonucleotide
cugccgagcgggaauagac

SEQ ID NO: 441400 - RNA, 19 nt, Artificial Sequence
  Description of Artificial Sequence: Synthetic oligonucleotide
uggugacacgagaacccag

SEQ ID NO: 441401 - RNA, 19 nt, Artificial Sequence
  Description of Artificial Sequence: Synthetic oligonucleotide
uacuaggcgcagucucugg

SEQ ID NO: 441402 - RNA, 19 nt, Artificial Sequence
  Description of Artificial Sequence: Synthetic oligonucleotide
aguguuaauccgccuucca

SEQ ID NO: 441403 - RNA, 19 nt, Artificial Sequence
  Description of Artificial Sequence: Synthetic oligonucleotide
ggaguuuccggaugagugc

SEQ ID NO: 441404 - RNA, 19 nt, Artificial Sequence
  Description of Artificial Sequence: Synthetic oligonucleotide
guuaauccgccuuccauua

SEQ ID NO: 441405 - RNA, 19 nt, Artificial Sequence
  Description of Artificial Sequence: Synthetic oligonucleotide
ggcuggcauagucugauag

SEQ ID NO: 441406 - RNA, 19 nt, Artificial Sequence
  Description of Artificial Sequence: Synthetic oligonucleotide
ucguaguacggugaaugcu

SEQ ID NO: 441407 - RNA, 19 nt, Artificial Sequence
  Description of Artificial Sequence: Synthetic oligonucleotide
auugcucguagcagaagag

SEQ ID NO: 441408 - RNA, 19 nt, Artificial Sequence
  Description of Artificial Sequence: Synthetic oligonucleotide
cuuugaccccgaucuggcg

SEQ ID NO: 441409 - RNA, 19 nt, Artificial Sequence
  Description of Artificial Sequence: Synthetic oligonucleotide
uacggugaaugcucagcca

SEQ ID NO: 441410 - RNA, 19 nt, Artificial Sequence
  Description of Artificial Sequence: Synthetic oligonucleotide
ugucaccugagaagaccug

SEQ ID NO: 441411 - RNA, 19 nt, Artificial Sequence
  Description of Artificial Sequence: Synthetic oligonucleotide
caggcggaaagucaccuuc

SEQ ID NO: 441412 - RNA, 19 nt, Artificial Sequence
  Description of Artificial Sequence: Synthetic oligonucleotide
agugcguuucucauccaag

SEQ ID NO: 441413 - RNA, 19 nt, Artificial Sequence
  Description of Artificial Sequence: Synthetic oligonucleotide
cauaccguagcagcuucgc

SEQ ID NO: 441414 - RNA, 19 nt, Artificial Sequence
  Description of Artificial Sequence: Synthetic oligonucleotide
agguacaaggggaagcuga

SEQ ID NO: 441415 - RNA, 19 nt, Artificial Sequence
  Description of Artificial Sequence: Synthetic oligonucleotide
ccuuauaguggucaacgac

SEQ ID NO: 441416 - RNA, 19 nt, Artificial Sequence
  Description of Artificial Sequence: Synthetic oligonucleotide
auaaggaccuugcggcuau

SEQ ID NO: 441417 - RNA, 19 nt, Artificial Sequence
  Description of Artificial Sequence: Synthetic oligonucleotide
cugcauucgcaggaagugg

SEQ ID NO: 441418 - RNA, 19 nt, Artificial Sequence
  Description of Artificial Sequence: Synthetic oligonucleotide
ucguagcagaagaguaccu

SEQ ID NO: 441419 - RNA, 19 nt, Artificial Sequence
  Description of Artificial Sequence: Synthetic oligonucleotide
uugcucguagcagaagagu

SEQ ID NO: 441420 - RNA, 19 nt, Artificial Sequence
  Description of Artificial Sequence: Synthetic oligonucleotide
ucaggcggccaaccauggg

SEQ ID NO: 441421 - RNA, 19 nt, Artificial Sequence
  Description of Artificial Sequence: Synthetic oligonucleotide
ucccugcucacgucaaaca

SEQ ID NO: 441422 - RNA, 19 nt, Artificial Sequence
  Description of Artificial Sequence: Synthetic oligonucleotide
ugcggcuauacagugccac

SEQ ID NO: 441423 - RNA, 19 nt, Artificial Sequence
  Description of Artificial Sequence: Synthetic oligonucleotide
gauccgugaagccaggcau

SEQ ID NO: 441424 - RNA, 19 nt, Artificial Sequence
  Description of Artificial Sequence: Synthetic oligonucleotide
uuggugacacgagaaccca

SEQ ID NO: 441425 - RNA, 19 nt, Artificial Sequence
  Description of Artificial Sequence: Synthetic oligonucleotide
ugccgagcgggaauagacu

SEQ ID NO: 441426 - RNA, 19 nt, Artificial Sequence
  Description of Artificial Sequence: Synthetic oligonucleotide
cccagugcguuucucaucc

SEQ ID NO: 441427 - RNA, 19 nt, Artificial Sequence
  Description of Artificial Sequence: Synthetic oligonucleotide
ugcggauguugaguggugc

SEQ ID NO: 441428 - RNA, 19 nt, Artificial Sequence
  Description of Artificial Sequence: Synthetic oligonucleotide
auguugaguggugcguccg

SEQ ID NO: 441429 - RNA, 19 nt, Artificial Sequence
  Description of Artificial Sequence: Synthetic oligonucleotide
agcuucuuuauuagugugu

SEQ ID NO: 441430 - RNA, 19 nt, Artificial Sequence
  Description of Artificial Sequence: Synthetic oligonucleotide
gaagcuucggcgauuucaa

SEQ ID NO: 441431 - RNA, 19 nt, Artificial Sequence
  Description of Artificial Sequence: Synthetic oligonucleotide
uucaggggaauguccucac

SEQ ID NO: 441432 - RNA, 19 nt, Artificial Sequence
  Description of Artificial Sequence: Synthetic oligonucleotide
gcaaaguaagcucaucaaa

SEQ ID NO: 441433 - RNA, 19 nt, Artificial Sequence
  Description of Artificial Sequence: Synthetic oligonucleotide
uaguacggugaaugcucag

SEQ ID NO: 441434 - RNA, 19 nt, Artificial Sequence
  Description of Artificial Sequence: Synthetic oligonucleotide
uccgugaagccaggcauug

SEQ ID NO: 441435 - RNA, 19 nt, Artificial Sequence
  Description of Artificial Sequence: Synthetic oligonucleotide
cuucggcgauuucaaacac

SEQ ID NO: 441436 - RNA, 19 nt, Artificial Sequence
  Description of Artificial Sequence: Synthetic oligonucleotide
caggcauuguaugcggccc

SEQ ID NO: 441437 - RNA, 19 nt, Artificial Sequence
  Description of Artificial Sequence: Synthetic oligonucleotide
gagauguauccucaaacuu

SEQ ID NO: 441438 - RNA, 19 nt, Artificial Sequence
  Description of Artificial Sequence: Synthetic oligonucleotide
agcaguugagcacguuccu

SEQ ID NO: 441439 - RNA, 19 nt, Artificial Sequence
  Description of Artificial Sequence: Synthetic oligonucleotide
uuaauccgccuuccauuaa

SEQ ID NO: 441440 - RNA, 19 nt, Artificial Sequence
  Description of Artificial Sequence: Synthetic oligonucleotide
agucugcagcccgcgaccc

SEQ ID NO: 441441 - RNA, 19 nt, Artificial Sequence
  Description of Artificial Sequence: Synthetic oligonucleotide
gcuucggcgauuucaaaca

SEQ ID NO: 441442 - RNA, 19 nt, Artificial Sequence
  Description of Artificial Sequence: Synthetic oligonucleotide
augagugcgcucuccugca

SEQ ID NO: 441443 - RNA, 19 nt, Artificial Sequence
  Description of Artificial Sequence: Synthetic oligonucleotide
acgacgaugucugucucca

SEQ ID NO: 441444 - RNA, 19 nt, Artificial Sequence
  Description of Artificial Sequence: Synthetic oligonucleotide
uggccucguaguacgguga

SEQ ID NO: 441445 - RNA, 19 nt, Artificial Sequence
  Description of Artificial Sequence: Synthetic oligonucleotide
ugagugcgcucuccugcag

SEQ ID NO: 441446 - RNA, 19 nt, Artificial Sequence
  Description of Artificial Sequence: Synthetic oligonucleotide
gacucguuagcaaaauccu

SEQ ID NO: 441447 - RNA, 19 nt, Artificial Sequence
  Description of Artificial Sequence: Synthetic oligonucleotide
acuaagaaauccgguuuaa

SEQ ID NO: 441448 - RNA, 19 nt, Artificial Sequence
  Description of Artificial Sequence: Synthetic oligonucleotide
gugacacgagaacccagug

SEQ ID NO: 441449 - RNA, 19 nt, Artificial Sequence
  Description of Artificial Sequence: Synthetic oligonucleotide
ggagauguauccucaaacu

SEQ ID NO: 441450 - RNA, 19 nt, Artificial Sequence
  Description of Artificial Sequence: Synthetic oligonucleotide
uucgcaggaaguggcgagc

SEQ ID NO: 441451 - RNA, 19 nt, Artificial Sequence
  Description of Artificial Sequence: Synthetic oligonucleotide
cacgcaguguagucugcag

SEQ ID NO: 441452 - RNA, 19 nt, Artificial Sequence
  Description of Artificial Sequence: Synthetic oligonucleotide
ucguucaggcggccaacca

SEQ ID NO: 441453 - RNA, 19 nt, Artificial Sequence
  Description of Artificial Sequence: Synthetic oligonucleotide
ggaacgggccacaaugucc

SEQ ID NO: 441454 - RNA, 19 nt, Artificial Sequence
  Description of Artificial Sequence: Synthetic oligonucleotide
auaccguagcagcuucgca

SEQ ID NO: 441455 - RNA, 19 nt, Artificial Sequence
  Description of Artificial Sequence: Synthetic oligonucleotide
uggcgauuguuccuagguu

SEQ ID NO: 441456 - RNA, 19 nt, Artificial Sequence
  Description of Artificial Sequence: Synthetic oligonucleotide
gaauagaaacccacuccaa

SEQ ID NO: 441457 - RNA, 19 nt, Artificial Sequence
  Description of Artificial Sequence: Synthetic oligonucleotide
auagucugauagacugguc

SEQ ID NO: 441458 - RNA, 19 nt, Artificial Sequence
  Description of Artificial Sequence: Synthetic oligonucleotide
acgguuaggggcacacagg

SEQ ID NO: 441459 - RNA, 19 nt, Artificial Sequence
  Description of Artificial Sequence: Synthetic oligonucleotide
uuuuggucccaggucuaac

SEQ ID NO: 441460 - RNA, 19 nt, Artificial Sequence
  Description of Artificial Sequence: Synthetic oligonucleotide
aguggugcguccgucuugu

SEQ ID NO: 441461 - RNA, 19 nt, Artificial Sequence
  Description of Artificial Sequence: Synthetic oligonucleotide
gucaaacauggaugguuuc

SEQ ID NO: 441462 - RNA, 19 nt, Artificial Sequence
  Description of Artificial Sequence: Synthetic oligonucleotide
ugcauacuaggcgcagucu

SEQ ID NO: 441463 - RNA, 19 nt, Artificial Sequence
  Description of Artificial Sequence: Synthetic oligonucleotide
auagauguugcgggugcca

SEQ ID NO: 441464 - RNA, 19 nt, Artificial Sequence
  Description of Artificial Sequence: Synthetic oligonucleotide
gcgauuucaaacacuccag

SEQ ID NO: 441465 - RNA, 19 nt, Artificial Sequence
  Description of Artificial Sequence: Synthetic oligonucleotide
auccgccuuccauuaaggu

SEQ ID NO: 441466 - RNA, 19 nt, Artificial Sequence
  Description of Artificial Sequence: Synthetic oligonucleotide
uuggguccaucauccagau

SEQ ID NO: 441467 - RNA, 19 nt, Artificial Sequence
  Description of Artificial Sequence: Synthetic oligonucleotide
gaagaguaccucuguuugu

SEQ ID NO: 441468 - RNA, 19 nt, Artificial Sequence
  Description of Artificial Sequence: Synthetic oligonucleotide
cguaguacggugaaugcuc

SEQ ID NO: 441469 - RNA, 19 nt, Artificial Sequence
  Description of Artificial Sequence: Synthetic oligonucleotide
gccuucagacaccagcuug

SEQ ID NO: 441470 - RNA, 19 nt, Artificial Sequence
  Description of Artificial Sequence: Synthetic oligonucleotide
agguucaggggaauguccu

SEQ ID NO: 441471 - RNA, 19 nt, Artificial Sequence
  Description of Artificial Sequence: Synthetic oligonucleotide
caggugacgguuaggggca

SEQ ID NO: 441472 - RNA, 19 nt, Artificial Sequence
  Description of Artificial Sequence: Synthetic oligonucleotide
guugagcacguuccuccug

SEQ ID NO: 441473 - RNA, 19 nt, Artificial Sequence
  Description of Artificial Sequence: Synthetic oligonucleotide
guacccgggacucguuagc

SEQ ID NO: 441474 - RNA, 19 nt, Artificial Sequence
  Description of Artificial Sequence: Synthetic oligonucleotide
gcggauguugaguggugcg

SEQ ID NO: 441475 - RNA, 19 nt, Artificial Sequence
  Description of Artificial Sequence: Synthetic oligonucleotide
gcuauacagugccacgcug

SEQ ID NO: 441476 - RNA, 19 nt, Artificial Sequence
  Description of Artificial Sequence: Synthetic oligonucleotide
gcauacuaggcgcagucuc

SEQ ID NO: 441477 - RNA, 19 nt, Artificial Sequence
  Description of Artificial Sequence: Synthetic oligonucleotide
cacguuggugacacgagaa

SEQ ID NO: 441478 - RNA, 19 nt, Artificial Sequence
  Description of Artificial Sequence: Synthetic oligonucleotide
agaagaccuggguugcaua

SEQ ID NO: 441479 - RNA, 19 nt, Artificial Sequence
  Description of Artificial Sequence: Synthetic oligonucleotide
ucgucggacgcccgcuagc

SEQ ID NO: 441480 - RNA, 19 nt, Artificial Sequence
  Description of Artificial Sequence: Synthetic oligonucleotide
ggcgauuguuccuagguua

SEQ ID NO: 441481 - RNA, 19 nt, Artificial Sequence
  Description of Artificial Sequence: Synthetic oligonucleotide
acaccucgaacgaagcgca

SEQ ID NO: 441482 - RNA, 19 nt, Artificial Sequence
  Description of Artificial Sequence: Synthetic oligonucleotide
gucaacgacgaugucuguc

SEQ ID NO: 441483 - RNA, 19 nt, Artificial Sequence
  Description of Artificial Sequence: Synthetic oligonucleotide
gaguggugcguccgucuug

SEQ ID NO: 441484 - RNA, 19 nt, Artificial Sequence
  Description of Artificial Sequence: Synthetic oligonucleotide
cugcaacucgcuuaugucu

SEQ ID NO: 441485 - RNA, 19 nt, Artificial Sequence
  Description of Artificial Sequence: Synthetic oligonucleotide
ccucguaguacggugaaug

SEQ ID NO: 441486 - RNA, 19 nt, Artificial Sequence
  Description of Artificial Sequence: Synthetic oligonucleotide
uuccuagguuagacaccag

SEQ ID NO: 441487 - RNA, 19 nt, Artificial Sequence
  Description of Artificial Sequence: Synthetic oligonucleotide
aagaugcagaacgggcuuu

SEQ ID NO: 441488 - RNA, 19 nt, Artificial Sequence
  Description of Artificial Sequence: Synthetic oligonucleotide
agcgcgggagcacgcagug

SEQ ID NO: 441489 - RNA, 19 nt, Artificial Sequence
  Description of Artificial Sequence: Synthetic oligonucleotide
gaagaugcagaacgggcuu

SEQ ID NO: 441490 - RNA, 19 nt, Artificial Sequence
  Description of Artificial Sequence: Synthetic oligonucleotide
cggaguuuccggaugagug

SEQ ID NO: 441491 - RNA, 19 nt, Artificial Sequence
  Description of Artificial Sequence: Synthetic oligonucleotide
ccucgaacgaagcgcagcc

SEQ ID NO: 441492 - RNA, 19 nt, Artificial Sequence
  Description of Artificial Sequence: Synthetic oligonucleotide
ccuuugaccccgaucuggc

SEQ ID NO: 441493 - RNA, 19 nt, Artificial Sequence
  Description of Artificial Sequence: Synthetic oligonucleotide
cugcaggaguucucggcug

SEQ ID NO: 441494 - RNA, 19 nt, Artificial Sequence
  Description of Artificial Sequence: Synthetic oligonucleotide
cauagucugauagacuggu

SEQ ID NO: 441495 - RNA, 19 nt, Artificial Sequence
  Description of Artificial Sequence: Synthetic oligonucleotide
gcauagucugauagacugg

SEQ ID NO: 441496 - RNA, 19 nt, Artificial Sequence
  Description of Artificial Sequence: Synthetic oligonucleotide
cuagcgcgggagcacgcag

SEQ ID NO: 441497 - RNA, 19 nt, Artificial Sequence
  Description of Artificial Sequence: Synthetic oligonucleotide
gcgggguuugucauaagcc

SEQ ID NO: 441498 - RNA, 19 nt, Artificial Sequence
  Description of Artificial Sequence: Synthetic oligonucleotide
uacccgggacucguuagca

SEQ ID NO: 441499 - RNA, 19 nt, Artificial Sequence
  Description of Artificial Sequence: Synthetic oligonucleotide
agguuagacaccagcuccu

SEQ ID NO: 441500 - RNA, 19 nt, Artificial Sequence
  Description of Artificial Sequence: Synthetic oligonucleotide
gcggcuauacagugccacg

SEQ ID NO: 441501 - RNA, 19 nt, Artificial Sequence
  Description of Artificial Sequence: Synthetic oligonucleotide
ggucacaaugcccucccuc

SEQ ID NO: 441502 - RNA, 19 nt, Artificial Sequence
  Description of Artificial Sequence: Synthetic oligonucleotide
aggucguucaggcggccaa

SEQ ID NO: 441503 - RNA, 19 nt, Artificial Sequence
  Description of Artificial Sequence: Synthetic oligonucleotide
aucuuguacccgggacucg

SEQ ID NO: 441504 - RNA, 19 nt, Artificial Sequence
  Description of Artificial Sequence: Synthetic oligonucleotide
guggucaacgacgaugucu

SEQ ID NO: 441505 - RNA, 19 nt, Artificial Sequence
  Description of Artificial Sequence: Synthetic oligonucleotide
guaguacggugaaugcuca

SEQ ID NO: 441506 - RNA, 19 nt, Artificial Sequence
  Description of Artificial Sequence: Synthetic oligonucleotide
gaucuggcgauuguuccua

SEQ ID NO: 441507 - RNA, 19 nt, Artificial Sequence
  Description of Artificial Sequence: Synthetic oligonucleotide
aagcgggguuugucauaag

SEQ ID NO: 441508 - RNA, 19 nt, Artificial Sequence
  Description of Artificial Sequence: Synthetic oligonucleotide
gcgauuguuccuagguuag

SEQ ID NO: 441509 - RNA, 19 nt, Artificial Sequence
  Description of Artificial Sequence: Synthetic oligonucleotide
gaauucccucaggugcagc

SEQ ID NO: 441510 - RNA, 19 nt, Artificial Sequence
  Description of Artificial Sequence: Synthetic oligonucleotide
cauacuaggcgcagucucu

SEQ ID NO: 441511 - RNA, 19 nt, Artificial Sequence
  Description of Artificial Sequence: Synthetic oligonucleotide
cauuguaugcggcccuuaa

SEQ ID NO: 441512 - RNA, 19 nt, Artificial Sequence
  Description of Artificial Sequence: Synthetic oligonucleotide
aaggucguucaggcggcca

SEQ ID NO: 441513 - RNA, 19 nt, Artificial Sequence
  Description of Artificial Sequence: Synthetic oligonucleotide
uuuccggaugagugcgcuc

SEQ ID NO: 441514 - RNA, 19 nt, Artificial Sequence
  Description of Artificial Sequence: Synthetic oligonucleotide
acgagaacccagugcguuu

SEQ ID NO: 441515 - RNA, 19 nt, Artificial Sequence
  Description of Artificial Sequence: Synthetic oligonucleotide
ggugcguccgucuuguagu

SEQ ID NO: 441516 - RNA, 19 nt, Artificial Sequence
  Description of Artificial Sequence: Synthetic oligonucleotide
ugguuucgucucuggcaca

SEQ ID NO: 441517 - RNA, 19 nt, Artificial Sequence
  Description of Artificial Sequence: Synthetic oligonucleotide
gcuggcauagucugauaga

SEQ ID NO: 441518 - RNA, 19 nt, Artificial Sequence
  Description of Artificial Sequence: Synthetic oligonucleotide
gucaucaacgaguccugcu

SEQ ID NO: 441519 - RNA, 19 nt, Artificial Sequence
  Description of Artificial Sequence: Synthetic oligonucleotide
ucaacgaguccugcugcua

SEQ ID NO: 441520 - RNA, 19 nt, Artificial Sequence
  Description of Artificial Sequence: Synthetic oligonucleotide
cuccugugucaucccaaug

SEQ ID NO: 441521 - RNA, 19 nt, Artificial Sequence
  Description of Artificial Sequence: Synthetic oligonucleotide
ggacugugguccucugaag

SEQ ID NO: 441522 - RNA, 19 nt, Artificial Sequence
  Description of Artificial Sequence: Synthetic oligonucleotide
gugcguccgucuuguagug

SEQ ID NO: 441523 - RNA, 19 nt, Artificial Sequence
  Description of Artificial Sequence: Synthetic oligonucleotide
acucguuagcaaaauccuu

SEQ ID NO: 441524 - RNA, 19 nt, Artificial Sequence
  Description of Artificial Sequence: Synthetic oligonucleotide
cuggcgauuguuccuaggu

SEQ ID NO: 441525 - RNA, 19 nt, Artificial Sequence
  Description of Artificial Sequence: Synthetic oligonucleotide
ggcguucucauagaucuga

SEQ ID NO: 441526 - RNA, 19 nt, Artificial Sequence
  Description of Artificial Sequence: Synthetic oligonucleotide
cucgucggacgcccgcuag

SEQ ID NO: 441527 - RNA, 19 nt, Artificial Sequence
  Description of Artificial Sequence: Synthetic oligonucleotide
uugcggcuauacagugcca

SEQ ID NO: 441528 - RNA, 19 nt, Artificial Sequence
  Description of Artificial Sequence: Synthetic oligonucleotide
gguugcauacuaggcgcag

SEQ ID NO: 441529 - RNA, 19 nt, Artificial Sequence
  Description of Artificial Sequence: Synthetic oligonucleotide
caacgacgaugucugucuc

SEQ ID NO: 441530 - RNA, 19 nt, Artificial Sequence
  Description of Artificial Sequence: Synthetic oligonucleotide
gucguucaggcggccaacc

SEQ ID NO: 441531 - RNA, 19 nt, Artificial Sequence
  Description of Artificial Sequence: Synthetic oligonucleotide
ucgcaauguccuccuugau

SEQ ID NO: 441532 - RNA, 19 nt, Artificial Sequence
  Description of Artificial Sequence: Synthetic oligonucleotide
caugcugcaacucgcuuau

SEQ ID NO: 441533 - RNA, 19 nt, Artificial Sequence
  Description of Artificial Sequence: Synthetic oligonucleotide
gcucguagcagaagaguac

SEQ ID NO: 441534 - RNA, 19 nt, Artificial Sequence
  Description of Artificial Sequence: Synthetic oligonucleotide
cagcccgcgaccccacagc

SEQ ID NO: 441535 - RNA, 19 nt, Artificial Sequence
  Description of Artificial Sequence: Synthetic oligonucleotide
gaccuugcggcuauacagu

SEQ ID NO: 441536 - RNA, 19 nt, Artificial Sequence
  Description of Artificial Sequence: Synthetic oligonucleotide
gggaauagacuucaacuuu

SEQ ID NO: 441537 - RNA, 19 nt, Artificial Sequence
  Description of Artificial Sequence: Synthetic oligonucleotide
cuaucauggcguucucaua

SEQ ID NO: 441538 - RNA, 19 nt, Artificial Sequence
  Description of Artificial Sequence: Synthetic oligonucleotide
ccuugcggcuauacagugc

SEQ ID NO: 441539 - RNA, 19 nt, Artificial Sequence
  Description of Artificial Sequence: Synthetic oligonucleotide
gggacucguuagcaaaauc

SEQ ID NO: 441540 - RNA, 19 nt, Artificial Sequence
  Description of Artificial Sequence: Synthetic oligonucleotide
ccuagguuagacaccagcu

SEQ ID NO: 441541 - RNA, 19 nt, Artificial Sequence
  Description of Artificial Sequence: Synthetic oligonucleotide
ggcggaaagucaccuucac

SEQ ID NO: 441542 - RNA, 19 nt, Artificial Sequence
  Description of Artificial Sequence: Synthetic oligonucleotide
gcugaggacucauaccgua

SEQ ID NO: 441543 - RNA, 19 nt, Artificial Sequence
  Description of Artificial Sequence: Synthetic oligonucleotide
caccucgaacgaagcgcag

SEQ ID NO: 441544 - RNA, 19 nt, Artificial Sequence
  Description of Artificial Sequence: Synthetic oligonucleotide
uaggggcacacagguaaua

SEQ ID NO: 441545 - RNA, 19 nt, Artificial Sequence
  Description of Artificial Sequence: Synthetic oligonucleotide
cauaagccugagcaacgua

SEQ ID NO: 441546 - RNA, 19 nt, Artificial Sequence
  Description of Artificial Sequence: Synthetic oligonucleotide
gaaggucguucaggcggcc

SEQ ID NO: 441547 - RNA, 19 nt, Artificial Sequence
  Description of Artificial Sequence: Synthetic oligonucleotide
aggcggaaagucaccuuca

SEQ ID NO: 441548 - RNA, 19 nt, Artificial Sequence
  Description of Artificial Sequence: Synthetic oligonucleotide
gucucugggcugucaaugu

SEQ ID NO: 441549 - RNA, 19 nt, Artificial Sequence
  Description of Artificial Sequence: Synthetic oligonucleotide
accccgaucuggcgauugu

SEQ ID NO: 441550 - RNA, 19 nt, Artificial Sequence
  Description of Artificial Sequence: Synthetic oligonucleotide
cccgaucuggcgauuguuc

SEQ ID NO: 441551 - RNA, 19 nt, Artificial Sequence
  Description of Artificial Sequence: Synthetic oligonucleotide
cugccugguucugcagugc

SEQ ID NO: 441552 - RNA, 19 nt, Artificial Sequence
  Description of Artificial Sequence: Synthetic oligonucleotide
gggagcacgcaguguaguc

SEQ ID NO: 441553 - RNA, 19 nt, Artificial Sequence
  Description of Artificial Sequence: Synthetic oligonucleotide
ucgcgcgccaugccucggu

SEQ ID NO: 441554 - RNA, 19 nt, Artificial Sequence
  Description of Artificial Sequence: Synthetic oligonucleotide
cgcuuaugucuuuuggguc

SEQ ID NO: 441555 - RNA, 19 nt, Artificial Sequence
  Description of Artificial Sequence: Synthetic oligonucleotide
acccgggacucguuagcaa

SEQ ID NO: 441556 - RNA, 19 nt, Artificial Sequence
  Description of Artificial Sequence: Synthetic oligonucleotide
aggugacgguuaggggcac

SEQ ID NO: 441557 - RNA, 19 nt, Artificial Sequence
  Description of Artificial Sequence: Synthetic oligonucleotide
aguucucggcugagguuca

SEQ ID NO: 441558 - RNA, 19 nt, Artificial Sequence
  Description of Artificial Sequence: Synthetic oligonucleotide
acguaacgguagaauuccu

SEQ ID NO: 441559 - RNA, 19 nt, Artificial Sequence
  Description of Artificial Sequence: Synthetic oligonucleotide
ugcggcccuuaaccuggac

SEQ ID NO: 441560 - RNA, 19 nt, Artificial Sequence
  Description of Artificial Sequence: Synthetic oligonucleotide
cggugaaugcucagccagg

SEQ ID NO: 441561 - RNA, 19 nt, Artificial Sequence
  Description of Artificial Sequence: Synthetic oligonucleotide
ggcaggauaucuguagccu

SEQ ID NO: 441562 - RNA, 19 nt, Artificial Sequence
  Description of Artificial Sequence: Synthetic oligonucleotide
gccugagcaacguaacggu

SEQ ID NO: 441563 - RNA, 19 nt, Artificial Sequence
  Description of Artificial Sequence: Synthetic oligonucleotide
cauggaugguuucgucucu

SEQ ID NO: 441564 - RNA, 19 nt, Artificial Sequence
  Description of Artificial Sequence: Synthetic oligonucleotide
gguuagacaccagcuccuc

SEQ ID NO: 441565 - RNA, 19 nt, Artificial Sequence
  Description of Artificial Sequence: Synthetic oligonucleotide
cguagcagaagaguaccuc

SEQ ID NO: 441566 - RNA, 19 nt, Artificial Sequence
  Description of Artificial Sequence: Synthetic oligonucleotide
gccaaugaucuugcugcug

SEQ ID NO: 441567 - RNA, 19 nt, Artificial Sequence
  Description of Artificial Sequence: Synthetic oligonucleotide
guugcauacuaggcgcagu

SEQ ID NO: 441568 - RNA, 19 nt, Artificial Sequence
  Description of Artificial Sequence: Synthetic oligonucleotide
ggugacacgagaacccagu

SEQ ID NO: 441569 - RNA, 19 nt, Artificial Sequence
  Description of Artificial Sequence: Synthetic oligonucleotide
auccgugaagccaggcauu

SEQ ID NO: 441570 - RNA, 19 nt, Artificial Sequence
  Description of Artificial Sequence: Synthetic oligonucleotide
caacgaguccugcugcuau

SEQ ID NO: 441571 - RNA, 19 nt, Artificial Sequence
  Description of Artificial Sequence: Synthetic oligonucleotide
ggcuauacagugccacgcu

SEQ ID NO: 441572 - RNA, 19 nt, Artificial Sequence
  Description of Artificial Sequence: Synthetic oligonucleotide
guucucggcugagguucag

SEQ ID NO: 441573 - RNA, 19 nt, Artificial Sequence
  Description of Artificial Sequence: Synthetic oligonucleotide
cagccaggugacgguuagg

SEQ ID NO: 441574 - RNA, 19 nt, Artificial Sequence
  Description of Artificial Sequence: Synthetic oligonucleotide
gagaacccagugcguuucu

SEQ ID NO: 441575 - RNA, 19 nt, Artificial Sequence
  Description of Artificial Sequence: Synthetic oligonucleotide
cucgaacgaagcgcagcca

SEQ ID NO: 441576 - RNA, 19 nt, Artificial Sequence
  Description of Artificial Sequence: Synthetic oligonucleotide
ccgagcgggaauagacuuc

SEQ ID NO: 441577 - RNA, 19 nt, Artificial Sequence
  Description of Artificial Sequence: Synthetic oligonucleotide
ggagcacgcaguguagucu

SEQ ID NO: 441578 - RNA, 19 nt, Artificial Sequence
  Description of Artificial Sequence: Synthetic oligonucleotide
cuguccuguagagauccgu

SEQ ID NO: 441579 - RNA, 19 nt, Artificial Sequence
  Description of Artificial Sequence: Synthetic oligonucleotide
cuggcacauagaagaugcu

SEQ ID NO: 441580 - RNA, 19 nt, Artificial Sequence
  Description of Artificial Sequence: Synthetic oligonucleotide
ggcugucaauguuucucua

SEQ ID NO: 441581 - RNA, 19 nt, Artificial Sequence
  Description of Artificial Sequence: Synthetic oligonucleotide
gcggcccuuaaccuggacu

SEQ ID NO: 441582 - RNA, 19 nt, Artificial Sequence
  Description of Artificial Sequence: Synthetic oligonucleotide
cggcgauuucaaacacucc

SEQ ID NO: 441583 - RNA, 19 nt, Artificial Sequence
  Description of Artificial Sequence: Synthetic oligonucleotide
ggucguucaggcggccaac

SEQ ID NO: 441584 - RNA, 19 nt, Artificial Sequence
  Description of Artificial Sequence: Synthetic oligonucleotide
ccgucaccauggcagggug

SEQ ID NO: 441585 - RNA, 19 nt, Artificial Sequence
  Description of Artificial Sequence: Synthetic oligonucleotide
cccgggacucguuagcaaa

SEQ ID NO: 441586 - RNA, 19 nt, Artificial Sequence
  Description of Artificial Sequence: Synthetic oligonucleotide
ccgcaguuucuccaaggca

SEQ ID NO: 441587 - RNA, 19 nt, Artificial Sequence
  Description of Artificial Sequence: Synthetic oligonucleotide
caucccggaguuuccggau

SEQ ID NO: 441588 - RNA, 19 nt, Artificial Sequence
  Description of Artificial Sequence: Synthetic oligonucleotide
cgucggacgcccgcuagcg

SEQ ID NO: 441589 - RNA, 19 nt, Artificial Sequence
  Description of Artificial Sequence: Synthetic oligonucleotide
ggguugcauacuaggcgca

SEQ ID NO: 441590 - RNA, 19 nt, Artificial Sequence
  Description of Artificial Sequence: Synthetic oligonucleotide
ggccucguaguacggugaa

SEQ ID NO: 441591 - RNA, 19 nt, Artificial Sequence
  Description of Artificial Sequence: Synthetic oligonucleotide
uaaggaccuugcggcuaua

SEQ ID NO: 441592 - RNA, 19 nt, Artificial Sequence
  Description of Artificial Sequence: Synthetic oligonucleotide
cacgagaacccagugcguu

SEQ ID NO: 441593 - RNA, 19 nt, Artificial Sequence
  Description of Artificial Sequence: Synthetic oligonucleotide
gcgcgccaugccucggucc

SEQ ID NO: 441594 - RNA, 19 nt, Artificial Sequence
  Description of Artificial Sequence: Synthetic oligonucleotide
cgagaacccagugcguuuc

SEQ ID NO: 441595 - RNA, 19 nt, Artificial Sequence
  Description of Artificial Sequence: Synthetic oligonucleotide
ccugagcaacguaacggua

SEQ ID NO: 441596 - RNA, 19 nt, Artificial Sequence
  Description of Artificial Sequence: Synthetic oligonucleotide
cgagcgggaauagacuuca

SEQ ID NO: 441597 - RNA, 19 nt, Artificial Sequence
  Description of Artificial Sequence: Synthetic oligonucleotide
gccgagcgggaauagacuu

SEQ ID NO: 441598 - RNA, 19 nt, Artificial Sequence
  Description of Artificial Sequence: Synthetic oligonucleotide
cgggaauagacuucaacuu

SEQ ID NO: 441599 - RNA, 19 nt, Artificial Sequence
  Description of Artificial Sequence: Synthetic oligonucleotide
gcacgcaguguagucugca

SEQ ID NO: 441600 - RNA, 19 nt, Artificial Sequence
  Description of Artificial Sequence: Synthetic oligonucleotide
ggccaaugaucuugcugcu

SEQ ID NO: 441601 - RNA, 19 nt, Artificial Sequence
  Description of Artificial Sequence: Synthetic oligonucleotide
ccgcuagcgcgggagcacg

SEQ ID NO: 441602 - RNA, 19 nt, Artificial Sequence
  Description of Artificial Sequence: Synthetic oligonucleotide
ccgguuuaauugagguaaa

SEQ ID NO: 441603 - RNA, 19 nt, Artificial Sequence
  Description of Artificial Sequence: Synthetic oligonucleotide
cugggcugucaauguuucu

SEQ ID NO: 441604 - RNA, 19 nt, Artificial Sequence
  Description of Artificial Sequence: Synthetic oligonucleotide
gcucucgaauaaacaccuc

SEQ ID NO: 441605 - RNA, 19 nt, Artificial Sequence
  Description of Artificial Sequence: Synthetic oligonucleotide
guuucgucucuggcacaua

SEQ ID NO: 441606 - RNA, 19 nt, Artificial Sequence
  Description of Artificial Sequence: Synthetic oligonucleotide
cgcucucucagcugacuga

SEQ ID NO: 441607 - RNA, 19 nt, Artificial Sequence
  Description of Artificial Sequence: Synthetic oligonucleotide
gguuaggggcacacaggua

SEQ ID NO: 441608 - RNA, 19 nt, Artificial Sequence
  Description of Artificial Sequence: Synthetic oligonucleotide
ggcugccgagcgggaauag

SEQ ID NO: 441609 - RNA, 19 nt, Artificial Sequence
  Description of Artificial Sequence: Synthetic oligonucleotide
gacgcccgcuagcgcggga

SEQ ID NO: 441610 - RNA, 19 nt, Artificial Sequence
  Description of Artificial Sequence: Synthetic oligonucleotide
ccgggacucguuagcaaaa

SEQ ID NO: 441611 - RNA, 19 nt, Artificial Sequence
  Description of Artificial Sequence: Synthetic oligonucleotide
gcugccgagcgggaauaga

SEQ ID NO: 441612 - RNA, 19 nt, Artificial Sequence
  Description of Artificial Sequence: Synthetic oligonucleotide
gagcgggaauagacuucaa

SEQ ID NO: 441613 - RNA, 19 nt, Artificial Sequence
  Description of Artificial Sequence: Synthetic oligonucleotide
cggacgcccgcuagcgcgg

SEQ ID NO: 441614 - RNA, 19 nt, Artificial Sequence
  Description of Artificial Sequence: Synthetic oligonucleotide
gcuagcgcgggagcacgca

SEQ ID NO: 441615 - RNA, 19 nt, Artificial Sequence
  Description of Artificial Sequence: Synthetic oligonucleotide
gcuguacaacuguccugua

SEQ ID NO: 441616 - RNA, 19 nt, Artificial Sequence
  Description of Artificial Sequence: Synthetic oligonucleotide
ggacgcccgcuagcgcggg

SEQ ID NO: 441617 - RNA, 19 nt, Artificial Sequence
  Description of Artificial Sequence: Synthetic oligonucleotide
ggugacgguuaggggcaca

SEQ ID NO: 441618 - RNA, 19 nt, Artificial Sequence
  Description of Artificial Sequence: Synthetic oligonucleotide
cgcgggagcacgcagugua

SEQ ID NO: 441619 - RNA, 19 nt, Artificial Sequence
  Description of Artificial Sequence: Synthetic oligonucleotide
guagaacaucccggaguuu

SEQ ID NO: 441620 - RNA, 19 nt, Artificial Sequence
  Description of Artificial Sequence: Synthetic oligonucleotide
cccgcuagcgcgggagcac

SEQ ID NO: 441621 - RNA, 19 nt, Artificial Sequence
  Description of Artificial Sequence: Synthetic oligonucleotide
caacucgcuuaugucuuuu

SEQ ID NO: 441622 - RNA, 19 nt, Artificial Sequence
  Description of Artificial Sequence: Synthetic oligonucleotide
ggcugaggacucauaccgu

SEQ ID NO: 441623 - RNA, 19 nt, Artificial Sequence
  Description of Artificial Sequence: Synthetic oligonucleotide
ccgucuuguagugcaaagu

SEQ ID NO: 441624 - RNA, 19 nt, Artificial Sequence
  Description of Artificial Sequence: Synthetic oligonucleotide
gcauuguaugcggcccuua

SEQ ID NO: 441625 - RNA, 19 nt, Artificial Sequence
  Description of Artificial Sequence: Synthetic oligonucleotide
cgacgaugucugucuccac

SEQ ID NO: 441626 - RNA, 19 nt, Artificial Sequence
  Description of Artificial Sequence: Synthetic oligonucleotide
gcgcagccacuugggcagg

SEQ ID NO: 441627 - RNA, 19 nt, Artificial Sequence
  Description of Artificial Sequence: Synthetic oligonucleotide
gcccgcuagcgcgggagca

SEQ ID NO: 441628 - RNA, 19 nt, Artificial Sequence
  Description of Artificial Sequence: Synthetic oligonucleotide
cgauuguuccuagguuaga

SEQ ID NO: 441629 - RNA, 19 nt, Artificial Sequence
  Description of Artificial Sequence: Synthetic oligonucleotide
guggugcguccgucuugua

SEQ ID NO: 441630 - RNA, 19 nt, Artificial Sequence
  Description of Artificial Sequence: Synthetic oligonucleotide
cguucaggcggccaaccau

SEQ ID NO: 441631 - RNA, 19 nt, Artificial Sequence
  Description of Artificial Sequence: Synthetic oligonucleotide
cuguagccuuggucuggau

SEQ ID NO: 441632 - RNA, 19 nt, Artificial Sequence
  Description of Artificial Sequence: Synthetic oligonucleotide
cgcccgcuagcgcgggagc

SEQ ID NO: 441633 - RNA, 19 nt, Artificial Sequence
  Description of Artificial Sequence: Synthetic oligonucleotide
ccgcgaccccacagcagca

SEQ ID NO: 441634 - RNA, 19 nt, Artificial Sequence
  Description of Artificial Sequence: Synthetic oligonucleotide
ccggaguuuccggaugagu

SEQ ID NO: 441635 - RNA, 19 nt, Artificial Sequence
  Description of Artificial Sequence: Synthetic oligonucleotide
cggcucccgcucucucagc

SEQ ID NO: 441636 - RNA, 19 nt, Artificial Sequence
  Description of Artificial Sequence: Synthetic oligonucleotide
cgggacucguuagcaaaau

SEQ ID NO: 441637 - RNA, 19 nt, Artificial Sequence
  Description of Artificial Sequence: Synthetic oligonucleotide
ccccgaucuggcgauuguu

SEQ ID NO: 441638 - RNA, 19 nt, Artificial Sequence
  Description of Artificial Sequence: Synthetic oligonucleotide
gcgcgggagcacgcagugu

SEQ ID NO: 441639 - RNA, 19 nt, Artificial Sequence
  Description of Artificial Sequence: Synthetic oligonucleotide
ccuugaccagaaggucguu

SEQ ID NO: 441640 - RNA, 19 nt, Artificial Sequence
  Description of Artificial Sequence: Synthetic oligonucleotide
aauacuauaguccacaagc

SEQ ID NO: 441641 - RNA, 19 nt, Artificial Sequence
  Description of Artificial Sequence: Synthetic oligonucleotide
uccucaaagaccaaaagag

SEQ ID NO: 441642 - RNA, 19 nt, Artificial Sequence
  Description of Artificial Sequence: Synthetic oligonucleotide
ugaaucgggagacaaagcg

SEQ ID NO: 441643 - RNA, 19 nt, Artificial Sequence
  Description of Artificial Sequence: Synthetic oligonucleotide
cuugaauuugcguagaaag

SEQ ID NO: 441644 - RNA, 19 nt, Artificial Sequence
  Description of Artificial Sequence: Synthetic oligonucleotide
auagguaacaucugggugg

SEQ ID NO: 441645 - RNA, 19 nt, Artificial Sequence
  Description of Artificial Sequence: Synthetic oligonucleotide
gaagcuucccuccagagcc

SEQ ID NO: 441646 - RNA, 19 nt, Artificial Sequence
  Description of Artificial Sequence: Synthetic oligonucleotide
ugauacuccuaucaggucc

SEQ ID NO: 441647 - RNA, 19 nt, Artificial Sequence
  Description of Artificial Sequence: Synthetic oligonucleotide
aauuugcguagaaagaagg

SEQ ID NO: 441648 - RNA, 19 nt, Artificial Sequence
  Description of Artificial Sequence: Synthetic oligonucleotide
uuugcguagaaagaaggcg

SEQ ID NO: 441649 - RNA, 19 nt, Artificial Sequence
  Description of Artificial Sequence: Synthetic oligonucleotide
acuauaguccacaagcacc

SEQ ID NO: 441650 - RNA, 19 nt, Artificial Sequence
  Description of Artificial Sequence: Synthetic oligonucleotide
caaagcguaaccaggaagc

SEQ ID NO: 441651 - RNA, 19 nt, Artificial Sequence
  Description of Artificial Sequence: Synthetic oligonucleotide
gaaaccagagccuuucugc

SEQ ID NO: 441652 - RNA, 19 nt, Artificial Sequence
  Description of Artificial Sequence: Synthetic oligonucleotide
uggcaugagugacagagcg

SEQ ID NO: 441653 - RNA, 19 nt, Artificial Sequence
  Description of Artificial Sequence: Synthetic oligonucleotide
agaaaggaacuccacacag

SEQ ID NO: 441654 - RNA, 19 nt, Artificial Sequence
  Description of Artificial Sequence: Synthetic oligonucleotide
cauuaagggaaguaacucc

SEQ ID NO: 441655 - RNA, 19 nt, Artificial Sequence
  Description of Artificial Sequence: Synthetic oligonucleotide
ugagcguggagauggagcg

SEQ ID NO: 441656 - RNA, 19 nt, Artificial Sequence
  Description of Artificial Sequence: Synthetic oligonucleotide
gaaacgcacagguacaggc

SEQ ID NO: 441657 - RNA, 19 nt, Artificial Sequence
  Description of Artificial Sequence: Synthetic oligonucleotide
ugcagaacgagaagaaggc

SEQ ID NO: 441658 - RNA, 19 nt, Artificial Sequence
  Description of Artificial Sequence: Synthetic oligonucleotide
aguucugauacuccuauca

SEQ ID NO: 441659 - RNA, 19 nt, Artificial Sequence
  Description of Artificial Sequence: Synthetic oligonucleotide
aaugaccauggagaggccc

SEQ ID NO: 441660 - RNA, 19 nt, Artificial Sequence
  Description of Artificial Sequence: Synthetic oligonucleotide
gaagaugcggguaaguacc

SEQ ID NO: 441661 - RNA, 19 nt, Artificial Sequence
  Description of Artificial Sequence: Synthetic oligonucleotide
auuagucccacugcuacgc

SEQ ID NO: 441662 - RNA, 19 nt, Artificial Sequence
  Description of Artificial Sequence: Synthetic oligonucleotide
uccauuaagggaaguaacu

SEQ ID NO: 441663 - RNA, 19 nt, Artificial Sequence
  Description of Artificial Sequence: Synthetic oligonucleotide
ucuuaaucagcuuguagaa

SEQ ID NO: 441664 - RNA, 19 nt, Artificial Sequence
  Description of Artificial Sequence: Synthetic oligonucleotide
agucguuggagacugagca

SEQ ID NO: 441665 - RNA, 19 nt, Artificial Sequence
  Description of Artificial Sequence: Synthetic oligonucleotide
uugcguagaaagaaggcga

SEQ ID NO: 441666 - RNA, 19 nt, Artificial Sequence
  Description of Artificial Sequence: Synthetic oligonucleotide
gaagccaauccacacucgg

SEQ ID NO: 441667 - RNA, 19 nt, Artificial Sequence
  Description of Artificial Sequence: Synthetic oligonucleotide
guaaguaccaccaugcgca

SEQ ID NO: 441668 - RNA, 19 nt, Artificial Sequence
  Description of Artificial Sequence: Synthetic oligonucleotide
acaaagcguaaccaggaag

SEQ ID NO: 441669 - RNA, 19 nt, Artificial Sequence
  Description of Artificial Sequence: Synthetic oligonucleotide
cacgucacgaaucagcccc

SEQ ID NO: 441670 - RNA, 19 nt, Artificial Sequence
  Description of Artificial Sequence: Synthetic oligonucleotide
guagaugaagauaacagca

SEQ ID NO: 441671 - RNA, 19 nt, Artificial Sequence
  Description of Artificial Sequence: Synthetic oligonucleotide
gucauauugccacugcugc

SEQ ID NO: 441672 - RNA, 19 nt, Artificial Sequence
  Description of Artificial Sequence: Synthetic oligonucleotide
guaacucccauguauaaga

SEQ ID NO: 441673 - RNA, 19 nt, Artificial Sequence
  Description of Artificial Sequence: Synthetic oligonucleotide
uccgaaguccccaauuacc

SEQ ID NO: 441674 - RNA, 19 nt, Artificial Sequence
  Description of Artificial Sequence: Synthetic oligonucleotide
agggaaguaacucccaugu

SEQ ID NO: 441675 - RNA, 19 nt, Artificial Sequence
  Description of Artificial Sequence: Synthetic oligonucleotide
ugaagaugcggguaaguac

SEQ ID NO: 441676 - RNA, 19 nt, Artificial Sequence
  Description of Artificial Sequence: Synthetic oligonucleotide
auuugcguagaaagaaggc

SEQ ID NO: 441677 - RNA, 19 nt, Artificial Sequence
  Description of Artificial Sequence: Synthetic oligonucleotide
uacuauaguccacaagcac

SEQ ID NO: 441678 - RNA, 19 nt, Artificial Sequence
  Description of Artificial Sequence: Synthetic oligonucleotide
cagguaagcugccucaugg

SEQ ID NO: 441679 - RNA, 19 nt, Artificial Sequence
  Description of Artificial Sequence: Synthetic oligonucleotide
auaugaggaaggcaaagau

SEQ ID NO: 441680 - RNA, 19 nt, Artificial Sequence
  Description of Artificial Sequence: Synthetic oligonucleotide
gaauuugcguagaaagaag

SEQ ID NO: 441681 - RNA, 19 nt, Artificial Sequence
  Description of Artificial Sequence: Synthetic oligonucleotide
uucauuucucgcucgguga

SEQ ID NO: 441682 - RNA, 19 nt, Artificial Sequence
  Description of Artificial Sequence: Synthetic oligonucleotide
ugaagugcuguggacauga

SEQ ID NO: 441683 - RNA, 19 nt, Artificial Sequence
  Description of Artificial Sequence: Synthetic oligonucleotide
uguuccuugaccucuugaa

SEQ ID NO: 441684 - RNA, 19 nt, Artificial Sequence
  Description of Artificial Sequence: Synthetic oligonucleotide
gacauuucauuucucgcuc

SEQ ID NO: 441685 - RNA, 19 nt, Artificial Sequence
  Description of Artificial Sequence: Synthetic oligonucleotide
ucugagucguuggagacug

SEQ ID NO: 441686 - RNA, 19 nt, Artificial Sequence
  Description of Artificial Sequence: Synthetic oligonucleotide
ggggauuugucguaguagg

SEQ ID NO: 441687 - RNA, 19 nt, Artificial Sequence
  Description of Artificial Sequence: Synthetic oligonucleotide
auaggcacuccgaaguccc

SEQ ID NO: 441688 - RNA, 19 nt, Artificial Sequence
  Description of Artificial Sequence: Synthetic oligonucleotide
guugcuacugcagaacgag

SEQ ID NO: 441689 - RNA, 19 nt, Artificial Sequence
  Description of Artificial Sequence: Synthetic oligonucleotide
ucacggaagucacucaggu

SEQ ID NO: 441690 - RNA, 19 nt, Artificial Sequence
  Description of Artificial Sequence: Synthetic oligonucleotide
uguccucaauacuauaguc

SEQ ID NO: 441691 - RNA, 19 nt, Artificial Sequence
  Description of Artificial Sequence: Synthetic oligonucleotide
cucauuagcauccagacau

SEQ ID NO: 441692 - RNA, 19 nt, Artificial Sequence
  Description of Artificial Sequence: Synthetic oligonucleotide
guucugauacuccuaucag

SEQ ID NO: 441693 - RNA, 19 nt, Artificial Sequence
  Description of Artificial Sequence: Synthetic oligonucleotide
ucguaguaggucuccaaug

SEQ ID NO: 441694 - RNA, 19 nt, Artificial Sequence
  Description of Artificial Sequence: Synthetic oligonucleotide
cuacccauuagucccacug

SEQ ID NO: 441695 - RNA, 19 nt, Artificial Sequence
  Description of Artificial Sequence: Synthetic oligonucleotide
uucgcgcucaucaaacacu

SEQ ID NO: 441696 - RNA, 19 nt, Artificial Sequence
  Description of Artificial Sequence: Synthetic oligonucleotide
gaucgcgauaggcacuccg

SEQ ID NO: 441697 - RNA, 19 nt, Artificial Sequence
  Description of Artificial Sequence: Synthetic oligonucleotide
agcgcguaauaccugcagg

SEQ ID NO: 441698 - RNA, 19 nt, Artificial Sequence
  Description of Artificial Sequence: Synthetic oligonucleotide
aaguaacucccauguauaa

SEQ ID NO: 441699 - RNA, 19 nt, Artificial Sequence
  Description of Artificial Sequence: Synthetic oligonucleotide
cuauaguccacaagcacca

SEQ ID NO: 441700 - RNA, 19 nt, Artificial Sequence
  Description of Artificial Sequence: Synthetic oligonucleotide
uacgccucuggacagcagc

SEQ ID NO: 441701 - RNA, 19 nt, Artificial Sequence
  Description of Artificial Sequence: Synthetic oligonucleotide
ugcaccuaccaccucuacc

SEQ ID NO: 441702 - RNA, 19 nt, Artificial Sequence
  Description of Artificial Sequence: Synthetic oligonucleotide
aaccaaggaaggccaaaga

SEQ ID NO: 441703 - RNA, 19 nt, Artificial Sequence
  Description of Artificial Sequence: Synthetic oligonucleotide
augaucagcguggugaucu

SEQ ID NO: 441704 - RNA, 19 nt, Artificial Sequence
  Description of Artificial Sequence: Synthetic oligonucleotide
uacccauuagucccacugc

SEQ ID NO: 441705 - RNA, 19 nt, Artificial Sequence
  Description of Artificial Sequence: Synthetic oligonucleotide
gauuugucguaguaggucu

SEQ ID NO: 441706 - RNA, 19 nt, Artificial Sequence
  Description of Artificial Sequence: Synthetic oligonucleotide
aguaacucccauguauaag

SEQ ID NO: 441707 - RNA, 19 nt, Artificial Sequence
  Description of Artificial Sequence: Synthetic oligonucleotide
gguaaguaccaccaugcgc

SEQ ID NO: 441708 - RNA, 19 nt, Artificial Sequence
  Description of Artificial Sequence: Synthetic oligonucleotide
cauccguaugguccgaacc

SEQ ID NO: 441709 - RNA, 19 nt, Artificial Sequence
  Description of Artificial Sequence: Synthetic oligonucleotide
caucacggaagucacucag

SEQ ID NO: 441710 - RNA, 19 nt, Artificial Sequence
  Description of Artificial Sequence: Synthetic oligonucleotide
ccagacauuucauuucucg

SEQ ID NO: 441711 - RNA, 19 nt, Artificial Sequence
  Description of Artificial Sequence: Synthetic oligonucleotide
ggugaaucgggagacaaag

SEQ ID NO: 441712 - RNA, 19 nt, Artificial Sequence
  Description of Artificial Sequence: Synthetic oligonucleotide
cauuagucccacugcuacg

SEQ ID NO: 441713 - RNA, 19 nt, Artificial Sequence
  Description of Artificial Sequence: Synthetic oligonucleotide
ucgcgcucaucaaacacug

SEQ ID NO: 441714 - RNA, 19 nt, Artificial Sequence
  Description of Artificial Sequence: Synthetic oligonucleotide
ugucacacgcuguuccuug

SEQ ID NO: 441715 - RNA, 19 nt, Artificial Sequence
  Description of Artificial Sequence: Synthetic oligonucleotide
auccguaugguccgaaccu

SEQ ID NO: 441716 - RNA, 19 nt, Artificial Sequence
  Description of Artificial Sequence: Synthetic oligonucleotide
gaaaggaacuccacacagc

SEQ ID NO: 441717 - RNA, 19 nt, Artificial Sequence
  Description of Artificial Sequence: Synthetic oligonucleotide
agauaccacccauggcuac

SEQ ID NO: 441718 - RNA, 19 nt, Artificial Sequence
  Description of Artificial Sequence: Synthetic oligonucleotide
auuagcauccagacauuuc

SEQ ID NO: 441719 - RNA, 19 nt, Artificial Sequence
  Description of Artificial Sequence: Synthetic oligonucleotide
uggagcgcguaauaccugc

SEQ ID NO: 441720 - RNA, 19 nt, Artificial Sequence
  Description of Artificial Sequence: Synthetic oligonucleotide
ucccgcagacgcacgaagg

SEQ ID NO: 441721 - RNA, 19 nt, Artificial Sequence
  Description of Artificial Sequence: Synthetic oligonucleotide
ugagucguuggagacugag

SEQ ID NO: 441722 - RNA, 19 nt, Artificial Sequence
  Description of Artificial Sequence: Synthetic oligonucleotide
agcgccuuaucuugggcag

SEQ ID NO: 441723 - RNA, 19 nt, Artificial Sequence
  Description of Artificial Sequence: Synthetic oligonucleotide
ugcaucacggaagucacuc

SEQ ID NO: 441724 - RNA, 19 nt, Artificial Sequence
  Description of Artificial Sequence: Synthetic oligonucleotide
cucuucuaacagaacgcag

SEQ ID NO: 441725 - RNA, 19 nt, Artificial Sequence
  Description of Artificial Sequence: Synthetic oligonucleotide
gauaggcacuccgaagucc

SEQ ID NO: 441726 - RNA, 19 nt, Artificial Sequence
  Description of Artificial Sequence: Synthetic oligonucleotide
uccaacugguugcuacugc

SEQ ID NO: 441727 - RNA, 19 nt, Artificial Sequence
  Description of Artificial Sequence: Synthetic oligonucleotide
aaucgggagacaaagcgua

SEQ ID NO: 441728 - RNA, 19 nt, Artificial Sequence
  Description of Artificial Sequence: Synthetic oligonucleotide
agcauccgcucuuucuugg

SEQ ID NO: 441729 - RNA, 19 nt, Artificial Sequence
  Description of Artificial Sequence: Synthetic oligonucleotide
ggugcauccguaugguccg

SEQ ID NO: 441730 - RNA, 19 nt, Artificial Sequence
  Description of Artificial Sequence: Synthetic oligonucleotide
aaagcguaaccaggaagcu

SEQ ID NO: 441731 - RNA, 19 nt, Artificial Sequence
  Description of Artificial Sequence: Synthetic oligonucleotide
ccaauuacccgccggaucc

SEQ ID NO: 441732 - RNA, 19 nt, Artificial Sequence
  Description of Artificial Sequence: Synthetic oligonucleotide
gaugaacaccagaacagca

SEQ ID NO: 441733 - RNA, 19 nt, Artificial Sequence
  Description of Artificial Sequence: Synthetic oligonucleotide
ucauauugccacugcugcu

SEQ ID NO: 441734 - RNA, 19 nt, Artificial Sequence
  Description of Artificial Sequence: Synthetic oligonucleotide
agacgcacgaaggccaugg

SEQ ID NO: 441735 - RNA, 19 nt, Artificial Sequence
  Description of Artificial Sequence: Synthetic oligonucleotide
ucggugaagaugcggguaa

SEQ ID NO: 441736 - RNA, 19 nt, Artificial Sequence
  Description of Artificial Sequence: Synthetic oligonucleotide
ucguuguacucauccacac

SEQ ID NO: 441737 - RNA, 19 nt, Artificial Sequence
  Description of Artificial Sequence: Synthetic oligonucleotide
cacaccuucgcgcucauca

SEQ ID NO: 441738 - RNA, 19 nt, Artificial Sequence
  Description of Artificial Sequence: Synthetic oligonucleotide
gcguaauaccugcaggugg

SEQ ID NO: 441739 - RNA, 19 nt, Artificial Sequence
  Description of Artificial Sequence: Synthetic oligonucleotide
acgagaagaaggccuccuc

SEQ ID NO: 441740 - RNA, 19 nt, Artificial Sequence
  Description of Artificial Sequence: Synthetic oligonucleotide
uccccaauuacccgccgga

SEQ ID NO: 441741 - RNA, 19 nt, Artificial Sequence
  Description of Artificial Sequence: Synthetic oligonucleotide
ugcguagaaagaaggcgau

SEQ ID NO: 441742 - RNA, 19 nt, Artificial Sequence
  Description of Artificial Sequence: Synthetic oligonucleotide
aaccggcuguucuugaauu

SEQ ID NO: 441743 - RNA, 19 nt, Artificial Sequence
  Description of Artificial Sequence: Synthetic oligonucleotide
ugcuuggacuuggagcgcg

SEQ ID NO: 441744 - RNA, 19 nt, Artificial Sequence
  Description of Artificial Sequence: Synthetic oligonucleotide
ugaugaggaucgcgauagg

SEQ ID NO: 441745 - RNA, 19 nt, Artificial Sequence
  Description of Artificial Sequence: Synthetic oligonucleotide
uaaguaccaccaugcgcag

SEQ ID NO: 441746 - RNA, 19 nt, Artificial Sequence
  Description of Artificial Sequence: Synthetic oligonucleotide
auggcuacaaugagcagca

SEQ ID NO: 441747 - RNA, 19 nt, Artificial Sequence
  Description of Artificial Sequence: Synthetic oligonucleotide
gaaguaacucccauguaua

SEQ ID NO: 441748 - RNA, 19 nt, Artificial Sequence
  Description of Artificial Sequence: Synthetic oligonucleotide
uucuugaauuugcguagaa

SEQ ID NO: 441749 - RNA, 19 nt, Artificial Sequence
  Description of Artificial Sequence: Synthetic oligonucleotide
acugguugcuacugcagaa

SEQ ID NO: 441750 - RNA, 19 nt, Artificial Sequence
  Description of Artificial Sequence: Synthetic oligonucleotide
aacgagaagaaggccuccu

SEQ ID NO: 441751 - RNA, 19 nt, Artificial Sequence
  Description of Artificial Sequence: Synthetic oligonucleotide
accuucgcgcucaucaaac

SEQ ID NO: 441752 - RNA, 19 nt, Artificial Sequence
  Description of Artificial Sequence: Synthetic oligonucleotide
caaccaaggaaggccaaag

SEQ ID NO: 441753 - RNA, 19 nt, Artificial Sequence
  Description of Artificial Sequence: Synthetic oligonucleotide
guaguaggucuccaaugac

SEQ ID NO: 441754 - RNA, 19 nt, Artificial Sequence
  Description of Artificial Sequence: Synthetic oligonucleotide
agaugagggauaugaggaa

SEQ ID NO: 441755 - RNA, 19 nt, Artificial Sequence
  Description of Artificial Sequence: Synthetic oligonucleotide
aaagaccaaaagaggucca

SEQ ID NO: 441756 - RNA, 19 nt, Artificial Sequence
  Description of Artificial Sequence: Synthetic oligonucleotide
aucuccuggggugaaucgg

SEQ ID NO: 441757 - RNA, 19 nt, Artificial Sequence
  Description of Artificial Sequence: Synthetic oligonucleotide
cgcacgaaggccauggugg

SEQ ID NO: 441758 - RNA, 19 nt, Artificial Sequence
  Description of Artificial Sequence: Synthetic oligonucleotide
aggcguugauagcagucag

SEQ ID NO: 441759 - RNA, 19 nt, Artificial Sequence
  Description of Artificial Sequence: Synthetic oligonucleotide
uuagucccacugcuacgcc

SEQ ID NO: 441760 - RNA, 19 nt, Artificial Sequence
  Description of Artificial Sequence: Synthetic oligonucleotide
aggaucgcgauaggcacuc

SEQ ID NO: 441761 - RNA, 19 nt, Artificial Sequence
  Description of Artificial Sequence: Synthetic oligonucleotide
ccaaaagagguccagagaa

SEQ ID NO: 441762 - RNA, 19 nt, Artificial Sequence
  Description of Artificial Sequence: Synthetic oligonucleotide
uuacccgccggauccggcc

SEQ ID NO: 441763 - RNA, 19 nt, Artificial Sequence
  Description of Artificial Sequence: Synthetic oligonucleotide
aggagcgccuuaucuuggg

SEQ ID NO: 441764 - RNA, 19 nt, Artificial Sequence
  Description of Artificial Sequence: Synthetic oligonucleotide
gauuccauuaagggaagua

SEQ ID NO: 441765 - RNA, 19 nt, Artificial Sequence
  Description of Artificial Sequence: Synthetic oligonucleotide
agaugaucagcguggugau

SEQ ID NO: 441766 - RNA, 19 nt, Artificial Sequence
  Description of Artificial Sequence: Synthetic oligonucleotide
auuucucgcucggugaaga

SEQ ID NO: 441767 - RNA, 19 nt, Artificial Sequence
  Description of Artificial Sequence: Synthetic oligonucleotide
cacacgcuguuccuugacc

SEQ ID NO: 441768 - RNA, 19 nt, Artificial Sequence
  Description of Artificial Sequence: Synthetic oligonucleotide
uuggagcgcguaauaccug

SEQ ID NO: 441769 - RNA, 19 nt, Artificial Sequence
  Description of Artificial Sequence: Synthetic oligonucleotide
acgcacgaaggccauggug

SEQ ID NO: 441770 - RNA, 19 nt, Artificial Sequence
  Description of Artificial Sequence: Synthetic oligonucleotide
ggggucaagugcaucacgg

SEQ ID NO: 441771 - RNA, 19 nt, Artificial Sequence
  Description of Artificial Sequence: Synthetic oligonucleotide
aggaaacgcacagguacag

SEQ ID NO: 441772 - RNA, 19 nt, Artificial Sequence
  Description of Artificial Sequence: Synthetic oligonucleotide
gaagccaaucaccagcaau

SEQ ID NO: 441773 - RNA, 19 nt, Artificial Sequence
  Description of Artificial Sequence: Synthetic oligonucleotide
ggauaugaggaaggcaaag

SEQ ID NO: 441774 - RNA, 19 nt, Artificial Sequence
  Description of Artificial Sequence: Synthetic oligonucleotide
cuuggagcgcguaauaccu

SEQ ID NO: 441775 - RNA, 19 nt, Artificial Sequence
  Description of Artificial Sequence: Synthetic oligonucleotide
auccgcucuuucuuggaga

SEQ ID NO: 441776 - RNA, 19 nt, Artificial Sequence
  Description of Artificial Sequence: Synthetic oligonucleotide
cugcccagacggcaggacg

SEQ ID NO: 441777 - RNA, 19 nt, Artificial Sequence
  Description of Artificial Sequence: Synthetic oligonucleotide
ugucguaguaggucuccaa

SEQ ID NO: 441778 - RNA, 19 nt, Artificial Sequence
  Description of Artificial Sequence: Synthetic oligonucleotide
ucucaugguaguccauguu

SEQ ID NO: 441779 - RNA, 19 nt, Artificial Sequence
  Description of Artificial Sequence: Synthetic oligonucleotide
caaccgcucguagaauugg

SEQ ID NO: 441780 - RNA, 19 nt, Artificial Sequence
  Description of Artificial Sequence: Synthetic oligonucleotide
ggaaguaacucccauguau

SEQ ID NO: 441781 - RNA, 19 nt, Artificial Sequence
  Description of Artificial Sequence: Synthetic oligonucleotide
gcgaugaagaaggugccgg

SEQ ID NO: 441782 - RNA, 19 nt, Artificial Sequence
  Description of Artificial Sequence: Synthetic oligonucleotide
cuccgaaguccccaauuac

SEQ ID NO: 441783 - RNA, 19 nt, Artificial Sequence
  Description of Artificial Sequence: Synthetic oligonucleotide
agguaagcugccucaugga

SEQ ID NO: 441784 - RNA, 19 nt, Artificial Sequence
  Description of Artificial Sequence: Synthetic oligonucleotide
gcggcuguggacaugacug

SEQ ID NO: 441785 - RNA, 19 nt, Artificial Sequence
  Description of Artificial Sequence: Synthetic oligonucleotide
gauccggccagggaagaac

SEQ ID NO: 441786 - RNA, 19 nt, Artificial Sequence
  Description of Artificial Sequence: Synthetic oligonucleotide
ccauuagucccacugcuac

SEQ ID NO: 441787 - RNA, 19 nt, Artificial Sequence
  Description of Artificial Sequence: Synthetic oligonucleotide
ucgcgauaggcacuccgaa

SEQ ID NO: 441788 - RNA, 19 nt, Artificial Sequence
  Description of Artificial Sequence: Synthetic oligonucleotide
ggguaaguaccaccaugcg

SEQ ID NO: 441789 - RNA, 19 nt, Artificial Sequence
  Description of Artificial Sequence: Synthetic oligonucleotide
gcaggagcgccuuaucuug

SEQ ID NO: 441790 - RNA, 19 nt, Artificial Sequence
  Description of Artificial Sequence: Synthetic oligonucleotide
gacaaagcguaaccaggaa

SEQ ID NO: 441791 - RNA, 19 nt, Artificial Sequence
  Description of Artificial Sequence: Synthetic oligonucleotide
caagucgucccguucaucu

SEQ ID NO: 441792 - RNA, 19 nt, Artificial Sequence
  Description of Artificial Sequence: Synthetic oligonucleotide
caggagcgccuuaucuugg

SEQ ID NO: 441793 - RNA, 19 nt, Artificial Sequence
  Description of Artificial Sequence: Synthetic oligonucleotide
aaggcgguguugggcuggc

SEQ ID NO: 441794 - RNA, 19 nt, Artificial Sequence
  Description of Artificial Sequence: Synthetic oligonucleotide
cugauacuccuaucagguc

SEQ ID NO: 441795 - RNA, 19 nt, Artificial Sequence
  Description of Artificial Sequence: Synthetic oligonucleotide
ggugcaaccgcucguagaa

SEQ ID NO: 441796 - RNA, 19 nt, Artificial Sequence
  Description of Artificial Sequence: Synthetic oligonucleotide
gaggaaacgcacagguaca

SEQ ID NO: 441797 - RNA, 19 nt, Artificial Sequence
  Description of Artificial Sequence: Synthetic oligonucleotide
auuucauuucucgcucggu

SEQ ID NO: 441798 - RNA, 19 nt, Artificial Sequence
  Description of Artificial Sequence: Synthetic oligonucleotide
ugaucagcguggugaucug

SEQ ID NO: 441799 - RNA, 19 nt, Artificial Sequence
  Description of Artificial Sequence: Synthetic oligonucleotide
ucgggagacaaagcguaac

SEQ ID NO: 441800 - RNA, 19 nt, Artificial Sequence
  Description of Artificial Sequence: Synthetic oligonucleotide
agaugcggguaaguaccac

SEQ ID NO: 441801 - RNA, 19 nt, Artificial Sequence
  Description of Artificial Sequence: Synthetic oligonucleotide
agaagccaauccacacucg

SEQ ID NO: 441802 - RNA, 19 nt, Artificial Sequence
  Description of Artificial Sequence: Synthetic oligonucleotide
gaacgagaagaaggccucc

SEQ ID NO: 441803 - RNA, 19 nt, Artificial Sequence
  Description of Artificial Sequence: Synthetic oligonucleotide
cggguaaguaccaccaugc

SEQ ID NO: 441804 - RNA, 19 nt, Artificial Sequence
  Description of Artificial Sequence: Synthetic oligonucleotide
guaucggcgccgcacguca

SEQ ID NO: 441805 - RNA, 19 nt, Artificial Sequence
  Description of Artificial Sequence: Synthetic oligonucleotide
guccgaaccuucuugacau

SEQ ID NO: 441806 - RNA, 19 nt, Artificial Sequence
  Description of Artificial Sequence: Synthetic oligonucleotide
auuacccgccggauccggc

SEQ ID NO: 441807 - RNA, 19 nt, Artificial Sequence
  Description of Artificial Sequence: Synthetic oligonucleotide
aagaugcggguaaguacca

SEQ ID NO: 441808 - RNA, 19 nt, Artificial Sequence
  Description of Artificial Sequence: Synthetic oligonucleotide
gccaaucucaugguagucc

SEQ ID NO: 441809 - RNA, 19 nt, Artificial Sequence
  Description of Artificial Sequence: Synthetic oligonucleotide
aguccccaauuacccgccg

SEQ ID NO: 441810 - RNA, 19 nt, Artificial Sequence
  Description of Artificial Sequence: Synthetic oligonucleotide
aagcguaaccaggaagcuu

SEQ ID NO: 441811 - RNA, 19 nt, Artificial Sequence
  Description of Artificial Sequence: Synthetic oligonucleotide
gauacuccuaucagguccu

SEQ ID NO: 441812 - RNA, 19 nt, Artificial Sequence
  Description of Artificial Sequence: Synthetic oligonucleotide
gaaucgggagacaaagcgu

SEQ ID NO: 441813 - RNA, 19 nt, Artificial Sequence
  Description of Artificial Sequence: Synthetic oligonucleotide
aaagaucuccuggggugaa

SEQ ID NO: 441814 - RNA, 19 nt, Artificial Sequence
  Description of Artificial Sequence: Synthetic oligonucleotide
augcggguaaguaccacca

SEQ ID NO: 441815 - RNA, 19 nt, Artificial Sequence
  Description of Artificial Sequence: Synthetic oligonucleotide
agauaacagcagccaggca

SEQ ID NO: 441816 - RNA, 19 nt, Artificial Sequence
  Description of Artificial Sequence: Synthetic oligonucleotide
gcggguaaguaccaccaug

SEQ ID NO: 441817 - RNA, 19 nt, Artificial Sequence
  Description of Artificial Sequence: Synthetic oligonucleotide
gguaagcugccucauggaa

SEQ ID NO: 441818 - RNA, 19 nt, Artificial Sequence
  Description of Artificial Sequence: Synthetic oligonucleotide
ggaaacgcacagguacagg

SEQ ID NO: 441819 - RNA, 19 nt, Artificial Sequence
  Description of Artificial Sequence: Synthetic oligonucleotide
cugcuacgccucuggacag

SEQ ID NO: 441820 - RNA, 19 nt, Artificial Sequence
  Description of Artificial Sequence: Synthetic oligonucleotide
aaccgcucguagaauugga

SEQ ID NO: 441821 - RNA, 19 nt, Artificial Sequence
  Description of Artificial Sequence: Synthetic oligonucleotide
cacuggcaugggcaucucg

SEQ ID NO: 441822 - RNA, 19 nt, Artificial Sequence
  Description of Artificial Sequence: Synthetic oligonucleotide
gaggcggcuguggacauga

SEQ ID NO: 441823 - RNA, 19 nt, Artificial Sequence
  Description of Artificial Sequence: Synthetic oligonucleotide
caauuacccgccggauccg

SEQ ID NO: 441824 - RNA, 19 nt, Artificial Sequence
  Description of Artificial Sequence: Synthetic oligonucleotide
gcgagaaaggaacuccaca

SEQ ID NO: 441825 - RNA, 19 nt, Artificial Sequence
  Description of Artificial Sequence: Synthetic oligonucleotide
cauuucucgcucggugaag

SEQ ID NO: 441826 - RNA, 19 nt, Artificial Sequence
  Description of Artificial Sequence: Synthetic oligonucleotide
acggugcugcuguugucug

SEQ ID NO: 441827 - RNA, 19 nt, Artificial Sequence
  Description of Artificial Sequence: Synthetic oligonucleotide
gggguaucggcgccgcacg

SEQ ID NO: 441828 - RNA, 19 nt, Artificial Sequence
  Description of Artificial Sequence: Synthetic oligonucleotide
cuaccaucugcaggagcgc

SEQ ID NO: 441829 - RNA, 19 nt, Artificial Sequence
  Description of Artificial Sequence: Synthetic oligonucleotide
guacaggcaccuccaggac

SEQ ID NO: 441830 - RNA, 19 nt, Artificial Sequence
  Description of Artificial Sequence: Synthetic oligonucleotide
cgcucguagaauuggauuc

SEQ ID NO: 441831 - RNA, 19 nt, Artificial Sequence
  Description of Artificial Sequence: Synthetic oligonucleotide
uuucucgcucggugaagau

SEQ ID NO: 441832 - RNA, 19 nt, Artificial Sequence
  Description of Artificial Sequence: Synthetic oligonucleotide
caaagaucuccugggguga

SEQ ID NO: 441833 - RNA, 19 nt, Artificial Sequence
  Description of Artificial Sequence: Synthetic oligonucleotide
ugcggguaaguaccaccau

SEQ ID NO: 441834 - RNA, 19 nt, Artificial Sequence
  Description of Artificial Sequence: Synthetic oligonucleotide
augguggggcgagaaagga

SEQ ID NO: 441835 - RNA, 19 nt, Artificial Sequence
  Description of Artificial Sequence: Synthetic oligonucleotide
ggggcgagaaaggaacucc

SEQ ID NO: 441836 - RNA, 19 nt, Artificial Sequence
  Description of Artificial Sequence: Synthetic oligonucleotide
aucgcgauaggcacuccga

SEQ ID NO: 441837 - RNA, 19 nt, Artificial Sequence
  Description of Artificial Sequence: Synthetic oligonucleotide
cagcguggugaucuguguc

SEQ ID NO: 441838 - RNA, 19 nt, Artificial Sequence
  Description of Artificial Sequence: Synthetic oligonucleotide
ccgcacgucacgaaucagc

SEQ ID NO: 441839 - RNA, 19 nt, Artificial Sequence
  Description of Artificial Sequence: Synthetic oligonucleotide
guaauaccugcagguggug

SEQ ID NO: 441840 - RNA, 19 nt, Artificial Sequence
  Description of Artificial Sequence: Synthetic oligonucleotide
auccacacucggcccacca

SEQ ID NO: 441841 - RNA, 19 nt, Artificial Sequence
  Description of Artificial Sequence: Synthetic oligonucleotide
cuccaacugguugcuacug

SEQ ID NO: 441842 - RNA, 19 nt, Artificial Sequence
  Description of Artificial Sequence: Synthetic oligonucleotide
ccagacggcaggacggugc

SEQ ID NO: 441843 - RNA, 19 nt, Artificial Sequence
  Description of Artificial Sequence: Synthetic oligonucleotide
gcggccaaucucaugguag

SEQ ID NO: 441844 - RNA, 19 nt, Artificial Sequence
  Description of Artificial Sequence: Synthetic oligonucleotide
acaccuucgcgcucaucaa

SEQ ID NO: 441845 - RNA, 19 nt, Artificial Sequence
  Description of Artificial Sequence: Synthetic oligonucleotide
agcaagucgucccguucau

SEQ ID NO: 441846 - RNA, 19 nt, Artificial Sequence
  Description of Artificial Sequence: Synthetic oligonucleotide
ggcaugagugacagagcgg

SEQ ID NO: 441847 - RNA, 19 nt, Artificial Sequence
  Description of Artificial Sequence: Synthetic oligonucleotide
aaguaccaccaugcgcaga

SEQ ID NO: 441848 - RNA, 19 nt, Artificial Sequence
  Description of Artificial Sequence: Synthetic oligonucleotide
cgcacgucacgaaucagcc

SEQ ID NO: 441849 - RNA, 19 nt, Artificial Sequence
  Description of Artificial Sequence: Synthetic oligonucleotide
uggggcgagaaaggaacuc

SEQ ID NO: 441850 - RNA, 19 nt, Artificial Sequence
  Description of Artificial Sequence: Synthetic oligonucleotide
uugggcagacuugggcucu

SEQ ID NO: 441851 - RNA, 19 nt, Artificial Sequence
  Description of Artificial Sequence: Synthetic oligonucleotide
uacccgccggauccggcca

SEQ ID NO: 441852 - RNA, 19 nt, Artificial Sequence
  Description of Artificial Sequence: Synthetic oligonucleotide
gccaauccacacucggccc

SEQ ID NO: 441853 - RNA, 19 nt, Artificial Sequence
  Description of Artificial Sequence: Synthetic oligonucleotide
cucgcucggugaagaugcg

SEQ ID NO: 441854 - RNA, 19 nt, Artificial Sequence
  Description of Artificial Sequence: Synthetic oligonucleotide
ccacacucggcccaccaag

SEQ ID NO: 441855 - RNA, 19 nt, Artificial Sequence
  Description of Artificial Sequence: Synthetic oligonucleotide
gacuugggcucuagcccag

SEQ ID NO: 441856 - RNA, 19 nt, Artificial Sequence
  Description of Artificial Sequence: Synthetic oligonucleotide
gcgauaggcacuccgaagu

SEQ ID NO: 441857 - RNA, 19 nt, Artificial Sequence
  Description of Artificial Sequence: Synthetic oligonucleotide
accggcuguucuugaauuu

SEQ ID NO: 441858 - RNA, 19 nt, Artificial Sequence
  Description of Artificial Sequence: Synthetic oligonucleotide
caggugcaaccgcucguag

SEQ ID NO: 441859 - RNA, 19 nt, Artificial Sequence
  Description of Artificial Sequence: Synthetic oligonucleotide
uauaguccacaagcaccau

SEQ ID NO: 441860 - RNA, 19 nt, Artificial Sequence
  Description of Artificial Sequence: Synthetic oligonucleotide
ugcuacgccucuggacagc

SEQ ID NO: 441861 - RNA, 19 nt, Artificial Sequence
  Description of Artificial Sequence: Synthetic oligonucleotide
cguaguaggucuccaauga

SEQ ID NO: 441862 - RNA, 19 nt, Artificial Sequence
  Description of Artificial Sequence: Synthetic oligonucleotide
gaaccggcuguucuugaau

SEQ ID NO: 441863 - RNA, 19 nt, Artificial Sequence
  Description of Artificial Sequence: Synthetic oligonucleotide
agcggccaaucucauggua

SEQ ID NO: 441864 - RNA, 19 nt, Artificial Sequence
  Description of Artificial Sequence: Synthetic oligonucleotide
guaagcugccucauggaau

SEQ ID NO: 441865 - RNA, 19 nt, Artificial Sequence
  Description of Artificial Sequence: Synthetic oligonucleotide
ggagcgccuuaucuugggc

SEQ ID NO: 441866 - RNA, 19 nt, Artificial Sequence
  Description of Artificial Sequence: Synthetic oligonucleotide
caggugcauccguaugguc

SEQ ID NO: 441867 - RNA, 19 nt, Artificial Sequence
  Description of Artificial Sequence: Synthetic oligonucleotide
ggcguugauagcagucagc

SEQ ID NO: 441868 - RNA, 19 nt, Artificial Sequence
  Description of Artificial Sequence: Synthetic oligonucleotide
gcaacugcaaggcggugaa

SEQ ID NO: 441869 - RNA, 19 nt, Artificial Sequence
  Description of Artificial Sequence: Synthetic oligonucleotide
uaucggcgccgcacgucac

SEQ ID NO: 441870 - RNA, 19 nt, Artificial Sequence
  Description of Artificial Sequence: Synthetic oligonucleotide
gcgguguugggcuggcccc

SEQ ID NO: 441871 - RNA, 19 nt, Artificial Sequence
  Description of Artificial Sequence: Synthetic oligonucleotide
cuacgccucuggacagcag

SEQ ID NO: 441872 - RNA, 19 nt, Artificial Sequence
  Description of Artificial Sequence: Synthetic oligonucleotide
gcaaccgcucguagaauug

SEQ ID NO: 441873 - RNA, 19 nt, Artificial Sequence
  Description of Artificial Sequence: Synthetic oligonucleotide
cccgcagacgcacgaaggc

SEQ ID NO: 441874 - RNA, 19 nt, Artificial Sequence
  Description of Artificial Sequence: Synthetic oligonucleotide
gcacgucacgaaucagccc

SEQ ID NO: 441875 - RNA, 19 nt, Artificial Sequence
  Description of Artificial Sequence: Synthetic oligonucleotide
ugcauccguaugguccgaa

SEQ ID NO: 441876 - RNA, 19 nt, Artificial Sequence
  Description of Artificial Sequence: Synthetic oligonucleotide
accgcucguagaauuggau

SEQ ID NO: 441877 - RNA, 19 nt, Artificial Sequence
  Description of Artificial Sequence: Synthetic oligonucleotide
cccaauuacccgccggauc

SEQ ID NO: 441878 - RNA, 19 nt, Artificial Sequence
  Description of Artificial Sequence: Synthetic oligonucleotide
cugcaccuaccaccucuac

SEQ ID NO: 441879 - RNA, 19 nt, Artificial Sequence
  Description of Artificial Sequence: Synthetic oligonucleotide
ggcgagaaaggaacuccac

SEQ ID NO: 441880 - RNA, 19 nt, Artificial Sequence
  Description of Artificial Sequence: Synthetic oligonucleotide
gcauccguaugguccgaac

SEQ ID NO: 441881 - RNA, 19 nt, Artificial Sequence
  Description of Artificial Sequence: Synthetic oligonucleotide
cacuggcucugccucauua

SEQ ID NO: 441882 - RNA, 19 nt, Artificial Sequence
  Description of Artificial Sequence: Synthetic oligonucleotide
cgcgauaggcacuccgaag

SEQ ID NO: 441883 - RNA, 19 nt, Artificial Sequence
  Description of Artificial Sequence: Synthetic oligonucleotide
gcgcguaauaccugcaggu

SEQ ID NO: 441884 - RNA, 19 nt, Artificial Sequence
  Description of Artificial Sequence: Synthetic oligonucleotide
ggcaggacggugcugcugu

SEQ ID NO: 441885 - RNA, 19 nt, Artificial Sequence
  Description of Artificial Sequence: Synthetic oligonucleotide
gggacccaguaggaggaag

SEQ ID NO: 441886 - RNA, 19 nt, Artificial Sequence
  Description of Artificial Sequence: Synthetic oligonucleotide
caccuucgcgcucaucaaa

SEQ ID NO: 441887 - RNA, 19 nt, Artificial Sequence
  Description of Artificial Sequence: Synthetic oligonucleotide
gcaucacggaagucacuca

SEQ ID NO: 441888 - RNA, 19 nt, Artificial Sequence
  Description of Artificial Sequence: Synthetic oligonucleotide
aucgggagacaaagcguaa

SEQ ID NO: 441889 - RNA, 19 nt, Artificial Sequence
  Description of Artificial Sequence: Synthetic oligonucleotide
cacggaagucacucaggua

SEQ ID NO: 441890 - RNA, 19 nt, Artificial Sequence
  Description of Artificial Sequence: Synthetic oligonucleotide
cucggugaagaugcgggua

SEQ ID NO: 441891 - RNA, 19 nt, Artificial Sequence
  Description of Artificial Sequence: Synthetic oligonucleotide
gcguagaaagaaggcgaug

SEQ ID NO: 441892 - RNA, 19 nt, Artificial Sequence
  Description of Artificial Sequence: Synthetic oligonucleotide
ccggauccggccagggaag

SEQ ID NO: 441893 - RNA, 19 nt, Artificial Sequence
  Description of Artificial Sequence: Synthetic oligonucleotide
ccggccagggaagaaccgg

SEQ ID NO: 441894 - RNA, 19 nt, Artificial Sequence
  Description of Artificial Sequence: Synthetic oligonucleotide
ggggugaaucgggagacaa

SEQ ID NO: 441895 - RNA, 19 nt, Artificial Sequence
  Description of Artificial Sequence: Synthetic oligonucleotide
ccguaugguccgaaccuuc

SEQ ID NO: 441896 - RNA, 19 nt, Artificial Sequence
  Description of Artificial Sequence: Synthetic oligonucleotide
ccauggcuacaaugagcag

SEQ ID NO: 441897 - RNA, 19 nt, Artificial Sequence
  Description of Artificial Sequence: Synthetic oligonucleotide
cacacucggcccaccaagu

SEQ ID NO: 441898 - RNA, 19 nt, Artificial Sequence
  Description of Artificial Sequence: Synthetic oligonucleotide
gcuacacuggcaugggcau

SEQ ID NO: 441899 - RNA, 19 nt, Artificial Sequence
  Description of Artificial Sequence: Synthetic oligonucleotide
cauuggcaugagugacaga

SEQ ID NO: 441900 - RNA, 19 nt, Artificial Sequence
  Description of Artificial Sequence: Synthetic oligonucleotide
ccgcagacgcacgaaggcc

SEQ ID NO: 441901 - RNA, 19 nt, Artificial Sequence
  Description of Artificial Sequence: Synthetic oligonucleotide
cguaauaccugcagguggu

SEQ ID NO: 441902 - RNA, 19 nt, Artificial Sequence
  Description of Artificial Sequence: Synthetic oligonucleotide
gcauccgcucuuucuugga

SEQ ID NO: 441903 - RNA, 19 nt, Artificial Sequence
  Description of Artificial Sequence: Synthetic oligonucleotide
gggaaguaacucccaugua

SEQ ID NO: 441904 - RNA, 19 nt, Artificial Sequence
  Description of Artificial Sequence: Synthetic oligonucleotide
ggcaucucguuguacucau

SEQ ID NO: 441905 - RNA, 19 nt, Artificial Sequence
  Description of Artificial Sequence: Synthetic oligonucleotide
gguaucggcgccgcacguc

SEQ ID NO: 441906 - RNA, 19 nt, Artificial Sequence
  Description of Artificial Sequence: Synthetic oligonucleotide
cucugagucguuggagacu

SEQ ID NO: 441907 - RNA, 19 nt, Artificial Sequence
  Description of Artificial Sequence: Synthetic oligonucleotide
cgauaggcacuccgaaguc

SEQ ID NO: 441908 - RNA, 19 nt, Artificial Sequence
  Description of Artificial Sequence: Synthetic oligonucleotide
ggccaaucucaugguaguc

SEQ ID NO: 441909 - RNA, 19 nt, Artificial Sequence
  Description of Artificial Sequence: Synthetic oligonucleotide
cgcguaauaccugcaggug

SEQ ID NO: 441910 - RNA, 19 nt, Artificial Sequence
  Description of Artificial Sequence: Synthetic oligonucleotide
gcuacgccucuggacagca

SEQ ID NO: 441911 - RNA, 19 nt, Artificial Sequence
  Description of Artificial Sequence: Synthetic oligonucleotide
ggcggugaacaggugcauc

SEQ ID NO: 441912 - RNA, 19 nt, Artificial Sequence
  Description of Artificial Sequence: Synthetic oligonucleotide
caaucucaugguaguccau

SEQ ID NO: 441913 - RNA, 19 nt, Artificial Sequence
  Description of Artificial Sequence: Synthetic oligonucleotide
ccuucgcgcucaucaaaca

SEQ ID NO: 441914 - RNA, 19 nt, Artificial Sequence
  Description of Artificial Sequence: Synthetic oligonucleotide
cugagucguuggagacuga

SEQ ID NO: 441915 - RNA, 19 nt, Artificial Sequence
  Description of Artificial Sequence: Synthetic oligonucleotide
ggcggcuguggacaugacu

SEQ ID NO: 441916 - RNA, 19 nt, Artificial Sequence
  Description of Artificial Sequence: Synthetic oligonucleotide
ggagcgcguaauaccugca

SEQ ID NO: 441917 - RNA, 19 nt, Artificial Sequence
  Description of Artificial Sequence: Synthetic oligonucleotide
gggugaaucgggagacaaa

SEQ ID NO: 441918 - RNA, 19 nt, Artificial Sequence
  Description of Artificial Sequence: Synthetic oligonucleotide
gcguggugaucugugucuc

SEQ ID NO: 441919 - RNA, 19 nt, Artificial Sequence
  Description of Artificial Sequence: Synthetic oligonucleotide
cgcgcucaucaaacacugg

SEQ ID NO: 441920 - RNA, 19 nt, Artificial Sequence
  Description of Artificial Sequence: Synthetic oligonucleotide
cagccuugcucaugacagu

SEQ ID NO: 441921 - RNA, 19 nt, Artificial Sequence
  Description of Artificial Sequence: Synthetic oligonucleotide
guguugggcuggccccgga

SEQ ID NO: 441922 - RNA, 19 nt, Artificial Sequence
  Description of Artificial Sequence: Synthetic oligonucleotide
caccaugcgcagaggcacu

SEQ ID NO: 441923 - RNA, 19 nt, Artificial Sequence
  Description of Artificial Sequence: Synthetic oligonucleotide
guggggcgagaaaggaacu

SEQ ID NO: 441924 - RNA, 19 nt, Artificial Sequence
  Description of Artificial Sequence: Synthetic oligonucleotide
gccgcacgucacgaaucag

SEQ ID NO: 441925 - RNA, 19 nt, Artificial Sequence
  Description of Artificial Sequence: Synthetic oligonucleotide
cuccgaaggggaucaucuu

SEQ ID NO: 441926 - RNA, 19 nt, Artificial Sequence
  Description of Artificial Sequence: Synthetic oligonucleotide
ggaucgcgauaggcacucc

SEQ ID NO: 441927 - RNA, 19 nt, Artificial Sequence
  Description of Artificial Sequence: Synthetic oligonucleotide
gugcauccguaugguccga

SEQ ID NO: 441928 - RNA, 19 nt, Artificial Sequence
  Description of Artificial Sequence: Synthetic oligonucleotide
cguaugguccgaaccuucu

SEQ ID NO: 441929 - RNA, 19 nt, Artificial Sequence
  Description of Artificial Sequence: Synthetic oligonucleotide
ccguccuccgaaggggauc

SEQ ID NO: 441930 - RNA, 19 nt, Artificial Sequence
  Description of Artificial Sequence: Synthetic oligonucleotide
gcgccgcacgucacgaauc

SEQ ID NO: 441931 - RNA, 19 nt, Artificial Sequence
  Description of Artificial Sequence: Synthetic oligonucleotide
cggugaagaugcggguaag

SEQ ID NO: 441932 - RNA, 19 nt, Artificial Sequence
  Description of Artificial Sequence: Synthetic oligonucleotide
ccgcucguagaauuggauu

SEQ ID NO: 441933 - RNA, 19 nt, Artificial Sequence
  Description of Artificial Sequence: Synthetic oligonucleotide
ggauccggccagggaagaa

SEQ ID NO: 441934 - RNA, 19 nt, Artificial Sequence
  Description of Artificial Sequence: Synthetic oligonucleotide
cguccuccgaaggggauca

SEQ ID NO: 441935 - RNA, 19 nt, Artificial Sequence
  Description of Artificial Sequence: Synthetic oligonucleotide
gcacugugaggaugaggau

SEQ ID NO: 441936 - RNA, 19 nt, Artificial Sequence
  Description of Artificial Sequence: Synthetic oligonucleotide
gcgccuuaucuugggcaga

SEQ ID NO: 441937 - RNA, 19 nt, Artificial Sequence
  Description of Artificial Sequence: Synthetic oligonucleotide
gugcaaccgcucguagaau

SEQ ID NO: 441938 - RNA, 19 nt, Artificial Sequence
  Description of Artificial Sequence: Synthetic oligonucleotide
cgccgcacgucacgaauca

SEQ ID NO: 441939 - RNA, 19 nt, Artificial Sequence
  Description of Artificial Sequence: Synthetic oligonucleotide
cccagacggcaggacggug

SEQ ID NO: 441940 - RNA, 19 nt, Artificial Sequence
  Description of Artificial Sequence: Synthetic oligonucleotide
ggguaucggcgccgcacgu

SEQ ID NO: 441941 - RNA, 19 nt, Artificial Sequence
  Description of Artificial Sequence: Synthetic oligonucleotide
gcccugcacuucugaaggu

SEQ ID NO: 441942 - RNA, 19 nt, Artificial Sequence
  Description of Artificial Sequence: Synthetic oligonucleotide
ccgccggauccggccaggg

SEQ ID NO: 441943 - RNA, 19 nt, Artificial Sequence
  Description of Artificial Sequence: Synthetic oligonucleotide
gccagguaagcugccucau

SEQ ID NO: 441944 - RNA, 19 nt, Artificial Sequence
  Description of Artificial Sequence: Synthetic oligonucleotide
gccccgcuuguguggggcu

SEQ ID NO: 441945 - RNA, 19 nt, Artificial Sequence
  Description of Artificial Sequence: Synthetic oligonucleotide
ccccaauuacccgccggau

SEQ ID NO: 441946 - RNA, 19 nt, Artificial Sequence
  Description of Artificial Sequence: Synthetic oligonucleotide
cggauccggccagggaaga

SEQ ID NO: 441947 - RNA, 19 nt, Artificial Sequence
  Description of Artificial Sequence: Synthetic oligonucleotide
cccguccuccgaaggggau

SEQ ID NO: 441948 - RNA, 19 nt, Artificial Sequence
  Description of Artificial Sequence: Synthetic oligonucleotide
guccuccgaaggggaucau

SEQ ID NO: 441949 - RNA, 19 nt, Artificial Sequence
  Description of Artificial Sequence: Synthetic oligonucleotide
cccgcuuguguggggcugu

SEQ ID NO: 441950 - RNA, 19 nt, Artificial Sequence
  Description of Artificial Sequence: Synthetic oligonucleotide
aauauauauauauauauau

SEQ ID NO: 441951 - RNA, 19 nt, Artificial Sequence
  Description of Artificial Sequence: Synthetic oligonucleotide
uauauauauauauauauga

SEQ ID NO: 441952 - RNA, 19 nt, Artificial Sequence
  Description of Artificial Sequence: Synthetic oligonucleotide
aaauagaauauauauauau

SEQ ID NO: 441953 - RNA, 19 nt, Artificial Sequence
  Description of Artificial Sequence: Synthetic oligonucleotide
auauauuaaagauagccuc

SEQ ID NO: 441954 - RNA, 19 nt, Artificial Sequence
  Description of Artificial Sequence: Synthetic oligonucleotide
aguaaaggaacucaauagc

SEQ ID NO: 441955 - RNA, 19 nt, Artificial Sequence
  Description of Artificial Sequence: Synthetic oligonucleotide
uauaaggcagauaacaaag

SEQ ID NO: 441956 - RNA, 19 nt, Artificial Sequence
  Description of Artificial Sequence: Synthetic oligonucleotide
uauauauauauauauauau

SEQ ID NO: 441957 - RNA, 19 nt, Artificial Sequence
  Description of Artificial Sequence: Synthetic oligonucleotide
ugcauagcaaacaugaugc

SEQ ID NO: 441958 - RNA, 19 nt, Artificial Sequence
  Description of Artificial Sequence: Synthetic oligonucleotide
uauauauauauauaugaga

SEQ ID NO: 441959 - RNA, 19 nt, Artificial Sequence
  Description of Artificial Sequence: Synthetic oligonucleotide
aaagcguucacuuaauagu

SEQ ID NO: 441960 - RNA, 19 nt, Artificial Sequence
  Description of Artificial Sequence: Synthetic oligonucleotide
auauauauauaugagaaug

SEQ ID NO: 441961 - RNA, 19 nt, Artificial Sequence
  Description of Artificial Sequence: Synthetic oligonucleotide
agaauauauauauauauau

SEQ ID NO: 441962 - RNA, 19 nt, Artificial Sequence
  Description of Artificial Sequence: Synthetic oligonucleotide
auagaauauauauauauau

SEQ ID NO: 441963 - RNA, 19 nt, Artificial Sequence
  Description of Artificial Sequence: Synthetic oligonucleotide
uauacucauagcaagguca

SEQ ID NO: 441964 - RNA, 19 nt, Artificial Sequence
  Description of Artificial Sequence: Synthetic oligonucleotide
auacaauagaaacugcaac

SEQ ID NO: 441965 - RNA, 19 nt, Artificial Sequence
  Description of Artificial Sequence: Synthetic oligonucleotide
acugaaguaaaauggcccc

SEQ ID NO: 441966 - RNA, 19 nt, Artificial Sequence
  Description of Artificial Sequence: Synthetic oligonucleotide
uuaauaaacuaacaugccu

SEQ ID NO: 441967 - RNA, 19 nt, Artificial Sequence
  Description of Artificial Sequence: Synthetic oligonucleotide
aauacagccaaauuugcaa

SEQ ID NO: 441968 - RNA, 19 nt, Artificial Sequence
  Description of Artificial Sequence: Synthetic oligonucleotide
uucgauuuacccaugauuc

SEQ ID NO: 441969 - RNA, 19 nt, Artificial Sequence
  Description of Artificial Sequence: Synthetic oligonucleotide
uagucuuacaaauagaaua

SEQ ID NO: 441970 - RNA, 19 nt, Artificial Sequence
  Description of Artificial Sequence: Synthetic oligonucleotide
guuaaauguguuaugaugc

SEQ ID NO: 441971 - RNA, 19 nt, Artificial Sequence
  Description of Artificial Sequence: Synthetic oligonucleotide
uuuaguugaugaaacguug

SEQ ID NO: 441972 - RNA, 19 nt, Artificial Sequence
  Description of Artificial Sequence: Synthetic oligonucleotide
aaacuaacaugccucugac

SEQ ID NO: 441973 - RNA, 19 nt, Artificial Sequence
  Description of Artificial Sequence: Synthetic oligonucleotide
guuaugaugcuccuaagag

SEQ ID NO: 441974 - RNA, 19 nt, Artificial Sequence
  Description of Artificial Sequence: Synthetic oligonucleotide
gaccacgugagauacaagg

SEQ ID NO: 441975 - RNA, 19 nt, Artificial Sequence
  Description of Artificial Sequence: Synthetic oligonucleotide
cuuuauaucaggcaccuug

SEQ ID NO: 441976 - RNA, 19 nt, Artificial Sequence
  Description of Artificial Sequence: Synthetic oligonucleotide
aaaucaggaugcuaaaccu

SEQ ID NO: 441977 - RNA, 19 nt, Artificial Sequence
  Description of Artificial Sequence: Synthetic oligonucleotide
ugcaauagaaauauauuaa

SEQ ID NO: 441978 - RNA, 19 nt, Artificial Sequence
  Description of Artificial Sequence: Synthetic oligonucleotide
agaaggaguagcuauacug

SEQ ID NO: 441979 - RNA, 19 nt, Artificial Sequence
  Description of Artificial Sequence: Synthetic oligonucleotide
augccucugacuuuuauac

SEQ ID NO: 441980 - RNA, 19 nt, Artificial Sequence
  Description of Artificial Sequence: Synthetic oligonucleotide
aaagcucagauucugcaug

SEQ ID NO: 441981 - RNA, 19 nt, Artificial Sequence
  Description of Artificial Sequence: Synthetic oligonucleotide
uuuaaggagacugcaauag

SEQ ID NO: 441982 - RNA, 19 nt, Artificial Sequence
  Description of Artificial Sequence: Synthetic oligonucleotide
auauaugagaaugaaagcu

SEQ ID NO: 441983 - RNA, 19 nt, Artificial Sequence
  Description of Artificial Sequence: Synthetic oligonucleotide
aaauuugcaaagcguucac

SEQ ID NO: 441984 - RNA, 19 nt, Artificial Sequence
  Description of Artificial Sequence: Synthetic oligonucleotide
uguagaaagauccaaccau

SEQ ID NO: 441985 - RNA, 19 nt, Artificial Sequence
  Description of Artificial Sequence: Synthetic oligonucleotide
auacaagacacaauagugc

SEQ ID NO: 441986 - RNA, 19 nt, Artificial Sequence
  Description of Artificial Sequence: Synthetic oligonucleotide
agcuuuaaaaccgaccagc

SEQ ID NO: 441987 - RNA, 19 nt, Artificial Sequence
  Description of Artificial Sequence: Synthetic oligonucleotide
auauauauauauaugagaa

SEQ ID NO: 441988 - RNA, 19 nt, Artificial Sequence
  Description of Artificial Sequence: Synthetic oligonucleotide
uugaugaaacguugaaugg

SEQ ID NO: 441989 - RNA, 19 nt, Artificial Sequence
  Description of Artificial Sequence: Synthetic oligonucleotide
aaaaccgaccagcacauca

SEQ ID NO: 441990 - RNA, 19 nt, Artificial Sequence
  Description of Artificial Sequence: Synthetic oligonucleotide
uaaacuaacaugccucuga

SEQ ID NO: 441991 - RNA, 19 nt, Artificial Sequence
  Description of Artificial Sequence: Synthetic oligonucleotide
aaacguugaauggaccugc

SEQ ID NO: 441992 - RNA, 19 nt, Artificial Sequence
  Description of Artificial Sequence: Synthetic oligonucleotide
uguguuaugaugcuccuaa

SEQ ID NO: 441993 - RNA, 19 nt, Artificial Sequence
  Description of Artificial Sequence: Synthetic oligonucleotide
agcauuauucaaucuugcc

SEQ ID NO: 441994 - RNA, 19 nt, Artificial Sequence
  Description of Artificial Sequence: Synthetic oligonucleotide
aaaguaaguaaaggaacuc

SEQ ID NO: 441995 - RNA, 19 nt, Artificial Sequence
  Description of Artificial Sequence: Synthetic oligonucleotide
acagcuagccaauugcugg

SEQ ID NO: 441996 - RNA, 19 nt, Artificial Sequence
  Description of Artificial Sequence: Synthetic oligonucleotide
gagaagacgccuaacacgg

SEQ ID NO: 441997 - RNA, 19 nt, Artificial Sequence
  Description of Artificial Sequence: Synthetic oligonucleotide
ugauugacaggauauaaaa

SEQ ID NO: 441998 - RNA, 19 nt, Artificial Sequence
  Description of Artificial Sequence: Synthetic oligonucleotide
caucaugccagcaacaaac

SEQ ID NO: 441999 - RNA, 19 nt, Artificial Sequence
  Description of Artificial Sequence: Synthetic oligonucleotide
ugcuagaauauauaaggca

SEQ ID NO: 442000 - RNA, 19 nt, Artificial Sequence
  Description of Artificial Sequence: Synthetic oligonucleotide
auauauauauauauaugag

SEQ ID NO: 442001 - RNA, 19 nt, Artificial Sequence
  Description of Artificial Sequence: Synthetic oligonucleotide
aauauauaaggcagauaac

SEQ ID NO: 442002 - RNA, 19 nt, Artificial Sequence
  Description of Artificial Sequence: Synthetic oligonucleotide
aacaugaugcaccacuaca

SEQ ID NO: 442003 - RNA, 19 nt, Artificial Sequence
  Description of Artificial Sequence: Synthetic oligonucleotide
gagagaauggauacaauag

SEQ ID NO: 442004 - RNA, 19 nt, Artificial Sequence
  Description of Artificial Sequence: Synthetic oligonucleotide
uuuagcugaguuuguaugc

SEQ ID NO: 442005 - RNA, 19 nt, Artificial Sequence
  Description of Artificial Sequence: Synthetic oligonucleotide
gaugagccgaguuacagug

SEQ ID NO: 442006 - RNA, 19 nt, Artificial Sequence
  Description of Artificial Sequence: Synthetic oligonucleotide
aaccaugauaccaauaaug

SEQ ID NO: 442007 - RNA, 19 nt, Artificial Sequence
  Description of Artificial Sequence: Synthetic oligonucleotide
aaagcauuuacugguauga

SEQ ID NO: 442008 - RNA, 19 nt, Artificial Sequence
  Description of Artificial Sequence: Synthetic oligonucleotide
ucaaguacuuugauagugc

SEQ ID NO: 442009 - RNA, 19 nt, Artificial Sequence
  Description of Artificial Sequence: Synthetic oligonucleotide
uagaauauauauauauaua

SEQ ID NO: 442010 - RNA, 19 nt, Artificial Sequence
  Description of Artificial Sequence: Synthetic oligonucleotide
acuaacaugccucugacuu

SEQ ID NO: 442011 - RNA, 19 nt, Artificial Sequence
  Description of Artificial Sequence: Synthetic oligonucleotide
uuuuggagagaauggauac

SEQ ID NO: 442012 - RNA, 19 nt, Artificial Sequence
  Description of Artificial Sequence: Synthetic oligonucleotide
uguuaugaugcuccuaaga

SEQ ID NO: 442013 - RNA, 19 nt, Artificial Sequence
  Description of Artificial Sequence: Synthetic oligonucleotide
uuuauaucaggcaccuuga

SEQ ID NO: 442014 - RNA, 19 nt, Artificial Sequence
  Description of Artificial Sequence: Synthetic oligonucleotide
ucuacacgucuuuauaaag

SEQ ID NO: 442015 - RNA, 19 nt, Artificial Sequence
  Description of Artificial Sequence: Synthetic oligonucleotide
uguguauugcugcucuggg

SEQ ID NO: 442016 - RNA, 19 nt, Artificial Sequence
  Description of Artificial Sequence: Synthetic oligonucleotide
auaaagaacucucuucaca

SEQ ID NO: 442017 - RNA, 19 nt, Artificial Sequence
  Description of Artificial Sequence: Synthetic oligonucleotide
auauauauauauauauaug

SEQ ID NO: 442018 - RNA, 19 nt, Artificial Sequence
  Description of Artificial Sequence: Synthetic oligonucleotide
uucacgcuaaaacacaaaa

SEQ ID NO: 442019 - RNA, 19 nt, Artificial Sequence
  Description of Artificial Sequence: Synthetic oligonucleotide
ugaaacguugaauggaccu

SEQ ID NO: 442020 - RNA, 19 nt, Artificial Sequence
  Description of Artificial Sequence: Synthetic oligonucleotide
ugaauacagccaaauuugc

SEQ ID NO: 442021 - RNA, 19 nt, Artificial Sequence
  Description of Artificial Sequence: Synthetic oligonucleotide
aagcauuauucaaucuugc

SEQ ID NO: 442022 - RNA, 19 nt, Artificial Sequence
  Description of Artificial Sequence: Synthetic oligonucleotide
uaaagauagccucaacuau

SEQ ID NO: 442023 - RNA, 19 nt, Artificial Sequence
  Description of Artificial Sequence: Synthetic oligonucleotide
uuaugaugcuccuaagaga

SEQ ID NO: 442024 - RNA, 19 nt, Artificial Sequence
  Description of Artificial Sequence: Synthetic oligonucleotide
aggagaagacgccuaacac

SEQ ID NO: 442025 - RNA, 19 nt, Artificial Sequence
  Description of Artificial Sequence: Synthetic oligonucleotide
gaagcauuauucaaucuug

SEQ ID NO: 442026 - RNA, 19 nt, Artificial Sequence
  Description of Artificial Sequence: Synthetic oligonucleotide
gucaucaugauacaagaca

SEQ ID NO: 442027 - RNA, 19 nt, Artificial Sequence
  Description of Artificial Sequence: Synthetic oligonucleotide
uauugcuugaaguacggau

SEQ ID NO: 442028 - RNA, 19 nt, Artificial Sequence
  Description of Artificial Sequence: Synthetic oligonucleotide
uauauauauauaugagaau

SEQ ID NO: 442029 - RNA, 19 nt, Artificial Sequence
  Description of Artificial Sequence: Synthetic oligonucleotide
cuaagagagggguugcagg

SEQ ID NO: 442030 - RNA, 19 nt, Artificial Sequence
  Description of Artificial Sequence: Synthetic oligonucleotide
cuuuagcugaguuuguaug

SEQ ID NO: 442031 - RNA, 19 nt, Artificial Sequence
  Description of Artificial Sequence: Synthetic oligonucleotide
aauagaauauauauauaua

SEQ ID NO: 442032 - RNA, 19 nt, Artificial Sequence
  Description of Artificial Sequence: Synthetic oligonucleotide
cagacgucuaucaagcagc

SEQ ID NO: 442033 - RNA, 19 nt, Artificial Sequence
  Description of Artificial Sequence: Synthetic oligonucleotide
ucuaccaagagcaccaguu

SEQ ID NO: 442034 - RNA, 19 nt, Artificial Sequence
  Description of Artificial Sequence: Synthetic oligonucleotide
ugugaugacggaguagagg

SEQ ID NO: 442035 - RNA, 19 nt, Artificial Sequence
  Description of Artificial Sequence: Synthetic oligonucleotide
agaaaggacccuuucuaag

SEQ ID NO: 442036 - RNA, 19 nt, Artificial Sequence
  Description of Artificial Sequence: Synthetic oligonucleotide
gaaggaguagcuauacugc

SEQ ID NO: 442037 - RNA, 19 nt, Artificial Sequence
  Description of Artificial Sequence: Synthetic oligonucleotide
acagacgucuaucaagcag

SEQ ID NO: 442038 - RNA, 19 nt, Artificial Sequence
  Description of Artificial Sequence: Synthetic oligonucleotide
uaugagaaugaaagcucag

SEQ ID NO: 442039 - RNA, 19 nt, Artificial Sequence
  Description of Artificial Sequence: Synthetic oligonucleotide
uuuaaucaaguacuuugau

SEQ ID NO: 442040 - RNA, 19 nt, Artificial Sequence
  Description of Artificial Sequence: Synthetic oligonucleotide
uaacaaagauagucaaccc

SEQ ID NO: 442041 - RNA, 19 nt, Artificial Sequence
  Description of Artificial Sequence: Synthetic oligonucleotide
uuuauacucauagcaaggu

SEQ ID NO: 442042 - RNA, 19 nt, Artificial Sequence
  Description of Artificial Sequence: Synthetic oligonucleotide
uuaaaaccgaccagcacau

SEQ ID NO: 442043 - RNA, 19 nt, Artificial Sequence
  Description of Artificial Sequence: Synthetic oligonucleotide
caaaguugauccgauauac

SEQ ID NO: 442044 - RNA, 19 nt, Artificial Sequence
  Description of Artificial Sequence: Synthetic oligonucleotide
ggagaagacgccuaacacg

SEQ ID NO: 442045 - RNA, 19 nt, Artificial Sequence
  Description of Artificial Sequence: Synthetic oligonucleotide
aaggaguagcuauacugca

SEQ ID NO: 442046 - RNA, 19 nt, Artificial Sequence
  Description of Artificial Sequence: Synthetic oligonucleotide
agauaacaaagauagucaa

SEQ ID NO: 442047 - RNA, 19 nt, Artificial Sequence
  Description of Artificial Sequence: Synthetic oligonucleotide
aguuuaguugaugaaacgu

SEQ ID NO: 442048 - RNA, 19 nt, Artificial Sequence
  Description of Artificial Sequence: Synthetic oligonucleotide
ucuaucaagcagcaucagu

SEQ ID NO: 442049 - RNA, 19 nt, Artificial Sequence
  Description of Artificial Sequence: Synthetic oligonucleotide
gaaggaccuacauacauaa

SEQ ID NO: 442050 - RNA, 19 nt, Artificial Sequence
  Description of Artificial Sequence: Synthetic oligonucleotide
aggaggcacacccagcugg

SEQ ID NO: 442051 - RNA, 19 nt, Artificial Sequence
  Description of Artificial Sequence: Synthetic oligonucleotide
uacacgucuuuauaaagaa

SEQ ID NO: 442052 - RNA, 19 nt, Artificial Sequence
  Description of Artificial Sequence: Synthetic oligonucleotide
auacauaauuccuugccaa

SEQ ID NO: 442053 - RNA, 19 nt, Artificial Sequence
  Description of Artificial Sequence: Synthetic oligonucleotide
agaacgaggcugauguucc

SEQ ID NO: 442054 - RNA, 19 nt, Artificial Sequence
  Description of Artificial Sequence: Synthetic oligonucleotide
gaaaggacccuuucuaaga

SEQ ID NO: 442055 - RNA, 19 nt, Artificial Sequence
  Description of Artificial Sequence: Synthetic oligonucleotide
gaugaaacguugaauggac

SEQ ID NO: 442056 - RNA, 19 nt, Artificial Sequence
  Description of Artificial Sequence: Synthetic oligonucleotide
aggaccuacauacauaauu

SEQ ID NO: 442057 - RNA, 19 nt, Artificial Sequence
  Description of Artificial Sequence: Synthetic oligonucleotide
uuuguaugccaucugucau

SEQ ID NO: 442058 - RNA, 19 nt, Artificial Sequence
  Description of Artificial Sequence: Synthetic oligonucleotide
gaagacgccuaacacggcc

SEQ ID NO: 442059 - RNA, 19 nt, Artificial Sequence
  Description of Artificial Sequence: Synthetic oligonucleotide
uuauccacagcccgacgag

SEQ ID NO: 442060 - RNA, 19 nt, Artificial Sequence
  Description of Artificial Sequence: Synthetic oligonucleotide
augaugcaccacuacagag

SEQ ID NO: 442061 - RNA, 19 nt, Artificial Sequence
  Description of Artificial Sequence: Synthetic oligonucleotide
uuaaggagacugcaauaga

SEQ ID NO: 442062 - RNA, 19 nt, Artificial Sequence
  Description of Artificial Sequence: Synthetic oligonucleotide
gaccuacauacauaauucc

SEQ ID NO: 442063 - RNA, 19 nt, Artificial Sequence
  Description of Artificial Sequence: Synthetic oligonucleotide
auucgauuuacccaugauu

SEQ ID NO: 442064 - RNA, 19 nt, Artificial Sequence
  Description of Artificial Sequence: Synthetic oligonucleotide
uuauacucauagcaagguc

SEQ ID NO: 442065 - RNA, 19 nt, Artificial Sequence
  Description of Artificial Sequence: Synthetic oligonucleotide
gauaccaauaauggcagca

SEQ ID NO: 442066 - RNA, 19 nt, Artificial Sequence
  Description of Artificial Sequence: Synthetic oligonucleotide
ugacuuuuauacucauagc

SEQ ID NO: 442067 - RNA, 19 nt, Artificial Sequence
  Description of Artificial Sequence: Synthetic oligonucleotide
aaaccgaccagcacaucac

SEQ ID NO: 442068 - RNA, 19 nt, Artificial Sequence
  Description of Artificial Sequence: Synthetic oligonucleotide
cuaaaccucugaagaaggg

SEQ ID NO: 442069 - RNA, 19 nt, Artificial Sequence
  Description of Artificial Sequence: Synthetic oligonucleotide
cuagccaauugcuggauac

SEQ ID NO: 442070 - RNA, 19 nt, Artificial Sequence
  Description of Artificial Sequence: Synthetic oligonucleotide
uguagagcaacacggcaaa

SEQ ID NO: 442071 - RNA, 19 nt, Artificial Sequence
  Description of Artificial Sequence: Synthetic oligonucleotide
agcauuuacugguaugaca

SEQ ID NO: 442072 - RNA, 19 nt, Artificial Sequence
  Description of Artificial Sequence: Synthetic oligonucleotide
ugaagaaccaaaacccauu

SEQ ID NO: 442073 - RNA, 19 nt, Artificial Sequence
  Description of Artificial Sequence: Synthetic oligonucleotide
uaguucacgcuaaaacaca

SEQ ID NO: 442074 - RNA, 19 nt, Artificial Sequence
  Description of Artificial Sequence: Synthetic oligonucleotide
gaauauauauauauauaua

SEQ ID NO: 442075 - RNA, 19 nt, Artificial Sequence
  Description of Artificial Sequence: Synthetic oligonucleotide
aagcauuuacugguaugac

SEQ ID NO: 442076 - RNA, 19 nt, Artificial Sequence
  Description of Artificial Sequence: Synthetic oligonucleotide
ugcaugaagcauuauucaa

SEQ ID NO: 442077 - RNA, 19 nt, Artificial Sequence
  Description of Artificial Sequence: Synthetic oligonucleotide
gauagccucaacuauccaa

SEQ ID NO: 442078 - RNA, 19 nt, Artificial Sequence
  Description of Artificial Sequence: Synthetic oligonucleotide
guuuguaugccaucuguca

SEQ ID NO: 442079 - RNA, 19 nt, Artificial Sequence
  Description of Artificial Sequence: Synthetic oligonucleotide
aagacgccuaacacggccc

SEQ ID NO: 442080 - RNA, 19 nt, Artificial Sequence
  Description of Artificial Sequence: Synthetic oligonucleotide
ugagccgaguuacagugga

SEQ ID NO: 442081 - RNA, 19 nt, Artificial Sequence
  Description of Artificial Sequence: Synthetic oligonucleotide
guugauccgauauacagcu

SEQ ID NO: 442082 - RNA, 19 nt, Artificial Sequence
  Description of Artificial Sequence: Synthetic oligonucleotide
uuuacccaugauucauucc

SEQ ID NO: 442083 - RNA, 19 nt, Artificial Sequence
  Description of Artificial Sequence: Synthetic oligonucleotide
uccaacaaucuucuaacuu

SEQ ID NO: 442084 - RNA, 19 nt, Artificial Sequence
  Description of Artificial Sequence: Synthetic oligonucleotide
ugaaaaccuuauuuucugu

SEQ ID NO: 442085 - RNA, 19 nt, Artificial Sequence
  Description of Artificial Sequence: Synthetic oligonucleotide
ucaauagccuucucucagc

SEQ ID NO: 442086 - RNA, 19 nt, Artificial Sequence
  Description of Artificial Sequence: Synthetic oligonucleotide
uauaucaggcaccuugauu

SEQ ID NO: 442087 - RNA, 19 nt, Artificial Sequence
  Description of Artificial Sequence: Synthetic oligonucleotide
cgauauacagcuuuaaaac

SEQ ID NO: 442088 - RNA, 19 nt, Artificial Sequence
  Description of Artificial Sequence: Synthetic oligonucleotide
auauauauauauauauaua

SEQ ID NO: 442089 - RNA, 19 nt, Artificial Sequence
  Description of Artificial Sequence: Synthetic oligonucleotide
uccgauauacagcuuuaaa

SEQ ID NO: 442090 - RNA, 19 nt, Artificial Sequence
  Description of Artificial Sequence: Synthetic oligonucleotide
caaagcauuuacugguaug

SEQ ID NO: 442091 - RNA, 19 nt, Artificial Sequence
  Description of Artificial Sequence: Synthetic oligonucleotide
uuggagagaauggauacaa

SEQ ID NO: 442092 - RNA, 19 nt, Artificial Sequence
  Description of Artificial Sequence: Synthetic oligonucleotide
uggauacaauagaaacugc

SEQ ID NO: 442093 - RNA, 19 nt, Artificial Sequence
  Description of Artificial Sequence: Synthetic oligonucleotide
agcuuguuaacuuggcuau

SEQ ID NO: 442094 - RNA, 19 nt, Artificial Sequence
  Description of Artificial Sequence: Synthetic oligonucleotide
cagcaaagcagcauaccag

SEQ ID NO: 442095 - RNA, 19 nt, Artificial Sequence
  Description of Artificial Sequence: Synthetic oligonucleotide
gaaacguugaauggaccug

SEQ ID NO: 442096 - RNA, 19 nt, Artificial Sequence
  Description of Artificial Sequence: Synthetic oligonucleotide
gaauucuugcugaugggac

SEQ ID NO: 442097 - RNA, 19 nt, Artificial Sequence
  Description of Artificial Sequence: Synthetic oligonucleotide
ucgauuuacccaugauuca

SEQ ID NO: 442098 - RNA, 19 nt, Artificial Sequence
  Description of Artificial Sequence: Synthetic oligonucleotide
acaauagugccaaggauga

SEQ ID NO: 442099 - RNA, 19 nt, Artificial Sequence
  Description of Artificial Sequence: Synthetic oligonucleotide
cauacauaauuccuugcca

SEQ ID NO: 442100 - RNA, 19 nt, Artificial Sequence
  Description of Artificial Sequence: Synthetic oligonucleotide
aaauguucccuuugugcua

SEQ ID NO: 442101 - RNA, 19 nt, Artificial Sequence
  Description of Artificial Sequence: Synthetic oligonucleotide
aacuaacaugccucugacu

SEQ ID NO: 442102 - RNA, 19 nt, Artificial Sequence
  Description of Artificial Sequence: Synthetic oligonucleotide
ccaacaaucuucuaacuuc

SEQ ID NO: 442103 - RNA, 19 nt, Artificial Sequence
  Description of Artificial Sequence: Synthetic oligonucleotide
uuugcaaagcguucacuua

SEQ ID NO: 442104 - RNA, 19 nt, Artificial Sequence
  Description of Artificial Sequence: Synthetic oligonucleotide
gguaugacacaucugacaa

SEQ ID NO: 442105 - RNA, 19 nt, Artificial Sequence
  Description of Artificial Sequence: Synthetic oligonucleotide
aucuacacgucuuuauaaa

SEQ ID NO: 442106 - RNA, 19 nt, Artificial Sequence
  Description of Artificial Sequence: Synthetic oligonucleotide
ggugguaucaccaaggaua

SEQ ID NO: 442107 - RNA, 19 nt, Artificial Sequence
  Description of Artificial Sequence: Synthetic oligonucleotide
agacgccuaacacggcccc

SEQ ID NO: 442108 - RNA, 19 nt, Artificial Sequence
  Description of Artificial Sequence: Synthetic oligonucleotide
aacccauuguguauugcug

SEQ ID NO: 442109 - RNA, 19 nt, Artificial Sequence
  Description of Artificial Sequence: Synthetic oligonucleotide
auagcaaggucauuacaua

SEQ ID NO: 442110 - RNA, 19 nt, Artificial Sequence
  Description of Artificial Sequence: Synthetic oligonucleotide
aaaguugauccgauauaca

SEQ ID NO: 442111 - RNA, 19 nt, Artificial Sequence
  Description of Artificial Sequence: Synthetic oligonucleotide
uuuggagagaauggauaca

SEQ ID NO: 442112 - RNA, 19 nt, Artificial Sequence
  Description of Artificial Sequence: Synthetic oligonucleotide
caaauuugcaaagcguuca

SEQ ID NO: 442113 - RNA, 19 nt, Artificial Sequence
  Description of Artificial Sequence: Synthetic oligonucleotide
gaauacagccaaauuugca

SEQ ID NO: 442114 - RNA, 19 nt, Artificial Sequence
  Description of Artificial Sequence: Synthetic oligonucleotide
cauuauucaaucuugccuu

SEQ ID NO: 442115 - RNA, 19 nt, Artificial Sequence
  Description of Artificial Sequence: Synthetic oligonucleotide
cuauagucuuacaaauaga

SEQ ID NO: 442116 - RNA, 19 nt, Artificial Sequence
  Description of Artificial Sequence: Synthetic oligonucleotide
caagaguccagagguacag

SEQ ID NO: 442117 - RNA, 19 nt, Artificial Sequence
  Description of Artificial Sequence: Synthetic oligonucleotide
ggaugcuagaauauauaag

SEQ ID NO: 442118 - RNA, 19 nt, Artificial Sequence
  Description of Artificial Sequence: Synthetic oligonucleotide
uaccaauaauggcagcaau

SEQ ID NO: 442119 - RNA, 19 nt, Artificial Sequence
  Description of Artificial Sequence: Synthetic oligonucleotide
uuauaucaggcaccuugau

SEQ ID NO: 442120 - RNA, 19 nt, Artificial Sequence
  Description of Artificial Sequence: Synthetic oligonucleotide
cuaccaagagcaccaguug

SEQ ID NO: 442121 - RNA, 19 nt, Artificial Sequence
  Description of Artificial Sequence: Synthetic oligonucleotide
aagcguucacuuaauaguu

SEQ ID NO: 442122 - RNA, 19 nt, Artificial Sequence
  Description of Artificial Sequence: Synthetic oligonucleotide
aguugaugaaacguugaau

SEQ ID NO: 442123 - RNA, 19 nt, Artificial Sequence
  Description of Artificial Sequence: Synthetic oligonucleotide
uaucaggcaccuugauuug

SEQ ID NO: 442124 - RNA, 19 nt, Artificial Sequence
  Description of Artificial Sequence: Synthetic oligonucleotide
aagacacaauagugccaag

SEQ ID NO: 442125 - RNA, 19 nt, Artificial Sequence
  Description of Artificial Sequence: Synthetic oligonucleotide
ucaggaugcuaaaccucug

SEQ ID NO: 442126 - RNA, 19 nt, Artificial Sequence
  Description of Artificial Sequence: Synthetic oligonucleotide
gacgccggggccgagaccc

SEQ ID NO: 442127 - RNA, 19 nt, Artificial Sequence
  Description of Artificial Sequence: Synthetic oligonucleotide
gcuaaaccucugaagaagg

SEQ ID NO: 442128 - RNA, 19 nt, Artificial Sequence
  Description of Artificial Sequence: Synthetic oligonucleotide
ugauaccaauaauggcagc

SEQ ID NO: 442129 - RNA, 19 nt, Artificial Sequence
  Description of Artificial Sequence: Synthetic oligonucleotide
cuccauuggugguaucacc

SEQ ID NO: 442130 - RNA, 19 nt, Artificial Sequence
  Description of Artificial Sequence: Synthetic oligonucleotide
acaaagcauuuacugguau

SEQ ID NO: 442131 - RNA, 19 nt, Artificial Sequence
  Description of Artificial Sequence: Synthetic oligonucleotide
aaccgaccagcacaucaca

SEQ ID NO: 442132 - RNA, 19 nt, Artificial Sequence
  Description of Artificial Sequence: Synthetic oligonucleotide
acacgucuuuauaaagaac

SEQ ID NO: 442133 - RNA, 19 nt, Artificial Sequence
  Description of Artificial Sequence: Synthetic oligonucleotide
gaugcuccuaagagagggg

SEQ ID NO: 442134 - RNA, 19 nt, Artificial Sequence
  Description of Artificial Sequence: Synthetic oligonucleotide
ugaugacggaguagaggca

SEQ ID NO: 442135 - RNA, 19 nt, Artificial Sequence
  Description of Artificial Sequence: Synthetic oligonucleotide
cauuuugacccacacagcu

SEQ ID NO: 442136 - RNA, 19 nt, Artificial Sequence
  Description of Artificial Sequence: Synthetic oligonucleotide
gccacagacgucuaucaag

SEQ ID NO: 442137 - RNA, 19 nt, Artificial Sequence
  Description of Artificial Sequence: Synthetic oligonucleotide
ccacagacgucuaucaagc

SEQ ID NO: 442138 - RNA, 19 nt, Artificial Sequence
  Description of Artificial Sequence: Synthetic oligonucleotide
acaagguguacagagugau

SEQ ID NO: 442139 - RNA, 19 nt, Artificial Sequence
  Description of Artificial Sequence: Synthetic oligonucleotide
ggauacaauagaaacugca

SEQ ID NO: 442140 - RNA, 19 nt, Artificial Sequence
  Description of Artificial Sequence: Synthetic oligonucleotide
acggcaaagaugauugaca

SEQ ID NO: 442141 - RNA, 19 nt, Artificial Sequence
  Description of Artificial Sequence: Synthetic oligonucleotide
agggguugcaggaacgguc

SEQ ID NO: 442142 - RNA, 19 nt, Artificial Sequence
  Description of Artificial Sequence: Synthetic oligonucleotide
ccaugauaccaauaauggc

SEQ ID NO: 442143 - RNA, 19 nt, Artificial Sequence
  Description of Artificial Sequence: Synthetic oligonucleotide
gaguuuguaugccaucugu

SEQ ID NO: 442144 - RNA, 19 nt, Artificial Sequence
  Description of Artificial Sequence: Synthetic oligonucleotide
aguguccauucugugauga

SEQ ID NO: 442145 - RNA, 19 nt, Artificial Sequence
  Description of Artificial Sequence: Synthetic oligonucleotide
auagucuuacaaauagaau

SEQ ID NO: 442146 - RNA, 19 nt, Artificial Sequence
  Description of Artificial Sequence: Synthetic oligonucleotide
ggaccuacauacauaauuc

SEQ ID NO: 442147 - RNA, 19 nt, Artificial Sequence
  Description of Artificial Sequence: Synthetic oligonucleotide
caccacuacagaggcaugg

SEQ ID NO: 442148 - RNA, 19 nt, Artificial Sequence
  Description of Artificial Sequence: Synthetic oligonucleotide
cagaacgaggcugauguuc

SEQ ID NO: 442149 - RNA, 19 nt, Artificial Sequence
  Description of Artificial Sequence: Synthetic oligonucleotide
gcauuauucaaucuugccu

SEQ ID NO: 442150 - RNA, 19 nt, Artificial Sequence
  Description of Artificial Sequence: Synthetic oligonucleotide
gacuguaccagcugguuau

SEQ ID NO: 442151 - RNA, 19 nt, Artificial Sequence
  Description of Artificial Sequence: Synthetic oligonucleotide
agcauagaugagccgaguu

SEQ ID NO: 442152 - RNA, 19 nt, Artificial Sequence
  Description of Artificial Sequence: Synthetic oligonucleotide
ugcaaagcguucacuuaau

SEQ ID NO: 442153 - RNA, 19 nt, Artificial Sequence
  Description of Artificial Sequence: Synthetic oligonucleotide
caucaugauacaagacaca

SEQ ID NO: 442154 - RNA, 19 nt, Artificial Sequence
  Description of Artificial Sequence: Synthetic oligonucleotide
augauugacaggauauaaa

SEQ ID NO: 442155 - RNA, 19 nt, Artificial Sequence
  Description of Artificial Sequence: Synthetic oligonucleotide
cacggcaaagaugauugac

SEQ ID NO: 442156 - RNA, 19 nt, Artificial Sequence
  Description of Artificial Sequence: Synthetic oligonucleotide
cagcuuguuaacuuggcua

SEQ ID NO: 442157 - RNA, 19 nt, Artificial Sequence
  Description of Artificial Sequence: Synthetic oligonucleotide
guguuaugaugcuccuaag

SEQ ID NO: 442158 - RNA, 19 nt, Artificial Sequence
  Description of Artificial Sequence: Synthetic oligonucleotide
uccauucgauuuacccaug

SEQ ID NO: 442159 - RNA, 19 nt, Artificial Sequence
  Description of Artificial Sequence: Synthetic oligonucleotide
guugaauuugcuggagaca

SEQ ID NO: 442160 - RNA, 19 nt, Artificial Sequence
  Description of Artificial Sequence: Synthetic oligonucleotide
uggcaucaggacuguacca

SEQ ID NO: 442161 - RNA, 19 nt, Artificial Sequence
  Description of Artificial Sequence: Synthetic oligonucleotide
agccaaauuugcaaagcgu

SEQ ID NO: 442162 - RNA, 19 nt, Artificial Sequence
  Description of Artificial Sequence: Synthetic oligonucleotide
uccaaccaugauaccaaua

SEQ ID NO: 442163 - RNA, 19 nt, Artificial Sequence
  Description of Artificial Sequence: Synthetic oligonucleotide
caagguguacagagugaug

SEQ ID NO: 442164 - RNA, 19 nt, Artificial Sequence
  Description of Artificial Sequence: Synthetic oligonucleotide
ggauguagaaagauccaac

SEQ ID NO: 442165 - RNA, 19 nt, Artificial Sequence
  Description of Artificial Sequence: Synthetic oligonucleotide
ggauaacacugucacuccc

SEQ ID NO: 442166 - RNA, 19 nt, Artificial Sequence
  Description of Artificial Sequence: Synthetic oligonucleotide
ccgauauacagcuuuaaaa

SEQ ID NO: 442167 - RNA, 19 nt, Artificial Sequence
  Description of Artificial Sequence: Synthetic oligonucleotide
auaccagagccuuggguuu

SEQ ID NO: 442168 - RNA, 19 nt, Artificial Sequence
  Description of Artificial Sequence: Synthetic oligonucleotide
uagccucaacuauccaaca

SEQ ID NO: 442169 - RNA, 19 nt, Artificial Sequence
  Description of Artificial Sequence: Synthetic oligonucleotide
ggcaucaggacuguaccag

SEQ ID NO: 442170 - RNA, 19 nt, Artificial Sequence
  Description of Artificial Sequence: Synthetic oligonucleotide
ugccucugacuuuuauacu

SEQ ID NO: 442171 - RNA, 19 nt, Artificial Sequence
  Description of Artificial Sequence: Synthetic oligonucleotide
agccuuaucagcagccaug

SEQ ID NO: 442172 - RNA, 19 nt, Artificial Sequence
  Description of Artificial Sequence: Synthetic oligonucleotide
gaaagcucagauucugcau

SEQ ID NO: 442173 - RNA, 19 nt, Artificial Sequence
  Description of Artificial Sequence: Synthetic oligonucleotide
ccaaauuugcaaagcguuc

SEQ ID NO: 442174 - RNA, 19 nt, Artificial Sequence
  Description of Artificial Sequence: Synthetic oligonucleotide
acggucagguucauugguc

SEQ ID NO: 442175 - RNA, 19 nt, Artificial Sequence
  Description of Artificial Sequence: Synthetic oligonucleotide
agccucaacuauccaacaa

SEQ ID NO: 442176 - RNA, 19 nt, Artificial Sequence
  Description of Artificial Sequence: Synthetic oligonucleotide
gugcuauagucuuacaaau

SEQ ID NO: 442177 - RNA, 19 nt, Artificial Sequence
  Description of Artificial Sequence: Synthetic oligonucleotide
accaauaauggcagcaauu

SEQ ID NO: 442178 - RNA, 19 nt, Artificial Sequence
  Description of Artificial Sequence: Synthetic oligonucleotide
auacucauagcaaggucau

SEQ ID NO: 442179 - RNA, 19 nt, Artificial Sequence
  Description of Artificial Sequence: Synthetic oligonucleotide
agcaaacaugaugcaccac

SEQ ID NO: 442180 - RNA, 19 nt, Artificial Sequence
  Description of Artificial Sequence: Synthetic oligonucleotide
augcuccuaagagaggggu

SEQ ID NO: 442181 - RNA, 19 nt, Artificial Sequence
  Description of Artificial Sequence: Synthetic oligonucleotide
agaagacgccuaacacggc

SEQ ID NO: 442182 - RNA, 19 nt, Artificial Sequence
  Description of Artificial Sequence: Synthetic oligonucleotide
ugggguuauugcauuccuu

SEQ ID NO: 442183 - RNA, 19 nt, Artificial Sequence
  Description of Artificial Sequence: Synthetic oligonucleotide
agauagccucaacuaucca

SEQ ID NO: 442184 - RNA, 19 nt, Artificial Sequence
  Description of Artificial Sequence: Synthetic oligonucleotide
cuguaggaaucuacacguc

SEQ ID NO: 442185 - RNA, 19 nt, Artificial Sequence
  Description of Artificial Sequence: Synthetic oligonucleotide
agccgaguuacaguggaau

SEQ ID NO: 442186 - RNA, 19 nt, Artificial Sequence
  Description of Artificial Sequence: Synthetic oligonucleotide
guuuaguugaugaaacguu

SEQ ID NO: 442187 - RNA, 19 nt, Artificial Sequence
  Description of Artificial Sequence: Synthetic oligonucleotide
gaacccagcuggccaagga

SEQ ID NO: 442188 - RNA, 19 nt, Artificial Sequence
  Description of Artificial Sequence: Synthetic oligonucleotide
aacguugaauggaccugca

SEQ ID NO: 442189 - RNA, 19 nt, Artificial Sequence
  Description of Artificial Sequence: Synthetic oligonucleotide
augagccgaguuacagugg

SEQ ID NO: 442190 - RNA, 19 nt, Artificial Sequence
  Description of Artificial Sequence: Synthetic oligonucleotide
uccuaagagagggguugca

SEQ ID NO: 442191 - RNA, 19 nt, Artificial Sequence
  Description of Artificial Sequence: Synthetic oligonucleotide
ccuuucuaagaaaccaaca

SEQ ID NO: 442192 - RNA, 19 nt, Artificial Sequence
  Description of Artificial Sequence: Synthetic oligonucleotide
auccaaccaugauaccaau

SEQ ID NO: 442193 - RNA, 19 nt, Artificial Sequence
  Description of Artificial Sequence: Synthetic oligonucleotide
cugugggguuauugcauuc

SEQ ID NO: 442194 - RNA, 19 nt, Artificial Sequence
  Description of Artificial Sequence: Synthetic oligonucleotide
ccauuuugacccacacagc

SEQ ID NO: 442195 - RNA, 19 nt, Artificial Sequence
  Description of Artificial Sequence: Synthetic oligonucleotide
ccagaaacuaaauaucuau

SEQ ID NO: 442196 - RNA, 19 nt, Artificial Sequence
  Description of Artificial Sequence: Synthetic oligonucleotide
auagaugagccgaguuaca

SEQ ID NO: 442197 - RNA, 19 nt, Artificial Sequence
  Description of Artificial Sequence: Synthetic oligonucleotide
acguugaauggaccugcau

SEQ ID NO: 442198 - RNA, 19 nt, Artificial Sequence
  Description of Artificial Sequence: Synthetic oligonucleotide
auuuugacccacacagcua

SEQ ID NO: 442199 - RNA, 19 nt, Artificial Sequence
  Description of Artificial Sequence: Synthetic oligonucleotide
gauccgauauacagcuuua

SEQ ID NO: 442200 - RNA, 19 nt, Artificial Sequence
  Description of Artificial Sequence: Synthetic oligonucleotide
guguccauucugugaugac

SEQ ID NO: 442201 - RNA, 19 nt, Artificial Sequence
  Description of Artificial Sequence: Synthetic oligonucleotide
agagagggucagcuuguua

SEQ ID NO: 442202 - RNA, 19 nt, Artificial Sequence
  Description of Artificial Sequence: Synthetic oligonucleotide
uggccgaccacgugagaua

SEQ ID NO: 442203 - RNA, 19 nt, Artificial Sequence
  Description of Artificial Sequence: Synthetic oligonucleotide
acuauccaacaaucuucua

SEQ ID NO: 442204 - RNA, 19 nt, Artificial Sequence
  Description of Artificial Sequence: Synthetic oligonucleotide
agacgucuaucaagcagca

SEQ ID NO: 442205 - RNA, 19 nt, Artificial Sequence
  Description of Artificial Sequence: Synthetic oligonucleotide
gcaaaguugauccgauaua

SEQ ID NO: 442206 - RNA, 19 nt, Artificial Sequence
  Description of Artificial Sequence: Synthetic oligonucleotide
cagcuagccaauugcugga

SEQ ID NO: 442207 - RNA, 19 nt, Artificial Sequence
  Description of Artificial Sequence: Synthetic oligonucleotide
ccuaagagagggguugcag

SEQ ID NO: 442208 - RNA, 19 nt, Artificial Sequence
  Description of Artificial Sequence: Synthetic oligonucleotide
agcuuguaaaagacagcaa

SEQ ID NO: 442209 - RNA, 19 nt, Artificial Sequence
  Description of Artificial Sequence: Synthetic oligonucleotide
ugccaaggaugagaauaaa

SEQ ID NO: 442210 - RNA, 19 nt, Artificial Sequence
  Description of Artificial Sequence: Synthetic oligonucleotide
ggaaucuacacgucuuuau

SEQ ID NO: 442211 - RNA, 19 nt, Artificial Sequence
  Description of Artificial Sequence: Synthetic oligonucleotide
ccgaguuacaguggaauuc

SEQ ID NO: 442212 - RNA, 19 nt, Artificial Sequence
  Description of Artificial Sequence: Synthetic oligonucleotide
ccauucugugaugacggag

SEQ ID NO: 442213 - RNA, 19 nt, Artificial Sequence
  Description of Artificial Sequence: Synthetic oligonucleotide
aaggaccuacauacauaau

SEQ ID NO: 442214 - RNA, 19 nt, Artificial Sequence
  Description of Artificial Sequence: Synthetic oligonucleotide
gggauguagaaagauccaa

SEQ ID NO: 442215 - RNA, 19 nt, Artificial Sequence
  Description of Artificial Sequence: Synthetic oligonucleotide
gcguucacuuaauaguuua

SEQ ID NO: 442216 - RNA, 19 nt, Artificial Sequence
  Description of Artificial Sequence: Synthetic oligonucleotide
gucccggccugugaggaug

SEQ ID NO: 442217 - RNA, 19 nt, Artificial Sequence
  Description of Artificial Sequence: Synthetic oligonucleotide
gggguuauugcauuccuuu

SEQ ID NO: 442218 - RNA, 19 nt, Artificial Sequence
  Description of Artificial Sequence: Synthetic oligonucleotide
cacagacgucuaucaagca

SEQ ID NO: 442219 - RNA, 19 nt, Artificial Sequence
  Description of Artificial Sequence: Synthetic oligonucleotide
gcaggaacggucagguuca

SEQ ID NO: 442220 - RNA, 19 nt, Artificial Sequence
  Description of Artificial Sequence: Synthetic oligonucleotide
uaaaaccgaccagcacauc

SEQ ID NO: 442221 - RNA, 19 nt, Artificial Sequence
  Description of Artificial Sequence: Synthetic oligonucleotide
guaggaaucuacacgucuu

SEQ ID NO: 442222 - RNA, 19 nt, Artificial Sequence
  Description of Artificial Sequence: Synthetic oligonucleotide
guucacgcuaaaacacaaa

SEQ ID NO: 442223 - RNA, 19 nt, Artificial Sequence
  Description of Artificial Sequence: Synthetic oligonucleotide
aggacuguaccagcugguu

SEQ ID NO: 442224 - RNA, 19 nt, Artificial Sequence
  Description of Artificial Sequence: Synthetic oligonucleotide
agcguucacuuaauaguuu

SEQ ID NO: 442225 - RNA, 19 nt, Artificial Sequence
  Description of Artificial Sequence: Synthetic oligonucleotide
ggaaggaccuacauacaua

SEQ ID NO: 442226 - RNA, 19 nt, Artificial Sequence
  Description of Artificial Sequence: Synthetic oligonucleotide
ugacgccggggccgagacc

SEQ ID NO: 442227 - RNA, 19 nt, Artificial Sequence
  Description of Artificial Sequence: Synthetic oligonucleotide
auguguuaugaugcuccua

SEQ ID NO: 442228 - RNA, 19 nt, Artificial Sequence
  Description of Artificial Sequence: Synthetic oligonucleotide
gccgagacccaccgcuccg

SEQ ID NO: 442229 - RNA, 19 nt, Artificial Sequence
  Description of Artificial Sequence: Synthetic oligonucleotide
cggaugcuagaauauauaa

SEQ ID NO: 442230 - RNA, 19 nt, Artificial Sequence
  Description of Artificial Sequence: Synthetic oligonucleotide
ugguaucaccaaggauaac

SEQ ID NO: 442231 - RNA, 19 nt, Artificial Sequence
  Description of Artificial Sequence: Synthetic oligonucleotide
uacucauagcaaggucauu

SEQ ID NO: 442232 - RNA, 19 nt, Artificial Sequence
  Description of Artificial Sequence: Synthetic oligonucleotide
agcuagccaauugcuggau

SEQ ID NO: 442233 - RNA, 19 nt, Artificial Sequence
  Description of Artificial Sequence: Synthetic oligonucleotide
accgaccagcacaucacaa

SEQ ID NO: 442234 - RNA, 19 nt, Artificial Sequence
  Description of Artificial Sequence: Synthetic oligonucleotide
gcuugaaguacggaugcua

SEQ ID NO: 442235 - RNA, 19 nt, Artificial Sequence
  Description of Artificial Sequence: Synthetic oligonucleotide
cauucgauuuacccaugau

SEQ ID NO: 442236 - RNA, 19 nt, Artificial Sequence
  Description of Artificial Sequence: Synthetic oligonucleotide
ggacuguaccagcugguua

SEQ ID NO: 442237 - RNA, 19 nt, Artificial Sequence
  Description of Artificial Sequence: Synthetic oligonucleotide
ggaacccagcuggccaagg

SEQ ID NO: 442238 - RNA, 19 nt, Artificial Sequence
  Description of Artificial Sequence: Synthetic oligonucleotide
gaacgaggcugauguuccu

SEQ ID NO: 442239 - RNA, 19 nt, Artificial Sequence
  Description of Artificial Sequence: Synthetic oligonucleotide
ccauucgauuuacccauga

SEQ ID NO: 442240 - RNA, 19 nt, Artificial Sequence
  Description of Artificial Sequence: Synthetic oligonucleotide
cagcccgacgaggcugucc

SEQ ID NO: 442241 - RNA, 19 nt, Artificial Sequence
  Description of Artificial Sequence: Synthetic oligonucleotide
cgugagauacaagguguac

SEQ ID NO: 442242 - RNA, 19 nt, Artificial Sequence
  Description of Artificial Sequence: Synthetic oligonucleotide
auucugcaugaagcauuau

SEQ ID NO: 442243 - RNA, 19 nt, Artificial Sequence
  Description of Artificial Sequence: Synthetic oligonucleotide
gagggguugcaggaacggu

SEQ ID NO: 442244 - RNA, 19 nt, Artificial Sequence
  Description of Artificial Sequence: Synthetic oligonucleotide
caacacggcaaagaugauu

SEQ ID NO: 442245 - RNA, 19 nt, Artificial Sequence
  Description of Artificial Sequence: Synthetic oligonucleotide
agacugcaauagaaauaua

SEQ ID NO: 442246 - RNA, 19 nt, Artificial Sequence
  Description of Artificial Sequence: Synthetic oligonucleotide
gccuuaucagcagccaugu

SEQ ID NO: 442247 - RNA, 19 nt, Artificial Sequence
  Description of Artificial Sequence: Synthetic oligonucleotide
ccgaccacgugagauacaa

SEQ ID NO: 442248 - RNA, 19 nt, Artificial Sequence
  Description of Artificial Sequence: Synthetic oligonucleotide
cagccuuaucagcagccau

SEQ ID NO: 442249 - RNA, 19 nt, Artificial Sequence
  Description of Artificial Sequence: Synthetic oligonucleotide
aggaacggucagguucauu

SEQ ID NO: 442250 - RNA, 19 nt, Artificial Sequence
  Description of Artificial Sequence: Synthetic oligonucleotide
cacagcccgacgaggcugu

SEQ ID NO: 442251 - RNA, 19 nt, Artificial Sequence
  Description of Artificial Sequence: Synthetic oligonucleotide
caguggaauucuugcugau

SEQ ID NO: 442252 - RNA, 19 nt, Artificial Sequence
  Description of Artificial Sequence: Synthetic oligonucleotide
ccgagacccaccgcuccgg

SEQ ID NO: 442253 - RNA, 19 nt, Artificial Sequence
  Description of Artificial Sequence: Synthetic oligonucleotide
gccgaguuacaguggaauu

SEQ ID NO: 442254 - RNA, 19 nt, Artificial Sequence
  Description of Artificial Sequence: Synthetic oligonucleotide
cccgacgaggcuguccauc

SEQ ID NO: 442255 - RNA, 19 nt, Artificial Sequence
  Description of Artificial Sequence: Synthetic oligonucleotide
cgaccacgugagauacaag

SEQ ID NO: 442256 - RNA, 19 nt, Artificial Sequence
  Description of Artificial Sequence: Synthetic oligonucleotide
ccacaagaguccagaggua

SEQ ID NO: 442257 - RNA, 19 nt, Artificial Sequence
  Description of Artificial Sequence: Synthetic oligonucleotide
ccgacgaggcuguccaucu

SEQ ID NO: 442258 - RNA, 19 nt, Artificial Sequence
  Description of Artificial Sequence: Synthetic oligonucleotide
ccccagggauguagaaaga

SEQ ID NO: 442259 - RNA, 19 nt, Artificial Sequence
  Description of Artificial Sequence: Synthetic oligonucleotide
gcuuguuaacuuggcuauu

SEQ ID NO: 442260 - RNA, 19 nt, Artificial Sequence
  Description of Artificial Sequence: Synthetic oligonucleotide
gccgaccacgugagauaca

SEQ ID NO: 442261 - RNA, 19 nt, Artificial Sequence
  Description of Artificial Sequence: Synthetic oligonucleotide
ccagaacgaggcugauguu

SEQ ID NO: 442262 - RNA, 19 nt, Artificial Sequence
  Description of Artificial Sequence: Synthetic oligonucleotide
caggaacggucagguucau

SEQ ID NO: 442263 - RNA, 19 nt, Artificial Sequence
  Description of Artificial Sequence: Synthetic oligonucleotide
ccggccugugaggaugagu

SEQ ID NO: 442264 - RNA, 19 nt, Artificial Sequence
  Description of Artificial Sequence: Synthetic oligonucleotide
gcccgacgaggcuguccau

SEQ ID NO: 442265 - RNA, 19 nt, Artificial Sequence
  Description of Artificial Sequence: Synthetic oligonucleotide
cgacgaggcuguccaucuu

SEQ ID NO: 442266 - RNA, 19 nt, Artificial Sequence
  Description of Artificial Sequence: Synthetic oligonucleotide
aagauuucccguucgaggg

SEQ ID NO: 442267 - RNA, 19 nt, Artificial Sequence
  Description of Artificial Sequence: Synthetic oligonucleotide
aacuguuaaaguuaaucug

SEQ ID NO: 442268 - RNA, 19 nt, Artificial Sequence
  Description of Artificial Sequence: Synthetic oligonucleotide
uauuguaugguucuuauua

SEQ ID NO: 442269 - RNA, 19 nt, Artificial Sequence
  Description of Artificial Sequence: Synthetic oligonucleotide
ucaagaauugguaaaacaa

SEQ ID NO: 442270 - RNA, 19 nt, Artificial Sequence
  Description of Artificial Sequence: Synthetic oligonucleotide
aacuaguccucacaugggc

SEQ ID NO: 442271 - RNA, 19 nt, Artificial Sequence
  Description of Artificial Sequence: Synthetic oligonucleotide
uaaucuggaaggcaugugg

SEQ ID NO: 442272 - RNA, 19 nt, Artificial Sequence
  Description of Artificial Sequence: Synthetic oligonucleotide
aaggcauauaccaaguugg

SEQ ID NO: 442273 - RNA, 19 nt, Artificial Sequence
  Description of Artificial Sequence: Synthetic oligonucleotide
uaucucauacguaauaucu

SEQ ID NO: 442274 - RNA, 19 nt, Artificial Sequence
  Description of Artificial Sequence: Synthetic oligonucleotide
uucaacucaguacugcugg

SEQ ID NO: 442275 - RNA, 19 nt, Artificial Sequence
  Description of Artificial Sequence: Synthetic oligonucleotide
acaauuugugugcagguac

SEQ ID NO: 442276 - RNA, 19 nt, Artificial Sequence
  Description of Artificial Sequence: Synthetic oligonucleotide
aauuaggagacuccccagg

SEQ ID NO: 442277 - RNA, 19 nt, Artificial Sequence
  Description of Artificial Sequence: Synthetic oligonucleotide
uuguuuucaaccaaagacu

SEQ ID NO: 442278 - RNA, 19 nt, Artificial Sequence
  Description of Artificial Sequence: Synthetic oligonucleotide
ugaauggaccuauugaagc

SEQ ID NO: 442279 - RNA, 19 nt, Artificial Sequence
  Description of Artificial Sequence: Synthetic oligonucleotide
auuguaugguucuuauuac

SEQ ID NO: 442280 - RNA, 19 nt, Artificial Sequence
  Description of Artificial Sequence: Synthetic oligonucleotide
ugcauuauauccugaaaug

SEQ ID NO: 442281 - RNA, 19 nt, Artificial Sequence
  Description of Artificial Sequence: Synthetic oligonucleotide
ucugccgaaagccugagcu

SEQ ID NO: 442282 - RNA, 19 nt, Artificial Sequence
  Description of Artificial Sequence: Synthetic oligonucleotide
uaugguucuuauuacgacc

SEQ ID NO: 442283 - RNA, 19 nt, Artificial Sequence
  Description of Artificial Sequence: Synthetic oligonucleotide
uguaugguucuuauuacga

SEQ ID NO: 442284 - RNA, 19 nt, Artificial Sequence
  Description of Artificial Sequence: Synthetic oligonucleotide
uuaauaucacuucaugaau

SEQ ID NO: 442285 - RNA, 19 nt, Artificial Sequence
  Description of Artificial Sequence: Synthetic oligonucleotide
agugagaacuauaacugcc

SEQ ID NO: 442286 - RNA, 19 nt, Artificial Sequence
  Description of Artificial Sequence: Synthetic oligonucleotide
acuauaacugccaggagac

SEQ ID NO: 442287 - RNA, 19 nt, Artificial Sequence
  Description of Artificial Sequence: Synthetic oligonucleotide
uauuacgaccagaauuagg

SEQ ID NO: 442288 - RNA, 19 nt, Artificial Sequence
  Description of Artificial Sequence: Synthetic oligonucleotide
uguucgagccaacauguag

SEQ ID NO: 442289 - RNA, 19 nt, Artificial Sequence
  Description of Artificial Sequence: Synthetic oligonucleotide
cugaaaugaaggaugaguc

SEQ ID NO: 442290 - RNA, 19 nt, Artificial Sequence
  Description of Artificial Sequence: Synthetic oligonucleotide
uccguaaggaucaacaaua

SEQ ID NO: 442291 - RNA, 19 nt, Artificial Sequence
  Description of Artificial Sequence: Synthetic oligonucleotide
caaacaaccugugucagcg

SEQ ID NO: 442292 - RNA, 19 nt, Artificial Sequence
  Description of Artificial Sequence: Synthetic oligonucleotide
auuacgaccagaauuagga

SEQ ID NO: 442293 - RNA, 19 nt, Artificial Sequence
  Description of Artificial Sequence: Synthetic oligonucleotide
uauauccugaaaugaagga

SEQ ID NO: 442294 - RNA, 19 nt, Artificial Sequence
  Description of Artificial Sequence: Synthetic oligonucleotide
auaucucauacguaauauc

SEQ ID NO: 442295 - RNA, 19 nt, Artificial Sequence
  Description of Artificial Sequence: Synthetic oligonucleotide
gaaaggaagaccuuaguua

SEQ ID NO: 442296 - RNA, 19 nt, Artificial Sequence
  Description of Artificial Sequence: Synthetic oligonucleotide
ucuguucgagccaacaugu

SEQ ID NO: 442297 - RNA, 19 nt, Artificial Sequence
  Description of Artificial Sequence: Synthetic oligonucleotide
aacgguugccucuuccaac

SEQ ID NO: 442298 - RNA, 19 nt, Artificial Sequence
  Description of Artificial Sequence: Synthetic oligonucleotide
accuauugaagccaucauc

SEQ ID NO: 442299 - RNA, 19 nt, Artificial Sequence
  Description of Artificial Sequence: Synthetic oligonucleotide
cauguggaaucgaugacgg

SEQ ID NO: 442300 - RNA, 19 nt, Artificial Sequence
  Description of Artificial Sequence: Synthetic oligonucleotide
ucgcaaaaccuccuugugg

SEQ ID NO: 442301 - RNA, 19 nt, Artificial Sequence
  Description of Artificial Sequence: Synthetic oligonucleotide
gaaucgaugacgggaaagg

SEQ ID NO: 442302 - RNA, 19 nt, Artificial Sequence
  Description of Artificial Sequence: Synthetic oligonucleotide
auaagggaugaagaauucc

SEQ ID NO: 442303 - RNA, 19 nt, Artificial Sequence
  Description of Artificial Sequence: Synthetic oligonucleotide
ucgaugacgggaaaggacu

SEQ ID NO: 442304 - RNA, 19 nt, Artificial Sequence
  Description of Artificial Sequence: Synthetic oligonucleotide
ugcauaaucugggagagga

SEQ ID NO: 442305 - RNA, 19 nt, Artificial Sequence
  Description of Artificial Sequence: Synthetic oligonucleotide
gaauggaccuauugaagcc

SEQ ID NO: 442306 - RNA, 19 nt, Artificial Sequence
  Description of Artificial Sequence: Synthetic oligonucleotide
uucaguuaagacucguucu

SEQ ID NO: 442307 - RNA, 19 nt, Artificial Sequence
  Description of Artificial Sequence: Synthetic oligonucleotide
ugagaacuauaacugccag

SEQ ID NO: 442308 - RNA, 19 nt, Artificial Sequence
  Description of Artificial Sequence: Synthetic oligonucleotide
cuuauuacgaccagaauua

SEQ ID NO: 442309 - RNA, 19 nt, Artificial Sequence
  Description of Artificial Sequence: Synthetic oligonucleotide
agagugagaacuauaacug

SEQ ID NO: 442310 - RNA, 19 nt, Artificial Sequence
  Description of Artificial Sequence: Synthetic oligonucleotide
uguggaaucgaugacggga

SEQ ID NO: 442311 - RNA, 19 nt, Artificial Sequence
  Description of Artificial Sequence: Synthetic oligonucleotide
gagaacuauaacugccagg

SEQ ID NO: 442312 - RNA, 19 nt, Artificial Sequence
  Description of Artificial Sequence: Synthetic oligonucleotide
ucucauacguaauaucuaa

SEQ ID NO: 442313 - RNA, 19 nt, Artificial Sequence
  Description of Artificial Sequence: Synthetic oligonucleotide
uuaguuaaggcgccaagau

SEQ ID NO: 442314 - RNA, 19 nt, Artificial Sequence
  Description of Artificial Sequence: Synthetic oligonucleotide
agacucuuuccacugacag

SEQ ID NO: 442315 - RNA, 19 nt, Artificial Sequence
  Description of Artificial Sequence: Synthetic oligonucleotide
accgauaucucauacguaa

SEQ ID NO: 442316 - RNA, 19 nt, Artificial Sequence
  Description of Artificial Sequence: Synthetic oligonucleotide
uacgaccagaauuaggaga

SEQ ID NO: 442317 - RNA, 19 nt, Artificial Sequence
  Description of Artificial Sequence: Synthetic oligonucleotide
uaaaguuaaucuggaaggc

SEQ ID NO: 442318 - RNA, 19 nt, Artificial Sequence
  Description of Artificial Sequence: Synthetic oligonucleotide
aaaguuaaucuggaaggca

SEQ ID NO: 442319 - RNA, 19 nt, Artificial Sequence
  Description of Artificial Sequence: Synthetic oligonucleotide
acgaccagaauuaggagac

SEQ ID NO: 442320 - RNA, 19 nt, Artificial Sequence
  Description of Artificial Sequence: Synthetic oligonucleotide
aagacucguucugaauacc

SEQ ID NO: 442321 - RNA, 19 nt, Artificial Sequence
  Description of Artificial Sequence: Synthetic oligonucleotide
uaagacucguucugaauac

SEQ ID NO: 442322 - RNA, 19 nt, Artificial Sequence
  Description of Artificial Sequence: Synthetic oligonucleotide
guucgagccaacauguagg

SEQ ID NO: 442323 - RNA, 19 nt, Artificial Sequence
  Description of Artificial Sequence: Synthetic oligonucleotide
aagacaaccaucgcugaga

SEQ ID NO: 442324 - RNA, 19 nt, Artificial Sequence
  Description of Artificial Sequence: Synthetic oligonucleotide
agagaccagacauaaggga

SEQ ID NO: 442325 - RNA, 19 nt, Artificial Sequence
  Description of Artificial Sequence: Synthetic oligonucleotide
acugccgaguuguagacca

SEQ ID NO: 442326 - RNA, 19 nt, Artificial Sequence
  Description of Artificial Sequence: Synthetic oligonucleotide
uuccaguacaggccgacug

SEQ ID NO: 442327 - RNA, 19 nt, Artificial Sequence
  Description of Artificial Sequence: Synthetic oligonucleotide
ugucgguacagagacgcgg

SEQ ID NO: 442328 - RNA, 19 nt, Artificial Sequence
  Description of Artificial Sequence: Synthetic oligonucleotide
ugaaacgguugccucuucc

SEQ ID NO: 442329 - RNA, 19 nt, Artificial Sequence
  Description of Artificial Sequence: Synthetic oligonucleotide
gaauuaggagacuccccag

SEQ ID NO: 442330 - RNA, 19 nt, Artificial Sequence
  Description of Artificial Sequence: Synthetic oligonucleotide
aguuaaggcgccaagauuu

SEQ ID NO: 442331 - RNA, 19 nt, Artificial Sequence
  Description of Artificial Sequence: Synthetic oligonucleotide
ugcagagcaauucuuccaa

SEQ ID NO: 442332 - RNA, 19 nt, Artificial Sequence
  Description of Artificial Sequence: Synthetic oligonucleotide
uugaucggacgucugcugc

SEQ ID NO: 442333 - RNA, 19 nt, Artificial Sequence
  Description of Artificial Sequence: Synthetic oligonucleotide
aucgccuccaccgauaucu

SEQ ID NO: 442334 - RNA, 19 nt, Artificial Sequence
  Description of Artificial Sequence: Synthetic oligonucleotide
uguaggggagacagggacc

SEQ ID NO: 442335 - RNA, 19 nt, Artificial Sequence
  Description of Artificial Sequence: Synthetic oligonucleotide
uuacgaccagaauuaggag

SEQ ID NO: 442336 - RNA, 19 nt, Artificial Sequence
  Description of Artificial Sequence: Synthetic oligonucleotide
uuccguaaggaucaacaau

SEQ ID NO: 442337 - RNA, 19 nt, Artificial Sequence
  Description of Artificial Sequence: Synthetic oligonucleotide
aaacaaccugugucagcgg

SEQ ID NO: 442338 - RNA, 19 nt, Artificial Sequence
  Description of Artificial Sequence: Synthetic oligonucleotide
cucauacguaauaucuaag

SEQ ID NO: 442339 - RNA, 19 nt, Artificial Sequence
  Description of Artificial Sequence: Synthetic oligonucleotide
gugauuaacugcaccaagc

SEQ ID NO: 442340 - RNA, 19 nt, Artificial Sequence
  Description of Artificial Sequence: Synthetic oligonucleotide
agaggucccguuuguagag

SEQ ID NO: 442341 - RNA, 19 nt, Artificial Sequence
  Description of Artificial Sequence: Synthetic oligonucleotide
guaugguucuuauuacgac

SEQ ID NO: 442342 - RNA, 19 nt, Artificial Sequence
  Description of Artificial Sequence: Synthetic oligonucleotide
ugcuugaucggacgucugc

SEQ ID NO: 442343 - RNA, 19 nt, Artificial Sequence
  Description of Artificial Sequence: Synthetic oligonucleotide
uuauuacgaccagaauuag

SEQ ID NO: 442344 - RNA, 19 nt, Artificial Sequence
  Description of Artificial Sequence: Synthetic oligonucleotide
ucuccauaucuguucgagc

SEQ ID NO: 442345 - RNA, 19 nt, Artificial Sequence
  Description of Artificial Sequence: Synthetic oligonucleotide
aaacgguugccucuuccaa

SEQ ID NO: 442346 - RNA, 19 nt, Artificial Sequence
  Description of Artificial Sequence: Synthetic oligonucleotide
cgagccaacauguaggucc

SEQ ID NO: 442347 - RNA, 19 nt, Artificial Sequence
  Description of Artificial Sequence: Synthetic oligonucleotide
uuucaaccaaagacuugca

SEQ ID NO: 442348 - RNA, 19 nt, Artificial Sequence
  Description of Artificial Sequence: Synthetic oligonucleotide
uaucuguucgagccaacau

SEQ ID NO: 442349 - RNA, 19 nt, Artificial Sequence
  Description of Artificial Sequence: Synthetic oligonucleotide
uacuccugacgccagucca

SEQ ID NO: 442350 - RNA, 19 nt, Artificial Sequence
  Description of Artificial Sequence: Synthetic oligonucleotide
gaaacgguugccucuucca

SEQ ID NO: 442351 - RNA, 19 nt, Artificial Sequence
  Description of Artificial Sequence: Synthetic oligonucleotide
cauguagguccugacauug

SEQ ID NO: 442352 - RNA, 19 nt, Artificial Sequence
  Description of Artificial Sequence: Synthetic oligonucleotide
caacuaguccucacauggg

SEQ ID NO: 442353 - RNA, 19 nt, Artificial Sequence
  Description of Artificial Sequence: Synthetic oligonucleotide
gggucguuuucagagaugg

SEQ ID NO: 442354 - RNA, 19 nt, Artificial Sequence
  Description of Artificial Sequence: Synthetic oligonucleotide
gaacuauaacugccaggag

SEQ ID NO: 442355 - RNA, 19 nt, Artificial Sequence
  Description of Artificial Sequence: Synthetic oligonucleotide
uucgagccaacauguaggu

SEQ ID NO: 442356 - RNA, 19 nt, Artificial Sequence
  Description of Artificial Sequence: Synthetic oligonucleotide
gaugaguccggaauugcuc

SEQ ID NO: 442357 - RNA, 19 nt, Artificial Sequence
  Description of Artificial Sequence: Synthetic oligonucleotide
uuaaucuggaaggcaugug

SEQ ID NO: 442358 - RNA, 19 nt, Artificial Sequence
  Description of Artificial Sequence: Synthetic oligonucleotide
augguucuuauuacgacca

SEQ ID NO: 442359 - RNA, 19 nt, Artificial Sequence
  Description of Artificial Sequence: Synthetic oligonucleotide
aucaaauacuugugacuga

SEQ ID NO: 442360 - RNA, 19 nt, Artificial Sequence
  Description of Artificial Sequence: Synthetic oligonucleotide
acgggaaaggacugcuguc

SEQ ID NO: 442361 - RNA, 19 nt, Artificial Sequence
  Description of Artificial Sequence: Synthetic oligonucleotide
guucuuauuacgaccagaa

SEQ ID NO: 442362 - RNA, 19 nt, Artificial Sequence
  Description of Artificial Sequence: Synthetic oligonucleotide
ugucugccaaaugaagaug

SEQ ID NO: 442363 - RNA, 19 nt, Artificial Sequence
  Description of Artificial Sequence: Synthetic oligonucleotide
acgguugccucuuccaaca

SEQ ID NO: 442364 - RNA, 19 nt, Artificial Sequence
  Description of Artificial Sequence: Synthetic oligonucleotide
gcauguggaaucgaugacg

SEQ ID NO: 442365 - RNA, 19 nt, Artificial Sequence
  Description of Artificial Sequence: Synthetic oligonucleotide
ugguucuuauuacgaccag

SEQ ID NO: 442366 - RNA, 19 nt, Artificial Sequence
  Description of Artificial Sequence: Synthetic oligonucleotide
aaggggucguuuucagaga

SEQ ID NO: 442367 - RNA, 19 nt, Artificial Sequence
  Description of Artificial Sequence: Synthetic oligonucleotide
  modified_base (4)..(4): a, c, u, g, unknown or other
gaancgggagcgcgggcgc

SEQ ID NO: 442368 - RNA, 19 nt, Artificial Sequence
  Description of Artificial Sequence: Synthetic oligonucleotide
cuguuaaaguuaaucugga

SEQ ID NO: 442369 - RNA, 19 nt, Artificial Sequence
  Description of Artificial Sequence: Synthetic oligonucleotide
agaguguacaagagcagug

SEQ ID NO: 442370 - RNA, 19 nt, Artificial Sequence
  Description of Artificial Sequence: Synthetic oligonucleotide
ugacugaugcucugucgca

SEQ ID NO: 442371 - RNA, 19 nt, Artificial Sequence
  Description of Artificial Sequence: Synthetic oligonucleotide
gcauauaccaaguuggggu

SEQ ID NO: 442372 - RNA, 19 nt, Artificial Sequence
  Description of Artificial Sequence: Synthetic oligonucleotide
ugucuuguguguucuuaaa

SEQ ID NO: 442373 - RNA, 19 nt, Artificial Sequence
  Description of Artificial Sequence: Synthetic oligonucleotide
ccggaauugcucaaagagg

SEQ ID NO: 442374 - RNA, 19 nt, Artificial Sequence
  Description of Artificial Sequence: Synthetic oligonucleotide
gauaucucauacguaauau

SEQ ID NO: 442375 - RNA, 19 nt, Artificial Sequence
  Description of Artificial Sequence: Synthetic oligonucleotide
uauaccaaguugggguugu

SEQ ID NO: 442376 - RNA, 19 nt, Artificial Sequence
  Description of Artificial Sequence: Synthetic oligonucleotide
cuugaucggacgucugcug

SEQ ID NO: 442377 - RNA, 19 nt, Artificial Sequence
  Description of Artificial Sequence: Synthetic oligonucleotide
cuuaguuaaggcgccaaga

SEQ ID NO: 442378 - RNA, 19 nt, Artificial Sequence
  Description of Artificial Sequence: Synthetic oligonucleotide
caguacugcugguuggcgc

SEQ ID NO: 442379 - RNA, 19 nt, Artificial Sequence
  Description of Artificial Sequence: Synthetic oligonucleotide
ugugucuggugcauccguc

SEQ ID NO: 442380 - RNA, 19 nt, Artificial Sequence
  Description of Artificial Sequence: Synthetic oligonucleotide
  modified_base (7)..(7): a, c, u, g, unknown or other
agggaancgggagcgcggg

SEQ ID NO: 442381 - RNA, 19 nt, Artificial Sequence
  Description of Artificial Sequence: Synthetic oligonucleotide
uuaaggcgccaagauuucc

SEQ ID NO: 442382 - RNA, 19 nt, Artificial Sequence
  Description of Artificial Sequence: Synthetic oligonucleotide
aagcugccaaacaauuugu

SEQ ID NO: 442383 - RNA, 19 nt, Artificial Sequence
  Description of Artificial Sequence: Synthetic oligonucleotide
gucgguacagagacgcggg

SEQ ID NO: 442384 - RNA, 19 nt, Artificial Sequence
  Description of Artificial Sequence: Synthetic oligonucleotide
agccucgagcugaagaagg

SEQ ID NO: 442385 - RNA, 19 nt, Artificial Sequence
  Description of Artificial Sequence: Synthetic oligonucleotide
ucucuaguccuggucauau

SEQ ID NO: 442386 - RNA, 19 nt, Artificial Sequence
  Description of Artificial Sequence: Synthetic oligonucleotide
auaucuguucgagccaaca

SEQ ID NO: 442387 - RNA, 19 nt, Artificial Sequence
  Description of Artificial Sequence: Synthetic oligonucleotide
aguuaaucuggaaggcaug

SEQ ID NO: 442388 - RNA, 19 nt, Artificial Sequence
  Description of Artificial Sequence: Synthetic oligonucleotide
uccucacaugggcaugccc

SEQ ID NO: 442389 - RNA, 19 nt, Artificial Sequence
  Description of Artificial Sequence: Synthetic oligonucleotide
aggcauauaccaaguuggg

SEQ ID NO: 442390 - RNA, 19 nt, Artificial Sequence
  Description of Artificial Sequence: Synthetic oligonucleotide
aguuguaaaguaagguuuu

SEQ ID NO: 442391 - RNA, 19 nt, Artificial Sequence
  Description of Artificial Sequence: Synthetic oligonucleotide
ugaucggacgucugcugcu

SEQ ID NO: 442392 - RNA, 19 nt, Artificial Sequence
  Description of Artificial Sequence: Synthetic oligonucleotide
ugacgggaaaggacugcug

SEQ ID NO: 442393 - RNA, 19 nt, Artificial Sequence
  Description of Artificial Sequence: Synthetic oligonucleotide
gggccauauauacaugaug

SEQ ID NO: 442394 - RNA, 19 nt, Artificial Sequence
  Description of Artificial Sequence: Synthetic oligonucleotide
  modified_base (8)..(8): a, c, u, g, unknown or other
cagggaancgggagcgcgg

SEQ ID NO: 442395 - RNA, 19 nt, Artificial Sequence
  Description of Artificial Sequence: Synthetic oligonucleotide
aauuugugugcagguacuu

SEQ ID NO: 442396 - RNA, 19 nt, Artificial Sequence
  Description of Artificial Sequence: Synthetic oligonucleotide
ccagacauaagggaugaag

SEQ ID NO: 442397 - RNA, 19 nt, Artificial Sequence
  Description of Artificial Sequence: Synthetic oligonucleotide
  modified_base (5)..(5): a, c, u, g, unknown or other
ggaancgggagcgcgggcg

SEQ ID NO: 442398 - RNA, 19 nt, Artificial Sequence
  Description of Artificial Sequence: Synthetic oligonucleotide
aggcaacuaguccucacau

SEQ ID NO: 442399 - RNA, 19 nt, Artificial Sequence
  Description of Artificial Sequence: Synthetic oligonucleotide
agaaggggucguuuucaga

SEQ ID NO: 442400 - RNA, 19 nt, Artificial Sequence
  Description of Artificial Sequence: Synthetic oligonucleotide
ugugucagcggcgcggacu

SEQ ID NO: 442401 - RNA, 19 nt, Artificial Sequence
  Description of Artificial Sequence: Synthetic oligonucleotide
gugagaacuauaacugcca

SEQ ID NO: 442402 - RNA, 19 nt, Artificial Sequence
  Description of Artificial Sequence: Synthetic oligonucleotide
gagagaccgaaacugugcu

SEQ ID NO: 442403 - RNA, 19 nt, Artificial Sequence
  Description of Artificial Sequence: Synthetic oligonucleotide
gacgggaaaggacugcugu

SEQ ID NO: 442404 - RNA, 19 nt, Artificial Sequence
  Description of Artificial Sequence: Synthetic oligonucleotide
uguugcuugaucggacguc

SEQ ID NO: 442405 - RNA, 19 nt, Artificial Sequence
  Description of Artificial Sequence: Synthetic oligonucleotide
ggaaucgaugacgggaaag

SEQ ID NO: 442406 - RNA, 19 nt, Artificial Sequence
  Description of Artificial Sequence: Synthetic oligonucleotide
ggagagaccgaaacugugc

SEQ ID NO: 442407 - RNA, 19 nt, Artificial Sequence
  Description of Artificial Sequence: Synthetic oligonucleotide
aguaagguuuucacaaguu

SEQ ID NO: 442408 - RNA, 19 nt, Artificial Sequence
  Description of Artificial Sequence: Synthetic oligonucleotide
  modified_base (2)..(2): a, c, u, g, unknown or other
ancgggagcgcgggcgcac

SEQ ID NO: 442409 - RNA, 19 nt, Artificial Sequence
  Description of Artificial Sequence: Synthetic oligonucleotide
ugacugcggagggaaaaca

SEQ ID NO: 442410 - RNA, 19 nt, Artificial Sequence
  Description of Artificial Sequence: Synthetic oligonucleotide
agacucguucugaauacca

SEQ ID NO: 442411 - RNA, 19 nt, Artificial Sequence
  Description of Artificial Sequence: Synthetic oligonucleotide
guacaggccgacugccgag

SEQ ID NO: 442412 - RNA, 19 nt, Artificial Sequence
  Description of Artificial Sequence: Synthetic oligonucleotide
gagaccagacauaagggau

SEQ ID NO: 442413 - RNA, 19 nt, Artificial Sequence
  Description of Artificial Sequence: Synthetic oligonucleotide
uugcuugaucggacgucug

SEQ ID NO: 442414 - RNA, 19 nt, Artificial Sequence
  Description of Artificial Sequence: Synthetic oligonucleotide
caucgcugagaucgccucc

SEQ ID NO: 442415 - RNA, 19 nt, Artificial Sequence
  Description of Artificial Sequence: Synthetic oligonucleotide
cauaucuguucgagccaac

SEQ ID NO: 442416 - RNA, 19 nt, Artificial Sequence
  Description of Artificial Sequence: Synthetic oligonucleotide
ugccugagagcuucuucaa

SEQ ID NO: 442417 - RNA, 19 nt, Artificial Sequence
  Description of Artificial Sequence: Synthetic oligonucleotide
uugucaggcaggaguugau

SEQ ID NO: 442418 - RNA, 19 nt, Artificial Sequence
  Description of Artificial Sequence: Synthetic oligonucleotide
ggaccuauugaagccauca

SEQ ID NO: 442419 - RNA, 19 nt, Artificial Sequence
  Description of Artificial Sequence: Synthetic oligonucleotide
ugcuauucgcucccaucuu

SEQ ID NO: 442420 - RNA, 19 nt, Artificial Sequence
  Description of Artificial Sequence: Synthetic oligonucleotide
agggaaaacauggguucca

SEQ ID NO: 442421 - RNA, 19 nt, Artificial Sequence
  Description of Artificial Sequence: Synthetic oligonucleotide
aucucauacguaauaucua

SEQ ID NO: 442422 - RNA, 19 nt, Artificial Sequence
  Description of Artificial Sequence: Synthetic oligonucleotide
gucgcuacuccugacgcca

SEQ ID NO: 442423 - RNA, 19 nt, Artificial Sequence
  Description of Artificial Sequence: Synthetic oligonucleotide
ugaguccggaauugcucaa

SEQ ID NO: 442424 - RNA, 19 nt, Artificial Sequence
  Description of Artificial Sequence: Synthetic oligonucleotide
ugccgaguuguagaccaga

SEQ ID NO: 442425 - RNA, 19 nt, Artificial Sequence
  Description of Artificial Sequence: Synthetic oligonucleotide
agaucgccuccaccgauau

SEQ ID NO: 442426 - RNA, 19 nt, Artificial Sequence
  Description of Artificial Sequence: Synthetic oligonucleotide
gaccagucgcuacuccuga

SEQ ID NO: 442427 - RNA, 19 nt, Artificial Sequence
  Description of Artificial Sequence: Synthetic oligonucleotide
ggcaacuaguccucacaug

SEQ ID NO: 442428 - RNA, 19 nt, Artificial Sequence
  Description of Artificial Sequence: Synthetic oligonucleotide
gucgguguguccugcuuca

SEQ ID NO: 442429 - RNA, 19 nt, Artificial Sequence
  Description of Artificial Sequence: Synthetic oligonucleotide
cugacugcggagggaaaac

SEQ ID NO: 442430 - RNA, 19 nt, Artificial Sequence
  Description of Artificial Sequence: Synthetic oligonucleotide
auuguauuguaugguucuu

SEQ ID NO: 442431 - RNA, 19 nt, Artificial Sequence
  Description of Artificial Sequence: Synthetic oligonucleotide
caaccaucgcugagaucgc

SEQ ID NO: 442432 - RNA, 19 nt, Artificial Sequence
  Description of Artificial Sequence: Synthetic oligonucleotide
cugcuauucgcucccaucu

SEQ ID NO: 442433 - RNA, 19 nt, Artificial Sequence
  Description of Artificial Sequence: Synthetic oligonucleotide
ggagagguagcugcuuugc

SEQ ID NO: 442434 - RNA, 19 nt, Artificial Sequence
  Description of Artificial Sequence: Synthetic oligonucleotide
ucgcuacuccugacgccag

SEQ ID NO: 442435 - RNA, 19 nt, Artificial Sequence
  Description of Artificial Sequence: Synthetic oligonucleotide
guuaaggcgccaagauuuc

SEQ ID NO: 442436 - RNA, 19 nt, Artificial Sequence
  Description of Artificial Sequence: Synthetic oligonucleotide
gcuauucgcucccaucuuc

SEQ ID NO: 442437 - RNA, 19 nt, Artificial Sequence
  Description of Artificial Sequence: Synthetic oligonucleotide
ucggacgucugcugcucac

SEQ ID NO: 442438 - RNA, 19 nt, Artificial Sequence
  Description of Artificial Sequence: Synthetic oligonucleotide
gacugccgaguuguagacc

SEQ ID NO: 442439 - RNA, 19 nt, Artificial Sequence
  Description of Artificial Sequence: Synthetic oligonucleotide
ccaaacaaccugugucagc

SEQ ID NO: 442440 - RNA, 19 nt, Artificial Sequence
  Description of Artificial Sequence: Synthetic oligonucleotide
uggaccuauugaagccauc

SEQ ID NO: 442441 - RNA, 19 nt, Artificial Sequence
  Description of Artificial Sequence: Synthetic oligonucleotide
gguucuuauuacgaccaga

SEQ ID NO: 442442 - RNA, 19 nt, Artificial Sequence
  Description of Artificial Sequence: Synthetic oligonucleotide
ggaacaucacuggaacuca

SEQ ID NO: 442443 - RNA, 19 nt, Artificial Sequence
  Description of Artificial Sequence: Synthetic oligonucleotide
acgccaguccauacaguag

SEQ ID NO: 442444 - RNA, 19 nt, Artificial Sequence
  Description of Artificial Sequence: Synthetic oligonucleotide
ccuuaguuaaggcgccaag

SEQ ID NO: 442445 - RNA, 19 nt, Artificial Sequence
  Description of Artificial Sequence: Synthetic oligonucleotide
guugcuugaucggacgucu

SEQ ID NO: 442446 - RNA, 19 nt, Artificial Sequence
  Description of Artificial Sequence: Synthetic oligonucleotide
ggugcauccgucagguuca

SEQ ID NO: 442447 - RNA, 19 nt, Artificial Sequence
  Description of Artificial Sequence: Synthetic oligonucleotide
cugcuugccccgccuagug

SEQ ID NO: 442448 - RNA, 19 nt, Artificial Sequence
  Description of Artificial Sequence: Synthetic oligonucleotide
uuucccguucgaggguugu

SEQ ID NO: 442449 - RNA, 19 nt, Artificial Sequence
  Description of Artificial Sequence: Synthetic oligonucleotide
cuauucgcucccaucuucu

SEQ ID NO: 442450 - RNA, 19 nt, Artificial Sequence
  Description of Artificial Sequence: Synthetic oligonucleotide
gauccucugggcggcguac

SEQ ID NO: 442451 - RNA, 19 nt, Artificial Sequence
  Description of Artificial Sequence: Synthetic oligonucleotide
uacaggccgacugccgagu

SEQ ID NO: 442452 - RNA, 19 nt, Artificial Sequence
  Description of Artificial Sequence: Synthetic oligonucleotide
ggcccgagugugcacgccg

SEQ ID NO: 442453 - RNA, 19 nt, Artificial Sequence
  Description of Artificial Sequence: Synthetic oligonucleotide
ucccguucgaggguuguuu

SEQ ID NO: 442454 - RNA, 19 nt, Artificial Sequence
  Description of Artificial Sequence: Synthetic oligonucleotide
augucgguacagagacgcg

SEQ ID NO: 442455 - RNA, 19 nt, Artificial Sequence
  Description of Artificial Sequence: Synthetic oligonucleotide
gacaaccaucgcugagauc

SEQ ID NO: 442456 - RNA, 19 nt, Artificial Sequence
  Description of Artificial Sequence: Synthetic oligonucleotide
gaucggacgucugcugcuc

SEQ ID NO: 442457 - RNA, 19 nt, Artificial Sequence
  Description of Artificial Sequence: Synthetic oligonucleotide
cauuaugugucugccaaau

SEQ ID NO: 442458 - RNA, 19 nt, Artificial Sequence
  Description of Artificial Sequence: Synthetic oligonucleotide
gcaugcccaccaaacaacc

SEQ ID NO: 442459 - RNA, 19 nt, Artificial Sequence
  Description of Artificial Sequence: Synthetic oligonucleotide
guaggggagacagggaccu

SEQ ID NO: 442460 - RNA, 19 nt, Artificial Sequence
  Description of Artificial Sequence: Synthetic oligonucleotide
ugggcggcguacugaugga

SEQ ID NO: 442461 - RNA, 19 nt, Artificial Sequence
  Description of Artificial Sequence: Synthetic oligonucleotide
aucggacgucugcugcuca

SEQ ID NO: 442462 - RNA, 19 nt, Artificial Sequence
  Description of Artificial Sequence: Synthetic oligonucleotide
  modified_base (3)..(3): a, c, u, g, unknown or other
aancgggagcgcgggcgca

SEQ ID NO: 442463 - RNA, 19 nt, Artificial Sequence
  Description of Artificial Sequence: Synthetic oligonucleotide
gagugugcacgccgccuca

SEQ ID NO: 442464 - RNA, 19 nt, Artificial Sequence
  Description of Artificial Sequence: Synthetic oligonucleotide
accaucgcugagaucgccu

SEQ ID NO: 442465 - RNA, 19 nt, Artificial Sequence
  Description of Artificial Sequence: Synthetic oligonucleotide
ugccccgccuagugugaag

SEQ ID NO: 442466 - RNA, 19 nt, Artificial Sequence
  Description of Artificial Sequence: Synthetic oligonucleotide
aggcgccaagauuucccgu

SEQ ID NO: 442467 - RNA, 19 nt, Artificial Sequence
  Description of Artificial Sequence: Synthetic oligonucleotide
cugagaucgccuccaccga

SEQ ID NO: 442468 - RNA, 19 nt, Artificial Sequence
  Description of Artificial Sequence: Synthetic oligonucleotide
ccugaaaugaaggaugagu

SEQ ID NO: 442469 - RNA, 19 nt, Artificial Sequence
  Description of Artificial Sequence: Synthetic oligonucleotide
auggaccuauugaagccau

SEQ ID NO: 442470 - RNA, 19 nt, Artificial Sequence
  Description of Artificial Sequence: Synthetic oligonucleotide
ucgguguguccugcuucag

SEQ ID NO: 442471 - RNA, 19 nt, Artificial Sequence
  Description of Artificial Sequence: Synthetic oligonucleotide
ucgagccaacauguagguc

SEQ ID NO: 442472 - RNA, 19 nt, Artificial Sequence
  Description of Artificial Sequence: Synthetic oligonucleotide
ggaauugcucaaagagguc

SEQ ID NO: 442473 - RNA, 19 nt, Artificial Sequence
  Description of Artificial Sequence: Synthetic oligonucleotide
ucgccuccaccgauaucuc

SEQ ID NO: 442474 - RNA, 19 nt, Artificial Sequence
  Description of Artificial Sequence: Synthetic oligonucleotide
guguugcuugaucggacgu

SEQ ID NO: 442475 - RNA, 19 nt, Artificial Sequence
  Description of Artificial Sequence: Synthetic oligonucleotide
ccgacugccgaguuguaga

SEQ ID NO: 442476 - RNA, 19 nt, Artificial Sequence
  Description of Artificial Sequence: Synthetic oligonucleotide
accuugcaucaaauacuug

SEQ ID NO: 442477 - RNA, 19 nt, Artificial Sequence
  Description of Artificial Sequence: Synthetic oligonucleotide
gaguccggaauugcucaaa

SEQ ID NO: 442478 - RNA, 19 nt, Artificial Sequence
  Description of Artificial Sequence: Synthetic oligonucleotide
auuucccguucgaggguug

SEQ ID NO: 442479 - RNA, 19 nt, Artificial Sequence
  Description of Artificial Sequence: Synthetic oligonucleotide
cugaaacgguugccucuuc

SEQ ID NO: 442480 - RNA, 19 nt, Artificial Sequence
  Description of Artificial Sequence: Synthetic oligonucleotide
gacugcggagggaaaacau

SEQ ID NO: 442481 - RNA, 19 nt, Artificial Sequence
  Description of Artificial Sequence: Synthetic oligonucleotide
gauuucccguucgaggguu

SEQ ID NO: 442482 - RNA, 19 nt, Artificial Sequence
  Description of Artificial Sequence: Synthetic oligonucleotide
caugcccaccaaacaaccu

SEQ ID NO: 442483 - RNA, 19 nt, Artificial Sequence
  Description of Artificial Sequence: Synthetic oligonucleotide
caccgauaucucauacgua

SEQ ID NO: 442484 - RNA, 19 nt, Artificial Sequence
  Description of Artificial Sequence: Synthetic oligonucleotide
guacaagagcaguguugcu

SEQ ID NO: 442485 - RNA, 19 nt, Artificial Sequence
  Description of Artificial Sequence: Synthetic oligonucleotide
gcggagggaaaacaugggu

SEQ ID NO: 442486 - RNA, 19 nt, Artificial Sequence
  Description of Artificial Sequence: Synthetic oligonucleotide
cgaugacgggaaaggacug

SEQ ID NO: 442487 - RNA, 19 nt, Artificial Sequence
  Description of Artificial Sequence: Synthetic oligonucleotide
gugggcgucgguguguccu

SEQ ID NO: 442488 - RNA, 19 nt, Artificial Sequence
  Description of Artificial Sequence: Synthetic oligonucleotide
  modified_base (6)..(6): a, c, u, g, unknown or other
gggaancgggagcgcgggc

SEQ ID NO: 442489 - RNA, 19 nt, Artificial Sequence
  Description of Artificial Sequence: Synthetic oligonucleotide
cuguucgagccaacaugua

SEQ ID NO: 442490 - RNA, 19 nt, Artificial Sequence
  Description of Artificial Sequence: Synthetic oligonucleotide
cgauaucucauacguaaua

SEQ ID NO: 442491 - RNA, 19 nt, Artificial Sequence
  Description of Artificial Sequence: Synthetic oligonucleotide
guggagugucagugauuaa

SEQ ID NO: 442492 - RNA, 19 nt, Artificial Sequence
  Description of Artificial Sequence: Synthetic oligonucleotide
ggcggcguacugauggaga

SEQ ID NO: 442493 - RNA, 19 nt, Artificial Sequence
  Description of Artificial Sequence: Synthetic oligonucleotide
gcuugaucggacgucugcu

SEQ ID NO: 442494 - RNA, 19 nt, Artificial Sequence
  Description of Artificial Sequence: Synthetic oligonucleotide
accagacauaagggaugaa

SEQ ID NO: 442495 - RNA, 19 nt, Artificial Sequence
  Description of Artificial Sequence: Synthetic oligonucleotide
ggcgccaagauuucccguu

SEQ ID NO: 442496 - RNA, 19 nt, Artificial Sequence
  Description of Artificial Sequence: Synthetic oligonucleotide
gggcggcguacugauggag

SEQ ID NO: 442497 - RNA, 19 nt, Artificial Sequence
  Description of Artificial Sequence: Synthetic oligonucleotide
gucucuaguccuggucaua

SEQ ID NO: 442498 - RNA, 19 nt, Artificial Sequence
  Description of Artificial Sequence: Synthetic oligonucleotide
ggucguuuucagagaugga

SEQ ID NO: 442499 - RNA, 19 nt, Artificial Sequence
  Description of Artificial Sequence: Synthetic oligonucleotide
gccucgagcugaagaagga

SEQ ID NO: 442500 - RNA, 19 nt, Artificial Sequence
  Description of Artificial Sequence: Synthetic oligonucleotide
cgagugugcacgccgccuc

SEQ ID NO: 442501 - RNA, 19 nt, Artificial Sequence
  Description of Artificial Sequence: Synthetic oligonucleotide
gccccgccuagugugaaga

SEQ ID NO: 442502 - RNA, 19 nt, Artificial Sequence
  Description of Artificial Sequence: Synthetic oligonucleotide
cuccugacgccaguccaua

SEQ ID NO: 442503 - RNA, 19 nt, Artificial Sequence
  Description of Artificial Sequence: Synthetic oligonucleotide
cagcggcccgagugugcac

SEQ ID NO: 442504 - RNA, 19 nt, Artificial Sequence
  Description of Artificial Sequence: Synthetic oligonucleotide
gcguacugauggagagacc

SEQ ID NO: 442505 - RNA, 19 nt, Artificial Sequence
  Description of Artificial Sequence: Synthetic oligonucleotide
gugcauccgucagguucac

SEQ ID NO: 442506 - RNA, 19 nt, Artificial Sequence
  Description of Artificial Sequence: Synthetic oligonucleotide
gggagcgcgggcgcacagc

SEQ ID NO: 442507 - RNA, 19 nt, Artificial Sequence
  Description of Artificial Sequence: Synthetic oligonucleotide
ccguaaggaucaacaauau

SEQ ID NO: 442508 - RNA, 19 nt, Artificial Sequence
  Description of Artificial Sequence: Synthetic oligonucleotide
uuccgccgcucagcggcuc

SEQ ID NO: 442509 - RNA, 19 nt, Artificial Sequence
  Description of Artificial Sequence: Synthetic oligonucleotide
acuccgugccugagagcuu

SEQ ID NO: 442510 - RNA, 19 nt, Artificial Sequence
  Description of Artificial Sequence: Synthetic oligonucleotide
ccuccaccgauaucucaua

SEQ ID NO: 442511 - RNA, 19 nt, Artificial Sequence
  Description of Artificial Sequence: Synthetic oligonucleotide
gccgaaagccugagcucuc

SEQ ID NO: 442512 - RNA, 19 nt, Artificial Sequence
  Description of Artificial Sequence: Synthetic oligonucleotide
gggcgucgguguguccugc

SEQ ID NO: 442513 - RNA, 19 nt, Artificial Sequence
  Description of Artificial Sequence: Synthetic oligonucleotide
cugcugcuauucgcuccca

SEQ ID NO: 442514 - RNA, 19 nt, Artificial Sequence
  Description of Artificial Sequence: Synthetic oligonucleotide
ggcgucgguguguccugcu

SEQ ID NO: 442515 - RNA, 19 nt, Artificial Sequence
  Description of Artificial Sequence: Synthetic oligonucleotide
guuccgccgcucagcggcu

SEQ ID NO: 442516 - RNA, 19 nt, Artificial Sequence
  Description of Artificial Sequence: Synthetic oligonucleotide
cccguucgaggguuguuuu

SEQ ID NO: 442517 - RNA, 19 nt, Artificial Sequence
  Description of Artificial Sequence: Synthetic oligonucleotide
cuggugcauccgucagguu

SEQ ID NO: 442518 - RNA, 19 nt, Artificial Sequence
  Description of Artificial Sequence: Synthetic oligonucleotide
gcgucgguguguccugcuu

SEQ ID NO: 442519 - RNA, 19 nt, Artificial Sequence
  Description of Artificial Sequence: Synthetic oligonucleotide
cggcccgagugugcacgcc

SEQ ID NO: 442520 - RNA, 19 nt, Artificial Sequence
  Description of Artificial Sequence: Synthetic oligonucleotide
cgaccagaauuaggagacu

SEQ ID NO: 442521 - RNA, 19 nt, Artificial Sequence
  Description of Artificial Sequence: Synthetic oligonucleotide
  modified_base (1)..(1): a, c, u, g, unknown or other
ncgggagcgcgggcgcaca

SEQ ID NO: 442522 - RNA, 19 nt, Artificial Sequence
  Description of Artificial Sequence: Synthetic oligonucleotide
aauaggacagcuuacauag

SEQ ID NO: 442523 - RNA, 19 nt, Artificial Sequence
  Description of Artificial Sequence: Synthetic oligonucleotide
aauuagaaacccuaguuuc

SEQ ID NO: 442524 - RNA, 19 nt, Artificial Sequence
  Description of Artificial Sequence: Synthetic oligonucleotide
agauaaaguucacagaugc

SEQ ID NO: 442525 - RNA, 19 nt, Artificial Sequence
  Description of Artificial Sequence: Synthetic oligonucleotide
uuuauaauaauaaaugcau

SEQ ID NO: 442526 - RNA, 19 nt, Artificial Sequence
  Description of Artificial Sequence: Synthetic oligonucleotide
aguuuaaggagucacacuc

SEQ ID NO: 442527 - RNA, 19 nt, Artificial Sequence
  Description of Artificial Sequence: Synthetic oligonucleotide
guuauuuaguccaugaugg

SEQ ID NO: 442528 - RNA, 19 nt, Artificial Sequence
  Description of Artificial Sequence: Synthetic oligonucleotide
aagauaagaagauauucug

SEQ ID NO: 442529 - RNA, 19 nt, Artificial Sequence
  Description of Artificial Sequence: Synthetic oligonucleotide
aaauugauggcguagucug

SEQ ID NO: 442530 - RNA, 19 nt, Artificial Sequence
  Description of Artificial Sequence: Synthetic oligonucleotide
agugcaguaaaucacagug

SEQ ID NO: 442531 - RNA, 19 nt, Artificial Sequence
  Description of Artificial Sequence: Synthetic oligonucleotide
uuguugacaaguuaguucc

SEQ ID NO: 442532 - RNA, 19 nt, Artificial Sequence
  Description of Artificial Sequence: Synthetic oligonucleotide
acugcuucgggcuaaagac

SEQ ID NO: 442533 - RNA, 19 nt, Artificial Sequence
  Description of Artificial Sequence: Synthetic oligonucleotide
aacagaaugcuguguauac

SEQ ID NO: 442534 - RNA, 19 nt, Artificial Sequence
  Description of Artificial Sequence: Synthetic oligonucleotide
acaucacuaacaucaaugc

SEQ ID NO: 442535 - RNA, 19 nt, Artificial Sequence
  Description of Artificial Sequence: Synthetic oligonucleotide
uauacugcaauuaagcaau

SEQ ID NO: 442536 - RNA, 19 nt, Artificial Sequence
  Description of Artificial Sequence: Synthetic oligonucleotide
uguuugguauaucucaagg

SEQ ID NO: 442537 - RNA, 19 nt, Artificial Sequence
  Description of Artificial Sequence: Synthetic oligonucleotide
aaagcuuguaaguccauag

SEQ ID NO: 442538 - RNA, 19 nt, Artificial Sequence
  Description of Artificial Sequence: Synthetic oligonucleotide
uuugguauaucucaaggcu

SEQ ID NO: 442539 - RNA, 19 nt, Artificial Sequence
  Description of Artificial Sequence: Synthetic oligonucleotide
auaaacuacugcuucgggc

SEQ ID NO: 442540 - RNA, 19 nt, Artificial Sequence
  Description of Artificial Sequence: Synthetic oligonucleotide
agaguuaugagcuaucuga

SEQ ID NO: 442541 - RNA, 19 nt, Artificial Sequence
  Description of Artificial Sequence: Synthetic oligonucleotide
uagacaguugcccuuaagg

SEQ ID NO: 442542 - RNA, 19 nt, Artificial Sequence
  Description of Artificial Sequence: Synthetic oligonucleotide
cuugguuucugucagaccc

SEQ ID NO: 442543 - RNA, 19 nt, Artificial Sequence
  Description of Artificial Sequence: Synthetic oligonucleotide
acugcaauuaagcaauagg

SEQ ID NO: 442544 - RNA, 19 nt, Artificial Sequence
  Description of Artificial Sequence: Synthetic oligonucleotide
uuguauaaggaaucaagag

SEQ ID NO: 442545 - RNA, 19 nt, Artificial Sequence
  Description of Artificial Sequence: Synthetic oligonucleotide
aaaagugaaaacagucccc

SEQ ID NO: 442546 - RNA, 19 nt, Artificial Sequence
  Description of Artificial Sequence: Synthetic oligonucleotide
aguaaaucacagugaaagc

SEQ ID NO: 442547 - RNA, 19 nt, Artificial Sequence
  Description of Artificial Sequence: Synthetic oligonucleotide
aaauaugacaaacaauaua

SEQ ID NO: 442548 - RNA, 19 nt, Artificial Sequence
  Description of Artificial Sequence: Synthetic oligonucleotide
uauaucucaaggcuugaag

SEQ ID NO: 442549 - RNA, 19 nt, Artificial Sequence
  Description of Artificial Sequence: Synthetic oligonucleotide
cugaagaucauacucuugg

SEQ ID NO: 442550 - RNA, 19 nt, Artificial Sequence
  Description of Artificial Sequence: Synthetic oligonucleotide
uuagacuucuucuugaaaa

SEQ ID NO: 442551 - RNA, 19 nt, Artificial Sequence
  Description of Artificial Sequence: Synthetic oligonucleotide
aagauauucugguaaacaa

SEQ ID NO: 442552 - RNA, 19 nt, Artificial Sequence
  Description of Artificial Sequence: Synthetic oligonucleotide
uaagcaauaggacagcuua

SEQ ID NO: 442553 - RNA, 19 nt, Artificial Sequence
  Description of Artificial Sequence: Synthetic oligonucleotide
ugagcuaucugaaagccac

SEQ ID NO: 442554 - RNA, 19 nt, Artificial Sequence
  Description of Artificial Sequence: Synthetic oligonucleotide
uucguuccgauacagagca

SEQ ID NO: 442555 - RNA, 19 nt, Artificial Sequence
  Description of Artificial Sequence: Synthetic oligonucleotide
ugacuuuucaguaauguua

SEQ ID NO: 442556 - RNA, 19 nt, Artificial Sequence
  Description of Artificial Sequence: Synthetic oligonucleotide
aauaggguaggguggaaug

SEQ ID NO: 442557 - RNA, 19 nt, Artificial Sequence
  Description of Artificial Sequence: Synthetic oligonucleotide
ugcaauuaguuuuacuuug

SEQ ID NO: 442558 - RNA, 19 nt, Artificial Sequence
  Description of Artificial Sequence: Synthetic oligonucleotide
uuauacugcaauuaagcaa

SEQ ID NO: 442559 - RNA, 19 nt, Artificial Sequence
  Description of Artificial Sequence: Synthetic oligonucleotide
cauuaaagcuuguaagucc

SEQ ID NO: 442560 - RNA, 19 nt, Artificial Sequence
  Description of Artificial Sequence: Synthetic oligonucleotide
ggcaacuugacacagacag

SEQ ID NO: 442561 - RNA, 19 nt, Artificial Sequence
  Description of Artificial Sequence: Synthetic oligonucleotide
aauaaugucuccaauuuau

SEQ ID NO: 442562 - RNA, 19 nt, Artificial Sequence
  Description of Artificial Sequence: Synthetic oligonucleotide
caugcuacaggauuucucc

SEQ ID NO: 442563 - RNA, 19 nt, Artificial Sequence
  Description of Artificial Sequence: Synthetic oligonucleotide
ucaauuagaaacccuaguu

SEQ ID NO: 442564 - RNA, 19 nt, Artificial Sequence
  Description of Artificial Sequence: Synthetic oligonucleotide
uuuguugacaaguuaguuc

SEQ ID NO: 442565 - RNA, 19 nt, Artificial Sequence
  Description of Artificial Sequence: Synthetic oligonucleotide
aaaguguggguuuucauuu

SEQ ID NO: 442566 - RNA, 19 nt, Artificial Sequence
  Description of Artificial Sequence: Synthetic oligonucleotide
ugugucgagguuuagguac

SEQ ID NO: 442567 - RNA, 19 nt, Artificial Sequence
  Description of Artificial Sequence: Synthetic oligonucleotide
uccauuaaagcuuguaagu

SEQ ID NO: 442568 - RNA, 19 nt, Artificial Sequence
  Description of Artificial Sequence: Synthetic oligonucleotide
gauaaaauugauggcguag

SEQ ID NO: 442569 - RNA, 19 nt, Artificial Sequence
  Description of Artificial Sequence: Synthetic oligonucleotide
acguugucagcucagagag

SEQ ID NO: 442570 - RNA, 19 nt, Artificial Sequence
  Description of Artificial Sequence: Synthetic oligonucleotide
cuuguaaguccauagcggc

SEQ ID NO: 442571 - RNA, 19 nt, Artificial Sequence
  Description of Artificial Sequence: Synthetic oligonucleotide
uguuuuaaguccuuugauc

SEQ ID NO: 442572 - RNA, 19 nt, Artificial Sequence
  Description of Artificial Sequence: Synthetic oligonucleotide
uccauagcggcuuucaaca

SEQ ID NO: 442573 - RNA, 19 nt, Artificial Sequence
  Description of Artificial Sequence: Synthetic oligonucleotide
uugauaaaauugauggcgu

SEQ ID NO: 442574 - RNA, 19 nt, Artificial Sequence
  Description of Artificial Sequence: Synthetic oligonucleotide
uccgauacagagcagggca

SEQ ID NO: 442575 - RNA, 19 nt, Artificial Sequence
  Description of Artificial Sequence: Synthetic oligonucleotide
agaguuuaaggagucacac

SEQ ID NO: 442576 - RNA, 19 nt, Artificial Sequence
  Description of Artificial Sequence: Synthetic oligonucleotide
uauucugguaaacaagaaa

SEQ ID NO: 442577 - RNA, 19 nt, Artificial Sequence
  Description of Artificial Sequence: Synthetic oligonucleotide
aggagguaagacuagggag

SEQ ID NO: 442578 - RNA, 19 nt, Artificial Sequence
  Description of Artificial Sequence: Synthetic oligonucleotide
cuguggucagaguagagcg

SEQ ID NO: 442579 - RNA, 19 nt, Artificial Sequence
  Description of Artificial Sequence: Synthetic oligonucleotide
uguggaaagauaagaagau

SEQ ID NO: 442580 - RNA, 19 nt, Artificial Sequence
  Description of Artificial Sequence: Synthetic oligonucleotide
ucucaaggcuugaaggagg

SEQ ID NO: 442581 - RNA, 19 nt, Artificial Sequence
  Description of Artificial Sequence: Synthetic oligonucleotide
uuucuuauacugcaauuaa

SEQ ID NO: 442582 - RNA, 19 nt, Artificial Sequence
  Description of Artificial Sequence: Synthetic oligonucleotide
auaaaugcaucugaagaag

SEQ ID NO: 442583 - RNA, 19 nt, Artificial Sequence
  Description of Artificial Sequence: Synthetic oligonucleotide
aaaauugauggcguagucu

SEQ ID NO: 442584 - RNA, 19 nt, Artificial Sequence
  Description of Artificial Sequence: Synthetic oligonucleotide
aagucaucgacuccuccag

SEQ ID NO: 442585 - RNA, 19 nt, Artificial Sequence
  Description of Artificial Sequence: Synthetic oligonucleotide
uuaagcaugugaauguuuu

SEQ ID NO: 442586 - RNA, 19 nt, Artificial Sequence
  Description of Artificial Sequence: Synthetic oligonucleotide
acuuguauaaggaaucaag

SEQ ID NO: 442587 - RNA, 19 nt, Artificial Sequence
  Description of Artificial Sequence: Synthetic oligonucleotide
uggaguuacauuccuaaaa

SEQ ID NO: 442588 - RNA, 19 nt, Artificial Sequence
  Description of Artificial Sequence: Synthetic oligonucleotide
uaaugagugcugaggaugc

SEQ ID NO: 442589 - RNA, 19 nt, Artificial Sequence
  Description of Artificial Sequence: Synthetic oligonucleotide
agauaagaagauauucugg

SEQ ID NO: 442590 - RNA, 19 nt, Artificial Sequence
  Description of Artificial Sequence: Synthetic oligonucleotide
auauuuguuaaucuugaua

SEQ ID NO: 442591 - RNA, 19 nt, Artificial Sequence
  Description of Artificial Sequence: Synthetic oligonucleotide
guuugguauaucucaaggc

SEQ ID NO: 442592 - RNA, 19 nt, Artificial Sequence
  Description of Artificial Sequence: Synthetic oligonucleotide
uguuaaucuugauauuaga

SEQ ID NO: 442593 - RNA, 19 nt, Artificial Sequence
  Description of Artificial Sequence: Synthetic oligonucleotide
aaagcaagucaauuagaaa

SEQ ID NO: 442594 - RNA, 19 nt, Artificial Sequence
  Description of Artificial Sequence: Synthetic oligonucleotide
uuucaguggaguguuauca

SEQ ID NO: 442595 - RNA, 19 nt, Artificial Sequence
  Description of Artificial Sequence: Synthetic oligonucleotide
ucugguaucuuggggaagg

SEQ ID NO: 442596 - RNA, 19 nt, Artificial Sequence
  Description of Artificial Sequence: Synthetic oligonucleotide
auaucuuucgagaagacaa

SEQ ID NO: 442597 - RNA, 19 nt, Artificial Sequence
  Description of Artificial Sequence: Synthetic oligonucleotide
uuuagguacagucccugga

SEQ ID NO: 442598 - RNA, 19 nt, Artificial Sequence
  Description of Artificial Sequence: Synthetic oligonucleotide
agcggcauaaacuacugcu

SEQ ID NO: 442599 - RNA, 19 nt, Artificial Sequence
  Description of Artificial Sequence: Synthetic oligonucleotide
cucgccauuaugacaaagg

SEQ ID NO: 442600 - RNA, 19 nt, Artificial Sequence
  Description of Artificial Sequence: Synthetic oligonucleotide
uaugagcuaucugaaagcc

SEQ ID NO: 442601 - RNA, 19 nt, Artificial Sequence
  Description of Artificial Sequence: Synthetic oligonucleotide
uuacaguccauuaaagcuu

SEQ ID NO: 442602 - RNA, 19 nt, Artificial Sequence
  Description of Artificial Sequence: Synthetic oligonucleotide
cuuguauaaggaaucaaga

SEQ ID NO: 442603 - RNA, 19 nt, Artificial Sequence
  Description of Artificial Sequence: Synthetic oligonucleotide
aguuaguuccaaaacauca

SEQ ID NO: 442604 - RNA, 19 nt, Artificial Sequence
  Description of Artificial Sequence: Synthetic oligonucleotide
gaaucaagagccuucucuc

SEQ ID NO: 442605 - RNA, 19 nt, Artificial Sequence
  Description of Artificial Sequence: Synthetic oligonucleotide
agcuaugugcaacaugcag

SEQ ID NO: 442606 - RNA, 19 nt, Artificial Sequence
  Description of Artificial Sequence: Synthetic oligonucleotide
gacaguugcccuuaaggac

SEQ ID NO: 442607 - RNA, 19 nt, Artificial Sequence
  Description of Artificial Sequence: Synthetic oligonucleotide
ugcuucgggcuaaagaccc

SEQ ID NO: 442608 - RNA, 19 nt, Artificial Sequence
  Description of Artificial Sequence: Synthetic oligonucleotide
gaggugagcucucugagac

SEQ ID NO: 442609 - RNA, 19 nt, Artificial Sequence
  Description of Artificial Sequence: Synthetic oligonucleotide
agacaguugcccuuaagga

SEQ ID NO: 442610 - RNA, 19 nt, Artificial Sequence
  Description of Artificial Sequence: Synthetic oligonucleotide
uuguacacuuugcuggcag

SEQ ID NO: 442611 - RNA, 19 nt, Artificial Sequence
  Description of Artificial Sequence: Synthetic oligonucleotide
ggagcuaugugcaacaugc

SEQ ID NO: 442612 - RNA, 19 nt, Artificial Sequence
  Description of Artificial Sequence: Synthetic oligonucleotide
cuuacaguccauuaaagcu

SEQ ID NO: 442613 - RNA, 19 nt, Artificial Sequence
  Description of Artificial Sequence: Synthetic oligonucleotide
gacucuaggcaucaccacc

SEQ ID NO: 442614 - RNA, 19 nt, Artificial Sequence
  Description of Artificial Sequence: Synthetic oligonucleotide
cuuauacugcaauuaagca

SEQ ID NO: 442615 - RNA, 19 nt, Artificial Sequence
  Description of Artificial Sequence: Synthetic oligonucleotide
ugucugguauuucccauug

SEQ ID NO: 442616 - RNA, 19 nt, Artificial Sequence
  Description of Artificial Sequence: Synthetic oligonucleotide
uuccacuuguauaaggaau

SEQ ID NO: 442617 - RNA, 19 nt, Artificial Sequence
  Description of Artificial Sequence: Synthetic oligonucleotide
uuuaguccaugauggaaac

SEQ ID NO: 442618 - RNA, 19 nt, Artificial Sequence
  Description of Artificial Sequence: Synthetic oligonucleotide
uuagguacagucccuggaa

SEQ ID NO: 442619 - RNA, 19 nt, Artificial Sequence
  Description of Artificial Sequence: Synthetic oligonucleotide
aagacaauguuugguauau

SEQ ID NO: 442620 - RNA, 19 nt, Artificial Sequence
  Description of Artificial Sequence: Synthetic oligonucleotide
ucgccauuaugacaaaggu

SEQ ID NO: 442621 - RNA, 19 nt, Artificial Sequence
  Description of Artificial Sequence: Synthetic oligonucleotide
gacaauguuugguauaucu

SEQ ID NO: 442622 - RNA, 19 nt, Artificial Sequence
  Description of Artificial Sequence: Synthetic oligonucleotide
agagcgaggagguaagacu

SEQ ID NO: 442623 - RNA, 19 nt, Artificial Sequence
  Description of Artificial Sequence: Synthetic oligonucleotide
cauugagagucacuuagac

SEQ ID NO: 442624 - RNA, 19 nt, Artificial Sequence
  Description of Artificial Sequence: Synthetic oligonucleotide
auaaaauugauggcguagu

SEQ ID NO: 442625 - RNA, 19 nt, Artificial Sequence
  Description of Artificial Sequence: Synthetic oligonucleotide
uccagucuggaaaacagua

SEQ ID NO: 442626 - RNA, 19 nt, Artificial Sequence
  Description of Artificial Sequence: Synthetic oligonucleotide
aacaguagugcaauuaguu

SEQ ID NO: 442627 - RNA, 19 nt, Artificial Sequence
  Description of Artificial Sequence: Synthetic oligonucleotide
uccaauggaagaguuuaag

SEQ ID NO: 442628 - RNA, 19 nt, Artificial Sequence
  Description of Artificial Sequence: Synthetic oligonucleotide
uaaaauugauggcguaguc

SEQ ID NO: 442629 - RNA, 19 nt, Artificial Sequence
  Description of Artificial Sequence: Synthetic oligonucleotide
aaaagccguucccgcaaac

SEQ ID NO: 442630 - RNA, 19 nt, Artificial Sequence
  Description of Artificial Sequence: Synthetic oligonucleotide
caguuuaagcaugugaaug

SEQ ID NO: 442631 - RNA, 19 nt, Artificial Sequence
  Description of Artificial Sequence: Synthetic oligonucleotide
aacccuaguuucuacuuaa

SEQ ID NO: 442632 - RNA, 19 nt, Artificial Sequence
  Description of Artificial Sequence: Synthetic oligonucleotide
ucgagaagacaauguuugg

SEQ ID NO: 442633 - RNA, 19 nt, Artificial Sequence
  Description of Artificial Sequence: Synthetic oligonucleotide
aauggagacucuaggcauc

SEQ ID NO: 442634 - RNA, 19 nt, Artificial Sequence
  Description of Artificial Sequence: Synthetic oligonucleotide
aagcaugugaauguuuuaa

SEQ ID NO: 442635 - RNA, 19 nt, Artificial Sequence
  Description of Artificial Sequence: Synthetic oligonucleotide
uccugaacuggcuugcugu

SEQ ID NO: 442636 - RNA, 19 nt, Artificial Sequence
  Description of Artificial Sequence: Synthetic oligonucleotide
ugacacagacagaaugucu

SEQ ID NO: 442637 - RNA, 19 nt, Artificial Sequence
  Description of Artificial Sequence: Synthetic oligonucleotide
caugcagggucccaaagac

SEQ ID NO: 442638 - RNA, 19 nt, Artificial Sequence
  Description of Artificial Sequence: Synthetic oligonucleotide
aagucaauuagaaacccua

SEQ ID NO: 442639 - RNA, 19 nt, Artificial Sequence
  Description of Artificial Sequence: Synthetic oligonucleotide
uacaggauuucuccaagau

SEQ ID NO: 442640 - RNA, 19 nt, Artificial Sequence
  Description of Artificial Sequence: Synthetic oligonucleotide
cauaaacuacugcuucggg

SEQ ID NO: 442641 - RNA, 19 nt, Artificial Sequence
  Description of Artificial Sequence: Synthetic oligonucleotide
uagaaaguugguucaugcu

SEQ ID NO: 442642 - RNA, 19 nt, Artificial Sequence
  Description of Artificial Sequence: Synthetic oligonucleotide
gagaagacaauguuuggua

SEQ ID NO: 442643 - RNA, 19 nt, Artificial Sequence
  Description of Artificial Sequence: Synthetic oligonucleotide
cuucguuccgauacagagc

SEQ ID NO: 442644 - RNA, 19 nt, Artificial Sequence
  Description of Artificial Sequence: Synthetic oligonucleotide
cuuuucucgccauuaugac

SEQ ID NO: 442645 - RNA, 19 nt, Artificial Sequence
  Description of Artificial Sequence: Synthetic oligonucleotide
guuaaucuugauauuagaa

SEQ ID NO: 442646 - RNA, 19 nt, Artificial Sequence
  Description of Artificial Sequence: Synthetic oligonucleotide
aaaacggaguggagggugg

SEQ ID NO: 442647 - RNA, 19 nt, Artificial Sequence
  Description of Artificial Sequence: Synthetic oligonucleotide
acagcuuacauagcucuuc

SEQ ID NO: 442648 - RNA, 19 nt, Artificial Sequence
  Description of Artificial Sequence: Synthetic oligonucleotide
uuaaggacauuuccucuau

SEQ ID NO: 442649 - RNA, 19 nt, Artificial Sequence
  Description of Artificial Sequence: Synthetic oligonucleotide
agaagacaauguuugguau

SEQ ID NO: 442650 - RNA, 19 nt, Artificial Sequence
  Description of Artificial Sequence: Synthetic oligonucleotide
uaaaugcaccauaaauuua

SEQ ID NO: 442651 - RNA, 19 nt, Artificial Sequence
  Description of Artificial Sequence: Synthetic oligonucleotide
ugcaucugaagaagcgccc

SEQ ID NO: 442652 - RNA, 19 nt, Artificial Sequence
  Description of Artificial Sequence: Synthetic oligonucleotide
ucaguuuaagcaugugaau

SEQ ID NO: 442653 - RNA, 19 nt, Artificial Sequence
  Description of Artificial Sequence: Synthetic oligonucleotide
uaguuccaaaacaucacua

SEQ ID NO: 442654 - RNA, 19 nt, Artificial Sequence
  Description of Artificial Sequence: Synthetic oligonucleotide
cagcaauaggguagggugg

SEQ ID NO: 442655 - RNA, 19 nt, Artificial Sequence
  Description of Artificial Sequence: Synthetic oligonucleotide
agacucuaggcaucaccac

SEQ ID NO: 442656 - RNA, 19 nt, Artificial Sequence
  Description of Artificial Sequence: Synthetic oligonucleotide
auuuaguccaugauggaaa

SEQ ID NO: 442657 - RNA, 19 nt, Artificial Sequence
  Description of Artificial Sequence: Synthetic oligonucleotide
gacguguggggaaggaugg

SEQ ID NO: 442658 - RNA, 19 nt, Artificial Sequence
  Description of Artificial Sequence: Synthetic oligonucleotide
gagauaaaguucacagaug

SEQ ID NO: 442659 - RNA, 19 nt, Artificial Sequence
  Description of Artificial Sequence: Synthetic oligonucleotide
ggcauaaacuacugcuucg

SEQ ID NO: 442660 - RNA, 19 nt, Artificial Sequence
  Description of Artificial Sequence: Synthetic oligonucleotide
agucaucgacuccuccagc

SEQ ID NO: 442661 - RNA, 19 nt, Artificial Sequence
  Description of Artificial Sequence: Synthetic oligonucleotide
uuguaaguccauagcggcu

SEQ ID NO: 442662 - RNA, 19 nt, Artificial Sequence
  Description of Artificial Sequence: Synthetic oligonucleotide
aaaucacagugaaagcccu

SEQ ID NO: 442663 - RNA, 19 nt, Artificial Sequence
  Description of Artificial Sequence: Synthetic oligonucleotide
uuaagcaauaggacagcuu

SEQ ID NO: 442664 - RNA, 19 nt, Artificial Sequence
  Description of Artificial Sequence: Synthetic oligonucleotide
aagaguuuaaggagucaca

SEQ ID NO: 442665 - RNA, 19 nt, Artificial Sequence
  Description of Artificial Sequence: Synthetic oligonucleotide
acaguagugcaauuaguuu

SEQ ID NO: 442666 - RNA, 19 nt, Artificial Sequence
  Description of Artificial Sequence: Synthetic oligonucleotide
agucaauuagaaacccuag

SEQ ID NO: 442667 - RNA, 19 nt, Artificial Sequence
  Description of Artificial Sequence: Synthetic oligonucleotide
ugucagacccacacacuca

SEQ ID NO: 442668 - RNA, 19 nt, Artificial Sequence
  Description of Artificial Sequence: Synthetic oligonucleotide
ugauaaaauugauggcgua

SEQ ID NO: 442669 - RNA, 19 nt, Artificial Sequence
  Description of Artificial Sequence: Synthetic oligonucleotide
ggcguagucuguuaaauca

SEQ ID NO: 442670 - RNA, 19 nt, Artificial Sequence
  Description of Artificial Sequence: Synthetic oligonucleotide
caucaacucuggaaagccc

SEQ ID NO: 442671 - RNA, 19 nt, Artificial Sequence
  Description of Artificial Sequence: Synthetic oligonucleotide
ggagguaagacuagggagc

SEQ ID NO: 442672 - RNA, 19 nt, Artificial Sequence
  Description of Artificial Sequence: Synthetic oligonucleotide
cuagcugcguuauuuaaaa

SEQ ID NO: 442673 - RNA, 19 nt, Artificial Sequence
  Description of Artificial Sequence: Synthetic oligonucleotide
uacugcaauuaagcaauag

SEQ ID NO: 442674 - RNA, 19 nt, Artificial Sequence
  Description of Artificial Sequence: Synthetic oligonucleotide
gagacucuaggcaucacca

SEQ ID NO: 442675 - RNA, 19 nt, Artificial Sequence
  Description of Artificial Sequence: Synthetic oligonucleotide
ggagauaaaguucacagau

SEQ ID NO: 442676 - RNA, 19 nt, Artificial Sequence
  Description of Artificial Sequence: Synthetic oligonucleotide
uuuuaucauacagccugca

SEQ ID NO: 442677 - RNA, 19 nt, Artificial Sequence
  Description of Artificial Sequence: Synthetic oligonucleotide
gcuuguaaguccauagcgg

SEQ ID NO: 442678 - RNA, 19 nt, Artificial Sequence
  Description of Artificial Sequence: Synthetic oligonucleotide
gaagacaauguuugguaua

SEQ ID NO: 442679 - RNA, 19 nt, Artificial Sequence
  Description of Artificial Sequence: Synthetic oligonucleotide
acaugcagggucccaaaga

SEQ ID NO: 442680 - RNA, 19 nt, Artificial Sequence
  Description of Artificial Sequence: Synthetic oligonucleotide
agcuaucugaaagccacag

SEQ ID NO: 442681 - RNA, 19 nt, Artificial Sequence
  Description of Artificial Sequence: Synthetic oligonucleotide
uuuagguaccgggaugcca

SEQ ID NO: 442682 - RNA, 19 nt, Artificial Sequence
  Description of Artificial Sequence: Synthetic oligonucleotide
aguuaugagcuaucugaaa

SEQ ID NO: 442683 - RNA, 19 nt, Artificial Sequence
  Description of Artificial Sequence: Synthetic oligonucleotide
uguaaguccauagcggcuu

SEQ ID NO: 442684 - RNA, 19 nt, Artificial Sequence
  Description of Artificial Sequence: Synthetic oligonucleotide
augcaccauaaauuuauau

SEQ ID NO: 442685 - RNA, 19 nt, Artificial Sequence
  Description of Artificial Sequence: Synthetic oligonucleotide
acacguugucagcucagag

SEQ ID NO: 442686 - RNA, 19 nt, Artificial Sequence
  Description of Artificial Sequence: Synthetic oligonucleotide
ucuugguuucugucagacc

SEQ ID NO: 442687 - RNA, 19 nt, Artificial Sequence
  Description of Artificial Sequence: Synthetic oligonucleotide
gaugacuuuucaguaaugu

SEQ ID NO: 442688 - RNA, 19 nt, Artificial Sequence
  Description of Artificial Sequence: Synthetic oligonucleotide
cuaagucaucgacuccucc

SEQ ID NO: 442689 - RNA, 19 nt, Artificial Sequence
  Description of Artificial Sequence: Synthetic oligonucleotide
agguuuagguaccgggaug

SEQ ID NO: 442690 - RNA, 19 nt, Artificial Sequence
  Description of Artificial Sequence: Synthetic oligonucleotide
augugugucgagguuuagg

SEQ ID NO: 442691 - RNA, 19 nt, Artificial Sequence
  Description of Artificial Sequence: Synthetic oligonucleotide
guccauagcggcuuucaac

SEQ ID NO: 442692 - RNA, 19 nt, Artificial Sequence
  Description of Artificial Sequence: Synthetic oligonucleotide
augccauuguacacuuugc

SEQ ID NO: 442693 - RNA, 19 nt, Artificial Sequence
  Description of Artificial Sequence: Synthetic oligonucleotide
uguugacaaguuaguucca

SEQ ID NO: 442694 - RNA, 19 nt, Artificial Sequence
  Description of Artificial Sequence: Synthetic oligonucleotide
acaucugcggucacuggcg

SEQ ID NO: 442695 - RNA, 19 nt, Artificial Sequence
  Description of Artificial Sequence: Synthetic oligonucleotide
aucuuucgagaagacaaug

SEQ ID NO: 442696 - RNA, 19 nt, Artificial Sequence
  Description of Artificial Sequence: Synthetic oligonucleotide
uuccugaacuggcuugcug

SEQ ID NO: 442697 - RNA, 19 nt, Artificial Sequence
  Description of Artificial Sequence: Synthetic oligonucleotide
guuccgauacagagcaggg

SEQ ID NO: 442698 - RNA, 19 nt, Artificial Sequence
  Description of Artificial Sequence: Synthetic oligonucleotide
gaugcugcggcgagagcgg

SEQ ID NO: 442699 - RNA, 19 nt, Artificial Sequence
  Description of Artificial Sequence: Synthetic oligonucleotide
ucuaagucaucgacuccuc

SEQ ID NO: 442700 - RNA, 19 nt, Artificial Sequence
  Description of Artificial Sequence: Synthetic oligonucleotide
gcuuacauagcucuucaga

SEQ ID NO: 442701 - RNA, 19 nt, Artificial Sequence
  Description of Artificial Sequence: Synthetic oligonucleotide
ugagagucacuuagacuuc

SEQ ID NO: 442702 - RNA, 19 nt, Artificial Sequence
  Description of Artificial Sequence: Synthetic oligonucleotide
cucuguggaaagauaagaa

SEQ ID NO: 442703 - RNA, 19 nt, Artificial Sequence
  Description of Artificial Sequence: Synthetic oligonucleotide
aaacacguugucagcucag

SEQ ID NO: 442704 - RNA, 19 nt, Artificial Sequence
  Description of Artificial Sequence: Synthetic oligonucleotide
uggucagaguagagcgagg

SEQ ID NO: 442705 - RNA, 19 nt, Artificial Sequence
  Description of Artificial Sequence: Synthetic oligonucleotide
aggagcuaugugcaacaug

SEQ ID NO: 442706 - RNA, 19 nt, Artificial Sequence
  Description of Artificial Sequence: Synthetic oligonucleotide
aaacggaguggaggguggg

SEQ ID NO: 442707 - RNA, 19 nt, Artificial Sequence
  Description of Artificial Sequence: Synthetic oligonucleotide
cccgcaaacacguugucag

SEQ ID NO: 442708 - RNA, 19 nt, Artificial Sequence
  Description of Artificial Sequence: Synthetic oligonucleotide
agacguguggggaaggaug

SEQ ID NO: 442709 - RNA, 19 nt, Artificial Sequence
  Description of Artificial Sequence: Synthetic oligonucleotide
ggagacucuaggcaucacc

SEQ ID NO: 442710 - RNA, 19 nt, Artificial Sequence
  Description of Artificial Sequence: Synthetic oligonucleotide
gguuuagguaccgggaugc

SEQ ID NO: 442711 - RNA, 19 nt, Artificial Sequence
  Description of Artificial Sequence: Synthetic oligonucleotide
agcuuacauagcucuucag

SEQ ID NO: 442712 - RNA, 19 nt, Artificial Sequence
  Description of Artificial Sequence: Synthetic oligonucleotide
agaaagcaagucaauuaga

SEQ ID NO: 442713 - RNA, 19 nt, Artificial Sequence
  Description of Artificial Sequence: Synthetic oligonucleotide
cagaguuaugagcuaucug

SEQ ID NO: 442714 - RNA, 19 nt, Artificial Sequence
  Description of Artificial Sequence: Synthetic oligonucleotide
uccacacaauaaugucucc

SEQ ID NO: 442715 - RNA, 19 nt, Artificial Sequence
  Description of Artificial Sequence: Synthetic oligonucleotide
uuccaauggaagaguuuaa

SEQ ID NO: 442716 - RNA, 19 nt, Artificial Sequence
  Description of Artificial Sequence: Synthetic oligonucleotide
aucuuuacagcaggacuug

SEQ ID NO: 442717 - RNA, 19 nt, Artificial Sequence
  Description of Artificial Sequence: Synthetic oligonucleotide
uaaagcuuguaaguccaua

SEQ ID NO: 442718 - RNA, 19 nt, Artificial Sequence
  Description of Artificial Sequence: Synthetic oligonucleotide
cucuugguuucugucagac

SEQ ID NO: 442719 - RNA, 19 nt, Artificial Sequence
  Description of Artificial Sequence: Synthetic oligonucleotide
gucaucgacuccuccagca

SEQ ID NO: 442720 - RNA, 19 nt, Artificial Sequence
  Description of Artificial Sequence: Synthetic oligonucleotide
caucacuaacaucaaugca

SEQ ID NO: 442721 - RNA, 19 nt, Artificial Sequence
  Description of Artificial Sequence: Synthetic oligonucleotide
gcggcuuucaacagaaugc

SEQ ID NO: 442722 - RNA, 19 nt, Artificial Sequence
  Description of Artificial Sequence: Synthetic oligonucleotide
guagacaguugcccuuaag

SEQ ID NO: 442723 - RNA, 19 nt, Artificial Sequence
  Description of Artificial Sequence: Synthetic oligonucleotide
aauugauggcguagucugu

SEQ ID NO: 442724 - RNA, 19 nt, Artificial Sequence
  Description of Artificial Sequence: Synthetic oligonucleotide
aacacguugucagcucaga

SEQ ID NO: 442725 - RNA, 19 nt, Artificial Sequence
  Description of Artificial Sequence: Synthetic oligonucleotide
uaggguaggguggaaugga

SEQ ID NO: 442726 - RNA, 19 nt, Artificial Sequence
  Description of Artificial Sequence: Synthetic oligonucleotide
gacauuuccucuauggcau

SEQ ID NO: 442727 - RNA, 19 nt, Artificial Sequence
  Description of Artificial Sequence: Synthetic oligonucleotide
cacuuagacuucuucuuga

SEQ ID NO: 442728 - RNA, 19 nt, Artificial Sequence
  Description of Artificial Sequence: Synthetic oligonucleotide
ugagccccgggagacaucu

SEQ ID NO: 442729 - RNA, 19 nt, Artificial Sequence
  Description of Artificial Sequence: Synthetic oligonucleotide
gucaauuagaaacccuagu

SEQ ID NO: 442730 - RNA, 19 nt, Artificial Sequence
  Description of Artificial Sequence: Synthetic oligonucleotide
auaggacagcuuacauagc

SEQ ID NO: 442731 - RNA, 19 nt, Artificial Sequence
  Description of Artificial Sequence: Synthetic oligonucleotide
uuccgauacagagcagggc

SEQ ID NO: 442732 - RNA, 19 nt, Artificial Sequence
  Description of Artificial Sequence: Synthetic oligonucleotide
uccuuugcauuuacccaaa

SEQ ID NO: 442733 - RNA, 19 nt, Artificial Sequence
  Description of Artificial Sequence: Synthetic oligonucleotide
aguagugcaauuaguuuua

SEQ ID NO: 442734 - RNA, 19 nt, Artificial Sequence
  Description of Artificial Sequence: Synthetic oligonucleotide
aaacuacugcuucgggcua

SEQ ID NO: 442735 - RNA, 19 nt, Artificial Sequence
  Description of Artificial Sequence: Synthetic oligonucleotide
acaguagacaguugcccuu

SEQ ID NO: 442736 - RNA, 19 nt, Artificial Sequence
  Description of Artificial Sequence: Synthetic oligonucleotide
gguaucuuggggaagguaa

SEQ ID NO: 442737 - RNA, 19 nt, Artificial Sequence
  Description of Artificial Sequence: Synthetic oligonucleotide
aggugagcucucugagacg

SEQ ID NO: 442738 - RNA, 19 nt, Artificial Sequence
  Description of Artificial Sequence: Synthetic oligonucleotide
ccgggaugccacuagaaag

SEQ ID NO: 442739 - RNA, 19 nt, Artificial Sequence
  Description of Artificial Sequence: Synthetic oligonucleotide
auggaguuacauuccuaaa

SEQ ID NO: 442740 - RNA, 19 nt, Artificial Sequence
  Description of Artificial Sequence: Synthetic oligonucleotide
gaguagagcgaggagguaa

SEQ ID NO: 442741 - RNA, 19 nt, Artificial Sequence
  Description of Artificial Sequence: Synthetic oligonucleotide
gaguuaugagcuaucugaa

SEQ ID NO: 442742 - RNA, 19 nt, Artificial Sequence
  Description of Artificial Sequence: Synthetic oligonucleotide
gaucuuuacagcaggacuu

SEQ ID NO: 442743 - RNA, 19 nt, Artificial Sequence
  Description of Artificial Sequence: Synthetic oligonucleotide
augcuacaggauuucucca

SEQ ID NO: 442744 - RNA, 19 nt, Artificial Sequence
  Description of Artificial Sequence: Synthetic oligonucleotide
caaacacguugucagcuca

SEQ ID NO: 442745 - RNA, 19 nt, Artificial Sequence
  Description of Artificial Sequence: Synthetic oligonucleotide
gguggaauggagacucuag

SEQ ID NO: 442746 - RNA, 19 nt, Artificial Sequence
  Description of Artificial Sequence: Synthetic oligonucleotide
uacacuuugcuggcaggac

SEQ ID NO: 442747 - RNA, 19 nt, Artificial Sequence
  Description of Artificial Sequence: Synthetic oligonucleotide
auggcuagcugcguuauuu

SEQ ID NO: 442748 - RNA, 19 nt, Artificial Sequence
  Description of Artificial Sequence: Synthetic oligonucleotide
gagcggcauaaacuacugc

SEQ ID NO: 442749 - RNA, 19 nt, Artificial Sequence
  Description of Artificial Sequence: Synthetic oligonucleotide
gcaucaacucuggaaagcc

SEQ ID NO: 442750 - RNA, 19 nt, Artificial Sequence
  Description of Artificial Sequence: Synthetic oligonucleotide
accgggaugccacuagaaa

SEQ ID NO: 442751 - RNA, 19 nt, Artificial Sequence
  Description of Artificial Sequence: Synthetic oligonucleotide
gaagcgccccauaauaaaa

SEQ ID NO: 442752 - RNA, 19 nt, Artificial Sequence
  Description of Artificial Sequence: Synthetic oligonucleotide
aaugagugcugaggaugcu

SEQ ID NO: 442753 - RNA, 19 nt, Artificial Sequence
  Description of Artificial Sequence: Synthetic oligonucleotide
cuucgggcuaaagacccag

SEQ ID NO: 442754 - RNA, 19 nt, Artificial Sequence
  Description of Artificial Sequence: Synthetic oligonucleotide
gacccagaagguuuaggua

SEQ ID NO: 442755 - RNA, 19 nt, Artificial Sequence
  Description of Artificial Sequence: Synthetic oligonucleotide
aaucugcugccagcgaaaa

SEQ ID NO: 442756 - RNA, 19 nt, Artificial Sequence
  Description of Artificial Sequence: Synthetic oligonucleotide
agccguucccgcaaacacg

SEQ ID NO: 442757 - RNA, 19 nt, Artificial Sequence
  Description of Artificial Sequence: Synthetic oligonucleotide
ggaguuacauuccuaaaau

SEQ ID NO: 442758 - RNA, 19 nt, Artificial Sequence
  Description of Artificial Sequence: Synthetic oligonucleotide
ucugcggucacuggcgaau

SEQ ID NO: 442759 - RNA, 19 nt, Artificial Sequence
  Description of Artificial Sequence: Synthetic oligonucleotide
cauagcggcuuucaacaga

SEQ ID NO: 442760 - RNA, 19 nt, Artificial Sequence
  Description of Artificial Sequence: Synthetic oligonucleotide
uuucagcagugaaguagau

SEQ ID NO: 442761 - RNA, 19 nt, Artificial Sequence
  Description of Artificial Sequence: Synthetic oligonucleotide
caguagugcaauuaguuuu

SEQ ID NO: 442762 - RNA, 19 nt, Artificial Sequence
  Description of Artificial Sequence: Synthetic oligonucleotide
uaccgggaugccacuagaa

SEQ ID NO: 442763 - RNA, 19 nt, Artificial Sequence
  Description of Artificial Sequence: Synthetic oligonucleotide
uucgggcuaaagacccaga

SEQ ID NO: 442764 - RNA, 19 nt, Artificial Sequence
  Description of Artificial Sequence: Synthetic oligonucleotide
cccaauggaguuacauucc

SEQ ID NO: 442765 - RNA, 19 nt, Artificial Sequence
  Description of Artificial Sequence: Synthetic oligonucleotide
agacaauguuugguauauc

SEQ ID NO: 442766 - RNA, 19 nt, Artificial Sequence
  Description of Artificial Sequence: Synthetic oligonucleotide
cucaaggcuugaaggagga

SEQ ID NO: 442767 - RNA, 19 nt, Artificial Sequence
  Description of Artificial Sequence: Synthetic oligonucleotide
ccauuaaagcuuguaaguc

SEQ ID NO: 442768 - RNA, 19 nt, Artificial Sequence
  Description of Artificial Sequence: Synthetic oligonucleotide
gcuguggucagaguagagc

SEQ ID NO: 442769 - RNA, 19 nt, Artificial Sequence
  Description of Artificial Sequence: Synthetic oligonucleotide
agagcggcauaaacuacug

SEQ ID NO: 442770 - RNA, 19 nt, Artificial Sequence
  Description of Artificial Sequence: Synthetic oligonucleotide
ucccgcaaacacguuguca

SEQ ID NO: 442771 - RNA, 19 nt, Artificial Sequence
  Description of Artificial Sequence: Synthetic oligonucleotide
caguuuuacuugcagagau

SEQ ID NO: 442772 - RNA, 19 nt, Artificial Sequence
  Description of Artificial Sequence: Synthetic oligonucleotide
gagcgaggagguaagacua

SEQ ID NO: 442773 - RNA, 19 nt, Artificial Sequence
  Description of Artificial Sequence: Synthetic oligonucleotide
cacaacuccacacaauaau

SEQ ID NO: 442774 - RNA, 19 nt, Artificial Sequence
  Description of Artificial Sequence: Synthetic oligonucleotide
ggcuuacaguccauuaaag

SEQ ID NO: 442775 - RNA, 19 nt, Artificial Sequence
  Description of Artificial Sequence: Synthetic oligonucleotide
gucacuuagacuucuucuu

SEQ ID NO: 442776 - RNA, 19 nt, Artificial Sequence
  Description of Artificial Sequence: Synthetic oligonucleotide
ugccacuagaaaguugguu

SEQ ID NO: 442777 - RNA, 19 nt, Artificial Sequence
  Description of Artificial Sequence: Synthetic oligonucleotide
cguagucuguuaaaucagc

SEQ ID NO: 442778 - RNA, 19 nt, Artificial Sequence
  Description of Artificial Sequence: Synthetic oligonucleotide
uugauggcguagucuguua

SEQ ID NO: 442779 - RNA, 19 nt, Artificial Sequence
  Description of Artificial Sequence: Synthetic oligonucleotide
ugcuuauucuggacacauu

SEQ ID NO: 442780 - RNA, 19 nt, Artificial Sequence
  Description of Artificial Sequence: Synthetic oligonucleotide
guugacaaguuaguuccaa

SEQ ID NO: 442781 - RNA, 19 nt, Artificial Sequence
  Description of Artificial Sequence: Synthetic oligonucleotide
gaguuacauuccuaaaauu

SEQ ID NO: 442782 - RNA, 19 nt, Artificial Sequence
  Description of Artificial Sequence: Synthetic oligonucleotide
uccccuauccacagucauu

SEQ ID NO: 442783 - RNA, 19 nt, Artificial Sequence
  Description of Artificial Sequence: Synthetic oligonucleotide
cuuucgagaagacaauguu

SEQ ID NO: 442784 - RNA, 19 nt, Artificial Sequence
  Description of Artificial Sequence: Synthetic oligonucleotide
aacuacugcuucgggcuaa

SEQ ID NO: 442785 - RNA, 19 nt, Artificial Sequence
  Description of Artificial Sequence: Synthetic oligonucleotide
cagaguagagcgaggaggu

SEQ ID NO: 442786 - RNA, 19 nt, Artificial Sequence
  Description of Artificial Sequence: Synthetic oligonucleotide
gagagcggcauaaacuacu

SEQ ID NO: 442787 - RNA, 19 nt, Artificial Sequence
  Description of Artificial Sequence: Synthetic oligonucleotide
gcuuucaacagaaugcugu

SEQ ID NO: 442788 - RNA, 19 nt, Artificial Sequence
  Description of Artificial Sequence: Synthetic oligonucleotide
gaugugugucgagguuuag

SEQ ID NO: 442789 - RNA, 19 nt, Artificial Sequence
  Description of Artificial Sequence: Synthetic oligonucleotide
aacuugacacagacagaau

SEQ ID NO: 442790 - RNA, 19 nt, Artificial Sequence
  Description of Artificial Sequence: Synthetic oligonucleotide
aacggaguggaggguggga

SEQ ID NO: 442791 - RNA, 19 nt, Artificial Sequence
  Description of Artificial Sequence: Synthetic oligonucleotide
ggacagcuuacauagcucu

SEQ ID NO: 442792 - RNA, 19 nt, Artificial Sequence
  Description of Artificial Sequence: Synthetic oligonucleotide
cagcuuacauagcucuuca

SEQ ID NO: 442793 - RNA, 19 nt, Artificial Sequence
  Description of Artificial Sequence: Synthetic oligonucleotide
gugucgagguuuagguacc

SEQ ID NO: 442794 - RNA, 19 nt, Artificial Sequence
  Description of Artificial Sequence: Synthetic oligonucleotide
ugcaacaugcaggguccca

SEQ ID NO: 442795 - RNA, 19 nt, Artificial Sequence
  Description of Artificial Sequence: Synthetic oligonucleotide
caagucaauuagaaacccu

SEQ ID NO: 442796 - RNA, 19 nt, Artificial Sequence
  Description of Artificial Sequence: Synthetic oligonucleotide
gcucuguggaaagauaaga

SEQ ID NO: 442797 - RNA, 19 nt, Artificial Sequence
  Description of Artificial Sequence: Synthetic oligonucleotide
cguuccgauacagagcagg

SEQ ID NO: 442798 - RNA, 19 nt, Artificial Sequence
  Description of Artificial Sequence: Synthetic oligonucleotide
ggaacaugaugugugucga

SEQ ID NO: 442799 - RNA, 19 nt, Artificial Sequence
  Description of Artificial Sequence: Synthetic oligonucleotide
gcgagagcggcauaaacua

SEQ ID NO: 442800 - RNA, 19 nt, Artificial Sequence
  Description of Artificial Sequence: Synthetic oligonucleotide
gggaaagcucaucucuuga

SEQ ID NO: 442801 - RNA, 19 nt, Artificial Sequence
  Description of Artificial Sequence: Synthetic oligonucleotide
aguuuuacuugcagagauu

SEQ ID NO: 442802 - RNA, 19 nt, Artificial Sequence
  Description of Artificial Sequence: Synthetic oligonucleotide
ugcggcgagagcggcauaa

SEQ ID NO: 442803 - RNA, 19 nt, Artificial Sequence
  Description of Artificial Sequence: Synthetic oligonucleotide
cgaggagguaagacuaggg

SEQ ID NO: 442804 - RNA, 19 nt, Artificial Sequence
  Description of Artificial Sequence: Synthetic oligonucleotide
agcgaggagguaagacuag

SEQ ID NO: 442805 - RNA, 19 nt, Artificial Sequence
  Description of Artificial Sequence: Synthetic oligonucleotide
cugagacguguggggaagg

SEQ ID NO: 442806 - RNA, 19 nt, Artificial Sequence
  Description of Artificial Sequence: Synthetic oligonucleotide
gauacagagcagggcaacu

SEQ ID NO: 442807 - RNA, 19 nt, Artificial Sequence
  Description of Artificial Sequence: Synthetic oligonucleotide
ggcacgaugcugcggcgag

SEQ ID NO: 442808 - RNA, 19 nt, Artificial Sequence
  Description of Artificial Sequence: Synthetic oligonucleotide
ugguaucuuggggaaggua

SEQ ID NO: 442809 - RNA, 19 nt, Artificial Sequence
  Description of Artificial Sequence: Synthetic oligonucleotide
cucuucguuccgauacaga

SEQ ID NO: 442810 - RNA, 19 nt, Artificial Sequence
  Description of Artificial Sequence: Synthetic oligonucleotide
uucccgcaaacacguuguc

SEQ ID NO: 442811 - RNA, 19 nt, Artificial Sequence
  Description of Artificial Sequence: Synthetic oligonucleotide
gcaaacacguugucagcuc

SEQ ID NO: 442812 - RNA, 19 nt, Artificial Sequence
  Description of Artificial Sequence: Synthetic oligonucleotide
gcaucugaagaagcgcccc

SEQ ID NO: 442813 - RNA, 19 nt, Artificial Sequence
  Description of Artificial Sequence: Synthetic oligonucleotide
guaccgggaugccacuaga

SEQ ID NO: 442814 - RNA, 19 nt, Artificial Sequence
  Description of Artificial Sequence: Synthetic oligonucleotide
gaugccauugagagucacu

SEQ ID NO: 442815 - RNA, 19 nt, Artificial Sequence
  Description of Artificial Sequence: Synthetic oligonucleotide
gcgaggagguaagacuagg

SEQ ID NO: 442816 - RNA, 19 nt, Artificial Sequence
  Description of Artificial Sequence: Synthetic oligonucleotide
gagcucucugagacgugug

SEQ ID NO: 442817 - RNA, 19 nt, Artificial Sequence
  Description of Artificial Sequence: Synthetic oligonucleotide
cauuuacccaaagucugua

SEQ ID NO: 442818 - RNA, 19 nt, Artificial Sequence
  Description of Artificial Sequence: Synthetic oligonucleotide
acacucaggugagccccgg

SEQ ID NO: 442819 - RNA, 19 nt, Artificial Sequence
  Description of Artificial Sequence: Synthetic oligonucleotide
gagcuaugugcaacaugca

SEQ ID NO: 442820 - RNA, 19 nt, Artificial Sequence
  Description of Artificial Sequence: Synthetic oligonucleotide
cacuuguauaaggaaucaa

SEQ ID NO: 442821 - RNA, 19 nt, Artificial Sequence
  Description of Artificial Sequence: Synthetic oligonucleotide
gugugucgagguuuaggua

SEQ ID NO: 442822 - RNA, 19 nt, Artificial Sequence
  Description of Artificial Sequence: Synthetic oligonucleotide
aucgacuccuccagcaaua

SEQ ID NO: 442823 - RNA, 19 nt, Artificial Sequence
  Description of Artificial Sequence: Synthetic oligonucleotide
gcgccccauaauaaaagug

SEQ ID NO: 442824 - RNA, 19 nt, Artificial Sequence
  Description of Artificial Sequence: Synthetic oligonucleotide
gagcuaucugaaagccaca

SEQ ID NO: 442825 - RNA, 19 nt, Artificial Sequence
  Description of Artificial Sequence: Synthetic oligonucleotide
aguccccuauccacaguca

SEQ ID NO: 442826 - RNA, 19 nt, Artificial Sequence
  Description of Artificial Sequence: Synthetic oligonucleotide
gguacagucccuggaaacu

SEQ ID NO: 442827 - RNA, 19 nt, Artificial Sequence
  Description of Artificial Sequence: Synthetic oligonucleotide
ggguuuucauuuccagaaa

SEQ ID NO: 442828 - RNA, 19 nt, Artificial Sequence
  Description of Artificial Sequence: Synthetic oligonucleotide
gcuagcugcguuauuuaaa

SEQ ID NO: 442829 - RNA, 19 nt, Artificial Sequence
  Description of Artificial Sequence: Synthetic oligonucleotide
ggcgagagcggcauaaacu

SEQ ID NO: 442830 - RNA, 19 nt, Artificial Sequence
  Description of Artificial Sequence: Synthetic oligonucleotide
caucugcggucacuggcga

SEQ ID NO: 442831 - RNA, 19 nt, Artificial Sequence
  Description of Artificial Sequence: Synthetic oligonucleotide
aucugcggucacuggcgaa

SEQ ID NO: 442832 - RNA, 19 nt, Artificial Sequence
  Description of Artificial Sequence: Synthetic oligonucleotide
gguauaucucaaggcuuga

SEQ ID NO: 442833 - RNA, 19 nt, Artificial Sequence
  Description of Artificial Sequence: Synthetic oligonucleotide
cuacugcuucgggcuaaag

SEQ ID NO: 442834 - RNA, 19 nt, Artificial Sequence
  Description of Artificial Sequence: Synthetic oligonucleotide
ccauaauaaaagugugggu

SEQ ID NO: 442835 - RNA, 19 nt, Artificial Sequence
  Description of Artificial Sequence: Synthetic oligonucleotide
guaucuuggggaagguaau

SEQ ID NO: 442836 - RNA, 19 nt, Artificial Sequence
  Description of Artificial Sequence: Synthetic oligonucleotide
ccgcaaacacguugucagc

SEQ ID NO: 442837 - RNA, 19 nt, Artificial Sequence
  Description of Artificial Sequence: Synthetic oligonucleotide
ccucuucguuccgauacag

SEQ ID NO: 442838 - RNA, 19 nt, Artificial Sequence
  Description of Artificial Sequence: Synthetic oligonucleotide
uggagacucuaggcaucac

SEQ ID NO: 442839 - RNA, 19 nt, Artificial Sequence
  Description of Artificial Sequence: Synthetic oligonucleotide
acuacugcuucgggcuaaa

SEQ ID NO: 442840 - RNA, 19 nt, Artificial Sequence
  Description of Artificial Sequence: Synthetic oligonucleotide
gcaauuaguuuuacuuugu

SEQ ID NO: 442841 - RNA, 19 nt, Artificial Sequence
  Description of Artificial Sequence: Synthetic oligonucleotide
ccuuaaggacauuuccucu

SEQ ID NO: 442842 - RNA, 19 nt, Artificial Sequence
  Description of Artificial Sequence: Synthetic oligonucleotide
ggugggagauaaaguucac

SEQ ID NO: 442843 - RNA, 19 nt, Artificial Sequence
  Description of Artificial Sequence: Synthetic oligonucleotide
agaguagagcgaggaggua

SEQ ID NO: 442844 - RNA, 19 nt, Artificial Sequence
  Description of Artificial Sequence: Synthetic oligonucleotide
augccacuagaaaguuggu

SEQ ID NO: 442845 - RNA, 19 nt, Artificial Sequence
  Description of Artificial Sequence: Synthetic oligonucleotide
ggcauggcuagcugcguua

SEQ ID NO: 442846 - RNA, 19 nt, Artificial Sequence
  Description of Artificial Sequence: Synthetic oligonucleotide
ggggugugucuucaucuaa

SEQ ID NO: 442847 - RNA, 19 nt, Artificial Sequence
  Description of Artificial Sequence: Synthetic oligonucleotide
gcaacaugcagggucccaa

SEQ ID NO: 442848 - RNA, 19 nt, Artificial Sequence
  Description of Artificial Sequence: Synthetic oligonucleotide
ccgggagacaucugcgguc

SEQ ID NO: 442849 - RNA, 19 nt, Artificial Sequence
  Description of Artificial Sequence: Synthetic oligonucleotide
auacugcaauuaagcaaua

SEQ ID NO: 442850 - RNA, 19 nt, Artificial Sequence
  Description of Artificial Sequence: Synthetic oligonucleotide
caguagacaguugcccuua

SEQ ID NO: 442851 - RNA, 19 nt, Artificial Sequence
  Description of Artificial Sequence: Synthetic oligonucleotide
guccccuauccacagucau

SEQ ID NO: 442852 - RNA, 19 nt, Artificial Sequence
  Description of Artificial Sequence: Synthetic oligonucleotide
cgagagcggcauaaacuac

SEQ ID NO: 442853 - RNA, 19 nt, Artificial Sequence
  Description of Artificial Sequence: Synthetic oligonucleotide
gucugguauuucccauugu

SEQ ID NO: 442854 - RNA, 19 nt, Artificial Sequence
  Description of Artificial Sequence: Synthetic oligonucleotide
gcuaaagacccagaagguu

SEQ ID NO: 442855 - RNA, 19 nt, Artificial Sequence
  Description of Artificial Sequence: Synthetic oligonucleotide
cagaaucuuguggucuacu

SEQ ID NO: 442856 - RNA, 19 nt, Artificial Sequence
  Description of Artificial Sequence: Synthetic oligonucleotide
guaaguccauagcggcuuu

SEQ ID NO: 442857 - RNA, 19 nt, Artificial Sequence
  Description of Artificial Sequence: Synthetic oligonucleotide
cgauacagagcagggcaac

SEQ ID NO: 442858 - RNA, 19 nt, Artificial Sequence
  Description of Artificial Sequence: Synthetic oligonucleotide
gccguucccgcaaacacgu

SEQ ID NO: 442859 - RNA, 19 nt, Artificial Sequence
  Description of Artificial Sequence: Synthetic oligonucleotide
gaggagcuaugugcaacau

SEQ ID NO: 442860 - RNA, 19 nt, Artificial Sequence
  Description of Artificial Sequence: Synthetic oligonucleotide
ccucuauggcaucaacucu

SEQ ID NO: 442861 - RNA, 19 nt, Artificial Sequence
  Description of Artificial Sequence: Synthetic oligonucleotide
ccgauacagagcagggcaa

SEQ ID NO: 442862 - RNA, 19 nt, Artificial Sequence
  Description of Artificial Sequence: Synthetic oligonucleotide
ggagacaucugcggucacu

SEQ ID NO: 442863 - RNA, 19 nt, Artificial Sequence
  Description of Artificial Sequence: Synthetic oligonucleotide
ccagaguuaugagcuaucu

SEQ ID NO: 442864 - RNA, 19 nt, Artificial Sequence
  Description of Artificial Sequence: Synthetic oligonucleotide
caguaauguuagacuugau

SEQ ID NO: 442865 - RNA, 19 nt, Artificial Sequence
  Description of Artificial Sequence: Synthetic oligonucleotide
gccccaauggaguuacauu

SEQ ID NO: 442866 - RNA, 19 nt, Artificial Sequence
  Description of Artificial Sequence: Synthetic oligonucleotide
gggcaacuugacacagaca

SEQ ID NO: 442867 - RNA, 19 nt, Artificial Sequence
  Description of Artificial Sequence: Synthetic oligonucleotide
cggcgagagcggcauaaac

SEQ ID NO: 442868 - RNA, 19 nt, Artificial Sequence
  Description of Artificial Sequence: Synthetic oligonucleotide
guccugcaucagacaugag

SEQ ID NO: 442869 - RNA, 19 nt, Artificial Sequence
  Description of Artificial Sequence: Synthetic oligonucleotide
gagccccgggagacaucug

SEQ ID NO: 442870 - RNA, 19 nt, Artificial Sequence
  Description of Artificial Sequence: Synthetic oligonucleotide
gcggcauaaacuacugcuu

SEQ ID NO: 442871 - RNA, 19 nt, Artificial Sequence
  Description of Artificial Sequence: Synthetic oligonucleotide
cugguaucuuggggaaggu

SEQ ID NO: 442872 - RNA, 19 nt, Artificial Sequence
  Description of Artificial Sequence: Synthetic oligonucleotide
gcuucgggcuaaagaccca

SEQ ID NO: 442873 - RNA, 19 nt, Artificial Sequence
  Description of Artificial Sequence: Synthetic oligonucleotide
cgggagacaucugcgguca

SEQ ID NO: 442874 - RNA, 19 nt, Artificial Sequence
  Description of Artificial Sequence: Synthetic oligonucleotide
cauggcuagcugcguuauu

SEQ ID NO: 442875 - RNA, 19 nt, Artificial Sequence
  Description of Artificial Sequence: Synthetic oligonucleotide
cccgggagacaucugcggu

SEQ ID NO: 442876 - RNA, 19 nt, Artificial Sequence
  Description of Artificial Sequence: Synthetic oligonucleotide
gcauggcuagcugcguuau

SEQ ID NO: 442877 - RNA, 19 nt, Artificial Sequence
  Description of Artificial Sequence: Synthetic oligonucleotide
gcacgaugcugcggcgaga

SEQ ID NO: 442878 - RNA, 19 nt, Artificial Sequence
  Description of Artificial Sequence: Synthetic oligonucleotide
gcggcgagagcggcauaaa

SEQ ID NO: 442879 - RNA, 19 nt, Artificial Sequence
  Description of Artificial Sequence: Synthetic oligonucleotide
ccacccagcuguggucaga

SEQ ID NO: 442880 - RNA, 19 nt, Artificial Sequence
  Description of Artificial Sequence: Synthetic oligonucleotide
cccuauccacagucauuuu

SEQ ID NO: 442881 - RNA, 19 nt, Artificial Sequence
  Description of Artificial Sequence: Synthetic oligonucleotide
ccguucccgcaaacacguu

SEQ ID NO: 442882 - RNA, 19 nt, Artificial Sequence
  Description of Artificial Sequence: Synthetic oligonucleotide
aaugaauagaauuuucauc

SEQ ID NO: 442883 - RNA, 19 nt, Artificial Sequence
  Description of Artificial Sequence: Synthetic oligonucleotide
aaaauauauauauauaaaa

SEQ ID NO: 442884 - RNA, 19 nt, Artificial Sequence
  Description of Artificial Sequence: Synthetic oligonucleotide
gaaguuuaaaaugagagug

SEQ ID NO: 442885 - RNA, 19 nt, Artificial Sequence
  Description of Artificial Sequence: Synthetic oligonucleotide
ucgacauugacacaggaag

SEQ ID NO: 442886 - RNA, 19 nt, Artificial Sequence
  Description of Artificial Sequence: Synthetic oligonucleotide
aaauccgucacuguugggc

SEQ ID NO: 442887 - RNA, 19 nt, Artificial Sequence
  Description of Artificial Sequence: Synthetic oligonucleotide
uuuuauacuagggacgugg

SEQ ID NO: 442888 - RNA, 19 nt, Artificial Sequence
  Description of Artificial Sequence: Synthetic oligonucleotide
aguagugcuuauuaguaac

SEQ ID NO: 442889 - RNA, 19 nt, Artificial Sequence
  Description of Artificial Sequence: Synthetic oligonucleotide
agggaaagcgcccagauag

SEQ ID NO: 442890 - RNA, 19 nt, Artificial Sequence
  Description of Artificial Sequence: Synthetic oligonucleotide
ugugcuaaauuacaguagu

SEQ ID NO: 442891 - RNA, 19 nt, Artificial Sequence
  Description of Artificial Sequence: Synthetic oligonucleotide
ugucuuuacucccggagcg

SEQ ID NO: 442892 - RNA, 19 nt, Artificial Sequence
  Description of Artificial Sequence: Synthetic oligonucleotide
ucaacgaaugaauagaauu

SEQ ID NO: 442893 - RNA, 19 nt, Artificial Sequence
  Description of Artificial Sequence: Synthetic oligonucleotide
uaaaacugugcuaaauuac

SEQ ID NO: 442894 - RNA, 19 nt, Artificial Sequence
  Description of Artificial Sequence: Synthetic oligonucleotide
cacagcaccacuuuugugc

SEQ ID NO: 442895 - RNA, 19 nt, Artificial Sequence
  Description of Artificial Sequence: Synthetic oligonucleotide
uggauugauagggaaagcg

SEQ ID NO: 442896 - RNA, 19 nt, Artificial Sequence
  Description of Artificial Sequence: Synthetic oligonucleotide
aaguuuaaaaugagagugg

SEQ ID NO: 442897 - RNA, 19 nt, Artificial Sequence
  Description of Artificial Sequence: Synthetic oligonucleotide
guugcugugagcaaggcag

SEQ ID NO: 442898 - RNA, 19 nt, Artificial Sequence
  Description of Artificial Sequence: Synthetic oligonucleotide
aaucacugaaaccaccgga

SEQ ID NO: 442899 - RNA, 19 nt, Artificial Sequence
  Description of Artificial Sequence: Synthetic oligonucleotide
ucuaaagacggguguaucc

SEQ ID NO: 442900 - RNA, 19 nt, Artificial Sequence
  Description of Artificial Sequence: Synthetic oligonucleotide
caauagagauaccuggugg

SEQ ID NO: 442901 - RNA, 19 nt, Artificial Sequence
  Description of Artificial Sequence: Synthetic oligonucleotide
uuugucuucgccccgaauc

SEQ ID NO: 442902 - RNA, 19 nt, Artificial Sequence
  Description of Artificial Sequence: Synthetic oligonucleotide
caaacuaugcacuauuuca

SEQ ID NO: 442903 - RNA, 19 nt, Artificial Sequence
  Description of Artificial Sequence: Synthetic oligonucleotide
acacaaaaccggcaucucc

SEQ ID NO: 442904 - RNA, 19 nt, Artificial Sequence
  Description of Artificial Sequence: Synthetic oligonucleotide
uauacuagggacguggaga

SEQ ID NO: 442905 - RNA, 19 nt, Artificial Sequence
  Description of Artificial Sequence: Synthetic oligonucleotide
aagucucgguacuuuauag

SEQ ID NO: 442906 - RNA, 19 nt, Artificial Sequence
  Description of Artificial Sequence: Synthetic oligonucleotide
uacuuuauagauuugucuu

SEQ ID NO: 442907 - RNA, 19 nt, Artificial Sequence
  Description of Artificial Sequence: Synthetic oligonucleotide
aaagcgcccagauagggga

SEQ ID NO: 442908 - RNA, 19 nt, Artificial Sequence
  Description of Artificial Sequence: Synthetic oligonucleotide
ugaucaacgaaugaauaga

SEQ ID NO: 442909 - RNA, 19 nt, Artificial Sequence
  Description of Artificial Sequence: Synthetic oligonucleotide
aguaacuagauugcaaaag

SEQ ID NO: 442910 - RNA, 19 nt, Artificial Sequence
  Description of Artificial Sequence: Synthetic oligonucleotide
gauugauagggaaagcgcc

SEQ ID NO: 442911 - RNA, 19 nt, Artificial Sequence
  Description of Artificial Sequence: Synthetic oligonucleotide
cuagauugcaaaagguuac

SEQ ID NO: 442912 - RNA, 19 nt, Artificial Sequence
  Description of Artificial Sequence: Synthetic oligonucleotide
gugaucaacgaaugaauag

SEQ ID NO: 442913 - RNA, 19 nt, Artificial Sequence
  Description of Artificial Sequence: Synthetic oligonucleotide
gucuuuaccucuuuuguug

SEQ ID NO: 442914 - RNA, 19 nt, Artificial Sequence
  Description of Artificial Sequence: Synthetic oligonucleotide
uaacuagauugcaaaaggu

SEQ ID NO: 442915 - RNA, 19 nt, Artificial Sequence
  Description of Artificial Sequence: Synthetic oligonucleotide
aguggaguuaaaacugugc

SEQ ID NO: 442916 - RNA, 19 nt, Artificial Sequence
  Description of Artificial Sequence: Synthetic oligonucleotide
ugaaaccaccggaaggcgg

SEQ ID NO: 442917 - RNA, 19 nt, Artificial Sequence
  Description of Artificial Sequence: Synthetic oligonucleotide
auugauagggaaagcgccc

SEQ ID NO: 442918 - RNA, 19 nt, Artificial Sequence
  Description of Artificial Sequence: Synthetic oligonucleotide
aaaaugagaguggaguuaa

SEQ ID NO: 442919 - RNA, 19 nt, Artificial Sequence
  Description of Artificial Sequence: Synthetic oligonucleotide
uuucgguuccuacaacugc

SEQ ID NO: 442920 - RNA, 19 nt, Artificial Sequence
  Description of Artificial Sequence: Synthetic oligonucleotide
aaaaccggcaucucccgca

SEQ ID NO: 442921 - RNA, 19 nt, Artificial Sequence
  Description of Artificial Sequence: Synthetic oligonucleotide
acaauagagauaccuggug

SEQ ID NO: 442922 - RNA, 19 nt, Artificial Sequence
  Description of Artificial Sequence: Synthetic oligonucleotide
uuaaaaugagaguggaguu

SEQ ID NO: 442923 - RNA, 19 nt, Artificial Sequence
  Description of Artificial Sequence: Synthetic oligonucleotide
cacauggauggauacagag

SEQ ID NO: 442924 - RNA, 19 nt, Artificial Sequence
  Description of Artificial Sequence: Synthetic oligonucleotide
aucgacauucucuuuauaa

SEQ ID NO: 442925 - RNA, 19 nt, Artificial Sequence
  Description of Artificial Sequence: Synthetic oligonucleotide
uuauacuagggacguggag

SEQ ID NO: 442926 - RNA, 19 nt, Artificial Sequence
  Description of Artificial Sequence: Synthetic oligonucleotide
cuaaagacggguguauccg

SEQ ID NO: 442927 - RNA, 19 nt, Artificial Sequence
  Description of Artificial Sequence: Synthetic oligonucleotide
aggauugagaugugggcuc

SEQ ID NO: 442928 - RNA, 19 nt, Artificial Sequence
  Description of Artificial Sequence: Synthetic oligonucleotide
aaacugugcuaaauuacag

SEQ ID NO: 442929 - RNA, 19 nt, Artificial Sequence
  Description of Artificial Sequence: Synthetic oligonucleotide
ugcaccacgcgcuuuagca

SEQ ID NO: 442930 - RNA, 19 nt, Artificial Sequence
  Description of Artificial Sequence: Synthetic oligonucleotide
ugcuuauuaguaacuagau

SEQ ID NO: 442931 - RNA, 19 nt, Artificial Sequence
  Description of Artificial Sequence: Synthetic oligonucleotide
uauacggugccaucgacau

SEQ ID NO: 442932 - RNA, 19 nt, Artificial Sequence
  Description of Artificial Sequence: Synthetic oligonucleotide
uaccaaaggaagaguagug

SEQ ID NO: 442933 - RNA, 19 nt, Artificial Sequence
  Description of Artificial Sequence: Synthetic oligonucleotide
agggguucacugaugaugc

SEQ ID NO: 442934 - RNA, 19 nt, Artificial Sequence
  Description of Artificial Sequence: Synthetic oligonucleotide
gagauguuaaaaugacaac

SEQ ID NO: 442935 - RNA, 19 nt, Artificial Sequence
  Description of Artificial Sequence: Synthetic oligonucleotide
ugguacuuuugucuguccc

SEQ ID NO: 442936 - RNA, 19 nt, Artificial Sequence
  Description of Artificial Sequence: Synthetic oligonucleotide
uuuauacuagggacgugga

SEQ ID NO: 442937 - RNA, 19 nt, Artificial Sequence
  Description of Artificial Sequence: Synthetic oligonucleotide
acugauuguccauucuuug

SEQ ID NO: 442938 - RNA, 19 nt, Artificial Sequence
  Description of Artificial Sequence: Synthetic oligonucleotide
cacacgagcagugacauug

SEQ ID NO: 442939 - RNA, 19 nt, Artificial Sequence
  Description of Artificial Sequence: Synthetic oligonucleotide
uacagaggggcuucuauac

SEQ ID NO: 442940 - RNA, 19 nt, Artificial Sequence
  Description of Artificial Sequence: Synthetic oligonucleotide
aaacagcauguuccucggc

SEQ ID NO: 442941 - RNA, 19 nt, Artificial Sequence
  Description of Artificial Sequence: Synthetic oligonucleotide
gaagaguagugggagagug

SEQ ID NO: 442942 - RNA, 19 nt, Artificial Sequence
  Description of Artificial Sequence: Synthetic oligonucleotide
uucgguuccuacaacugcu

SEQ ID NO: 442943 - RNA, 19 nt, Artificial Sequence
  Description of Artificial Sequence: Synthetic oligonucleotide
cagaggggcuucuauacgg

SEQ ID NO: 442944 - RNA, 19 nt, Artificial Sequence
  Description of Artificial Sequence: Synthetic oligonucleotide
cuucuauacggugccaucg

SEQ ID NO: 442945 - RNA, 19 nt, Artificial Sequence
  Description of Artificial Sequence: Synthetic oligonucleotide
ccuacuaccgaugauaggc

SEQ ID NO: 442946 - RNA, 19 nt, Artificial Sequence
  Description of Artificial Sequence: Synthetic oligonucleotide
agugggcucugacuguagc

SEQ ID NO: 442947 - RNA, 19 nt, Artificial Sequence
  Description of Artificial Sequence: Synthetic oligonucleotide
cugugcuaaauuacaguag

SEQ ID NO: 442948 - RNA, 19 nt, Artificial Sequence
  Description of Artificial Sequence: Synthetic oligonucleotide
aaaccggcaucucccgcac

SEQ ID NO: 442949 - RNA, 19 nt, Artificial Sequence
  Description of Artificial Sequence: Synthetic oligonucleotide
aacgaaugaauagaauuuu

SEQ ID NO: 442950 - RNA, 19 nt, Artificial Sequence
  Description of Artificial Sequence: Synthetic oligonucleotide
aacuagauugcaaaagguu

SEQ ID NO: 442951 - RNA, 19 nt, Artificial Sequence
  Description of Artificial Sequence: Synthetic oligonucleotide
cauggcuaggcacaggcug

SEQ ID NO: 442952 - RNA, 19 nt, Artificial Sequence
  Description of Artificial Sequence: Synthetic oligonucleotide
uauaaacgugaguggauuc

SEQ ID NO: 442953 - RNA, 19 nt, Artificial Sequence
  Description of Artificial Sequence: Synthetic oligonucleotide
agugcguagcucugcugcc

SEQ ID NO: 442954 - RNA, 19 nt, Artificial Sequence
  Description of Artificial Sequence: Synthetic oligonucleotide
ccacaauagagauaccugg

SEQ ID NO: 442955 - RNA, 19 nt, Artificial Sequence
  Description of Artificial Sequence: Synthetic oligonucleotide
aaaauccgucacuguuggg

SEQ ID NO: 442956 - RNA, 19 nt, Artificial Sequence
  Description of Artificial Sequence: Synthetic oligonucleotide
ugguucuaaagacgggugu

SEQ ID NO: 442957 - RNA, 19 nt, Artificial Sequence
  Description of Artificial Sequence: Synthetic oligonucleotide
cuaucaggcuuccacugcc

SEQ ID NO: 442958 - RNA, 19 nt, Artificial Sequence
  Description of Artificial Sequence: Synthetic oligonucleotide
ugcauucaguuuuauucac

SEQ ID NO: 442959 - RNA, 19 nt, Artificial Sequence
  Description of Artificial Sequence: Synthetic oligonucleotide
uggucuccuaaaacaauac

SEQ ID NO: 442960 - RNA, 19 nt, Artificial Sequence
  Description of Artificial Sequence: Synthetic oligonucleotide
acuagggacguggagaugu

SEQ ID NO: 442961 - RNA, 19 nt, Artificial Sequence
  Description of Artificial Sequence: Synthetic oligonucleotide
uuauaaacgugaguggauu

SEQ ID NO: 442962 - RNA, 19 nt, Artificial Sequence
  Description of Artificial Sequence: Synthetic oligonucleotide
acagaggggcuucuauacg

SEQ ID NO: 442963 - RNA, 19 nt, Artificial Sequence
  Description of Artificial Sequence: Synthetic oligonucleotide
uucuauacggugccaucga

SEQ ID NO: 442964 - RNA, 19 nt, Artificial Sequence
  Description of Artificial Sequence: Synthetic oligonucleotide
cuuucgguuccuacaacug

SEQ ID NO: 442965 - RNA, 19 nt, Artificial Sequence
  Description of Artificial Sequence: Synthetic oligonucleotide
acgaaugaauagaauuuuc

SEQ ID NO: 442966 - RNA, 19 nt, Artificial Sequence
  Description of Artificial Sequence: Synthetic oligonucleotide
gguggugcaacauggcggg

SEQ ID NO: 442967 - RNA, 19 nt, Artificial Sequence
  Description of Artificial Sequence: Synthetic oligonucleotide
guagccaggauugagaugu

SEQ ID NO: 442968 - RNA, 19 nt, Artificial Sequence
  Description of Artificial Sequence: Synthetic oligonucleotide
agucggacuggccauugag

SEQ ID NO: 442969 - RNA, 19 nt, Artificial Sequence
  Description of Artificial Sequence: Synthetic oligonucleotide
gaaaccaccggaaggcggc

SEQ ID NO: 442970 - RNA, 19 nt, Artificial Sequence
  Description of Artificial Sequence: Synthetic oligonucleotide
guacuuuauagauuugucu

SEQ ID NO: 442971 - RNA, 19 nt, Artificial Sequence
  Description of Artificial Sequence: Synthetic oligonucleotide
auagggaggcugcggcugc

SEQ ID NO: 442972 - RNA, 19 nt, Artificial Sequence
  Description of Artificial Sequence: Synthetic oligonucleotide
gaaagcgcccagauagggg

SEQ ID NO: 442973 - RNA, 19 nt, Artificial Sequence
  Description of Artificial Sequence: Synthetic oligonucleotide
caccuacuaccgaugauag

SEQ ID NO: 442974 - RNA, 19 nt, Artificial Sequence
  Description of Artificial Sequence: Synthetic oligonucleotide
auaaacgugaguggauucu

SEQ ID NO: 442975 - RNA, 19 nt, Artificial Sequence
  Description of Artificial Sequence: Synthetic oligonucleotide
auacuagggacguggagau

SEQ ID NO: 442976 - RNA, 19 nt, Artificial Sequence
  Description of Artificial Sequence: Synthetic oligonucleotide
agucuuucgguuccuacaa

SEQ ID NO: 442977 - RNA, 19 nt, Artificial Sequence
  Description of Artificial Sequence: Synthetic oligonucleotide
ucuauacggugccaucgac

SEQ ID NO: 442978 - RNA, 19 nt, Artificial Sequence
  Description of Artificial Sequence: Synthetic oligonucleotide
aggucaugaccauuggcca

SEQ ID NO: 442979 - RNA, 19 nt, Artificial Sequence
  Description of Artificial Sequence: Synthetic oligonucleotide
gucuccuaaaacaauacaa

SEQ ID NO: 442980 - RNA, 19 nt, Artificial Sequence
  Description of Artificial Sequence: Synthetic oligonucleotide
uggccaauagggaggcugc

SEQ ID NO: 442981 - RNA, 19 nt, Artificial Sequence
  Description of Artificial Sequence: Synthetic oligonucleotide
caaguguccacgcagaacu

SEQ ID NO: 442982 - RNA, 19 nt, Artificial Sequence
  Description of Artificial Sequence: Synthetic oligonucleotide
acagaugagugcguagcuc

SEQ ID NO: 442983 - RNA, 19 nt, Artificial Sequence
  Description of Artificial Sequence: Synthetic oligonucleotide
cauugacacaggaaggaga

SEQ ID NO: 442984 - RNA, 19 nt, Artificial Sequence
  Description of Artificial Sequence: Synthetic oligonucleotide
uaaagacggguguauccgu

SEQ ID NO: 442985 - RNA, 19 nt, Artificial Sequence
  Description of Artificial Sequence: Synthetic oligonucleotide
uguggccgcagccacugug

SEQ ID NO: 442986 - RNA, 19 nt, Artificial Sequence
  Description of Artificial Sequence: Synthetic oligonucleotide
acauugacacaggaaggag

SEQ ID NO: 442987 - RNA, 19 nt, Artificial Sequence
  Description of Artificial Sequence: Synthetic oligonucleotide
uccucacacuuucugaauu

SEQ ID NO: 442988 - RNA, 19 nt, Artificial Sequence
  Description of Artificial Sequence: Synthetic oligonucleotide
gaagcccuuucuucuguug

SEQ ID NO: 442989 - RNA, 19 nt, Artificial Sequence
  Description of Artificial Sequence: Synthetic oligonucleotide
acgugaguggauucuccag

SEQ ID NO: 442990 - RNA, 19 nt, Artificial Sequence
  Description of Artificial Sequence: Synthetic oligonucleotide
uugccggagaccacacgag

SEQ ID NO: 442991 - RNA, 19 nt, Artificial Sequence
  Description of Artificial Sequence: Synthetic oligonucleotide
gaguggauucuccaggcaa

SEQ ID NO: 442992 - RNA, 19 nt, Artificial Sequence
  Description of Artificial Sequence: Synthetic oligonucleotide
acuaccgaugauaggcagg

SEQ ID NO: 442993 - RNA, 19 nt, Artificial Sequence
  Description of Artificial Sequence: Synthetic oligonucleotide
ggauugauagggaaagcgc

SEQ ID NO: 442994 - RNA, 19 nt, Artificial Sequence
  Description of Artificial Sequence: Synthetic oligonucleotide
gguuacagaaaauuuacau

SEQ ID NO: 442995 - RNA, 19 nt, Artificial Sequence
  Description of Artificial Sequence: Synthetic oligonucleotide
agaucucagugaucaacga

SEQ ID NO: 442996 - RNA, 19 nt, Artificial Sequence
  Description of Artificial Sequence: Synthetic oligonucleotide
uuuacucccggagcgcagc

SEQ ID NO: 442997 - RNA, 19 nt, Artificial Sequence
  Description of Artificial Sequence: Synthetic oligonucleotide
cuugccggagaccacacga

SEQ ID NO: 442998 - RNA, 19 nt, Artificial Sequence
  Description of Artificial Sequence: Synthetic oligonucleotide
ucuuuacucccggagcgca

SEQ ID NO: 442999 - RNA, 19 nt, Artificial Sequence
  Description of Artificial Sequence: Synthetic oligonucleotide
uccguuugucuucgccccg

SEQ ID NO: 443000 - RNA, 19 nt, Artificial Sequence
  Description of Artificial Sequence: Synthetic oligonucleotide
ugaugccacucuuguuccg

SEQ ID NO: 443001 - RNA, 19 nt, Artificial Sequence
  Description of Artificial Sequence: Synthetic oligonucleotide
ucgguuccuacaacugcug

SEQ ID NO: 443002 - RNA, 19 nt, Artificial Sequence
  Description of Artificial Sequence: Synthetic oligonucleotide
acaguagugcuuauuagua

SEQ ID NO: 443003 - RNA, 19 nt, Artificial Sequence
  Description of Artificial Sequence: Synthetic oligonucleotide
accuacuaccgaugauagg

SEQ ID NO: 443004 - RNA, 19 nt, Artificial Sequence
  Description of Artificial Sequence: Synthetic oligonucleotide
uguggacugugcgaacugc

SEQ ID NO: 443005 - RNA, 19 nt, Artificial Sequence
  Description of Artificial Sequence: Synthetic oligonucleotide
uaucaggcuuccacugcca

SEQ ID NO: 443006 - RNA, 19 nt, Artificial Sequence
  Description of Artificial Sequence: Synthetic oligonucleotide
gaugagugcguagcucugc

SEQ ID NO: 443007 - RNA, 19 nt, Artificial Sequence
  Description of Artificial Sequence: Synthetic oligonucleotide
augugcagcgcgcucucag

SEQ ID NO: 443008 - RNA, 19 nt, Artificial Sequence
  Description of Artificial Sequence: Synthetic oligonucleotide
gcuaaauuacaguagugcu

SEQ ID NO: 443009 - RNA, 19 nt, Artificial Sequence
  Description of Artificial Sequence: Synthetic oligonucleotide
auacagaggggcuucuaua

SEQ ID NO: 443010 - RNA, 19 nt, Artificial Sequence
  Description of Artificial Sequence: Synthetic oligonucleotide
uucgccccgaaucccuugc

SEQ ID NO: 443011 - RNA, 19 nt, Artificial Sequence
  Description of Artificial Sequence: Synthetic oligonucleotide
cuauacggugccaucgaca

SEQ ID NO: 443012 - RNA, 19 nt, Artificial Sequence
  Description of Artificial Sequence: Synthetic oligonucleotide
gucggacuggccauugagg

SEQ ID NO: 443013 - RNA, 19 nt, Artificial Sequence
  Description of Artificial Sequence: Synthetic oligonucleotide
ugggcaccuacuaccgaug

SEQ ID NO: 443014 - RNA, 19 nt, Artificial Sequence
  Description of Artificial Sequence: Synthetic oligonucleotide
agacggguguauccguuug

SEQ ID NO: 443015 - RNA, 19 nt, Artificial Sequence
  Description of Artificial Sequence: Synthetic oligonucleotide
cauuggccaauagggaggc

SEQ ID NO: 443016 - RNA, 19 nt, Artificial Sequence
  Description of Artificial Sequence: Synthetic oligonucleotide
auggcuaggcacaggcugg

SEQ ID NO: 443017 - RNA, 19 nt, Artificial Sequence
  Description of Artificial Sequence: Synthetic oligonucleotide
gacguggagauguuaaaau

SEQ ID NO: 443018 - RNA, 19 nt, Artificial Sequence
  Description of Artificial Sequence: Synthetic oligonucleotide
aucacugaaaccaccggaa

SEQ ID NO: 443019 - RNA, 19 nt, Artificial Sequence
  Description of Artificial Sequence: Synthetic oligonucleotide
augagugcguagcucugcu

SEQ ID NO: 443020 - RNA, 19 nt, Artificial Sequence
  Description of Artificial Sequence: Synthetic oligonucleotide
ugugagcaaggcaggggaa

SEQ ID NO: 443021 - RNA, 19 nt, Artificial Sequence
  Description of Artificial Sequence: Synthetic oligonucleotide
cccagauaggggaagucgg

SEQ ID NO: 443022 - RNA, 19 nt, Artificial Sequence
  Description of Artificial Sequence: Synthetic oligonucleotide
guguauccguuugucuucg

SEQ ID NO: 443023 - RNA, 19 nt, Artificial Sequence
  Description of Artificial Sequence: Synthetic oligonucleotide
caacgaaugaauagaauuu

SEQ ID NO: 443024 - RNA, 19 nt, Artificial Sequence
  Description of Artificial Sequence: Synthetic oligonucleotide
uucuaaagacggguguauc

SEQ ID NO: 443025 - RNA, 19 nt, Artificial Sequence
  Description of Artificial Sequence: Synthetic oligonucleotide
ugcguagcucugcugccca

SEQ ID NO: 443026 - RNA, 19 nt, Artificial Sequence
  Description of Artificial Sequence: Synthetic oligonucleotide
cucacacuuucugaauuug

SEQ ID NO: 443027 - RNA, 19 nt, Artificial Sequence
  Description of Artificial Sequence: Synthetic oligonucleotide
acgcagaacugucuuuacu

SEQ ID NO: 443028 - RNA, 19 nt, Artificial Sequence
  Description of Artificial Sequence: Synthetic oligonucleotide
acggguguauccguuuguc

SEQ ID NO: 443029 - RNA, 19 nt, Artificial Sequence
  Description of Artificial Sequence: Synthetic oligonucleotide
ugcgaacugcugcagcguc

SEQ ID NO: 443030 - RNA, 19 nt, Artificial Sequence
  Description of Artificial Sequence: Synthetic oligonucleotide
ucgguacuuuauagauuug

SEQ ID NO: 443031 - RNA, 19 nt, Artificial Sequence
  Description of Artificial Sequence: Synthetic oligonucleotide
acaugcauucaguuuuauu

SEQ ID NO: 443032 - RNA, 19 nt, Artificial Sequence
  Description of Artificial Sequence: Synthetic oligonucleotide
ggaaagcgcccagauaggg

SEQ ID NO: 443033 - RNA, 19 nt, Artificial Sequence
  Description of Artificial Sequence: Synthetic oligonucleotide
auguuccucggcagggagc

SEQ ID NO: 443034 - RNA, 19 nt, Artificial Sequence
  Description of Artificial Sequence: Synthetic oligonucleotide
cuuuacucccggagcgcag

SEQ ID NO: 443035 - RNA, 19 nt, Artificial Sequence
  Description of Artificial Sequence: Synthetic oligonucleotide
ugggcucugacuguagcuc

SEQ ID NO: 443036 - RNA, 19 nt, Artificial Sequence
  Description of Artificial Sequence: Synthetic oligonucleotide
gauacagaggggcuucuau

SEQ ID NO: 443037 - RNA, 19 nt, Artificial Sequence
  Description of Artificial Sequence: Synthetic oligonucleotide
cacuauuucaugguuggaa

SEQ ID NO: 443038 - RNA, 19 nt, Artificial Sequence
  Description of Artificial Sequence: Synthetic oligonucleotide
ccaauagggaggcugcggc

SEQ ID NO: 443039 - RNA, 19 nt, Artificial Sequence
  Description of Artificial Sequence: Synthetic oligonucleotide
ucuguucggacgccugcuc

SEQ ID NO: 443040 - RNA, 19 nt, Artificial Sequence
  Description of Artificial Sequence: Synthetic oligonucleotide
ggauucuccaggcaaacua

SEQ ID NO: 443041 - RNA, 19 nt, Artificial Sequence
  Description of Artificial Sequence: Synthetic oligonucleotide
cuacuaccgaugauaggca

SEQ ID NO: 443042 - RNA, 19 nt, Artificial Sequence
  Description of Artificial Sequence: Synthetic oligonucleotide
uguucggacgccugcucuc

SEQ ID NO: 443043 - RNA, 19 nt, Artificial Sequence
  Description of Artificial Sequence: Synthetic oligonucleotide
acacgagcagugacauugc

SEQ ID NO: 443044 - RNA, 19 nt, Artificial Sequence
  Description of Artificial Sequence: Synthetic oligonucleotide
agaugugggcuccccagau

SEQ ID NO: 443045 - RNA, 19 nt, Artificial Sequence
  Description of Artificial Sequence: Synthetic oligonucleotide
gauagggaaagcgcccaga

SEQ ID NO: 443046 - RNA, 19 nt, Artificial Sequence
  Description of Artificial Sequence: Synthetic oligonucleotide
gaugccacucuuguuccga

SEQ ID NO: 443047 - RNA, 19 nt, Artificial Sequence
  Description of Artificial Sequence: Synthetic oligonucleotide
cagauaggggaagucggac

SEQ ID NO: 443048 - RNA, 19 nt, Artificial Sequence
  Description of Artificial Sequence: Synthetic oligonucleotide
caugaccauuggccaauag

SEQ ID NO: 443049 - RNA, 19 nt, Artificial Sequence
  Description of Artificial Sequence: Synthetic oligonucleotide
ggucuccuaaaacaauaca

SEQ ID NO: 443050 - RNA, 19 nt, Artificial Sequence
  Description of Artificial Sequence: Synthetic oligonucleotide
aguguccacgcagaacugu

SEQ ID NO: 443051 - RNA, 19 nt, Artificial Sequence
  Description of Artificial Sequence: Synthetic oligonucleotide
ugcuauuggugugcugcug

SEQ ID NO: 443052 - RNA, 19 nt, Artificial Sequence
  Description of Artificial Sequence: Synthetic oligonucleotide
cacaauagagauaccuggu

SEQ ID NO: 443053 - RNA, 19 nt, Artificial Sequence
  Description of Artificial Sequence: Synthetic oligonucleotide
cagaugagugcguagcucu

SEQ ID NO: 443054 - RNA, 19 nt, Artificial Sequence
  Description of Artificial Sequence: Synthetic oligonucleotide
guucggacgccugcucucg

SEQ ID NO: 443055 - RNA, 19 nt, Artificial Sequence
  Description of Artificial Sequence: Synthetic oligonucleotide
ucggaagcaucaccuucuc

SEQ ID NO: 443056 - RNA, 19 nt, Artificial Sequence
  Description of Artificial Sequence: Synthetic oligonucleotide
aacaugcauucaguuuuau

SEQ ID NO: 443057 - RNA, 19 nt, Artificial Sequence
  Description of Artificial Sequence: Synthetic oligonucleotide
aucgacauugacacaggaa

SEQ ID NO: 443058 - RNA, 19 nt, Artificial Sequence
  Description of Artificial Sequence: Synthetic oligonucleotide
caguagugcuuauuaguaa

SEQ ID NO: 443059 - RNA, 19 nt, Artificial Sequence
  Description of Artificial Sequence: Synthetic oligonucleotide
gugguacuuuugucugucc

SEQ ID NO: 443060 - RNA, 19 nt, Artificial Sequence
  Description of Artificial Sequence: Synthetic oligonucleotide
uggauucuccaggcaaacu

SEQ ID NO: 443061 - RNA, 19 nt, Artificial Sequence
  Description of Artificial Sequence: Synthetic oligonucleotide
uguauccguuugucuucgc

SEQ ID NO: 443062 - RNA, 19 nt, Artificial Sequence
  Description of Artificial Sequence: Synthetic oligonucleotide
gcccagauaggggaagucg

SEQ ID NO: 443063 - RNA, 19 nt, Artificial Sequence
  Description of Artificial Sequence: Synthetic oligonucleotide
cuaccaaaggaagaguagu

SEQ ID NO: 443064 - RNA, 19 nt, Artificial Sequence
  Description of Artificial Sequence: Synthetic oligonucleotide
cacgcagaacugucuuuac

SEQ ID NO: 443065 - RNA, 19 nt, Artificial Sequence
  Description of Artificial Sequence: Synthetic oligonucleotide
ccgaugauaggcaggggac

SEQ ID NO: 443066 - RNA, 19 nt, Artificial Sequence
  Description of Artificial Sequence: Synthetic oligonucleotide
ggcgucgucugccacugag

SEQ ID NO: 443067 - RNA, 19 nt, Artificial Sequence
  Description of Artificial Sequence: Synthetic oligonucleotide
aaccaccggaaggcggcuc

SEQ ID NO: 443068 - RNA, 19 nt, Artificial Sequence
  Description of Artificial Sequence: Synthetic oligonucleotide
cacggagagggcagcuuug

SEQ ID NO: 443069 - RNA, 19 nt, Artificial Sequence
  Description of Artificial Sequence: Synthetic oligonucleotide
cgguggugcaacauggcgg

SEQ ID NO: 443070 - RNA, 19 nt, Artificial Sequence
  Description of Artificial Sequence: Synthetic oligonucleotide
ccuaucaggcuuccacugc

SEQ ID NO: 443071 - RNA, 19 nt, Artificial Sequence
  Description of Artificial Sequence: Synthetic oligonucleotide
gucuuucgguuccuacaac

SEQ ID NO: 443072 - RNA, 19 nt, Artificial Sequence
  Description of Artificial Sequence: Synthetic oligonucleotide
ucccggccgucacugaaau

SEQ ID NO: 443073 - RNA, 19 nt, Artificial Sequence
  Description of Artificial Sequence: Synthetic oligonucleotide
uaccgaugauaggcagggg

SEQ ID NO: 443074 - RNA, 19 nt, Artificial Sequence
  Description of Artificial Sequence: Synthetic oligonucleotide
acgcgcuuuagcaucucug

SEQ ID NO: 443075 - RNA, 19 nt, Artificial Sequence
  Description of Artificial Sequence: Synthetic oligonucleotide
guagugcuuauuaguaacu

SEQ ID NO: 443076 - RNA, 19 nt, Artificial Sequence
  Description of Artificial Sequence: Synthetic oligonucleotide
aggagacugauuguccauu

SEQ ID NO: 443077 - RNA, 19 nt, Artificial Sequence
  Description of Artificial Sequence: Synthetic oligonucleotide
agagcagcggaaggcuucu

SEQ ID NO: 443078 - RNA, 19 nt, Artificial Sequence
  Description of Artificial Sequence: Synthetic oligonucleotide
ggauugagaugugggcucc

SEQ ID NO: 443079 - RNA, 19 nt, Artificial Sequence
  Description of Artificial Sequence: Synthetic oligonucleotide
accgccgaggcucgacaug

SEQ ID NO: 443080 - RNA, 19 nt, Artificial Sequence
  Description of Artificial Sequence: Synthetic oligonucleotide
agaggggcuucuauacggu

SEQ ID NO: 443081 - RNA, 19 nt, Artificial Sequence
  Description of Artificial Sequence: Synthetic oligonucleotide
ucgccccgaaucccuugcc

SEQ ID NO: 443082 - RNA, 19 nt, Artificial Sequence
  Description of Artificial Sequence: Synthetic oligonucleotide
cucgcaguugaugcgccuc

SEQ ID NO: 443083 - RNA, 19 nt, Artificial Sequence
  Description of Artificial Sequence: Synthetic oligonucleotide
cuucgccccgaaucccuug

SEQ ID NO: 443084 - RNA, 19 nt, Artificial Sequence
  Description of Artificial Sequence: Synthetic oligonucleotide
gccaucgacauucucuuua

SEQ ID NO: 443085 - RNA, 19 nt, Artificial Sequence
  Description of Artificial Sequence: Synthetic oligonucleotide
uggguucccggccgucacu

SEQ ID NO: 443086 - RNA, 19 nt, Artificial Sequence
  Description of Artificial Sequence: Synthetic oligonucleotide
cccgccucacucaucagug

SEQ ID NO: 443087 - RNA, 19 nt, Artificial Sequence
  Description of Artificial Sequence: Synthetic oligonucleotide
ggcacauggucaagugucc

SEQ ID NO: 443088 - RNA, 19 nt, Artificial Sequence
  Description of Artificial Sequence: Synthetic oligonucleotide
ucuucgccccgaaucccuu

SEQ ID NO: 443089 - RNA, 19 nt, Artificial Sequence
  Description of Artificial Sequence: Synthetic oligonucleotide
gggaaagcgcccagauagg

SEQ ID NO: 443090 - RNA, 19 nt, Artificial Sequence
  Description of Artificial Sequence: Synthetic oligonucleotide
ggguugcuuuuguccacgg

SEQ ID NO: 443091 - RNA, 19 nt, Artificial Sequence
  Description of Artificial Sequence: Synthetic oligonucleotide
gcuucuauacggugccauc

SEQ ID NO: 443092 - RNA, 19 nt, Artificial Sequence
  Description of Artificial Sequence: Synthetic oligonucleotide
uacuagggacguggagaug

SEQ ID NO: 443093 - RNA, 19 nt, Artificial Sequence
  Description of Artificial Sequence: Synthetic oligonucleotide
gcgcuuuagcaucucugug

SEQ ID NO: 443094 - RNA, 19 nt, Artificial Sequence
  Description of Artificial Sequence: Synthetic oligonucleotide
cgucgucugccacugaggc

SEQ ID NO: 443095 - RNA, 19 nt, Artificial Sequence
  Description of Artificial Sequence: Synthetic oligonucleotide
gagagugggcgggaccgac

SEQ ID NO: 443096 - RNA, 19 nt, Artificial Sequence
  Description of Artificial Sequence: Synthetic oligonucleotide
ggagaccacacgagcagug

SEQ ID NO: 443097 - RNA, 19 nt, Artificial Sequence
  Description of Artificial Sequence: Synthetic oligonucleotide
accggaaggcggcucccgu

SEQ ID NO: 443098 - RNA, 19 nt, Artificial Sequence
  Description of Artificial Sequence: Synthetic oligonucleotide
aaccggcaucucccgcaca

SEQ ID NO: 443099 - RNA, 19 nt, Artificial Sequence
  Description of Artificial Sequence: Synthetic oligonucleotide
cagugggcucugacuguag

SEQ ID NO: 443100 - RNA, 19 nt, Artificial Sequence
  Description of Artificial Sequence: Synthetic oligonucleotide
ccggagaccacacgagcag

SEQ ID NO: 443101 - RNA, 19 nt, Artificial Sequence
  Description of Artificial Sequence: Synthetic oligonucleotide
gcaccuacuaccgaugaua

SEQ ID NO: 443102 - RNA, 19 nt, Artificial Sequence
  Description of Artificial Sequence: Synthetic oligonucleotide
gguucuaaagacgggugua

SEQ ID NO: 443103 - RNA, 19 nt, Artificial Sequence
  Description of Artificial Sequence: Synthetic oligonucleotide
ggucaugaccauuggccaa

SEQ ID NO: 443104 - RNA, 19 nt, Artificial Sequence
  Description of Artificial Sequence: Synthetic oligonucleotide
ucccugcaugggguacucg

SEQ ID NO: 443105 - RNA, 19 nt, Artificial Sequence
  Description of Artificial Sequence: Synthetic oligonucleotide
gaaggcggcucccgucgga

SEQ ID NO: 443106 - RNA, 19 nt, Artificial Sequence
  Description of Artificial Sequence: Synthetic oligonucleotide
gcccggacucagcaggcgg

SEQ ID NO: 443107 - RNA, 19 nt, Artificial Sequence
  Description of Artificial Sequence: Synthetic oligonucleotide
accgacgcaggcucuuguu

SEQ ID NO: 443108 - RNA, 19 nt, Artificial Sequence
  Description of Artificial Sequence: Synthetic oligonucleotide
cucggcugccagcucugug

SEQ ID NO: 443109 - RNA, 19 nt, Artificial Sequence
  Description of Artificial Sequence: Synthetic oligonucleotide
ggcgcgcauggcuaggcac

SEQ ID NO: 443110 - RNA, 19 nt, Artificial Sequence
  Description of Artificial Sequence: Synthetic oligonucleotide
cacggccauggccgcagcc

SEQ ID NO: 443111 - RNA, 19 nt, Artificial Sequence
  Description of Artificial Sequence: Synthetic oligonucleotide
ccaccggcgguccugggag

SEQ ID NO: 443112 - RNA, 19 nt, Artificial Sequence
  Description of Artificial Sequence: Synthetic oligonucleotide
ggguguauccguuugucuu

SEQ ID NO: 443113 - RNA, 19 nt, Artificial Sequence
  Description of Artificial Sequence: Synthetic oligonucleotide
uugcacggagagggcagcu

SEQ ID NO: 443114 - RNA, 19 nt, Artificial Sequence
  Description of Artificial Sequence: Synthetic oligonucleotide
caugccgcagcguuuccgu

SEQ ID NO: 443115 - RNA, 19 nt, Artificial Sequence
  Description of Artificial Sequence: Synthetic oligonucleotide
ggguacucggccaggccag

SEQ ID NO: 443116 - RNA, 19 nt, Artificial Sequence
  Description of Artificial Sequence: Synthetic oligonucleotide
cuauuggugugcugcugcu

SEQ ID NO: 443117 - RNA, 19 nt, Artificial Sequence
  Description of Artificial Sequence: Synthetic oligonucleotide
cacgagcagugacauugca

SEQ ID NO: 443118 - RNA, 19 nt, Artificial Sequence
  Description of Artificial Sequence: Synthetic oligonucleotide
ugcggcgcccggacucagc

SEQ ID NO: 443119 - RNA, 19 nt, Artificial Sequence
  Description of Artificial Sequence: Synthetic oligonucleotide
cacagaugagugcguagcu

SEQ ID NO: 443120 - RNA, 19 nt, Artificial Sequence
  Description of Artificial Sequence: Synthetic oligonucleotide
cacaugccgcagcguuucc

SEQ ID NO: 443121 - RNA, 19 nt, Artificial Sequence
  Description of Artificial Sequence: Synthetic oligonucleotide
gcgggcggaggacucggcg

SEQ ID NO: 443122 - RNA, 19 nt, Artificial Sequence
  Description of Artificial Sequence: Synthetic oligonucleotide
ugccaucgacauucucuuu

SEQ ID NO: 443123 - RNA, 19 nt, Artificial Sequence
  Description of Artificial Sequence: Synthetic oligonucleotide
cuggcucuguucggacgcc

SEQ ID NO: 443124 - RNA, 19 nt, Artificial Sequence
  Description of Artificial Sequence: Synthetic oligonucleotide
augauaggcaggggaccaa

SEQ ID NO: 443125 - RNA, 19 nt, Artificial Sequence
  Description of Artificial Sequence: Synthetic oligonucleotide
cucgacaugguggggccga

SEQ ID NO: 443126 - RNA, 19 nt, Artificial Sequence
  Description of Artificial Sequence: Synthetic oligonucleotide
aucccuugccggagaccac

SEQ ID NO: 443127 - RNA, 19 nt, Artificial Sequence
  Description of Artificial Sequence: Synthetic oligonucleotide
ggccaauagggaggcugcg

SEQ ID NO: 443128 - RNA, 19 nt, Artificial Sequence
  Description of Artificial Sequence: Synthetic oligonucleotide
caauagggaggcugcggcu

SEQ ID NO: 443129 - RNA, 19 nt, Artificial Sequence
  Description of Artificial Sequence: Synthetic oligonucleotide
ccagauaggggaagucgga

SEQ ID NO: 443130 - RNA, 19 nt, Artificial Sequence
  Description of Artificial Sequence: Synthetic oligonucleotide
auacggugccaucgacauu

SEQ ID NO: 443131 - RNA, 19 nt, Artificial Sequence
  Description of Artificial Sequence: Synthetic oligonucleotide
caccggaaggcggcucccg

SEQ ID NO: 443132 - RNA, 19 nt, Artificial Sequence
  Description of Artificial Sequence: Synthetic oligonucleotide
gcgucgucugccacugagg

SEQ ID NO: 443133 - RNA, 19 nt, Artificial Sequence
  Description of Artificial Sequence: Synthetic oligonucleotide
ccgacgcaggcucuuguug

SEQ ID NO: 443134 - RNA, 19 nt, Artificial Sequence
  Description of Artificial Sequence: Synthetic oligonucleotide
cuacaacugcugcacugcu

SEQ ID NO: 443135 - RNA, 19 nt, Artificial Sequence
  Description of Artificial Sequence: Synthetic oligonucleotide
ggaacacaccagcuggggu

SEQ ID NO: 443136 - RNA, 19 nt, Artificial Sequence
  Description of Artificial Sequence: Synthetic oligonucleotide
aagcgcccagauaggggaa

SEQ ID NO: 443137 - RNA, 19 nt, Artificial Sequence
  Description of Artificial Sequence: Synthetic oligonucleotide
acgccugcucucgccgccg

SEQ ID NO: 443138 - RNA, 19 nt, Artificial Sequence
  Description of Artificial Sequence: Synthetic oligonucleotide
gggcaccuacuaccgauga

SEQ ID NO: 443139 - RNA, 19 nt, Artificial Sequence
  Description of Artificial Sequence: Synthetic oligonucleotide
gacucggcgugcggcgccc

SEQ ID NO: 443140 - RNA, 19 nt, Artificial Sequence
  Description of Artificial Sequence: Synthetic oligonucleotide
cuuuggguucccggccguc

SEQ ID NO: 443141 - RNA, 19 nt, Artificial Sequence
  Description of Artificial Sequence: Synthetic oligonucleotide
gcgggaccgacgcaggcuc

SEQ ID NO: 443142 - RNA, 19 nt, Artificial Sequence
  Description of Artificial Sequence: Synthetic oligonucleotide
ggguucccggccgucacug

SEQ ID NO: 443143 - RNA, 19 nt, Artificial Sequence
  Description of Artificial Sequence: Synthetic oligonucleotide
cuguucggacgccugcucu

SEQ ID NO: 443144 - RNA, 19 nt, Artificial Sequence
  Description of Artificial Sequence: Synthetic oligonucleotide
ugccaccggcgguccuggg

SEQ ID NO: 443145 - RNA, 19 nt, Artificial Sequence
  Description of Artificial Sequence: Synthetic oligonucleotide
cucggcgugcggcgcccgg

SEQ ID NO: 443146 - RNA, 19 nt, Artificial Sequence
  Description of Artificial Sequence: Synthetic oligonucleotide
ccgccucacucaucagugg

SEQ ID NO: 443147 - RNA, 19 nt, Artificial Sequence
  Description of Artificial Sequence: Synthetic oligonucleotide
agcacccgccucacucauc

SEQ ID NO: 443148 - RNA, 19 nt, Artificial Sequence
  Description of Artificial Sequence: Synthetic oligonucleotide
cucccgucggaagcaucac

SEQ ID NO: 443149 - RNA, 19 nt, Artificial Sequence
  Description of Artificial Sequence: Synthetic oligonucleotide
gcacugcucgcaguugaug

SEQ ID NO: 443150 - RNA, 19 nt, Artificial Sequence
  Description of Artificial Sequence: Synthetic oligonucleotide
cugcuauuggugugcugcu

SEQ ID NO: 443151 - RNA, 19 nt, Artificial Sequence
  Description of Artificial Sequence: Synthetic oligonucleotide
gccggagaccacacgagca

SEQ ID NO: 443152 - RNA, 19 nt, Artificial Sequence
  Description of Artificial Sequence: Synthetic oligonucleotide
guggacugugcgaacugcu

SEQ ID NO: 443153 - RNA, 19 nt, Artificial Sequence
  Description of Artificial Sequence: Synthetic oligonucleotide
guccacgcagaacugucuu

SEQ ID NO: 443154 - RNA, 19 nt, Artificial Sequence
  Description of Artificial Sequence: Synthetic oligonucleotide
ccgcagccaggucaugacc

SEQ ID NO: 443155 - RNA, 19 nt, Artificial Sequence
  Description of Artificial Sequence: Synthetic oligonucleotide
ggacucggcgugcggcgcc

SEQ ID NO: 443156 - RNA, 19 nt, Artificial Sequence
  Description of Artificial Sequence: Synthetic oligonucleotide
caccacuuuugugcuuuga

SEQ ID NO: 443157 - RNA, 19 nt, Artificial Sequence
  Description of Artificial Sequence: Synthetic oligonucleotide
gcacauggucaagugucca

SEQ ID NO: 443158 - RNA, 19 nt, Artificial Sequence
  Description of Artificial Sequence: Synthetic oligonucleotide
gcucuuguugagggguuca

SEQ ID NO: 443159 - RNA, 19 nt, Artificial Sequence
  Description of Artificial Sequence: Synthetic oligonucleotide
guuugucuucgccccgaau

SEQ ID NO: 443160 - RNA, 19 nt, Artificial Sequence
  Description of Artificial Sequence: Synthetic oligonucleotide
gcucgacaugguggggccg

SEQ ID NO: 443161 - RNA, 19 nt, Artificial Sequence
  Description of Artificial Sequence: Synthetic oligonucleotide
gcacacaugccgcagcguu

SEQ ID NO: 443162 - RNA, 19 nt, Artificial Sequence
  Description of Artificial Sequence: Synthetic oligonucleotide
ggaagucucgguacuuuau

SEQ ID NO: 443163 - RNA, 19 nt, Artificial Sequence
  Description of Artificial Sequence: Synthetic oligonucleotide
cggacgccugcucucgccg

SEQ ID NO: 443164 - RNA, 19 nt, Artificial Sequence
  Description of Artificial Sequence: Synthetic oligonucleotide
cgccccgaaucccuugccg

SEQ ID NO: 443165 - RNA, 19 nt, Artificial Sequence
  Description of Artificial Sequence: Synthetic oligonucleotide
gcggaggacucggcgugcg

SEQ ID NO: 443166 - RNA, 19 nt, Artificial Sequence
  Description of Artificial Sequence: Synthetic oligonucleotide
cugcuaccaaaggaagagu

SEQ ID NO: 443167 - RNA, 19 nt, Artificial Sequence
  Description of Artificial Sequence: Synthetic oligonucleotide
acucggcgugcggcgcccg

SEQ ID NO: 443168 - RNA, 19 nt, Artificial Sequence
  Description of Artificial Sequence: Synthetic oligonucleotide
gcggcgcccggacucagca

SEQ ID NO: 443169 - RNA, 19 nt, Artificial Sequence
  Description of Artificial Sequence: Synthetic oligonucleotide
aggcucuuguugagggguu

SEQ ID NO: 443170 - RNA, 19 nt, Artificial Sequence
  Description of Artificial Sequence: Synthetic oligonucleotide
gcacuauuucaugguugga

SEQ ID NO: 443171 - RNA, 19 nt, Artificial Sequence
  Description of Artificial Sequence: Synthetic oligonucleotide
cacacaugccgcagcguuu

SEQ ID NO: 443172 - RNA, 19 nt, Artificial Sequence
  Description of Artificial Sequence: Synthetic oligonucleotide
gcucacagaugagugcgua

SEQ ID NO: 443173 - RNA, 19 nt, Artificial Sequence
  Description of Artificial Sequence: Synthetic oligonucleotide
gcgcgcauggcuaggcaca

SEQ ID NO: 443174 - RNA, 19 nt, Artificial Sequence
  Description of Artificial Sequence: Synthetic oligonucleotide
gccaccggcgguccuggga

SEQ ID NO: 443175 - RNA, 19 nt, Artificial Sequence
  Description of Artificial Sequence: Synthetic oligonucleotide
ccggaaggcggcucccguc

SEQ ID NO: 443176 - RNA, 19 nt, Artificial Sequence
  Description of Artificial Sequence: Synthetic oligonucleotide
ccaucgacauucucuuuau

SEQ ID NO: 443177 - RNA, 19 nt, Artificial Sequence
  Description of Artificial Sequence: Synthetic oligonucleotide
gguucccggccgucacuga

SEQ ID NO: 443178 - RNA, 19 nt, Artificial Sequence
  Description of Artificial Sequence: Synthetic oligonucleotide
cuagggacguggagauguu

SEQ ID NO: 443179 - RNA, 19 nt, Artificial Sequence
  Description of Artificial Sequence: Synthetic oligonucleotide
ggcggcgcgcauggcuagg

SEQ ID NO: 443180 - RNA, 19 nt, Artificial Sequence
  Description of Artificial Sequence: Synthetic oligonucleotide
cgguacuuuauagauuugu

SEQ ID NO: 443181 - RNA, 19 nt, Artificial Sequence
  Description of Artificial Sequence: Synthetic oligonucleotide
ggauacagaggggcuucua

SEQ ID NO: 443182 - RNA, 19 nt, Artificial Sequence
  Description of Artificial Sequence: Synthetic oligonucleotide
gcguagcucugcugcccac

SEQ ID NO: 443183 - RNA, 19 nt, Artificial Sequence
  Description of Artificial Sequence: Synthetic oligonucleotide
ccccuaucaggcuuccacu

SEQ ID NO: 443184 - RNA, 19 nt, Artificial Sequence
  Description of Artificial Sequence: Synthetic oligonucleotide
ggcaccuacuaccgaugau

SEQ ID NO: 443185 - RNA, 19 nt, Artificial Sequence
  Description of Artificial Sequence: Synthetic oligonucleotide
gcgcauggcuaggcacagg

SEQ ID NO: 443186 - RNA, 19 nt, Artificial Sequence
  Description of Artificial Sequence: Synthetic oligonucleotide
gcggcgcgcauggcuaggc

SEQ ID NO: 443187 - RNA, 19 nt, Artificial Sequence
  Description of Artificial Sequence: Synthetic oligonucleotide
gcgcccggacucagcaggc

SEQ ID NO: 443188 - RNA, 19 nt, Artificial Sequence
  Description of Artificial Sequence: Synthetic oligonucleotide
ccaccggaaggcggcuccc

SEQ ID NO: 443189 - RNA, 19 nt, Artificial Sequence
  Description of Artificial Sequence: Synthetic oligonucleotide
gggcuucuauacggugcca

SEQ ID NO: 443190 - RNA, 19 nt, Artificial Sequence
  Description of Artificial Sequence: Synthetic oligonucleotide
gacgcggggccgggcuguc

SEQ ID NO: 443191 - RNA, 19 nt, Artificial Sequence
  Description of Artificial Sequence: Synthetic oligonucleotide
cagccaugugcagcgcgcu

SEQ ID NO: 443192 - RNA, 19 nt, Artificial Sequence
  Description of Artificial Sequence: Synthetic oligonucleotide
gcauggcuaggcacaggcu

SEQ ID NO: 443193 - RNA, 19 nt, Artificial Sequence
  Description of Artificial Sequence: Synthetic oligonucleotide
ccguuugucuucgccccga

SEQ ID NO: 443194 - RNA, 19 nt, Artificial Sequence
  Description of Artificial Sequence: Synthetic oligonucleotide
cagcacccgccucacucau

SEQ ID NO: 443195 - RNA, 19 nt, Artificial Sequence
  Description of Artificial Sequence: Synthetic oligonucleotide
gccuccggcagggcgcaca

SEQ ID NO: 443196 - RNA, 19 nt, Artificial Sequence
  Description of Artificial Sequence: Synthetic oligonucleotide
cccggccgucacugaaauc

SEQ ID NO: 443197 - RNA, 19 nt, Artificial Sequence
  Description of Artificial Sequence: Synthetic oligonucleotide
ccacggccauggccgcagc

SEQ ID NO: 443198 - RNA, 19 nt, Artificial Sequence
  Description of Artificial Sequence: Synthetic oligonucleotide
cggguguauccguuugucu

SEQ ID NO: 443199 - RNA, 19 nt, Artificial Sequence
  Description of Artificial Sequence: Synthetic oligonucleotide
cggacucagcaggcggcgc

SEQ ID NO: 443200 - RNA, 19 nt, Artificial Sequence
  Description of Artificial Sequence: Synthetic oligonucleotide
ccacucuuguuccgacgcu

SEQ ID NO: 443201 - RNA, 19 nt, Artificial Sequence
  Description of Artificial Sequence: Synthetic oligonucleotide
guguggccgcagccacugu

SEQ ID NO: 443202 - RNA, 19 nt, Artificial Sequence
  Description of Artificial Sequence: Synthetic oligonucleotide
ggggacgguggugcaacau

SEQ ID NO: 443203 - RNA, 19 nt, Artificial Sequence
  Description of Artificial Sequence: Synthetic oligonucleotide
cggcgcccggacucagcag

SEQ ID NO: 443204 - RNA, 19 nt, Artificial Sequence
  Description of Artificial Sequence: Synthetic oligonucleotide
cguuugucuucgccccgaa

SEQ ID NO: 443205 - RNA, 19 nt, Artificial Sequence
  Description of Artificial Sequence: Synthetic oligonucleotide
gcgcccagauaggggaagu

SEQ ID NO: 443206 - RNA, 19 nt, Artificial Sequence
  Description of Artificial Sequence: Synthetic oligonucleotide
ccggcaucucccgcacaga

SEQ ID NO: 443207 - RNA, 19 nt, Artificial Sequence
  Description of Artificial Sequence: Synthetic oligonucleotide
gggcgucgucugccacuga

SEQ ID NO: 443208 - RNA, 19 nt, Artificial Sequence
  Description of Artificial Sequence: Synthetic oligonucleotide
gcgccuccggcagggcgca

SEQ ID NO: 443209 - RNA, 19 nt, Artificial Sequence
  Description of Artificial Sequence: Synthetic oligonucleotide
gggaccgacgcaggcucuu

SEQ ID NO: 443210 - RNA, 19 nt, Artificial Sequence
  Description of Artificial Sequence: Synthetic oligonucleotide
ccgaggcccagaccccacu

SEQ ID NO: 443211 - RNA, 19 nt, Artificial Sequence
  Description of Artificial Sequence: Synthetic oligonucleotide
cggcgcgcauggcuaggca

SEQ ID NO: 443212 - RNA, 19 nt, Artificial Sequence
  Description of Artificial Sequence: Synthetic oligonucleotide
cgggaccgacgcaggcucu

SEQ ID NO: 443213 - RNA, 19 nt, Artificial Sequence
  Description of Artificial Sequence: Synthetic oligonucleotide
cggcucccgucggaagcau

SEQ ID NO: 443214 - RNA, 19 nt, Artificial Sequence
  Description of Artificial Sequence: Synthetic oligonucleotide
ucuuuugcaacacagacug

SEQ ID NO: 443215 - RNA, 19 nt, Artificial Sequence
  Description of Artificial Sequence: Synthetic oligonucleotide
aaacggaucugcuaugucc

SEQ ID NO: 443216 - RNA, 19 nt, Artificial Sequence
  Description of Artificial Sequence: Synthetic oligonucleotide
agaaacaccacauuuacag

SEQ ID NO: 443217 - RNA, 19 nt, Artificial Sequence
  Description of Artificial Sequence: Synthetic oligonucleotide
uuuagaauaguucauuucu

SEQ ID NO: 443218 - RNA, 19 nt, Artificial Sequence
  Description of Artificial Sequence: Synthetic oligonucleotide
acaauaggauuguagagcc

SEQ ID NO: 443219 - RNA, 19 nt, Artificial Sequence
  Description of Artificial Sequence: Synthetic oligonucleotide
aaauaggcucugcacaucc

SEQ ID NO: 443220 - RNA, 19 nt, Artificial Sequence
  Description of Artificial Sequence: Synthetic oligonucleotide
ugaauuugaaucaugcgca

SEQ ID NO: 443221 - RNA, 19 nt, Artificial Sequence
  Description of Artificial Sequence: Synthetic oligonucleotide
cuucuaaagauucacagag

SEQ ID NO: 443222 - RNA, 19 nt, Artificial Sequence
  Description of Artificial Sequence: Synthetic oligonucleotide
aaagcuacacuccuuagca

SEQ ID NO: 443223 - RNA, 19 nt, Artificial Sequence
  Description of Artificial Sequence: Synthetic oligonucleotide
aagacaaacacagcaaauc

SEQ ID NO: 443224 - RNA, 19 nt, Artificial Sequence
  Description of Artificial Sequence: Synthetic oligonucleotide
acuaguaucugaauugucc

SEQ ID NO: 443225 - RNA, 19 nt, Artificial Sequence
  Description of Artificial Sequence: Synthetic oligonucleotide
uuucucuucacuacaguag

SEQ ID NO: 443226 - RNA, 19 nt, Artificial Sequence
  Description of Artificial Sequence: Synthetic oligonucleotide
cuugcggucugguagaucg

SEQ ID NO: 443227 - RNA, 19 nt, Artificial Sequence
  Description of Artificial Sequence: Synthetic oligonucleotide
ucauccauaucauucagcu

SEQ ID NO: 443228 - RNA, 19 nt, Artificial Sequence
  Description of Artificial Sequence: Synthetic oligonucleotide
aaaggggccgguuucgacg

SEQ ID NO: 443229 - RNA, 19 nt, Artificial Sequence
  Description of Artificial Sequence: Synthetic oligonucleotide
aguucuagcaaagcgaggg

SEQ ID NO: 443230 - RNA, 19 nt, Artificial Sequence
  Description of Artificial Sequence: Synthetic oligonucleotide
ucguaacuuaucaauaucu

SEQ ID NO: 443231 - RNA, 19 nt, Artificial Sequence
  Description of Artificial Sequence: Synthetic oligonucleotide
ugugguagcgccugaaggg

SEQ ID NO: 443232 - RNA, 19 nt, Artificial Sequence
  Description of Artificial Sequence: Synthetic oligonucleotide
gucacauugaauuauuuca

SEQ ID NO: 443233 - RNA, 19 nt, Artificial Sequence
  Description of Artificial Sequence: Synthetic oligonucleotide
aaagcgagggucuucacaa

SEQ ID NO: 443234 - RNA, 19 nt, Artificial Sequence
  Description of Artificial Sequence: Synthetic oligonucleotide
auaacaaccuucaugaacu

SEQ ID NO: 443235 - RNA, 19 nt, Artificial Sequence
  Description of Artificial Sequence: Synthetic oligonucleotide
ugguaaugcagcuuacagg

SEQ ID NO: 443236 - RNA, 19 nt, Artificial Sequence
  Description of Artificial Sequence: Synthetic oligonucleotide
auaguucacagcuaggaga

SEQ ID NO: 443237 - RNA, 19 nt, Artificial Sequence
  Description of Artificial Sequence: Synthetic oligonucleotide
aguaacaugaaaauaggcu

SEQ ID NO: 443238 - RNA, 19 nt, Artificial Sequence
  Description of Artificial Sequence: Synthetic oligonucleotide
cagggcacaaacaaugugg

SEQ ID NO: 443239 - RNA, 19 nt, Artificial Sequence
  Description of Artificial Sequence: Synthetic oligonucleotide
uucggugcucguaagauug

SEQ ID NO: 443240 - RNA, 19 nt, Artificial Sequence
  Description of Artificial Sequence: Synthetic oligonucleotide
uggaacaaauuucacuggc

SEQ ID NO: 443241 - RNA, 19 nt, Artificial Sequence
  Description of Artificial Sequence: Synthetic oligonucleotide
uaagaggaggaucaaggca

SEQ ID NO: 443242 - RNA, 19 nt, Artificial Sequence
  Description of Artificial Sequence: Synthetic oligonucleotide
uuuacgaauggccgaagca

SEQ ID NO: 443243 - RNA, 19 nt, Artificial Sequence
  Description of Artificial Sequence: Synthetic oligonucleotide
caucaguuuacgaauggcc

SEQ ID NO: 443244 - RNA, 19 nt, Artificial Sequence
  Description of Artificial Sequence: Synthetic oligonucleotide
aacuuuucccuuggaaccc

SEQ ID NO: 443245 - RNA, 19 nt, Artificial Sequence
  Description of Artificial Sequence: Synthetic oligonucleotide
ugucuaaccuaucugcaug

SEQ ID NO: 443246 - RNA, 19 nt, Artificial Sequence
  Description of Artificial Sequence: Synthetic oligonucleotide
cauaacaaccuucaugaac

SEQ ID NO: 443247 - RNA, 19 nt, Artificial Sequence
  Description of Artificial Sequence: Synthetic oligonucleotide
ugaauuauuucaucugcgu

SEQ ID NO: 443248 - RNA, 19 nt, Artificial Sequence
  Description of Artificial Sequence: Synthetic oligonucleotide
acuguuucugcuaagaacu

SEQ ID NO: 443249 - RNA, 19 nt, Artificial Sequence
  Description of Artificial Sequence: Synthetic oligonucleotide
agauaucuguacugauucc

SEQ ID NO: 443250 - RNA, 19 nt, Artificial Sequence
  Description of Artificial Sequence: Synthetic oligonucleotide
aucaaggcacccgagaugg

SEQ ID NO: 443251 - RNA, 19 nt, Artificial Sequence
  Description of Artificial Sequence: Synthetic oligonucleotide
uaagauugccgguacauuc

SEQ ID NO: 443252 - RNA, 19 nt, Artificial Sequence
  Description of Artificial Sequence: Synthetic oligonucleotide
uguagagccaaguaguuuu

SEQ ID NO: 443253 - RNA, 19 nt, Artificial Sequence
  Description of Artificial Sequence: Synthetic oligonucleotide
uccuuaaucugucuccuug

SEQ ID NO: 443254 - RNA, 19 nt, Artificial Sequence
  Description of Artificial Sequence: Synthetic oligonucleotide
aguuuuccgaagcugaacu

SEQ ID NO: 443255 - RNA, 19 nt, Artificial Sequence
  Description of Artificial Sequence: Synthetic oligonucleotide
auugccgguacauucaacu

SEQ ID NO: 443256 - RNA, 19 nt, Artificial Sequence
  Description of Artificial Sequence: Synthetic oligonucleotide
gaacaaauuucacuggcuc

SEQ ID NO: 443257 - RNA, 19 nt, Artificial Sequence
  Description of Artificial Sequence: Synthetic oligonucleotide
aaaacggaucugcuauguc

SEQ ID NO: 443258 - RNA, 19 nt, Artificial Sequence
  Description of Artificial Sequence: Synthetic oligonucleotide
gaauuauuucaucugcguc

SEQ ID NO: 443259 - RNA, 19 nt, Artificial Sequence
  Description of Artificial Sequence: Synthetic oligonucleotide
ugcaaagacauuuuacaau

SEQ ID NO: 443260 - RNA, 19 nt, Artificial Sequence
  Description of Artificial Sequence: Synthetic oligonucleotide
gcuaucauuggucaguucc

SEQ ID NO: 443261 - RNA, 19 nt, Artificial Sequence
  Description of Artificial Sequence: Synthetic oligonucleotide
aaaaggggccgguuucgac

SEQ ID NO: 443262 - RNA, 19 nt, Artificial Sequence
  Description of Artificial Sequence: Synthetic oligonucleotide
ugaucguuugguuccaucu

SEQ ID NO: 443263 - RNA, 19 nt, Artificial Sequence
  Description of Artificial Sequence: Synthetic oligonucleotide
aacaaagcuucucuuucgu

SEQ ID NO: 443264 - RNA, 19 nt, Artificial Sequence
  Description of Artificial Sequence: Synthetic oligonucleotide
acagcuaggagaaacacca

SEQ ID NO: 443265 - RNA, 19 nt, Artificial Sequence
  Description of Artificial Sequence: Synthetic oligonucleotide
uccuuagcaccauauuuag

SEQ ID NO: 443266 - RNA, 19 nt, Artificial Sequence
  Description of Artificial Sequence: Synthetic oligonucleotide
auguuuccuccuuccaucc

SEQ ID NO: 443267 - RNA, 19 nt, Artificial Sequence
  Description of Artificial Sequence: Synthetic oligonucleotide
uugagauagggucaggcua

SEQ ID NO: 443268 - RNA, 19 nt, Artificial Sequence
  Description of Artificial Sequence: Synthetic oligonucleotide
ucuagcaaagcgagggucu

SEQ ID NO: 443269 - RNA, 19 nt, Artificial Sequence
  Description of Artificial Sequence: Synthetic oligonucleotide
aguaucagaugccgucgcc

SEQ ID NO: 443270 - RNA, 19 nt, Artificial Sequence
  Description of Artificial Sequence: Synthetic oligonucleotide
uccgaaguuucccauucag

SEQ ID NO: 443271 - RNA, 19 nt, Artificial Sequence
  Description of Artificial Sequence: Synthetic oligonucleotide
ucccauucagguuuugcag

SEQ ID NO: 443272 - RNA, 19 nt, Artificial Sequence
  Description of Artificial Sequence: Synthetic oligonucleotide
uuugagauagggucaggcu

SEQ ID NO: 443273 - RNA, 19 nt, Artificial Sequence
  Description of Artificial Sequence: Synthetic oligonucleotide
ucuucacuacaguaggucu

SEQ ID NO: 443274 - RNA, 19 nt, Artificial Sequence
  Description of Artificial Sequence: Synthetic oligonucleotide
ugacuugcuccucaguggc

SEQ ID NO: 443275 - RNA, 19 nt, Artificial Sequence
  Description of Artificial Sequence: Synthetic oligonucleotide
uacuggucguaacuuauca

SEQ ID NO: 443276 - RNA, 19 nt, Artificial Sequence
  Description of Artificial Sequence: Synthetic oligonucleotide
ggauuguagagccaaguag

SEQ ID NO: 443277 - RNA, 19 nt, Artificial Sequence
  Description of Artificial Sequence: Synthetic oligonucleotide
uccugauuaggacauaguu

SEQ ID NO: 443278 - RNA, 19 nt, Artificial Sequence
  Description of Artificial Sequence: Synthetic oligonucleotide
gaacucauaauggagucac

SEQ ID NO: 443279 - RNA, 19 nt, Artificial Sequence
  Description of Artificial Sequence: Synthetic oligonucleotide
uccacuggaaagauaucug

SEQ ID NO: 443280 - RNA, 19 nt, Artificial Sequence
  Description of Artificial Sequence: Synthetic oligonucleotide
uugcaaagacauuuuacaa

SEQ ID NO: 443281 - RNA, 19 nt, Artificial Sequence
  Description of Artificial Sequence: Synthetic oligonucleotide
uuccauccacacuagaacu

SEQ ID NO: 443282 - RNA, 19 nt, Artificial Sequence
  Description of Artificial Sequence: Synthetic oligonucleotide
cacgauacugcuguagucg

SEQ ID NO: 443283 - RNA, 19 nt, Artificial Sequence
  Description of Artificial Sequence: Synthetic oligonucleotide
ucaguuuacgaauggccga

SEQ ID NO: 443284 - RNA, 19 nt, Artificial Sequence
  Description of Artificial Sequence: Synthetic oligonucleotide
uucucguguuucuuauugg

SEQ ID NO: 443285 - RNA, 19 nt, Artificial Sequence
  Description of Artificial Sequence: Synthetic oligonucleotide
ugcauguugcuuacaauaa

SEQ ID NO: 443286 - RNA, 19 nt, Artificial Sequence
  Description of Artificial Sequence: Synthetic oligonucleotide
uuuuccgaagcugaacuca

SEQ ID NO: 443287 - RNA, 19 nt, Artificial Sequence
  Description of Artificial Sequence: Synthetic oligonucleotide
ucuuuugugugccuccuuc

SEQ ID NO: 443288 - RNA, 19 nt, Artificial Sequence
  Description of Artificial Sequence: Synthetic oligonucleotide
acuaggagggcugcuaugg

SEQ ID NO: 443289 - RNA, 19 nt, Artificial Sequence
  Description of Artificial Sequence: Synthetic oligonucleotide
uuacgaauggccgaagcac

SEQ ID NO: 443290 - RNA, 19 nt, Artificial Sequence
  Description of Artificial Sequence: Synthetic oligonucleotide
gugcucguaagauugccgg

SEQ ID NO: 443291 - RNA, 19 nt, Artificial Sequence
  Description of Artificial Sequence: Synthetic oligonucleotide
uucucaagaaucagcgagu

SEQ ID NO: 443292 - RNA, 19 nt, Artificial Sequence
  Description of Artificial Sequence: Synthetic oligonucleotide
auucggccaaguaaggccc

SEQ ID NO: 443293 - RNA, 19 nt, Artificial Sequence
  Description of Artificial Sequence: Synthetic oligonucleotide
uggguaacuuuucccuugg

SEQ ID NO: 443294 - RNA, 19 nt, Artificial Sequence
  Description of Artificial Sequence: Synthetic oligonucleotide
ugagauagggucaggcuau

SEQ ID NO: 443295 - RNA, 19 nt, Artificial Sequence
  Description of Artificial Sequence: Synthetic oligonucleotide
gaagcacuacuugugagug

SEQ ID NO: 443296 - RNA, 19 nt, Artificial Sequence
  Description of Artificial Sequence: Synthetic oligonucleotide
ugaaaauuccauccugauu

SEQ ID NO: 443297 - RNA, 19 nt, Artificial Sequence
  Description of Artificial Sequence: Synthetic oligonucleotide
aaaauaggcucugcacauc

SEQ ID NO: 443298 - RNA, 19 nt, Artificial Sequence
  Description of Artificial Sequence: Synthetic oligonucleotide
uccgaagcugaacucauaa

SEQ ID NO: 443299 - RNA, 19 nt, Artificial Sequence
  Description of Artificial Sequence: Synthetic oligonucleotide
gauacugcuguagucgggc

SEQ ID NO: 443300 - RNA, 19 nt, Artificial Sequence
  Description of Artificial Sequence: Synthetic oligonucleotide
uuccauccugauuaggaca

SEQ ID NO: 443301 - RNA, 19 nt, Artificial Sequence
  Description of Artificial Sequence: Synthetic oligonucleotide
cacauucuguucuuaaguc

SEQ ID NO: 443302 - RNA, 19 nt, Artificial Sequence
  Description of Artificial Sequence: Synthetic oligonucleotide
guggaacaaauuucacugg

SEQ ID NO: 443303 - RNA, 19 nt, Artificial Sequence
  Description of Artificial Sequence: Synthetic oligonucleotide
ucauuacucuugcuuugag

SEQ ID NO: 443304 - RNA, 19 nt, Artificial Sequence
  Description of Artificial Sequence: Synthetic oligonucleotide
ucgacgaagauuccauuuc

SEQ ID NO: 443305 - RNA, 19 nt, Artificial Sequence
  Description of Artificial Sequence: Synthetic oligonucleotide
uuugcaacacagacugccu

SEQ ID NO: 443306 - RNA, 19 nt, Artificial Sequence
  Description of Artificial Sequence: Synthetic oligonucleotide
cuuugagauagggucaggc

SEQ ID NO: 443307 - RNA, 19 nt, Artificial Sequence
  Description of Artificial Sequence: Synthetic oligonucleotide
aauguggacccaucuucca

SEQ ID NO: 443308 - RNA, 19 nt, Artificial Sequence
  Description of Artificial Sequence: Synthetic oligonucleotide
agcuaaugcaaacuccagu

SEQ ID NO: 443309 - RNA, 19 nt, Artificial Sequence
  Description of Artificial Sequence: Synthetic oligonucleotide
uugcgcaucaguuuacgaa

SEQ ID NO: 443310 - RNA, 19 nt, Artificial Sequence
  Description of Artificial Sequence: Synthetic oligonucleotide
ugcgcaucaguuuacgaau

SEQ ID NO: 443311 - RNA, 19 nt, Artificial Sequence
  Description of Artificial Sequence: Synthetic oligonucleotide
cguaauucggccaaguaag

SEQ ID NO: 443312 - RNA, 19 nt, Artificial Sequence
  Description of Artificial Sequence: Synthetic oligonucleotide
uucacuacaguaggucucc

SEQ ID NO: 443313 - RNA, 19 nt, Artificial Sequence
  Description of Artificial Sequence: Synthetic oligonucleotide
ucagcgaguccucauuacu

SEQ ID NO: 443314 - RNA, 19 nt, Artificial Sequence
  Description of Artificial Sequence: Synthetic oligonucleotide
ggcaucacaaaaccaaggc

SEQ ID NO: 443315 - RNA, 19 nt, Artificial Sequence
  Description of Artificial Sequence: Synthetic oligonucleotide
ggacauaguucacagcuag

SEQ ID NO: 443316 - RNA, 19 nt, Artificial Sequence
  Description of Artificial Sequence: Synthetic oligonucleotide
accuucaugaacuguaauu

SEQ ID NO: 443317 - RNA, 19 nt, Artificial Sequence
  Description of Artificial Sequence: Synthetic oligonucleotide
auuucucucaaaauaguaa

SEQ ID NO: 443318 - RNA, 19 nt, Artificial Sequence
  Description of Artificial Sequence: Synthetic oligonucleotide
gauuguagagccaaguagu

SEQ ID NO: 443319 - RNA, 19 nt, Artificial Sequence
  Description of Artificial Sequence: Synthetic oligonucleotide
aacuaguaucugaauuguc

SEQ ID NO: 443320 - RNA, 19 nt, Artificial Sequence
  Description of Artificial Sequence: Synthetic oligonucleotide
cacagcuaggagaaacacc

SEQ ID NO: 443321 - RNA, 19 nt, Artificial Sequence
  Description of Artificial Sequence: Synthetic oligonucleotide
cuaaccuaucugcauguug

SEQ ID NO: 443322 - RNA, 19 nt, Artificial Sequence
  Description of Artificial Sequence: Synthetic oligonucleotide
uaauucggccaaguaaggc

SEQ ID NO: 443323 - RNA, 19 nt, Artificial Sequence
  Description of Artificial Sequence: Synthetic oligonucleotide
ucuuucguccucugguucu

SEQ ID NO: 443324 - RNA, 19 nt, Artificial Sequence
  Description of Artificial Sequence: Synthetic oligonucleotide
uucaacuucugccccguaa

SEQ ID NO: 443325 - RNA, 19 nt, Artificial Sequence
  Description of Artificial Sequence: Synthetic oligonucleotide
guuuacgaauggccgaagc

SEQ ID NO: 443326 - RNA, 19 nt, Artificial Sequence
  Description of Artificial Sequence: Synthetic oligonucleotide
uaguaucugaauuguccac

SEQ ID NO: 443327 - RNA, 19 nt, Artificial Sequence
  Description of Artificial Sequence: Synthetic oligonucleotide
ugccgguacauucaacuuc

SEQ ID NO: 443328 - RNA, 19 nt, Artificial Sequence
  Description of Artificial Sequence: Synthetic oligonucleotide
aucaugcgcauauuucucu

SEQ ID NO: 443329 - RNA, 19 nt, Artificial Sequence
  Description of Artificial Sequence: Synthetic oligonucleotide
acuagaacuaguaucugaa

SEQ ID NO: 443330 - RNA, 19 nt, Artificial Sequence
  Description of Artificial Sequence: Synthetic oligonucleotide
cacacuagaacuaguaucu

SEQ ID NO: 443331 - RNA, 19 nt, Artificial Sequence
  Description of Artificial Sequence: Synthetic oligonucleotide
uggucguaacuuaucaaua

SEQ ID NO: 443332 - RNA, 19 nt, Artificial Sequence
  Description of Artificial Sequence: Synthetic oligonucleotide
cuucacuacaguaggucuc

SEQ ID NO: 443333 - RNA, 19 nt, Artificial Sequence
  Description of Artificial Sequence: Synthetic oligonucleotide
aagauugccgguacauuca

SEQ ID NO: 443334 - RNA, 19 nt, Artificial Sequence
  Description of Artificial Sequence: Synthetic oligonucleotide
uucgacgaagauuccauuu

SEQ ID NO: 443335 - RNA, 19 nt, Artificial Sequence
  Description of Artificial Sequence: Synthetic oligonucleotide
ccgguuucgacgaagauuc

SEQ ID NO: 443336 - RNA, 19 nt, Artificial Sequence
  Description of Artificial Sequence: Synthetic oligonucleotide
ucguuugguuccaucuggc

SEQ ID NO: 443337 - RNA, 19 nt, Artificial Sequence
  Description of Artificial Sequence: Synthetic oligonucleotide
caauaucuccaaaggcuac

SEQ ID NO: 443338 - RNA, 19 nt, Artificial Sequence
  Description of Artificial Sequence: Synthetic oligonucleotide
aucacagcuaaugcaaacu

SEQ ID NO: 443339 - RNA, 19 nt, Artificial Sequence
  Description of Artificial Sequence: Synthetic oligonucleotide
gaaaauaggcucugcacau

SEQ ID NO: 443340 - RNA, 19 nt, Artificial Sequence
  Description of Artificial Sequence: Synthetic oligonucleotide
uguuacuggucguaacuua

SEQ ID NO: 443341 - RNA, 19 nt, Artificial Sequence
  Description of Artificial Sequence: Synthetic oligonucleotide
uccaguuuugacucuucuc

SEQ ID NO: 443342 - RNA, 19 nt, Artificial Sequence
  Description of Artificial Sequence: Synthetic oligonucleotide
gacauaguucacagcuagg

SEQ ID NO: 443343 - RNA, 19 nt, Artificial Sequence
  Description of Artificial Sequence: Synthetic oligonucleotide
agauuccauuucuugggcu

SEQ ID NO: 443344 - RNA, 19 nt, Artificial Sequence
  Description of Artificial Sequence: Synthetic oligonucleotide
agcgaguccucauuacucu

SEQ ID NO: 443345 - RNA, 19 nt, Artificial Sequence
  Description of Artificial Sequence: Synthetic oligonucleotide
acuucacuaggagggcugc

SEQ ID NO: 443346 - RNA, 19 nt, Artificial Sequence
  Description of Artificial Sequence: Synthetic oligonucleotide
cuggguaacuuuucccuug

SEQ ID NO: 443347 - RNA, 19 nt, Artificial Sequence
  Description of Artificial Sequence: Synthetic oligonucleotide
cuaucugcauguugcuuac

SEQ ID NO: 443348 - RNA, 19 nt, Artificial Sequence
  Description of Artificial Sequence: Synthetic oligonucleotide
cauccugauuaggacauag

SEQ ID NO: 443349 - RNA, 19 nt, Artificial Sequence
  Description of Artificial Sequence: Synthetic oligonucleotide
gucguaacuuaucaauauc

SEQ ID NO: 443350 - RNA, 19 nt, Artificial Sequence
  Description of Artificial Sequence: Synthetic oligonucleotide
aaggggccgguuucgacga

SEQ ID NO: 443351 - RNA, 19 nt, Artificial Sequence
  Description of Artificial Sequence: Synthetic oligonucleotide
uccccaucaacuccauaac

SEQ ID NO: 443352 - RNA, 19 nt, Artificial Sequence
  Description of Artificial Sequence: Synthetic oligonucleotide
auggccgaagcacuacuug

SEQ ID NO: 443353 - RNA, 19 nt, Artificial Sequence
  Description of Artificial Sequence: Synthetic oligonucleotide
cuuaagucuucagccuugg

SEQ ID NO: 443354 - RNA, 19 nt, Artificial Sequence
  Description of Artificial Sequence: Synthetic oligonucleotide
guaauucggccaaguaagg

SEQ ID NO: 443355 - RNA, 19 nt, Artificial Sequence
  Description of Artificial Sequence: Synthetic oligonucleotide
gcuuauuauauuccacaug

SEQ ID NO: 443356 - RNA, 19 nt, Artificial Sequence
  Description of Artificial Sequence: Synthetic oligonucleotide
ucugcgucuucacuauuau

SEQ ID NO: 443357 - RNA, 19 nt, Artificial Sequence
  Description of Artificial Sequence: Synthetic oligonucleotide
uaggauuguagagccaagu

SEQ ID NO: 443358 - RNA, 19 nt, Artificial Sequence
  Description of Artificial Sequence: Synthetic oligonucleotide
uuacuggucguaacuuauc

SEQ ID NO: 443359 - RNA, 19 nt, Artificial Sequence
  Description of Artificial Sequence: Synthetic oligonucleotide
auguugcuuacaauaagca

SEQ ID NO: 443360 - RNA, 19 nt, Artificial Sequence
  Description of Artificial Sequence: Synthetic oligonucleotide
uccauccacacuagaacua

SEQ ID NO: 443361 - RNA, 19 nt, Artificial Sequence
  Description of Artificial Sequence: Synthetic oligonucleotide
gguagaucgagccagcucu

SEQ ID NO: 443362 - RNA, 19 nt, Artificial Sequence
  Description of Artificial Sequence: Synthetic oligonucleotide
ugccuugcgcaucaguuua

SEQ ID NO: 443363 - RNA, 19 nt, Artificial Sequence
  Description of Artificial Sequence: Synthetic oligonucleotide
ucuugcucauucucuaauu

SEQ ID NO: 443364 - RNA, 19 nt, Artificial Sequence
  Description of Artificial Sequence: Synthetic oligonucleotide
aggauuguagagccaagua

SEQ ID NO: 443365 - RNA, 19 nt, Artificial Sequence
  Description of Artificial Sequence: Synthetic oligonucleotide
ucugccccguaauucggcc

SEQ ID NO: 443366 - RNA, 19 nt, Artificial Sequence
  Description of Artificial Sequence: Synthetic oligonucleotide
uggccgaagcacuacuugu

SEQ ID NO: 443367 - RNA, 19 nt, Artificial Sequence
  Description of Artificial Sequence: Synthetic oligonucleotide
cuguagucgggcauugauc

SEQ ID NO: 443368 - RNA, 19 nt, Artificial Sequence
  Description of Artificial Sequence: Synthetic oligonucleotide
acagacugccucugccuuc

SEQ ID NO: 443369 - RNA, 19 nt, Artificial Sequence
  Description of Artificial Sequence: Synthetic oligonucleotide
ucaugcgcauauuucucuc

SEQ ID NO: 443370 - RNA, 19 nt, Artificial Sequence
  Description of Artificial Sequence: Synthetic oligonucleotide
cgaagcugaacucauaaug

SEQ ID NO: 443371 - RNA, 19 nt, Artificial Sequence
  Description of Artificial Sequence: Synthetic oligonucleotide
uuccaugucacugcucccu

SEQ ID NO: 443372 - RNA, 19 nt, Artificial Sequence
  Description of Artificial Sequence: Synthetic oligonucleotide
aauuugaaucaugcgcaua

SEQ ID NO: 443373 - RNA, 19 nt, Artificial Sequence
  Description of Artificial Sequence: Synthetic oligonucleotide
ccacacuagaacuaguauc

SEQ ID NO: 443374 - RNA, 19 nt, Artificial Sequence
  Description of Artificial Sequence: Synthetic oligonucleotide
cuucugccccguaauucgg

SEQ ID NO: 443375 - RNA, 19 nt, Artificial Sequence
  Description of Artificial Sequence: Synthetic oligonucleotide
aagaaucagcgaguccuca

SEQ ID NO: 443376 - RNA, 19 nt, Artificial Sequence
  Description of Artificial Sequence: Synthetic oligonucleotide
ugguagaucgagccagcuc

SEQ ID NO: 443377 - RNA, 19 nt, Artificial Sequence
  Description of Artificial Sequence: Synthetic oligonucleotide
gaugguaaugcagcuuaca

SEQ ID NO: 443378 - RNA, 19 nt, Artificial Sequence
  Description of Artificial Sequence: Synthetic oligonucleotide
gcugcaguaucagaugccg

SEQ ID NO: 443379 - RNA, 19 nt, Artificial Sequence
  Description of Artificial Sequence: Synthetic oligonucleotide
cuuggcacgauacugcugu

SEQ ID NO: 443380 - RNA, 19 nt, Artificial Sequence
  Description of Artificial Sequence: Synthetic oligonucleotide
uucugccccguaauucggc

SEQ ID NO: 443381 - RNA, 19 nt, Artificial Sequence
  Description of Artificial Sequence: Synthetic oligonucleotide
cucguaagauugccgguac

SEQ ID NO: 443382 - RNA, 19 nt, Artificial Sequence
  Description of Artificial Sequence: Synthetic oligonucleotide
cagcgaguccucauuacuc

SEQ ID NO: 443383 - RNA, 19 nt, Artificial Sequence
  Description of Artificial Sequence: Synthetic oligonucleotide
acuggucguaacuuaucaa

SEQ ID NO: 443384 - RNA, 19 nt, Artificial Sequence
  Description of Artificial Sequence: Synthetic oligonucleotide
uccuucggugcucguaaga

SEQ ID NO: 443385 - RNA, 19 nt, Artificial Sequence
  Description of Artificial Sequence: Synthetic oligonucleotide
cacuucacuaggagggcug

SEQ ID NO: 443386 - RNA, 19 nt, Artificial Sequence
  Description of Artificial Sequence: Synthetic oligonucleotide
ugguucucguguuucuuau

SEQ ID NO: 443387 - RNA, 19 nt, Artificial Sequence
  Description of Artificial Sequence: Synthetic oligonucleotide
ugcggucugguagaucgag

SEQ ID NO: 443388 - RNA, 19 nt, Artificial Sequence
  Description of Artificial Sequence: Synthetic oligonucleotide
ucaguguuacuggucguaa

SEQ ID NO: 443389 - RNA, 19 nt, Artificial Sequence
  Description of Artificial Sequence: Synthetic oligonucleotide
uaucagaugccgucgccuu

SEQ ID NO: 443390 - RNA, 19 nt, Artificial Sequence
  Description of Artificial Sequence: Synthetic oligonucleotide
cucuaggaacucuuuccuc

SEQ ID NO: 443391 - RNA, 19 nt, Artificial Sequence
  Description of Artificial Sequence: Synthetic oligonucleotide
caagaaucagcgaguccuc

SEQ ID NO: 443392 - RNA, 19 nt, Artificial Sequence
  Description of Artificial Sequence: Synthetic oligonucleotide
ucucuuucguccucugguu

SEQ ID NO: 443393 - RNA, 19 nt, Artificial Sequence
  Description of Artificial Sequence: Synthetic oligonucleotide
acaaacaauguggacccau

SEQ ID NO: 443394 - RNA, 19 nt, Artificial Sequence
  Description of Artificial Sequence: Synthetic oligonucleotide
gaguuuuccgaagcugaac

SEQ ID NO: 443395 - RNA, 19 nt, Artificial Sequence
  Description of Artificial Sequence: Synthetic oligonucleotide
agaugguaaugcagcuuac

SEQ ID NO: 443396 - RNA, 19 nt, Artificial Sequence
  Description of Artificial Sequence: Synthetic oligonucleotide
ccaucaacuccauaacaac

SEQ ID NO: 443397 - RNA, 19 nt, Artificial Sequence
  Description of Artificial Sequence: Synthetic oligonucleotide
ugcucguaagauugccggu

SEQ ID NO: 443398 - RNA, 19 nt, Artificial Sequence
  Description of Artificial Sequence: Synthetic oligonucleotide
gauagggucaggcuaucau

SEQ ID NO: 443399 - RNA, 19 nt, Artificial Sequence
  Description of Artificial Sequence: Synthetic oligonucleotide
agcgagggucuucacaaaa

SEQ ID NO: 443400 - RNA, 19 nt, Artificial Sequence
  Description of Artificial Sequence: Synthetic oligonucleotide
gaacuaguaucugaauugu

SEQ ID NO: 443401 - RNA, 19 nt, Artificial Sequence
  Description of Artificial Sequence: Synthetic oligonucleotide
uggcacgauacugcuguag

SEQ ID NO: 443402 - RNA, 19 nt, Artificial Sequence
  Description of Artificial Sequence: Synthetic oligonucleotide
ccuugaaaauuccauccug

SEQ ID NO: 443403 - RNA, 19 nt, Artificial Sequence
  Description of Artificial Sequence: Synthetic oligonucleotide
ugccccguaauucggccaa

SEQ ID NO: 443404 - RNA, 19 nt, Artificial Sequence
  Description of Artificial Sequence: Synthetic oligonucleotide
uuucgacgaagauuccauu

SEQ ID NO: 443405 - RNA, 19 nt, Artificial Sequence
  Description of Artificial Sequence: Synthetic oligonucleotide
augcgcauauuucucucaa

SEQ ID NO: 443406 - RNA, 19 nt, Artificial Sequence
  Description of Artificial Sequence: Synthetic oligonucleotide
ugcagcuuacaggugucac

SEQ ID NO: 443407 - RNA, 19 nt, Artificial Sequence
  Description of Artificial Sequence: Synthetic oligonucleotide
caguguuacuggucguaac

SEQ ID NO: 443408 - RNA, 19 nt, Artificial Sequence
  Description of Artificial Sequence: Synthetic oligonucleotide
agauugccgguacauucaa

SEQ ID NO: 443409 - RNA, 19 nt, Artificial Sequence
  Description of Artificial Sequence: Synthetic oligonucleotide
cuggucguaacuuaucaau

SEQ ID NO: 443410 - RNA, 19 nt, Artificial Sequence
  Description of Artificial Sequence: Synthetic oligonucleotide
uucacuaggagggcugcua

SEQ ID NO: 443411 - RNA, 19 nt, Artificial Sequence
  Description of Artificial Sequence: Synthetic oligonucleotide
aaggcacccgagaugguaa

SEQ ID NO: 443412 - RNA, 19 nt, Artificial Sequence
  Description of Artificial Sequence: Synthetic oligonucleotide
gaugccgucgccuuuucuu

SEQ ID NO: 443413 - RNA, 19 nt, Artificial Sequence
  Description of Artificial Sequence: Synthetic oligonucleotide
ugcgcauauuucucucaaa

SEQ ID NO: 443414 - RNA, 19 nt, Artificial Sequence
  Description of Artificial Sequence: Synthetic oligonucleotide
uuccuucggugcucguaag

SEQ ID NO: 443415 - RNA, 19 nt, Artificial Sequence
  Description of Artificial Sequence: Synthetic oligonucleotide
ggugcucguaagauugccg

SEQ ID NO: 443416 - RNA, 19 nt, Artificial Sequence
  Description of Artificial Sequence: Synthetic oligonucleotide
cagcccacuucacuaggag

SEQ ID NO: 443417 - RNA, 19 nt, Artificial Sequence
  Description of Artificial Sequence: Synthetic oligonucleotide
uuguagagccaaguaguuu

SEQ ID NO: 443418 - RNA, 19 nt, Artificial Sequence
  Description of Artificial Sequence: Synthetic oligonucleotide
aucuggcaaggucuccaug

SEQ ID NO: 443419 - RNA, 19 nt, Artificial Sequence
  Description of Artificial Sequence: Synthetic oligonucleotide
gaauuugaaucaugcgcau

SEQ ID NO: 443420 - RNA, 19 nt, Artificial Sequence
  Description of Artificial Sequence: Synthetic oligonucleotide
gaucgagccagcucugccu

SEQ ID NO: 443421 - RNA, 19 nt, Artificial Sequence
  Description of Artificial Sequence: Synthetic oligonucleotide
caccacauuuacaggcauc

SEQ ID NO: 443422 - RNA, 19 nt, Artificial Sequence
  Description of Artificial Sequence: Synthetic oligonucleotide
caugcgcauauuucucuca

SEQ ID NO: 443423 - RNA, 19 nt, Artificial Sequence
  Description of Artificial Sequence: Synthetic oligonucleotide
auacugcuguagucgggca

SEQ ID NO: 443424 - RNA, 19 nt, Artificial Sequence
  Description of Artificial Sequence: Synthetic oligonucleotide
aauggccgaagcacuacuu

SEQ ID NO: 443425 - RNA, 19 nt, Artificial Sequence
  Description of Artificial Sequence: Synthetic oligonucleotide
acacuagaacuaguaucug

SEQ ID NO: 443426 - RNA, 19 nt, Artificial Sequence
  Description of Artificial Sequence: Synthetic oligonucleotide
aggcuugcggucugguaga

SEQ ID NO: 443427 - RNA, 19 nt, Artificial Sequence
  Description of Artificial Sequence: Synthetic oligonucleotide
ggaggaucaaggcacccga

SEQ ID NO: 443428 - RNA, 19 nt, Artificial Sequence
  Description of Artificial Sequence: Synthetic oligonucleotide
uagaucgagccagcucugc

SEQ ID NO: 443429 - RNA, 19 nt, Artificial Sequence
  Description of Artificial Sequence: Synthetic oligonucleotide
auuguagagccaaguaguu

SEQ ID NO: 443430 - RNA, 19 nt, Artificial Sequence
  Description of Artificial Sequence: Synthetic oligonucleotide
acccgagaugguaaugcag

SEQ ID NO: 443431 - RNA, 19 nt, Artificial Sequence
  Description of Artificial Sequence: Synthetic oligonucleotide
gcgcauauuucucucaaaa

SEQ ID NO: 443432 - RNA, 19 nt, Artificial Sequence
  Description of Artificial Sequence: Synthetic oligonucleotide
caccauauuuagaauaguu

SEQ ID NO: 443433 - RNA, 19 nt, Artificial Sequence
  Description of Artificial Sequence: Synthetic oligonucleotide
gucuaaccuaucugcaugu

SEQ ID NO: 443434 - RNA, 19 nt, Artificial Sequence
  Description of Artificial Sequence: Synthetic oligonucleotide
gcaucaguuuacgaauggc

SEQ ID NO: 443435 - RNA, 19 nt, Artificial Sequence
  Description of Artificial Sequence: Synthetic oligonucleotide
cuugcgcaucaguuuacga

SEQ ID NO: 443436 - RNA, 19 nt, Artificial Sequence
  Description of Artificial Sequence: Synthetic oligonucleotide
cacuaggagggcugcuaug

SEQ ID NO: 443437 - RNA, 19 nt, Artificial Sequence
  Description of Artificial Sequence: Synthetic oligonucleotide
cugcgucuucacuauuauc

SEQ ID NO: 443438 - RNA, 19 nt, Artificial Sequence
  Description of Artificial Sequence: Synthetic oligonucleotide
gaauggccgaagcacuacu

SEQ ID NO: 443439 - RNA, 19 nt, Artificial Sequence
  Description of Artificial Sequence: Synthetic oligonucleotide
cggucugguagaucgagcc

SEQ ID NO: 443440 - RNA, 19 nt, Artificial Sequence
  Description of Artificial Sequence: Synthetic oligonucleotide
gauugccgguacauucaac

SEQ ID NO: 443441 - RNA, 19 nt, Artificial Sequence
  Description of Artificial Sequence: Synthetic oligonucleotide
gcacccgagaugguaaugc

SEQ ID NO: 443442 - RNA, 19 nt, Artificial Sequence
  Description of Artificial Sequence: Synthetic oligonucleotide
gaaucagcgaguccucauu

SEQ ID NO: 443443 - RNA, 19 nt, Artificial Sequence
  Description of Artificial Sequence: Synthetic oligonucleotide
gcuaagaacuuuacccuuc

SEQ ID NO: 443444 - RNA, 19 nt, Artificial Sequence
  Description of Artificial Sequence: Synthetic oligonucleotide
uuccgaagcugaacucaua

SEQ ID NO: 443445 - RNA, 19 nt, Artificial Sequence
  Description of Artificial Sequence: Synthetic oligonucleotide
uugcggucugguagaucga

SEQ ID NO: 443446 - RNA, 19 nt, Artificial Sequence
  Description of Artificial Sequence: Synthetic oligonucleotide
agcuuacaggugucacaca

SEQ ID NO: 443447 - RNA, 19 nt, Artificial Sequence
  Description of Artificial Sequence: Synthetic oligonucleotide
ucuaaccuaucugcauguu

SEQ ID NO: 443448 - RNA, 19 nt, Artificial Sequence
  Description of Artificial Sequence: Synthetic oligonucleotide
agugguugugguagcgccu

SEQ ID NO: 443449 - RNA, 19 nt, Artificial Sequence
  Description of Artificial Sequence: Synthetic oligonucleotide
guuucgacgaagauuccau

SEQ ID NO: 443450 - RNA, 19 nt, Artificial Sequence
  Description of Artificial Sequence: Synthetic oligonucleotide
ggucguaacuuaucaauau

SEQ ID NO: 443451 - RNA, 19 nt, Artificial Sequence
  Description of Artificial Sequence: Synthetic oligonucleotide
gguuucgacgaagauucca

SEQ ID NO: 443452 - RNA, 19 nt, Artificial Sequence
  Description of Artificial Sequence: Synthetic oligonucleotide
auccugauuaggacauagu

SEQ ID NO: 443453 - RNA, 19 nt, Artificial Sequence
  Description of Artificial Sequence: Synthetic oligonucleotide
guagaucgagccagcucug

SEQ ID NO: 443454 - RNA, 19 nt, Artificial Sequence
  Description of Artificial Sequence: Synthetic oligonucleotide
guacugauucccauuaguu

SEQ ID NO: 443455 - RNA, 19 nt, Artificial Sequence
  Description of Artificial Sequence: Synthetic oligonucleotide
aucugcgucuucacuauua

SEQ ID NO: 443456 - RNA, 19 nt, Artificial Sequence
  Description of Artificial Sequence: Synthetic oligonucleotide
acacuccuuagcaccauau

SEQ ID NO: 443457 - RNA, 19 nt, Artificial Sequence
  Description of Artificial Sequence: Synthetic oligonucleotide
ucaaggcacccgagauggu

SEQ ID NO: 443458 - RNA, 19 nt, Artificial Sequence
  Description of Artificial Sequence: Synthetic oligonucleotide
agaugccgucgccuuuucu

SEQ ID NO: 443459 - RNA, 19 nt, Artificial Sequence
  Description of Artificial Sequence: Synthetic oligonucleotide
ccaaaaggggccgguuucg

SEQ ID NO: 443460 - RNA, 19 nt, Artificial Sequence
  Description of Artificial Sequence: Synthetic oligonucleotide
ccguaauucggccaaguaa

SEQ ID NO: 443461 - RNA, 19 nt, Artificial Sequence
  Description of Artificial Sequence: Synthetic oligonucleotide
guaucagaugccgucgccu

SEQ ID NO: 443462 - RNA, 19 nt, Artificial Sequence
  Description of Artificial Sequence: Synthetic oligonucleotide
caguuuacgaauggccgaa

SEQ ID NO: 443463 - RNA, 19 nt, Artificial Sequence
  Description of Artificial Sequence: Synthetic oligonucleotide
cuuaaucugucuccuugau

SEQ ID NO: 443464 - RNA, 19 nt, Artificial Sequence
  Description of Artificial Sequence: Synthetic oligonucleotide
cacccgagaugguaaugca

SEQ ID NO: 443465 - RNA, 19 nt, Artificial Sequence
  Description of Artificial Sequence: Synthetic oligonucleotide
cgcaucaguuuacgaaugg

SEQ ID NO: 443466 - RNA, 19 nt, Artificial Sequence
  Description of Artificial Sequence: Synthetic oligonucleotide
agucgggcauugauccuug

SEQ ID NO: 443467 - RNA, 19 nt, Artificial Sequence
  Description of Artificial Sequence: Synthetic oligonucleotide
ggcugcuauggucuucuuc

SEQ ID NO: 443468 - RNA, 19 nt, Artificial Sequence
  Description of Artificial Sequence: Synthetic oligonucleotide
ggccgaagcacuacuugug

SEQ ID NO: 443469 - RNA, 19 nt, Artificial Sequence
  Description of Artificial Sequence: Synthetic oligonucleotide
gcacgauacugcuguaguc

SEQ ID NO: 443470 - RNA, 19 nt, Artificial Sequence
  Description of Artificial Sequence: Synthetic oligonucleotide
uggcccucacuccgaaguu

SEQ ID NO: 443471 - RNA, 19 nt, Artificial Sequence
  Description of Artificial Sequence: Synthetic oligonucleotide
gccgaagcacuacuuguga

SEQ ID NO: 443472 - RNA, 19 nt, Artificial Sequence
  Description of Artificial Sequence: Synthetic oligonucleotide
ggcacgauacugcuguagu

SEQ ID NO: 443473 - RNA, 19 nt, Artificial Sequence
  Description of Artificial Sequence: Synthetic oligonucleotide
aggcuaucauuggucaguu

SEQ ID NO: 443474 - RNA, 19 nt, Artificial Sequence
  Description of Artificial Sequence: Synthetic oligonucleotide
gagauagggucaggcuauc

SEQ ID NO: 443475 - RNA, 19 nt, Artificial Sequence
  Description of Artificial Sequence: Synthetic oligonucleotide
ccuugcgcaucaguuuacg

SEQ ID NO: 443476 - RNA, 19 nt, Artificial Sequence
  Description of Artificial Sequence: Synthetic oligonucleotide
gcuacacuccuuagcacca

SEQ ID NO: 443477 - RNA, 19 nt, Artificial Sequence
  Description of Artificial Sequence: Synthetic oligonucleotide
ggaacccaggcuugcgguc

SEQ ID NO: 443478 - RNA, 19 nt, Artificial Sequence
  Description of Artificial Sequence: Synthetic oligonucleotide
aggcacccgagaugguaau

SEQ ID NO: 443479 - RNA, 19 nt, Artificial Sequence
  Description of Artificial Sequence: Synthetic oligonucleotide
gaacccaggcuugcggucu

SEQ ID NO: 443480 - RNA, 19 nt, Artificial Sequence
  Description of Artificial Sequence: Synthetic oligonucleotide
cccauuaguucugccuugc

SEQ ID NO: 443481 - RNA, 19 nt, Artificial Sequence
  Description of Artificial Sequence: Synthetic oligonucleotide
cuccgaaguuucccauuca

SEQ ID NO: 443482 - RNA, 19 nt, Artificial Sequence
  Description of Artificial Sequence: Synthetic oligonucleotide
gguggcacguccuguggaa

SEQ ID NO: 443483 - RNA, 19 nt, Artificial Sequence
  Description of Artificial Sequence: Synthetic oligonucleotide
uuggcacgauacugcugua

SEQ ID NO: 443484 - RNA, 19 nt, Artificial Sequence
  Description of Artificial Sequence: Synthetic oligonucleotide
acgaauggccgaagcacua

SEQ ID NO: 443485 - RNA, 19 nt, Artificial Sequence
  Description of Artificial Sequence: Synthetic oligonucleotide
caaaaggggccgguuucga

SEQ ID NO: 443486 - RNA, 19 nt, Artificial Sequence
  Description of Artificial Sequence: Synthetic oligonucleotide
gacgaagauuccauuucuu

SEQ ID NO: 443487 - RNA, 19 nt, Artificial Sequence
  Description of Artificial Sequence: Synthetic oligonucleotide
cugccccguaauucggcca

SEQ ID NO: 443488 - RNA, 19 nt, Artificial Sequence
  Description of Artificial Sequence: Synthetic oligonucleotide
gacuuguggcuggaguggu

SEQ ID NO: 443489 - RNA, 19 nt, Artificial Sequence
  Description of Artificial Sequence: Synthetic oligonucleotide
guaagauugccgguacauu

SEQ ID NO: 443490 - RNA, 19 nt, Artificial Sequence
  Description of Artificial Sequence: Synthetic oligonucleotide
ggaguuuuccgaagcugaa

SEQ ID NO: 443491 - RNA, 19 nt, Artificial Sequence
  Description of Artificial Sequence: Synthetic oligonucleotide
uggguucugguggcacguc

SEQ ID NO: 443492 - RNA, 19 nt, Artificial Sequence
  Description of Artificial Sequence: Synthetic oligonucleotide
gcucguaagauugccggua

SEQ ID NO: 443493 - RNA, 19 nt, Artificial Sequence
  Description of Artificial Sequence: Synthetic oligonucleotide
ggucuccaaucauugucgu

SEQ ID NO: 443494 - RNA, 19 nt, Artificial Sequence
  Description of Artificial Sequence: Synthetic oligonucleotide
gcccauauuccuuggcccu

SEQ ID NO: 443495 - RNA, 19 nt, Artificial Sequence
  Description of Artificial Sequence: Synthetic oligonucleotide
cugcaguaucagaugccgu

SEQ ID NO: 443496 - RNA, 19 nt, Artificial Sequence
  Description of Artificial Sequence: Synthetic oligonucleotide
ggcuaucauuggucaguuc

SEQ ID NO: 443497 - RNA, 19 nt, Artificial Sequence
  Description of Artificial Sequence: Synthetic oligonucleotide
cuucggugcucguaagauu

SEQ ID NO: 443498 - RNA, 19 nt, Artificial Sequence
  Description of Artificial Sequence: Synthetic oligonucleotide
cccauucagguuuugcagu

SEQ ID NO: 443499 - RNA, 19 nt, Artificial Sequence
  Description of Artificial Sequence: Synthetic oligonucleotide
ggggccgguuucgacgaag

SEQ ID NO: 443500 - RNA, 19 nt, Artificial Sequence
  Description of Artificial Sequence: Synthetic oligonucleotide
cuaggagggcugcuauggu

SEQ ID NO: 443501 - RNA, 19 nt, Artificial Sequence
  Description of Artificial Sequence: Synthetic oligonucleotide
ggcacccgagaugguaaug

SEQ ID NO: 443502 - RNA, 19 nt, Artificial Sequence
  Description of Artificial Sequence: Synthetic oligonucleotide
gcggucugguagaucgagc

SEQ ID NO: 443503 - RNA, 19 nt, Artificial Sequence
  Description of Artificial Sequence: Synthetic oligonucleotide
gcgccugaaggggagguga

SEQ ID NO: 443504 - RNA, 19 nt, Artificial Sequence
  Description of Artificial Sequence: Synthetic oligonucleotide
cguccuguggaacaaauuu

SEQ ID NO: 443505 - RNA, 19 nt, Artificial Sequence
  Description of Artificial Sequence: Synthetic oligonucleotide
gcacuacuugugaguggcc

SEQ ID NO: 443506 - RNA, 19 nt, Artificial Sequence
  Description of Artificial Sequence: Synthetic oligonucleotide
cagcaucagucuccuugaa

SEQ ID NO: 443507 - RNA, 19 nt, Artificial Sequence
  Description of Artificial Sequence: Synthetic oligonucleotide
cugcuauggucuucuucau

SEQ ID NO: 443508 - RNA, 19 nt, Artificial Sequence
  Description of Artificial Sequence: Synthetic oligonucleotide
cgaauggccgaagcacuac

SEQ ID NO: 443509 - RNA, 19 nt, Artificial Sequence
  Description of Artificial Sequence: Synthetic oligonucleotide
ggcacguccuguggaacaa

SEQ ID NO: 443510 - RNA, 19 nt, Artificial Sequence
  Description of Artificial Sequence: Synthetic oligonucleotide
gccgguuucgacgaagauu

SEQ ID NO: 443511 - RNA, 19 nt, Artificial Sequence
  Description of Artificial Sequence: Synthetic oligonucleotide
gggccgguuucgacgaaga

SEQ ID NO: 443512 - RNA, 19 nt, Artificial Sequence
  Description of Artificial Sequence: Synthetic oligonucleotide
gccuugcgcaucaguuuac

SEQ ID NO: 443513 - RNA, 19 nt, Artificial Sequence
  Description of Artificial Sequence: Synthetic oligonucleotide
ccgagaugguaaugcagcu

SEQ ID NO: 443514 - RNA, 19 nt, Artificial Sequence
  Description of Artificial Sequence: Synthetic oligonucleotide
cuccuuaaucugucuccuu

SEQ ID NO: 443515 - RNA, 19 nt, Artificial Sequence
  Description of Artificial Sequence: Synthetic oligonucleotide
cgacgaagauuccauuucu

SEQ ID NO: 443516 - RNA, 19 nt, Artificial Sequence
  Description of Artificial Sequence: Synthetic oligonucleotide
cccguaauucggccaagua

SEQ ID NO: 443517 - RNA, 19 nt, Artificial Sequence
  Description of Artificial Sequence: Synthetic oligonucleotide
cuucacuaggagggcugcu

SEQ ID NO: 443518 - RNA, 19 nt, Artificial Sequence
  Description of Artificial Sequence: Synthetic oligonucleotide
cacugccaguaacuguuuu

SEQ ID NO: 443519 - RNA, 19 nt, Artificial Sequence
  Description of Artificial Sequence: Synthetic oligonucleotide
cgguuucgacgaagauucc

SEQ ID NO: 443520 - RNA, 19 nt, Artificial Sequence
  Description of Artificial Sequence: Synthetic oligonucleotide
aggggccgguuucgacgaa

SEQ ID NO: 443521 - RNA, 19 nt, Artificial Sequence
  Description of Artificial Sequence: Synthetic oligonucleotide
gccgucgccuuuucuuugu

SEQ ID NO: 443522 - RNA, 19 nt, Artificial Sequence
  Description of Artificial Sequence: Synthetic oligonucleotide
ccuucggugcucguaagau

SEQ ID NO: 443523 - RNA, 19 nt, Artificial Sequence
  Description of Artificial Sequence: Synthetic oligonucleotide
gcuugcggucugguagauc

SEQ ID NO: 443524 - RNA, 19 nt, Artificial Sequence
  Description of Artificial Sequence: Synthetic oligonucleotide
cuugaucguuugguuccau

SEQ ID NO: 443525 - RNA, 19 nt, Artificial Sequence
  Description of Artificial Sequence: Synthetic oligonucleotide
cuacacuccuuagcaccau

SEQ ID NO: 443526 - RNA, 19 nt, Artificial Sequence
  Description of Artificial Sequence: Synthetic oligonucleotide
gccccguaauucggccaag

SEQ ID NO: 443527 - RNA, 19 nt, Artificial Sequence
  Description of Artificial Sequence: Synthetic oligonucleotide
caucugcgucuucacuauu

SEQ ID NO: 443528 - RNA, 19 nt, Artificial Sequence
  Description of Artificial Sequence: Synthetic oligonucleotide
ggccgguuucgacgaagau

SEQ ID NO: 443529 - RNA, 19 nt, Artificial Sequence
  Description of Artificial Sequence: Synthetic oligonucleotide
ccucaguggcagugguugu

SEQ ID NO: 443530 - RNA, 19 nt, Artificial Sequence
  Description of Artificial Sequence: Synthetic oligonucleotide
ccauccugauuaggacaua

SEQ ID NO: 443531 - RNA, 19 nt, Artificial Sequence
  Description of Artificial Sequence: Synthetic oligonucleotide
ccccguaauucggccaagu

SEQ ID NO: 443532 - RNA, 19 nt, Artificial Sequence
  Description of Artificial Sequence: Synthetic oligonucleotide
aacacuuaaagaguggacc

SEQ ID NO: 443533 - RNA, 19 nt, Artificial Sequence
  Description of Artificial Sequence: Synthetic oligonucleotide
gacgguauggaccaaaacg

SEQ ID NO: 443534 - RNA, 19 nt, Artificial Sequence
  Description of Artificial Sequence: Synthetic oligonucleotide
uauuaggagagcaacaccc

SEQ ID NO: 443535 - RNA, 19 nt, Artificial Sequence
  Description of Artificial Sequence: Synthetic oligonucleotide
aaauacgaucuccaguccc

SEQ ID NO: 443536 - RNA, 19 nt, Artificial Sequence
  Description of Artificial Sequence: Synthetic oligonucleotide
uuuaguacugcgaagcagc

SEQ ID NO: 443537 - RNA, 19 nt, Artificial Sequence
  Description of Artificial Sequence: Synthetic oligonucleotide
uaaagaguggaccaccagg

SEQ ID NO: 443538 - RNA, 19 nt, Artificial Sequence
  Description of Artificial Sequence: Synthetic oligonucleotide
ugugguauuaguauucccc

SEQ ID NO: 443539 - RNA, 19 nt, Artificial Sequence
  Description of Artificial Sequence: Synthetic oligonucleotide
auuaguauuccccagggga

SEQ ID NO: 443540 - RNA, 19 nt, Artificial Sequence
  Description of Artificial Sequence: Synthetic oligonucleotide
aauauccaguccaaguugc

SEQ ID NO: 443541 - RNA, 19 nt, Artificial Sequence
  Description of Artificial Sequence: Synthetic oligonucleotide
uuuaacacuuaaagagugg

SEQ ID NO: 443542 - RNA, 19 nt, Artificial Sequence
  Description of Artificial Sequence: Synthetic oligonucleotide
aacucgaaauacgaucucc

SEQ ID NO: 443543 - RNA, 19 nt, Artificial Sequence
  Description of Artificial Sequence: Synthetic oligonucleotide
auacacuuuauuuuccauc

SEQ ID NO: 443544 - RNA, 19 nt, Artificial Sequence
  Description of Artificial Sequence: Synthetic oligonucleotide
auauuaggagagcaacacc

SEQ ID NO: 443545 - RNA, 19 nt, Artificial Sequence
  Description of Artificial Sequence: Synthetic oligonucleotide
uuaguauuccccaggggag

SEQ ID NO: 443546 - RNA, 19 nt, Artificial Sequence
  Description of Artificial Sequence: Synthetic oligonucleotide
aaugcggccccagagaauc

SEQ ID NO: 443547 - RNA, 19 nt, Artificial Sequence
  Description of Artificial Sequence: Synthetic oligonucleotide
agcgcauggacuuggaguc

SEQ ID NO: 443548 - RNA, 19 nt, Artificial Sequence
  Description of Artificial Sequence: Synthetic oligonucleotide
uauuaguauuccccagggg

SEQ ID NO: 443549 - RNA, 19 nt, Artificial Sequence
  Description of Artificial Sequence: Synthetic oligonucleotide
acuuaaagaguggaccacc

SEQ ID NO: 443550 - RNA, 19 nt, Artificial Sequence
  Description of Artificial Sequence: Synthetic oligonucleotide
cuacucacaccccaggugg

SEQ ID NO: 443551 - RNA, 19 nt, Artificial Sequence
  Description of Artificial Sequence: Synthetic oligonucleotide
uucgucagaagaugguagg

SEQ ID NO: 443552 - RNA, 19 nt, Artificial Sequence
  Description of Artificial Sequence: Synthetic oligonucleotide
cuggauacuagugaggagc

SEQ ID NO: 443553 - RNA, 19 nt, Artificial Sequence
  Description of Artificial Sequence: Synthetic oligonucleotide
cacagaaacaaguggacug

SEQ ID NO: 443554 - RNA, 19 nt, Artificial Sequence
  Description of Artificial Sequence: Synthetic oligonucleotide
aggacgcauacauagaugu

SEQ ID NO: 443555 - RNA, 19 nt, Artificial Sequence
  Description of Artificial Sequence: Synthetic oligonucleotide
aagauaagggagguaacug

SEQ ID NO: 443556 - RNA, 19 nt, Artificial Sequence
  Description of Artificial Sequence: Synthetic oligonucleotide
ugaguaugccuucaugaca

SEQ ID NO: 443557 - RNA, 19 nt, Artificial Sequence
  Description of Artificial Sequence: Synthetic oligonucleotide
aaaacgggugaacacugcu

SEQ ID NO: 443558 - RNA, 19 nt, Artificial Sequence
  Description of Artificial Sequence: Synthetic oligonucleotide
acgguauggaccaaaacgg

SEQ ID NO: 443559 - RNA, 19 nt, Artificial Sequence
  Description of Artificial Sequence: Synthetic oligonucleotide
acggaaacacuucaagaag

SEQ ID NO: 443560 - RNA, 19 nt, Artificial Sequence
  Description of Artificial Sequence: Synthetic oligonucleotide
gauacuagugaggagccgc

SEQ ID NO: 443561 - RNA, 19 nt, Artificial Sequence
  Description of Artificial Sequence: Synthetic oligonucleotide
ucgaaauacgaucuccagu

SEQ ID NO: 443562 - RNA, 19 nt, Artificial Sequence
  Description of Artificial Sequence: Synthetic oligonucleotide
ucccucauacauaaagaug

SEQ ID NO: 443563 - RNA, 19 nt, Artificial Sequence
  Description of Artificial Sequence: Synthetic oligonucleotide
guugcuauaaggcguggcc

SEQ ID NO: 443564 - RNA, 19 nt, Artificial Sequence
  Description of Artificial Sequence: Synthetic oligonucleotide
uuaaagaguggaccaccag

SEQ ID NO: 443565 - RNA, 19 nt, Artificial Sequence
  Description of Artificial Sequence: Synthetic oligonucleotide
uucgaaucagcuccuugag

SEQ ID NO: 443566 - RNA, 19 nt, Artificial Sequence
  Description of Artificial Sequence: Synthetic oligonucleotide
ugccgugucaggcuaagcc

SEQ ID NO: 443567 - RNA, 19 nt, Artificial Sequence
  Description of Artificial Sequence: Synthetic oligonucleotide
ugaguacugguucuugaca

SEQ ID NO: 443568 - RNA, 19 nt, Artificial Sequence
  Description of Artificial Sequence: Synthetic oligonucleotide
cauauuaggagagcaacac

SEQ ID NO: 443569 - RNA, 19 nt, Artificial Sequence
  Description of Artificial Sequence: Synthetic oligonucleotide
agauaagggagguaacuga

SEQ ID NO: 443570 - RNA, 19 nt, Artificial Sequence
  Description of Artificial Sequence: Synthetic oligonucleotide
gguauuaguauuccccagg

SEQ ID NO: 443571 - RNA, 19 nt, Artificial Sequence
  Description of Artificial Sequence: Synthetic oligonucleotide
ugcgggaugagggauaaag

SEQ ID NO: 443572 - RNA, 19 nt, Artificial Sequence
  Description of Artificial Sequence: Synthetic oligonucleotide
aucgauggacuuuggcacc

SEQ ID NO: 443573 - RNA, 19 nt, Artificial Sequence
  Description of Artificial Sequence: Synthetic oligonucleotide
aaagaguggaccaccagga

SEQ ID NO: 443574 - RNA, 19 nt, Artificial Sequence
  Description of Artificial Sequence: Synthetic oligonucleotide
guagaguggguccugcagg

SEQ ID NO: 443575 - RNA, 19 nt, Artificial Sequence
  Description of Artificial Sequence: Synthetic oligonucleotide
uuacuguguaaauacacuu

SEQ ID NO: 443576 - RNA, 19 nt, Artificial Sequence
  Description of Artificial Sequence: Synthetic oligonucleotide
aacgggugaacacugcuau

SEQ ID NO: 443577 - RNA, 19 nt, Artificial Sequence
  Description of Artificial Sequence: Synthetic oligonucleotide
uccauauuaggagagcaac

SEQ ID NO: 443578 - RNA, 19 nt, Artificial Sequence
  Description of Artificial Sequence: Synthetic oligonucleotide
uguggaagcucugaguaug

SEQ ID NO: 443579 - RNA, 19 nt, Artificial Sequence
  Description of Artificial Sequence: Synthetic oligonucleotide
uggauacuagugaggagcc

SEQ ID NO: 443580 - RNA, 19 nt, Artificial Sequence
  Description of Artificial Sequence: Synthetic oligonucleotide
cuucgucagaagaugguag

SEQ ID NO: 443581 - RNA, 19 nt, Artificial Sequence
  Description of Artificial Sequence: Synthetic oligonucleotide
auacauagauguguggaag

SEQ ID NO: 443582 - RNA, 19 nt, Artificial Sequence
  Description of Artificial Sequence: Synthetic oligonucleotide
ugcuauaaggcguggccag

SEQ ID NO: 443583 - RNA, 19 nt, Artificial Sequence
  Description of Artificial Sequence: Synthetic oligonucleotide
uugaguagcucugaguacu

SEQ ID NO: 443584 - RNA, 19 nt, Artificial Sequence
  Description of Artificial Sequence: Synthetic oligonucleotide
accacggaaacacuucaag

SEQ ID NO: 443585 - RNA, 19 nt, Artificial Sequence
  Description of Artificial Sequence: Synthetic oligonucleotide
uaacacuuaaagaguggac

SEQ ID NO: 443586 - RNA, 19 nt, Artificial Sequence
  Description of Artificial Sequence: Synthetic oligonucleotide
ugacuacucacaccccagg

SEQ ID NO: 443587 - RNA, 19 nt, Artificial Sequence
  Description of Artificial Sequence: Synthetic oligonucleotide
acuguguaaauacacuuua

SEQ ID NO: 443588 - RNA, 19 nt, Artificial Sequence
  Description of Artificial Sequence: Synthetic oligonucleotide
augguagggagucuucguc

SEQ ID NO: 443589 - RNA, 19 nt, Artificial Sequence
  Description of Artificial Sequence: Synthetic oligonucleotide
agcaacacccuccagguaa

SEQ ID NO: 443590 - RNA, 19 nt, Artificial Sequence
  Description of Artificial Sequence: Synthetic oligonucleotide
cacucguuggcaaugcggc

SEQ ID NO: 443591 - RNA, 19 nt, Artificial Sequence
  Description of Artificial Sequence: Synthetic oligonucleotide
cauaagagggccuccucag

SEQ ID NO: 443592 - RNA, 19 nt, Artificial Sequence
  Description of Artificial Sequence: Synthetic oligonucleotide
aguacugguucuugacagg

SEQ ID NO: 443593 - RNA, 19 nt, Artificial Sequence
  Description of Artificial Sequence: Synthetic oligonucleotide
gugauugcggccuccaggc

SEQ ID NO: 443594 - RNA, 19 nt, Artificial Sequence
  Description of Artificial Sequence: Synthetic oligonucleotide
aaaaugguggugggcagug

SEQ ID NO: 443595 - RNA, 19 nt, Artificial Sequence
  Description of Artificial Sequence: Synthetic oligonucleotide
caucuuuccugccugggag

SEQ ID NO: 443596 - RNA, 19 nt, Artificial Sequence
  Description of Artificial Sequence: Synthetic oligonucleotide
uguccauauuaggagagca

SEQ ID NO: 443597 - RNA, 19 nt, Artificial Sequence
  Description of Artificial Sequence: Synthetic oligonucleotide
acuacucacaccccaggug

SEQ ID NO: 443598 - RNA, 19 nt, Artificial Sequence
  Description of Artificial Sequence: Synthetic oligonucleotide
aauacgaucuccagucccu

SEQ ID NO: 443599 - RNA, 19 nt, Artificial Sequence
  Description of Artificial Sequence: Synthetic oligonucleotide
ugguauuaguauuccccag

SEQ ID NO: 443600 - RNA, 19 nt, Artificial Sequence
  Description of Artificial Sequence: Synthetic oligonucleotide
acauaagagggccuccuca

SEQ ID NO: 443601 - RNA, 19 nt, Artificial Sequence
  Description of Artificial Sequence: Synthetic oligonucleotide
gaaauacgaucuccagucc

SEQ ID NO: 443602 - RNA, 19 nt, Artificial Sequence
  Description of Artificial Sequence: Synthetic oligonucleotide
aggcuaagcccaucgaaag

SEQ ID NO: 443603 - RNA, 19 nt, Artificial Sequence
  Description of Artificial Sequence: Synthetic oligonucleotide
uacuguguaaauacacuuu

SEQ ID NO: 443604 - RNA, 19 nt, Artificial Sequence
  Description of Artificial Sequence: Synthetic oligonucleotide
auagcuugggaugccacuc

SEQ ID NO: 443605 - RNA, 19 nt, Artificial Sequence
  Description of Artificial Sequence: Synthetic oligonucleotide
ugugggaugcccuuucgaa

SEQ ID NO: 443606 - RNA, 19 nt, Artificial Sequence
  Description of Artificial Sequence: Synthetic oligonucleotide
uuaguacugcgaagcagca

SEQ ID NO: 443607 - RNA, 19 nt, Artificial Sequence
  Description of Artificial Sequence: Synthetic oligonucleotide
ugcuuagcaaguccuggga

SEQ ID NO: 443608 - RNA, 19 nt, Artificial Sequence
  Description of Artificial Sequence: Synthetic oligonucleotide
guauggaccaaaacgggug

SEQ ID NO: 443609 - RNA, 19 nt, Artificial Sequence
  Description of Artificial Sequence: Synthetic oligonucleotide
acugacuacucacacccca

SEQ ID NO: 443610 - RNA, 19 nt, Artificial Sequence
  Description of Artificial Sequence: Synthetic oligonucleotide
aguagcucugaguacuggu

SEQ ID NO: 443611 - RNA, 19 nt, Artificial Sequence
  Description of Artificial Sequence: Synthetic oligonucleotide
cucgaaauacgaucuccag

SEQ ID NO: 443612 - RNA, 19 nt, Artificial Sequence
  Description of Artificial Sequence: Synthetic oligonucleotide
guuggugggccuuucagca

SEQ ID NO: 443613 - RNA, 19 nt, Artificial Sequence
  Description of Artificial Sequence: Synthetic oligonucleotide
ugcggauuagcuucucgca

SEQ ID NO: 443614 - RNA, 19 nt, Artificial Sequence
  Description of Artificial Sequence: Synthetic oligonucleotide
cugcggauuagcuucucgc

SEQ ID NO: 443615 - RNA, 19 nt, Artificial Sequence
  Description of Artificial Sequence: Synthetic oligonucleotide
ucgucagaagaugguaggg

SEQ ID NO: 443616 - RNA, 19 nt, Artificial Sequence
  Description of Artificial Sequence: Synthetic oligonucleotide
ugacugggaaacucuggcc

SEQ ID NO: 443617 - RNA, 19 nt, Artificial Sequence
  Description of Artificial Sequence: Synthetic oligonucleotide
ugggaugcccuuucgaauc

SEQ ID NO: 443618 - RNA, 19 nt, Artificial Sequence
  Description of Artificial Sequence: Synthetic oligonucleotide
agugacucucuggaaguac

SEQ ID NO: 443619 - RNA, 19 nt, Artificial Sequence
  Description of Artificial Sequence: Synthetic oligonucleotide
gugguauuaguauucccca

SEQ ID NO: 443620 - RNA, 19 nt, Artificial Sequence
  Description of Artificial Sequence: Synthetic oligonucleotide
ucaacucugacugggcaga

SEQ ID NO: 443621 - RNA, 19 nt, Artificial Sequence
  Description of Artificial Sequence: Synthetic oligonucleotide
uuagcaaguccugggaccu

SEQ ID NO: 443622 - RNA, 19 nt, Artificial Sequence
  Description of Artificial Sequence: Synthetic oligonucleotide
ggugauugcggccuccagg

SEQ ID NO: 443623 - RNA, 19 nt, Artificial Sequence
  Description of Artificial Sequence: Synthetic oligonucleotide
cuccgggagccauucaugg

SEQ ID NO: 443624 - RNA, 19 nt, Artificial Sequence
  Description of Artificial Sequence: Synthetic oligonucleotide
cugaguacugguucuugac

SEQ ID NO: 443625 - RNA, 19 nt, Artificial Sequence
  Description of Artificial Sequence: Synthetic oligonucleotide
guuggcgggagccauggug

SEQ ID NO: 443626 - RNA, 19 nt, Artificial Sequence
  Description of Artificial Sequence: Synthetic oligonucleotide
accaaaacgggugaacacu

SEQ ID NO: 443627 - RNA, 19 nt, Artificial Sequence
  Description of Artificial Sequence: Synthetic oligonucleotide
agaagcgugcgucccgggg

SEQ ID NO: 443628 - RNA, 19 nt, Artificial Sequence
  Description of Artificial Sequence: Synthetic oligonucleotide
uggccuuuccagacgucgg

SEQ ID NO: 443629 - RNA, 19 nt, Artificial Sequence
  Description of Artificial Sequence: Synthetic oligonucleotide
cgaaauacgaucuccaguc

SEQ ID NO: 443630 - RNA, 19 nt, Artificial Sequence
  Description of Artificial Sequence: Synthetic oligonucleotide
ggaugagggauaaaggagc

SEQ ID NO: 443631 - RNA, 19 nt, Artificial Sequence
  Description of Artificial Sequence: Synthetic oligonucleotide
gaagaagcgugcgucccgg

SEQ ID NO: 443632 - RNA, 19 nt, Artificial Sequence
  Description of Artificial Sequence: Synthetic oligonucleotide
agaguggaccaccaggaau

SEQ ID NO: 443633 - RNA, 19 nt, Artificial Sequence
  Description of Artificial Sequence: Synthetic oligonucleotide
uucucaacucugacugggc

SEQ ID NO: 443634 - RNA, 19 nt, Artificial Sequence
  Description of Artificial Sequence: Synthetic oligonucleotide
ggauuagcuucucgcaugg

SEQ ID NO: 443635 - RNA, 19 nt, Artificial Sequence
  Description of Artificial Sequence: Synthetic oligonucleotide
uagggagucuucgucuagg

SEQ ID NO: 443636 - RNA, 19 nt, Artificial Sequence
  Description of Artificial Sequence: Synthetic oligonucleotide
agcuggauacuagugagga

SEQ ID NO: 443637 - RNA, 19 nt, Artificial Sequence
  Description of Artificial Sequence: Synthetic oligonucleotide
ugaguagcucugaguacug

SEQ ID NO: 443638 - RNA, 19 nt, Artificial Sequence
  Description of Artificial Sequence: Synthetic oligonucleotide
cauucucaacucugacugg

SEQ ID NO: 443639 - RNA, 19 nt, Artificial Sequence
  Description of Artificial Sequence: Synthetic oligonucleotide
ccuugguugcuauaaggcg

SEQ ID NO: 443640 - RNA, 19 nt, Artificial Sequence
  Description of Artificial Sequence: Synthetic oligonucleotide
uugcuauaaggcguggcca

SEQ ID NO: 443641 - RNA, 19 nt, Artificial Sequence
  Description of Artificial Sequence: Synthetic oligonucleotide
cuuaaagaguggaccacca

SEQ ID NO: 443642 - RNA, 19 nt, Artificial Sequence
  Description of Artificial Sequence: Synthetic oligonucleotide
ucugcaucgcugucugagc

SEQ ID NO: 443643 - RNA, 19 nt, Artificial Sequence
  Description of Artificial Sequence: Synthetic oligonucleotide
acagaaacaaguggacuga

SEQ ID NO: 443644 - RNA, 19 nt, Artificial Sequence
  Description of Artificial Sequence: Synthetic oligonucleotide
caccccuugaacucaggag

SEQ ID NO: 443645 - RNA, 19 nt, Artificial Sequence
  Description of Artificial Sequence: Synthetic oligonucleotide
gucccugcggauuagcuuc

SEQ ID NO: 443646 - RNA, 19 nt, Artificial Sequence
  Description of Artificial Sequence: Synthetic oligonucleotide
uggcccggaagugaugugg

SEQ ID NO: 443647 - RNA, 19 nt, Artificial Sequence
  Description of Artificial Sequence: Synthetic oligonucleotide
aagaugguagggagucuuc

SEQ ID NO: 443648 - RNA, 19 nt, Artificial Sequence
  Description of Artificial Sequence: Synthetic oligonucleotide
ucggaagaagcgugcgucc

SEQ ID NO: 443649 - RNA, 19 nt, Artificial Sequence
  Description of Artificial Sequence: Synthetic oligonucleotide
cugacuacucacaccccag

SEQ ID NO: 443650 - RNA, 19 nt, Artificial Sequence
  Description of Artificial Sequence: Synthetic oligonucleotide
caaaacgggugaacacugc

SEQ ID NO: 443651 - RNA, 19 nt, Artificial Sequence
  Description of Artificial Sequence: Synthetic oligonucleotide
cauaucuguggcacugcac

SEQ ID NO: 443652 - RNA, 19 nt, Artificial Sequence
  Description of Artificial Sequence: Synthetic oligonucleotide
auauccaguccaaguugcc

SEQ ID NO: 443653 - RNA, 19 nt, Artificial Sequence
  Description of Artificial Sequence: Synthetic oligonucleotide
acgugugguauuaguauuc

SEQ ID NO: 443654 - RNA, 19 nt, Artificial Sequence
  Description of Artificial Sequence: Synthetic oligonucleotide
aacgauggcccggaaguga

SEQ ID NO: 443655 - RNA, 19 nt, Artificial Sequence
  Description of Artificial Sequence: Synthetic oligonucleotide
gcuaagcccaucgaaagcc

SEQ ID NO: 443656 - RNA, 19 nt, Artificial Sequence
  Description of Artificial Sequence: Synthetic oligonucleotide
uaggugcgggcaauguccc

SEQ ID NO: 443657 - RNA, 19 nt, Artificial Sequence
  Description of Artificial Sequence: Synthetic oligonucleotide
ggccuugguugcuauaagg

SEQ ID NO: 443658 - RNA, 19 nt, Artificial Sequence
  Description of Artificial Sequence: Synthetic oligonucleotide
ucuucgucagaagauggua

SEQ ID NO: 443659 - RNA, 19 nt, Artificial Sequence
  Description of Artificial Sequence: Synthetic oligonucleotide
aagaagcgugcgucccggg

SEQ ID NO: 443660 - RNA, 19 nt, Artificial Sequence
  Description of Artificial Sequence: Synthetic oligonucleotide
acuagugaggagccgcuau

SEQ ID NO: 443661 - RNA, 19 nt, Artificial Sequence
  Description of Artificial Sequence: Synthetic oligonucleotide
cuugguugcuauaaggcgu

SEQ ID NO: 443662 - RNA, 19 nt, Artificial Sequence
  Description of Artificial Sequence: Synthetic oligonucleotide
gacgcauacauagaugugu

SEQ ID NO: 443663 - RNA, 19 nt, Artificial Sequence
  Description of Artificial Sequence: Synthetic oligonucleotide
ucggcccuuguccauauua

SEQ ID NO: 443664 - RNA, 19 nt, Artificial Sequence
  Description of Artificial Sequence: Synthetic oligonucleotide
gccaacucgaaauacgauc

SEQ ID NO: 443665 - RNA, 19 nt, Artificial Sequence
  Description of Artificial Sequence: Synthetic oligonucleotide
uuccagacgucggaagaag

SEQ ID NO: 443666 - RNA, 19 nt, Artificial Sequence
  Description of Artificial Sequence: Synthetic oligonucleotide
ucgucuaggugccguguca

SEQ ID NO: 443667 - RNA, 19 nt, Artificial Sequence
  Description of Artificial Sequence: Synthetic oligonucleotide
caaacgauggcccggaagu

SEQ ID NO: 443668 - RNA, 19 nt, Artificial Sequence
  Description of Artificial Sequence: Synthetic oligonucleotide
gcacuuucggcccuugucc

SEQ ID NO: 443669 - RNA, 19 nt, Artificial Sequence
  Description of Artificial Sequence: Synthetic oligonucleotide
ugcccuuucgaaucagcuc

SEQ ID NO: 443670 - RNA, 19 nt, Artificial Sequence
  Description of Artificial Sequence: Synthetic oligonucleotide
aaacgauggcccggaagug

SEQ ID NO: 443671 - RNA, 19 nt, Artificial Sequence
  Description of Artificial Sequence: Synthetic oligonucleotide
uuguccauauuaggagagc

SEQ ID NO: 443672 - RNA, 19 nt, Artificial Sequence
  Description of Artificial Sequence: Synthetic oligonucleotide
acucacaccccagguggcc

SEQ ID NO: 443673 - RNA, 19 nt, Artificial Sequence
  Description of Artificial Sequence: Synthetic oligonucleotide
aagcgugcgucccggggug

SEQ ID NO: 443674 - RNA, 19 nt, Artificial Sequence
  Description of Artificial Sequence: Synthetic oligonucleotide
ugucaaagacccggguggc

SEQ ID NO: 443675 - RNA, 19 nt, Artificial Sequence
  Description of Artificial Sequence: Synthetic oligonucleotide
aagaugcgggaugagggau

SEQ ID NO: 443676 - RNA, 19 nt, Artificial Sequence
  Description of Artificial Sequence: Synthetic oligonucleotide
acucgaaauacgaucucca

SEQ ID NO: 443677 - RNA, 19 nt, Artificial Sequence
  Description of Artificial Sequence: Synthetic oligonucleotide
cuuuccagacgucggaaga

SEQ ID NO: 443678 - RNA, 19 nt, Artificial Sequence
  Description of Artificial Sequence: Synthetic oligonucleotide
cugagcuaccuucacuguc

SEQ ID NO: 443679 - RNA, 19 nt, Artificial Sequence
  Description of Artificial Sequence: Synthetic oligonucleotide
aagguuggugggccuuuca

SEQ ID NO: 443680 - RNA, 19 nt, Artificial Sequence
  Description of Artificial Sequence: Synthetic oligonucleotide
caugacauugaagaggacu

SEQ ID NO: 443681 - RNA, 19 nt, Artificial Sequence
  Description of Artificial Sequence: Synthetic oligonucleotide
ccagacgucggaagaagcg

SEQ ID NO: 443682 - RNA, 19 nt, Artificial Sequence
  Description of Artificial Sequence: Synthetic oligonucleotide
uggacgguauggaccaaaa

SEQ ID NO: 443683 - RNA, 19 nt, Artificial Sequence
  Description of Artificial Sequence: Synthetic oligonucleotide
guccucgaagguugguggg

SEQ ID NO: 443684 - RNA, 19 nt, Artificial Sequence
  Description of Artificial Sequence: Synthetic oligonucleotide
uuuccagacgucggaagaa

SEQ ID NO: 443685 - RNA, 19 nt, Artificial Sequence
  Description of Artificial Sequence: Synthetic oligonucleotide
gaguagcucugaguacugg

SEQ ID NO: 443686 - RNA, 19 nt, Artificial Sequence
  Description of Artificial Sequence: Synthetic oligonucleotide
gagccugggagcaucgaug

SEQ ID NO: 443687 - RNA, 19 nt, Artificial Sequence
  Description of Artificial Sequence: Synthetic oligonucleotide
uccuccgggagccauucau

SEQ ID NO: 443688 - RNA, 19 nt, Artificial Sequence
  Description of Artificial Sequence: Synthetic oligonucleotide
gaaccuguccuggagugca

SEQ ID NO: 443689 - RNA, 19 nt, Artificial Sequence
  Description of Artificial Sequence: Synthetic oligonucleotide
auuaggagagcaacacccu

SEQ ID NO: 443690 - RNA, 19 nt, Artificial Sequence
  Description of Artificial Sequence: Synthetic oligonucleotide
uauaaggcguggccagcuc

SEQ ID NO: 443691 - RNA, 19 nt, Artificial Sequence
  Description of Artificial Sequence: Synthetic oligonucleotide
agugaugugggaugcccuu

SEQ ID NO: 443692 - RNA, 19 nt, Artificial Sequence
  Description of Artificial Sequence: Synthetic oligonucleotide
guaacuggccuaggcaccc

SEQ ID NO: 443693 - RNA, 19 nt, Artificial Sequence
  Description of Artificial Sequence: Synthetic oligonucleotide
gguuggugggccuuucagc

SEQ ID NO: 443694 - RNA, 19 nt, Artificial Sequence
  Description of Artificial Sequence: Synthetic oligonucleotide
uucgucuaggugccguguc

SEQ ID NO: 443695 - RNA, 19 nt, Artificial Sequence
  Description of Artificial Sequence: Synthetic oligonucleotide
uggaccaaaacgggugaac

SEQ ID NO: 443696 - RNA, 19 nt, Artificial Sequence
  Description of Artificial Sequence: Synthetic oligonucleotide
ucgcauggugaggacaucu

SEQ ID NO: 443697 - RNA, 19 nt, Artificial Sequence
  Description of Artificial Sequence: Synthetic oligonucleotide
aggcauaucuguggcacug

SEQ ID NO: 443698 - RNA, 19 nt, Artificial Sequence
  Description of Artificial Sequence: Synthetic oligonucleotide
ugcucucuccuggcaagcg

SEQ ID NO: 443699 - RNA, 19 nt, Artificial Sequence
  Description of Artificial Sequence: Synthetic oligonucleotide
ggaagaagcgugcgucccg

SEQ ID NO: 443700 - RNA, 19 nt, Artificial Sequence
  Description of Artificial Sequence: Synthetic oligonucleotide
cacuuaaagaguggaccac

SEQ ID NO: 443701 - RNA, 19 nt, Artificial Sequence
  Description of Artificial Sequence: Synthetic oligonucleotide
uacgaucuccagucccuca

SEQ ID NO: 443702 - RNA, 19 nt, Artificial Sequence
  Description of Artificial Sequence: Synthetic oligonucleotide
acgcauacauagaugugug

SEQ ID NO: 443703 - RNA, 19 nt, Artificial Sequence
  Description of Artificial Sequence: Synthetic oligonucleotide
gagaccacggaaacacuuc

SEQ ID NO: 443704 - RNA, 19 nt, Artificial Sequence
  Description of Artificial Sequence: Synthetic oligonucleotide
gugguaaggaaaaguguga

SEQ ID NO: 443705 - RNA, 19 nt, Artificial Sequence
  Description of Artificial Sequence: Synthetic oligonucleotide
gcugccaaacgauggcccg

SEQ ID NO: 443706 - RNA, 19 nt, Artificial Sequence
  Description of Artificial Sequence: Synthetic oligonucleotide
gagccgcuauuccuccggg

SEQ ID NO: 443707 - RNA, 19 nt, Artificial Sequence
  Description of Artificial Sequence: Synthetic oligonucleotide
auacgaucuccagucccuc

SEQ ID NO: 443708 - RNA, 19 nt, Artificial Sequence
  Description of Artificial Sequence: Synthetic oligonucleotide
caggcuaagcccaucgaaa

SEQ ID NO: 443709 - RNA, 19 nt, Artificial Sequence
  Description of Artificial Sequence: Synthetic oligonucleotide
augugggaugcccuuucga

SEQ ID NO: 443710 - RNA, 19 nt, Artificial Sequence
  Description of Artificial Sequence: Synthetic oligonucleotide
ccaaaacgggugaacacug

SEQ ID NO: 443711 - RNA, 19 nt, Artificial Sequence
  Description of Artificial Sequence: Synthetic oligonucleotide
guacugcgaagcagcaagg

SEQ ID NO: 443712 - RNA, 19 nt, Artificial Sequence
  Description of Artificial Sequence: Synthetic oligonucleotide
ugucccugcggauuagcuu

SEQ ID NO: 443713 - RNA, 19 nt, Artificial Sequence
  Description of Artificial Sequence: Synthetic oligonucleotide
uacugcgaagcagcaaggu

SEQ ID NO: 443714 - RNA, 19 nt, Artificial Sequence
  Description of Artificial Sequence: Synthetic oligonucleotide
gccgcuauuccuccgggag

SEQ ID NO: 443715 - RNA, 19 nt, Artificial Sequence
  Description of Artificial Sequence: Synthetic oligonucleotide
aggccuugguugcuauaag

SEQ ID NO: 443716 - RNA, 19 nt, Artificial Sequence
  Description of Artificial Sequence: Synthetic oligonucleotide
ucgauggacuuuggcacca

SEQ ID NO: 443717 - RNA, 19 nt, Artificial Sequence
  Description of Artificial Sequence: Synthetic oligonucleotide
gccuugguugcuauaaggc

SEQ ID NO: 443718 - RNA, 19 nt, Artificial Sequence
  Description of Artificial Sequence: Synthetic oligonucleotide
ccacucguuggcaaugcgg

SEQ ID NO: 443719 - RNA, 19 nt, Artificial Sequence
  Description of Artificial Sequence: Synthetic oligonucleotide
uagugaggagccgcuauuc

SEQ ID NO: 443720 - RNA, 19 nt, Artificial Sequence
  Description of Artificial Sequence: Synthetic oligonucleotide
gccgugucaggcuaagccc

SEQ ID NO: 443721 - RNA, 19 nt, Artificial Sequence
  Description of Artificial Sequence: Synthetic oligonucleotide
gaugguagggagucuucgu

SEQ ID NO: 443722 - RNA, 19 nt, Artificial Sequence
  Description of Artificial Sequence: Synthetic oligonucleotide
agcggguccucgaagguug

SEQ ID NO: 443723 - RNA, 19 nt, Artificial Sequence
  Description of Artificial Sequence: Synthetic oligonucleotide
ugccagcuuguccgggcag

SEQ ID NO: 443724 - RNA, 19 nt, Artificial Sequence
  Description of Artificial Sequence: Synthetic oligonucleotide
agacgucggaagaagcgug

SEQ ID NO: 443725 - RNA, 19 nt, Artificial Sequence
  Description of Artificial Sequence: Synthetic oligonucleotide
acgucggaagaagcgugcg

SEQ ID NO: 443726 - RNA, 19 nt, Artificial Sequence
  Description of Artificial Sequence: Synthetic oligonucleotide
aggaagcuuccugcuuagc

SEQ ID NO: 443727 - RNA, 19 nt, Artificial Sequence
  Description of Artificial Sequence: Synthetic oligonucleotide
ggcuaagcccaucgaaagc

SEQ ID NO: 443728 - RNA, 19 nt, Artificial Sequence
  Description of Artificial Sequence: Synthetic oligonucleotide
caacucgaaauacgaucuc

SEQ ID NO: 443729 - RNA, 19 nt, Artificial Sequence
  Description of Artificial Sequence: Synthetic oligonucleotide
acgggugaacacugcuaug

SEQ ID NO: 443730 - RNA, 19 nt, Artificial Sequence
  Description of Artificial Sequence: Synthetic oligonucleotide
uugucccauagggaagcca

SEQ ID NO: 443731 - RNA, 19 nt, Artificial Sequence
  Description of Artificial Sequence: Synthetic oligonucleotide
ugguugcuauaaggcgugg

SEQ ID NO: 443732 - RNA, 19 nt, Artificial Sequence
  Description of Artificial Sequence: Synthetic oligonucleotide
cacauaagagggccuccuc

SEQ ID NO: 443733 - RNA, 19 nt, Artificial Sequence
  Description of Artificial Sequence: Synthetic oligonucleotide
agcacgugugguauuagua

SEQ ID NO: 443734 - RNA, 19 nt, Artificial Sequence
  Description of Artificial Sequence: Synthetic oligonucleotide
ugccaaacgauggcccgga

SEQ ID NO: 443735 - RNA, 19 nt, Artificial Sequence
  Description of Artificial Sequence: Synthetic oligonucleotide
gacuacucacaccccaggu

SEQ ID NO: 443736 - RNA, 19 nt, Artificial Sequence
  Description of Artificial Sequence: Synthetic oligonucleotide
gguaacuggccuaggcacc

SEQ ID NO: 443737 - RNA, 19 nt, Artificial Sequence
  Description of Artificial Sequence: Synthetic oligonucleotide
auacuagugaggagccgcu

SEQ ID NO: 443738 - RNA, 19 nt, Artificial Sequence
  Description of Artificial Sequence: Synthetic oligonucleotide
uauguagggcaggccugcc

SEQ ID NO: 443739 - RNA, 19 nt, Artificial Sequence
  Description of Artificial Sequence: Synthetic oligonucleotide
caucgaaagccagcggguc

SEQ ID NO: 443740 - RNA, 19 nt, Artificial Sequence
  Description of Artificial Sequence: Synthetic oligonucleotide
gaagcgugcgucccggggu

SEQ ID NO: 443741 - RNA, 19 nt, Artificial Sequence
  Description of Artificial Sequence: Synthetic oligonucleotide
gcgggaugagggauaaagg

SEQ ID NO: 443742 - RNA, 19 nt, Artificial Sequence
  Description of Artificial Sequence: Synthetic oligonucleotide
cuugaacucaggagggccu

SEQ ID NO: 443743 - RNA, 19 nt, Artificial Sequence
  Description of Artificial Sequence: Synthetic oligonucleotide
gcuggauacuagugaggag

SEQ ID NO: 443744 - RNA, 19 nt, Artificial Sequence
  Description of Artificial Sequence: Synthetic oligonucleotide
guaggcccugcccucugug

SEQ ID NO: 443745 - RNA, 19 nt, Artificial Sequence
  Description of Artificial Sequence: Synthetic oligonucleotide
gaugcgggaugagggauaa

SEQ ID NO: 443746 - RNA, 19 nt, Artificial Sequence
  Description of Artificial Sequence: Synthetic oligonucleotide
agaagaugguagggagucu

SEQ ID NO: 443747 - RNA, 19 nt, Artificial Sequence
  Description of Artificial Sequence: Synthetic oligonucleotide
cacuuucggcccuugucca

SEQ ID NO: 443748 - RNA, 19 nt, Artificial Sequence
  Description of Artificial Sequence: Synthetic oligonucleotide
cacugcuauguagggcagg

SEQ ID NO: 443749 - RNA, 19 nt, Artificial Sequence
  Description of Artificial Sequence: Synthetic oligonucleotide
gucggcuuccaggagccug

SEQ ID NO: 443750 - RNA, 19 nt, Artificial Sequence
  Description of Artificial Sequence: Synthetic oligonucleotide
ccggaagugaugugggaug

SEQ ID NO: 443751 - RNA, 19 nt, Artificial Sequence
  Description of Artificial Sequence: Synthetic oligonucleotide
gggauaaaggagccuggga

SEQ ID NO: 443752 - RNA, 19 nt, Artificial Sequence
  Description of Artificial Sequence: Synthetic oligonucleotide
gaagaugguagggagucuu

SEQ ID NO: 443753 - RNA, 19 nt, Artificial Sequence
  Description of Artificial Sequence: Synthetic oligonucleotide
ccaacucgaaauacgaucu

SEQ ID NO: 443754 - RNA, 19 nt, Artificial Sequence
  Description of Artificial Sequence: Synthetic oligonucleotide
ggauacuagugaggagccg

SEQ ID NO: 443755 - RNA, 19 nt, Artificial Sequence
  Description of Artificial Sequence: Synthetic oligonucleotide
cuucucgcauggugaggac

SEQ ID NO: 443756 - RNA, 19 nt, Artificial Sequence
  Description of Artificial Sequence: Synthetic oligonucleotide
uaguacugcgaagcagcaa

SEQ ID NO: 443757 - RNA, 19 nt, Artificial Sequence
  Description of Artificial Sequence: Synthetic oligonucleotide
ccagagaauccacgugucc

SEQ ID NO: 443758 - RNA, 19 nt, Artificial Sequence
  Description of Artificial Sequence: Synthetic oligonucleotide
ucccugcggauuagcuucu

SEQ ID NO: 443759 - RNA, 19 nt, Artificial Sequence
  Description of Artificial Sequence: Synthetic oligonucleotide
cuugucccauagggaagcc

SEQ ID NO: 443760 - RNA, 19 nt, Artificial Sequence
  Description of Artificial Sequence: Synthetic oligonucleotide
gguugcuauaaggcguggc

SEQ ID NO: 443761 - RNA, 19 nt, Artificial Sequence
  Description of Artificial Sequence: Synthetic oligonucleotide
cacccagggauagcuuggg

SEQ ID NO: 443762 - RNA, 19 nt, Artificial Sequence
  Description of Artificial Sequence: Synthetic oligonucleotide
gugcgggcaaugucccugc

SEQ ID NO: 443763 - RNA, 19 nt, Artificial Sequence
  Description of Artificial Sequence: Synthetic oligonucleotide
caggguacccugccccggc

SEQ ID NO: 443764 - RNA, 19 nt, Artificial Sequence
  Description of Artificial Sequence: Synthetic oligonucleotide
gucaggcuaagcccaucga

SEQ ID NO: 443765 - RNA, 19 nt, Artificial Sequence
  Description of Artificial Sequence: Synthetic oligonucleotide
gccuggacgguauggacca

SEQ ID NO: 443766 - RNA, 19 nt, Artificial Sequence
  Description of Artificial Sequence: Synthetic oligonucleotide
guccauauuaggagagcaa

SEQ ID NO: 443767 - RNA, 19 nt, Artificial Sequence
  Description of Artificial Sequence: Synthetic oligonucleotide
gcuauguagggcaggccug

SEQ ID NO: 443768 - RNA, 19 nt, Artificial Sequence
  Description of Artificial Sequence: Synthetic oligonucleotide
ccacggaaacacuucaaga

SEQ ID NO: 443769 - RNA, 19 nt, Artificial Sequence
  Description of Artificial Sequence: Synthetic oligonucleotide
aggaggacgcauacauaga

SEQ ID NO: 443770 - RNA, 19 nt, Artificial Sequence
  Description of Artificial Sequence: Synthetic oligonucleotide
aggcguggccagcucgucu

SEQ ID NO: 443771 - RNA, 19 nt, Artificial Sequence
  Description of Artificial Sequence: Synthetic oligonucleotide
ccugcggauuagcuucucg

SEQ ID NO: 443772 - RNA, 19 nt, Artificial Sequence
  Description of Artificial Sequence: Synthetic oligonucleotide
ggaggacgcauacauagau

SEQ ID NO: 443773 - RNA, 19 nt, Artificial Sequence
  Description of Artificial Sequence: Synthetic oligonucleotide
cauggagcgcauggacuug

SEQ ID NO: 443774 - RNA, 19 nt, Artificial Sequence
  Description of Artificial Sequence: Synthetic oligonucleotide
gugcgucccggggugacag

SEQ ID NO: 443775 - RNA, 19 nt, Artificial Sequence
  Description of Artificial Sequence: Synthetic oligonucleotide
agccgcuauuccuccggga

SEQ ID NO: 443776 - RNA, 19 nt, Artificial Sequence
  Description of Artificial Sequence: Synthetic oligonucleotide
ccgggcagcugucaaacug

SEQ ID NO: 443777 - RNA, 19 nt, Artificial Sequence
  Description of Artificial Sequence: Synthetic oligonucleotide
cggauuagcuucucgcaug

SEQ ID NO: 443778 - RNA, 19 nt, Artificial Sequence
  Description of Artificial Sequence: Synthetic oligonucleotide
uccgggcagcugucaaacu

SEQ ID NO: 443779 - RNA, 19 nt, Artificial Sequence
  Description of Artificial Sequence: Synthetic oligonucleotide
ggcccggaagugauguggg

SEQ ID NO: 443780 - RNA, 19 nt, Artificial Sequence
  Description of Artificial Sequence: Synthetic oligonucleotide
cugcucucuccuggcaagc

SEQ ID NO: 443781 - RNA, 19 nt, Artificial Sequence
  Description of Artificial Sequence: Synthetic oligonucleotide
gguacccugccccggcccc

SEQ ID NO: 443782 - RNA, 19 nt, Artificial Sequence
  Description of Artificial Sequence: Synthetic oligonucleotide
cuaggugccgugucaggcu

SEQ ID NO: 443783 - RNA, 19 nt, Artificial Sequence
  Description of Artificial Sequence: Synthetic oligonucleotide
cugggagcaucgauggacu

SEQ ID NO: 443784 - RNA, 19 nt, Artificial Sequence
  Description of Artificial Sequence: Synthetic oligonucleotide
uacuagugaggagccgcua

SEQ ID NO: 443785 - RNA, 19 nt, Artificial Sequence
  Description of Artificial Sequence: Synthetic oligonucleotide
ucgaagguuggugggccuu

SEQ ID NO: 443786 - RNA, 19 nt, Artificial Sequence
  Description of Artificial Sequence: Synthetic oligonucleotide
ggacgcauacauagaugug

SEQ ID NO: 443787 - RNA, 19 nt, Artificial Sequence
  Description of Artificial Sequence: Synthetic oligonucleotide
ugggagcaucgauggacuu

SEQ ID NO: 443788 - RNA, 19 nt, Artificial Sequence
  Description of Artificial Sequence: Synthetic oligonucleotide
augcggccccagagaaucc

SEQ ID NO: 443789 - RNA, 19 nt, Artificial Sequence
  Description of Artificial Sequence: Synthetic oligonucleotide
cgugugguauuaguauucc

SEQ ID NO: 443790 - RNA, 19 nt, Artificial Sequence
  Description of Artificial Sequence: Synthetic oligonucleotide
uuccuccgggagccauuca

SEQ ID NO: 443791 - RNA, 19 nt, Artificial Sequence
  Description of Artificial Sequence: Synthetic oligonucleotide
ggcacauaagagggccucc

SEQ ID NO: 443792 - RNA, 19 nt, Artificial Sequence
  Description of Artificial Sequence: Synthetic oligonucleotide
gaccacggaaacacuucaa

SEQ ID NO: 443793 - RNA, 19 nt, Artificial Sequence
  Description of Artificial Sequence: Synthetic oligonucleotide
gccacucuaccugaggcuc

SEQ ID NO: 443794 - RNA, 19 nt, Artificial Sequence
  Description of Artificial Sequence: Synthetic oligonucleotide
gugggaugcccuuucgaau

SEQ ID NO: 443795 - RNA, 19 nt, Artificial Sequence
  Description of Artificial Sequence: Synthetic oligonucleotide
guacugggacaugcccucc

SEQ ID NO: 443796 - RNA, 19 nt, Artificial Sequence
  Description of Artificial Sequence: Synthetic oligonucleotide
gcuauaaggcguggccagc

SEQ ID NO: 443797 - RNA, 19 nt, Artificial Sequence
  Description of Artificial Sequence: Synthetic oligonucleotide
gcacgugugguauuaguau

SEQ ID NO: 443798 - RNA, 19 nt, Artificial Sequence
  Description of Artificial Sequence: Synthetic oligonucleotide
cacgugugguauuaguauu

SEQ ID NO: 443799 - RNA, 19 nt, Artificial Sequence
  Description of Artificial Sequence: Synthetic oligonucleotide
ggauagcuugggaugccac

SEQ ID NO: 443800 - RNA, 19 nt, Artificial Sequence
  Description of Artificial Sequence: Synthetic oligonucleotide
cugcaucgcugucugagcu

SEQ ID NO: 443801 - RNA, 19 nt, Artificial Sequence
  Description of Artificial Sequence: Synthetic oligonucleotide
caucugacccugguggcaa

SEQ ID NO: 443802 - RNA, 19 nt, Artificial Sequence
  Description of Artificial Sequence: Synthetic oligonucleotide
gcaccccuugaacucagga

SEQ ID NO: 443803 - RNA, 19 nt, Artificial Sequence
  Description of Artificial Sequence: Synthetic oligonucleotide
cuccagucccucauacaua

SEQ ID NO: 443804 - RNA, 19 nt, Artificial Sequence
  Description of Artificial Sequence: Synthetic oligonucleotide
cgcuauuccuccgggagcc

SEQ ID NO: 443805 - RNA, 19 nt, Artificial Sequence
  Description of Artificial Sequence: Synthetic oligonucleotide
ccuccgggagccauucaug

SEQ ID NO: 443806 - RNA, 19 nt, Artificial Sequence
  Description of Artificial Sequence: Synthetic oligonucleotide
ggccgugaugccugcacca

SEQ ID NO: 443807 - RNA, 19 nt, Artificial Sequence
  Description of Artificial Sequence: Synthetic oligonucleotide
agaugcgggaugagggaua

SEQ ID NO: 443808 - RNA, 19 nt, Artificial Sequence
  Description of Artificial Sequence: Synthetic oligonucleotide
cuauaaggcguggccagcu

SEQ ID NO: 443809 - RNA, 19 nt, Artificial Sequence
  Description of Artificial Sequence: Synthetic oligonucleotide
ggccuuuccagacgucgga

SEQ ID NO: 443810 - RNA, 19 nt, Artificial Sequence
  Description of Artificial Sequence: Synthetic oligonucleotide
ccgcuauuccuccgggagc

SEQ ID NO: 443811 - RNA, 19 nt, Artificial Sequence
  Description of Artificial Sequence: Synthetic oligonucleotide
cagacgucggaagaagcgu

SEQ ID NO: 443812 - RNA, 19 nt, Artificial Sequence
  Description of Artificial Sequence: Synthetic oligonucleotide
aggugcgggcaaugucccu

SEQ ID NO: 443813 - RNA, 19 nt, Artificial Sequence
  Description of Artificial Sequence: Synthetic oligonucleotide
ggugccgugucaggcuaag

SEQ ID NO: 443814 - RNA, 19 nt, Artificial Sequence
  Description of Artificial Sequence: Synthetic oligonucleotide
ccgugucaggcuaagccca

SEQ ID NO: 443815 - RNA, 19 nt, Artificial Sequence
  Description of Artificial Sequence: Synthetic oligonucleotide
aagcacccagggauagcuu

SEQ ID NO: 443816 - RNA, 19 nt, Artificial Sequence
  Description of Artificial Sequence: Synthetic oligonucleotide
ugcgucccggggugacaga

SEQ ID NO: 443817 - RNA, 19 nt, Artificial Sequence
  Description of Artificial Sequence: Synthetic oligonucleotide
aaccuguccuggagugcaa

SEQ ID NO: 443818 - RNA, 19 nt, Artificial Sequence
  Description of Artificial Sequence: Synthetic oligonucleotide
cuuucggcccuuguccaua

SEQ ID NO: 443819 - RNA, 19 nt, Artificial Sequence
  Description of Artificial Sequence: Synthetic oligonucleotide
aggcaccccuugaacucag

SEQ ID NO: 443820 - RNA, 19 nt, Artificial Sequence
  Description of Artificial Sequence: Synthetic oligonucleotide
ggauguacugccagcuugu

SEQ ID NO: 443821 - RNA, 19 nt, Artificial Sequence
  Description of Artificial Sequence: Synthetic oligonucleotide
ccugcgccgccacucuucc

SEQ ID NO: 443822 - RNA, 19 nt, Artificial Sequence
  Description of Artificial Sequence: Synthetic oligonucleotide
gccgugaugccugcaccag

SEQ ID NO: 443823 - RNA, 19 nt, Artificial Sequence
  Description of Artificial Sequence: Synthetic oligonucleotide
gcaacacccuccagguaac

SEQ ID NO: 443824 - RNA, 19 nt, Artificial Sequence
  Description of Artificial Sequence: Synthetic oligonucleotide
cuggacgguauggaccaaa

SEQ ID NO: 443825 - RNA, 19 nt, Artificial Sequence
  Description of Artificial Sequence: Synthetic oligonucleotide
cagcacgugugguauuagu

SEQ ID NO: 443826 - RNA, 19 nt, Artificial Sequence
  Description of Artificial Sequence: Synthetic oligonucleotide
cuagugaggagccgcuauu

SEQ ID NO: 443827 - RNA, 19 nt, Artificial Sequence
  Description of Artificial Sequence: Synthetic oligonucleotide
cgggagccauucauggagc

SEQ ID NO: 443828 - RNA, 19 nt, Artificial Sequence
  Description of Artificial Sequence: Synthetic oligonucleotide
cgcauggacuuggagucgg

SEQ ID NO: 443829 - RNA, 19 nt, Artificial Sequence
  Description of Artificial Sequence: Synthetic oligonucleotide
uagcaaguccugggaccuc

SEQ ID NO: 443830 - RNA, 19 nt, Artificial Sequence
  Description of Artificial Sequence: Synthetic oligonucleotide
gcgucccggggugacagag

SEQ ID NO: 443831 - RNA, 19 nt, Artificial Sequence
  Description of Artificial Sequence: Synthetic oligonucleotide
gcgcauggacuuggagucg

SEQ ID NO: 443832 - RNA, 19 nt, Artificial Sequence
  Description of Artificial Sequence: Synthetic oligonucleotide
cucgcauggugaggacauc

SEQ ID NO: 443833 - RNA, 19 nt, Artificial Sequence
  Description of Artificial Sequence: Synthetic oligonucleotide
uucggcccuuguccauauu

SEQ ID NO: 443834 - RNA, 19 nt, Artificial Sequence
  Description of Artificial Sequence: Synthetic oligonucleotide
gcggauuagcuucucgcau

SEQ ID NO: 443835 - RNA, 19 nt, Artificial Sequence
  Description of Artificial Sequence: Synthetic oligonucleotide
cgucuaggugccgugucag

SEQ ID NO: 443836 - RNA, 19 nt, Artificial Sequence
  Description of Artificial Sequence: Synthetic oligonucleotide
caggcauaucuguggcacu

SEQ ID NO: 443837 - RNA, 19 nt, Artificial Sequence
  Description of Artificial Sequence: Synthetic oligonucleotide
guggaccaccaggaaugga

SEQ ID NO: 443838 - RNA, 19 nt, Artificial Sequence
  Description of Artificial Sequence: Synthetic oligonucleotide
cgucagaagaugguaggga

SEQ ID NO: 443839 - RNA, 19 nt, Artificial Sequence
  Description of Artificial Sequence: Synthetic oligonucleotide
cucgaagguuggugggccu

SEQ ID NO: 443840 - RNA, 19 nt, Artificial Sequence
  Description of Artificial Sequence: Synthetic oligonucleotide
cccagggauagcuugggau

SEQ ID NO: 443841 - RNA, 19 nt, Artificial Sequence
  Description of Artificial Sequence: Synthetic oligonucleotide
cuucgucuaggugccgugu

SEQ ID NO: 443842 - RNA, 19 nt, Artificial Sequence
  Description of Artificial Sequence: Synthetic oligonucleotide
ggcaccccuugaacucagg

SEQ ID NO: 443843 - RNA, 19 nt, Artificial Sequence
  Description of Artificial Sequence: Synthetic oligonucleotide
ccagcacgugugguauuag

SEQ ID NO: 443844 - RNA, 19 nt, Artificial Sequence
  Description of Artificial Sequence: Synthetic oligonucleotide
cgguuggcgggagccaugg

SEQ ID NO: 443845 - RNA, 19 nt, Artificial Sequence
  Description of Artificial Sequence: Synthetic oligonucleotide
cacucuaccugaggcucua

SEQ ID NO: 443846 - RNA, 19 nt, Artificial Sequence
  Description of Artificial Sequence: Synthetic oligonucleotide
cgucccggggugacagagg

SEQ ID NO: 443847 - RNA, 19 nt, Artificial Sequence
  Description of Artificial Sequence: Synthetic oligonucleotide
ggcugcgcccacgcccacg

SEQ ID NO: 443848 - RNA, 19 nt, Artificial Sequence
  Description of Artificial Sequence: Synthetic oligonucleotide
cugcgcccacgcccacgcc

SEQ ID NO: 443849 - RNA, 19 nt, Artificial Sequence
  Description of Artificial Sequence: Synthetic oligonucleotide
cuauuccuccgggagccau

SEQ ID NO: 443850 - RNA, 19 nt, Artificial Sequence
  Description of Artificial Sequence: Synthetic oligonucleotide
gcccggaagugauguggga

SEQ ID NO: 443851 - RNA, 19 nt, Artificial Sequence
  Description of Artificial Sequence: Synthetic oligonucleotide
gccuuuccagacgucggaa

SEQ ID NO: 443852 - RNA, 19 nt, Artificial Sequence
  Description of Artificial Sequence: Synthetic oligonucleotide
agcgugcgucccgggguga

SEQ ID NO: 443853 - RNA, 19 nt, Artificial Sequence
  Description of Artificial Sequence: Synthetic oligonucleotide
aggugccgugucaggcuaa

SEQ ID NO: 443854 - RNA, 19 nt, Artificial Sequence
  Description of Artificial Sequence: Synthetic oligonucleotide
ggccaacucgaaauacgau

SEQ ID NO: 443855 - RNA, 19 nt, Artificial Sequence
  Description of Artificial Sequence: Synthetic oligonucleotide
augcgggaugagggauaaa

SEQ ID NO: 443856 - RNA, 19 nt, Artificial Sequence
  Description of Artificial Sequence: Synthetic oligonucleotide
gcuauuccuccgggagcca

SEQ ID NO: 443857 - RNA, 19 nt, Artificial Sequence
  Description of Artificial Sequence: Synthetic oligonucleotide
gccaaacgauggcccggaa

SEQ ID NO: 443858 - RNA, 19 nt, Artificial Sequence
  Description of Artificial Sequence: Synthetic oligonucleotide
cccggaagugaugugggau

SEQ ID NO: 443859 - RNA, 19 nt, Artificial Sequence
  Description of Artificial Sequence: Synthetic oligonucleotide
ccacucuaccugaggcucu

SEQ ID NO: 443860 - RNA, 19 nt, Artificial Sequence
  Description of Artificial Sequence: Synthetic oligonucleotide
gcgugcgucccggggugac

SEQ ID NO: 443861 - RNA, 19 nt, Artificial Sequence
  Description of Artificial Sequence: Synthetic oligonucleotide
cgcccacgcccacacccac

SEQ ID NO: 443862 - RNA, 19 nt, Artificial Sequence
  Description of Artificial Sequence: Synthetic oligonucleotide
cgucggaagaagcgugcgu

SEQ ID NO: 443863 - RNA, 19 nt, Artificial Sequence
  Description of Artificial Sequence: Synthetic oligonucleotide
cccugcggauuagcuucuc

SEQ ID NO: 443864 - RNA, 19 nt, Artificial Sequence
  Description of Artificial Sequence: Synthetic oligonucleotide
cgugcgucccggggugaca

SEQ ID NO: 443865 - RNA, 19 nt, Artificial Sequence
  Description of Artificial Sequence: Synthetic oligonucleotide
ccuggacgguauggaccaa

SEQ ID NO: 443866 - RNA, 19 nt, Artificial Sequence
  Description of Artificial Sequence: Synthetic oligonucleotide
cgcccacgcccacgcccac

SEQ ID NO: 443867 - RNA, 19 nt, Artificial Sequence
  Description of Artificial Sequence: Synthetic oligonucleotide
aaauauacaaaaccccucc

SEQ ID NO: 443868 - RNA, 19 nt, Artificial Sequence
  Description of Artificial Sequence: Synthetic oligonucleotide
aaauaaaauauauauauau

SEQ ID NO: 443869 - RNA, 19 nt, Artificial Sequence
  Description of Artificial Sequence: Synthetic oligonucleotide
aaaauauauauauauauau

SEQ ID NO: 443870 - RNA, 19 nt, Artificial Sequence
  Description of Artificial Sequence: Synthetic oligonucleotide
aaagaauagaccuucaugu

SEQ ID NO: 443871 - RNA, 19 nt, Artificial Sequence
  Description of Artificial Sequence: Synthetic oligonucleotide
aauauauauauauauauuu

SEQ ID NO: 443872 - RNA, 19 nt, Artificial Sequence
  Description of Artificial Sequence: Synthetic oligonucleotide
aacaauagaacucacaaau

SEQ ID NO: 443873 - RNA, 19 nt, Artificial Sequence
  Description of Artificial Sequence: Synthetic oligonucleotide
aaaucugugguagaaauac

SEQ ID NO: 443874 - RNA, 19 nt, Artificial Sequence
  Description of Artificial Sequence: Synthetic oligonucleotide
aaaucuguauaacaaagug

SEQ ID NO: 443875 - RNA, 19 nt, Artificial Sequence
  Description of Artificial Sequence: Synthetic oligonucleotide
auaaaauauauauauauau

SEQ ID NO: 443876 - RNA, 19 nt, Artificial Sequence
  Description of Artificial Sequence: Synthetic oligonucleotide
aaauaggcaacugugggcc

SEQ ID NO: 443877 - RNA, 19 nt, Artificial Sequence
  Description of Artificial Sequence: Synthetic oligonucleotide
uauauauauauuuauauuu

SEQ ID NO: 443878 - RNA, 19 nt, Artificial Sequence
  Description of Artificial Sequence: Synthetic oligonucleotide
ucuuaauuggaaaugauuc

SEQ ID NO: 443879 - RNA, 19 nt, Artificial Sequence
  Description of Artificial Sequence: Synthetic oligonucleotide
auuacaaugcccuagaaau

SEQ ID NO: 443880 - RNA, 19 nt, Artificial Sequence
  Description of Artificial Sequence: Synthetic oligonucleotide
uauguaagaacuaucgagc

SEQ ID NO: 443881 - RNA, 19 nt, Artificial Sequence
  Description of Artificial Sequence: Synthetic oligonucleotide
uauauauauauauuuauau

SEQ ID NO: 443882 - RNA, 19 nt, Artificial Sequence
  Description of Artificial Sequence: Synthetic oligonucleotide
caaacgaccaauuacaaug

SEQ ID NO: 443883 - RNA, 19 nt, Artificial Sequence
  Description of Artificial Sequence: Synthetic oligonucleotide
aguagcaaagaauagaccu

SEQ ID NO: 443884 - RNA, 19 nt, Artificial Sequence
  Description of Artificial Sequence: Synthetic oligonucleotide
ugcaauaaaggauugggcc

SEQ ID NO: 443885 - RNA, 19 nt, Artificial Sequence
  Description of Artificial Sequence: Synthetic oligonucleotide
aauagugaugaggauagcg

SEQ ID NO: 443886 - RNA, 19 nt, Artificial Sequence
  Description of Artificial Sequence: Synthetic oligonucleotide
acugucaacaauaugcucc

SEQ ID NO: 443887 - RNA, 19 nt, Artificial Sequence
  Description of Artificial Sequence: Synthetic oligonucleotide
guauguaagaacuaucgag

SEQ ID NO: 443888 - RNA, 19 nt, Artificial Sequence
  Description of Artificial Sequence: Synthetic oligonucleotide
ucggcaauuauucaaacga

SEQ ID NO: 443889 - RNA, 19 nt, Artificial Sequence
  Description of Artificial Sequence: Synthetic oligonucleotide
aaaguguaagugcucacuc

SEQ ID NO: 443890 - RNA, 19 nt, Artificial Sequence
  Description of Artificial Sequence: Synthetic oligonucleotide
aauacgcaugcucaaacag

SEQ ID NO: 443891 - RNA, 19 nt, Artificial Sequence
  Description of Artificial Sequence: Synthetic oligonucleotide
uauauauauauauauuuau

SEQ ID NO: 443892 - RNA, 19 nt, Artificial Sequence
  Description of Artificial Sequence: Synthetic oligonucleotide
uucucuuaugcguuuaugg

SEQ ID NO: 443893 - RNA, 19 nt, Artificial Sequence
  Description of Artificial Sequence: Synthetic oligonucleotide
uauucaaacgaccaauuac

SEQ ID NO: 443894 - RNA, 19 nt, Artificial Sequence
  Description of Artificial Sequence: Synthetic oligonucleotide
accuacaccaguuaaauug

SEQ ID NO: 443895 - RNA, 19 nt, Artificial Sequence
  Description of Artificial Sequence: Synthetic oligonucleotide
aguauagagagccacgcuc

SEQ ID NO: 443896 - RNA, 19 nt, Artificial Sequence
  Description of Artificial Sequence: Synthetic oligonucleotide
uguucuaccugccauuggg

SEQ ID NO: 443897 - RNA, 19 nt, Artificial Sequence
  Description of Artificial Sequence: Synthetic oligonucleotide
uaaaauauauauauauaua

SEQ ID NO: 443898 - RNA, 19 nt, Artificial Sequence
  Description of Artificial Sequence: Synthetic oligonucleotide
uguuaggaaaagcuauugg

SEQ ID NO: 443899 - RNA, 19 nt, Artificial Sequence
  Description of Artificial Sequence: Synthetic oligonucleotide
aaucugauaaagucaauau

SEQ ID NO: 443900 - RNA, 19 nt, Artificial Sequence
  Description of Artificial Sequence: Synthetic oligonucleotide
auaagagugcaucugcuuc

SEQ ID NO: 443901 - RNA, 19 nt, Artificial Sequence
  Description of Artificial Sequence: Synthetic oligonucleotide
ucuguuauguguaggagcu

SEQ ID NO: 443902 - RNA, 19 nt, Artificial Sequence
  Description of Artificial Sequence: Synthetic oligonucleotide
augaggauagcguuuugcc

SEQ ID NO: 443903 - RNA, 19 nt, Artificial Sequence
  Description of Artificial Sequence: Synthetic oligonucleotide
gaaagaucgaguucuagac

SEQ ID NO: 443904 - RNA, 19 nt, Artificial Sequence
  Description of Artificial Sequence: Synthetic oligonucleotide
ucgaguucuagacacauga

SEQ ID NO: 443905 - RNA, 19 nt, Artificial Sequence
  Description of Artificial Sequence: Synthetic oligonucleotide
uacuuagccacccaaauaa

SEQ ID NO: 443906 - RNA, 19 nt, Artificial Sequence
  Description of Artificial Sequence: Synthetic oligonucleotide
ugaccuaaaauaacugucc

SEQ ID NO: 443907 - RNA, 19 nt, Artificial Sequence
  Description of Artificial Sequence: Synthetic oligonucleotide
gagacaauuguaaagggcc

SEQ ID NO: 443908 - RNA, 19 nt, Artificial Sequence
  Description of Artificial Sequence: Synthetic oligonucleotide
aaacaaucccuacccauuc

SEQ ID NO: 443909 - RNA, 19 nt, Artificial Sequence
  Description of Artificial Sequence: Synthetic oligonucleotide
aguucuagacacaugagcg

SEQ ID NO: 443910 - RNA, 19 nt, Artificial Sequence
  Description of Artificial Sequence: Synthetic oligonucleotide
agaacuaucgagcauucug

SEQ ID NO: 443911 - RNA, 19 nt, Artificial Sequence
  Description of Artificial Sequence: Synthetic oligonucleotide
uucucucuaaaaccgacag

SEQ ID NO: 443912 - RNA, 19 nt, Artificial Sequence
  Description of Artificial Sequence: Synthetic oligonucleotide
aaaucuaggagagcugaac

SEQ ID NO: 443913 - RNA, 19 nt, Artificial Sequence
  Description of Artificial Sequence: Synthetic oligonucleotide
aaagauuaucucucuauau

SEQ ID NO: 443914 - RNA, 19 nt, Artificial Sequence
  Description of Artificial Sequence: Synthetic oligonucleotide
aauuggaaaugauucggca

SEQ ID NO: 443915 - RNA, 19 nt, Artificial Sequence
  Description of Artificial Sequence: Synthetic oligonucleotide
ucuaaaaccgacagauuca

SEQ ID NO: 443916 - RNA, 19 nt, Artificial Sequence
  Description of Artificial Sequence: Synthetic oligonucleotide
ucuguaauaacagaagaaa

SEQ ID NO: 443917 - RNA, 19 nt, Artificial Sequence
  Description of Artificial Sequence: Synthetic oligonucleotide
gaaauaaagggaaaaguca

SEQ ID NO: 443918 - RNA, 19 nt, Artificial Sequence
  Description of Artificial Sequence: Synthetic oligonucleotide
aauuauucaaacgaccaau

SEQ ID NO: 443919 - RNA, 19 nt, Artificial Sequence
  Description of Artificial Sequence: Synthetic oligonucleotide
aaucuaggagagcugaaca

SEQ ID NO: 443920 - RNA, 19 nt, Artificial Sequence
  Description of Artificial Sequence: Synthetic oligonucleotide
aacaauaugcucccacuca

SEQ ID NO: 443921 - RNA, 19 nt, Artificial Sequence
  Description of Artificial Sequence: Synthetic oligonucleotide
uuaucuccaucccuaaugc

SEQ ID NO: 443922 - RNA, 19 nt, Artificial Sequence
  Description of Artificial Sequence: Synthetic oligonucleotide
aaucccuacccauucuagg

SEQ ID NO: 443923 - RNA, 19 nt, Artificial Sequence
  Description of Artificial Sequence: Synthetic oligonucleotide
aaacgaccaauuacaaugc

SEQ ID NO: 443924 - RNA, 19 nt, Artificial Sequence
  Description of Artificial Sequence: Synthetic oligonucleotide
agcugcaguauagagagcc

SEQ ID NO: 443925 - RNA, 19 nt, Artificial Sequence
  Description of Artificial Sequence: Synthetic oligonucleotide
aguuaaauugguugagaag

SEQ ID NO: 443926 - RNA, 19 nt, Artificial Sequence
  Description of Artificial Sequence: Synthetic oligonucleotide
uuagccacccaaauaaaac

SEQ ID NO: 443927 - RNA, 19 nt, Artificial Sequence
  Description of Artificial Sequence: Synthetic oligonucleotide
aggaaaagcuauugguggc

SEQ ID NO: 443928 - RNA, 19 nt, Artificial Sequence
  Description of Artificial Sequence: Synthetic oligonucleotide
aauaaaauauauauauaua

SEQ ID NO: 443929 - RNA, 19 nt, Artificial Sequence
  Description of Artificial Sequence: Synthetic oligonucleotide
aguagaguucacaacaacg

SEQ ID NO: 443930 - RNA, 19 nt, Artificial Sequence
  Description of Artificial Sequence: Synthetic oligonucleotide
aacgaccaauuacaaugcc

SEQ ID NO: 443931 - RNA, 19 nt, Artificial Sequence
  Description of Artificial Sequence: Synthetic oligonucleotide
ucugucaagaaaaugccau

SEQ ID NO: 443932 - RNA, 19 nt, Artificial Sequence
  Description of Artificial Sequence: Synthetic oligonucleotide
uugaccuaaaauaacuguc

SEQ ID NO: 443933 - RNA, 19 nt, Artificial Sequence
  Description of Artificial Sequence: Synthetic oligonucleotide
aaccgacagauucagagga

SEQ ID NO: 443934 - RNA, 19 nt, Artificial Sequence
  Description of Artificial Sequence: Synthetic oligonucleotide
ugaaguauugugugcacug

SEQ ID NO: 443935 - RNA, 19 nt, Artificial Sequence
  Description of Artificial Sequence: Synthetic oligonucleotide
auauauauauauuuauauu

SEQ ID NO: 443936 - RNA, 19 nt, Artificial Sequence
  Description of Artificial Sequence: Synthetic oligonucleotide
gaggacaaguuuucgaacc

SEQ ID NO: 443937 - RNA, 19 nt, Artificial Sequence
  Description of Artificial Sequence: Synthetic oligonucleotide
uaauuggaaaugauucggc

SEQ ID NO: 443938 - RNA, 19 nt, Artificial Sequence
  Description of Artificial Sequence: Synthetic oligonucleotide
cucuaaaaccgacagauuc

SEQ ID NO: 443939 - RNA, 19 nt, Artificial Sequence
  Description of Artificial Sequence: Synthetic oligonucleotide
uauacaaaaccccuccaaa

SEQ ID NO: 443940 - RNA, 19 nt, Artificial Sequence
  Description of Artificial Sequence: Synthetic oligonucleotide
guaaagaaaucuaggagag

SEQ ID NO: 443941 - RNA, 19 nt, Artificial Sequence
  Description of Artificial Sequence: Synthetic oligonucleotide
uaacagaagaaaugggucu

SEQ ID NO: 443942 - RNA, 19 nt, Artificial Sequence
  Description of Artificial Sequence: Synthetic oligonucleotide
uccaucacaguuucucucg

SEQ ID NO: 443943 - RNA, 19 nt, Artificial Sequence
  Description of Artificial Sequence: Synthetic oligonucleotide
acaaacacccugcaggaag

SEQ ID NO: 443944 - RNA, 19 nt, Artificial Sequence
  Description of Artificial Sequence: Synthetic oligonucleotide
gaacuaucgagcauucugg

SEQ ID NO: 443945 - RNA, 19 nt, Artificial Sequence
  Description of Artificial Sequence: Synthetic oligonucleotide
cuaggggaagaaaauauac

SEQ ID NO: 443946 - RNA, 19 nt, Artificial Sequence
  Description of Artificial Sequence: Synthetic oligonucleotide
uaaauacgcaugcucaaac

SEQ ID NO: 443947 - RNA, 19 nt, Artificial Sequence
  Description of Artificial Sequence: Synthetic oligonucleotide
augcccuagaaauaccuac

SEQ ID NO: 443948 - RNA, 19 nt, Artificial Sequence
  Description of Artificial Sequence: Synthetic oligonucleotide
uuuuacaaggcugguagag

SEQ ID NO: 443949 - RNA, 19 nt, Artificial Sequence
  Description of Artificial Sequence: Synthetic oligonucleotide
uaugcguuuauggcaaugg

SEQ ID NO: 443950 - RNA, 19 nt, Artificial Sequence
  Description of Artificial Sequence: Synthetic oligonucleotide
ugaugcauaauguguagac

SEQ ID NO: 443951 - RNA, 19 nt, Artificial Sequence
  Description of Artificial Sequence: Synthetic oligonucleotide
aacagaagaaaugggucuc

SEQ ID NO: 443952 - RNA, 19 nt, Artificial Sequence
  Description of Artificial Sequence: Synthetic oligonucleotide
gagcuuaagggaaugacag

SEQ ID NO: 443953 - RNA, 19 nt, Artificial Sequence
  Description of Artificial Sequence: Synthetic oligonucleotide
aguagauaaacacuguauu

SEQ ID NO: 443954 - RNA, 19 nt, Artificial Sequence
  Description of Artificial Sequence: Synthetic oligonucleotide
ugcauuucagucuuacaug

SEQ ID NO: 443955 - RNA, 19 nt, Artificial Sequence
  Description of Artificial Sequence: Synthetic oligonucleotide
uucggcaauuauucaaacg

SEQ ID NO: 443956 - RNA, 19 nt, Artificial Sequence
  Description of Artificial Sequence: Synthetic oligonucleotide
aaauacgcaugcucaaaca

SEQ ID NO: 443957 - RNA, 19 nt, Artificial Sequence
  Description of Artificial Sequence: Synthetic oligonucleotide
cacucaaucugauaaaguc

SEQ ID NO: 443958 - RNA, 19 nt, Artificial Sequence
  Description of Artificial Sequence: Synthetic oligonucleotide
aaauauauauauauauauu

SEQ ID NO: 443959 - RNA, 19 nt, Artificial Sequence
  Description of Artificial Sequence: Synthetic oligonucleotide
ucuuaugcguuuauggcaa

SEQ ID NO: 443960 - RNA, 19 nt, Artificial Sequence
  Description of Artificial Sequence: Synthetic oligonucleotide
uuuuaaggaagcaccuaug

SEQ ID NO: 443961 - RNA, 19 nt, Artificial Sequence
  Description of Artificial Sequence: Synthetic oligonucleotide
auuuuaaggaagcaccuau

SEQ ID NO: 443962 - RNA, 19 nt, Artificial Sequence
  Description of Artificial Sequence: Synthetic oligonucleotide
aggacaaguuuucgaaccc

SEQ ID NO: 443963 - RNA, 19 nt, Artificial Sequence
  Description of Artificial Sequence: Synthetic oligonucleotide
ugcaacugcaauaaaggau

SEQ ID NO: 443964 - RNA, 19 nt, Artificial Sequence
  Description of Artificial Sequence: Synthetic oligonucleotide
uguaauagugaugaggaua

SEQ ID NO: 443965 - RNA, 19 nt, Artificial Sequence
  Description of Artificial Sequence: Synthetic oligonucleotide
ugcguuuauggcaaugggc

SEQ ID NO: 443966 - RNA, 19 nt, Artificial Sequence
  Description of Artificial Sequence: Synthetic oligonucleotide
aaauaccuacaccaguuaa

SEQ ID NO: 443967 - RNA, 19 nt, Artificial Sequence
  Description of Artificial Sequence: Synthetic oligonucleotide
aauuguaaagggccugaga

SEQ ID NO: 443968 - RNA, 19 nt, Artificial Sequence
  Description of Artificial Sequence: Synthetic oligonucleotide
aagggaaugacagcaaaca

SEQ ID NO: 443969 - RNA, 19 nt, Artificial Sequence
  Description of Artificial Sequence: Synthetic oligonucleotide
uaaagauuaucucucuaua

SEQ ID NO: 443970 - RNA, 19 nt, Artificial Sequence
  Description of Artificial Sequence: Synthetic oligonucleotide
uauaacaaaguguccucug

SEQ ID NO: 443971 - RNA, 19 nt, Artificial Sequence
  Description of Artificial Sequence: Synthetic oligonucleotide
uccgcaugcacucacgcgc

SEQ ID NO: 443972 - RNA, 19 nt, Artificial Sequence
  Description of Artificial Sequence: Synthetic oligonucleotide
uacgcaugcucaaacagcu

SEQ ID NO: 443973 - RNA, 19 nt, Artificial Sequence
  Description of Artificial Sequence: Synthetic oligonucleotide
uuuacaaggcugguagagg

SEQ ID NO: 443974 - RNA, 19 nt, Artificial Sequence
  Description of Artificial Sequence: Synthetic oligonucleotide
uagacucaaagguccacgg

SEQ ID NO: 443975 - RNA, 19 nt, Artificial Sequence
  Description of Artificial Sequence: Synthetic oligonucleotide
aucccuacccauucuaggg

SEQ ID NO: 443976 - RNA, 19 nt, Artificial Sequence
  Description of Artificial Sequence: Synthetic oligonucleotide
aauggaccccagcuuuagc

SEQ ID NO: 443977 - RNA, 19 nt, Artificial Sequence
  Description of Artificial Sequence: Synthetic oligonucleotide
ucuuacugaccucaugcca

SEQ ID NO: 443978 - RNA, 19 nt, Artificial Sequence
  Description of Artificial Sequence: Synthetic oligonucleotide
uguaaagggccugagaguc

SEQ ID NO: 443979 - RNA, 19 nt, Artificial Sequence
  Description of Artificial Sequence: Synthetic oligonucleotide
ggaacucagguuuagaaac

SEQ ID NO: 443980 - RNA, 19 nt, Artificial Sequence
  Description of Artificial Sequence: Synthetic oligonucleotide
agaaggacccagcacaugu

SEQ ID NO: 443981 - RNA, 19 nt, Artificial Sequence
  Description of Artificial Sequence: Synthetic oligonucleotide
ucaacaauaugcucccacu

SEQ ID NO: 443982 - RNA, 19 nt, Artificial Sequence
  Description of Artificial Sequence: Synthetic oligonucleotide
uccccuuacaugcaacugc

SEQ ID NO: 443983 - RNA, 19 nt, Artificial Sequence
  Description of Artificial Sequence: Synthetic oligonucleotide
aggagacaauuguaaaggg

SEQ ID NO: 443984 - RNA, 19 nt, Artificial Sequence
  Description of Artificial Sequence: Synthetic oligonucleotide
ugauaaagucaauauuaaa

SEQ ID NO: 443985 - RNA, 19 nt, Artificial Sequence
  Description of Artificial Sequence: Synthetic oligonucleotide
ugauucggcaauuauucaa

SEQ ID NO: 443986 - RNA, 19 nt, Artificial Sequence
  Description of Artificial Sequence: Synthetic oligonucleotide
ugcauaauguguagacuca

SEQ ID NO: 443987 - RNA, 19 nt, Artificial Sequence
  Description of Artificial Sequence: Synthetic oligonucleotide
agcuuaagggaaugacagc

SEQ ID NO: 443988 - RNA, 19 nt, Artificial Sequence
  Description of Artificial Sequence: Synthetic oligonucleotide
uaaaggauugggccugcag

SEQ ID NO: 443989 - RNA, 19 nt, Artificial Sequence
  Description of Artificial Sequence: Synthetic oligonucleotide
cugaagaaaucugugguag

SEQ ID NO: 443990 - RNA, 19 nt, Artificial Sequence
  Description of Artificial Sequence: Synthetic oligonucleotide
uccgcaacugaaaauaauu

SEQ ID NO: 443991 - RNA, 19 nt, Artificial Sequence
  Description of Artificial Sequence: Synthetic oligonucleotide
uuuaaacgcagccucuuua

SEQ ID NO: 443992 - RNA, 19 nt, Artificial Sequence
  Description of Artificial Sequence: Synthetic oligonucleotide
aguaguggcuccaaaguuc

SEQ ID NO: 443993 - RNA, 19 nt, Artificial Sequence
  Description of Artificial Sequence: Synthetic oligonucleotide
uuauucaaacgaccaauua

SEQ ID NO: 443994 - RNA, 19 nt, Artificial Sequence
  Description of Artificial Sequence: Synthetic oligonucleotide
auuggaaaugauucggcaa

SEQ ID NO: 443995 - RNA, 19 nt, Artificial Sequence
  Description of Artificial Sequence: Synthetic oligonucleotide
uucugcgucuguuauaaaa

SEQ ID NO: 443996 - RNA, 19 nt, Artificial Sequence
  Description of Artificial Sequence: Synthetic oligonucleotide
aggauagcguuuugccucc

SEQ ID NO: 443997 - RNA, 19 nt, Artificial Sequence
  Description of Artificial Sequence: Synthetic oligonucleotide
auguaagaacuaucgagca

SEQ ID NO: 443998 - RNA, 19 nt, Artificial Sequence
  Description of Artificial Sequence: Synthetic oligonucleotide
gacucaaagguccacgguc

SEQ ID NO: 443999 - RNA, 19 nt, Artificial Sequence
  Description of Artificial Sequence: Synthetic oligonucleotide
acgaccaauuacaaugccc

SEQ ID NO: 444000 - RNA, 19 nt, Artificial Sequence
  Description of Artificial Sequence: Synthetic oligonucleotide
ucuauacuagccugauccc

SEQ ID NO: 444001 - RNA, 19 nt, Artificial Sequence
  Description of Artificial Sequence: Synthetic oligonucleotide
uguaaauacgcaugcucaa

SEQ ID NO: 444002 - RNA, 19 nt, Artificial Sequence
  Description of Artificial Sequence: Synthetic oligonucleotide
ucucucgcaaacuccuccg

SEQ ID NO: 444003 - RNA, 19 nt, Artificial Sequence
  Description of Artificial Sequence: Synthetic oligonucleotide
aagaauagaccuucauguu

SEQ ID NO: 444004 - RNA, 19 nt, Artificial Sequence
  Description of Artificial Sequence: Synthetic oligonucleotide
uucgugaccacuguucgcc

SEQ ID NO: 444005 - RNA, 19 nt, Artificial Sequence
  Description of Artificial Sequence: Synthetic oligonucleotide
cugcaauaaaggauugggc

SEQ ID NO: 444006 - RNA, 19 nt, Artificial Sequence
  Description of Artificial Sequence: Synthetic oligonucleotide
cacaacaacguuuggggac

SEQ ID NO: 444007 - RNA, 19 nt, Artificial Sequence
  Description of Artificial Sequence: Synthetic oligonucleotide
cugucaacaauaugcuccc

SEQ ID NO: 444008 - RNA, 19 nt, Artificial Sequence
  Description of Artificial Sequence: Synthetic oligonucleotide
auauauauauauauauuua

SEQ ID NO: 444009 - RNA, 19 nt, Artificial Sequence
  Description of Artificial Sequence: Synthetic oligonucleotide
agaauagaccuucauguuu

SEQ ID NO: 444010 - RNA, 19 nt, Artificial Sequence
  Description of Artificial Sequence: Synthetic oligonucleotide
gagguuauugucuguuaug

SEQ ID NO: 444011 - RNA, 19 nt, Artificial Sequence
  Description of Artificial Sequence: Synthetic oligonucleotide
gguuuagaaacuccaacug

SEQ ID NO: 444012 - RNA, 19 nt, Artificial Sequence
  Description of Artificial Sequence: Synthetic oligonucleotide
auauacaaaaccccuccaa

SEQ ID NO: 444013 - RNA, 19 nt, Artificial Sequence
  Description of Artificial Sequence: Synthetic oligonucleotide
aacuaucgagcauucugga

SEQ ID NO: 444014 - RNA, 19 nt, Artificial Sequence
  Description of Artificial Sequence: Synthetic oligonucleotide
cuguaaauacgcaugcuca

SEQ ID NO: 444015 - RNA, 19 nt, Artificial Sequence
  Description of Artificial Sequence: Synthetic oligonucleotide
uuucuuaauuggaaaugau

SEQ ID NO: 444016 - RNA, 19 nt, Artificial Sequence
  Description of Artificial Sequence: Synthetic oligonucleotide
caugaugcauaauguguag

SEQ ID NO: 444017 - RNA, 19 nt, Artificial Sequence
  Description of Artificial Sequence: Synthetic oligonucleotide
cuaaaaccgacagauucag

SEQ ID NO: 444018 - RNA, 19 nt, Artificial Sequence
  Description of Artificial Sequence: Synthetic oligonucleotide
gaugaggauagcguuuugc

SEQ ID NO: 444019 - RNA, 19 nt, Artificial Sequence
  Description of Artificial Sequence: Synthetic oligonucleotide
caacugaggaacauuugac

SEQ ID NO: 444020 - RNA, 19 nt, Artificial Sequence
  Description of Artificial Sequence: Synthetic oligonucleotide
aaauaagagugcaucugcu

SEQ ID NO: 444021 - RNA, 19 nt, Artificial Sequence
  Description of Artificial Sequence: Synthetic oligonucleotide
ucugguaacuccugaagua

SEQ ID NO: 444022 - RNA, 19 nt, Artificial Sequence
  Description of Artificial Sequence: Synthetic oligonucleotide
auucagaggauuggaacuc

SEQ ID NO: 444023 - RNA, 19 nt, Artificial Sequence
  Description of Artificial Sequence: Synthetic oligonucleotide
agaaaucuaggagagcuga

SEQ ID NO: 444024 - RNA, 19 nt, Artificial Sequence
  Description of Artificial Sequence: Synthetic oligonucleotide
aaacgcagccucuuuacuu

SEQ ID NO: 444025 - RNA, 19 nt, Artificial Sequence
  Description of Artificial Sequence: Synthetic oligonucleotide
uagaacucacaaauggaua

SEQ ID NO: 444026 - RNA, 19 nt, Artificial Sequence
  Description of Artificial Sequence: Synthetic oligonucleotide
gauucagaggauuggaacu

SEQ ID NO: 444027 - RNA, 19 nt, Artificial Sequence
  Description of Artificial Sequence: Synthetic oligonucleotide
accaauuacaaugcccuag

SEQ ID NO: 444028 - RNA, 19 nt, Artificial Sequence
  Description of Artificial Sequence: Synthetic oligonucleotide
cucaaucugauaaagucaa

SEQ ID NO: 444029 - RNA, 19 nt, Artificial Sequence
  Description of Artificial Sequence: Synthetic oligonucleotide
uucuagacacaugagcgca

SEQ ID NO: 444030 - RNA, 19 nt, Artificial Sequence
  Description of Artificial Sequence: Synthetic oligonucleotide
uguaagaacuaucgagcau

SEQ ID NO: 444031 - RNA, 19 nt, Artificial Sequence
  Description of Artificial Sequence: Synthetic oligonucleotide
uguccuugucuauacuagc

SEQ ID NO: 444032 - RNA, 19 nt, Artificial Sequence
  Description of Artificial Sequence: Synthetic oligonucleotide
acuaucgagcauucuggag

SEQ ID NO: 444033 - RNA, 19 nt, Artificial Sequence
  Description of Artificial Sequence: Synthetic oligonucleotide
acaacguuuggggacacag

SEQ ID NO: 444034 - RNA, 19 nt, Artificial Sequence
  Description of Artificial Sequence: Synthetic oligonucleotide
auauauauauauauuuaua

SEQ ID NO: 444035 - RNA, 19 nt, Artificial Sequence
  Description of Artificial Sequence: Synthetic oligonucleotide
uugacacaaucuuacugac

SEQ ID NO: 444036 - RNA, 19 nt, Artificial Sequence
  Description of Artificial Sequence: Synthetic oligonucleotide
aggcacaucucuguaauag

SEQ ID NO: 444037 - RNA, 19 nt, Artificial Sequence
  Description of Artificial Sequence: Synthetic oligonucleotide
aauaccuacaccaguuaaa

SEQ ID NO: 444038 - RNA, 19 nt, Artificial Sequence
  Description of Artificial Sequence: Synthetic oligonucleotide
ugcucacuuuucauaaaga

SEQ ID NO: 444039 - RNA, 19 nt, Artificial Sequence
  Description of Artificial Sequence: Synthetic oligonucleotide
aggacuguauuugagauuu

SEQ ID NO: 444040 - RNA, 19 nt, Artificial Sequence
  Description of Artificial Sequence: Synthetic oligonucleotide
guucuagacacaugagcgc

SEQ ID NO: 444041 - RNA, 19 nt, Artificial Sequence
  Description of Artificial Sequence: Synthetic oligonucleotide
agcguuuugccuccuaacu

SEQ ID NO: 444042 - RNA, 19 nt, Artificial Sequence
  Description of Artificial Sequence: Synthetic oligonucleotide
guagacucaaagguccacg

SEQ ID NO: 444043 - RNA, 19 nt, Artificial Sequence
  Description of Artificial Sequence: Synthetic oligonucleotide
augcguuuauggcaauggg

SEQ ID NO: 444044 - RNA, 19 nt, Artificial Sequence
  Description of Artificial Sequence: Synthetic oligonucleotide
uccugaaguauugugugca

SEQ ID NO: 444045 - RNA, 19 nt, Artificial Sequence
  Description of Artificial Sequence: Synthetic oligonucleotide
acaguauguaagaacuauc

SEQ ID NO: 444046 - RNA, 19 nt, Artificial Sequence
  Description of Artificial Sequence: Synthetic oligonucleotide
agagccacgcucaugagug

SEQ ID NO: 444047 - RNA, 19 nt, Artificial Sequence
  Description of Artificial Sequence: Synthetic oligonucleotide
aaaagcuauugguggcaca

SEQ ID NO: 444048 - RNA, 19 nt, Artificial Sequence
  Description of Artificial Sequence: Synthetic oligonucleotide
caucucaugaccaaagugu

SEQ ID NO: 444049 - RNA, 19 nt, Artificial Sequence
  Description of Artificial Sequence: Synthetic oligonucleotide
ugaagaaaucugugguaga

SEQ ID NO: 444050 - RNA, 19 nt, Artificial Sequence
  Description of Artificial Sequence: Synthetic oligonucleotide
ucagaggauuggaacucag

SEQ ID NO: 444051 - RNA, 19 nt, Artificial Sequence
  Description of Artificial Sequence: Synthetic oligonucleotide
uucagucuuacaugaaaua

SEQ ID NO: 444052 - RNA, 19 nt, Artificial Sequence
  Description of Artificial Sequence: Synthetic oligonucleotide
uucgaguuuguugucagaa

SEQ ID NO: 444053 - RNA, 19 nt, Artificial Sequence
  Description of Artificial Sequence: Synthetic oligonucleotide
uuauguguaggagcuuaag

SEQ ID NO: 444054 - RNA, 19 nt, Artificial Sequence
  Description of Artificial Sequence: Synthetic oligonucleotide
auguguagacucaaagguc

SEQ ID NO: 444055 - RNA, 19 nt, Artificial Sequence
  Description of Artificial Sequence: Synthetic oligonucleotide
aacgcagccucuuuacuua

SEQ ID NO: 444056 - RNA, 19 nt, Artificial Sequence
  Description of Artificial Sequence: Synthetic oligonucleotide
acaauaugcucccacucaa

SEQ ID NO: 444057 - RNA, 19 nt, Artificial Sequence
  Description of Artificial Sequence: Synthetic oligonucleotide
cucuuaugcguuuauggca

SEQ ID NO: 444058 - RNA, 19 nt, Artificial Sequence
  Description of Artificial Sequence: Synthetic oligonucleotide
agcuauugguggcacagcu

SEQ ID NO: 444059 - RNA, 19 nt, Artificial Sequence
  Description of Artificial Sequence: Synthetic oligonucleotide
ugucuguuauguguaggag

SEQ ID NO: 444060 - RNA, 19 nt, Artificial Sequence
  Description of Artificial Sequence: Synthetic oligonucleotide
aaauggaccccagcuuuag

SEQ ID NO: 444061 - RNA, 19 nt, Artificial Sequence
  Description of Artificial Sequence: Synthetic oligonucleotide
acucaaucugauaaaguca

SEQ ID NO: 444062 - RNA, 19 nt, Artificial Sequence
  Description of Artificial Sequence: Synthetic oligonucleotide
uguuauguguaggagcuua

SEQ ID NO: 444063 - RNA, 19 nt, Artificial Sequence
  Description of Artificial Sequence: Synthetic oligonucleotide
gucaacaauaugcucccac

SEQ ID NO: 444064 - RNA, 19 nt, Artificial Sequence
  Description of Artificial Sequence: Synthetic oligonucleotide
guaauucuaaaagcccaag

SEQ ID NO: 444065 - RNA, 19 nt, Artificial Sequence
  Description of Artificial Sequence: Synthetic oligonucleotide
gaccaaaucuguauaacaa

SEQ ID NO: 444066 - RNA, 19 nt, Artificial Sequence
  Description of Artificial Sequence: Synthetic oligonucleotide
uggaccccagcuuuagcag

SEQ ID NO: 444067 - RNA, 19 nt, Artificial Sequence
  Description of Artificial Sequence: Synthetic oligonucleotide
uaaagaaaucuaggagagc

SEQ ID NO: 444068 - RNA, 19 nt, Artificial Sequence
  Description of Artificial Sequence: Synthetic oligonucleotide
uaucgagcauucuggaguc

SEQ ID NO: 444069 - RNA, 19 nt, Artificial Sequence
  Description of Artificial Sequence: Synthetic oligonucleotide
uaaacgcagccucuuuacu

SEQ ID NO: 444070 - RNA, 19 nt, Artificial Sequence
  Description of Artificial Sequence: Synthetic oligonucleotide
cgcacauacacaaagcacc

SEQ ID NO: 444071 - RNA, 19 nt, Artificial Sequence
  Description of Artificial Sequence: Synthetic oligonucleotide
cagaggauuggaacucagg

SEQ ID NO: 444072 - RNA, 19 nt, Artificial Sequence
  Description of Artificial Sequence: Synthetic oligonucleotide
uagaguucacaacaacguu

SEQ ID NO: 444073 - RNA, 19 nt, Artificial Sequence
  Description of Artificial Sequence: Synthetic oligonucleotide
acaauagaacucacaaaug

SEQ ID NO: 444074 - RNA, 19 nt, Artificial Sequence
  Description of Artificial Sequence: Synthetic oligonucleotide
ucccuaaugccacagucuu

SEQ ID NO: 444075 - RNA, 19 nt, Artificial Sequence
  Description of Artificial Sequence: Synthetic oligonucleotide
gacaauuguaaagggccug

SEQ ID NO: 444076 - RNA, 19 nt, Artificial Sequence
  Description of Artificial Sequence: Synthetic oligonucleotide
uuuccgcaacugaaaauaa

SEQ ID NO: 444077 - RNA, 19 nt, Artificial Sequence
  Description of Artificial Sequence: Synthetic oligonucleotide
ucucgcaaacuccuccgca

SEQ ID NO: 444078 - RNA, 19 nt, Artificial Sequence
  Description of Artificial Sequence: Synthetic oligonucleotide
gaauagaccuucauguuua

SEQ ID NO: 444079 - RNA, 19 nt, Artificial Sequence
  Description of Artificial Sequence: Synthetic oligonucleotide
ucuaggagagcugaacaau

SEQ ID NO: 444080 - RNA, 19 nt, Artificial Sequence
  Description of Artificial Sequence: Synthetic oligonucleotide
guauugugugcacuguuuc

SEQ ID NO: 444081 - RNA, 19 nt, Artificial Sequence
  Description of Artificial Sequence: Synthetic oligonucleotide
ucaucuucgugaccacugu

SEQ ID NO: 444082 - RNA, 19 nt, Artificial Sequence
  Description of Artificial Sequence: Synthetic oligonucleotide
caucccuaaugccacaguc

SEQ ID NO: 444083 - RNA, 19 nt, Artificial Sequence
  Description of Artificial Sequence: Synthetic oligonucleotide
uuuuaucuccaucccuaau

SEQ ID NO: 444084 - RNA, 19 nt, Artificial Sequence
  Description of Artificial Sequence: Synthetic oligonucleotide
uuuuaaacgcagccucuuu

SEQ ID NO: 444085 - RNA, 19 nt, Artificial Sequence
  Description of Artificial Sequence: Synthetic oligonucleotide
uagugaugaggauagcguu

SEQ ID NO: 444086 - RNA, 19 nt, Artificial Sequence
  Description of Artificial Sequence: Synthetic oligonucleotide
agugcucacucuugccuuc

SEQ ID NO: 444087 - RNA, 19 nt, Artificial Sequence
  Description of Artificial Sequence: Synthetic oligonucleotide
aucuaggagagcugaacaa

SEQ ID NO: 444088 - RNA, 19 nt, Artificial Sequence
  Description of Artificial Sequence: Synthetic oligonucleotide
caugaguguuaggaaaagc

SEQ ID NO: 444089 - RNA, 19 nt, Artificial Sequence
  Description of Artificial Sequence: Synthetic oligonucleotide
auaccuacaccaguuaaau

SEQ ID NO: 444090 - RNA, 19 nt, Artificial Sequence
  Description of Artificial Sequence: Synthetic oligonucleotide
aaggacuguauuugagauu

SEQ ID NO: 444091 - RNA, 19 nt, Artificial Sequence
  Description of Artificial Sequence: Synthetic oligonucleotide
acgcucaugaguguuagga

SEQ ID NO: 444092 - RNA, 19 nt, Artificial Sequence
  Description of Artificial Sequence: Synthetic oligonucleotide
gauucggcaauuauucaaa

SEQ ID NO: 444093 - RNA, 19 nt, Artificial Sequence
  Description of Artificial Sequence: Synthetic oligonucleotide
uccuaacugucaacaauau

SEQ ID NO: 444094 - RNA, 19 nt, Artificial Sequence
  Description of Artificial Sequence: Synthetic oligonucleotide
aaugggucucaagaguaaa

SEQ ID NO: 444095 - RNA, 19 nt, Artificial Sequence
  Description of Artificial Sequence: Synthetic oligonucleotide
ucucaugaccaaaguguaa

SEQ ID NO: 444096 - RNA, 19 nt, Artificial Sequence
  Description of Artificial Sequence: Synthetic oligonucleotide
accacuguucgccacacuu

SEQ ID NO: 444097 - RNA, 19 nt, Artificial Sequence
  Description of Artificial Sequence: Synthetic oligonucleotide
augauucggcaauuauuca

SEQ ID NO: 444098 - RNA, 19 nt, Artificial Sequence
  Description of Artificial Sequence: Synthetic oligonucleotide
caguuaaauugguugagaa

SEQ ID NO: 444099 - RNA, 19 nt, Artificial Sequence
  Description of Artificial Sequence: Synthetic oligonucleotide
cuugucuauacuagccuga

SEQ ID NO: 444100 - RNA, 19 nt, Artificial Sequence
  Description of Artificial Sequence: Synthetic oligonucleotide
uggugaccaaaucuguaua

SEQ ID NO: 444101 - RNA, 19 nt, Artificial Sequence
  Description of Artificial Sequence: Synthetic oligonucleotide
cuuuagcagcucuacccac

SEQ ID NO: 444102 - RNA, 19 nt, Artificial Sequence
  Description of Artificial Sequence: Synthetic oligonucleotide
cuaucgagcauucuggagu

SEQ ID NO: 444103 - RNA, 19 nt, Artificial Sequence
  Description of Artificial Sequence: Synthetic oligonucleotide
guguuaggaaaagcuauug

SEQ ID NO: 444104 - RNA, 19 nt, Artificial Sequence
  Description of Artificial Sequence: Synthetic oligonucleotide
uuaugcguuuauggcaaug

SEQ ID NO: 444105 - RNA, 19 nt, Artificial Sequence
  Description of Artificial Sequence: Synthetic oligonucleotide
auagcguuuugccuccuaa

SEQ ID NO: 444106 - RNA, 19 nt, Artificial Sequence
  Description of Artificial Sequence: Synthetic oligonucleotide
acaauuguaaagggccuga

SEQ ID NO: 444107 - RNA, 19 nt, Artificial Sequence
  Description of Artificial Sequence: Synthetic oligonucleotide
acaacaacguuuggggaca

SEQ ID NO: 444108 - RNA, 19 nt, Artificial Sequence
  Description of Artificial Sequence: Synthetic oligonucleotide
gcaauuauucaaacgacca

SEQ ID NO: 444109 - RNA, 19 nt, Artificial Sequence
  Description of Artificial Sequence: Synthetic oligonucleotide
gcauuucagucuuacauga

SEQ ID NO: 444110 - RNA, 19 nt, Artificial Sequence
  Description of Artificial Sequence: Synthetic oligonucleotide
gaaaagcuauugguggcac

SEQ ID NO: 444111 - RNA, 19 nt, Artificial Sequence
  Description of Artificial Sequence: Synthetic oligonucleotide
caccaguuaaauugguuga

SEQ ID NO: 444112 - RNA, 19 nt, Artificial Sequence
  Description of Artificial Sequence: Synthetic oligonucleotide
ucgcaaacuccuccgcaug

SEQ ID NO: 444113 - RNA, 19 nt, Artificial Sequence
  Description of Artificial Sequence: Synthetic oligonucleotide
agcccaaggacuguauuug

SEQ ID NO: 444114 - RNA, 19 nt, Artificial Sequence
  Description of Artificial Sequence: Synthetic oligonucleotide
agaguucacaacaacguuu

SEQ ID NO: 444115 - RNA, 19 nt, Artificial Sequence
  Description of Artificial Sequence: Synthetic oligonucleotide
auguucuaccugccauugg

SEQ ID NO: 444116 - RNA, 19 nt, Artificial Sequence
  Description of Artificial Sequence: Synthetic oligonucleotide
uaaauggaccccagcuuua

SEQ ID NO: 444117 - RNA, 19 nt, Artificial Sequence
  Description of Artificial Sequence: Synthetic oligonucleotide
gaaauaccuacaccaguua

SEQ ID NO: 444118 - RNA, 19 nt, Artificial Sequence
  Description of Artificial Sequence: Synthetic oligonucleotide
cuuagccacccaaauaaaa

SEQ ID NO: 444119 - RNA, 19 nt, Artificial Sequence
  Description of Artificial Sequence: Synthetic oligonucleotide
uuccgcaacugaaaauaau

SEQ ID NO: 444120 - RNA, 19 nt, Artificial Sequence
  Description of Artificial Sequence: Synthetic oligonucleotide
cuccuaacugucaacaaua

SEQ ID NO: 444121 - RNA, 19 nt, Artificial Sequence
  Description of Artificial Sequence: Synthetic oligonucleotide
accuaaaauaacuguccuu

SEQ ID NO: 444122 - RNA, 19 nt, Artificial Sequence
  Description of Artificial Sequence: Synthetic oligonucleotide
guagaguucacaacaacgu

SEQ ID NO: 444123 - RNA, 19 nt, Artificial Sequence
  Description of Artificial Sequence: Synthetic oligonucleotide
acugaccucaugccagucu

SEQ ID NO: 444124 - RNA, 19 nt, Artificial Sequence
  Description of Artificial Sequence: Synthetic oligonucleotide
gcaucucaugaccaaagug

SEQ ID NO: 444125 - RNA, 19 nt, Artificial Sequence
  Description of Artificial Sequence: Synthetic oligonucleotide
agucuucgaguuuguuguc

SEQ ID NO: 444126 - RNA, 19 nt, Artificial Sequence
  Description of Artificial Sequence: Synthetic oligonucleotide
agacaagcaugaugcauaa

SEQ ID NO: 444127 - RNA, 19 nt, Artificial Sequence
  Description of Artificial Sequence: Synthetic oligonucleotide
ccuaagcugcaguauagag

SEQ ID NO: 444128 - RNA, 19 nt, Artificial Sequence
  Description of Artificial Sequence: Synthetic oligonucleotide
caaucuuacugaccucaug

SEQ ID NO: 444129 - RNA, 19 nt, Artificial Sequence
  Description of Artificial Sequence: Synthetic oligonucleotide
agucauguucuaccugcca

SEQ ID NO: 444130 - RNA, 19 nt, Artificial Sequence
  Description of Artificial Sequence: Synthetic oligonucleotide
cagacaagcaugaugcaua

SEQ ID NO: 444131 - RNA, 19 nt, Artificial Sequence
  Description of Artificial Sequence: Synthetic oligonucleotide
cacuacaauaaacauacau

SEQ ID NO: 444132 - RNA, 19 nt, Artificial Sequence
  Description of Artificial Sequence: Synthetic oligonucleotide
uagcguuuugccuccuaac

SEQ ID NO: 444133 - RNA, 19 nt, Artificial Sequence
  Description of Artificial Sequence: Synthetic oligonucleotide
uccuccgcaugcacucacg

SEQ ID NO: 444134 - RNA, 19 nt, Artificial Sequence
  Description of Artificial Sequence: Synthetic oligonucleotide
caauuauucaaacgaccaa

SEQ ID NO: 444135 - RNA, 19 nt, Artificial Sequence
  Description of Artificial Sequence: Synthetic oligonucleotide
ucaaucugauaaagucaau

SEQ ID NO: 444136 - RNA, 19 nt, Artificial Sequence
  Description of Artificial Sequence: Synthetic oligonucleotide
acaaucccuacccauucua

SEQ ID NO: 444137 - RNA, 19 nt, Artificial Sequence
  Description of Artificial Sequence: Synthetic oligonucleotide
acguuuggggacacagagc

SEQ ID NO: 444138 - RNA, 19 nt, Artificial Sequence
  Description of Artificial Sequence: Synthetic oligonucleotide
acagacaagcaugaugcau

SEQ ID NO: 444139 - RNA, 19 nt, Artificial Sequence
  Description of Artificial Sequence: Synthetic oligonucleotide
agacucaaagguccacggu

SEQ ID NO: 444140 - RNA, 19 nt, Artificial Sequence
  Description of Artificial Sequence: Synthetic oligonucleotide
uucagaggauuggaacuca

SEQ ID NO: 444141 - RNA, 19 nt, Artificial Sequence
  Description of Artificial Sequence: Synthetic oligonucleotide
ugucuauacuagccugauc

SEQ ID NO: 444142 - RNA, 19 nt, Artificial Sequence
  Description of Artificial Sequence: Synthetic oligonucleotide
uguagacucaaagguccac

SEQ ID NO: 444143 - RNA, 19 nt, Artificial Sequence
  Description of Artificial Sequence: Synthetic oligonucleotide
aaaccccuccaaaagcuaa

SEQ ID NO: 444144 - RNA, 19 nt, Artificial Sequence
  Description of Artificial Sequence: Synthetic oligonucleotide
auugggccuaagcugcagu

SEQ ID NO: 444145 - RNA, 19 nt, Artificial Sequence
  Description of Artificial Sequence: Synthetic oligonucleotide
cuccgcaugcacucacgcg

SEQ ID NO: 444146 - RNA, 19 nt, Artificial Sequence
  Description of Artificial Sequence: Synthetic oligonucleotide
ucucuaaaaccgacagauu

SEQ ID NO: 444147 - RNA, 19 nt, Artificial Sequence
  Description of Artificial Sequence: Synthetic oligonucleotide
cuucgugaccacuguucgc

SEQ ID NO: 444148 - RNA, 19 nt, Artificial Sequence
  Description of Artificial Sequence: Synthetic oligonucleotide
uaaaagcccaaggacugua

SEQ ID NO: 444149 - RNA, 19 nt, Artificial Sequence
  Description of Artificial Sequence: Synthetic oligonucleotide
gugaccaaaucuguauaac

SEQ ID NO: 444150 - RNA, 19 nt, Artificial Sequence
  Description of Artificial Sequence: Synthetic oligonucleotide
agcacauguucucucuaaa

SEQ ID NO: 444151 - RNA, 19 nt, Artificial Sequence
  Description of Artificial Sequence: Synthetic oligonucleotide
augaugcauaauguguaga

SEQ ID NO: 444152 - RNA, 19 nt, Artificial Sequence
  Description of Artificial Sequence: Synthetic oligonucleotide
gguaacuccugaaguauug

SEQ ID NO: 444153 - RNA, 19 nt, Artificial Sequence
  Description of Artificial Sequence: Synthetic oligonucleotide
ucacuacaauaaacauaca

SEQ ID NO: 444154 - RNA, 19 nt, Artificial Sequence
  Description of Artificial Sequence: Synthetic oligonucleotide
agacaauuguaaagggccu

SEQ ID NO: 444155 - RNA, 19 nt, Artificial Sequence
  Description of Artificial Sequence: Synthetic oligonucleotide
uuccccuuacaugcaacug

SEQ ID NO: 444156 - RNA, 19 nt, Artificial Sequence
  Description of Artificial Sequence: Synthetic oligonucleotide
gcacgcuggaaacaaacac

SEQ ID NO: 444157 - RNA, 19 nt, Artificial Sequence
  Description of Artificial Sequence: Synthetic oligonucleotide
gaugcauaauguguagacu

SEQ ID NO: 444158 - RNA, 19 nt, Artificial Sequence
  Description of Artificial Sequence: Synthetic oligonucleotide
aaugcccuagaaauaccua

SEQ ID NO: 444159 - RNA, 19 nt, Artificial Sequence
  Description of Artificial Sequence: Synthetic oligonucleotide
cugcaggagacaauuguaa

SEQ ID NO: 444160 - RNA, 19 nt, Artificial Sequence
  Description of Artificial Sequence: Synthetic oligonucleotide
ccuugucuauacuagccug

SEQ ID NO: 444161 - RNA, 19 nt, Artificial Sequence
  Description of Artificial Sequence: Synthetic oligonucleotide
guagcacucuuaguuuggc

SEQ ID NO: 444162 - RNA, 19 nt, Artificial Sequence
  Description of Artificial Sequence: Synthetic oligonucleotide
agcaccaauuuuauuuuaa

SEQ ID NO: 444163 - RNA, 19 nt, Artificial Sequence
  Description of Artificial Sequence: Synthetic oligonucleotide
uggagguuauugucuguua

SEQ ID NO: 444164 - RNA, 19 nt, Artificial Sequence
  Description of Artificial Sequence: Synthetic oligonucleotide
cacccaaauaaaacuguaa

SEQ ID NO: 444165 - RNA, 19 nt, Artificial Sequence
  Description of Artificial Sequence: Synthetic oligonucleotide
gguagcacucuuaguuugg

SEQ ID NO: 444166 - RNA, 19 nt, Artificial Sequence
  Description of Artificial Sequence: Synthetic oligonucleotide
aguguuaggaaaagcuauu

SEQ ID NO: 444167 - RNA, 19 nt, Artificial Sequence
  Description of Artificial Sequence: Synthetic oligonucleotide
aucccuaaugccacagucu

SEQ ID NO: 444168 - RNA, 19 nt, Artificial Sequence
  Description of Artificial Sequence: Synthetic oligonucleotide
acucuuaguuuggcuuugg

SEQ ID NO: 444169 - RNA, 19 nt, Artificial Sequence
  Description of Artificial Sequence: Synthetic oligonucleotide
guaaauacgcaugcucaaa

SEQ ID NO: 444170 - RNA, 19 nt, Artificial Sequence
  Description of Artificial Sequence: Synthetic oligonucleotide
caaggacuguauuugagau

SEQ ID NO: 444171 - RNA, 19 nt, Artificial Sequence
  Description of Artificial Sequence: Synthetic oligonucleotide
cauagucauuaaggcacag

SEQ ID NO: 444172 - RNA, 19 nt, Artificial Sequence
  Description of Artificial Sequence: Synthetic oligonucleotide
aaaaccccuccaaaagcua

SEQ ID NO: 444173 - RNA, 19 nt, Artificial Sequence
  Description of Artificial Sequence: Synthetic oligonucleotide
gcguuuugccuccuaacug

SEQ ID NO: 444174 - RNA, 19 nt, Artificial Sequence
  Description of Artificial Sequence: Synthetic oligonucleotide
auggauaaauggaccccag

SEQ ID NO: 444175 - RNA, 19 nt, Artificial Sequence
  Description of Artificial Sequence: Synthetic oligonucleotide
cauuaacugcaggagacaa

SEQ ID NO: 444176 - RNA, 19 nt, Artificial Sequence
  Description of Artificial Sequence: Synthetic oligonucleotide
caugcucaaacagcuuuuc

SEQ ID NO: 444177 - RNA, 19 nt, Artificial Sequence
  Description of Artificial Sequence: Synthetic oligonucleotide
guguaagugcucacucuug

SEQ ID NO: 444178 - RNA, 19 nt, Artificial Sequence
  Description of Artificial Sequence: Synthetic oligonucleotide
ggugaccaaaucuguauaa

SEQ ID NO: 444179 - RNA, 19 nt, Artificial Sequence
  Description of Artificial Sequence: Synthetic oligonucleotide
ucgagcauucuggagucau

SEQ ID NO: 444180 - RNA, 19 nt, Artificial Sequence
  Description of Artificial Sequence: Synthetic oligonucleotide
cucucgcaaacuccuccgc

SEQ ID NO: 444181 - RNA, 19 nt, Artificial Sequence
  Description of Artificial Sequence: Synthetic oligonucleotide
cagauucagaggauuggaa

SEQ ID NO: 444182 - RNA, 19 nt, Artificial Sequence
  Description of Artificial Sequence: Synthetic oligonucleotide
agugaugaggauagcguuu

SEQ ID NO: 444183 - RNA, 19 nt, Artificial Sequence
  Description of Artificial Sequence: Synthetic oligonucleotide
aucucaugaccaaagugua

SEQ ID NO: 444184 - RNA, 19 nt, Artificial Sequence
  Description of Artificial Sequence: Synthetic oligonucleotide
caaugcccuagaaauaccu

SEQ ID NO: 444185 - RNA, 19 nt, Artificial Sequence
  Description of Artificial Sequence: Synthetic oligonucleotide
guaaagggccugagagucc

SEQ ID NO: 444186 - RNA, 19 nt, Artificial Sequence
  Description of Artificial Sequence: Synthetic oligonucleotide
uaccuacaccaguuaaauu

SEQ ID NO: 444187 - RNA, 19 nt, Artificial Sequence
  Description of Artificial Sequence: Synthetic oligonucleotide
cauggugaccaaaucugua

SEQ ID NO: 444188 - RNA, 19 nt, Artificial Sequence
  Description of Artificial Sequence: Synthetic oligonucleotide
ggagaugcagcaaggucug

SEQ ID NO: 444189 - RNA, 19 nt, Artificial Sequence
  Description of Artificial Sequence: Synthetic oligonucleotide
uugccuccuaacugucaac

SEQ ID NO: 444190 - RNA, 19 nt, Artificial Sequence
  Description of Artificial Sequence: Synthetic oligonucleotide
ccugccauugggccuaagc

SEQ ID NO: 444191 - RNA, 19 nt, Artificial Sequence
  Description of Artificial Sequence: Synthetic oligonucleotide
gcaguagauaaacacugua

SEQ ID NO: 444192 - RNA, 19 nt, Artificial Sequence
  Description of Artificial Sequence: Synthetic oligonucleotide
gaaguauugugugcacugu

SEQ ID NO: 444193 - RNA, 19 nt, Artificial Sequence
  Description of Artificial Sequence: Synthetic oligonucleotide
cacgcucaugaguguuagg

SEQ ID NO: 444194 - RNA, 19 nt, Artificial Sequence
  Description of Artificial Sequence: Synthetic oligonucleotide
ucgugaccacuguucgcca

SEQ ID NO: 444195 - RNA, 19 nt, Artificial Sequence
  Description of Artificial Sequence: Synthetic oligonucleotide
gcccuagaaauaccuacac

SEQ ID NO: 444196 - RNA, 19 nt, Artificial Sequence
  Description of Artificial Sequence: Synthetic oligonucleotide
gucuacacagcaccaauuu

SEQ ID NO: 444197 - RNA, 19 nt, Artificial Sequence
  Description of Artificial Sequence: Synthetic oligonucleotide
aacaacguuuggggacaca

SEQ ID NO: 444198 - RNA, 19 nt, Artificial Sequence
  Description of Artificial Sequence: Synthetic oligonucleotide
ccauugaccuaaaauaacu

SEQ ID NO: 444199 - RNA, 19 nt, Artificial Sequence
  Description of Artificial Sequence: Synthetic oligonucleotide
gucuucgaguuuguuguca

SEQ ID NO: 444200 - RNA, 19 nt, Artificial Sequence
  Description of Artificial Sequence: Synthetic oligonucleotide
cucaaagguccacggucuc

SEQ ID NO: 444201 - RNA, 19 nt, Artificial Sequence
  Description of Artificial Sequence: Synthetic oligonucleotide
gccauugaccuaaaauaac

SEQ ID NO: 444202 - RNA, 19 nt, Artificial Sequence
  Description of Artificial Sequence: Synthetic oligonucleotide
gaccaauuacaaugcccua

SEQ ID NO: 444203 - RNA, 19 nt, Artificial Sequence
  Description of Artificial Sequence: Synthetic oligonucleotide
gcguuuauggcaaugggcu

SEQ ID NO: 444204 - RNA, 19 nt, Artificial Sequence
  Description of Artificial Sequence: Synthetic oligonucleotide
aucgaguucuagacacaug

SEQ ID NO: 444205 - RNA, 19 nt, Artificial Sequence
  Description of Artificial Sequence: Synthetic oligonucleotide
ugggccuaagcugcaguau

SEQ ID NO: 444206 - RNA, 19 nt, Artificial Sequence
  Description of Artificial Sequence: Synthetic oligonucleotide
cauuuuaaggaagcaccua

SEQ ID NO: 444207 - RNA, 19 nt, Artificial Sequence
  Description of Artificial Sequence: Synthetic oligonucleotide
guuuugccuccuaacuguc

SEQ ID NO: 444208 - RNA, 19 nt, Artificial Sequence
  Description of Artificial Sequence: Synthetic oligonucleotide
ggccuaagcugcaguauag

SEQ ID NO: 444209 - RNA, 19 nt, Artificial Sequence
  Description of Artificial Sequence: Synthetic oligonucleotide
agaucgaguucuagacaca

SEQ ID NO: 444210 - RNA, 19 nt, Artificial Sequence
  Description of Artificial Sequence: Synthetic oligonucleotide
cauugggccuaagcugcag

SEQ ID NO: 444211 - RNA, 19 nt, Artificial Sequence
  Description of Artificial Sequence: Synthetic oligonucleotide
accucaugccagucuucga

SEQ ID NO: 444212 - RNA, 19 nt, Artificial Sequence
  Description of Artificial Sequence: Synthetic oligonucleotide
guuauguguaggagcuuaa

SEQ ID NO: 444213 - RNA, 19 nt, Artificial Sequence
  Description of Artificial Sequence: Synthetic oligonucleotide
ccugaaguauugugugcac

SEQ ID NO: 444214 - RNA, 19 nt, Artificial Sequence
  Description of Artificial Sequence: Synthetic oligonucleotide
gcacauguucucucuaaaa

SEQ ID NO: 444215 - RNA, 19 nt, Artificial Sequence
  Description of Artificial Sequence: Synthetic oligonucleotide
ccucuuuacuuagccaccc

SEQ ID NO: 444216 - RNA, 19 nt, Artificial Sequence
  Description of Artificial Sequence: Synthetic oligonucleotide
gauagcguuuugccuccua

SEQ ID NO: 444217 - RNA, 19 nt, Artificial Sequence
  Description of Artificial Sequence: Synthetic oligonucleotide
guagcaaagaauagaccuu

SEQ ID NO: 444218 - RNA, 19 nt, Artificial Sequence
  Description of Artificial Sequence: Synthetic oligonucleotide
gagcgcagaaggcagcaau

SEQ ID NO: 444219 - RNA, 19 nt, Artificial Sequence
  Description of Artificial Sequence: Synthetic oligonucleotide
gcgcacauacacaaagcac

SEQ ID NO: 444220 - RNA, 19 nt, Artificial Sequence
  Description of Artificial Sequence: Synthetic oligonucleotide
ggcaaugggcugcagaaau

SEQ ID NO: 444221 - RNA, 19 nt, Artificial Sequence
  Description of Artificial Sequence: Synthetic oligonucleotide
ggauugggccugcaguaga

SEQ ID NO: 444222 - RNA, 19 nt, Artificial Sequence
  Description of Artificial Sequence: Synthetic oligonucleotide
gaaguccuaugugaguuuu

SEQ ID NO: 444223 - RNA, 19 nt, Artificial Sequence
  Description of Artificial Sequence: Synthetic oligonucleotide
ggcaacugugggccuuugc

SEQ ID NO: 444224 - RNA, 19 nt, Artificial Sequence
  Description of Artificial Sequence: Synthetic oligonucleotide
uacugaccucaugccaguc

SEQ ID NO: 444225 - RNA, 19 nt, Artificial Sequence
  Description of Artificial Sequence: Synthetic oligonucleotide
ccuuuuccgcaacugaaaa

SEQ ID NO: 444226 - RNA, 19 nt, Artificial Sequence
  Description of Artificial Sequence: Synthetic oligonucleotide
ugagcgcagaaggcagcaa

SEQ ID NO: 444227 - RNA, 19 nt, Artificial Sequence
  Description of Artificial Sequence: Synthetic oligonucleotide
cugaaguauugugugcacu

SEQ ID NO: 444228 - RNA, 19 nt, Artificial Sequence
  Description of Artificial Sequence: Synthetic oligonucleotide
cugguaacuccugaaguau

SEQ ID NO: 444229 - RNA, 19 nt, Artificial Sequence
  Description of Artificial Sequence: Synthetic oligonucleotide
ccuucugcgucuguuauaa

SEQ ID NO: 444230 - RNA, 19 nt, Artificial Sequence
  Description of Artificial Sequence: Synthetic oligonucleotide
ccuccgcaugcacucacgc

SEQ ID NO: 444231 - RNA, 19 nt, Artificial Sequence
  Description of Artificial Sequence: Synthetic oligonucleotide
cucgcaaacuccuccgcau

SEQ ID NO: 444232 - RNA, 19 nt, Artificial Sequence
  Description of Artificial Sequence: Synthetic oligonucleotide
ggcacaucucuguaauagu

SEQ ID NO: 444233 - RNA, 19 nt, Artificial Sequence
  Description of Artificial Sequence: Synthetic oligonucleotide
caugcacucacgcgcacau

SEQ ID NO: 444234 - RNA, 19 nt, Artificial Sequence
  Description of Artificial Sequence: Synthetic oligonucleotide
gccugaucccugcugcuca

SEQ ID NO: 444235 - RNA, 19 nt, Artificial Sequence
  Description of Artificial Sequence: Synthetic oligonucleotide
cacucuugccuucugccau

SEQ ID NO: 444236 - RNA, 19 nt, Artificial Sequence
  Description of Artificial Sequence: Synthetic oligonucleotide
gcuauugguggcacagcuc

SEQ ID NO: 444237 - RNA, 19 nt, Artificial Sequence
  Description of Artificial Sequence: Synthetic oligonucleotide
accgacagauucagaggau

SEQ ID NO: 444238 - RNA, 19 nt, Artificial Sequence
  Description of Artificial Sequence: Synthetic oligonucleotide
caacaacguuuggggacac

SEQ ID NO: 444239 - RNA, 19 nt, Artificial Sequence
  Description of Artificial Sequence: Synthetic oligonucleotide
gggccuaagcugcaguaua

SEQ ID NO: 444240 - RNA, 19 nt, Artificial Sequence
  Description of Artificial Sequence: Synthetic oligonucleotide
aucgagcauucuggaguca

SEQ ID NO: 444241 - RNA, 19 nt, Artificial Sequence
  Description of Artificial Sequence: Synthetic oligonucleotide
gaaggacaagacacuguuu

SEQ ID NO: 444242 - RNA, 19 nt, Artificial Sequence
  Description of Artificial Sequence: Synthetic oligonucleotide
gugccugaaggcacaucuc

SEQ ID NO: 444243 - RNA, 19 nt, Artificial Sequence
  Description of Artificial Sequence: Synthetic oligonucleotide
agccacgcucaugaguguu

SEQ ID NO: 444244 - RNA, 19 nt, Artificial Sequence
  Description of Artificial Sequence: Synthetic oligonucleotide
cacuguucgccacacuuuu

SEQ ID NO: 444245 - RNA, 19 nt, Artificial Sequence
  Description of Artificial Sequence: Synthetic oligonucleotide
cgcgcacauacacaaagca

SEQ ID NO: 444246 - RNA, 19 nt, Artificial Sequence
  Description of Artificial Sequence: Synthetic oligonucleotide
ccacgcucaugaguguuag

SEQ ID NO: 444247 - RNA, 19 nt, Artificial Sequence
  Description of Artificial Sequence: Synthetic oligonucleotide
ccacccaaauaaaacugua

SEQ ID NO: 444248 - RNA, 19 nt, Artificial Sequence
  Description of Artificial Sequence: Synthetic oligonucleotide
cguuuugccuccuaacugu

SEQ ID NO: 444249 - RNA, 19 nt, Artificial Sequence
  Description of Artificial Sequence: Synthetic oligonucleotide
gccuaagcugcaguauaga

SEQ ID NO: 444250 - RNA, 19 nt, Artificial Sequence
  Description of Artificial Sequence: Synthetic oligonucleotide
ggacaguaguggcuccaaa

SEQ ID NO: 444251 - RNA, 19 nt, Artificial Sequence
  Description of Artificial Sequence: Synthetic oligonucleotide
gaaggacccagcacauguu

SEQ ID NO: 444252 - RNA, 19 nt, Artificial Sequence
  Description of Artificial Sequence: Synthetic oligonucleotide
gccacccaaauaaaacugu

SEQ ID NO: 444253 - RNA, 19 nt, Artificial Sequence
  Description of Artificial Sequence: Synthetic oligonucleotide
cgagcauucuggagucaug

SEQ ID NO: 444254 - RNA, 19 nt, Artificial Sequence
  Description of Artificial Sequence: Synthetic oligonucleotide
ccacucaaucugauaaagu

SEQ ID NO: 444255 - RNA, 19 nt, Artificial Sequence
  Description of Artificial Sequence: Synthetic oligonucleotide
cuucugcgucuguuauaaa

SEQ ID NO: 444256 - RNA, 19 nt, Artificial Sequence
  Description of Artificial Sequence: Synthetic oligonucleotide
cuuaugcguuuauggcaau

SEQ ID NO: 444257 - RNA, 19 nt, Artificial Sequence
  Description of Artificial Sequence: Synthetic oligonucleotide
ccuccuaacugucaacaau

SEQ ID NO: 444258 - RNA, 19 nt, Artificial Sequence
  Description of Artificial Sequence: Synthetic oligonucleotide
gagccacgcucaugagugu

SEQ ID NO: 444259 - RNA, 19 nt, Artificial Sequence
  Description of Artificial Sequence: Synthetic oligonucleotide
aggcaacugugggccuuug

SEQ ID NO: 444260 - RNA, 19 nt, Artificial Sequence
  Description of Artificial Sequence: Synthetic oligonucleotide
caucuucgugaccacuguu

SEQ ID NO: 444261 - RNA, 19 nt, Artificial Sequence
  Description of Artificial Sequence: Synthetic oligonucleotide
cccauucuaggggaagaaa

SEQ ID NO: 444262 - RNA, 19 nt, Artificial Sequence
  Description of Artificial Sequence: Synthetic oligonucleotide
gccacgcucaugaguguua

SEQ ID NO: 444263 - RNA, 19 nt, Artificial Sequence
  Description of Artificial Sequence: Synthetic oligonucleotide
gcgcagaaggcagcaauuu

SEQ ID NO: 444264 - RNA, 19 nt, Artificial Sequence
  Description of Artificial Sequence: Synthetic oligonucleotide
ccgacagauucagaggauu

SEQ ID NO: 444265 - RNA, 19 nt, Artificial Sequence
  Description of Artificial Sequence: Synthetic oligonucleotide
cgagaaggacccagcacau

SEQ ID NO: 444266 - RNA, 19 nt, Artificial Sequence
  Description of Artificial Sequence: Synthetic oligonucleotide
cggucucuucucucugccu

SEQ ID NO: 444267 - RNA, 19 nt, Artificial Sequence
  Description of Artificial Sequence: Synthetic oligonucleotide
aauaauccggugcagagcc

SEQ ID NO: 444268 - RNA, 19 nt, Artificial Sequence
  Description of Artificial Sequence: Synthetic oligonucleotide
aauauuggagccuccuucc

SEQ ID NO: 444269 - RNA, 19 nt, Artificial Sequence
  Description of Artificial Sequence: Synthetic oligonucleotide
ucaacaacuucaauaaucc

SEQ ID NO: 444270 - RNA, 19 nt, Artificial Sequence
  Description of Artificial Sequence: Synthetic oligonucleotide
ucgaauccaucauagaugg

SEQ ID NO: 444271 - RNA, 19 nt, Artificial Sequence
  Description of Artificial Sequence: Synthetic oligonucleotide
ucaucaugcugcuuuaugg

SEQ ID NO: 444272 - RNA, 19 nt, Artificial Sequence
  Description of Artificial Sequence: Synthetic oligonucleotide
uuuuccugcagucaaacac

SEQ ID NO: 444273 - RNA, 19 nt, Artificial Sequence
  Description of Artificial Sequence: Synthetic oligonucleotide
aaacgcaccaaguuauagg

SEQ ID NO: 444274 - RNA, 19 nt, Artificial Sequence
  Description of Artificial Sequence: Synthetic oligonucleotide
uauggcaagacguuuguag

SEQ ID NO: 444275 - RNA, 19 nt, Artificial Sequence
  Description of Artificial Sequence: Synthetic oligonucleotide
agcgacaccacacaggccg

SEQ ID NO: 444276 - RNA, 19 nt, Artificial Sequence
  Description of Artificial Sequence: Synthetic oligonucleotide
cuugguaacccucauauac

SEQ ID NO: 444277 - RNA, 19 nt, Artificial Sequence
  Description of Artificial Sequence: Synthetic oligonucleotide
gaucuggccauucugagcc

SEQ ID NO: 444278 - RNA, 19 nt, Artificial Sequence
  Description of Artificial Sequence: Synthetic oligonucleotide
ucuuacggcuucaugaaag

SEQ ID NO: 444279 - RNA, 19 nt, Artificial Sequence
  Description of Artificial Sequence: Synthetic oligonucleotide
agcgcauugauacuguggg

SEQ ID NO: 444280 - RNA, 19 nt, Artificial Sequence
  Description of Artificial Sequence: Synthetic oligonucleotide
gagguaggaaugcuuaugg

SEQ ID NO: 444281 - RNA, 19 nt, Artificial Sequence
  Description of Artificial Sequence: Synthetic oligonucleotide
aauccugucaaaugcagaa

SEQ ID NO: 444282 - RNA, 19 nt, Artificial Sequence
  Description of Artificial Sequence: Synthetic oligonucleotide
ucaauaauccggugcagag

SEQ ID NO: 444283 - RNA, 19 nt, Artificial Sequence
  Description of Artificial Sequence: Synthetic oligonucleotide
gaacccggcacauuguugg

SEQ ID NO: 444284 - RNA, 19 nt, Artificial Sequence
  Description of Artificial Sequence: Synthetic oligonucleotide
aacgccucguguuucuccc

SEQ ID NO: 444285 - RNA, 19 nt, Artificial Sequence
  Description of Artificial Sequence: Synthetic oligonucleotide
aucaacaacuucaauaauc

SEQ ID NO: 444286 - RNA, 19 nt, Artificial Sequence
  Description of Artificial Sequence: Synthetic oligonucleotide
agagaggugcuccaaguac

SEQ ID NO: 444287 - RNA, 19 nt, Artificial Sequence
  Description of Artificial Sequence: Synthetic oligonucleotide
uucuaucgaauggagaagg

SEQ ID NO: 444288 - RNA, 19 nt, Artificial Sequence
  Description of Artificial Sequence: Synthetic oligonucleotide
augccuaccacguugaggu

SEQ ID NO: 444289 - RNA, 19 nt, Artificial Sequence
  Description of Artificial Sequence: Synthetic oligonucleotide
gaagccaucgaauccauca

SEQ ID NO: 444290 - RNA, 19 nt, Artificial Sequence
  Description of Artificial Sequence: Synthetic oligonucleotide
aaauccaccaacgaucaga

SEQ ID NO: 444291 - RNA, 19 nt, Artificial Sequence
  Description of Artificial Sequence: Synthetic oligonucleotide
gaaucagacacaucauagc

SEQ ID NO: 444292 - RNA, 19 nt, Artificial Sequence
  Description of Artificial Sequence: Synthetic oligonucleotide
acguuuguagguuuucagg

SEQ ID NO: 444293 - RNA, 19 nt, Artificial Sequence
  Description of Artificial Sequence: Synthetic oligonucleotide
ucugagaguuucaagcaca

SEQ ID NO: 444294 - RNA, 19 nt, Artificial Sequence
  Description of Artificial Sequence: Synthetic oligonucleotide
uuugauucggucacacgug

SEQ ID NO: 444295 - RNA, 19 nt, Artificial Sequence
  Description of Artificial Sequence: Synthetic oligonucleotide
guuucuaucgaauggagaa

SEQ ID NO: 444296 - RNA, 19 nt, Artificial Sequence
  Description of Artificial Sequence: Synthetic oligonucleotide
auggcaagacguuuguagg

SEQ ID NO: 444297 - RNA, 19 nt, Artificial Sequence
  Description of Artificial Sequence: Synthetic oligonucleotide
gagucuuacggcuucauga

SEQ ID NO: 444298 - RNA, 19 nt, Artificial Sequence
  Description of Artificial Sequence: Synthetic oligonucleotide
augcuuauggacuucgucu

SEQ ID NO: 444299 - RNA, 19 nt, Artificial Sequence
  Description of Artificial Sequence: Synthetic oligonucleotide
uggacuguaaaucucugau

SEQ ID NO: 444300 - RNA, 19 nt, Artificial Sequence
  Description of Artificial Sequence: Synthetic oligonucleotide
ucacacgugucugugauag

SEQ ID NO: 444301 - RNA, 19 nt, Artificial Sequence
  Description of Artificial Sequence: Synthetic oligonucleotide
auuugcagaaugcuggaga

SEQ ID NO: 444302 - RNA, 19 nt, Artificial Sequence
  Description of Artificial Sequence: Synthetic oligonucleotide
gauacugugggaacgaauc

SEQ ID NO: 444303 - RNA, 19 nt, Artificial Sequence
  Description of Artificial Sequence: Synthetic oligonucleotide
uccgugauccacuccauag

SEQ ID NO: 444304 - RNA, 19 nt, Artificial Sequence
  Description of Artificial Sequence: Synthetic oligonucleotide
uuuggcuaucgauugcucc

SEQ ID NO: 444305 - RNA, 19 nt, Artificial Sequence
  Description of Artificial Sequence: Synthetic oligonucleotide
ugaugauagcaacauugca

SEQ ID NO: 444306 - RNA, 19 nt, Artificial Sequence
  Description of Artificial Sequence: Synthetic oligonucleotide
ugauugguugauuuuggcu

SEQ ID NO: 444307 - RNA, 19 nt, Artificial Sequence
  Description of Artificial Sequence: Synthetic oligonucleotide
gaugauagcaacauugcaa

SEQ ID NO: 444308 - RNA, 19 nt, Artificial Sequence
  Description of Artificial Sequence: Synthetic oligonucleotide
ucaucgucaacaaacuuuu

SEQ ID NO: 444309 - RNA, 19 nt, Artificial Sequence
  Description of Artificial Sequence: Synthetic oligonucleotide
gaugcugaaaucggaaccc

SEQ ID NO: 444310 - RNA, 19 nt, Artificial Sequence
  Description of Artificial Sequence: Synthetic oligonucleotide
aaacuccucccucggaguc

SEQ ID NO: 444311 - RNA, 19 nt, Artificial Sequence
  Description of Artificial Sequence: Synthetic oligonucleotide
aucguuucaaugaugaaca

SEQ ID NO: 444312 - RNA, 19 nt, Artificial Sequence
  Description of Artificial Sequence: Synthetic oligonucleotide
uugguaacccucauauaca

SEQ ID NO: 444313 - RNA, 19 nt, Artificial Sequence
  Description of Artificial Sequence: Synthetic oligonucleotide
uaucgauugcuccuucagc

SEQ ID NO: 444314 - RNA, 19 nt, Artificial Sequence
  Description of Artificial Sequence: Synthetic oligonucleotide
uuuauggcaagacguuugu

SEQ ID NO: 444315 - RNA, 19 nt, Artificial Sequence
  Description of Artificial Sequence: Synthetic oligonucleotide
caucguuucaaugaugaac

SEQ ID NO: 444316 - RNA, 19 nt, Artificial Sequence
  Description of Artificial Sequence: Synthetic oligonucleotide
ucaaaugcagaaggggucc

SEQ ID NO: 444317 - RNA, 19 nt, Artificial Sequence
  Description of Artificial Sequence: Synthetic oligonucleotide
aguuauaggcagcuuucag

SEQ ID NO: 444318 - RNA, 19 nt, Artificial Sequence
  Description of Artificial Sequence: Synthetic oligonucleotide
acggcuucaugaaaguucc

SEQ ID NO: 444319 - RNA, 19 nt, Artificial Sequence
  Description of Artificial Sequence: Synthetic oligonucleotide
ugcaaucccgacucgaaca

SEQ ID NO: 444320 - RNA, 19 nt, Artificial Sequence
  Description of Artificial Sequence: Synthetic oligonucleotide
uucgucccaagaauggacc

SEQ ID NO: 444321 - RNA, 19 nt, Artificial Sequence
  Description of Artificial Sequence: Synthetic oligonucleotide
uguucggcgaucuucucca

SEQ ID NO: 444322 - RNA, 19 nt, Artificial Sequence
  Description of Artificial Sequence: Synthetic oligonucleotide
aaguccguuccacuccuuc

SEQ ID NO: 444323 - RNA, 19 nt, Artificial Sequence
  Description of Artificial Sequence: Synthetic oligonucleotide
aguccguuccacuccuucc

SEQ ID NO: 444324 - RNA, 19 nt, Artificial Sequence
  Description of Artificial Sequence: Synthetic oligonucleotide
cacaaauggaaucaucguc

SEQ ID NO: 444325 - RNA, 19 nt, Artificial Sequence
  Description of Artificial Sequence: Synthetic oligonucleotide
gacguuuguagguuuucag

SEQ ID NO: 444326 - RNA, 19 nt, Artificial Sequence
  Description of Artificial Sequence: Synthetic oligonucleotide
uuucgaucuggccauucug

SEQ ID NO: 444327 - RNA, 19 nt, Artificial Sequence
  Description of Artificial Sequence: Synthetic oligonucleotide
uuauucccagaacacaaau

SEQ ID NO: 444328 - RNA, 19 nt, Artificial Sequence
  Description of Artificial Sequence: Synthetic oligonucleotide
ugcggaaggcauugcaacg

SEQ ID NO: 444329 - RNA, 19 nt, Artificial Sequence
  Description of Artificial Sequence: Synthetic oligonucleotide
caauauuggagccuccuuc

SEQ ID NO: 444330 - RNA, 19 nt, Artificial Sequence
  Description of Artificial Sequence: Synthetic oligonucleotide
uguuugauucggucacacg

SEQ ID NO: 444331 - RNA, 19 nt, Artificial Sequence
  Description of Artificial Sequence: Synthetic oligonucleotide
ucauuugcacacauuccac

SEQ ID NO: 444332 - RNA, 19 nt, Artificial Sequence
  Description of Artificial Sequence: Synthetic oligonucleotide
accacguugagguaggaau

SEQ ID NO: 444333 - RNA, 19 nt, Artificial Sequence
  Description of Artificial Sequence: Synthetic oligonucleotide
uuucgucccaagaauggac

SEQ ID NO: 444334 - RNA, 19 nt, Artificial Sequence
  Description of Artificial Sequence: Synthetic oligonucleotide
aucggaacccggcacauug

SEQ ID NO: 444335 - RNA, 19 nt, Artificial Sequence
  Description of Artificial Sequence: Synthetic oligonucleotide
uuucuaucgaauggagaag

SEQ ID NO: 444336 - RNA, 19 nt, Artificial Sequence
  Description of Artificial Sequence: Synthetic oligonucleotide
aacccucauauacaaagua

SEQ ID NO: 444337 - RNA, 19 nt, Artificial Sequence
  Description of Artificial Sequence: Synthetic oligonucleotide
ugcugaaaucggaacccgg

SEQ ID NO: 444338 - RNA, 19 nt, Artificial Sequence
  Description of Artificial Sequence: Synthetic oligonucleotide
uuggcuaucgauugcuccu

SEQ ID NO: 444339 - RNA, 19 nt, Artificial Sequence
  Description of Artificial Sequence: Synthetic oligonucleotide
aagcccagcugauucacca

SEQ ID NO: 444340 - RNA, 19 nt, Artificial Sequence
  Description of Artificial Sequence: Synthetic oligonucleotide
ucaccaaggccaaguaacc

SEQ ID NO: 444341 - RNA, 19 nt, Artificial Sequence
  Description of Artificial Sequence: Synthetic oligonucleotide
acaguauccacccaucguu

SEQ ID NO: 444342 - RNA, 19 nt, Artificial Sequence
  Description of Artificial Sequence: Synthetic oligonucleotide
aucgaauccaucauagaug

SEQ ID NO: 444343 - RNA, 19 nt, Artificial Sequence
  Description of Artificial Sequence: Synthetic oligonucleotide
cauugauacugugggaacg

SEQ ID NO: 444344 - RNA, 19 nt, Artificial Sequence
  Description of Artificial Sequence: Synthetic oligonucleotide
guuugauucggucacacgu

SEQ ID NO: 444345 - RNA, 19 nt, Artificial Sequence
  Description of Artificial Sequence: Synthetic oligonucleotide
uagcucgucuuguacuugg

SEQ ID NO: 444346 - RNA, 19 nt, Artificial Sequence
  Description of Artificial Sequence: Synthetic oligonucleotide
ugaguauaaggccccucug

SEQ ID NO: 444347 - RNA, 19 nt, Artificial Sequence
  Description of Artificial Sequence: Synthetic oligonucleotide
aaugcagaaggggucccuc

SEQ ID NO: 444348 - RNA, 19 nt, Artificial Sequence
  Description of Artificial Sequence: Synthetic oligonucleotide
agccaaggcacucaccaag

SEQ ID NO: 444349 - RNA, 19 nt, Artificial Sequence
  Description of Artificial Sequence: Synthetic oligonucleotide
ucacccgggugucaaagcc

SEQ ID NO: 444350 - RNA, 19 nt, Artificial Sequence
  Description of Artificial Sequence: Synthetic oligonucleotide
aaguuucuaucgaauggag

SEQ ID NO: 444351 - RNA, 19 nt, Artificial Sequence
  Description of Artificial Sequence: Synthetic oligonucleotide
ugccccgaugcugaaaucg

SEQ ID NO: 444352 - RNA, 19 nt, Artificial Sequence
  Description of Artificial Sequence: Synthetic oligonucleotide
ucguguuucucccgggcag

SEQ ID NO: 444353 - RNA, 19 nt, Artificial Sequence
  Description of Artificial Sequence: Synthetic oligonucleotide
uucaauaauccggugcaga

SEQ ID NO: 444354 - RNA, 19 nt, Artificial Sequence
  Description of Artificial Sequence: Synthetic oligonucleotide
auagcucuagcagagauuu

SEQ ID NO: 444355 - RNA, 19 nt, Artificial Sequence
  Description of Artificial Sequence: Synthetic oligonucleotide
uuuucgaucuggccauucu

SEQ ID NO: 444356 - RNA, 19 nt, Artificial Sequence
  Description of Artificial Sequence: Synthetic oligonucleotide
gaacgaaucuguucggcga

SEQ ID NO: 444357 - RNA, 19 nt, Artificial Sequence
  Description of Artificial Sequence: Synthetic oligonucleotide
aagcgcauugauacugugg

SEQ ID NO: 444358 - RNA, 19 nt, Artificial Sequence
  Description of Artificial Sequence: Synthetic oligonucleotide
aguuucagccaccacugcu

SEQ ID NO: 444359 - RNA, 19 nt, Artificial Sequence
  Description of Artificial Sequence: Synthetic oligonucleotide
cuaucgauugcuccuucag

SEQ ID NO: 444360 - RNA, 19 nt, Artificial Sequence
  Description of Artificial Sequence: Synthetic oligonucleotide
ucaagcacaugcuuuccuc

SEQ ID NO: 444361 - RNA, 19 nt, Artificial Sequence
  Description of Artificial Sequence: Synthetic oligonucleotide
cauugcaacgggcacuccc

SEQ ID NO: 444362 - RNA, 19 nt, Artificial Sequence
  Description of Artificial Sequence: Synthetic oligonucleotide
cauaaccauagggauacag

SEQ ID NO: 444363 - RNA, 19 nt, Artificial Sequence
  Description of Artificial Sequence: Synthetic oligonucleotide
ugguugauuuuggcuaucg

SEQ ID NO: 444364 - RNA, 19 nt, Artificial Sequence
  Description of Artificial Sequence: Synthetic oligonucleotide
aagacguuuguagguuuuc

SEQ ID NO: 444365 - RNA, 19 nt, Artificial Sequence
  Description of Artificial Sequence: Synthetic oligonucleotide
augcggcuggccaaaaucc

SEQ ID NO: 444366 - RNA, 19 nt, Artificial Sequence
  Description of Artificial Sequence: Synthetic oligonucleotide
caaggcacucaccaaggcc

SEQ ID NO: 444367 - RNA, 19 nt, Artificial Sequence
  Description of Artificial Sequence: Synthetic oligonucleotide
uuggcgaagccaucgaauc

SEQ ID NO: 444368 - RNA, 19 nt, Artificial Sequence
  Description of Artificial Sequence: Synthetic oligonucleotide
cucaaaacuccucccucgg

SEQ ID NO: 444369 - RNA, 19 nt, Artificial Sequence
  Description of Artificial Sequence: Synthetic oligonucleotide
ugcguuucgucccaagaau

SEQ ID NO: 444370 - RNA, 19 nt, Artificial Sequence
  Description of Artificial Sequence: Synthetic oligonucleotide
ucaagaaguccguuccacu

SEQ ID NO: 444371 - RNA, 19 nt, Artificial Sequence
  Description of Artificial Sequence: Synthetic oligonucleotide
gaaaucggaacccggcaca

SEQ ID NO: 444372 - RNA, 19 nt, Artificial Sequence
  Description of Artificial Sequence: Synthetic oligonucleotide
ucugccccgaugcugaaau

SEQ ID NO: 444373 - RNA, 19 nt, Artificial Sequence
  Description of Artificial Sequence: Synthetic oligonucleotide
ggaacgaaucuguucggcg

SEQ ID NO: 444374 - RNA, 19 nt, Artificial Sequence
  Description of Artificial Sequence: Synthetic oligonucleotide
aaucccgacucgaacagca

SEQ ID NO: 444375 - RNA, 19 nt, Artificial Sequence
  Description of Artificial Sequence: Synthetic oligonucleotide
auuaucguuccaccuauuu

SEQ ID NO: 444376 - RNA, 19 nt, Artificial Sequence
  Description of Artificial Sequence: Synthetic oligonucleotide
aacgaaucuguucggcgau

SEQ ID NO: 444377 - RNA, 19 nt, Artificial Sequence
  Description of Artificial Sequence: Synthetic oligonucleotide
auugcaacgggcacucccg

SEQ ID NO: 444378 - RNA, 19 nt, Artificial Sequence
  Description of Artificial Sequence: Synthetic oligonucleotide
uagggauacagaacgccuc

SEQ ID NO: 444379 - RNA, 19 nt, Artificial Sequence
  Description of Artificial Sequence: Synthetic oligonucleotide
agugugugugugugugugg

SEQ ID NO: 444380 - RNA, 19 nt, Artificial Sequence
  Description of Artificial Sequence: Synthetic oligonucleotide
ugcuuauucccagaacaca

SEQ ID NO: 444381 - RNA, 19 nt, Artificial Sequence
  Description of Artificial Sequence: Synthetic oligonucleotide
acacgugucugugauagug

SEQ ID NO: 444382 - RNA, 19 nt, Artificial Sequence
  Description of Artificial Sequence: Synthetic oligonucleotide
agucuuacggcuucaugaa

SEQ ID NO: 444383 - RNA, 19 nt, Artificial Sequence
  Description of Artificial Sequence: Synthetic oligonucleotide
ccgaucacacacaaguugg

SEQ ID NO: 444384 - RNA, 19 nt, Artificial Sequence
  Description of Artificial Sequence: Synthetic oligonucleotide
ucaaaacuccucccucgga

SEQ ID NO: 444385 - RNA, 19 nt, Artificial Sequence
  Description of Artificial Sequence: Synthetic oligonucleotide
ccaccaacgaucagaagcg

SEQ ID NO: 444386 - RNA, 19 nt, Artificial Sequence
  Description of Artificial Sequence: Synthetic oligonucleotide
aaguuauaggcagcuuuca

SEQ ID NO: 444387 - RNA, 19 nt, Artificial Sequence
  Description of Artificial Sequence: Synthetic oligonucleotide
uucucucaagugacccacg

SEQ ID NO: 444388 - RNA, 19 nt, Artificial Sequence
  Description of Artificial Sequence: Synthetic oligonucleotide
acauucucccauuuggcuu

SEQ ID NO: 444389 - RNA, 19 nt, Artificial Sequence
  Description of Artificial Sequence: Synthetic oligonucleotide
ucaagugacccacguugga

SEQ ID NO: 444390 - RNA, 19 nt, Artificial Sequence
  Description of Artificial Sequence: Synthetic oligonucleotide
uggcgaagccaucgaaucc

SEQ ID NO: 444391 - RNA, 19 nt, Artificial Sequence
  Description of Artificial Sequence: Synthetic oligonucleotide
uccaguccaaccuccgaca

SEQ ID NO: 444392 - RNA, 19 nt, Artificial Sequence
  Description of Artificial Sequence: Synthetic oligonucleotide
aagccaucgaauccaucau

SEQ ID NO: 444393 - RNA, 19 nt, Artificial Sequence
  Description of Artificial Sequence: Synthetic oligonucleotide
ucccucaaaacuccucccu

SEQ ID NO: 444394 - RNA, 19 nt, Artificial Sequence
  Description of Artificial Sequence: Synthetic oligonucleotide
aucaucgucaacaaacuuu

SEQ ID NO: 444395 - RNA, 19 nt, Artificial Sequence
  Description of Artificial Sequence: Synthetic oligonucleotide
auacugugggaacgaaucu

SEQ ID NO: 444396 - RNA, 19 nt, Artificial Sequence
  Description of Artificial Sequence: Synthetic oligonucleotide
caugcggcuggccaaaauc

SEQ ID NO: 444397 - RNA, 19 nt, Artificial Sequence
  Description of Artificial Sequence: Synthetic oligonucleotide
uggcaagacguuuguaggu

SEQ ID NO: 444398 - RNA, 19 nt, Artificial Sequence
  Description of Artificial Sequence: Synthetic oligonucleotide
ugcuuauggacuucgucuu

SEQ ID NO: 444399 - RNA, 19 nt, Artificial Sequence
  Description of Artificial Sequence: Synthetic oligonucleotide
uccguuccacuccuuccgg

SEQ ID NO: 444400 - RNA, 19 nt, Artificial Sequence
  Description of Artificial Sequence: Synthetic oligonucleotide
gauacagaacgccucgugu

SEQ ID NO: 444401 - RNA, 19 nt, Artificial Sequence
  Description of Artificial Sequence: Synthetic oligonucleotide
guagggugcguuucguccc

SEQ ID NO: 444402 - RNA, 19 nt, Artificial Sequence
  Description of Artificial Sequence: Synthetic oligonucleotide
cacauugaugauagcaaca

SEQ ID NO: 444403 - RNA, 19 nt, Artificial Sequence
  Description of Artificial Sequence: Synthetic oligonucleotide
caauaauccggugcagagc

SEQ ID NO: 444404 - RNA, 19 nt, Artificial Sequence
  Description of Artificial Sequence: Synthetic oligonucleotide
cucgucuuguacuuggcca

SEQ ID NO: 444405 - RNA, 19 nt, Artificial Sequence
  Description of Artificial Sequence: Synthetic oligonucleotide
ucccgauuaucguuccacc

SEQ ID NO: 444406 - RNA, 19 nt, Artificial Sequence
  Description of Artificial Sequence: Synthetic oligonucleotide
uucaugagaggccgcaguu

SEQ ID NO: 444407 - RNA, 19 nt, Artificial Sequence
  Description of Artificial Sequence: Synthetic oligonucleotide
uuugugggcacgguucucu

SEQ ID NO: 444408 - RNA, 19 nt, Artificial Sequence
  Description of Artificial Sequence: Synthetic oligonucleotide
agaaguccguuccacuccu

SEQ ID NO: 444409 - RNA, 19 nt, Artificial Sequence
  Description of Artificial Sequence: Synthetic oligonucleotide
ucgauugcuccuucagcca

SEQ ID NO: 444410 - RNA, 19 nt, Artificial Sequence
  Description of Artificial Sequence: Synthetic oligonucleotide
caaacgcaccaaguuauag

SEQ ID NO: 444411 - RNA, 19 nt, Artificial Sequence
  Description of Artificial Sequence: Synthetic oligonucleotide
acguauauucccgugcgca

SEQ ID NO: 444412 - RNA, 19 nt, Artificial Sequence
  Description of Artificial Sequence: Synthetic oligonucleotide
cuguucggcgaucuucucc

SEQ ID NO: 444413 - RNA, 19 nt, Artificial Sequence
  Description of Artificial Sequence: Synthetic oligonucleotide
ucagaagcgcauugauacu

SEQ ID NO: 444414 - RNA, 19 nt, Artificial Sequence
  Description of Artificial Sequence: Synthetic oligonucleotide
ucgucccaagaauggaccc

SEQ ID NO: 444415 - RNA, 19 nt, Artificial Sequence
  Description of Artificial Sequence: Synthetic oligonucleotide
gagugugugugugugugug

SEQ ID NO: 444416 - RNA, 19 nt, Artificial Sequence
  Description of Artificial Sequence: Synthetic oligonucleotide
cagaagcgcauugauacug

SEQ ID NO: 444417 - RNA, 19 nt, Artificial Sequence
  Description of Artificial Sequence: Synthetic oligonucleotide
gauucggucacacgugucu

SEQ ID NO: 444418 - RNA, 19 nt, Artificial Sequence
  Description of Artificial Sequence: Synthetic oligonucleotide
accuauuugcagaaugcug

SEQ ID NO: 444419 - RNA, 19 nt, Artificial Sequence
  Description of Artificial Sequence: Synthetic oligonucleotide
uguguguguguggugcaag

SEQ ID NO: 444420 - RNA, 19 nt, Artificial Sequence
  Description of Artificial Sequence: Synthetic oligonucleotide
uuuuggcuaucgauugcuc

SEQ ID NO: 444421 - RNA, 19 nt, Artificial Sequence
  Description of Artificial Sequence: Synthetic oligonucleotide
gaagcgcauugauacugug

SEQ ID NO: 444422 - RNA, 19 nt, Artificial Sequence
  Description of Artificial Sequence: Synthetic oligonucleotide
uuguagguuuucagguuuc

SEQ ID NO: 444423 - RNA, 19 nt, Artificial Sequence
  Description of Artificial Sequence: Synthetic oligonucleotide
guguguguguguguggugc

SEQ ID NO: 444424 - RNA, 19 nt, Artificial Sequence
  Description of Artificial Sequence: Synthetic oligonucleotide
ugauaguguucagagccgu

SEQ ID NO: 444425 - RNA, 19 nt, Artificial Sequence
  Description of Artificial Sequence: Synthetic oligonucleotide
ccaaccuccgacaucuucc

SEQ ID NO: 444426 - RNA, 19 nt, Artificial Sequence
  Description of Artificial Sequence: Synthetic oligonucleotide
auggaaucaucgucaacaa

SEQ ID NO: 444427 - RNA, 19 nt, Artificial Sequence
  Description of Artificial Sequence: Synthetic oligonucleotide
ugcagaaggggucccuccu

SEQ ID NO: 444428 - RNA, 19 nt, Artificial Sequence
  Description of Artificial Sequence: Synthetic oligonucleotide
caaccuccgacaucuuccc

SEQ ID NO: 444429 - RNA, 19 nt, Artificial Sequence
  Description of Artificial Sequence: Synthetic oligonucleotide
uacagaacgccucguguuu

SEQ ID NO: 444430 - RNA, 19 nt, Artificial Sequence
  Description of Artificial Sequence: Synthetic oligonucleotide
ggaaugcuuauggacuucg

SEQ ID NO: 444431 - RNA, 19 nt, Artificial Sequence
  Description of Artificial Sequence: Synthetic oligonucleotide
augauaauguucagccucu

SEQ ID NO: 444432 - RNA, 19 nt, Artificial Sequence
  Description of Artificial Sequence: Synthetic oligonucleotide
acgguucucugagaguuuc

SEQ ID NO: 444433 - RNA, 19 nt, Artificial Sequence
  Description of Artificial Sequence: Synthetic oligonucleotide
uguguguguguguggugca

SEQ ID NO: 444434 - RNA, 19 nt, Artificial Sequence
  Description of Artificial Sequence: Synthetic oligonucleotide
cacguugagguaggaaugc

SEQ ID NO: 444435 - RNA, 19 nt, Artificial Sequence
  Description of Artificial Sequence: Synthetic oligonucleotide
aguuucuaucgaauggaga

SEQ ID NO: 444436 - RNA, 19 nt, Artificial Sequence
  Description of Artificial Sequence: Synthetic oligonucleotide
ucguuccaccuauuugcag

SEQ ID NO: 444437 - RNA, 19 nt, Artificial Sequence
  Description of Artificial Sequence: Synthetic oligonucleotide
gucaaaugcagaagggguc

SEQ ID NO: 444438 - RNA, 19 nt, Artificial Sequence
  Description of Artificial Sequence: Synthetic oligonucleotide
agguaggaaugcuuaugga

SEQ ID NO: 444439 - RNA, 19 nt, Artificial Sequence
  Description of Artificial Sequence: Synthetic oligonucleotide
gcagagccgaaucaguccc

SEQ ID NO: 444440 - RNA, 19 nt, Artificial Sequence
  Description of Artificial Sequence: Synthetic oligonucleotide
agguagggugcguuucguc

SEQ ID NO: 444441 - RNA, 19 nt, Artificial Sequence
  Description of Artificial Sequence: Synthetic oligonucleotide
acaauauuggagccuccuu

SEQ ID NO: 444442 - RNA, 19 nt, Artificial Sequence
  Description of Artificial Sequence: Synthetic oligonucleotide
uguguguguguguguggug

SEQ ID NO: 444443 - RNA, 19 nt, Artificial Sequence
  Description of Artificial Sequence: Synthetic oligonucleotide
cugcuuuauggcaagacgu

SEQ ID NO: 444444 - RNA, 19 nt, Artificial Sequence
  Description of Artificial Sequence: Synthetic oligonucleotide
acugugggaacgaaucugu

SEQ ID NO: 444445 - RNA, 19 nt, Artificial Sequence
  Description of Artificial Sequence: Synthetic oligonucleotide
uauucccgugcgcaccaca

SEQ ID NO: 444446 - RNA, 19 nt, Artificial Sequence
  Description of Artificial Sequence: Synthetic oligonucleotide
ucguugcacaugcccaaga

SEQ ID NO: 444447 - RNA, 19 nt, Artificial Sequence
  Description of Artificial Sequence: Synthetic oligonucleotide
acagaacgccucguguuuc

SEQ ID NO: 444448 - RNA, 19 nt, Artificial Sequence
  Description of Artificial Sequence: Synthetic oligonucleotide
aaaugcagaaggggucccu

SEQ ID NO: 444449 - RNA, 19 nt, Artificial Sequence
  Description of Artificial Sequence: Synthetic oligonucleotide
ucguuucaaugaugaacac

SEQ ID NO: 444450 - RNA, 19 nt, Artificial Sequence
  Description of Artificial Sequence: Synthetic oligonucleotide
gaaucaucgucaacaaacu

SEQ ID NO: 444451 - RNA, 19 nt, Artificial Sequence
  Description of Artificial Sequence: Synthetic oligonucleotide
gauaguguucagagccgug

SEQ ID NO: 444452 - RNA, 19 nt, Artificial Sequence
  Description of Artificial Sequence: Synthetic oligonucleotide
acaggccgggguuucagga

SEQ ID NO: 444453 - RNA, 19 nt, Artificial Sequence
  Description of Artificial Sequence: Synthetic oligonucleotide
uuccacaauauuggagccu

SEQ ID NO: 444454 - RNA, 19 nt, Artificial Sequence
  Description of Artificial Sequence: Synthetic oligonucleotide
cccaagaauggucacccgg

SEQ ID NO: 444455 - RNA, 19 nt, Artificial Sequence
  Description of Artificial Sequence: Synthetic oligonucleotide
cuucaauaauccggugcag

SEQ ID NO: 444456 - RNA, 19 nt, Artificial Sequence
  Description of Artificial Sequence: Synthetic oligonucleotide
uaggcagcuuucagacgcc

SEQ ID NO: 444457 - RNA, 19 nt, Artificial Sequence
  Description of Artificial Sequence: Synthetic oligonucleotide
aaaucggaacccggcacau

SEQ ID NO: 444458 - RNA, 19 nt, Artificial Sequence
  Description of Artificial Sequence: Synthetic oligonucleotide
gcaaucccgacucgaacag

SEQ ID NO: 444459 - RNA, 19 nt, Artificial Sequence
  Description of Artificial Sequence: Synthetic oligonucleotide
cucccgauuaucguuccac

SEQ ID NO: 444460 - RNA, 19 nt, Artificial Sequence
  Description of Artificial Sequence: Synthetic oligonucleotide
acguuggacuguaaaucuc

SEQ ID NO: 444461 - RNA, 19 nt, Artificial Sequence
  Description of Artificial Sequence: Synthetic oligonucleotide
ggauacagaacgccucgug

SEQ ID NO: 444462 - RNA, 19 nt, Artificial Sequence
  Description of Artificial Sequence: Synthetic oligonucleotide
agacguuuguagguuuuca

SEQ ID NO: 444463 - RNA, 19 nt, Artificial Sequence
  Description of Artificial Sequence: Synthetic oligonucleotide
cacccgggugucaaagccc

SEQ ID NO: 444464 - RNA, 19 nt, Artificial Sequence
  Description of Artificial Sequence: Synthetic oligonucleotide
ucccaagaauggacccucc

SEQ ID NO: 444465 - RNA, 19 nt, Artificial Sequence
  Description of Artificial Sequence: Synthetic oligonucleotide
gcugaaaucggaacccggc

SEQ ID NO: 444466 - RNA, 19 nt, Artificial Sequence
  Description of Artificial Sequence: Synthetic oligonucleotide
cguuucgucccaagaaugg

SEQ ID NO: 444467 - RNA, 19 nt, Artificial Sequence
  Description of Artificial Sequence: Synthetic oligonucleotide
uucagacgcccuucccggc

SEQ ID NO: 444468 - RNA, 19 nt, Artificial Sequence
  Description of Artificial Sequence: Synthetic oligonucleotide
aacccggcacauuguugga

SEQ ID NO: 444469 - RNA, 19 nt, Artificial Sequence
  Description of Artificial Sequence: Synthetic oligonucleotide
acgugucugugauaguguu

SEQ ID NO: 444470 - RNA, 19 nt, Artificial Sequence
  Description of Artificial Sequence: Synthetic oligonucleotide
cgaugcugaaaucggaacc

SEQ ID NO: 444471 - RNA, 19 nt, Artificial Sequence
  Description of Artificial Sequence: Synthetic oligonucleotide
gugcguuucgucccaagaa

SEQ ID NO: 444472 - RNA, 19 nt, Artificial Sequence
  Description of Artificial Sequence: Synthetic oligonucleotide
cccaucguuucaaugauga

SEQ ID NO: 444473 - RNA, 19 nt, Artificial Sequence
  Description of Artificial Sequence: Synthetic oligonucleotide
uugcaacgggcacucccga

SEQ ID NO: 444474 - RNA, 19 nt, Artificial Sequence
  Description of Artificial Sequence: Synthetic oligonucleotide
ggugcuccaaguacuucgg

SEQ ID NO: 444475 - RNA, 19 nt, Artificial Sequence
  Description of Artificial Sequence: Synthetic oligonucleotide
cacguuggacuguaaaucu

SEQ ID NO: 444476 - RNA, 19 nt, Artificial Sequence
  Description of Artificial Sequence: Synthetic oligonucleotide
guuucgucccaagaaugga

SEQ ID NO: 444477 - RNA, 19 nt, Artificial Sequence
  Description of Artificial Sequence: Synthetic oligonucleotide
accgcaagccaaggcacuc

SEQ ID NO: 444478 - RNA, 19 nt, Artificial Sequence
  Description of Artificial Sequence: Synthetic oligonucleotide
gguguaguuuacacugcag

SEQ ID NO: 444479 - RNA, 19 nt, Artificial Sequence
  Description of Artificial Sequence: Synthetic oligonucleotide
ucggaacccggcacauugu

SEQ ID NO: 444480 - RNA, 19 nt, Artificial Sequence
  Description of Artificial Sequence: Synthetic oligonucleotide
ucgcaccgcaagccaaggc

SEQ ID NO: 444481 - RNA, 19 nt, Artificial Sequence
  Description of Artificial Sequence: Synthetic oligonucleotide
ugcuuuccuccccaaccau

SEQ ID NO: 444482 - RNA, 19 nt, Artificial Sequence
  Description of Artificial Sequence: Synthetic oligonucleotide
gugaugcccaaacgcacca

SEQ ID NO: 444483 - RNA, 19 nt, Artificial Sequence
  Description of Artificial Sequence: Synthetic oligonucleotide
agccaucgaauccaucaua

SEQ ID NO: 444484 - RNA, 19 nt, Artificial Sequence
  Description of Artificial Sequence: Synthetic oligonucleotide
cccgacucgaacagcagag

SEQ ID NO: 444485 - RNA, 19 nt, Artificial Sequence
  Description of Artificial Sequence: Synthetic oligonucleotide
acccacguuggacuguaaa

SEQ ID NO: 444486 - RNA, 19 nt, Artificial Sequence
  Description of Artificial Sequence: Synthetic oligonucleotide
cacaggccgggguuucagg

SEQ ID NO: 444487 - RNA, 19 nt, Artificial Sequence
  Description of Artificial Sequence: Synthetic oligonucleotide
cugaguauaaggccccucu

SEQ ID NO: 444488 - RNA, 19 nt, Artificial Sequence
  Description of Artificial Sequence: Synthetic oligonucleotide
agacgcccuucccggcugc

SEQ ID NO: 444489 - RNA, 19 nt, Artificial Sequence
  Description of Artificial Sequence: Synthetic oligonucleotide
acgggcacucccgauuauc

SEQ ID NO: 444490 - RNA, 19 nt, Artificial Sequence
  Description of Artificial Sequence: Synthetic oligonucleotide
agaagcgcauugauacugu

SEQ ID NO: 444491 - RNA, 19 nt, Artificial Sequence
  Description of Artificial Sequence: Synthetic oligonucleotide
cacucccgauuaucguucc

SEQ ID NO: 444492 - RNA, 19 nt, Artificial Sequence
  Description of Artificial Sequence: Synthetic oligonucleotide
auagcucgucuuguacuug

SEQ ID NO: 444493 - RNA, 19 nt, Artificial Sequence
  Description of Artificial Sequence: Synthetic oligonucleotide
uugauacugugggaacgaa

SEQ ID NO: 444494 - RNA, 19 nt, Artificial Sequence
  Description of Artificial Sequence: Synthetic oligonucleotide
gucacccgggugucaaagc

SEQ ID NO: 444495 - RNA, 19 nt, Artificial Sequence
  Description of Artificial Sequence: Synthetic oligonucleotide
cucccgugagacuuccguc

SEQ ID NO: 444496 - RNA, 19 nt, Artificial Sequence
  Description of Artificial Sequence: Synthetic oligonucleotide
ccacccaucguuucaauga

SEQ ID NO: 444497 - RNA, 19 nt, Artificial Sequence
  Description of Artificial Sequence: Synthetic oligonucleotide
caaauccaccaacgaucag

SEQ ID NO: 444498 - RNA, 19 nt, Artificial Sequence
  Description of Artificial Sequence: Synthetic oligonucleotide
ccacguugagguaggaaug

SEQ ID NO: 444499 - RNA, 19 nt, Artificial Sequence
  Description of Artificial Sequence: Synthetic oligonucleotide
uuacggcuucaugaaaguu

SEQ ID NO: 444500 - RNA, 19 nt, Artificial Sequence
  Description of Artificial Sequence: Synthetic oligonucleotide
ccacaguauccacccaucg

SEQ ID NO: 444501 - RNA, 19 nt, Artificial Sequence
  Description of Artificial Sequence: Synthetic oligonucleotide
auaauccggugcagagccg

SEQ ID NO: 444502 - RNA, 19 nt, Artificial Sequence
  Description of Artificial Sequence: Synthetic oligonucleotide
cgacucgaacagcagagcg

SEQ ID NO: 444503 - RNA, 19 nt, Artificial Sequence
  Description of Artificial Sequence: Synthetic oligonucleotide
cguuucaaugaugaacacc

SEQ ID NO: 444504 - RNA, 19 nt, Artificial Sequence
  Description of Artificial Sequence: Synthetic oligonucleotide
aucguuccaccuauuugca

SEQ ID NO: 444505 - RNA, 19 nt, Artificial Sequence
  Description of Artificial Sequence: Synthetic oligonucleotide
uccauagcucuagcagaga

SEQ ID NO: 444506 - RNA, 19 nt, Artificial Sequence
  Description of Artificial Sequence: Synthetic oligonucleotide
ucuccgugauccacuccau

SEQ ID NO: 444507 - RNA, 19 nt, Artificial Sequence
  Description of Artificial Sequence: Synthetic oligonucleotide
cuuacggcuucaugaaagu

SEQ ID NO: 444508 - RNA, 19 nt, Artificial Sequence
  Description of Artificial Sequence: Synthetic oligonucleotide
gcucgucuuguacuuggcc

SEQ ID NO: 444509 - RNA, 19 nt, Artificial Sequence
  Description of Artificial Sequence: Synthetic oligonucleotide
gucccaagaauggacccuc

SEQ ID NO: 444510 - RNA, 19 nt, Artificial Sequence
  Description of Artificial Sequence: Synthetic oligonucleotide
acgccucguguuucucccg

SEQ ID NO: 444511 - RNA, 19 nt, Artificial Sequence
  Description of Artificial Sequence: Synthetic oligonucleotide
ggugcguuucgucccaaga

SEQ ID NO: 444512 - RNA, 19 nt, Artificial Sequence
  Description of Artificial Sequence: Synthetic oligonucleotide
gccaaggcacucaccaagg

SEQ ID NO: 444513 - RNA, 19 nt, Artificial Sequence
  Description of Artificial Sequence: Synthetic oligonucleotide
ccgaugcugaaaucggaac

SEQ ID NO: 444514 - RNA, 19 nt, Artificial Sequence
  Description of Artificial Sequence: Synthetic oligonucleotide
ugaacacccggcgcuuggu

SEQ ID NO: 444515 - RNA, 19 nt, Artificial Sequence
  Description of Artificial Sequence: Synthetic oligonucleotide
cuuuggcgaagccaucgaa

SEQ ID NO: 444516 - RNA, 19 nt, Artificial Sequence
  Description of Artificial Sequence: Synthetic oligonucleotide
uuuguacagccugggucau

SEQ ID NO: 444517 - RNA, 19 nt, Artificial Sequence
  Description of Artificial Sequence: Synthetic oligonucleotide
gccuaccacguugagguag

SEQ ID NO: 444518 - RNA, 19 nt, Artificial Sequence
  Description of Artificial Sequence: Synthetic oligonucleotide
ggcgaagccaucgaaucca

SEQ ID NO: 444519 - RNA, 19 nt, Artificial Sequence
  Description of Artificial Sequence: Synthetic oligonucleotide
cucguugcacaugcccaag

SEQ ID NO: 444520 - RNA, 19 nt, Artificial Sequence
  Description of Artificial Sequence: Synthetic oligonucleotide
caaucccgacucgaacagc

SEQ ID NO: 444521 - RNA, 19 nt, Artificial Sequence
  Description of Artificial Sequence: Synthetic oligonucleotide
accaugccuaccacguuga

SEQ ID NO: 444522 - RNA, 19 nt, Artificial Sequence
  Description of Artificial Sequence: Synthetic oligonucleotide
uuggcucccgugagacuuc

SEQ ID NO: 444523 - RNA, 19 nt, Artificial Sequence
  Description of Artificial Sequence: Synthetic oligonucleotide
ugcaacgggcacucccgau

SEQ ID NO: 444524 - RNA, 19 nt, Artificial Sequence
  Description of Artificial Sequence: Synthetic oligonucleotide
auauucccgugcgcaccac

SEQ ID NO: 444525 - RNA, 19 nt, Artificial Sequence
  Description of Artificial Sequence: Synthetic oligonucleotide
acccggcacauuguuggag

SEQ ID NO: 444526 - RNA, 19 nt, Artificial Sequence
  Description of Artificial Sequence: Synthetic oligonucleotide
acguugagguaggaaugcu

SEQ ID NO: 444527 - RNA, 19 nt, Artificial Sequence
  Description of Artificial Sequence: Synthetic oligonucleotide
uuuugugggcacgguucuc

SEQ ID NO: 444528 - RNA, 19 nt, Artificial Sequence
  Description of Artificial Sequence: Synthetic oligonucleotide
aacgggcacucccgauuau

SEQ ID NO: 444529 - RNA, 19 nt, Artificial Sequence
  Description of Artificial Sequence: Synthetic oligonucleotide
gucuuacggcuucaugaaa

SEQ ID NO: 444530 - RNA, 19 nt, Artificial Sequence
  Description of Artificial Sequence: Synthetic oligonucleotide
cucgcaccgcaagccaagg

SEQ ID NO: 444531 - RNA, 19 nt, Artificial Sequence
  Description of Artificial Sequence: Synthetic oligonucleotide
uggacccuccuuguccagu

SEQ ID NO: 444532 - RNA, 19 nt, Artificial Sequence
  Description of Artificial Sequence: Synthetic oligonucleotide
ggcgaucuucuccaaaugu

SEQ ID NO: 444533 - RNA, 19 nt, Artificial Sequence
  Description of Artificial Sequence: Synthetic oligonucleotide
ggucacccgggugucaaag

SEQ ID NO: 444534 - RNA, 19 nt, Artificial Sequence
  Description of Artificial Sequence: Synthetic oligonucleotide
gcguuucgucccaagaaug

SEQ ID NO: 444535 - RNA, 19 nt, Artificial Sequence
  Description of Artificial Sequence: Synthetic oligonucleotide
cuucaugagaggccgcagu

SEQ ID NO: 444536 - RNA, 19 nt, Artificial Sequence
  Description of Artificial Sequence: Synthetic oligonucleotide
ugccugaaucagacacauc

SEQ ID NO: 444537 - RNA, 19 nt, Artificial Sequence
  Description of Artificial Sequence: Synthetic oligonucleotide
agagccgaaucagucccaa

SEQ ID NO: 444538 - RNA, 19 nt, Artificial Sequence
  Description of Artificial Sequence: Synthetic oligonucleotide
cgggcacucccgauuaucg

SEQ ID NO: 444539 - RNA, 19 nt, Artificial Sequence
  Description of Artificial Sequence: Synthetic oligonucleotide
acccgggugucaaagccca

SEQ ID NO: 444540 - RNA, 19 nt, Artificial Sequence
  Description of Artificial Sequence: Synthetic oligonucleotide
caguagcaggaaccauaac

SEQ ID NO: 444541 - RNA, 19 nt, Artificial Sequence
  Description of Artificial Sequence: Synthetic oligonucleotide
cguauauucccgugcgcac

SEQ ID NO: 444542 - RNA, 19 nt, Artificial Sequence
  Description of Artificial Sequence: Synthetic oligonucleotide
gcuaucgauugcuccuuca

SEQ ID NO: 444543 - RNA, 19 nt, Artificial Sequence
  Description of Artificial Sequence: Synthetic oligonucleotide
ucggagucuuacggcuuca

SEQ ID NO: 444544 - RNA, 19 nt, Artificial Sequence
  Description of Artificial Sequence: Synthetic oligonucleotide
ggcauugcaacgggcacuc

SEQ ID NO: 444545 - RNA, 19 nt, Artificial Sequence
  Description of Artificial Sequence: Synthetic oligonucleotide
cagcgacaccacacaggcc

SEQ ID NO: 444546 - RNA, 19 nt, Artificial Sequence
  Description of Artificial Sequence: Synthetic oligonucleotide
uggcuaucgauugcuccuu

SEQ ID NO: 444547 - RNA, 19 nt, Artificial Sequence
  Description of Artificial Sequence: Synthetic oligonucleotide
ccauccucgcaccgcaagc

SEQ ID NO: 444548 - RNA, 19 nt, Artificial Sequence
  Description of Artificial Sequence: Synthetic oligonucleotide
ccgugcgcaccacagcacg

SEQ ID NO: 444549 - RNA, 19 nt, Artificial Sequence
  Description of Artificial Sequence: Synthetic oligonucleotide
aaucggaacccggcacauu

SEQ ID NO: 444550 - RNA, 19 nt, Artificial Sequence
  Description of Artificial Sequence: Synthetic oligonucleotide
caccaaggccaaguaacca

SEQ ID NO: 444551 - RNA, 19 nt, Artificial Sequence
  Description of Artificial Sequence: Synthetic oligonucleotide
gcuggccaaaauccuguca

SEQ ID NO: 444552 - RNA, 19 nt, Artificial Sequence
  Description of Artificial Sequence: Synthetic oligonucleotide
cugagaguuucaagcacau

SEQ ID NO: 444553 - RNA, 19 nt, Artificial Sequence
  Description of Artificial Sequence: Synthetic oligonucleotide
cagacgcccuucccggcug

SEQ ID NO: 444554 - RNA, 19 nt, Artificial Sequence
  Description of Artificial Sequence: Synthetic oligonucleotide
ggaccccuucaguuucucc

SEQ ID NO: 444555 - RNA, 19 nt, Artificial Sequence
  Description of Artificial Sequence: Synthetic oligonucleotide
cguuuguagguuuucaggu

SEQ ID NO: 444556 - RNA, 19 nt, Artificial Sequence
  Description of Artificial Sequence: Synthetic oligonucleotide
guguguguguguguguggu

SEQ ID NO: 444557 - RNA, 19 nt, Artificial Sequence
  Description of Artificial Sequence: Synthetic oligonucleotide
uggcucccgugagacuucc

SEQ ID NO: 444558 - RNA, 19 nt, Artificial Sequence
  Description of Artificial Sequence: Synthetic oligonucleotide
uagcucuagcagagauuuu

SEQ ID NO: 444559 - RNA, 19 nt, Artificial Sequence
  Description of Artificial Sequence: Synthetic oligonucleotide
gcccaaacgcaccaaguua

SEQ ID NO: 444560 - RNA, 19 nt, Artificial Sequence
  Description of Artificial Sequence: Synthetic oligonucleotide
gaaugcuuauggacuucgu

SEQ ID NO: 444561 - RNA, 19 nt, Artificial Sequence
  Description of Artificial Sequence: Synthetic oligonucleotide
accaaguuauaggcagcuu

SEQ ID NO: 444562 - RNA, 19 nt, Artificial Sequence
  Description of Artificial Sequence: Synthetic oligonucleotide
cuggauaguggucuucauu

SEQ ID NO: 444563 - RNA, 19 nt, Artificial Sequence
  Description of Artificial Sequence: Synthetic oligonucleotide
ccgccgaucacacacaagu

SEQ ID NO: 444564 - RNA, 19 nt, Artificial Sequence
  Description of Artificial Sequence: Synthetic oligonucleotide
ggucacacgugucugugau

SEQ ID NO: 444565 - RNA, 19 nt, Artificial Sequence
  Description of Artificial Sequence: Synthetic oligonucleotide
cauccccgccgcuggucag

SEQ ID NO: 444566 - RNA, 19 nt, Artificial Sequence
  Description of Artificial Sequence: Synthetic oligonucleotide
cgauugcuccuucagccac

SEQ ID NO: 444567 - RNA, 19 nt, Artificial Sequence
  Description of Artificial Sequence: Synthetic oligonucleotide
caccgauggcuuugccauc

SEQ ID NO: 444568 - RNA, 19 nt, Artificial Sequence
  Description of Artificial Sequence: Synthetic oligonucleotide
agcagagcgcacagcugca

SEQ ID NO: 444569 - RNA, 19 nt, Artificial Sequence
  Description of Artificial Sequence: Synthetic oligonucleotide
caucaacaacuucaauaau

SEQ ID NO: 444570 - RNA, 19 nt, Artificial Sequence
  Description of Artificial Sequence: Synthetic oligonucleotide
ccucgcaccgcaagccaag

SEQ ID NO: 444571 - RNA, 19 nt, Artificial Sequence
  Description of Artificial Sequence: Synthetic oligonucleotide
gccucguguuucucccggg

SEQ ID NO: 444572 - RNA, 19 nt, Artificial Sequence
  Description of Artificial Sequence: Synthetic oligonucleotide
gcaccgcaagccaaggcac

SEQ ID NO: 444573 - RNA, 19 nt, Artificial Sequence
  Description of Artificial Sequence: Synthetic oligonucleotide
cagagccgaaucaguccca

SEQ ID NO: 444574 - RNA, 19 nt, Artificial Sequence
  Description of Artificial Sequence: Synthetic oligonucleotide
gcacucccgauuaucguuc

SEQ ID NO: 444575 - RNA, 19 nt, Artificial Sequence
  Description of Artificial Sequence: Synthetic oligonucleotide
uggucacccgggugucaaa

SEQ ID NO: 444576 - RNA, 19 nt, Artificial Sequence
  Description of Artificial Sequence: Synthetic oligonucleotide
cuuauggacuucgucuuuu

SEQ ID NO: 444577 - RNA, 19 nt, Artificial Sequence
  Description of Artificial Sequence: Synthetic oligonucleotide
acgcccuucccggcugcgg

SEQ ID NO: 444578 - RNA, 19 nt, Artificial Sequence
  Description of Artificial Sequence: Synthetic oligonucleotide
cccaaacgcaccaaguuau

SEQ ID NO: 444579 - RNA, 19 nt, Artificial Sequence
  Description of Artificial Sequence: Synthetic oligonucleotide
gaaggggucccuccucguu

SEQ ID NO: 444580 - RNA, 19 nt, Artificial Sequence
  Description of Artificial Sequence: Synthetic oligonucleotide
ccuugggcauccccgccgc

SEQ ID NO: 444581 - RNA, 19 nt, Artificial Sequence
  Description of Artificial Sequence: Synthetic oligonucleotide
ccgauuaucguuccaccua

SEQ ID NO: 444582 - RNA, 19 nt, Artificial Sequence
  Description of Artificial Sequence: Synthetic oligonucleotide
gugcgcaccacagcacgga

SEQ ID NO: 444583 - RNA, 19 nt, Artificial Sequence
  Description of Artificial Sequence: Synthetic oligonucleotide
ugccuaccacguugaggua

SEQ ID NO: 444584 - RNA, 19 nt, Artificial Sequence
  Description of Artificial Sequence: Synthetic oligonucleotide
gggugcguuucgucccaag

SEQ ID NO: 444585 - RNA, 19 nt, Artificial Sequence
  Description of Artificial Sequence: Synthetic oligonucleotide
gucacacgugucugugaua

SEQ ID NO: 444586 - RNA, 19 nt, Artificial Sequence
  Description of Artificial Sequence: Synthetic oligonucleotide
cgcauugauacugugggaa

SEQ ID NO: 444587 - RNA, 19 nt, Artificial Sequence
  Description of Artificial Sequence: Synthetic oligonucleotide
ccgggugucaaagcccagc

SEQ ID NO: 444588 - RNA, 19 nt, Artificial Sequence
  Description of Artificial Sequence: Synthetic oligonucleotide
ccaucgaauccaucauaga

SEQ ID NO: 444589 - RNA, 19 nt, Artificial Sequence
  Description of Artificial Sequence: Synthetic oligonucleotide
ccggcacauuguuggagac

SEQ ID NO: 444590 - RNA, 19 nt, Artificial Sequence
  Description of Artificial Sequence: Synthetic oligonucleotide
cacccaucguuucaaugau

SEQ ID NO: 444591 - RNA, 19 nt, Artificial Sequence
  Description of Artificial Sequence: Synthetic oligonucleotide
ccaacgaucagaagcgcau

SEQ ID NO: 444592 - RNA, 19 nt, Artificial Sequence
  Description of Artificial Sequence: Synthetic oligonucleotide
cccgaugcugaaaucggaa

SEQ ID NO: 444593 - RNA, 19 nt, Artificial Sequence
  Description of Artificial Sequence: Synthetic oligonucleotide
aaccauccucgcaccgcaa

SEQ ID NO: 444594 - RNA, 19 nt, Artificial Sequence
  Description of Artificial Sequence: Synthetic oligonucleotide
ggcuaucgauugcuccuuc

SEQ ID NO: 444595 - RNA, 19 nt, Artificial Sequence
  Description of Artificial Sequence: Synthetic oligonucleotide
cugccccgaugcugaaauc

SEQ ID NO: 444596 - RNA, 19 nt, Artificial Sequence
  Description of Artificial Sequence: Synthetic oligonucleotide
ccacaaugucuccccauca

SEQ ID NO: 444597 - RNA, 19 nt, Artificial Sequence
  Description of Artificial Sequence: Synthetic oligonucleotide
ggcacucccgauuaucguu

SEQ ID NO: 444598 - RNA, 19 nt, Artificial Sequence
  Description of Artificial Sequence: Synthetic oligonucleotide
gcucccgugagacuuccgu

SEQ ID NO: 444599 - RNA, 19 nt, Artificial Sequence
  Description of Artificial Sequence: Synthetic oligonucleotide
gcgcauugauacuguggga

SEQ ID NO: 444600 - RNA, 19 nt, Artificial Sequence
  Description of Artificial Sequence: Synthetic oligonucleotide
cgugcgcaccacagcacgg

SEQ ID NO: 444601 - RNA, 19 nt, Artificial Sequence
  Description of Artificial Sequence: Synthetic oligonucleotide
uuguacagccugggucauu

SEQ ID NO: 444602 - RNA, 19 nt, Artificial Sequence
  Description of Artificial Sequence: Synthetic oligonucleotide
cguuggacuguaaaucucu

SEQ ID NO: 444603 - RNA, 19 nt, Artificial Sequence
  Description of Artificial Sequence: Synthetic oligonucleotide
cagaacgccucguguuucu

SEQ ID NO: 444604 - RNA, 19 nt, Artificial Sequence
  Description of Artificial Sequence: Synthetic oligonucleotide
ccccaaccauccucgcacc

SEQ ID NO: 444605 - RNA, 19 nt, Artificial Sequence
  Description of Artificial Sequence: Synthetic oligonucleotide
guguguguguguggugcaa

SEQ ID NO: 444606 - RNA, 19 nt, Artificial Sequence
  Description of Artificial Sequence: Synthetic oligonucleotide
ccgacucgaacagcagagc

SEQ ID NO: 444607 - RNA, 19 nt, Artificial Sequence
  Description of Artificial Sequence: Synthetic oligonucleotide
gcauccccgccgcugguca

SEQ ID NO: 444608 - RNA, 19 nt, Artificial Sequence
  Description of Artificial Sequence: Synthetic oligonucleotide
cuccgugauccacuccaua

SEQ ID NO: 444609 - RNA, 19 nt, Artificial Sequence
  Description of Artificial Sequence: Synthetic oligonucleotide
ggaagauguuggcucccgu

SEQ ID NO: 444610 - RNA, 19 nt, Artificial Sequence
  Description of Artificial Sequence: Synthetic oligonucleotide
cgccucguguuucucccgg

SEQ ID NO: 444611 - RNA, 19 nt, Artificial Sequence
  Description of Artificial Sequence: Synthetic oligonucleotide
gauuaucguuccaccuauu

SEQ ID NO: 444612 - RNA, 19 nt, Artificial Sequence
  Description of Artificial Sequence: Synthetic oligonucleotide
ccauugccuuuuguacagc

SEQ ID NO: 444613 - RNA, 19 nt, Artificial Sequence
  Description of Artificial Sequence: Synthetic oligonucleotide
cccgauuaucguuccaccu

SEQ ID NO: 444614 - RNA, 19 nt, Artificial Sequence
  Description of Artificial Sequence: Synthetic oligonucleotide
ggcacucaccaaggccaag

SEQ ID NO: 444615 - RNA, 19 nt, Artificial Sequence
  Description of Artificial Sequence: Synthetic oligonucleotide
cccacguuggacuguaaau

SEQ ID NO: 444616 - RNA, 19 nt, Artificial Sequence
  Description of Artificial Sequence: Synthetic oligonucleotide
ccuuuggcgaagccaucga

SEQ ID NO: 444617 - RNA, 19 nt, Artificial Sequence
  Description of Artificial Sequence: Synthetic oligonucleotide
caccgcaagccaaggcacu

SEQ ID NO: 444618 - RNA, 19 nt, Artificial Sequence
  Description of Artificial Sequence: Synthetic oligonucleotide
gcaagacguuuguagguuu

SEQ ID NO: 444619 - RNA, 19 nt, Artificial Sequence
  Description of Artificial Sequence: Synthetic oligonucleotide
ggcaagacguuuguagguu

SEQ ID NO: 444620 - RNA, 19 nt, Artificial Sequence
  Description of Artificial Sequence: Synthetic oligonucleotide
ccaugccuaccacguugag

SEQ ID NO: 444621 - RNA, 19 nt, Artificial Sequence
  Description of Artificial Sequence: Synthetic oligonucleotide
gcgaucuucuccaaauguu

SEQ ID NO: 444622 - RNA, 19 nt, Artificial Sequence
  Description of Artificial Sequence: Synthetic oligonucleotide
ccccuucaguuucuccgug

SEQ ID NO: 444623 - RNA, 19 nt, Artificial Sequence
  Description of Artificial Sequence: Synthetic oligonucleotide
ccaucguuucaaugaugaa

SEQ ID NO: 444624 - RNA, 19 nt, Artificial Sequence
  Description of Artificial Sequence: Synthetic oligonucleotide
cccgccgaucacacacaag

SEQ ID NO: 444625 - RNA, 19 nt, Artificial Sequence
  Description of Artificial Sequence: Synthetic oligonucleotide
gagccgaaucagucccaau

SEQ ID NO: 444626 - RNA, 19 nt, Artificial Sequence
  Description of Artificial Sequence: Synthetic oligonucleotide
cagcaaguccacucauguu

SEQ ID NO: 444627 - RNA, 19 nt, Artificial Sequence
  Description of Artificial Sequence: Synthetic oligonucleotide
cuaccacguugagguagga

SEQ ID NO: 444628 - RNA, 19 nt, Artificial Sequence
  Description of Artificial Sequence: Synthetic oligonucleotide
cggcgaucuucuccaaaug

SEQ ID NO: 444629 - RNA, 19 nt, Artificial Sequence
  Description of Artificial Sequence: Synthetic oligonucleotide
ccccgaugcugaaaucgga

SEQ ID NO: 444630 - RNA, 19 nt, Artificial Sequence
  Description of Artificial Sequence: Synthetic oligonucleotide
cacucauguuggccaggua

SEQ ID NO: 444631 - RNA, 19 nt, Artificial Sequence
  Description of Artificial Sequence: Synthetic oligonucleotide
ccaaacgcaccaaguuaua

SEQ ID NO: 444632 - RNA, 19 nt, Artificial Sequence
  Description of Artificial Sequence: Synthetic oligonucleotide
gguuucccucaaaacuccu

SEQ ID NO: 444633 - RNA, 19 nt, Artificial Sequence
  Description of Artificial Sequence: Synthetic oligonucleotide
caggccgggguuucaggau

SEQ ID NO: 444634 - RNA, 19 nt, Artificial Sequence
  Description of Artificial Sequence: Synthetic oligonucleotide
cgauuaucguuccaccuau

SEQ ID NO: 444635 - RNA, 19 nt, Artificial Sequence
  Description of Artificial Sequence: Synthetic oligonucleotide
gcuuauggacuucgucuuu

SEQ ID NO: 444636 - RNA, 19 nt, Artificial Sequence
  Description of Artificial Sequence: Synthetic oligonucleotide
ccgaaucagucccaauggu

SEQ ID NO: 444637 - RNA, 19 nt, Artificial Sequence
  Description of Artificial Sequence: Synthetic oligonucleotide
caacgaucagaagcgcauu

SEQ ID NO: 444638 - RNA, 19 nt, Artificial Sequence
  Description of Artificial Sequence: Synthetic oligonucleotide
cacacgugucugugauagu

SEQ ID NO: 444639 - RNA, 19 nt, Artificial Sequence
  Description of Artificial Sequence: Synthetic oligonucleotide
ccaggagaauucuuuuauu

SEQ ID NO: 444640 - RNA, 19 nt, Artificial Sequence
  Description of Artificial Sequence: Synthetic oligonucleotide
ccguuccacuccuuccgga

SEQ ID NO: 444641 - RNA, 19 nt, Artificial Sequence
  Description of Artificial Sequence: Synthetic oligonucleotide
cccgggugucaaagcccag

SEQ ID NO: 444642 - RNA, 19 nt, Artificial Sequence
  Description of Artificial Sequence: Synthetic oligonucleotide
cccaagaauggacccuccu

SEQ ID NO: 444643 - RNA, 19 nt, Artificial Sequence
  Description of Artificial Sequence: Synthetic oligonucleotide
cguugagguaggaaugcuu

SEQ ID NO: 444644 - RNA, 19 nt, Artificial Sequence
  Description of Artificial Sequence: Synthetic oligonucleotide
cuugggcauccccgccgcu

SEQ ID NO: 444645 - RNA, 19 nt, Artificial Sequence
  Description of Artificial Sequence: Synthetic oligonucleotide
ccaguccaaccuccgacau

SEQ ID NO: 444646 - RNA, 19 nt, Artificial Sequence
  Description of Artificial Sequence: Synthetic oligonucleotide
gccgggguuucaggaucac

SEQ ID NO: 444647 - RNA, 19 nt, Artificial Sequence
  Description of Artificial Sequence: Synthetic oligonucleotide
cacccggcgcuugguccca

SEQ ID NO: 444648 - RNA, 19 nt, Artificial Sequence
  Description of Artificial Sequence: Synthetic oligonucleotide
gagccgugucugccccgau

SEQ ID NO: 444649 - RNA, 19 nt, Artificial Sequence
  Description of Artificial Sequence: Synthetic oligonucleotide
ccccgccgaucacacacaa

SEQ ID NO: 444650 - RNA, 19 nt, Artificial Sequence
  Description of Artificial Sequence: Synthetic oligonucleotide
gcgaagccaucgaauccau

SEQ ID NO: 444651 - RNA, 19 nt, Artificial Sequence
  Description of Artificial Sequence: Synthetic oligonucleotide
gcagaaugcuggagacauu

SEQ ID NO: 444652 - RNA, 19 nt, Artificial Sequence
  Description of Artificial Sequence: Synthetic oligonucleotide
ccccaugcggcuggccaaa

SEQ ID NO: 444653 - RNA, 19 nt, Artificial Sequence
  Description of Artificial Sequence: Synthetic oligonucleotide
ccaugcggcuggccaaaau

SEQ ID NO: 444654 - RNA, 19 nt, Artificial Sequence
  Description of Artificial Sequence: Synthetic oligonucleotide
cgccgcuggucaggacacc

SEQ ID NO: 444655 - RNA, 19 nt, Artificial Sequence
  Description of Artificial Sequence: Synthetic oligonucleotide
ccgugucugccccgaugcu

SEQ ID NO: 444656 - RNA, 19 nt, Artificial Sequence
  Description of Artificial Sequence: Synthetic oligonucleotide
aauuaaaugugguuucugg

SEQ ID NO: 444657 - RNA, 19 nt, Artificial Sequence
  Description of Artificial Sequence: Synthetic oligonucleotide
aauccuaugggcucugcac

SEQ ID NO: 444658 - RNA, 19 nt, Artificial Sequence
  Description of Artificial Sequence: Synthetic oligonucleotide
agcgcuacaguacagacgg

SEQ ID NO: 444659 - RNA, 19 nt, Artificial Sequence
  Description of Artificial Sequence: Synthetic oligonucleotide
aaggcaaucuuucugcguc

SEQ ID NO: 444660 - RNA, 19 nt, Artificial Sequence
  Description of Artificial Sequence: Synthetic oligonucleotide
aaaguauaggcagaggcag

SEQ ID NO: 444661 - RNA, 19 nt, Artificial Sequence
  Description of Artificial Sequence: Synthetic oligonucleotide
uccaguuugcaaaacaggc

SEQ ID NO: 444662 - RNA, 19 nt, Artificial Sequence
  Description of Artificial Sequence: Synthetic oligonucleotide
ugugguuucuggauuagag

SEQ ID NO: 444663 - RNA, 19 nt, Artificial Sequence
  Description of Artificial Sequence: Synthetic oligonucleotide
uauggguagaguuaggagu

SEQ ID NO: 444664 - RNA, 19 nt, Artificial Sequence
  Description of Artificial Sequence: Synthetic oligonucleotide
uguugcaguacucagaaua

SEQ ID NO: 444665 - RNA, 19 nt, Artificial Sequence
  Description of Artificial Sequence: Synthetic oligonucleotide
aauaacacgacaaaaucau

SEQ ID NO: 444666 - RNA, 19 nt, Artificial Sequence
  Description of Artificial Sequence: Synthetic oligonucleotide
uuuguaguacagcacgucc

SEQ ID NO: 444667 - RNA, 19 nt, Artificial Sequence
  Description of Artificial Sequence: Synthetic oligonucleotide
uacacaguugacuguaccg

SEQ ID NO: 444668 - RNA, 19 nt, Artificial Sequence
  Description of Artificial Sequence: Synthetic oligonucleotide
uauaugugcagccacccca

SEQ ID NO: 444669 - RNA, 19 nt, Artificial Sequence
  Description of Artificial Sequence: Synthetic oligonucleotide
cuaaccuggaaccagguac

SEQ ID NO: 444670 - RNA, 19 nt, Artificial Sequence
  Description of Artificial Sequence: Synthetic oligonucleotide
acaguagaugagcugacgg

SEQ ID NO: 444671 - RNA, 19 nt, Artificial Sequence
  Description of Artificial Sequence: Synthetic oligonucleotide
aaggguggaugcuugugac

SEQ ID NO: 444672 - RNA, 19 nt, Artificial Sequence
  Description of Artificial Sequence: Synthetic oligonucleotide
agguccaaaguauaggcag

SEQ ID NO: 444673 - RNA, 19 nt, Artificial Sequence
  Description of Artificial Sequence: Synthetic oligonucleotide
acaaagugcugucagguug

SEQ ID NO: 444674 - RNA, 19 nt, Artificial Sequence
  Description of Artificial Sequence: Synthetic oligonucleotide
gaguagaugaguuccgagc

SEQ ID NO: 444675 - RNA, 19 nt, Artificial Sequence
  Description of Artificial Sequence: Synthetic oligonucleotide
aguagaugaguuccgagcu

SEQ ID NO: 444676 - RNA, 19 nt, Artificial Sequence
  Description of Artificial Sequence: Synthetic oligonucleotide
uccauuguuagagaaauaa

SEQ ID NO: 444677 - RNA, 19 nt, Artificial Sequence
  Description of Artificial Sequence: Synthetic oligonucleotide
uucugcgucauuaacaauu

SEQ ID NO: 444678 - RNA, 19 nt, Artificial Sequence
  Description of Artificial Sequence: Synthetic oligonucleotide
uaugaaauuaaaugugguu

SEQ ID NO: 444679 - RNA, 19 nt, Artificial Sequence
  Description of Artificial Sequence: Synthetic oligonucleotide
cacgacaaaaucauaauga

SEQ ID NO: 444680 - RNA, 19 nt, Artificial Sequence
  Description of Artificial Sequence: Synthetic oligonucleotide
uaagcuuuccaaagaacgu

SEQ ID NO: 444681 - RNA, 19 nt, Artificial Sequence
  Description of Artificial Sequence: Synthetic oligonucleotide
caauucuccauuguuagag

SEQ ID NO: 444682 - RNA, 19 nt, Artificial Sequence
  Description of Artificial Sequence: Synthetic oligonucleotide
ucacuaaccuggaaccagg

SEQ ID NO: 444683 - RNA, 19 nt, Artificial Sequence
  Description of Artificial Sequence: Synthetic oligonucleotide
cucacuuucggaagggugc

SEQ ID NO: 444684 - RNA, 19 nt, Artificial Sequence
  Description of Artificial Sequence: Synthetic oligonucleotide
ugcgucauuaacaauucuc

SEQ ID NO: 444685 - RNA, 19 nt, Artificial Sequence
  Description of Artificial Sequence: Synthetic oligonucleotide
uaggagugcacaauucuug

SEQ ID NO: 444686 - RNA, 19 nt, Artificial Sequence
  Description of Artificial Sequence: Synthetic oligonucleotide
aacacgacaaaaucauaau

SEQ ID NO: 444687 - RNA, 19 nt, Artificial Sequence
  Description of Artificial Sequence: Synthetic oligonucleotide
aguccuuauggcuucucac

SEQ ID NO: 444688 - RNA, 19 nt, Artificial Sequence
  Description of Artificial Sequence: Synthetic oligonucleotide
uuuuacaguagaugagcug

SEQ ID NO: 444689 - RNA, 19 nt, Artificial Sequence
  Description of Artificial Sequence: Synthetic oligonucleotide
gacauuggugcgcaucugg

SEQ ID NO: 444690 - RNA, 19 nt, Artificial Sequence
  Description of Artificial Sequence: Synthetic oligonucleotide
gaauagaucuggaagucug

SEQ ID NO: 444691 - RNA, 19 nt, Artificial Sequence
  Description of Artificial Sequence: Synthetic oligonucleotide
acacgacaaaaucauaaug

SEQ ID NO: 444692 - RNA, 19 nt, Artificial Sequence
  Description of Artificial Sequence: Synthetic oligonucleotide
aguagaugagcugacgguc

SEQ ID NO: 444693 - RNA, 19 nt, Artificial Sequence
  Description of Artificial Sequence: Synthetic oligonucleotide
uuccaaagaacguccagca

SEQ ID NO: 444694 - RNA, 19 nt, Artificial Sequence
  Description of Artificial Sequence: Synthetic oligonucleotide
cuugacgcucacauggagg

SEQ ID NO: 444695 - RNA, 19 nt, Artificial Sequence
  Description of Artificial Sequence: Synthetic oligonucleotide
aggagugcacaauucuugg

SEQ ID NO: 444696 - RNA, 19 nt, Artificial Sequence
  Description of Artificial Sequence: Synthetic oligonucleotide
agcuacaggggacugucac

SEQ ID NO: 444697 - RNA, 19 nt, Artificial Sequence
  Description of Artificial Sequence: Synthetic oligonucleotide
aaaggacaaguggagagca

SEQ ID NO: 444698 - RNA, 19 nt, Artificial Sequence
  Description of Artificial Sequence: Synthetic oligonucleotide
uguaccuguucacuuccag

SEQ ID NO: 444699 - RNA, 19 nt, Artificial Sequence
  Description of Artificial Sequence: Synthetic oligonucleotide
gaacguccagcacagauga

SEQ ID NO: 444700 - RNA, 19 nt, Artificial Sequence
  Description of Artificial Sequence: Synthetic oligonucleotide
agucggcugaugcugugcc

SEQ ID NO: 444701 - RNA, 19 nt, Artificial Sequence
  Description of Artificial Sequence: Synthetic oligonucleotide
uaaccuggaaccagguaca

SEQ ID NO: 444702 - RNA, 19 nt, Artificial Sequence
  Description of Artificial Sequence: Synthetic oligonucleotide
uaggccacggaauucaguc

SEQ ID NO: 444703 - RNA, 19 nt, Artificial Sequence
  Description of Artificial Sequence: Synthetic oligonucleotide
gaaguuagauggcuuccgc

SEQ ID NO: 444704 - RNA, 19 nt, Artificial Sequence
  Description of Artificial Sequence: Synthetic oligonucleotide
aucacuucgaugacauccc

SEQ ID NO: 444705 - RNA, 19 nt, Artificial Sequence
  Description of Artificial Sequence: Synthetic oligonucleotide
aguacagcacgucccgacg

SEQ ID NO: 444706 - RNA, 19 nt, Artificial Sequence
  Description of Artificial Sequence: Synthetic oligonucleotide
acgacaaaaucauaaugaa

SEQ ID NO: 444707 - RNA, 19 nt, Artificial Sequence
  Description of Artificial Sequence: Synthetic oligonucleotide
aauucaguccuuauggcuu

SEQ ID NO: 444708 - RNA, 19 nt, Artificial Sequence
  Description of Artificial Sequence: Synthetic oligonucleotide
uucggaagggugccagucg

SEQ ID NO: 444709 - RNA, 19 nt, Artificial Sequence
  Description of Artificial Sequence: Synthetic oligonucleotide
ugucagguuguccgguagg

SEQ ID NO: 444710 - RNA, 19 nt, Artificial Sequence
  Description of Artificial Sequence: Synthetic oligonucleotide
ucugcgucauuaacaauuc

SEQ ID NO: 444711 - RNA, 19 nt, Artificial Sequence
  Description of Artificial Sequence: Synthetic oligonucleotide
gagugcaacacugcacucg

SEQ ID NO: 444712 - RNA, 19 nt, Artificial Sequence
  Description of Artificial Sequence: Synthetic oligonucleotide
acggaauucaguccuuaug

SEQ ID NO: 444713 - RNA, 19 nt, Artificial Sequence
  Description of Artificial Sequence: Synthetic oligonucleotide
aguauaggcagaggcagag

SEQ ID NO: 444714 - RNA, 19 nt, Artificial Sequence
  Description of Artificial Sequence: Synthetic oligonucleotide
guuguugcaguacucagaa

SEQ ID NO: 444715 - RNA, 19 nt, Artificial Sequence
  Description of Artificial Sequence: Synthetic oligonucleotide
aacacugcacucgcauugg

SEQ ID NO: 444716 - RNA, 19 nt, Artificial Sequence
  Description of Artificial Sequence: Synthetic oligonucleotide
ggcauaaggacagcuaugg

SEQ ID NO: 444717 - RNA, 19 nt, Artificial Sequence
  Description of Artificial Sequence: Synthetic oligonucleotide
ucuucggucucuccagccc

SEQ ID NO: 444718 - RNA, 19 nt, Artificial Sequence
  Description of Artificial Sequence: Synthetic oligonucleotide
uggguauaugugcagccac

SEQ ID NO: 444719 - RNA, 19 nt, Artificial Sequence
  Description of Artificial Sequence: Synthetic oligonucleotide
ucuuuugcaacagccggca

SEQ ID NO: 444720 - RNA, 19 nt, Artificial Sequence
  Description of Artificial Sequence: Synthetic oligonucleotide
cuacaugcaggccuggcug

SEQ ID NO: 444721 - RNA, 19 nt, Artificial Sequence
  Description of Artificial Sequence: Synthetic oligonucleotide
uguguaacacgggucagcu

SEQ ID NO: 444722 - RNA, 19 nt, Artificial Sequence
  Description of Artificial Sequence: Synthetic oligonucleotide
ugcaacacugcacucgcau

SEQ ID NO: 444723 - RNA, 19 nt, Artificial Sequence
  Description of Artificial Sequence: Synthetic oligonucleotide
caacacugcacucgcauug

SEQ ID NO: 444724 - RNA, 19 nt, Artificial Sequence
  Description of Artificial Sequence: Synthetic oligonucleotide
caguacucagaauagaucu

SEQ ID NO: 444725 - RNA, 19 nt, Artificial Sequence
  Description of Artificial Sequence: Synthetic oligonucleotide
gauguucccgaagauggug

SEQ ID NO: 444726 - RNA, 19 nt, Artificial Sequence
  Description of Artificial Sequence: Synthetic oligonucleotide
uagaguuaggagugcacaa

SEQ ID NO: 444727 - RNA, 19 nt, Artificial Sequence
  Description of Artificial Sequence: Synthetic oligonucleotide
ugaggcuguguaacacggg

SEQ ID NO: 444728 - RNA, 19 nt, Artificial Sequence
  Description of Artificial Sequence: Synthetic oligonucleotide
acuacaugcaggccuggcu

SEQ ID NO: 444729 - RNA, 19 nt, Artificial Sequence
  Description of Artificial Sequence: Synthetic oligonucleotide
caugcuucugaauccuaug

SEQ ID NO: 444730 - RNA, 19 nt, Artificial Sequence
  Description of Artificial Sequence: Synthetic oligonucleotide
gagguacugaccaugcuuc

SEQ ID NO: 444731 - RNA, 19 nt, Artificial Sequence
  Description of Artificial Sequence: Synthetic oligonucleotide
ucacaaagggugucuggca

SEQ ID NO: 444732 - RNA, 19 nt, Artificial Sequence
  Description of Artificial Sequence: Synthetic oligonucleotide
guacacaguugacuguacc

SEQ ID NO: 444733 - RNA, 19 nt, Artificial Sequence
  Description of Artificial Sequence: Synthetic oligonucleotide
uaaggcaaucuuucugcgu

SEQ ID NO: 444734 - RNA, 19 nt, Artificial Sequence
  Description of Artificial Sequence: Synthetic oligonucleotide
cuucggucucuccagcccg

SEQ ID NO: 444735 - RNA, 19 nt, Artificial Sequence
  Description of Artificial Sequence: Synthetic oligonucleotide
acguggguauaugugcagc

SEQ ID NO: 444736 - RNA, 19 nt, Artificial Sequence
  Description of Artificial Sequence: Synthetic oligonucleotide
ggugaguagaaagccaucc

SEQ ID NO: 444737 - RNA, 19 nt, Artificial Sequence
  Description of Artificial Sequence: Synthetic oligonucleotide
gaagucugcuugguguucc

SEQ ID NO: 444738 - RNA, 19 nt, Artificial Sequence
  Description of Artificial Sequence: Synthetic oligonucleotide
gucccgacggagcaggucc

SEQ ID NO: 444739 - RNA, 19 nt, Artificial Sequence
  Description of Artificial Sequence: Synthetic oligonucleotide
uuuaggcuucccuguggcc

SEQ ID NO: 444740 - RNA, 19 nt, Artificial Sequence
  Description of Artificial Sequence: Synthetic oligonucleotide
cuggauuagagaagguaca

SEQ ID NO: 444741 - RNA, 19 nt, Artificial Sequence
  Description of Artificial Sequence: Synthetic oligonucleotide
ggcacuggcggacauacgc

SEQ ID NO: 444742 - RNA, 19 nt, Artificial Sequence
  Description of Artificial Sequence: Synthetic oligonucleotide
guacugaccaugcuucuga

SEQ ID NO: 444743 - RNA, 19 nt, Artificial Sequence
  Description of Artificial Sequence: Synthetic oligonucleotide
ucucgguccuuccccaucu

SEQ ID NO: 444744 - RNA, 19 nt, Artificial Sequence
  Description of Artificial Sequence: Synthetic oligonucleotide
agcucgcucagguguggcc

SEQ ID NO: 444745 - RNA, 19 nt, Artificial Sequence
  Description of Artificial Sequence: Synthetic oligonucleotide
cucaagucuccguuuccgc

SEQ ID NO: 444746 - RNA, 19 nt, Artificial Sequence
  Description of Artificial Sequence: Synthetic oligonucleotide
cuggcucacuuucggaagg

SEQ ID NO: 444747 - RNA, 19 nt, Artificial Sequence
  Description of Artificial Sequence: Synthetic oligonucleotide
cagcgcuacaguacagacg

SEQ ID NO: 444748 - RNA, 19 nt, Artificial Sequence
  Description of Artificial Sequence: Synthetic oligonucleotide
uucucacacucacuagggu

SEQ ID NO: 444749 - RNA, 19 nt, Artificial Sequence
  Description of Artificial Sequence: Synthetic oligonucleotide
ugcuaggccacggaauuca

SEQ ID NO: 444750 - RNA, 19 nt, Artificial Sequence
  Description of Artificial Sequence: Synthetic oligonucleotide
agaauagaucuggaagucu

SEQ ID NO: 444751 - RNA, 19 nt, Artificial Sequence
  Description of Artificial Sequence: Synthetic oligonucleotide
auccauguccagccgaccu

SEQ ID NO: 444752 - RNA, 19 nt, Artificial Sequence
  Description of Artificial Sequence: Synthetic oligonucleotide
gacguggguauaugugcag

SEQ ID NO: 444753 - RNA, 19 nt, Artificial Sequence
  Description of Artificial Sequence: Synthetic oligonucleotide
gcgucauuaacaauucucc

SEQ ID NO: 444754 - RNA, 19 nt, Artificial Sequence
  Description of Artificial Sequence: Synthetic oligonucleotide
guauaugugcagccacccc

SEQ ID NO: 444755 - RNA, 19 nt, Artificial Sequence
  Description of Artificial Sequence: Synthetic oligonucleotide
acucgcauuggggaggaag

SEQ ID NO: 444756 - RNA, 19 nt, Artificial Sequence
  Description of Artificial Sequence: Synthetic oligonucleotide
ugaacauauccucccgcuu

SEQ ID NO: 444757 - RNA, 19 nt, Artificial Sequence
  Description of Artificial Sequence: Synthetic oligonucleotide
auucuugguuccugaccuc

SEQ ID NO: 444758 - RNA, 19 nt, Artificial Sequence
  Description of Artificial Sequence: Synthetic oligonucleotide
ugucuucggucucuccagc

SEQ ID NO: 444759 - RNA, 19 nt, Artificial Sequence
  Description of Artificial Sequence: Synthetic oligonucleotide
guuaggagugcacaauucu

SEQ ID NO: 444760 - RNA, 19 nt, Artificial Sequence
  Description of Artificial Sequence: Synthetic oligonucleotide
ucacuuucggaagggugcc

SEQ ID NO: 444761 - RNA, 19 nt, Artificial Sequence
  Description of Artificial Sequence: Synthetic oligonucleotide
ucugcaacgcggccccacc

SEQ ID NO: 444762 - RNA, 19 nt, Artificial Sequence
  Description of Artificial Sequence: Synthetic oligonucleotide
cacuggcggacauacgccc

SEQ ID NO: 444763 - RNA, 19 nt, Artificial Sequence
  Description of Artificial Sequence: Synthetic oligonucleotide
ugugacgggucagguaucc

SEQ ID NO: 444764 - RNA, 19 nt, Artificial Sequence
  Description of Artificial Sequence: Synthetic oligonucleotide
guuguccgcgggcucaucc

SEQ ID NO: 444765 - RNA, 19 nt, Artificial Sequence
  Description of Artificial Sequence: Synthetic oligonucleotide
aaccagguacacaguugac

SEQ ID NO: 444766 - RNA, 19 nt, Artificial Sequence
  Description of Artificial Sequence: Synthetic oligonucleotide
aguuacaagugggcugggg

SEQ ID NO: 444767 - RNA, 19 nt, Artificial Sequence
  Description of Artificial Sequence: Synthetic oligonucleotide
acuuucggaagggugccag

SEQ ID NO: 444768 - RNA, 19 nt, Artificial Sequence
  Description of Artificial Sequence: Synthetic oligonucleotide
ugucacuaaccuggaacca

SEQ ID NO: 444769 - RNA, 19 nt, Artificial Sequence
  Description of Artificial Sequence: Synthetic oligonucleotide
ucagugcugaggaucucau

SEQ ID NO: 444770 - RNA, 19 nt, Artificial Sequence
  Description of Artificial Sequence: Synthetic oligonucleotide
ucgccaucugcaacgcggc

SEQ ID NO: 444771 - RNA, 19 nt, Artificial Sequence
  Description of Artificial Sequence: Synthetic oligonucleotide
cagcuauggguagaguuag

SEQ ID NO: 444772 - RNA, 19 nt, Artificial Sequence
  Description of Artificial Sequence: Synthetic oligonucleotide
acucacuaggguaaggcaa

SEQ ID NO: 444773 - RNA, 19 nt, Artificial Sequence
  Description of Artificial Sequence: Synthetic oligonucleotide
uacagcacgucccgacgga

SEQ ID NO: 444774 - RNA, 19 nt, Artificial Sequence
  Description of Artificial Sequence: Synthetic oligonucleotide
cuuuguaguacagcacguc

SEQ ID NO: 444775 - RNA, 19 nt, Artificial Sequence
  Description of Artificial Sequence: Synthetic oligonucleotide
cuugugacgggucagguau

SEQ ID NO: 444776 - RNA, 19 nt, Artificial Sequence
  Description of Artificial Sequence: Synthetic oligonucleotide
agcacgucccgacggagca

SEQ ID NO: 444777 - RNA, 19 nt, Artificial Sequence
  Description of Artificial Sequence: Synthetic oligonucleotide
ccauuguuagagaaauaac

SEQ ID NO: 444778 - RNA, 19 nt, Artificial Sequence
  Description of Artificial Sequence: Synthetic oligonucleotide
uuucggaagggugccaguc

SEQ ID NO: 444779 - RNA, 19 nt, Artificial Sequence
  Description of Artificial Sequence: Synthetic oligonucleotide
uggcuugaggcuguguaac

SEQ ID NO: 444780 - RNA, 19 nt, Artificial Sequence
  Description of Artificial Sequence: Synthetic oligonucleotide
gaagggugccagucggcug

SEQ ID NO: 444781 - RNA, 19 nt, Artificial Sequence
  Description of Artificial Sequence: Synthetic oligonucleotide
ugccagucggcugaugcug

SEQ ID NO: 444782 - RNA, 19 nt, Artificial Sequence
  Description of Artificial Sequence: Synthetic oligonucleotide
gguauaugugcagccaccc

SEQ ID NO: 444783 - RNA, 19 nt, Artificial Sequence
  Description of Artificial Sequence: Synthetic oligonucleotide
aaguauaggcagaggcaga

SEQ ID NO: 444784 - RNA, 19 nt, Artificial Sequence
  Description of Artificial Sequence: Synthetic oligonucleotide
ucggcacuggcggacauac

SEQ ID NO: 444785 - RNA, 19 nt, Artificial Sequence
  Description of Artificial Sequence: Synthetic oligonucleotide
agaguuaggagugcacaau

SEQ ID NO: 444786 - RNA, 19 nt, Artificial Sequence
  Description of Artificial Sequence: Synthetic oligonucleotide
uuccgagcuccugaccagg

SEQ ID NO: 444787 - RNA, 19 nt, Artificial Sequence
  Description of Artificial Sequence: Synthetic oligonucleotide
uuccugaccucugaaguua

SEQ ID NO: 444788 - RNA, 19 nt, Artificial Sequence
  Description of Artificial Sequence: Synthetic oligonucleotide
uucugcacuggggugagua

SEQ ID NO: 444789 - RNA, 19 nt, Artificial Sequence
  Description of Artificial Sequence: Synthetic oligonucleotide
gaugaguuccgagcuccug

SEQ ID NO: 444790 - RNA, 19 nt, Artificial Sequence
  Description of Artificial Sequence: Synthetic oligonucleotide
cuguguaacacgggucagc

SEQ ID NO: 444791 - RNA, 19 nt, Artificial Sequence
  Description of Artificial Sequence: Synthetic oligonucleotide
ugcaacgcggccccaccac

SEQ ID NO: 444792 - RNA, 19 nt, Artificial Sequence
  Description of Artificial Sequence: Synthetic oligonucleotide
cuauggagcucugccacug

SEQ ID NO: 444793 - RNA, 19 nt, Artificial Sequence
  Description of Artificial Sequence: Synthetic oligonucleotide
cauacgcccucacagaugu

SEQ ID NO: 444794 - RNA, 19 nt, Artificial Sequence
  Description of Artificial Sequence: Synthetic oligonucleotide
guagaugaguuccgagcuc

SEQ ID NO: 444795 - RNA, 19 nt, Artificial Sequence
  Description of Artificial Sequence: Synthetic oligonucleotide
gagugcacaauucuugguu

SEQ ID NO: 444796 - RNA, 19 nt, Artificial Sequence
  Description of Artificial Sequence: Synthetic oligonucleotide
cugucagguuguccgguag

SEQ ID NO: 444797 - RNA, 19 nt, Artificial Sequence
  Description of Artificial Sequence: Synthetic oligonucleotide
gaaggcguucuugacgcuc

SEQ ID NO: 444798 - RNA, 19 nt, Artificial Sequence
  Description of Artificial Sequence: Synthetic oligonucleotide
gcauaaggacagcuauggg

SEQ ID NO: 444799 - RNA, 19 nt, Artificial Sequence
  Description of Artificial Sequence: Synthetic oligonucleotide
aaguuacaagugggcuggg

SEQ ID NO: 444800 - RNA, 19 nt, Artificial Sequence
  Description of Artificial Sequence: Synthetic oligonucleotide
ucguaguuguccgcgggcu

SEQ ID NO: 444801 - RNA, 19 nt, Artificial Sequence
  Description of Artificial Sequence: Synthetic oligonucleotide
agguauccuggccugccga

SEQ ID NO: 444802 - RNA, 19 nt, Artificial Sequence
  Description of Artificial Sequence: Synthetic oligonucleotide
ugugugccccacgaggagu

SEQ ID NO: 444803 - RNA, 19 nt, Artificial Sequence
  Description of Artificial Sequence: Synthetic oligonucleotide
auccucccgcuuucggcac

SEQ ID NO: 444804 - RNA, 19 nt, Artificial Sequence
  Description of Artificial Sequence: Synthetic oligonucleotide
acuaaccuggaaccaggua

SEQ ID NO: 444805 - RNA, 19 nt, Artificial Sequence
  Description of Artificial Sequence: Synthetic oligonucleotide
cagguccaaaguauaggca

SEQ ID NO: 444806 - RNA, 19 nt, Artificial Sequence
  Description of Artificial Sequence: Synthetic oligonucleotide
gacuucauacagcugugau

SEQ ID NO: 444807 - RNA, 19 nt, Artificial Sequence
  Description of Artificial Sequence: Synthetic oligonucleotide
cacucacuaggguaaggca

SEQ ID NO: 444808 - RNA, 19 nt, Artificial Sequence
  Description of Artificial Sequence: Synthetic oligonucleotide
ggggccucguaguuguccg

SEQ ID NO: 444809 - RNA, 19 nt, Artificial Sequence
  Description of Artificial Sequence: Synthetic oligonucleotide
gacauacgcccucacagau

SEQ ID NO: 444810 - RNA, 19 nt, Artificial Sequence
  Description of Artificial Sequence: Synthetic oligonucleotide
agauggugcgcagcugcuc

SEQ ID NO: 444811 - RNA, 19 nt, Artificial Sequence
  Description of Artificial Sequence: Synthetic oligonucleotide
uccgagcuccugaccagga

SEQ ID NO: 444812 - RNA, 19 nt, Artificial Sequence
  Description of Artificial Sequence: Synthetic oligonucleotide
cagguauccuggccugccg

SEQ ID NO: 444813 - RNA, 19 nt, Artificial Sequence
  Description of Artificial Sequence: Synthetic oligonucleotide
aguuugcaaaacaggcaga

SEQ ID NO: 444814 - RNA, 19 nt, Artificial Sequence
  Description of Artificial Sequence: Synthetic oligonucleotide
agguacugaccaugcuucu

SEQ ID NO: 444815 - RNA, 19 nt, Artificial Sequence
  Description of Artificial Sequence: Synthetic oligonucleotide
ucccgcuuucggcacuggc

SEQ ID NO: 444816 - RNA, 19 nt, Artificial Sequence
  Description of Artificial Sequence: Synthetic oligonucleotide
acgcccucacagauguccc

SEQ ID NO: 444817 - RNA, 19 nt, Artificial Sequence
  Description of Artificial Sequence: Synthetic oligonucleotide
cccgcuuucggcacuggcg

SEQ ID NO: 444818 - RNA, 19 nt, Artificial Sequence
  Description of Artificial Sequence: Synthetic oligonucleotide
cacgucccgacggagcagg

SEQ ID NO: 444819 - RNA, 19 nt, Artificial Sequence
  Description of Artificial Sequence: Synthetic oligonucleotide
uggguagaguuaggagugc

SEQ ID NO: 444820 - RNA, 19 nt, Artificial Sequence
  Description of Artificial Sequence: Synthetic oligonucleotide
cacccgcagccguacaaag

SEQ ID NO: 444821 - RNA, 19 nt, Artificial Sequence
  Description of Artificial Sequence: Synthetic oligonucleotide
aggcauaaggacagcuaug

SEQ ID NO: 444822 - RNA, 19 nt, Artificial Sequence
  Description of Artificial Sequence: Synthetic oligonucleotide
guuguccgguaggugcugg

SEQ ID NO: 444823 - RNA, 19 nt, Artificial Sequence
  Description of Artificial Sequence: Synthetic oligonucleotide
gccguacaaagcuggcagg

SEQ ID NO: 444824 - RNA, 19 nt, Artificial Sequence
  Description of Artificial Sequence: Synthetic oligonucleotide
cagcacgucccgacggagc

SEQ ID NO: 444825 - RNA, 19 nt, Artificial Sequence
  Description of Artificial Sequence: Synthetic oligonucleotide
agacuucauacagcuguga

SEQ ID NO: 444826 - RNA, 19 nt, Artificial Sequence
  Description of Artificial Sequence: Synthetic oligonucleotide
ccgcucauugaugagcugg

SEQ ID NO: 444827 - RNA, 19 nt, Artificial Sequence
  Description of Artificial Sequence: Synthetic oligonucleotide
uacagacggaaggcguucu

SEQ ID NO: 444828 - RNA, 19 nt, Artificial Sequence
  Description of Artificial Sequence: Synthetic oligonucleotide
ccagacuucauacagcugu

SEQ ID NO: 444829 - RNA, 19 nt, Artificial Sequence
  Description of Artificial Sequence: Synthetic oligonucleotide
ugaauccuaugggcucugc

SEQ ID NO: 444830 - RNA, 19 nt, Artificial Sequence
  Description of Artificial Sequence: Synthetic oligonucleotide
guaguuguccgcgggcuca

SEQ ID NO: 444831 - RNA, 19 nt, Artificial Sequence
  Description of Artificial Sequence: Synthetic oligonucleotide
cuucuggcagcgguagaug

SEQ ID NO: 444832 - RNA, 19 nt, Artificial Sequence
  Description of Artificial Sequence: Synthetic oligonucleotide
cagccgaccuuuguaguac

SEQ ID NO: 444833 - RNA, 19 nt, Artificial Sequence
  Description of Artificial Sequence: Synthetic oligonucleotide
aggucucgguccuucccca

SEQ ID NO: 444834 - RNA, 19 nt, Artificial Sequence
  Description of Artificial Sequence: Synthetic oligonucleotide
agcugacggucaaagagaa

SEQ ID NO: 444835 - RNA, 19 nt, Artificial Sequence
  Description of Artificial Sequence: Synthetic oligonucleotide
uugugacgggucagguauc

SEQ ID NO: 444836 - RNA, 19 nt, Artificial Sequence
  Description of Artificial Sequence: Synthetic oligonucleotide
acauacgcccucacagaug

SEQ ID NO: 444837 - RNA, 19 nt, Artificial Sequence
  Description of Artificial Sequence: Synthetic oligonucleotide
caguccaugcuaggccacg

SEQ ID NO: 444838 - RNA, 19 nt, Artificial Sequence
  Description of Artificial Sequence: Synthetic oligonucleotide
auaacacgacaaaaucaua

SEQ ID NO: 444839 - RNA, 19 nt, Artificial Sequence
  Description of Artificial Sequence: Synthetic oligonucleotide
agccauccagggaaauguc

SEQ ID NO: 444840 - RNA, 19 nt, Artificial Sequence
  Description of Artificial Sequence: Synthetic oligonucleotide
ggguauaugugcagccacc

SEQ ID NO: 444841 - RNA, 19 nt, Artificial Sequence
  Description of Artificial Sequence: Synthetic oligonucleotide
gguagaguuaggagugcac

SEQ ID NO: 444842 - RNA, 19 nt, Artificial Sequence
  Description of Artificial Sequence: Synthetic oligonucleotide
aaagaacguccagcacaga

SEQ ID NO: 444843 - RNA, 19 nt, Artificial Sequence
  Description of Artificial Sequence: Synthetic oligonucleotide
cuacaggggacugucacua

SEQ ID NO: 444844 - RNA, 19 nt, Artificial Sequence
  Description of Artificial Sequence: Synthetic oligonucleotide
ccaucugcaacgcggcccc

SEQ ID NO: 444845 - RNA, 19 nt, Artificial Sequence
  Description of Artificial Sequence: Synthetic oligonucleotide
uccgcucauugaugagcug

SEQ ID NO: 444846 - RNA, 19 nt, Artificial Sequence
  Description of Artificial Sequence: Synthetic oligonucleotide
acuggaggggauacuugca

SEQ ID NO: 444847 - RNA, 19 nt, Artificial Sequence
  Description of Artificial Sequence: Synthetic oligonucleotide
cguggguauaugugcagcc

SEQ ID NO: 444848 - RNA, 19 nt, Artificial Sequence
  Description of Artificial Sequence: Synthetic oligonucleotide
caguccuuauggcuucuca

SEQ ID NO: 444849 - RNA, 19 nt, Artificial Sequence
  Description of Artificial Sequence: Synthetic oligonucleotide
cacuacaugcaggccuggc

SEQ ID NO: 444850 - RNA, 19 nt, Artificial Sequence
  Description of Artificial Sequence: Synthetic oligonucleotide
caggcacccagcucgcuca

SEQ ID NO: 444851 - RNA, 19 nt, Artificial Sequence
  Description of Artificial Sequence: Synthetic oligonucleotide
ccccgaguagaugaguucc

SEQ ID NO: 444852 - RNA, 19 nt, Artificial Sequence
  Description of Artificial Sequence: Synthetic oligonucleotide
uuguugcaguacucagaau

SEQ ID NO: 444853 - RNA, 19 nt, Artificial Sequence
  Description of Artificial Sequence: Synthetic oligonucleotide
gguacugaccaugcuucug

SEQ ID NO: 444854 - RNA, 19 nt, Artificial Sequence
  Description of Artificial Sequence: Synthetic oligonucleotide
ucacccgcagccguacaaa

SEQ ID NO: 444855 - RNA, 19 nt, Artificial Sequence
  Description of Artificial Sequence: Synthetic oligonucleotide
ccagcgcuacaguacagac

SEQ ID NO: 444856 - RNA, 19 nt, Artificial Sequence
  Description of Artificial Sequence: Synthetic oligonucleotide
ucacuaggguaaggcaauc

SEQ ID NO: 444857 - RNA, 19 nt, Artificial Sequence
  Description of Artificial Sequence: Synthetic oligonucleotide
acaguugacuguaccguuu

SEQ ID NO: 444858 - RNA, 19 nt, Artificial Sequence
  Description of Artificial Sequence: Synthetic oligonucleotide
cagcuccgccaacuggagg

SEQ ID NO: 444859 - RNA, 19 nt, Artificial Sequence
  Description of Artificial Sequence: Synthetic oligonucleotide
aaacgccuucuggcagcgg

SEQ ID NO: 444860 - RNA, 19 nt, Artificial Sequence
  Description of Artificial Sequence: Synthetic oligonucleotide
cgaccuuuguaguacagca

SEQ ID NO: 444861 - RNA, 19 nt, Artificial Sequence
  Description of Artificial Sequence: Synthetic oligonucleotide
ggggacguggguauaugug

SEQ ID NO: 444862 - RNA, 19 nt, Artificial Sequence
  Description of Artificial Sequence: Synthetic oligonucleotide
ggccucguaguuguccgcg

SEQ ID NO: 444863 - RNA, 19 nt, Artificial Sequence
  Description of Artificial Sequence: Synthetic oligonucleotide
cccgaguagaugaguuccg

SEQ ID NO: 444864 - RNA, 19 nt, Artificial Sequence
  Description of Artificial Sequence: Synthetic oligonucleotide
cauccauguccagccgacc

SEQ ID NO: 444865 - RNA, 19 nt, Artificial Sequence
  Description of Artificial Sequence: Synthetic oligonucleotide
cucacuaggguaaggcaau

SEQ ID NO: 444866 - RNA, 19 nt, Artificial Sequence
  Description of Artificial Sequence: Synthetic oligonucleotide
ugaugagcugggccacauu

SEQ ID NO: 444867 - RNA, 19 nt, Artificial Sequence
  Description of Artificial Sequence: Synthetic oligonucleotide
gcgcaucugguccuugcag

SEQ ID NO: 444868 - RNA, 19 nt, Artificial Sequence
  Description of Artificial Sequence: Synthetic oligonucleotide
cagucggcugaugcugugc

SEQ ID NO: 444869 - RNA, 19 nt, Artificial Sequence
  Description of Artificial Sequence: Synthetic oligonucleotide
cagcuagcaccaacaccug

SEQ ID NO: 444870 - RNA, 19 nt, Artificial Sequence
  Description of Artificial Sequence: Synthetic oligonucleotide
cacgaggagucaguccaug

SEQ ID NO: 444871 - RNA, 19 nt, Artificial Sequence
  Description of Artificial Sequence: Synthetic oligonucleotide
acagugcaagagguacuga

SEQ ID NO: 444872 - RNA, 19 nt, Artificial Sequence
  Description of Artificial Sequence: Synthetic oligonucleotide
cgaguagaugaguuccgag

SEQ ID NO: 444873 - RNA, 19 nt, Artificial Sequence
  Description of Artificial Sequence: Synthetic oligonucleotide
cuggcggacauacgcccuc

SEQ ID NO: 444874 - RNA, 19 nt, Artificial Sequence
  Description of Artificial Sequence: Synthetic oligonucleotide
ggaaccaccccucgccauc

SEQ ID NO: 444875 - RNA, 19 nt, Artificial Sequence
  Description of Artificial Sequence: Synthetic oligonucleotide
gguccaaaguauaggcaga

SEQ ID NO: 444876 - RNA, 19 nt, Artificial Sequence
  Description of Artificial Sequence: Synthetic oligonucleotide
cggaaugcugucuucgguc

SEQ ID NO: 444877 - RNA, 19 nt, Artificial Sequence
  Description of Artificial Sequence: Synthetic oligonucleotide
acagccggcaggccucgaa

SEQ ID NO: 444878 - RNA, 19 nt, Artificial Sequence
  Description of Artificial Sequence: Synthetic oligonucleotide
gucagguauccuggccugc

SEQ ID NO: 444879 - RNA, 19 nt, Artificial Sequence
  Description of Artificial Sequence: Synthetic oligonucleotide
agaggggugcacaccugcu

SEQ ID NO: 444880 - RNA, 19 nt, Artificial Sequence
  Description of Artificial Sequence: Synthetic oligonucleotide
gcacaauucuugguuccug

SEQ ID NO: 444881 - RNA, 19 nt, Artificial Sequence
  Description of Artificial Sequence: Synthetic oligonucleotide
cugaauccuaugggcucug

SEQ ID NO: 444882 - RNA, 19 nt, Artificial Sequence
  Description of Artificial Sequence: Synthetic oligonucleotide
acuggcggacauacgcccu

SEQ ID NO: 444883 - RNA, 19 nt, Artificial Sequence
  Description of Artificial Sequence: Synthetic oligonucleotide
uggcggacauacgcccuca

SEQ ID NO: 444884 - RNA, 19 nt, Artificial Sequence
  Description of Artificial Sequence: Synthetic oligonucleotide
agaugaguuccgagcuccu

SEQ ID NO: 444885 - RNA, 19 nt, Artificial Sequence
  Description of Artificial Sequence: Synthetic oligonucleotide
ggcuugaggcuguguaaca

SEQ ID NO: 444886 - RNA, 19 nt, Artificial Sequence
  Description of Artificial Sequence: Synthetic oligonucleotide
caacgcggccccaccacca

SEQ ID NO: 444887 - RNA, 19 nt, Artificial Sequence
  Description of Artificial Sequence: Synthetic oligonucleotide
gcuguguaacacgggucag

SEQ ID NO: 444888 - RNA, 19 nt, Artificial Sequence
  Description of Artificial Sequence: Synthetic oligonucleotide
ggaggggauacuugcagau

SEQ ID NO: 444889 - RNA, 19 nt, Artificial Sequence
  Description of Artificial Sequence: Synthetic oligonucleotide
gcacuggcggacauacgcc

SEQ ID NO: 444890 - RNA, 19 nt, Artificial Sequence
  Description of Artificial Sequence: Synthetic oligonucleotide
gcaacgcggccccaccacc

SEQ ID NO: 444891 - RNA, 19 nt, Artificial Sequence
  Description of Artificial Sequence: Synthetic oligonucleotide
ugacgcucacauggagguc

SEQ ID NO: 444892 - RNA, 19 nt, Artificial Sequence
  Description of Artificial Sequence: Synthetic oligonucleotide
ugugccccacgaggaguca

SEQ ID NO: 444893 - RNA, 19 nt, Artificial Sequence
  Description of Artificial Sequence: Synthetic oligonucleotide
cauggcaugcaaggcagcu

SEQ ID NO: 444894 - RNA, 19 nt, Artificial Sequence
  Description of Artificial Sequence: Synthetic oligonucleotide
ggauuagagaagguacagu

SEQ ID NO: 444895 - RNA, 19 nt, Artificial Sequence
  Description of Artificial Sequence: Synthetic oligonucleotide
gugccccacgaggagucag

SEQ ID NO: 444896 - RNA, 19 nt, Artificial Sequence
  Description of Artificial Sequence: Synthetic oligonucleotide
aguuguccgcgggcucauc

SEQ ID NO: 444897 - RNA, 19 nt, Artificial Sequence
  Description of Artificial Sequence: Synthetic oligonucleotide
ggaggcauaaggacagcua

SEQ ID NO: 444898 - RNA, 19 nt, Artificial Sequence
  Description of Artificial Sequence: Synthetic oligonucleotide
cuaggccacggaauucagu

SEQ ID NO: 444899 - RNA, 19 nt, Artificial Sequence
  Description of Artificial Sequence: Synthetic oligonucleotide
ggagugcacaauucuuggu

SEQ ID NO: 444900 - RNA, 19 nt, Artificial Sequence
  Description of Artificial Sequence: Synthetic oligonucleotide
cagccguacaaagcuggca

SEQ ID NO: 444901 - RNA, 19 nt, Artificial Sequence
  Description of Artificial Sequence: Synthetic oligonucleotide
cacuaaccuggaaccaggu

SEQ ID NO: 444902 - RNA, 19 nt, Artificial Sequence
  Description of Artificial Sequence: Synthetic oligonucleotide
cacaguugacuguaccguu

SEQ ID NO: 444903 - RNA, 19 nt, Artificial Sequence
  Description of Artificial Sequence: Synthetic oligonucleotide
cauccagggaaaugucaau

SEQ ID NO: 444904 - RNA, 19 nt, Artificial Sequence
  Description of Artificial Sequence: Synthetic oligonucleotide
cagcucgcucagguguggc

SEQ ID NO: 444905 - RNA, 19 nt, Artificial Sequence
  Description of Artificial Sequence: Synthetic oligonucleotide
auggugcgcagcugcucuu

SEQ ID NO: 444906 - RNA, 19 nt, Artificial Sequence
  Description of Artificial Sequence: Synthetic oligonucleotide
uaguuguccgcgggcucau

SEQ ID NO: 444907 - RNA, 19 nt, Artificial Sequence
  Description of Artificial Sequence: Synthetic oligonucleotide
gguucacccgcagccguac

SEQ ID NO: 444908 - RNA, 19 nt, Artificial Sequence
  Description of Artificial Sequence: Synthetic oligonucleotide
gcuaggccacggaauucag

SEQ ID NO: 444909 - RNA, 19 nt, Artificial Sequence
  Description of Artificial Sequence: Synthetic oligonucleotide
cuuuggucuccugcccaga

SEQ ID NO: 444910 - RNA, 19 nt, Artificial Sequence
  Description of Artificial Sequence: Synthetic oligonucleotide
gaaccaccccucgccaucu

SEQ ID NO: 444911 - RNA, 19 nt, Artificial Sequence
  Description of Artificial Sequence: Synthetic oligonucleotide
gggugcacaccugcuuuug

SEQ ID NO: 444912 - RNA, 19 nt, Artificial Sequence
  Description of Artificial Sequence: Synthetic oligonucleotide
cacaaagugcugucagguu

SEQ ID NO: 444913 - RNA, 19 nt, Artificial Sequence
  Description of Artificial Sequence: Synthetic oligonucleotide
gcagccguacaaagcuggc

SEQ ID NO: 444914 - RNA, 19 nt, Artificial Sequence
  Description of Artificial Sequence: Synthetic oligonucleotide
cugcaacgcggccccacca

SEQ ID NO: 444915 - RNA, 19 nt, Artificial Sequence
  Description of Artificial Sequence: Synthetic oligonucleotide
caggcguuggggugguugu

SEQ ID NO: 444916 - RNA, 19 nt, Artificial Sequence
  Description of Artificial Sequence: Synthetic oligonucleotide
gcuccgccaacuggagggg

SEQ ID NO: 444917 - RNA, 19 nt, Artificial Sequence
  Description of Artificial Sequence: Synthetic oligonucleotide
cagcuacaggggacuguca

SEQ ID NO: 444918 - RNA, 19 nt, Artificial Sequence
  Description of Artificial Sequence: Synthetic oligonucleotide
gcuugugacgggucaggua

SEQ ID NO: 444919 - RNA, 19 nt, Artificial Sequence
  Description of Artificial Sequence: Synthetic oligonucleotide
cacggaauucaguccuuau

SEQ ID NO: 444920 - RNA, 19 nt, Artificial Sequence
  Description of Artificial Sequence: Synthetic oligonucleotide
gguuguccgguaggugcug

SEQ ID NO: 444921 - RNA, 19 nt, Artificial Sequence
  Description of Artificial Sequence: Synthetic oligonucleotide
gccgaccuuuguaguacag

SEQ ID NO: 444922 - RNA, 19 nt, Artificial Sequence
  Description of Artificial Sequence: Synthetic oligonucleotide
cccgcagccguacaaagcu

SEQ ID NO: 444923 - RNA, 19 nt, Artificial Sequence
  Description of Artificial Sequence: Synthetic oligonucleotide
ccuaugggcucugcacuac

SEQ ID NO: 444924 - RNA, 19 nt, Artificial Sequence
  Description of Artificial Sequence: Synthetic oligonucleotide
gccgacagcuuuaggcuuc

SEQ ID NO: 444925 - RNA, 19 nt, Artificial Sequence
  Description of Artificial Sequence: Synthetic oligonucleotide
cugcgucauuaacaauucu

SEQ ID NO: 444926 - RNA, 19 nt, Artificial Sequence
  Description of Artificial Sequence: Synthetic oligonucleotide
ggaagggugccagucggcu

SEQ ID NO: 444927 - RNA, 19 nt, Artificial Sequence
  Description of Artificial Sequence: Synthetic oligonucleotide
ccuuuguaguacagcacgu

SEQ ID NO: 444928 - RNA, 19 nt, Artificial Sequence
  Description of Artificial Sequence: Synthetic oligonucleotide
caccccucgccaucugcaa

SEQ ID NO: 444929 - RNA, 19 nt, Artificial Sequence
  Description of Artificial Sequence: Synthetic oligonucleotide
cacuuucggaagggugcca

SEQ ID NO: 444930 - RNA, 19 nt, Artificial Sequence
  Description of Artificial Sequence: Synthetic oligonucleotide
cucccgcuuucggcacugg

SEQ ID NO: 444931 - RNA, 19 nt, Artificial Sequence
  Description of Artificial Sequence: Synthetic oligonucleotide
ccgcagccguacaaagcug

SEQ ID NO: 444932 - RNA, 19 nt, Artificial Sequence
  Description of Artificial Sequence: Synthetic oligonucleotide
ggccugccgacagcuuuag

SEQ ID NO: 444933 - RNA, 19 nt, Artificial Sequence
  Description of Artificial Sequence: Synthetic oligonucleotide
ccgacagcuuuaggcuucc

SEQ ID NO: 444934 - RNA, 19 nt, Artificial Sequence
  Description of Artificial Sequence: Synthetic oligonucleotide
gccggcaggccucgaagaa

SEQ ID NO: 444935 - RNA, 19 nt, Artificial Sequence
  Description of Artificial Sequence: Synthetic oligonucleotide
cguaguuguccgcgggcuc

SEQ ID NO: 444936 - RNA, 19 nt, Artificial Sequence
  Description of Artificial Sequence: Synthetic oligonucleotide
gcaacacugcacucgcauu

SEQ ID NO: 444937 - RNA, 19 nt, Artificial Sequence
  Description of Artificial Sequence: Synthetic oligonucleotide
ccgaguagaugaguuccga

SEQ ID NO: 444938 - RNA, 19 nt, Artificial Sequence
  Description of Artificial Sequence: Synthetic oligonucleotide
acgccuucuggcagcggua

SEQ ID NO: 444939 - RNA, 19 nt, Artificial Sequence
  Description of Artificial Sequence: Synthetic oligonucleotide
ggcaaggguggaugcuugu

SEQ ID NO: 444940 - RNA, 19 nt, Artificial Sequence
  Description of Artificial Sequence: Synthetic oligonucleotide
caggcaaggguggaugcuu

SEQ ID NO: 444941 - RNA, 19 nt, Artificial Sequence
  Description of Artificial Sequence: Synthetic oligonucleotide
guggccgcucuguguugaa

SEQ ID NO: 444942 - RNA, 19 nt, Artificial Sequence
  Description of Artificial Sequence: Synthetic oligonucleotide
cuccgccaacuggagggga

SEQ ID NO: 444943 - RNA, 19 nt, Artificial Sequence
  Description of Artificial Sequence: Synthetic oligonucleotide
gcugugccagaaguuagau

SEQ ID NO: 444944 - RNA, 19 nt, Artificial Sequence
  Description of Artificial Sequence: Synthetic oligonucleotide
ccgccugggcucagcuagc

SEQ ID NO: 444945 - RNA, 19 nt, Artificial Sequence
  Description of Artificial Sequence: Synthetic oligonucleotide
gugacgggucagguauccu

SEQ ID NO: 444946 - RNA, 19 nt, Artificial Sequence
  Description of Artificial Sequence: Synthetic oligonucleotide
acgucccgacggagcaggu

SEQ ID NO: 444947 - RNA, 19 nt, Artificial Sequence
  Description of Artificial Sequence: Synthetic oligonucleotide
gcugacggucaaagagaaa

SEQ ID NO: 444948 - RNA, 19 nt, Artificial Sequence
  Description of Artificial Sequence: Synthetic oligonucleotide
cggcacuggcggacauacg

SEQ ID NO: 444949 - RNA, 19 nt, Artificial Sequence
  Description of Artificial Sequence: Synthetic oligonucleotide
ccacggaauucaguccuua

SEQ ID NO: 444950 - RNA, 19 nt, Artificial Sequence
  Description of Artificial Sequence: Synthetic oligonucleotide
ggucucgguccuuccccau

SEQ ID NO: 444951 - RNA, 19 nt, Artificial Sequence
  Description of Artificial Sequence: Synthetic oligonucleotide
gccagucggcugaugcugu

SEQ ID NO: 444952 - RNA, 19 nt, Artificial Sequence
  Description of Artificial Sequence: Synthetic oligonucleotide
ccccagcuacaggggacug

SEQ ID NO: 444953 - RNA, 19 nt, Artificial Sequence
  Description of Artificial Sequence: Synthetic oligonucleotide
ccgcggggccucguaguug

SEQ ID NO: 444954 - RNA, 19 nt, Artificial Sequence
  Description of Artificial Sequence: Synthetic oligonucleotide
cgcggggccucguaguugu

SEQ ID NO: 444955 - RNA, 19 nt, Artificial Sequence
  Description of Artificial Sequence: Synthetic oligonucleotide
gcccgcggggccucguagu

SEQ ID NO: 444956 - RNA, 19 nt, Artificial Sequence
  Description of Artificial Sequence: Synthetic oligonucleotide
cgcuuucggcacuggcgga

SEQ ID NO: 444957 - RNA, 19 nt, Artificial Sequence
  Description of Artificial Sequence: Synthetic oligonucleotide
cacucgcauuggggaggaa

SEQ ID NO: 444958 - RNA, 19 nt, Artificial Sequence
  Description of Artificial Sequence: Synthetic oligonucleotide
ccgccaacuggaggggaua

SEQ ID NO: 444959 - RNA, 19 nt, Artificial Sequence
  Description of Artificial Sequence: Synthetic oligonucleotide
gccacggaauucaguccuu

SEQ ID NO: 444960 - RNA, 19 nt, Artificial Sequence
  Description of Artificial Sequence: Synthetic oligonucleotide
cccgcggggccucguaguu

SEQ ID NO: 444961 - RNA, 19 nt, Artificial Sequence
  Description of Artificial Sequence: Synthetic oligonucleotide
ccgacggagcagguccuuu

SEQ ID NO: 444962 - RNA, 19 nt, Artificial Sequence
  Description of Artificial Sequence: Synthetic oligonucleotide
cacaggcguuggggugguu

SEQ ID NO: 444963 - RNA, 19 nt, Artificial Sequence
  Description of Artificial Sequence: Synthetic oligonucleotide
aaguauacgauauauuaac

SEQ ID NO: 444964 - RNA, 19 nt, Artificial Sequence
  Description of Artificial Sequence: Synthetic oligonucleotide
uaagugaccauucacauag

SEQ ID NO: 444965 - RNA, 19 nt, Artificial Sequence
  Description of Artificial Sequence: Synthetic oligonucleotide
agaauuaaacauuacacag

SEQ ID NO: 444966 - RNA, 19 nt, Artificial Sequence
  Description of Artificial Sequence: Synthetic oligonucleotide
uccgcaaucucuaacaugg

SEQ ID NO: 444967 - RNA, 19 nt, Artificial Sequence
  Description of Artificial Sequence: Synthetic oligonucleotide
uuaaaaguggcaauugcag

SEQ ID NO: 444968 - RNA, 19 nt, Artificial Sequence
  Description of Artificial Sequence: Synthetic oligonucleotide
aucagaguaauccuguccc

SEQ ID NO: 444969 - RNA, 19 nt, Artificial Sequence
  Description of Artificial Sequence: Synthetic oligonucleotide
aauuacaucccucccuccc

SEQ ID NO: 444970 - RNA, 19 nt, Artificial Sequence
  Description of Artificial Sequence: Synthetic oligonucleotide
aagaucaagagucucaggu

SEQ ID NO: 444971 - RNA, 19 nt, Artificial Sequence
  Description of Artificial Sequence: Synthetic oligonucleotide
auacauuaaguacucauuc

SEQ ID NO: 444972 - RNA, 19 nt, Artificial Sequence
  Description of Artificial Sequence: Synthetic oligonucleotide
ucagucuacauccaaaucu

SEQ ID NO: 444973 - RNA, 19 nt, Artificial Sequence
  Description of Artificial Sequence: Synthetic oligonucleotide
uguugauuaguguacauug

SEQ ID NO: 444974 - RNA, 19 nt, Artificial Sequence
  Description of Artificial Sequence: Synthetic oligonucleotide
aagccaaaaguccaugugg

SEQ ID NO: 444975 - RNA, 19 nt, Artificial Sequence
  Description of Artificial Sequence: Synthetic oligonucleotide
uccuacaacacgaaguggg

SEQ ID NO: 444976 - RNA, 19 nt, Artificial Sequence
  Description of Artificial Sequence: Synthetic oligonucleotide
aacucuugucucuggaugc

SEQ ID NO: 444977 - RNA, 19 nt, Artificial Sequence
  Description of Artificial Sequence: Synthetic oligonucleotide
acagauaucauugugcuuc

SEQ ID NO: 444978 - RNA, 19 nt, Artificial Sequence
  Description of Artificial Sequence: Synthetic oligonucleotide
aaucuuauucacagcaucc

SEQ ID NO: 444979 - RNA, 19 nt, Artificial Sequence
  Description of Artificial Sequence: Synthetic oligonucleotide
uccucaaccauaauaagug

SEQ ID NO: 444980 - RNA, 19 nt, Artificial Sequence
  Description of Artificial Sequence: Synthetic oligonucleotide
uguauaaauaaaugacuag

SEQ ID NO: 444981 - RNA, 19 nt, Artificial Sequence
  Description of Artificial Sequence: Synthetic oligonucleotide
aaauaugacacauccuugu

SEQ ID NO: 444982 - RNA, 19 nt, Artificial Sequence
  Description of Artificial Sequence: Synthetic oligonucleotide
ugaccauucacauaguaga

SEQ ID NO: 444983 - RNA, 19 nt, Artificial Sequence
  Description of Artificial Sequence: Synthetic oligonucleotide
agcauauaaauacauguug

SEQ ID NO: 444984 - RNA, 19 nt, Artificial Sequence
  Description of Artificial Sequence: Synthetic oligonucleotide
cuuaagacauccugcaugg

SEQ ID NO: 444985 - RNA, 19 nt, Artificial Sequence
  Description of Artificial Sequence: Synthetic oligonucleotide
aaauaaaugacuaguuucu

SEQ ID NO: 444986 - RNA, 19 nt, Artificial Sequence
  Description of Artificial Sequence: Synthetic oligonucleotide
uucauuaccccucacaaau

SEQ ID NO: 444987 - RNA, 19 nt, Artificial Sequence
  Description of Artificial Sequence: Synthetic oligonucleotide
guauccuggacauacagcc

SEQ ID NO: 444988 - RNA, 19 nt, Artificial Sequence
  Description of Artificial Sequence: Synthetic oligonucleotide
gugaucucgaccuugggcg

SEQ ID NO: 444989 - RNA, 19 nt, Artificial Sequence
  Description of Artificial Sequence: Synthetic oligonucleotide
ucuaacauggacugcagga

SEQ ID NO: 444990 - RNA, 19 nt, Artificial Sequence
  Description of Artificial Sequence: Synthetic oligonucleotide
uaaaaguggacuccaaagu

SEQ ID NO: 444991 - RNA, 19 nt, Artificial Sequence
  Description of Artificial Sequence: Synthetic oligonucleotide
aaaugacuaguuucuuuuc

SEQ ID NO: 444992 - RNA, 19 nt, Artificial Sequence
  Description of Artificial Sequence: Synthetic oligonucleotide
cuuaaucuuauucacagca

SEQ ID NO: 444993 - RNA, 19 nt, Artificial Sequence
  Description of Artificial Sequence: Synthetic oligonucleotide
auguaggccauauaugcgg

SEQ ID NO: 444994 - RNA, 19 nt, Artificial Sequence
  Description of Artificial Sequence: Synthetic oligonucleotide
aaagugcaaauguugccag

SEQ ID NO: 444995 - RNA, 19 nt, Artificial Sequence
  Description of Artificial Sequence: Synthetic oligonucleotide
aaucgacugaaggaaaggg

SEQ ID NO: 444996 - RNA, 19 nt, Artificial Sequence
  Description of Artificial Sequence: Synthetic oligonucleotide
uugauuaguguacauugca

SEQ ID NO: 444997 - RNA, 19 nt, Artificial Sequence
  Description of Artificial Sequence: Synthetic oligonucleotide
ucaaccauaauaaguguuc

SEQ ID NO: 444998 - RNA, 19 nt, Artificial Sequence
  Description of Artificial Sequence: Synthetic oligonucleotide
ucuaccuguagccaugaug

SEQ ID NO: 444999 - RNA, 19 nt, Artificial Sequence
  Description of Artificial Sequence: Synthetic oligonucleotide
uacauuaaguacucauucc

SEQ ID NO: 445000 - RNA, 19 nt, Artificial Sequence
  Description of Artificial Sequence: Synthetic oligonucleotide
auaugcggggaacacaagg

SEQ ID NO: 445001 - RNA, 19 nt, Artificial Sequence
  Description of Artificial Sequence: Synthetic oligonucleotide
uucuccuacaacacgaagu

SEQ ID NO: 445002 - RNA, 19 nt, Artificial Sequence
  Description of Artificial Sequence: Synthetic oligonucleotide
agaauaccaagucugaaau

SEQ ID NO: 445003 - RNA, 19 nt, Artificial Sequence
  Description of Artificial Sequence: Synthetic oligonucleotide
uccugaaguacaauguucu

SEQ ID NO: 445004 - RNA, 19 nt, Artificial Sequence
  Description of Artificial Sequence: Synthetic oligonucleotide
ucgacugaaggaaagggcu

SEQ ID NO: 445005 - RNA, 19 nt, Artificial Sequence
  Description of Artificial Sequence: Synthetic oligonucleotide
ucggugaaccaccugaagc

SEQ ID NO: 445006 - RNA, 19 nt, Artificial Sequence
  Description of Artificial Sequence: Synthetic oligonucleotide
gaguaauccugucccaugg

SEQ ID NO: 445007 - RNA, 19 nt, Artificial Sequence
  Description of Artificial Sequence: Synthetic oligonucleotide
ugcaccuucaugaugacuu

SEQ ID NO: 445008 - RNA, 19 nt, Artificial Sequence
  Description of Artificial Sequence: Synthetic oligonucleotide
aguacucauucccaaagug

SEQ ID NO: 445009 - RNA, 19 nt, Artificial Sequence
  Description of Artificial Sequence: Synthetic oligonucleotide
uguaggccauauaugcggg

SEQ ID NO: 445010 - RNA, 19 nt, Artificial Sequence
  Description of Artificial Sequence: Synthetic oligonucleotide
aucuuauucacagcauccc

SEQ ID NO: 445011 - RNA, 19 nt, Artificial Sequence
  Description of Artificial Sequence: Synthetic oligonucleotide
uacaacacgaaguggggug

SEQ ID NO: 445012 - RNA, 19 nt, Artificial Sequence
  Description of Artificial Sequence: Synthetic oligonucleotide
aaagucuauuaacagcuuu

SEQ ID NO: 445013 - RNA, 19 nt, Artificial Sequence
  Description of Artificial Sequence: Synthetic oligonucleotide
uagaauaccaagucugaaa

SEQ ID NO: 445014 - RNA, 19 nt, Artificial Sequence
  Description of Artificial Sequence: Synthetic oligonucleotide
acagccaacaaaguauacg

SEQ ID NO: 445015 - RNA, 19 nt, Artificial Sequence
  Description of Artificial Sequence: Synthetic oligonucleotide
uaccccucacaaaucaggg

SEQ ID NO: 445016 - RNA, 19 nt, Artificial Sequence
  Description of Artificial Sequence: Synthetic oligonucleotide
caaaccucuacaaaacauc

SEQ ID NO: 445017 - RNA, 19 nt, Artificial Sequence
  Description of Artificial Sequence: Synthetic oligonucleotide
uaugcggggaacacaagga

SEQ ID NO: 445018 - RNA, 19 nt, Artificial Sequence
  Description of Artificial Sequence: Synthetic oligonucleotide
gaagccaaaaguccaugug

SEQ ID NO: 445019 - RNA, 19 nt, Artificial Sequence
  Description of Artificial Sequence: Synthetic oligonucleotide
ugauuaguguacauugcaa

SEQ ID NO: 445020 - RNA, 19 nt, Artificial Sequence
  Description of Artificial Sequence: Synthetic oligonucleotide
aaaccucuacaaaacauca

SEQ ID NO: 445021 - RNA, 19 nt, Artificial Sequence
  Description of Artificial Sequence: Synthetic oligonucleotide
uuucauguccugguaacag

SEQ ID NO: 445022 - RNA, 19 nt, Artificial Sequence
  Description of Artificial Sequence: Synthetic oligonucleotide
ugugucuacaucuuugauu

SEQ ID NO: 445023 - RNA, 19 nt, Artificial Sequence
  Description of Artificial Sequence: Synthetic oligonucleotide
aagugcaaauguugccagg

SEQ ID NO: 445024 - RNA, 19 nt, Artificial Sequence
  Description of Artificial Sequence: Synthetic oligonucleotide
gguuccaaucgacugaagg

SEQ ID NO: 445025 - RNA, 19 nt, Artificial Sequence
  Description of Artificial Sequence: Synthetic oligonucleotide
uaauaaguguucccagaac

SEQ ID NO: 445026 - RNA, 19 nt, Artificial Sequence
  Description of Artificial Sequence: Synthetic oligonucleotide
ucaugagaguuuuaguuua

SEQ ID NO: 445027 - RNA, 19 nt, Artificial Sequence
  Description of Artificial Sequence: Synthetic oligonucleotide
gaauuccucaaccauaaua

SEQ ID NO: 445028 - RNA, 19 nt, Artificial Sequence
  Description of Artificial Sequence: Synthetic oligonucleotide
agauccuuggaaugucagg

SEQ ID NO: 445029 - RNA, 19 nt, Artificial Sequence
  Description of Artificial Sequence: Synthetic oligonucleotide
cacguuguaauaggaaugg

SEQ ID NO: 445030 - RNA, 19 nt, Artificial Sequence
  Description of Artificial Sequence: Synthetic oligonucleotide
uuuacuucacacagccaac

SEQ ID NO: 445031 - RNA, 19 nt, Artificial Sequence
  Description of Artificial Sequence: Synthetic oligonucleotide
ucaguuauugucugucagu

SEQ ID NO: 445032 - RNA, 19 nt, Artificial Sequence
  Description of Artificial Sequence: Synthetic oligonucleotide
aaguacucauucccaaagu

SEQ ID NO: 445033 - RNA, 19 nt, Artificial Sequence
  Description of Artificial Sequence: Synthetic oligonucleotide
aaaguggacuccaaagugu

SEQ ID NO: 445034 - RNA, 19 nt, Artificial Sequence
  Description of Artificial Sequence: Synthetic oligonucleotide
ugcucuuucguggcgacgg

SEQ ID NO: 445035 - RNA, 19 nt, Artificial Sequence
  Description of Artificial Sequence: Synthetic oligonucleotide
aucgacugaaggaaagggc

SEQ ID NO: 445036 - RNA, 19 nt, Artificial Sequence
  Description of Artificial Sequence: Synthetic oligonucleotide
aaucucuaacauggacugc

SEQ ID NO: 445037 - RNA, 19 nt, Artificial Sequence
  Description of Artificial Sequence: Synthetic oligonucleotide
gacauucaguuauugucug

SEQ ID NO: 445038 - RNA, 19 nt, Artificial Sequence
  Description of Artificial Sequence: Synthetic oligonucleotide
uagauccuuggaaugucag

SEQ ID NO: 445039 - RNA, 19 nt, Artificial Sequence
  Description of Artificial Sequence: Synthetic oligonucleotide
ugugccugcaucuuagaau

SEQ ID NO: 445040 - RNA, 19 nt, Artificial Sequence
  Description of Artificial Sequence: Synthetic oligonucleotide
cacacaaagggccacaaga

SEQ ID NO: 445041 - RNA, 19 nt, Artificial Sequence
  Description of Artificial Sequence: Synthetic oligonucleotide
guuauugucugucagucua

SEQ ID NO: 445042 - RNA, 19 nt, Artificial Sequence
  Description of Artificial Sequence: Synthetic oligonucleotide
acggggagagacuuaaucu

SEQ ID NO: 445043 - RNA, 19 nt, Artificial Sequence
  Description of Artificial Sequence: Synthetic oligonucleotide
aaggcgugaucacagcaga

SEQ ID NO: 445044 - RNA, 19 nt, Artificial Sequence
  Description of Artificial Sequence: Synthetic oligonucleotide
aguaauccugucccauggg

SEQ ID NO: 445045 - RNA, 19 nt, Artificial Sequence
  Description of Artificial Sequence: Synthetic oligonucleotide
gauagaggccacaacgaug

SEQ ID NO: 445046 - RNA, 19 nt, Artificial Sequence
  Description of Artificial Sequence: Synthetic oligonucleotide
cacguuagaauaccaaguc

SEQ ID NO: 445047 - RNA, 19 nt, Artificial Sequence
  Description of Artificial Sequence: Synthetic oligonucleotide
agguauccuggacauacag

SEQ ID NO: 445048 - RNA, 19 nt, Artificial Sequence
  Description of Artificial Sequence: Synthetic oligonucleotide
auuugagcgugaucucgac

SEQ ID NO: 445049 - RNA, 19 nt, Artificial Sequence
  Description of Artificial Sequence: Synthetic oligonucleotide
ugauucagcuuugagaauu

SEQ ID NO: 445050 - RNA, 19 nt, Artificial Sequence
  Description of Artificial Sequence: Synthetic oligonucleotide
uuugagcgugaucucgacc

SEQ ID NO: 445051 - RNA, 19 nt, Artificial Sequence
  Description of Artificial Sequence: Synthetic oligonucleotide
agcacggaaguguuuccac

SEQ ID NO: 445052 - RNA, 19 nt, Artificial Sequence
  Description of Artificial Sequence: Synthetic oligonucleotide
ugucagucuacauccaaau

SEQ ID NO: 445053 - RNA, 19 nt, Artificial Sequence
  Description of Artificial Sequence: Synthetic oligonucleotide
guagaugacaucguccaug

SEQ ID NO: 445054 - RNA, 19 nt, Artificial Sequence
  Description of Artificial Sequence: Synthetic oligonucleotide
uggugguuccaaucgacug

SEQ ID NO: 445055 - RNA, 19 nt, Artificial Sequence
  Description of Artificial Sequence: Synthetic oligonucleotide
cagaaaugcucggugaacc

SEQ ID NO: 445056 - RNA, 19 nt, Artificial Sequence
  Description of Artificial Sequence: Synthetic oligonucleotide
ugagaguuuuaguuuacuu

SEQ ID NO: 445057 - RNA, 19 nt, Artificial Sequence
  Description of Artificial Sequence: Synthetic oligonucleotide
acguuagaauaccaagucu

SEQ ID NO: 445058 - RNA, 19 nt, Artificial Sequence
  Description of Artificial Sequence: Synthetic oligonucleotide
uuuuccacgggcucuuuuc

SEQ ID NO: 445059 - RNA, 19 nt, Artificial Sequence
  Description of Artificial Sequence: Synthetic oligonucleotide
cauaauaaguguucccaga

SEQ ID NO: 445060 - RNA, 19 nt, Artificial Sequence
  Description of Artificial Sequence: Synthetic oligonucleotide
uuccaaucgacugaaggaa

SEQ ID NO: 445061 - RNA, 19 nt, Artificial Sequence
  Description of Artificial Sequence: Synthetic oligonucleotide
gugaccauucacauaguag

SEQ ID NO: 445062 - RNA, 19 nt, Artificial Sequence
  Description of Artificial Sequence: Synthetic oligonucleotide
caaggcgugaucacagcag

SEQ ID NO: 445063 - RNA, 19 nt, Artificial Sequence
  Description of Artificial Sequence: Synthetic oligonucleotide
uguguucacuacugucccg

SEQ ID NO: 445064 - RNA, 19 nt, Artificial Sequence
  Description of Artificial Sequence: Synthetic oligonucleotide
agaguaauccugucccaug

SEQ ID NO: 445065 - RNA, 19 nt, Artificial Sequence
  Description of Artificial Sequence: Synthetic oligonucleotide
ugaucucgaccuugggcgg

SEQ ID NO: 445066 - RNA, 19 nt, Artificial Sequence
  Description of Artificial Sequence: Synthetic oligonucleotide
agauuucauguccugguaa

SEQ ID NO: 445067 - RNA, 19 nt, Artificial Sequence
  Description of Artificial Sequence: Synthetic oligonucleotide
caaccauaauaaguguucc

SEQ ID NO: 445068 - RNA, 19 nt, Artificial Sequence
  Description of Artificial Sequence: Synthetic oligonucleotide
cauuaaguacucauuccca

SEQ ID NO: 445069 - RNA, 19 nt, Artificial Sequence
  Description of Artificial Sequence: Synthetic oligonucleotide
cuaggcagacucaacagga

SEQ ID NO: 445070 - RNA, 19 nt, Artificial Sequence
  Description of Artificial Sequence: Synthetic oligonucleotide
gacggggagagacuuaauc

SEQ ID NO: 445071 - RNA, 19 nt, Artificial Sequence
  Description of Artificial Sequence: Synthetic oligonucleotide
ucggaauuccucaaccaua

SEQ ID NO: 445072 - RNA, 19 nt, Artificial Sequence
  Description of Artificial Sequence: Synthetic oligonucleotide
gacaucguccauguuuucc

SEQ ID NO: 445073 - RNA, 19 nt, Artificial Sequence
  Description of Artificial Sequence: Synthetic oligonucleotide
ugguguagaaaaugccaga

SEQ ID NO: 445074 - RNA, 19 nt, Artificial Sequence
  Description of Artificial Sequence: Synthetic oligonucleotide
uuucauuaccccucacaaa

SEQ ID NO: 445075 - RNA, 19 nt, Artificial Sequence
  Description of Artificial Sequence: Synthetic oligonucleotide
cauucaguuauugucuguc

SEQ ID NO: 445076 - RNA, 19 nt, Artificial Sequence
  Description of Artificial Sequence: Synthetic oligonucleotide
aguauacgauauauuaaca

SEQ ID NO: 445077 - RNA, 19 nt, Artificial Sequence
  Description of Artificial Sequence: Synthetic oligonucleotide
ugcggauguguucacuacu

SEQ ID NO: 445078 - RNA, 19 nt, Artificial Sequence
  Description of Artificial Sequence: Synthetic oligonucleotide
caggugacgugaaugcccc

SEQ ID NO: 445079 - RNA, 19 nt, Artificial Sequence
  Description of Artificial Sequence: Synthetic oligonucleotide
agaaaugcucggugaacca

SEQ ID NO: 445080 - RNA, 19 nt, Artificial Sequence
  Description of Artificial Sequence: Synthetic oligonucleotide
auauaugcggggaacacaa

SEQ ID NO: 445081 - RNA, 19 nt, Artificial Sequence
  Description of Artificial Sequence: Synthetic oligonucleotide
agaaaaccacaucccacgu

SEQ ID NO: 445082 - RNA, 19 nt, Artificial Sequence
  Description of Artificial Sequence: Synthetic oligonucleotide
uggucauuacccauacuuu

SEQ ID NO: 445083 - RNA, 19 nt, Artificial Sequence
  Description of Artificial Sequence: Synthetic oligonucleotide
agcucuaugaggccgguuu

SEQ ID NO: 445084 - RNA, 19 nt, Artificial Sequence
  Description of Artificial Sequence: Synthetic oligonucleotide
cguuagaauaccaagucug

SEQ ID NO: 445085 - RNA, 19 nt, Artificial Sequence
  Description of Artificial Sequence: Synthetic oligonucleotide
uuggugguuccaaucgacu

SEQ ID NO: 445086 - RNA, 19 nt, Artificial Sequence
  Description of Artificial Sequence: Synthetic oligonucleotide
caaucgacugaaggaaagg

SEQ ID NO: 445087 - RNA, 19 nt, Artificial Sequence
  Description of Artificial Sequence: Synthetic oligonucleotide
cugaguaccccuggaauag

SEQ ID NO: 445088 - RNA, 19 nt, Artificial Sequence
  Description of Artificial Sequence: Synthetic oligonucleotide
ucacauaguagaugacauc

SEQ ID NO: 445089 - RNA, 19 nt, Artificial Sequence
  Description of Artificial Sequence: Synthetic oligonucleotide
acaacacgaaguggggugg

SEQ ID NO: 445090 - RNA, 19 nt, Artificial Sequence
  Description of Artificial Sequence: Synthetic oligonucleotide
cucuaacauggacugcagg

SEQ ID NO: 445091 - RNA, 19 nt, Artificial Sequence
  Description of Artificial Sequence: Synthetic oligonucleotide
aguuauugucugucagucu

SEQ ID NO: 445092 - RNA, 19 nt, Artificial Sequence
  Description of Artificial Sequence: Synthetic oligonucleotide
acacguuguaauaggaaug

SEQ ID NO: 445093 - RNA, 19 nt, Artificial Sequence
  Description of Artificial Sequence: Synthetic oligonucleotide
aaaucauguaggccauaua

SEQ ID NO: 445094 - RNA, 19 nt, Artificial Sequence
  Description of Artificial Sequence: Synthetic oligonucleotide
guacauugcaaaauuucuc

SEQ ID NO: 445095 - RNA, 19 nt, Artificial Sequence
  Description of Artificial Sequence: Synthetic oligonucleotide
caguuauugucugucaguc

SEQ ID NO: 445096 - RNA, 19 nt, Artificial Sequence
  Description of Artificial Sequence: Synthetic oligonucleotide
acugaguaccccuggaaua

SEQ ID NO: 445097 - RNA, 19 nt, Artificial Sequence
  Description of Artificial Sequence: Synthetic oligonucleotide
uccaaucgacugaaggaaa

SEQ ID NO: 445098 - RNA, 19 nt, Artificial Sequence
  Description of Artificial Sequence: Synthetic oligonucleotide
aucauguaggccauauaug

SEQ ID NO: 445099 - RNA, 19 nt, Artificial Sequence
  Description of Artificial Sequence: Synthetic oligonucleotide
ugacuaguuucuuuucaua

SEQ ID NO: 445100 - RNA, 19 nt, Artificial Sequence
  Description of Artificial Sequence: Synthetic oligonucleotide
auaaguguucccagaaccu

SEQ ID NO: 445101 - RNA, 19 nt, Artificial Sequence
  Description of Artificial Sequence: Synthetic oligonucleotide
uggagaugaugaugagaag

SEQ ID NO: 445102 - RNA, 19 nt, Artificial Sequence
  Description of Artificial Sequence: Synthetic oligonucleotide
gaaaugcucggugaaccac

SEQ ID NO: 445103 - RNA, 19 nt, Artificial Sequence
  Description of Artificial Sequence: Synthetic oligonucleotide
cauggugacggacgugugc

SEQ ID NO: 445104 - RNA, 19 nt, Artificial Sequence
  Description of Artificial Sequence: Synthetic oligonucleotide
ugccuaauccucuccuaca

SEQ ID NO: 445105 - RNA, 19 nt, Artificial Sequence
  Description of Artificial Sequence: Synthetic oligonucleotide
agagucucaggugacguga

SEQ ID NO: 445106 - RNA, 19 nt, Artificial Sequence
  Description of Artificial Sequence: Synthetic oligonucleotide
accccucacaaaucagggg

SEQ ID NO: 445107 - RNA, 19 nt, Artificial Sequence
  Description of Artificial Sequence: Synthetic oligonucleotide
ucauuaccccucacaaauc

SEQ ID NO: 445108 - RNA, 19 nt, Artificial Sequence
  Description of Artificial Sequence: Synthetic oligonucleotide
ugucccgagaacccuccug

SEQ ID NO: 445109 - RNA, 19 nt, Artificial Sequence
  Description of Artificial Sequence: Synthetic oligonucleotide
guacucuaaagccccuccc

SEQ ID NO: 445110 - RNA, 19 nt, Artificial Sequence
  Description of Artificial Sequence: Synthetic oligonucleotide
aggcagacucaacaggaca

SEQ ID NO: 445111 - RNA, 19 nt, Artificial Sequence
  Description of Artificial Sequence: Synthetic oligonucleotide
uauugucugucagucuaca

SEQ ID NO: 445112 - RNA, 19 nt, Artificial Sequence
  Description of Artificial Sequence: Synthetic oligonucleotide
aaagggugcaaagucuauu

SEQ ID NO: 445113 - RNA, 19 nt, Artificial Sequence
  Description of Artificial Sequence: Synthetic oligonucleotide
augccagaaucacuuggug

SEQ ID NO: 445114 - RNA, 19 nt, Artificial Sequence
  Description of Artificial Sequence: Synthetic oligonucleotide
ucccacguuagaauaccaa

SEQ ID NO: 445115 - RNA, 19 nt, Artificial Sequence
  Description of Artificial Sequence: Synthetic oligonucleotide
gugccugcaucuuagaaua

SEQ ID NO: 445116 - RNA, 19 nt, Artificial Sequence
  Description of Artificial Sequence: Synthetic oligonucleotide
uaggccauauaugcgggga

SEQ ID NO: 445117 - RNA, 19 nt, Artificial Sequence
  Description of Artificial Sequence: Synthetic oligonucleotide
uccacgggcucuuuucgga

SEQ ID NO: 445118 - RNA, 19 nt, Artificial Sequence
  Description of Artificial Sequence: Synthetic oligonucleotide
guaggccauauaugcgggg

SEQ ID NO: 445119 - RNA, 19 nt, Artificial Sequence
  Description of Artificial Sequence: Synthetic oligonucleotide
aaucacuuggugguuccaa

SEQ ID NO: 445120 - RNA, 19 nt, Artificial Sequence
  Description of Artificial Sequence: Synthetic oligonucleotide
uguucacuacugucccgag

SEQ ID NO: 445121 - RNA, 19 nt, Artificial Sequence
  Description of Artificial Sequence: Synthetic oligonucleotide
cauacuuuauaaucagagu

SEQ ID NO: 445122 - RNA, 19 nt, Artificial Sequence
  Description of Artificial Sequence: Synthetic oligonucleotide
guaauaggaauggaugaaa

SEQ ID NO: 445123 - RNA, 19 nt, Artificial Sequence
  Description of Artificial Sequence: Synthetic oligonucleotide
acuuggugguuccaaucga

SEQ ID NO: 445124 - RNA, 19 nt, Artificial Sequence
  Description of Artificial Sequence: Synthetic oligonucleotide
acauucaguuauugucugu

SEQ ID NO: 445125 - RNA, 19 nt, Artificial Sequence
  Description of Artificial Sequence: Synthetic oligonucleotide
gauuugagcgugaucucga

SEQ ID NO: 445126 - RNA, 19 nt, Artificial Sequence
  Description of Artificial Sequence: Synthetic oligonucleotide
cugccuaauccucuccuac

SEQ ID NO: 445127 - RNA, 19 nt, Artificial Sequence
  Description of Artificial Sequence: Synthetic oligonucleotide
ggauccgcaaucucuaaca

SEQ ID NO: 445128 - RNA, 19 nt, Artificial Sequence
  Description of Artificial Sequence: Synthetic oligonucleotide
gcauggaagaaaugacugc

SEQ ID NO: 445129 - RNA, 19 nt, Artificial Sequence
  Description of Artificial Sequence: Synthetic oligonucleotide
cccacguuagaauaccaag

SEQ ID NO: 445130 - RNA, 19 nt, Artificial Sequence
  Description of Artificial Sequence: Synthetic oligonucleotide
ugaagcacauggugacgga

SEQ ID NO: 445131 - RNA, 19 nt, Artificial Sequence
  Description of Artificial Sequence: Synthetic oligonucleotide
ugcugagguugaauuuucu

SEQ ID NO: 445132 - RNA, 19 nt, Artificial Sequence
  Description of Artificial Sequence: Synthetic oligonucleotide
cuggaccccuuucaaacac

SEQ ID NO: 445133 - RNA, 19 nt, Artificial Sequence
  Description of Artificial Sequence: Synthetic oligonucleotide
agaacccuccuguguuccg

SEQ ID NO: 445134 - RNA, 19 nt, Artificial Sequence
  Description of Artificial Sequence: Synthetic oligonucleotide
acugucccgagaacccucc

SEQ ID NO: 445135 - RNA, 19 nt, Artificial Sequence
  Description of Artificial Sequence: Synthetic oligonucleotide
aaaccacaucccacguuag

SEQ ID NO: 445136 - RNA, 19 nt, Artificial Sequence
  Description of Artificial Sequence: Synthetic oligonucleotide
gggugcaaagucuauuaac

SEQ ID NO: 445137 - RNA, 19 nt, Artificial Sequence
  Description of Artificial Sequence: Synthetic oligonucleotide
agccaaaaguccaugugga

SEQ ID NO: 445138 - RNA, 19 nt, Artificial Sequence
  Description of Artificial Sequence: Synthetic oligonucleotide
cacagcacggaaguguuuc

SEQ ID NO: 445139 - RNA, 19 nt, Artificial Sequence
  Description of Artificial Sequence: Synthetic oligonucleotide
ugcaaggcgugaucacagc

SEQ ID NO: 445140 - RNA, 19 nt, Artificial Sequence
  Description of Artificial Sequence: Synthetic oligonucleotide
aggauagaggccacaacga

SEQ ID NO: 445141 - RNA, 19 nt, Artificial Sequence
  Description of Artificial Sequence: Synthetic oligonucleotide
ccuacaacacgaagugggg

SEQ ID NO: 445142 - RNA, 19 nt, Artificial Sequence
  Description of Artificial Sequence: Synthetic oligonucleotide
ggcagacucaacaggacag

SEQ ID NO: 445143 - RNA, 19 nt, Artificial Sequence
  Description of Artificial Sequence: Synthetic oligonucleotide
auccuuggaaugucaggga

SEQ ID NO: 445144 - RNA, 19 nt, Artificial Sequence
  Description of Artificial Sequence: Synthetic oligonucleotide
gaagauccucucugggguc

SEQ ID NO: 445145 - RNA, 19 nt, Artificial Sequence
  Description of Artificial Sequence: Synthetic oligonucleotide
gguuucaccuuuugcacuc

SEQ ID NO: 445146 - RNA, 19 nt, Artificial Sequence
  Description of Artificial Sequence: Synthetic oligonucleotide
gaggaacaagcagaggcuc

SEQ ID NO: 445147 - RNA, 19 nt, Artificial Sequence
  Description of Artificial Sequence: Synthetic oligonucleotide
aggauuuaacacugcuuuu

SEQ ID NO: 445148 - RNA, 19 nt, Artificial Sequence
  Description of Artificial Sequence: Synthetic oligonucleotide
ugauuucauuaccccucac

SEQ ID NO: 445149 - RNA, 19 nt, Artificial Sequence
  Description of Artificial Sequence: Synthetic oligonucleotide
gucagucuacauccaaauc

SEQ ID NO: 445150 - RNA, 19 nt, Artificial Sequence
  Description of Artificial Sequence: Synthetic oligonucleotide
aguucuaccuguagccaug

SEQ ID NO: 445151 - RNA, 19 nt, Artificial Sequence
  Description of Artificial Sequence: Synthetic oligonucleotide
gagaacccuccuguguucc

SEQ ID NO: 445152 - RNA, 19 nt, Artificial Sequence
  Description of Artificial Sequence: Synthetic oligonucleotide
cuggucauuacccauacuu

SEQ ID NO: 445153 - RNA, 19 nt, Artificial Sequence
  Description of Artificial Sequence: Synthetic oligonucleotide
cauacauuaaguacucauu

SEQ ID NO: 445154 - RNA, 19 nt, Artificial Sequence
  Description of Artificial Sequence: Synthetic oligonucleotide
ccaaucgacugaaggaaag

SEQ ID NO: 445155 - RNA, 19 nt, Artificial Sequence
  Description of Artificial Sequence: Synthetic oligonucleotide
augagaguuuuaguuuacu

SEQ ID NO: 445156 - RNA, 19 nt, Artificial Sequence
  Description of Artificial Sequence: Synthetic oligonucleotide
agaaagggugcaaagucua

SEQ ID NO: 445157 - RNA, 19 nt, Artificial Sequence
  Description of Artificial Sequence: Synthetic oligonucleotide
ggcuagccgagcuucugcg

SEQ ID NO: 445158 - RNA, 19 nt, Artificial Sequence
  Description of Artificial Sequence: Synthetic oligonucleotide
agcgugaucucgaccuugg

SEQ ID NO: 445159 - RNA, 19 nt, Artificial Sequence
  Description of Artificial Sequence: Synthetic oligonucleotide
cucaggugacgugaaugcc

SEQ ID NO: 445160 - RNA, 19 nt, Artificial Sequence
  Description of Artificial Sequence: Synthetic oligonucleotide
cuuucguggcgacggggag

SEQ ID NO: 445161 - RNA, 19 nt, Artificial Sequence
  Description of Artificial Sequence: Synthetic oligonucleotide
agccaagcuuauuguauaa

SEQ ID NO: 445162 - RNA, 19 nt, Artificial Sequence
  Description of Artificial Sequence: Synthetic oligonucleotide
aacccuccuguguuccggu

SEQ ID NO: 445163 - RNA, 19 nt, Artificial Sequence
  Description of Artificial Sequence: Synthetic oligonucleotide
gacugcaaggcgugaucac

SEQ ID NO: 445164 - RNA, 19 nt, Artificial Sequence
  Description of Artificial Sequence: Synthetic oligonucleotide
auagauccuuggaauguca

SEQ ID NO: 445165 - RNA, 19 nt, Artificial Sequence
  Description of Artificial Sequence: Synthetic oligonucleotide
aaaugacugcaaggcguga

SEQ ID NO: 445166 - RNA, 19 nt, Artificial Sequence
  Description of Artificial Sequence: Synthetic oligonucleotide
agggugcaaagucuauuaa

SEQ ID NO: 445167 - RNA, 19 nt, Artificial Sequence
  Description of Artificial Sequence: Synthetic oligonucleotide
cauauaugcggggaacaca

SEQ ID NO: 445168 - RNA, 19 nt, Artificial Sequence
  Description of Artificial Sequence: Synthetic oligonucleotide
ggugguuccaaucgacuga

SEQ ID NO: 445169 - RNA, 19 nt, Artificial Sequence
  Description of Artificial Sequence: Synthetic oligonucleotide
uacauucacuccucagauu

SEQ ID NO: 445170 - RNA, 19 nt, Artificial Sequence
  Description of Artificial Sequence: Synthetic oligonucleotide
uccguucccagucccggaa

SEQ ID NO: 445171 - RNA, 19 nt, Artificial Sequence
  Description of Artificial Sequence: Synthetic oligonucleotide
ggucauuacccauacuuua

SEQ ID NO: 445172 - RNA, 19 nt, Artificial Sequence
  Description of Artificial Sequence: Synthetic oligonucleotide
cucggugaaccaccugaag

SEQ ID NO: 445173 - RNA, 19 nt, Artificial Sequence
  Description of Artificial Sequence: Synthetic oligonucleotide
guaggccaccacacaaagg

SEQ ID NO: 445174 - RNA, 19 nt, Artificial Sequence
  Description of Artificial Sequence: Synthetic oligonucleotide
gguauccuggacauacagc

SEQ ID NO: 445175 - RNA, 19 nt, Artificial Sequence
  Description of Artificial Sequence: Synthetic oligonucleotide
uuucguggcgacggggaga

SEQ ID NO: 445176 - RNA, 19 nt, Artificial Sequence
  Description of Artificial Sequence: Synthetic oligonucleotide
uugggcggccuucuccgca

SEQ ID NO: 445177 - RNA, 19 nt, Artificial Sequence
  Description of Artificial Sequence: Synthetic oligonucleotide
uccggucccuggcggaugc

SEQ ID NO: 445178 - RNA, 19 nt, Artificial Sequence
  Description of Artificial Sequence: Synthetic oligonucleotide
uguuccggucccuggcgga

SEQ ID NO: 445179 - RNA, 19 nt, Artificial Sequence
  Description of Artificial Sequence: Synthetic oligonucleotide
guguucacuacugucccga

SEQ ID NO: 445180 - RNA, 19 nt, Artificial Sequence
  Description of Artificial Sequence: Synthetic oligonucleotide
caaaguguucaugagaguu

SEQ ID NO: 445181 - RNA, 19 nt, Artificial Sequence
  Description of Artificial Sequence: Synthetic oligonucleotide
guucgggaccuuccugaag

SEQ ID NO: 445182 - RNA, 19 nt, Artificial Sequence
  Description of Artificial Sequence: Synthetic oligonucleotide
gggucauacauuaaguacu

SEQ ID NO: 445183 - RNA, 19 nt, Artificial Sequence
  Description of Artificial Sequence: Synthetic oligonucleotide
acgugugccugcaucuuag

SEQ ID NO: 445184 - RNA, 19 nt, Artificial Sequence
  Description of Artificial Sequence: Synthetic oligonucleotide
gguguagaaaaugccagaa

SEQ ID NO: 445185 - RNA, 19 nt, Artificial Sequence
  Description of Artificial Sequence: Synthetic oligonucleotide
acgccguaggccaccacac

SEQ ID NO: 445186 - RNA, 19 nt, Artificial Sequence
  Description of Artificial Sequence: Synthetic oligonucleotide
cuacauucacuccucagau

SEQ ID NO: 445187 - RNA, 19 nt, Artificial Sequence
  Description of Artificial Sequence: Synthetic oligonucleotide
cacggaaguguuuccacaa

SEQ ID NO: 445188 - RNA, 19 nt, Artificial Sequence
  Description of Artificial Sequence: Synthetic oligonucleotide
cagucccggaagcugggag

SEQ ID NO: 445189 - RNA, 19 nt, Artificial Sequence
  Description of Artificial Sequence: Synthetic oligonucleotide
uggcaauugcagggugggg

SEQ ID NO: 445190 - RNA, 19 nt, Artificial Sequence
  Description of Artificial Sequence: Synthetic oligonucleotide
ccugguaacagauggcaca

SEQ ID NO: 445191 - RNA, 19 nt, Artificial Sequence
  Description of Artificial Sequence: Synthetic oligonucleotide
agggaccugccuaauccuc

SEQ ID NO: 445192 - RNA, 19 nt, Artificial Sequence
  Description of Artificial Sequence: Synthetic oligonucleotide
gaggccgguuugcacugcc

SEQ ID NO: 445193 - RNA, 19 nt, Artificial Sequence
  Description of Artificial Sequence: Synthetic oligonucleotide
agugcccgcccaucccuuc

SEQ ID NO: 445194 - RNA, 19 nt, Artificial Sequence
  Description of Artificial Sequence: Synthetic oligonucleotide
ugagacgccguaggccacc

SEQ ID NO: 445195 - RNA, 19 nt, Artificial Sequence
  Description of Artificial Sequence: Synthetic oligonucleotide
gugacggacgugugccugc

SEQ ID NO: 445196 - RNA, 19 nt, Artificial Sequence
  Description of Artificial Sequence: Synthetic oligonucleotide
guucacuacugucccgaga

SEQ ID NO: 445197 - RNA, 19 nt, Artificial Sequence
  Description of Artificial Sequence: Synthetic oligonucleotide
gaucucgaccuugggcggc

SEQ ID NO: 445198 - RNA, 19 nt, Artificial Sequence
  Description of Artificial Sequence: Synthetic oligonucleotide
aggcgguaagugaccauuc

SEQ ID NO: 445199 - RNA, 19 nt, Artificial Sequence
  Description of Artificial Sequence: Synthetic oligonucleotide
cucaaccauaauaaguguu

SEQ ID NO: 445200 - RNA, 19 nt, Artificial Sequence
  Description of Artificial Sequence: Synthetic oligonucleotide
aggccauauaugcggggaa

SEQ ID NO: 445201 - RNA, 19 nt, Artificial Sequence
  Description of Artificial Sequence: Synthetic oligonucleotide
auuucuccuacaacacgaa

SEQ ID NO: 445202 - RNA, 19 nt, Artificial Sequence
  Description of Artificial Sequence: Synthetic oligonucleotide
aggaacaagcagaggcuca

SEQ ID NO: 445203 - RNA, 19 nt, Artificial Sequence
  Description of Artificial Sequence: Synthetic oligonucleotide
gcgguaagugaccauucac

SEQ ID NO: 445204 - RNA, 19 nt, Artificial Sequence
  Description of Artificial Sequence: Synthetic oligonucleotide
cauaggcccagugcccgcc

SEQ ID NO: 445205 - RNA, 19 nt, Artificial Sequence
  Description of Artificial Sequence: Synthetic oligonucleotide
uuccguucccagucccgga

SEQ ID NO: 445206 - RNA, 19 nt, Artificial Sequence
  Description of Artificial Sequence: Synthetic oligonucleotide
gcuagccgagcuucugcgg

SEQ ID NO: 445207 - RNA, 19 nt, Artificial Sequence
  Description of Artificial Sequence: Synthetic oligonucleotide
aacacgaagugggguggaa

SEQ ID NO: 445208 - RNA, 19 nt, Artificial Sequence
  Description of Artificial Sequence: Synthetic oligonucleotide
gcaauugcagggugggguc

SEQ ID NO: 445209 - RNA, 19 nt, Artificial Sequence
  Description of Artificial Sequence: Synthetic oligonucleotide
aguuuacuucacacagcca

SEQ ID NO: 445210 - RNA, 19 nt, Artificial Sequence
  Description of Artificial Sequence: Synthetic oligonucleotide
ugcggaguaggaagcucuu

SEQ ID NO: 445211 - RNA, 19 nt, Artificial Sequence
  Description of Artificial Sequence: Synthetic oligonucleotide
ugggauccgcaaucucuaa

SEQ ID NO: 445212 - RNA, 19 nt, Artificial Sequence
  Description of Artificial Sequence: Synthetic oligonucleotide
ggguucgggaccuuccuga

SEQ ID NO: 445213 - RNA, 19 nt, Artificial Sequence
  Description of Artificial Sequence: Synthetic oligonucleotide
gcucccgggaugcaggcug

SEQ ID NO: 445214 - RNA, 19 nt, Artificial Sequence
  Description of Artificial Sequence: Synthetic oligonucleotide
gauccgcaaucucuaacau

SEQ ID NO: 445215 - RNA, 19 nt, Artificial Sequence
  Description of Artificial Sequence: Synthetic oligonucleotide
cacgguccacucuccgaag

SEQ ID NO: 445216 - RNA, 19 nt, Artificial Sequence
  Description of Artificial Sequence: Synthetic oligonucleotide
gccgguuugcacugccagg

SEQ ID NO: 445217 - RNA, 19 nt, Artificial Sequence
  Description of Artificial Sequence: Synthetic oligonucleotide
gaaaaccacaucccacguu

SEQ ID NO: 445218 - RNA, 19 nt, Artificial Sequence
  Description of Artificial Sequence: Synthetic oligonucleotide
uucugcggauguguucacu

SEQ ID NO: 445219 - RNA, 19 nt, Artificial Sequence
  Description of Artificial Sequence: Synthetic oligonucleotide
gcaaggcgugaucacagca

SEQ ID NO: 445220 - RNA, 19 nt, Artificial Sequence
  Description of Artificial Sequence: Synthetic oligonucleotide
gggauccgcaaucucuaac

SEQ ID NO: 445221 - RNA, 19 nt, Artificial Sequence
  Description of Artificial Sequence: Synthetic oligonucleotide
ggcggaugcucauggucag

SEQ ID NO: 445222 - RNA, 19 nt, Artificial Sequence
  Description of Artificial Sequence: Synthetic oligonucleotide
gacgugugccugcaucuua

SEQ ID NO: 445223 - RNA, 19 nt, Artificial Sequence
  Description of Artificial Sequence: Synthetic oligonucleotide
agccaacaaaguauacgau

SEQ ID NO: 445224 - RNA, 19 nt, Artificial Sequence
  Description of Artificial Sequence: Synthetic oligonucleotide
uggugacggacgugugccu

SEQ ID NO: 445225 - RNA, 19 nt, Artificial Sequence
  Description of Artificial Sequence: Synthetic oligonucleotide
gaaucacuuggugguucca

SEQ ID NO: 445226 - RNA, 19 nt, Artificial Sequence
  Description of Artificial Sequence: Synthetic oligonucleotide
uucuaccuguagccaugau

SEQ ID NO: 445227 - RNA, 19 nt, Artificial Sequence
  Description of Artificial Sequence: Synthetic oligonucleotide
cuucugcggauguguucac

SEQ ID NO: 445228 - RNA, 19 nt, Artificial Sequence
  Description of Artificial Sequence: Synthetic oligonucleotide
gagaggucaggaugcuacu

SEQ ID NO: 445229 - RNA, 19 nt, Artificial Sequence
  Description of Artificial Sequence: Synthetic oligonucleotide
ugacggacgugugccugca

SEQ ID NO: 445230 - RNA, 19 nt, Artificial Sequence
  Description of Artificial Sequence: Synthetic oligonucleotide
cccuauucauggcucccgg

SEQ ID NO: 445231 - RNA, 19 nt, Artificial Sequence
  Description of Artificial Sequence: Synthetic oligonucleotide
cuaacauggacugcaggau

SEQ ID NO: 445232 - RNA, 19 nt, Artificial Sequence
  Description of Artificial Sequence: Synthetic oligonucleotide
cgguaagugaccauucaca

SEQ ID NO: 445233 - RNA, 19 nt, Artificial Sequence
  Description of Artificial Sequence: Synthetic oligonucleotide
ggagccacacguuguaaua

SEQ ID NO: 445234 - RNA, 19 nt, Artificial Sequence
  Description of Artificial Sequence: Synthetic oligonucleotide
gcagaaaugcucggugaac

SEQ ID NO: 445235 - RNA, 19 nt, Artificial Sequence
  Description of Artificial Sequence: Synthetic oligonucleotide
ccauauaugcggggaacac

SEQ ID NO: 445236 - RNA, 19 nt, Artificial Sequence
  Description of Artificial Sequence: Synthetic oligonucleotide
cugcggaguaggaagcucu

SEQ ID NO: 445237 - RNA, 19 nt, Artificial Sequence
  Description of Artificial Sequence: Synthetic oligonucleotide
gcacggaaguguuuccaca

SEQ ID NO: 445238 - RNA, 19 nt, Artificial Sequence
  Description of Artificial Sequence: Synthetic oligonucleotide
ggcgguaagugaccauuca

SEQ ID NO: 445239 - RNA, 19 nt, Artificial Sequence
  Description of Artificial Sequence: Synthetic oligonucleotide
aucuuagaauacagucaau

SEQ ID NO: 445240 - RNA, 19 nt, Artificial Sequence
  Description of Artificial Sequence: Synthetic oligonucleotide
gaaacuccagcaggcggua

SEQ ID NO: 445241 - RNA, 19 nt, Artificial Sequence
  Description of Artificial Sequence: Synthetic oligonucleotide
ccuccuguguuccgguccc

SEQ ID NO: 445242 - RNA, 19 nt, Artificial Sequence
  Description of Artificial Sequence: Synthetic oligonucleotide
cacugaguaccccuggaau

SEQ ID NO: 445243 - RNA, 19 nt, Artificial Sequence
  Description of Artificial Sequence: Synthetic oligonucleotide
ggugacggacgugugccug

SEQ ID NO: 445244 - RNA, 19 nt, Artificial Sequence
  Description of Artificial Sequence: Synthetic oligonucleotide
cagguauccuggacauaca

SEQ ID NO: 445245 - RNA, 19 nt, Artificial Sequence
  Description of Artificial Sequence: Synthetic oligonucleotide
aucccacguuagaauacca

SEQ ID NO: 445246 - RNA, 19 nt, Artificial Sequence
  Description of Artificial Sequence: Synthetic oligonucleotide
ggcaauugcaggguggggu

SEQ ID NO: 445247 - RNA, 19 nt, Artificial Sequence
  Description of Artificial Sequence: Synthetic oligonucleotide
ccacguuagaauaccaagu

SEQ ID NO: 445248 - RNA, 19 nt, Artificial Sequence
  Description of Artificial Sequence: Synthetic oligonucleotide
caagagucucaggugacgu

SEQ ID NO: 445249 - RNA, 19 nt, Artificial Sequence
  Description of Artificial Sequence: Synthetic oligonucleotide
cuggcuagccgagcuucug

SEQ ID NO: 445250 - RNA, 19 nt, Artificial Sequence
  Description of Artificial Sequence: Synthetic oligonucleotide
gucccggaagcugggagga

SEQ ID NO: 445251 - RNA, 19 nt, Artificial Sequence
  Description of Artificial Sequence: Synthetic oligonucleotide
ggaccccuuucaaacacuc

SEQ ID NO: 445252 - RNA, 19 nt, Artificial Sequence
  Description of Artificial Sequence: Synthetic oligonucleotide
ucccuggcggaugcucaug

SEQ ID NO: 445253 - RNA, 19 nt, Artificial Sequence
  Description of Artificial Sequence: Synthetic oligonucleotide
caggggcuacuucugaagu

SEQ ID NO: 445254 - RNA, 19 nt, Artificial Sequence
  Description of Artificial Sequence: Synthetic oligonucleotide
gccguaggccaccacacaa

SEQ ID NO: 445255 - RNA, 19 nt, Artificial Sequence
  Description of Artificial Sequence: Synthetic oligonucleotide
cuacaacacgaaguggggu

SEQ ID NO: 445256 - RNA, 19 nt, Artificial Sequence
  Description of Artificial Sequence: Synthetic oligonucleotide
gggguucgggaccuuccug

SEQ ID NO: 445257 - RNA, 19 nt, Artificial Sequence
  Description of Artificial Sequence: Synthetic oligonucleotide
uuccggucccuggcggaug

SEQ ID NO: 445258 - RNA, 19 nt, Artificial Sequence
  Description of Artificial Sequence: Synthetic oligonucleotide
ggaccugccuaauccucuc

SEQ ID NO: 445259 - RNA, 19 nt, Artificial Sequence
  Description of Artificial Sequence: Synthetic oligonucleotide
gggcuacuucugaaguugc

SEQ ID NO: 445260 - RNA, 19 nt, Artificial Sequence
  Description of Artificial Sequence: Synthetic oligonucleotide
gccaaaaguccauguggaa

SEQ ID NO: 445261 - RNA, 19 nt, Artificial Sequence
  Description of Artificial Sequence: Synthetic oligonucleotide
gcgugaucucgaccuuggg

SEQ ID NO: 445262 - RNA, 19 nt, Artificial Sequence
  Description of Artificial Sequence: Synthetic oligonucleotide
gucaaugugucuacaucuu

SEQ ID NO: 445263 - RNA, 19 nt, Artificial Sequence
  Description of Artificial Sequence: Synthetic oligonucleotide
caaagucuauuaacagcuu

SEQ ID NO: 445264 - RNA, 19 nt, Artificial Sequence
  Description of Artificial Sequence: Synthetic oligonucleotide
ugucagggaccugccuaau

SEQ ID NO: 445265 - RNA, 19 nt, Artificial Sequence
  Description of Artificial Sequence: Synthetic oligonucleotide
cuccucuaggcagacucaa

SEQ ID NO: 445266 - RNA, 19 nt, Artificial Sequence
  Description of Artificial Sequence: Synthetic oligonucleotide
ccacacguuguaauaggaa

SEQ ID NO: 445267 - RNA, 19 nt, Artificial Sequence
  Description of Artificial Sequence: Synthetic oligonucleotide
gaguaccccuggaauagau

SEQ ID NO: 445268 - RNA, 19 nt, Artificial Sequence
  Description of Artificial Sequence: Synthetic oligonucleotide
cacggagccacacguugua

SEQ ID NO: 445269 - RNA, 19 nt, Artificial Sequence
  Description of Artificial Sequence: Synthetic oligonucleotide
caucccugcggaguaggaa

SEQ ID NO: 445270 - RNA, 19 nt, Artificial Sequence
  Description of Artificial Sequence: Synthetic oligonucleotide
cguggcgacggggagagac

SEQ ID NO: 445271 - RNA, 19 nt, Artificial Sequence
  Description of Artificial Sequence: Synthetic oligonucleotide
ccgggaugcaggcugucuc

SEQ ID NO: 445272 - RNA, 19 nt, Artificial Sequence
  Description of Artificial Sequence: Synthetic oligonucleotide
gcgugaucacagcagauuu

SEQ ID NO: 445273 - RNA, 19 nt, Artificial Sequence
  Description of Artificial Sequence: Synthetic oligonucleotide
gguucgggaccuuccugaa

SEQ ID NO: 445274 - RNA, 19 nt, Artificial Sequence
  Description of Artificial Sequence: Synthetic oligonucleotide
gaccuugggcggccuucuc

SEQ ID NO: 445275 - RNA, 19 nt, Artificial Sequence
  Description of Artificial Sequence: Synthetic oligonucleotide
acggagccacacguuguaa

SEQ ID NO: 445276 - RNA, 19 nt, Artificial Sequence
  Description of Artificial Sequence: Synthetic oligonucleotide
ccgguuugcacugccagga

SEQ ID NO: 445277 - RNA, 19 nt, Artificial Sequence
  Description of Artificial Sequence: Synthetic oligonucleotide
gccaagcuuauuguauaaa

SEQ ID NO: 445278 - RNA, 19 nt, Artificial Sequence
  Description of Artificial Sequence: Synthetic oligonucleotide
cagaguaauccugucccau

SEQ ID NO: 445279 - RNA, 19 nt, Artificial Sequence
  Description of Artificial Sequence: Synthetic oligonucleotide
gccuaauccucuccuacau

SEQ ID NO: 445280 - RNA, 19 nt, Artificial Sequence
  Description of Artificial Sequence: Synthetic oligonucleotide
cagcaucccugcggaguag

SEQ ID NO: 445281 - RNA, 19 nt, Artificial Sequence
  Description of Artificial Sequence: Synthetic oligonucleotide
caacacgaaguggggugga

SEQ ID NO: 445282 - RNA, 19 nt, Artificial Sequence
  Description of Artificial Sequence: Synthetic oligonucleotide
cacagauaucauugugcuu

SEQ ID NO: 445283 - RNA, 19 nt, Artificial Sequence
  Description of Artificial Sequence: Synthetic oligonucleotide
gaagcucuaugaggccggu

SEQ ID NO: 445284 - RNA, 19 nt, Artificial Sequence
  Description of Artificial Sequence: Synthetic oligonucleotide
gcggaugcucauggucagg

SEQ ID NO: 445285 - RNA, 19 nt, Artificial Sequence
  Description of Artificial Sequence: Synthetic oligonucleotide
cggugaaccaccugaagcu

SEQ ID NO: 445286 - RNA, 19 nt, Artificial Sequence
  Description of Artificial Sequence: Synthetic oligonucleotide
ccucaaccauaauaagugu

SEQ ID NO: 445287 - RNA, 19 nt, Artificial Sequence
  Description of Artificial Sequence: Synthetic oligonucleotide
ggagagacuuaaucuuauu

SEQ ID NO: 445288 - RNA, 19 nt, Artificial Sequence
  Description of Artificial Sequence: Synthetic oligonucleotide
cuacugucccgagaacccu

SEQ ID NO: 445289 - RNA, 19 nt, Artificial Sequence
  Description of Artificial Sequence: Synthetic oligonucleotide
gcgacggggagagacuuaa

SEQ ID NO: 445290 - RNA, 19 nt, Artificial Sequence
  Description of Artificial Sequence: Synthetic oligonucleotide
ccaucccuucucugaagca

SEQ ID NO: 445291 - RNA, 19 nt, Artificial Sequence
  Description of Artificial Sequence: Synthetic oligonucleotide
caggcgguaagugaccauu

SEQ ID NO: 445292 - RNA, 19 nt, Artificial Sequence
  Description of Artificial Sequence: Synthetic oligonucleotide
ccguucccagucccggaag

SEQ ID NO: 445293 - RNA, 19 nt, Artificial Sequence
  Description of Artificial Sequence: Synthetic oligonucleotide
ccugcggaguaggaagcuc

SEQ ID NO: 445294 - RNA, 19 nt, Artificial Sequence
  Description of Artificial Sequence: Synthetic oligonucleotide
ggaugcucccagugccaaa

SEQ ID NO: 445295 - RNA, 19 nt, Artificial Sequence
  Description of Artificial Sequence: Synthetic oligonucleotide
cugccugcaccuucaugau

SEQ ID NO: 445296 - RNA, 19 nt, Artificial Sequence
  Description of Artificial Sequence: Synthetic oligonucleotide
ccgcccaucccuucucuga

SEQ ID NO: 445297 - RNA, 19 nt, Artificial Sequence
  Description of Artificial Sequence: Synthetic oligonucleotide
ggcgugaucacagcagauu

SEQ ID NO: 445298 - RNA, 19 nt, Artificial Sequence
  Description of Artificial Sequence: Synthetic oligonucleotide
cacgggcucuuuucggaau

SEQ ID NO: 445299 - RNA, 19 nt, Artificial Sequence
  Description of Artificial Sequence: Synthetic oligonucleotide
gggaccugccuaauccucu

SEQ ID NO: 445300 - RNA, 19 nt, Artificial Sequence
  Description of Artificial Sequence: Synthetic oligonucleotide
ccugccuaauccucuccua

SEQ ID NO: 445301 - RNA, 19 nt, Artificial Sequence
  Description of Artificial Sequence: Synthetic oligonucleotide
gggcuggucauuacccaua

SEQ ID NO: 445302 - RNA, 19 nt, Artificial Sequence
  Description of Artificial Sequence: Synthetic oligonucleotide
cccucacaaaucaggggcu

SEQ ID NO: 445303 - RNA, 19 nt, Artificial Sequence
  Description of Artificial Sequence: Synthetic oligonucleotide
caacgaugaagaggaugau

SEQ ID NO: 445304 - RNA, 19 nt, Artificial Sequence
  Description of Artificial Sequence: Synthetic oligonucleotide
gugcccgcccaucccuucu

SEQ ID NO: 445305 - RNA, 19 nt, Artificial Sequence
  Description of Artificial Sequence: Synthetic oligonucleotide
ccgagaacccuccuguguu

SEQ ID NO: 445306 - RNA, 19 nt, Artificial Sequence
  Description of Artificial Sequence: Synthetic oligonucleotide
ccgcaaucucuaacaugga

SEQ ID NO: 445307 - RNA, 19 nt, Artificial Sequence
  Description of Artificial Sequence: Synthetic oligonucleotide
ccgagcuucugcggaugug

SEQ ID NO: 445308 - RNA, 19 nt, Artificial Sequence
  Description of Artificial Sequence: Synthetic oligonucleotide
gcaucccugcggaguagga

SEQ ID NO: 445309 - RNA, 19 nt, Artificial Sequence
  Description of Artificial Sequence: Synthetic oligonucleotide
gacggacgugugccugcau

SEQ ID NO: 445310 - RNA, 19 nt, Artificial Sequence
  Description of Artificial Sequence: Synthetic oligonucleotide
ccucacaaaucaggggcua

SEQ ID NO: 445311 - RNA, 19 nt, Artificial Sequence
  Description of Artificial Sequence: Synthetic oligonucleotide
guacacccagggccuucau

SEQ ID NO: 445312 - RNA, 19 nt, Artificial Sequence
  Description of Artificial Sequence: Synthetic oligonucleotide
gccgagcuucugcggaugu

SEQ ID NO: 445313 - RNA, 19 nt, Artificial Sequence
  Description of Artificial Sequence: Synthetic oligonucleotide
ccuaauccucuccuacauu

SEQ ID NO: 445314 - RNA, 19 nt, Artificial Sequence
  Description of Artificial Sequence: Synthetic oligonucleotide
cgugugccugcaucuuaga

SEQ ID NO: 445315 - RNA, 19 nt, Artificial Sequence
  Description of Artificial Sequence: Synthetic oligonucleotide
cgggcucuuuucggaauuc

SEQ ID NO: 445316 - RNA, 19 nt, Artificial Sequence
  Description of Artificial Sequence: Synthetic oligonucleotide
cgcccaucccuucucugaa

SEQ ID NO: 445317 - RNA, 19 nt, Artificial Sequence
  Description of Artificial Sequence: Synthetic oligonucleotide
cgggaugcaggcugucucu

SEQ ID NO: 445318 - RNA, 19 nt, Artificial Sequence
  Description of Artificial Sequence: Synthetic oligonucleotide
cccggaagcugggaggagu

SEQ ID NO: 445319 - RNA, 19 nt, Artificial Sequence
  Description of Artificial Sequence: Synthetic oligonucleotide
cagugcccgcccaucccuu

SEQ ID NO: 445320 - RNA, 19 nt, Artificial Sequence
  Description of Artificial Sequence: Synthetic oligonucleotide
ggcgacggggagagacuua

SEQ ID NO: 445321 - RNA, 19 nt, Artificial Sequence
  Description of Artificial Sequence: Synthetic oligonucleotide
ccucagauuugagcgugau

SEQ ID NO: 445322 - RNA, 19 nt, Artificial Sequence
  Description of Artificial Sequence: Synthetic oligonucleotide
cgccguaggccaccacaca

SEQ ID NO: 445323 - RNA, 19 nt, Artificial Sequence
  Description of Artificial Sequence: Synthetic oligonucleotide
gcccgcccaucccuucucu

SEQ ID NO: 445324 - RNA, 19 nt, Artificial Sequence
  Description of Artificial Sequence: Synthetic oligonucleotide
ccacaacgaugaagaggau

SEQ ID NO: 445325 - RNA, 19 nt, Artificial Sequence
  Description of Artificial Sequence: Synthetic oligonucleotide
cgguuugcacugccaggau

SEQ ID NO: 445326 - RNA, 19 nt, Artificial Sequence
  Description of Artificial Sequence: Synthetic oligonucleotide
uguaaugucuguaugaagg

SEQ ID NO: 445327 - RNA, 19 nt, Artificial Sequence
  Description of Artificial Sequence: Synthetic oligonucleotide
aaggcggaagacuagcucc

SEQ ID NO: 445328 - RNA, 19 nt, Artificial Sequence
  Description of Artificial Sequence: Synthetic oligonucleotide
aguuguuucaaacuugcac

SEQ ID NO: 445329 - RNA, 19 nt, Artificial Sequence
  Description of Artificial Sequence: Synthetic oligonucleotide
guuguuucaaacuugcacc

SEQ ID NO: 445330 - RNA, 19 nt, Artificial Sequence
  Description of Artificial Sequence: Synthetic oligonucleotide
aaacaauccaaagacccac

SEQ ID NO: 445331 - RNA, 19 nt, Artificial Sequence
  Description of Artificial Sequence: Synthetic oligonucleotide
uugagugucagccuggaca

SEQ ID NO: 445332 - RNA, 19 nt, Artificial Sequence
  Description of Artificial Sequence: Synthetic oligonucleotide
aagaaaugggugcuuguuc

SEQ ID NO: 445333 - RNA, 19 nt, Artificial Sequence
  Description of Artificial Sequence: Synthetic oligonucleotide
ucucguaucgguauugcag

SEQ ID NO: 445334 - RNA, 19 nt, Artificial Sequence
  Description of Artificial Sequence: Synthetic oligonucleotide
auuucuccggauuucauag

SEQ ID NO: 445335 - RNA, 19 nt, Artificial Sequence
  Description of Artificial Sequence: Synthetic oligonucleotide
aguaagaugucuccugaac

SEQ ID NO: 445336 - RNA, 19 nt, Artificial Sequence
  Description of Artificial Sequence: Synthetic oligonucleotide
uguccgacagguuaguggg

SEQ ID NO: 445337 - RNA, 19 nt, Artificial Sequence
  Description of Artificial Sequence: Synthetic oligonucleotide
ucaugcaaaagugaacugg

SEQ ID NO: 445338 - RNA, 19 nt, Artificial Sequence
  Description of Artificial Sequence: Synthetic oligonucleotide
aaaaguuacgcgcuuguaa

SEQ ID NO: 445339 - RNA, 19 nt, Artificial Sequence
  Description of Artificial Sequence: Synthetic oligonucleotide
ucgucugccacuuaagaag

SEQ ID NO: 445340 - RNA, 19 nt, Artificial Sequence
  Description of Artificial Sequence: Synthetic oligonucleotide
aaaguuacgcgcuuguaau

SEQ ID NO: 445341 - RNA, 19 nt, Artificial Sequence
  Description of Artificial Sequence: Synthetic oligonucleotide
augaugucgucauuucucc

SEQ ID NO: 445342 - RNA, 19 nt, Artificial Sequence
  Description of Artificial Sequence: Synthetic oligonucleotide
uccuuaaacaaccugcccu

SEQ ID NO: 445343 - RNA, 19 nt, Artificial Sequence
  Description of Artificial Sequence: Synthetic oligonucleotide
acuuaagaaggcuagggca

SEQ ID NO: 445344 - RNA, 19 nt, Artificial Sequence
  Description of Artificial Sequence: Synthetic oligonucleotide
cagaauagcucacaguucc

SEQ ID NO: 445345 - RNA, 19 nt, Artificial Sequence
  Description of Artificial Sequence: Synthetic oligonucleotide
ugcuuguucaugcaaaagu

SEQ ID NO: 445346 - RNA, 19 nt, Artificial Sequence
  Description of Artificial Sequence: Synthetic oligonucleotide
aaguuuaugaugucgucau

SEQ ID NO: 445347 - RNA, 19 nt, Artificial Sequence
  Description of Artificial Sequence: Synthetic oligonucleotide
ugucucaguagcauggacc

SEQ ID NO: 445348 - RNA, 19 nt, Artificial Sequence
  Description of Artificial Sequence: Synthetic oligonucleotide
ucaaucaaugugcaguacu

SEQ ID NO: 445349 - RNA, 19 nt, Artificial Sequence
  Description of Artificial Sequence: Synthetic oligonucleotide
aaucaaugugcaguacucg

SEQ ID NO: 445350 - RNA, 19 nt, Artificial Sequence
  Description of Artificial Sequence: Synthetic oligonucleotide
ugccaacuagccauggugg

SEQ ID NO: 445351 - RNA, 19 nt, Artificial Sequence
  Description of Artificial Sequence: Synthetic oligonucleotide
guaagaugucuccugaacc

SEQ ID NO: 445352 - RNA, 19 nt, Artificial Sequence
  Description of Artificial Sequence: Synthetic oligonucleotide
cacacgacugcucacaacc

SEQ ID NO: 445353 - RNA, 19 nt, Artificial Sequence
  Description of Artificial Sequence: Synthetic oligonucleotide
uaagaugucuccugaaccu

SEQ ID NO: 445354 - RNA, 19 nt, Artificial Sequence
  Description of Artificial Sequence: Synthetic oligonucleotide
gaaaugaaaggaccugcag

SEQ ID NO: 445355 - RNA, 19 nt, Artificial Sequence
  Description of Artificial Sequence: Synthetic oligonucleotide
acaguuguuucaaacuugc

SEQ ID NO: 445356 - RNA, 19 nt, Artificial Sequence
  Description of Artificial Sequence: Synthetic oligonucleotide
uuguuucaaacuugcaccc

SEQ ID NO: 445357 - RNA, 19 nt, Artificial Sequence
  Description of Artificial Sequence: Synthetic oligonucleotide
acacacuccuuaaacaacc

SEQ ID NO: 445358 - RNA, 19 nt, Artificial Sequence
  Description of Artificial Sequence: Synthetic oligonucleotide
ucuuaggaggguugaagcc

SEQ ID NO: 445359 - RNA, 19 nt, Artificial Sequence
  Description of Artificial Sequence: Synthetic oligonucleotide
uggauucugauccgcaccc

SEQ ID NO: 445360 - RNA, 19 nt, Artificial Sequence
  Description of Artificial Sequence: Synthetic oligonucleotide
uccugaaccuccacgaaca

SEQ ID NO: 445361 - RNA, 19 nt, Artificial Sequence
  Description of Artificial Sequence: Synthetic oligonucleotide
uucuccggauuucauagug

SEQ ID NO: 445362 - RNA, 19 nt, Artificial Sequence
  Description of Artificial Sequence: Synthetic oligonucleotide
gaacccuggggcuuuagcc

SEQ ID NO: 445363 - RNA, 19 nt, Artificial Sequence
  Description of Artificial Sequence: Synthetic oligonucleotide
uaaacaaccugcccuggcu

SEQ ID NO: 445364 - RNA, 19 nt, Artificial Sequence
  Description of Artificial Sequence: Synthetic oligonucleotide
ucuguuuuccgccuuguua

SEQ ID NO: 445365 - RNA, 19 nt, Artificial Sequence
  Description of Artificial Sequence: Synthetic oligonucleotide
cuccggauuucauagugcg

SEQ ID NO: 445366 - RNA, 19 nt, Artificial Sequence
  Description of Artificial Sequence: Synthetic oligonucleotide
ugaacgaaggucagguccu

SEQ ID NO: 445367 - RNA, 19 nt, Artificial Sequence
  Description of Artificial Sequence: Synthetic oligonucleotide
ugccacuuaagaaggcuag

SEQ ID NO: 445368 - RNA, 19 nt, Artificial Sequence
  Description of Artificial Sequence: Synthetic oligonucleotide
acuccuuaaacaaccugcc

SEQ ID NO: 445369 - RNA, 19 nt, Artificial Sequence
  Description of Artificial Sequence: Synthetic oligonucleotide
auaaaaguuacgcgcuugu

SEQ ID NO: 445370 - RNA, 19 nt, Artificial Sequence
  Description of Artificial Sequence: Synthetic oligonucleotide
uuaaacaaccugcccuggc

SEQ ID NO: 445371 - RNA, 19 nt, Artificial Sequence
  Description of Artificial Sequence: Synthetic oligonucleotide
aagugaacuggaggcaugg

SEQ ID NO: 445372 - RNA, 19 nt, Artificial Sequence
  Description of Artificial Sequence: Synthetic oligonucleotide
aaguguucuugcugacgcg

SEQ ID NO: 445373 - RNA, 19 nt, Artificial Sequence
  Description of Artificial Sequence: Synthetic oligonucleotide
guugaagcccaccauugcc

SEQ ID NO: 445374 - RNA, 19 nt, Artificial Sequence
  Description of Artificial Sequence: Synthetic oligonucleotide
gucuuaggaggguugaagc

SEQ ID NO: 445375 - RNA, 19 nt, Artificial Sequence
  Description of Artificial Sequence: Synthetic oligonucleotide
accuccacgaacaucuggc

SEQ ID NO: 445376 - RNA, 19 nt, Artificial Sequence
  Description of Artificial Sequence: Synthetic oligonucleotide
aaguuacgcgcuuguaaug

SEQ ID NO: 445377 - RNA, 19 nt, Artificial Sequence
  Description of Artificial Sequence: Synthetic oligonucleotide
caaucaaugugcaguacuc

SEQ ID NO: 445378 - RNA, 19 nt, Artificial Sequence
  Description of Artificial Sequence: Synthetic oligonucleotide
cuguccgacagguuagugg

SEQ ID NO: 445379 - RNA, 19 nt, Artificial Sequence
  Description of Artificial Sequence: Synthetic oligonucleotide
cacuuaagaaggcuagggc

SEQ ID NO: 445380 - RNA, 19 nt, Artificial Sequence
  Description of Artificial Sequence: Synthetic oligonucleotide
gaaguuuaugaugucguca

SEQ ID NO: 445381 - RNA, 19 nt, Artificial Sequence
  Description of Artificial Sequence: Synthetic oligonucleotide
uguccaagauguugaacug

SEQ ID NO: 445382 - RNA, 19 nt, Artificial Sequence
  Description of Artificial Sequence: Synthetic oligonucleotide
agcaaagggagagaacuuc

SEQ ID NO: 445383 - RNA, 19 nt, Artificial Sequence
  Description of Artificial Sequence: Synthetic oligonucleotide
gguauugcaguucuugaug

SEQ ID NO: 445384 - RNA, 19 nt, Artificial Sequence
  Description of Artificial Sequence: Synthetic oligonucleotide
uguaugaaggugccacugu

SEQ ID NO: 445385 - RNA, 19 nt, Artificial Sequence
  Description of Artificial Sequence: Synthetic oligonucleotide
aauagcucacaguuccuuu

SEQ ID NO: 445386 - RNA, 19 nt, Artificial Sequence
  Description of Artificial Sequence: Synthetic oligonucleotide
auggagcguacccaguagg

SEQ ID NO: 445387 - RNA, 19 nt, Artificial Sequence
  Description of Artificial Sequence: Synthetic oligonucleotide
agggcaacccacccaaggg

SEQ ID NO: 445388 - RNA, 19 nt, Artificial Sequence
  Description of Artificial Sequence: Synthetic oligonucleotide
uuucaaacuugcacccggc

SEQ ID NO: 445389 - RNA, 19 nt, Artificial Sequence
  Description of Artificial Sequence: Synthetic oligonucleotide
cucuaucuuguagaaaagc

SEQ ID NO: 445390 - RNA, 19 nt, Artificial Sequence
  Description of Artificial Sequence: Synthetic oligonucleotide
ucagaccuagguaugggau

SEQ ID NO: 445391 - RNA, 19 nt, Artificial Sequence
  Description of Artificial Sequence: Synthetic oligonucleotide
ugagugucagccuggacau

SEQ ID NO: 445392 - RNA, 19 nt, Artificial Sequence
  Description of Artificial Sequence: Synthetic oligonucleotide
caacuagccaugguggugg

SEQ ID NO: 445393 - RNA, 19 nt, Artificial Sequence
  Description of Artificial Sequence: Synthetic oligonucleotide
ugagcccugaacaucuccu

SEQ ID NO: 445394 - RNA, 19 nt, Artificial Sequence
  Description of Artificial Sequence: Synthetic oligonucleotide
gagggcaacccacccaagg

SEQ ID NO: 445395 - RNA, 19 nt, Artificial Sequence
  Description of Artificial Sequence: Synthetic oligonucleotide
uggaccaguaagaugucuc

SEQ ID NO: 445396 - RNA, 19 nt, Artificial Sequence
  Description of Artificial Sequence: Synthetic oligonucleotide
uucaugcaaaagugaacug

SEQ ID NO: 445397 - RNA, 19 nt, Artificial Sequence
  Description of Artificial Sequence: Synthetic oligonucleotide
ggagcauugacagaaaaca

SEQ ID NO: 445398 - RNA, 19 nt, Artificial Sequence
  Description of Artificial Sequence: Synthetic oligonucleotide
ugaugucgucauuucuccg

SEQ ID NO: 445399 - RNA, 19 nt, Artificial Sequence
  Description of Artificial Sequence: Synthetic oligonucleotide
acugaaaugaaaggaccug

SEQ ID NO: 445400 - RNA, 19 nt, Artificial Sequence
  Description of Artificial Sequence: Synthetic oligonucleotide
gcuguggaaaucaaggucc

SEQ ID NO: 445401 - RNA, 19 nt, Artificial Sequence
  Description of Artificial Sequence: Synthetic oligonucleotide
gacaguuguuucaaacuug

SEQ ID NO: 445402 - RNA, 19 nt, Artificial Sequence
  Description of Artificial Sequence: Synthetic oligonucleotide
aacuagccauggugguggc

SEQ ID NO: 445403 - RNA, 19 nt, Artificial Sequence
  Description of Artificial Sequence: Synthetic oligonucleotide
aaucaaggucccuggccug

SEQ ID NO: 445404 - RNA, 19 nt, Artificial Sequence
  Description of Artificial Sequence: Synthetic oligonucleotide
uuacgcgcuuguaaugucu

SEQ ID NO: 445405 - RNA, 19 nt, Artificial Sequence
  Description of Artificial Sequence: Synthetic oligonucleotide
ucgguauugcaguucuuga

SEQ ID NO: 445406 - RNA, 19 nt, Artificial Sequence
  Description of Artificial Sequence: Synthetic oligonucleotide
aaacuugcacccggccagc

SEQ ID NO: 445407 - RNA, 19 nt, Artificial Sequence
  Description of Artificial Sequence: Synthetic oligonucleotide
ugaacuguugccaccgcuu

SEQ ID NO: 445408 - RNA, 19 nt, Artificial Sequence
  Description of Artificial Sequence: Synthetic oligonucleotide
gugacgacuggguugagga

SEQ ID NO: 445409 - RNA, 19 nt, Artificial Sequence
  Description of Artificial Sequence: Synthetic oligonucleotide
aucgguauugcaguucuug

SEQ ID NO: 445410 - RNA, 19 nt, Artificial Sequence
  Description of Artificial Sequence: Synthetic oligonucleotide
cuggauucugauccgcacc

SEQ ID NO: 445411 - RNA, 19 nt, Artificial Sequence
  Description of Artificial Sequence: Synthetic oligonucleotide
uugaacuguugccaccgcu

SEQ ID NO: 445412 - RNA, 19 nt, Artificial Sequence
  Description of Artificial Sequence: Synthetic oligonucleotide
gaucagaccuagguauggg

SEQ ID NO: 445413 - RNA, 19 nt, Artificial Sequence
  Description of Artificial Sequence: Synthetic oligonucleotide
cuugcacccggccagcagc

SEQ ID NO: 445414 - RNA, 19 nt, Artificial Sequence
  Description of Artificial Sequence: Synthetic oligonucleotide
gagagaguucccauagggc

SEQ ID NO: 445415 - RNA, 19 nt, Artificial Sequence
  Description of Artificial Sequence: Synthetic oligonucleotide
ucacggucuguuuuccgcc

SEQ ID NO: 445416 - RNA, 19 nt, Artificial Sequence
  Description of Artificial Sequence: Synthetic oligonucleotide
ugaacccuggggcuuuagc

SEQ ID NO: 445417 - RNA, 19 nt, Artificial Sequence
  Description of Artificial Sequence: Synthetic oligonucleotide
ugaugauggagcguaccca

SEQ ID NO: 445418 - RNA, 19 nt, Artificial Sequence
  Description of Artificial Sequence: Synthetic oligonucleotide
uaucucguggcuguggaaa

SEQ ID NO: 445419 - RNA, 19 nt, Artificial Sequence
  Description of Artificial Sequence: Synthetic oligonucleotide
guugcuccccagcuggagg

SEQ ID NO: 445420 - RNA, 19 nt, Artificial Sequence
  Description of Artificial Sequence: Synthetic oligonucleotide
ucuguaugaaggugccacu

SEQ ID NO: 445421 - RNA, 19 nt, Artificial Sequence
  Description of Artificial Sequence: Synthetic oligonucleotide
uacgcgcuuguaaugucug

SEQ ID NO: 445422 - RNA, 19 nt, Artificial Sequence
  Description of Artificial Sequence: Synthetic oligonucleotide
uggagcguacccaguagga

SEQ ID NO: 445423 - RNA, 19 nt, Artificial Sequence
  Description of Artificial Sequence: Synthetic oligonucleotide
uaggcucggaaagaggaug

SEQ ID NO: 445424 - RNA, 19 nt, Artificial Sequence
  Description of Artificial Sequence: Synthetic oligonucleotide
aguuacgcgcuuguaaugu

SEQ ID NO: 445425 - RNA, 19 nt, Artificial Sequence
  Description of Artificial Sequence: Synthetic oligonucleotide
cucggaaagaggaugagcu

SEQ ID NO: 445426 - RNA, 19 nt, Artificial Sequence
  Description of Artificial Sequence: Synthetic oligonucleotide
ucggaaagaggaugagcug

SEQ ID NO: 445427 - RNA, 19 nt, Artificial Sequence
  Description of Artificial Sequence: Synthetic oligonucleotide
aucagaccuagguauggga

SEQ ID NO: 445428 - RNA, 19 nt, Artificial Sequence
  Description of Artificial Sequence: Synthetic oligonucleotide
agacccacacgacugcuca

SEQ ID NO: 445429 - RNA, 19 nt, Artificial Sequence
  Description of Artificial Sequence: Synthetic oligonucleotide
cugacgcgcuucuugaaug

SEQ ID NO: 445430 - RNA, 19 nt, Artificial Sequence
  Description of Artificial Sequence: Synthetic oligonucleotide
ucgucauuucuccggauuu

SEQ ID NO: 445431 - RNA, 19 nt, Artificial Sequence
  Description of Artificial Sequence: Synthetic oligonucleotide
cacuuguugugaacccugg

SEQ ID NO: 445432 - RNA, 19 nt, Artificial Sequence
  Description of Artificial Sequence: Synthetic oligonucleotide
cuguggaaaucaagguccc

SEQ ID NO: 445433 - RNA, 19 nt, Artificial Sequence
  Description of Artificial Sequence: Synthetic oligonucleotide
ggggauuuauauuacagcu

SEQ ID NO: 445434 - RNA, 19 nt, Artificial Sequence
  Description of Artificial Sequence: Synthetic oligonucleotide
ucagauuggggcucuucuc

SEQ ID NO: 445435 - RNA, 19 nt, Artificial Sequence
  Description of Artificial Sequence: Synthetic oligonucleotide
ugucagcaaagggagagaa

SEQ ID NO: 445436 - RNA, 19 nt, Artificial Sequence
  Description of Artificial Sequence: Synthetic oligonucleotide
uccggauuucauagugcgc

SEQ ID NO: 445437 - RNA, 19 nt, Artificial Sequence
  Description of Artificial Sequence: Synthetic oligonucleotide
aaagugaacuggaggcaug

SEQ ID NO: 445438 - RNA, 19 nt, Artificial Sequence
  Description of Artificial Sequence: Synthetic oligonucleotide
aggcauagcucauccacga

SEQ ID NO: 445439 - RNA, 19 nt, Artificial Sequence
  Description of Artificial Sequence: Synthetic oligonucleotide
guaugaaggugccacuguc

SEQ ID NO: 445440 - RNA, 19 nt, Artificial Sequence
  Description of Artificial Sequence: Synthetic oligonucleotide
auagcucauccacgacucg

SEQ ID NO: 445441 - RNA, 19 nt, Artificial Sequence
  Description of Artificial Sequence: Synthetic oligonucleotide
gacucgcaccagcacaaag

SEQ ID NO: 445442 - RNA, 19 nt, Artificial Sequence
  Description of Artificial Sequence: Synthetic oligonucleotide
ugcgccugcuggaagcacc

SEQ ID NO: 445443 - RNA, 19 nt, Artificial Sequence
  Description of Artificial Sequence: Synthetic oligonucleotide
acgacuggguugaggaagc

SEQ ID NO: 445444 - RNA, 19 nt, Artificial Sequence
  Description of Artificial Sequence: Synthetic oligonucleotide
gcuagggcagucuuaggag

SEQ ID NO: 445445 - RNA, 19 nt, Artificial Sequence
  Description of Artificial Sequence: Synthetic oligonucleotide
uccgcacccugccaacuag

SEQ ID NO: 445446 - RNA, 19 nt, Artificial Sequence
  Description of Artificial Sequence: Synthetic oligonucleotide
uguuuuccgccuuguuaug

SEQ ID NO: 445447 - RNA, 19 nt, Artificial Sequence
  Description of Artificial Sequence: Synthetic oligonucleotide
auagcucacaguuccuuuu

SEQ ID NO: 445448 - RNA, 19 nt, Artificial Sequence
  Description of Artificial Sequence: Synthetic oligonucleotide
gggaucucuaucuuguaga

SEQ ID NO: 445449 - RNA, 19 nt, Artificial Sequence
  Description of Artificial Sequence: Synthetic oligonucleotide
cuuguaaugucuguaugaa

SEQ ID NO: 445450 - RNA, 19 nt, Artificial Sequence
  Description of Artificial Sequence: Synthetic oligonucleotide
ggaccaguaagaugucucc

SEQ ID NO: 445451 - RNA, 19 nt, Artificial Sequence
  Description of Artificial Sequence: Synthetic oligonucleotide
aagacccacacgacugcuc

SEQ ID NO: 445452 - RNA, 19 nt, Artificial Sequence
  Description of Artificial Sequence: Synthetic oligonucleotide
aagcaccgcaugcugucca

SEQ ID NO: 445453 - RNA, 19 nt, Artificial Sequence
  Description of Artificial Sequence: Synthetic oligonucleotide
ucuucacggucuguuuucc

SEQ ID NO: 445454 - RNA, 19 nt, Artificial Sequence
  Description of Artificial Sequence: Synthetic oligonucleotide
agugucagccuggacauaa

SEQ ID NO: 445455 - RNA, 19 nt, Artificial Sequence
  Description of Artificial Sequence: Synthetic oligonucleotide
gcauggaccaguaagaugu

SEQ ID NO: 445456 - RNA, 19 nt, Artificial Sequence
  Description of Artificial Sequence: Synthetic oligonucleotide
cuguaugaaggugccacug

SEQ ID NO: 445457 - RNA, 19 nt, Artificial Sequence
  Description of Artificial Sequence: Synthetic oligonucleotide
ccggauuucauagugcgcc

SEQ ID NO: 445458 - RNA, 19 nt, Artificial Sequence
  Description of Artificial Sequence: Synthetic oligonucleotide
uuuccgccuuguuauguuc

SEQ ID NO: 445459 - RNA, 19 nt, Artificial Sequence
  Description of Artificial Sequence: Synthetic oligonucleotide
ugucagccuggacauaauu

SEQ ID NO: 445460 - RNA, 19 nt, Artificial Sequence
  Description of Artificial Sequence: Synthetic oligonucleotide
acacgacugcucacaaccc

SEQ ID NO: 445461 - RNA, 19 nt, Artificial Sequence
  Description of Artificial Sequence: Synthetic oligonucleotide
caaggcggaagacuagcuc

SEQ ID NO: 445462 - RNA, 19 nt, Artificial Sequence
  Description of Artificial Sequence: Synthetic oligonucleotide
agggagagaacuucucgua

SEQ ID NO: 445463 - RNA, 19 nt, Artificial Sequence
  Description of Artificial Sequence: Synthetic oligonucleotide
ugacgcgcuucuugaaugu

SEQ ID NO: 445464 - RNA, 19 nt, Artificial Sequence
  Description of Artificial Sequence: Synthetic oligonucleotide
uuuuccgccuuguuauguu

SEQ ID NO: 445465 - RNA, 19 nt, Artificial Sequence
  Description of Artificial Sequence: Synthetic oligonucleotide
acucgcaccagcacaaaga

SEQ ID NO: 445466 - RNA, 19 nt, Artificial Sequence
  Description of Artificial Sequence: Synthetic oligonucleotide
gaccugcagagaaacaauc

SEQ ID NO: 445467 - RNA, 19 nt, Artificial Sequence
  Description of Artificial Sequence: Synthetic oligonucleotide
ugaaggugccacuguccga

SEQ ID NO: 445468 - RNA, 19 nt, Artificial Sequence
  Description of Artificial Sequence: Synthetic oligonucleotide
gguaggcucggaaagagga

SEQ ID NO: 445469 - RNA, 19 nt, Artificial Sequence
  Description of Artificial Sequence: Synthetic oligonucleotide
uaaaaguuacgcgcuugua

SEQ ID NO: 445470 - RNA, 19 nt, Artificial Sequence
  Description of Artificial Sequence: Synthetic oligonucleotide
uucccaggugaacgaaggu

SEQ ID NO: 445471 - RNA, 19 nt, Artificial Sequence
  Description of Artificial Sequence: Synthetic oligonucleotide
cuguuuuccgccuuguuau

SEQ ID NO: 445472 - RNA, 19 nt, Artificial Sequence
  Description of Artificial Sequence: Synthetic oligonucleotide
ggaagacuagcuccaucag

SEQ ID NO: 445473 - RNA, 19 nt, Artificial Sequence
  Description of Artificial Sequence: Synthetic oligonucleotide
gaacugggucagauugggg

SEQ ID NO: 445474 - RNA, 19 nt, Artificial Sequence
  Description of Artificial Sequence: Synthetic oligonucleotide
caaaagugaacuggaggca

SEQ ID NO: 445475 - RNA, 19 nt, Artificial Sequence
  Description of Artificial Sequence: Synthetic oligonucleotide
aggaggguugaagcccacc

SEQ ID NO: 445476 - RNA, 19 nt, Artificial Sequence
  Description of Artificial Sequence: Synthetic oligonucleotide
agagcgacaguuguuucaa

SEQ ID NO: 445477 - RNA, 19 nt, Artificial Sequence
  Description of Artificial Sequence: Synthetic oligonucleotide
uguugcuccccagcuggag

SEQ ID NO: 445478 - RNA, 19 nt, Artificial Sequence
  Description of Artificial Sequence: Synthetic oligonucleotide
caccgcuuggagaaguuca

SEQ ID NO: 445479 - RNA, 19 nt, Artificial Sequence
  Description of Artificial Sequence: Synthetic oligonucleotide
guggucgcugaagucauug

SEQ ID NO: 445480 - RNA, 19 nt, Artificial Sequence
  Description of Artificial Sequence: Synthetic oligonucleotide
gguugaagcccaccauugc

SEQ ID NO: 445481 - RNA, 19 nt, Artificial Sequence
  Description of Artificial Sequence: Synthetic oligonucleotide
cauuucuccggauuucaua

SEQ ID NO: 445482 - RNA, 19 nt, Artificial Sequence
  Description of Artificial Sequence: Synthetic oligonucleotide
cucgucugccacuuaagaa

SEQ ID NO: 445483 - RNA, 19 nt, Artificial Sequence
  Description of Artificial Sequence: Synthetic oligonucleotide
uagcauggaccaguaagau

SEQ ID NO: 445484 - RNA, 19 nt, Artificial Sequence
  Description of Artificial Sequence: Synthetic oligonucleotide
auuucauagugcgccugcu

SEQ ID NO: 445485 - RNA, 19 nt, Artificial Sequence
  Description of Artificial Sequence: Synthetic oligonucleotide
cucguaucgguauugcagu

SEQ ID NO: 445486 - RNA, 19 nt, Artificial Sequence
  Description of Artificial Sequence: Synthetic oligonucleotide
cauucugcucuuuggccca

SEQ ID NO: 445487 - RNA, 19 nt, Artificial Sequence
  Description of Artificial Sequence: Synthetic oligonucleotide
cagagcgacaguuguuuca

SEQ ID NO: 445488 - RNA, 19 nt, Artificial Sequence
  Description of Artificial Sequence: Synthetic oligonucleotide
uguucuugcugacgcgcuu

SEQ ID NO: 445489 - RNA, 19 nt, Artificial Sequence
  Description of Artificial Sequence: Synthetic oligonucleotide
gaaagaggaugagcuguca

SEQ ID NO: 445490 - RNA, 19 nt, Artificial Sequence
  Description of Artificial Sequence: Synthetic oligonucleotide
auagggcuuccucggccag

SEQ ID NO: 445491 - RNA, 19 nt, Artificial Sequence
  Description of Artificial Sequence: Synthetic oligonucleotide
cauagggcuuccucggcca

SEQ ID NO: 445492 - RNA, 19 nt, Artificial Sequence
  Description of Artificial Sequence: Synthetic oligonucleotide
guugaacuguugccaccgc

SEQ ID NO: 445493 - RNA, 19 nt, Artificial Sequence
  Description of Artificial Sequence: Synthetic oligonucleotide
agccccaugaccagaagaa

SEQ ID NO: 445494 - RNA, 19 nt, Artificial Sequence
  Description of Artificial Sequence: Synthetic oligonucleotide
ccaguauauucuuccggag

SEQ ID NO: 445495 - RNA, 19 nt, Artificial Sequence
  Description of Artificial Sequence: Synthetic oligonucleotide
guuacgcgcuuguaauguc

SEQ ID NO: 445496 - RNA, 19 nt, Artificial Sequence
  Description of Artificial Sequence: Synthetic oligonucleotide
cucgcaccagcacaaagaa

SEQ ID NO: 445497 - RNA, 19 nt, Artificial Sequence
  Description of Artificial Sequence: Synthetic oligonucleotide
uccgugaacugggucagau

SEQ ID NO: 445498 - RNA, 19 nt, Artificial Sequence
  Description of Artificial Sequence: Synthetic oligonucleotide
aggaucagaccuagguaug

SEQ ID NO: 445499 - RNA, 19 nt, Artificial Sequence
  Description of Artificial Sequence: Synthetic oligonucleotide
accgcaugcuguccaagau

SEQ ID NO: 445500 - RNA, 19 nt, Artificial Sequence
  Description of Artificial Sequence: Synthetic oligonucleotide
aguuuaugaugucgucauu

SEQ ID NO: 445501 - RNA, 19 nt, Artificial Sequence
  Description of Artificial Sequence: Synthetic oligonucleotide
cauugugaucaaugaggga

SEQ ID NO: 445502 - RNA, 19 nt, Artificial Sequence
  Description of Artificial Sequence: Synthetic oligonucleotide
acgacugcucacaacccug

SEQ ID NO: 445503 - RNA, 19 nt, Artificial Sequence
  Description of Artificial Sequence: Synthetic oligonucleotide
aucucguggcuguggaaau

SEQ ID NO: 445504 - RNA, 19 nt, Artificial Sequence
  Description of Artificial Sequence: Synthetic oligonucleotide
uccuguagguggucaggaa

SEQ ID NO: 445505 - RNA, 19 nt, Artificial Sequence
  Description of Artificial Sequence: Synthetic oligonucleotide
gggccgcuaguucacaagc

SEQ ID NO: 445506 - RNA, 19 nt, Artificial Sequence
  Description of Artificial Sequence: Synthetic oligonucleotide
ggaucucuaucuuguagaa

SEQ ID NO: 445507 - RNA, 19 nt, Artificial Sequence
  Description of Artificial Sequence: Synthetic oligonucleotide
agagauccugguguccacu

SEQ ID NO: 445508 - RNA, 19 nt, Artificial Sequence
  Description of Artificial Sequence: Synthetic oligonucleotide
cccaggugaacgaagguca

SEQ ID NO: 445509 - RNA, 19 nt, Artificial Sequence
  Description of Artificial Sequence: Synthetic oligonucleotide
aaccagaccaggggccgcu

SEQ ID NO: 445510 - RNA, 19 nt, Artificial Sequence
  Description of Artificial Sequence: Synthetic oligonucleotide
ccccucucuauuuacagca

SEQ ID NO: 445511 - RNA, 19 nt, Artificial Sequence
  Description of Artificial Sequence: Synthetic oligonucleotide
ucguaucgguauugcaguu

SEQ ID NO: 445512 - RNA, 19 nt, Artificial Sequence
  Description of Artificial Sequence: Synthetic oligonucleotide
aggcuagggcagucuuagg

SEQ ID NO: 445513 - RNA, 19 nt, Artificial Sequence
  Description of Artificial Sequence: Synthetic oligonucleotide
gucaaucaaugugcaguac

SEQ ID NO: 445514 - RNA, 19 nt, Artificial Sequence
  Description of Artificial Sequence: Synthetic oligonucleotide
agcccgguaggcucggaaa

SEQ ID NO: 445515 - RNA, 19 nt, Artificial Sequence
  Description of Artificial Sequence: Synthetic oligonucleotide
caucgauauagucuggguu

SEQ ID NO: 445516 - RNA, 19 nt, Artificial Sequence
  Description of Artificial Sequence: Synthetic oligonucleotide
gacgcgcuucuugaaugug

SEQ ID NO: 445517 - RNA, 19 nt, Artificial Sequence
  Description of Artificial Sequence: Synthetic oligonucleotide
agcguacccaguaggacau

SEQ ID NO: 445518 - RNA, 19 nt, Artificial Sequence
  Description of Artificial Sequence: Synthetic oligonucleotide
acaaggcggaagacuagcu

SEQ ID NO: 445519 - RNA, 19 nt, Artificial Sequence
  Description of Artificial Sequence: Synthetic oligonucleotide
cacccugccaacuagccau

SEQ ID NO: 445520 - RNA, 19 nt, Artificial Sequence
  Description of Artificial Sequence: Synthetic oligonucleotide
gggcuguucacggaugccc

SEQ ID NO: 445521 - RNA, 19 nt, Artificial Sequence
  Description of Artificial Sequence: Synthetic oligonucleotide
gaacgaaggucagguccug

SEQ ID NO: 445522 - RNA, 19 nt, Artificial Sequence
  Description of Artificial Sequence: Synthetic oligonucleotide
cagagauccugguguccac

SEQ ID NO: 445523 - RNA, 19 nt, Artificial Sequence
  Description of Artificial Sequence: Synthetic oligonucleotide
ggucgcugaagucauugaa

SEQ ID NO: 445524 - RNA, 19 nt, Artificial Sequence
  Description of Artificial Sequence: Synthetic oligonucleotide
cugaaccuccacgaacauc

SEQ ID NO: 445525 - RNA, 19 nt, Artificial Sequence
  Description of Artificial Sequence: Synthetic oligonucleotide
ugaacaucuccuggccgua

SEQ ID NO: 445526 - RNA, 19 nt, Artificial Sequence
  Description of Artificial Sequence: Synthetic oligonucleotide
cagaccuagguaugggaua

SEQ ID NO: 445527 - RNA, 19 nt, Artificial Sequence
  Description of Artificial Sequence: Synthetic oligonucleotide
guucacuuucccaucgaua

SEQ ID NO: 445528 - RNA, 19 nt, Artificial Sequence
  Description of Artificial Sequence: Synthetic oligonucleotide
acuguccgacagguuagug

SEQ ID NO: 445529 - RNA, 19 nt, Artificial Sequence
  Description of Artificial Sequence: Synthetic oligonucleotide
ccgcuaguucacaagccag

SEQ ID NO: 445530 - RNA, 19 nt, Artificial Sequence
  Description of Artificial Sequence: Synthetic oligonucleotide
cccaucgauauagucuggg

SEQ ID NO: 445531 - RNA, 19 nt, Artificial Sequence
  Description of Artificial Sequence: Synthetic oligonucleotide
aggccugcacuuguuguga

SEQ ID NO: 445532 - RNA, 19 nt, Artificial Sequence
  Description of Artificial Sequence: Synthetic oligonucleotide
aggcucggaaagaggauga

SEQ ID NO: 445533 - RNA, 19 nt, Artificial Sequence
  Description of Artificial Sequence: Synthetic oligonucleotide
gcuaucucguggcugugga

SEQ ID NO: 445534 - RNA, 19 nt, Artificial Sequence
  Description of Artificial Sequence: Synthetic oligonucleotide
ugcugacgcgcuucuugaa

SEQ ID NO: 445535 - RNA, 19 nt, Artificial Sequence
  Description of Artificial Sequence: Synthetic oligonucleotide
gcugugacgacuggguuga

SEQ ID NO: 445536 - RNA, 19 nt, Artificial Sequence
  Description of Artificial Sequence: Synthetic oligonucleotide
aacuugcacccggccagca

SEQ ID NO: 445537 - RNA, 19 nt, Artificial Sequence
  Description of Artificial Sequence: Synthetic oligonucleotide
ccacuguccgacagguuag

SEQ ID NO: 445538 - RNA, 19 nt, Artificial Sequence
  Description of Artificial Sequence: Synthetic oligonucleotide
cuguugccaccgcuuggag

SEQ ID NO: 445539 - RNA, 19 nt, Artificial Sequence
  Description of Artificial Sequence: Synthetic oligonucleotide
caguaagaugucuccugaa

SEQ ID NO: 445540 - RNA, 19 nt, Artificial Sequence
  Description of Artificial Sequence: Synthetic oligonucleotide
acgcgcuuguaaugucugu

SEQ ID NO: 445541 - RNA, 19 nt, Artificial Sequence
  Description of Artificial Sequence: Synthetic oligonucleotide
gccgcuaguucacaagcca

SEQ ID NO: 445542 - RNA, 19 nt, Artificial Sequence
  Description of Artificial Sequence: Synthetic oligonucleotide
cggaagacuagcuccauca

SEQ ID NO: 445543 - RNA, 19 nt, Artificial Sequence
  Description of Artificial Sequence: Synthetic oligonucleotide
gcucggaaagaggaugagc

SEQ ID NO: 445544 - RNA, 19 nt, Artificial Sequence
  Description of Artificial Sequence: Synthetic oligonucleotide
uaucgguauugcaguucuu

SEQ ID NO: 445545 - RNA, 19 nt, Artificial Sequence
  Description of Artificial Sequence: Synthetic oligonucleotide
cugcgacaccccuggcugc

SEQ ID NO: 445546 - RNA, 19 nt, Artificial Sequence
  Description of Artificial Sequence: Synthetic oligonucleotide
acgcgcuucuugaaugugu

SEQ ID NO: 445547 - RNA, 19 nt, Artificial Sequence
  Description of Artificial Sequence: Synthetic oligonucleotide
acgacucgcaccagcacaa

SEQ ID NO: 445548 - RNA, 19 nt, Artificial Sequence
  Description of Artificial Sequence: Synthetic oligonucleotide
aggcaaagacugaaaugaa

SEQ ID NO: 445549 - RNA, 19 nt, Artificial Sequence
  Description of Artificial Sequence: Synthetic oligonucleotide
ggugaacgaaggucagguc

SEQ ID NO: 445550 - RNA, 19 nt, Artificial Sequence
  Description of Artificial Sequence: Synthetic oligonucleotide
uaggaggguugaagcccac

SEQ ID NO: 445551 - RNA, 19 nt, Artificial Sequence
  Description of Artificial Sequence: Synthetic oligonucleotide
gaccaguaagaugucuccu

SEQ ID NO: 445552 - RNA, 19 nt, Artificial Sequence
  Description of Artificial Sequence: Synthetic oligonucleotide
guccgacagguuagugggg

SEQ ID NO: 445553 - RNA, 19 nt, Artificial Sequence
  Description of Artificial Sequence: Synthetic oligonucleotide
gcagaauagcucacaguuc

SEQ ID NO: 445554 - RNA, 19 nt, Artificial Sequence
  Description of Artificial Sequence: Synthetic oligonucleotide
gaaggcuagggcagucuua

SEQ ID NO: 445555 - RNA, 19 nt, Artificial Sequence
  Description of Artificial Sequence: Synthetic oligonucleotide
ggggcuuuagccacaggga

SEQ ID NO: 445556 - RNA, 19 nt, Artificial Sequence
  Description of Artificial Sequence: Synthetic oligonucleotide
aacccacccaaggguccug

SEQ ID NO: 445557 - RNA, 19 nt, Artificial Sequence
  Description of Artificial Sequence: Synthetic oligonucleotide
guuuuccgccuuguuaugu

SEQ ID NO: 445558 - RNA, 19 nt, Artificial Sequence
  Description of Artificial Sequence: Synthetic oligonucleotide
uugugaacccuggggcuuu

SEQ ID NO: 445559 - RNA, 19 nt, Artificial Sequence
  Description of Artificial Sequence: Synthetic oligonucleotide
augauggagcguacccagu

SEQ ID NO: 445560 - RNA, 19 nt, Artificial Sequence
  Description of Artificial Sequence: Synthetic oligonucleotide
cauagugcgccugcuggaa

SEQ ID NO: 445561 - RNA, 19 nt, Artificial Sequence
  Description of Artificial Sequence: Synthetic oligonucleotide
gucgucauuucuccggauu

SEQ ID NO: 445562 - RNA, 19 nt, Artificial Sequence
  Description of Artificial Sequence: Synthetic oligonucleotide
gcucacaacccugacucca

SEQ ID NO: 445563 - RNA, 19 nt, Artificial Sequence
  Description of Artificial Sequence: Synthetic oligonucleotide
ccgcaugcuguccaagaug

SEQ ID NO: 445564 - RNA, 19 nt, Artificial Sequence
  Description of Artificial Sequence: Synthetic oligonucleotide
gcucggcguucucacaccc

SEQ ID NO: 445565 - RNA, 19 nt, Artificial Sequence
  Description of Artificial Sequence: Synthetic oligonucleotide
agugcuccgugaacugggu

SEQ ID NO: 445566 - RNA, 19 nt, Artificial Sequence
  Description of Artificial Sequence: Synthetic oligonucleotide
aggggccgcuaguucacaa

SEQ ID NO: 445567 - RNA, 19 nt, Artificial Sequence
  Description of Artificial Sequence: Synthetic oligonucleotide
cuaucucguggcuguggaa

SEQ ID NO: 445568 - RNA, 19 nt, Artificial Sequence
  Description of Artificial Sequence: Synthetic oligonucleotide
gagauccugguguccacuu

SEQ ID NO: 445569 - RNA, 19 nt, Artificial Sequence
  Description of Artificial Sequence: Synthetic oligonucleotide
gagaguucccauagggcuu

SEQ ID NO: 445570 - RNA, 19 nt, Artificial Sequence
  Description of Artificial Sequence: Synthetic oligonucleotide
gugcuccgugaacuggguc

SEQ ID NO: 445571 - RNA, 19 nt, Artificial Sequence
  Description of Artificial Sequence: Synthetic oligonucleotide
agccguggccugggagacc

SEQ ID NO: 445572 - RNA, 19 nt, Artificial Sequence
  Description of Artificial Sequence: Synthetic oligonucleotide
ggccgcuaguucacaagcc

SEQ ID NO: 445573 - RNA, 19 nt, Artificial Sequence
  Description of Artificial Sequence: Synthetic oligonucleotide
cacgacugcucacaacccu

SEQ ID NO: 445574 - RNA, 19 nt, Artificial Sequence
  Description of Artificial Sequence: Synthetic oligonucleotide
acggucuguuuuccgccuu

SEQ ID NO: 445575 - RNA, 19 nt, Artificial Sequence
  Description of Artificial Sequence: Synthetic oligonucleotide
ggcucggaaagaggaugag

SEQ ID NO: 445576 - RNA, 19 nt, Artificial Sequence
  Description of Artificial Sequence: Synthetic oligonucleotide
cucggcguucucacaccca

SEQ ID NO: 445577 - RNA, 19 nt, Artificial Sequence
  Description of Artificial Sequence: Synthetic oligonucleotide
ccgguaggcucggaaagag

SEQ ID NO: 445578 - RNA, 19 nt, Artificial Sequence
  Description of Artificial Sequence: Synthetic oligonucleotide
uccacucgucugccacuua

SEQ ID NO: 445579 - RNA, 19 nt, Artificial Sequence
  Description of Artificial Sequence: Synthetic oligonucleotide
cuggccuggcugcgacacc

SEQ ID NO: 445580 - RNA, 19 nt, Artificial Sequence
  Description of Artificial Sequence: Synthetic oligonucleotide
gaccuagguaugggauaca

SEQ ID NO: 445581 - RNA, 19 nt, Artificial Sequence
  Description of Artificial Sequence: Synthetic oligonucleotide
cgcgcuucuugaauguguc

SEQ ID NO: 445582 - RNA, 19 nt, Artificial Sequence
  Description of Artificial Sequence: Synthetic oligonucleotide
gugaacccuggggcuuuag

SEQ ID NO: 445583 - RNA, 19 nt, Artificial Sequence
  Description of Artificial Sequence: Synthetic oligonucleotide
cgcacccugccaacuagcc

SEQ ID NO: 445584 - RNA, 19 nt, Artificial Sequence
  Description of Artificial Sequence: Synthetic oligonucleotide
uggcugcgacaccccuggc

SEQ ID NO: 445585 - RNA, 19 nt, Artificial Sequence
  Description of Artificial Sequence: Synthetic oligonucleotide
gcggaagacuagcuccauc

SEQ ID NO: 445586 - RNA, 19 nt, Artificial Sequence
  Description of Artificial Sequence: Synthetic oligonucleotide
gggcaacccacccaagggu

SEQ ID NO: 445587 - RNA, 19 nt, Artificial Sequence
  Description of Artificial Sequence: Synthetic oligonucleotide
gcacccugccaacuagcca

SEQ ID NO: 445588 - RNA, 19 nt, Artificial Sequence
  Description of Artificial Sequence: Synthetic oligonucleotide
guugugaacccuggggcuu

SEQ ID NO: 445589 - RNA, 19 nt, Artificial Sequence
  Description of Artificial Sequence: Synthetic oligonucleotide
cuguugcuccccagcugga

SEQ ID NO: 445590 - RNA, 19 nt, Artificial Sequence
  Description of Artificial Sequence: Synthetic oligonucleotide
ugugaacccuggggcuuua

SEQ ID NO: 445591 - RNA, 19 nt, Artificial Sequence
  Description of Artificial Sequence: Synthetic oligonucleotide
ccacacgacugcucacaac

SEQ ID NO: 445592 - RNA, 19 nt, Artificial Sequence
  Description of Artificial Sequence: Synthetic oligonucleotide
cucggcucccagggugccc

SEQ ID NO: 445593 - RNA, 19 nt, Artificial Sequence
  Description of Artificial Sequence: Synthetic oligonucleotide
cguaucgguauugcaguuc

SEQ ID NO: 445594 - RNA, 19 nt, Artificial Sequence
  Description of Artificial Sequence: Synthetic oligonucleotide
cacggucuguuuuccgccu

SEQ ID NO: 445595 - RNA, 19 nt, Artificial Sequence
  Description of Artificial Sequence: Synthetic oligonucleotide
gauccgcacccugccaacu

SEQ ID NO: 445596 - RNA, 19 nt, Artificial Sequence
  Description of Artificial Sequence: Synthetic oligonucleotide
cacccucuugcuugagugu

SEQ ID NO: 445597 - RNA, 19 nt, Artificial Sequence
  Description of Artificial Sequence: Synthetic oligonucleotide
ccgcacccugccaacuagc

SEQ ID NO: 445598 - RNA, 19 nt, Artificial Sequence
  Description of Artificial Sequence: Synthetic oligonucleotide
gcgcuucuugaauguguca

SEQ ID NO: 445599 - RNA, 19 nt, Artificial Sequence
  Description of Artificial Sequence: Synthetic oligonucleotide
gccaacuagccaugguggu

SEQ ID NO: 445600 - RNA, 19 nt, Artificial Sequence
  Description of Artificial Sequence: Synthetic oligonucleotide
gcacacaaggcggaagacu

SEQ ID NO: 445601 - RNA, 19 nt, Artificial Sequence
  Description of Artificial Sequence: Synthetic oligonucleotide
guaggcucggaaagaggau

SEQ ID NO: 445602 - RNA, 19 nt, Artificial Sequence
  Description of Artificial Sequence: Synthetic oligonucleotide
gcgcuuguaaugucuguau

SEQ ID NO: 445603 - RNA, 19 nt, Artificial Sequence
  Description of Artificial Sequence: Synthetic oligonucleotide
caguagcauggaccaguaa

SEQ ID NO: 445604 - RNA, 19 nt, Artificial Sequence
  Description of Artificial Sequence: Synthetic oligonucleotide
ccagaccaggggccgcuag

SEQ ID NO: 445605 - RNA, 19 nt, Artificial Sequence
  Description of Artificial Sequence: Synthetic oligonucleotide
gcugacgcgcuucuugaau

SEQ ID NO: 445606 - RNA, 19 nt, Artificial Sequence
  Description of Artificial Sequence: Synthetic oligonucleotide
ggcugcgacaccccuggcu

SEQ ID NO: 445607 - RNA, 19 nt, Artificial Sequence
  Description of Artificial Sequence: Synthetic oligonucleotide
gcaccgcaugcuguccaag

SEQ ID NO: 445608 - RNA, 19 nt, Artificial Sequence
  Description of Artificial Sequence: Synthetic oligonucleotide
cacgcgggccaggcugagc

SEQ ID NO: 445609 - RNA, 19 nt, Artificial Sequence
  Description of Artificial Sequence: Synthetic oligonucleotide
cagcccgguaggcucggaa

SEQ ID NO: 445610 - RNA, 19 nt, Artificial Sequence
  Description of Artificial Sequence: Synthetic oligonucleotide
gcucaggugcugccacaca

SEQ ID NO: 445611 - RNA, 19 nt, Artificial Sequence
  Description of Artificial Sequence: Synthetic oligonucleotide
gugcgccugcuggaagcac

SEQ ID NO: 445612 - RNA, 19 nt, Artificial Sequence
  Description of Artificial Sequence: Synthetic oligonucleotide
cgcucggcguucucacacc

SEQ ID NO: 445613 - RNA, 19 nt, Artificial Sequence
  Description of Artificial Sequence: Synthetic oligonucleotide
cugagagggcagcccggua

SEQ ID NO: 445614 - RNA, 19 nt, Artificial Sequence
  Description of Artificial Sequence: Synthetic oligonucleotide
cugugacgacuggguugag

SEQ ID NO: 445615 - RNA, 19 nt, Artificial Sequence
  Description of Artificial Sequence: Synthetic oligonucleotide
cggucuguuuuccgccuug

SEQ ID NO: 445616 - RNA, 19 nt, Artificial Sequence
  Description of Artificial Sequence: Synthetic oligonucleotide
caacccacccaaggguccu

SEQ ID NO: 445617 - RNA, 19 nt, Artificial Sequence
  Description of Artificial Sequence: Synthetic oligonucleotide
cgacugcucacaacccuga

SEQ ID NO: 445618 - RNA, 19 nt, Artificial Sequence
  Description of Artificial Sequence: Synthetic oligonucleotide
ccgccuuguuauguuccug

SEQ ID NO: 445619 - RNA, 19 nt, Artificial Sequence
  Description of Artificial Sequence: Synthetic oligonucleotide
cacgaacaucuggcccauc

SEQ ID NO: 445620 - RNA, 19 nt, Artificial Sequence
  Description of Artificial Sequence: Synthetic oligonucleotide
cuggggccuccacucgucu

SEQ ID NO: 445621 - RNA, 19 nt, Artificial Sequence
  Description of Artificial Sequence: Synthetic oligonucleotide
cggcguucucacacccagc

SEQ ID NO: 445622 - RNA, 19 nt, Artificial Sequence
  Description of Artificial Sequence: Synthetic oligonucleotide
gcacccggccagcagcugu

SEQ ID NO: 445623 - RNA, 19 nt, Artificial Sequence
  Description of Artificial Sequence: Synthetic oligonucleotide
gcguucucacacccagccu

SEQ ID NO: 445624 - RNA, 19 nt, Artificial Sequence
  Description of Artificial Sequence: Synthetic oligonucleotide
cgguauugcaguucuugau

SEQ ID NO: 445625 - RNA, 19 nt, Artificial Sequence
  Description of Artificial Sequence: Synthetic oligonucleotide
gcccaccauugcccuaguc

SEQ ID NO: 445626 - RNA, 19 nt, Artificial Sequence
  Description of Artificial Sequence: Synthetic oligonucleotide
cccacacgacugcucacaa

SEQ ID NO: 445627 - RNA, 19 nt, Artificial Sequence
  Description of Artificial Sequence: Synthetic oligonucleotide
caggggccgcuaguucaca

SEQ ID NO: 445628 - RNA, 19 nt, Artificial Sequence
  Description of Artificial Sequence: Synthetic oligonucleotide
ggccuccacucgucugcca

SEQ ID NO: 445629 - RNA, 19 nt, Artificial Sequence
  Description of Artificial Sequence: Synthetic oligonucleotide
gcguacccaguaggacaug

SEQ ID NO: 445630 - RNA, 19 nt, Artificial Sequence
  Description of Artificial Sequence: Synthetic oligonucleotide
cgcgcuuguaaugucugua

SEQ ID NO: 445631 - RNA, 19 nt, Artificial Sequence
  Description of Artificial Sequence: Synthetic oligonucleotide
cggauuucauagugcgccu

SEQ ID NO: 445632 - RNA, 19 nt, Artificial Sequence
  Description of Artificial Sequence: Synthetic oligonucleotide
cguacccaguaggacaugu

SEQ ID NO: 445633 - RNA, 19 nt, Artificial Sequence
  Description of Artificial Sequence: Synthetic oligonucleotide
gcacgcgggccaggcugag

SEQ ID NO: 445634 - RNA, 19 nt, Artificial Sequence
  Description of Artificial Sequence: Synthetic oligonucleotide
ccugaaccuccacgaacau

SEQ ID NO: 445635 - RNA, 19 nt, Artificial Sequence
  Description of Artificial Sequence: Synthetic oligonucleotide
gggcagucuuaggaggguu

SEQ ID NO: 445636 - RNA, 19 nt, Artificial Sequence
  Description of Artificial Sequence: Synthetic oligonucleotide
gcgacaccccuggcugcca

SEQ ID NO: 445637 - RNA, 19 nt, Artificial Sequence
  Description of Artificial Sequence: Synthetic oligonucleotide
cugggccgcucggcguucu

SEQ ID NO: 445638 - RNA, 19 nt, Artificial Sequence
  Description of Artificial Sequence: Synthetic oligonucleotide
ccaccuuguccaguauauu

SEQ ID NO: 445639 - RNA, 19 nt, Artificial Sequence
  Description of Artificial Sequence: Synthetic oligonucleotide
agaauacuucauuagaggc

SEQ ID NO: 445640 - RNA, 19 nt, Artificial Sequence
  Description of Artificial Sequence: Synthetic oligonucleotide
uuaauagaccauaacuugg

SEQ ID NO: 445641 - RNA, 19 nt, Artificial Sequence
  Description of Artificial Sequence: Synthetic oligonucleotide
gauucaaggauuuauuaag

SEQ ID NO: 445642 - RNA, 19 nt, Artificial Sequence
  Description of Artificial Sequence: Synthetic oligonucleotide
uuuaauagaccauaacuug

SEQ ID NO: 445643 - RNA, 19 nt, Artificial Sequence
  Description of Artificial Sequence: Synthetic oligonucleotide
cacaacuuaguucagaagg

SEQ ID NO: 445644 - RNA, 19 nt, Artificial Sequence
  Description of Artificial Sequence: Synthetic oligonucleotide
aguuaugucaugaacaugg

SEQ ID NO: 445645 - RNA, 19 nt, Artificial Sequence
  Description of Artificial Sequence: Synthetic oligonucleotide
uacuagaaaacuaaggaaa

SEQ ID NO: 445646 - RNA, 19 nt, Artificial Sequence
  Description of Artificial Sequence: Synthetic oligonucleotide
acaaaguuaugucaugaac

SEQ ID NO: 445647 - RNA, 19 nt, Artificial Sequence
  Description of Artificial Sequence: Synthetic oligonucleotide
guuacuagaaaacuaagga

SEQ ID NO: 445648 - RNA, 19 nt, Artificial Sequence
  Description of Artificial Sequence: Synthetic oligonucleotide
agucucgacaguuuagugc

SEQ ID NO: 445649 - RNA, 19 nt, Artificial Sequence
  Description of Artificial Sequence: Synthetic oligonucleotide
ucuacuaaucuaccaaaag

SEQ ID NO: 445650 - RNA, 19 nt, Artificial Sequence
  Description of Artificial Sequence: Synthetic oligonucleotide
ucaaggauuuauuaaguca

SEQ ID NO: 445651 - RNA, 19 nt, Artificial Sequence
  Description of Artificial Sequence: Synthetic oligonucleotide
caaauuaagaacacgucug

SEQ ID NO: 445652 - RNA, 19 nt, Artificial Sequence
  Description of Artificial Sequence: Synthetic oligonucleotide
aagucugcaaaaguuaguc

SEQ ID NO: 445653 - RNA, 19 nt, Artificial Sequence
  Description of Artificial Sequence: Synthetic oligonucleotide
aaaugcgaaggcuccaccg

SEQ ID NO: 445654 - RNA, 19 nt, Artificial Sequence
  Description of Artificial Sequence: Synthetic oligonucleotide
ugcacuucuacuaaucuac

SEQ ID NO: 445655 - RNA, 19 nt, Artificial Sequence
  Description of Artificial Sequence: Synthetic oligonucleotide
uauucaguugaauuacucc

SEQ ID NO: 445656 - RNA, 19 nt, Artificial Sequence
  Description of Artificial Sequence: Synthetic oligonucleotide
ucugacagaaauuaaccgu

SEQ ID NO: 445657 - RNA, 19 nt, Artificial Sequence
  Description of Artificial Sequence: Synthetic oligonucleotide
auucaguugaauuacucca

SEQ ID NO: 445658 - RNA, 19 nt, Artificial Sequence
  Description of Artificial Sequence: Synthetic oligonucleotide
acccgugacacuuuuauuc

SEQ ID NO: 445659 - RNA, 19 nt, Artificial Sequence
  Description of Artificial Sequence: Synthetic oligonucleotide
cacaacacaacuuaguuca

SEQ ID NO: 445660 - RNA, 19 nt, Artificial Sequence
  Description of Artificial Sequence: Synthetic oligonucleotide
gucucgacaguuuagugcg

SEQ ID NO: 445661 - RNA, 19 nt, Artificial Sequence
  Description of Artificial Sequence: Synthetic oligonucleotide
aaugcauuaucagaaagau

SEQ ID NO: 445662 - RNA, 19 nt, Artificial Sequence
  Description of Artificial Sequence: Synthetic oligonucleotide
agaauaguugucaaagacg

SEQ ID NO: 445663 - RNA, 19 nt, Artificial Sequence
  Description of Artificial Sequence: Synthetic oligonucleotide
uuacuagaaaacuaaggaa

SEQ ID NO: 445664 - RNA, 19 nt, Artificial Sequence
  Description of Artificial Sequence: Synthetic oligonucleotide
uuauugacugguucauugg

SEQ ID NO: 445665 - RNA, 19 nt, Artificial Sequence
  Description of Artificial Sequence: Synthetic oligonucleotide
uagaccauaacuuggaauu

SEQ ID NO: 445666 - RNA, 19 nt, Artificial Sequence
  Description of Artificial Sequence: Synthetic oligonucleotide
cauaguuuaagaauuaucu

SEQ ID NO: 445667 - RNA, 19 nt, Artificial Sequence
  Description of Artificial Sequence: Synthetic oligonucleotide
uaauagaccauaacuugga

SEQ ID NO: 445668 - RNA, 19 nt, Artificial Sequence
  Description of Artificial Sequence: Synthetic oligonucleotide
agugaguuagguuguacag

SEQ ID NO: 445669 - RNA, 19 nt, Artificial Sequence
  Description of Artificial Sequence: Synthetic oligonucleotide
aguuacuagaaaacuaagg

SEQ ID NO: 445670 - RNA, 19 nt, Artificial Sequence
  Description of Artificial Sequence: Synthetic oligonucleotide
agagucugcaccccgacuc

SEQ ID NO: 445671 - RNA, 19 nt, Artificial Sequence
  Description of Artificial Sequence: Synthetic oligonucleotide
gacgcaaucugucauaauc

SEQ ID NO: 445672 - RNA, 19 nt, Artificial Sequence
  Description of Artificial Sequence: Synthetic oligonucleotide
aucucuacuucauuauuag

SEQ ID NO: 445673 - RNA, 19 nt, Artificial Sequence
  Description of Artificial Sequence: Synthetic oligonucleotide
uacaguacaaaguuauguc

SEQ ID NO: 445674 - RNA, 19 nt, Artificial Sequence
  Description of Artificial Sequence: Synthetic oligonucleotide
aucaugucguguuucgcac

SEQ ID NO: 445675 - RNA, 19 nt, Artificial Sequence
  Description of Artificial Sequence: Synthetic oligonucleotide
acgacuaggaacagaauac

SEQ ID NO: 445676 - RNA, 19 nt, Artificial Sequence
  Description of Artificial Sequence: Synthetic oligonucleotide
auuacauggcaacgugucg

SEQ ID NO: 445677 - RNA, 19 nt, Artificial Sequence
  Description of Artificial Sequence: Synthetic oligonucleotide
aauauggauucaacacccc

SEQ ID NO: 445678 - RNA, 19 nt, Artificial Sequence
  Description of Artificial Sequence: Synthetic oligonucleotide
uuauucaguugaauuacuc

SEQ ID NO: 445679 - RNA, 19 nt, Artificial Sequence
  Description of Artificial Sequence: Synthetic oligonucleotide
agaccggccauuuaucauc

SEQ ID NO: 445680 - RNA, 19 nt, Artificial Sequence
  Description of Artificial Sequence: Synthetic oligonucleotide
aaguuagucaacugggguu

SEQ ID NO: 445681 - RNA, 19 nt, Artificial Sequence
  Description of Artificial Sequence: Synthetic oligonucleotide
aggaaguguguccacgugg

SEQ ID NO: 445682 - RNA, 19 nt, Artificial Sequence
  Description of Artificial Sequence: Synthetic oligonucleotide
ucuagugguuggaaggccc

SEQ ID NO: 445683 - RNA, 19 nt, Artificial Sequence
  Description of Artificial Sequence: Synthetic oligonucleotide
uccuuaucaucccugagau

SEQ ID NO: 445684 - RNA, 19 nt, Artificial Sequence
  Description of Artificial Sequence: Synthetic oligonucleotide
ugcauuacauggcaacgug

SEQ ID NO: 445685 - RNA, 19 nt, Artificial Sequence
  Description of Artificial Sequence: Synthetic oligonucleotide
cuacuaaucuaccaaaaga

SEQ ID NO: 445686 - RNA, 19 nt, Artificial Sequence
  Description of Artificial Sequence: Synthetic oligonucleotide
ucguguuucgcacacucca

SEQ ID NO: 445687 - RNA, 19 nt, Artificial Sequence
  Description of Artificial Sequence: Synthetic oligonucleotide
cacaugacaguguugguug

SEQ ID NO: 445688 - RNA, 19 nt, Artificial Sequence
  Description of Artificial Sequence: Synthetic oligonucleotide
ucaguugaauuacuccaug

SEQ ID NO: 445689 - RNA, 19 nt, Artificial Sequence
  Description of Artificial Sequence: Synthetic oligonucleotide
aaugcgaaggcuccaccgu

SEQ ID NO: 445690 - RNA, 19 nt, Artificial Sequence
  Description of Artificial Sequence: Synthetic oligonucleotide
uauggauucaacaccccau

SEQ ID NO: 445691 - RNA, 19 nt, Artificial Sequence
  Description of Artificial Sequence: Synthetic oligonucleotide
gacaguuuagugcguagug

SEQ ID NO: 445692 - RNA, 19 nt, Artificial Sequence
  Description of Artificial Sequence: Synthetic oligonucleotide
uucaaggauuuauuaaguc

SEQ ID NO: 445693 - RNA, 19 nt, Artificial Sequence
  Description of Artificial Sequence: Synthetic oligonucleotide
cauuacauggcaacguguc

SEQ ID NO: 445694 - RNA, 19 nt, Artificial Sequence
  Description of Artificial Sequence: Synthetic oligonucleotide
cuguuugcggauaggagag

SEQ ID NO: 445695 - RNA, 19 nt, Artificial Sequence
  Description of Artificial Sequence: Synthetic oligonucleotide
cugagcaagaauaggggac

SEQ ID NO: 445696 - RNA, 19 nt, Artificial Sequence
  Description of Artificial Sequence: Synthetic oligonucleotide
gauaccacuuugcacggac

SEQ ID NO: 445697 - RNA, 19 nt, Artificial Sequence
  Description of Artificial Sequence: Synthetic oligonucleotide
agugcguaguguucucagc

SEQ ID NO: 445698 - RNA, 19 nt, Artificial Sequence
  Description of Artificial Sequence: Synthetic oligonucleotide
aaccgcauuagcaaaagau

SEQ ID NO: 445699 - RNA, 19 nt, Artificial Sequence
  Description of Artificial Sequence: Synthetic oligonucleotide
uuguacagaacagcguuag

SEQ ID NO: 445700 - RNA, 19 nt, Artificial Sequence
  Description of Artificial Sequence: Synthetic oligonucleotide
uuacccgugacacuuuuau

SEQ ID NO: 445701 - RNA, 19 nt, Artificial Sequence
  Description of Artificial Sequence: Synthetic oligonucleotide
uuguucuagugguuggaag

SEQ ID NO: 445702 - RNA, 19 nt, Artificial Sequence
  Description of Artificial Sequence: Synthetic oligonucleotide
auccuuaucaucccugaga

SEQ ID NO: 445703 - RNA, 19 nt, Artificial Sequence
  Description of Artificial Sequence: Synthetic oligonucleotide
guuaaggaggcugugcugc

SEQ ID NO: 445704 - RNA, 19 nt, Artificial Sequence
  Description of Artificial Sequence: Synthetic oligonucleotide
agcaaauuaagaacacguc

SEQ ID NO: 445705 - RNA, 19 nt, Artificial Sequence
  Description of Artificial Sequence: Synthetic oligonucleotide
guuacaggugcauuacaug

SEQ ID NO: 445706 - RNA, 19 nt, Artificial Sequence
  Description of Artificial Sequence: Synthetic oligonucleotide
ugcaaaaguuagucaacug

SEQ ID NO: 445707 - RNA, 19 nt, Artificial Sequence
  Description of Artificial Sequence: Synthetic oligonucleotide
accuguaaagcugcaacac

SEQ ID NO: 445708 - RNA, 19 nt, Artificial Sequence
  Description of Artificial Sequence: Synthetic oligonucleotide
uucuacuaaucuaccaaaa

SEQ ID NO: 445709 - RNA, 19 nt, Artificial Sequence
  Description of Artificial Sequence: Synthetic oligonucleotide
gaucaugucguguuucgca

SEQ ID NO: 445710 - RNA, 19 nt, Artificial Sequence
  Description of Artificial Sequence: Synthetic oligonucleotide
cuuauaguacaggucagac

SEQ ID NO: 445711 - RNA, 19 nt, Artificial Sequence
  Description of Artificial Sequence: Synthetic oligonucleotide
gaauacuucauuagaggca

SEQ ID NO: 445712 - RNA, 19 nt, Artificial Sequence
  Description of Artificial Sequence: Synthetic oligonucleotide
uaagaccggccauuuauca

SEQ ID NO: 445713 - RNA, 19 nt, Artificial Sequence
  Description of Artificial Sequence: Synthetic oligonucleotide
uguuucgcacacuccaccc

SEQ ID NO: 445714 - RNA, 19 nt, Artificial Sequence
  Description of Artificial Sequence: Synthetic oligonucleotide
accgcauuagcaaaagauc

SEQ ID NO: 445715 - RNA, 19 nt, Artificial Sequence
  Description of Artificial Sequence: Synthetic oligonucleotide
auauggauucaacacccca

SEQ ID NO: 445716 - RNA, 19 nt, Artificial Sequence
  Description of Artificial Sequence: Synthetic oligonucleotide
auagaccauaacuuggaau

SEQ ID NO: 445717 - RNA, 19 nt, Artificial Sequence
  Description of Artificial Sequence: Synthetic oligonucleotide
aacuuuacccgugacacuu

SEQ ID NO: 445718 - RNA, 19 nt, Artificial Sequence
  Description of Artificial Sequence: Synthetic oligonucleotide
acugcuaaccgcauuagca

SEQ ID NO: 445719 - RNA, 19 nt, Artificial Sequence
  Description of Artificial Sequence: Synthetic oligonucleotide
ugcaggacucacaagggaa

SEQ ID NO: 445720 - RNA, 19 nt, Artificial Sequence
  Description of Artificial Sequence: Synthetic oligonucleotide
uucaguugaauuacuccau

SEQ ID NO: 445721 - RNA, 19 nt, Artificial Sequence
  Description of Artificial Sequence: Synthetic oligonucleotide
uauccuuaucaucccugag

SEQ ID NO: 445722 - RNA, 19 nt, Artificial Sequence
  Description of Artificial Sequence: Synthetic oligonucleotide
aagcguacaaagguuccag

SEQ ID NO: 445723 - RNA, 19 nt, Artificial Sequence
  Description of Artificial Sequence: Synthetic oligonucleotide
uacaaaguuaugucaugaa

SEQ ID NO: 445724 - RNA, 19 nt, Artificial Sequence
  Description of Artificial Sequence: Synthetic oligonucleotide
agcacaacacaacuuaguu

SEQ ID NO: 445725 - RNA, 19 nt, Artificial Sequence
  Description of Artificial Sequence: Synthetic oligonucleotide
gauaagaccggccauuuau

SEQ ID NO: 445726 - RNA, 19 nt, Artificial Sequence
  Description of Artificial Sequence: Synthetic oligonucleotide
uacuucauuagaggcaaca

SEQ ID NO: 445727 - RNA, 19 nt, Artificial Sequence
  Description of Artificial Sequence: Synthetic oligonucleotide
ugucguguuucgcacacuc

SEQ ID NO: 445728 - RNA, 19 nt, Artificial Sequence
  Description of Artificial Sequence: Synthetic oligonucleotide
guuagguuguacagaacag

SEQ ID NO: 445729 - RNA, 19 nt, Artificial Sequence
  Description of Artificial Sequence: Synthetic oligonucleotide
caccuaguuacuagaaaac

SEQ ID NO: 445730 - RNA, 19 nt, Artificial Sequence
  Description of Artificial Sequence: Synthetic oligonucleotide
aaacuuuacccgugacacu

SEQ ID NO: 445731 - RNA, 19 nt, Artificial Sequence
  Description of Artificial Sequence: Synthetic oligonucleotide
agcguacaaagguuccagg

SEQ ID NO: 445732 - RNA, 19 nt, Artificial Sequence
  Description of Artificial Sequence: Synthetic oligonucleotide
uagugcguaguguucucag

SEQ ID NO: 445733 - RNA, 19 nt, Artificial Sequence
  Description of Artificial Sequence: Synthetic oligonucleotide
ugcggguaggugauaggag

SEQ ID NO: 445734 - RNA, 19 nt, Artificial Sequence
  Description of Artificial Sequence: Synthetic oligonucleotide
aagcuucguucccaccagg

SEQ ID NO: 445735 - RNA, 19 nt, Artificial Sequence
  Description of Artificial Sequence: Synthetic oligonucleotide
aaguuaugucaugaacaug

SEQ ID NO: 445736 - RNA, 19 nt, Artificial Sequence
  Description of Artificial Sequence: Synthetic oligonucleotide
uggauucaacaccccaucu

SEQ ID NO: 445737 - RNA, 19 nt, Artificial Sequence
  Description of Artificial Sequence: Synthetic oligonucleotide
aagcucgagagacacugau

SEQ ID NO: 445738 - RNA, 19 nt, Artificial Sequence
  Description of Artificial Sequence: Synthetic oligonucleotide
ugcauugguuguguaacug

SEQ ID NO: 445739 - RNA, 19 nt, Artificial Sequence
  Description of Artificial Sequence: Synthetic oligonucleotide
gacacugauaagaccggcc

SEQ ID NO: 445740 - RNA, 19 nt, Artificial Sequence
  Description of Artificial Sequence: Synthetic oligonucleotide
agaaaacuaaggaaagcau

SEQ ID NO: 445741 - RNA, 19 nt, Artificial Sequence
  Description of Artificial Sequence: Synthetic oligonucleotide
aggaaugcacuucuacuaa

SEQ ID NO: 445742 - RNA, 19 nt, Artificial Sequence
  Description of Artificial Sequence: Synthetic oligonucleotide
ucgcacuucaggauaccac

SEQ ID NO: 445743 - RNA, 19 nt, Artificial Sequence
  Description of Artificial Sequence: Synthetic oligonucleotide
ucgacaguuuagugcguag

SEQ ID NO: 445744 - RNA, 19 nt, Artificial Sequence
  Description of Artificial Sequence: Synthetic oligonucleotide
acacccacgacuaggaaca

SEQ ID NO: 445745 - RNA, 19 nt, Artificial Sequence
  Description of Artificial Sequence: Synthetic oligonucleotide
acaacuuaguucagaaggu

SEQ ID NO: 445746 - RNA, 19 nt, Artificial Sequence
  Description of Artificial Sequence: Synthetic oligonucleotide
ugcaccccgacuccagaag

SEQ ID NO: 445747 - RNA, 19 nt, Artificial Sequence
  Description of Artificial Sequence: Synthetic oligonucleotide
guuagcaaccauggggaag

SEQ ID NO: 445748 - RNA, 19 nt, Artificial Sequence
  Description of Artificial Sequence: Synthetic oligonucleotide
ucuuaacaggagguggaca

SEQ ID NO: 445749 - RNA, 19 nt, Artificial Sequence
  Description of Artificial Sequence: Synthetic oligonucleotide
ugacagaaauuaaccguua

SEQ ID NO: 445750 - RNA, 19 nt, Artificial Sequence
  Description of Artificial Sequence: Synthetic oligonucleotide
aagagucugcaccccgacu

SEQ ID NO: 445751 - RNA, 19 nt, Artificial Sequence
  Description of Artificial Sequence: Synthetic oligonucleotide
aucugggccgcuccguggg

SEQ ID NO: 445752 - RNA, 19 nt, Artificial Sequence
  Description of Artificial Sequence: Synthetic oligonucleotide
ugcuaaccgcauuagcaaa

SEQ ID NO: 445753 - RNA, 19 nt, Artificial Sequence
  Description of Artificial Sequence: Synthetic oligonucleotide
agguauuugacagcgccga

SEQ ID NO: 445754 - RNA, 19 nt, Artificial Sequence
  Description of Artificial Sequence: Synthetic oligonucleotide
auugcucguuaagaagggg

SEQ ID NO: 445755 - RNA, 19 nt, Artificial Sequence
  Description of Artificial Sequence: Synthetic oligonucleotide
ggugcauuacauggcaacg

SEQ ID NO: 445756 - RNA, 19 nt, Artificial Sequence
  Description of Artificial Sequence: Synthetic oligonucleotide
gcaaauuaagaacacgucu

SEQ ID NO: 445757 - RNA, 19 nt, Artificial Sequence
  Description of Artificial Sequence: Synthetic oligonucleotide
ucaaaugcgaaggcuccac

SEQ ID NO: 445758 - RNA, 19 nt, Artificial Sequence
  Description of Artificial Sequence: Synthetic oligonucleotide
guaguguaaaguaaucucu

SEQ ID NO: 445759 - RNA, 19 nt, Artificial Sequence
  Description of Artificial Sequence: Synthetic oligonucleotide
ggaaguguguccacguggg

SEQ ID NO: 445760 - RNA, 19 nt, Artificial Sequence
  Description of Artificial Sequence: Synthetic oligonucleotide
cauacugcuaaccgcauua

SEQ ID NO: 445761 - RNA, 19 nt, Artificial Sequence
  Description of Artificial Sequence: Synthetic oligonucleotide
cuaaccgcauuagcaaaag

SEQ ID NO: 445762 - RNA, 19 nt, Artificial Sequence
  Description of Artificial Sequence: Synthetic oligonucleotide
cauuagaggcaacacggga

SEQ ID NO: 445763 - RNA, 19 nt, Artificial Sequence
  Description of Artificial Sequence: Synthetic oligonucleotide
cacgacuaggaacagaaua

SEQ ID NO: 445764 - RNA, 19 nt, Artificial Sequence
  Description of Artificial Sequence: Synthetic oligonucleotide
auggcaacgugucguuaag

SEQ ID NO: 445765 - RNA, 19 nt, Artificial Sequence
  Description of Artificial Sequence: Synthetic oligonucleotide
ugcguaguguucucagcac

SEQ ID NO: 445766 - RNA, 19 nt, Artificial Sequence
  Description of Artificial Sequence: Synthetic oligonucleotide
caaaugcgaaggcuccacc

SEQ ID NO: 445767 - RNA, 19 nt, Artificial Sequence
  Description of Artificial Sequence: Synthetic oligonucleotide
gaagagucugcaccccgac

SEQ ID NO: 445768 - RNA, 19 nt, Artificial Sequence
  Description of Artificial Sequence: Synthetic oligonucleotide
augcauuaucagaaagauc

SEQ ID NO: 445769 - RNA, 19 nt, Artificial Sequence
  Description of Artificial Sequence: Synthetic oligonucleotide
uuuagugcguaguguucuc

SEQ ID NO: 445770 - RNA, 19 nt, Artificial Sequence
  Description of Artificial Sequence: Synthetic oligonucleotide
cagugaguuagguuguaca

SEQ ID NO: 445771 - RNA, 19 nt, Artificial Sequence
  Description of Artificial Sequence: Synthetic oligonucleotide
guacaguacaaaguuaugu

SEQ ID NO: 445772 - RNA, 19 nt, Artificial Sequence
  Description of Artificial Sequence: Synthetic oligonucleotide
aacaccccaucuggggagg

SEQ ID NO: 445773 - RNA, 19 nt, Artificial Sequence
  Description of Artificial Sequence: Synthetic oligonucleotide
gaaggcgaagcacgacagc

SEQ ID NO: 445774 - RNA, 19 nt, Artificial Sequence
  Description of Artificial Sequence: Synthetic oligonucleotide
auuagucacaugacagugu

SEQ ID NO: 445775 - RNA, 19 nt, Artificial Sequence
  Description of Artificial Sequence: Synthetic oligonucleotide
aggaaaugcauugguugug

SEQ ID NO: 445776 - RNA, 19 nt, Artificial Sequence
  Description of Artificial Sequence: Synthetic oligonucleotide
acagcgccgaucucuuuug

SEQ ID NO: 445777 - RNA, 19 nt, Artificial Sequence
  Description of Artificial Sequence: Synthetic oligonucleotide
ucgcacacuccacccagca

SEQ ID NO: 445778 - RNA, 19 nt, Artificial Sequence
  Description of Artificial Sequence: Synthetic oligonucleotide
uccuuugaucaugucgugu

SEQ ID NO: 445779 - RNA, 19 nt, Artificial Sequence
  Description of Artificial Sequence: Synthetic oligonucleotide
augggcugauaaguuacag

SEQ ID NO: 445780 - RNA, 19 nt, Artificial Sequence
  Description of Artificial Sequence: Synthetic oligonucleotide
aaguggcgggcucgggaag

SEQ ID NO: 445781 - RNA, 19 nt, Artificial Sequence
  Description of Artificial Sequence: Synthetic oligonucleotide
agaacagcguuagcacuag

SEQ ID NO: 445782 - RNA, 19 nt, Artificial Sequence
  Description of Artificial Sequence: Synthetic oligonucleotide
ggagggacggcaguguagg

SEQ ID NO: 445783 - RNA, 19 nt, Artificial Sequence
  Description of Artificial Sequence: Synthetic oligonucleotide
gcaaaacauacugcuaacc

SEQ ID NO: 445784 - RNA, 19 nt, Artificial Sequence
  Description of Artificial Sequence: Synthetic oligonucleotide
auacugcuaaccgcauuag

SEQ ID NO: 445785 - RNA, 19 nt, Artificial Sequence
  Description of Artificial Sequence: Synthetic oligonucleotide
agcguuagcacuagcaguu

SEQ ID NO: 445786 - RNA, 19 nt, Artificial Sequence
  Description of Artificial Sequence: Synthetic oligonucleotide
aacucacuaugaaaucaaa

SEQ ID NO: 445787 - RNA, 19 nt, Artificial Sequence
  Description of Artificial Sequence: Synthetic oligonucleotide
gaaguggcgggcucgggaa

SEQ ID NO: 445788 - RNA, 19 nt, Artificial Sequence
  Description of Artificial Sequence: Synthetic oligonucleotide
acugauaagaccggccauu

SEQ ID NO: 445789 - RNA, 19 nt, Artificial Sequence
  Description of Artificial Sequence: Synthetic oligonucleotide
gggaccgcuguccacgccg

SEQ ID NO: 445790 - RNA, 19 nt, Artificial Sequence
  Description of Artificial Sequence: Synthetic oligonucleotide
ugauaagaccggccauuua

SEQ ID NO: 445791 - RNA, 19 nt, Artificial Sequence
  Description of Artificial Sequence: Synthetic oligonucleotide
cuuuugccauggcuagccc

SEQ ID NO: 445792 - RNA, 19 nt, Artificial Sequence
  Description of Artificial Sequence: Synthetic oligonucleotide
ugggguggccagcuuaaau

SEQ ID NO: 445793 - RNA, 19 nt, Artificial Sequence
  Description of Artificial Sequence: Synthetic oligonucleotide
uucgcacacuccacccagc

SEQ ID NO: 445794 - RNA, 19 nt, Artificial Sequence
  Description of Artificial Sequence: Synthetic oligonucleotide
gaggggacgcaaucuguca

SEQ ID NO: 445795 - RNA, 19 nt, Artificial Sequence
  Description of Artificial Sequence: Synthetic oligonucleotide
ccgcauuagcaaaagauca

SEQ ID NO: 445796 - RNA, 19 nt, Artificial Sequence
  Description of Artificial Sequence: Synthetic oligonucleotide
uugacagcgccgaucucuu

SEQ ID NO: 445797 - RNA, 19 nt, Artificial Sequence
  Description of Artificial Sequence: Synthetic oligonucleotide
aggggacgcaaucugucau

SEQ ID NO: 445798 - RNA, 19 nt, Artificial Sequence
  Description of Artificial Sequence: Synthetic oligonucleotide
gagggacggcaguguaggg

SEQ ID NO: 445799 - RNA, 19 nt, Artificial Sequence
  Description of Artificial Sequence: Synthetic oligonucleotide
cagaacagcguuagcacua

SEQ ID NO: 445800 - RNA, 19 nt, Artificial Sequence
  Description of Artificial Sequence: Synthetic oligonucleotide
gaaaugcauugguugugua

SEQ ID NO: 445801 - RNA, 19 nt, Artificial Sequence
  Description of Artificial Sequence: Synthetic oligonucleotide
gcaagaauaggggacuuga

SEQ ID NO: 445802 - RNA, 19 nt, Artificial Sequence
  Description of Artificial Sequence: Synthetic oligonucleotide
cuagugguuggaaggccca

SEQ ID NO: 445803 - RNA, 19 nt, Artificial Sequence
  Description of Artificial Sequence: Synthetic oligonucleotide
guuucgcacacuccaccca

SEQ ID NO: 445804 - RNA, 19 nt, Artificial Sequence
  Description of Artificial Sequence: Synthetic oligonucleotide
aucaaaugcgaaggcucca

SEQ ID NO: 445805 - RNA, 19 nt, Artificial Sequence
  Description of Artificial Sequence: Synthetic oligonucleotide
gaacagcguuagcacuagc

SEQ ID NO: 445806 - RNA, 19 nt, Artificial Sequence
  Description of Artificial Sequence: Synthetic oligonucleotide
acauacugcuaaccgcauu

SEQ ID NO: 445807 - RNA, 19 nt, Artificial Sequence
  Description of Artificial Sequence: Synthetic oligonucleotide
gcauugguuguguaacuga

SEQ ID NO: 445808 - RNA, 19 nt, Artificial Sequence
  Description of Artificial Sequence: Synthetic oligonucleotide
aaccgcucggauagcuuca

SEQ ID NO: 445809 - RNA, 19 nt, Artificial Sequence
  Description of Artificial Sequence: Synthetic oligonucleotide
aggggcucagacauuuaca

SEQ ID NO: 445810 - RNA, 19 nt, Artificial Sequence
  Description of Artificial Sequence: Synthetic oligonucleotide
gucguguuucgcacacucc

SEQ ID NO: 445811 - RNA, 19 nt, Artificial Sequence
  Description of Artificial Sequence: Synthetic oligonucleotide
caacacaacuuaguucaga

SEQ ID NO: 445812 - RNA, 19 nt, Artificial Sequence
  Description of Artificial Sequence: Synthetic oligonucleotide
ugucgcacuucaggauacc

SEQ ID NO: 445813 - RNA, 19 nt, Artificial Sequence
  Description of Artificial Sequence: Synthetic oligonucleotide
ggugucgcacuucaggaua

SEQ ID NO: 445814 - RNA, 19 nt, Artificial Sequence
  Description of Artificial Sequence: Synthetic oligonucleotide
cccacgacuaggaacagaa

SEQ ID NO: 445815 - RNA, 19 nt, Artificial Sequence
  Description of Artificial Sequence: Synthetic oligonucleotide
guggcguacaguacaaagu

SEQ ID NO: 445816 - RNA, 19 nt, Artificial Sequence
  Description of Artificial Sequence: Synthetic oligonucleotide
cuuaguucagaagguauuu

SEQ ID NO: 445817 - RNA, 19 nt, Artificial Sequence
  Description of Artificial Sequence: Synthetic oligonucleotide
gcauuagucacaugacagu

SEQ ID NO: 445818 - RNA, 19 nt, Artificial Sequence
  Description of Artificial Sequence: Synthetic oligonucleotide
gacagcgccgaucucuuuu

SEQ ID NO: 445819 - RNA, 19 nt, Artificial Sequence
  Description of Artificial Sequence: Synthetic oligonucleotide
gugucgcacuucaggauac

SEQ ID NO: 445820 - RNA, 19 nt, Artificial Sequence
  Description of Artificial Sequence: Synthetic oligonucleotide
caacuuaguucagaaggua

SEQ ID NO: 445821 - RNA, 19 nt, Artificial Sequence
  Description of Artificial Sequence: Synthetic oligonucleotide
cagcguuagcacuagcagu

SEQ ID NO: 445822 - RNA, 19 nt, Artificial Sequence
  Description of Artificial Sequence: Synthetic oligonucleotide
gacagagaaccgcucggau

SEQ ID NO: 445823 - RNA, 19 nt, Artificial Sequence
  Description of Artificial Sequence: Synthetic oligonucleotide
ccgugacacuuuuauucag

SEQ ID NO: 445824 - RNA, 19 nt, Artificial Sequence
  Description of Artificial Sequence: Synthetic oligonucleotide
gaacaugggcugauaaguu

SEQ ID NO: 445825 - RNA, 19 nt, Artificial Sequence
  Description of Artificial Sequence: Synthetic oligonucleotide
gcugcgucacacagucugg

SEQ ID NO: 445826 - RNA, 19 nt, Artificial Sequence
  Description of Artificial Sequence: Synthetic oligonucleotide
cgugucguuaaggaggcug

SEQ ID NO: 445827 - RNA, 19 nt, Artificial Sequence
  Description of Artificial Sequence: Synthetic oligonucleotide
gugcauuacauggcaacgu

SEQ ID NO: 445828 - RNA, 19 nt, Artificial Sequence
  Description of Artificial Sequence: Synthetic oligonucleotide
cagcgccgaucucuuuugc

SEQ ID NO: 445829 - RNA, 19 nt, Artificial Sequence
  Description of Artificial Sequence: Synthetic oligonucleotide
ggaaaugcauugguugugu

SEQ ID NO: 445830 - RNA, 19 nt, Artificial Sequence
  Description of Artificial Sequence: Synthetic oligonucleotide
agcggacuggaaggcgaag

SEQ ID NO: 445831 - RNA, 19 nt, Artificial Sequence
  Description of Artificial Sequence: Synthetic oligonucleotide
cucgcugugugagcgcuga

SEQ ID NO: 445832 - RNA, 19 nt, Artificial Sequence
  Description of Artificial Sequence: Synthetic oligonucleotide
gcaucugggccgcuccgug

SEQ ID NO: 445833 - RNA, 19 nt, Artificial Sequence
  Description of Artificial Sequence: Synthetic oligonucleotide
gugucguuaaggaggcugu

SEQ ID NO: 445834 - RNA, 19 nt, Artificial Sequence
  Description of Artificial Sequence: Synthetic oligonucleotide
gcguacaguacaaaguuau

SEQ ID NO: 445835 - RNA, 19 nt, Artificial Sequence
  Description of Artificial Sequence: Synthetic oligonucleotide
cugggccgcuccgugggcc

SEQ ID NO: 445836 - RNA, 19 nt, Artificial Sequence
  Description of Artificial Sequence: Synthetic oligonucleotide
cguguuucgcacacuccac

SEQ ID NO: 445837 - RNA, 19 nt, Artificial Sequence
  Description of Artificial Sequence: Synthetic oligonucleotide
aggucuagaggggcagcau

SEQ ID NO: 445838 - RNA, 19 nt, Artificial Sequence
  Description of Artificial Sequence: Synthetic oligonucleotide
gaccggccauuuaucaucu

SEQ ID NO: 445839 - RNA, 19 nt, Artificial Sequence
  Description of Artificial Sequence: Synthetic oligonucleotide
ggguggccagcuuaaauau

SEQ ID NO: 445840 - RNA, 19 nt, Artificial Sequence
  Description of Artificial Sequence: Synthetic oligonucleotide
gugauaggagucagcuucu

SEQ ID NO: 445841 - RNA, 19 nt, Artificial Sequence
  Description of Artificial Sequence: Synthetic oligonucleotide
acccacgacuaggaacaga

SEQ ID NO: 445842 - RNA, 19 nt, Artificial Sequence
  Description of Artificial Sequence: Synthetic oligonucleotide
gucacaugacaguguuggu

SEQ ID NO: 445843 - RNA, 19 nt, Artificial Sequence
  Description of Artificial Sequence: Synthetic oligonucleotide
cugcgucacacagucugga

SEQ ID NO: 445844 - RNA, 19 nt, Artificial Sequence
  Description of Artificial Sequence: Synthetic oligonucleotide
cucgacaguuuagugcgua

SEQ ID NO: 445845 - RNA, 19 nt, Artificial Sequence
  Description of Artificial Sequence: Synthetic oligonucleotide
ccuuaucaucccugagauc

SEQ ID NO: 445846 - RNA, 19 nt, Artificial Sequence
  Description of Artificial Sequence: Synthetic oligonucleotide
ccccaucuggggagggacg

SEQ ID NO: 445847 - RNA, 19 nt, Artificial Sequence
  Description of Artificial Sequence: Synthetic oligonucleotide
augucguguuucgcacacu

SEQ ID NO: 445848 - RNA, 19 nt, Artificial Sequence
  Description of Artificial Sequence: Synthetic oligonucleotide
ggcggcggggcgccgagug

SEQ ID NO: 445849 - RNA, 19 nt, Artificial Sequence
  Description of Artificial Sequence: Synthetic oligonucleotide
gggacgcaaucugucauaa

SEQ ID NO: 445850 - RNA, 19 nt, Artificial Sequence
  Description of Artificial Sequence: Synthetic oligonucleotide
cgcauuagcaaaagaucaa

SEQ ID NO: 445851 - RNA, 19 nt, Artificial Sequence
  Description of Artificial Sequence: Synthetic oligonucleotide
gcgccgagugccgggaccg

SEQ ID NO: 445852 - RNA, 19 nt, Artificial Sequence
  Description of Artificial Sequence: Synthetic oligonucleotide
ggggacgcaaucugucaua

SEQ ID NO: 445853 - RNA, 19 nt, Artificial Sequence
  Description of Artificial Sequence: Synthetic oligonucleotide
gcauuacauggcaacgugu

SEQ ID NO: 445854 - RNA, 19 nt, Artificial Sequence
  Description of Artificial Sequence: Synthetic oligonucleotide
ggcuagccccugcggguag

SEQ ID NO: 445855 - RNA, 19 nt, Artificial Sequence
  Description of Artificial Sequence: Synthetic oligonucleotide
cagcggacuggaaggcgaa

SEQ ID NO: 445856 - RNA, 19 nt, Artificial Sequence
  Description of Artificial Sequence: Synthetic oligonucleotide
cugauaagaccggccauuu

SEQ ID NO: 445857 - RNA, 19 nt, Artificial Sequence
  Description of Artificial Sequence: Synthetic oligonucleotide
cgucuguuugcggauagga

SEQ ID NO: 445858 - RNA, 19 nt, Artificial Sequence
  Description of Artificial Sequence: Synthetic oligonucleotide
gcuagccccugcggguagg

SEQ ID NO: 445859 - RNA, 19 nt, Artificial Sequence
  Description of Artificial Sequence: Synthetic oligonucleotide
gguuguuuagaagguucau

SEQ ID NO: 445860 - RNA, 19 nt, Artificial Sequence
  Description of Artificial Sequence: Synthetic oligonucleotide
gagcaagaauaggggacuu

SEQ ID NO: 445861 - RNA, 19 nt, Artificial Sequence
  Description of Artificial Sequence: Synthetic oligonucleotide
gcuucguucccaccaggau

SEQ ID NO: 445862 - RNA, 19 nt, Artificial Sequence
  Description of Artificial Sequence: Synthetic oligonucleotide
accggccauuuaucaucua

SEQ ID NO: 445863 - RNA, 19 nt, Artificial Sequence
  Description of Artificial Sequence: Synthetic oligonucleotide
cacgugggugaggucuaga

SEQ ID NO: 445864 - RNA, 19 nt, Artificial Sequence
  Description of Artificial Sequence: Synthetic oligonucleotide
cgagcgggugcgaggcugc

SEQ ID NO: 445865 - RNA, 19 nt, Artificial Sequence
  Description of Artificial Sequence: Synthetic oligonucleotide
ccgggaccgcuguccacgc

SEQ ID NO: 445866 - RNA, 19 nt, Artificial Sequence
  Description of Artificial Sequence: Synthetic oligonucleotide
caccccgacuccagaaguu

SEQ ID NO: 445867 - RNA, 19 nt, Artificial Sequence
  Description of Artificial Sequence: Synthetic oligonucleotide
cgacuaggaacagaauacu

SEQ ID NO: 445868 - RNA, 19 nt, Artificial Sequence
  Description of Artificial Sequence: Synthetic oligonucleotide
ccacgugggugaggucuag

SEQ ID NO: 445869 - RNA, 19 nt, Artificial Sequence
  Description of Artificial Sequence: Synthetic oligonucleotide
cuagccccugcggguaggu

SEQ ID NO: 445870 - RNA, 19 nt, Artificial Sequence
  Description of Artificial Sequence: Synthetic oligonucleotide
gccagugaguuagguugua

SEQ ID NO: 445871 - RNA, 19 nt, Artificial Sequence
  Description of Artificial Sequence: Synthetic oligonucleotide
cgacaguuuagugcguagu

SEQ ID NO: 445872 - RNA, 19 nt, Artificial Sequence
  Description of Artificial Sequence: Synthetic oligonucleotide
gggcgccgagugccgggac

SEQ ID NO: 445873 - RNA, 19 nt, Artificial Sequence
  Description of Artificial Sequence: Synthetic oligonucleotide
cggcggccggucacugagg

SEQ ID NO: 445874 - RNA, 19 nt, Artificial Sequence
  Description of Artificial Sequence: Synthetic oligonucleotide
caaagacgguggggaugua

SEQ ID NO: 445875 - RNA, 19 nt, Artificial Sequence
  Description of Artificial Sequence: Synthetic oligonucleotide
ccacgacuaggaacagaau

SEQ ID NO: 445876 - RNA, 19 nt, Artificial Sequence
  Description of Artificial Sequence: Synthetic oligonucleotide
gccgagugccgggaccgcu

SEQ ID NO: 445877 - RNA, 19 nt, Artificial Sequence
  Description of Artificial Sequence: Synthetic oligonucleotide
cgagugccgggaccgcugu

SEQ ID NO: 445878 - RNA, 19 nt, Artificial Sequence
  Description of Artificial Sequence: Synthetic oligonucleotide
cccugagaucaagcuucgu

SEQ ID NO: 445879 - RNA, 19 nt, Artificial Sequence
  Description of Artificial Sequence: Synthetic oligonucleotide
ccacgccgccuggccuuca

SEQ ID NO: 445880 - RNA, 19 nt, Artificial Sequence
  Description of Artificial Sequence: Synthetic oligonucleotide
  modified_base (16)..(16): a, c, u, g, unknown or other
aaaagugccaucucgnuuc

SEQ ID NO: 445881 - RNA, 19 nt, Artificial Sequence
  Description of Artificial Sequence: Synthetic oligonucleotide
uuaaauagcagcauccugg

SEQ ID NO: 445882 - RNA, 19 nt, Artificial Sequence
  Description of Artificial Sequence: Synthetic oligonucleotide
acaaguuuuaagcaaaacg

SEQ ID NO: 445883 - RNA, 19 nt, Artificial Sequence
  Description of Artificial Sequence: Synthetic oligonucleotide
aaauauaugucagguaagc

SEQ ID NO: 445884 - RNA, 19 nt, Artificial Sequence
  Description of Artificial Sequence: Synthetic oligonucleotide
aaaggauaagguuagaaau

SEQ ID NO: 445885 - RNA, 19 nt, Artificial Sequence
  Description of Artificial Sequence: Synthetic oligonucleotide
uugaaaacugguaacgacg

SEQ ID NO: 445886 - RNA, 19 nt, Artificial Sequence
  Description of Artificial Sequence: Synthetic oligonucleotide
aauugcauagcgcugcacg

SEQ ID NO: 445887 - RNA, 19 nt, Artificial Sequence
  Description of Artificial Sequence: Synthetic oligonucleotide
aacgaagcaacaucaaagg

SEQ ID NO: 445888 - RNA, 19 nt, Artificial Sequence
  Description of Artificial Sequence: Synthetic oligonucleotide
aacauuaacaagcaccaug

SEQ ID NO: 445889 - RNA, 19 nt, Artificial Sequence
  Description of Artificial Sequence: Synthetic oligonucleotide
uuaagaauugcauagcgcu

SEQ ID NO: 445890 - RNA, 19 nt, Artificial Sequence
  Description of Artificial Sequence: Synthetic oligonucleotide
uuaacaagcaccaugguua

SEQ ID NO: 445891 - RNA, 19 nt, Artificial Sequence
  Description of Artificial Sequence: Synthetic oligonucleotide
aagcaagacauucagaccu

SEQ ID NO: 445892 - RNA, 19 nt, Artificial Sequence
  Description of Artificial Sequence: Synthetic oligonucleotide
ugauauauaacuauagauu

SEQ ID NO: 445893 - RNA, 19 nt, Artificial Sequence
  Description of Artificial Sequence: Synthetic oligonucleotide
uuagauaccaugcauugca

SEQ ID NO: 445894 - RNA, 19 nt, Artificial Sequence
  Description of Artificial Sequence: Synthetic oligonucleotide
acugauucgagacuuuagc

SEQ ID NO: 445895 - RNA, 19 nt, Artificial Sequence
  Description of Artificial Sequence: Synthetic oligonucleotide
gcuagugugacauugaggg

SEQ ID NO: 445896 - RNA, 19 nt, Artificial Sequence
  Description of Artificial Sequence: Synthetic oligonucleotide
ugacccuaaauucaaacag

SEQ ID NO: 445897 - RNA, 19 nt, Artificial Sequence
  Description of Artificial Sequence: Synthetic oligonucleotide
uuaugguuucauuaaaugc

SEQ ID NO: 445898 - RNA, 19 nt, Artificial Sequence
  Description of Artificial Sequence: Synthetic oligonucleotide
acaaauauaugucagguaa

SEQ ID NO: 445899 - RNA, 19 nt, Artificial Sequence
  Description of Artificial Sequence: Synthetic oligonucleotide
uaagcaaaacguuuucugg

SEQ ID NO: 445900 - RNA, 19 nt, Artificial Sequence
  Description of Artificial Sequence: Synthetic oligonucleotide
aagaauugcauagcgcugc

SEQ ID NO: 445901 - RNA, 19 nt, Artificial Sequence
  Description of Artificial Sequence: Synthetic oligonucleotide
uuuaugguuucauuaaaug

SEQ ID NO: 445902 - RNA, 19 nt, Artificial Sequence
  Description of Artificial Sequence: Synthetic oligonucleotide
uuccaacugacuuagauac

SEQ ID NO: 445903 - RNA, 19 nt, Artificial Sequence
  Description of Artificial Sequence: Synthetic oligonucleotide
uuuuccuccgaacauacug

SEQ ID NO: 445904 - RNA, 19 nt, Artificial Sequence
  Description of Artificial Sequence: Synthetic oligonucleotide
ccuaaauucaaacagacag

SEQ ID NO: 445905 - RNA, 19 nt, Artificial Sequence
  Description of Artificial Sequence: Synthetic oligonucleotide
ucuaccacuacagagcagg

SEQ ID NO: 445906 - RNA, 19 nt, Artificial Sequence
  Description of Artificial Sequence: Synthetic oligonucleotide
aaacgaagcaacaucaaag

SEQ ID NO: 445907 - RNA, 19 nt, Artificial Sequence
  Description of Artificial Sequence: Synthetic oligonucleotide
agauucucagcuuuguuuc

SEQ ID NO: 445908 - RNA, 19 nt, Artificial Sequence
  Description of Artificial Sequence: Synthetic oligonucleotide
cugguaacgacguauaaag

SEQ ID NO: 445909 - RNA, 19 nt, Artificial Sequence
  Description of Artificial Sequence: Synthetic oligonucleotide
ugucuagucauucaacagc

SEQ ID NO: 445910 - RNA, 19 nt, Artificial Sequence
  Description of Artificial Sequence: Synthetic oligonucleotide
cuauuugauaguuagucac

SEQ ID NO: 445911 - RNA, 19 nt, Artificial Sequence
  Description of Artificial Sequence: Synthetic oligonucleotide
ucuguugugcauauaccgg

SEQ ID NO: 445912 - RNA, 19 nt, Artificial Sequence
  Description of Artificial Sequence: Synthetic oligonucleotide
uuuagcuuaucauaguuau

SEQ ID NO: 445913 - RNA, 19 nt, Artificial Sequence
  Description of Artificial Sequence: Synthetic oligonucleotide
ucaaguauuggucucuugu

SEQ ID NO: 445914 - RNA, 19 nt, Artificial Sequence
  Description of Artificial Sequence: Synthetic oligonucleotide
uguguugauaauaguagca

SEQ ID NO: 445915 - RNA, 19 nt, Artificial Sequence
  Description of Artificial Sequence: Synthetic oligonucleotide
aaugcuucgauagcuguuc

SEQ ID NO: 445916 - RNA, 19 nt, Artificial Sequence
  Description of Artificial Sequence: Synthetic oligonucleotide
gcuuauuugguauugauac

SEQ ID NO: 445917 - RNA, 19 nt, Artificial Sequence
  Description of Artificial Sequence: Synthetic oligonucleotide
uaagguuagaaaugucuag

SEQ ID NO: 445918 - RNA, 19 nt, Artificial Sequence
  Description of Artificial Sequence: Synthetic oligonucleotide
auaauaguagcaccagcuc

SEQ ID NO: 445919 - RNA, 19 nt, Artificial Sequence
  Description of Artificial Sequence: Synthetic oligonucleotide
uguugauaauaguagcacc

SEQ ID NO: 445920 - RNA, 19 nt, Artificial Sequence
  Description of Artificial Sequence: Synthetic oligonucleotide
guugccuucacguuuaaac

SEQ ID NO: 445921 - RNA, 19 nt, Artificial Sequence
  Description of Artificial Sequence: Synthetic oligonucleotide
auauaugucagguaagcaa

SEQ ID NO: 445922 - RNA, 19 nt, Artificial Sequence
  Description of Artificial Sequence: Synthetic oligonucleotide
aagcaaaacguuuucuggu

SEQ ID NO: 445923 - RNA, 19 nt, Artificial Sequence
  Description of Artificial Sequence: Synthetic oligonucleotide
acuuugucccaugugaggc

SEQ ID NO: 445924 - RNA, 19 nt, Artificial Sequence
  Description of Artificial Sequence: Synthetic oligonucleotide
uuugaaaacugguaacgac

SEQ ID NO: 445925 - RNA, 19 nt, Artificial Sequence
  Description of Artificial Sequence: Synthetic oligonucleotide
aaaacgaagcaacaucaaa

SEQ ID NO: 445926 - RNA, 19 nt, Artificial Sequence
  Description of Artificial Sequence: Synthetic oligonucleotide
uuugccaacaauguucacc

SEQ ID NO: 445927 - RNA, 19 nt, Artificial Sequence
  Description of Artificial Sequence: Synthetic oligonucleotide
ggaaguaacccacagugcg

SEQ ID NO: 445928 - RNA, 19 nt, Artificial Sequence
  Description of Artificial Sequence: Synthetic oligonucleotide
ucggcaaagccauagccgg

SEQ ID NO: 445929 - RNA, 19 nt, Artificial Sequence
  Description of Artificial Sequence: Synthetic oligonucleotide
ugaaaacugguaacgacgu

SEQ ID NO: 445930 - RNA, 19 nt, Artificial Sequence
  Description of Artificial Sequence: Synthetic oligonucleotide
auguauucuuugcuguacc

SEQ ID NO: 445931 - RNA, 19 nt, Artificial Sequence
  Description of Artificial Sequence: Synthetic oligonucleotide
ucuauguauucuuugcugu

SEQ ID NO: 445932 - RNA, 19 nt, Artificial Sequence
  Description of Artificial Sequence: Synthetic oligonucleotide
uuaaaugcuucgauagcug

SEQ ID NO: 445933 - RNA, 19 nt, Artificial Sequence
  Description of Artificial Sequence: Synthetic oligonucleotide
uacgcaaugcuugacuucg

SEQ ID NO: 445934 - RNA, 19 nt, Artificial Sequence
  Description of Artificial Sequence: Synthetic oligonucleotide
uaggacuucccaaacaagu

SEQ ID NO: 445935 - RNA, 19 nt, Artificial Sequence
  Description of Artificial Sequence: Synthetic oligonucleotide
uucggugugaaguuggaga

SEQ ID NO: 445936 - RNA, 19 nt, Artificial Sequence
  Description of Artificial Sequence: Synthetic oligonucleotide
ucuuaaaaugacccuaaau

SEQ ID NO: 445937 - RNA, 19 nt, Artificial Sequence
  Description of Artificial Sequence: Synthetic oligonucleotide
uuguugauuacgcaaugcu

SEQ ID NO: 445938 - RNA, 19 nt, Artificial Sequence
  Description of Artificial Sequence: Synthetic oligonucleotide
uuuuaugguuucauuaaau

SEQ ID NO: 445939 - RNA, 19 nt, Artificial Sequence
  Description of Artificial Sequence: Synthetic oligonucleotide
uugauaguuagucacccaa

SEQ ID NO: 445940 - RNA, 19 nt, Artificial Sequence
  Description of Artificial Sequence: Synthetic oligonucleotide
guugauuacgcaaugcuug

SEQ ID NO: 445941 - RNA, 19 nt, Artificial Sequence
  Description of Artificial Sequence: Synthetic oligonucleotide
aaaacugguaacgacguau

SEQ ID NO: 445942 - RNA, 19 nt, Artificial Sequence
  Description of Artificial Sequence: Synthetic oligonucleotide
aguuacuagcucuuaacca

SEQ ID NO: 445943 - RNA, 19 nt, Artificial Sequence
  Description of Artificial Sequence: Synthetic oligonucleotide
ugauaauaguagcaccagc

SEQ ID NO: 445944 - RNA, 19 nt, Artificial Sequence
  Description of Artificial Sequence: Synthetic oligonucleotide
aaggauaagguuagaaaug

SEQ ID NO: 445945 - RNA, 19 nt, Artificial Sequence
  Description of Artificial Sequence: Synthetic oligonucleotide
cucccaauaagaaacaaca

SEQ ID NO: 445946 - RNA, 19 nt, Artificial Sequence
  Description of Artificial Sequence: Synthetic oligonucleotide
uaguuagucacccaauaau

SEQ ID NO: 445947 - RNA, 19 nt, Artificial Sequence
  Description of Artificial Sequence: Synthetic oligonucleotide
aaguaacccacagugcgac

SEQ ID NO: 445948 - RNA, 19 nt, Artificial Sequence
  Description of Artificial Sequence: Synthetic oligonucleotide
ucaaacagacagcaacgcc

SEQ ID NO: 445949 - RNA, 19 nt, Artificial Sequence
  Description of Artificial Sequence: Synthetic oligonucleotide
agggauugguuccucacac

SEQ ID NO: 445950 - RNA, 19 nt, Artificial Sequence
  Description of Artificial Sequence: Synthetic oligonucleotide
caaguuuuaagcaaaacgu

SEQ ID NO: 445951 - RNA, 19 nt, Artificial Sequence
  Description of Artificial Sequence: Synthetic oligonucleotide
uuuccuccgaacauacugc

SEQ ID NO: 445952 - RNA, 19 nt, Artificial Sequence
  Description of Artificial Sequence: Synthetic oligonucleotide
ucuuaaccagauaugugac

SEQ ID NO: 445953 - RNA, 19 nt, Artificial Sequence
  Description of Artificial Sequence: Synthetic oligonucleotide
agccaaugcuaucucaugg

SEQ ID NO: 445954 - RNA, 19 nt, Artificial Sequence
  Description of Artificial Sequence: Synthetic oligonucleotide
agguuagaaaugucuaguc

SEQ ID NO: 445955 - RNA, 19 nt, Artificial Sequence
  Description of Artificial Sequence: Synthetic oligonucleotide
cucuuaaccagauauguga

SEQ ID NO: 445956 - RNA, 19 nt, Artificial Sequence
  Description of Artificial Sequence: Synthetic oligonucleotide
cucagcuuuguuucgauug

SEQ ID NO: 445957 - RNA, 19 nt, Artificial Sequence
  Description of Artificial Sequence: Synthetic oligonucleotide
ucaaucucgcgguauucgg

SEQ ID NO: 445958 - RNA, 19 nt, Artificial Sequence
  Description of Artificial Sequence: Synthetic oligonucleotide
uuucucguugccuucacgu

SEQ ID NO: 445959 - RNA, 19 nt, Artificial Sequence
  Description of Artificial Sequence: Synthetic oligonucleotide
cuguugugcauauaccggg

SEQ ID NO: 445960 - RNA, 19 nt, Artificial Sequence
  Description of Artificial Sequence: Synthetic oligonucleotide
aaugcuugacuucgccauc

SEQ ID NO: 445961 - RNA, 19 nt, Artificial Sequence
  Description of Artificial Sequence: Synthetic oligonucleotide
ucccaauaagaaacaacag

SEQ ID NO: 445962 - RNA, 19 nt, Artificial Sequence
  Description of Artificial Sequence: Synthetic oligonucleotide
aauauaugucagguaagca

SEQ ID NO: 445963 - RNA, 19 nt, Artificial Sequence
  Description of Artificial Sequence: Synthetic oligonucleotide
augguuaaaggccucuuug

SEQ ID NO: 445964 - RNA, 19 nt, Artificial Sequence
  Description of Artificial Sequence: Synthetic oligonucleotide
acguauaaagguuaagaau

SEQ ID NO: 445965 - RNA, 19 nt, Artificial Sequence
  Description of Artificial Sequence: Synthetic oligonucleotide
aauaguagcaccagcuccu

SEQ ID NO: 445966 - RNA, 19 nt, Artificial Sequence
  Description of Artificial Sequence: Synthetic oligonucleotide
ugcuagugugacauugagg

SEQ ID NO: 445967 - RNA, 19 nt, Artificial Sequence
  Description of Artificial Sequence: Synthetic oligonucleotide
aguucccuuguccacacuc

SEQ ID NO: 445968 - RNA, 19 nt, Artificial Sequence
  Description of Artificial Sequence: Synthetic oligonucleotide
aagguuagaaaugucuagu

SEQ ID NO: 445969 - RNA, 19 nt, Artificial Sequence
  Description of Artificial Sequence: Synthetic oligonucleotide
ucggugugaaguuggagag

SEQ ID NO: 445970 - RNA, 19 nt, Artificial Sequence
  Description of Artificial Sequence: Synthetic oligonucleotide
uuaaugcuguucaugcgcu

SEQ ID NO: 445971 - RNA, 19 nt, Artificial Sequence
  Description of Artificial Sequence: Synthetic oligonucleotide
ucuucuaccagugaguauu

SEQ ID NO: 445972 - RNA, 19 nt, Artificial Sequence
  Description of Artificial Sequence: Synthetic oligonucleotide
auuaacaagcaccaugguu

SEQ ID NO: 445973 - RNA, 19 nt, Artificial Sequence
  Description of Artificial Sequence: Synthetic oligonucleotide
uugauacaaauccaucuau

SEQ ID NO: 445974 - RNA, 19 nt, Artificial Sequence
  Description of Artificial Sequence: Synthetic oligonucleotide
uguugguguauguuguggc

SEQ ID NO: 445975 - RNA, 19 nt, Artificial Sequence
  Description of Artificial Sequence: Synthetic oligonucleotide
aaucucgcgguauucggcu

SEQ ID NO: 445976 - RNA, 19 nt, Artificial Sequence
  Description of Artificial Sequence: Synthetic oligonucleotide
aaugucaaaugaugaacuu

SEQ ID NO: 445977 - RNA, 19 nt, Artificial Sequence
  Description of Artificial Sequence: Synthetic oligonucleotide
ucagcuuuguuucgauugc

SEQ ID NO: 445978 - RNA, 19 nt, Artificial Sequence
  Description of Artificial Sequence: Synthetic oligonucleotide
acaucauucguucauuaaa

SEQ ID NO: 445979 - RNA, 19 nt, Artificial Sequence
  Description of Artificial Sequence: Synthetic oligonucleotide
ugguaacgacguauaaagg

SEQ ID NO: 445980 - RNA, 19 nt, Artificial Sequence
  Description of Artificial Sequence: Synthetic oligonucleotide
uucguuucccaaccacucg

SEQ ID NO: 445981 - RNA, 19 nt, Artificial Sequence
  Description of Artificial Sequence: Synthetic oligonucleotide
uugacuucgccaucuacca

SEQ ID NO: 445982 - RNA, 19 nt, Artificial Sequence
  Description of Artificial Sequence: Synthetic oligonucleotide
ucucccaauaagaaacaac

SEQ ID NO: 445983 - RNA, 19 nt, Artificial Sequence
  Description of Artificial Sequence: Synthetic oligonucleotide
ugccccuuuucuuaaaaug

SEQ ID NO: 445984 - RNA, 19 nt, Artificial Sequence
  Description of Artificial Sequence: Synthetic oligonucleotide
ugcacguuuagccuucaga

SEQ ID NO: 445985 - RNA, 19 nt, Artificial Sequence
  Description of Artificial Sequence: Synthetic oligonucleotide
ugugaaguuggagagucug

SEQ ID NO: 445986 - RNA, 19 nt, Artificial Sequence
  Description of Artificial Sequence: Synthetic oligonucleotide
ugcauaauccuuugaauuu

SEQ ID NO: 445987 - RNA, 19 nt, Artificial Sequence
  Description of Artificial Sequence: Synthetic oligonucleotide
acguuuagccuucagacaa

SEQ ID NO: 445988 - RNA, 19 nt, Artificial Sequence
  Description of Artificial Sequence: Synthetic oligonucleotide
accacacccagcgacaccc

SEQ ID NO: 445989 - RNA, 19 nt, Artificial Sequence
  Description of Artificial Sequence: Synthetic oligonucleotide
augucuagucauucaacag

SEQ ID NO: 445990 - RNA, 19 nt, Artificial Sequence
  Description of Artificial Sequence: Synthetic oligonucleotide
aauagauucucagcuuugu

SEQ ID NO: 445991 - RNA, 19 nt, Artificial Sequence
  Description of Artificial Sequence: Synthetic oligonucleotide
ucuuugucccugcacggag

SEQ ID NO: 445992 - RNA, 19 nt, Artificial Sequence
  Description of Artificial Sequence: Synthetic oligonucleotide
ucgauagcuguucuuuuca

SEQ ID NO: 445993 - RNA, 19 nt, Artificial Sequence
  Description of Artificial Sequence: Synthetic oligonucleotide
cauuaaaugcuucgauagc

SEQ ID NO: 445994 - RNA, 19 nt, Artificial Sequence
  Description of Artificial Sequence: Synthetic oligonucleotide
augacccuaaauucaaaca

SEQ ID NO: 445995 - RNA, 19 nt, Artificial Sequence
  Description of Artificial Sequence: Synthetic oligonucleotide
uggagagucuguucaauga

SEQ ID NO: 445996 - RNA, 19 nt, Artificial Sequence
  Description of Artificial Sequence: Synthetic oligonucleotide
gauaagguuagaaaugucu

SEQ ID NO: 445997 - RNA, 19 nt, Artificial Sequence
  Description of Artificial Sequence: Synthetic oligonucleotide
ugccgaacaccuuucugcg

SEQ ID NO: 445998 - RNA, 19 nt, Artificial Sequence
  Description of Artificial Sequence: Synthetic oligonucleotide
guugauaauaguagcacca

SEQ ID NO: 445999 - RNA, 19 nt, Artificial Sequence
  Description of Artificial Sequence: Synthetic oligonucleotide
aacacacucugacuugaca

SEQ ID NO: 446000 - RNA, 19 nt, Artificial Sequence
  Description of Artificial Sequence: Synthetic oligonucleotide
auaaagguuaagaauugca

SEQ ID NO: 446001 - RNA, 19 nt, Artificial Sequence
  Description of Artificial Sequence: Synthetic oligonucleotide
uucuuugcuguaccgcucc

SEQ ID NO: 446002 - RNA, 19 nt, Artificial Sequence
  Description of Artificial Sequence: Synthetic oligonucleotide
agucuuguugauuacgcaa

SEQ ID NO: 446003 - RNA, 19 nt, Artificial Sequence
  Description of Artificial Sequence: Synthetic oligonucleotide
agccacaucaaguauuggu

SEQ ID NO: 446004 - RNA, 19 nt, Artificial Sequence
  Description of Artificial Sequence: Synthetic oligonucleotide
gauaauaguagcaccagcu

SEQ ID NO: 446005 - RNA, 19 nt, Artificial Sequence
  Description of Artificial Sequence: Synthetic oligonucleotide
caugcauugcaaaagcaca

SEQ ID NO: 446006 - RNA, 19 nt, Artificial Sequence
  Description of Artificial Sequence: Synthetic oligonucleotide
ugauucgagacuuuagcuu

SEQ ID NO: 446007 - RNA, 19 nt, Artificial Sequence
  Description of Artificial Sequence: Synthetic oligonucleotide
aguuaugcauaauccuuug

SEQ ID NO: 446008 - RNA, 19 nt, Artificial Sequence
  Description of Artificial Sequence: Synthetic oligonucleotide
uuagcuuaucauaguuaug

SEQ ID NO: 446009 - RNA, 19 nt, Artificial Sequence
  Description of Artificial Sequence: Synthetic oligonucleotide
gauucgagacuuuagcuua

SEQ ID NO: 446010 - RNA, 19 nt, Artificial Sequence
  Description of Artificial Sequence: Synthetic oligonucleotide
ugacuuagauaccaugcau

SEQ ID NO: 446011 - RNA, 19 nt, Artificial Sequence
  Description of Artificial Sequence: Synthetic oligonucleotide
aagcuuauuugguauugau

SEQ ID NO: 446012 - RNA, 19 nt, Artificial Sequence
  Description of Artificial Sequence: Synthetic oligonucleotide
aagggcguagcuucuaaaa

SEQ ID NO: 446013 - RNA, 19 nt, Artificial Sequence
  Description of Artificial Sequence: Synthetic oligonucleotide
aauuucuuucucguugccu

SEQ ID NO: 446014 - RNA, 19 nt, Artificial Sequence
  Description of Artificial Sequence: Synthetic oligonucleotide
uaugcuagugugacauuga

SEQ ID NO: 446015 - RNA, 19 nt, Artificial Sequence
  Description of Artificial Sequence: Synthetic oligonucleotide
uugcaaaagcacaguuggg

SEQ ID NO: 446016 - RNA, 19 nt, Artificial Sequence
  Description of Artificial Sequence: Synthetic oligonucleotide
uugauuacgcaaugcuuga

SEQ ID NO: 446017 - RNA, 19 nt, Artificial Sequence
  Description of Artificial Sequence: Synthetic oligonucleotide
cauugagggagucauugug

SEQ ID NO: 446018 - RNA, 19 nt, Artificial Sequence
  Description of Artificial Sequence: Synthetic oligonucleotide
uaguuaugcauaauccuuu

SEQ ID NO: 446019 - RNA, 19 nt, Artificial Sequence
  Description of Artificial Sequence: Synthetic oligonucleotide
aaguucggugugaaguugg

SEQ ID NO: 446020 - RNA, 19 nt, Artificial Sequence
  Description of Artificial Sequence: Synthetic oligonucleotide
acacacucugacuugacaa

SEQ ID NO: 446021 - RNA, 19 nt, Artificial Sequence
  Description of Artificial Sequence: Synthetic oligonucleotide
aggauaagguuagaaaugu

SEQ ID NO: 446022 - RNA, 19 nt, Artificial Sequence
  Description of Artificial Sequence: Synthetic oligonucleotide
auaguuagucacccaauaa

SEQ ID NO: 446023 - RNA, 19 nt, Artificial Sequence
  Description of Artificial Sequence: Synthetic oligonucleotide
accaagcggucccaggccc

SEQ ID NO: 446024 - RNA, 19 nt, Artificial Sequence
  Description of Artificial Sequence: Synthetic oligonucleotide
cagaccugcucccugaaag

SEQ ID NO: 446025 - RNA, 19 nt, Artificial Sequence
  Description of Artificial Sequence: Synthetic oligonucleotide
gucuagucauucaacagcc

SEQ ID NO: 446026 - RNA, 19 nt, Artificial Sequence
  Description of Artificial Sequence: Synthetic oligonucleotide
ugcaucaauguucucucaa

SEQ ID NO: 446027 - RNA, 19 nt, Artificial Sequence
  Description of Artificial Sequence: Synthetic oligonucleotide
ggcauugugcuuuaacugc

SEQ ID NO: 446028 - RNA, 19 nt, Artificial Sequence
  Description of Artificial Sequence: Synthetic oligonucleotide
ggagaauuuggcauuuugg

SEQ ID NO: 446029 - RNA, 19 nt, Artificial Sequence
  Description of Artificial Sequence: Synthetic oligonucleotide
uccucuaaucuccuccuac

SEQ ID NO: 446030 - RNA, 19 nt, Artificial Sequence
  Description of Artificial Sequence: Synthetic oligonucleotide
uuugauaguuagucaccca

SEQ ID NO: 446031 - RNA, 19 nt, Artificial Sequence
  Description of Artificial Sequence: Synthetic oligonucleotide
ucuagucccacgugcagac

SEQ ID NO: 446032 - RNA, 19 nt, Artificial Sequence
  Description of Artificial Sequence: Synthetic oligonucleotide
guuagaaaugucuagucau

SEQ ID NO: 446033 - RNA, 19 nt, Artificial Sequence
  Description of Artificial Sequence: Synthetic oligonucleotide
uucaccuuuacaagacaaa

SEQ ID NO: 446034 - RNA, 19 nt, Artificial Sequence
  Description of Artificial Sequence: Synthetic oligonucleotide
uuuucaucgugguggggca

SEQ ID NO: 446035 - RNA, 19 nt, Artificial Sequence
  Description of Artificial Sequence: Synthetic oligonucleotide
auuacgcaaugcuugacuu

SEQ ID NO: 446036 - RNA, 19 nt, Artificial Sequence
  Description of Artificial Sequence: Synthetic oligonucleotide
caaguauuggucucuuguc

SEQ ID NO: 446037 - RNA, 19 nt, Artificial Sequence
  Description of Artificial Sequence: Synthetic oligonucleotide
ggcuaaaccaggcuggacc

SEQ ID NO: 446038 - RNA, 19 nt, Artificial Sequence
  Description of Artificial Sequence: Synthetic oligonucleotide
gauaguuagucacccaaua

SEQ ID NO: 446039 - RNA, 19 nt, Artificial Sequence
  Description of Artificial Sequence: Synthetic oligonucleotide
uccgcuucacaucauucgu

SEQ ID NO: 446040 - RNA, 19 nt, Artificial Sequence
  Description of Artificial Sequence: Synthetic oligonucleotide
uaacgacguauaaagguua

SEQ ID NO: 446041 - RNA, 19 nt, Artificial Sequence
  Description of Artificial Sequence: Synthetic oligonucleotide
gaaaaggauaagguuagaa

SEQ ID NO: 446042 - RNA, 19 nt, Artificial Sequence
  Description of Artificial Sequence: Synthetic oligonucleotide
ggacuguacagguuguagg

SEQ ID NO: 446043 - RNA, 19 nt, Artificial Sequence
  Description of Artificial Sequence: Synthetic oligonucleotide
uguccacacuccuuuauuc

SEQ ID NO: 446044 - RNA, 19 nt, Artificial Sequence
  Description of Artificial Sequence: Synthetic oligonucleotide
aaaccaggcuggaccaagc

SEQ ID NO: 446045 - RNA, 19 nt, Artificial Sequence
  Description of Artificial Sequence: Synthetic oligonucleotide
uguugugcauauaccgggu

SEQ ID NO: 446046 - RNA, 19 nt, Artificial Sequence
  Description of Artificial Sequence: Synthetic oligonucleotide
ucuagucauucaacagccc

SEQ ID NO: 446047 - RNA, 19 nt, Artificial Sequence
  Description of Artificial Sequence: Synthetic oligonucleotide
ccaucuaccacuacagagc

SEQ ID NO: 446048 - RNA, 19 nt, Artificial Sequence
  Description of Artificial Sequence: Synthetic oligonucleotide
gacuucccaaacaaguuac

SEQ ID NO: 446049 - RNA, 19 nt, Artificial Sequence
  Description of Artificial Sequence: Synthetic oligonucleotide
augcuagugugacauugag

SEQ ID NO: 446050 - RNA, 19 nt, Artificial Sequence
  Description of Artificial Sequence: Synthetic oligonucleotide
aguuuuaagcaaaacguuu

SEQ ID NO: 446051 - RNA, 19 nt, Artificial Sequence
  Description of Artificial Sequence: Synthetic oligonucleotide
auaguuaugcauaauccuu

SEQ ID NO: 446052 - RNA, 19 nt, Artificial Sequence
  Description of Artificial Sequence: Synthetic oligonucleotide
uuucgauugcugcugccaa

SEQ ID NO: 446053 - RNA, 19 nt, Artificial Sequence
  Description of Artificial Sequence: Synthetic oligonucleotide
cacagugcgacgugucugg

SEQ ID NO: 446054 - RNA, 19 nt, Artificial Sequence
  Description of Artificial Sequence: Synthetic oligonucleotide
ugaucucacugauucgaga

SEQ ID NO: 446055 - RNA, 19 nt, Artificial Sequence
  Description of Artificial Sequence: Synthetic oligonucleotide
uucgauagcuguucuuuuc

SEQ ID NO: 446056 - RNA, 19 nt, Artificial Sequence
  Description of Artificial Sequence: Synthetic oligonucleotide
caaacaaguuacuagcucu

SEQ ID NO: 446057 - RNA, 19 nt, Artificial Sequence
  Description of Artificial Sequence: Synthetic oligonucleotide
caucauucguucauuaaaa

SEQ ID NO: 446058 - RNA, 19 nt, Artificial Sequence
  Description of Artificial Sequence: Synthetic oligonucleotide
uagaaaugucuagucauuc

SEQ ID NO: 446059 - RNA, 19 nt, Artificial Sequence
  Description of Artificial Sequence: Synthetic oligonucleotide
gcacguuuagccuucagac

SEQ ID NO: 446060 - RNA, 19 nt, Artificial Sequence
  Description of Artificial Sequence: Synthetic oligonucleotide
uaccggguaugcuagugug

SEQ ID NO: 446061 - RNA, 19 nt, Artificial Sequence
  Description of Artificial Sequence: Synthetic oligonucleotide
ccaauaagaaacaacagua

SEQ ID NO: 446062 - RNA, 19 nt, Artificial Sequence
  Description of Artificial Sequence: Synthetic oligonucleotide
cuuagauaccaugcauugc

SEQ ID NO: 446063 - RNA, 19 nt, Artificial Sequence
  Description of Artificial Sequence: Synthetic oligonucleotide
gucaaucucgcgguauucg

SEQ ID NO: 446064 - RNA, 19 nt, Artificial Sequence
  Description of Artificial Sequence: Synthetic oligonucleotide
caacuuguagcugguaaag

SEQ ID NO: 446065 - RNA, 19 nt, Artificial Sequence
  Description of Artificial Sequence: Synthetic oligonucleotide
uagucauucaacagcccua

SEQ ID NO: 446066 - RNA, 19 nt, Artificial Sequence
  Description of Artificial Sequence: Synthetic oligonucleotide
ggauugguuccucacacug

SEQ ID NO: 446067 - RNA, 19 nt, Artificial Sequence
  Description of Artificial Sequence: Synthetic oligonucleotide
ucacuacuaguuauuugau

SEQ ID NO: 446068 - RNA, 19 nt, Artificial Sequence
  Description of Artificial Sequence: Synthetic oligonucleotide
guauucuuugcuguaccgc

SEQ ID NO: 446069 - RNA, 19 nt, Artificial Sequence
  Description of Artificial Sequence: Synthetic oligonucleotide
cauaguuaugcauaauccu

SEQ ID NO: 446070 - RNA, 19 nt, Artificial Sequence
  Description of Artificial Sequence: Synthetic oligonucleotide
ugucccugcacggagagau

SEQ ID NO: 446071 - RNA, 19 nt, Artificial Sequence
  Description of Artificial Sequence: Synthetic oligonucleotide
ugagccacauucucccuac

SEQ ID NO: 446072 - RNA, 19 nt, Artificial Sequence
  Description of Artificial Sequence: Synthetic oligonucleotide
uguagcugguaaagcuuca

SEQ ID NO: 446073 - RNA, 19 nt, Artificial Sequence
  Description of Artificial Sequence: Synthetic oligonucleotide
uauaccggguaugcuagug

SEQ ID NO: 446074 - RNA, 19 nt, Artificial Sequence
  Description of Artificial Sequence: Synthetic oligonucleotide
aacgcccacuuuuccaacu

SEQ ID NO: 446075 - RNA, 19 nt, Artificial Sequence
  Description of Artificial Sequence: Synthetic oligonucleotide
auaagguuagaaaugucua

SEQ ID NO: 446076 - RNA, 19 nt, Artificial Sequence
  Description of Artificial Sequence: Synthetic oligonucleotide
uccaacugacuuagauacc

SEQ ID NO: 446077 - RNA, 19 nt, Artificial Sequence
  Description of Artificial Sequence: Synthetic oligonucleotide
gauuacgcaaugcuugacu

SEQ ID NO: 446078 - RNA, 19 nt, Artificial Sequence
  Description of Artificial Sequence: Synthetic oligonucleotide
gguaacgacguauaaaggu

SEQ ID NO: 446079 - RNA, 19 nt, Artificial Sequence
  Description of Artificial Sequence: Synthetic oligonucleotide
gguggcgcgcgcuucaucg

SEQ ID NO: 446080 - RNA, 19 nt, Artificial Sequence
  Description of Artificial Sequence: Synthetic oligonucleotide
ucucguugccuucacguuu

SEQ ID NO: 446081 - RNA, 19 nt, Artificial Sequence
  Description of Artificial Sequence: Synthetic oligonucleotide
aguuagucacccaauaaua

SEQ ID NO: 446082 - RNA, 19 nt, Artificial Sequence
  Description of Artificial Sequence: Synthetic oligonucleotide
cucuaaucuccuccuacug

SEQ ID NO: 446083 - RNA, 19 nt, Artificial Sequence
  Description of Artificial Sequence: Synthetic oligonucleotide
acaaguucggugugaaguu

SEQ ID NO: 446084 - RNA, 19 nt, Artificial Sequence
  Description of Artificial Sequence: Synthetic oligonucleotide
aaagggcguagcuucuaaa

SEQ ID NO: 446085 - RNA, 19 nt, Artificial Sequence
  Description of Artificial Sequence: Synthetic oligonucleotide
accagauaugugacaaagg

SEQ ID NO: 446086 - RNA, 19 nt, Artificial Sequence
  Description of Artificial Sequence: Synthetic oligonucleotide
agacagccggcuucguuuc

SEQ ID NO: 446087 - RNA, 19 nt, Artificial Sequence
  Description of Artificial Sequence: Synthetic oligonucleotide
ucgauugcugcugccaaca

SEQ ID NO: 446088 - RNA, 19 nt, Artificial Sequence
  Description of Artificial Sequence: Synthetic oligonucleotide
ugccuucacguuuaaacuu

SEQ ID NO: 446089 - RNA, 19 nt, Artificial Sequence
  Description of Artificial Sequence: Synthetic oligonucleotide
agugcgacgugucuggguu

SEQ ID NO: 446090 - RNA, 19 nt, Artificial Sequence
  Description of Artificial Sequence: Synthetic oligonucleotide
uaaguucccuuguccacac

SEQ ID NO: 446091 - RNA, 19 nt, Artificial Sequence
  Description of Artificial Sequence: Synthetic oligonucleotide
uuccuccgaacauacugca

SEQ ID NO: 446092 - RNA, 19 nt, Artificial Sequence
  Description of Artificial Sequence: Synthetic oligonucleotide
uggcuuaaugcuguucaug

SEQ ID NO: 446093 - RNA, 19 nt, Artificial Sequence
  Description of Artificial Sequence: Synthetic oligonucleotide
gacgugucuggguucacca

SEQ ID NO: 446094 - RNA, 19 nt, Artificial Sequence
  Description of Artificial Sequence: Synthetic oligonucleotide
ucucgcgguauucggcugc

SEQ ID NO: 446095 - RNA, 19 nt, Artificial Sequence
  Description of Artificial Sequence: Synthetic oligonucleotide
auagcgcugcacguuuagc

SEQ ID NO: 446096 - RNA, 19 nt, Artificial Sequence
  Description of Artificial Sequence: Synthetic oligonucleotide
gacccuaaauucaaacaga

SEQ ID NO: 446097 - RNA, 19 nt, Artificial Sequence
  Description of Artificial Sequence: Synthetic oligonucleotide
aguaacccacagugcgacg

SEQ ID NO: 446098 - RNA, 19 nt, Artificial Sequence
  Description of Artificial Sequence: Synthetic oligonucleotide
cugacuuagauaccaugca

SEQ ID NO: 446099 - RNA, 19 nt, Artificial Sequence
  Description of Artificial Sequence: Synthetic oligonucleotide
gcuuaaugcuguucaugcg

SEQ ID NO: 446100 - RNA, 19 nt, Artificial Sequence
  Description of Artificial Sequence: Synthetic oligonucleotide
acugguaacgacguauaaa

SEQ ID NO: 446101 - RNA, 19 nt, Artificial Sequence
  Description of Artificial Sequence: Synthetic oligonucleotide
gacuucgccaucuaccacu

SEQ ID NO: 446102 - RNA, 19 nt, Artificial Sequence
  Description of Artificial Sequence: Synthetic oligonucleotide
uacccucacuacuaguuau

SEQ ID NO: 446103 - RNA, 19 nt, Artificial Sequence
  Description of Artificial Sequence: Synthetic oligonucleotide
uccuccuacugucaaugau

SEQ ID NO: 446104 - RNA, 19 nt, Artificial Sequence
  Description of Artificial Sequence: Synthetic oligonucleotide
agcgcugcacguuuagccu

SEQ ID NO: 446105 - RNA, 19 nt, Artificial Sequence
  Description of Artificial Sequence: Synthetic oligonucleotide
ucucacugauucgagacuu

SEQ ID NO: 446106 - RNA, 19 nt, Artificial Sequence
  Description of Artificial Sequence: Synthetic oligonucleotide
aaacaaguuacuagcucuu

SEQ ID NO: 446107 - RNA, 19 nt, Artificial Sequence
  Description of Artificial Sequence: Synthetic oligonucleotide
uguuucgauugcugcugcc

SEQ ID NO: 446108 - RNA, 19 nt, Artificial Sequence
  Description of Artificial Sequence: Synthetic oligonucleotide
cugucuaccuucuggucuc

SEQ ID NO: 446109 - RNA, 19 nt, Artificial Sequence
  Description of Artificial Sequence: Synthetic oligonucleotide
uuacugcucucccggacaa

SEQ ID NO: 446110 - RNA, 19 nt, Artificial Sequence
  Description of Artificial Sequence: Synthetic oligonucleotide
cacccagcgacacccaggc

SEQ ID NO: 446111 - RNA, 19 nt, Artificial Sequence
  Description of Artificial Sequence: Synthetic oligonucleotide
agacaaaacgaagcaacau

SEQ ID NO: 446112 - RNA, 19 nt, Artificial Sequence
  Description of Artificial Sequence: Synthetic oligonucleotide
auaccggguaugcuagugu

SEQ ID NO: 446113 - RNA, 19 nt, Artificial Sequence
  Description of Artificial Sequence: Synthetic oligonucleotide
acgugucuggguucaccac

SEQ ID NO: 446114 - RNA, 19 nt, Artificial Sequence
  Description of Artificial Sequence: Synthetic oligonucleotide
cacucugacuugacaacac

SEQ ID NO: 446115 - RNA, 19 nt, Artificial Sequence
  Description of Artificial Sequence: Synthetic oligonucleotide
guaauagauucucagcuuu

SEQ ID NO: 446116 - RNA, 19 nt, Artificial Sequence
  Description of Artificial Sequence: Synthetic oligonucleotide
uugucaaucucgcgguauu

SEQ ID NO: 446117 - RNA, 19 nt, Artificial Sequence
  Description of Artificial Sequence: Synthetic oligonucleotide
uaacccacagugcgacgug

SEQ ID NO: 446118 - RNA, 19 nt, Artificial Sequence
  Description of Artificial Sequence: Synthetic oligonucleotide
agaauugcauagcgcugca

SEQ ID NO: 446119 - RNA, 19 nt, Artificial Sequence
  Description of Artificial Sequence: Synthetic oligonucleotide
uacuagcucuuaaccagau

SEQ ID NO: 446120 - RNA, 19 nt, Artificial Sequence
  Description of Artificial Sequence: Synthetic oligonucleotide
ucccuacccucacuacuag

SEQ ID NO: 446121 - RNA, 19 nt, Artificial Sequence
  Description of Artificial Sequence: Synthetic oligonucleotide
aaacugguaacgacguaua

SEQ ID NO: 446122 - RNA, 19 nt, Artificial Sequence
  Description of Artificial Sequence: Synthetic oligonucleotide
cauagcgcugcacguuuag

SEQ ID NO: 446123 - RNA, 19 nt, Artificial Sequence
  Description of Artificial Sequence: Synthetic oligonucleotide
uucagcccugucuaccuuc

SEQ ID NO: 446124 - RNA, 19 nt, Artificial Sequence
  Description of Artificial Sequence: Synthetic oligonucleotide
uucaucgugguggggcaag

SEQ ID NO: 446125 - RNA, 19 nt, Artificial Sequence
  Description of Artificial Sequence: Synthetic oligonucleotide
uaaccagauaugugacaaa

SEQ ID NO: 446126 - RNA, 19 nt, Artificial Sequence
  Description of Artificial Sequence: Synthetic oligonucleotide
aacgacguauaaagguuaa

SEQ ID NO: 446127 - RNA, 19 nt, Artificial Sequence
  Description of Artificial Sequence: Synthetic oligonucleotide
cccguaauagauucucagc

SEQ ID NO: 446128 - RNA, 19 nt, Artificial Sequence
  Description of Artificial Sequence: Synthetic oligonucleotide
guauucggcugccugcuuc

SEQ ID NO: 446129 - RNA, 19 nt, Artificial Sequence
  Description of Artificial Sequence: Synthetic oligonucleotide
cuaccacuacagagcaggc

SEQ ID NO: 446130 - RNA, 19 nt, Artificial Sequence
  Description of Artificial Sequence: Synthetic oligonucleotide
cuagucauucaacagcccu

SEQ ID NO: 446131 - RNA, 19 nt, Artificial Sequence
  Description of Artificial Sequence: Synthetic oligonucleotide
ugguguauguuguggcuuu

SEQ ID NO: 446132 - RNA, 19 nt, Artificial Sequence
  Description of Artificial Sequence: Synthetic oligonucleotide
gaguauuggucuucagugu

SEQ ID NO: 446133 - RNA, 19 nt, Artificial Sequence
  Description of Artificial Sequence: Synthetic oligonucleotide
gauugguuccucacacuga

SEQ ID NO: 446134 - RNA, 19 nt, Artificial Sequence
  Description of Artificial Sequence: Synthetic oligonucleotide
caguugggaaaaccagcag

SEQ ID NO: 446135 - RNA, 19 nt, Artificial Sequence
  Description of Artificial Sequence: Synthetic oligonucleotide
ugacuucgccaucuaccac

SEQ ID NO: 446136 - RNA, 19 nt, Artificial Sequence
  Description of Artificial Sequence: Synthetic oligonucleotide
augaucucacugauucgag

SEQ ID NO: 446137 - RNA, 19 nt, Artificial Sequence
  Description of Artificial Sequence: Synthetic oligonucleotide
uucacaucauucguucauu

SEQ ID NO: 446138 - RNA, 19 nt, Artificial Sequence
  Description of Artificial Sequence: Synthetic oligonucleotide
guuucgauugcugcugcca

SEQ ID NO: 446139 - RNA, 19 nt, Artificial Sequence
  Description of Artificial Sequence: Synthetic oligonucleotide
cugauucgagacuuuagcu

SEQ ID NO: 446140 - RNA, 19 nt, Artificial Sequence
  Description of Artificial Sequence: Synthetic oligonucleotide
uaccacuacagagcaggca

SEQ ID NO: 446141 - RNA, 19 nt, Artificial Sequence
  Description of Artificial Sequence: Synthetic oligonucleotide
ugauuacgcaaugcuugac

SEQ ID NO: 446142 - RNA, 19 nt, Artificial Sequence
  Description of Artificial Sequence: Synthetic oligonucleotide
cacguuuagccuucagaca

SEQ ID NO: 446143 - RNA, 19 nt, Artificial Sequence
  Description of Artificial Sequence: Synthetic oligonucleotide
ucaucgccucuguugugca

SEQ ID NO: 446144 - RNA, 19 nt, Artificial Sequence
  Description of Artificial Sequence: Synthetic oligonucleotide
guucccuuguccacacucc

SEQ ID NO: 446145 - RNA, 19 nt, Artificial Sequence
  Description of Artificial Sequence: Synthetic oligonucleotide
uugguguauguuguggcuu

SEQ ID NO: 446146 - RNA, 19 nt, Artificial Sequence
  Description of Artificial Sequence: Synthetic oligonucleotide
gcagucuuguugauuacgc

SEQ ID NO: 446147 - RNA, 19 nt, Artificial Sequence
  Description of Artificial Sequence: Synthetic oligonucleotide
agcuuauuugguauugaua

SEQ ID NO: 446148 - RNA, 19 nt, Artificial Sequence
  Description of Artificial Sequence: Synthetic oligonucleotide
agcccuuugccuucccaga

SEQ ID NO: 446149 - RNA, 19 nt, Artificial Sequence
  Description of Artificial Sequence: Synthetic oligonucleotide
gcauauaccggguaugcua

SEQ ID NO: 446150 - RNA, 19 nt, Artificial Sequence
  Description of Artificial Sequence: Synthetic oligonucleotide
acgacguauaaagguuaag

SEQ ID NO: 446151 - RNA, 19 nt, Artificial Sequence
  Description of Artificial Sequence: Synthetic oligonucleotide
cuuuggguggcuugaaggu

SEQ ID NO: 446152 - RNA, 19 nt, Artificial Sequence
  Description of Artificial Sequence: Synthetic oligonucleotide
ugucaaucucgcgguauuc

SEQ ID NO: 446153 - RNA, 19 nt, Artificial Sequence
  Description of Artificial Sequence: Synthetic oligonucleotide
uucguuucugcagcucagu

SEQ ID NO: 446154 - RNA, 19 nt, Artificial Sequence
  Description of Artificial Sequence: Synthetic oligonucleotide
ugcgacgugucuggguuca

SEQ ID NO: 446155 - RNA, 19 nt, Artificial Sequence
  Description of Artificial Sequence: Synthetic oligonucleotide
uucagggacuguacagguu

SEQ ID NO: 446156 - RNA, 19 nt, Artificial Sequence
  Description of Artificial Sequence: Synthetic oligonucleotide
ccuccgaacauacugcauc

SEQ ID NO: 446157 - RNA, 19 nt, Artificial Sequence
  Description of Artificial Sequence: Synthetic oligonucleotide
caaugcuugacuucgccau

SEQ ID NO: 446158 - RNA, 19 nt, Artificial Sequence
  Description of Artificial Sequence: Synthetic oligonucleotide
ccccguaauagauucucag

SEQ ID NO: 446159 - RNA, 19 nt, Artificial Sequence
  Description of Artificial Sequence: Synthetic oligonucleotide
uucagaccugcucccugaa

SEQ ID NO: 446160 - RNA, 19 nt, Artificial Sequence
  Description of Artificial Sequence: Synthetic oligonucleotide
guucggugugaaguuggag

SEQ ID NO: 446161 - RNA, 19 nt, Artificial Sequence
  Description of Artificial Sequence: Synthetic oligonucleotide
cugugagagcagacaugcc

SEQ ID NO: 446162 - RNA, 19 nt, Artificial Sequence
  Description of Artificial Sequence: Synthetic oligonucleotide
augcuugacuucgccaucu

SEQ ID NO: 446163 - RNA, 19 nt, Artificial Sequence
  Description of Artificial Sequence: Synthetic oligonucleotide
ucauggugacaaguucggu

SEQ ID NO: 446164 - RNA, 19 nt, Artificial Sequence
  Description of Artificial Sequence: Synthetic oligonucleotide
auauaccggguaugcuagu

SEQ ID NO: 446165 - RNA, 19 nt, Artificial Sequence
  Description of Artificial Sequence: Synthetic oligonucleotide
guuagucacccaauaauau

SEQ ID NO: 446166 - RNA, 19 nt, Artificial Sequence
  Description of Artificial Sequence: Synthetic oligonucleotide
gacuuagauaccaugcauu

SEQ ID NO: 446167 - RNA, 19 nt, Artificial Sequence
  Description of Artificial Sequence: Synthetic oligonucleotide
ccaaugcuaucucauggug

SEQ ID NO: 446168 - RNA, 19 nt, Artificial Sequence
  Description of Artificial Sequence: Synthetic oligonucleotide
uaggcggccgugucuuccc

SEQ ID NO: 446169 - RNA, 19 nt, Artificial Sequence
  Description of Artificial Sequence: Synthetic oligonucleotide
ucucagcuuuguuucgauu

SEQ ID NO: 446170 - RNA, 19 nt, Artificial Sequence
  Description of Artificial Sequence: Synthetic oligonucleotide
aacccacagugcgacgugu

SEQ ID NO: 446171 - RNA, 19 nt, Artificial Sequence
  Description of Artificial Sequence: Synthetic oligonucleotide
gaaaacugguaacgacgua

SEQ ID NO: 446172 - RNA, 19 nt, Artificial Sequence
  Description of Artificial Sequence: Synthetic oligonucleotide
cagucuuguugauuacgca

SEQ ID NO: 446173 - RNA, 19 nt, Artificial Sequence
  Description of Artificial Sequence: Synthetic oligonucleotide
guaacgacguauaaagguu

SEQ ID NO: 446174 - RNA, 19 nt, Artificial Sequence
  Description of Artificial Sequence: Synthetic oligonucleotide
cacuacuaguuauuugaua

SEQ ID NO: 446175 - RNA, 19 nt, Artificial Sequence
  Description of Artificial Sequence: Synthetic oligonucleotide
ucuguucaaugagccacau

SEQ ID NO: 446176 - RNA, 19 nt, Artificial Sequence
  Description of Artificial Sequence: Synthetic oligonucleotide
aggcuaaaccaggcuggac

SEQ ID NO: 446177 - RNA, 19 nt, Artificial Sequence
  Description of Artificial Sequence: Synthetic oligonucleotide
cuuugcuguaccgcuccug

SEQ ID NO: 446178 - RNA, 19 nt, Artificial Sequence
  Description of Artificial Sequence: Synthetic oligonucleotide
ugugaggcauugugcuuua

SEQ ID NO: 446179 - RNA, 19 nt, Artificial Sequence
  Description of Artificial Sequence: Synthetic oligonucleotide
aucucgcgguauucggcug

SEQ ID NO: 446180 - RNA, 19 nt, Artificial Sequence
  Description of Artificial Sequence: Synthetic oligonucleotide
uagccgguggcagucuugu

SEQ ID NO: 446181 - RNA, 19 nt, Artificial Sequence
  Description of Artificial Sequence: Synthetic oligonucleotide
cuaggcggccgugucuucc

SEQ ID NO: 446182 - RNA, 19 nt, Artificial Sequence
  Description of Artificial Sequence: Synthetic oligonucleotide
cuuugucccugcacggaga

SEQ ID NO: 446183 - RNA, 19 nt, Artificial Sequence
  Description of Artificial Sequence: Synthetic oligonucleotide
aaguucccuuguccacacu

SEQ ID NO: 446184 - RNA, 19 nt, Artificial Sequence
  Description of Artificial Sequence: Synthetic oligonucleotide
ggugaggaacuggauccgg

SEQ ID NO: 446185 - RNA, 19 nt, Artificial Sequence
  Description of Artificial Sequence: Synthetic oligonucleotide
gcaaugcuugacuucgcca

SEQ ID NO: 446186 - RNA, 19 nt, Artificial Sequence
  Description of Artificial Sequence: Synthetic oligonucleotide
ggacuucccaaacaaguua

SEQ ID NO: 446187 - RNA, 19 nt, Artificial Sequence
  Description of Artificial Sequence: Synthetic oligonucleotide
gcucuuaaccagauaugug

SEQ ID NO: 446188 - RNA, 19 nt, Artificial Sequence
  Description of Artificial Sequence: Synthetic oligonucleotide
agcucuagucccacgugca

SEQ ID NO: 446189 - RNA, 19 nt, Artificial Sequence
  Description of Artificial Sequence: Synthetic oligonucleotide
uaaugcuguucaugcgcuu

SEQ ID NO: 446190 - RNA, 19 nt, Artificial Sequence
  Description of Artificial Sequence: Synthetic oligonucleotide
guugugcauauaccgggua

SEQ ID NO: 446191 - RNA, 19 nt, Artificial Sequence
  Description of Artificial Sequence: Synthetic oligonucleotide
ccgaacaccuuucugcguc

SEQ ID NO: 446192 - RNA, 19 nt, Artificial Sequence
  Description of Artificial Sequence: Synthetic oligonucleotide
gcgguauucggcugccugc

SEQ ID NO: 446193 - RNA, 19 nt, Artificial Sequence
  Description of Artificial Sequence: Synthetic oligonucleotide
gcuaucucauggugacaag

SEQ ID NO: 446194 - RNA, 19 nt, Artificial Sequence
  Description of Artificial Sequence: Synthetic oligonucleotide
ucccugcacggagagauuu

SEQ ID NO: 446195 - RNA, 19 nt, Artificial Sequence
  Description of Artificial Sequence: Synthetic oligonucleotide
ggauccggaggguggcgcg

SEQ ID NO: 446196 - RNA, 19 nt, Artificial Sequence
  Description of Artificial Sequence: Synthetic oligonucleotide
acuucccaaacaaguuacu

SEQ ID NO: 446197 - RNA, 19 nt, Artificial Sequence
  Description of Artificial Sequence: Synthetic oligonucleotide
guaacccacagugcgacgu

SEQ ID NO: 446198 - RNA, 19 nt, Artificial Sequence
  Description of Artificial Sequence: Synthetic oligonucleotide
ccguaauagauucucagcu

SEQ ID NO: 446199 - RNA, 19 nt, Artificial Sequence
  Description of Artificial Sequence: Synthetic oligonucleotide
acgcaaugcuugacuucgc

SEQ ID NO: 446200 - RNA, 19 nt, Artificial Sequence
  Description of Artificial Sequence: Synthetic oligonucleotide
cucccuacccucacuacua

SEQ ID NO: 446201 - RNA, 19 nt, Artificial Sequence
  Description of Artificial Sequence: Synthetic oligonucleotide
cuaucucauggugacaagu

SEQ ID NO: 446202 - RNA, 19 nt, Artificial Sequence
  Description of Artificial Sequence: Synthetic oligonucleotide
cucguugccuucacguuua

SEQ ID NO: 446203 - RNA, 19 nt, Artificial Sequence
  Description of Artificial Sequence: Synthetic oligonucleotide
ugggaaguacggguguauu

SEQ ID NO: 446204 - RNA, 19 nt, Artificial Sequence
  Description of Artificial Sequence: Synthetic oligonucleotide
acagugcgacgugucuggg

SEQ ID NO: 446205 - RNA, 19 nt, Artificial Sequence
  Description of Artificial Sequence: Synthetic oligonucleotide
uccgaacauacugcaucaa

SEQ ID NO: 446206 - RNA, 19 nt, Artificial Sequence
  Description of Artificial Sequence: Synthetic oligonucleotide
uccuacugucaaugaucuc

SEQ ID NO: 446207 - RNA, 19 nt, Artificial Sequence
  Description of Artificial Sequence: Synthetic oligonucleotide
gagccacauucucccuacc

SEQ ID NO: 446208 - RNA, 19 nt, Artificial Sequence
  Description of Artificial Sequence: Synthetic oligonucleotide
gauccggaggguggcgcgc

SEQ ID NO: 446209 - RNA, 19 nt, Artificial Sequence
  Description of Artificial Sequence: Synthetic oligonucleotide
ucgccucuguugugcauau

SEQ ID NO: 446210 - RNA, 19 nt, Artificial Sequence
  Description of Artificial Sequence: Synthetic oligonucleotide
gcucuagucccacgugcag

SEQ ID NO: 446211 - RNA, 19 nt, Artificial Sequence
  Description of Artificial Sequence: Synthetic oligonucleotide
cuacccucacuacuaguua

SEQ ID NO: 446212 - RNA, 19 nt, Artificial Sequence
  Description of Artificial Sequence: Synthetic oligonucleotide
uuucaucgugguggggcaa

SEQ ID NO: 446213 - RNA, 19 nt, Artificial Sequence
  Description of Artificial Sequence: Synthetic oligonucleotide
caugccucuccgcuucaca

SEQ ID NO: 446214 - RNA, 19 nt, Artificial Sequence
  Description of Artificial Sequence: Synthetic oligonucleotide
aguucggugugaaguugga

SEQ ID NO: 446215 - RNA, 19 nt, Artificial Sequence
  Description of Artificial Sequence: Synthetic oligonucleotide
ucgggcuggagaggagccc

SEQ ID NO: 446216 - RNA, 19 nt, Artificial Sequence
  Description of Artificial Sequence: Synthetic oligonucleotide
auucgagacuuuagcuuau

SEQ ID NO: 446217 - RNA, 19 nt, Artificial Sequence
  Description of Artificial Sequence: Synthetic oligonucleotide
ggauaagguuagaaauguc

SEQ ID NO: 446218 - RNA, 19 nt, Artificial Sequence
  Description of Artificial Sequence: Synthetic oligonucleotide
ggguaugcuagugugacau

SEQ ID NO: 446219 - RNA, 19 nt, Artificial Sequence
  Description of Artificial Sequence: Synthetic oligonucleotide
cucgcgguauucggcugcc

SEQ ID NO: 446220 - RNA, 19 nt, Artificial Sequence
  Description of Artificial Sequence: Synthetic oligonucleotide
caaaacguuuucugguguu

SEQ ID NO: 446221 - RNA, 19 nt, Artificial Sequence
  Description of Artificial Sequence: Synthetic oligonucleotide
ggcucggcaaagccauagc

SEQ ID NO: 446222 - RNA, 19 nt, Artificial Sequence
  Description of Artificial Sequence: Synthetic oligonucleotide
cagacagccggcuucguuu

SEQ ID NO: 446223 - RNA, 19 nt, Artificial Sequence
  Description of Artificial Sequence: Synthetic oligonucleotide
gcaaaacguuuucuggugu

SEQ ID NO: 446224 - RNA, 19 nt, Artificial Sequence
  Description of Artificial Sequence: Synthetic oligonucleotide
cucuuugucccugcacgga

SEQ ID NO: 446225 - RNA, 19 nt, Artificial Sequence
  Description of Artificial Sequence: Synthetic oligonucleotide
gggcucggcaaagccauag

SEQ ID NO: 446226 - RNA, 19 nt, Artificial Sequence
  Description of Artificial Sequence: Synthetic oligonucleotide
cauuaacaagcaccauggu

SEQ ID NO: 446227 - RNA, 19 nt, Artificial Sequence
  Description of Artificial Sequence: Synthetic oligonucleotide
guggcgcgcgcuucaucgc

SEQ ID NO: 446228 - RNA, 19 nt, Artificial Sequence
  Description of Artificial Sequence: Synthetic oligonucleotide
cgcaaugcuugacuucgcc

SEQ ID NO: 446229 - RNA, 19 nt, Artificial Sequence
  Description of Artificial Sequence: Synthetic oligonucleotide
gccaaugcuaucucauggu

SEQ ID NO: 446230 - RNA, 19 nt, Artificial Sequence
  Description of Artificial Sequence: Synthetic oligonucleotide
caugguuaaaggccucuuu

SEQ ID NO: 446231 - RNA, 19 nt, Artificial Sequence
  Description of Artificial Sequence: Synthetic oligonucleotide
ucguugccuucacguuuaa

SEQ ID NO: 446232 - RNA, 19 nt, Artificial Sequence
  Description of Artificial Sequence: Synthetic oligonucleotide
caacagcccuaggcggccg

SEQ ID NO: 446233 - RNA, 19 nt, Artificial Sequence
  Description of Artificial Sequence: Synthetic oligonucleotide
ccucacacugacagcucac

SEQ ID NO: 446234 - RNA, 19 nt, Artificial Sequence
  Description of Artificial Sequence: Synthetic oligonucleotide
caucgugguggggcaaguc

SEQ ID NO: 446235 - RNA, 19 nt, Artificial Sequence
  Description of Artificial Sequence: Synthetic oligonucleotide
acuucgccaucuaccacua

SEQ ID NO: 446236 - RNA, 19 nt, Artificial Sequence
  Description of Artificial Sequence: Synthetic oligonucleotide
cuucgccaucuaccacuac

SEQ ID NO: 446237 - RNA, 19 nt, Artificial Sequence
  Description of Artificial Sequence: Synthetic oligonucleotide
gugcgacgugucuggguuc

SEQ ID NO: 446238 - RNA, 19 nt, Artificial Sequence
  Description of Artificial Sequence: Synthetic oligonucleotide
gcuucgauagcuguucuuu

SEQ ID NO: 446239 - RNA, 19 nt, Artificial Sequence
  Description of Artificial Sequence: Synthetic oligonucleotide
agacagcaacgcccacuuu

SEQ ID NO: 446240 - RNA, 19 nt, Artificial Sequence
  Description of Artificial Sequence: Synthetic oligonucleotide
gggaaguacggguguauuu

SEQ ID NO: 446241 - RNA, 19 nt, Artificial Sequence
  Description of Artificial Sequence: Synthetic oligonucleotide
ccuacccucacuacuaguu

SEQ ID NO: 446242 - RNA, 19 nt, Artificial Sequence
  Description of Artificial Sequence: Synthetic oligonucleotide
cccugucuaccuucugguc

SEQ ID NO: 446243 - RNA, 19 nt, Artificial Sequence
  Description of Artificial Sequence: Synthetic oligonucleotide
cugccccuuuucuuaaaau

SEQ ID NO: 446244 - RNA, 19 nt, Artificial Sequence
  Description of Artificial Sequence: Synthetic oligonucleotide
cgcgguauucggcugccug

SEQ ID NO: 446245 - RNA, 19 nt, Artificial Sequence
  Description of Artificial Sequence: Synthetic oligonucleotide
cgagacuuuagcuuaucau

SEQ ID NO: 446246 - RNA, 19 nt, Artificial Sequence
  Description of Artificial Sequence: Synthetic oligonucleotide
gggauugguuccucacacu

SEQ ID NO: 446247 - RNA, 19 nt, Artificial Sequence
  Description of Artificial Sequence: Synthetic oligonucleotide
cuguaccgcuccugggucu

SEQ ID NO: 446248 - RNA, 19 nt, Artificial Sequence
  Description of Artificial Sequence: Synthetic oligonucleotide
cagcuuuguuucgauugcu

SEQ ID NO: 446249 - RNA, 19 nt, Artificial Sequence
  Description of Artificial Sequence: Synthetic oligonucleotide
ucgcgguauucggcugccu

SEQ ID NO: 446250 - RNA, 19 nt, Artificial Sequence
  Description of Artificial Sequence: Synthetic oligonucleotide
cagugcgacgugucugggu

SEQ ID NO: 446251 - RNA, 19 nt, Artificial Sequence
  Description of Artificial Sequence: Synthetic oligonucleotide
gcgcgcuucaucgccucug

SEQ ID NO: 446252 - RNA, 19 nt, Artificial Sequence
  Description of Artificial Sequence: Synthetic oligonucleotide
cguaauagauucucagcuu

SEQ ID NO: 446253 - RNA, 19 nt, Artificial Sequence
  Description of Artificial Sequence: Synthetic oligonucleotide
gccuucacguuuaaacuuu

SEQ ID NO: 446254 - RNA, 19 nt, Artificial Sequence
  Description of Artificial Sequence: Synthetic oligonucleotide
ccgaacauacugcaucaau

SEQ ID NO: 446255 - RNA, 19 nt, Artificial Sequence
  Description of Artificial Sequence: Synthetic oligonucleotide
cgacgugucuggguucacc

SEQ ID NO: 446256 - RNA, 19 nt, Artificial Sequence
  Description of Artificial Sequence: Synthetic oligonucleotide
cccaaccacucguucaacu

SEQ ID NO: 446257 - RNA, 19 nt, Artificial Sequence
  Description of Artificial Sequence: Synthetic oligonucleotide
caggcauagcagcccugcu

SEQ ID NO: 446258 - RNA, 19 nt, Artificial Sequence
  Description of Artificial Sequence: Synthetic oligonucleotide
cgcugcacguuuagccuuc

SEQ ID NO: 446259 - RNA, 19 nt, Artificial Sequence
  Description of Artificial Sequence: Synthetic oligonucleotide
ggguggcgcgcgcuucauc

SEQ ID NO: 446260 - RNA, 19 nt, Artificial Sequence
  Description of Artificial Sequence: Synthetic oligonucleotide
gucccaugugaggcauugu

SEQ ID NO: 446261 - RNA, 19 nt, Artificial Sequence
  Description of Artificial Sequence: Synthetic oligonucleotide
ccuaggcggccgugucuuc

SEQ ID NO: 446262 - RNA, 19 nt, Artificial Sequence
  Description of Artificial Sequence: Synthetic oligonucleotide
gcugcacguuuagccuuca

SEQ ID NO: 446263 - RNA, 19 nt, Artificial Sequence
  Description of Artificial Sequence: Synthetic oligonucleotide
gcgcugcacguuuagccuu

SEQ ID NO: 446264 - RNA, 19 nt, Artificial Sequence
  Description of Artificial Sequence: Synthetic oligonucleotide
cggguaugcuagugugaca

SEQ ID NO: 446265 - RNA, 19 nt, Artificial Sequence
  Description of Artificial Sequence: Synthetic oligonucleotide
ccgcuucacaucauucguu

SEQ ID NO: 446266 - RNA, 19 nt, Artificial Sequence
  Description of Artificial Sequence: Synthetic oligonucleotide
gcccuaggcggccgugucu

SEQ ID NO: 446267 - RNA, 19 nt, Artificial Sequence
  Description of Artificial Sequence: Synthetic oligonucleotide
cccuacccucacuacuagu

SEQ ID NO: 446268 - RNA, 19 nt, Artificial Sequence
  Description of Artificial Sequence: Synthetic oligonucleotide
cagcccuaggcggccgugu

SEQ ID NO: 446269 - RNA, 19 nt, Artificial Sequence
  Description of Artificial Sequence: Synthetic oligonucleotide
gcgacgugucuggguucac

SEQ ID NO: 446270 - RNA, 19 nt, Artificial Sequence
  Description of Artificial Sequence: Synthetic oligonucleotide
cguuucccaaccacucguu

SEQ ID NO: 446271 - RNA, 19 nt, Artificial Sequence
  Description of Artificial Sequence: Synthetic oligonucleotide
ccaugguuaaaggccucuu

SEQ ID NO: 446272 - RNA, 19 nt, Artificial Sequence
  Description of Artificial Sequence: Synthetic oligonucleotide
cagcgacacccaggcuaaa

SEQ ID NO: 446273 - RNA, 19 nt, Artificial Sequence
  Description of Artificial Sequence: Synthetic oligonucleotide
cccugcacggagagauuuu

SEQ ID NO: 446274 - RNA, 19 nt, Artificial Sequence
  Description of Artificial Sequence: Synthetic oligonucleotide
cccuaggcggccgugucuu

SEQ ID NO: 446275 - RNA, 19 nt, Artificial Sequence
  Description of Artificial Sequence: Synthetic oligonucleotide
ccggaggguggcgcgcgcu

SEQ ID NO: 446276 - RNA, 19 nt, Artificial Sequence
  Description of Artificial Sequence: Synthetic oligonucleotide
cgccucuguugugcauaua

SEQ ID NO: 446277 - RNA, 19 nt, Artificial Sequence
  Description of Artificial Sequence: Synthetic oligonucleotide
auuucuaucacguuagagg

SEQ ID NO: 446278 - RNA, 19 nt, Artificial Sequence
  Description of Artificial Sequence: Synthetic oligonucleotide
uuuauaagagguaucauca

SEQ ID NO: 446279 - RNA, 19 nt, Artificial Sequence
  Description of Artificial Sequence: Synthetic oligonucleotide
uaauuuacaaagaugaggu

SEQ ID NO: 446280 - RNA, 19 nt, Artificial Sequence
  Description of Artificial Sequence: Synthetic oligonucleotide
ucuuacaaaaguaaagcag

SEQ ID NO: 446281 - RNA, 19 nt, Artificial Sequence
  Description of Artificial Sequence: Synthetic oligonucleotide
aauuuaaaguggaagauag

SEQ ID NO: 446282 - RNA, 19 nt, Artificial Sequence
  Description of Artificial Sequence: Synthetic oligonucleotide
acuaauaauuucuaucacg

SEQ ID NO: 446283 - RNA, 19 nt, Artificial Sequence
  Description of Artificial Sequence: Synthetic oligonucleotide
ucaauuagccaaaacaagc

SEQ ID NO: 446284 - RNA, 19 nt, Artificial Sequence
  Description of Artificial Sequence: Synthetic oligonucleotide
guauguguaaggcagaggg

SEQ ID NO: 446285 - RNA, 19 nt, Artificial Sequence
  Description of Artificial Sequence: Synthetic oligonucleotide
auuccaaauaagcacauuc

SEQ ID NO: 446286 - RNA, 19 nt, Artificial Sequence
  Description of Artificial Sequence: Synthetic oligonucleotide
acuaaacuaagacacacag

SEQ ID NO: 446287 - RNA, 19 nt, Artificial Sequence
  Description of Artificial Sequence: Synthetic oligonucleotide
ugcucaauuagccaaaaca

SEQ ID NO: 446288 - RNA, 19 nt, Artificial Sequence
  Description of Artificial Sequence: Synthetic oligonucleotide
aucauauacaaauuaacca

SEQ ID NO: 446289 - RNA, 19 nt, Artificial Sequence
  Description of Artificial Sequence: Synthetic oligonucleotide
caucacuaaacuaagacac

SEQ ID NO: 446290 - RNA, 19 nt, Artificial Sequence
  Description of Artificial Sequence: Synthetic oligonucleotide
uguauaguaacaagguuug

SEQ ID NO: 446291 - RNA, 19 nt, Artificial Sequence
  Description of Artificial Sequence: Synthetic oligonucleotide
gaacuaauaauuucuauca

SEQ ID NO: 446292 - RNA, 19 nt, Artificial Sequence
  Description of Artificial Sequence: Synthetic oligonucleotide
aacuaauaauuucuaucac

SEQ ID NO: 446293 - RNA, 19 nt, Artificial Sequence
  Description of Artificial Sequence: Synthetic oligonucleotide
uuagcuaagacaucuggag

SEQ ID NO: 446294 - RNA, 19 nt, Artificial Sequence
  Description of Artificial Sequence: Synthetic oligonucleotide
aaacguaaaacuguucagg

SEQ ID NO: 446295 - RNA, 19 nt, Artificial Sequence
  Description of Artificial Sequence: Synthetic oligonucleotide
acaagcuaaagauaaaugu

SEQ ID NO: 446296 - RNA, 19 nt, Artificial Sequence
  Description of Artificial Sequence: Synthetic oligonucleotide
auuaauuaggcauuuucug

SEQ ID NO: 446297 - RNA, 19 nt, Artificial Sequence
  Description of Artificial Sequence: Synthetic oligonucleotide
uuuuauaagagguaucauc

SEQ ID NO: 446298 - RNA, 19 nt, Artificial Sequence
  Description of Artificial Sequence: Synthetic oligonucleotide
acaauuguauguguaaggc

SEQ ID NO: 446299 - RNA, 19 nt, Artificial Sequence
  Description of Artificial Sequence: Synthetic oligonucleotide
cuauauaucccacuguacc

SEQ ID NO: 446300 - RNA, 19 nt, Artificial Sequence
  Description of Artificial Sequence: Synthetic oligonucleotide
uuucuaucacguuagagga

SEQ ID NO: 446301 - RNA, 19 nt, Artificial Sequence
  Description of Artificial Sequence: Synthetic oligonucleotide
acaucagugguucacuagc

SEQ ID NO: 446302 - RNA, 19 nt, Artificial Sequence
  Description of Artificial Sequence: Synthetic oligonucleotide
ucuuagcuaagacaucugg

SEQ ID NO: 446303 - RNA, 19 nt, Artificial Sequence
  Description of Artificial Sequence: Synthetic oligonucleotide
ucaccuaucauauuguggu

SEQ ID NO: 446304 - RNA, 19 nt, Artificial Sequence
  Description of Artificial Sequence: Synthetic oligonucleotide
aguaauaguagcaaauuuc

SEQ ID NO: 446305 - RNA, 19 nt, Artificial Sequence
  Description of Artificial Sequence: Synthetic oligonucleotide
ugucuaaucagucucuaug

SEQ ID NO: 446306 - RNA, 19 nt, Artificial Sequence
  Description of Artificial Sequence: Synthetic oligonucleotide
auaugcauuaauuaggcau

SEQ ID NO: 446307 - RNA, 19 nt, Artificial Sequence
  Description of Artificial Sequence: Synthetic oligonucleotide
ucugucauauaacagauuu

SEQ ID NO: 446308 - RNA, 19 nt, Artificial Sequence
  Description of Artificial Sequence: Synthetic oligonucleotide
acgggcuuaauuuacaaag

SEQ ID NO: 446309 - RNA, 19 nt, Artificial Sequence
  Description of Artificial Sequence: Synthetic oligonucleotide
uguauuugacaaacgacug

SEQ ID NO: 446310 - RNA, 19 nt, Artificial Sequence
  Description of Artificial Sequence: Synthetic oligonucleotide
uacaauuguauguguaagg

SEQ ID NO: 446311 - RNA, 19 nt, Artificial Sequence
  Description of Artificial Sequence: Synthetic oligonucleotide
uggacuaaugacauuacac

SEQ ID NO: 446312 - RNA, 19 nt, Artificial Sequence
  Description of Artificial Sequence: Synthetic oligonucleotide
uuaauauucaguccuucgu

SEQ ID NO: 446313 - RNA, 19 nt, Artificial Sequence
  Description of Artificial Sequence: Synthetic oligonucleotide
ucuagcuaacuuaauauuc

SEQ ID NO: 446314 - RNA, 19 nt, Artificial Sequence
  Description of Artificial Sequence: Synthetic oligonucleotide
acuaacauuucagagcuac

SEQ ID NO: 446315 - RNA, 19 nt, Artificial Sequence
  Description of Artificial Sequence: Synthetic oligonucleotide
ugauauguugccaggaugu

SEQ ID NO: 446316 - RNA, 19 nt, Artificial Sequence
  Description of Artificial Sequence: Synthetic oligonucleotide
uuaaaguggaagauagcug

SEQ ID NO: 446317 - RNA, 19 nt, Artificial Sequence
  Description of Artificial Sequence: Synthetic oligonucleotide
agcuacucugguucgaucc

SEQ ID NO: 446318 - RNA, 19 nt, Artificial Sequence
  Description of Artificial Sequence: Synthetic oligonucleotide
ugguucacuagcuaaaaug

SEQ ID NO: 446319 - RNA, 19 nt, Artificial Sequence
  Description of Artificial Sequence: Synthetic oligonucleotide
ucauauugugguaaggagu

SEQ ID NO: 446320 - RNA, 19 nt, Artificial Sequence
  Description of Artificial Sequence: Synthetic oligonucleotide
cauauugugguaaggagug

SEQ ID NO: 446321 - RNA, 19 nt, Artificial Sequence
  Description of Artificial Sequence: Synthetic oligonucleotide
uguaccaauaagcuuuuga

SEQ ID NO: 446322 - RNA, 19 nt, Artificial Sequence
  Description of Artificial Sequence: Synthetic oligonucleotide
uccauaaauuuaaagugga

SEQ ID NO: 446323 - RNA, 19 nt, Artificial Sequence
  Description of Artificial Sequence: Synthetic oligonucleotide
aauaucauauacaaauuaa

SEQ ID NO: 446324 - RNA, 19 nt, Artificial Sequence
  Description of Artificial Sequence: Synthetic oligonucleotide
aauaugugagggaagacca

SEQ ID NO: 446325 - RNA, 19 nt, Artificial Sequence
  Description of Artificial Sequence: Synthetic oligonucleotide
uccaggaacgaucaaauuc

SEQ ID NO: 446326 - RNA, 19 nt, Artificial Sequence
  Description of Artificial Sequence: Synthetic oligonucleotide
guaauaguagcaaauuucc

SEQ ID NO: 446327 - RNA, 19 nt, Artificial Sequence
  Description of Artificial Sequence: Synthetic oligonucleotide
ucucuaaacguaaaacugu

SEQ ID NO: 446328 - RNA, 19 nt, Artificial Sequence
  Description of Artificial Sequence: Synthetic oligonucleotide
guucauuuguuauagugug

SEQ ID NO: 446329 - RNA, 19 nt, Artificial Sequence
  Description of Artificial Sequence: Synthetic oligonucleotide
uguauuuccacaccccaca

SEQ ID NO: 446330 - RNA, 19 nt, Artificial Sequence
  Description of Artificial Sequence: Synthetic oligonucleotide
uaaacguaaaacuguucag

SEQ ID NO: 446331 - RNA, 19 nt, Artificial Sequence
  Description of Artificial Sequence: Synthetic oligonucleotide
aauagggaacuagagcagg

SEQ ID NO: 446332 - RNA, 19 nt, Artificial Sequence
  Description of Artificial Sequence: Synthetic oligonucleotide
uguacauccaggaacgauc

SEQ ID NO: 446333 - RNA, 19 nt, Artificial Sequence
  Description of Artificial Sequence: Synthetic oligonucleotide
ucacuagcuaaaauguuug

SEQ ID NO: 446334 - RNA, 19 nt, Artificial Sequence
  Description of Artificial Sequence: Synthetic oligonucleotide
aauuucuaucacguuagag

SEQ ID NO: 446335 - RNA, 19 nt, Artificial Sequence
  Description of Artificial Sequence: Synthetic oligonucleotide
aucauauugugguaaggag

SEQ ID NO: 446336 - RNA, 19 nt, Artificial Sequence
  Description of Artificial Sequence: Synthetic oligonucleotide
uuuguuauagugugcauua

SEQ ID NO: 446337 - RNA, 19 nt, Artificial Sequence
  Description of Artificial Sequence: Synthetic oligonucleotide
uauacagacuguauuucca

SEQ ID NO: 446338 - RNA, 19 nt, Artificial Sequence
  Description of Artificial Sequence: Synthetic oligonucleotide
aagagccucaguuaauugu

SEQ ID NO: 446339 - RNA, 19 nt, Artificial Sequence
  Description of Artificial Sequence: Synthetic oligonucleotide
ugguacuaacauuucagag

SEQ ID NO: 446340 - RNA, 19 nt, Artificial Sequence
  Description of Artificial Sequence: Synthetic oligonucleotide
auaguaacaagguuuguau

SEQ ID NO: 446341 - RNA, 19 nt, Artificial Sequence
  Description of Artificial Sequence: Synthetic oligonucleotide
uauuugacaaacgacugca

SEQ ID NO: 446342 - RNA, 19 nt, Artificial Sequence
  Description of Artificial Sequence: Synthetic oligonucleotide
accgucacgacacaaugac

SEQ ID NO: 446343 - RNA, 19 nt, Artificial Sequence
  Description of Artificial Sequence: Synthetic oligonucleotide
gacacaaugaccgcaacgc

SEQ ID NO: 446344 - RNA, 19 nt, Artificial Sequence
  Description of Artificial Sequence: Synthetic oligonucleotide
ggaauagggaacuagagca

SEQ ID NO: 446345 - RNA, 19 nt, Artificial Sequence
  Description of Artificial Sequence: Synthetic oligonucleotide
cuaaacguaaaacuguuca

SEQ ID NO: 446346 - RNA, 19 nt, Artificial Sequence
  Description of Artificial Sequence: Synthetic oligonucleotide
uauaagagguaucaucauc

SEQ ID NO: 446347 - RNA, 19 nt, Artificial Sequence
  Description of Artificial Sequence: Synthetic oligonucleotide
ucaaacuacccuccaaaca

SEQ ID NO: 446348 - RNA, 19 nt, Artificial Sequence
  Description of Artificial Sequence: Synthetic oligonucleotide
auacagacuguauuuccac

SEQ ID NO: 446349 - RNA, 19 nt, Artificial Sequence
  Description of Artificial Sequence: Synthetic oligonucleotide
ugguacguaagucacaaau

SEQ ID NO: 446350 - RNA, 19 nt, Artificial Sequence
  Description of Artificial Sequence: Synthetic oligonucleotide
ucacguuagaggaaucaag

SEQ ID NO: 446351 - RNA, 19 nt, Artificial Sequence
  Description of Artificial Sequence: Synthetic oligonucleotide
ugucuagcuaacuuaauau

SEQ ID NO: 446352 - RNA, 19 nt, Artificial Sequence
  Description of Artificial Sequence: Synthetic oligonucleotide
aucaaacuacccuccaaac

SEQ ID NO: 446353 - RNA, 19 nt, Artificial Sequence
  Description of Artificial Sequence: Synthetic oligonucleotide
uuccaaauaagcacauucu

SEQ ID NO: 446354 - RNA, 19 nt, Artificial Sequence
  Description of Artificial Sequence: Synthetic oligonucleotide
ugucguggaguccuggagg

SEQ ID NO: 446355 - RNA, 19 nt, Artificial Sequence
  Description of Artificial Sequence: Synthetic oligonucleotide
cuaaacuaagacacacagg

SEQ ID NO: 446356 - RNA, 19 nt, Artificial Sequence
  Description of Artificial Sequence: Synthetic oligonucleotide
aaguaugaggcacaagaau

SEQ ID NO: 446357 - RNA, 19 nt, Artificial Sequence
  Description of Artificial Sequence: Synthetic oligonucleotide
uuacaauuguauguguaag

SEQ ID NO: 446358 - RNA, 19 nt, Artificial Sequence
  Description of Artificial Sequence: Synthetic oligonucleotide
ucaugauaguuccauaaau

SEQ ID NO: 446359 - RNA, 19 nt, Artificial Sequence
  Description of Artificial Sequence: Synthetic oligonucleotide
gauuacauacaacucuuuc

SEQ ID NO: 446360 - RNA, 19 nt, Artificial Sequence
  Description of Artificial Sequence: Synthetic oligonucleotide
gcuaacuuaauauucaguc

SEQ ID NO: 446361 - RNA, 19 nt, Artificial Sequence
  Description of Artificial Sequence: Synthetic oligonucleotide
uguugcggaaaccacuacc

SEQ ID NO: 446362 - RNA, 19 nt, Artificial Sequence
  Description of Artificial Sequence: Synthetic oligonucleotide
uuaacugucuagcuaacuu

SEQ ID NO: 446363 - RNA, 19 nt, Artificial Sequence
  Description of Artificial Sequence: Synthetic oligonucleotide
uaugcauuaauuaggcauu

SEQ ID NO: 446364 - RNA, 19 nt, Artificial Sequence
  Description of Artificial Sequence: Synthetic oligonucleotide
aggaaaucaucacuaaacu

SEQ ID NO: 446365 - RNA, 19 nt, Artificial Sequence
  Description of Artificial Sequence: Synthetic oligonucleotide
cauuacugcagcaaaugac

SEQ ID NO: 446366 - RNA, 19 nt, Artificial Sequence
  Description of Artificial Sequence: Synthetic oligonucleotide
ugucgugaauacuucaucu

SEQ ID NO: 446367 - RNA, 19 nt, Artificial Sequence
  Description of Artificial Sequence: Synthetic oligonucleotide
uucacuagcuaaaauguuu

SEQ ID NO: 446368 - RNA, 19 nt, Artificial Sequence
  Description of Artificial Sequence: Synthetic oligonucleotide
aagauagcuguucaauaaa

SEQ ID NO: 446369 - RNA, 19 nt, Artificial Sequence
  Description of Artificial Sequence: Synthetic oligonucleotide
gaagauagcuguucaauaa

SEQ ID NO: 446370 - RNA, 19 nt, Artificial Sequence
  Description of Artificial Sequence: Synthetic oligonucleotide
ggaacuaauaauuucuauc

SEQ ID NO: 446371 - RNA, 19 nt, Artificial Sequence
  Description of Artificial Sequence: Synthetic oligonucleotide
uaauauucaguccuucguu

SEQ ID NO: 446372 - RNA, 19 nt, Artificial Sequence
  Description of Artificial Sequence: Synthetic oligonucleotide
acuagcaggugucaaauaa

SEQ ID NO: 446373 - RNA, 19 nt, Artificial Sequence
  Description of Artificial Sequence: Synthetic oligonucleotide
ucuucgacgguccggcggg

SEQ ID NO: 446374 - RNA, 19 nt, Artificial Sequence
  Description of Artificial Sequence: Synthetic oligonucleotide
aagacaucuggagucauga

SEQ ID NO: 446375 - RNA, 19 nt, Artificial Sequence
  Description of Artificial Sequence: Synthetic oligonucleotide
guugcggaaaccacuaccg

SEQ ID NO: 446376 - RNA, 19 nt, Artificial Sequence
  Description of Artificial Sequence: Synthetic oligonucleotide
uucauuuguuauagugugc

SEQ ID NO: 446377 - RNA, 19 nt, Artificial Sequence
  Description of Artificial Sequence: Synthetic oligonucleotide
ugguguguauuuugguacg

SEQ ID NO: 446378 - RNA, 19 nt, Artificial Sequence
  Description of Artificial Sequence: Synthetic oligonucleotide
uguguauuuugguacguaa

SEQ ID NO: 446379 - RNA, 19 nt, Artificial Sequence
  Description of Artificial Sequence: Synthetic oligonucleotide
cugguguguauuuugguac

SEQ ID NO: 446380 - RNA, 19 nt, Artificial Sequence
  Description of Artificial Sequence: Synthetic oligonucleotide
ucuaaucagucucuauggu

SEQ ID NO: 446381 - RNA, 19 nt, Artificial Sequence
  Description of Artificial Sequence: Synthetic oligonucleotide
aaguggaagauagcuguuc

SEQ ID NO: 446382 - RNA, 19 nt, Artificial Sequence
  Description of Artificial Sequence: Synthetic oligonucleotide
uggaugauauguugccagg

SEQ ID NO: 446383 - RNA, 19 nt, Artificial Sequence
  Description of Artificial Sequence: Synthetic oligonucleotide
aacgacugcauugcugaac

SEQ ID NO: 446384 - RNA, 19 nt, Artificial Sequence
  Description of Artificial Sequence: Synthetic oligonucleotide
ugcgguagauccuugauuu

SEQ ID NO: 446385 - RNA, 19 nt, Artificial Sequence
  Description of Artificial Sequence: Synthetic oligonucleotide
ucacuaaacuaagacacac

SEQ ID NO: 446386 - RNA, 19 nt, Artificial Sequence
  Description of Artificial Sequence: Synthetic oligonucleotide
agucgcuaaaggcaucuuc

SEQ ID NO: 446387 - RNA, 19 nt, Artificial Sequence
  Description of Artificial Sequence: Synthetic oligonucleotide
acaggaacuaauaauuucu

SEQ ID NO: 446388 - RNA, 19 nt, Artificial Sequence
  Description of Artificial Sequence: Synthetic oligonucleotide
guauuugacaaacgacugc

SEQ ID NO: 446389 - RNA, 19 nt, Artificial Sequence
  Description of Artificial Sequence: Synthetic oligonucleotide
uacguaagucacaaauugu

SEQ ID NO: 446390 - RNA, 19 nt, Artificial Sequence
  Description of Artificial Sequence: Synthetic oligonucleotide
aaccaguguucuuacaaaa

SEQ ID NO: 446391 - RNA, 19 nt, Artificial Sequence
  Description of Artificial Sequence: Synthetic oligonucleotide
aauuaacugucuagcuaac

SEQ ID NO: 446392 - RNA, 19 nt, Artificial Sequence
  Description of Artificial Sequence: Synthetic oligonucleotide
ucgugaauacuucaucuau

SEQ ID NO: 446393 - RNA, 19 nt, Artificial Sequence
  Description of Artificial Sequence: Synthetic oligonucleotide
ugacaaacgacugcauugc

SEQ ID NO: 446394 - RNA, 19 nt, Artificial Sequence
  Description of Artificial Sequence: Synthetic oligonucleotide
ugcggaaaccacuaccggc

SEQ ID NO: 446395 - RNA, 19 nt, Artificial Sequence
  Description of Artificial Sequence: Synthetic oligonucleotide
ucagugguucacuagcuaa

SEQ ID NO: 446396 - RNA, 19 nt, Artificial Sequence
  Description of Artificial Sequence: Synthetic oligonucleotide
uuaaagcaaugacuccuca

SEQ ID NO: 446397 - RNA, 19 nt, Artificial Sequence
  Description of Artificial Sequence: Synthetic oligonucleotide
guacuaacauuucagagcu

SEQ ID NO: 446398 - RNA, 19 nt, Artificial Sequence
  Description of Artificial Sequence: Synthetic oligonucleotide
gaugagguauacauugcug

SEQ ID NO: 446399 - RNA, 19 nt, Artificial Sequence
  Description of Artificial Sequence: Synthetic oligonucleotide
uauauaacugguguguauu

SEQ ID NO: 446400 - RNA, 19 nt, Artificial Sequence
  Description of Artificial Sequence: Synthetic oligonucleotide
caaacgacugcauugcuga

SEQ ID NO: 446401 - RNA, 19 nt, Artificial Sequence
  Description of Artificial Sequence: Synthetic oligonucleotide
uagcuaaaauguuugguua

SEQ ID NO: 446402 - RNA, 19 nt, Artificial Sequence
  Description of Artificial Sequence: Synthetic oligonucleotide
agaugagguauacauugcu

SEQ ID NO: 446403 - RNA, 19 nt, Artificial Sequence
  Description of Artificial Sequence: Synthetic oligonucleotide
acaagaagcaauguuguau

SEQ ID NO: 446404 - RNA, 19 nt, Artificial Sequence
  Description of Artificial Sequence: Synthetic oligonucleotide
ucuaucacguuagaggaau

SEQ ID NO: 446405 - RNA, 19 nt, Artificial Sequence
  Description of Artificial Sequence: Synthetic oligonucleotide
agaaucucuaaacguaaaa

SEQ ID NO: 446406 - RNA, 19 nt, Artificial Sequence
  Description of Artificial Sequence: Synthetic oligonucleotide
acaaacgggcuuaauuuac

SEQ ID NO: 446407 - RNA, 19 nt, Artificial Sequence
  Description of Artificial Sequence: Synthetic oligonucleotide
uuuggacuaaugacauuac

SEQ ID NO: 446408 - RNA, 19 nt, Artificial Sequence
  Description of Artificial Sequence: Synthetic oligonucleotide
ucuaaacguaaaacuguuc

SEQ ID NO: 446409 - RNA, 19 nt, Artificial Sequence
  Description of Artificial Sequence: Synthetic oligonucleotide
augguacuaacauuucaga

SEQ ID NO: 446410 - RNA, 19 nt, Artificial Sequence
  Description of Artificial Sequence: Synthetic oligonucleotide
uccuucguuguagugaagc

SEQ ID NO: 446411 - RNA, 19 nt, Artificial Sequence
  Description of Artificial Sequence: Synthetic oligonucleotide
uauguguaaggcagaggga

SEQ ID NO: 446412 - RNA, 19 nt, Artificial Sequence
  Description of Artificial Sequence: Synthetic oligonucleotide
ucauuagcuucugagucgc

SEQ ID NO: 446413 - RNA, 19 nt, Artificial Sequence
  Description of Artificial Sequence: Synthetic oligonucleotide
uaacugucuagcuaacuua

SEQ ID NO: 446414 - RNA, 19 nt, Artificial Sequence
  Description of Artificial Sequence: Synthetic oligonucleotide
cuuaaagcaaugacuccuc

SEQ ID NO: 446415 - RNA, 19 nt, Artificial Sequence
  Description of Artificial Sequence: Synthetic oligonucleotide
acuuaauauucaguccuuc

SEQ ID NO: 446416 - RNA, 19 nt, Artificial Sequence
  Description of Artificial Sequence: Synthetic oligonucleotide
acgacugcauugcugaaca

SEQ ID NO: 446417 - RNA, 19 nt, Artificial Sequence
  Description of Artificial Sequence: Synthetic oligonucleotide
gauuuauuuggugcuacca

SEQ ID NO: 446418 - RNA, 19 nt, Artificial Sequence
  Description of Artificial Sequence: Synthetic oligonucleotide
augaccgcaacgccacagc

SEQ ID NO: 446419 - RNA, 19 nt, Artificial Sequence
  Description of Artificial Sequence: Synthetic oligonucleotide
aagguuuguauuugacaaa

SEQ ID NO: 446420 - RNA, 19 nt, Artificial Sequence
  Description of Artificial Sequence: Synthetic oligonucleotide
aaugaccgcaacgccacag

SEQ ID NO: 446421 - RNA, 19 nt, Artificial Sequence
  Description of Artificial Sequence: Synthetic oligonucleotide
accuauauaucccacugua

SEQ ID NO: 446422 - RNA, 19 nt, Artificial Sequence
  Description of Artificial Sequence: Synthetic oligonucleotide
aaacgggcuuaauuuacaa

SEQ ID NO: 446423 - RNA, 19 nt, Artificial Sequence
  Description of Artificial Sequence: Synthetic oligonucleotide
uugcggaaaccacuaccgg

SEQ ID NO: 446424 - RNA, 19 nt, Artificial Sequence
  Description of Artificial Sequence: Synthetic oligonucleotide
augacauuacacuguauuu

SEQ ID NO: 446425 - RNA, 19 nt, Artificial Sequence
  Description of Artificial Sequence: Synthetic oligonucleotide
acuagcuaaaauguuuggu

SEQ ID NO: 446426 - RNA, 19 nt, Artificial Sequence
  Description of Artificial Sequence: Synthetic oligonucleotide
auauauaacugguguguau

SEQ ID NO: 446427 - RNA, 19 nt, Artificial Sequence
  Description of Artificial Sequence: Synthetic oligonucleotide
uguagugaagcuuccuuuu

SEQ ID NO: 446428 - RNA, 19 nt, Artificial Sequence
  Description of Artificial Sequence: Synthetic oligonucleotide
uuagcuucugagucgcuaa

SEQ ID NO: 446429 - RNA, 19 nt, Artificial Sequence
  Description of Artificial Sequence: Synthetic oligonucleotide
ucccgagaccgauacuucg

SEQ ID NO: 446430 - RNA, 19 nt, Artificial Sequence
  Description of Artificial Sequence: Synthetic oligonucleotide
uuauaagagguaucaucau

SEQ ID NO: 446431 - RNA, 19 nt, Artificial Sequence
  Description of Artificial Sequence: Synthetic oligonucleotide
uaucacguuagaggaauca

SEQ ID NO: 446432 - RNA, 19 nt, Artificial Sequence
  Description of Artificial Sequence: Synthetic oligonucleotide
agaauaugugagggaagac

SEQ ID NO: 446433 - RNA, 19 nt, Artificial Sequence
  Description of Artificial Sequence: Synthetic oligonucleotide
auauguugccaggauguuc

SEQ ID NO: 446434 - RNA, 19 nt, Artificial Sequence
  Description of Artificial Sequence: Synthetic oligonucleotide
uucugucuaaucagucucu

SEQ ID NO: 446435 - RNA, 19 nt, Artificial Sequence
  Description of Artificial Sequence: Synthetic oligonucleotide
cuuagcuaagacaucugga

SEQ ID NO: 446436 - RNA, 19 nt, Artificial Sequence
  Description of Artificial Sequence: Synthetic oligonucleotide
gacuccugcucaauuagcc

SEQ ID NO: 446437 - RNA, 19 nt, Artificial Sequence
  Description of Artificial Sequence: Synthetic oligonucleotide
gagaccgauacuucggcuc

SEQ ID NO: 446438 - RNA, 19 nt, Artificial Sequence
  Description of Artificial Sequence: Synthetic oligonucleotide
uggccaacggccuuugcca

SEQ ID NO: 446439 - RNA, 19 nt, Artificial Sequence
  Description of Artificial Sequence: Synthetic oligonucleotide
gcaaugacuccucagaauc

SEQ ID NO: 446440 - RNA, 19 nt, Artificial Sequence
  Description of Artificial Sequence: Synthetic oligonucleotide
aacgggcuuaauuuacaaa

SEQ ID NO: 446441 - RNA, 19 nt, Artificial Sequence
  Description of Artificial Sequence: Synthetic oligonucleotide
uucuuagcuaagacaucug

SEQ ID NO: 446442 - RNA, 19 nt, Artificial Sequence
  Description of Artificial Sequence: Synthetic oligonucleotide
ugacagaauaugugaggga

SEQ ID NO: 446443 - RNA, 19 nt, Artificial Sequence
  Description of Artificial Sequence: Synthetic oligonucleotide
cgucacgacacaaugaccg

SEQ ID NO: 446444 - RNA, 19 nt, Artificial Sequence
  Description of Artificial Sequence: Synthetic oligonucleotide
acugguguguauuuuggua

SEQ ID NO: 446445 - RNA, 19 nt, Artificial Sequence
  Description of Artificial Sequence: Synthetic oligonucleotide
cuaucauauugugguaagg

SEQ ID NO: 446446 - RNA, 19 nt, Artificial Sequence
  Description of Artificial Sequence: Synthetic oligonucleotide
aggaacuaauaauuucuau

SEQ ID NO: 446447 - RNA, 19 nt, Artificial Sequence
  Description of Artificial Sequence: Synthetic oligonucleotide
agagggaauagggaacuag

SEQ ID NO: 446448 - RNA, 19 nt, Artificial Sequence
  Description of Artificial Sequence: Synthetic oligonucleotide
cacagggagaucaggcugc

SEQ ID NO: 446449 - RNA, 19 nt, Artificial Sequence
  Description of Artificial Sequence: Synthetic oligonucleotide
uaugugagggaagaccagu

SEQ ID NO: 446450 - RNA, 19 nt, Artificial Sequence
  Description of Artificial Sequence: Synthetic oligonucleotide
auuaucacauucccuuaaa

SEQ ID NO: 446451 - RNA, 19 nt, Artificial Sequence
  Description of Artificial Sequence: Synthetic oligonucleotide
acguaaaacuguucaggca

SEQ ID NO: 446452 - RNA, 19 nt, Artificial Sequence
  Description of Artificial Sequence: Synthetic oligonucleotide
auuuguuauagugugcauu

SEQ ID NO: 446453 - RNA, 19 nt, Artificial Sequence
  Description of Artificial Sequence: Synthetic oligonucleotide
uccuucauguuuagaacua

SEQ ID NO: 446454 - RNA, 19 nt, Artificial Sequence
  Description of Artificial Sequence: Synthetic oligonucleotide
uccaccuauauaucccacu

SEQ ID NO: 446455 - RNA, 19 nt, Artificial Sequence
  Description of Artificial Sequence: Synthetic oligonucleotide
aguccuucguuguagugaa

SEQ ID NO: 446456 - RNA, 19 nt, Artificial Sequence
  Description of Artificial Sequence: Synthetic oligonucleotide
aggauucccuugaugggcc

SEQ ID NO: 446457 - RNA, 19 nt, Artificial Sequence
  Description of Artificial Sequence: Synthetic oligonucleotide
ucaucaaaccauagucuuu

SEQ ID NO: 446458 - RNA, 19 nt, Artificial Sequence
  Description of Artificial Sequence: Synthetic oligonucleotide
ugaccgcaacgccacagcc

SEQ ID NO: 446459 - RNA, 19 nt, Artificial Sequence
  Description of Artificial Sequence: Synthetic oligonucleotide
caauuguauguguaaggca

SEQ ID NO: 446460 - RNA, 19 nt, Artificial Sequence
  Description of Artificial Sequence: Synthetic oligonucleotide
agccgcagaggucuuguuc

SEQ ID NO: 446461 - RNA, 19 nt, Artificial Sequence
  Description of Artificial Sequence: Synthetic oligonucleotide
auauaacugguguguauuu

SEQ ID NO: 446462 - RNA, 19 nt, Artificial Sequence
  Description of Artificial Sequence: Synthetic oligonucleotide
gagguaucaucaucuagaa

SEQ ID NO: 446463 - RNA, 19 nt, Artificial Sequence
  Description of Artificial Sequence: Synthetic oligonucleotide
accgcaacgccacagccga

SEQ ID NO: 446464 - RNA, 19 nt, Artificial Sequence
  Description of Artificial Sequence: Synthetic oligonucleotide
cagguuaagacagguaauc

SEQ ID NO: 446465 - RNA, 19 nt, Artificial Sequence
  Description of Artificial Sequence: Synthetic oligonucleotide
caaacuacccuccaaacau

SEQ ID NO: 446466 - RNA, 19 nt, Artificial Sequence
  Description of Artificial Sequence: Synthetic oligonucleotide
agggaauagggaacuagag

SEQ ID NO: 446467 - RNA, 19 nt, Artificial Sequence
  Description of Artificial Sequence: Synthetic oligonucleotide
caauuagccaaaacaagcu

SEQ ID NO: 446468 - RNA, 19 nt, Artificial Sequence
  Description of Artificial Sequence: Synthetic oligonucleotide
uauucaguccuucguugua

SEQ ID NO: 446469 - RNA, 19 nt, Artificial Sequence
  Description of Artificial Sequence: Synthetic oligonucleotide
agaccgauacuucggcucu

SEQ ID NO: 446470 - RNA, 19 nt, Artificial Sequence
  Description of Artificial Sequence: Synthetic oligonucleotide
ugagucgcuaaaggcaucu

SEQ ID NO: 446471 - RNA, 19 nt, Artificial Sequence
  Description of Artificial Sequence: Synthetic oligonucleotide
agcaaugacuccucagaau

SEQ ID NO: 446472 - RNA, 19 nt, Artificial Sequence
  Description of Artificial Sequence: Synthetic oligonucleotide
auuaaccaguguucuuaca

SEQ ID NO: 446473 - RNA, 19 nt, Artificial Sequence
  Description of Artificial Sequence: Synthetic oligonucleotide
uaguagcaaauuuccugac

SEQ ID NO: 446474 - RNA, 19 nt, Artificial Sequence
  Description of Artificial Sequence: Synthetic oligonucleotide
uucuaucacguuagaggaa

SEQ ID NO: 446475 - RNA, 19 nt, Artificial Sequence
  Description of Artificial Sequence: Synthetic oligonucleotide
uccucuucgacgguccggc

SEQ ID NO: 446476 - RNA, 19 nt, Artificial Sequence
  Description of Artificial Sequence: Synthetic oligonucleotide
ggcuuaauuuacaaagaug

SEQ ID NO: 446477 - RNA, 19 nt, Artificial Sequence
  Description of Artificial Sequence: Synthetic oligonucleotide
gaaguaugaggcacaagaa

SEQ ID NO: 446478 - RNA, 19 nt, Artificial Sequence
  Description of Artificial Sequence: Synthetic oligonucleotide
uccugucgugaauacuuca

SEQ ID NO: 446479 - RNA, 19 nt, Artificial Sequence
  Description of Artificial Sequence: Synthetic oligonucleotide
gagggaauagggaacuaga

SEQ ID NO: 446480 - RNA, 19 nt, Artificial Sequence
  Description of Artificial Sequence: Synthetic oligonucleotide
gucgcuaaaggcaucuuca

SEQ ID NO: 446481 - RNA, 19 nt, Artificial Sequence
  Description of Artificial Sequence: Synthetic oligonucleotide
ucaguccuucguuguagug

SEQ ID NO: 446482 - RNA, 19 nt, Artificial Sequence
  Description of Artificial Sequence: Synthetic oligonucleotide
uugccggucgcuccggcug

SEQ ID NO: 446483 - RNA, 19 nt, Artificial Sequence
  Description of Artificial Sequence: Synthetic oligonucleotide
cucuucgacgguccggcgg

SEQ ID NO: 446484 - RNA, 19 nt, Artificial Sequence
  Description of Artificial Sequence: Synthetic oligonucleotide
gucgaggccgccauugccg

SEQ ID NO: 446485 - RNA, 19 nt, Artificial Sequence
  Description of Artificial Sequence: Synthetic oligonucleotide
auuaacugucuagcuaacu

SEQ ID NO: 446486 - RNA, 19 nt, Artificial Sequence
  Description of Artificial Sequence: Synthetic oligonucleotide
ggacuaaugacauuacacu

SEQ ID NO: 446487 - RNA, 19 nt, Artificial Sequence
  Description of Artificial Sequence: Synthetic oligonucleotide
cuagcuaaaauguuugguu

SEQ ID NO: 446488 - RNA, 19 nt, Artificial Sequence
  Description of Artificial Sequence: Synthetic oligonucleotide
agcuaaagauaaauguuaa

SEQ ID NO: 446489 - RNA, 19 nt, Artificial Sequence
  Description of Artificial Sequence: Synthetic oligonucleotide
agguuaagacagguaauca

SEQ ID NO: 446490 - RNA, 19 nt, Artificial Sequence
  Description of Artificial Sequence: Synthetic oligonucleotide
acguaagucacaaauugua

SEQ ID NO: 446491 - RNA, 19 nt, Artificial Sequence
  Description of Artificial Sequence: Synthetic oligonucleotide
caagcuaaagauaaauguu

SEQ ID NO: 446492 - RNA, 19 nt, Artificial Sequence
  Description of Artificial Sequence: Synthetic oligonucleotide
ucacgacacaaugaccgca

SEQ ID NO: 446493 - RNA, 19 nt, Artificial Sequence
  Description of Artificial Sequence: Synthetic oligonucleotide
uugcgguagauccuugauu

SEQ ID NO: 446494 - RNA, 19 nt, Artificial Sequence
  Description of Artificial Sequence: Synthetic oligonucleotide
aaaccacuaccggcgucac

SEQ ID NO: 446495 - RNA, 19 nt, Artificial Sequence
  Description of Artificial Sequence: Synthetic oligonucleotide
ggaacgaucaaauucugau

SEQ ID NO: 446496 - RNA, 19 nt, Artificial Sequence
  Description of Artificial Sequence: Synthetic oligonucleotide
acgacacaaugaccgcaac

SEQ ID NO: 446497 - RNA, 19 nt, Artificial Sequence
  Description of Artificial Sequence: Synthetic oligonucleotide
uuuugacaucaugauaguu

SEQ ID NO: 446498 - RNA, 19 nt, Artificial Sequence
  Description of Artificial Sequence: Synthetic oligonucleotide
agauagcuguucaauaaaa

SEQ ID NO: 446499 - RNA, 19 nt, Artificial Sequence
  Description of Artificial Sequence: Synthetic oligonucleotide
gcggaaaccacuaccggcg

SEQ ID NO: 446500 - RNA, 19 nt, Artificial Sequence
  Description of Artificial Sequence: Synthetic oligonucleotide
gaccgcaacgccacagccg

SEQ ID NO: 446501 - RNA, 19 nt, Artificial Sequence
  Description of Artificial Sequence: Synthetic oligonucleotide
acguuagaggaaucaaguu

SEQ ID NO: 446502 - RNA, 19 nt, Artificial Sequence
  Description of Artificial Sequence: Synthetic oligonucleotide
uuccaccuauauaucccac

SEQ ID NO: 446503 - RNA, 19 nt, Artificial Sequence
  Description of Artificial Sequence: Synthetic oligonucleotide
cacguuagaggaaucaagu

SEQ ID NO: 446504 - RNA, 19 nt, Artificial Sequence
  Description of Artificial Sequence: Synthetic oligonucleotide
gcucaauuagccaaaacaa

SEQ ID NO: 446505 - RNA, 19 nt, Artificial Sequence
  Description of Artificial Sequence: Synthetic oligonucleotide
caugauaguuccauaaauu

SEQ ID NO: 446506 - RNA, 19 nt, Artificial Sequence
  Description of Artificial Sequence: Synthetic oligonucleotide
ccuaucauauugugguaag

SEQ ID NO: 446507 - RNA, 19 nt, Artificial Sequence
  Description of Artificial Sequence: Synthetic oligonucleotide
cacuaaacuaagacacaca

SEQ ID NO: 446508 - RNA, 19 nt, Artificial Sequence
  Description of Artificial Sequence: Synthetic oligonucleotide
cguuagaggaaucaaguuc

SEQ ID NO: 446509 - RNA, 19 nt, Artificial Sequence
  Description of Artificial Sequence: Synthetic oligonucleotide
gaugauauguugccaggau

SEQ ID NO: 446510 - RNA, 19 nt, Artificial Sequence
  Description of Artificial Sequence: Synthetic oligonucleotide
aacuuaauauucaguccuu

SEQ ID NO: 446511 - RNA, 19 nt, Artificial Sequence
  Description of Artificial Sequence: Synthetic oligonucleotide
cguaagucacaaauuguag

SEQ ID NO: 446512 - RNA, 19 nt, Artificial Sequence
  Description of Artificial Sequence: Synthetic oligonucleotide
gucacgacacaaugaccgc

SEQ ID NO: 446513 - RNA, 19 nt, Artificial Sequence
  Description of Artificial Sequence: Synthetic oligonucleotide
caguguucuuacaaaagua

SEQ ID NO: 446514 - RNA, 19 nt, Artificial Sequence
  Description of Artificial Sequence: Synthetic oligonucleotide
ggaaaucaucacuaaacua

SEQ ID NO: 446515 - RNA, 19 nt, Artificial Sequence
  Description of Artificial Sequence: Synthetic oligonucleotide
gccucaguuaauuguuucc

SEQ ID NO: 446516 - RNA, 19 nt, Artificial Sequence
  Description of Artificial Sequence: Synthetic oligonucleotide
accggcgucaccgucacga

SEQ ID NO: 446517 - RNA, 19 nt, Artificial Sequence
  Description of Artificial Sequence: Synthetic oligonucleotide
caaacgggcuuaauuuaca

SEQ ID NO: 446518 - RNA, 19 nt, Artificial Sequence
  Description of Artificial Sequence: Synthetic oligonucleotide
cugucuagcuaacuuaaua

SEQ ID NO: 446519 - RNA, 19 nt, Artificial Sequence
  Description of Artificial Sequence: Synthetic oligonucleotide
uaugaggcacaagaauaua

SEQ ID NO: 446520 - RNA, 19 nt, Artificial Sequence
  Description of Artificial Sequence: Synthetic oligonucleotide
cauuaucacauucccuuaa

SEQ ID NO: 446521 - RNA, 19 nt, Artificial Sequence
  Description of Artificial Sequence: Synthetic oligonucleotide
guacauccaggaacgauca

SEQ ID NO: 446522 - RNA, 19 nt, Artificial Sequence
  Description of Artificial Sequence: Synthetic oligonucleotide
gcuaauuucuuagcuaaga

SEQ ID NO: 446523 - RNA, 19 nt, Artificial Sequence
  Description of Artificial Sequence: Synthetic oligonucleotide
ucgcuaaaggcaucuucau

SEQ ID NO: 446524 - RNA, 19 nt, Artificial Sequence
  Description of Artificial Sequence: Synthetic oligonucleotide
auaugugagggaagaccag

SEQ ID NO: 446525 - RNA, 19 nt, Artificial Sequence
  Description of Artificial Sequence: Synthetic oligonucleotide
aacuacccuccaaacauuu

SEQ ID NO: 446526 - RNA, 19 nt, Artificial Sequence
  Description of Artificial Sequence: Synthetic oligonucleotide
aaacgacugcauugcugaa

SEQ ID NO: 446527 - RNA, 19 nt, Artificial Sequence
  Description of Artificial Sequence: Synthetic oligonucleotide
ccuauauaucccacuguac

SEQ ID NO: 446528 - RNA, 19 nt, Artificial Sequence
  Description of Artificial Sequence: Synthetic oligonucleotide
caggaacgaucaaauucug

SEQ ID NO: 446529 - RNA, 19 nt, Artificial Sequence
  Description of Artificial Sequence: Synthetic oligonucleotide
aucacguuagaggaaucaa

SEQ ID NO: 446530 - RNA, 19 nt, Artificial Sequence
  Description of Artificial Sequence: Synthetic oligonucleotide
agccucacccgcuguugcg

SEQ ID NO: 446531 - RNA, 19 nt, Artificial Sequence
  Description of Artificial Sequence: Synthetic oligonucleotide
auuagcuucugagucgcua

SEQ ID NO: 446532 - RNA, 19 nt, Artificial Sequence
  Description of Artificial Sequence: Synthetic oligonucleotide
ggaacuagagcagguuaag

SEQ ID NO: 446533 - RNA, 19 nt, Artificial Sequence
  Description of Artificial Sequence: Synthetic oligonucleotide
agcuaauuucuuagcuaag

SEQ ID NO: 446534 - RNA, 19 nt, Artificial Sequence
  Description of Artificial Sequence: Synthetic oligonucleotide
gguucacuagcuaaaaugu

SEQ ID NO: 446535 - RNA, 19 nt, Artificial Sequence
  Description of Artificial Sequence: Synthetic oligonucleotide
ccaccuauauaucccacug

SEQ ID NO: 446536 - RNA, 19 nt, Artificial Sequence
  Description of Artificial Sequence: Synthetic oligonucleotide
uucccgagaccgauacuuc

SEQ ID NO: 446537 - RNA, 19 nt, Artificial Sequence
  Description of Artificial Sequence: Synthetic oligonucleotide
cucugguucgaucccauaa

SEQ ID NO: 446538 - RNA, 19 nt, Artificial Sequence
  Description of Artificial Sequence: Synthetic oligonucleotide
auacuucggcucugcaccu

SEQ ID NO: 446539 - RNA, 19 nt, Artificial Sequence
  Description of Artificial Sequence: Synthetic oligonucleotide
agugguucacuagcuaaaa

SEQ ID NO: 446540 - RNA, 19 nt, Artificial Sequence
  Description of Artificial Sequence: Synthetic oligonucleotide
uccuuccugucgugaauac

SEQ ID NO: 446541 - RNA, 19 nt, Artificial Sequence
  Description of Artificial Sequence: Synthetic oligonucleotide
uagcuucugagucgcuaaa

SEQ ID NO: 446542 - RNA, 19 nt, Artificial Sequence
  Description of Artificial Sequence: Synthetic oligonucleotide
auugcugaacacauuucuu

SEQ ID NO: 446543 - RNA, 19 nt, Artificial Sequence
  Description of Artificial Sequence: Synthetic oligonucleotide
gucgugaauacuucaucua

SEQ ID NO: 446544 - RNA, 19 nt, Artificial Sequence
  Description of Artificial Sequence: Synthetic oligonucleotide
auagggaacuagagcaggu

SEQ ID NO: 446545 - RNA, 19 nt, Artificial Sequence
  Description of Artificial Sequence: Synthetic oligonucleotide
cacaaacgggcuuaauuua

SEQ ID NO: 446546 - RNA, 19 nt, Artificial Sequence
  Description of Artificial Sequence: Synthetic oligonucleotide
cuaucacguuagaggaauc

SEQ ID NO: 446547 - RNA, 19 nt, Artificial Sequence
  Description of Artificial Sequence: Synthetic oligonucleotide
aaacuacccuccaaacauu

SEQ ID NO: 446548 - RNA, 19 nt, Artificial Sequence
  Description of Artificial Sequence: Synthetic oligonucleotide
gguccggcggggcuguucg

SEQ ID NO: 446549 - RNA, 19 nt, Artificial Sequence
  Description of Artificial Sequence: Synthetic oligonucleotide
caguuaacucuuggacucc

SEQ ID NO: 446550 - RNA, 19 nt, Artificial Sequence
  Description of Artificial Sequence: Synthetic oligonucleotide
auacauugcugagugugua

SEQ ID NO: 446551 - RNA, 19 nt, Artificial Sequence
  Description of Artificial Sequence: Synthetic oligonucleotide
aguguguacaucagugguu

SEQ ID NO: 446552 - RNA, 19 nt, Artificial Sequence
  Description of Artificial Sequence: Synthetic oligonucleotide
cuaaucagucucuaugguu

SEQ ID NO: 446553 - RNA, 19 nt, Artificial Sequence
  Description of Artificial Sequence: Synthetic oligonucleotide
cugcucaauuagccaaaac

SEQ ID NO: 446554 - RNA, 19 nt, Artificial Sequence
  Description of Artificial Sequence: Synthetic oligonucleotide
caguccuucguuguaguga

SEQ ID NO: 446555 - RNA, 19 nt, Artificial Sequence
  Description of Artificial Sequence: Synthetic oligonucleotide
gcaauguuguauaguaaca

SEQ ID NO: 446556 - RNA, 19 nt, Artificial Sequence
  Description of Artificial Sequence: Synthetic oligonucleotide
agccgcggagccgaggccg

SEQ ID NO: 446557 - RNA, 19 nt, Artificial Sequence
  Description of Artificial Sequence: Synthetic oligonucleotide
gcuacucugguucgauccc

SEQ ID NO: 446558 - RNA, 19 nt, Artificial Sequence
  Description of Artificial Sequence: Synthetic oligonucleotide
gucuagcuaacuuaauauu

SEQ ID NO: 446559 - RNA, 19 nt, Artificial Sequence
  Description of Artificial Sequence: Synthetic oligonucleotide
aggaacgaucaaauucuga

SEQ ID NO: 446560 - RNA, 19 nt, Artificial Sequence
  Description of Artificial Sequence: Synthetic oligonucleotide
cagaaucucuaaacguaaa

SEQ ID NO: 446561 - RNA, 19 nt, Artificial Sequence
  Description of Artificial Sequence: Synthetic oligonucleotide
auugugguaaggaguguuu

SEQ ID NO: 446562 - RNA, 19 nt, Artificial Sequence
  Description of Artificial Sequence: Synthetic oligonucleotide
acuaccggcgucaccguca

SEQ ID NO: 446563 - RNA, 19 nt, Artificial Sequence
  Description of Artificial Sequence: Synthetic oligonucleotide
ccaggaacgaucaaauucu

SEQ ID NO: 446564 - RNA, 19 nt, Artificial Sequence
  Description of Artificial Sequence: Synthetic oligonucleotide
cugguucgaucccauaaaa

SEQ ID NO: 446565 - RNA, 19 nt, Artificial Sequence
  Description of Artificial Sequence: Synthetic oligonucleotide
auugccggucgcuccggcu

SEQ ID NO: 446566 - RNA, 19 nt, Artificial Sequence
  Description of Artificial Sequence: Synthetic oligonucleotide
ucgacgguccggcggggcu

SEQ ID NO: 446567 - RNA, 19 nt, Artificial Sequence
  Description of Artificial Sequence: Synthetic oligonucleotide
gcagcuaauuucuuagcua

SEQ ID NO: 446568 - RNA, 19 nt, Artificial Sequence
  Description of Artificial Sequence: Synthetic oligonucleotide
cagugguucacuagcuaaa

SEQ ID NO: 446569 - RNA, 19 nt, Artificial Sequence
  Description of Artificial Sequence: Synthetic oligonucleotide
cacgacacaaugaccgcaa

SEQ ID NO: 446570 - RNA, 19 nt, Artificial Sequence
  Description of Artificial Sequence: Synthetic oligonucleotide
cucuaaacguaaaacuguu

SEQ ID NO: 446571 - RNA, 19 nt, Artificial Sequence
  Description of Artificial Sequence: Synthetic oligonucleotide
cccgagaccgauacuucgg

SEQ ID NO: 446572 - RNA, 19 nt, Artificial Sequence
  Description of Artificial Sequence: Synthetic oligonucleotide
agcaggugucaaauaagaa

SEQ ID NO: 446573 - RNA, 19 nt, Artificial Sequence
  Description of Artificial Sequence: Synthetic oligonucleotide
guacaucagugguucacua

SEQ ID NO: 446574 - RNA, 19 nt, Artificial Sequence
  Description of Artificial Sequence: Synthetic oligonucleotide
uaaggaguguuuggcucau

SEQ ID NO: 446575 - RNA, 19 nt, Artificial Sequence
  Description of Artificial Sequence: Synthetic oligonucleotide
agagcuacucugguucgau

SEQ ID NO: 446576 - RNA, 19 nt, Artificial Sequence
  Description of Artificial Sequence: Synthetic oligonucleotide
uugguacguaagucacaaa

SEQ ID NO: 446577 - RNA, 19 nt, Artificial Sequence
  Description of Artificial Sequence: Synthetic oligonucleotide
caccggggaagccgcagag

SEQ ID NO: 446578 - RNA, 19 nt, Artificial Sequence
  Description of Artificial Sequence: Synthetic oligonucleotide
cgacacaaugaccgcaacg

SEQ ID NO: 446579 - RNA, 19 nt, Artificial Sequence
  Description of Artificial Sequence: Synthetic oligonucleotide
ggaugauauguugccagga

SEQ ID NO: 446580 - RNA, 19 nt, Artificial Sequence
  Description of Artificial Sequence: Synthetic oligonucleotide
cuaccggcgucaccgucac

SEQ ID NO: 446581 - RNA, 19 nt, Artificial Sequence
  Description of Artificial Sequence: Synthetic oligonucleotide
caccgucacgacacaauga

SEQ ID NO: 446582 - RNA, 19 nt, Artificial Sequence
  Description of Artificial Sequence: Synthetic oligonucleotide
cagauggccacuugcggua

SEQ ID NO: 446583 - RNA, 19 nt, Artificial Sequence
  Description of Artificial Sequence: Synthetic oligonucleotide
agcugucguggaguccugg

SEQ ID NO: 446584 - RNA, 19 nt, Artificial Sequence
  Description of Artificial Sequence: Synthetic oligonucleotide
caaugacuccucagaaucu

SEQ ID NO: 446585 - RNA, 19 nt, Artificial Sequence
  Description of Artificial Sequence: Synthetic oligonucleotide
gacaaacgacugcauugcu

SEQ ID NO: 446586 - RNA, 19 nt, Artificial Sequence
  Description of Artificial Sequence: Synthetic oligonucleotide
ggcuguucggccgaggcca

SEQ ID NO: 446587 - RNA, 19 nt, Artificial Sequence
  Description of Artificial Sequence: Synthetic oligonucleotide
cugagucgcuaaaggcauc

SEQ ID NO: 446588 - RNA, 19 nt, Artificial Sequence
  Description of Artificial Sequence: Synthetic oligonucleotide
gagacccuccaggcagccg

SEQ ID NO: 446589 - RNA, 19 nt, Artificial Sequence
  Description of Artificial Sequence: Synthetic oligonucleotide
gcuaagacaucuggaguca

SEQ ID NO: 446590 - RNA, 19 nt, Artificial Sequence
  Description of Artificial Sequence: Synthetic oligonucleotide
augggccggugcgaggccg

SEQ ID NO: 446591 - RNA, 19 nt, Artificial Sequence
  Description of Artificial Sequence: Synthetic oligonucleotide
guucccgagaccgauacuu

SEQ ID NO: 446592 - RNA, 19 nt, Artificial Sequence
  Description of Artificial Sequence: Synthetic oligonucleotide
cgauacuucggcucugcac

SEQ ID NO: 446593 - RNA, 19 nt, Artificial Sequence
  Description of Artificial Sequence: Synthetic oligonucleotide
gggcuuaauuuacaaagau

SEQ ID NO: 446594 - RNA, 19 nt, Artificial Sequence
  Description of Artificial Sequence: Synthetic oligonucleotide
acauucccuuaaagcaaug

SEQ ID NO: 446595 - RNA, 19 nt, Artificial Sequence
  Description of Artificial Sequence: Synthetic oligonucleotide
cccacuguaccaauaagcu

SEQ ID NO: 446596 - RNA, 19 nt, Artificial Sequence
  Description of Artificial Sequence: Synthetic oligonucleotide
aggccgccauugccggucg

SEQ ID NO: 446597 - RNA, 19 nt, Artificial Sequence
  Description of Artificial Sequence: Synthetic oligonucleotide
augugagggaagaccaguu

SEQ ID NO: 446598 - RNA, 19 nt, Artificial Sequence
  Description of Artificial Sequence: Synthetic oligonucleotide
ccgagaccgauacuucggc

SEQ ID NO: 446599 - RNA, 19 nt, Artificial Sequence
  Description of Artificial Sequence: Synthetic oligonucleotide
ccaauaagcuuuugauuaa

SEQ ID NO: 446600 - RNA, 19 nt, Artificial Sequence
  Description of Artificial Sequence: Synthetic oligonucleotide
cacuugcgguagauccuug

SEQ ID NO: 446601 - RNA, 19 nt, Artificial Sequence
  Description of Artificial Sequence: Synthetic oligonucleotide
aagccgcagaggucuuguu

SEQ ID NO: 446602 - RNA, 19 nt, Artificial Sequence
  Description of Artificial Sequence: Synthetic oligonucleotide
gcauuaucacauucccuua

SEQ ID NO: 446603 - RNA, 19 nt, Artificial Sequence
  Description of Artificial Sequence: Synthetic oligonucleotide
ccgucacgacacaaugacc

SEQ ID NO: 446604 - RNA, 19 nt, Artificial Sequence
  Description of Artificial Sequence: Synthetic oligonucleotide
gccgcagaggucuuguucu

SEQ ID NO: 446605 - RNA, 19 nt, Artificial Sequence
  Description of Artificial Sequence: Synthetic oligonucleotide
auaucccacuguaccaaua

SEQ ID NO: 446606 - RNA, 19 nt, Artificial Sequence
  Description of Artificial Sequence: Synthetic oligonucleotide
gaccgauacuucggcucug

SEQ ID NO: 446607 - RNA, 19 nt, Artificial Sequence
  Description of Artificial Sequence: Synthetic oligonucleotide
uucgacgguccggcggggc

SEQ ID NO: 446608 - RNA, 19 nt, Artificial Sequence
  Description of Artificial Sequence: Synthetic oligonucleotide
cuuuaucagcuggaugaua

SEQ ID NO: 446609 - RNA, 19 nt, Artificial Sequence
  Description of Artificial Sequence: Synthetic oligonucleotide
acucugguucgaucccaua

SEQ ID NO: 446610 - RNA, 19 nt, Artificial Sequence
  Description of Artificial Sequence: Synthetic oligonucleotide
guguguauuuugguacgua

SEQ ID NO: 446611 - RNA, 19 nt, Artificial Sequence
  Description of Artificial Sequence: Synthetic oligonucleotide
cuugcgguagauccuugau

SEQ ID NO: 446612 - RNA, 19 nt, Artificial Sequence
  Description of Artificial Sequence: Synthetic oligonucleotide
caccuauauaucccacugu

SEQ ID NO: 446613 - RNA, 19 nt, Artificial Sequence
  Description of Artificial Sequence: Synthetic oligonucleotide
ggucgcuccggcugucggc

SEQ ID NO: 446614 - RNA, 19 nt, Artificial Sequence
  Description of Artificial Sequence: Synthetic oligonucleotide
caccuaucauauuguggua

SEQ ID NO: 446615 - RNA, 19 nt, Artificial Sequence
  Description of Artificial Sequence: Synthetic oligonucleotide
ggaaaccacuaccggcguc

SEQ ID NO: 446616 - RNA, 19 nt, Artificial Sequence
  Description of Artificial Sequence: Synthetic oligonucleotide
gauauguugccaggauguu

SEQ ID NO: 446617 - RNA, 19 nt, Artificial Sequence
  Description of Artificial Sequence: Synthetic oligonucleotide
cacuaccggcgucaccguc

SEQ ID NO: 446618 - RNA, 19 nt, Artificial Sequence
  Description of Artificial Sequence: Synthetic oligonucleotide
cauguucccgagaccgaua

SEQ ID NO: 446619 - RNA, 19 nt, Artificial Sequence
  Description of Artificial Sequence: Synthetic oligonucleotide
cacccgcuguugcggaaac

SEQ ID NO: 446620 - RNA, 19 nt, Artificial Sequence
  Description of Artificial Sequence: Synthetic oligonucleotide
uaccggcgucaccgucacg

SEQ ID NO: 446621 - RNA, 19 nt, Artificial Sequence
  Description of Artificial Sequence: Synthetic oligonucleotide
aggccgucgaggccgccau

SEQ ID NO: 446622 - RNA, 19 nt, Artificial Sequence
  Description of Artificial Sequence: Synthetic oligonucleotide
gcugucguggaguccugga

SEQ ID NO: 446623 - RNA, 19 nt, Artificial Sequence
  Description of Artificial Sequence: Synthetic oligonucleotide
gcuauccuuccugucguga

SEQ ID NO: 446624 - RNA, 19 nt, Artificial Sequence
  Description of Artificial Sequence: Synthetic oligonucleotide
cacagccgaugccgcgcgg

SEQ ID NO: 446625 - RNA, 19 nt, Artificial Sequence
  Description of Artificial Sequence: Synthetic oligonucleotide
gugcgaggccgucgaggcc

SEQ ID NO: 446626 - RNA, 19 nt, Artificial Sequence
  Description of Artificial Sequence: Synthetic oligonucleotide
uggccacuugcgguagauc

SEQ ID NO: 446627 - RNA, 19 nt, Artificial Sequence
  Description of Artificial Sequence: Synthetic oligonucleotide
cuucgacgguccggcgggg

SEQ ID NO: 446628 - RNA, 19 nt, Artificial Sequence
  Description of Artificial Sequence: Synthetic oligonucleotide
accgugcaaaagagccuca

SEQ ID NO: 446629 - RNA, 19 nt, Artificial Sequence
  Description of Artificial Sequence: Synthetic oligonucleotide
guccuucguuguagugaag

SEQ ID NO: 446630 - RNA, 19 nt, Artificial Sequence
  Description of Artificial Sequence: Synthetic oligonucleotide
cagcugucguggaguccug

SEQ ID NO: 446631 - RNA, 19 nt, Artificial Sequence
  Description of Artificial Sequence: Synthetic oligonucleotide
ccgugcaaaagagccucag

SEQ ID NO: 446632 - RNA, 19 nt, Artificial Sequence
  Description of Artificial Sequence: Synthetic oligonucleotide
caaugaccgcaacgccaca

SEQ ID NO: 446633 - RNA, 19 nt, Artificial Sequence
  Description of Artificial Sequence: Synthetic oligonucleotide
ccucaguuaauuguuuccu

SEQ ID NO: 446634 - RNA, 19 nt, Artificial Sequence
  Description of Artificial Sequence: Synthetic oligonucleotide
agccgaggccgggcuacag

SEQ ID NO: 446635 - RNA, 19 nt, Artificial Sequence
  Description of Artificial Sequence: Synthetic oligonucleotide
ccgcuguugcggaaaccac

SEQ ID NO: 446636 - RNA, 19 nt, Artificial Sequence
  Description of Artificial Sequence: Synthetic oligonucleotide
ccuucguuguagugaagcu

SEQ ID NO: 446637 - RNA, 19 nt, Artificial Sequence
  Description of Artificial Sequence: Synthetic oligonucleotide
cuaagacaucuggagucau

SEQ ID NO: 446638 - RNA, 19 nt, Artificial Sequence
  Description of Artificial Sequence: Synthetic oligonucleotide
gccggugcgaggccgucga

SEQ ID NO: 446639 - RNA, 19 nt, Artificial Sequence
  Description of Artificial Sequence: Synthetic oligonucleotide
guuuugcagauggccacuu

SEQ ID NO: 446640 - RNA, 19 nt, Artificial Sequence
  Description of Artificial Sequence: Synthetic oligonucleotide
gcugucggcucagggucgc

SEQ ID NO: 446641 - RNA, 19 nt, Artificial Sequence
  Description of Artificial Sequence: Synthetic oligonucleotide
cgccauugccggucgcucc

SEQ ID NO: 446642 - RNA, 19 nt, Artificial Sequence
  Description of Artificial Sequence: Synthetic oligonucleotide
cauuagcuucugagucgcu

SEQ ID NO: 446643 - RNA, 19 nt, Artificial Sequence
  Description of Artificial Sequence: Synthetic oligonucleotide
ccgggcuacagcagccuca

SEQ ID NO: 446644 - RNA, 19 nt, Artificial Sequence
  Description of Artificial Sequence: Synthetic oligonucleotide
ucgcuccggcugucggcuc

SEQ ID NO: 446645 - RNA, 19 nt, Artificial Sequence
  Description of Artificial Sequence: Synthetic oligonucleotide
ccgucgaggccgccauugc

SEQ ID NO: 446646 - RNA, 19 nt, Artificial Sequence
  Description of Artificial Sequence: Synthetic oligonucleotide
ccccaaugacauuauuuau

SEQ ID NO: 446647 - RNA, 19 nt, Artificial Sequence
  Description of Artificial Sequence: Synthetic oligonucleotide
cggugcgaggccgucgagg

SEQ ID NO: 446648 - RNA, 19 nt, Artificial Sequence
  Description of Artificial Sequence: Synthetic oligonucleotide
cagagggaauagggaacua

SEQ ID NO: 446649 - RNA, 19 nt, Artificial Sequence
  Description of Artificial Sequence: Synthetic oligonucleotide
ggcggggcuguucggccga

SEQ ID NO: 446650 - RNA, 19 nt, Artificial Sequence
  Description of Artificial Sequence: Synthetic oligonucleotide
ccacuguaccaauaagcuu

SEQ ID NO: 446651 - RNA, 19 nt, Artificial Sequence
  Description of Artificial Sequence: Synthetic oligonucleotide
gggucgcagcugucgugga

SEQ ID NO: 446652 - RNA, 19 nt, Artificial Sequence
  Description of Artificial Sequence: Synthetic oligonucleotide
gagucgcuaaaggcaucuu

SEQ ID NO: 446653 - RNA, 19 nt, Artificial Sequence
  Description of Artificial Sequence: Synthetic oligonucleotide
gacgguccggcggggcugu

SEQ ID NO: 446654 - RNA, 19 nt, Artificial Sequence
  Description of Artificial Sequence: Synthetic oligonucleotide
ccgauacuucggcucugca

SEQ ID NO: 446655 - RNA, 19 nt, Artificial Sequence
  Description of Artificial Sequence: Synthetic oligonucleotide
gcuguucggccgaggccac

SEQ ID NO: 446656 - RNA, 19 nt, Artificial Sequence
  Description of Artificial Sequence: Synthetic oligonucleotide
ggccaacggccuuugccau

SEQ ID NO: 446657 - RNA, 19 nt, Artificial Sequence
  Description of Artificial Sequence: Synthetic oligonucleotide
cgugcaaaagagccucagu

SEQ ID NO: 446658 - RNA, 19 nt, Artificial Sequence
  Description of Artificial Sequence: Synthetic oligonucleotide
gcgucaccgucacgacaca

SEQ ID NO: 446659 - RNA, 19 nt, Artificial Sequence
  Description of Artificial Sequence: Synthetic oligonucleotide
ccuuccugucgugaauacu

SEQ ID NO: 446660 - RNA, 19 nt, Artificial Sequence
  Description of Artificial Sequence: Synthetic oligonucleotide
cgagaccgauacuucggcu

SEQ ID NO: 446661 - RNA, 19 nt, Artificial Sequence
  Description of Artificial Sequence: Synthetic oligonucleotide
ccggugcgaggccgucgag

SEQ ID NO: 446662 - RNA, 19 nt, Artificial Sequence
  Description of Artificial Sequence: Synthetic oligonucleotide
cgacgguccggcggggcug

SEQ ID NO: 446663 - RNA, 19 nt, Artificial Sequence
  Description of Artificial Sequence: Synthetic oligonucleotide
ccgaggccaccaccgggga

SEQ ID NO: 446664 - RNA, 19 nt, Artificial Sequence
  Description of Artificial Sequence: Synthetic oligonucleotide
ccgaugccgcgcggcgggc

SEQ ID NO: 446665 - RNA, 19 nt, Artificial Sequence
  Description of Artificial Sequence: Synthetic oligonucleotide
cgaggccgucgaggccgcc

SEQ ID NO: 446666 - RNA, 19 nt, Artificial Sequence
  Description of Artificial Sequence: Synthetic oligonucleotide
ccccacaaacgggcuuaau

SEQ ID NO: 446667 - RNA, 19 nt, Artificial Sequence
  Description of Artificial Sequence: Synthetic oligonucleotide
ccgcaacgccacagccgau

SEQ ID NO: 446668 - RNA, 19 nt, Artificial Sequence
  Description of Artificial Sequence: Synthetic oligonucleotide
aaauauaccacuuugaugu

SEQ ID NO: 446669 - RNA, 19 nt, Artificial Sequence
  Description of Artificial Sequence: Synthetic oligonucleotide
uuuacauagcauaugaggg

SEQ ID NO: 446670 - RNA, 19 nt, Artificial Sequence
  Description of Artificial Sequence: Synthetic oligonucleotide
auuuuaacuaucuugaugu

SEQ ID NO: 446671 - RNA, 19 nt, Artificial Sequence
  Description of Artificial Sequence: Synthetic oligonucleotide
aaguuucgaauacaaagac

SEQ ID NO: 446672 - RNA, 19 nt, Artificial Sequence
  Description of Artificial Sequence: Synthetic oligonucleotide
aaauauguacucauuggcc

SEQ ID NO: 446673 - RNA, 19 nt, Artificial Sequence
  Description of Artificial Sequence: Synthetic oligonucleotide
acuaucuugauguguagcc

SEQ ID NO: 446674 - RNA, 19 nt, Artificial Sequence
  Description of Artificial Sequence: Synthetic oligonucleotide
caugauuugggucuuaugc

SEQ ID NO: 446675 - RNA, 19 nt, Artificial Sequence
  Description of Artificial Sequence: Synthetic oligonucleotide
uauuuuaacuaucuugaug

SEQ ID NO: 446676 - RNA, 19 nt, Artificial Sequence
  Description of Artificial Sequence: Synthetic oligonucleotide
ucgaauacaaagacuacag

SEQ ID NO: 446677 - RNA, 19 nt, Artificial Sequence
  Description of Artificial Sequence: Synthetic oligonucleotide
ucuuaagccacaaaccagc

SEQ ID NO: 446678 - RNA, 19 nt, Artificial Sequence
  Description of Artificial Sequence: Synthetic oligonucleotide
ucaaguaauaucccaaaac

SEQ ID NO: 446679 - RNA, 19 nt, Artificial Sequence
  Description of Artificial Sequence: Synthetic oligonucleotide
accacaauaaguuacuugu

SEQ ID NO: 446680 - RNA, 19 nt, Artificial Sequence
  Description of Artificial Sequence: Synthetic oligonucleotide
cauaaauccaaugauggcc

SEQ ID NO: 446681 - RNA, 19 nt, Artificial Sequence
  Description of Artificial Sequence: Synthetic oligonucleotide
aaucguuuaacagccgggc

SEQ ID NO: 446682 - RNA, 19 nt, Artificial Sequence
  Description of Artificial Sequence: Synthetic oligonucleotide
ucaaucguuuaacagccgg

SEQ ID NO: 446683 - RNA, 19 nt, Artificial Sequence
  Description of Artificial Sequence: Synthetic oligonucleotide
aauaaugcuuggugguuuc

SEQ ID NO: 446684 - RNA, 19 nt, Artificial Sequence
  Description of Artificial Sequence: Synthetic oligonucleotide
ucuugccuacuucaaaacg

SEQ ID NO: 446685 - RNA, 19 nt, Artificial Sequence
  Description of Artificial Sequence: Synthetic oligonucleotide
uuaacuaucuugaugugua

SEQ ID NO: 446686 - RNA, 19 nt, Artificial Sequence
  Description of Artificial Sequence: Synthetic oligonucleotide
auauaagagcugccaaugc

SEQ ID NO: 446687 - RNA, 19 nt, Artificial Sequence
  Description of Artificial Sequence: Synthetic oligonucleotide
aacuaucuugauguguagc

SEQ ID NO: 446688 - RNA, 19 nt, Artificial Sequence
  Description of Artificial Sequence: Synthetic oligonucleotide
uuaccuaccagcuucuaca

SEQ ID NO: 446689 - RNA, 19 nt, Artificial Sequence
  Description of Artificial Sequence: Synthetic oligonucleotide
aucgcuacaagcaaaacag

SEQ ID NO: 446690 - RNA, 19 nt, Artificial Sequence
  Description of Artificial Sequence: Synthetic oligonucleotide
aaacuaauuugucucgcca

SEQ ID NO: 446691 - RNA, 19 nt, Artificial Sequence
  Description of Artificial Sequence: Synthetic oligonucleotide
aauuugucucgccaguucu

SEQ ID NO: 446692 - RNA, 19 nt, Artificial Sequence
  Description of Artificial Sequence: Synthetic oligonucleotide
uaaccuagugcucagcaca

SEQ ID NO: 446693 - RNA, 19 nt, Artificial Sequence
  Description of Artificial Sequence: Synthetic oligonucleotide
ucaguagaauaaaacaauc

SEQ ID NO: 446694 - RNA, 19 nt, Artificial Sequence
  Description of Artificial Sequence: Synthetic oligonucleotide
uauccgucggaauauaaga

SEQ ID NO: 446695 - RNA, 19 nt, Artificial Sequence
  Description of Artificial Sequence: Synthetic oligonucleotide
caaguaauaucccaaaaca

SEQ ID NO: 446696 - RNA, 19 nt, Artificial Sequence
  Description of Artificial Sequence: Synthetic oligonucleotide
ugauguguagccauaugcu

SEQ ID NO: 446697 - RNA, 19 nt, Artificial Sequence
  Description of Artificial Sequence: Synthetic oligonucleotide
uccauuagccguuagcaga

SEQ ID NO: 446698 - RNA, 19 nt, Artificial Sequence
  Description of Artificial Sequence: Synthetic oligonucleotide
aagcaugcuauuuuaacua

SEQ ID NO: 446699 - RNA, 19 nt, Artificial Sequence
  Description of Artificial Sequence: Synthetic oligonucleotide
auaaguuacuuguuuguga

SEQ ID NO: 446700 - RNA, 19 nt, Artificial Sequence
  Description of Artificial Sequence: Synthetic oligonucleotide
aucuaagcaggacaaacug

SEQ ID NO: 446701 - RNA, 19 nt, Artificial Sequence
  Description of Artificial Sequence: Synthetic oligonucleotide
uuacauagcauaugaggga

SEQ ID NO: 446702 - RNA, 19 nt, Artificial Sequence
  Description of Artificial Sequence: Synthetic oligonucleotide
uuugugaaguagauuaaau

SEQ ID NO: 446703 - RNA, 19 nt, Artificial Sequence
  Description of Artificial Sequence: Synthetic oligonucleotide
agcucauugacuccaacug

SEQ ID NO: 446704 - RNA, 19 nt, Artificial Sequence
  Description of Artificial Sequence: Synthetic oligonucleotide
gagguagccaguuagcgac

SEQ ID NO: 446705 - RNA, 19 nt, Artificial Sequence
  Description of Artificial Sequence: Synthetic oligonucleotide
gauuuggaaagcucaugag

SEQ ID NO: 446706 - RNA, 19 nt, Artificial Sequence
  Description of Artificial Sequence: Synthetic oligonucleotide
uccuccaucaaaaucggaa

SEQ ID NO: 446707 - RNA, 19 nt, Artificial Sequence
  Description of Artificial Sequence: Synthetic oligonucleotide
uguaaucuagagaaccuau

SEQ ID NO: 446708 - RNA, 19 nt, Artificial Sequence
  Description of Artificial Sequence: Synthetic oligonucleotide
uuggcauaaauccaaugau

SEQ ID NO: 446709 - RNA, 19 nt, Artificial Sequence
  Description of Artificial Sequence: Synthetic oligonucleotide
auaaccuagugcucagcac

SEQ ID NO: 446710 - RNA, 19 nt, Artificial Sequence
  Description of Artificial Sequence: Synthetic oligonucleotide
caguuagcgacagugaggg

SEQ ID NO: 446711 - RNA, 19 nt, Artificial Sequence
  Description of Artificial Sequence: Synthetic oligonucleotide
aaagagugguuuaagucug

SEQ ID NO: 446712 - RNA, 19 nt, Artificial Sequence
  Description of Artificial Sequence: Synthetic oligonucleotide
cauuauaacucaaagucaa

SEQ ID NO: 446713 - RNA, 19 nt, Artificial Sequence
  Description of Artificial Sequence: Synthetic oligonucleotide
uuaacagccgggcucuuca

SEQ ID NO: 446714 - RNA, 19 nt, Artificial Sequence
  Description of Artificial Sequence: Synthetic oligonucleotide
augagcauggcagacccgc

SEQ ID NO: 446715 - RNA, 19 nt, Artificial Sequence
  Description of Artificial Sequence: Synthetic oligonucleotide
uguuguagguagaucgucu

SEQ ID NO: 446716 - RNA, 19 nt, Artificial Sequence
  Description of Artificial Sequence: Synthetic oligonucleotide
uuucaucaaucguuuaaca

SEQ ID NO: 446717 - RNA, 19 nt, Artificial Sequence
  Description of Artificial Sequence: Synthetic oligonucleotide
gauccuaagacuuuaccua

SEQ ID NO: 446718 - RNA, 19 nt, Artificial Sequence
  Description of Artificial Sequence: Synthetic oligonucleotide
ucggcgauagucuuuccag

SEQ ID NO: 446719 - RNA, 19 nt, Artificial Sequence
  Description of Artificial Sequence: Synthetic oligonucleotide
agauauauccgucggaaua

SEQ ID NO: 446720 - RNA, 19 nt, Artificial Sequence
  Description of Artificial Sequence: Synthetic oligonucleotide
aaccuaugggcuucccuuc

SEQ ID NO: 446721 - RNA, 19 nt, Artificial Sequence
  Description of Artificial Sequence: Synthetic oligonucleotide
uuuaccuaccagcuucuac

SEQ ID NO: 446722 - RNA, 19 nt, Artificial Sequence
  Description of Artificial Sequence: Synthetic oligonucleotide
uccgucggaauauaagagc

SEQ ID NO: 446723 - RNA, 19 nt, Artificial Sequence
  Description of Artificial Sequence: Synthetic oligonucleotide
aaucuaagcaggacaaacu

SEQ ID NO: 446724 - RNA, 19 nt, Artificial Sequence
  Description of Artificial Sequence: Synthetic oligonucleotide
cucauugacuccaacugug

SEQ ID NO: 446725 - RNA, 19 nt, Artificial Sequence
  Description of Artificial Sequence: Synthetic oligonucleotide
ucucuccuauaaaugacac

SEQ ID NO: 446726 - RNA, 19 nt, Artificial Sequence
  Description of Artificial Sequence: Synthetic oligonucleotide
caaucguuuaacagccggg

SEQ ID NO: 446727 - RNA, 19 nt, Artificial Sequence
  Description of Artificial Sequence: Synthetic oligonucleotide
uuaagucugauucggcgau

SEQ ID NO: 446728 - RNA, 19 nt, Artificial Sequence
  Description of Artificial Sequence: Synthetic oligonucleotide
acguccauuagccguuagc

SEQ ID NO: 446729 - RNA, 19 nt, Artificial Sequence
  Description of Artificial Sequence: Synthetic oligonucleotide
uuagaucgcuacaagcaaa

SEQ ID NO: 446730 - RNA, 19 nt, Artificial Sequence
  Description of Artificial Sequence: Synthetic oligonucleotide
aaucaaccuauuucuuggu

SEQ ID NO: 446731 - RNA, 19 nt, Artificial Sequence
  Description of Artificial Sequence: Synthetic oligonucleotide
agaucacacaauaaccuag

SEQ ID NO: 446732 - RNA, 19 nt, Artificial Sequence
  Description of Artificial Sequence: Synthetic oligonucleotide
acauggagauccuaagacu

SEQ ID NO: 446733 - RNA, 19 nt, Artificial Sequence
  Description of Artificial Sequence: Synthetic oligonucleotide
ucguuuaacagccgggcuc

SEQ ID NO: 446734 - RNA, 19 nt, Artificial Sequence
  Description of Artificial Sequence: Synthetic oligonucleotide
auaaauccaaugauggcca

SEQ ID NO: 446735 - RNA, 19 nt, Artificial Sequence
  Description of Artificial Sequence: Synthetic oligonucleotide
cacuauucguccaugauaa

SEQ ID NO: 446736 - RNA, 19 nt, Artificial Sequence
  Description of Artificial Sequence: Synthetic oligonucleotide
acgaugugccagcuguagc

SEQ ID NO: 446737 - RNA, 19 nt, Artificial Sequence
  Description of Artificial Sequence: Synthetic oligonucleotide
uguuugugaaguagauuaa

SEQ ID NO: 446738 - RNA, 19 nt, Artificial Sequence
  Description of Artificial Sequence: Synthetic oligonucleotide
aagucugauucggcgauag

SEQ ID NO: 446739 - RNA, 19 nt, Artificial Sequence
  Description of Artificial Sequence: Synthetic oligonucleotide
uagaucgcuacaagcaaaa

SEQ ID NO: 446740 - RNA, 19 nt, Artificial Sequence
  Description of Artificial Sequence: Synthetic oligonucleotide
uuguagcgggucuccaugg

SEQ ID NO: 446741 - RNA, 19 nt, Artificial Sequence
  Description of Artificial Sequence: Synthetic oligonucleotide
auacuuagguuauacccaa

SEQ ID NO: 446742 - RNA, 19 nt, Artificial Sequence
  Description of Artificial Sequence: Synthetic oligonucleotide
aucuguuggaucuuucaau

SEQ ID NO: 446743 - RNA, 19 nt, Artificial Sequence
  Description of Artificial Sequence: Synthetic oligonucleotide
uauauccgucggaauauaa

SEQ ID NO: 446744 - RNA, 19 nt, Artificial Sequence
  Description of Artificial Sequence: Synthetic oligonucleotide
ucggaauauaagagcugcc

SEQ ID NO: 446745 - RNA, 19 nt, Artificial Sequence
  Description of Artificial Sequence: Synthetic oligonucleotide
uucggcgauagucuuucca

SEQ ID NO: 446746 - RNA, 19 nt, Artificial Sequence
  Description of Artificial Sequence: Synthetic oligonucleotide
uugccuacuucaaaacguc

SEQ ID NO: 446747 - RNA, 19 nt, Artificial Sequence
  Description of Artificial Sequence: Synthetic oligonucleotide
uucucgguaugauuggcuc

SEQ ID NO: 446748 - RNA, 19 nt, Artificial Sequence
  Description of Artificial Sequence: Synthetic oligonucleotide
auauccgucggaauauaag

SEQ ID NO: 446749 - RNA, 19 nt, Artificial Sequence
  Description of Artificial Sequence: Synthetic oligonucleotide
ugccuacuucaaaacgucc

SEQ ID NO: 446750 - RNA, 19 nt, Artificial Sequence
  Description of Artificial Sequence: Synthetic oligonucleotide
guacucauuggccagauau

SEQ ID NO: 446751 - RNA, 19 nt, Artificial Sequence
  Description of Artificial Sequence: Synthetic oligonucleotide
gaauauaagagcugccaau

SEQ ID NO: 446752 - RNA, 19 nt, Artificial Sequence
  Description of Artificial Sequence: Synthetic oligonucleotide
aucacacaauaaccuagug

SEQ ID NO: 446753 - RNA, 19 nt, Artificial Sequence
  Description of Artificial Sequence: Synthetic oligonucleotide
cuaagacuuuaccuaccag

SEQ ID NO: 446754 - RNA, 19 nt, Artificial Sequence
  Description of Artificial Sequence: Synthetic oligonucleotide
auguuguagguagaucguc

SEQ ID NO: 446755 - RNA, 19 nt, Artificial Sequence
  Description of Artificial Sequence: Synthetic oligonucleotide
uaguaagacaaggaacuau

SEQ ID NO: 446756 - RNA, 19 nt, Artificial Sequence
  Description of Artificial Sequence: Synthetic oligonucleotide
uggaauuaaggggcuaaac

SEQ ID NO: 446757 - RNA, 19 nt, Artificial Sequence
  Description of Artificial Sequence: Synthetic oligonucleotide
ugccuauagcacaaugaau

SEQ ID NO: 446758 - RNA, 19 nt, Artificial Sequence
  Description of Artificial Sequence: Synthetic oligonucleotide
cgugguaaugaucuguugg

SEQ ID NO: 446759 - RNA, 19 nt, Artificial Sequence
  Description of Artificial Sequence: Synthetic oligonucleotide
guccauuagccguuagcag

SEQ ID NO: 446760 - RNA, 19 nt, Artificial Sequence
  Description of Artificial Sequence: Synthetic oligonucleotide
aguuucgaauacaaagacu

SEQ ID NO: 446761 - RNA, 19 nt, Artificial Sequence
  Description of Artificial Sequence: Synthetic oligonucleotide
gauucggcgauagucuuuc

SEQ ID NO: 446762 - RNA, 19 nt, Artificial Sequence
  Description of Artificial Sequence: Synthetic oligonucleotide
gaagugccauucaaauaag

SEQ ID NO: 446763 - RNA, 19 nt, Artificial Sequence
  Description of Artificial Sequence: Synthetic oligonucleotide
aaaacguccauuagccguu

SEQ ID NO: 446764 - RNA, 19 nt, Artificial Sequence
  Description of Artificial Sequence: Synthetic oligonucleotide
caaaacguccauuagccgu

SEQ ID NO: 446765 - RNA, 19 nt, Artificial Sequence
  Description of Artificial Sequence: Synthetic oligonucleotide
agcaugcuauuuuaacuau

SEQ ID NO: 446766 - RNA, 19 nt, Artificial Sequence
  Description of Artificial Sequence: Synthetic oligonucleotide
gacaggguuauaaaggccu

SEQ ID NO: 446767 - RNA, 19 nt, Artificial Sequence
  Description of Artificial Sequence: Synthetic oligonucleotide
cauacgaugugccagcugu

SEQ ID NO: 446768 - RNA, 19 nt, Artificial Sequence
  Description of Artificial Sequence: Synthetic oligonucleotide
uacucauuggccagauaua

SEQ ID NO: 446769 - RNA, 19 nt, Artificial Sequence
  Description of Artificial Sequence: Synthetic oligonucleotide
ucuaacugugaagugccau

SEQ ID NO: 446770 - RNA, 19 nt, Artificial Sequence
  Description of Artificial Sequence: Synthetic oligonucleotide
cuugccuacuucaaaacgu

SEQ ID NO: 446771 - RNA, 19 nt, Artificial Sequence
  Description of Artificial Sequence: Synthetic oligonucleotide
gacaccgcccaguccagcc

SEQ ID NO: 446772 - RNA, 19 nt, Artificial Sequence
  Description of Artificial Sequence: Synthetic oligonucleotide
aucguuuaacagccgggcu

SEQ ID NO: 446773 - RNA, 19 nt, Artificial Sequence
  Description of Artificial Sequence: Synthetic oligonucleotide
cuuagaucgcuacaagcaa

SEQ ID NO: 446774 - RNA, 19 nt, Artificial Sequence
  Description of Artificial Sequence: Synthetic oligonucleotide
auccgucggaauauaagag

SEQ ID NO: 446775 - RNA, 19 nt, Artificial Sequence
  Description of Artificial Sequence: Synthetic oligonucleotide
gugucuaucagaugcuaaa

SEQ ID NO: 446776 - RNA, 19 nt, Artificial Sequence
  Description of Artificial Sequence: Synthetic oligonucleotide
cuuuucauuugugugcaca

SEQ ID NO: 446777 - RNA, 19 nt, Artificial Sequence
  Description of Artificial Sequence: Synthetic oligonucleotide
agcacuauucguccaugau

SEQ ID NO: 446778 - RNA, 19 nt, Artificial Sequence
  Description of Artificial Sequence: Synthetic oligonucleotide
agaucgcuacaagcaaaac

SEQ ID NO: 446779 - RNA, 19 nt, Artificial Sequence
  Description of Artificial Sequence: Synthetic oligonucleotide
aacguccauuagccguuag

SEQ ID NO: 446780 - RNA, 19 nt, Artificial Sequence
  Description of Artificial Sequence: Synthetic oligonucleotide
gauauauccgucggaauau

SEQ ID NO: 446781 - RNA, 19 nt, Artificial Sequence
  Description of Artificial Sequence: Synthetic oligonucleotide
auuagccguuagcagaaua

SEQ ID NO: 446782 - RNA, 19 nt, Artificial Sequence
  Description of Artificial Sequence: Synthetic oligonucleotide
gcuugaaucacuuccagau

SEQ ID NO: 446783 - RNA, 19 nt, Artificial Sequence
  Description of Artificial Sequence: Synthetic oligonucleotide
ggaauauaagagcugccaa

SEQ ID NO: 446784 - RNA, 19 nt, Artificial Sequence
  Description of Artificial Sequence: Synthetic oligonucleotide
agcaaccgagucucagcuc

SEQ ID NO: 446785 - RNA, 19 nt, Artificial Sequence
  Description of Artificial Sequence: Synthetic oligonucleotide
aucaaccuauuucuuggua

SEQ ID NO: 446786 - RNA, 19 nt, Artificial Sequence
  Description of Artificial Sequence: Synthetic oligonucleotide
ggccagauauauccgucgg

SEQ ID NO: 446787 - RNA, 19 nt, Artificial Sequence
  Description of Artificial Sequence: Synthetic oligonucleotide
agguuauacccaaugcaga

SEQ ID NO: 446788 - RNA, 19 nt, Artificial Sequence
  Description of Artificial Sequence: Synthetic oligonucleotide
auucggcgauagucuuucc

SEQ ID NO: 446789 - RNA, 19 nt, Artificial Sequence
  Description of Artificial Sequence: Synthetic oligonucleotide
cugggcgugguaaugaucu

SEQ ID NO: 446790 - RNA, 19 nt, Artificial Sequence
  Description of Artificial Sequence: Synthetic oligonucleotide
gcuaaacugaggcuuuaac

SEQ ID NO: 446791 - RNA, 19 nt, Artificial Sequence
  Description of Artificial Sequence: Synthetic oligonucleotide
uugucucgccaguucuuug

SEQ ID NO: 446792 - RNA, 19 nt, Artificial Sequence
  Description of Artificial Sequence: Synthetic oligonucleotide
agccguuagcagaauaaug

SEQ ID NO: 446793 - RNA, 19 nt, Artificial Sequence
  Description of Artificial Sequence: Synthetic oligonucleotide
aguuguagcgggucuccau

SEQ ID NO: 446794 - RNA, 19 nt, Artificial Sequence
  Description of Artificial Sequence: Synthetic oligonucleotide
guagaucgucuugugaauc

SEQ ID NO: 446795 - RNA, 19 nt, Artificial Sequence
  Description of Artificial Sequence: Synthetic oligonucleotide
uacaugauuugggucuuau

SEQ ID NO: 446796 - RNA, 19 nt, Artificial Sequence
  Description of Artificial Sequence: Synthetic oligonucleotide
cacacugagguggugauaa

SEQ ID NO: 446797 - RNA, 19 nt, Artificial Sequence
  Description of Artificial Sequence: Synthetic oligonucleotide
ccacguacagaagauuugg

SEQ ID NO: 446798 - RNA, 19 nt, Artificial Sequence
  Description of Artificial Sequence: Synthetic oligonucleotide
auuauaacucaaagucaaa

SEQ ID NO: 446799 - RNA, 19 nt, Artificial Sequence
  Description of Artificial Sequence: Synthetic oligonucleotide
accuauuucuugguaugga

SEQ ID NO: 446800 - RNA, 19 nt, Artificial Sequence
  Description of Artificial Sequence: Synthetic oligonucleotide
aguuagcgacagugagggg

SEQ ID NO: 446801 - RNA, 19 nt, Artificial Sequence
  Description of Artificial Sequence: Synthetic oligonucleotide
ugauucggcgauagucuuu

SEQ ID NO: 446802 - RNA, 19 nt, Artificial Sequence
  Description of Artificial Sequence: Synthetic oligonucleotide
uuugucucgccaguucuuu

SEQ ID NO: 446803 - RNA, 19 nt, Artificial Sequence
  Description of Artificial Sequence: Synthetic oligonucleotide
aagggugcuccagauggau

SEQ ID NO: 446804 - RNA, 19 nt, Artificial Sequence
  Description of Artificial Sequence: Synthetic oligonucleotide
ucgucuugugaaucauuua

SEQ ID NO: 446805 - RNA, 19 nt, Artificial Sequence
  Description of Artificial Sequence: Synthetic oligonucleotide
caauaaccuagugcucagc

SEQ ID NO: 446806 - RNA, 19 nt, Artificial Sequence
  Description of Artificial Sequence: Synthetic oligonucleotide
cuaucuugauguguagcca

SEQ ID NO: 446807 - RNA, 19 nt, Artificial Sequence
  Description of Artificial Sequence: Synthetic oligonucleotide
cagguguguaaucuagaga

SEQ ID NO: 446808 - RNA, 19 nt, Artificial Sequence
  Description of Artificial Sequence: Synthetic oligonucleotide
gaucacacaauaaccuagu

SEQ ID NO: 446809 - RNA, 19 nt, Artificial Sequence
  Description of Artificial Sequence: Synthetic oligonucleotide
cuuaggagccgguugggua

SEQ ID NO: 446810 - RNA, 19 nt, Artificial Sequence
  Description of Artificial Sequence: Synthetic oligonucleotide
uguagcacccuggaauguu

SEQ ID NO: 446811 - RNA, 19 nt, Artificial Sequence
  Description of Artificial Sequence: Synthetic oligonucleotide
guggugauaacagcauauc

SEQ ID NO: 446812 - RNA, 19 nt, Artificial Sequence
  Description of Artificial Sequence: Synthetic oligonucleotide
uuuaacagccgggcucuuc

SEQ ID NO: 446813 - RNA, 19 nt, Artificial Sequence
  Description of Artificial Sequence: Synthetic oligonucleotide
guuggguagguuguggcaa

SEQ ID NO: 446814 - RNA, 19 nt, Artificial Sequence
  Description of Artificial Sequence: Synthetic oligonucleotide
aaacaauacuuagguuaua

SEQ ID NO: 446815 - RNA, 19 nt, Artificial Sequence
  Description of Artificial Sequence: Synthetic oligonucleotide
guagcacccuggaauguug

SEQ ID NO: 446816 - RNA, 19 nt, Artificial Sequence
  Description of Artificial Sequence: Synthetic oligonucleotide
guggaggaccuucucugac

SEQ ID NO: 446817 - RNA, 19 nt, Artificial Sequence
  Description of Artificial Sequence: Synthetic oligonucleotide
aagccacaaaccagcauua

SEQ ID NO: 446818 - RNA, 19 nt, Artificial Sequence
  Description of Artificial Sequence: Synthetic oligonucleotide
gcuccauacgaugugccag

SEQ ID NO: 446819 - RNA, 19 nt, Artificial Sequence
  Description of Artificial Sequence: Synthetic oligonucleotide
cccucuaacugugaagugc

SEQ ID NO: 446820 - RNA, 19 nt, Artificial Sequence
  Description of Artificial Sequence: Synthetic oligonucleotide
aagagugguuuaagucuga

SEQ ID NO: 446821 - RNA, 19 nt, Artificial Sequence
  Description of Artificial Sequence: Synthetic oligonucleotide
acccaaugcagaauguuua

SEQ ID NO: 446822 - RNA, 19 nt, Artificial Sequence
  Description of Artificial Sequence: Synthetic oligonucleotide
acaggguuauaaaggccug

SEQ ID NO: 446823 - RNA, 19 nt, Artificial Sequence
  Description of Artificial Sequence: Synthetic oligonucleotide
gguuuaagucugauucggc

SEQ ID NO: 446824 - RNA, 19 nt, Artificial Sequence
  Description of Artificial Sequence: Synthetic oligonucleotide
cacguacagaagauuugga

SEQ ID NO: 446825 - RNA, 19 nt, Artificial Sequence
  Description of Artificial Sequence: Synthetic oligonucleotide
auaaugcuuggugguuuca

SEQ ID NO: 446826 - RNA, 19 nt, Artificial Sequence
  Description of Artificial Sequence: Synthetic oligonucleotide
aggguuauaaaggccuguu

SEQ ID NO: 446827 - RNA, 19 nt, Artificial Sequence
  Description of Artificial Sequence: Synthetic oligonucleotide
caccgcccaguccagcccg

SEQ ID NO: 446828 - RNA, 19 nt, Artificial Sequence
  Description of Artificial Sequence: Synthetic oligonucleotide
agacccgccguucucggua

SEQ ID NO: 446829 - RNA, 19 nt, Artificial Sequence
  Description of Artificial Sequence: Synthetic oligonucleotide
gcgauagucuuuccagaug

SEQ ID NO: 446830 - RNA, 19 nt, Artificial Sequence
  Description of Artificial Sequence: Synthetic oligonucleotide
augcuuaggcagaucuucu

SEQ ID NO: 446831 - RNA, 19 nt, Artificial Sequence
  Description of Artificial Sequence: Synthetic oligonucleotide
cgauagucuuuccagauga

SEQ ID NO: 446832 - RNA, 19 nt, Artificial Sequence
  Description of Artificial Sequence: Synthetic oligonucleotide
gaauaaugcuuggugguuu

SEQ ID NO: 446833 - RNA, 19 nt, Artificial Sequence
  Description of Artificial Sequence: Synthetic oligonucleotide
gauagucuuuccagaugaa

SEQ ID NO: 446834 - RNA, 19 nt, Artificial Sequence
  Description of Artificial Sequence: Synthetic oligonucleotide
agucugauucggcgauagu

SEQ ID NO: 446835 - RNA, 19 nt, Artificial Sequence
  Description of Artificial Sequence: Synthetic oligonucleotide
agagugguuuaagucugau

SEQ ID NO: 446836 - RNA, 19 nt, Artificial Sequence
  Description of Artificial Sequence: Synthetic oligonucleotide
augucugccuauagcacaa

SEQ ID NO: 446837 - RNA, 19 nt, Artificial Sequence
  Description of Artificial Sequence: Synthetic oligonucleotide
acauaaggagguagccagu

SEQ ID NO: 446838 - RNA, 19 nt, Artificial Sequence
  Description of Artificial Sequence: Synthetic oligonucleotide
cccacguacagaagauuug

SEQ ID NO: 446839 - RNA, 19 nt, Artificial Sequence
  Description of Artificial Sequence: Synthetic oligonucleotide
auauauccgucggaauaua

SEQ ID NO: 446840 - RNA, 19 nt, Artificial Sequence
  Description of Artificial Sequence: Synthetic oligonucleotide
accgagucucagcucuuaa

SEQ ID NO: 446841 - RNA, 19 nt, Artificial Sequence
  Description of Artificial Sequence: Synthetic oligonucleotide
cauggcggaccucccgcug

SEQ ID NO: 446842 - RNA, 19 nt, Artificial Sequence
  Description of Artificial Sequence: Synthetic oligonucleotide
ccguucucgguaugauugg

SEQ ID NO: 446843 - RNA, 19 nt, Artificial Sequence
  Description of Artificial Sequence: Synthetic oligonucleotide
uaagucugauucggcgaua

SEQ ID NO: 446844 - RNA, 19 nt, Artificial Sequence
  Description of Artificial Sequence: Synthetic oligonucleotide
gguagguuguggcaagggu

SEQ ID NO: 446845 - RNA, 19 nt, Artificial Sequence
  Description of Artificial Sequence: Synthetic oligonucleotide
aaccgagucucagcucuua

SEQ ID NO: 446846 - RNA, 19 nt, Artificial Sequence
  Description of Artificial Sequence: Synthetic oligonucleotide
auggagauccuaagacuuu

SEQ ID NO: 446847 - RNA, 19 nt, Artificial Sequence
  Description of Artificial Sequence: Synthetic oligonucleotide
cuuaugcuccacgaaggcu

SEQ ID NO: 446848 - RNA, 19 nt, Artificial Sequence
  Description of Artificial Sequence: Synthetic oligonucleotide
auuugucucgccaguucuu

SEQ ID NO: 446849 - RNA, 19 nt, Artificial Sequence
  Description of Artificial Sequence: Synthetic oligonucleotide
ccagauauauccgucggaa

SEQ ID NO: 446850 - RNA, 19 nt, Artificial Sequence
  Description of Artificial Sequence: Synthetic oligonucleotide
aggcugggcgugguaauga

SEQ ID NO: 446851 - RNA, 19 nt, Artificial Sequence
  Description of Artificial Sequence: Synthetic oligonucleotide
ggggagaauggaugagauc

SEQ ID NO: 446852 - RNA, 19 nt, Artificial Sequence
  Description of Artificial Sequence: Synthetic oligonucleotide
ggcuccauacgaugugcca

SEQ ID NO: 446853 - RNA, 19 nt, Artificial Sequence
  Description of Artificial Sequence: Synthetic oligonucleotide
gccagauauauccgucgga

SEQ ID NO: 446854 - RNA, 19 nt, Artificial Sequence
  Description of Artificial Sequence: Synthetic oligonucleotide
agaugcuuaggcagaucuu

SEQ ID NO: 446855 - RNA, 19 nt, Artificial Sequence
  Description of Artificial Sequence: Synthetic oligonucleotide
ugacaccgcccaguccagc

SEQ ID NO: 446856 - RNA, 19 nt, Artificial Sequence
  Description of Artificial Sequence: Synthetic oligonucleotide
gcagacccgccguucucgg

SEQ ID NO: 446857 - RNA, 19 nt, Artificial Sequence
  Description of Artificial Sequence: Synthetic oligonucleotide
gguagaucgucuugugaau

SEQ ID NO: 446858 - RNA, 19 nt, Artificial Sequence
  Description of Artificial Sequence: Synthetic oligonucleotide
guucucgguaugauuggcu

SEQ ID NO: 446859 - RNA, 19 nt, Artificial Sequence
  Description of Artificial Sequence: Synthetic oligonucleotide
cacuugucaagaagcuggu

SEQ ID NO: 446860 - RNA, 19 nt, Artificial Sequence
  Description of Artificial Sequence: Synthetic oligonucleotide
ccgucggaauauaagagcu

SEQ ID NO: 446861 - RNA, 19 nt, Artificial Sequence
  Description of Artificial Sequence: Synthetic oligonucleotide
cccuuaaucuaagcaggac

SEQ ID NO: 446862 - RNA, 19 nt, Artificial Sequence
  Description of Artificial Sequence: Synthetic oligonucleotide
cagauauauccgucggaau

SEQ ID NO: 446863 - RNA, 19 nt, Artificial Sequence
  Description of Artificial Sequence: Synthetic oligonucleotide
gcaaccacaauaaguuacu

SEQ ID NO: 446864 - RNA, 19 nt, Artificial Sequence
  Description of Artificial Sequence: Synthetic oligonucleotide
ggcgauagucuuuccagau

SEQ ID NO: 446865 - RNA, 19 nt, Artificial Sequence
  Description of Artificial Sequence: Synthetic oligonucleotide
cgucggaauauaagagcug

SEQ ID NO: 446866 - RNA, 19 nt, Artificial Sequence
  Description of Artificial Sequence: Synthetic oligonucleotide
cggaauauaagagcugcca

SEQ ID NO: 446867 - RNA, 19 nt, Artificial Sequence
  Description of Artificial Sequence: Synthetic oligonucleotide
uuggucagccuggcuugaa

SEQ ID NO: 446868 - RNA, 19 nt, Artificial Sequence
  Description of Artificial Sequence: Synthetic oligonucleotide
gcagcacuauucguccaug

SEQ ID NO: 446869 - RNA, 19 nt, Artificial Sequence
  Description of Artificial Sequence: Synthetic oligonucleotide
cccaaugcagaauguuuaa

SEQ ID NO: 446870 - RNA, 19 nt, Artificial Sequence
  Description of Artificial Sequence: Synthetic oligonucleotide
cugcccgggugucgcgcgg

SEQ ID NO: 446871 - RNA, 19 nt, Artificial Sequence
  Description of Artificial Sequence: Synthetic oligonucleotide
ccgguuggguagguugugg

SEQ ID NO: 446872 - RNA, 19 nt, Artificial Sequence
  Description of Artificial Sequence: Synthetic oligonucleotide
cguucucgguaugauuggc

SEQ ID NO: 446873 - RNA, 19 nt, Artificial Sequence
  Description of Artificial Sequence: Synthetic oligonucleotide
agggugcuccagauggauu

SEQ ID NO: 446874 - RNA, 19 nt, Artificial Sequence
  Description of Artificial Sequence: Synthetic oligonucleotide
ccaguccagcccgaccgcg

SEQ ID NO: 446875 - RNA, 19 nt, Artificial Sequence
  Description of Artificial Sequence: Synthetic oligonucleotide
ggguuauaaaggccuguuu

SEQ ID NO: 446876 - RNA, 19 nt, Artificial Sequence
  Description of Artificial Sequence: Synthetic oligonucleotide
ccuacuucaaaacguccau

SEQ ID NO: 446877 - RNA, 19 nt, Artificial Sequence
  Description of Artificial Sequence: Synthetic oligonucleotide
caggguuauaaaggccugu

SEQ ID NO: 446878 - RNA, 19 nt, Artificial Sequence
  Description of Artificial Sequence: Synthetic oligonucleotide
cccgaccgcgggcaaggcg

SEQ ID NO: 446879 - RNA, 19 nt, Artificial Sequence
  Description of Artificial Sequence: Synthetic oligonucleotide
gggguccgccucccugagg

SEQ ID NO: 446880 - RNA, 19 nt, Artificial Sequence
  Description of Artificial Sequence: Synthetic oligonucleotide
gggugucgcgcggcggacg

SEQ ID NO: 446881 - RNA, 19 nt, Artificial Sequence
  Description of Artificial Sequence: Synthetic oligonucleotide
ccaugauaaacuccuccau

SEQ ID NO: 446882 - RNA, 19 nt, Artificial Sequence
  Description of Artificial Sequence: Synthetic oligonucleotide
gcugggcgugguaaugauc

SEQ ID NO: 446883 - RNA, 19 nt, Artificial Sequence
  Description of Artificial Sequence: Synthetic oligonucleotide
gacccgccguucucgguau

SEQ ID NO: 446884 - RNA, 19 nt, Artificial Sequence
  Description of Artificial Sequence: Synthetic oligonucleotide
cagcccgaccgcgggcaag

SEQ ID NO: 446885 - RNA, 19 nt, Artificial Sequence
  Description of Artificial Sequence: Synthetic oligonucleotide
gccuccgcugacaccgccc

SEQ ID NO: 446886 - RNA, 19 nt, Artificial Sequence
  Description of Artificial Sequence: Synthetic oligonucleotide
cuacaugauuugggucuua

SEQ ID NO: 446887 - RNA, 19 nt, Artificial Sequence
  Description of Artificial Sequence: Synthetic oligonucleotide
ccccacguacagaagauuu

SEQ ID NO: 446888 - RNA, 19 nt, Artificial Sequence
  Description of Artificial Sequence: Synthetic oligonucleotide
aggagccgguuggguaggu

SEQ ID NO: 446889 - RNA, 19 nt, Artificial Sequence
  Description of Artificial Sequence: Synthetic oligonucleotide
gccgguuggguagguugug

SEQ ID NO: 446890 - RNA, 19 nt, Artificial Sequence
  Description of Artificial Sequence: Synthetic oligonucleotide
ggcgugguaaugaucuguu

SEQ ID NO: 446891 - RNA, 19 nt, Artificial Sequence
  Description of Artificial Sequence: Synthetic oligonucleotide
ggacgcgccuggcgagggc

SEQ ID NO: 446892 - RNA, 19 nt, Artificial Sequence
  Description of Artificial Sequence: Synthetic oligonucleotide
gccugaaugucugccuaua

SEQ ID NO: 446893 - RNA, 19 nt, Artificial Sequence
  Description of Artificial Sequence: Synthetic oligonucleotide
cggcgauagucuuuccaga

SEQ ID NO: 446894 - RNA, 19 nt, Artificial Sequence
  Description of Artificial Sequence: Synthetic oligonucleotide
gucgcgcggcggacgcgcc

SEQ ID NO: 446895 - RNA, 19 nt, Artificial Sequence
  Description of Artificial Sequence: Synthetic oligonucleotide
ccgggugucgcgcggcgga

SEQ ID NO: 446896 - RNA, 19 nt, Artificial Sequence
  Description of Artificial Sequence: Synthetic oligonucleotide
cagacccgccguucucggu

SEQ ID NO: 446897 - RNA, 19 nt, Artificial Sequence
  Description of Artificial Sequence: Synthetic oligonucleotide
cauuagccguuagcagaau

SEQ ID NO: 446898 - RNA, 19 nt, Artificial Sequence
  Description of Artificial Sequence: Synthetic oligonucleotide
cgcgggguccgccucccug

SEQ ID NO: 446899 - RNA, 19 nt, Artificial Sequence
  Description of Artificial Sequence: Synthetic oligonucleotide
cccgggugucgcgcggcgg

SEQ ID NO: 446900 - RNA, 19 nt, Artificial Sequence
  Description of Artificial Sequence: Synthetic oligonucleotide
gcgacagugaggggagaau

SEQ ID NO: 446901 - RNA, 19 nt, Artificial Sequence
  Description of Artificial Sequence: Synthetic oligonucleotide
cccgccguucucgguauga

SEQ ID NO: 446902 - RNA, 19 nt, Artificial Sequence
  Description of Artificial Sequence: Synthetic oligonucleotide
ccggcgcugucgagggcuc

SEQ ID NO: 446903 - RNA, 19 nt, Artificial Sequence
  Description of Artificial Sequence: Synthetic oligonucleotide
guuuaacagccgggcucuu

SEQ ID NO: 446904 - RNA, 19 nt, Artificial Sequence
  Description of Artificial Sequence: Synthetic oligonucleotide
cggacgcgccuggcgaggg

SEQ ID NO: 446905 - RNA, 19 nt, Artificial Sequence
  Description of Artificial Sequence: Synthetic oligonucleotide
cccggcgcugucgagggcu

SEQ ID NO: 446906 - RNA, 19 nt, Artificial Sequence
  Description of Artificial Sequence: Synthetic oligonucleotide
ccgggcucuucaaguugua

SEQ ID NO: 446907 - RNA, 19 nt, Artificial Sequence
  Description of Artificial Sequence: Synthetic oligonucleotide
ggagccgguuggguagguu

SEQ ID NO: 446908 - RNA, 19 nt, Artificial Sequence
  Description of Artificial Sequence: Synthetic oligonucleotide
cgccguucucgguaugauu

SEQ ID NO: 446909 - RNA, 19 nt, Artificial Sequence
  Description of Artificial Sequence: Synthetic oligonucleotide
ccgccguucucgguaugau

SEQ ID NO: 446910 - RNA, 19 nt, Artificial Sequence
  Description of Artificial Sequence: Synthetic oligonucleotide
gcgcgggguccgccucccu

SEQ ID NO: 446911 - RNA, 19 nt, Artificial Sequence
  Description of Artificial Sequence: Synthetic oligonucleotide
uguggaauaaucuauauug

SEQ ID NO: 446912 - RNA, 19 nt, Artificial Sequence
  Description of Artificial Sequence: Synthetic oligonucleotide
aaacuuacggaucacauag

SEQ ID NO: 446913 - RNA, 19 nt, Artificial Sequence
  Description of Artificial Sequence: Synthetic oligonucleotide
ugaauagagaauaaagcag

SEQ ID NO: 446914 - RNA, 19 nt, Artificial Sequence
  Description of Artificial Sequence: Synthetic oligonucleotide
auagauucuucuuaaauag

SEQ ID NO: 446915 - RNA, 19 nt, Artificial Sequence
  Description of Artificial Sequence: Synthetic oligonucleotide
uauauugcuggucagcagg

SEQ ID NO: 446916 - RNA, 19 nt, Artificial Sequence
  Description of Artificial Sequence: Synthetic oligonucleotide
gaaaauuugagccagccca

SEQ ID NO: 446917 - RNA, 19 nt, Artificial Sequence
  Description of Artificial Sequence: Synthetic oligonucleotide
acugcaugaaaauuugagc

SEQ ID NO: 446918 - RNA, 19 nt, Artificial Sequence
  Description of Artificial Sequence: Synthetic oligonucleotide
aaagauggggaugaauucc

SEQ ID NO: 446919 - RNA, 19 nt, Artificial Sequence
  Description of Artificial Sequence: Synthetic oligonucleotide
acaagguagccucugaacc

SEQ ID NO: 446920 - RNA, 19 nt, Artificial Sequence
  Description of Artificial Sequence: Synthetic oligonucleotide
aauagauucuucuuaaaua

SEQ ID NO: 446921 - RNA, 19 nt, Artificial Sequence
  Description of Artificial Sequence: Synthetic oligonucleotide
uaaucuauauugcugguca

SEQ ID NO: 446922 - RNA, 19 nt, Artificial Sequence
  Description of Artificial Sequence: Synthetic oligonucleotide
acaaugacaagguagccuc

SEQ ID NO: 446923 - RNA, 19 nt, Artificial Sequence
  Description of Artificial Sequence: Synthetic oligonucleotide
uuaccaauauacugaaggg

SEQ ID NO: 446924 - RNA, 19 nt, Artificial Sequence
  Description of Artificial Sequence: Synthetic oligonucleotide
ugugcuuaaggacagcugc

SEQ ID NO: 446925 - RNA, 19 nt, Artificial Sequence
  Description of Artificial Sequence: Synthetic oligonucleotide
ucagucuggauguaggagg

SEQ ID NO: 446926 - RNA, 19 nt, Artificial Sequence
  Description of Artificial Sequence: Synthetic oligonucleotide
cagauguugacucuuagcc

SEQ ID NO: 446927 - RNA, 19 nt, Artificial Sequence
  Description of Artificial Sequence: Synthetic oligonucleotide
gaauagagaauaaagcagc

SEQ ID NO: 446928 - RNA, 19 nt, Artificial Sequence
  Description of Artificial Sequence: Synthetic oligonucleotide
ucuuaaauagcaucuccag

SEQ ID NO: 446929 - RNA, 19 nt, Artificial Sequence
  Description of Artificial Sequence: Synthetic oligonucleotide
aauuugagccagcccaucg

SEQ ID NO: 446930 - RNA, 19 nt, Artificial Sequence
  Description of Artificial Sequence: Synthetic oligonucleotide
ugucauucgagcauuugag

SEQ ID NO: 446931 - RNA, 19 nt, Artificial Sequence
  Description of Artificial Sequence: Synthetic oligonucleotide
uuuggacuggacuugagcu

SEQ ID NO: 446932 - RNA, 19 nt, Artificial Sequence
  Description of Artificial Sequence: Synthetic oligonucleotide
ucagcgaucacggaaaagc

SEQ ID NO: 446933 - RNA, 19 nt, Artificial Sequence
  Description of Artificial Sequence: Synthetic oligonucleotide
uacggaucacauaggaugg

SEQ ID NO: 446934 - RNA, 19 nt, Artificial Sequence
  Description of Artificial Sequence: Synthetic oligonucleotide
caaugguucggauauacug

SEQ ID NO: 446935 - RNA, 19 nt, Artificial Sequence
  Description of Artificial Sequence: Synthetic oligonucleotide
uguugcacaggucauagau

SEQ ID NO: 446936 - RNA, 19 nt, Artificial Sequence
  Description of Artificial Sequence: Synthetic oligonucleotide
ucgggagacaaugacaagg

SEQ ID NO: 446937 - RNA, 19 nt, Artificial Sequence
  Description of Artificial Sequence: Synthetic oligonucleotide
ucauucgagcauuugagcu

SEQ ID NO: 446938 - RNA, 19 nt, Artificial Sequence
  Description of Artificial Sequence: Synthetic oligonucleotide
uuugcaaagauggggauga

SEQ ID NO: 446939 - RNA, 19 nt, Artificial Sequence
  Description of Artificial Sequence: Synthetic oligonucleotide
aggaagcuuaccaauauac

SEQ ID NO: 446940 - RNA, 19 nt, Artificial Sequence
  Description of Artificial Sequence: Synthetic oligonucleotide
aauaaucuauauugcuggu

SEQ ID NO: 446941 - RNA, 19 nt, Artificial Sequence
  Description of Artificial Sequence: Synthetic oligonucleotide
uggaauaaucuauauugcu

SEQ ID NO: 446942 - RNA, 19 nt, Artificial Sequence
  Description of Artificial Sequence: Synthetic oligonucleotide
ucaacuuguugaaaacccc

SEQ ID NO: 446943 - RNA, 19 nt, Artificial Sequence
  Description of Artificial Sequence: Synthetic oligonucleotide
cucuuagccaaguuaauug

SEQ ID NO: 446944 - RNA, 19 nt, Artificial Sequence
  Description of Artificial Sequence: Synthetic oligonucleotide
uuagccaaguuaauugcca

SEQ ID NO: 446945 - RNA, 19 nt, Artificial Sequence
  Description of Artificial Sequence: Synthetic oligonucleotide
auuagcuagagacugccga

SEQ ID NO: 446946 - RNA, 19 nt, Artificial Sequence
  Description of Artificial Sequence: Synthetic oligonucleotide
ucagaguuggcccggaaac

SEQ ID NO: 446947 - RNA, 19 nt, Artificial Sequence
  Description of Artificial Sequence: Synthetic oligonucleotide
aaguagucagcgaucacgg

SEQ ID NO: 446948 - RNA, 19 nt, Artificial Sequence
  Description of Artificial Sequence: Synthetic oligonucleotide
ucuucaaguaccacucaug

SEQ ID NO: 446949 - RNA, 19 nt, Artificial Sequence
  Description of Artificial Sequence: Synthetic oligonucleotide
aaaggaagcuuaccaauau

SEQ ID NO: 446950 - RNA, 19 nt, Artificial Sequence
  Description of Artificial Sequence: Synthetic oligonucleotide
uguaccacuagaagaggug

SEQ ID NO: 446951 - RNA, 19 nt, Artificial Sequence
  Description of Artificial Sequence: Synthetic oligonucleotide
ucucgggagacaaugacaa

SEQ ID NO: 446952 - RNA, 19 nt, Artificial Sequence
  Description of Artificial Sequence: Synthetic oligonucleotide
agcuagagacugccgaugc

SEQ ID NO: 446953 - RNA, 19 nt, Artificial Sequence
  Description of Artificial Sequence: Synthetic oligonucleotide
ucuauauugcuggucagca

SEQ ID NO: 446954 - RNA, 19 nt, Artificial Sequence
  Description of Artificial Sequence: Synthetic oligonucleotide
ugagagucuggaacugugg

SEQ ID NO: 446955 - RNA, 19 nt, Artificial Sequence
  Description of Artificial Sequence: Synthetic oligonucleotide
uuaauauccucuagcugga

SEQ ID NO: 446956 - RNA, 19 nt, Artificial Sequence
  Description of Artificial Sequence: Synthetic oligonucleotide
guaaugcaugaucugcugg

SEQ ID NO: 446957 - RNA, 19 nt, Artificial Sequence
  Description of Artificial Sequence: Synthetic oligonucleotide
ucuuggguuguuugcaaag

SEQ ID NO: 446958 - RNA, 19 nt, Artificial Sequence
  Description of Artificial Sequence: Synthetic oligonucleotide
aucuauauugcuggucagc

SEQ ID NO: 446959 - RNA, 19 nt, Artificial Sequence
  Description of Artificial Sequence: Synthetic oligonucleotide
uuuggaccagauagucucg

SEQ ID NO: 446960 - RNA, 19 nt, Artificial Sequence
  Description of Artificial Sequence: Synthetic oligonucleotide
ucuugaauuuccuggcgga

SEQ ID NO: 446961 - RNA, 19 nt, Artificial Sequence
  Description of Artificial Sequence: Synthetic oligonucleotide
agcacguacagggagcccc

SEQ ID NO: 446962 - RNA, 19 nt, Artificial Sequence
  Description of Artificial Sequence: Synthetic oligonucleotide
ucugcgugaaguuucuccu

SEQ ID NO: 446963 - RNA, 19 nt, Artificial Sequence
  Description of Artificial Sequence: Synthetic oligonucleotide
gaagucgugcaucuggcac

SEQ ID NO: 446964 - RNA, 19 nt, Artificial Sequence
  Description of Artificial Sequence: Synthetic oligonucleotide
aacauggagccucccgauc

SEQ ID NO: 446965 - RNA, 19 nt, Artificial Sequence
  Description of Artificial Sequence: Synthetic oligonucleotide
augucgcucacacacagca

SEQ ID NO: 446966 - RNA, 19 nt, Artificial Sequence
  Description of Artificial Sequence: Synthetic oligonucleotide
accaauauacugaagggcu

SEQ ID NO: 446967 - RNA, 19 nt, Artificial Sequence
  Description of Artificial Sequence: Synthetic oligonucleotide
agugcuuuaucaaacacau

SEQ ID NO: 446968 - RNA, 19 nt, Artificial Sequence
  Description of Artificial Sequence: Synthetic oligonucleotide
aucgcuuucugaguaacuc

SEQ ID NO: 446969 - RNA, 19 nt, Artificial Sequence
  Description of Artificial Sequence: Synthetic oligonucleotide
agucaaguuguggaugcgc

SEQ ID NO: 446970 - RNA, 19 nt, Artificial Sequence
  Description of Artificial Sequence: Synthetic oligonucleotide
ugugguaaugcaugaucug

SEQ ID NO: 446971 - RNA, 19 nt, Artificial Sequence
  Description of Artificial Sequence: Synthetic oligonucleotide
uagagacugccgaugcagg

SEQ ID NO: 446972 - RNA, 19 nt, Artificial Sequence
  Description of Artificial Sequence: Synthetic oligonucleotide
uugggagaaaccuuccggu

SEQ ID NO: 446973 - RNA, 19 nt, Artificial Sequence
  Description of Artificial Sequence: Synthetic oligonucleotide
ugggccgauagucaguaca

SEQ ID NO: 446974 - RNA, 19 nt, Artificial Sequence
  Description of Artificial Sequence: Synthetic oligonucleotide
aagucgugcaucuggcaca

SEQ ID NO: 446975 - RNA, 19 nt, Artificial Sequence
  Description of Artificial Sequence: Synthetic oligonucleotide
cucugcgugaaguuucucc

SEQ ID NO: 446976 - RNA, 19 nt, Artificial Sequence
  Description of Artificial Sequence: Synthetic oligonucleotide
ugcgugaaguuucuccuug

SEQ ID NO: 446977 - RNA, 19 nt, Artificial Sequence
  Description of Artificial Sequence: Synthetic oligonucleotide
ucgugcaucuggcacagga

SEQ ID NO: 446978 - RNA, 19 nt, Artificial Sequence
  Description of Artificial Sequence: Synthetic oligonucleotide
cauucgagcauuugagcug

SEQ ID NO: 446979 - RNA, 19 nt, Artificial Sequence
  Description of Artificial Sequence: Synthetic oligonucleotide
agauguugacucuuagcca

SEQ ID NO: 446980 - RNA, 19 nt, Artificial Sequence
  Description of Artificial Sequence: Synthetic oligonucleotide
cuuccgauucucugggagg

SEQ ID NO: 446981 - RNA, 19 nt, Artificial Sequence
  Description of Artificial Sequence: Synthetic oligonucleotide
caaagauggggaugaauuc

SEQ ID NO: 446982 - RNA, 19 nt, Artificial Sequence
  Description of Artificial Sequence: Synthetic oligonucleotide
aaguuaauugccaucucaa

SEQ ID NO: 446983 - RNA, 19 nt, Artificial Sequence
  Description of Artificial Sequence: Synthetic oligonucleotide
uccagauguugacucuuag

SEQ ID NO: 446984 - RNA, 19 nt, Artificial Sequence
  Description of Artificial Sequence: Synthetic oligonucleotide
aaauuugagccagcccauc

SEQ ID NO: 446985 - RNA, 19 nt, Artificial Sequence
  Description of Artificial Sequence: Synthetic oligonucleotide
ggucaugucuguuacuaag

SEQ ID NO: 446986 - RNA, 19 nt, Artificial Sequence
  Description of Artificial Sequence: Synthetic oligonucleotide
acggaaaagcugucauucg

SEQ ID NO: 446987 - RNA, 19 nt, Artificial Sequence
  Description of Artificial Sequence: Synthetic oligonucleotide
uacagggagccccacucag

SEQ ID NO: 446988 - RNA, 19 nt, Artificial Sequence
  Description of Artificial Sequence: Synthetic oligonucleotide
cuagagacugccgaugcag

SEQ ID NO: 446989 - RNA, 19 nt, Artificial Sequence
  Description of Artificial Sequence: Synthetic oligonucleotide
cauaggaaguggacugagg

SEQ ID NO: 446990 - RNA, 19 nt, Artificial Sequence
  Description of Artificial Sequence: Synthetic oligonucleotide
acugguguggaauaaucua

SEQ ID NO: 446991 - RNA, 19 nt, Artificial Sequence
  Description of Artificial Sequence: Synthetic oligonucleotide
gagucuggaacugugguca

SEQ ID NO: 446992 - RNA, 19 nt, Artificial Sequence
  Description of Artificial Sequence: Synthetic oligonucleotide
gcuuauggcccucaaaggc

SEQ ID NO: 446993 - RNA, 19 nt, Artificial Sequence
  Description of Artificial Sequence: Synthetic oligonucleotide
ugguaugaucagcauuagc

SEQ ID NO: 446994 - RNA, 19 nt, Artificial Sequence
  Description of Artificial Sequence: Synthetic oligonucleotide
auguugagaauuugcuugu

SEQ ID NO: 446995 - RNA, 19 nt, Artificial Sequence
  Description of Artificial Sequence: Synthetic oligonucleotide
guggaauaaucuauauugc

SEQ ID NO: 446996 - RNA, 19 nt, Artificial Sequence
  Description of Artificial Sequence: Synthetic oligonucleotide
ucauccugugcaaucugcu

SEQ ID NO: 446997 - RNA, 19 nt, Artificial Sequence
  Description of Artificial Sequence: Synthetic oligonucleotide
ugcccuugaauagagaaua

SEQ ID NO: 446998 - RNA, 19 nt, Artificial Sequence
  Description of Artificial Sequence: Synthetic oligonucleotide
guaacucucaaagcagugc

SEQ ID NO: 446999 - RNA, 19 nt, Artificial Sequence
  Description of Artificial Sequence: Synthetic oligonucleotide
caaguuaauugccaucuca

SEQ ID NO: 447000 - RNA, 19 nt, Artificial Sequence
  Description of Artificial Sequence: Synthetic oligonucleotide
ucacugguguggaauaauc

SEQ ID NO: 447001 - RNA, 19 nt, Artificial Sequence
  Description of Artificial Sequence: Synthetic oligonucleotide
gucauucgagcauuugagc

SEQ ID NO: 447002 - RNA, 19 nt, Artificial Sequence
  Description of Artificial Sequence: Synthetic oligonucleotide
ugaucagcauuagcuagag

SEQ ID NO: 447003 - RNA, 19 nt, Artificial Sequence
  Description of Artificial Sequence: Synthetic oligonucleotide
gaacugaucguggagaucu

SEQ ID NO: 447004 - RNA, 19 nt, Artificial Sequence
  Description of Artificial Sequence: Synthetic oligonucleotide
agacugccgaugcaggguc

SEQ ID NO: 447005 - RNA, 19 nt, Artificial Sequence
  Description of Artificial Sequence: Synthetic oligonucleotide
guaguagccggccugccug

SEQ ID NO: 447006 - RNA, 19 nt, Artificial Sequence
  Description of Artificial Sequence: Synthetic oligonucleotide
caaaguagcugagagccug

SEQ ID NO: 447007 - RNA, 19 nt, Artificial Sequence
  Description of Artificial Sequence: Synthetic oligonucleotide
cacggaaaagcugucauuc

SEQ ID NO: 447008 - RNA, 19 nt, Artificial Sequence
  Description of Artificial Sequence: Synthetic oligonucleotide
guagccucugaaccagugg

SEQ ID NO: 447009 - RNA, 19 nt, Artificial Sequence
  Description of Artificial Sequence: Synthetic oligonucleotide
aguuaauugccaucucaaa

SEQ ID NO: 447010 - RNA, 19 nt, Artificial Sequence
  Description of Artificial Sequence: Synthetic oligonucleotide
uugaauuuccuggcggaug

SEQ ID NO: 447011 - RNA, 19 nt, Artificial Sequence
  Description of Artificial Sequence: Synthetic oligonucleotide
uuagcuagagacugccgau

SEQ ID NO: 447012 - RNA, 19 nt, Artificial Sequence
  Description of Artificial Sequence: Synthetic oligonucleotide
ugagagccuguucccacag

SEQ ID NO: 447013 - RNA, 19 nt, Artificial Sequence
  Description of Artificial Sequence: Synthetic oligonucleotide
uuccggacugggccgauag

SEQ ID NO: 447014 - RNA, 19 nt, Artificial Sequence
  Description of Artificial Sequence: Synthetic oligonucleotide
gguaugaucagcauuagcu

SEQ ID NO: 447015 - RNA, 19 nt, Artificial Sequence
  Description of Artificial Sequence: Synthetic oligonucleotide
aagcagggugguaugauca

SEQ ID NO: 447016 - RNA, 19 nt, Artificial Sequence
  Description of Artificial Sequence: Synthetic oligonucleotide
uccaaugguucggauauac

SEQ ID NO: 447017 - RNA, 19 nt, Artificial Sequence
  Description of Artificial Sequence: Synthetic oligonucleotide
caugaaaauuugagccagc

SEQ ID NO: 447018 - RNA, 19 nt, Artificial Sequence
  Description of Artificial Sequence: Synthetic oligonucleotide
aucacggaaaagcugucau

SEQ ID NO: 447019 - RNA, 19 nt, Artificial Sequence
  Description of Artificial Sequence: Synthetic oligonucleotide
uccaaccuuccaaugguuc

SEQ ID NO: 447020 - RNA, 19 nt, Artificial Sequence
  Description of Artificial Sequence: Synthetic oligonucleotide
aaggaagcuuaccaauaua

SEQ ID NO: 447021 - RNA, 19 nt, Artificial Sequence
  Description of Artificial Sequence: Synthetic oligonucleotide
cauuagcuagagacugccg

SEQ ID NO: 447022 - RNA, 19 nt, Artificial Sequence
  Description of Artificial Sequence: Synthetic oligonucleotide
gaaacuuacggaucacaua

SEQ ID NO: 447023 - RNA, 19 nt, Artificial Sequence
  Description of Artificial Sequence: Synthetic oligonucleotide
aacuuacggaucacauagg

SEQ ID NO: 447024 - RNA, 19 nt, Artificial Sequence
  Description of Artificial Sequence: Synthetic oligonucleotide
aaccagugggugaugagcu

SEQ ID NO: 447025 - RNA, 19 nt, Artificial Sequence
  Description of Artificial Sequence: Synthetic oligonucleotide
auagagaauaaagcagcca

SEQ ID NO: 447026 - RNA, 19 nt, Artificial Sequence
  Description of Artificial Sequence: Synthetic oligonucleotide
aaaauuugagccagcccau

SEQ ID NO: 447027 - RNA, 19 nt, Artificial Sequence
  Description of Artificial Sequence: Synthetic oligonucleotide
aauuuccuggcggaugcga

SEQ ID NO: 447028 - RNA, 19 nt, Artificial Sequence
  Description of Artificial Sequence: Synthetic oligonucleotide
acagaaucggccacucuuc

SEQ ID NO: 447029 - RNA, 19 nt, Artificial Sequence
  Description of Artificial Sequence: Synthetic oligonucleotide
uuccgauucucugggaggc

SEQ ID NO: 447030 - RNA, 19 nt, Artificial Sequence
  Description of Artificial Sequence: Synthetic oligonucleotide
agcuuaccaauauacugaa

SEQ ID NO: 447031 - RNA, 19 nt, Artificial Sequence
  Description of Artificial Sequence: Synthetic oligonucleotide
ucggaugauggacaaggua

SEQ ID NO: 447032 - RNA, 19 nt, Artificial Sequence
  Description of Artificial Sequence: Synthetic oligonucleotide
cuugguauagcaguucaga

SEQ ID NO: 447033 - RNA, 19 nt, Artificial Sequence
  Description of Artificial Sequence: Synthetic oligonucleotide
ucuguaccgccucacccga

SEQ ID NO: 447034 - RNA, 19 nt, Artificial Sequence
  Description of Artificial Sequence: Synthetic oligonucleotide
caucucaaauagauucuuc

SEQ ID NO: 447035 - RNA, 19 nt, Artificial Sequence
  Description of Artificial Sequence: Synthetic oligonucleotide
cagccuuccggacugggcc

SEQ ID NO: 447036 - RNA, 19 nt, Artificial Sequence
  Description of Artificial Sequence: Synthetic oligonucleotide
gaagcagggugguaugauc

SEQ ID NO: 447037 - RNA, 19 nt, Artificial Sequence
  Description of Artificial Sequence: Synthetic oligonucleotide
guaugaucagcauuagcua

SEQ ID NO: 447038 - RNA, 19 nt, Artificial Sequence
  Description of Artificial Sequence: Synthetic oligonucleotide
ggcuccaaccuuccaaugg

SEQ ID NO: 447039 - RNA, 19 nt, Artificial Sequence
  Description of Artificial Sequence: Synthetic oligonucleotide
acugaucguggagaucucg

SEQ ID NO: 447040 - RNA, 19 nt, Artificial Sequence
  Description of Artificial Sequence: Synthetic oligonucleotide
agaaacuuacggaucacau

SEQ ID NO: 447041 - RNA, 19 nt, Artificial Sequence
  Description of Artificial Sequence: Synthetic oligonucleotide
gguccugcuccccaugucg

SEQ ID NO: 447042 - RNA, 19 nt, Artificial Sequence
  Description of Artificial Sequence: Synthetic oligonucleotide
ugcaucagcaggucucgcu

SEQ ID NO: 447043 - RNA, 19 nt, Artificial Sequence
  Description of Artificial Sequence: Synthetic oligonucleotide
gccgauagucaguacaaag

SEQ ID NO: 447044 - RNA, 19 nt, Artificial Sequence
  Description of Artificial Sequence: Synthetic oligonucleotide
guaggcagucaaguugugg

SEQ ID NO: 447045 - RNA, 19 nt, Artificial Sequence
  Description of Artificial Sequence: Synthetic oligonucleotide
auucgagcauuugagcuga

SEQ ID NO: 447046 - RNA, 19 nt, Artificial Sequence
  Description of Artificial Sequence: Synthetic oligonucleotide
uucaaguaccacucaugau

SEQ ID NO: 447047 - RNA, 19 nt, Artificial Sequence
  Description of Artificial Sequence: Synthetic oligonucleotide
cgagcauuugagcugaugc

SEQ ID NO: 447048 - RNA, 19 nt, Artificial Sequence
  Description of Artificial Sequence: Synthetic oligonucleotide
aguaacucucaaagcagug

SEQ ID NO: 447049 - RNA, 19 nt, Artificial Sequence
  Description of Artificial Sequence: Synthetic oligonucleotide
ugcucgugcugcauguggu

SEQ ID NO: 447050 - RNA, 19 nt, Artificial Sequence
  Description of Artificial Sequence: Synthetic oligonucleotide
augcgaguggucuccucuc

SEQ ID NO: 447051 - RNA, 19 nt, Artificial Sequence
  Description of Artificial Sequence: Synthetic oligonucleotide
gguucggauauacugcuga

SEQ ID NO: 447052 - RNA, 19 nt, Artificial Sequence
  Description of Artificial Sequence: Synthetic oligonucleotide
ugggagaaaccuuccgguc

SEQ ID NO: 447053 - RNA, 19 nt, Artificial Sequence
  Description of Artificial Sequence: Synthetic oligonucleotide
cugcucgugcugcaugugg

SEQ ID NO: 447054 - RNA, 19 nt, Artificial Sequence
  Description of Artificial Sequence: Synthetic oligonucleotide
acggaucacauaggauggc

SEQ ID NO: 447055 - RNA, 19 nt, Artificial Sequence
  Description of Artificial Sequence: Synthetic oligonucleotide
ggugcccuugaauagagaa

SEQ ID NO: 447056 - RNA, 19 nt, Artificial Sequence
  Description of Artificial Sequence: Synthetic oligonucleotide
ggugguaugaucagcauua

SEQ ID NO: 447057 - RNA, 19 nt, Artificial Sequence
  Description of Artificial Sequence: Synthetic oligonucleotide
uagcuagagacugccgaug

SEQ ID NO: 447058 - RNA, 19 nt, Artificial Sequence
  Description of Artificial Sequence: Synthetic oligonucleotide
uaccgccucacccgaagcu

SEQ ID NO: 447059 - RNA, 19 nt, Artificial Sequence
  Description of Artificial Sequence: Synthetic oligonucleotide
agccuuccggacugggccg

SEQ ID NO: 447060 - RNA, 19 nt, Artificial Sequence
  Description of Artificial Sequence: Synthetic oligonucleotide
uuccuggcggaugcgagug

SEQ ID NO: 447061 - RNA, 19 nt, Artificial Sequence
  Description of Artificial Sequence: Synthetic oligonucleotide
gacagcugccacguacucc

SEQ ID NO: 447062 - RNA, 19 nt, Artificial Sequence
  Description of Artificial Sequence: Synthetic oligonucleotide
acucuuagccaaguuaauu

SEQ ID NO: 447063 - RNA, 19 nt, Artificial Sequence
  Description of Artificial Sequence: Synthetic oligonucleotide
ccagauguugacucuuagc

SEQ ID NO: 447064 - RNA, 19 nt, Artificial Sequence
  Description of Artificial Sequence: Synthetic oligonucleotide
gaugugcuuaaggacagcu

SEQ ID NO: 447065 - RNA, 19 nt, Artificial Sequence
  Description of Artificial Sequence: Synthetic oligonucleotide
ugaucguggagaucucguu

SEQ ID NO: 447066 - RNA, 19 nt, Artificial Sequence
  Description of Artificial Sequence: Synthetic oligonucleotide
aaaguagcugagagccugu

SEQ ID NO: 447067 - RNA, 19 nt, Artificial Sequence
  Description of Artificial Sequence: Synthetic oligonucleotide
ggugcaugaggaucuugcc

SEQ ID NO: 447068 - RNA, 19 nt, Artificial Sequence
  Description of Artificial Sequence: Synthetic oligonucleotide
uguugacucuuagccaagu

SEQ ID NO: 447069 - RNA, 19 nt, Artificial Sequence
  Description of Artificial Sequence: Synthetic oligonucleotide
gugcgugguucucagccag

SEQ ID NO: 447070 - RNA, 19 nt, Artificial Sequence
  Description of Artificial Sequence: Synthetic oligonucleotide
caugucgcucacacacagc

SEQ ID NO: 447071 - RNA, 19 nt, Artificial Sequence
  Description of Artificial Sequence: Synthetic oligonucleotide
cuagcuggaucuucaagua

SEQ ID NO: 447072 - RNA, 19 nt, Artificial Sequence
  Description of Artificial Sequence: Synthetic oligonucleotide
ugcguugucugcucuggua

SEQ ID NO: 447073 - RNA, 19 nt, Artificial Sequence
  Description of Artificial Sequence: Synthetic oligonucleotide
ugcgaguggucuccucucu

SEQ ID NO: 447074 - RNA, 19 nt, Artificial Sequence
  Description of Artificial Sequence: Synthetic oligonucleotide
gaucacggaaaagcuguca

SEQ ID NO: 447075 - RNA, 19 nt, Artificial Sequence
  Description of Artificial Sequence: Synthetic oligonucleotide
ucguggagaucucguuucu

SEQ ID NO: 447076 - RNA, 19 nt, Artificial Sequence
  Description of Artificial Sequence: Synthetic oligonucleotide
ucgcucacacacagcaauc

SEQ ID NO: 447077 - RNA, 19 nt, Artificial Sequence
  Description of Artificial Sequence: Synthetic oligonucleotide
aaguggacugagggcaacu

SEQ ID NO: 447078 - RNA, 19 nt, Artificial Sequence
  Description of Artificial Sequence: Synthetic oligonucleotide
ggauguaggagggucaguc

SEQ ID NO: 447079 - RNA, 19 nt, Artificial Sequence
  Description of Artificial Sequence: Synthetic oligonucleotide
accacucaugaugugcgug

SEQ ID NO: 447080 - RNA, 19 nt, Artificial Sequence
  Description of Artificial Sequence: Synthetic oligonucleotide
agaaaccuuccggucucgg

SEQ ID NO: 447081 - RNA, 19 nt, Artificial Sequence
  Description of Artificial Sequence: Synthetic oligonucleotide
uuacucucugccugcucaa

SEQ ID NO: 447082 - RNA, 19 nt, Artificial Sequence
  Description of Artificial Sequence: Synthetic oligonucleotide
agaguuggcccggaaacau

SEQ ID NO: 447083 - RNA, 19 nt, Artificial Sequence
  Description of Artificial Sequence: Synthetic oligonucleotide
aaccuuccaaugguucgga

SEQ ID NO: 447084 - RNA, 19 nt, Artificial Sequence
  Description of Artificial Sequence: Synthetic oligonucleotide
gcauuagcuagagacugcc

SEQ ID NO: 447085 - RNA, 19 nt, Artificial Sequence
  Description of Artificial Sequence: Synthetic oligonucleotide
aacugaucguggagaucuc

SEQ ID NO: 447086 - RNA, 19 nt, Artificial Sequence
  Description of Artificial Sequence: Synthetic oligonucleotide
ucccgaucaccccagccuu

SEQ ID NO: 447087 - RNA, 19 nt, Artificial Sequence
  Description of Artificial Sequence: Synthetic oligonucleotide
ucgagcauuugagcugaug

SEQ ID NO: 447088 - RNA, 19 nt, Artificial Sequence
  Description of Artificial Sequence: Synthetic oligonucleotide
gagaaaccuuccggucucg

SEQ ID NO: 447089 - RNA, 19 nt, Artificial Sequence
  Description of Artificial Sequence: Synthetic oligonucleotide
auauacugaagggcuuccu

SEQ ID NO: 447090 - RNA, 19 nt, Artificial Sequence
  Description of Artificial Sequence: Synthetic oligonucleotide
gcacuuggucuucuggaag

SEQ ID NO: 447091 - RNA, 19 nt, Artificial Sequence
  Description of Artificial Sequence: Synthetic oligonucleotide
gcgcugggcauccagaaac

SEQ ID NO: 447092 - RNA, 19 nt, Artificial Sequence
  Description of Artificial Sequence: Synthetic oligonucleotide
augaugugcgugguucuca

SEQ ID NO: 447093 - RNA, 19 nt, Artificial Sequence
  Description of Artificial Sequence: Synthetic oligonucleotide
cucaugggcccaguucugc

SEQ ID NO: 447094 - RNA, 19 nt, Artificial Sequence
  Description of Artificial Sequence: Synthetic oligonucleotide
ggacugggccgauagucag

SEQ ID NO: 447095 - RNA, 19 nt, Artificial Sequence
  Description of Artificial Sequence: Synthetic oligonucleotide
gaguaacucucaaagcagu

SEQ ID NO: 447096 - RNA, 19 nt, Artificial Sequence
  Description of Artificial Sequence: Synthetic oligonucleotide
uguucucgaugugcuuaag

SEQ ID NO: 447097 - RNA, 19 nt, Artificial Sequence
  Description of Artificial Sequence: Synthetic oligonucleotide
ggagagucaacuuguugaa

SEQ ID NO: 447098 - RNA, 19 nt, Artificial Sequence
  Description of Artificial Sequence: Synthetic oligonucleotide
cucgggagacaaugacaag

SEQ ID NO: 447099 - RNA, 19 nt, Artificial Sequence
  Description of Artificial Sequence: Synthetic oligonucleotide
ggagaaaccuuccggucuc

SEQ ID NO: 447100 - RNA, 19 nt, Artificial Sequence
  Description of Artificial Sequence: Synthetic oligonucleotide
aucggccacucuucagcag

SEQ ID NO: 447101 - RNA, 19 nt, Artificial Sequence
  Description of Artificial Sequence: Synthetic oligonucleotide
gaagaucuuuggacuggac

SEQ ID NO: 447102 - RNA, 19 nt, Artificial Sequence
  Description of Artificial Sequence: Synthetic oligonucleotide
ccuuccgauucucugggag

SEQ ID NO: 447103 - RNA, 19 nt, Artificial Sequence
  Description of Artificial Sequence: Synthetic oligonucleotide
ccggccaaaguagucagcg

SEQ ID NO: 447104 - RNA, 19 nt, Artificial Sequence
  Description of Artificial Sequence: Synthetic oligonucleotide
uguaggcuaugaacuuguu

SEQ ID NO: 447105 - RNA, 19 nt, Artificial Sequence
  Description of Artificial Sequence: Synthetic oligonucleotide
uaccacucaugaugugcgu

SEQ ID NO: 447106 - RNA, 19 nt, Artificial Sequence
  Description of Artificial Sequence: Synthetic oligonucleotide
gacuugagcucuugaauuu

SEQ ID NO: 447107 - RNA, 19 nt, Artificial Sequence
  Description of Artificial Sequence: Synthetic oligonucleotide
gaucguggagaucucguuu

SEQ ID NO: 447108 - RNA, 19 nt, Artificial Sequence
  Description of Artificial Sequence: Synthetic oligonucleotide
ucgugcugcaugugguaau

SEQ ID NO: 447109 - RNA, 19 nt, Artificial Sequence
  Description of Artificial Sequence: Synthetic oligonucleotide
guucggauauacugcugaa

SEQ ID NO: 447110 - RNA, 19 nt, Artificial Sequence
  Description of Artificial Sequence: Synthetic oligonucleotide
gcgugaaguuucuccuugg

SEQ ID NO: 447111 - RNA, 19 nt, Artificial Sequence
  Description of Artificial Sequence: Synthetic oligonucleotide
gaucagcauuagcuagaga

SEQ ID NO: 447112 - RNA, 19 nt, Artificial Sequence
  Description of Artificial Sequence: Synthetic oligonucleotide
caucgcuguccagauguug

SEQ ID NO: 447113 - RNA, 19 nt, Artificial Sequence
  Description of Artificial Sequence: Synthetic oligonucleotide
uggugcccuugaauagaga

SEQ ID NO: 447114 - RNA, 19 nt, Artificial Sequence
  Description of Artificial Sequence: Synthetic oligonucleotide
guaccgccucacccgaagc

SEQ ID NO: 447115 - RNA, 19 nt, Artificial Sequence
  Description of Artificial Sequence: Synthetic oligonucleotide
agccccacucagccagcac

SEQ ID NO: 447116 - RNA, 19 nt, Artificial Sequence
  Description of Artificial Sequence: Synthetic oligonucleotide
aucccgcgucagcacguac

SEQ ID NO: 447117 - RNA, 19 nt, Artificial Sequence
  Description of Artificial Sequence: Synthetic oligonucleotide
gaccuuccucacuggugug

SEQ ID NO: 447118 - RNA, 19 nt, Artificial Sequence
  Description of Artificial Sequence: Synthetic oligonucleotide
gucagcgaucacggaaaag

SEQ ID NO: 447119 - RNA, 19 nt, Artificial Sequence
  Description of Artificial Sequence: Synthetic oligonucleotide
gggcaugggaguaguagcc

SEQ ID NO: 447120 - RNA, 19 nt, Artificial Sequence
  Description of Artificial Sequence: Synthetic oligonucleotide
cuuacggaucacauaggau

SEQ ID NO: 447121 - RNA, 19 nt, Artificial Sequence
  Description of Artificial Sequence: Synthetic oligonucleotide
ugcaaugcgugggcccgcc

SEQ ID NO: 447122 - RNA, 19 nt, Artificial Sequence
  Description of Artificial Sequence: Synthetic oligonucleotide
acugggccgauagucagua

SEQ ID NO: 447123 - RNA, 19 nt, Artificial Sequence
  Description of Artificial Sequence: Synthetic oligonucleotide
gccgaugcagggucuguag

SEQ ID NO: 447124 - RNA, 19 nt, Artificial Sequence
  Description of Artificial Sequence: Synthetic oligonucleotide
gcugcguugucugcucugg

SEQ ID NO: 447125 - RNA, 19 nt, Artificial Sequence
  Description of Artificial Sequence: Synthetic oligonucleotide
guacagggagccccacuca

SEQ ID NO: 447126 - RNA, 19 nt, Artificial Sequence
  Description of Artificial Sequence: Synthetic oligonucleotide
cagaaucggccacucuuca

SEQ ID NO: 447127 - RNA, 19 nt, Artificial Sequence
  Description of Artificial Sequence: Synthetic oligonucleotide
caaugcgugggcccgccca

SEQ ID NO: 447128 - RNA, 19 nt, Artificial Sequence
  Description of Artificial Sequence: Synthetic oligonucleotide
augagcuuauggcccucaa

SEQ ID NO: 447129 - RNA, 19 nt, Artificial Sequence
  Description of Artificial Sequence: Synthetic oligonucleotide
aaguagcugagagccuguu

SEQ ID NO: 447130 - RNA, 19 nt, Artificial Sequence
  Description of Artificial Sequence: Synthetic oligonucleotide
aggaguggccacauaggaa

SEQ ID NO: 447131 - RNA, 19 nt, Artificial Sequence
  Description of Artificial Sequence: Synthetic oligonucleotide
acugccgaugcagggucug

SEQ ID NO: 447132 - RNA, 19 nt, Artificial Sequence
  Description of Artificial Sequence: Synthetic oligonucleotide
uccggacugggccgauagu

SEQ ID NO: 447133 - RNA, 19 nt, Artificial Sequence
  Description of Artificial Sequence: Synthetic oligonucleotide
cucuuggguuguuugcaaa

SEQ ID NO: 447134 - RNA, 19 nt, Artificial Sequence
  Description of Artificial Sequence: Synthetic oligonucleotide
cuuccugauaguucuuaau

SEQ ID NO: 447135 - RNA, 19 nt, Artificial Sequence
  Description of Artificial Sequence: Synthetic oligonucleotide
ccgaugcagggucuguagg

SEQ ID NO: 447136 - RNA, 19 nt, Artificial Sequence
  Description of Artificial Sequence: Synthetic oligonucleotide
gggagaaaccuuccggucu

SEQ ID NO: 447137 - RNA, 19 nt, Artificial Sequence
  Description of Artificial Sequence: Synthetic oligonucleotide
gaguggucuccucucugua

SEQ ID NO: 447138 - RNA, 19 nt, Artificial Sequence
  Description of Artificial Sequence: Synthetic oligonucleotide
ccgauagucaguacaaagu

SEQ ID NO: 447139 - RNA, 19 nt, Artificial Sequence
  Description of Artificial Sequence: Synthetic oligonucleotide
gccauagcgcuucauguua

SEQ ID NO: 447140 - RNA, 19 nt, Artificial Sequence
  Description of Artificial Sequence: Synthetic oligonucleotide
gagacugccgaugcagggu

SEQ ID NO: 447141 - RNA, 19 nt, Artificial Sequence
  Description of Artificial Sequence: Synthetic oligonucleotide
gagauggccucugcgugaa

SEQ ID NO: 447142 - RNA, 19 nt, Artificial Sequence
  Description of Artificial Sequence: Synthetic oligonucleotide
caugguugcccuugcugua

SEQ ID NO: 447143 - RNA, 19 nt, Artificial Sequence
  Description of Artificial Sequence: Synthetic oligonucleotide
gcgaucacggaaaagcugu

SEQ ID NO: 447144 - RNA, 19 nt, Artificial Sequence
  Description of Artificial Sequence: Synthetic oligonucleotide
cccggaaacauggagccuc

SEQ ID NO: 447145 - RNA, 19 nt, Artificial Sequence
  Description of Artificial Sequence: Synthetic oligonucleotide
gcuccaaccuuccaauggu

SEQ ID NO: 447146 - RNA, 19 nt, Artificial Sequence
  Description of Artificial Sequence: Synthetic oligonucleotide
agauggccucugcgugaag

SEQ ID NO: 447147 - RNA, 19 nt, Artificial Sequence
  Description of Artificial Sequence: Synthetic oligonucleotide
uccggucucgggagacaau

SEQ ID NO: 447148 - RNA, 19 nt, Artificial Sequence
  Description of Artificial Sequence: Synthetic oligonucleotide
ccggaaacauggagccucc

SEQ ID NO: 447149 - RNA, 19 nt, Artificial Sequence
  Description of Artificial Sequence: Synthetic oligonucleotide
gcaucgcuuucugaguaac

SEQ ID NO: 447150 - RNA, 19 nt, Artificial Sequence
  Description of Artificial Sequence: Synthetic oligonucleotide
ugccgaugcagggucugua

SEQ ID NO: 447151 - RNA, 19 nt, Artificial Sequence
  Description of Artificial Sequence: Synthetic oligonucleotide
aguagccggccugccugag

SEQ ID NO: 447152 - RNA, 19 nt, Artificial Sequence
  Description of Artificial Sequence: Synthetic oligonucleotide
gcuagagacugccgaugca

SEQ ID NO: 447153 - RNA, 19 nt, Artificial Sequence
  Description of Artificial Sequence: Synthetic oligonucleotide
gcggaugcgaguggucucc

SEQ ID NO: 447154 - RNA, 19 nt, Artificial Sequence
  Description of Artificial Sequence: Synthetic oligonucleotide
gcgaguggucuccucucug

SEQ ID NO: 447155 - RNA, 19 nt, Artificial Sequence
  Description of Artificial Sequence: Synthetic oligonucleotide
cucgugcugcaugugguaa

SEQ ID NO: 447156 - RNA, 19 nt, Artificial Sequence
  Description of Artificial Sequence: Synthetic oligonucleotide
uucgagcauuugagcugau

SEQ ID NO: 447157 - RNA, 19 nt, Artificial Sequence
  Description of Artificial Sequence: Synthetic oligonucleotide
uuccaaugguucggauaua

SEQ ID NO: 447158 - RNA, 19 nt, Artificial Sequence
  Description of Artificial Sequence: Synthetic oligonucleotide
caucgcuuucugaguaacu

SEQ ID NO: 447159 - RNA, 19 nt, Artificial Sequence
  Description of Artificial Sequence: Synthetic oligonucleotide
ccggacugggccgauaguc

SEQ ID NO: 447160 - RNA, 19 nt, Artificial Sequence
  Description of Artificial Sequence: Synthetic oligonucleotide
cugggccgauagucaguac

SEQ ID NO: 447161 - RNA, 19 nt, Artificial Sequence
  Description of Artificial Sequence: Synthetic oligonucleotide
ggccucugcgugaaguuuc

SEQ ID NO: 447162 - RNA, 19 nt, Artificial Sequence
  Description of Artificial Sequence: Synthetic oligonucleotide
ccccggccaaaguagucag

SEQ ID NO: 447163 - RNA, 19 nt, Artificial Sequence
  Description of Artificial Sequence: Synthetic oligonucleotide
cucggaugauggacaaggu

SEQ ID NO: 447164 - RNA, 19 nt, Artificial Sequence
  Description of Artificial Sequence: Synthetic oligonucleotide
gacucuuagccaaguuaau

SEQ ID NO: 447165 - RNA, 19 nt, Artificial Sequence
  Description of Artificial Sequence: Synthetic oligonucleotide
ggugaccuuccucacuggu

SEQ ID NO: 447166 - RNA, 19 nt, Artificial Sequence
  Description of Artificial Sequence: Synthetic oligonucleotide
cuugaauuuccuggcggau

SEQ ID NO: 447167 - RNA, 19 nt, Artificial Sequence
  Description of Artificial Sequence: Synthetic oligonucleotide
augcgugggcccgcccauc

SEQ ID NO: 447168 - RNA, 19 nt, Artificial Sequence
  Description of Artificial Sequence: Synthetic oligonucleotide
guuggcccggaaacaugga

SEQ ID NO: 447169 - RNA, 19 nt, Artificial Sequence
  Description of Artificial Sequence: Synthetic oligonucleotide
gggccgauagucaguacaa

SEQ ID NO: 447170 - RNA, 19 nt, Artificial Sequence
  Description of Artificial Sequence: Synthetic oligonucleotide
gcguugucugcucugguau

SEQ ID NO: 447171 - RNA, 19 nt, Artificial Sequence
  Description of Artificial Sequence: Synthetic oligonucleotide
ggcggaugcgaguggucuc

SEQ ID NO: 447172 - RNA, 19 nt, Artificial Sequence
  Description of Artificial Sequence: Synthetic oligonucleotide
cagcacguacagggagccc

SEQ ID NO: 447173 - RNA, 19 nt, Artificial Sequence
  Description of Artificial Sequence: Synthetic oligonucleotide
cugccacguacuccuugca

SEQ ID NO: 447174 - RNA, 19 nt, Artificial Sequence
  Description of Artificial Sequence: Synthetic oligonucleotide
ccgaucaccccagccuucc

SEQ ID NO: 447175 - RNA, 19 nt, Artificial Sequence
  Description of Artificial Sequence: Synthetic oligonucleotide
cucacccgaagcucauccu

SEQ ID NO: 447176 - RNA, 19 nt, Artificial Sequence
  Description of Artificial Sequence: Synthetic oligonucleotide
ccgguacugcucgugcugc

SEQ ID NO: 447177 - RNA, 19 nt, Artificial Sequence
  Description of Artificial Sequence: Synthetic oligonucleotide
gugcccuugaauagagaau

SEQ ID NO: 447178 - RNA, 19 nt, Artificial Sequence
  Description of Artificial Sequence: Synthetic oligonucleotide
guccagauguugacucuua

SEQ ID NO: 447179 - RNA, 19 nt, Artificial Sequence
  Description of Artificial Sequence: Synthetic oligonucleotide
gggugguaugaucagcauu

SEQ ID NO: 447180 - RNA, 19 nt, Artificial Sequence
  Description of Artificial Sequence: Synthetic oligonucleotide
cccuugaauagagaauaaa

SEQ ID NO: 447181 - RNA, 19 nt, Artificial Sequence
  Description of Artificial Sequence: Synthetic oligonucleotide
ccuggugcccuugaauaga

SEQ ID NO: 447182 - RNA, 19 nt, Artificial Sequence
  Description of Artificial Sequence: Synthetic oligonucleotide
cucacugguguggaauaau

SEQ ID NO: 447183 - RNA, 19 nt, Artificial Sequence
  Description of Artificial Sequence: Synthetic oligonucleotide
gggucuguagguaggcagu

SEQ ID NO: 447184 - RNA, 19 nt, Artificial Sequence
  Description of Artificial Sequence: Synthetic oligonucleotide
cuccaaccuuccaaugguu

SEQ ID NO: 447185 - RNA, 19 nt, Artificial Sequence
  Description of Artificial Sequence: Synthetic oligonucleotide
gcuccaagagugugucaua

SEQ ID NO: 447186 - RNA, 19 nt, Artificial Sequence
  Description of Artificial Sequence: Synthetic oligonucleotide
cgaucacggaaaagcuguc

SEQ ID NO: 447187 - RNA, 19 nt, Artificial Sequence
  Description of Artificial Sequence: Synthetic oligonucleotide
gcaaugcgugggcccgccc

SEQ ID NO: 447188 - RNA, 19 nt, Artificial Sequence
  Description of Artificial Sequence: Synthetic oligonucleotide
ccaauauacugaagggcuu

SEQ ID NO: 447189 - RNA, 19 nt, Artificial Sequence
  Description of Artificial Sequence: Synthetic oligonucleotide
ccaaugguucggauauacu

SEQ ID NO: 447190 - RNA, 19 nt, Artificial Sequence
  Description of Artificial Sequence: Synthetic oligonucleotide
cacucaugaugugcguggu

SEQ ID NO: 447191 - RNA, 19 nt, Artificial Sequence
  Description of Artificial Sequence: Synthetic oligonucleotide
cugcgugaaguuucuccuu

SEQ ID NO: 447192 - RNA, 19 nt, Artificial Sequence
  Description of Artificial Sequence: Synthetic oligonucleotide
cggacugggccgauaguca

SEQ ID NO: 447193 - RNA, 19 nt, Artificial Sequence
  Description of Artificial Sequence: Synthetic oligonucleotide
ggccgauagucaguacaaa

SEQ ID NO: 447194 - RNA, 19 nt, Artificial Sequence
  Description of Artificial Sequence: Synthetic oligonucleotide
cuguaccgccucacccgaa

SEQ ID NO: 447195 - RNA, 19 nt, Artificial Sequence
  Description of Artificial Sequence: Synthetic oligonucleotide
cccgaucaccccagccuuc

SEQ ID NO: 447196 - RNA, 19 nt, Artificial Sequence
  Description of Artificial Sequence: Synthetic oligonucleotide
gacugccgaugcagggucu

SEQ ID NO: 447197 - RNA, 19 nt, Artificial Sequence
  Description of Artificial Sequence: Synthetic oligonucleotide
cagguuggacagucagcau

SEQ ID NO: 447198 - RNA, 19 nt, Artificial Sequence
  Description of Artificial Sequence: Synthetic oligonucleotide
ggaaagcuuucagcucucu

SEQ ID NO: 447199 - RNA, 19 nt, Artificial Sequence
  Description of Artificial Sequence: Synthetic oligonucleotide
ggcccgcccaucccgcguc

SEQ ID NO: 447200 - RNA, 19 nt, Artificial Sequence
  Description of Artificial Sequence: Synthetic oligonucleotide
cugcguugucugcucuggu

SEQ ID NO: 447201 - RNA, 19 nt, Artificial Sequence
  Description of Artificial Sequence: Synthetic oligonucleotide
ccgcccaucccgcgucagc

SEQ ID NO: 447202 - RNA, 19 nt, Artificial Sequence
  Description of Artificial Sequence: Synthetic oligonucleotide
gcaugugguaaugcaugau

SEQ ID NO: 447203 - RNA, 19 nt, Artificial Sequence
  Description of Artificial Sequence: Synthetic oligonucleotide
ggaccccauccuggaaguc

SEQ ID NO: 447204 - RNA, 19 nt, Artificial Sequence
  Description of Artificial Sequence: Synthetic oligonucleotide
ccucacugguguggaauaa

SEQ ID NO: 447205 - RNA, 19 nt, Artificial Sequence
  Description of Artificial Sequence: Synthetic oligonucleotide
caucccgcgucagcacgua

SEQ ID NO: 447206 - RNA, 19 nt, Artificial Sequence
  Description of Artificial Sequence: Synthetic oligonucleotide
gcccuggggugagucuggc

SEQ ID NO: 447207 - RNA, 19 nt, Artificial Sequence
  Description of Artificial Sequence: Synthetic oligonucleotide
gccuuccggacugggccga

SEQ ID NO: 447208 - RNA, 19 nt, Artificial Sequence
  Description of Artificial Sequence: Synthetic oligonucleotide
ccucugcgugaaguuucuc

SEQ ID NO: 447209 - RNA, 19 nt, Artificial Sequence
  Description of Artificial Sequence: Synthetic oligonucleotide
gccucugcgugaaguuucu

SEQ ID NO: 447210 - RNA, 19 nt, Artificial Sequence
  Description of Artificial Sequence: Synthetic oligonucleotide
cugccgaugcagggucugu

SEQ ID NO: 447211 - RNA, 19 nt, Artificial Sequence
  Description of Artificial Sequence: Synthetic oligonucleotide
ccaucccgcgucagcacgu

SEQ ID NO: 447212 - RNA, 19 nt, Artificial Sequence
  Description of Artificial Sequence: Synthetic oligonucleotide
ccggccugccugaggaccu

SEQ ID NO: 447213 - RNA, 19 nt, Artificial Sequence
  Description of Artificial Sequence: Synthetic oligonucleotide
gcucugguauguggugcau

SEQ ID NO: 447214 - RNA, 19 nt, Artificial Sequence
  Description of Artificial Sequence: Synthetic oligonucleotide
gcccggaaacauggagccu

SEQ ID NO: 447215 - RNA, 19 nt, Artificial Sequence
  Description of Artificial Sequence: Synthetic oligonucleotide
ccaucgcuguccagauguu

SEQ ID NO: 447216 - RNA, 19 nt, Artificial Sequence
  Description of Artificial Sequence: Synthetic oligonucleotide
cggaugcgaguggucuccu

SEQ ID NO: 447217 - RNA, 19 nt, Artificial Sequence
  Description of Artificial Sequence: Synthetic oligonucleotide
ccuuccggacugggccgau

SEQ ID NO: 447218 - RNA, 19 nt, Artificial Sequence
  Description of Artificial Sequence: Synthetic oligonucleotide
aguuuggugaugcaguacc

SEQ ID NO: 447219 - RNA, 19 nt, Artificial Sequence
  Description of Artificial Sequence: Synthetic oligonucleotide
augagcaaagccuuggccc

SEQ ID NO: 447220 - RNA, 19 nt, Artificial Sequence
  Description of Artificial Sequence: Synthetic oligonucleotide
uuguauaaggaguuguagg

SEQ ID NO: 447221 - RNA, 19 nt, Artificial Sequence
  Description of Artificial Sequence: Synthetic oligonucleotide
gaaaagcucagcuugacac

SEQ ID NO: 447222 - RNA, 19 nt, Artificial Sequence
  Description of Artificial Sequence: Synthetic oligonucleotide
ugaucgaugggaaacuggg

SEQ ID NO: 447223 - RNA, 19 nt, Artificial Sequence
  Description of Artificial Sequence: Synthetic oligonucleotide
caaaagggcaaacaggugg

SEQ ID NO: 447224 - RNA, 19 nt, Artificial Sequence
  Description of Artificial Sequence: Synthetic oligonucleotide
gauaucaugcuccaucugc

SEQ ID NO: 447225 - RNA, 19 nt, Artificial Sequence
  Description of Artificial Sequence: Synthetic oligonucleotide
cuuggcaggauauacauac

SEQ ID NO: 447226 - RNA, 19 nt, Artificial Sequence
  Description of Artificial Sequence: Synthetic oligonucleotide
uaagacccgauauugcugg

SEQ ID NO: 447227 - RNA, 19 nt, Artificial Sequence
  Description of Artificial Sequence: Synthetic oligonucleotide
auuuuggugacgccggggc

SEQ ID NO: 447228 - RNA, 19 nt, Artificial Sequence
  Description of Artificial Sequence: Synthetic oligonucleotide
cacaaaucggcucaggagg

SEQ ID NO: 447229 - RNA, 19 nt, Artificial Sequence
  Description of Artificial Sequence: Synthetic oligonucleotide
uugaagguaaaguucaccu

SEQ ID NO: 447230 - RNA, 19 nt, Artificial Sequence
  Description of Artificial Sequence: Synthetic oligonucleotide
cuugacacgguccaguucc

SEQ ID NO: 447231 - RNA, 19 nt, Artificial Sequence
  Description of Artificial Sequence: Synthetic oligonucleotide
uauaaggaguuguagguga

SEQ ID NO: 447232 - RNA, 19 nt, Artificial Sequence
  Description of Artificial Sequence: Synthetic oligonucleotide
ucauaguacagccgguuag

SEQ ID NO: 447233 - RNA, 19 nt, Artificial Sequence
  Description of Artificial Sequence: Synthetic oligonucleotide
uguacaaagcucuggcugc

SEQ ID NO: 447234 - RNA, 19 nt, Artificial Sequence
  Description of Artificial Sequence: Synthetic oligonucleotide
aaagcucagcuugacacgg

SEQ ID NO: 447235 - RNA, 19 nt, Artificial Sequence
  Description of Artificial Sequence: Synthetic oligonucleotide
ugugaagugaucgauggga

SEQ ID NO: 447236 - RNA, 19 nt, Artificial Sequence
  Description of Artificial Sequence: Synthetic oligonucleotide
agcuguuucaaguacgaug

SEQ ID NO: 447237 - RNA, 19 nt, Artificial Sequence
  Description of Artificial Sequence: Synthetic oligonucleotide
agacucucaggcuccaugc

SEQ ID NO: 447238 - RNA, 19 nt, Artificial Sequence
  Description of Artificial Sequence: Synthetic oligonucleotide
ugggcuguaaacuucccag

SEQ ID NO: 447239 - RNA, 19 nt, Artificial Sequence
  Description of Artificial Sequence: Synthetic oligonucleotide
uugccuagcauacucgcag

SEQ ID NO: 447240 - RNA, 19 nt, Artificial Sequence
  Description of Artificial Sequence: Synthetic oligonucleotide
uucaccuugaaggucagcc

SEQ ID NO: 447241 - RNA, 19 nt, Artificial Sequence
  Description of Artificial Sequence: Synthetic oligonucleotide
aauaaggcuuggcuggugu

SEQ ID NO: 447242 - RNA, 19 nt, Artificial Sequence
  Description of Artificial Sequence: Synthetic oligonucleotide
aagucuuaauguccucagg

SEQ ID NO: 447243 - RNA, 19 nt, Artificial Sequence
  Description of Artificial Sequence: Synthetic oligonucleotide
uuaagacccgauauugcug

SEQ ID NO: 447244 - RNA, 19 nt, Artificial Sequence
  Description of Artificial Sequence: Synthetic oligonucleotide
caggguugaagaaggaugg

SEQ ID NO: 447245 - RNA, 19 nt, Artificial Sequence
  Description of Artificial Sequence: Synthetic oligonucleotide
uucaaguacgaugucacug

SEQ ID NO: 447246 - RNA, 19 nt, Artificial Sequence
  Description of Artificial Sequence: Synthetic oligonucleotide
acuacgaugagcaaagccu

SEQ ID NO: 447247 - RNA, 19 nt, Artificial Sequence
  Description of Artificial Sequence: Synthetic oligonucleotide
gguaccuggacucacaaug

SEQ ID NO: 447248 - RNA, 19 nt, Artificial Sequence
  Description of Artificial Sequence: Synthetic oligonucleotide
gaaaccgagguugaagucc

SEQ ID NO: 447249 - RNA, 19 nt, Artificial Sequence
  Description of Artificial Sequence: Synthetic oligonucleotide
uggguuuugggucagggau

SEQ ID NO: 447250 - RNA, 19 nt, Artificial Sequence
  Description of Artificial Sequence: Synthetic oligonucleotide
aaaguucaccuugaagguc

SEQ ID NO: 447251 - RNA, 19 nt, Artificial Sequence
  Description of Artificial Sequence: Synthetic oligonucleotide
uauggggagaugaugccca

SEQ ID NO: 447252 - RNA, 19 nt, Artificial Sequence
  Description of Artificial Sequence: Synthetic oligonucleotide
ugggcuauugcccucucgc

SEQ ID NO: 447253 - RNA, 19 nt, Artificial Sequence
  Description of Artificial Sequence: Synthetic oligonucleotide
ugggaaacugggcugacac

SEQ ID NO: 447254 - RNA, 19 nt, Artificial Sequence
  Description of Artificial Sequence: Synthetic oligonucleotide
gaagugaucgaugggaaac

SEQ ID NO: 447255 - RNA, 19 nt, Artificial Sequence
  Description of Artificial Sequence: Synthetic oligonucleotide
ugacgcuucguucuugccc

SEQ ID NO: 447256 - RNA, 19 nt, Artificial Sequence
  Description of Artificial Sequence: Synthetic oligonucleotide
uugcggagcaguuugguga

SEQ ID NO: 447257 - RNA, 19 nt, Artificial Sequence
  Description of Artificial Sequence: Synthetic oligonucleotide
ugcuauggccaccagacuc

SEQ ID NO: 447258 - RNA, 19 nt, Artificial Sequence
  Description of Artificial Sequence: Synthetic oligonucleotide
uggugaacgcagcacaggc

SEQ ID NO: 447259 - RNA, 19 nt, Artificial Sequence
  Description of Artificial Sequence: Synthetic oligonucleotide
guaguugcggagcaguuug

SEQ ID NO: 447260 - RNA, 19 nt, Artificial Sequence
  Description of Artificial Sequence: Synthetic oligonucleotide
aaaggggcauccaguauac

SEQ ID NO: 447261 - RNA, 19 nt, Artificial Sequence
  Description of Artificial Sequence: Synthetic oligonucleotide
uuaaggaaaccgagguuga

SEQ ID NO: 447262 - RNA, 19 nt, Artificial Sequence
  Description of Artificial Sequence: Synthetic oligonucleotide
aggaaaccgagguugaagu

SEQ ID NO: 447263 - RNA, 19 nt, Artificial Sequence
  Description of Artificial Sequence: Synthetic oligonucleotide
uagaacggcauuuuguuuu

SEQ ID NO: 447264 - RNA, 19 nt, Artificial Sequence
  Description of Artificial Sequence: Synthetic oligonucleotide
uacagcaagucuuaauguc

SEQ ID NO: 447265 - RNA, 19 nt, Artificial Sequence
  Description of Artificial Sequence: Synthetic oligonucleotide
uccacaaaucggcucagga

SEQ ID NO: 447266 - RNA, 19 nt, Artificial Sequence
  Description of Artificial Sequence: Synthetic oligonucleotide
gugaacgcagcacaggccc

SEQ ID NO: 447267 - RNA, 19 nt, Artificial Sequence
  Description of Artificial Sequence: Synthetic oligonucleotide
cacuaugugacagucuugc

SEQ ID NO: 447268 - RNA, 19 nt, Artificial Sequence
  Description of Artificial Sequence: Synthetic oligonucleotide
acuuguaagggcaggcccc

SEQ ID NO: 447269 - RNA, 19 nt, Artificial Sequence
  Description of Artificial Sequence: Synthetic oligonucleotide
gggauaggcagcaauaagg

SEQ ID NO: 447270 - RNA, 19 nt, Artificial Sequence
  Description of Artificial Sequence: Synthetic oligonucleotide
uuugggucagggauaggca

SEQ ID NO: 447271 - RNA, 19 nt, Artificial Sequence
  Description of Artificial Sequence: Synthetic oligonucleotide
cauuacaccauggaagaug

SEQ ID NO: 447272 - RNA, 19 nt, Artificial Sequence
  Description of Artificial Sequence: Synthetic oligonucleotide
ugcauagaacggcauuuug

SEQ ID NO: 447273 - RNA, 19 nt, Artificial Sequence
  Description of Artificial Sequence: Synthetic oligonucleotide
caccccguagcacugaggg

SEQ ID NO: 447274 - RNA, 19 nt, Artificial Sequence
  Description of Artificial Sequence: Synthetic oligonucleotide
gaagaugugugugaaguga

SEQ ID NO: 447275 - RNA, 19 nt, Artificial Sequence
  Description of Artificial Sequence: Synthetic oligonucleotide
ggaguuguaggugaguagg

SEQ ID NO: 447276 - RNA, 19 nt, Artificial Sequence
  Description of Artificial Sequence: Synthetic oligonucleotide
caucuuugcccauuacacc

SEQ ID NO: 447277 - RNA, 19 nt, Artificial Sequence
  Description of Artificial Sequence: Synthetic oligonucleotide
aggguucgacuccagacuc

SEQ ID NO: 447278 - RNA, 19 nt, Artificial Sequence
  Description of Artificial Sequence: Synthetic oligonucleotide
uuacccuucuuggaggaag

SEQ ID NO: 447279 - RNA, 19 nt, Artificial Sequence
  Description of Artificial Sequence: Synthetic oligonucleotide
ggagauuuuggugacgccg

SEQ ID NO: 447280 - RNA, 19 nt, Artificial Sequence
  Description of Artificial Sequence: Synthetic oligonucleotide
gaugagggugguaauuaag

SEQ ID NO: 447281 - RNA, 19 nt, Artificial Sequence
  Description of Artificial Sequence: Synthetic oligonucleotide
gaugacgcuucguucuugc

SEQ ID NO: 447282 - RNA, 19 nt, Artificial Sequence
  Description of Artificial Sequence: Synthetic oligonucleotide
cacguugaaccucuugggg

SEQ ID NO: 447283 - RNA, 19 nt, Artificial Sequence
  Description of Artificial Sequence: Synthetic oligonucleotide
cacuacgaugagcaaagcc

SEQ ID NO: 447284 - RNA, 19 nt, Artificial Sequence
  Description of Artificial Sequence: Synthetic oligonucleotide
uccaguccgggucauggcc

SEQ ID NO: 447285 - RNA, 19 nt, Artificial Sequence
  Description of Artificial Sequence: Synthetic oligonucleotide
auuacaccauggaagauga

SEQ ID NO: 447286 - RNA, 19 nt, Artificial Sequence
  Description of Artificial Sequence: Synthetic oligonucleotide
cauaguacagccgguuagg

SEQ ID NO: 447287 - RNA, 19 nt, Artificial Sequence
  Description of Artificial Sequence: Synthetic oligonucleotide
uuugcauagaacggcauuu

SEQ ID NO: 447288 - RNA, 19 nt, Artificial Sequence
  Description of Artificial Sequence: Synthetic oligonucleotide
accauucggaugucccugc

SEQ ID NO: 447289 - RNA, 19 nt, Artificial Sequence
  Description of Artificial Sequence: Synthetic oligonucleotide
aaguacgaugucacugugg

SEQ ID NO: 447290 - RNA, 19 nt, Artificial Sequence
  Description of Artificial Sequence: Synthetic oligonucleotide
aguaaauccugucccugcu

SEQ ID NO: 447291 - RNA, 19 nt, Artificial Sequence
  Description of Artificial Sequence: Synthetic oligonucleotide
ugguaauuaagacccgaua

SEQ ID NO: 447292 - RNA, 19 nt, Artificial Sequence
  Description of Artificial Sequence: Synthetic oligonucleotide
ugagggacggcucucgguc

SEQ ID NO: 447293 - RNA, 19 nt, Artificial Sequence
  Description of Artificial Sequence: Synthetic oligonucleotide
agcauacucgcaguugugg

SEQ ID NO: 447294 - RNA, 19 nt, Artificial Sequence
  Description of Artificial Sequence: Synthetic oligonucleotide
accuggacucacaaugugc

SEQ ID NO: 447295 - RNA, 19 nt, Artificial Sequence
  Description of Artificial Sequence: Synthetic oligonucleotide
cuugccgguaccuggacuc

SEQ ID NO: 447296 - RNA, 19 nt, Artificial Sequence
  Description of Artificial Sequence: Synthetic oligonucleotide
augguuugggcuguaaacu

SEQ ID NO: 447297 - RNA, 19 nt, Artificial Sequence
  Description of Artificial Sequence: Synthetic oligonucleotide
caguccucgaaguucccgg

SEQ ID NO: 447298 - RNA, 19 nt, Artificial Sequence
  Description of Artificial Sequence: Synthetic oligonucleotide
ucguucuugcccuuggaau

SEQ ID NO: 447299 - RNA, 19 nt, Artificial Sequence
  Description of Artificial Sequence: Synthetic oligonucleotide
uugggcuguaaacuuccca

SEQ ID NO: 447300 - RNA, 19 nt, Artificial Sequence
  Description of Artificial Sequence: Synthetic oligonucleotide
aggaguuguaggugaguag

SEQ ID NO: 447301 - RNA, 19 nt, Artificial Sequence
  Description of Artificial Sequence: Synthetic oligonucleotide
gauuuuggugacgccgggg

SEQ ID NO: 447302 - RNA, 19 nt, Artificial Sequence
  Description of Artificial Sequence: Synthetic oligonucleotide
gguucuuaaggaaaccgag

SEQ ID NO: 447303 - RNA, 19 nt, Artificial Sequence
  Description of Artificial Sequence: Synthetic oligonucleotide
uuuuggugacgccggggcc

SEQ ID NO: 447304 - RNA, 19 nt, Artificial Sequence
  Description of Artificial Sequence: Synthetic oligonucleotide
ugaggaugacgcuucguuc

SEQ ID NO: 447305 - RNA, 19 nt, Artificial Sequence
  Description of Artificial Sequence: Synthetic oligonucleotide
guauaaggaguuguaggug

SEQ ID NO: 447306 - RNA, 19 nt, Artificial Sequence
  Description of Artificial Sequence: Synthetic oligonucleotide
aaccuccagugugagcagc

SEQ ID NO: 447307 - RNA, 19 nt, Artificial Sequence
  Description of Artificial Sequence: Synthetic oligonucleotide
agauuuuggugacgccggg

SEQ ID NO: 447308 - RNA, 19 nt, Artificial Sequence
  Description of Artificial Sequence: Synthetic oligonucleotide
guagugccggauaucaugc

SEQ ID NO: 447309 - RNA, 19 nt, Artificial Sequence
  Description of Artificial Sequence: Synthetic oligonucleotide
aagugaucgaugggaaacu

SEQ ID NO: 447310 - RNA, 19 nt, Artificial Sequence
  Description of Artificial Sequence: Synthetic oligonucleotide
augaggaugacgcuucguu

SEQ ID NO: 447311 - RNA, 19 nt, Artificial Sequence
  Description of Artificial Sequence: Synthetic oligonucleotide
uggacucacaaugugcuuc

SEQ ID NO: 447312 - RNA, 19 nt, Artificial Sequence
  Description of Artificial Sequence: Synthetic oligonucleotide
uuucaaguacgaugucacu

SEQ ID NO: 447313 - RNA, 19 nt, Artificial Sequence
  Description of Artificial Sequence: Synthetic oligonucleotide
uacgaugagcaaagccuug

SEQ ID NO: 447314 - RNA, 19 nt, Artificial Sequence
  Description of Artificial Sequence: Synthetic oligonucleotide
agaagacgguagauggagc

SEQ ID NO: 447315 - RNA, 19 nt, Artificial Sequence
  Description of Artificial Sequence: Synthetic oligonucleotide
augagggugguaauuaaga

SEQ ID NO: 447316 - RNA, 19 nt, Artificial Sequence
  Description of Artificial Sequence: Synthetic oligonucleotide
ucacuaugugacagucuug

SEQ ID NO: 447317 - RNA, 19 nt, Artificial Sequence
  Description of Artificial Sequence: Synthetic oligonucleotide
aaaccgagguugaagucca

SEQ ID NO: 447318 - RNA, 19 nt, Artificial Sequence
  Description of Artificial Sequence: Synthetic oligonucleotide
ugcccuuggaauucuucca

SEQ ID NO: 447319 - RNA, 19 nt, Artificial Sequence
  Description of Artificial Sequence: Synthetic oligonucleotide
cuccaucauaguacagccg

SEQ ID NO: 447320 - RNA, 19 nt, Artificial Sequence
  Description of Artificial Sequence: Synthetic oligonucleotide
cagguggucaccccguagc

SEQ ID NO: 447321 - RNA, 19 nt, Artificial Sequence
  Description of Artificial Sequence: Synthetic oligonucleotide
gguaauuaagacccgauau

SEQ ID NO: 447322 - RNA, 19 nt, Artificial Sequence
  Description of Artificial Sequence: Synthetic oligonucleotide
gaagacgguagauggagcu

SEQ ID NO: 447323 - RNA, 19 nt, Artificial Sequence
  Description of Artificial Sequence: Synthetic oligonucleotide
uaguugcggagcaguuugg

SEQ ID NO: 447324 - RNA, 19 nt, Artificial Sequence
  Description of Artificial Sequence: Synthetic oligonucleotide
ucgaaguucccggucaagu

SEQ ID NO: 447325 - RNA, 19 nt, Artificial Sequence
  Description of Artificial Sequence: Synthetic oligonucleotide
aagacgguagauggagcug

SEQ ID NO: 447326 - RNA, 19 nt, Artificial Sequence
  Description of Artificial Sequence: Synthetic oligonucleotide
gaguuggauggagugcagg

SEQ ID NO: 447327 - RNA, 19 nt, Artificial Sequence
  Description of Artificial Sequence: Synthetic oligonucleotide
gaugucauccaguccucga

SEQ ID NO: 447328 - RNA, 19 nt, Artificial Sequence
  Description of Artificial Sequence: Synthetic oligonucleotide
gugaucgaugggaaacugg

SEQ ID NO: 447329 - RNA, 19 nt, Artificial Sequence
  Description of Artificial Sequence: Synthetic oligonucleotide
ugauggccucacuauguga

SEQ ID NO: 447330 - RNA, 19 nt, Artificial Sequence
  Description of Artificial Sequence: Synthetic oligonucleotide
gaggaugacgcuucguucu

SEQ ID NO: 447331 - RNA, 19 nt, Artificial Sequence
  Description of Artificial Sequence: Synthetic oligonucleotide
uaccauucggaugucccug

SEQ ID NO: 447332 - RNA, 19 nt, Artificial Sequence
  Description of Artificial Sequence: Synthetic oligonucleotide
agaggacaaaagggcaaac

SEQ ID NO: 447333 - RNA, 19 nt, Artificial Sequence
  Description of Artificial Sequence: Synthetic oligonucleotide
uuccgguauggggagauga

SEQ ID NO: 447334 - RNA, 19 nt, Artificial Sequence
  Description of Artificial Sequence: Synthetic oligonucleotide
uggauugcccguuuccuuu

SEQ ID NO: 447335 - RNA, 19 nt, Artificial Sequence
  Description of Artificial Sequence: Synthetic oligonucleotide
auagaacggcauuuuguuu

SEQ ID NO: 447336 - RNA, 19 nt, Artificial Sequence
  Description of Artificial Sequence: Synthetic oligonucleotide
gaagaaggaugggcuauug

SEQ ID NO: 447337 - RNA, 19 nt, Artificial Sequence
  Description of Artificial Sequence: Synthetic oligonucleotide
ggugcugaacccgaagggg

SEQ ID NO: 447338 - RNA, 19 nt, Artificial Sequence
  Description of Artificial Sequence: Synthetic oligonucleotide
uggugaugcaguaccggau

SEQ ID NO: 447339 - RNA, 19 nt, Artificial Sequence
  Description of Artificial Sequence: Synthetic oligonucleotide
guauggggagaugaugccc

SEQ ID NO: 447340 - RNA, 19 nt, Artificial Sequence
  Description of Artificial Sequence: Synthetic oligonucleotide
ugacagucuugccgguacc

SEQ ID NO: 447341 - RNA, 19 nt, Artificial Sequence
  Description of Artificial Sequence: Synthetic oligonucleotide
ucuugccgguaccuggacu

SEQ ID NO: 447342 - RNA, 19 nt, Artificial Sequence
  Description of Artificial Sequence: Synthetic oligonucleotide
auaaggaguuguaggugag

SEQ ID NO: 447343 - RNA, 19 nt, Artificial Sequence
  Description of Artificial Sequence: Synthetic oligonucleotide
ccgauauugcuggagaugc

SEQ ID NO: 447344 - RNA, 19 nt, Artificial Sequence
  Description of Artificial Sequence: Synthetic oligonucleotide
uuggcaggauauacauacu

SEQ ID NO: 447345 - RNA, 19 nt, Artificial Sequence
  Description of Artificial Sequence: Synthetic oligonucleotide
guaauuaagacccgauauu

SEQ ID NO: 447346 - RNA, 19 nt, Artificial Sequence
  Description of Artificial Sequence: Synthetic oligonucleotide
cuucggacgguggagauga

SEQ ID NO: 447347 - RNA, 19 nt, Artificial Sequence
  Description of Artificial Sequence: Synthetic oligonucleotide
ugcuugcuugccuagcaua

SEQ ID NO: 447348 - RNA, 19 nt, Artificial Sequence
  Description of Artificial Sequence: Synthetic oligonucleotide
gaguaggcgcuccagcaga

SEQ ID NO: 447349 - RNA, 19 nt, Artificial Sequence
  Description of Artificial Sequence: Synthetic oligonucleotide
cagcuuggguuauuuuccc

SEQ ID NO: 447350 - RNA, 19 nt, Artificial Sequence
  Description of Artificial Sequence: Synthetic oligonucleotide
uggcgguugaagguaaagu

SEQ ID NO: 447351 - RNA, 19 nt, Artificial Sequence
  Description of Artificial Sequence: Synthetic oligonucleotide
ucaccccguagcacugagg

SEQ ID NO: 447352 - RNA, 19 nt, Artificial Sequence
  Description of Artificial Sequence: Synthetic oligonucleotide
ucggacgguggagaugagg

SEQ ID NO: 447353 - RNA, 19 nt, Artificial Sequence
  Description of Artificial Sequence: Synthetic oligonucleotide
gacgcuucguucuugcccu

SEQ ID NO: 447354 - RNA, 19 nt, Artificial Sequence
  Description of Artificial Sequence: Synthetic oligonucleotide
gguaccauucggauguccc

SEQ ID NO: 447355 - RNA, 19 nt, Artificial Sequence
  Description of Artificial Sequence: Synthetic oligonucleotide
agugaucgaugggaaacug

SEQ ID NO: 447356 - RNA, 19 nt, Artificial Sequence
  Description of Artificial Sequence: Synthetic oligonucleotide
agggguggaaugguuuggg

SEQ ID NO: 447357 - RNA, 19 nt, Artificial Sequence
  Description of Artificial Sequence: Synthetic oligonucleotide
ccacaaaucggcucaggag

SEQ ID NO: 447358 - RNA, 19 nt, Artificial Sequence
  Description of Artificial Sequence: Synthetic oligonucleotide
agguaccauucggaugucc

SEQ ID NO: 447359 - RNA, 19 nt, Artificial Sequence
  Description of Artificial Sequence: Synthetic oligonucleotide
accgagguugaaguccagg

SEQ ID NO: 447360 - RNA, 19 nt, Artificial Sequence
  Description of Artificial Sequence: Synthetic oligonucleotide
cucgguccaccacaucugc

SEQ ID NO: 447361 - RNA, 19 nt, Artificial Sequence
  Description of Artificial Sequence: Synthetic oligonucleotide
cuuuacccuucuuggagga

SEQ ID NO: 447362 - RNA, 19 nt, Artificial Sequence
  Description of Artificial Sequence: Synthetic oligonucleotide
agcugcucaggguucgacu

SEQ ID NO: 447363 - RNA, 19 nt, Artificial Sequence
  Description of Artificial Sequence: Synthetic oligonucleotide
agggacggcucucggucac

SEQ ID NO: 447364 - RNA, 19 nt, Artificial Sequence
  Description of Artificial Sequence: Synthetic oligonucleotide
gggugagaccuguaguugc

SEQ ID NO: 447365 - RNA, 19 nt, Artificial Sequence
  Description of Artificial Sequence: Synthetic oligonucleotide
uuagcagcuuggguuauuu

SEQ ID NO: 447366 - RNA, 19 nt, Artificial Sequence
  Description of Artificial Sequence: Synthetic oligonucleotide
gugcugaacccgaaggggc

SEQ ID NO: 447367 - RNA, 19 nt, Artificial Sequence
  Description of Artificial Sequence: Synthetic oligonucleotide
ucaugggcaccgacuccag

SEQ ID NO: 447368 - RNA, 19 nt, Artificial Sequence
  Description of Artificial Sequence: Synthetic oligonucleotide
ggugaguaggcgcuccagc

SEQ ID NO: 447369 - RNA, 19 nt, Artificial Sequence
  Description of Artificial Sequence: Synthetic oligonucleotide
uccgguauggggagaugau

SEQ ID NO: 447370 - RNA, 19 nt, Artificial Sequence
  Description of Artificial Sequence: Synthetic oligonucleotide
aggucguagugccggauau

SEQ ID NO: 447371 - RNA, 19 nt, Artificial Sequence
  Description of Artificial Sequence: Synthetic oligonucleotide
acaaaagggcaaacaggug

SEQ ID NO: 447372 - RNA, 19 nt, Artificial Sequence
  Description of Artificial Sequence: Synthetic oligonucleotide
gggguugcccacuacgaug

SEQ ID NO: 447373 - RNA, 19 nt, Artificial Sequence
  Description of Artificial Sequence: Synthetic oligonucleotide
aguuugcucaggccuugga

SEQ ID NO: 447374 - RNA, 19 nt, Artificial Sequence
  Description of Artificial Sequence: Synthetic oligonucleotide
cuugauggccucacuaugu

SEQ ID NO: 447375 - RNA, 19 nt, Artificial Sequence
  Description of Artificial Sequence: Synthetic oligonucleotide
aaucggcucaggaggcuug

SEQ ID NO: 447376 - RNA, 19 nt, Artificial Sequence
  Description of Artificial Sequence: Synthetic oligonucleotide
uguaguugcggagcaguuu

SEQ ID NO: 447377 - RNA, 19 nt, Artificial Sequence
  Description of Artificial Sequence: Synthetic oligonucleotide
guggugaacgcagcacagg

SEQ ID NO: 447378 - RNA, 19 nt, Artificial Sequence
  Description of Artificial Sequence: Synthetic oligonucleotide
ugcggagcaguuuggugau

SEQ ID NO: 447379 - RNA, 19 nt, Artificial Sequence
  Description of Artificial Sequence: Synthetic oligonucleotide
ccacguugaaccucuuggg

SEQ ID NO: 447380 - RNA, 19 nt, Artificial Sequence
  Description of Artificial Sequence: Synthetic oligonucleotide
agugaugagggugguaauu

SEQ ID NO: 447381 - RNA, 19 nt, Artificial Sequence
  Description of Artificial Sequence: Synthetic oligonucleotide
uagccaagcccaugcuucu

SEQ ID NO: 447382 - RNA, 19 nt, Artificial Sequence
  Description of Artificial Sequence: Synthetic oligonucleotide
uuccaguccgggucauggc

SEQ ID NO: 447383 - RNA, 19 nt, Artificial Sequence
  Description of Artificial Sequence: Synthetic oligonucleotide
cacuaccugcuugauggcc

SEQ ID NO: 447384 - RNA, 19 nt, Artificial Sequence
  Description of Artificial Sequence: Synthetic oligonucleotide
ucgacuccagacuccgauc

SEQ ID NO: 447385 - RNA, 19 nt, Artificial Sequence
  Description of Artificial Sequence: Synthetic oligonucleotide
ugccggauaucaugcucca

SEQ ID NO: 447386 - RNA, 19 nt, Artificial Sequence
  Description of Artificial Sequence: Synthetic oligonucleotide
caucgcucugucaacucca

SEQ ID NO: 447387 - RNA, 19 nt, Artificial Sequence
  Description of Artificial Sequence: Synthetic oligonucleotide
gcuauugcccucucgcuca

SEQ ID NO: 447388 - RNA, 19 nt, Artificial Sequence
  Description of Artificial Sequence: Synthetic oligonucleotide
ggggagauuuuggugacgc

SEQ ID NO: 447389 - RNA, 19 nt, Artificial Sequence
  Description of Artificial Sequence: Synthetic oligonucleotide
caguggugaacgcagcaca

SEQ ID NO: 447390 - RNA, 19 nt, Artificial Sequence
  Description of Artificial Sequence: Synthetic oligonucleotide
gacgguagauggagcuggg

SEQ ID NO: 447391 - RNA, 19 nt, Artificial Sequence
  Description of Artificial Sequence: Synthetic oligonucleotide
cucacuaugugacagucuu

SEQ ID NO: 447392 - RNA, 19 nt, Artificial Sequence
  Description of Artificial Sequence: Synthetic oligonucleotide
ucaggccuuggaguaaauc

SEQ ID NO: 447393 - RNA, 19 nt, Artificial Sequence
  Description of Artificial Sequence: Synthetic oligonucleotide
gugagaccuguaguugcgg

SEQ ID NO: 447394 - RNA, 19 nt, Artificial Sequence
  Description of Artificial Sequence: Synthetic oligonucleotide
cagccgguuagggaugucc

SEQ ID NO: 447395 - RNA, 19 nt, Artificial Sequence
  Description of Artificial Sequence: Synthetic oligonucleotide
gauugcccguuuccuuuac

SEQ ID NO: 447396 - RNA, 19 nt, Artificial Sequence
  Description of Artificial Sequence: Synthetic oligonucleotide
acgguggagaugaggauga

SEQ ID NO: 447397 - RNA, 19 nt, Artificial Sequence
  Description of Artificial Sequence: Synthetic oligonucleotide
uaggugauaggguccucuu

SEQ ID NO: 447398 - RNA, 19 nt, Artificial Sequence
  Description of Artificial Sequence: Synthetic oligonucleotide
cugcuuccgguauggggag

SEQ ID NO: 447399 - RNA, 19 nt, Artificial Sequence
  Description of Artificial Sequence: Synthetic oligonucleotide
cguagugccggauaucaug

SEQ ID NO: 447400 - RNA, 19 nt, Artificial Sequence
  Description of Artificial Sequence: Synthetic oligonucleotide
auugcccguuuccuuuaca

SEQ ID NO: 447401 - RNA, 19 nt, Artificial Sequence
  Description of Artificial Sequence: Synthetic oligonucleotide
ugaagaaggaugggcuauu

SEQ ID NO: 447402 - RNA, 19 nt, Artificial Sequence
  Description of Artificial Sequence: Synthetic oligonucleotide
acccgauauugcuggagau

SEQ ID NO: 447403 - RNA, 19 nt, Artificial Sequence
  Description of Artificial Sequence: Synthetic oligonucleotide
gaacccgaaggggcuggcg

SEQ ID NO: 447404 - RNA, 19 nt, Artificial Sequence
  Description of Artificial Sequence: Synthetic oligonucleotide
cuggcgguugaagguaaag

SEQ ID NO: 447405 - RNA, 19 nt, Artificial Sequence
  Description of Artificial Sequence: Synthetic oligonucleotide
aguugcggagcaguuuggu

SEQ ID NO: 447406 - RNA, 19 nt, Artificial Sequence
  Description of Artificial Sequence: Synthetic oligonucleotide
agauggagcuggguaggug

SEQ ID NO: 447407 - RNA, 19 nt, Artificial Sequence
  Description of Artificial Sequence: Synthetic oligonucleotide
uagugccggauaucaugcu

SEQ ID NO: 447408 - RNA, 19 nt, Artificial Sequence
  Description of Artificial Sequence: Synthetic oligonucleotide
guagguggacccggagccg

SEQ ID NO: 447409 - RNA, 19 nt, Artificial Sequence
  Description of Artificial Sequence: Synthetic oligonucleotide
gacugcuugcuugccuagc

SEQ ID NO: 447410 - RNA, 19 nt, Artificial Sequence
  Description of Artificial Sequence: Synthetic oligonucleotide
agcuugacacgguccaguu

SEQ ID NO: 447411 - RNA, 19 nt, Artificial Sequence
  Description of Artificial Sequence: Synthetic oligonucleotide
guggccagccucaucgaug

SEQ ID NO: 447412 - RNA, 19 nt, Artificial Sequence
  Description of Artificial Sequence: Synthetic oligonucleotide
ucguagugccggauaucau

SEQ ID NO: 447413 - RNA, 19 nt, Artificial Sequence
  Description of Artificial Sequence: Synthetic oligonucleotide
ggacucacaaugugcuuca

SEQ ID NO: 447414 - RNA, 19 nt, Artificial Sequence
  Description of Artificial Sequence: Synthetic oligonucleotide
ggcuauugcccucucgcuc

SEQ ID NO: 447415 - RNA, 19 nt, Artificial Sequence
  Description of Artificial Sequence: Synthetic oligonucleotide
cucucggucacaccaggaa

SEQ ID NO: 447416 - RNA, 19 nt, Artificial Sequence
  Description of Artificial Sequence: Synthetic oligonucleotide
uuuacccuucuuggaggaa

SEQ ID NO: 447417 - RNA, 19 nt, Artificial Sequence
  Description of Artificial Sequence: Synthetic oligonucleotide
cuggguuuugggucaggga

SEQ ID NO: 447418 - RNA, 19 nt, Artificial Sequence
  Description of Artificial Sequence: Synthetic oligonucleotide
gggaaacugggcugacacc

SEQ ID NO: 447419 - RNA, 19 nt, Artificial Sequence
  Description of Artificial Sequence: Synthetic oligonucleotide
gcgguugaagguaaaguuc

SEQ ID NO: 447420 - RNA, 19 nt, Artificial Sequence
  Description of Artificial Sequence: Synthetic oligonucleotide
cacuguggcggccucuuca

SEQ ID NO: 447421 - RNA, 19 nt, Artificial Sequence
  Description of Artificial Sequence: Synthetic oligonucleotide
ggcucucggucacaccagg

SEQ ID NO: 447422 - RNA, 19 nt, Artificial Sequence
  Description of Artificial Sequence: Synthetic oligonucleotide
agcgacagacugcuugcuu

SEQ ID NO: 447423 - RNA, 19 nt, Artificial Sequence
  Description of Artificial Sequence: Synthetic oligonucleotide
gcuugcuugccuagcauac

SEQ ID NO: 447424 - RNA, 19 nt, Artificial Sequence
  Description of Artificial Sequence: Synthetic oligonucleotide
agcuggguagguggacccg

SEQ ID NO: 447425 - RNA, 19 nt, Artificial Sequence
  Description of Artificial Sequence: Synthetic oligonucleotide
acccgaaggggcuggcggu

SEQ ID NO: 447426 - RNA, 19 nt, Artificial Sequence
  Description of Artificial Sequence: Synthetic oligonucleotide
ccaucgcucugucaacucc

SEQ ID NO: 447427 - RNA, 19 nt, Artificial Sequence
  Description of Artificial Sequence: Synthetic oligonucleotide
ggcccugagguagaggggc

SEQ ID NO: 447428 - RNA, 19 nt, Artificial Sequence
  Description of Artificial Sequence: Synthetic oligonucleotide
ggguucuuaaggaaaccga

SEQ ID NO: 447429 - RNA, 19 nt, Artificial Sequence
  Description of Artificial Sequence: Synthetic oligonucleotide
agccaucgcucugucaacu

SEQ ID NO: 447430 - RNA, 19 nt, Artificial Sequence
  Description of Artificial Sequence: Synthetic oligonucleotide
ggugaacgcagcacaggcc

SEQ ID NO: 447431 - RNA, 19 nt, Artificial Sequence
  Description of Artificial Sequence: Synthetic oligonucleotide
uuacaccauggaagaugau

SEQ ID NO: 447432 - RNA, 19 nt, Artificial Sequence
  Description of Artificial Sequence: Synthetic oligonucleotide
ccaccagacucucaggcuc

SEQ ID NO: 447433 - RNA, 19 nt, Artificial Sequence
  Description of Artificial Sequence: Synthetic oligonucleotide
guaccauucggaugucccu

SEQ ID NO: 447434 - RNA, 19 nt, Artificial Sequence
  Description of Artificial Sequence: Synthetic oligonucleotide
aggaugacgcuucguucuu

SEQ ID NO: 447435 - RNA, 19 nt, Artificial Sequence
  Description of Artificial Sequence: Synthetic oligonucleotide
gacggcucucggucacacc

SEQ ID NO: 447436 - RNA, 19 nt, Artificial Sequence
  Description of Artificial Sequence: Synthetic oligonucleotide
uacagccgguuagggaugu

SEQ ID NO: 447437 - RNA, 19 nt, Artificial Sequence
  Description of Artificial Sequence: Synthetic oligonucleotide
cuacgaugagcaaagccuu

SEQ ID NO: 447438 - RNA, 19 nt, Artificial Sequence
  Description of Artificial Sequence: Synthetic oligonucleotide
gagggacggcucucgguca

SEQ ID NO: 447439 - RNA, 19 nt, Artificial Sequence
  Description of Artificial Sequence: Synthetic oligonucleotide
cauggccuaggaggagggg

SEQ ID NO: 447440 - RNA, 19 nt, Artificial Sequence
  Description of Artificial Sequence: Synthetic oligonucleotide
cucgaaguucccggucaag

SEQ ID NO: 447441 - RNA, 19 nt, Artificial Sequence
  Description of Artificial Sequence: Synthetic oligonucleotide
uggggcccuucuuguauaa

SEQ ID NO: 447442 - RNA, 19 nt, Artificial Sequence
  Description of Artificial Sequence: Synthetic oligonucleotide
ccgguuagggauguccagg

SEQ ID NO: 447443 - RNA, 19 nt, Artificial Sequence
  Description of Artificial Sequence: Synthetic oligonucleotide
gaacgcagcacaggcccca

SEQ ID NO: 447444 - RNA, 19 nt, Artificial Sequence
  Description of Artificial Sequence: Synthetic oligonucleotide
gggguggaaugguuugggc

SEQ ID NO: 447445 - RNA, 19 nt, Artificial Sequence
  Description of Artificial Sequence: Synthetic oligonucleotide
guacagccgguuagggaug

SEQ ID NO: 447446 - RNA, 19 nt, Artificial Sequence
  Description of Artificial Sequence: Synthetic oligonucleotide
gggagauuuuggugacgcc

SEQ ID NO: 447447 - RNA, 19 nt, Artificial Sequence
  Description of Artificial Sequence: Synthetic oligonucleotide
ggguggaaugguuugggcu

SEQ ID NO: 447448 - RNA, 19 nt, Artificial Sequence
  Description of Artificial Sequence: Synthetic oligonucleotide
agccgguuagggaugucca

SEQ ID NO: 447449 - RNA, 19 nt, Artificial Sequence
  Description of Artificial Sequence: Synthetic oligonucleotide
aggucagcccauccacaaa

SEQ ID NO: 447450 - RNA, 19 nt, Artificial Sequence
  Description of Artificial Sequence: Synthetic oligonucleotide
cagccaucgcucugucaac

SEQ ID NO: 447451 - RNA, 19 nt, Artificial Sequence
  Description of Artificial Sequence: Synthetic oligonucleotide
gucagggauaggcagcaau

SEQ ID NO: 447452 - RNA, 19 nt, Artificial Sequence
  Description of Artificial Sequence: Synthetic oligonucleotide
uucggacgguggagaugag

SEQ ID NO: 447453 - RNA, 19 nt, Artificial Sequence
  Description of Artificial Sequence: Synthetic oligonucleotide
ccuagcauacucgcaguug

SEQ ID NO: 447454 - RNA, 19 nt, Artificial Sequence
  Description of Artificial Sequence: Synthetic oligonucleotide
ugaacccgaaggggcuggc

SEQ ID NO: 447455 - RNA, 19 nt, Artificial Sequence
  Description of Artificial Sequence: Synthetic oligonucleotide
cacagagcccaccuucaaa

SEQ ID NO: 447456 - RNA, 19 nt, Artificial Sequence
  Description of Artificial Sequence: Synthetic oligonucleotide
ugacacgguccaguuccac

SEQ ID NO: 447457 - RNA, 19 nt, Artificial Sequence
  Description of Artificial Sequence: Synthetic oligonucleotide
cagggauaggcagcaauaa

SEQ ID NO: 447458 - RNA, 19 nt, Artificial Sequence
  Description of Artificial Sequence: Synthetic oligonucleotide
uugccgguaccuggacuca

SEQ ID NO: 447459 - RNA, 19 nt, Artificial Sequence
  Description of Artificial Sequence: Synthetic oligonucleotide
accccguagcacugaggga

SEQ ID NO: 447460 - RNA, 19 nt, Artificial Sequence
  Description of Artificial Sequence: Synthetic oligonucleotide
gagccggcugacagaggag

SEQ ID NO: 447461 - RNA, 19 nt, Artificial Sequence
  Description of Artificial Sequence: Synthetic oligonucleotide
ggcagcaauaaggcuuggc

SEQ ID NO: 447462 - RNA, 19 nt, Artificial Sequence
  Description of Artificial Sequence: Synthetic oligonucleotide
aaccgagguugaaguccag

SEQ ID NO: 447463 - RNA, 19 nt, Artificial Sequence
  Description of Artificial Sequence: Synthetic oligonucleotide
cccauccacaaaucggcuc

SEQ ID NO: 447464 - RNA, 19 nt, Artificial Sequence
  Description of Artificial Sequence: Synthetic oligonucleotide
cagcggcagaaccuuucuc

SEQ ID NO: 447465 - RNA, 19 nt, Artificial Sequence
  Description of Artificial Sequence: Synthetic oligonucleotide
cccgauauugcuggagaug

SEQ ID NO: 447466 - RNA, 19 nt, Artificial Sequence
  Description of Artificial Sequence: Synthetic oligonucleotide
cccguagcacugagggacg

SEQ ID NO: 447467 - RNA, 19 nt, Artificial Sequence
  Description of Artificial Sequence: Synthetic oligonucleotide
gagaccccacgggaggcca

SEQ ID NO: 447468 - RNA, 19 nt, Artificial Sequence
  Description of Artificial Sequence: Synthetic oligonucleotide
gugguaauuaagacccgau

SEQ ID NO: 447469 - RNA, 19 nt, Artificial Sequence
  Description of Artificial Sequence: Synthetic oligonucleotide
acgguagauggagcugggu

SEQ ID NO: 447470 - RNA, 19 nt, Artificial Sequence
  Description of Artificial Sequence: Synthetic oligonucleotide
ugccgguaccuggacucac

SEQ ID NO: 447471 - RNA, 19 nt, Artificial Sequence
  Description of Artificial Sequence: Synthetic oligonucleotide
ggugaugcaguaccggauu

SEQ ID NO: 447472 - RNA, 19 nt, Artificial Sequence
  Description of Artificial Sequence: Synthetic oligonucleotide
aucggcucaggaggcuugu

SEQ ID NO: 447473 - RNA, 19 nt, Artificial Sequence
  Description of Artificial Sequence: Synthetic oligonucleotide
cuuucucgguccaccacau

SEQ ID NO: 447474 - RNA, 19 nt, Artificial Sequence
  Description of Artificial Sequence: Synthetic oligonucleotide
gccaguggugaacgcagca

SEQ ID NO: 447475 - RNA, 19 nt, Artificial Sequence
  Description of Artificial Sequence: Synthetic oligonucleotide
ggaugacgcuucguucuug

SEQ ID NO: 447476 - RNA, 19 nt, Artificial Sequence
  Description of Artificial Sequence: Synthetic oligonucleotide
gagaaggcgggcagcuaua

SEQ ID NO: 447477 - RNA, 19 nt, Artificial Sequence
  Description of Artificial Sequence: Synthetic oligonucleotide
caggucguagugccggaua

SEQ ID NO: 447478 - RNA, 19 nt, Artificial Sequence
  Description of Artificial Sequence: Synthetic oligonucleotide
ccgguauggggagaugaug

SEQ ID NO: 447479 - RNA, 19 nt, Artificial Sequence
  Description of Artificial Sequence: Synthetic oligonucleotide
guacaaagcucuggcugcu

SEQ ID NO: 447480 - RNA, 19 nt, Artificial Sequence
  Description of Artificial Sequence: Synthetic oligonucleotide
acagccgguuagggauguc

SEQ ID NO: 447481 - RNA, 19 nt, Artificial Sequence
  Description of Artificial Sequence: Synthetic oligonucleotide
ucccagcggcagaaccuuu

SEQ ID NO: 447482 - RNA, 19 nt, Artificial Sequence
  Description of Artificial Sequence: Synthetic oligonucleotide
gcuauggccaccagacucu

SEQ ID NO: 447483 - RNA, 19 nt, Artificial Sequence
  Description of Artificial Sequence: Synthetic oligonucleotide
cucaggcgggcuuuacccu

SEQ ID NO: 447484 - RNA, 19 nt, Artificial Sequence
  Description of Artificial Sequence: Synthetic oligonucleotide
gccaucgcucugucaacuc

SEQ ID NO: 447485 - RNA, 19 nt, Artificial Sequence
  Description of Artificial Sequence: Synthetic oligonucleotide
gcuucggacgguggagaug

SEQ ID NO: 447486 - RNA, 19 nt, Artificial Sequence
  Description of Artificial Sequence: Synthetic oligonucleotide
guggcggccucuucagggu

SEQ ID NO: 447487 - RNA, 19 nt, Artificial Sequence
  Description of Artificial Sequence: Synthetic oligonucleotide
cuggauugcccguuuccuu

SEQ ID NO: 447488 - RNA, 19 nt, Artificial Sequence
  Description of Artificial Sequence: Synthetic oligonucleotide
gaccccacgggaggccaca

SEQ ID NO: 447489 - RNA, 19 nt, Artificial Sequence
  Description of Artificial Sequence: Synthetic oligonucleotide
ggguuuugggucagggaua

SEQ ID NO: 447490 - RNA, 19 nt, Artificial Sequence
  Description of Artificial Sequence: Synthetic oligonucleotide
ggucguagugccggauauc

SEQ ID NO: 447491 - RNA, 19 nt, Artificial Sequence
  Description of Artificial Sequence: Synthetic oligonucleotide
ggggcccuucuuguauaag

SEQ ID NO: 447492 - RNA, 19 nt, Artificial Sequence
  Description of Artificial Sequence: Synthetic oligonucleotide
ccuuguguacaaaacccuu

SEQ ID NO: 447493 - RNA, 19 nt, Artificial Sequence
  Description of Artificial Sequence: Synthetic oligonucleotide
ccucuuguugggucucaga

SEQ ID NO: 447494 - RNA, 19 nt, Artificial Sequence
  Description of Artificial Sequence: Synthetic oligonucleotide
ggacggcucucggucacac

SEQ ID NO: 447495 - RNA, 19 nt, Artificial Sequence
  Description of Artificial Sequence: Synthetic oligonucleotide
guucgacuccagacuccga

SEQ ID NO: 447496 - RNA, 19 nt, Artificial Sequence
  Description of Artificial Sequence: Synthetic oligonucleotide
gggcuauugcccucucgcu

SEQ ID NO: 447497 - RNA, 19 nt, Artificial Sequence
  Description of Artificial Sequence: Synthetic oligonucleotide
cuucacccucccgcuccug

SEQ ID NO: 447498 - RNA, 19 nt, Artificial Sequence
  Description of Artificial Sequence: Synthetic oligonucleotide
caaaucggcucaggaggcu

SEQ ID NO: 447499 - RNA, 19 nt, Artificial Sequence
  Description of Artificial Sequence: Synthetic oligonucleotide
ccguagcacugagggacgg

SEQ ID NO: 447500 - RNA, 19 nt, Artificial Sequence
  Description of Artificial Sequence: Synthetic oligonucleotide
cugcuauggccaccagacu

SEQ ID NO: 447501 - RNA, 19 nt, Artificial Sequence
  Description of Artificial Sequence: Synthetic oligonucleotide
caguccgggucauggccua

SEQ ID NO: 447502 - RNA, 19 nt, Artificial Sequence
  Description of Artificial Sequence: Synthetic oligonucleotide
ccacuacgaugagcaaagc

SEQ ID NO: 447503 - RNA, 19 nt, Artificial Sequence
  Description of Artificial Sequence: Synthetic oligonucleotide
acgcuucguucuugcccuu

SEQ ID NO: 447504 - RNA, 19 nt, Artificial Sequence
  Description of Artificial Sequence: Synthetic oligonucleotide
ccggcugacagaggagguc

SEQ ID NO: 447505 - RNA, 19 nt, Artificial Sequence
  Description of Artificial Sequence: Synthetic oligonucleotide
ggacgguggagaugaggau

SEQ ID NO: 447506 - RNA, 19 nt, Artificial Sequence
  Description of Artificial Sequence: Synthetic oligonucleotide
gagugcaggccaggauggu

SEQ ID NO: 447507 - RNA, 19 nt, Artificial Sequence
  Description of Artificial Sequence: Synthetic oligonucleotide
gcucucggucacaccagga

SEQ ID NO: 447508 - RNA, 19 nt, Artificial Sequence
  Description of Artificial Sequence: Synthetic oligonucleotide
ccaguccgggucauggccu

SEQ ID NO: 447509 - RNA, 19 nt, Artificial Sequence
  Description of Artificial Sequence: Synthetic oligonucleotide
gggcuggcgguugaaggua

SEQ ID NO: 447510 - RNA, 19 nt, Artificial Sequence
  Description of Artificial Sequence: Synthetic oligonucleotide
ccgguaccuggacucacaa

SEQ ID NO: 447511 - RNA, 19 nt, Artificial Sequence
  Description of Artificial Sequence: Synthetic oligonucleotide
gccuagcauacucgcaguu

SEQ ID NO: 447512 - RNA, 19 nt, Artificial Sequence
  Description of Artificial Sequence: Synthetic oligonucleotide
cgaaguucccggucaaguu

SEQ ID NO: 447513 - RNA, 19 nt, Artificial Sequence
  Description of Artificial Sequence: Synthetic oligonucleotide
gggacggcucucggucaca

SEQ ID NO: 447514 - RNA, 19 nt, Artificial Sequence
  Description of Artificial Sequence: Synthetic oligonucleotide
cgcuucguucuugcccuug

SEQ ID NO: 447515 - RNA, 19 nt, Artificial Sequence
  Description of Artificial Sequence: Synthetic oligonucleotide
gguggacccggagccggcu

SEQ ID NO: 447516 - RNA, 19 nt, Artificial Sequence
  Description of Artificial Sequence: Synthetic oligonucleotide
cccggucaaguuuggugau

SEQ ID NO: 447517 - RNA, 19 nt, Artificial Sequence
  Description of Artificial Sequence: Synthetic oligonucleotide
cgguaccuggacucacaau

SEQ ID NO: 447518 - RNA, 19 nt, Artificial Sequence
  Description of Artificial Sequence: Synthetic oligonucleotide
ccaggucguagugccggau

SEQ ID NO: 447519 - RNA, 19 nt, Artificial Sequence
  Description of Artificial Sequence: Synthetic oligonucleotide
gcucagcgacagacugcuu

SEQ ID NO: 447520 - RNA, 19 nt, Artificial Sequence
  Description of Artificial Sequence: Synthetic oligonucleotide
aaaacaagcauugaaucgg

SEQ ID NO: 447521 - RNA, 19 nt, Artificial Sequence
  Description of Artificial Sequence: Synthetic oligonucleotide
aucaauacgacgcuuggcc

SEQ ID NO: 447522 - RNA, 19 nt, Artificial Sequence
  Description of Artificial Sequence: Synthetic oligonucleotide
uucuaucucauuuucaucc

SEQ ID NO: 447523 - RNA, 19 nt, Artificial Sequence
  Description of Artificial Sequence: Synthetic oligonucleotide
gauaucauuaaugcgaggc

SEQ ID NO: 447524 - RNA, 19 nt, Artificial Sequence
  Description of Artificial Sequence: Synthetic oligonucleotide
cuugauaucauuaaugcga

SEQ ID NO: 447525 - RNA, 19 nt, Artificial Sequence
  Description of Artificial Sequence: Synthetic oligonucleotide
uuugcaaacaaaucuauau

SEQ ID NO: 447526 - RNA, 19 nt, Artificial Sequence
  Description of Artificial Sequence: Synthetic oligonucleotide
auaucauuaaugcgaggcc

SEQ ID NO: 447527 - RNA, 19 nt, Artificial Sequence
  Description of Artificial Sequence: Synthetic oligonucleotide
agaaccaggguagagacgc

SEQ ID NO: 447528 - RNA, 19 nt, Artificial Sequence
  Description of Artificial Sequence: Synthetic oligonucleotide
aaauucucggauguugcgc

SEQ ID NO: 447529 - RNA, 19 nt, Artificial Sequence
  Description of Artificial Sequence: Synthetic oligonucleotide
uugauaucauuaaugcgag

SEQ ID NO: 447530 - RNA, 19 nt, Artificial Sequence
  Description of Artificial Sequence: Synthetic oligonucleotide
uucuguucaagcuuggucu

SEQ ID NO: 447531 - RNA, 19 nt, Artificial Sequence
  Description of Artificial Sequence: Synthetic oligonucleotide
uugguguuauccaaggcag

SEQ ID NO: 447532 - RNA, 19 nt, Artificial Sequence
  Description of Artificial Sequence: Synthetic oligonucleotide
aauuggaugcccaagcgag

SEQ ID NO: 447533 - RNA, 19 nt, Artificial Sequence
  Description of Artificial Sequence: Synthetic oligonucleotide
gaaucggucaaaucgcucc

SEQ ID NO: 447534 - RNA, 19 nt, Artificial Sequence
  Description of Artificial Sequence: Synthetic oligonucleotide
aaucgcuccuucuuaaucu

SEQ ID NO: 447535 - RNA, 19 nt, Artificial Sequence
  Description of Artificial Sequence: Synthetic oligonucleotide
uguccugcaucuuacaggc

SEQ ID NO: 447536 - RNA, 19 nt, Artificial Sequence
  Description of Artificial Sequence: Synthetic oligonucleotide
agccuuauagaucucauca

SEQ ID NO: 447537 - RNA, 19 nt, Artificial Sequence
  Description of Artificial Sequence: Synthetic oligonucleotide
cuuuccuaaaaccuuaguc

SEQ ID NO: 447538 - RNA, 19 nt, Artificial Sequence
  Description of Artificial Sequence: Synthetic oligonucleotide
uguugguagccacagauuc

SEQ ID NO: 447539 - RNA, 19 nt, Artificial Sequence
  Description of Artificial Sequence: Synthetic oligonucleotide
uuagacuucuccuggaggu

SEQ ID NO: 447540 - RNA, 19 nt, Artificial Sequence
  Description of Artificial Sequence: Synthetic oligonucleotide
auugaucucaucaauacga

SEQ ID NO: 447541 - RNA, 19 nt, Artificial Sequence
  Description of Artificial Sequence: Synthetic oligonucleotide
aauucucggauguugcgca

SEQ ID NO: 447542 - RNA, 19 nt, Artificial Sequence
  Description of Artificial Sequence: Synthetic oligonucleotide
uuguccauaggccggaagc

SEQ ID NO: 447543 - RNA, 19 nt, Artificial Sequence
  Description of Artificial Sequence: Synthetic oligonucleotide
agcugcaacggucuucucc

SEQ ID NO: 447544 - RNA, 19 nt, Artificial Sequence
  Description of Artificial Sequence: Synthetic oligonucleotide
aaaccuuagucacagcaau

SEQ ID NO: 447545 - RNA, 19 nt, Artificial Sequence
  Description of Artificial Sequence: Synthetic oligonucleotide
uuaaucuguucaaacgccu

SEQ ID NO: 447546 - RNA, 19 nt, Artificial Sequence
  Description of Artificial Sequence: Synthetic oligonucleotide
uaucauuaaugcgaggccc

SEQ ID NO: 447547 - RNA, 19 nt, Artificial Sequence
  Description of Artificial Sequence: Synthetic oligonucleotide
cuuacaggccuguagcagg

SEQ ID NO: 447548 - RNA, 19 nt, Artificial Sequence
  Description of Artificial Sequence: Synthetic oligonucleotide
auugcagaagcauccaugu

SEQ ID NO: 447549 - RNA, 19 nt, Artificial Sequence
  Description of Artificial Sequence: Synthetic oligonucleotide
auuaaugcgaggcccgaag

SEQ ID NO: 447550 - RNA, 19 nt, Artificial Sequence
  Description of Artificial Sequence: Synthetic oligonucleotide
uugucguucacuucggacu

SEQ ID NO: 447551 - RNA, 19 nt, Artificial Sequence
  Description of Artificial Sequence: Synthetic oligonucleotide
gaugauucucuugauauca

SEQ ID NO: 447552 - RNA, 19 nt, Artificial Sequence
  Description of Artificial Sequence: Synthetic oligonucleotide
ucgggacaaagccuuauag

SEQ ID NO: 447553 - RNA, 19 nt, Artificial Sequence
  Description of Artificial Sequence: Synthetic oligonucleotide
caucuuacaggccuguagc

SEQ ID NO: 447554 - RNA, 19 nt, Artificial Sequence
  Description of Artificial Sequence: Synthetic oligonucleotide
uuagcuaguggugauauau

SEQ ID NO: 447555 - RNA, 19 nt, Artificial Sequence
  Description of Artificial Sequence: Synthetic oligonucleotide
uucucgaauuccaagcgcu

SEQ ID NO: 447556 - RNA, 19 nt, Artificial Sequence
  Description of Artificial Sequence: Synthetic oligonucleotide
acaauuguaguugaugcca

SEQ ID NO: 447557 - RNA, 19 nt, Artificial Sequence
  Description of Artificial Sequence: Synthetic oligonucleotide
ucaaugagggccucucgag

SEQ ID NO: 447558 - RNA, 19 nt, Artificial Sequence
  Description of Artificial Sequence: Synthetic oligonucleotide
aaugcgaggcccgaaguug

SEQ ID NO: 447559 - RNA, 19 nt, Artificial Sequence
  Description of Artificial Sequence: Synthetic oligonucleotide
ugcuguuucgggacaaagc

SEQ ID NO: 447560 - RNA, 19 nt, Artificial Sequence
  Description of Artificial Sequence: Synthetic oligonucleotide
uccaaauagggcucuucag

SEQ ID NO: 447561 - RNA, 19 nt, Artificial Sequence
  Description of Artificial Sequence: Synthetic oligonucleotide
auacuucuuuuguguaggc

SEQ ID NO: 447562 - RNA, 19 nt, Artificial Sequence
  Description of Artificial Sequence: Synthetic oligonucleotide
cacaauuguaguugaugcc

SEQ ID NO: 447563 - RNA, 19 nt, Artificial Sequence
  Description of Artificial Sequence: Synthetic oligonucleotide
acugcgcuucuguucaagc

SEQ ID NO: 447564 - RNA, 19 nt, Artificial Sequence
  Description of Artificial Sequence: Synthetic oligonucleotide
ucucgagcauagauacugg

SEQ ID NO: 447565 - RNA, 19 nt, Artificial Sequence
  Description of Artificial Sequence: Synthetic oligonucleotide
cuuagucacagcaaucuga

SEQ ID NO: 447566 - RNA, 19 nt, Artificial Sequence
  Description of Artificial Sequence: Synthetic oligonucleotide
caaucaggcggccauacac

SEQ ID NO: 447567 - RNA, 19 nt, Artificial Sequence
  Description of Artificial Sequence: Synthetic oligonucleotide
gcuguuucgggacaaagcc

SEQ ID NO: 447568 - RNA, 19 nt, Artificial Sequence
  Description of Artificial Sequence: Synthetic oligonucleotide
gaggucgaaagucagaacu

SEQ ID NO: 447569 - RNA, 19 nt, Artificial Sequence
  Description of Artificial Sequence: Synthetic oligonucleotide
cuauuguucauugggguug

SEQ ID NO: 447570 - RNA, 19 nt, Artificial Sequence
  Description of Artificial Sequence: Synthetic oligonucleotide
uguccauaggccggaagcg

SEQ ID NO: 447571 - RNA, 19 nt, Artificial Sequence
  Description of Artificial Sequence: Synthetic oligonucleotide
agcauauugcagaagcauc

SEQ ID NO: 447572 - RNA, 19 nt, Artificial Sequence
  Description of Artificial Sequence: Synthetic oligonucleotide
gacaauagccuggaaguug

SEQ ID NO: 447573 - RNA, 19 nt, Artificial Sequence
  Description of Artificial Sequence: Synthetic oligonucleotide
acgacgcuuggccaucucc

SEQ ID NO: 447574 - RNA, 19 nt, Artificial Sequence
  Description of Artificial Sequence: Synthetic oligonucleotide
ugauaucauuaaugcgagg

SEQ ID NO: 447575 - RNA, 19 nt, Artificial Sequence
  Description of Artificial Sequence: Synthetic oligonucleotide
cuugucucggacacucucc

SEQ ID NO: 447576 - RNA, 19 nt, Artificial Sequence
  Description of Artificial Sequence: Synthetic oligonucleotide
ucaauacgacgcuuggcca

SEQ ID NO: 447577 - RNA, 19 nt, Artificial Sequence
  Description of Artificial Sequence: Synthetic oligonucleotide
aauacgacgcuuggccauc

SEQ ID NO: 447578 - RNA, 19 nt, Artificial Sequence
  Description of Artificial Sequence: Synthetic oligonucleotide
uuaaugcgaggcccgaagu

SEQ ID NO: 447579 - RNA, 19 nt, Artificial Sequence
  Description of Artificial Sequence: Synthetic oligonucleotide
ccaaauagggcucuucagg

SEQ ID NO: 447580 - RNA, 19 nt, Artificial Sequence
  Description of Artificial Sequence: Synthetic oligonucleotide
aaaaccuuagucacagcaa

SEQ ID NO: 447581 - RNA, 19 nt, Artificial Sequence
  Description of Artificial Sequence: Synthetic oligonucleotide
caauuugauguccugcauc

SEQ ID NO: 447582 - RNA, 19 nt, Artificial Sequence
  Description of Artificial Sequence: Synthetic oligonucleotide
ucuggaaaaggguuccauc

SEQ ID NO: 447583 - RNA, 19 nt, Artificial Sequence
  Description of Artificial Sequence: Synthetic oligonucleotide
aucauuaaugcgaggcccg

SEQ ID NO: 447584 - RNA, 19 nt, Artificial Sequence
  Description of Artificial Sequence: Synthetic oligonucleotide
ugcaacggucuucuccccg

SEQ ID NO: 447585 - RNA, 19 nt, Artificial Sequence
  Description of Artificial Sequence: Synthetic oligonucleotide
ucaugguucuugucguuca

SEQ ID NO: 447586 - RNA, 19 nt, Artificial Sequence
  Description of Artificial Sequence: Synthetic oligonucleotide
ucgagcauagauacuggau

SEQ ID NO: 447587 - RNA, 19 nt, Artificial Sequence
  Description of Artificial Sequence: Synthetic oligonucleotide
ggguagagacgcuugaugc

SEQ ID NO: 447588 - RNA, 19 nt, Artificial Sequence
  Description of Artificial Sequence: Synthetic oligonucleotide
aggguagagacgcuugaug

SEQ ID NO: 447589 - RNA, 19 nt, Artificial Sequence
  Description of Artificial Sequence: Synthetic oligonucleotide
ucugucaauucucccucca

SEQ ID NO: 447590 - RNA, 19 nt, Artificial Sequence
  Description of Artificial Sequence: Synthetic oligonucleotide
ggcaagauggacagaaggg

SEQ ID NO: 447591 - RNA, 19 nt, Artificial Sequence
  Description of Artificial Sequence: Synthetic oligonucleotide
ucugggaaccacucacuga

SEQ ID NO: 447592 - RNA, 19 nt, Artificial Sequence
  Description of Artificial Sequence: Synthetic oligonucleotide
ggagaugacaauagccugg

SEQ ID NO: 447593 - RNA, 19 nt, Artificial Sequence
  Description of Artificial Sequence: Synthetic oligonucleotide
ugauucuuaaggucuugua

SEQ ID NO: 447594 - RNA, 19 nt, Artificial Sequence
  Description of Artificial Sequence: Synthetic oligonucleotide
aaauuguccauaggccgga

SEQ ID NO: 447595 - RNA, 19 nt, Artificial Sequence
  Description of Artificial Sequence: Synthetic oligonucleotide
ucacucugugaguacuuca

SEQ ID NO: 447596 - RNA, 19 nt, Artificial Sequence
  Description of Artificial Sequence: Synthetic oligonucleotide
aaacaagcauugaaucggu

SEQ ID NO: 447597 - RNA, 19 nt, Artificial Sequence
  Description of Artificial Sequence: Synthetic oligonucleotide
uugguagccacagauucaa

SEQ ID NO: 447598 - RNA, 19 nt, Artificial Sequence
  Description of Artificial Sequence: Synthetic oligonucleotide
gucacugcgcuucuguuca

SEQ ID NO: 447599 - RNA, 19 nt, Artificial Sequence
  Description of Artificial Sequence: Synthetic oligonucleotide
aacaagcauugaaucgguc

SEQ ID NO: 447600 - RNA, 19 nt, Artificial Sequence
  Description of Artificial Sequence: Synthetic oligonucleotide
gcugcaacggucuucuccc

SEQ ID NO: 447601 - RNA, 19 nt, Artificial Sequence
  Description of Artificial Sequence: Synthetic oligonucleotide
uugauguaauuugccaccu

SEQ ID NO: 447602 - RNA, 19 nt, Artificial Sequence
  Description of Artificial Sequence: Synthetic oligonucleotide
gcauauugcagaagcaucc

SEQ ID NO: 447603 - RNA, 19 nt, Artificial Sequence
  Description of Artificial Sequence: Synthetic oligonucleotide
caaugagggccucucgagc

SEQ ID NO: 447604 - RNA, 19 nt, Artificial Sequence
  Description of Artificial Sequence: Synthetic oligonucleotide
aauagccuggaaguugcaa

SEQ ID NO: 447605 - RNA, 19 nt, Artificial Sequence
  Description of Artificial Sequence: Synthetic oligonucleotide
ccacauguguacuuugucc

SEQ ID NO: 447606 - RNA, 19 nt, Artificial Sequence
  Description of Artificial Sequence: Synthetic oligonucleotide
uauccaaggcagcaucgau

SEQ ID NO: 447607 - RNA, 19 nt, Artificial Sequence
  Description of Artificial Sequence: Synthetic oligonucleotide
ugguguuauccaaggcagc

SEQ ID NO: 447608 - RNA, 19 nt, Artificial Sequence
  Description of Artificial Sequence: Synthetic oligonucleotide
agacgcuugaugcucucca

SEQ ID NO: 447609 - RNA, 19 nt, Artificial Sequence
  Description of Artificial Sequence: Synthetic oligonucleotide
ucuagggacugcuuagcua

SEQ ID NO: 447610 - RNA, 19 nt, Artificial Sequence
  Description of Artificial Sequence: Synthetic oligonucleotide
ugucguucacuucggacuu

SEQ ID NO: 447611 - RNA, 19 nt, Artificial Sequence
  Description of Artificial Sequence: Synthetic oligonucleotide
ccuugauguaauuugccac

SEQ ID NO: 447612 - RNA, 19 nt, Artificial Sequence
  Description of Artificial Sequence: Synthetic oligonucleotide
gccacaagcauauugcaga

SEQ ID NO: 447613 - RNA, 19 nt, Artificial Sequence
  Description of Artificial Sequence: Synthetic oligonucleotide
cucgcuuucgugcugccuc

SEQ ID NO: 447614 - RNA, 19 nt, Artificial Sequence
  Description of Artificial Sequence: Synthetic oligonucleotide
uuauccaaggcagcaucga

SEQ ID NO: 447615 - RNA, 19 nt, Artificial Sequence
  Description of Artificial Sequence: Synthetic oligonucleotide
auucucggauguugcgcac

SEQ ID NO: 447616 - RNA, 19 nt, Artificial Sequence
  Description of Artificial Sequence: Synthetic oligonucleotide
auagggcucuucaggauuc

SEQ ID NO: 447617 - RNA, 19 nt, Artificial Sequence
  Description of Artificial Sequence: Synthetic oligonucleotide
ugucaagcguucuuucuuu

SEQ ID NO: 447618 - RNA, 19 nt, Artificial Sequence
  Description of Artificial Sequence: Synthetic oligonucleotide
ggcuacacaauuguaguug

SEQ ID NO: 447619 - RNA, 19 nt, Artificial Sequence
  Description of Artificial Sequence: Synthetic oligonucleotide
ugauucucuugauaucauu

SEQ ID NO: 447620 - RNA, 19 nt, Artificial Sequence
  Description of Artificial Sequence: Synthetic oligonucleotide
auauugcagaagcauccau

SEQ ID NO: 447621 - RNA, 19 nt, Artificial Sequence
  Description of Artificial Sequence: Synthetic oligonucleotide
gcaagauggacagaagggc

SEQ ID NO: 447622 - RNA, 19 nt, Artificial Sequence
  Description of Artificial Sequence: Synthetic oligonucleotide
auguugcgcacaccaaucu

SEQ ID NO: 447623 - RNA, 19 nt, Artificial Sequence
  Description of Artificial Sequence: Synthetic oligonucleotide
cuuucucaucccagcgccg

SEQ ID NO: 447624 - RNA, 19 nt, Artificial Sequence
  Description of Artificial Sequence: Synthetic oligonucleotide
uaaugcgaggcccgaaguu

SEQ ID NO: 447625 - RNA, 19 nt, Artificial Sequence
  Description of Artificial Sequence: Synthetic oligonucleotide
ucaaucaggcggccauaca

SEQ ID NO: 447626 - RNA, 19 nt, Artificial Sequence
  Description of Artificial Sequence: Synthetic oligonucleotide
uagagacgcuugaugcucu

SEQ ID NO: 447627 - RNA, 19 nt, Artificial Sequence
  Description of Artificial Sequence: Synthetic oligonucleotide
aggacgaagaagggagccg

SEQ ID NO: 447628 - RNA, 19 nt, Artificial Sequence
  Description of Artificial Sequence: Synthetic oligonucleotide
ugugucuuugcuccuccuu

SEQ ID NO: 447629 - RNA, 19 nt, Artificial Sequence
  Description of Artificial Sequence: Synthetic oligonucleotide
gacugcuuagcuaguggug

SEQ ID NO: 447630 - RNA, 19 nt, Artificial Sequence
  Description of Artificial Sequence: Synthetic oligonucleotide
ggcggccauacacagaacc

SEQ ID NO: 447631 - RNA, 19 nt, Artificial Sequence
  Description of Artificial Sequence: Synthetic oligonucleotide
gggagaugacaauagccug

SEQ ID NO: 447632 - RNA, 19 nt, Artificial Sequence
  Description of Artificial Sequence: Synthetic oligonucleotide
ucuugucguucacuucgga

SEQ ID NO: 447633 - RNA, 19 nt, Artificial Sequence
  Description of Artificial Sequence: Synthetic oligonucleotide
gccucucgagcauagauac

SEQ ID NO: 447634 - RNA, 19 nt, Artificial Sequence
  Description of Artificial Sequence: Synthetic oligonucleotide
ugaggucgaaagucagaac

SEQ ID NO: 447635 - RNA, 19 nt, Artificial Sequence
  Description of Artificial Sequence: Synthetic oligonucleotide
caucaauacgacgcuuggc

SEQ ID NO: 447636 - RNA, 19 nt, Artificial Sequence
  Description of Artificial Sequence: Synthetic oligonucleotide
caccugacguaguucggcc

SEQ ID NO: 447637 - RNA, 19 nt, Artificial Sequence
  Description of Artificial Sequence: Synthetic oligonucleotide
agcaaugcgcugaaguaca

SEQ ID NO: 447638 - RNA, 19 nt, Artificial Sequence
  Description of Artificial Sequence: Synthetic oligonucleotide
gaggcccgaaguuggcuag

SEQ ID NO: 447639 - RNA, 19 nt, Artificial Sequence
  Description of Artificial Sequence: Synthetic oligonucleotide
guagagacgcuugaugcuc

SEQ ID NO: 447640 - RNA, 19 nt, Artificial Sequence
  Description of Artificial Sequence: Synthetic oligonucleotide
caauuggaugcccaagcga

SEQ ID NO: 447641 - RNA, 19 nt, Artificial Sequence
  Description of Artificial Sequence: Synthetic oligonucleotide
uuggaugcccaagcgaguc

SEQ ID NO: 447642 - RNA, 19 nt, Artificial Sequence
  Description of Artificial Sequence: Synthetic oligonucleotide
ccucauuuguagcccaugg

SEQ ID NO: 447643 - RNA, 19 nt, Artificial Sequence
  Description of Artificial Sequence: Synthetic oligonucleotide
ggcaagaugccuugucuug

SEQ ID NO: 447644 - RNA, 19 nt, Artificial Sequence
  Description of Artificial Sequence: Synthetic oligonucleotide
ggacgaagaagggagccgg

SEQ ID NO: 447645 - RNA, 19 nt, Artificial Sequence
  Description of Artificial Sequence: Synthetic oligonucleotide
ccaauuggaugcccaagcg

SEQ ID NO: 447646 - RNA, 19 nt, Artificial Sequence
  Description of Artificial Sequence: Synthetic oligonucleotide
ccgacaaaacuccucaaac

SEQ ID NO: 447647 - RNA, 19 nt, Artificial Sequence
  Description of Artificial Sequence: Synthetic oligonucleotide
ugcccuuugacagcggcaa

SEQ ID NO: 447648 - RNA, 19 nt, Artificial Sequence
  Description of Artificial Sequence: Synthetic oligonucleotide
uuggucucaauggcuguca

SEQ ID NO: 447649 - RNA, 19 nt, Artificial Sequence
  Description of Artificial Sequence: Synthetic oligonucleotide
aauuugccaccuugccaau

SEQ ID NO: 447650 - RNA, 19 nt, Artificial Sequence
  Description of Artificial Sequence: Synthetic oligonucleotide
gggacugcuuagcuagugg

SEQ ID NO: 447651 - RNA, 19 nt, Artificial Sequence
  Description of Artificial Sequence: Synthetic oligonucleotide
caggacgaagaagggagcc

SEQ ID NO: 447652 - RNA, 19 nt, Artificial Sequence
  Description of Artificial Sequence: Synthetic oligonucleotide
cucuccugccggucaaugc

SEQ ID NO: 447653 - RNA, 19 nt, Artificial Sequence
  Description of Artificial Sequence: Synthetic oligonucleotide
ggaaccacucacugauucc

SEQ ID NO: 447654 - RNA, 19 nt, Artificial Sequence
  Description of Artificial Sequence: Synthetic oligonucleotide
gagauaacuccugacuucu

SEQ ID NO: 447655 - RNA, 19 nt, Artificial Sequence
  Description of Artificial Sequence: Synthetic oligonucleotide
uaggccggaagcguuugcc

SEQ ID NO: 447656 - RNA, 19 nt, Artificial Sequence
  Description of Artificial Sequence: Synthetic oligonucleotide
agcauugaaucggucaaau

SEQ ID NO: 447657 - RNA, 19 nt, Artificial Sequence
  Description of Artificial Sequence: Synthetic oligonucleotide
uucgggacaaagccuuaua

SEQ ID NO: 447658 - RNA, 19 nt, Artificial Sequence
  Description of Artificial Sequence: Synthetic oligonucleotide
cgagcauagauacuggaug

SEQ ID NO: 447659 - RNA, 19 nt, Artificial Sequence
  Description of Artificial Sequence: Synthetic oligonucleotide
aggaaugccugggcacugc

SEQ ID NO: 447660 - RNA, 19 nt, Artificial Sequence
  Description of Artificial Sequence: Synthetic oligonucleotide
cucccgacaaaacuccuca

SEQ ID NO: 447661 - RNA, 19 nt, Artificial Sequence
  Description of Artificial Sequence: Synthetic oligonucleotide
gagucuucugauucucgaa

SEQ ID NO: 447662 - RNA, 19 nt, Artificial Sequence
  Description of Artificial Sequence: Synthetic oligonucleotide
aguucggccucuuuccguu

SEQ ID NO: 447663 - RNA, 19 nt, Artificial Sequence
  Description of Artificial Sequence: Synthetic oligonucleotide
ugcgcacaccaaucucccg

SEQ ID NO: 447664 - RNA, 19 nt, Artificial Sequence
  Description of Artificial Sequence: Synthetic oligonucleotide
uggucuguucuaagucacu

SEQ ID NO: 447665 - RNA, 19 nt, Artificial Sequence
  Description of Artificial Sequence: Synthetic oligonucleotide
uagcuaguggugauauauu

SEQ ID NO: 447666 - RNA, 19 nt, Artificial Sequence
  Description of Artificial Sequence: Synthetic oligonucleotide
uggugaccuccaaaggcaa

SEQ ID NO: 447667 - RNA, 19 nt, Artificial Sequence
  Description of Artificial Sequence: Synthetic oligonucleotide
ugcaaguugacugcuccuu

SEQ ID NO: 447668 - RNA, 19 nt, Artificial Sequence
  Description of Artificial Sequence: Synthetic oligonucleotide
uggucucaauggcugucac

SEQ ID NO: 447669 - RNA, 19 nt, Artificial Sequence
  Description of Artificial Sequence: Synthetic oligonucleotide
acaccaaucucccgacaaa

SEQ ID NO: 447670 - RNA, 19 nt, Artificial Sequence
  Description of Artificial Sequence: Synthetic oligonucleotide
cguaguucggccucuuucc

SEQ ID NO: 447671 - RNA, 19 nt, Artificial Sequence
  Description of Artificial Sequence: Synthetic oligonucleotide
uggaugcccaagcgagucu

SEQ ID NO: 447672 - RNA, 19 nt, Artificial Sequence
  Description of Artificial Sequence: Synthetic oligonucleotide
cucaugguucuugucguuc

SEQ ID NO: 447673 - RNA, 19 nt, Artificial Sequence
  Description of Artificial Sequence: Synthetic oligonucleotide
gguguuauccaaggcagca

SEQ ID NO: 447674 - RNA, 19 nt, Artificial Sequence
  Description of Artificial Sequence: Synthetic oligonucleotide
gauagacuccaaugaggcu

SEQ ID NO: 447675 - RNA, 19 nt, Artificial Sequence
  Description of Artificial Sequence: Synthetic oligonucleotide
augcgaggcccgaaguugg

SEQ ID NO: 447676 - RNA, 19 nt, Artificial Sequence
  Description of Artificial Sequence: Synthetic oligonucleotide
cucgagcauagauacugga

SEQ ID NO: 447677 - RNA, 19 nt, Artificial Sequence
  Description of Artificial Sequence: Synthetic oligonucleotide
ggaugauucucuugauauc

SEQ ID NO: 447678 - RNA, 19 nt, Artificial Sequence
  Description of Artificial Sequence: Synthetic oligonucleotide
guuguggcggucacugcgc

SEQ ID NO: 447679 - RNA, 19 nt, Artificial Sequence
  Description of Artificial Sequence: Synthetic oligonucleotide
ugacaauagccuggaaguu

SEQ ID NO: 447680 - RNA, 19 nt, Artificial Sequence
  Description of Artificial Sequence: Synthetic oligonucleotide
ugccaggggcuacacaauu

SEQ ID NO: 447681 - RNA, 19 nt, Artificial Sequence
  Description of Artificial Sequence: Synthetic oligonucleotide
cauauugcagaagcaucca

SEQ ID NO: 447682 - RNA, 19 nt, Artificial Sequence
  Description of Artificial Sequence: Synthetic oligonucleotide
agcgccgugccuuugccuu

SEQ ID NO: 447683 - RNA, 19 nt, Artificial Sequence
  Description of Artificial Sequence: Synthetic oligonucleotide
accugacguaguucggccu

SEQ ID NO: 447684 - RNA, 19 nt, Artificial Sequence
  Description of Artificial Sequence: Synthetic oligonucleotide
gcgacugcucuccugccgg

SEQ ID NO: 447685 - RNA, 19 nt, Artificial Sequence
  Description of Artificial Sequence: Synthetic oligonucleotide
uugcucgcuuucgugcugc

SEQ ID NO: 447686 - RNA, 19 nt, Artificial Sequence
  Description of Artificial Sequence: Synthetic oligonucleotide
ucggcucuggaugauucuc

SEQ ID NO: 447687 - RNA, 19 nt, Artificial Sequence
  Description of Artificial Sequence: Synthetic oligonucleotide
uuucgggacaaagccuuau

SEQ ID NO: 447688 - RNA, 19 nt, Artificial Sequence
  Description of Artificial Sequence: Synthetic oligonucleotide
uccccgccugacaaauugu

SEQ ID NO: 447689 - RNA, 19 nt, Artificial Sequence
  Description of Artificial Sequence: Synthetic oligonucleotide
agcguuugccaggggcuac

SEQ ID NO: 447690 - RNA, 19 nt, Artificial Sequence
  Description of Artificial Sequence: Synthetic oligonucleotide
ugcgaggcccgaaguuggc

SEQ ID NO: 447691 - RNA, 19 nt, Artificial Sequence
  Description of Artificial Sequence: Synthetic oligonucleotide
ggugcccuuugacagcggc

SEQ ID NO: 447692 - RNA, 19 nt, Artificial Sequence
  Description of Artificial Sequence: Synthetic oligonucleotide
cucaucccagcgccgugcc

SEQ ID NO: 447693 - RNA, 19 nt, Artificial Sequence
  Description of Artificial Sequence: Synthetic oligonucleotide
gacgaagaagggagccggc

SEQ ID NO: 447694 - RNA, 19 nt, Artificial Sequence
  Description of Artificial Sequence: Synthetic oligonucleotide
ggucuguucuaagucacuc

SEQ ID NO: 447695 - RNA, 19 nt, Artificial Sequence
  Description of Artificial Sequence: Synthetic oligonucleotide
cagagauaacuccugacuu

SEQ ID NO: 447696 - RNA, 19 nt, Artificial Sequence
  Description of Artificial Sequence: Synthetic oligonucleotide
caacggucuucuccccgcc

SEQ ID NO: 447697 - RNA, 19 nt, Artificial Sequence
  Description of Artificial Sequence: Synthetic oligonucleotide
aggcaaugcgucgggcauc

SEQ ID NO: 447698 - RNA, 19 nt, Artificial Sequence
  Description of Artificial Sequence: Synthetic oligonucleotide
guacuucagccucauuugu

SEQ ID NO: 447699 - RNA, 19 nt, Artificial Sequence
  Description of Artificial Sequence: Synthetic oligonucleotide
auuggaugcccaagcgagu

SEQ ID NO: 447700 - RNA, 19 nt, Artificial Sequence
  Description of Artificial Sequence: Synthetic oligonucleotide
gaaguacacucugcugcuc

SEQ ID NO: 447701 - RNA, 19 nt, Artificial Sequence
  Description of Artificial Sequence: Synthetic oligonucleotide
ucccgacaaaacuccucaa

SEQ ID NO: 447702 - RNA, 19 nt, Artificial Sequence
  Description of Artificial Sequence: Synthetic oligonucleotide
cacugucuuguggcguugg

SEQ ID NO: 447703 - RNA, 19 nt, Artificial Sequence
  Description of Artificial Sequence: Synthetic oligonucleotide
auuguucauugggguuggg

SEQ ID NO: 447704 - RNA, 19 nt, Artificial Sequence
  Description of Artificial Sequence: Synthetic oligonucleotide
agcauagauacuggauguu

SEQ ID NO: 447705 - RNA, 19 nt, Artificial Sequence
  Description of Artificial Sequence: Synthetic oligonucleotide
auccaaggcagcaucgauu

SEQ ID NO: 447706 - RNA, 19 nt, Artificial Sequence
  Description of Artificial Sequence: Synthetic oligonucleotide
agcggcaauuugauguccu

SEQ ID NO: 447707 - RNA, 19 nt, Artificial Sequence
  Description of Artificial Sequence: Synthetic oligonucleotide
aauuguccauaggccggaa

SEQ ID NO: 447708 - RNA, 19 nt, Artificial Sequence
  Description of Artificial Sequence: Synthetic oligonucleotide
cuuucgcugcuggcgacug

SEQ ID NO: 447709 - RNA, 19 nt, Artificial Sequence
  Description of Artificial Sequence: Synthetic oligonucleotide
augauucucuugauaucau

SEQ ID NO: 447710 - RNA, 19 nt, Artificial Sequence
  Description of Artificial Sequence: Synthetic oligonucleotide
aacuugucucggacacucu

SEQ ID NO: 447711 - RNA, 19 nt, Artificial Sequence
  Description of Artificial Sequence: Synthetic oligonucleotide
aggucgaaagucagaacuu

SEQ ID NO: 447712 - RNA, 19 nt, Artificial Sequence
  Description of Artificial Sequence: Synthetic oligonucleotide
ugcuuagcuaguggugaua

SEQ ID NO: 447713 - RNA, 19 nt, Artificial Sequence
  Description of Artificial Sequence: Synthetic oligonucleotide
gucacucugugaguacuuc

SEQ ID NO: 447714 - RNA, 19 nt, Artificial Sequence
  Description of Artificial Sequence: Synthetic oligonucleotide
gcauugaaucggucaaauc

SEQ ID NO: 447715 - RNA, 19 nt, Artificial Sequence
  Description of Artificial Sequence: Synthetic oligonucleotide
uugagaucacuggcuccac

SEQ ID NO: 447716 - RNA, 19 nt, Artificial Sequence
  Description of Artificial Sequence: Synthetic oligonucleotide
aggcccgaaguuggcuagc

SEQ ID NO: 447717 - RNA, 19 nt, Artificial Sequence
  Description of Artificial Sequence: Synthetic oligonucleotide
agauaacuccugacuucug

SEQ ID NO: 447718 - RNA, 19 nt, Artificial Sequence
  Description of Artificial Sequence: Synthetic oligonucleotide
cccgccugacaaauugucc

SEQ ID NO: 447719 - RNA, 19 nt, Artificial Sequence
  Description of Artificial Sequence: Synthetic oligonucleotide
cugcaacggucuucucccc

SEQ ID NO: 447720 - RNA, 19 nt, Artificial Sequence
  Description of Artificial Sequence: Synthetic oligonucleotide
gccuugagaucacuggcuc

SEQ ID NO: 447721 - RNA, 19 nt, Artificial Sequence
  Description of Artificial Sequence: Synthetic oligonucleotide
agccggcuuauagcugugg

SEQ ID NO: 447722 - RNA, 19 nt, Artificial Sequence
  Description of Artificial Sequence: Synthetic oligonucleotide
uggccuucuuugcucgcuu

SEQ ID NO: 447723 - RNA, 19 nt, Artificial Sequence
  Description of Artificial Sequence: Synthetic oligonucleotide
uggcgacugcucuccugcc

SEQ ID NO: 447724 - RNA, 19 nt, Artificial Sequence
  Description of Artificial Sequence: Synthetic oligonucleotide
guucauugggguugggguu

SEQ ID NO: 447725 - RNA, 19 nt, Artificial Sequence
  Description of Artificial Sequence: Synthetic oligonucleotide
cagcggcaauuugaugucc

SEQ ID NO: 447726 - RNA, 19 nt, Artificial Sequence
  Description of Artificial Sequence: Synthetic oligonucleotide
aacgccugcuuggccuucu

SEQ ID NO: 447727 - RNA, 19 nt, Artificial Sequence
  Description of Artificial Sequence: Synthetic oligonucleotide
cacugcgcuucuguucaag

SEQ ID NO: 447728 - RNA, 19 nt, Artificial Sequence
  Description of Artificial Sequence: Synthetic oligonucleotide
guuugccaggggcuacaca

SEQ ID NO: 447729 - RNA, 19 nt, Artificial Sequence
  Description of Artificial Sequence: Synthetic oligonucleotide
gcgcacaccaaucucccga

SEQ ID NO: 447730 - RNA, 19 nt, Artificial Sequence
  Description of Artificial Sequence: Synthetic oligonucleotide
auguugguagccacagauu

SEQ ID NO: 447731 - RNA, 19 nt, Artificial Sequence
  Description of Artificial Sequence: Synthetic oligonucleotide
augcgcugaaguacacucu

SEQ ID NO: 447732 - RNA, 19 nt, Artificial Sequence
  Description of Artificial Sequence: Synthetic oligonucleotide
ggacugcuuagcuaguggu

SEQ ID NO: 447733 - RNA, 19 nt, Artificial Sequence
  Description of Artificial Sequence: Synthetic oligonucleotide
ugaguacuucagccucauu

SEQ ID NO: 447734 - RNA, 19 nt, Artificial Sequence
  Description of Artificial Sequence: Synthetic oligonucleotide
caauacgacgcuuggccau

SEQ ID NO: 447735 - RNA, 19 nt, Artificial Sequence
  Description of Artificial Sequence: Synthetic oligonucleotide
ugccggucaaugcgcgcau

SEQ ID NO: 447736 - RNA, 19 nt, Artificial Sequence
  Description of Artificial Sequence: Synthetic oligonucleotide
ccggucaaugcgcgcaucc

SEQ ID NO: 447737 - RNA, 19 nt, Artificial Sequence
  Description of Artificial Sequence: Synthetic oligonucleotide
gcggcaauuugauguccug

SEQ ID NO: 447738 - RNA, 19 nt, Artificial Sequence
  Description of Artificial Sequence: Synthetic oligonucleotide
ccugacguaguucggccuc

SEQ ID NO: 447739 - RNA, 19 nt, Artificial Sequence
  Description of Artificial Sequence: Synthetic oligonucleotide
ggcauugccacaagcauau

SEQ ID NO: 447740 - RNA, 19 nt, Artificial Sequence
  Description of Artificial Sequence: Synthetic oligonucleotide
cuuagcuaguggugauaua

SEQ ID NO: 447741 - RNA, 19 nt, Artificial Sequence
  Description of Artificial Sequence: Synthetic oligonucleotide
caagaugccuugucuuggu

SEQ ID NO: 447742 - RNA, 19 nt, Artificial Sequence
  Description of Artificial Sequence: Synthetic oligonucleotide
uacgacgcuuggccaucuc

SEQ ID NO: 447743 - RNA, 19 nt, Artificial Sequence
  Description of Artificial Sequence: Synthetic oligonucleotide
cuccgccugugcauccuuc

SEQ ID NO: 447744 - RNA, 19 nt, Artificial Sequence
  Description of Artificial Sequence: Synthetic oligonucleotide
cugccggucaaugcgcgca

SEQ ID NO: 447745 - RNA, 19 nt, Artificial Sequence
  Description of Artificial Sequence: Synthetic oligonucleotide
cucggauguugcgcacacc

SEQ ID NO: 447746 - RNA, 19 nt, Artificial Sequence
  Description of Artificial Sequence: Synthetic oligonucleotide
ggccuguagcagguugugg

SEQ ID NO: 447747 - RNA, 19 nt, Artificial Sequence
  Description of Artificial Sequence: Synthetic oligonucleotide
cucuagggacugcuuagcu

SEQ ID NO: 447748 - RNA, 19 nt, Artificial Sequence
  Description of Artificial Sequence: Synthetic oligonucleotide
agucacucugugaguacuu

SEQ ID NO: 447749 - RNA, 19 nt, Artificial Sequence
  Description of Artificial Sequence: Synthetic oligonucleotide
uguggcggucacugcgcuu

SEQ ID NO: 447750 - RNA, 19 nt, Artificial Sequence
  Description of Artificial Sequence: Synthetic oligonucleotide
auacgacgcuuggccaucu

SEQ ID NO: 447751 - RNA, 19 nt, Artificial Sequence
  Description of Artificial Sequence: Synthetic oligonucleotide
cgggacaaagccuuauaga

SEQ ID NO: 447752 - RNA, 19 nt, Artificial Sequence
  Description of Artificial Sequence: Synthetic oligonucleotide
gccggcuuauagcugugga

SEQ ID NO: 447753 - RNA, 19 nt, Artificial Sequence
  Description of Artificial Sequence: Synthetic oligonucleotide
cauuaaugcgaggcccgaa

SEQ ID NO: 447754 - RNA, 19 nt, Artificial Sequence
  Description of Artificial Sequence: Synthetic oligonucleotide
uggcggucacugcgcuucu

SEQ ID NO: 447755 - RNA, 19 nt, Artificial Sequence
  Description of Artificial Sequence: Synthetic oligonucleotide
ucacugcgcuucuguucaa

SEQ ID NO: 447756 - RNA, 19 nt, Artificial Sequence
  Description of Artificial Sequence: Synthetic oligonucleotide
gagccggcuuauagcugug

SEQ ID NO: 447757 - RNA, 19 nt, Artificial Sequence
  Description of Artificial Sequence: Synthetic oligonucleotide
gcgucgggcauccuccaca

SEQ ID NO: 447758 - RNA, 19 nt, Artificial Sequence
  Description of Artificial Sequence: Synthetic oligonucleotide
ggacagaagggcaguucca

SEQ ID NO: 447759 - RNA, 19 nt, Artificial Sequence
  Description of Artificial Sequence: Synthetic oligonucleotide
ccccgccugacaaauuguc

SEQ ID NO: 447760 - RNA, 19 nt, Artificial Sequence
  Description of Artificial Sequence: Synthetic oligonucleotide
gccucauuuguagcccaug

SEQ ID NO: 447761 - RNA, 19 nt, Artificial Sequence
  Description of Artificial Sequence: Synthetic oligonucleotide
ggauguucucugggaacca

SEQ ID NO: 447762 - RNA, 19 nt, Artificial Sequence
  Description of Artificial Sequence: Synthetic oligonucleotide
gcuuagcuaguggugauau

SEQ ID NO: 447763 - RNA, 19 nt, Artificial Sequence
  Description of Artificial Sequence: Synthetic oligonucleotide
guccauaggccggaagcgu

SEQ ID NO: 447764 - RNA, 19 nt, Artificial Sequence
  Description of Artificial Sequence: Synthetic oligonucleotide
aggcggccauacacagaac

SEQ ID NO: 447765 - RNA, 19 nt, Artificial Sequence
  Description of Artificial Sequence: Synthetic oligonucleotide
guccugcaucuuacaggcc

SEQ ID NO: 447766 - RNA, 19 nt, Artificial Sequence
  Description of Artificial Sequence: Synthetic oligonucleotide
cgcacaccaaucucccgac

SEQ ID NO: 447767 - RNA, 19 nt, Artificial Sequence
  Description of Artificial Sequence: Synthetic oligonucleotide
ugacguaguucggccucuu

SEQ ID NO: 447768 - RNA, 19 nt, Artificial Sequence
  Description of Artificial Sequence: Synthetic oligonucleotide
guguuauccaaggcagcau

SEQ ID NO: 447769 - RNA, 19 nt, Artificial Sequence
  Description of Artificial Sequence: Synthetic oligonucleotide
ggccucucgagcauagaua

SEQ ID NO: 447770 - RNA, 19 nt, Artificial Sequence
  Description of Artificial Sequence: Synthetic oligonucleotide
cgaaagucagaacuuugcu

SEQ ID NO: 447771 - RNA, 19 nt, Artificial Sequence
  Description of Artificial Sequence: Synthetic oligonucleotide
gcucuccugccggucaaug

SEQ ID NO: 447772 - RNA, 19 nt, Artificial Sequence
  Description of Artificial Sequence: Synthetic oligonucleotide
guuucgggacaaagccuua

SEQ ID NO: 447773 - RNA, 19 nt, Artificial Sequence
  Description of Artificial Sequence: Synthetic oligonucleotide
gcaaugcgcugaaguacac

SEQ ID NO: 447774 - RNA, 19 nt, Artificial Sequence
  Description of Artificial Sequence: Synthetic oligonucleotide
ccugccggucaaugcgcgc

SEQ ID NO: 447775 - RNA, 19 nt, Artificial Sequence
  Description of Artificial Sequence: Synthetic oligonucleotide
gggcaagaugccuugucuu

SEQ ID NO: 447776 - RNA, 19 nt, Artificial Sequence
  Description of Artificial Sequence: Synthetic oligonucleotide
ggucgaaagucagaacuuu

SEQ ID NO: 447777 - RNA, 19 nt, Artificial Sequence
  Description of Artificial Sequence: Synthetic oligonucleotide
gggccucucgagcauagau

SEQ ID NO: 447778 - RNA, 19 nt, Artificial Sequence
  Description of Artificial Sequence: Synthetic oligonucleotide
gacguaguucggccucuuu

SEQ ID NO: 447779 - RNA, 19 nt, Artificial Sequence
  Description of Artificial Sequence: Synthetic oligonucleotide
ggaaugccugggcacugcu

SEQ ID NO: 447780 - RNA, 19 nt, Artificial Sequence
  Description of Artificial Sequence: Synthetic oligonucleotide
gugaguacuucagccucau

SEQ ID NO: 447781 - RNA, 19 nt, Artificial Sequence
  Description of Artificial Sequence: Synthetic oligonucleotide
gccuuucgcugcuggcgac

SEQ ID NO: 447782 - RNA, 19 nt, Artificial Sequence
  Description of Artificial Sequence: Synthetic oligonucleotide
cuagcucacucuccagcuu

SEQ ID NO: 447783 - RNA, 19 nt, Artificial Sequence
  Description of Artificial Sequence: Synthetic oligonucleotide
cugaucacacaguccccuu

SEQ ID NO: 447784 - RNA, 19 nt, Artificial Sequence
  Description of Artificial Sequence: Synthetic oligonucleotide
gcuuucgugcugccucaaa

SEQ ID NO: 447785 - RNA, 19 nt, Artificial Sequence
  Description of Artificial Sequence: Synthetic oligonucleotide
caucccagcgccgugccuu

SEQ ID NO: 447786 - RNA, 19 nt, Artificial Sequence
  Description of Artificial Sequence: Synthetic oligonucleotide
gccugagacugcaccugac

SEQ ID NO: 447787 - RNA, 19 nt, Artificial Sequence
  Description of Artificial Sequence: Synthetic oligonucleotide
cugcaucuuacaggccugu

SEQ ID NO: 447788 - RNA, 19 nt, Artificial Sequence
  Description of Artificial Sequence: Synthetic oligonucleotide
gccugacaaauuguccaua

SEQ ID NO: 447789 - RNA, 19 nt, Artificial Sequence
  Description of Artificial Sequence: Synthetic oligonucleotide
caggguagagacgcuugau

SEQ ID NO: 447790 - RNA, 19 nt, Artificial Sequence
  Description of Artificial Sequence: Synthetic oligonucleotide
cccuugcucaggauagacu

SEQ ID NO: 447791 - RNA, 19 nt, Artificial Sequence
  Description of Artificial Sequence: Synthetic oligonucleotide
gcguuugccaggggcuaca

SEQ ID NO: 447792 - RNA, 19 nt, Artificial Sequence
  Description of Artificial Sequence: Synthetic oligonucleotide
ccggcuuauagcuguggau

SEQ ID NO: 447793 - RNA, 19 nt, Artificial Sequence
  Description of Artificial Sequence: Synthetic oligonucleotide
ggcggucacugcgcuucug

SEQ ID NO: 447794 - RNA, 19 nt, Artificial Sequence
  Description of Artificial Sequence: Synthetic oligonucleotide
ccaagcgagucuucugauu

SEQ ID NO: 447795 - RNA, 19 nt, Artificial Sequence
  Description of Artificial Sequence: Synthetic oligonucleotide
cguuugccaggggcuacac

SEQ ID NO: 447796 - RNA, 19 nt, Artificial Sequence
  Description of Artificial Sequence: Synthetic oligonucleotide
cccaagcgagucuucugau

SEQ ID NO: 447797 - RNA, 19 nt, Artificial Sequence
  Description of Artificial Sequence: Synthetic oligonucleotide
ccauaggccggaagcguuu

SEQ ID NO: 447798 - RNA, 19 nt, Artificial Sequence
  Description of Artificial Sequence: Synthetic oligonucleotide
ccucucgagcauagauacu

SEQ ID NO: 447799 - RNA, 19 nt, Artificial Sequence
  Description of Artificial Sequence: Synthetic oligonucleotide
gucguucacuucggacuuu

SEQ ID NO: 447800 - RNA, 19 nt, Artificial Sequence
  Description of Artificial Sequence: Synthetic oligonucleotide
gccggucaaugcgcgcauc

SEQ ID NO: 447801 - RNA, 19 nt, Artificial Sequence
  Description of Artificial Sequence: Synthetic oligonucleotide
gcgaggcccgaaguuggcu

SEQ ID NO: 447802 - RNA, 19 nt, Artificial Sequence
  Description of Artificial Sequence: Synthetic oligonucleotide
gucgggcauccuccacauu

SEQ ID NO: 447803 - RNA, 19 nt, Artificial Sequence
  Description of Artificial Sequence: Synthetic oligonucleotide
ccuuucgcugcuggcgacu

SEQ ID NO: 447804 - RNA, 19 nt, Artificial Sequence
  Description of Artificial Sequence: Synthetic oligonucleotide
cgucgggcauccuccacau

SEQ ID NO: 447805 - RNA, 19 nt, Artificial Sequence
  Description of Artificial Sequence: Synthetic oligonucleotide
ccccaagcuucuugcgaau

SEQ ID NO: 447806 - RNA, 19 nt, Artificial Sequence
  Description of Artificial Sequence: Synthetic oligonucleotide
aaaacgaccacuuucagag

SEQ ID NO: 447807 - RNA, 19 nt, Artificial Sequence
  Description of Artificial Sequence: Synthetic oligonucleotide
acuacuaacccauaaaccc

SEQ ID NO: 447808 - RNA, 19 nt, Artificial Sequence
  Description of Artificial Sequence: Synthetic oligonucleotide
aaauugguggcacugaagg

SEQ ID NO: 447809 - RNA, 19 nt, Artificial Sequence
  Description of Artificial Sequence: Synthetic oligonucleotide
aacaucuuaggauucugcc

SEQ ID NO: 447810 - RNA, 19 nt, Artificial Sequence
  Description of Artificial Sequence: Synthetic oligonucleotide
aucacaguaauauugggac

SEQ ID NO: 447811 - RNA, 19 nt, Artificial Sequence
  Description of Artificial Sequence: Synthetic oligonucleotide
aguagaacuagguauugcc

SEQ ID NO: 447812 - RNA, 19 nt, Artificial Sequence
  Description of Artificial Sequence: Synthetic oligonucleotide
cuuacuauuacugggaccg

SEQ ID NO: 447813 - RNA, 19 nt, Artificial Sequence
  Description of Artificial Sequence: Synthetic oligonucleotide
aauaucagaaagggcaagc

SEQ ID NO: 447814 - RNA, 19 nt, Artificial Sequence
  Description of Artificial Sequence: Synthetic oligonucleotide
guuuguuucgaugugagcg

SEQ ID NO: 447815 - RNA, 19 nt, Artificial Sequence
  Description of Artificial Sequence: Synthetic oligonucleotide
auaguugaggcucagagcu

SEQ ID NO: 447816 - RNA, 19 nt, Artificial Sequence
  Description of Artificial Sequence: Synthetic oligonucleotide
uuaagugaagcaaauauuu

SEQ ID NO: 447817 - RNA, 19 nt, Artificial Sequence
  Description of Artificial Sequence: Synthetic oligonucleotide
uucggaaauaucagaaagg

SEQ ID NO: 447818 - RNA, 19 nt, Artificial Sequence
  Description of Artificial Sequence: Synthetic oligonucleotide
uuugagaaguagaacuagg

SEQ ID NO: 447819 - RNA, 19 nt, Artificial Sequence
  Description of Artificial Sequence: Synthetic oligonucleotide
uucucgacaagcuuggugc

SEQ ID NO: 447820 - RNA, 19 nt, Artificial Sequence
  Description of Artificial Sequence: Synthetic oligonucleotide
uuuauaaagaaugggacuc

SEQ ID NO: 447821 - RNA, 19 nt, Artificial Sequence
  Description of Artificial Sequence: Synthetic oligonucleotide
uguguaauacaaaaggcau

SEQ ID NO: 447822 - RNA, 19 nt, Artificial Sequence
  Description of Artificial Sequence: Synthetic oligonucleotide
uguaauacaaaaggcaugu

SEQ ID NO: 447823 - RNA, 19 nt, Artificial Sequence
  Description of Artificial Sequence: Synthetic oligonucleotide
ucuccuuacuauuacuggg

SEQ ID NO: 447824 - RNA, 19 nt, Artificial Sequence
  Description of Artificial Sequence: Synthetic oligonucleotide
aagggacuuaaucugccac

SEQ ID NO: 447825 - RNA, 19 nt, Artificial Sequence
  Description of Artificial Sequence: Synthetic oligonucleotide
ucauggauacagcuguugg

SEQ ID NO: 447826 - RNA, 19 nt, Artificial Sequence
  Description of Artificial Sequence: Synthetic oligonucleotide
uaugcguaggaaaacgacc

SEQ ID NO: 447827 - RNA, 19 nt, Artificial Sequence
  Description of Artificial Sequence: Synthetic oligonucleotide
auauagaggaggaugcucc

SEQ ID NO: 447828 - RNA, 19 nt, Artificial Sequence
  Description of Artificial Sequence: Synthetic oligonucleotide
cacagauuauaguugaggc

SEQ ID NO: 447829 - RNA, 19 nt, Artificial Sequence
  Description of Artificial Sequence: Synthetic oligonucleotide
cugcuuacgaauucaaucc

SEQ ID NO: 447830 - RNA, 19 nt, Artificial Sequence
  Description of Artificial Sequence: Synthetic oligonucleotide
uucgaugugagcgaacugg

SEQ ID NO: 447831 - RNA, 19 nt, Artificial Sequence
  Description of Artificial Sequence: Synthetic oligonucleotide
ucgucuuugacucuuucgc

SEQ ID NO: 447832 - RNA, 19 nt, Artificial Sequence
  Description of Artificial Sequence: Synthetic oligonucleotide
ucuuaaaaggggcacagau

SEQ ID NO: 447833 - RNA, 19 nt, Artificial Sequence
  Description of Artificial Sequence: Synthetic oligonucleotide
ucugcuuacgaauucaauc

SEQ ID NO: 447834 - RNA, 19 nt, Artificial Sequence
  Description of Artificial Sequence: Synthetic oligonucleotide
uauugggacauucuagaug

SEQ ID NO: 447835 - RNA, 19 nt, Artificial Sequence
  Description of Artificial Sequence: Synthetic oligonucleotide
uuugauacugacacucuca

SEQ ID NO: 447836 - RNA, 19 nt, Artificial Sequence
  Description of Artificial Sequence: Synthetic oligonucleotide
uuagaaagaaacacaucac

SEQ ID NO: 447837 - RNA, 19 nt, Artificial Sequence
  Description of Artificial Sequence: Synthetic oligonucleotide
aguaacuaacaucuuagga

SEQ ID NO: 447838 - RNA, 19 nt, Artificial Sequence
  Description of Artificial Sequence: Synthetic oligonucleotide
cuucggaaauaucagaaag

SEQ ID NO: 447839 - RNA, 19 nt, Artificial Sequence
  Description of Artificial Sequence: Synthetic oligonucleotide
aaacaaggaaauguuagcu

SEQ ID NO: 447840 - RNA, 19 nt, Artificial Sequence
  Description of Artificial Sequence: Synthetic oligonucleotide
aagugaagcaaauauuuua

SEQ ID NO: 447841 - RNA, 19 nt, Artificial Sequence
  Description of Artificial Sequence: Synthetic oligonucleotide
uuuaagugaagcaaauauu

SEQ ID NO: 447842 - RNA, 19 nt, Artificial Sequence
  Description of Artificial Sequence: Synthetic oligonucleotide
auauugaucuuuucugaag

SEQ ID NO: 447843 - RNA, 19 nt, Artificial Sequence
  Description of Artificial Sequence: Synthetic oligonucleotide
ucaaucagaaauacaugga

SEQ ID NO: 447844 - RNA, 19 nt, Artificial Sequence
  Description of Artificial Sequence: Synthetic oligonucleotide
gacacucucaauugcaagc

SEQ ID NO: 447845 - RNA, 19 nt, Artificial Sequence
  Description of Artificial Sequence: Synthetic oligonucleotide
uucuagauguuuccaaaug

SEQ ID NO: 447846 - RNA, 19 nt, Artificial Sequence
  Description of Artificial Sequence: Synthetic oligonucleotide
ugguauuaaauguguaccc

SEQ ID NO: 447847 - RNA, 19 nt, Artificial Sequence
  Description of Artificial Sequence: Synthetic oligonucleotide
aguugcaauggcuuuacug

SEQ ID NO: 447848 - RNA, 19 nt, Artificial Sequence
  Description of Artificial Sequence: Synthetic oligonucleotide
acauaaugcaacauuguuc

SEQ ID NO: 447849 - RNA, 19 nt, Artificial Sequence
  Description of Artificial Sequence: Synthetic oligonucleotide
uuucugagcucccuaugcg

SEQ ID NO: 447850 - RNA, 19 nt, Artificial Sequence
  Description of Artificial Sequence: Synthetic oligonucleotide
aguggcuagccucuugacc

SEQ ID NO: 447851 - RNA, 19 nt, Artificial Sequence
  Description of Artificial Sequence: Synthetic oligonucleotide
gagugucugaaucugcuag

SEQ ID NO: 447852 - RNA, 19 nt, Artificial Sequence
  Description of Artificial Sequence: Synthetic oligonucleotide
accuaucacggccuuaggc

SEQ ID NO: 447853 - RNA, 19 nt, Artificial Sequence
  Description of Artificial Sequence: Synthetic oligonucleotide
uaugcaaccugccucgucu

SEQ ID NO: 447854 - RNA, 19 nt, Artificial Sequence
  Description of Artificial Sequence: Synthetic oligonucleotide
cuugccuucggaaauauca

SEQ ID NO: 447855 - RNA, 19 nt, Artificial Sequence
  Description of Artificial Sequence: Synthetic oligonucleotide
auaucagaaagggcaagcc

SEQ ID NO: 447856 - RNA, 19 nt, Artificial Sequence
  Description of Artificial Sequence: Synthetic oligonucleotide
acuaaggagacugcuuucc

SEQ ID NO: 447857 - RNA, 19 nt, Artificial Sequence
  Description of Artificial Sequence: Synthetic oligonucleotide
agaacuagguauugccaac

SEQ ID NO: 447858 - RNA, 19 nt, Artificial Sequence
  Description of Artificial Sequence: Synthetic oligonucleotide
aauagguacaugaggagga

SEQ ID NO: 447859 - RNA, 19 nt, Artificial Sequence
  Description of Artificial Sequence: Synthetic oligonucleotide
gauauaagaguacaaucaa

SEQ ID NO: 447860 - RNA, 19 nt, Artificial Sequence
  Description of Artificial Sequence: Synthetic oligonucleotide
uaacuaacaucuuaggauu

SEQ ID NO: 447861 - RNA, 19 nt, Artificial Sequence
  Description of Artificial Sequence: Synthetic oligonucleotide
auaaauauauagaggagga

SEQ ID NO: 447862 - RNA, 19 nt, Artificial Sequence
  Description of Artificial Sequence: Synthetic oligonucleotide
acgaauucaauccaggaua

SEQ ID NO: 447863 - RNA, 19 nt, Artificial Sequence
  Description of Artificial Sequence: Synthetic oligonucleotide
cugguauuaaauguguacc

SEQ ID NO: 447864 - RNA, 19 nt, Artificial Sequence
  Description of Artificial Sequence: Synthetic oligonucleotide
aacgaccacuuucagagga

SEQ ID NO: 447865 - RNA, 19 nt, Artificial Sequence
  Description of Artificial Sequence: Synthetic oligonucleotide
augacuuguaccuuccucu

SEQ ID NO: 447866 - RNA, 19 nt, Artificial Sequence
  Description of Artificial Sequence: Synthetic oligonucleotide
uucgucuuugacucuuucg

SEQ ID NO: 447867 - RNA, 19 nt, Artificial Sequence
  Description of Artificial Sequence: Synthetic oligonucleotide
ugguguuuuauuucugagc

SEQ ID NO: 447868 - RNA, 19 nt, Artificial Sequence
  Description of Artificial Sequence: Synthetic oligonucleotide
ugaaucaggagcacagacu

SEQ ID NO: 447869 - RNA, 19 nt, Artificial Sequence
  Description of Artificial Sequence: Synthetic oligonucleotide
uauuugccacagauuauag

SEQ ID NO: 447870 - RNA, 19 nt, Artificial Sequence
  Description of Artificial Sequence: Synthetic oligonucleotide
cagauuauaguugaggcuc

SEQ ID NO: 447871 - RNA, 19 nt, Artificial Sequence
  Description of Artificial Sequence: Synthetic oligonucleotide
cagaguucgucuuugacuc

SEQ ID NO: 447872 - RNA, 19 nt, Artificial Sequence
  Description of Artificial Sequence: Synthetic oligonucleotide
uuuguuucgaugugagcga

SEQ ID NO: 447873 - RNA, 19 nt, Artificial Sequence
  Description of Artificial Sequence: Synthetic oligonucleotide
uacgaauucaauccaggau

SEQ ID NO: 447874 - RNA, 19 nt, Artificial Sequence
  Description of Artificial Sequence: Synthetic oligonucleotide
caauagguacaugaggagg

SEQ ID NO: 447875 - RNA, 19 nt, Artificial Sequence
  Description of Artificial Sequence: Synthetic oligonucleotide
cauggauacagcuguuggg

SEQ ID NO: 447876 - RNA, 19 nt, Artificial Sequence
  Description of Artificial Sequence: Synthetic oligonucleotide
cauagcaagcucuugcuuc

SEQ ID NO: 447877 - RNA, 19 nt, Artificial Sequence
  Description of Artificial Sequence: Synthetic oligonucleotide
cuguaugcaaccugccucg

SEQ ID NO: 447878 - RNA, 19 nt, Artificial Sequence
  Description of Artificial Sequence: Synthetic oligonucleotide
ucugucaggguuucggaug

SEQ ID NO: 447879 - RNA, 19 nt, Artificial Sequence
  Description of Artificial Sequence: Synthetic oligonucleotide
guaacuaacaucuuaggau

SEQ ID NO: 447880 - RNA, 19 nt, Artificial Sequence
  Description of Artificial Sequence: Synthetic oligonucleotide
acacccgucauauauugug

SEQ ID NO: 447881 - RNA, 19 nt, Artificial Sequence
  Description of Artificial Sequence: Synthetic oligonucleotide
gacuacuaacccauaaacc

SEQ ID NO: 447882 - RNA, 19 nt, Artificial Sequence
  Description of Artificial Sequence: Synthetic oligonucleotide
acuuaaucugccacuaagg

SEQ ID NO: 447883 - RNA, 19 nt, Artificial Sequence
  Description of Artificial Sequence: Synthetic oligonucleotide
acagauuauaguugaggcu

SEQ ID NO: 447884 - RNA, 19 nt, Artificial Sequence
  Description of Artificial Sequence: Synthetic oligonucleotide
gagauggacgcgucaacgg

SEQ ID NO: 447885 - RNA, 19 nt, Artificial Sequence
  Description of Artificial Sequence: Synthetic oligonucleotide
cucuccuuacuauuacugg

SEQ ID NO: 447886 - RNA, 19 nt, Artificial Sequence
  Description of Artificial Sequence: Synthetic oligonucleotide
augaacauaaugcaacauu

SEQ ID NO: 447887 - RNA, 19 nt, Artificial Sequence
  Description of Artificial Sequence: Synthetic oligonucleotide
uagaacuagguauugccaa

SEQ ID NO: 447888 - RNA, 19 nt, Artificial Sequence
  Description of Artificial Sequence: Synthetic oligonucleotide
acacaucacaguaauauug

SEQ ID NO: 447889 - RNA, 19 nt, Artificial Sequence
  Description of Artificial Sequence: Synthetic oligonucleotide
aaucagaaauacauggaau

SEQ ID NO: 447890 - RNA, 19 nt, Artificial Sequence
  Description of Artificial Sequence: Synthetic oligonucleotide
ucucugcugguauuaaaug

SEQ ID NO: 447891 - RNA, 19 nt, Artificial Sequence
  Description of Artificial Sequence: Synthetic oligonucleotide
uugauacugacacucucaa

SEQ ID NO: 447892 - RNA, 19 nt, Artificial Sequence
  Description of Artificial Sequence: Synthetic oligonucleotide
uuuauuucugagcucccua

SEQ ID NO: 447893 - RNA, 19 nt, Artificial Sequence
  Description of Artificial Sequence: Synthetic oligonucleotide
aaacccaagcucagugacc

SEQ ID NO: 447894 - RNA, 19 nt, Artificial Sequence
  Description of Artificial Sequence: Synthetic oligonucleotide
uauuacugggaccgacucc

SEQ ID NO: 447895 - RNA, 19 nt, Artificial Sequence
  Description of Artificial Sequence: Synthetic oligonucleotide
agaaagggcaagcccaucu

SEQ ID NO: 447896 - RNA, 19 nt, Artificial Sequence
  Description of Artificial Sequence: Synthetic oligonucleotide
acaucuuaggauucugcca

SEQ ID NO: 447897 - RNA, 19 nt, Artificial Sequence
  Description of Artificial Sequence: Synthetic oligonucleotide
auuacugggaccgacuccu

SEQ ID NO: 447898 - RNA, 19 nt, Artificial Sequence
  Description of Artificial Sequence: Synthetic oligonucleotide
gaagucagcggacagccca

SEQ ID NO: 447899 - RNA, 19 nt, Artificial Sequence
  Description of Artificial Sequence: Synthetic oligonucleotide
cuaugcguaggaaaacgac

SEQ ID NO: 447900 - RNA, 19 nt, Artificial Sequence
  Description of Artificial Sequence: Synthetic oligonucleotide
gaaaacgaccacuuucaga

SEQ ID NO: 447901 - RNA, 19 nt, Artificial Sequence
  Description of Artificial Sequence: Synthetic oligonucleotide
ugccacagauuauaguuga

SEQ ID NO: 447902 - RNA, 19 nt, Artificial Sequence
  Description of Artificial Sequence: Synthetic oligonucleotide
ggauauaagaguacaauca

SEQ ID NO: 447903 - RNA, 19 nt, Artificial Sequence
  Description of Artificial Sequence: Synthetic oligonucleotide
auauacagugaguaacuaa

SEQ ID NO: 447904 - RNA, 19 nt, Artificial Sequence
  Description of Artificial Sequence: Synthetic oligonucleotide
aacuaacaucuuaggauuc

SEQ ID NO: 447905 - RNA, 19 nt, Artificial Sequence
  Description of Artificial Sequence: Synthetic oligonucleotide
cuuaaucugccacuaagga

SEQ ID NO: 447906 - RNA, 19 nt, Artificial Sequence
  Description of Artificial Sequence: Synthetic oligonucleotide
aaacgaccacuuucagagg

SEQ ID NO: 447907 - RNA, 19 nt, Artificial Sequence
  Description of Artificial Sequence: Synthetic oligonucleotide
aagguugaagucagcggac

SEQ ID NO: 447908 - RNA, 19 nt, Artificial Sequence
  Description of Artificial Sequence: Synthetic oligonucleotide
uacuaacccauaaacccaa

SEQ ID NO: 447909 - RNA, 19 nt, Artificial Sequence
  Description of Artificial Sequence: Synthetic oligonucleotide
agugcuuccguuugucuca

SEQ ID NO: 447910 - RNA, 19 nt, Artificial Sequence
  Description of Artificial Sequence: Synthetic oligonucleotide
caagguugaagucagcgga

SEQ ID NO: 447911 - RNA, 19 nt, Artificial Sequence
  Description of Artificial Sequence: Synthetic oligonucleotide
uggagugucugaaucugcu

SEQ ID NO: 447912 - RNA, 19 nt, Artificial Sequence
  Description of Artificial Sequence: Synthetic oligonucleotide
ugugggguuuguuucgaug

SEQ ID NO: 447913 - RNA, 19 nt, Artificial Sequence
  Description of Artificial Sequence: Synthetic oligonucleotide
auagcaagcucuugcuuca

SEQ ID NO: 447914 - RNA, 19 nt, Artificial Sequence
  Description of Artificial Sequence: Synthetic oligonucleotide
aucaccggaaccugggucu

SEQ ID NO: 447915 - RNA, 19 nt, Artificial Sequence
  Description of Artificial Sequence: Synthetic oligonucleotide
gguucuagacaucucuucc

SEQ ID NO: 447916 - RNA, 19 nt, Artificial Sequence
  Description of Artificial Sequence: Synthetic oligonucleotide
gaaauugguggcacugaag

SEQ ID NO: 447917 - RNA, 19 nt, Artificial Sequence
  Description of Artificial Sequence: Synthetic oligonucleotide
caaucagaaauacauggaa

SEQ ID NO: 447918 - RNA, 19 nt, Artificial Sequence
  Description of Artificial Sequence: Synthetic oligonucleotide
gugaaucaggagcacagac

SEQ ID NO: 447919 - RNA, 19 nt, Artificial Sequence
  Description of Artificial Sequence: Synthetic oligonucleotide
auuugccacagauuauagu

SEQ ID NO: 447920 - RNA, 19 nt, Artificial Sequence
  Description of Artificial Sequence: Synthetic oligonucleotide
cuaucacggccuuaggcac

SEQ ID NO: 447921 - RNA, 19 nt, Artificial Sequence
  Description of Artificial Sequence: Synthetic oligonucleotide
cucuuucgccaucagagug

SEQ ID NO: 447922 - RNA, 19 nt, Artificial Sequence
  Description of Artificial Sequence: Synthetic oligonucleotide
ucccucauggauacagcug

SEQ ID NO: 447923 - RNA, 19 nt, Artificial Sequence
  Description of Artificial Sequence: Synthetic oligonucleotide
cuacuaacccauaaaccca

SEQ ID NO: 447924 - RNA, 19 nt, Artificial Sequence
  Description of Artificial Sequence: Synthetic oligonucleotide
uuugccagaacaggugcug

SEQ ID NO: 447925 - RNA, 19 nt, Artificial Sequence
  Description of Artificial Sequence: Synthetic oligonucleotide
aaccuguaugcaaccugcc

SEQ ID NO: 447926 - RNA, 19 nt, Artificial Sequence
  Description of Artificial Sequence: Synthetic oligonucleotide
aacuagguauugccaacau

SEQ ID NO: 447927 - RNA, 19 nt, Artificial Sequence
  Description of Artificial Sequence: Synthetic oligonucleotide
uccacgucauuaagagaag

SEQ ID NO: 447928 - RNA, 19 nt, Artificial Sequence
  Description of Artificial Sequence: Synthetic oligonucleotide
ucgaugugagcgaacuggu

SEQ ID NO: 447929 - RNA, 19 nt, Artificial Sequence
  Description of Artificial Sequence: Synthetic oligonucleotide
ucccgaggcacaauguccu

SEQ ID NO: 447930 - RNA, 19 nt, Artificial Sequence
  Description of Artificial Sequence: Synthetic oligonucleotide
cuauuacugggaccgacuc

SEQ ID NO: 447931 - RNA, 19 nt, Artificial Sequence
  Description of Artificial Sequence: Synthetic oligonucleotide
uuucgaugugagcgaacug

SEQ ID NO: 447932 - RNA, 19 nt, Artificial Sequence
  Description of Artificial Sequence: Synthetic oligonucleotide
aaccuaucacggccuuagg

SEQ ID NO: 447933 - RNA, 19 nt, Artificial Sequence
  Description of Artificial Sequence: Synthetic oligonucleotide
cagguugaauguagggacc

SEQ ID NO: 447934 - RNA, 19 nt, Artificial Sequence
  Description of Artificial Sequence: Synthetic oligonucleotide
ugguucuagacaucucuuc

SEQ ID NO: 447935 - RNA, 19 nt, Artificial Sequence
  Description of Artificial Sequence: Synthetic oligonucleotide
agauggacgcgucaacggu

SEQ ID NO: 447936 - RNA, 19 nt, Artificial Sequence
  Description of Artificial Sequence: Synthetic oligonucleotide
uuaagagaagggacuuaau

SEQ ID NO: 447937 - RNA, 19 nt, Artificial Sequence
  Description of Artificial Sequence: Synthetic oligonucleotide
acaaaaggcaugugcuuaa

SEQ ID NO: 447938 - RNA, 19 nt, Artificial Sequence
  Description of Artificial Sequence: Synthetic oligonucleotide
augugagcgaacuggucca

SEQ ID NO: 447939 - RNA, 19 nt, Artificial Sequence
  Description of Artificial Sequence: Synthetic oligonucleotide
ucaguucccauguguguac

SEQ ID NO: 447940 - RNA, 19 nt, Artificial Sequence
  Description of Artificial Sequence: Synthetic oligonucleotide
ucugagcucccuaugcgua

SEQ ID NO: 447941 - RNA, 19 nt, Artificial Sequence
  Description of Artificial Sequence: Synthetic oligonucleotide
cauauugaucuuuucugaa

SEQ ID NO: 447942 - RNA, 19 nt, Artificial Sequence
  Description of Artificial Sequence: Synthetic oligonucleotide
ugcaaccucccucauggau

SEQ ID NO: 447943 - RNA, 19 nt, Artificial Sequence
  Description of Artificial Sequence: Synthetic oligonucleotide
ucagaaagggcaagcccau

SEQ ID NO: 447944 - RNA, 19 nt, Artificial Sequence
  Description of Artificial Sequence: Synthetic oligonucleotide
augagauggaaaaccuauc

SEQ ID NO: 447945 - RNA, 19 nt, Artificial Sequence
  Description of Artificial Sequence: Synthetic oligonucleotide
augcguaggaaaacgacca

SEQ ID NO: 447946 - RNA, 19 nt, Artificial Sequence
  Description of Artificial Sequence: Synthetic oligonucleotide
acuaacaucuuaggauucu

SEQ ID NO: 447947 - RNA, 19 nt, Artificial Sequence
  Description of Artificial Sequence: Synthetic oligonucleotide
uucugcuuacgaauucaau

SEQ ID NO: 447948 - RNA, 19 nt, Artificial Sequence
  Description of Artificial Sequence: Synthetic oligonucleotide
gauuauaguugaggcucag

SEQ ID NO: 447949 - RNA, 19 nt, Artificial Sequence
  Description of Artificial Sequence: Synthetic oligonucleotide
ggacauucuagauguuucc

SEQ ID NO: 447950 - RNA, 19 nt, Artificial Sequence
  Description of Artificial Sequence: Synthetic oligonucleotide
caaccucccucauggauac

SEQ ID NO: 447951 - RNA, 19 nt, Artificial Sequence
  Description of Artificial Sequence: Synthetic oligonucleotide
aagucagcggacagcccac

SEQ ID NO: 447952 - RNA, 19 nt, Artificial Sequence
  Description of Artificial Sequence: Synthetic oligonucleotide
ugacuuguaccuuccucuc

SEQ ID NO: 447953 - RNA, 19 nt, Artificial Sequence
  Description of Artificial Sequence: Synthetic oligonucleotide
acuccaguaucuaucaaaa

SEQ ID NO: 447954 - RNA, 19 nt, Artificial Sequence
  Description of Artificial Sequence: Synthetic oligonucleotide
uacugggaccgacuccugc

SEQ ID NO: 447955 - RNA, 19 nt, Artificial Sequence
  Description of Artificial Sequence: Synthetic oligonucleotide
cuaacaucuuaggauucug

SEQ ID NO: 447956 - RNA, 19 nt, Artificial Sequence
  Description of Artificial Sequence: Synthetic oligonucleotide
cuccuuacuauuacuggga

SEQ ID NO: 447957 - RNA, 19 nt, Artificial Sequence
  Description of Artificial Sequence: Synthetic oligonucleotide
acucuuucgccaucagagu

SEQ ID NO: 447958 - RNA, 19 nt, Artificial Sequence
  Description of Artificial Sequence: Synthetic oligonucleotide
uacuauuacugggaccgac

SEQ ID NO: 447959 - RNA, 19 nt, Artificial Sequence
  Description of Artificial Sequence: Synthetic oligonucleotide
uccguuugucucacugucu

SEQ ID NO: 447960 - RNA, 19 nt, Artificial Sequence
  Description of Artificial Sequence: Synthetic oligonucleotide
ucgacaagcuuggugcucu

SEQ ID NO: 447961 - RNA, 19 nt, Artificial Sequence
  Description of Artificial Sequence: Synthetic oligonucleotide
gcgucaacggucuggacag

SEQ ID NO: 447962 - RNA, 19 nt, Artificial Sequence
  Description of Artificial Sequence: Synthetic oligonucleotide
ugugaaucaggagcacaga

SEQ ID NO: 447963 - RNA, 19 nt, Artificial Sequence
  Description of Artificial Sequence: Synthetic oligonucleotide
guagaacuagguauugcca

SEQ ID NO: 447964 - RNA, 19 nt, Artificial Sequence
  Description of Artificial Sequence: Synthetic oligonucleotide
uaucacggccuuaggcaca

SEQ ID NO: 447965 - RNA, 19 nt, Artificial Sequence
  Description of Artificial Sequence: Synthetic oligonucleotide
ccaagguugaagucagcgg

SEQ ID NO: 447966 - RNA, 19 nt, Artificial Sequence
  Description of Artificial Sequence: Synthetic oligonucleotide
gaacuagguauugccaaca

SEQ ID NO: 447967 - RNA, 19 nt, Artificial Sequence
  Description of Artificial Sequence: Synthetic oligonucleotide
ugccaacauugauuccagg

SEQ ID NO: 447968 - RNA, 19 nt, Artificial Sequence
  Description of Artificial Sequence: Synthetic oligonucleotide
aggacaucucugcugguau

SEQ ID NO: 447969 - RNA, 19 nt, Artificial Sequence
  Description of Artificial Sequence: Synthetic oligonucleotide
ucuuaggauucugccaggu

SEQ ID NO: 447970 - RNA, 19 nt, Artificial Sequence
  Description of Artificial Sequence: Synthetic oligonucleotide
aaccugaacuggauuagaa

SEQ ID NO: 447971 - RNA, 19 nt, Artificial Sequence
  Description of Artificial Sequence: Synthetic oligonucleotide
ugcguaggaaaacgaccac

SEQ ID NO: 447972 - RNA, 19 nt, Artificial Sequence
  Description of Artificial Sequence: Synthetic oligonucleotide
cacucaucuguccacguca

SEQ ID NO: 447973 - RNA, 19 nt, Artificial Sequence
  Description of Artificial Sequence: Synthetic oligonucleotide
auccaggauauaagaguac

SEQ ID NO: 447974 - RNA, 19 nt, Artificial Sequence
  Description of Artificial Sequence: Synthetic oligonucleotide
uguuucgaugugagcgaac

SEQ ID NO: 447975 - RNA, 19 nt, Artificial Sequence
  Description of Artificial Sequence: Synthetic oligonucleotide
acuauuacugggaccgacu

SEQ ID NO: 447976 - RNA, 19 nt, Artificial Sequence
  Description of Artificial Sequence: Synthetic oligonucleotide
auacagugaguaacuaaca

SEQ ID NO: 447977 - RNA, 19 nt, Artificial Sequence
  Description of Artificial Sequence: Synthetic oligonucleotide
acuagguauugccaacauu

SEQ ID NO: 447978 - RNA, 19 nt, Artificial Sequence
  Description of Artificial Sequence: Synthetic oligonucleotide
ccacagauuauaguugagg

SEQ ID NO: 447979 - RNA, 19 nt, Artificial Sequence
  Description of Artificial Sequence: Synthetic oligonucleotide
ugcuaggggagugcuuccg

SEQ ID NO: 447980 - RNA, 19 nt, Artificial Sequence
  Description of Artificial Sequence: Synthetic oligonucleotide
cuuaggauucugccagguc

SEQ ID NO: 447981 - RNA, 19 nt, Artificial Sequence
  Description of Artificial Sequence: Synthetic oligonucleotide
uacugguggguccaagcuu

SEQ ID NO: 447982 - RNA, 19 nt, Artificial Sequence
  Description of Artificial Sequence: Synthetic oligonucleotide
cuccaguuugagaaguaga

SEQ ID NO: 447983 - RNA, 19 nt, Artificial Sequence
  Description of Artificial Sequence: Synthetic oligonucleotide
cugagcucccuaugcguag

SEQ ID NO: 447984 - RNA, 19 nt, Artificial Sequence
  Description of Artificial Sequence: Synthetic oligonucleotide
auuauaguugaggcucaga

SEQ ID NO: 447985 - RNA, 19 nt, Artificial Sequence
  Description of Artificial Sequence: Synthetic oligonucleotide
uucacugguucuagacauc

SEQ ID NO: 447986 - RNA, 19 nt, Artificial Sequence
  Description of Artificial Sequence: Synthetic oligonucleotide
cuuccucucaggaauguua

SEQ ID NO: 447987 - RNA, 19 nt, Artificial Sequence
  Description of Artificial Sequence: Synthetic oligonucleotide
cgucauuaagagaagggac

SEQ ID NO: 447988 - RNA, 19 nt, Artificial Sequence
  Description of Artificial Sequence: Synthetic oligonucleotide
cucccuaugcguaggaaaa

SEQ ID NO: 447989 - RNA, 19 nt, Artificial Sequence
  Description of Artificial Sequence: Synthetic oligonucleotide
gugaccuuuaaaaugacuu

SEQ ID NO: 447990 - RNA, 19 nt, Artificial Sequence
  Description of Artificial Sequence: Synthetic oligonucleotide
uucuuaaaaggggcacaga

SEQ ID NO: 447991 - RNA, 19 nt, Artificial Sequence
  Description of Artificial Sequence: Synthetic oligonucleotide
gauauacagugaguaacua

SEQ ID NO: 447992 - RNA, 19 nt, Artificial Sequence
  Description of Artificial Sequence: Synthetic oligonucleotide
agugaccuuuaaaaugacu

SEQ ID NO: 447993 - RNA, 19 nt, Artificial Sequence
  Description of Artificial Sequence: Synthetic oligonucleotide
ugggacauucuagauguuu

SEQ ID NO: 447994 - RNA, 19 nt, Artificial Sequence
  Description of Artificial Sequence: Synthetic oligonucleotide
guagggaccuucaaucaga

SEQ ID NO: 447995 - RNA, 19 nt, Artificial Sequence
  Description of Artificial Sequence: Synthetic oligonucleotide
gauggacgcgucaacgguc

SEQ ID NO: 447996 - RNA, 19 nt, Artificial Sequence
  Description of Artificial Sequence: Synthetic oligonucleotide
uggcucuagcucccgguga

SEQ ID NO: 447997 - RNA, 19 nt, Artificial Sequence
  Description of Artificial Sequence: Synthetic oligonucleotide
ccuguaugcaaccugccuc

SEQ ID NO: 447998 - RNA, 19 nt, Artificial Sequence
  Description of Artificial Sequence: Synthetic oligonucleotide
uggcuugccuucacauucu

SEQ ID NO: 447999 - RNA, 19 nt, Artificial Sequence
  Description of Artificial Sequence: Synthetic oligonucleotide
aggccgcucuccuuucagg

SEQ ID NO: 448000 - RNA, 19 nt, Artificial Sequence
  Description of Artificial Sequence: Synthetic oligonucleotide
uuccaaccugaacuggauu

SEQ ID NO: 448001 - RNA, 19 nt, Artificial Sequence
  Description of Artificial Sequence: Synthetic oligonucleotide
ccuuacuauuacugggacc

SEQ ID NO: 448002 - RNA, 19 nt, Artificial Sequence
  Description of Artificial Sequence: Synthetic oligonucleotide
agguacaugaggaggacua

SEQ ID NO: 448003 - RNA, 19 nt, Artificial Sequence
  Description of Artificial Sequence: Synthetic oligonucleotide
ccaagcuuugaacuugaac

SEQ ID NO: 448004 - RNA, 19 nt, Artificial Sequence
  Description of Artificial Sequence: Synthetic oligonucleotide
ugacccaccucggucuuug

SEQ ID NO: 448005 - RNA, 19 nt, Artificial Sequence
  Description of Artificial Sequence: Synthetic oligonucleotide
caaccuugaggccucccuc

SEQ ID NO: 448006 - RNA, 19 nt, Artificial Sequence
  Description of Artificial Sequence: Synthetic oligonucleotide
gucccgaggcacaaugucc

SEQ ID NO: 448007 - RNA, 19 nt, Artificial Sequence
  Description of Artificial Sequence: Synthetic oligonucleotide
gcaucuguagagcucccug

SEQ ID NO: 448008 - RNA, 19 nt, Artificial Sequence
  Description of Artificial Sequence: Synthetic oligonucleotide
gguuuguuucgaugugagc

SEQ ID NO: 448009 - RNA, 19 nt, Artificial Sequence
  Description of Artificial Sequence: Synthetic oligonucleotide
ugccacuaaggagacugcu

SEQ ID NO: 448010 - RNA, 19 nt, Artificial Sequence
  Description of Artificial Sequence: Synthetic oligonucleotide
gcacacccgucauauauug

SEQ ID NO: 448011 - RNA, 19 nt, Artificial Sequence
  Description of Artificial Sequence: Synthetic oligonucleotide
acgaccacuuucagaggac

SEQ ID NO: 448012 - RNA, 19 nt, Artificial Sequence
  Description of Artificial Sequence: Synthetic oligonucleotide
cucucaauugcaagcauau

SEQ ID NO: 448013 - RNA, 19 nt, Artificial Sequence
  Description of Artificial Sequence: Synthetic oligonucleotide
cugagauggacgcgucaac

SEQ ID NO: 448014 - RNA, 19 nt, Artificial Sequence
  Description of Artificial Sequence: Synthetic oligonucleotide
gaaauguuagcuggcucua

SEQ ID NO: 448015 - RNA, 19 nt, Artificial Sequence
  Description of Artificial Sequence: Synthetic oligonucleotide
cagcggacagcccacucug

SEQ ID NO: 448016 - RNA, 19 nt, Artificial Sequence
  Description of Artificial Sequence: Synthetic oligonucleotide
gucaacggucuggacaggc

SEQ ID NO: 448017 - RNA, 19 nt, Artificial Sequence
  Description of Artificial Sequence: Synthetic oligonucleotide
guuucgaugugagcgaacu

SEQ ID NO: 448018 - RNA, 19 nt, Artificial Sequence
  Description of Artificial Sequence: Synthetic oligonucleotide
uuguuucgaugugagcgaa

SEQ ID NO: 448019 - RNA, 19 nt, Artificial Sequence
  Description of Artificial Sequence: Synthetic oligonucleotide
gaguggcuagccucuugac

SEQ ID NO: 448020 - RNA, 19 nt, Artificial Sequence
  Description of Artificial Sequence: Synthetic oligonucleotide
ugauuccagguugaaugua

SEQ ID NO: 448021 - RNA, 19 nt, Artificial Sequence
  Description of Artificial Sequence: Synthetic oligonucleotide
ggguuuguuucgaugugag

SEQ ID NO: 448022 - RNA, 19 nt, Artificial Sequence
  Description of Artificial Sequence: Synthetic oligonucleotide
cugacacucucaauugcaa

SEQ ID NO: 448023 - RNA, 19 nt, Artificial Sequence
  Description of Artificial Sequence: Synthetic oligonucleotide
ugggaccgacuccugccug

SEQ ID NO: 448024 - RNA, 19 nt, Artificial Sequence
  Description of Artificial Sequence: Synthetic oligonucleotide
acacagaguucgucuuuga

SEQ ID NO: 448025 - RNA, 19 nt, Artificial Sequence
  Description of Artificial Sequence: Synthetic oligonucleotide
cacggccuuaggcacacuc

SEQ ID NO: 448026 - RNA, 19 nt, Artificial Sequence
  Description of Artificial Sequence: Synthetic oligonucleotide
uccaguggucacccuuuuc

SEQ ID NO: 448027 - RNA, 19 nt, Artificial Sequence
  Description of Artificial Sequence: Synthetic oligonucleotide
uuacuauuacugggaccga

SEQ ID NO: 448028 - RNA, 19 nt, Artificial Sequence
  Description of Artificial Sequence: Synthetic oligonucleotide
agaguucgucuuugacucu

SEQ ID NO: 448029 - RNA, 19 nt, Artificial Sequence
  Description of Artificial Sequence: Synthetic oligonucleotide
acccgucauauauugugua

SEQ ID NO: 448030 - RNA, 19 nt, Artificial Sequence
  Description of Artificial Sequence: Synthetic oligonucleotide
cugccacuaaggagacugc

SEQ ID NO: 448031 - RNA, 19 nt, Artificial Sequence
  Description of Artificial Sequence: Synthetic oligonucleotide
uuacugggaccgacuccug

SEQ ID NO: 448032 - RNA, 19 nt, Artificial Sequence
  Description of Artificial Sequence: Synthetic oligonucleotide
ucccuaugcguaggaaaac

SEQ ID NO: 448033 - RNA, 19 nt, Artificial Sequence
  Description of Artificial Sequence: Synthetic oligonucleotide
cccuaugcguaggaaaacg

SEQ ID NO: 448034 - RNA, 19 nt, Artificial Sequence
  Description of Artificial Sequence: Synthetic oligonucleotide
ggaaauugguggcacugaa

SEQ ID NO: 448035 - RNA, 19 nt, Artificial Sequence
  Description of Artificial Sequence: Synthetic oligonucleotide
acucucaauugcaagcaua

SEQ ID NO: 448036 - RNA, 19 nt, Artificial Sequence
  Description of Artificial Sequence: Synthetic oligonucleotide
gacgcgucaacggucugga

SEQ ID NO: 448037 - RNA, 19 nt, Artificial Sequence
  Description of Artificial Sequence: Synthetic oligonucleotide
gccaacauugauuccaggu

SEQ ID NO: 448038 - RNA, 19 nt, Artificial Sequence
  Description of Artificial Sequence: Synthetic oligonucleotide
uccaagcuuugaacuugaa

SEQ ID NO: 448039 - RNA, 19 nt, Artificial Sequence
  Description of Artificial Sequence: Synthetic oligonucleotide
acuaacccauaaacccaag

SEQ ID NO: 448040 - RNA, 19 nt, Artificial Sequence
  Description of Artificial Sequence: Synthetic oligonucleotide
ucuugggcggagucuugau

SEQ ID NO: 448041 - RNA, 19 nt, Artificial Sequence
  Description of Artificial Sequence: Synthetic oligonucleotide
aucaguugucaaaccacaa

SEQ ID NO: 448042 - RNA, 19 nt, Artificial Sequence
  Description of Artificial Sequence: Synthetic oligonucleotide
gcuccaguuugagaaguag

SEQ ID NO: 448043 - RNA, 19 nt, Artificial Sequence
  Description of Artificial Sequence: Synthetic oligonucleotide
gugagcgaacugguccacg

SEQ ID NO: 448044 - RNA, 19 nt, Artificial Sequence
  Description of Artificial Sequence: Synthetic oligonucleotide
caggauauaagaguacaau

SEQ ID NO: 448045 - RNA, 19 nt, Artificial Sequence
  Description of Artificial Sequence: Synthetic oligonucleotide
auggacgcgucaacggucu

SEQ ID NO: 448046 - RNA, 19 nt, Artificial Sequence
  Description of Artificial Sequence: Synthetic oligonucleotide
ggcggagucuugauggcag

SEQ ID NO: 448047 - RNA, 19 nt, Artificial Sequence
  Description of Artificial Sequence: Synthetic oligonucleotide
ugugagcgaacugguccac

SEQ ID NO: 448048 - RNA, 19 nt, Artificial Sequence
  Description of Artificial Sequence: Synthetic oligonucleotide
ggggcuacagcuugaucca

SEQ ID NO: 448049 - RNA, 19 nt, Artificial Sequence
  Description of Artificial Sequence: Synthetic oligonucleotide
guaugcaaccugccucguc

SEQ ID NO: 448050 - RNA, 19 nt, Artificial Sequence
  Description of Artificial Sequence: Synthetic oligonucleotide
cgucuuugacucuuucgcc

SEQ ID NO: 448051 - RNA, 19 nt, Artificial Sequence
  Description of Artificial Sequence: Synthetic oligonucleotide
uguaugcaaccugccucgu

SEQ ID NO: 448052 - RNA, 19 nt, Artificial Sequence
  Description of Artificial Sequence: Synthetic oligonucleotide
ggcaugugcuuaaauauua

SEQ ID NO: 448053 - RNA, 19 nt, Artificial Sequence
  Description of Artificial Sequence: Synthetic oligonucleotide
gagucuugauggcagcuuu

SEQ ID NO: 448054 - RNA, 19 nt, Artificial Sequence
  Description of Artificial Sequence: Synthetic oligonucleotide
ggggugcucuccaagguug

SEQ ID NO: 448055 - RNA, 19 nt, Artificial Sequence
  Description of Artificial Sequence: Synthetic oligonucleotide
cugcacacccgucauauau

SEQ ID NO: 448056 - RNA, 19 nt, Artificial Sequence
  Description of Artificial Sequence: Synthetic oligonucleotide
ggacgcgucaacggucugg

SEQ ID NO: 448057 - RNA, 19 nt, Artificial Sequence
  Description of Artificial Sequence: Synthetic oligonucleotide
ccaaccugaacuggauuag

SEQ ID NO: 448058 - RNA, 19 nt, Artificial Sequence
  Description of Artificial Sequence: Synthetic oligonucleotide
cucgcuugcucugguuuug

SEQ ID NO: 448059 - RNA, 19 nt, Artificial Sequence
  Description of Artificial Sequence: Synthetic oligonucleotide
ucaccggaaccugggucug

SEQ ID NO: 448060 - RNA, 19 nt, Artificial Sequence
  Description of Artificial Sequence: Synthetic oligonucleotide
guucugcuuacgaauucaa

SEQ ID NO: 448061 - RNA, 19 nt, Artificial Sequence
  Description of Artificial Sequence: Synthetic oligonucleotide
ccuaugcguaggaaaacga

SEQ ID NO: 448062 - RNA, 19 nt, Artificial Sequence
  Description of Artificial Sequence: Synthetic oligonucleotide
acggccuuaggcacacuca

SEQ ID NO: 448063 - RNA, 19 nt, Artificial Sequence
  Description of Artificial Sequence: Synthetic oligonucleotide
acgcgucaacggucuggac

SEQ ID NO: 448064 - RNA, 19 nt, Artificial Sequence
  Description of Artificial Sequence: Synthetic oligonucleotide
ugguggguccaagcuuuga

SEQ ID NO: 448065 - RNA, 19 nt, Artificial Sequence
  Description of Artificial Sequence: Synthetic oligonucleotide
uguucucgacaagcuuggu

SEQ ID NO: 448066 - RNA, 19 nt, Artificial Sequence
  Description of Artificial Sequence: Synthetic oligonucleotide
gccuucggaaauaucagaa

SEQ ID NO: 448067 - RNA, 19 nt, Artificial Sequence
  Description of Artificial Sequence: Synthetic oligonucleotide
agugaguaacuaacaucuu

SEQ ID NO: 448068 - RNA, 19 nt, Artificial Sequence
  Description of Artificial Sequence: Synthetic oligonucleotide
cucgacaagcuuggugcuc

SEQ ID NO: 448069 - RNA, 19 nt, Artificial Sequence
  Description of Artificial Sequence: Synthetic oligonucleotide
gaauucaauccaggauaua

SEQ ID NO: 448070 - RNA, 19 nt, Artificial Sequence
  Description of Artificial Sequence: Synthetic oligonucleotide
gccaucagaguggcuagcc

SEQ ID NO: 448071 - RNA, 19 nt, Artificial Sequence
  Description of Artificial Sequence: Synthetic oligonucleotide
ugggagaguggagcuuccu

SEQ ID NO: 448072 - RNA, 19 nt, Artificial Sequence
  Description of Artificial Sequence: Synthetic oligonucleotide
uggacgcgucaacggucug

SEQ ID NO: 448073 - RNA, 19 nt, Artificial Sequence
  Description of Artificial Sequence: Synthetic oligonucleotide
agacacacuccaguaucua

SEQ ID NO: 448074 - RNA, 19 nt, Artificial Sequence
  Description of Artificial Sequence: Synthetic oligonucleotide
gaccugugacugccuguca

SEQ ID NO: 448075 - RNA, 19 nt, Artificial Sequence
  Description of Artificial Sequence: Synthetic oligonucleotide
ucgcuugcucugguuuugu

SEQ ID NO: 448076 - RNA, 19 nt, Artificial Sequence
  Description of Artificial Sequence: Synthetic oligonucleotide
gggguuuguuucgauguga

SEQ ID NO: 448077 - RNA, 19 nt, Artificial Sequence
  Description of Artificial Sequence: Synthetic oligonucleotide
cuucucuggucccgaggca

SEQ ID NO: 448078 - RNA, 19 nt, Artificial Sequence
  Description of Artificial Sequence: Synthetic oligonucleotide
gaccacuuucagaggacua

SEQ ID NO: 448079 - RNA, 19 nt, Artificial Sequence
  Description of Artificial Sequence: Synthetic oligonucleotide
cucaaggacucagcaaucu

SEQ ID NO: 448080 - RNA, 19 nt, Artificial Sequence
  Description of Artificial Sequence: Synthetic oligonucleotide
caagcccaucuugggcugc

SEQ ID NO: 448081 - RNA, 19 nt, Artificial Sequence
  Description of Artificial Sequence: Synthetic oligonucleotide
gucagcggacagcccacuc

SEQ ID NO: 448082 - RNA, 19 nt, Artificial Sequence
  Description of Artificial Sequence: Synthetic oligonucleotide
gacccaccucggucuuugc

SEQ ID NO: 448083 - RNA, 19 nt, Artificial Sequence
  Description of Artificial Sequence: Synthetic oligonucleotide
gcaaccucccucauggaua

SEQ ID NO: 448084 - RNA, 19 nt, Artificial Sequence
  Description of Artificial Sequence: Synthetic oligonucleotide
cucagcaaucuuggucuca

SEQ ID NO: 448085 - RNA, 19 nt, Artificial Sequence
  Description of Artificial Sequence: Synthetic oligonucleotide
cagauaucacagacacacu

SEQ ID NO: 448086 - RNA, 19 nt, Artificial Sequence
  Description of Artificial Sequence: Synthetic oligonucleotide
gccugucaguugcaauggc

SEQ ID NO: 448087 - RNA, 19 nt, Artificial Sequence
  Description of Artificial Sequence: Synthetic oligonucleotide
gcgaacugguccacggcug

SEQ ID NO: 448088 - RNA, 19 nt, Artificial Sequence
  Description of Artificial Sequence: Synthetic oligonucleotide
agucagcggacagcccacu

SEQ ID NO: 448089 - RNA, 19 nt, Artificial Sequence
  Description of Artificial Sequence: Synthetic oligonucleotide
cgcgucaacggucuggaca

SEQ ID NO: 448090 - RNA, 19 nt, Artificial Sequence
  Description of Artificial Sequence: Synthetic oligonucleotide
cccgucauauauuguguaa

SEQ ID NO: 448091 - RNA, 19 nt, Artificial Sequence
  Description of Artificial Sequence: Synthetic oligonucleotide
cuccaguaucuaucaaaau

SEQ ID NO: 448092 - RNA, 19 nt, Artificial Sequence
  Description of Artificial Sequence: Synthetic oligonucleotide
ggauacagcuguugggguu

SEQ ID NO: 448093 - RNA, 19 nt, Artificial Sequence
  Description of Artificial Sequence: Synthetic oligonucleotide
ggauugucaggggugcucu

SEQ ID NO: 448094 - RNA, 19 nt, Artificial Sequence
  Description of Artificial Sequence: Synthetic oligonucleotide
ccugucaguugcaauggcu

SEQ ID NO: 448095 - RNA, 19 nt, Artificial Sequence
  Description of Artificial Sequence: Synthetic oligonucleotide
gcaugagauggaaaaccua

SEQ ID NO: 448096 - RNA, 19 nt, Artificial Sequence
  Description of Artificial Sequence: Synthetic oligonucleotide
cacucgcuugcucugguuu

SEQ ID NO: 448097 - RNA, 19 nt, Artificial Sequence
  Description of Artificial Sequence: Synthetic oligonucleotide
aaccucccucauggauaca

SEQ ID NO: 448098 - RNA, 19 nt, Artificial Sequence
  Description of Artificial Sequence: Synthetic oligonucleotide
ggacucacuugguucugcu

SEQ ID NO: 448099 - RNA, 19 nt, Artificial Sequence
  Description of Artificial Sequence: Synthetic oligonucleotide
cacacccgucauauauugu

SEQ ID NO: 448100 - RNA, 19 nt, Artificial Sequence
  Description of Artificial Sequence: Synthetic oligonucleotide
ggccgcucuccuuucaggu

SEQ ID NO: 448101 - RNA, 19 nt, Artificial Sequence
  Description of Artificial Sequence: Synthetic oligonucleotide
ccacuaaggagacugcuuu

SEQ ID NO: 448102 - RNA, 19 nt, Artificial Sequence
  Description of Artificial Sequence: Synthetic oligonucleotide
gcggacagcccacucugaa

SEQ ID NO: 448103 - RNA, 19 nt, Artificial Sequence
  Description of Artificial Sequence: Synthetic oligonucleotide
gagcacagacugugggguu

SEQ ID NO: 448104 - RNA, 19 nt, Artificial Sequence
  Description of Artificial Sequence: Synthetic oligonucleotide
agcggacagcccacucuga

SEQ ID NO: 448105 - RNA, 19 nt, Artificial Sequence
  Description of Artificial Sequence: Synthetic oligonucleotide
uugacccaccucggucuuu

SEQ ID NO: 448106 - RNA, 19 nt, Artificial Sequence
  Description of Artificial Sequence: Synthetic oligonucleotide
gggcggagucuugauggca

SEQ ID NO: 448107 - RNA, 19 nt, Artificial Sequence
  Description of Artificial Sequence: Synthetic oligonucleotide
cuccccucucugagaugga

SEQ ID NO: 448108 - RNA, 19 nt, Artificial Sequence
  Description of Artificial Sequence: Synthetic oligonucleotide
caccucggucuuugccaga

SEQ ID NO: 448109 - RNA, 19 nt, Artificial Sequence
  Description of Artificial Sequence: Synthetic oligonucleotide
ggcuagccucuugacccac

SEQ ID NO: 448110 - RNA, 19 nt, Artificial Sequence
  Description of Artificial Sequence: Synthetic oligonucleotide
ccgucauauauuguguaau

SEQ ID NO: 448111 - RNA, 19 nt, Artificial Sequence
  Description of Artificial Sequence: Synthetic oligonucleotide
ggagucuugauggcagcuu

SEQ ID NO: 448112 - RNA, 19 nt, Artificial Sequence
  Description of Artificial Sequence: Synthetic oligonucleotide
caguucccauguguguacu

SEQ ID NO: 448113 - RNA, 19 nt, Artificial Sequence
  Description of Artificial Sequence: Synthetic oligonucleotide
cccgaggcacaauguccuc

SEQ ID NO: 448114 - RNA, 19 nt, Artificial Sequence
  Description of Artificial Sequence: Synthetic oligonucleotide
caguugcaauggcuuuacu

SEQ ID NO: 448115 - RNA, 19 nt, Artificial Sequence
  Description of Artificial Sequence: Synthetic oligonucleotide
cuugacccaccucggucuu

SEQ ID NO: 448116 - RNA, 19 nt, Artificial Sequence
  Description of Artificial Sequence: Synthetic oligonucleotide
cggaaccugggucugugaa

SEQ ID NO: 448117 - RNA, 19 nt, Artificial Sequence
  Description of Artificial Sequence: Synthetic oligonucleotide
ccauaaacccaagcucagu

SEQ ID NO: 448118 - RNA, 19 nt, Artificial Sequence
  Description of Artificial Sequence: Synthetic oligonucleotide
cucaucuguccacgucauu

SEQ ID NO: 448119 - RNA, 19 nt, Artificial Sequence
  Description of Artificial Sequence: Synthetic oligonucleotide
ccggaaccugggucuguga

SEQ ID NO: 448120 - RNA, 19 nt, Artificial Sequence
  Description of Artificial Sequence: Synthetic oligonucleotide
gaccgacuccugccugcuu

SEQ ID NO: 448121 - RNA, 19 nt, Artificial Sequence
  Description of Artificial Sequence: Synthetic oligonucleotide
cgucaacggucuggacagg

SEQ ID NO: 448122 - RNA, 19 nt, Artificial Sequence
  Description of Artificial Sequence: Synthetic oligonucleotide
ccucuugacccaccucggu

SEQ ID NO: 448123 - RNA, 19 nt, Artificial Sequence
  Description of Artificial Sequence: Synthetic oligonucleotide
ggaccgacuccugccugcu

SEQ ID NO: 448124 - RNA, 19 nt, Artificial Sequence
  Description of Artificial Sequence: Synthetic oligonucleotide
ccgaggcacaauguccucu

SEQ ID NO: 448125 - RNA, 19 nt, Artificial Sequence
  Description of Artificial Sequence: Synthetic oligonucleotide
cgaccacuuucagaggacu

SEQ ID NO: 448126 - RNA, 19 nt, Artificial Sequence
  Description of Artificial Sequence: Synthetic oligonucleotide
caccggaaccugggucugu

SEQ ID NO: 448127 - RNA, 19 nt, Artificial Sequence
  Description of Artificial Sequence: Synthetic oligonucleotide
ccacggcugucuggaugau

SEQ ID NO: 448128 - RNA, 19 nt, Artificial Sequence
  Description of Artificial Sequence: Synthetic oligonucleotide
aaauauacuauccacccac

SEQ ID NO: 448129 - RNA, 19 nt, Artificial Sequence
  Description of Artificial Sequence: Synthetic oligonucleotide
uccuuaauaauccaggagg

SEQ ID NO: 448130 - RNA, 19 nt, Artificial Sequence
  Description of Artificial Sequence: Synthetic oligonucleotide
aaauuuugaaaauugccug

SEQ ID NO: 448131 - RNA, 19 nt, Artificial Sequence
  Description of Artificial Sequence: Synthetic oligonucleotide
uaaguuaucgguuuauuag

SEQ ID NO: 448132 - RNA, 19 nt, Artificial Sequence
  Description of Artificial Sequence: Synthetic oligonucleotide
aguaaaguugcuuauaugu

SEQ ID NO: 448133 - RNA, 19 nt, Artificial Sequence
  Description of Artificial Sequence: Synthetic oligonucleotide
agugcagagccucagaacc

SEQ ID NO: 448134 - RNA, 19 nt, Artificial Sequence
  Description of Artificial Sequence: Synthetic oligonucleotide
aauuccgcaauguuuacag

SEQ ID NO: 448135 - RNA, 19 nt, Artificial Sequence
  Description of Artificial Sequence: Synthetic oligonucleotide
aaguuaucgguuuauuagg

SEQ ID NO: 448136 - RNA, 19 nt, Artificial Sequence
  Description of Artificial Sequence: Synthetic oligonucleotide
guagacauaaaucuuauac

SEQ ID NO: 448137 - RNA, 19 nt, Artificial Sequence
  Description of Artificial Sequence: Synthetic oligonucleotide
aaugcggugagcucgaucu

SEQ ID NO: 448138 - RNA, 19 nt, Artificial Sequence
  Description of Artificial Sequence: Synthetic oligonucleotide
aggcuuaugacuugcaacc

SEQ ID NO: 448139 - RNA, 19 nt, Artificial Sequence
  Description of Artificial Sequence: Synthetic oligonucleotide
acggcuaccaaauuugacc

SEQ ID NO: 448140 - RNA, 19 nt, Artificial Sequence
  Description of Artificial Sequence: Synthetic oligonucleotide
gauaucauauguuugucug

SEQ ID NO: 448141 - RNA, 19 nt, Artificial Sequence
  Description of Artificial Sequence: Synthetic oligonucleotide
uaaagcuagcucuagauga

SEQ ID NO: 448142 - RNA, 19 nt, Artificial Sequence
  Description of Artificial Sequence: Synthetic oligonucleotide
aauauguuacaaauauucg

SEQ ID NO: 448143 - RNA, 19 nt, Artificial Sequence
  Description of Artificial Sequence: Synthetic oligonucleotide
uuaaauacugacuguagga

SEQ ID NO: 448144 - RNA, 19 nt, Artificial Sequence
  Description of Artificial Sequence: Synthetic oligonucleotide
auuaggaaaguaccaacac

SEQ ID NO: 448145 - RNA, 19 nt, Artificial Sequence
  Description of Artificial Sequence: Synthetic oligonucleotide
aauuuugaaaauugccuga

SEQ ID NO: 448146 - RNA, 19 nt, Artificial Sequence
  Description of Artificial Sequence: Synthetic oligonucleotide
ugagcugucgcccugaacu

SEQ ID NO: 448147 - RNA, 19 nt, Artificial Sequence
  Description of Artificial Sequence: Synthetic oligonucleotide
agauuaaguacacuuuagg

SEQ ID NO: 448148 - RNA, 19 nt, Artificial Sequence
  Description of Artificial Sequence: Synthetic oligonucleotide
aaauugccgucuucgaugg

SEQ ID NO: 448149 - RNA, 19 nt, Artificial Sequence
  Description of Artificial Sequence: Synthetic oligonucleotide
agucagaucaaguccacac

SEQ ID NO: 448150 - RNA, 19 nt, Artificial Sequence
  Description of Artificial Sequence: Synthetic oligonucleotide
ucaauagcggucaauaaaa

SEQ ID NO: 448151 - RNA, 19 nt, Artificial Sequence
  Description of Artificial Sequence: Synthetic oligonucleotide
aucgggacacucuagacac

SEQ ID NO: 448152 - RNA, 19 nt, Artificial Sequence
  Description of Artificial Sequence: Synthetic oligonucleotide
aaccaguggcuuuuaaugg

SEQ ID NO: 448153 - RNA, 19 nt, Artificial Sequence
  Description of Artificial Sequence: Synthetic oligonucleotide
uguaauagucaauagcggu

SEQ ID NO: 448154 - RNA, 19 nt, Artificial Sequence
  Description of Artificial Sequence: Synthetic oligonucleotide
uauuaggaaaguaccaaca

SEQ ID NO: 448155 - RNA, 19 nt, Artificial Sequence
  Description of Artificial Sequence: Synthetic oligonucleotide
cuuccuaauuaauucauag

SEQ ID NO: 448156 - RNA, 19 nt, Artificial Sequence
  Description of Artificial Sequence: Synthetic oligonucleotide
aauagcggucaauaaaaca

SEQ ID NO: 448157 - RNA, 19 nt, Artificial Sequence
  Description of Artificial Sequence: Synthetic oligonucleotide
ucaaaaucgcucacaacag

SEQ ID NO: 448158 - RNA, 19 nt, Artificial Sequence
  Description of Artificial Sequence: Synthetic oligonucleotide
aaugcucuccgcucguggc

SEQ ID NO: 448159 - RNA, 19 nt, Artificial Sequence
  Description of Artificial Sequence: Synthetic oligonucleotide
ucuucgauggcccggagcc

SEQ ID NO: 448160 - RNA, 19 nt, Artificial Sequence
  Description of Artificial Sequence: Synthetic oligonucleotide
uguguguguguguagaugc

SEQ ID NO: 448161 - RNA, 19 nt, Artificial Sequence
  Description of Artificial Sequence: Synthetic oligonucleotide
uaaaguugcuuauauguac

SEQ ID NO: 448162 - RNA, 19 nt, Artificial Sequence
  Description of Artificial Sequence: Synthetic oligonucleotide
ugaaugaagacuucacuga

SEQ ID NO: 448163 - RNA, 19 nt, Artificial Sequence
  Description of Artificial Sequence: Synthetic oligonucleotide
cauccuucgaaauuacugg

SEQ ID NO: 448164 - RNA, 19 nt, Artificial Sequence
  Description of Artificial Sequence: Synthetic oligonucleotide
uucaagguaaguuaucggu

SEQ ID NO: 448165 - RNA, 19 nt, Artificial Sequence
  Description of Artificial Sequence: Synthetic oligonucleotide
cacucuuaaauacugacug

SEQ ID NO: 448166 - RNA, 19 nt, Artificial Sequence
  Description of Artificial Sequence: Synthetic oligonucleotide
ucagaucaaguccacacug

SEQ ID NO: 448167 - RNA, 19 nt, Artificial Sequence
  Description of Artificial Sequence: Synthetic oligonucleotide
accccuaccaaauaucuuc

SEQ ID NO: 448168 - RNA, 19 nt, Artificial Sequence
  Description of Artificial Sequence: Synthetic oligonucleotide
gugauuacgaauucuuucc

SEQ ID NO: 448169 - RNA, 19 nt, Artificial Sequence
  Description of Artificial Sequence: Synthetic oligonucleotide
cugaaugaagacuucacug

SEQ ID NO: 448170 - RNA, 19 nt, Artificial Sequence
  Description of Artificial Sequence: Synthetic oligonucleotide
auacuauccacccacgucu

SEQ ID NO: 448171 - RNA, 19 nt, Artificial Sequence
  Description of Artificial Sequence: Synthetic oligonucleotide
cacaguaucgaugauggcg

SEQ ID NO: 448172 - RNA, 19 nt, Artificial Sequence
  Description of Artificial Sequence: Synthetic oligonucleotide
aaauauucgugugugugug

SEQ ID NO: 448173 - RNA, 19 nt, Artificial Sequence
  Description of Artificial Sequence: Synthetic oligonucleotide
auaucauauguuugucugg

SEQ ID NO: 448174 - RNA, 19 nt, Artificial Sequence
  Description of Artificial Sequence: Synthetic oligonucleotide
uguuacaaauauucgugug

SEQ ID NO: 448175 - RNA, 19 nt, Artificial Sequence
  Description of Artificial Sequence: Synthetic oligonucleotide
ugacuguaggacaauggag

SEQ ID NO: 448176 - RNA, 19 nt, Artificial Sequence
  Description of Artificial Sequence: Synthetic oligonucleotide
uacaccaugauaucauaug

SEQ ID NO: 448177 - RNA, 19 nt, Artificial Sequence
  Description of Artificial Sequence: Synthetic oligonucleotide
guaacucuuuccuggaagg

SEQ ID NO: 448178 - RNA, 19 nt, Artificial Sequence
  Description of Artificial Sequence: Synthetic oligonucleotide
guacacuuuagggagaagg

SEQ ID NO: 448179 - RNA, 19 nt, Artificial Sequence
  Description of Artificial Sequence: Synthetic oligonucleotide
cauucuguuggccaaugcg

SEQ ID NO: 448180 - RNA, 19 nt, Artificial Sequence
  Description of Artificial Sequence: Synthetic oligonucleotide
acucuagacacuguaauag

SEQ ID NO: 448181 - RNA, 19 nt, Artificial Sequence
  Description of Artificial Sequence: Synthetic oligonucleotide
ugucaccuaguaaaguugc

SEQ ID NO: 448182 - RNA, 19 nt, Artificial Sequence
  Description of Artificial Sequence: Synthetic oligonucleotide
ucaucagcgcuguagaaga

SEQ ID NO: 448183 - RNA, 19 nt, Artificial Sequence
  Description of Artificial Sequence: Synthetic oligonucleotide
uuaucgguuuauuaggaaa

SEQ ID NO: 448184 - RNA, 19 nt, Artificial Sequence
  Description of Artificial Sequence: Synthetic oligonucleotide
caaauugccgucuucgaug

SEQ ID NO: 448185 - RNA, 19 nt, Artificial Sequence
  Description of Artificial Sequence: Synthetic oligonucleotide
uccgcaauguuuacaguag

SEQ ID NO: 448186 - RNA, 19 nt, Artificial Sequence
  Description of Artificial Sequence: Synthetic oligonucleotide
aaauccacuggcuuccuaa

SEQ ID NO: 448187 - RNA, 19 nt, Artificial Sequence
  Description of Artificial Sequence: Synthetic oligonucleotide
cuguaauagucaauagcgg

SEQ ID NO: 448188 - RNA, 19 nt, Artificial Sequence
  Description of Artificial Sequence: Synthetic oligonucleotide
uauacuauccacccacguc

SEQ ID NO: 448189 - RNA, 19 nt, Artificial Sequence
  Description of Artificial Sequence: Synthetic oligonucleotide
aaagcuagcucuagaugac

SEQ ID NO: 448190 - RNA, 19 nt, Artificial Sequence
  Description of Artificial Sequence: Synthetic oligonucleotide
ugaggacggaggaauaacc

SEQ ID NO: 448191 - RNA, 19 nt, Artificial Sequence
  Description of Artificial Sequence: Synthetic oligonucleotide
ugauaucauauguuugucu

SEQ ID NO: 448192 - RNA, 19 nt, Artificial Sequence
  Description of Artificial Sequence: Synthetic oligonucleotide
aauauacuauccacccacg

SEQ ID NO: 448193 - RNA, 19 nt, Artificial Sequence
  Description of Artificial Sequence: Synthetic oligonucleotide
uucuaacuacuguacaucu

SEQ ID NO: 448194 - RNA, 19 nt, Artificial Sequence
  Description of Artificial Sequence: Synthetic oligonucleotide
auccuuaauaauccaggag

SEQ ID NO: 448195 - RNA, 19 nt, Artificial Sequence
  Description of Artificial Sequence: Synthetic oligonucleotide
uaauagucaauagcgguca

SEQ ID NO: 448196 - RNA, 19 nt, Artificial Sequence
  Description of Artificial Sequence: Synthetic oligonucleotide
aaaaucuccucaucaggau

SEQ ID NO: 448197 - RNA, 19 nt, Artificial Sequence
  Description of Artificial Sequence: Synthetic oligonucleotide
auucuguuggccaaugcgg

SEQ ID NO: 448198 - RNA, 19 nt, Artificial Sequence
  Description of Artificial Sequence: Synthetic oligonucleotide
uguagaugcauguuuguuu

SEQ ID NO: 448199 - RNA, 19 nt, Artificial Sequence
  Description of Artificial Sequence: Synthetic oligonucleotide
uagcggucaauaaaacaag

SEQ ID NO: 448200 - RNA, 19 nt, Artificial Sequence
  Description of Artificial Sequence: Synthetic oligonucleotide
auagcggucaauaaaacaa

SEQ ID NO: 448201 - RNA, 19 nt, Artificial Sequence
  Description of Artificial Sequence: Synthetic oligonucleotide
uuccuaauuaauucauagu

SEQ ID NO: 448202 - RNA, 19 nt, Artificial Sequence
  Description of Artificial Sequence: Synthetic oligonucleotide
cuucauagaucugggaucc

SEQ ID NO: 448203 - RNA, 19 nt, Artificial Sequence
  Description of Artificial Sequence: Synthetic oligonucleotide
aauacugacuguaggacaa

SEQ ID NO: 448204 - RNA, 19 nt, Artificial Sequence
  Description of Artificial Sequence: Synthetic oligonucleotide
ucuaacuacuguacaucug

SEQ ID NO: 448205 - RNA, 19 nt, Artificial Sequence
  Description of Artificial Sequence: Synthetic oligonucleotide
uauguaggugauuucuaac

SEQ ID NO: 448206 - RNA, 19 nt, Artificial Sequence
  Description of Artificial Sequence: Synthetic oligonucleotide
caggauagaugauggaagc

SEQ ID NO: 448207 - RNA, 19 nt, Artificial Sequence
  Description of Artificial Sequence: Synthetic oligonucleotide
uuugccucaggcuuaugac

SEQ ID NO: 448208 - RNA, 19 nt, Artificial Sequence
  Description of Artificial Sequence: Synthetic oligonucleotide
ugauuacgaauucuuuccu

SEQ ID NO: 448209 - RNA, 19 nt, Artificial Sequence
  Description of Artificial Sequence: Synthetic oligonucleotide
acgucuuuuccaucaaaag

SEQ ID NO: 448210 - RNA, 19 nt, Artificial Sequence
  Description of Artificial Sequence: Synthetic oligonucleotide
auaccgaacaaaugaaaau

SEQ ID NO: 448211 - RNA, 19 nt, Artificial Sequence
  Description of Artificial Sequence: Synthetic oligonucleotide
uuuuaaucuuugaaucuuu

SEQ ID NO: 448212 - RNA, 19 nt, Artificial Sequence
  Description of Artificial Sequence: Synthetic oligonucleotide
uuuauuugccucaggcuua

SEQ ID NO: 448213 - RNA, 19 nt, Artificial Sequence
  Description of Artificial Sequence: Synthetic oligonucleotide
aaucgcucacaacagguuu

SEQ ID NO: 448214 - RNA, 19 nt, Artificial Sequence
  Description of Artificial Sequence: Synthetic oligonucleotide
cuaaagcuagcucuagaug

SEQ ID NO: 448215 - RNA, 19 nt, Artificial Sequence
  Description of Artificial Sequence: Synthetic oligonucleotide
acuaucuuuguaguuuauc

SEQ ID NO: 448216 - RNA, 19 nt, Artificial Sequence
  Description of Artificial Sequence: Synthetic oligonucleotide
ucaagguaaguuaucgguu

SEQ ID NO: 448217 - RNA, 19 nt, Artificial Sequence
  Description of Artificial Sequence: Synthetic oligonucleotide
ucagcgcuguagaagauaa

SEQ ID NO: 448218 - RNA, 19 nt, Artificial Sequence
  Description of Artificial Sequence: Synthetic oligonucleotide
ggagaaggagaccauaccc

SEQ ID NO: 448219 - RNA, 19 nt, Artificial Sequence
  Description of Artificial Sequence: Synthetic oligonucleotide
ggagucuucauagaucugg

SEQ ID NO: 448220 - RNA, 19 nt, Artificial Sequence
  Description of Artificial Sequence: Synthetic oligonucleotide
ggcacuauccuaaagcuag

SEQ ID NO: 448221 - RNA, 19 nt, Artificial Sequence
  Description of Artificial Sequence: Synthetic oligonucleotide
cuagcucuagaugacaaug

SEQ ID NO: 448222 - RNA, 19 nt, Artificial Sequence
  Description of Artificial Sequence: Synthetic oligonucleotide
agcaugacaucuuucucca

SEQ ID NO: 448223 - RNA, 19 nt, Artificial Sequence
  Description of Artificial Sequence: Synthetic oligonucleotide
ucacaauauguuacaaaua

SEQ ID NO: 448224 - RNA, 19 nt, Artificial Sequence
  Description of Artificial Sequence: Synthetic oligonucleotide
auauguaggugauuucuaa

SEQ ID NO: 448225 - RNA, 19 nt, Artificial Sequence
  Description of Artificial Sequence: Synthetic oligonucleotide
uuuggcgauuuucugccga

SEQ ID NO: 448226 - RNA, 19 nt, Artificial Sequence
  Description of Artificial Sequence: Synthetic oligonucleotide
ucaaacucuucuucccggc

SEQ ID NO: 448227 - RNA, 19 nt, Artificial Sequence
  Description of Artificial Sequence: Synthetic oligonucleotide
aauauucgugugugugugu

SEQ ID NO: 448228 - RNA, 19 nt, Artificial Sequence
  Description of Artificial Sequence: Synthetic oligonucleotide
gaaugcucuccgcucgugg

SEQ ID NO: 448229 - RNA, 19 nt, Artificial Sequence
  Description of Artificial Sequence: Synthetic oligonucleotide
uuccgcaauguuuacagua

SEQ ID NO: 448230 - RNA, 19 nt, Artificial Sequence
  Description of Artificial Sequence: Synthetic oligonucleotide
ugggaucccuccaaguuga

SEQ ID NO: 448231 - RNA, 19 nt, Artificial Sequence
  Description of Artificial Sequence: Synthetic oligonucleotide
uccacuggcuuccuaauua

SEQ ID NO: 448232 - RNA, 19 nt, Artificial Sequence
  Description of Artificial Sequence: Synthetic oligonucleotide
caggcuuaugacuugcaac

SEQ ID NO: 448233 - RNA, 19 nt, Artificial Sequence
  Description of Artificial Sequence: Synthetic oligonucleotide
agaccauacccauugguaa

SEQ ID NO: 448234 - RNA, 19 nt, Artificial Sequence
  Description of Artificial Sequence: Synthetic oligonucleotide
uaccgaacaaaugaaaauu

SEQ ID NO: 448235 - RNA, 19 nt, Artificial Sequence
  Description of Artificial Sequence: Synthetic oligonucleotide
ugcaggaaugcucuccgcu

SEQ ID NO: 448236 - RNA, 19 nt, Artificial Sequence
  Description of Artificial Sequence: Synthetic oligonucleotide
aacggcuaccaaauuugac

SEQ ID NO: 448237 - RNA, 19 nt, Artificial Sequence
  Description of Artificial Sequence: Synthetic oligonucleotide
uuccgcgucauccuuaaua

SEQ ID NO: 448238 - RNA, 19 nt, Artificial Sequence
  Description of Artificial Sequence: Synthetic oligonucleotide
ucgguuuggccuuuucuug

SEQ ID NO: 448239 - RNA, 19 nt, Artificial Sequence
  Description of Artificial Sequence: Synthetic oligonucleotide
agagccucagaacccggac

SEQ ID NO: 448240 - RNA, 19 nt, Artificial Sequence
  Description of Artificial Sequence: Synthetic oligonucleotide
uccgguacuugugauuacg

SEQ ID NO: 448241 - RNA, 19 nt, Artificial Sequence
  Description of Artificial Sequence: Synthetic oligonucleotide
cauaguauucugguaacuc

SEQ ID NO: 448242 - RNA, 19 nt, Artificial Sequence
  Description of Artificial Sequence: Synthetic oligonucleotide
ucgcccugaacuaucuuug

SEQ ID NO: 448243 - RNA, 19 nt, Artificial Sequence
  Description of Artificial Sequence: Synthetic oligonucleotide
uccgcgucauccuuaauaa

SEQ ID NO: 448244 - RNA, 19 nt, Artificial Sequence
  Description of Artificial Sequence: Synthetic oligonucleotide
auuuggucacaauauguua

SEQ ID NO: 448245 - RNA, 19 nt, Artificial Sequence
  Description of Artificial Sequence: Synthetic oligonucleotide
aggaucuuucuccacauuu

SEQ ID NO: 448246 - RNA, 19 nt, Artificial Sequence
  Description of Artificial Sequence: Synthetic oligonucleotide
guaauagucaauagcgguc

SEQ ID NO: 448247 - RNA, 19 nt, Artificial Sequence
  Description of Artificial Sequence: Synthetic oligonucleotide
uguaggacaauggagucuu

SEQ ID NO: 448248 - RNA, 19 nt, Artificial Sequence
  Description of Artificial Sequence: Synthetic oligonucleotide
gucaauagcggucaauaaa

SEQ ID NO: 448249 - RNA, 19 nt, Artificial Sequence
  Description of Artificial Sequence: Synthetic oligonucleotide
cugucaccuaguaaaguug

SEQ ID NO: 448250 - RNA, 19 nt, Artificial Sequence
  Description of Artificial Sequence: Synthetic oligonucleotide
auauacuauccacccacgu

SEQ ID NO: 448251 - RNA, 19 nt, Artificial Sequence
  Description of Artificial Sequence: Synthetic oligonucleotide
auuugacccaccuguagaa

SEQ ID NO: 448252 - RNA, 19 nt, Artificial Sequence
  Description of Artificial Sequence: Synthetic oligonucleotide
uuuucugccgagcacucuu

SEQ ID NO: 448253 - RNA, 19 nt, Artificial Sequence
  Description of Artificial Sequence: Synthetic oligonucleotide
ugcccaaagggcaaaugaa

SEQ ID NO: 448254 - RNA, 19 nt, Artificial Sequence
  Description of Artificial Sequence: Synthetic oligonucleotide
ucugggaucccuccaaguu

SEQ ID NO: 448255 - RNA, 19 nt, Artificial Sequence
  Description of Artificial Sequence: Synthetic oligonucleotide
uagucaauagcggucaaua

SEQ ID NO: 448256 - RNA, 19 nt, Artificial Sequence
  Description of Artificial Sequence: Synthetic oligonucleotide
aauaaccaguggcuuuuaa

SEQ ID NO: 448257 - RNA, 19 nt, Artificial Sequence
  Description of Artificial Sequence: Synthetic oligonucleotide
uuuacaccaugauaucaua

SEQ ID NO: 448258 - RNA, 19 nt, Artificial Sequence
  Description of Artificial Sequence: Synthetic oligonucleotide
aaauuccgcaauguuuaca

SEQ ID NO: 448259 - RNA, 19 nt, Artificial Sequence
  Description of Artificial Sequence: Synthetic oligonucleotide
uguguagaugcauguuugu

SEQ ID NO: 448260 - RNA, 19 nt, Artificial Sequence
  Description of Artificial Sequence: Synthetic oligonucleotide
ccggacuucauucuguugg

SEQ ID NO: 448261 - RNA, 19 nt, Artificial Sequence
  Description of Artificial Sequence: Synthetic oligonucleotide
uacaaauauucgugugugu

SEQ ID NO: 448262 - RNA, 19 nt, Artificial Sequence
  Description of Artificial Sequence: Synthetic oligonucleotide
agaaccccuaccaaauauc

SEQ ID NO: 448263 - RNA, 19 nt, Artificial Sequence
  Description of Artificial Sequence: Synthetic oligonucleotide
gaccauacccauugguaac

SEQ ID NO: 448264 - RNA, 19 nt, Artificial Sequence
  Description of Artificial Sequence: Synthetic oligonucleotide
augaggacggaggaauaac

SEQ ID NO: 448265 - RNA, 19 nt, Artificial Sequence
  Description of Artificial Sequence: Synthetic oligonucleotide
aggaauaacccagugccca

SEQ ID NO: 448266 - RNA, 19 nt, Artificial Sequence
  Description of Artificial Sequence: Synthetic oligonucleotide
aauugccgucuucgauggc

SEQ ID NO: 448267 - RNA, 19 nt, Artificial Sequence
  Description of Artificial Sequence: Synthetic oligonucleotide
guaaguuaucgguuuauua

SEQ ID NO: 448268 - RNA, 19 nt, Artificial Sequence
  Description of Artificial Sequence: Synthetic oligonucleotide
gaggacggaggaauaaccc

SEQ ID NO: 448269 - RNA, 19 nt, Artificial Sequence
  Description of Artificial Sequence: Synthetic oligonucleotide
caauagcggucaauaaaac

SEQ ID NO: 448270 - RNA, 19 nt, Artificial Sequence
  Description of Artificial Sequence: Synthetic oligonucleotide
aaugaggacggaggaauaa

SEQ ID NO: 448271 - RNA, 19 nt, Artificial Sequence
  Description of Artificial Sequence: Synthetic oligonucleotide
auauucgugugugugugug

SEQ ID NO: 448272 - RNA, 19 nt, Artificial Sequence
  Description of Artificial Sequence: Synthetic oligonucleotide
cuaacuacuguacaucugu

SEQ ID NO: 448273 - RNA, 19 nt, Artificial Sequence
  Description of Artificial Sequence: Synthetic oligonucleotide
aauccacuggcuuccuaau

SEQ ID NO: 448274 - RNA, 19 nt, Artificial Sequence
  Description of Artificial Sequence: Synthetic oligonucleotide
uccaaauugccgucuucga

SEQ ID NO: 448275 - RNA, 19 nt, Artificial Sequence
  Description of Artificial Sequence: Synthetic oligonucleotide
uguguguguguguguguag

SEQ ID NO: 448276 - RNA, 19 nt, Artificial Sequence
  Description of Artificial Sequence: Synthetic oligonucleotide
uugacccaccuguagaaau

SEQ ID NO: 448277 - RNA, 19 nt, Artificial Sequence
  Description of Artificial Sequence: Synthetic oligonucleotide
ugucaaaaucgcucacaac

SEQ ID NO: 448278 - RNA, 19 nt, Artificial Sequence
  Description of Artificial Sequence: Synthetic oligonucleotide
aagguaaguuaucgguuua

SEQ ID NO: 448279 - RNA, 19 nt, Artificial Sequence
  Description of Artificial Sequence: Synthetic oligonucleotide
gacuguaggacaauggagu

SEQ ID NO: 448280 - RNA, 19 nt, Artificial Sequence
  Description of Artificial Sequence: Synthetic oligonucleotide
cugacuguaggacaaugga

SEQ ID NO: 448281 - RNA, 19 nt, Artificial Sequence
  Description of Artificial Sequence: Synthetic oligonucleotide
cuuaugacuugcaaccaaa

SEQ ID NO: 448282 - RNA, 19 nt, Artificial Sequence
  Description of Artificial Sequence: Synthetic oligonucleotide
aauagucaauagcggucaa

SEQ ID NO: 448283 - RNA, 19 nt, Artificial Sequence
  Description of Artificial Sequence: Synthetic oligonucleotide
aucagucccacuugccucu

SEQ ID NO: 448284 - RNA, 19 nt, Artificial Sequence
  Description of Artificial Sequence: Synthetic oligonucleotide
uacuugugauuacgaauuc

SEQ ID NO: 448285 - RNA, 19 nt, Artificial Sequence
  Description of Artificial Sequence: Synthetic oligonucleotide
auucgugugugugugugug

SEQ ID NO: 448286 - RNA, 19 nt, Artificial Sequence
  Description of Artificial Sequence: Synthetic oligonucleotide
ugccucaggcuuaugacuu

SEQ ID NO: 448287 - RNA, 19 nt, Artificial Sequence
  Description of Artificial Sequence: Synthetic oligonucleotide
cauagaucugggaucccuc

SEQ ID NO: 448288 - RNA, 19 nt, Artificial Sequence
  Description of Artificial Sequence: Synthetic oligonucleotide
aguuaucgguuuauuagga

SEQ ID NO: 448289 - RNA, 19 nt, Artificial Sequence
  Description of Artificial Sequence: Synthetic oligonucleotide
agucaauagcggucaauaa

SEQ ID NO: 448290 - RNA, 19 nt, Artificial Sequence
  Description of Artificial Sequence: Synthetic oligonucleotide
gagggcgucgcuguagucc

SEQ ID NO: 448291 - RNA, 19 nt, Artificial Sequence
  Description of Artificial Sequence: Synthetic oligonucleotide
guauauguaggugauuucu

SEQ ID NO: 448292 - RNA, 19 nt, Artificial Sequence
  Description of Artificial Sequence: Synthetic oligonucleotide
aaguacacuuuagggagaa

SEQ ID NO: 448293 - RNA, 19 nt, Artificial Sequence
  Description of Artificial Sequence: Synthetic oligonucleotide
aacucuuuccuggaaggua

SEQ ID NO: 448294 - RNA, 19 nt, Artificial Sequence
  Description of Artificial Sequence: Synthetic oligonucleotide
ucgcucacaacagguuugg

SEQ ID NO: 448295 - RNA, 19 nt, Artificial Sequence
  Description of Artificial Sequence: Synthetic oligonucleotide
cuucacugagcugucgccc

SEQ ID NO: 448296 - RNA, 19 nt, Artificial Sequence
  Description of Artificial Sequence: Synthetic oligonucleotide
uucacugagcugucgcccu

SEQ ID NO: 448297 - RNA, 19 nt, Artificial Sequence
  Description of Artificial Sequence: Synthetic oligonucleotide
acaauaccgaacaaaugaa

SEQ ID NO: 448298 - RNA, 19 nt, Artificial Sequence
  Description of Artificial Sequence: Synthetic oligonucleotide
acugucaaaaucgcucaca

SEQ ID NO: 448299 - RNA, 19 nt, Artificial Sequence
  Description of Artificial Sequence: Synthetic oligonucleotide
caucaggcgaggcuugcgc

SEQ ID NO: 448300 - RNA, 19 nt, Artificial Sequence
  Description of Artificial Sequence: Synthetic oligonucleotide
uucccggcgagcaaucauc

SEQ ID NO: 448301 - RNA, 19 nt, Artificial Sequence
  Description of Artificial Sequence: Synthetic oligonucleotide
gaacccggacuucauucug

SEQ ID NO: 448302 - RNA, 19 nt, Artificial Sequence
  Description of Artificial Sequence: Synthetic oligonucleotide
cuaccaaauuugacccacc

SEQ ID NO: 448303 - RNA, 19 nt, Artificial Sequence
  Description of Artificial Sequence: Synthetic oligonucleotide
ucgugugugugugugugug

SEQ ID NO: 448304 - RNA, 19 nt, Artificial Sequence
  Description of Artificial Sequence: Synthetic oligonucleotide
acuugugauuacgaauucu

SEQ ID NO: 448305 - RNA, 19 nt, Artificial Sequence
  Description of Artificial Sequence: Synthetic oligonucleotide
uauucgugugugugugugu

SEQ ID NO: 448306 - RNA, 19 nt, Artificial Sequence
  Description of Artificial Sequence: Synthetic oligonucleotide
uuugccucgguuuggccuu

SEQ ID NO: 448307 - RNA, 19 nt, Artificial Sequence
  Description of Artificial Sequence: Synthetic oligonucleotide
guugacagugcagagccuc

SEQ ID NO: 448308 - RNA, 19 nt, Artificial Sequence
  Description of Artificial Sequence: Synthetic oligonucleotide
gucuucauagaucugggau

SEQ ID NO: 448309 - RNA, 19 nt, Artificial Sequence
  Description of Artificial Sequence: Synthetic oligonucleotide
caauaccgaacaaaugaaa

SEQ ID NO: 448310 - RNA, 19 nt, Artificial Sequence
  Description of Artificial Sequence: Synthetic oligonucleotide
ugacccaccuguagaaaua

SEQ ID NO: 448311 - RNA, 19 nt, Artificial Sequence
  Description of Artificial Sequence: Synthetic oligonucleotide
ucaccuaguaaaguugcuu

SEQ ID NO: 448312 - RNA, 19 nt, Artificial Sequence
  Description of Artificial Sequence: Synthetic oligonucleotide
ucgaaauuacuggaauuuu

SEQ ID NO: 448313 - RNA, 19 nt, Artificial Sequence
  Description of Artificial Sequence: Synthetic oligonucleotide
guacuuugcagcugcgaga

SEQ ID NO: 448314 - RNA, 19 nt, Artificial Sequence
  Description of Artificial Sequence: Synthetic oligonucleotide
ccacagucagaucaagucc

SEQ ID NO: 448315 - RNA, 19 nt, Artificial Sequence
  Description of Artificial Sequence: Synthetic oligonucleotide
aaacggcuaccaaauuuga

SEQ ID NO: 448316 - RNA, 19 nt, Artificial Sequence
  Description of Artificial Sequence: Synthetic oligonucleotide
uauguaccacaguguaaaa

SEQ ID NO: 448317 - RNA, 19 nt, Artificial Sequence
  Description of Artificial Sequence: Synthetic oligonucleotide
gcucuagaugacaaugagg

SEQ ID NO: 448318 - RNA, 19 nt, Artificial Sequence
  Description of Artificial Sequence: Synthetic oligonucleotide
guuaucgguuuauuaggaa

SEQ ID NO: 448319 - RNA, 19 nt, Artificial Sequence
  Description of Artificial Sequence: Synthetic oligonucleotide
aguagacauaaaucuuaua

SEQ ID NO: 448320 - RNA, 19 nt, Artificial Sequence
  Description of Artificial Sequence: Synthetic oligonucleotide
agaucugggaucccuccaa

SEQ ID NO: 448321 - RNA, 19 nt, Artificial Sequence
  Description of Artificial Sequence: Synthetic oligonucleotide
uguguguguguguguagau

SEQ ID NO: 448322 - RNA, 19 nt, Artificial Sequence
  Description of Artificial Sequence: Synthetic oligonucleotide
ugagcucgaucuugggccu

SEQ ID NO: 448323 - RNA, 19 nt, Artificial Sequence
  Description of Artificial Sequence: Synthetic oligonucleotide
caucgggacacucuagaca

SEQ ID NO: 448324 - RNA, 19 nt, Artificial Sequence
  Description of Artificial Sequence: Synthetic oligonucleotide
gagaccauacccauuggua

SEQ ID NO: 448325 - RNA, 19 nt, Artificial Sequence
  Description of Artificial Sequence: Synthetic oligonucleotide
cacgucuuuuccaucaaaa

SEQ ID NO: 448326 - RNA, 19 nt, Artificial Sequence
  Description of Artificial Sequence: Synthetic oligonucleotide
guaaaguugcuuauaugua

SEQ ID NO: 448327 - RNA, 19 nt, Artificial Sequence
  Description of Artificial Sequence: Synthetic oligonucleotide
ugugugugugugugugugu

SEQ ID NO: 448328 - RNA, 19 nt, Artificial Sequence
  Description of Artificial Sequence: Synthetic oligonucleotide
aaaucgcucacaacagguu

SEQ ID NO: 448329 - RNA, 19 nt, Artificial Sequence
  Description of Artificial Sequence: Synthetic oligonucleotide
ucgguuuauuaggaaagua

SEQ ID NO: 448330 - RNA, 19 nt, Artificial Sequence
  Description of Artificial Sequence: Synthetic oligonucleotide
ccggcgagcaaucaucugg

SEQ ID NO: 448331 - RNA, 19 nt, Artificial Sequence
  Description of Artificial Sequence: Synthetic oligonucleotide
uggcacuauccuaaagcua

SEQ ID NO: 448332 - RNA, 19 nt, Artificial Sequence
  Description of Artificial Sequence: Synthetic oligonucleotide
ugcggugagcucgaucuug

SEQ ID NO: 448333 - RNA, 19 nt, Artificial Sequence
  Description of Artificial Sequence: Synthetic oligonucleotide
aagcuagcucuagaugaca

SEQ ID NO: 448334 - RNA, 19 nt, Artificial Sequence
  Description of Artificial Sequence: Synthetic oligonucleotide
cugucaaaaucgcucacaa

SEQ ID NO: 448335 - RNA, 19 nt, Artificial Sequence
  Description of Artificial Sequence: Synthetic oligonucleotide
auauguuugucuggcacua

SEQ ID NO: 448336 - RNA, 19 nt, Artificial Sequence
  Description of Artificial Sequence: Synthetic oligonucleotide
ugccgagcacucuuaaaua

SEQ ID NO: 448337 - RNA, 19 nt, Artificial Sequence
  Description of Artificial Sequence: Synthetic oligonucleotide
aggauagaugauggaagca

SEQ ID NO: 448338 - RNA, 19 nt, Artificial Sequence
  Description of Artificial Sequence: Synthetic oligonucleotide
ggacggaggaauaacccag

SEQ ID NO: 448339 - RNA, 19 nt, Artificial Sequence
  Description of Artificial Sequence: Synthetic oligonucleotide
gcgucauccuuaauaaucc

SEQ ID NO: 448340 - RNA, 19 nt, Artificial Sequence
  Description of Artificial Sequence: Synthetic oligonucleotide
gugugugugugugugugug

SEQ ID NO: 448341 - RNA, 19 nt, Artificial Sequence
  Description of Artificial Sequence: Synthetic oligonucleotide
uggagucuucauagaucug

SEQ ID NO: 448342 - RNA, 19 nt, Artificial Sequence
  Description of Artificial Sequence: Synthetic oligonucleotide
gcaauguuuacaguagaca

SEQ ID NO: 448343 - RNA, 19 nt, Artificial Sequence
  Description of Artificial Sequence: Synthetic oligonucleotide
gggagaaggagaccauacc

SEQ ID NO: 448344 - RNA, 19 nt, Artificial Sequence
  Description of Artificial Sequence: Synthetic oligonucleotide
aucgcucacaacagguuug

SEQ ID NO: 448345 - RNA, 19 nt, Artificial Sequence
  Description of Artificial Sequence: Synthetic oligonucleotide
cauauguuugucuggcacu

SEQ ID NO: 448346 - RNA, 19 nt, Artificial Sequence
  Description of Artificial Sequence: Synthetic oligonucleotide
auuccgcaauguuuacagu

SEQ ID NO: 448347 - RNA, 19 nt, Artificial Sequence
  Description of Artificial Sequence: Synthetic oligonucleotide
gcggucaauaaaacaagag

SEQ ID NO: 448348 - RNA, 19 nt, Artificial Sequence
  Description of Artificial Sequence: Synthetic oligonucleotide
ggauagaugauggaagcaa

SEQ ID NO: 448349 - RNA, 19 nt, Artificial Sequence
  Description of Artificial Sequence: Synthetic oligonucleotide
guguguguguguguagaug

SEQ ID NO: 448350 - RNA, 19 nt, Artificial Sequence
  Description of Artificial Sequence: Synthetic oligonucleotide
agcggucaauaaaacaaga

SEQ ID NO: 448351 - RNA, 19 nt, Artificial Sequence
  Description of Artificial Sequence: Synthetic oligonucleotide
gagaaccccuaccaaauau

SEQ ID NO: 448352 - RNA, 19 nt, Artificial Sequence
  Description of Artificial Sequence: Synthetic oligonucleotide
gucuucgauggcccggagc

SEQ ID NO: 448353 - RNA, 19 nt, Artificial Sequence
  Description of Artificial Sequence: Synthetic oligonucleotide
ucugccgagcacucuuaaa

SEQ ID NO: 448354 - RNA, 19 nt, Artificial Sequence
  Description of Artificial Sequence: Synthetic oligonucleotide
uguuuacaguagacauaaa

SEQ ID NO: 448355 - RNA, 19 nt, Artificial Sequence
  Description of Artificial Sequence: Synthetic oligonucleotide
guaacugaaugaagacuuc

SEQ ID NO: 448356 - RNA, 19 nt, Artificial Sequence
  Description of Artificial Sequence: Synthetic oligonucleotide
cugcgagaaucuuuuccuc

SEQ ID NO: 448357 - RNA, 19 nt, Artificial Sequence
  Description of Artificial Sequence: Synthetic oligonucleotide
cuggcacuauccuaaagcu

SEQ ID NO: 448358 - RNA, 19 nt, Artificial Sequence
  Description of Artificial Sequence: Synthetic oligonucleotide
ucacccaggcuccgguacu

SEQ ID NO: 448359 - RNA, 19 nt, Artificial Sequence
  Description of Artificial Sequence: Synthetic oligonucleotide
gaaccccuaccaaauaucu

SEQ ID NO: 448360 - RNA, 19 nt, Artificial Sequence
  Description of Artificial Sequence: Synthetic oligonucleotide
gccgagcacucuuaaauac

SEQ ID NO: 448361 - RNA, 19 nt, Artificial Sequence
  Description of Artificial Sequence: Synthetic oligonucleotide
cucgucgucugguacuuca

SEQ ID NO: 448362 - RNA, 19 nt, Artificial Sequence
  Description of Artificial Sequence: Synthetic oligonucleotide
gguaacugaaugaagacuu

SEQ ID NO: 448363 - RNA, 19 nt, Artificial Sequence
  Description of Artificial Sequence: Synthetic oligonucleotide
uucgugugugugugugugu

SEQ ID NO: 448364 - RNA, 19 nt, Artificial Sequence
  Description of Artificial Sequence: Synthetic oligonucleotide
cggcuaccaaauuugaccc

SEQ ID NO: 448365 - RNA, 19 nt, Artificial Sequence
  Description of Artificial Sequence: Synthetic oligonucleotide
cucccggucaucagcgcug

SEQ ID NO: 448366 - RNA, 19 nt, Artificial Sequence
  Description of Artificial Sequence: Synthetic oligonucleotide
cgcgucauccuuaauaauc

SEQ ID NO: 448367 - RNA, 19 nt, Artificial Sequence
  Description of Artificial Sequence: Synthetic oligonucleotide
gcuaccaaauuugacccac

SEQ ID NO: 448368 - RNA, 19 nt, Artificial Sequence
  Description of Artificial Sequence: Synthetic oligonucleotide
auagucaauagcggucaau

SEQ ID NO: 448369 - RNA, 19 nt, Artificial Sequence
  Description of Artificial Sequence: Synthetic oligonucleotide
acuuccgcgucauccuuaa

SEQ ID NO: 448370 - RNA, 19 nt, Artificial Sequence
  Description of Artificial Sequence: Synthetic oligonucleotide
uacuauccacccacgucuu

SEQ ID NO: 448371 - RNA, 19 nt, Artificial Sequence
  Description of Artificial Sequence: Synthetic oligonucleotide
ucagaucauagagcauaaa

SEQ ID NO: 448372 - RNA, 19 nt, Artificial Sequence
  Description of Artificial Sequence: Synthetic oligonucleotide
gucagaucaaguccacacu

SEQ ID NO: 448373 - RNA, 19 nt, Artificial Sequence
  Description of Artificial Sequence: Synthetic oligonucleotide
ugccgucuucgauggcccg

SEQ ID NO: 448374 - RNA, 19 nt, Artificial Sequence
  Description of Artificial Sequence: Synthetic oligonucleotide
cacucuagacacuguaaua

SEQ ID NO: 448375 - RNA, 19 nt, Artificial Sequence
  Description of Artificial Sequence: Synthetic oligonucleotide
aacuaucuuuguaguuuau

SEQ ID NO: 448376 - RNA, 19 nt, Artificial Sequence
  Description of Artificial Sequence: Synthetic oligonucleotide
agguaaguuaucgguuuau

SEQ ID NO: 448377 - RNA, 19 nt, Artificial Sequence
  Description of Artificial Sequence: Synthetic oligonucleotide
aucaaacggcuaccaaauu

SEQ ID NO: 448378 - RNA, 19 nt, Artificial Sequence
  Description of Artificial Sequence: Synthetic oligonucleotide
guguguguguguguguaga

SEQ ID NO: 448379 - RNA, 19 nt, Artificial Sequence
  Description of Artificial Sequence: Synthetic oligonucleotide
guggacaaaagaagccauc

SEQ ID NO: 448380 - RNA, 19 nt, Artificial Sequence
  Description of Artificial Sequence: Synthetic oligonucleotide
caagguaaguuaucgguuu

SEQ ID NO: 448381 - RNA, 19 nt, Artificial Sequence
  Description of Artificial Sequence: Synthetic oligonucleotide
ugucuggcacuauccuaaa

SEQ ID NO: 448382 - RNA, 19 nt, Artificial Sequence
  Description of Artificial Sequence: Synthetic oligonucleotide
agguuuggcuuugccucgg

SEQ ID NO: 448383 - RNA, 19 nt, Artificial Sequence
  Description of Artificial Sequence: Synthetic oligonucleotide
aguacacuuuagggagaag

SEQ ID NO: 448384 - RNA, 19 nt, Artificial Sequence
  Description of Artificial Sequence: Synthetic oligonucleotide
caauggagucuucauagau

SEQ ID NO: 448385 - RNA, 19 nt, Artificial Sequence
  Description of Artificial Sequence: Synthetic oligonucleotide
ucgucgucugguacuucau

SEQ ID NO: 448386 - RNA, 19 nt, Artificial Sequence
  Description of Artificial Sequence: Synthetic oligonucleotide
cugugcauugugacagaga

SEQ ID NO: 448387 - RNA, 19 nt, Artificial Sequence
  Description of Artificial Sequence: Synthetic oligonucleotide
cgcaauguuuacaguagac

SEQ ID NO: 448388 - RNA, 19 nt, Artificial Sequence
  Description of Artificial Sequence: Synthetic oligonucleotide
cugccgagcacucuuaaau

SEQ ID NO: 448389 - RNA, 19 nt, Artificial Sequence
  Description of Artificial Sequence: Synthetic oligonucleotide
gcuggcgagaaccccuacc

SEQ ID NO: 448390 - RNA, 19 nt, Artificial Sequence
  Description of Artificial Sequence: Synthetic oligonucleotide
gcaggaaugcucuccgcuc

SEQ ID NO: 448391 - RNA, 19 nt, Artificial Sequence
  Description of Artificial Sequence: Synthetic oligonucleotide
auccacuggcuuccuaauu

SEQ ID NO: 448392 - RNA, 19 nt, Artificial Sequence
  Description of Artificial Sequence: Synthetic oligonucleotide
aggcuugcgcuuuggguuu

SEQ ID NO: 448393 - RNA, 19 nt, Artificial Sequence
  Description of Artificial Sequence: Synthetic oligonucleotide
aaccccuaccaaauaucuu

SEQ ID NO: 448394 - RNA, 19 nt, Artificial Sequence
  Description of Artificial Sequence: Synthetic oligonucleotide
ucgggacacucuagacacu

SEQ ID NO: 448395 - RNA, 19 nt, Artificial Sequence
  Description of Artificial Sequence: Synthetic oligonucleotide
gcuuaugacuugcaaccaa

SEQ ID NO: 448396 - RNA, 19 nt, Artificial Sequence
  Description of Artificial Sequence: Synthetic oligonucleotide
uaucgaugauggcguucau

SEQ ID NO: 448397 - RNA, 19 nt, Artificial Sequence
  Description of Artificial Sequence: Synthetic oligonucleotide
cucgguuuggccuuuucuu

SEQ ID NO: 448398 - RNA, 19 nt, Artificial Sequence
  Description of Artificial Sequence: Synthetic oligonucleotide
gcgauuuucugccgagcac

SEQ ID NO: 448399 - RNA, 19 nt, Artificial Sequence
  Description of Artificial Sequence: Synthetic oligonucleotide
guaccaacaccacauccuu

SEQ ID NO: 448400 - RNA, 19 nt, Artificial Sequence
  Description of Artificial Sequence: Synthetic oligonucleotide
cacaucaaacggcuaccaa

SEQ ID NO: 448401 - RNA, 19 nt, Artificial Sequence
  Description of Artificial Sequence: Synthetic oligonucleotide
gucgcccugaacuaucuuu

SEQ ID NO: 448402 - RNA, 19 nt, Artificial Sequence
  Description of Artificial Sequence: Synthetic oligonucleotide
gccaucgggacacucuaga

SEQ ID NO: 448403 - RNA, 19 nt, Artificial Sequence
  Description of Artificial Sequence: Synthetic oligonucleotide
cuccgguacuugugauuac

SEQ ID NO: 448404 - RNA, 19 nt, Artificial Sequence
  Description of Artificial Sequence: Synthetic oligonucleotide
ccaucgggacacucuagac

SEQ ID NO: 448405 - RNA, 19 nt, Artificial Sequence
  Description of Artificial Sequence: Synthetic oligonucleotide
cugagcugucgcccugaac

SEQ ID NO: 448406 - RNA, 19 nt, Artificial Sequence
  Description of Artificial Sequence: Synthetic oligonucleotide
gugugugugugugugugua

SEQ ID NO: 448407 - RNA, 19 nt, Artificial Sequence
  Description of Artificial Sequence: Synthetic oligonucleotide
ugucgcccugaacuaucuu

SEQ ID NO: 448408 - RNA, 19 nt, Artificial Sequence
  Description of Artificial Sequence: Synthetic oligonucleotide
gcggugagcucgaucuugg

SEQ ID NO: 448409 - RNA, 19 nt, Artificial Sequence
  Description of Artificial Sequence: Synthetic oligonucleotide
guguguguguguagaugca

SEQ ID NO: 448410 - RNA, 19 nt, Artificial Sequence
  Description of Artificial Sequence: Synthetic oligonucleotide
cuguucguucucauccugu

SEQ ID NO: 448411 - RNA, 19 nt, Artificial Sequence
  Description of Artificial Sequence: Synthetic oligonucleotide
auacugacuguaggacaau

SEQ ID NO: 448412 - RNA, 19 nt, Artificial Sequence
  Description of Artificial Sequence: Synthetic oligonucleotide
augcccgccuggauaaccu

SEQ ID NO: 448413 - RNA, 19 nt, Artificial Sequence
  Description of Artificial Sequence: Synthetic oligonucleotide
ggcuaccaaauuugaccca

SEQ ID NO: 448414 - RNA, 19 nt, Artificial Sequence
  Description of Artificial Sequence: Synthetic oligonucleotide
uauuugccucaggcuuaug

SEQ ID NO: 448415 - RNA, 19 nt, Artificial Sequence
  Description of Artificial Sequence: Synthetic oligonucleotide
agccaucgggacacucuag

SEQ ID NO: 448416 - RNA, 19 nt, Artificial Sequence
  Description of Artificial Sequence: Synthetic oligonucleotide
aggcuccgguacuugugau

SEQ ID NO: 448417 - RNA, 19 nt, Artificial Sequence
  Description of Artificial Sequence: Synthetic oligonucleotide
gguaagccuuuuccacuuc

SEQ ID NO: 448418 - RNA, 19 nt, Artificial Sequence
  Description of Artificial Sequence: Synthetic oligonucleotide
cuguguccgcagccugaag

SEQ ID NO: 448419 - RNA, 19 nt, Artificial Sequence
  Description of Artificial Sequence: Synthetic oligonucleotide
acuugcaaccaaagacauu

SEQ ID NO: 448420 - RNA, 19 nt, Artificial Sequence
  Description of Artificial Sequence: Synthetic oligonucleotide
gcuccgguacuugugauua

SEQ ID NO: 448421 - RNA, 19 nt, Artificial Sequence
  Description of Artificial Sequence: Synthetic oligonucleotide
ggucucgucgucugguacu

SEQ ID NO: 448422 - RNA, 19 nt, Artificial Sequence
  Description of Artificial Sequence: Synthetic oligonucleotide
cagcugcgagaaucuuuuc

SEQ ID NO: 448423 - RNA, 19 nt, Artificial Sequence
  Description of Artificial Sequence: Synthetic oligonucleotide
gccgucuucgauggcccgg

SEQ ID NO: 448424 - RNA, 19 nt, Artificial Sequence
  Description of Artificial Sequence: Synthetic oligonucleotide
ggaaugcucuccgcucgug

SEQ ID NO: 448425 - RNA, 19 nt, Artificial Sequence
  Description of Artificial Sequence: Synthetic oligonucleotide
cacuuccgcgucauccuua

SEQ ID NO: 448426 - RNA, 19 nt, Artificial Sequence
  Description of Artificial Sequence: Synthetic oligonucleotide
augcggugagcucgaucuu

SEQ ID NO: 448427 - RNA, 19 nt, Artificial Sequence
  Description of Artificial Sequence: Synthetic oligonucleotide
gguggacaaaagaagccau

SEQ ID NO: 448428 - RNA, 19 nt, Artificial Sequence
  Description of Artificial Sequence: Synthetic oligonucleotide
cccuaccaaauaucuucuc

SEQ ID NO: 448429 - RNA, 19 nt, Artificial Sequence
  Description of Artificial Sequence: Synthetic oligonucleotide
cacuugccucugacuguuc

SEQ ID NO: 448430 - RNA, 19 nt, Artificial Sequence
  Description of Artificial Sequence: Synthetic oligonucleotide
ucucgucgucugguacuuc

SEQ ID NO: 448431 - RNA, 19 nt, Artificial Sequence
  Description of Artificial Sequence: Synthetic oligonucleotide
gagggcggccucuucuuuu

SEQ ID NO: 448432 - RNA, 19 nt, Artificial Sequence
  Description of Artificial Sequence: Synthetic oligonucleotide
acccaggcuccgguacuug

SEQ ID NO: 448433 - RNA, 19 nt, Artificial Sequence
  Description of Artificial Sequence: Synthetic oligonucleotide
guaggacaauggagucuuc

SEQ ID NO: 448434 - RNA, 19 nt, Artificial Sequence
  Description of Artificial Sequence: Synthetic oligonucleotide
gguaaguuaucgguuuauu

SEQ ID NO: 448435 - RNA, 19 nt, Artificial Sequence
  Description of Artificial Sequence: Synthetic oligonucleotide
ggcgaggcuugcgcuuugg

SEQ ID NO: 448436 - RNA, 19 nt, Artificial Sequence
  Description of Artificial Sequence: Synthetic oligonucleotide
gaggcccauuuggucacaa

SEQ ID NO: 448437 - RNA, 19 nt, Artificial Sequence
  Description of Artificial Sequence: Synthetic oligonucleotide
cugucgcccugaacuaucu

SEQ ID NO: 448438 - RNA, 19 nt, Artificial Sequence
  Description of Artificial Sequence: Synthetic oligonucleotide
ccgcaauguuuacaguaga

SEQ ID NO: 448439 - RNA, 19 nt, Artificial Sequence
  Description of Artificial Sequence: Synthetic oligonucleotide
gcagcugcgagaaucuuuu

SEQ ID NO: 448440 - RNA, 19 nt, Artificial Sequence
  Description of Artificial Sequence: Synthetic oligonucleotide
ccggcgcuggcgagaaccc

SEQ ID NO: 448441 - RNA, 19 nt, Artificial Sequence
  Description of Artificial Sequence: Synthetic oligonucleotide
cagcgcuguagaagauaaa

SEQ ID NO: 448442 - RNA, 19 nt, Artificial Sequence
  Description of Artificial Sequence: Synthetic oligonucleotide
ccaaauugccgucuucgau

SEQ ID NO: 448443 - RNA, 19 nt, Artificial Sequence
  Description of Artificial Sequence: Synthetic oligonucleotide
ccgagcacucuuaaauacu

SEQ ID NO: 448444 - RNA, 19 nt, Artificial Sequence
  Description of Artificial Sequence: Synthetic oligonucleotide
cgauuuucugccgagcacu

SEQ ID NO: 448445 - RNA, 19 nt, Artificial Sequence
  Description of Artificial Sequence: Synthetic oligonucleotide
caucagcgcuguagaagau

SEQ ID NO: 448446 - RNA, 19 nt, Artificial Sequence
  Description of Artificial Sequence: Synthetic oligonucleotide
ccucgguuuggccuuuucu

SEQ ID NO: 448447 - RNA, 19 nt, Artificial Sequence
  Description of Artificial Sequence: Synthetic oligonucleotide
gucucgucgucugguacuu

SEQ ID NO: 448448 - RNA, 19 nt, Artificial Sequence
  Description of Artificial Sequence: Synthetic oligonucleotide
ucccggccuuucucuucuu

SEQ ID NO: 448449 - RNA, 19 nt, Artificial Sequence
  Description of Artificial Sequence: Synthetic oligonucleotide
ggaucccuccaaguugaau

SEQ ID NO: 448450 - RNA, 19 nt, Artificial Sequence
  Description of Artificial Sequence: Synthetic oligonucleotide
ccgucuucgauggcccgga

SEQ ID NO: 448451 - RNA, 19 nt, Artificial Sequence
  Description of Artificial Sequence: Synthetic oligonucleotide
ggcggccucuucuuuucuu

SEQ ID NO: 448452 - RNA, 19 nt, Artificial Sequence
  Description of Artificial Sequence: Synthetic oligonucleotide
cgagaaccccuaccaaaua

SEQ ID NO: 448453 - RNA, 19 nt, Artificial Sequence
  Description of Artificial Sequence: Synthetic oligonucleotide
cggcgagcaaucaucuggu

SEQ ID NO: 448454 - RNA, 19 nt, Artificial Sequence
  Description of Artificial Sequence: Synthetic oligonucleotide
ggagggcggccucuucuuu

SEQ ID NO: 448455 - RNA, 19 nt, Artificial Sequence
  Description of Artificial Sequence: Synthetic oligonucleotide
cgugugugugugugugugu

SEQ ID NO: 448456 - RNA, 19 nt, Artificial Sequence
  Description of Artificial Sequence: Synthetic oligonucleotide
cuuccgcgucauccuuaau

SEQ ID NO: 448457 - RNA, 19 nt, Artificial Sequence
  Description of Artificial Sequence: Synthetic oligonucleotide
ccacuugccucugacuguu

SEQ ID NO: 448458 - RNA, 19 nt, Artificial Sequence
  Description of Artificial Sequence: Synthetic oligonucleotide
gggcggccucuucuuuucu

SEQ ID NO: 448459 - RNA, 19 nt, Artificial Sequence
  Description of Artificial Sequence: Synthetic oligonucleotide
cgcuggcgagaaccccuac

SEQ ID NO: 448460 - RNA, 19 nt, Artificial Sequence
  Description of Artificial Sequence: Synthetic oligonucleotide
cacccaggcuccgguacuu

SEQ ID NO: 448461 - RNA, 19 nt, Artificial Sequence
  Description of Artificial Sequence: Synthetic oligonucleotide
ccgcgucauccuuaauaau

SEQ ID NO: 448462 - RNA, 19 nt, Artificial Sequence
  Description of Artificial Sequence: Synthetic oligonucleotide
gcgcuggcgagaaccccua

SEQ ID NO: 448463 - RNA, 19 nt, Artificial Sequence
  Description of Artificial Sequence: Synthetic oligonucleotide
ccgcagccugaagauuuaa

SEQ ID NO: 448464 - RNA, 19 nt, Artificial Sequence
  Description of Artificial Sequence: Synthetic oligonucleotide
cccggccuuucucuucuuu

SEQ ID NO: 448465 - RNA, 19 nt, Artificial Sequence
  Description of Artificial Sequence: Synthetic oligonucleotide
aaucucauaacccagcuuc

SEQ ID NO: 448466 - RNA, 19 nt, Artificial Sequence
  Description of Artificial Sequence: Synthetic oligonucleotide
aguaacuaggaacuguucc

SEQ ID NO: 448467 - RNA, 19 nt, Artificial Sequence
  Description of Artificial Sequence: Synthetic oligonucleotide
aaaggugacauguugguug

SEQ ID NO: 448468 - RNA, 19 nt, Artificial Sequence
  Description of Artificial Sequence: Synthetic oligonucleotide
uguaccagaacuuggaugu

SEQ ID NO: 448469 - RNA, 19 nt, Artificial Sequence
  Description of Artificial Sequence: Synthetic oligonucleotide
uggguaaugacgacgaaag

SEQ ID NO: 448470 - RNA, 19 nt, Artificial Sequence
  Description of Artificial Sequence: Synthetic oligonucleotide
aguaggacaacccuugauc

SEQ ID NO: 448471 - RNA, 19 nt, Artificial Sequence
  Description of Artificial Sequence: Synthetic oligonucleotide
uggauugcaaguagggugg

SEQ ID NO: 448472 - RNA, 19 nt, Artificial Sequence
  Description of Artificial Sequence: Synthetic oligonucleotide
aaaugggagagauggagug

SEQ ID NO: 448473 - RNA, 19 nt, Artificial Sequence
  Description of Artificial Sequence: Synthetic oligonucleotide
acugauaccgccucacccc

SEQ ID NO: 448474 - RNA, 19 nt, Artificial Sequence
  Description of Artificial Sequence: Synthetic oligonucleotide
agaacuuuggugauaaagg

SEQ ID NO: 448475 - RNA, 19 nt, Artificial Sequence
  Description of Artificial Sequence: Synthetic oligonucleotide
uuguaaaggaugcucuggg

SEQ ID NO: 448476 - RNA, 19 nt, Artificial Sequence
  Description of Artificial Sequence: Synthetic oligonucleotide
ugugaucccacucuggucu

SEQ ID NO: 448477 - RNA, 19 nt, Artificial Sequence
  Description of Artificial Sequence: Synthetic oligonucleotide
uccuguugaagccaggugc

SEQ ID NO: 448478 - RNA, 19 nt, Artificial Sequence
  Description of Artificial Sequence: Synthetic oligonucleotide
gguguggccacuuugaggg

SEQ ID NO: 448479 - RNA, 19 nt, Artificial Sequence
  Description of Artificial Sequence: Synthetic oligonucleotide
augacgacgaaagaagagc

SEQ ID NO: 448480 - RNA, 19 nt, Artificial Sequence
  Description of Artificial Sequence: Synthetic oligonucleotide
uccuuuuaagggcugggcg

SEQ ID NO: 448481 - RNA, 19 nt, Artificial Sequence
  Description of Artificial Sequence: Synthetic oligonucleotide
ugacaauggcauuugcugg

SEQ ID NO: 448482 - RNA, 19 nt, Artificial Sequence
  Description of Artificial Sequence: Synthetic oligonucleotide
  modified_base (19)..(19): a, c, u, g, unknown or other
gaaauucuuuauuaguacn

SEQ ID NO: 448483 - RNA, 19 nt, Artificial Sequence
  Description of Artificial Sequence: Synthetic oligonucleotide
aguguugcgagaccagggc

SEQ ID NO: 448484 - RNA, 19 nt, Artificial Sequence
  Description of Artificial Sequence: Synthetic oligonucleotide
uauacugggcaguaacuag

SEQ ID NO: 448485 - RNA, 19 nt, Artificial Sequence
  Description of Artificial Sequence: Synthetic oligonucleotide
guaaugacgacgaaagaag

SEQ ID NO: 448486 - RNA, 19 nt, Artificial Sequence
  Description of Artificial Sequence: Synthetic oligonucleotide
ugaugggaccuccagcugg

SEQ ID NO: 448487 - RNA, 19 nt, Artificial Sequence
  Description of Artificial Sequence: Synthetic oligonucleotide
aacccuugaucuucacgcc

SEQ ID NO: 448488 - RNA, 19 nt, Artificial Sequence
  Description of Artificial Sequence: Synthetic oligonucleotide
  modified_base (17)..(17): a, c, u, g, unknown or other
aauucuuuauuaguacnca

SEQ ID NO: 448489 - RNA, 19 nt, Artificial Sequence
  Description of Artificial Sequence: Synthetic oligonucleotide
aguaggguggacuucccgg

SEQ ID NO: 448490 - RNA, 19 nt, Artificial Sequence
  Description of Artificial Sequence: Synthetic oligonucleotide
aaccaaagaucuuggacgu

SEQ ID NO: 448491 - RNA, 19 nt, Artificial Sequence
  Description of Artificial Sequence: Synthetic oligonucleotide
cacacucucuuucauaggg

SEQ ID NO: 448492 - RNA, 19 nt, Artificial Sequence
  Description of Artificial Sequence: Synthetic oligonucleotide
uccauaccugccuucaggg

SEQ ID NO: 448493 - RNA, 19 nt, Artificial Sequence
  Description of Artificial Sequence: Synthetic oligonucleotide
uccuggauugcaaguaggg

SEQ ID NO: 448494 - RNA, 19 nt, Artificial Sequence
  Description of Artificial Sequence: Synthetic oligonucleotide
uagccauagguuaccaggg

SEQ ID NO: 448495 - RNA, 19 nt, Artificial Sequence
  Description of Artificial Sequence: Synthetic oligonucleotide
gaaaccuugaaguggacaa

SEQ ID NO: 448496 - RNA, 19 nt, Artificial Sequence
  Description of Artificial Sequence: Synthetic oligonucleotide
agggcuagcccauaggcuc

SEQ ID NO: 448497 - RNA, 19 nt, Artificial Sequence
  Description of Artificial Sequence: Synthetic oligonucleotide
uccucuguuuaugugaucc

SEQ ID NO: 448498 - RNA, 19 nt, Artificial Sequence
  Description of Artificial Sequence: Synthetic oligonucleotide
ugagggcuagcccauaggc

SEQ ID NO: 448499 - RNA, 19 nt, Artificial Sequence
  Description of Artificial Sequence: Synthetic oligonucleotide
uguugaugugggcucagag

SEQ ID NO: 448500 - RNA, 19 nt, Artificial Sequence
  Description of Artificial Sequence: Synthetic oligonucleotide
accuugaggauccacaacu

SEQ ID NO: 448501 - RNA, 19 nt, Artificial Sequence
  Description of Artificial Sequence: Synthetic oligonucleotide
ugcggcuuguaccagaacu

SEQ ID NO: 448502 - RNA, 19 nt, Artificial Sequence
  Description of Artificial Sequence: Synthetic oligonucleotide
uuucccuccaugaugggac

SEQ ID NO: 448503 - RNA, 19 nt, Artificial Sequence
  Description of Artificial Sequence: Synthetic oligonucleotide
uuugggcccagucucaaug

SEQ ID NO: 448504 - RNA, 19 nt, Artificial Sequence
  Description of Artificial Sequence: Synthetic oligonucleotide
uuaugugaucccacucugg

SEQ ID NO: 448505 - RNA, 19 nt, Artificial Sequence
  Description of Artificial Sequence: Synthetic oligonucleotide
aacugugaggugcccggcc

SEQ ID NO: 448506 - RNA, 19 nt, Artificial Sequence
  Description of Artificial Sequence: Synthetic oligonucleotide
auccacaacugugaggugc

SEQ ID NO: 448507 - RNA, 19 nt, Artificial Sequence
  Description of Artificial Sequence: Synthetic oligonucleotide
aaugacgacgaaagaagag

SEQ ID NO: 448508 - RNA, 19 nt, Artificial Sequence
  Description of Artificial Sequence: Synthetic oligonucleotide
uacugauaccgccucaccc

SEQ ID NO: 448509 - RNA, 19 nt, Artificial Sequence
  Description of Artificial Sequence: Synthetic oligonucleotide
uuguaccagaacuuggaug

SEQ ID NO: 448510 - RNA, 19 nt, Artificial Sequence
  Description of Artificial Sequence: Synthetic oligonucleotide
uuggccacgaaaccaaaga

SEQ ID NO: 448511 - RNA, 19 nt, Artificial Sequence
  Description of Artificial Sequence: Synthetic oligonucleotide
guacuugucccuuccaucc

SEQ ID NO: 448512 - RNA, 19 nt, Artificial Sequence
  Description of Artificial Sequence: Synthetic oligonucleotide
uguugcgagaccagggcag

SEQ ID NO: 448513 - RNA, 19 nt, Artificial Sequence
  Description of Artificial Sequence: Synthetic oligonucleotide
caggugacucuguagaugc

SEQ ID NO: 448514 - RNA, 19 nt, Artificial Sequence
  Description of Artificial Sequence: Synthetic oligonucleotide
aauuggcacuacuggagug

SEQ ID NO: 448515 - RNA, 19 nt, Artificial Sequence
  Description of Artificial Sequence: Synthetic oligonucleotide
ucagugcuagagaagguga

SEQ ID NO: 448516 - RNA, 19 nt, Artificial Sequence
  Description of Artificial Sequence: Synthetic oligonucleotide
acaacugugaggugcccgg

SEQ ID NO: 448517 - RNA, 19 nt, Artificial Sequence
  Description of Artificial Sequence: Synthetic oligonucleotide
ugacgacgaaagaagagcu

SEQ ID NO: 448518 - RNA, 19 nt, Artificial Sequence
  Description of Artificial Sequence: Synthetic oligonucleotide
aauucgaagacagcagggu

SEQ ID NO: 448519 - RNA, 19 nt, Artificial Sequence
  Description of Artificial Sequence: Synthetic oligonucleotide
gaugugggcucagagauug

SEQ ID NO: 448520 - RNA, 19 nt, Artificial Sequence
  Description of Artificial Sequence: Synthetic oligonucleotide
aguugcaaaggugacaugu

SEQ ID NO: 448521 - RNA, 19 nt, Artificial Sequence
  Description of Artificial Sequence: Synthetic oligonucleotide
agggcuagggucugguggc

SEQ ID NO: 448522 - RNA, 19 nt, Artificial Sequence
  Description of Artificial Sequence: Synthetic oligonucleotide
gaccauuagcaucauagga

SEQ ID NO: 448523 - RNA, 19 nt, Artificial Sequence
  Description of Artificial Sequence: Synthetic oligonucleotide
cauugggugagcugggcgg

SEQ ID NO: 448524 - RNA, 19 nt, Artificial Sequence
  Description of Artificial Sequence: Synthetic oligonucleotide
gacucagucucugaguugc

SEQ ID NO: 448525 - RNA, 19 nt, Artificial Sequence
  Description of Artificial Sequence: Synthetic oligonucleotide
ucuguuuaugugaucccac

SEQ ID NO: 448526 - RNA, 19 nt, Artificial Sequence
  Description of Artificial Sequence: Synthetic oligonucleotide
cuuguaaaggaugcucugg

SEQ ID NO: 448527 - RNA, 19 nt, Artificial Sequence
  Description of Artificial Sequence: Synthetic oligonucleotide
aggaguaagguggggacgc

SEQ ID NO: 448528 - RNA, 19 nt, Artificial Sequence
  Description of Artificial Sequence: Synthetic oligonucleotide
uuagcuuagcaggcaaggg

SEQ ID NO: 448529 - RNA, 19 nt, Artificial Sequence
  Description of Artificial Sequence: Synthetic oligonucleotide
uguuuaugugaucccacuc

SEQ ID NO: 448530 - RNA, 19 nt, Artificial Sequence
  Description of Artificial Sequence: Synthetic oligonucleotide
agcugaaaccuugaagugg

SEQ ID NO: 448531 - RNA, 19 nt, Artificial Sequence
  Description of Artificial Sequence: Synthetic oligonucleotide
agugcauugggcaucucgg

SEQ ID NO: 448532 - RNA, 19 nt, Artificial Sequence
  Description of Artificial Sequence: Synthetic oligonucleotide
cucaguaggacaacccuug

SEQ ID NO: 448533 - RNA, 19 nt, Artificial Sequence
  Description of Artificial Sequence: Synthetic oligonucleotide
cacgaaaccaaagaucuug

SEQ ID NO: 448534 - RNA, 19 nt, Artificial Sequence
  Description of Artificial Sequence: Synthetic oligonucleotide
caagccgagggcaucgugg

SEQ ID NO: 448535 - RNA, 19 nt, Artificial Sequence
  Description of Artificial Sequence: Synthetic oligonucleotide
ugccaggucaucucauggg

SEQ ID NO: 448536 - RNA, 19 nt, Artificial Sequence
  Description of Artificial Sequence: Synthetic oligonucleotide
acugggaauucgaagacag

SEQ ID NO: 448537 - RNA, 19 nt, Artificial Sequence
  Description of Artificial Sequence: Synthetic oligonucleotide
agugugaugccuugagcug

SEQ ID NO: 448538 - RNA, 19 nt, Artificial Sequence
  Description of Artificial Sequence: Synthetic oligonucleotide
aggccuccacuacugauac

SEQ ID NO: 448539 - RNA, 19 nt, Artificial Sequence
  Description of Artificial Sequence: Synthetic oligonucleotide
cuuccccucaccuugagga

SEQ ID NO: 448540 - RNA, 19 nt, Artificial Sequence
  Description of Artificial Sequence: Synthetic oligonucleotide
acacacauuuucccagggg

SEQ ID NO: 448541 - RNA, 19 nt, Artificial Sequence
  Description of Artificial Sequence: Synthetic oligonucleotide
uccaucugcgguccugggg

SEQ ID NO: 448542 - RNA, 19 nt, Artificial Sequence
  Description of Artificial Sequence: Synthetic oligonucleotide
uugagggcuagcccauagg

SEQ ID NO: 448543 - RNA, 19 nt, Artificial Sequence
  Description of Artificial Sequence: Synthetic oligonucleotide
agggccauuccccaccagg

SEQ ID NO: 448544 - RNA, 19 nt, Artificial Sequence
  Description of Artificial Sequence: Synthetic oligonucleotide
ucagagauugcagcuuucc

SEQ ID NO: 448545 - RNA, 19 nt, Artificial Sequence
  Description of Artificial Sequence: Synthetic oligonucleotide
guaggguggacuucccggg

SEQ ID NO: 448546 - RNA, 19 nt, Artificial Sequence
  Description of Artificial Sequence: Synthetic oligonucleotide
auacugggcaguaacuagg

SEQ ID NO: 448547 - RNA, 19 nt, Artificial Sequence
  Description of Artificial Sequence: Synthetic oligonucleotide
cacacuacaggcugcuccc

SEQ ID NO: 448548 - RNA, 19 nt, Artificial Sequence
  Description of Artificial Sequence: Synthetic oligonucleotide
cucgccaggacucagucuc

SEQ ID NO: 448549 - RNA, 19 nt, Artificial Sequence
  Description of Artificial Sequence: Synthetic oligonucleotide
ugggucaagcuccgcaaag

SEQ ID NO: 448550 - RNA, 19 nt, Artificial Sequence
  Description of Artificial Sequence: Synthetic oligonucleotide
ucuguagaugccagggguc

SEQ ID NO: 448551 - RNA, 19 nt, Artificial Sequence
  Description of Artificial Sequence: Synthetic oligonucleotide
aacuguuccuccauagcca

SEQ ID NO: 448552 - RNA, 19 nt, Artificial Sequence
  Description of Artificial Sequence: Synthetic oligonucleotide
cagugcauugggcaucucg

SEQ ID NO: 448553 - RNA, 19 nt, Artificial Sequence
  Description of Artificial Sequence: Synthetic oligonucleotide
cuugaaguggacaauggcu

SEQ ID NO: 448554 - RNA, 19 nt, Artificial Sequence
  Description of Artificial Sequence: Synthetic oligonucleotide
cuggguugguccaucugcg

SEQ ID NO: 448555 - RNA, 19 nt, Artificial Sequence
  Description of Artificial Sequence: Synthetic oligonucleotide
gugcuagagaaggugaugc

SEQ ID NO: 448556 - RNA, 19 nt, Artificial Sequence
  Description of Artificial Sequence: Synthetic oligonucleotide
aggacaguucaggugacuc

SEQ ID NO: 448557 - RNA, 19 nt, Artificial Sequence
  Description of Artificial Sequence: Synthetic oligonucleotide
augugaucccacucugguc

SEQ ID NO: 448558 - RNA, 19 nt, Artificial Sequence
  Description of Artificial Sequence: Synthetic oligonucleotide
aaugaguggcugucccuga

SEQ ID NO: 448559 - RNA, 19 nt, Artificial Sequence
  Description of Artificial Sequence: Synthetic oligonucleotide
cugaugaagcagugcauug

SEQ ID NO: 448560 - RNA, 19 nt, Artificial Sequence
  Description of Artificial Sequence: Synthetic oligonucleotide
gaguguugcgagaccaggg

SEQ ID NO: 448561 - RNA, 19 nt, Artificial Sequence
  Description of Artificial Sequence: Synthetic oligonucleotide
cauaccugccuucagggca

SEQ ID NO: 448562 - RNA, 19 nt, Artificial Sequence
  Description of Artificial Sequence: Synthetic oligonucleotide
gccuccacuacugauaccg

SEQ ID NO: 448563 - RNA, 19 nt, Artificial Sequence
  Description of Artificial Sequence: Synthetic oligonucleotide
ggaccauuagcaucauagg

SEQ ID NO: 448564 - RNA, 19 nt, Artificial Sequence
  Description of Artificial Sequence: Synthetic oligonucleotide
uucuuugcccuggacuggg

SEQ ID NO: 448565 - RNA, 19 nt, Artificial Sequence
  Description of Artificial Sequence: Synthetic oligonucleotide
aaggugacaauggcauuug

SEQ ID NO: 448566 - RNA, 19 nt, Artificial Sequence
  Description of Artificial Sequence: Synthetic oligonucleotide
guuuaugugaucccacucu

SEQ ID NO: 448567 - RNA, 19 nt, Artificial Sequence
  Description of Artificial Sequence: Synthetic oligonucleotide
ucugaugaagcagugcauu

SEQ ID NO: 448568 - RNA, 19 nt, Artificial Sequence
  Description of Artificial Sequence: Synthetic oligonucleotide
ucaccuugaggauccacaa

SEQ ID NO: 448569 - RNA, 19 nt, Artificial Sequence
  Description of Artificial Sequence: Synthetic oligonucleotide
ggagagauggaguguugcg

SEQ ID NO: 448570 - RNA, 19 nt, Artificial Sequence
  Description of Artificial Sequence: Synthetic oligonucleotide
uuuaagggcugggcgcugg

SEQ ID NO: 448571 - RNA, 19 nt, Artificial Sequence
  Description of Artificial Sequence: Synthetic oligonucleotide
cacuuugagggcuagccca

SEQ ID NO: 448572 - RNA, 19 nt, Artificial Sequence
  Description of Artificial Sequence: Synthetic oligonucleotide
aucguggguaggcacagga

SEQ ID NO: 448573 - RNA, 19 nt, Artificial Sequence
  Description of Artificial Sequence: Synthetic oligonucleotide
ucgggugcuuucuuugccc

SEQ ID NO: 448574 - RNA, 19 nt, Artificial Sequence
  Description of Artificial Sequence: Synthetic oligonucleotide
gguaaugacgacgaaagaa

SEQ ID NO: 448575 - RNA, 19 nt, Artificial Sequence
  Description of Artificial Sequence: Synthetic oligonucleotide
gaggugcccggccauauac

SEQ ID NO: 448576 - RNA, 19 nt, Artificial Sequence
  Description of Artificial Sequence: Synthetic oligonucleotide
ggaaagugguggcugagug

SEQ ID NO: 448577 - RNA, 19 nt, Artificial Sequence
  Description of Artificial Sequence: Synthetic oligonucleotide
uccgcaaagaggugacaca

SEQ ID NO: 448578 - RNA, 19 nt, Artificial Sequence
  Description of Artificial Sequence: Synthetic oligonucleotide
cccaguagaacuuugguga

SEQ ID NO: 448579 - RNA, 19 nt, Artificial Sequence
  Description of Artificial Sequence: Synthetic oligonucleotide
aggacucagucucugaguu

SEQ ID NO: 448580 - RNA, 19 nt, Artificial Sequence
  Description of Artificial Sequence: Synthetic oligonucleotide
agggcucaguaggacaacc

SEQ ID NO: 448581 - RNA, 19 nt, Artificial Sequence
  Description of Artificial Sequence: Synthetic oligonucleotide
gucucguucagaggggagg

SEQ ID NO: 448582 - RNA, 19 nt, Artificial Sequence
  Description of Artificial Sequence: Synthetic oligonucleotide
uaacuaggaacuguuccuc

SEQ ID NO: 448583 - RNA, 19 nt, Artificial Sequence
  Description of Artificial Sequence: Synthetic oligonucleotide
ccuuuuaagggcugggcgc

SEQ ID NO: 448584 - RNA, 19 nt, Artificial Sequence
  Description of Artificial Sequence: Synthetic oligonucleotide
ucucguucagaggggaggc

SEQ ID NO: 448585 - RNA, 19 nt, Artificial Sequence
  Description of Artificial Sequence: Synthetic oligonucleotide
cauagguuaccagggcagg

SEQ ID NO: 448586 - RNA, 19 nt, Artificial Sequence
  Description of Artificial Sequence: Synthetic oligonucleotide
auucgaagacagcagggua

SEQ ID NO: 448587 - RNA, 19 nt, Artificial Sequence
  Description of Artificial Sequence: Synthetic oligonucleotide
gagaggaguugcaaaggug

SEQ ID NO: 448588 - RNA, 19 nt, Artificial Sequence
  Description of Artificial Sequence: Synthetic oligonucleotide
cucaccuugaggauccaca

SEQ ID NO: 448589 - RNA, 19 nt, Artificial Sequence
  Description of Artificial Sequence: Synthetic oligonucleotide
gugcauugggcaucucggg

SEQ ID NO: 448590 - RNA, 19 nt, Artificial Sequence
  Description of Artificial Sequence: Synthetic oligonucleotide
uguccauaccugccuucag

SEQ ID NO: 448591 - RNA, 19 nt, Artificial Sequence
  Description of Artificial Sequence: Synthetic oligonucleotide
guaggacaacccuugaucu

SEQ ID NO: 448592 - RNA, 19 nt, Artificial Sequence
  Description of Artificial Sequence: Synthetic oligonucleotide
uggguugguccaucugcgg

SEQ ID NO: 448593 - RNA, 19 nt, Artificial Sequence
  Description of Artificial Sequence: Synthetic oligonucleotide
gagagauggaguguugcga

SEQ ID NO: 448594 - RNA, 19 nt, Artificial Sequence
  Description of Artificial Sequence: Synthetic oligonucleotide
ccaaagaucuuggacgugg

SEQ ID NO: 448595 - RNA, 19 nt, Artificial Sequence
  Description of Artificial Sequence: Synthetic oligonucleotide
cgagaauuggcacuacugg

SEQ ID NO: 448596 - RNA, 19 nt, Artificial Sequence
  Description of Artificial Sequence: Synthetic oligonucleotide
aagcuccgcaaagagguga

SEQ ID NO: 448597 - RNA, 19 nt, Artificial Sequence
  Description of Artificial Sequence: Synthetic oligonucleotide
auauacugggcaguaacua

SEQ ID NO: 448598 - RNA, 19 nt, Artificial Sequence
  Description of Artificial Sequence: Synthetic oligonucleotide
aggccaagacagugagagc

SEQ ID NO: 448599 - RNA, 19 nt, Artificial Sequence
  Description of Artificial Sequence: Synthetic oligonucleotide
ugcuagagaaggugaugcu

SEQ ID NO: 448600 - RNA, 19 nt, Artificial Sequence
  Description of Artificial Sequence: Synthetic oligonucleotide
cauagggcaggccaagaca

SEQ ID NO: 448601 - RNA, 19 nt, Artificial Sequence
  Description of Artificial Sequence: Synthetic oligonucleotide
ugguugucugucaguguga

SEQ ID NO: 448602 - RNA, 19 nt, Artificial Sequence
  Description of Artificial Sequence: Synthetic oligonucleotide
cacucucuuucauagggca

SEQ ID NO: 448603 - RNA, 19 nt, Artificial Sequence
  Description of Artificial Sequence: Synthetic oligonucleotide
agagcacacuacaggcugc

SEQ ID NO: 448604 - RNA, 19 nt, Artificial Sequence
  Description of Artificial Sequence: Synthetic oligonucleotide
auaccugccuucagggcac

SEQ ID NO: 448605 - RNA, 19 nt, Artificial Sequence
  Description of Artificial Sequence: Synthetic oligonucleotide
agugcuagagaaggugaug

SEQ ID NO: 448606 - RNA, 19 nt, Artificial Sequence
  Description of Artificial Sequence: Synthetic oligonucleotide
ucaccccuuacaccugucu

SEQ ID NO: 448607 - RNA, 19 nt, Artificial Sequence
  Description of Artificial Sequence: Synthetic oligonucleotide
uucacuggguaaugacgac

SEQ ID NO: 448608 - RNA, 19 nt, Artificial Sequence
  Description of Artificial Sequence: Synthetic oligonucleotide
ucuuggacgugguuccauc

SEQ ID NO: 448609 - RNA, 19 nt, Artificial Sequence
  Description of Artificial Sequence: Synthetic oligonucleotide
gauguccauaccugccuuc

SEQ ID NO: 448610 - RNA, 19 nt, Artificial Sequence
  Description of Artificial Sequence: Synthetic oligonucleotide
cacuggguaaugacgacga

SEQ ID NO: 448611 - RNA, 19 nt, Artificial Sequence
  Description of Artificial Sequence: Synthetic oligonucleotide
acauguugguuggugccuc

SEQ ID NO: 448612 - RNA, 19 nt, Artificial Sequence
  Description of Artificial Sequence: Synthetic oligonucleotide
gggugguugggacagggcc

SEQ ID NO: 448613 - RNA, 19 nt, Artificial Sequence
  Description of Artificial Sequence: Synthetic oligonucleotide
aaaccuugaaguggacaau

SEQ ID NO: 448614 - RNA, 19 nt, Artificial Sequence
  Description of Artificial Sequence: Synthetic oligonucleotide
auggaguguugcgagacca

SEQ ID NO: 448615 - RNA, 19 nt, Artificial Sequence
  Description of Artificial Sequence: Synthetic oligonucleotide
caggguacccuggaugucc

SEQ ID NO: 448616 - RNA, 19 nt, Artificial Sequence
  Description of Artificial Sequence: Synthetic oligonucleotide
acgacgaaagaagagcuuu

SEQ ID NO: 448617 - RNA, 19 nt, Artificial Sequence
  Description of Artificial Sequence: Synthetic oligonucleotide
cugggaauucgaagacagc

SEQ ID NO: 448618 - RNA, 19 nt, Artificial Sequence
  Description of Artificial Sequence: Synthetic oligonucleotide
ggggucuccuuuuaagggc

SEQ ID NO: 448619 - RNA, 19 nt, Artificial Sequence
  Description of Artificial Sequence: Synthetic oligonucleotide
gugugcagcgguguagagg

SEQ ID NO: 448620 - RNA, 19 nt, Artificial Sequence
  Description of Artificial Sequence: Synthetic oligonucleotide
cuggucucguucagagggg

SEQ ID NO: 448621 - RNA, 19 nt, Artificial Sequence
  Description of Artificial Sequence: Synthetic oligonucleotide
ucccacucuggucucguuc

SEQ ID NO: 448622 - RNA, 19 nt, Artificial Sequence
  Description of Artificial Sequence: Synthetic oligonucleotide
caucugggagaggaguugc

SEQ ID NO: 448623 - RNA, 19 nt, Artificial Sequence
  Description of Artificial Sequence: Synthetic oligonucleotide
cuccgcaaagaggugacac

SEQ ID NO: 448624 - RNA, 19 nt, Artificial Sequence
  Description of Artificial Sequence: Synthetic oligonucleotide
cucuggucucguucagagg

SEQ ID NO: 448625 - RNA, 19 nt, Artificial Sequence
  Description of Artificial Sequence: Synthetic oligonucleotide
caggaguaagguggggacg

SEQ ID NO: 448626 - RNA, 19 nt, Artificial Sequence
  Description of Artificial Sequence: Synthetic oligonucleotide
acuuagcuuagcaggcaag

SEQ ID NO: 448627 - RNA, 19 nt, Artificial Sequence
  Description of Artificial Sequence: Synthetic oligonucleotide
uggcgcaccaacugcucug

SEQ ID NO: 448628 - RNA, 19 nt, Artificial Sequence
  Description of Artificial Sequence: Synthetic oligonucleotide
gguacuugucccuuccauc

SEQ ID NO: 448629 - RNA, 19 nt, Artificial Sequence
  Description of Artificial Sequence: Synthetic oligonucleotide
uaggaacuguuccuccaua

SEQ ID NO: 448630 - RNA, 19 nt, Artificial Sequence
  Description of Artificial Sequence: Synthetic oligonucleotide
gcccaguagaacuuuggug

SEQ ID NO: 448631 - RNA, 19 nt, Artificial Sequence
  Description of Artificial Sequence: Synthetic oligonucleotide
gcaaguaggguggacuucc

SEQ ID NO: 448632 - RNA, 19 nt, Artificial Sequence
  Description of Artificial Sequence: Synthetic oligonucleotide
ccuugaaguggacaauggc

SEQ ID NO: 448633 - RNA, 19 nt, Artificial Sequence
  Description of Artificial Sequence: Synthetic oligonucleotide
ugcagcgguguagagggac

SEQ ID NO: 448634 - RNA, 19 nt, Artificial Sequence
  Description of Artificial Sequence: Synthetic oligonucleotide
acgccuuugggcccagucu

SEQ ID NO: 448635 - RNA, 19 nt, Artificial Sequence
  Description of Artificial Sequence: Synthetic oligonucleotide
acgugguuccaucuggguu

SEQ ID NO: 448636 - RNA, 19 nt, Artificial Sequence
  Description of Artificial Sequence: Synthetic oligonucleotide
caucgugggcugucguggg

SEQ ID NO: 448637 - RNA, 19 nt, Artificial Sequence
  Description of Artificial Sequence: Synthetic oligonucleotide
ggaccagacagcucugaug

SEQ ID NO: 448638 - RNA, 19 nt, Artificial Sequence
  Description of Artificial Sequence: Synthetic oligonucleotide
augaugggaccuccagcug

SEQ ID NO: 448639 - RNA, 19 nt, Artificial Sequence
  Description of Artificial Sequence: Synthetic oligonucleotide
ccgagaauuggcacuacug

SEQ ID NO: 448640 - RNA, 19 nt, Artificial Sequence
  Description of Artificial Sequence: Synthetic oligonucleotide
cauauacugggcaguaacu

SEQ ID NO: 448641 - RNA, 19 nt, Artificial Sequence
  Description of Artificial Sequence: Synthetic oligonucleotide
uucccuccaugaugggacc

SEQ ID NO: 448642 - RNA, 19 nt, Artificial Sequence
  Description of Artificial Sequence: Synthetic oligonucleotide
agcuccgcaaagaggugac

SEQ ID NO: 448643 - RNA, 19 nt, Artificial Sequence
  Description of Artificial Sequence: Synthetic oligonucleotide
cauuugcugguuggucugg

SEQ ID NO: 448644 - RNA, 19 nt, Artificial Sequence
  Description of Artificial Sequence: Synthetic oligonucleotide
aggaguugcaaaggugaca

SEQ ID NO: 448645 - RNA, 19 nt, Artificial Sequence
  Description of Artificial Sequence: Synthetic oligonucleotide
aucgugggcugucgugggg

SEQ ID NO: 448646 - RNA, 19 nt, Artificial Sequence
  Description of Artificial Sequence: Synthetic oligonucleotide
uggguacuugucccuucca

SEQ ID NO: 448647 - RNA, 19 nt, Artificial Sequence
  Description of Artificial Sequence: Synthetic oligonucleotide
ggugucuugccgucgggug

SEQ ID NO: 448648 - RNA, 19 nt, Artificial Sequence
  Description of Artificial Sequence: Synthetic oligonucleotide
ggauguguccuggacaaac

SEQ ID NO: 448649 - RNA, 19 nt, Artificial Sequence
  Description of Artificial Sequence: Synthetic oligonucleotide
uucauagggcaggccaaga

SEQ ID NO: 448650 - RNA, 19 nt, Artificial Sequence
  Description of Artificial Sequence: Synthetic oligonucleotide
cucuguuuaugugauccca

SEQ ID NO: 448651 - RNA, 19 nt, Artificial Sequence
  Description of Artificial Sequence: Synthetic oligonucleotide
gccaggucaucucaugggc

SEQ ID NO: 448652 - RNA, 19 nt, Artificial Sequence
  Description of Artificial Sequence: Synthetic oligonucleotide
caucucggggagaccgagg

SEQ ID NO: 448653 - RNA, 19 nt, Artificial Sequence
  Description of Artificial Sequence: Synthetic oligonucleotide
uaccgccucaccccuuaca

SEQ ID NO: 448654 - RNA, 19 nt, Artificial Sequence
  Description of Artificial Sequence: Synthetic oligonucleotide
acaagccgagggcaucgug

SEQ ID NO: 448655 - RNA, 19 nt, Artificial Sequence
  Description of Artificial Sequence: Synthetic oligonucleotide
ggugcccggccauauacug

SEQ ID NO: 448656 - RNA, 19 nt, Artificial Sequence
  Description of Artificial Sequence: Synthetic oligonucleotide
gggcaucucggggagaccg

SEQ ID NO: 448657 - RNA, 19 nt, Artificial Sequence
  Description of Artificial Sequence: Synthetic oligonucleotide
caccccuuacaccugucuc

SEQ ID NO: 448658 - RNA, 19 nt, Artificial Sequence
  Description of Artificial Sequence: Synthetic oligonucleotide
cagacccagacaggugucg

SEQ ID NO: 448659 - RNA, 19 nt, Artificial Sequence
  Description of Artificial Sequence: Synthetic oligonucleotide
guguugcgagaccagggca

SEQ ID NO: 448660 - RNA, 19 nt, Artificial Sequence
  Description of Artificial Sequence: Synthetic oligonucleotide
cagggguaccccucuuccc

SEQ ID NO: 448661 - RNA, 19 nt, Artificial Sequence
  Description of Artificial Sequence: Synthetic oligonucleotide
gauugcaaguaggguggac

SEQ ID NO: 448662 - RNA, 19 nt, Artificial Sequence
  Description of Artificial Sequence: Synthetic oligonucleotide
uggcacuacuggagugacc

SEQ ID NO: 448663 - RNA, 19 nt, Artificial Sequence
  Description of Artificial Sequence: Synthetic oligonucleotide
cucuguagaugccaggggu

SEQ ID NO: 448664 - RNA, 19 nt, Artificial Sequence
  Description of Artificial Sequence: Synthetic oligonucleotide
ugucagugugaugccuuga

SEQ ID NO: 448665 - RNA, 19 nt, Artificial Sequence
  Description of Artificial Sequence: Synthetic oligonucleotide
gccacgaaaccaaagaucu

SEQ ID NO: 448666 - RNA, 19 nt, Artificial Sequence
  Description of Artificial Sequence: Synthetic oligonucleotide
caaugaggaaguggcgcac

SEQ ID NO: 448667 - RNA, 19 nt, Artificial Sequence
  Description of Artificial Sequence: Synthetic oligonucleotide
ucacgggacaggugcggcu

SEQ ID NO: 448668 - RNA, 19 nt, Artificial Sequence
  Description of Artificial Sequence: Synthetic oligonucleotide
gauaccgccucaccccuua

SEQ ID NO: 448669 - RNA, 19 nt, Artificial Sequence
  Description of Artificial Sequence: Synthetic oligonucleotide
uuuuaagggcugggcgcug

SEQ ID NO: 448670 - RNA, 19 nt, Artificial Sequence
  Description of Artificial Sequence: Synthetic oligonucleotide
uggucucguucagagggga

SEQ ID NO: 448671 - RNA, 19 nt, Artificial Sequence
  Description of Artificial Sequence: Synthetic oligonucleotide
auaccgccucaccccuuac

SEQ ID NO: 448672 - RNA, 19 nt, Artificial Sequence
  Description of Artificial Sequence: Synthetic oligonucleotide
ugcaaguaggguggacuuc

SEQ ID NO: 448673 - RNA, 19 nt, Artificial Sequence
  Description of Artificial Sequence: Synthetic oligonucleotide
agggugguugggacagggc

SEQ ID NO: 448674 - RNA, 19 nt, Artificial Sequence
  Description of Artificial Sequence: Synthetic oligonucleotide
aggaaagugguggcugagu

SEQ ID NO: 448675 - RNA, 19 nt, Artificial Sequence
  Description of Artificial Sequence: Synthetic oligonucleotide
uggcauuugcugguugguc

SEQ ID NO: 448676 - RNA, 19 nt, Artificial Sequence
  Description of Artificial Sequence: Synthetic oligonucleotide
ggcaagaacaguggcccag

SEQ ID NO: 448677 - RNA, 19 nt, Artificial Sequence
  Description of Artificial Sequence: Synthetic oligonucleotide
uggguaggcacaggaguaa

SEQ ID NO: 448678 - RNA, 19 nt, Artificial Sequence
  Description of Artificial Sequence: Synthetic oligonucleotide
uuaccagggcaggguaccc

SEQ ID NO: 448679 - RNA, 19 nt, Artificial Sequence
  Description of Artificial Sequence: Synthetic oligonucleotide
cuggguaaugacgacgaaa

SEQ ID NO: 448680 - RNA, 19 nt, Artificial Sequence
  Description of Artificial Sequence: Synthetic oligonucleotide
ccauaggcuccuuggaaug

SEQ ID NO: 448681 - RNA, 19 nt, Artificial Sequence
  Description of Artificial Sequence: Synthetic oligonucleotide
aguaagguggggacgccau

SEQ ID NO: 448682 - RNA, 19 nt, Artificial Sequence
  Description of Artificial Sequence: Synthetic oligonucleotide
gggaccaucccuccaggac

SEQ ID NO: 448683 - RNA, 19 nt, Artificial Sequence
  Description of Artificial Sequence: Synthetic oligonucleotide
auggcauuugcugguuggu

SEQ ID NO: 448684 - RNA, 19 nt, Artificial Sequence
  Description of Artificial Sequence: Synthetic oligonucleotide
ggcccacucacuuagcuua

SEQ ID NO: 448685 - RNA, 19 nt, Artificial Sequence
  Description of Artificial Sequence: Synthetic oligonucleotide
uggcugagugggaccauua

SEQ ID NO: 448686 - RNA, 19 nt, Artificial Sequence
  Description of Artificial Sequence: Synthetic oligonucleotide
cuuccagaggaucuuuacu

SEQ ID NO: 448687 - RNA, 19 nt, Artificial Sequence
  Description of Artificial Sequence: Synthetic oligonucleotide
cagggccccgagaauuggc

SEQ ID NO: 448688 - RNA, 19 nt, Artificial Sequence
  Description of Artificial Sequence: Synthetic oligonucleotide
cuguuuaugugaucccacu

SEQ ID NO: 448689 - RNA, 19 nt, Artificial Sequence
  Description of Artificial Sequence: Synthetic oligonucleotide
ccauugggugagcugggcg

SEQ ID NO: 448690 - RNA, 19 nt, Artificial Sequence
  Description of Artificial Sequence: Synthetic oligonucleotide
agcagugcauugggcaucu

SEQ ID NO: 448691 - RNA, 19 nt, Artificial Sequence
  Description of Artificial Sequence: Synthetic oligonucleotide
ggcccagucucaaugagga

SEQ ID NO: 448692 - RNA, 19 nt, Artificial Sequence
  Description of Artificial Sequence: Synthetic oligonucleotide
cuugaggauccacaacugu

SEQ ID NO: 448693 - RNA, 19 nt, Artificial Sequence
  Description of Artificial Sequence: Synthetic oligonucleotide
ugggcggggaggucuggga

SEQ ID NO: 448694 - RNA, 19 nt, Artificial Sequence
  Description of Artificial Sequence: Synthetic oligonucleotide
gugcccggccauauacugg

SEQ ID NO: 448695 - RNA, 19 nt, Artificial Sequence
  Description of Artificial Sequence: Synthetic oligonucleotide
ccuugaggauccacaacug

SEQ ID NO: 448696 - RNA, 19 nt, Artificial Sequence
  Description of Artificial Sequence: Synthetic oligonucleotide
uacaccugucucugccauc

SEQ ID NO: 448697 - RNA, 19 nt, Artificial Sequence
  Description of Artificial Sequence: Synthetic oligonucleotide
ggcagggccauuccccacc

SEQ ID NO: 448698 - RNA, 19 nt, Artificial Sequence
  Description of Artificial Sequence: Synthetic oligonucleotide
ggaaucucauaacccagcu

SEQ ID NO: 448699 - RNA, 19 nt, Artificial Sequence
  Description of Artificial Sequence: Synthetic oligonucleotide
aggugcggcuuguaccaga

SEQ ID NO: 448700 - RNA, 19 nt, Artificial Sequence
  Description of Artificial Sequence: Synthetic oligonucleotide
cacuuagcuuagcaggcaa

SEQ ID NO: 448701 - RNA, 19 nt, Artificial Sequence
  Description of Artificial Sequence: Synthetic oligonucleotide
ccaucgugggcugucgugg

SEQ ID NO: 448702 - RNA, 19 nt, Artificial Sequence
  Description of Artificial Sequence: Synthetic oligonucleotide
ugguccaucugcgguccug

SEQ ID NO: 448703 - RNA, 19 nt, Artificial Sequence
  Description of Artificial Sequence: Synthetic oligonucleotide
agggccagugagugacucu

SEQ ID NO: 448704 - RNA, 19 nt, Artificial Sequence
  Description of Artificial Sequence: Synthetic oligonucleotide
uccccucaccuugaggauc

SEQ ID NO: 448705 - RNA, 19 nt, Artificial Sequence
  Description of Artificial Sequence: Synthetic oligonucleotide
cccacugggaccaucccuc

SEQ ID NO: 448706 - RNA, 19 nt, Artificial Sequence
  Description of Artificial Sequence: Synthetic oligonucleotide
agucucugaguugcugcca

SEQ ID NO: 448707 - RNA, 19 nt, Artificial Sequence
  Description of Artificial Sequence: Synthetic oligonucleotide
aagaggugacacacauuuu

SEQ ID NO: 448708 - RNA, 19 nt, Artificial Sequence
  Description of Artificial Sequence: Synthetic oligonucleotide
gcaaagaggugacacacau

SEQ ID NO: 448709 - RNA, 19 nt, Artificial Sequence
  Description of Artificial Sequence: Synthetic oligonucleotide
gcugccaaaauagggcuca

SEQ ID NO: 448710 - RNA, 19 nt, Artificial Sequence
  Description of Artificial Sequence: Synthetic oligonucleotide
guggacuucccggggacac

SEQ ID NO: 448711 - RNA, 19 nt, Artificial Sequence
  Description of Artificial Sequence: Synthetic oligonucleotide
ccggccauauacugggcag

SEQ ID NO: 448712 - RNA, 19 nt, Artificial Sequence
  Description of Artificial Sequence: Synthetic oligonucleotide
guaagguggggacgccauc

SEQ ID NO: 448713 - RNA, 19 nt, Artificial Sequence
  Description of Artificial Sequence: Synthetic oligonucleotide
acuggguaaugacgacgaa

SEQ ID NO: 448714 - RNA, 19 nt, Artificial Sequence
  Description of Artificial Sequence: Synthetic oligonucleotide
gccaaugggaaggcagggg

SEQ ID NO: 448715 - RNA, 19 nt, Artificial Sequence
  Description of Artificial Sequence: Synthetic oligonucleotide
accaaagaucuuggacgug

SEQ ID NO: 448716 - RNA, 19 nt, Artificial Sequence
  Description of Artificial Sequence: Synthetic oligonucleotide
ggacgugguuccaucuggg

SEQ ID NO: 448717 - RNA, 19 nt, Artificial Sequence
  Description of Artificial Sequence: Synthetic oligonucleotide
gacauguugguuggugccu

SEQ ID NO: 448718 - RNA, 19 nt, Artificial Sequence
  Description of Artificial Sequence: Synthetic oligonucleotide
aagccucgccaggacucag

SEQ ID NO: 448719 - RNA, 19 nt, Artificial Sequence
  Description of Artificial Sequence: Synthetic oligonucleotide
caggccuccacuacugaua

SEQ ID NO: 448720 - RNA, 19 nt, Artificial Sequence
  Description of Artificial Sequence: Synthetic oligonucleotide
gcggaguccgggcagggug

SEQ ID NO: 448721 - RNA, 19 nt, Artificial Sequence
  Description of Artificial Sequence: Synthetic oligonucleotide
ggacucagucucugaguug

SEQ ID NO: 448722 - RNA, 19 nt, Artificial Sequence
  Description of Artificial Sequence: Synthetic oligonucleotide
ugaggugcccggccauaua

SEQ ID NO: 448723 - RNA, 19 nt, Artificial Sequence
  Description of Artificial Sequence: Synthetic oligonucleotide
agacccagacaggugucgu

SEQ ID NO: 448724 - RNA, 19 nt, Artificial Sequence
  Description of Artificial Sequence: Synthetic oligonucleotide
agcacacuacaggcugcuc

SEQ ID NO: 448725 - RNA, 19 nt, Artificial Sequence
  Description of Artificial Sequence: Synthetic oligonucleotide
ggacuucccggggacacag

SEQ ID NO: 448726 - RNA, 19 nt, Artificial Sequence
  Description of Artificial Sequence: Synthetic oligonucleotide
accuggugucuugccgucg

SEQ ID NO: 448727 - RNA, 19 nt, Artificial Sequence
  Description of Artificial Sequence: Synthetic oligonucleotide
ggccauuccccaccaggcc

SEQ ID NO: 448728 - RNA, 19 nt, Artificial Sequence
  Description of Artificial Sequence: Synthetic oligonucleotide
gggcccagucucaaugagg

SEQ ID NO: 448729 - RNA, 19 nt, Artificial Sequence
  Description of Artificial Sequence: Synthetic oligonucleotide
agcgguguagagggaccag

SEQ ID NO: 448730 - RNA, 19 nt, Artificial Sequence
  Description of Artificial Sequence: Synthetic oligonucleotide
gucacgggacaggugcggc

SEQ ID NO: 448731 - RNA, 19 nt, Artificial Sequence
  Description of Artificial Sequence: Synthetic oligonucleotide
cuuggacgugguuccaucu

SEQ ID NO: 448732 - RNA, 19 nt, Artificial Sequence
  Description of Artificial Sequence: Synthetic oligonucleotide
gaggaucuuuacugggaau

SEQ ID NO: 448733 - RNA, 19 nt, Artificial Sequence
  Description of Artificial Sequence: Synthetic oligonucleotide
guagagcacacuacaggcu

SEQ ID NO: 448734 - RNA, 19 nt, Artificial Sequence
  Description of Artificial Sequence: Synthetic oligonucleotide
gacgugguuccaucugggu

SEQ ID NO: 448735 - RNA, 19 nt, Artificial Sequence
  Description of Artificial Sequence: Synthetic oligonucleotide
agggcaucguggguaggca

SEQ ID NO: 448736 - RNA, 19 nt, Artificial Sequence
  Description of Artificial Sequence: Synthetic oligonucleotide
uggacuucccggggacaca

SEQ ID NO: 448737 - RNA, 19 nt, Artificial Sequence
  Description of Artificial Sequence: Synthetic oligonucleotide
cagcucagagcugcagaac

SEQ ID NO: 448738 - RNA, 19 nt, Artificial Sequence
  Description of Artificial Sequence: Synthetic oligonucleotide
caaagaucuuggacguggu

SEQ ID NO: 448739 - RNA, 19 nt, Artificial Sequence
  Description of Artificial Sequence: Synthetic oligonucleotide
agggccccgagaauuggca

SEQ ID NO: 448740 - RNA, 19 nt, Artificial Sequence
  Description of Artificial Sequence: Synthetic oligonucleotide
gcaggguagggaaauggga

SEQ ID NO: 448741 - RNA, 19 nt, Artificial Sequence
  Description of Artificial Sequence: Synthetic oligonucleotide
guugcgagaccagggcaga

SEQ ID NO: 448742 - RNA, 19 nt, Artificial Sequence
  Description of Artificial Sequence: Synthetic oligonucleotide
gacgccaucgugggcuguc

SEQ ID NO: 448743 - RNA, 19 nt, Artificial Sequence
  Description of Artificial Sequence: Synthetic oligonucleotide
ggcucaguaggacaacccu

SEQ ID NO: 448744 - RNA, 19 nt, Artificial Sequence
  Description of Artificial Sequence: Synthetic oligonucleotide
ccccuuucccuccaugaug

SEQ ID NO: 448745 - RNA, 19 nt, Artificial Sequence
  Description of Artificial Sequence: Synthetic oligonucleotide
gccaucgugggcugucgug

SEQ ID NO: 448746 - RNA, 19 nt, Artificial Sequence
  Description of Artificial Sequence: Synthetic oligonucleotide
agcagggcaauggcuuggu

SEQ ID NO: 448747 - RNA, 19 nt, Artificial Sequence
  Description of Artificial Sequence: Synthetic oligonucleotide
ucccuccaugaugggaccu

SEQ ID NO: 448748 - RNA, 19 nt, Artificial Sequence
  Description of Artificial Sequence: Synthetic oligonucleotide
acgccaucgugggcugucg

SEQ ID NO: 448749 - RNA, 19 nt, Artificial Sequence
  Description of Artificial Sequence: Synthetic oligonucleotide
gaccgaggcagcgugcugu

SEQ ID NO: 448750 - RNA, 19 nt, Artificial Sequence
  Description of Artificial Sequence: Synthetic oligonucleotide
gcuagggucugguggcuca

SEQ ID NO: 448751 - RNA, 19 nt, Artificial Sequence
  Description of Artificial Sequence: Synthetic oligonucleotide
gcaucguggguaggcacag

SEQ ID NO: 448752 - RNA, 19 nt, Artificial Sequence
  Description of Artificial Sequence: Synthetic oligonucleotide
gggcucaguaggacaaccc

SEQ ID NO: 448753 - RNA, 19 nt, Artificial Sequence
  Description of Artificial Sequence: Synthetic oligonucleotide
ccacaagccgagggcaucg

SEQ ID NO: 448754 - RNA, 19 nt, Artificial Sequence
  Description of Artificial Sequence: Synthetic oligonucleotide
ugauaccgccucaccccuu

SEQ ID NO: 448755 - RNA, 19 nt, Artificial Sequence
  Description of Artificial Sequence: Synthetic oligonucleotide
ucccggggacacagagcca

SEQ ID NO: 448756 - RNA, 19 nt, Artificial Sequence
  Description of Artificial Sequence: Synthetic oligonucleotide
cugggcggggaggucuggg

SEQ ID NO: 448757 - RNA, 19 nt, Artificial Sequence
  Description of Artificial Sequence: Synthetic oligonucleotide
cagugcuucccuggacaac

SEQ ID NO: 448758 - RNA, 19 nt, Artificial Sequence
  Description of Artificial Sequence: Synthetic oligonucleotide
ccuccacuacugauaccgc

SEQ ID NO: 448759 - RNA, 19 nt, Artificial Sequence
  Description of Artificial Sequence: Synthetic oligonucleotide
cucugaugaagcagugcau

SEQ ID NO: 448760 - RNA, 19 nt, Artificial Sequence
  Description of Artificial Sequence: Synthetic oligonucleotide
ggcaucguggguaggcaca

SEQ ID NO: 448761 - RNA, 19 nt, Artificial Sequence
  Description of Artificial Sequence: Synthetic oligonucleotide
gcaucucggggagaccgag

SEQ ID NO: 448762 - RNA, 19 nt, Artificial Sequence
  Description of Artificial Sequence: Synthetic oligonucleotide
cugaggggucuccuuuuaa

SEQ ID NO: 448763 - RNA, 19 nt, Artificial Sequence
  Description of Artificial Sequence: Synthetic oligonucleotide
ggcaguaacuaggaacugu

SEQ ID NO: 448764 - RNA, 19 nt, Artificial Sequence
  Description of Artificial Sequence: Synthetic oligonucleotide
cugauaccgccucaccccu

SEQ ID NO: 448765 - RNA, 19 nt, Artificial Sequence
  Description of Artificial Sequence: Synthetic oligonucleotide
ggucucguucagaggggag

SEQ ID NO: 448766 - RNA, 19 nt, Artificial Sequence
  Description of Artificial Sequence: Synthetic oligonucleotide
ggguggacuucccggggac

SEQ ID NO: 448767 - RNA, 19 nt, Artificial Sequence
  Description of Artificial Sequence: Synthetic oligonucleotide
agccgagggcaucgugggu

SEQ ID NO: 448768 - RNA, 19 nt, Artificial Sequence
  Description of Artificial Sequence: Synthetic oligonucleotide
caguguugaugugggcuca

SEQ ID NO: 448769 - RNA, 19 nt, Artificial Sequence
  Description of Artificial Sequence: Synthetic oligonucleotide
cgacgaaagaagagcuuuc

SEQ ID NO: 448770 - RNA, 19 nt, Artificial Sequence
  Description of Artificial Sequence: Synthetic oligonucleotide
aggugcccggccauauacu

SEQ ID NO: 448771 - RNA, 19 nt, Artificial Sequence
  Description of Artificial Sequence: Synthetic oligonucleotide
caggggugggugagcucug

SEQ ID NO: 448772 - RNA, 19 nt, Artificial Sequence
  Description of Artificial Sequence: Synthetic oligonucleotide
cagugcuagagaaggugau

SEQ ID NO: 448773 - RNA, 19 nt, Artificial Sequence
  Description of Artificial Sequence: Synthetic oligonucleotide
gcccauaggcuccuuggaa

SEQ ID NO: 448774 - RNA, 19 nt, Artificial Sequence
  Description of Artificial Sequence: Synthetic oligonucleotide
gggcuagcccauaggcucc

SEQ ID NO: 448775 - RNA, 19 nt, Artificial Sequence
  Description of Artificial Sequence: Synthetic oligonucleotide
ccuugagcugaaaccuuga

SEQ ID NO: 448776 - RNA, 19 nt, Artificial Sequence
  Description of Artificial Sequence: Synthetic oligonucleotide
gcucauguuggugggaacu

SEQ ID NO: 448777 - RNA, 19 nt, Artificial Sequence
  Description of Artificial Sequence: Synthetic oligonucleotide
ggcccaguagaacuuuggu

SEQ ID NO: 448778 - RNA, 19 nt, Artificial Sequence
  Description of Artificial Sequence: Synthetic oligonucleotide
gacgacgaaagaagagcuu

SEQ ID NO: 448779 - RNA, 19 nt, Artificial Sequence
  Description of Artificial Sequence: Synthetic oligonucleotide
ggaguaagguggggacgcc

SEQ ID NO: 448780 - RNA, 19 nt, Artificial Sequence
  Description of Artificial Sequence: Synthetic oligonucleotide
cccguggugagugggcacc

SEQ ID NO: 448781 - RNA, 19 nt, Artificial Sequence
  Description of Artificial Sequence: Synthetic oligonucleotide
ccacugggaccaucccucc

SEQ ID NO: 448782 - RNA, 19 nt, Artificial Sequence
  Description of Artificial Sequence: Synthetic oligonucleotide
guggcgcaccaacugcucu

SEQ ID NO: 448783 - RNA, 19 nt, Artificial Sequence
  Description of Artificial Sequence: Synthetic oligonucleotide
cggaguccgggcagggugg

SEQ ID NO: 448784 - RNA, 19 nt, Artificial Sequence
  Description of Artificial Sequence: Synthetic oligonucleotide
caaagaggugacacacauu

SEQ ID NO: 448785 - RNA, 19 nt, Artificial Sequence
  Description of Artificial Sequence: Synthetic oligonucleotide
cacucuggucucguucaga

SEQ ID NO: 448786 - RNA, 19 nt, Artificial Sequence
  Description of Artificial Sequence: Synthetic oligonucleotide
gugcggcuuguaccagaac

SEQ ID NO: 448787 - RNA, 19 nt, Artificial Sequence
  Description of Artificial Sequence: Synthetic oligonucleotide
ccgccucaccccuuacacc

SEQ ID NO: 448788 - RNA, 19 nt, Artificial Sequence
  Description of Artificial Sequence: Synthetic oligonucleotide
cagcgguguagagggacca

SEQ ID NO: 448789 - RNA, 19 nt, Artificial Sequence
  Description of Artificial Sequence: Synthetic oligonucleotide
gggcaguaacuaggaacug

SEQ ID NO: 448790 - RNA, 19 nt, Artificial Sequence
  Description of Artificial Sequence: Synthetic oligonucleotide
caucuggguugguccaucu

SEQ ID NO: 448791 - RNA, 19 nt, Artificial Sequence
  Description of Artificial Sequence: Synthetic oligonucleotide
caggugcggcuuguaccag

SEQ ID NO: 448792 - RNA, 19 nt, Artificial Sequence
  Description of Artificial Sequence: Synthetic oligonucleotide
ccagacccagacagguguc

SEQ ID NO: 448793 - RNA, 19 nt, Artificial Sequence
  Description of Artificial Sequence: Synthetic oligonucleotide
ggagaccgaggcagcgugc

SEQ ID NO: 448794 - RNA, 19 nt, Artificial Sequence
  Description of Artificial Sequence: Synthetic oligonucleotide
cagggguccuccuguugaa

SEQ ID NO: 448795 - RNA, 19 nt, Artificial Sequence
  Description of Artificial Sequence: Synthetic oligonucleotide
ggcugccaaaauagggcuc

SEQ ID NO: 448796 - RNA, 19 nt, Artificial Sequence
  Description of Artificial Sequence: Synthetic oligonucleotide
cagggccauuccccaccag

SEQ ID NO: 448797 - RNA, 19 nt, Artificial Sequence
  Description of Artificial Sequence: Synthetic oligonucleotide
aucccacucuggucucguu

SEQ ID NO: 448798 - RNA, 19 nt, Artificial Sequence
  Description of Artificial Sequence: Synthetic oligonucleotide
cucguucagaggggaggca

SEQ ID NO: 448799 - RNA, 19 nt, Artificial Sequence
  Description of Artificial Sequence: Synthetic oligonucleotide
gggacgccaucgugggcug

SEQ ID NO: 448800 - RNA, 19 nt, Artificial Sequence
  Description of Artificial Sequence: Synthetic oligonucleotide
caggccccagggguacccc

SEQ ID NO: 448801 - RNA, 19 nt, Artificial Sequence
  Description of Artificial Sequence: Synthetic oligonucleotide
ggccccgagaauuggcacu

SEQ ID NO: 448802 - RNA, 19 nt, Artificial Sequence
  Description of Artificial Sequence: Synthetic oligonucleotide
ggcagcgugcugugcccac

SEQ ID NO: 448803 - RNA, 19 nt, Artificial Sequence
  Description of Artificial Sequence: Synthetic oligonucleotide
ccacggaggucagguagag

SEQ ID NO: 448804 - RNA, 19 nt, Artificial Sequence
  Description of Artificial Sequence: Synthetic oligonucleotide
ggauugcaaguagggugga

SEQ ID NO: 448805 - RNA, 19 nt, Artificial Sequence
  Description of Artificial Sequence: Synthetic oligonucleotide
ggccauauacugggcagua

SEQ ID NO: 448806 - RNA, 19 nt, Artificial Sequence
  Description of Artificial Sequence: Synthetic oligonucleotide
gccgagggcaucgugggua

SEQ ID NO: 448807 - RNA, 19 nt, Artificial Sequence
  Description of Artificial Sequence: Synthetic oligonucleotide
gguggacuucccggggaca

SEQ ID NO: 448808 - RNA, 19 nt, Artificial Sequence
  Description of Artificial Sequence: Synthetic oligonucleotide
gcuuggucacgggacaggu

SEQ ID NO: 448809 - RNA, 19 nt, Artificial Sequence
  Description of Artificial Sequence: Synthetic oligonucleotide
cccacucacuuagcuuagc

SEQ ID NO: 448810 - RNA, 19 nt, Artificial Sequence
  Description of Artificial Sequence: Synthetic oligonucleotide
cgccucaccccuuacaccu

SEQ ID NO: 448811 - RNA, 19 nt, Artificial Sequence
  Description of Artificial Sequence: Synthetic oligonucleotide
cuuugagggcuagcccaua

SEQ ID NO: 448812 - RNA, 19 nt, Artificial Sequence
  Description of Artificial Sequence: Synthetic oligonucleotide
gcugguuggucugggucaa

SEQ ID NO: 448813 - RNA, 19 nt, Artificial Sequence
  Description of Artificial Sequence: Synthetic oligonucleotide
ggaccuccagcugggugga

SEQ ID NO: 448814 - RNA, 19 nt, Artificial Sequence
  Description of Artificial Sequence: Synthetic oligonucleotide
gccauauacugggcaguaa

SEQ ID NO: 448815 - RNA, 19 nt, Artificial Sequence
  Description of Artificial Sequence: Synthetic oligonucleotide
gcgcaccaacugcucugag

SEQ ID NO: 448816 - RNA, 19 nt, Artificial Sequence
  Description of Artificial Sequence: Synthetic oligonucleotide
gcucaguaggacaacccuu

SEQ ID NO: 448817 - RNA, 19 nt, Artificial Sequence
  Description of Artificial Sequence: Synthetic oligonucleotide
ggcuagggucugguggcuc

SEQ ID NO: 448818 - RNA, 19 nt, Artificial Sequence
  Description of Artificial Sequence: Synthetic oligonucleotide
ggcaucucggggagaccga

SEQ ID NO: 448819 - RNA, 19 nt, Artificial Sequence
  Description of Artificial Sequence: Synthetic oligonucleotide
gggguaccccucuuccccu

SEQ ID NO: 448820 - RNA, 19 nt, Artificial Sequence
  Description of Artificial Sequence: Synthetic oligonucleotide
ggucagugcuagagaaggu

SEQ ID NO: 448821 - RNA, 19 nt, Artificial Sequence
  Description of Artificial Sequence: Synthetic oligonucleotide
ccucuuccccucaccuuga

SEQ ID NO: 448822 - RNA, 19 nt, Artificial Sequence
  Description of Artificial Sequence: Synthetic oligonucleotide
gugaggugcccggccauau

SEQ ID NO: 448823 - RNA, 19 nt, Artificial Sequence
  Description of Artificial Sequence: Synthetic oligonucleotide
gccccgagaauuggcacua

SEQ ID NO: 448824 - RNA, 19 nt, Artificial Sequence
  Description of Artificial Sequence: Synthetic oligonucleotide
gcggggaggucugggagaa

SEQ ID NO: 448825 - RNA, 19 nt, Artificial Sequence
  Description of Artificial Sequence: Synthetic oligonucleotide
gggagagugcaguguugau

SEQ ID NO: 448826 - RNA, 19 nt, Artificial Sequence
  Description of Artificial Sequence: Synthetic oligonucleotide
cccgagaauuggcacuacu

SEQ ID NO: 448827 - RNA, 19 nt, Artificial Sequence
  Description of Artificial Sequence: Synthetic oligonucleotide
cuggugccacacucucuuu

SEQ ID NO: 448828 - RNA, 19 nt, Artificial Sequence
  Description of Artificial Sequence: Synthetic oligonucleotide
ccgaggcagcgugcugugc

SEQ ID NO: 448829 - RNA, 19 nt, Artificial Sequence
  Description of Artificial Sequence: Synthetic oligonucleotide
cacaagccgagggcaucgu

SEQ ID NO: 448830 - RNA, 19 nt, Artificial Sequence
  Description of Artificial Sequence: Synthetic oligonucleotide
ccgggcagggugguuggga

SEQ ID NO: 448831 - RNA, 19 nt, Artificial Sequence
  Description of Artificial Sequence: Synthetic oligonucleotide
ccccgagaauuggcacuac

SEQ ID NO: 448832 - RNA, 19 nt, Artificial Sequence
  Description of Artificial Sequence: Synthetic oligonucleotide
ccucgccaggacucagucu

SEQ ID NO: 448833 - RNA, 19 nt, Artificial Sequence
  Description of Artificial Sequence: Synthetic oligonucleotide
ccacgaaaccaaagaucuu

SEQ ID NO: 448834 - RNA, 19 nt, Artificial Sequence
  Description of Artificial Sequence: Synthetic oligonucleotide
cgggugcuuucuuugcccu

SEQ ID NO: 448835 - RNA, 19 nt, Artificial Sequence
  Description of Artificial Sequence: Synthetic oligonucleotide
ggaguccgggcaggguggu

SEQ ID NO: 448836 - RNA, 19 nt, Artificial Sequence
  Description of Artificial Sequence: Synthetic oligonucleotide
gcagcgugcugugcccacu

SEQ ID NO: 448837 - RNA, 19 nt, Artificial Sequence
  Description of Artificial Sequence: Synthetic oligonucleotide
gggcuagggucugguggcu

SEQ ID NO: 448838 - RNA, 19 nt, Artificial Sequence
  Description of Artificial Sequence: Synthetic oligonucleotide
ccaucccuccaggacaguu

SEQ ID NO: 448839 - RNA, 19 nt, Artificial Sequence
  Description of Artificial Sequence: Synthetic oligonucleotide
ggacgccaucgugggcugu

SEQ ID NO: 448840 - RNA, 19 nt, Artificial Sequence
  Description of Artificial Sequence: Synthetic oligonucleotide
gucuugccgucgggugcuu

SEQ ID NO: 448841 - RNA, 19 nt, Artificial Sequence
  Description of Artificial Sequence: Synthetic oligonucleotide
cgccaucgugggcugucgu

SEQ ID NO: 448842 - RNA, 19 nt, Artificial Sequence
  Description of Artificial Sequence: Synthetic oligonucleotide
gcuagcccauaggcuccuu

SEQ ID NO: 448843 - RNA, 19 nt, Artificial Sequence
  Description of Artificial Sequence: Synthetic oligonucleotide
aauuacauccucuugauuc

SEQ ID NO: 448844 - RNA, 19 nt, Artificial Sequence
  Description of Artificial Sequence: Synthetic oligonucleotide
aauuaugauaauuuccugc

SEQ ID NO: 448845 - RNA, 19 nt, Artificial Sequence
  Description of Artificial Sequence: Synthetic oligonucleotide
aauaguaccaagcaaagcu

SEQ ID NO: 448846 - RNA, 19 nt, Artificial Sequence
  Description of Artificial Sequence: Synthetic oligonucleotide
aaugaaucaacuuugauuu

SEQ ID NO: 448847 - RNA, 19 nt, Artificial Sequence
  Description of Artificial Sequence: Synthetic oligonucleotide
auacaauucaacaugaugc

SEQ ID NO: 448848 - RNA, 19 nt, Artificial Sequence
  Description of Artificial Sequence: Synthetic oligonucleotide
uccuaaaugauaaauaaca

SEQ ID NO: 448849 - RNA, 19 nt, Artificial Sequence
  Description of Artificial Sequence: Synthetic oligonucleotide
auaaaugaaaagcugggac

SEQ ID NO: 448850 - RNA, 19 nt, Artificial Sequence
  Description of Artificial Sequence: Synthetic oligonucleotide
gaugcuaucaauaucaagc

SEQ ID NO: 448851 - RNA, 19 nt, Artificial Sequence
  Description of Artificial Sequence: Synthetic oligonucleotide
uuuuauaagacuuagucau

SEQ ID NO: 448852 - RNA, 19 nt, Artificial Sequence
  Description of Artificial Sequence: Synthetic oligonucleotide
aaauaagggauuuaaucag

SEQ ID NO: 448853 - RNA, 19 nt, Artificial Sequence
  Description of Artificial Sequence: Synthetic oligonucleotide
acgaauuauaaauagguag

SEQ ID NO: 448854 - RNA, 19 nt, Artificial Sequence
  Description of Artificial Sequence: Synthetic oligonucleotide
uuuacgaauuauaaauagg

SEQ ID NO: 448855 - RNA, 19 nt, Artificial Sequence
  Description of Artificial Sequence: Synthetic oligonucleotide
uuuuguaagacugacagug

SEQ ID NO: 448856 - RNA, 19 nt, Artificial Sequence
  Description of Artificial Sequence: Synthetic oligonucleotide
uuacgaauuauaaauaggu

SEQ ID NO: 448857 - RNA, 19 nt, Artificial Sequence
  Description of Artificial Sequence: Synthetic oligonucleotide
uuuuacgaauuauaaauag

SEQ ID NO: 448858 - RNA, 19 nt, Artificial Sequence
  Description of Artificial Sequence: Synthetic oligonucleotide
ugauauugaauccaaggcc

SEQ ID NO: 448859 - RNA, 19 nt, Artificial Sequence
  Description of Artificial Sequence: Synthetic oligonucleotide
aaaugaaucaacuuugauu

SEQ ID NO: 448860 - RNA, 19 nt, Artificial Sequence
  Description of Artificial Sequence: Synthetic oligonucleotide
uguaucuuaaacaaauccu

SEQ ID NO: 448861 - RNA, 19 nt, Artificial Sequence
  Description of Artificial Sequence: Synthetic oligonucleotide
uguaacggaacgcugaugc

SEQ ID NO: 448862 - RNA, 19 nt, Artificial Sequence
  Description of Artificial Sequence: Synthetic oligonucleotide
auuucaacccaucaguuuc

SEQ ID NO: 448863 - RNA, 19 nt, Artificial Sequence
  Description of Artificial Sequence: Synthetic oligonucleotide
aaaugauuaggucuguugu

SEQ ID NO: 448864 - RNA, 19 nt, Artificial Sequence
  Description of Artificial Sequence: Synthetic oligonucleotide
uuccuuauuauacaagaag

SEQ ID NO: 448865 - RNA, 19 nt, Artificial Sequence
  Description of Artificial Sequence: Synthetic oligonucleotide
caugauauugaauccaagg

SEQ ID NO: 448866 - RNA, 19 nt, Artificial Sequence
  Description of Artificial Sequence: Synthetic oligonucleotide
uaaucugugacugaaaaug

SEQ ID NO: 448867 - RNA, 19 nt, Artificial Sequence
  Description of Artificial Sequence: Synthetic oligonucleotide
uccguuaacagaaaguagc

SEQ ID NO: 448868 - RNA, 19 nt, Artificial Sequence
  Description of Artificial Sequence: Synthetic oligonucleotide
aaauaaaugaaaagcuggg

SEQ ID NO: 448869 - RNA, 19 nt, Artificial Sequence
  Description of Artificial Sequence: Synthetic oligonucleotide
uuacagauaaggaacauaa

SEQ ID NO: 448870 - RNA, 19 nt, Artificial Sequence
  Description of Artificial Sequence: Synthetic oligonucleotide
ugaaaucugagcuuguuug

SEQ ID NO: 448871 - RNA, 19 nt, Artificial Sequence
  Description of Artificial Sequence: Synthetic oligonucleotide
auugugagacuuaagaagc

SEQ ID NO: 448872 - RNA, 19 nt, Artificial Sequence
  Description of Artificial Sequence: Synthetic oligonucleotide
aaucgcugaaacaugaaac

SEQ ID NO: 448873 - RNA, 19 nt, Artificial Sequence
  Description of Artificial Sequence: Synthetic oligonucleotide
uaaaugaauagccuaacaa

SEQ ID NO: 448874 - RNA, 19 nt, Artificial Sequence
  Description of Artificial Sequence: Synthetic oligonucleotide
auaguagcuaggcugagac

SEQ ID NO: 448875 - RNA, 19 nt, Artificial Sequence
  Description of Artificial Sequence: Synthetic oligonucleotide
aaugauuaggucuguuguc

SEQ ID NO: 448876 - RNA, 19 nt, Artificial Sequence
  Description of Artificial Sequence: Synthetic oligonucleotide
aguuuuaaaugauuagguc

SEQ ID NO: 448877 - RNA, 19 nt, Artificial Sequence
  Description of Artificial Sequence: Synthetic oligonucleotide
agauuggugaguuuuguuc

SEQ ID NO: 448878 - RNA, 19 nt, Artificial Sequence
  Description of Artificial Sequence: Synthetic oligonucleotide
uaauuuaaccuucccuugg

SEQ ID NO: 448879 - RNA, 19 nt, Artificial Sequence
  Description of Artificial Sequence: Synthetic oligonucleotide
gauauugaauccaaggccc

SEQ ID NO: 448880 - RNA, 19 nt, Artificial Sequence
  Description of Artificial Sequence: Synthetic oligonucleotide
ugagaaauauauuuaaaua

SEQ ID NO: 448881 - RNA, 19 nt, Artificial Sequence
  Description of Artificial Sequence: Synthetic oligonucleotide
cucgaauuagaacugaagc

SEQ ID NO: 448882 - RNA, 19 nt, Artificial Sequence
  Description of Artificial Sequence: Synthetic oligonucleotide
cugccuuuuaguaaaauag

SEQ ID NO: 448883 - RNA, 19 nt, Artificial Sequence
  Description of Artificial Sequence: Synthetic oligonucleotide
auccgugagauauagauug

SEQ ID NO: 448884 - RNA, 19 nt, Artificial Sequence
  Description of Artificial Sequence: Synthetic oligonucleotide
cacaacaauaauauuacug

SEQ ID NO: 448885 - RNA, 19 nt, Artificial Sequence
  Description of Artificial Sequence: Synthetic oligonucleotide
auaaucaaauuacauccuc

SEQ ID NO: 448886 - RNA, 19 nt, Artificial Sequence
  Description of Artificial Sequence: Synthetic oligonucleotide
aaagguaauaaagucauaa

SEQ ID NO: 448887 - RNA, 19 nt, Artificial Sequence
  Description of Artificial Sequence: Synthetic oligonucleotide
ugagauaugagaauuucau

SEQ ID NO: 448888 - RNA, 19 nt, Artificial Sequence
  Description of Artificial Sequence: Synthetic oligonucleotide
uuucuaaucaugcucaaua

SEQ ID NO: 448889 - RNA, 19 nt, Artificial Sequence
  Description of Artificial Sequence: Synthetic oligonucleotide
accuauuauauauuuacug

SEQ ID NO: 448890 - RNA, 19 nt, Artificial Sequence
  Description of Artificial Sequence: Synthetic oligonucleotide
uuauccgugagauauagau

SEQ ID NO: 448891 - RNA, 19 nt, Artificial Sequence
  Description of Artificial Sequence: Synthetic oligonucleotide
aagccguguacacacuucc

SEQ ID NO: 448892 - RNA, 19 nt, Artificial Sequence
  Description of Artificial Sequence: Synthetic oligonucleotide
auaauuaugauaauuuccu

SEQ ID NO: 448893 - RNA, 19 nt, Artificial Sequence
  Description of Artificial Sequence: Synthetic oligonucleotide
aagggauuuaaucaguaau

SEQ ID NO: 448894 - RNA, 19 nt, Artificial Sequence
  Description of Artificial Sequence: Synthetic oligonucleotide
uuuaccacuagauuacaga

SEQ ID NO: 448895 - RNA, 19 nt, Artificial Sequence
  Description of Artificial Sequence: Synthetic oligonucleotide
acauccaguggacaaaugg

SEQ ID NO: 448896 - RNA, 19 nt, Artificial Sequence
  Description of Artificial Sequence: Synthetic oligonucleotide
uuaaguuauuacuuugucu

SEQ ID NO: 448897 - RNA, 19 nt, Artificial Sequence
  Description of Artificial Sequence: Synthetic oligonucleotide
ucaauaguaccaagcaaag

SEQ ID NO: 448898 - RNA, 19 nt, Artificial Sequence
  Description of Artificial Sequence: Synthetic oligonucleotide
uaaaugauuaggucuguug

SEQ ID NO: 448899 - RNA, 19 nt, Artificial Sequence
  Description of Artificial Sequence: Synthetic oligonucleotide
augucauacucuucuauac

SEQ ID NO: 448900 - RNA, 19 nt, Artificial Sequence
  Description of Artificial Sequence: Synthetic oligonucleotide
augaaagcaagcuauuucu

SEQ ID NO: 448901 - RNA, 19 nt, Artificial Sequence
  Description of Artificial Sequence: Synthetic oligonucleotide
gauuuaaucaguaauguua

SEQ ID NO: 448902 - RNA, 19 nt, Artificial Sequence
  Description of Artificial Sequence: Synthetic oligonucleotide
ucgaauuagaacugaagcu

SEQ ID NO: 448903 - RNA, 19 nt, Artificial Sequence
  Description of Artificial Sequence: Synthetic oligonucleotide
aauuauccgugagauauag

SEQ ID NO: 448904 - RNA, 19 nt, Artificial Sequence
  Description of Artificial Sequence: Synthetic oligonucleotide
uuguaguggacuaaagaca

SEQ ID NO: 448905 - RNA, 19 nt, Artificial Sequence
  Description of Artificial Sequence: Synthetic oligonucleotide
aaagcuacagauauuuugu

SEQ ID NO: 448906 - RNA, 19 nt, Artificial Sequence
  Description of Artificial Sequence: Synthetic oligonucleotide
agccuaacaaauuugaaaa

SEQ ID NO: 448907 - RNA, 19 nt, Artificial Sequence
  Description of Artificial Sequence: Synthetic oligonucleotide
agcacaacaauaauauuac

SEQ ID NO: 448908 - RNA, 19 nt, Artificial Sequence
  Description of Artificial Sequence: Synthetic oligonucleotide
uaugcaccaacuuuaauau

SEQ ID NO: 448909 - RNA, 19 nt, Artificial Sequence
  Description of Artificial Sequence: Synthetic oligonucleotide
uguaguggacuaaagacau

SEQ ID NO: 448910 - RNA, 19 nt, Artificial Sequence
  Description of Artificial Sequence: Synthetic oligonucleotide
ugugauguagggauacgag

SEQ ID NO: 448911 - RNA, 19 nt, Artificial Sequence
  Description of Artificial Sequence: Synthetic oligonucleotide
aacuuacuuuuacaaauca

SEQ ID NO: 448912 - RNA, 19 nt, Artificial Sequence
  Description of Artificial Sequence: Synthetic oligonucleotide
ggacuaaagacauucaacc

SEQ ID NO: 448913 - RNA, 19 nt, Artificial Sequence
  Description of Artificial Sequence: Synthetic oligonucleotide
accuauuuagcaaugauug

SEQ ID NO: 448914 - RNA, 19 nt, Artificial Sequence
  Description of Artificial Sequence: Synthetic oligonucleotide
uuaaacaaauccugccucc

SEQ ID NO: 448915 - RNA, 19 nt, Artificial Sequence
  Description of Artificial Sequence: Synthetic oligonucleotide
ucuucuauacuacuuuggu

SEQ ID NO: 448916 - RNA, 19 nt, Artificial Sequence
  Description of Artificial Sequence: Synthetic oligonucleotide
uucuaaucaugcucaauag

SEQ ID NO: 448917 - RNA, 19 nt, Artificial Sequence
  Description of Artificial Sequence: Synthetic oligonucleotide
uaccguacaacuaauuuaa

SEQ ID NO: 448918 - RNA, 19 nt, Artificial Sequence
  Description of Artificial Sequence: Synthetic oligonucleotide
uggguaacucaacaacucg

SEQ ID NO: 448919 - RNA, 19 nt, Artificial Sequence
  Description of Artificial Sequence: Synthetic oligonucleotide
agauuuaccacuagauuac

SEQ ID NO: 448920 - RNA, 19 nt, Artificial Sequence
  Description of Artificial Sequence: Synthetic oligonucleotide
gcauuuauaauuuaugaca

SEQ ID NO: 448921 - RNA, 19 nt, Artificial Sequence
  Description of Artificial Sequence: Synthetic oligonucleotide
uggacuaaagacauucaac

SEQ ID NO: 448922 - RNA, 19 nt, Artificial Sequence
  Description of Artificial Sequence: Synthetic oligonucleotide
ggacuuuugguguauaccg

SEQ ID NO: 448923 - RNA, 19 nt, Artificial Sequence
  Description of Artificial Sequence: Synthetic oligonucleotide
accacuagauuacagauaa

SEQ ID NO: 448924 - RNA, 19 nt, Artificial Sequence
  Description of Artificial Sequence: Synthetic oligonucleotide
cuaaagacauucaaccaug

SEQ ID NO: 448925 - RNA, 19 nt, Artificial Sequence
  Description of Artificial Sequence: Synthetic oligonucleotide
aacucaacaacucggggau

SEQ ID NO: 448926 - RNA, 19 nt, Artificial Sequence
  Description of Artificial Sequence: Synthetic oligonucleotide
uaacucaacaacucgggga

SEQ ID NO: 448927 - RNA, 19 nt, Artificial Sequence
  Description of Artificial Sequence: Synthetic oligonucleotide
ugguguauaccguacaacu

SEQ ID NO: 448928 - RNA, 19 nt, Artificial Sequence
  Description of Artificial Sequence: Synthetic oligonucleotide
guaaacuuggcugaaauuc

SEQ ID NO: 448929 - RNA, 19 nt, Artificial Sequence
  Description of Artificial Sequence: Synthetic oligonucleotide
gacuuagucauaaucacac

SEQ ID NO: 448930 - RNA, 19 nt, Artificial Sequence
  Description of Artificial Sequence: Synthetic oligonucleotide
uuaugacauaaauaaggga

SEQ ID NO: 448931 - RNA, 19 nt, Artificial Sequence
  Description of Artificial Sequence: Synthetic oligonucleotide
aucuccucguuugagaccc

SEQ ID NO: 448932 - RNA, 19 nt, Artificial Sequence
  Description of Artificial Sequence: Synthetic oligonucleotide
uucagcuuuuauaagacuu

SEQ ID NO: 448933 - RNA, 19 nt, Artificial Sequence
  Description of Artificial Sequence: Synthetic oligonucleotide
uguaagcuacaaaugaaau

SEQ ID NO: 448934 - RNA, 19 nt, Artificial Sequence
  Description of Artificial Sequence: Synthetic oligonucleotide
aacgcugaugcguacugag

SEQ ID NO: 448935 - RNA, 19 nt, Artificial Sequence
  Description of Artificial Sequence: Synthetic oligonucleotide
uauaccguacaacuaauuu

SEQ ID NO: 448936 - RNA, 19 nt, Artificial Sequence
  Description of Artificial Sequence: Synthetic oligonucleotide
uguaauuguaacggaacgc

SEQ ID NO: 448937 - RNA, 19 nt, Artificial Sequence
  Description of Artificial Sequence: Synthetic oligonucleotide
gagacaagaccccagggug

SEQ ID NO: 448938 - RNA, 19 nt, Artificial Sequence
  Description of Artificial Sequence: Synthetic oligonucleotide
aacaugcaaagccguguac

SEQ ID NO: 448939 - RNA, 19 nt, Artificial Sequence
  Description of Artificial Sequence: Synthetic oligonucleotide
accucuaauaaucuuacaa

SEQ ID NO: 448940 - RNA, 19 nt, Artificial Sequence
  Description of Artificial Sequence: Synthetic oligonucleotide
cuuuuauaagacuuaguca

SEQ ID NO: 448941 - RNA, 19 nt, Artificial Sequence
  Description of Artificial Sequence: Synthetic oligonucleotide
ucuaaucaugcucaauagu

SEQ ID NO: 448942 - RNA, 19 nt, Artificial Sequence
  Description of Artificial Sequence: Synthetic oligonucleotide
uauagauuggugaguuuug

SEQ ID NO: 448943 - RNA, 19 nt, Artificial Sequence
  Description of Artificial Sequence: Synthetic oligonucleotide
ugagacuuaagaagcugcc

SEQ ID NO: 448944 - RNA, 19 nt, Artificial Sequence
  Description of Artificial Sequence: Synthetic oligonucleotide
gcuuuuauaagacuuaguc

SEQ ID NO: 448945 - RNA, 19 nt, Artificial Sequence
  Description of Artificial Sequence: Synthetic oligonucleotide
uaauuaugauaauuuccug

SEQ ID NO: 448946 - RNA, 19 nt, Artificial Sequence
  Description of Artificial Sequence: Synthetic oligonucleotide
uacaacuaauuuaaccuuc

SEQ ID NO: 448947 - RNA, 19 nt, Artificial Sequence
  Description of Artificial Sequence: Synthetic oligonucleotide
uuuagcaaugauugcuuca

SEQ ID NO: 448948 - RNA, 19 nt, Artificial Sequence
  Description of Artificial Sequence: Synthetic oligonucleotide
uuuacugugugccuaguuu

SEQ ID NO: 448949 - RNA, 19 nt, Artificial Sequence
  Description of Artificial Sequence: Synthetic oligonucleotide
cuuugcaguugcauuagcc

SEQ ID NO: 448950 - RNA, 19 nt, Artificial Sequence
  Description of Artificial Sequence: Synthetic oligonucleotide
auaucaagcacauuuugua

SEQ ID NO: 448951 - RNA, 19 nt, Artificial Sequence
  Description of Artificial Sequence: Synthetic oligonucleotide
auuuagcaaugauugcuuc

SEQ ID NO: 448952 - RNA, 19 nt, Artificial Sequence
  Description of Artificial Sequence: Synthetic oligonucleotide
uagccuaacaaauuugaaa

SEQ ID NO: 448953 - RNA, 19 nt, Artificial Sequence
  Description of Artificial Sequence: Synthetic oligonucleotide
gaaaucugagcuuguuugc

SEQ ID NO: 448954 - RNA, 19 nt, Artificial Sequence
  Description of Artificial Sequence: Synthetic oligonucleotide
ucaacacucacuccguuaa

SEQ ID NO: 448955 - RNA, 19 nt, Artificial Sequence
  Description of Artificial Sequence: Synthetic oligonucleotide
aauuguaacggaacgcuga

SEQ ID NO: 448956 - RNA, 19 nt, Artificial Sequence
  Description of Artificial Sequence: Synthetic oligonucleotide
aggacuuuugguguauacc

SEQ ID NO: 448957 - RNA, 19 nt, Artificial Sequence
  Description of Artificial Sequence: Synthetic oligonucleotide
cuaauuuaaccuucccuug

SEQ ID NO: 448958 - RNA, 19 nt, Artificial Sequence
  Description of Artificial Sequence: Synthetic oligonucleotide
auaaaugaauagccuaaca

SEQ ID NO: 448959 - RNA, 19 nt, Artificial Sequence
  Description of Artificial Sequence: Synthetic oligonucleotide
cuuaaacaaauccugccuc

SEQ ID NO: 448960 - RNA, 19 nt, Artificial Sequence
  Description of Artificial Sequence: Synthetic oligonucleotide
ugaauuacugcagaagaaa

SEQ ID NO: 448961 - RNA, 19 nt, Artificial Sequence
  Description of Artificial Sequence: Synthetic oligonucleotide
ugagacaagaccccagggu

SEQ ID NO: 448962 - RNA, 19 nt, Artificial Sequence
  Description of Artificial Sequence: Synthetic oligonucleotide
uuuguaagacugacagugc

SEQ ID NO: 448963 - RNA, 19 nt, Artificial Sequence
  Description of Artificial Sequence: Synthetic oligonucleotide
aaagacauucaaccaugca

SEQ ID NO: 448964 - RNA, 19 nt, Artificial Sequence
  Description of Artificial Sequence: Synthetic oligonucleotide
cucaauaguaccaagcaaa

SEQ ID NO: 448965 - RNA, 19 nt, Artificial Sequence
  Description of Artificial Sequence: Synthetic oligonucleotide
gauaaauaacaaugcugac

SEQ ID NO: 448966 - RNA, 19 nt, Artificial Sequence
  Description of Artificial Sequence: Synthetic oligonucleotide
cuaaucaugcucaauagua

SEQ ID NO: 448967 - RNA, 19 nt, Artificial Sequence
  Description of Artificial Sequence: Synthetic oligonucleotide
agcacucugaaccccacuc

SEQ ID NO: 448968 - RNA, 19 nt, Artificial Sequence
  Description of Artificial Sequence: Synthetic oligonucleotide
aagaagcacucugaacccc

SEQ ID NO: 448969 - RNA, 19 nt, Artificial Sequence
  Description of Artificial Sequence: Synthetic oligonucleotide
aucgauagcugccuuuuag

SEQ ID NO: 448970 - RNA, 19 nt, Artificial Sequence
  Description of Artificial Sequence: Synthetic oligonucleotide
cagaaaguagcugaucucc

SEQ ID NO: 448971 - RNA, 19 nt, Artificial Sequence
  Description of Artificial Sequence: Synthetic oligonucleotide
uaauuguaacggaacgcug

SEQ ID NO: 448972 - RNA, 19 nt, Artificial Sequence
  Description of Artificial Sequence: Synthetic oligonucleotide
uuauaagacuuagucauaa

SEQ ID NO: 448973 - RNA, 19 nt, Artificial Sequence
  Description of Artificial Sequence: Synthetic oligonucleotide
auuacauccucuugauuca

SEQ ID NO: 448974 - RNA, 19 nt, Artificial Sequence
  Description of Artificial Sequence: Synthetic oligonucleotide
uguucagacucccaucgcu

SEQ ID NO: 448975 - RNA, 19 nt, Artificial Sequence
  Description of Artificial Sequence: Synthetic oligonucleotide
ugucauacucuucuauacu

SEQ ID NO: 448976 - RNA, 19 nt, Artificial Sequence
  Description of Artificial Sequence: Synthetic oligonucleotide
ugaugcuaucaauaucaag

SEQ ID NO: 448977 - RNA, 19 nt, Artificial Sequence
  Description of Artificial Sequence: Synthetic oligonucleotide
acaagaagacuacuguaca

SEQ ID NO: 448978 - RNA, 19 nt, Artificial Sequence
  Description of Artificial Sequence: Synthetic oligonucleotide
auuagaacugaagcugaac

SEQ ID NO: 448979 - RNA, 19 nt, Artificial Sequence
  Description of Artificial Sequence: Synthetic oligonucleotide
auaccucuaauaaucuuac

SEQ ID NO: 448980 - RNA, 19 nt, Artificial Sequence
  Description of Artificial Sequence: Synthetic oligonucleotide
agcgugauuccauuucuuc

SEQ ID NO: 448981 - RNA, 19 nt, Artificial Sequence
  Description of Artificial Sequence: Synthetic oligonucleotide
aauaagggauuuaaucagu

SEQ ID NO: 448982 - RNA, 19 nt, Artificial Sequence
  Description of Artificial Sequence: Synthetic oligonucleotide
gauacgagcacaacaauaa

SEQ ID NO: 448983 - RNA, 19 nt, Artificial Sequence
  Description of Artificial Sequence: Synthetic oligonucleotide
uacgaauuauaaauaggua

SEQ ID NO: 448984 - RNA, 19 nt, Artificial Sequence
  Description of Artificial Sequence: Synthetic oligonucleotide
ugugugccuaguuuuauuc

SEQ ID NO: 448985 - RNA, 19 nt, Artificial Sequence
  Description of Artificial Sequence: Synthetic oligonucleotide
aauaccuauuuagcaauga

SEQ ID NO: 448986 - RNA, 19 nt, Artificial Sequence
  Description of Artificial Sequence: Synthetic oligonucleotide
ugugccuaguuuuauucac

SEQ ID NO: 448987 - RNA, 19 nt, Artificial Sequence
  Description of Artificial Sequence: Synthetic oligonucleotide
uuugguguauaccguacaa

SEQ ID NO: 448988 - RNA, 19 nt, Artificial Sequence
  Description of Artificial Sequence: Synthetic oligonucleotide
uccaccuggaauuauccgu

SEQ ID NO: 448989 - RNA, 19 nt, Artificial Sequence
  Description of Artificial Sequence: Synthetic oligonucleotide
uacgagcacaacaauaaua

SEQ ID NO: 448990 - RNA, 19 nt, Artificial Sequence
  Description of Artificial Sequence: Synthetic oligonucleotide
caacuguagccauaguagc

SEQ ID NO: 448991 - RNA, 19 nt, Artificial Sequence
  Description of Artificial Sequence: Synthetic oligonucleotide
gugauguagggauacgagc

SEQ ID NO: 448992 - RNA, 19 nt, Artificial Sequence
  Description of Artificial Sequence: Synthetic oligonucleotide
aguagcuaggcugagacaa

SEQ ID NO: 448993 - RNA, 19 nt, Artificial Sequence
  Description of Artificial Sequence: Synthetic oligonucleotide
uaccuauuuagcaaugauu

SEQ ID NO: 448994 - RNA, 19 nt, Artificial Sequence
  Description of Artificial Sequence: Synthetic oligonucleotide
auuuaaucaguaauguuaa

SEQ ID NO: 448995 - RNA, 19 nt, Artificial Sequence
  Description of Artificial Sequence: Synthetic oligonucleotide
auaccguacaacuaauuua

SEQ ID NO: 448996 - RNA, 19 nt, Artificial Sequence
  Description of Artificial Sequence: Synthetic oligonucleotide
agggauuuaaucaguaaug

SEQ ID NO: 448997 - RNA, 19 nt, Artificial Sequence
  Description of Artificial Sequence: Synthetic oligonucleotide
augggagugcccuucacug

SEQ ID NO: 448998 - RNA, 19 nt, Artificial Sequence
  Description of Artificial Sequence: Synthetic oligonucleotide
gaacacuaauuauguuggg

SEQ ID NO: 448999 - RNA, 19 nt, Artificial Sequence
  Description of Artificial Sequence: Synthetic oligonucleotide
uugcaguugcauuagcccu

SEQ ID NO: 449000 - RNA, 19 nt, Artificial Sequence
  Description of Artificial Sequence: Synthetic oligonucleotide
auauauuuacugugugccu

SEQ ID NO: 449001 - RNA, 19 nt, Artificial Sequence
  Description of Artificial Sequence: Synthetic oligonucleotide
aauaugucauacucuucua

SEQ ID NO: 449002 - RNA, 19 nt, Artificial Sequence
  Description of Artificial Sequence: Synthetic oligonucleotide
gaauagccuaacaaauuug

SEQ ID NO: 449003 - RNA, 19 nt, Artificial Sequence
  Description of Artificial Sequence: Synthetic oligonucleotide
accccacucauugugagac

SEQ ID NO: 449004 - RNA, 19 nt, Artificial Sequence
  Description of Artificial Sequence: Synthetic oligonucleotide
cuucuauacuacuuugguc

SEQ ID NO: 449005 - RNA, 19 nt, Artificial Sequence
  Description of Artificial Sequence: Synthetic oligonucleotide
uuuauaagacuuagucaua

SEQ ID NO: 449006 - RNA, 19 nt, Artificial Sequence
  Description of Artificial Sequence: Synthetic oligonucleotide
uacucuucuauacuacuuu

SEQ ID NO: 449007 - RNA, 19 nt, Artificial Sequence
  Description of Artificial Sequence: Synthetic oligonucleotide
caagaagacuacuguacac

SEQ ID NO: 449008 - RNA, 19 nt, Artificial Sequence
  Description of Artificial Sequence: Synthetic oligonucleotide
aaucugugacugaaaauga

SEQ ID NO: 449009 - RNA, 19 nt, Artificial Sequence
  Description of Artificial Sequence: Synthetic oligonucleotide
aacacucacuccguuaaca

SEQ ID NO: 449010 - RNA, 19 nt, Artificial Sequence
  Description of Artificial Sequence: Synthetic oligonucleotide
ucugagauaugagaauuuc

SEQ ID NO: 449011 - RNA, 19 nt, Artificial Sequence
  Description of Artificial Sequence: Synthetic oligonucleotide
acacucacuccguuaacag

SEQ ID NO: 449012 - RNA, 19 nt, Artificial Sequence
  Description of Artificial Sequence: Synthetic oligonucleotide
aaacaugcaaagccgugua

SEQ ID NO: 449013 - RNA, 19 nt, Artificial Sequence
  Description of Artificial Sequence: Synthetic oligonucleotide
uaaauagguagcagcccac

SEQ ID NO: 449014 - RNA, 19 nt, Artificial Sequence
  Description of Artificial Sequence: Synthetic oligonucleotide
uccgugagauauagauugg

SEQ ID NO: 449015 - RNA, 19 nt, Artificial Sequence
  Description of Artificial Sequence: Synthetic oligonucleotide
caaaccauccauuuauuaa

SEQ ID NO: 449016 - RNA, 19 nt, Artificial Sequence
  Description of Artificial Sequence: Synthetic oligonucleotide
ccucccaugauauugaauc

SEQ ID NO: 449017 - RNA, 19 nt, Artificial Sequence
  Description of Artificial Sequence: Synthetic oligonucleotide
aaucacacaucgauagcug

SEQ ID NO: 449018 - RNA, 19 nt, Artificial Sequence
  Description of Artificial Sequence: Synthetic oligonucleotide
ucaccucaaccuuuuauaa

SEQ ID NO: 449019 - RNA, 19 nt, Artificial Sequence
  Description of Artificial Sequence: Synthetic oligonucleotide
uaagggauuuaaucaguaa

SEQ ID NO: 449020 - RNA, 19 nt, Artificial Sequence
  Description of Artificial Sequence: Synthetic oligonucleotide
ugaugcguacugaggagca

SEQ ID NO: 449021 - RNA, 19 nt, Artificial Sequence
  Description of Artificial Sequence: Synthetic oligonucleotide
uguauaccguacaacuaau

SEQ ID NO: 449022 - RNA, 19 nt, Artificial Sequence
  Description of Artificial Sequence: Synthetic oligonucleotide
aaagccguguacacacuuc

SEQ ID NO: 449023 - RNA, 19 nt, Artificial Sequence
  Description of Artificial Sequence: Synthetic oligonucleotide
uuuccaaagcgugauucca

SEQ ID NO: 449024 - RNA, 19 nt, Artificial Sequence
  Description of Artificial Sequence: Synthetic oligonucleotide
acgagcacaacaauaauau

SEQ ID NO: 449025 - RNA, 19 nt, Artificial Sequence
  Description of Artificial Sequence: Synthetic oligonucleotide
uuaugauaauuuccugcau

SEQ ID NO: 449026 - RNA, 19 nt, Artificial Sequence
  Description of Artificial Sequence: Synthetic oligonucleotide
uaaagauaagaagcacucu

SEQ ID NO: 449027 - RNA, 19 nt, Artificial Sequence
  Description of Artificial Sequence: Synthetic oligonucleotide
uuucaacccaucaguuucu

SEQ ID NO: 449028 - RNA, 19 nt, Artificial Sequence
  Description of Artificial Sequence: Synthetic oligonucleotide
ucgauagcugccuuuuagu

SEQ ID NO: 449029 - RNA, 19 nt, Artificial Sequence
  Description of Artificial Sequence: Synthetic oligonucleotide
uuucagcuuuuauaagacu

SEQ ID NO: 449030 - RNA, 19 nt, Artificial Sequence
  Description of Artificial Sequence: Synthetic oligonucleotide
aucgcuaucugaaucauaa

SEQ ID NO: 449031 - RNA, 19 nt, Artificial Sequence
  Description of Artificial Sequence: Synthetic oligonucleotide
uguagggauacgagcacaa

SEQ ID NO: 449032 - RNA, 19 nt, Artificial Sequence
  Description of Artificial Sequence: Synthetic oligonucleotide
uuacugugugccuaguuuu

SEQ ID NO: 449033 - RNA, 19 nt, Artificial Sequence
  Description of Artificial Sequence: Synthetic oligonucleotide
ccuuauuauacaagaagac

SEQ ID NO: 449034 - RNA, 19 nt, Artificial Sequence
  Description of Artificial Sequence: Synthetic oligonucleotide
acuaauuauguugggcucu

SEQ ID NO: 449035 - RNA, 19 nt, Artificial Sequence
  Description of Artificial Sequence: Synthetic oligonucleotide
auaccuauuuagcaaugau

SEQ ID NO: 449036 - RNA, 19 nt, Artificial Sequence
  Description of Artificial Sequence: Synthetic oligonucleotide
uguacacuugccaccgagu

SEQ ID NO: 449037 - RNA, 19 nt, Artificial Sequence
  Description of Artificial Sequence: Synthetic oligonucleotide
caaagcgugauuccauuuc

SEQ ID NO: 449038 - RNA, 19 nt, Artificial Sequence
  Description of Artificial Sequence: Synthetic oligonucleotide
gguaacucaacaacucggg

SEQ ID NO: 449039 - RNA, 19 nt, Artificial Sequence
  Description of Artificial Sequence: Synthetic oligonucleotide
ugauagcaauagauuuacc

SEQ ID NO: 449040 - RNA, 19 nt, Artificial Sequence
  Description of Artificial Sequence: Synthetic oligonucleotide
auuauacaagaagacuacu

SEQ ID NO: 449041 - RNA, 19 nt, Artificial Sequence
  Description of Artificial Sequence: Synthetic oligonucleotide
caacuaauuuaaccuuccc

SEQ ID NO: 449042 - RNA, 19 nt, Artificial Sequence
  Description of Artificial Sequence: Synthetic oligonucleotide
uggucucaacauuuuaaaa

SEQ ID NO: 449043 - RNA, 19 nt, Artificial Sequence
  Description of Artificial Sequence: Synthetic oligonucleotide
acuccguuaacagaaagua

SEQ ID NO: 449044 - RNA, 19 nt, Artificial Sequence
  Description of Artificial Sequence: Synthetic oligonucleotide
ucuauacuacuuuggucuc

SEQ ID NO: 449045 - RNA, 19 nt, Artificial Sequence
  Description of Artificial Sequence: Synthetic oligonucleotide
uaacggaacgcugaugcgu

SEQ ID NO: 449046 - RNA, 19 nt, Artificial Sequence
  Description of Artificial Sequence: Synthetic oligonucleotide
gcuaucaauaucaagcaca

SEQ ID NO: 449047 - RNA, 19 nt, Artificial Sequence
  Description of Artificial Sequence: Synthetic oligonucleotide
ucuugauucacugcuuaau

SEQ ID NO: 449048 - RNA, 19 nt, Artificial Sequence
  Description of Artificial Sequence: Synthetic oligonucleotide
cacuaauuauguugggcuc

SEQ ID NO: 449049 - RNA, 19 nt, Artificial Sequence
  Description of Artificial Sequence: Synthetic oligonucleotide
guaacggaacgcugaugcg

SEQ ID NO: 449050 - RNA, 19 nt, Artificial Sequence
  Description of Artificial Sequence: Synthetic oligonucleotide
ugacauaaauaagggauuu

SEQ ID NO: 449051 - RNA, 19 nt, Artificial Sequence
  Description of Artificial Sequence: Synthetic oligonucleotide
acaugaaaccaggaggcug

SEQ ID NO: 449052 - RNA, 19 nt, Artificial Sequence
  Description of Artificial Sequence: Synthetic oligonucleotide
cuugcccugugauguaggg

SEQ ID NO: 449053 - RNA, 19 nt, Artificial Sequence
  Description of Artificial Sequence: Synthetic oligonucleotide
caugauagcaauagauuua

SEQ ID NO: 449054 - RNA, 19 nt, Artificial Sequence
  Description of Artificial Sequence: Synthetic oligonucleotide
uauaagacuuagucauaau

SEQ ID NO: 449055 - RNA, 19 nt, Artificial Sequence
  Description of Artificial Sequence: Synthetic oligonucleotide
uauccgugagauauagauu

SEQ ID NO: 449056 - RNA, 19 nt, Artificial Sequence
  Description of Artificial Sequence: Synthetic oligonucleotide
ccguacaacuaauuuaacc

SEQ ID NO: 449057 - RNA, 19 nt, Artificial Sequence
  Description of Artificial Sequence: Synthetic oligonucleotide
aguaaacuuggcugaaauu

SEQ ID NO: 449058 - RNA, 19 nt, Artificial Sequence
  Description of Artificial Sequence: Synthetic oligonucleotide
ucuuccugucucgaauuag

SEQ ID NO: 449059 - RNA, 19 nt, Artificial Sequence
  Description of Artificial Sequence: Synthetic oligonucleotide
cugagacaagaccccaggg

SEQ ID NO: 449060 - RNA, 19 nt, Artificial Sequence
  Description of Artificial Sequence: Synthetic oligonucleotide
uauacuacuuuggucucaa

SEQ ID NO: 449061 - RNA, 19 nt, Artificial Sequence
  Description of Artificial Sequence: Synthetic oligonucleotide
auuguaacggaacgcugau

SEQ ID NO: 449062 - RNA, 19 nt, Artificial Sequence
  Description of Artificial Sequence: Synthetic oligonucleotide
agacugacagugcucacaa

SEQ ID NO: 449063 - RNA, 19 nt, Artificial Sequence
  Description of Artificial Sequence: Synthetic oligonucleotide
caauaguaccaagcaaagc

SEQ ID NO: 449064 - RNA, 19 nt, Artificial Sequence
  Description of Artificial Sequence: Synthetic oligonucleotide
augcguacugaggagcaac

SEQ ID NO: 449065 - RNA, 19 nt, Artificial Sequence
  Description of Artificial Sequence: Synthetic oligonucleotide
auuuaccacuagauuacag

SEQ ID NO: 449066 - RNA, 19 nt, Artificial Sequence
  Description of Artificial Sequence: Synthetic oligonucleotide
uauaugcaccaacuuuaau

SEQ ID NO: 449067 - RNA, 19 nt, Artificial Sequence
  Description of Artificial Sequence: Synthetic oligonucleotide
uugccucccaugauauuga

SEQ ID NO: 449068 - RNA, 19 nt, Artificial Sequence
  Description of Artificial Sequence: Synthetic oligonucleotide
guaauuguaacggaacgcu

SEQ ID NO: 449069 - RNA, 19 nt, Artificial Sequence
  Description of Artificial Sequence: Synthetic oligonucleotide
cugucucgaauuagaacug

SEQ ID NO: 449070 - RNA, 19 nt, Artificial Sequence
  Description of Artificial Sequence: Synthetic oligonucleotide
aacaugaaaccaggaggcu

SEQ ID NO: 449071 - RNA, 19 nt, Artificial Sequence
  Description of Artificial Sequence: Synthetic oligonucleotide
aaauaacaaugcugacuuu

SEQ ID NO: 449072 - RNA, 19 nt, Artificial Sequence
  Description of Artificial Sequence: Synthetic oligonucleotide
ucccaucgcuaucugaauc

SEQ ID NO: 449073 - RNA, 19 nt, Artificial Sequence
  Description of Artificial Sequence: Synthetic oligonucleotide
uugguguauaccguacaac

SEQ ID NO: 449074 - RNA, 19 nt, Artificial Sequence
  Description of Artificial Sequence: Synthetic oligonucleotide
agcacauuuuguaguggac

SEQ ID NO: 449075 - RNA, 19 nt, Artificial Sequence
  Description of Artificial Sequence: Synthetic oligonucleotide
agauauuuuguaagacuga

SEQ ID NO: 449076 - RNA, 19 nt, Artificial Sequence
  Description of Artificial Sequence: Synthetic oligonucleotide
ucacugcuuaauuauuauu

SEQ ID NO: 449077 - RNA, 19 nt, Artificial Sequence
  Description of Artificial Sequence: Synthetic oligonucleotide
ggguaacucaacaacucgg

SEQ ID NO: 449078 - RNA, 19 nt, Artificial Sequence
  Description of Artificial Sequence: Synthetic oligonucleotide
ugcguacugaggagcaacu

SEQ ID NO: 449079 - RNA, 19 nt, Artificial Sequence
  Description of Artificial Sequence: Synthetic oligonucleotide
auagauuggugaguuuugu

SEQ ID NO: 449080 - RNA, 19 nt, Artificial Sequence
  Description of Artificial Sequence: Synthetic oligonucleotide
uuguucagacucccaucgc

SEQ ID NO: 449081 - RNA, 19 nt, Artificial Sequence
  Description of Artificial Sequence: Synthetic oligonucleotide
uuccaaagcgugauuccau

SEQ ID NO: 449082 - RNA, 19 nt, Artificial Sequence
  Description of Artificial Sequence: Synthetic oligonucleotide
aaugauugcuucaguguuu

SEQ ID NO: 449083 - RNA, 19 nt, Artificial Sequence
  Description of Artificial Sequence: Synthetic oligonucleotide
cugaugcguacugaggagc

SEQ ID NO: 449084 - RNA, 19 nt, Artificial Sequence
  Description of Artificial Sequence: Synthetic oligonucleotide
aauuagaacugaagcugaa

SEQ ID NO: 449085 - RNA, 19 nt, Artificial Sequence
  Description of Artificial Sequence: Synthetic oligonucleotide
agggauacgagcacaacaa

SEQ ID NO: 449086 - RNA, 19 nt, Artificial Sequence
  Description of Artificial Sequence: Synthetic oligonucleotide
cuuccugucucgaauuaga

SEQ ID NO: 449087 - RNA, 19 nt, Artificial Sequence
  Description of Artificial Sequence: Synthetic oligonucleotide
uuccuauggucaauauuua

SEQ ID NO: 449088 - RNA, 19 nt, Artificial Sequence
  Description of Artificial Sequence: Synthetic oligonucleotide
cgcuaucugaaucauaaag

SEQ ID NO: 449089 - RNA, 19 nt, Artificial Sequence
  Description of Artificial Sequence: Synthetic oligonucleotide
cugaaauucugcaaucgcu

SEQ ID NO: 449090 - RNA, 19 nt, Artificial Sequence
  Description of Artificial Sequence: Synthetic oligonucleotide
acacacuuccauucuuccu

SEQ ID NO: 449091 - RNA, 19 nt, Artificial Sequence
  Description of Artificial Sequence: Synthetic oligonucleotide
agacuuagucauaaucaca

SEQ ID NO: 449092 - RNA, 19 nt, Artificial Sequence
  Description of Artificial Sequence: Synthetic oligonucleotide
ugucugcguuugcugaucu

SEQ ID NO: 449093 - RNA, 19 nt, Artificial Sequence
  Description of Artificial Sequence: Synthetic oligonucleotide
ugucucgaauuagaacuga

SEQ ID NO: 449094 - RNA, 19 nt, Artificial Sequence
  Description of Artificial Sequence: Synthetic oligonucleotide
ccuauuuagcaaugauugc

SEQ ID NO: 449095 - RNA, 19 nt, Artificial Sequence
  Description of Artificial Sequence: Synthetic oligonucleotide
ucaacaacucggggauggg

SEQ ID NO: 449096 - RNA, 19 nt, Artificial Sequence
  Description of Artificial Sequence: Synthetic oligonucleotide
uguggcggcaccucuccac

SEQ ID NO: 449097 - RNA, 19 nt, Artificial Sequence
  Description of Artificial Sequence: Synthetic oligonucleotide
ccugucucgaauuagaacu

SEQ ID NO: 449098 - RNA, 19 nt, Artificial Sequence
  Description of Artificial Sequence: Synthetic oligonucleotide
auacgagcacaacaauaau

SEQ ID NO: 449099 - RNA, 19 nt, Artificial Sequence
  Description of Artificial Sequence: Synthetic oligonucleotide
gcgugauuccauuucuucc

SEQ ID NO: 449100 - RNA, 19 nt, Artificial Sequence
  Description of Artificial Sequence: Synthetic oligonucleotide
gacuuaagaagcugccugu

SEQ ID NO: 449101 - RNA, 19 nt, Artificial Sequence
  Description of Artificial Sequence: Synthetic oligonucleotide
uuaaaugauuaggucuguu

SEQ ID NO: 449102 - RNA, 19 nt, Artificial Sequence
  Description of Artificial Sequence: Synthetic oligonucleotide
auuuacugugugccuaguu

SEQ ID NO: 449103 - RNA, 19 nt, Artificial Sequence
  Description of Artificial Sequence: Synthetic oligonucleotide
uacugugugccuaguuuua

SEQ ID NO: 449104 - RNA, 19 nt, Artificial Sequence
  Description of Artificial Sequence: Synthetic oligonucleotide
aaugaaaagcugggacaaa

SEQ ID NO: 449105 - RNA, 19 nt, Artificial Sequence
  Description of Artificial Sequence: Synthetic oligonucleotide
uaccucuaauaaucuuaca

SEQ ID NO: 449106 - RNA, 19 nt, Artificial Sequence
  Description of Artificial Sequence: Synthetic oligonucleotide
uccaaagcgugauuccauu

SEQ ID NO: 449107 - RNA, 19 nt, Artificial Sequence
  Description of Artificial Sequence: Synthetic oligonucleotide
uggcugaaauucugcaauc

SEQ ID NO: 449108 - RNA, 19 nt, Artificial Sequence
  Description of Artificial Sequence: Synthetic oligonucleotide
caaucgcugaaacaugaaa

SEQ ID NO: 449109 - RNA, 19 nt, Artificial Sequence
  Description of Artificial Sequence: Synthetic oligonucleotide
uuaggucuguugucugcgu

SEQ ID NO: 449110 - RNA, 19 nt, Artificial Sequence
  Description of Artificial Sequence: Synthetic oligonucleotide
agcaauagauuuaccacua

SEQ ID NO: 449111 - RNA, 19 nt, Artificial Sequence
  Description of Artificial Sequence: Synthetic oligonucleotide
uaguagcuaggcugagaca

SEQ ID NO: 449112 - RNA, 19 nt, Artificial Sequence
  Description of Artificial Sequence: Synthetic oligonucleotide
auucacugcuuaauuauua

SEQ ID NO: 449113 - RNA, 19 nt, Artificial Sequence
  Description of Artificial Sequence: Synthetic oligonucleotide
augaauagccuaacaaauu

SEQ ID NO: 449114 - RNA, 19 nt, Artificial Sequence
  Description of Artificial Sequence: Synthetic oligonucleotide
auaguaccaagcaaagcua

SEQ ID NO: 449115 - RNA, 19 nt, Artificial Sequence
  Description of Artificial Sequence: Synthetic oligonucleotide
cucaaccuuuuauaaaugu

SEQ ID NO: 449116 - RNA, 19 nt, Artificial Sequence
  Description of Artificial Sequence: Synthetic oligonucleotide
gcuguaauuguaacggaac

SEQ ID NO: 449117 - RNA, 19 nt, Artificial Sequence
  Description of Artificial Sequence: Synthetic oligonucleotide
auaagggauuuaaucagua

SEQ ID NO: 449118 - RNA, 19 nt, Artificial Sequence
  Description of Artificial Sequence: Synthetic oligonucleotide
acucccaucgcuaucugaa

SEQ ID NO: 449119 - RNA, 19 nt, Artificial Sequence
  Description of Artificial Sequence: Synthetic oligonucleotide
aguaccaagcaaagcuaug

SEQ ID NO: 449120 - RNA, 19 nt, Artificial Sequence
  Description of Artificial Sequence: Synthetic oligonucleotide
cguacaacuaauuuaaccu

SEQ ID NO: 449121 - RNA, 19 nt, Artificial Sequence
  Description of Artificial Sequence: Synthetic oligonucleotide
auuggugaguuuuguucuu

SEQ ID NO: 449122 - RNA, 19 nt, Artificial Sequence
  Description of Artificial Sequence: Synthetic oligonucleotide
gugugccuaguuuuauuca

SEQ ID NO: 449123 - RNA, 19 nt, Artificial Sequence
  Description of Artificial Sequence: Synthetic oligonucleotide
uccugcauuucaacccauc

SEQ ID NO: 449124 - RNA, 19 nt, Artificial Sequence
  Description of Artificial Sequence: Synthetic oligonucleotide
auuucuaaucaugcucaau

SEQ ID NO: 449125 - RNA, 19 nt, Artificial Sequence
  Description of Artificial Sequence: Synthetic oligonucleotide
uggaauuauccgugagaua

SEQ ID NO: 449126 - RNA, 19 nt, Artificial Sequence
  Description of Artificial Sequence: Synthetic oligonucleotide
gaugggagugcccuucacu

SEQ ID NO: 449127 - RNA, 19 nt, Artificial Sequence
  Description of Artificial Sequence: Synthetic oligonucleotide
guacaacuaauuuaaccuu

SEQ ID NO: 449128 - RNA, 19 nt, Artificial Sequence
  Description of Artificial Sequence: Synthetic oligonucleotide
guacacacuuccauucuuc

SEQ ID NO: 449129 - RNA, 19 nt, Artificial Sequence
  Description of Artificial Sequence: Synthetic oligonucleotide
uuguaacggaacgcugaug

SEQ ID NO: 449130 - RNA, 19 nt, Artificial Sequence
  Description of Artificial Sequence: Synthetic oligonucleotide
gcaauagauuuaccacuag

SEQ ID NO: 449131 - RNA, 19 nt, Artificial Sequence
  Description of Artificial Sequence: Synthetic oligonucleotide
cauacucuucuauacuacu

SEQ ID NO: 449132 - RNA, 19 nt, Artificial Sequence
  Description of Artificial Sequence: Synthetic oligonucleotide
cauuuuguaguggacuaaa

SEQ ID NO: 449133 - RNA, 19 nt, Artificial Sequence
  Description of Artificial Sequence: Synthetic oligonucleotide
aacggaacgcugaugcgua

SEQ ID NO: 449134 - RNA, 19 nt, Artificial Sequence
  Description of Artificial Sequence: Synthetic oligonucleotide
accguacaacuaauuuaac

SEQ ID NO: 449135 - RNA, 19 nt, Artificial Sequence
  Description of Artificial Sequence: Synthetic oligonucleotide
gcugaugcguacugaggag

SEQ ID NO: 449136 - RNA, 19 nt, Artificial Sequence
  Description of Artificial Sequence: Synthetic oligonucleotide
auugcagaacucacucuga

SEQ ID NO: 449137 - RNA, 19 nt, Artificial Sequence
  Description of Artificial Sequence: Synthetic oligonucleotide
aguggacuaaagacauuca

SEQ ID NO: 449138 - RNA, 19 nt, Artificial Sequence
  Description of Artificial Sequence: Synthetic oligonucleotide
guaccaagcaaagcuaugu

SEQ ID NO: 449139 - RNA, 19 nt, Artificial Sequence
  Description of Artificial Sequence: Synthetic oligonucleotide
cgcugaaacaugaaaccag

SEQ ID NO: 449140 - RNA, 19 nt, Artificial Sequence
  Description of Artificial Sequence: Synthetic oligonucleotide
auacucuucuauacuacuu

SEQ ID NO: 449141 - RNA, 19 nt, Artificial Sequence
  Description of Artificial Sequence: Synthetic oligonucleotide
ccgaguuuuccuaugguca

SEQ ID NO: 449142 - RNA, 19 nt, Artificial Sequence
  Description of Artificial Sequence: Synthetic oligonucleotide
acaucgauagcugccuuuu

SEQ ID NO: 449143 - RNA, 19 nt, Artificial Sequence
  Description of Artificial Sequence: Synthetic oligonucleotide
cgugagauauagauuggug

SEQ ID NO: 449144 - RNA, 19 nt, Artificial Sequence
  Description of Artificial Sequence: Synthetic oligonucleotide
ucgcuaucugaaucauaaa

SEQ ID NO: 449145 - RNA, 19 nt, Artificial Sequence
  Description of Artificial Sequence: Synthetic oligonucleotide
ccaccuggaauuauccgug

SEQ ID NO: 449146 - RNA, 19 nt, Artificial Sequence
  Description of Artificial Sequence: Synthetic oligonucleotide
guagcuaggcugagacaag

SEQ ID NO: 449147 - RNA, 19 nt, Artificial Sequence
  Description of Artificial Sequence: Synthetic oligonucleotide
cugugauguagggauacga

SEQ ID NO: 449148 - RNA, 19 nt, Artificial Sequence
  Description of Artificial Sequence: Synthetic oligonucleotide
aucugugacugaaaaugaa

SEQ ID NO: 449149 - RNA, 19 nt, Artificial Sequence
  Description of Artificial Sequence: Synthetic oligonucleotide
cuggaauuauccgugagau

SEQ ID NO: 449150 - RNA, 19 nt, Artificial Sequence
  Description of Artificial Sequence: Synthetic oligonucleotide
cuugauucacugcuuaauu

SEQ ID NO: 449151 - RNA, 19 nt, Artificial Sequence
  Description of Artificial Sequence: Synthetic oligonucleotide
gacucccaucgcuaucuga

SEQ ID NO: 449152 - RNA, 19 nt, Artificial Sequence
  Description of Artificial Sequence: Synthetic oligonucleotide
caccuauuauauauuuacu

SEQ ID NO: 449153 - RNA, 19 nt, Artificial Sequence
  Description of Artificial Sequence: Synthetic oligonucleotide
agcuauguauuuggcuccu

SEQ ID NO: 449154 - RNA, 19 nt, Artificial Sequence
  Description of Artificial Sequence: Synthetic oligonucleotide
gagacuuaagaagcugccu

SEQ ID NO: 449155 - RNA, 19 nt, Artificial Sequence
  Description of Artificial Sequence: Synthetic oligonucleotide
gggauuuaaucaguaaugu

SEQ ID NO: 449156 - RNA, 19 nt, Artificial Sequence
  Description of Artificial Sequence: Synthetic oligonucleotide
caccucaaccuuuuauaaa

SEQ ID NO: 449157 - RNA, 19 nt, Artificial Sequence
  Description of Artificial Sequence: Synthetic oligonucleotide
caacacucacuccguuaac

SEQ ID NO: 449158 - RNA, 19 nt, Artificial Sequence
  Description of Artificial Sequence: Synthetic oligonucleotide
gcucaauaguaccaagcaa

SEQ ID NO: 449159 - RNA, 19 nt, Artificial Sequence
  Description of Artificial Sequence: Synthetic oligonucleotide
cacuccguuaacagaaagu

SEQ ID NO: 449160 - RNA, 19 nt, Artificial Sequence
  Description of Artificial Sequence: Synthetic oligonucleotide
auuauccgugagauauaga

SEQ ID NO: 449161 - RNA, 19 nt, Artificial Sequence
  Description of Artificial Sequence: Synthetic oligonucleotide
cucuugauucacugcuuaa

SEQ ID NO: 449162 - RNA, 19 nt, Artificial Sequence
  Description of Artificial Sequence: Synthetic oligonucleotide
gaauuauccgugagauaua

SEQ ID NO: 449163 - RNA, 19 nt, Artificial Sequence
  Description of Artificial Sequence: Synthetic oligonucleotide
cuauacuacuuuggucuca

SEQ ID NO: 449164 - RNA, 19 nt, Artificial Sequence
  Description of Artificial Sequence: Synthetic oligonucleotide
gauauagauuggugaguuu

SEQ ID NO: 449165 - RNA, 19 nt, Artificial Sequence
  Description of Artificial Sequence: Synthetic oligonucleotide
caaacaugcaaagccgugu

SEQ ID NO: 449166 - RNA, 19 nt, Artificial Sequence
  Description of Artificial Sequence: Synthetic oligonucleotide
uaauuauguugggcucuuc

SEQ ID NO: 449167 - RNA, 19 nt, Artificial Sequence
  Description of Artificial Sequence: Synthetic oligonucleotide
guagggauacgagcacaac

SEQ ID NO: 449168 - RNA, 19 nt, Artificial Sequence
  Description of Artificial Sequence: Synthetic oligonucleotide
ggauacgagcacaacaaua

SEQ ID NO: 449169 - RNA, 19 nt, Artificial Sequence
  Description of Artificial Sequence: Synthetic oligonucleotide
gacuuuugguguauaccgu

SEQ ID NO: 449170 - RNA, 19 nt, Artificial Sequence
  Description of Artificial Sequence: Synthetic oligonucleotide
gugccuaguuuuauucaca

SEQ ID NO: 449171 - RNA, 19 nt, Artificial Sequence
  Description of Artificial Sequence: Synthetic oligonucleotide
cacucauugugagacuuaa

SEQ ID NO: 449172 - RNA, 19 nt, Artificial Sequence
  Description of Artificial Sequence: Synthetic oligonucleotide
aggguguacuugcccugug

SEQ ID NO: 449173 - RNA, 19 nt, Artificial Sequence
  Description of Artificial Sequence: Synthetic oligonucleotide
ccuaacaaauuugaaaagu

SEQ ID NO: 449174 - RNA, 19 nt, Artificial Sequence
  Description of Artificial Sequence: Synthetic oligonucleotide
guucuauaugcaccaacuu

SEQ ID NO: 449175 - RNA, 19 nt, Artificial Sequence
  Description of Artificial Sequence: Synthetic oligonucleotide
guacacuugccaccgaguu

SEQ ID NO: 449176 - RNA, 19 nt, Artificial Sequence
  Description of Artificial Sequence: Synthetic oligonucleotide
ccaugauagcaauagauuu

SEQ ID NO: 449177 - RNA, 19 nt, Artificial Sequence
  Description of Artificial Sequence: Synthetic oligonucleotide
ggauuuaaucaguaauguu

SEQ ID NO: 449178 - RNA, 19 nt, Artificial Sequence
  Description of Artificial Sequence: Synthetic oligonucleotide
ggcuguaauuguaacggaa

SEQ ID NO: 449179 - RNA, 19 nt, Artificial Sequence
  Description of Artificial Sequence: Synthetic oligonucleotide
ucuccucguuugagacccc

SEQ ID NO: 449180 - RNA, 19 nt, Artificial Sequence
  Description of Artificial Sequence: Synthetic oligonucleotide
gacaagaccccagggugua

SEQ ID NO: 449181 - RNA, 19 nt, Artificial Sequence
  Description of Artificial Sequence: Synthetic oligonucleotide
acacaucgauagcugccuu

SEQ ID NO: 449182 - RNA, 19 nt, Artificial Sequence
  Description of Artificial Sequence: Synthetic oligonucleotide
uucaacccaucaguuucuu

SEQ ID NO: 449183 - RNA, 19 nt, Artificial Sequence
  Description of Artificial Sequence: Synthetic oligonucleotide
gguguauaccguacaacua

SEQ ID NO: 449184 - RNA, 19 nt, Artificial Sequence
  Description of Artificial Sequence: Synthetic oligonucleotide
caacaacucggggauggga

SEQ ID NO: 449185 - RNA, 19 nt, Artificial Sequence
  Description of Artificial Sequence: Synthetic oligonucleotide
aggcauggaagaacugaaa

SEQ ID NO: 449186 - RNA, 19 nt, Artificial Sequence
  Description of Artificial Sequence: Synthetic oligonucleotide
augcugacuuuuacucuga

SEQ ID NO: 449187 - RNA, 19 nt, Artificial Sequence
  Description of Artificial Sequence: Synthetic oligonucleotide
cuaccucaucucuaggcau

SEQ ID NO: 449188 - RNA, 19 nt, Artificial Sequence
  Description of Artificial Sequence: Synthetic oligonucleotide
gccaccgaguuuuccuaug

SEQ ID NO: 449189 - RNA, 19 nt, Artificial Sequence
  Description of Artificial Sequence: Synthetic oligonucleotide
cacacaucgauagcugccu

SEQ ID NO: 449190 - RNA, 19 nt, Artificial Sequence
  Description of Artificial Sequence: Synthetic oligonucleotide
gguguacuugcccugugau

SEQ ID NO: 449191 - RNA, 19 nt, Artificial Sequence
  Description of Artificial Sequence: Synthetic oligonucleotide
caucgcuaucugaaucaua

SEQ ID NO: 449192 - RNA, 19 nt, Artificial Sequence
  Description of Artificial Sequence: Synthetic oligonucleotide
agccguguacacacuucca

SEQ ID NO: 449193 - RNA, 19 nt, Artificial Sequence
  Description of Artificial Sequence: Synthetic oligonucleotide
ccacuagauuacagauaag

SEQ ID NO: 449194 - RNA, 19 nt, Artificial Sequence
  Description of Artificial Sequence: Synthetic oligonucleotide
ccaugcacaauccaguguu

SEQ ID NO: 449195 - RNA, 19 nt, Artificial Sequence
  Description of Artificial Sequence: Synthetic oligonucleotide
uggcggcaccucuccacuc

SEQ ID NO: 449196 - RNA, 19 nt, Artificial Sequence
  Description of Artificial Sequence: Synthetic oligonucleotide
guacuugcccugugaugua

SEQ ID NO: 449197 - RNA, 19 nt, Artificial Sequence
  Description of Artificial Sequence: Synthetic oligonucleotide
ccguuaacagaaaguagcu

SEQ ID NO: 449198 - RNA, 19 nt, Artificial Sequence
  Description of Artificial Sequence: Synthetic oligonucleotide
ggaugggagugcccuucac

SEQ ID NO: 449199 - RNA, 19 nt, Artificial Sequence
  Description of Artificial Sequence: Synthetic oligonucleotide
guggcggcaccucuccacu

SEQ ID NO: 449200 - RNA, 19 nt, Artificial Sequence
  Description of Artificial Sequence: Synthetic oligonucleotide
cuaauuauguugggcucuu

SEQ ID NO: 449201 - RNA, 19 nt, Artificial Sequence
  Description of Artificial Sequence: Synthetic oligonucleotide
caucgauagcugccuuuua

SEQ ID NO: 449202 - RNA, 19 nt, Artificial Sequence
  Description of Artificial Sequence: Synthetic oligonucleotide
cacaucgauagcugccuuu

SEQ ID NO: 449203 - RNA, 19 nt, Artificial Sequence
  Description of Artificial Sequence: Synthetic oligonucleotide
gccguguacacacuuccau

SEQ ID NO: 449204 - RNA, 19 nt, Artificial Sequence
  Description of Artificial Sequence: Synthetic oligonucleotide
gggaugggagugcccuuca

SEQ ID NO: 449205 - RNA, 19 nt, Artificial Sequence
  Description of Artificial Sequence: Synthetic oligonucleotide
cugcguuugcugaucucau

SEQ ID NO: 449206 - RNA, 19 nt, Artificial Sequence
  Description of Artificial Sequence: Synthetic oligonucleotide
cugugugccuaguuuuauu

SEQ ID NO: 449207 - RNA, 19 nt, Artificial Sequence
  Description of Artificial Sequence: Synthetic oligonucleotide
cucccaucgcuaucugaau

SEQ ID NO: 449208 - RNA, 19 nt, Artificial Sequence
  Description of Artificial Sequence: Synthetic oligonucleotide
ggagugcccuucacuggca

SEQ ID NO: 449209 - RNA, 19 nt, Artificial Sequence
  Description of Artificial Sequence: Synthetic oligonucleotide
cuuugccucccaugauauu

SEQ ID NO: 449210 - RNA, 19 nt, Artificial Sequence
  Description of Artificial Sequence: Synthetic oligonucleotide
guaguggacuaaagacauu

SEQ ID NO: 449211 - RNA, 19 nt, Artificial Sequence
  Description of Artificial Sequence: Synthetic oligonucleotide
ccaaagcgugauuccauuu

SEQ ID NO: 449212 - RNA, 19 nt, Artificial Sequence
  Description of Artificial Sequence: Synthetic oligonucleotide
ccucacuucagggcugcua

SEQ ID NO: 449213 - RNA, 19 nt, Artificial Sequence
  Description of Artificial Sequence: Synthetic oligonucleotide
cccacucauugugagacuu

SEQ ID NO: 449214 - RNA, 19 nt, Artificial Sequence
  Description of Artificial Sequence: Synthetic oligonucleotide
aauauagauauccagaguc

SEQ ID NO: 449215 - RNA, 19 nt, Artificial Sequence
  Description of Artificial Sequence: Synthetic oligonucleotide
uaaugaaugacuaagaccc

SEQ ID NO: 449216 - RNA, 19 nt, Artificial Sequence
  Description of Artificial Sequence: Synthetic oligonucleotide
aaaucauacauacaguagg

SEQ ID NO: 449217 - RNA, 19 nt, Artificial Sequence
  Description of Artificial Sequence: Synthetic oligonucleotide
ucuaauuuaaaucacacuc

SEQ ID NO: 449218 - RNA, 19 nt, Artificial Sequence
  Description of Artificial Sequence: Synthetic oligonucleotide
auuuugaugcauuuggucc

SEQ ID NO: 449219 - RNA, 19 nt, Artificial Sequence
  Description of Artificial Sequence: Synthetic oligonucleotide
auuaacugggucuucaugc

SEQ ID NO: 449220 - RNA, 19 nt, Artificial Sequence
  Description of Artificial Sequence: Synthetic oligonucleotide
uuuuaaaucugauuaaaag

SEQ ID NO: 449221 - RNA, 19 nt, Artificial Sequence
  Description of Artificial Sequence: Synthetic oligonucleotide
aaauauuacuuugagacuc

SEQ ID NO: 449222 - RNA, 19 nt, Artificial Sequence
  Description of Artificial Sequence: Synthetic oligonucleotide
uuagaaugcguuauaaagg

SEQ ID NO: 449223 - RNA, 19 nt, Artificial Sequence
  Description of Artificial Sequence: Synthetic oligonucleotide
gauagcacaacauagaaga

SEQ ID NO: 449224 - RNA, 19 nt, Artificial Sequence
  Description of Artificial Sequence: Synthetic oligonucleotide
uuccauaaaacuuaaagca

SEQ ID NO: 449225 - RNA, 19 nt, Artificial Sequence
  Description of Artificial Sequence: Synthetic oligonucleotide
auuaaaagccaucggaagc

SEQ ID NO: 449226 - RNA, 19 nt, Artificial Sequence
  Description of Artificial Sequence: Synthetic oligonucleotide
auuacuuugagacucauga

SEQ ID NO: 449227 - RNA, 19 nt, Artificial Sequence
  Description of Artificial Sequence: Synthetic oligonucleotide
cuuagaaugcguuauaaag

SEQ ID NO: 449228 - RNA, 19 nt, Artificial Sequence
  Description of Artificial Sequence: Synthetic oligonucleotide
auauagauaggauugaugu

SEQ ID NO: 449229 - RNA, 19 nt, Artificial Sequence
  Description of Artificial Sequence: Synthetic oligonucleotide
uaguauaucuuccacauca

SEQ ID NO: 449230 - RNA, 19 nt, Artificial Sequence
  Description of Artificial Sequence: Synthetic oligonucleotide
uuagguguaauuuaacuug

SEQ ID NO: 449231 - RNA, 19 nt, Artificial Sequence
  Description of Artificial Sequence: Synthetic oligonucleotide
auaguacuuauauauaguc

SEQ ID NO: 449232 - RNA, 19 nt, Artificial Sequence
  Description of Artificial Sequence: Synthetic oligonucleotide
uuaaugaaugacuaagacc

SEQ ID NO: 449233 - RNA, 19 nt, Artificial Sequence
  Description of Artificial Sequence: Synthetic oligonucleotide
uguaguauuuauccaaucc

SEQ ID NO: 449234 - RNA, 19 nt, Artificial Sequence
  Description of Artificial Sequence: Synthetic oligonucleotide
ugauuuauaccagauauag

SEQ ID NO: 449235 - RNA, 19 nt, Artificial Sequence
  Description of Artificial Sequence: Synthetic oligonucleotide
ucauaaauaguacuuauau

SEQ ID NO: 449236 - RNA, 19 nt, Artificial Sequence
  Description of Artificial Sequence: Synthetic oligonucleotide
aaucucucaaccuagaguu

SEQ ID NO: 449237 - RNA, 19 nt, Artificial Sequence
  Description of Artificial Sequence: Synthetic oligonucleotide
uuaaucugcaggcauuugg

SEQ ID NO: 449238 - RNA, 19 nt, Artificial Sequence
  Description of Artificial Sequence: Synthetic oligonucleotide
auguggaacaaguaguacc

SEQ ID NO: 449239 - RNA, 19 nt, Artificial Sequence
  Description of Artificial Sequence: Synthetic oligonucleotide
aaugauauguacaagaguu

SEQ ID NO: 449240 - RNA, 19 nt, Artificial Sequence
  Description of Artificial Sequence: Synthetic oligonucleotide
uaguucuuuauccacacag

SEQ ID NO: 449241 - RNA, 19 nt, Artificial Sequence
  Description of Artificial Sequence: Synthetic oligonucleotide
ucgaagaauaucuagaaaa

SEQ ID NO: 449242 - RNA, 19 nt, Artificial Sequence
  Description of Artificial Sequence: Synthetic oligonucleotide
ucugauuaaccaauuaaug

SEQ ID NO: 449243 - RNA, 19 nt, Artificial Sequence
  Description of Artificial Sequence: Synthetic oligonucleotide
uuucguugaagccauaaug

SEQ ID NO: 449244 - RNA, 19 nt, Artificial Sequence
  Description of Artificial Sequence: Synthetic oligonucleotide
aggaauguuauugaaaagg

SEQ ID NO: 449245 - RNA, 19 nt, Artificial Sequence
  Description of Artificial Sequence: Synthetic oligonucleotide
uucguugaagccauaaugc

SEQ ID NO: 449246 - RNA, 19 nt, Artificial Sequence
  Description of Artificial Sequence: Synthetic oligonucleotide
ugaaucuggaguuguaacg

SEQ ID NO: 449247 - RNA, 19 nt, Artificial Sequence
  Description of Artificial Sequence: Synthetic oligonucleotide
agagucaacacucuugguc

SEQ ID NO: 449248 - RNA, 19 nt, Artificial Sequence
  Description of Artificial Sequence: Synthetic oligonucleotide
aaaugucuaccuuucaugu

SEQ ID NO: 449249 - RNA, 19 nt, Artificial Sequence
  Description of Artificial Sequence: Synthetic oligonucleotide
uccuuugaacaacaggucg

SEQ ID NO: 449250 - RNA, 19 nt, Artificial Sequence
  Description of Artificial Sequence: Synthetic oligonucleotide
auagauaggauugauguag

SEQ ID NO: 449251 - RNA, 19 nt, Artificial Sequence
  Description of Artificial Sequence: Synthetic oligonucleotide
aauuuaaagaucugauuaa

SEQ ID NO: 449252 - RNA, 19 nt, Artificial Sequence
  Description of Artificial Sequence: Synthetic oligonucleotide
uagaaugcguuauaaaggc

SEQ ID NO: 449253 - RNA, 19 nt, Artificial Sequence
  Description of Artificial Sequence: Synthetic oligonucleotide
uuuucgaucagacuucugu

SEQ ID NO: 449254 - RNA, 19 nt, Artificial Sequence
  Description of Artificial Sequence: Synthetic oligonucleotide
ucuuuauccacacaguaaa

SEQ ID NO: 449255 - RNA, 19 nt, Artificial Sequence
  Description of Artificial Sequence: Synthetic oligonucleotide
uccauagccaacuaaggag

SEQ ID NO: 449256 - RNA, 19 nt, Artificial Sequence
  Description of Artificial Sequence: Synthetic oligonucleotide
ucauacauacaguagguca

SEQ ID NO: 449257 - RNA, 19 nt, Artificial Sequence
  Description of Artificial Sequence: Synthetic oligonucleotide
gauuaaaagccaucggaag

SEQ ID NO: 449258 - RNA, 19 nt, Artificial Sequence
  Description of Artificial Sequence: Synthetic oligonucleotide
uuaagcugaauauuguugu

SEQ ID NO: 449259 - RNA, 19 nt, Artificial Sequence
  Description of Artificial Sequence: Synthetic oligonucleotide
aacauaagacaaaugauca

SEQ ID NO: 449260 - RNA, 19 nt, Artificial Sequence
  Description of Artificial Sequence: Synthetic oligonucleotide
uccaauaaucucaguaagg

SEQ ID NO: 449261 - RNA, 19 nt, Artificial Sequence
  Description of Artificial Sequence: Synthetic oligonucleotide
cauguauuaacuuuguuga

SEQ ID NO: 449262 - RNA, 19 nt, Artificial Sequence
  Description of Artificial Sequence: Synthetic oligonucleotide
aauugcaacaaaguaucuc

SEQ ID NO: 449263 - RNA, 19 nt, Artificial Sequence
  Description of Artificial Sequence: Synthetic oligonucleotide
uuuuagguguaauuuaacu

SEQ ID NO: 449264 - RNA, 19 nt, Artificial Sequence
  Description of Artificial Sequence: Synthetic oligonucleotide
uaaugcaagaacaucagua

SEQ ID NO: 449265 - RNA, 19 nt, Artificial Sequence
  Description of Artificial Sequence: Synthetic oligonucleotide
uaaaugucuaccuuucaug

SEQ ID NO: 449266 - RNA, 19 nt, Artificial Sequence
  Description of Artificial Sequence: Synthetic oligonucleotide
aaugucuaauuuaaaucac

SEQ ID NO: 449267 - RNA, 19 nt, Artificial Sequence
  Description of Artificial Sequence: Synthetic oligonucleotide
aaaucaauagucaaguuua

SEQ ID NO: 449268 - RNA, 19 nt, Artificial Sequence
  Description of Artificial Sequence: Synthetic oligonucleotide
uguggaacaaguaguacca

SEQ ID NO: 449269 - RNA, 19 nt, Artificial Sequence
  Description of Artificial Sequence: Synthetic oligonucleotide
uauuguuguaaacaauaga

SEQ ID NO: 449270 - RNA, 19 nt, Artificial Sequence
  Description of Artificial Sequence: Synthetic oligonucleotide
aagugcguaauucccaaag

SEQ ID NO: 449271 - RNA, 19 nt, Artificial Sequence
  Description of Artificial Sequence: Synthetic oligonucleotide
ugucuaauuuaaaucacac

SEQ ID NO: 449272 - RNA, 19 nt, Artificial Sequence
  Description of Artificial Sequence: Synthetic oligonucleotide
aguacuuauauauagucua

SEQ ID NO: 449273 - RNA, 19 nt, Artificial Sequence
  Description of Artificial Sequence: Synthetic oligonucleotide
aacuggauuaacugggucu

SEQ ID NO: 449274 - RNA, 19 nt, Artificial Sequence
  Description of Artificial Sequence: Synthetic oligonucleotide
auaucuagaaaacuaaauu

SEQ ID NO: 449275 - RNA, 19 nt, Artificial Sequence
  Description of Artificial Sequence: Synthetic oligonucleotide
acuaugcuuucuuauacuc

SEQ ID NO: 449276 - RNA, 19 nt, Artificial Sequence
  Description of Artificial Sequence: Synthetic oligonucleotide
aguaguucuuuauccacac

SEQ ID NO: 449277 - RNA, 19 nt, Artificial Sequence
  Description of Artificial Sequence: Synthetic oligonucleotide
uguacaagaguuuaacaaa

SEQ ID NO: 449278 - RNA, 19 nt, Artificial Sequence
  Description of Artificial Sequence: Synthetic oligonucleotide
aagaucuuauauugaagca

SEQ ID NO: 449279 - RNA, 19 nt, Artificial Sequence
  Description of Artificial Sequence: Synthetic oligonucleotide
cuuaagcugaauauuguug

SEQ ID NO: 449280 - RNA, 19 nt, Artificial Sequence
  Description of Artificial Sequence: Synthetic oligonucleotide
uaguauuuauccaauccca

SEQ ID NO: 449281 - RNA, 19 nt, Artificial Sequence
  Description of Artificial Sequence: Synthetic oligonucleotide
cuuaaugaaugacuaagac

SEQ ID NO: 449282 - RNA, 19 nt, Artificial Sequence
  Description of Artificial Sequence: Synthetic oligonucleotide
cauugugccaucuguaagg

SEQ ID NO: 449283 - RNA, 19 nt, Artificial Sequence
  Description of Artificial Sequence: Synthetic oligonucleotide
gagucaacacucuuggucc

SEQ ID NO: 449284 - RNA, 19 nt, Artificial Sequence
  Description of Artificial Sequence: Synthetic oligonucleotide
ucuuaaugaaugacuaaga

SEQ ID NO: 449285 - RNA, 19 nt, Artificial Sequence
  Description of Artificial Sequence: Synthetic oligonucleotide
aucccaaggaaaauaaccc

SEQ ID NO: 449286 - RNA, 19 nt, Artificial Sequence
  Description of Artificial Sequence: Synthetic oligonucleotide
ugaaucagcuuauauaaau

SEQ ID NO: 449287 - RNA, 19 nt, Artificial Sequence
  Description of Artificial Sequence: Synthetic oligonucleotide
aguuauguuaauuccacau

SEQ ID NO: 449288 - RNA, 19 nt, Artificial Sequence
  Description of Artificial Sequence: Synthetic oligonucleotide
ugaaaacacuauuucagcu

SEQ ID NO: 449289 - RNA, 19 nt, Artificial Sequence
  Description of Artificial Sequence: Synthetic oligonucleotide
uauaccagauauagauagg

SEQ ID NO: 449290 - RNA, 19 nt, Artificial Sequence
  Description of Artificial Sequence: Synthetic oligonucleotide
aaugcacuucacuauaaaa

SEQ ID NO: 449291 - RNA, 19 nt, Artificial Sequence
  Description of Artificial Sequence: Synthetic oligonucleotide
acucagccagaauaaauac

SEQ ID NO: 449292 - RNA, 19 nt, Artificial Sequence
  Description of Artificial Sequence: Synthetic oligonucleotide
uaaucucucaaccuagagu

SEQ ID NO: 449293 - RNA, 19 nt, Artificial Sequence
  Description of Artificial Sequence: Synthetic oligonucleotide
auacuaaggaauguuauug

SEQ ID NO: 449294 - RNA, 19 nt, Artificial Sequence
  Description of Artificial Sequence: Synthetic oligonucleotide
auggacaauucauugaugu

SEQ ID NO: 449295 - RNA, 19 nt, Artificial Sequence
  Description of Artificial Sequence: Synthetic oligonucleotide
ugcuuaacuggauuaacug

SEQ ID NO: 449296 - RNA, 19 nt, Artificial Sequence
  Description of Artificial Sequence: Synthetic oligonucleotide
uuuagguguaauuuaacuu

SEQ ID NO: 449297 - RNA, 19 nt, Artificial Sequence
  Description of Artificial Sequence: Synthetic oligonucleotide
agugcguaauucccaaagc

SEQ ID NO: 449298 - RNA, 19 nt, Artificial Sequence
  Description of Artificial Sequence: Synthetic oligonucleotide
aauacuaaggaauguuauu

SEQ ID NO: 449299 - RNA, 19 nt, Artificial Sequence
  Description of Artificial Sequence: Synthetic oligonucleotide
aucugauuaaaagccaucg

SEQ ID NO: 449300 - RNA, 19 nt, Artificial Sequence
  Description of Artificial Sequence: Synthetic oligonucleotide
aaugcauuauuaggaaaag

SEQ ID NO: 449301 - RNA, 19 nt, Artificial Sequence
  Description of Artificial Sequence: Synthetic oligonucleotide
uauauagucuauguacaag

SEQ ID NO: 449302 - RNA, 19 nt, Artificial Sequence
  Description of Artificial Sequence: Synthetic oligonucleotide
acuuuguugaaucagcuua

SEQ ID NO: 449303 - RNA, 19 nt, Artificial Sequence
  Description of Artificial Sequence: Synthetic oligonucleotide
ugcuuaagaauuucguuga

SEQ ID NO: 449304 - RNA, 19 nt, Artificial Sequence
  Description of Artificial Sequence: Synthetic oligonucleotide
uuuagaucucaucacuaac

SEQ ID NO: 449305 - RNA, 19 nt, Artificial Sequence
  Description of Artificial Sequence: Synthetic oligonucleotide
uagucgaagaauaucuaga

SEQ ID NO: 449306 - RNA, 19 nt, Artificial Sequence
  Description of Artificial Sequence: Synthetic oligonucleotide
aauccacuguccaauaauc

SEQ ID NO: 449307 - RNA, 19 nt, Artificial Sequence
  Description of Artificial Sequence: Synthetic oligonucleotide
ugucgugaagcaaaaucag

SEQ ID NO: 449308 - RNA, 19 nt, Artificial Sequence
  Description of Artificial Sequence: Synthetic oligonucleotide
aauacuuaagcugaauauu

SEQ ID NO: 449309 - RNA, 19 nt, Artificial Sequence
  Description of Artificial Sequence: Synthetic oligonucleotide
aauaguacuuauauauagu

SEQ ID NO: 449310 - RNA, 19 nt, Artificial Sequence
  Description of Artificial Sequence: Synthetic oligonucleotide
ugaaguaguucuuuaucca

SEQ ID NO: 449311 - RNA, 19 nt, Artificial Sequence
  Description of Artificial Sequence: Synthetic oligonucleotide
uuaaaagccaucggaagca

SEQ ID NO: 449312 - RNA, 19 nt, Artificial Sequence
  Description of Artificial Sequence: Synthetic oligonucleotide
uuugagacucaugacagug

SEQ ID NO: 449313 - RNA, 19 nt, Artificial Sequence
  Description of Artificial Sequence: Synthetic oligonucleotide
uuuggggaugcuaaugucu

SEQ ID NO: 449314 - RNA, 19 nt, Artificial Sequence
  Description of Artificial Sequence: Synthetic oligonucleotide
ucauggacaauucauugau

SEQ ID NO: 449315 - RNA, 19 nt, Artificial Sequence
  Description of Artificial Sequence: Synthetic oligonucleotide
uguuuguucgauccguucu

SEQ ID NO: 449316 - RNA, 19 nt, Artificial Sequence
  Description of Artificial Sequence: Synthetic oligonucleotide
uccauaaaacuuaaagcau

SEQ ID NO: 449317 - RNA, 19 nt, Artificial Sequence
  Description of Artificial Sequence: Synthetic oligonucleotide
aacuuguuuguucgauccg

SEQ ID NO: 449318 - RNA, 19 nt, Artificial Sequence
  Description of Artificial Sequence: Synthetic oligonucleotide
agaguaagucgcucauucc

SEQ ID NO: 449319 - RNA, 19 nt, Artificial Sequence
  Description of Artificial Sequence: Synthetic oligonucleotide
auaccaagacuguaaaugu

SEQ ID NO: 449320 - RNA, 19 nt, Artificial Sequence
  Description of Artificial Sequence: Synthetic oligonucleotide
uuacauaguauaucuucca

SEQ ID NO: 449321 - RNA, 19 nt, Artificial Sequence
  Description of Artificial Sequence: Synthetic oligonucleotide
ucaaagugcguaauuccca

SEQ ID NO: 449322 - RNA, 19 nt, Artificial Sequence
  Description of Artificial Sequence: Synthetic oligonucleotide
aagcaugauccauaccaag

SEQ ID NO: 449323 - RNA, 19 nt, Artificial Sequence
  Description of Artificial Sequence: Synthetic oligonucleotide
uaaaacggaaccaguuaug

SEQ ID NO: 449324 - RNA, 19 nt, Artificial Sequence
  Description of Artificial Sequence: Synthetic oligonucleotide
aaugaaugacuaagacccc

SEQ ID NO: 449325 - RNA, 19 nt, Artificial Sequence
  Description of Artificial Sequence: Synthetic oligonucleotide
ucaagagucuuccuucaga

SEQ ID NO: 449326 - RNA, 19 nt, Artificial Sequence
  Description of Artificial Sequence: Synthetic oligonucleotide
aaauacuaaggaauguuau

SEQ ID NO: 449327 - RNA, 19 nt, Artificial Sequence
  Description of Artificial Sequence: Synthetic oligonucleotide
cacauauaaaagaggggag

SEQ ID NO: 449328 - RNA, 19 nt, Artificial Sequence
  Description of Artificial Sequence: Synthetic oligonucleotide
aauuaaaacggaaccaguu

SEQ ID NO: 449329 - RNA, 19 nt, Artificial Sequence
  Description of Artificial Sequence: Synthetic oligonucleotide
caguaaggugcuuaacugg

SEQ ID NO: 449330 - RNA, 19 nt, Artificial Sequence
  Description of Artificial Sequence: Synthetic oligonucleotide
uuaacugggucuucaugcc

SEQ ID NO: 449331 - RNA, 19 nt, Artificial Sequence
  Description of Artificial Sequence: Synthetic oligonucleotide
cagguguuaaucugcaggc

SEQ ID NO: 449332 - RNA, 19 nt, Artificial Sequence
  Description of Artificial Sequence: Synthetic oligonucleotide
auacuuaagcugaauauug

SEQ ID NO: 449333 - RNA, 19 nt, Artificial Sequence
  Description of Artificial Sequence: Synthetic oligonucleotide
gauuaacugggucuucaug

SEQ ID NO: 449334 - RNA, 19 nt, Artificial Sequence
  Description of Artificial Sequence: Synthetic oligonucleotide
uagguguaauuuaacuuga

SEQ ID NO: 449335 - RNA, 19 nt, Artificial Sequence
  Description of Artificial Sequence: Synthetic oligonucleotide
auuaaaacggaaccaguua

SEQ ID NO: 449336 - RNA, 19 nt, Artificial Sequence
  Description of Artificial Sequence: Synthetic oligonucleotide
uuaaugcauuauuaggaaa

SEQ ID NO: 449337 - RNA, 19 nt, Artificial Sequence
  Description of Artificial Sequence: Synthetic oligonucleotide
uugcuuccgcuuuacauag

SEQ ID NO: 449338 - RNA, 19 nt, Artificial Sequence
  Description of Artificial Sequence: Synthetic oligonucleotide
uuaaugcaagaacaucagu

SEQ ID NO: 449339 - RNA, 19 nt, Artificial Sequence
  Description of Artificial Sequence: Synthetic oligonucleotide
gaaugcguuauaaaggcuc

SEQ ID NO: 449340 - RNA, 19 nt, Artificial Sequence
  Description of Artificial Sequence: Synthetic oligonucleotide
aauaacccagaagaaauuu

SEQ ID NO: 449341 - RNA, 19 nt, Artificial Sequence
  Description of Artificial Sequence: Synthetic oligonucleotide
uauagauauccagaguccu

SEQ ID NO: 449342 - RNA, 19 nt, Artificial Sequence
  Description of Artificial Sequence: Synthetic oligonucleotide
gcuuaacuggauuaacugg

SEQ ID NO: 449343 - RNA, 19 nt, Artificial Sequence
  Description of Artificial Sequence: Synthetic oligonucleotide
aguuguaacgucacuguuc

SEQ ID NO: 449344 - RNA, 19 nt, Artificial Sequence
  Description of Artificial Sequence: Synthetic oligonucleotide
ccaacuaaggaguaaacug

SEQ ID NO: 449345 - RNA, 19 nt, Artificial Sequence
  Description of Artificial Sequence: Synthetic oligonucleotide
uacuuaagcugaauauugu

SEQ ID NO: 449346 - RNA, 19 nt, Artificial Sequence
  Description of Artificial Sequence: Synthetic oligonucleotide
accagauauagauaggauu

SEQ ID NO: 449347 - RNA, 19 nt, Artificial Sequence
  Description of Artificial Sequence: Synthetic oligonucleotide
uaaggaaauugcuuccgcu

SEQ ID NO: 449348 - RNA, 19 nt, Artificial Sequence
  Description of Artificial Sequence: Synthetic oligonucleotide
aaugcagauguggaacaag

SEQ ID NO: 449349 - RNA, 19 nt, Artificial Sequence
  Description of Artificial Sequence: Synthetic oligonucleotide
uauuacuuugagacucaug

SEQ ID NO: 449350 - RNA, 19 nt, Artificial Sequence
  Description of Artificial Sequence: Synthetic oligonucleotide
aacaaguaguaccaacauu

SEQ ID NO: 449351 - RNA, 19 nt, Artificial Sequence
  Description of Artificial Sequence: Synthetic oligonucleotide
uaguaaagugagguuacag

SEQ ID NO: 449352 - RNA, 19 nt, Artificial Sequence
  Description of Artificial Sequence: Synthetic oligonucleotide
agucgaagaauaucuagaa

SEQ ID NO: 449353 - RNA, 19 nt, Artificial Sequence
  Description of Artificial Sequence: Synthetic oligonucleotide
ugcguaauucccaaagcau

SEQ ID NO: 449354 - RNA, 19 nt, Artificial Sequence
  Description of Artificial Sequence: Synthetic oligonucleotide
aagcaaaaucaguccuggg

SEQ ID NO: 449355 - RNA, 19 nt, Artificial Sequence
  Description of Artificial Sequence: Synthetic oligonucleotide
caguaaacuacacugguga

SEQ ID NO: 449356 - RNA, 19 nt, Artificial Sequence
  Description of Artificial Sequence: Synthetic oligonucleotide
uuaacuggauuaacugggu

SEQ ID NO: 449357 - RNA, 19 nt, Artificial Sequence
  Description of Artificial Sequence: Synthetic oligonucleotide
ucaugcagguguuaaucug

SEQ ID NO: 449358 - RNA, 19 nt, Artificial Sequence
  Description of Artificial Sequence: Synthetic oligonucleotide
uaaggaguaaacuguggau

SEQ ID NO: 449359 - RNA, 19 nt, Artificial Sequence
  Description of Artificial Sequence: Synthetic oligonucleotide
augcauuugguccauguaa

SEQ ID NO: 449360 - RNA, 19 nt, Artificial Sequence
  Description of Artificial Sequence: Synthetic oligonucleotide
uguaaucucucaaccuaga

SEQ ID NO: 449361 - RNA, 19 nt, Artificial Sequence
  Description of Artificial Sequence: Synthetic oligonucleotide
ucuuagaaugcguuauaaa

SEQ ID NO: 449362 - RNA, 19 nt, Artificial Sequence
  Description of Artificial Sequence: Synthetic oligonucleotide
gaaaugcagauguggaaca

SEQ ID NO: 449363 - RNA, 19 nt, Artificial Sequence
  Description of Artificial Sequence: Synthetic oligonucleotide
aguucuuacaaggcaguuc

SEQ ID NO: 449364 - RNA, 19 nt, Artificial Sequence
  Description of Artificial Sequence: Synthetic oligonucleotide
cuguaaucucucaaccuag

SEQ ID NO: 449365 - RNA, 19 nt, Artificial Sequence
  Description of Artificial Sequence: Synthetic oligonucleotide
aaggcucaccauuuaauuu

SEQ ID NO: 449366 - RNA, 19 nt, Artificial Sequence
  Description of Artificial Sequence: Synthetic oligonucleotide
auaccagauauagauagga

SEQ ID NO: 449367 - RNA, 19 nt, Artificial Sequence
  Description of Artificial Sequence: Synthetic oligonucleotide
uguggaugcuuuucaaagu

SEQ ID NO: 449368 - RNA, 19 nt, Artificial Sequence
  Description of Artificial Sequence: Synthetic oligonucleotide
auaguauaucuuccacauc

SEQ ID NO: 449369 - RNA, 19 nt, Artificial Sequence
  Description of Artificial Sequence: Synthetic oligonucleotide
caaagcaccaaaaggcauc

SEQ ID NO: 449370 - RNA, 19 nt, Artificial Sequence
  Description of Artificial Sequence: Synthetic oligonucleotide
guaaucucucaaccuagag

SEQ ID NO: 449371 - RNA, 19 nt, Artificial Sequence
  Description of Artificial Sequence: Synthetic oligonucleotide
uacuuauauauagucuaug

SEQ ID NO: 449372 - RNA, 19 nt, Artificial Sequence
  Description of Artificial Sequence: Synthetic oligonucleotide
aggaauugcaacaaaguau

SEQ ID NO: 449373 - RNA, 19 nt, Artificial Sequence
  Description of Artificial Sequence: Synthetic oligonucleotide
aaggugcuuaacuggauua

SEQ ID NO: 449374 - RNA, 19 nt, Artificial Sequence
  Description of Artificial Sequence: Synthetic oligonucleotide
auaacccagaagaaauuuc

SEQ ID NO: 449375 - RNA, 19 nt, Artificial Sequence
  Description of Artificial Sequence: Synthetic oligonucleotide
uccgcuuuacauaguauau

SEQ ID NO: 449376 - RNA, 19 nt, Artificial Sequence
  Description of Artificial Sequence: Synthetic oligonucleotide
augucgugaagcaaaauca

SEQ ID NO: 449377 - RNA, 19 nt, Artificial Sequence
  Description of Artificial Sequence: Synthetic oligonucleotide
uauagauaggauugaugua

SEQ ID NO: 449378 - RNA, 19 nt, Artificial Sequence
  Description of Artificial Sequence: Synthetic oligonucleotide
aggauagcacaacauagaa

SEQ ID NO: 449379 - RNA, 19 nt, Artificial Sequence
  Description of Artificial Sequence: Synthetic oligonucleotide
auaagcuaucugcaaagaa

SEQ ID NO: 449380 - RNA, 19 nt, Artificial Sequence
  Description of Artificial Sequence: Synthetic oligonucleotide
uggacaauucauugaugug

SEQ ID NO: 449381 - RNA, 19 nt, Artificial Sequence
  Description of Artificial Sequence: Synthetic oligonucleotide
ggaauugcaacaaaguauc

SEQ ID NO: 449382 - RNA, 19 nt, Artificial Sequence
  Description of Artificial Sequence: Synthetic oligonucleotide
ugguacuaucccaaggaaa

SEQ ID NO: 449383 - RNA, 19 nt, Artificial Sequence
  Description of Artificial Sequence: Synthetic oligonucleotide
gauccguucuguuaacauc

SEQ ID NO: 449384 - RNA, 19 nt, Artificial Sequence
  Description of Artificial Sequence: Synthetic oligonucleotide
aaguagcuacaaaauccac

SEQ ID NO: 449385 - RNA, 19 nt, Artificial Sequence
  Description of Artificial Sequence: Synthetic oligonucleotide
uuguugaaucagcuuauau

SEQ ID NO: 449386 - RNA, 19 nt, Artificial Sequence
  Description of Artificial Sequence: Synthetic oligonucleotide
aaugcguuauaaaggcuca

SEQ ID NO: 449387 - RNA, 19 nt, Artificial Sequence
  Description of Artificial Sequence: Synthetic oligonucleotide
aaccuagaguuccucuucu

SEQ ID NO: 449388 - RNA, 19 nt, Artificial Sequence
  Description of Artificial Sequence: Synthetic oligonucleotide
ugauccauaccaagacugu

SEQ ID NO: 449389 - RNA, 19 nt, Artificial Sequence
  Description of Artificial Sequence: Synthetic oligonucleotide
gaucaugcagguguuaauc

SEQ ID NO: 449390 - RNA, 19 nt, Artificial Sequence
  Description of Artificial Sequence: Synthetic oligonucleotide
aaagccaaaucugugugua

SEQ ID NO: 449391 - RNA, 19 nt, Artificial Sequence
  Description of Artificial Sequence: Synthetic oligonucleotide
cuguaaaugucuaccuuuc

SEQ ID NO: 449392 - RNA, 19 nt, Artificial Sequence
  Description of Artificial Sequence: Synthetic oligonucleotide
aaguaguucuuuauccaca

SEQ ID NO: 449393 - RNA, 19 nt, Artificial Sequence
  Description of Artificial Sequence: Synthetic oligonucleotide
aaauuacaauuaaaacgga

SEQ ID NO: 449394 - RNA, 19 nt, Artificial Sequence
  Description of Artificial Sequence: Synthetic oligonucleotide
ugcguuauaaaggcucacc

SEQ ID NO: 449395 - RNA, 19 nt, Artificial Sequence
  Description of Artificial Sequence: Synthetic oligonucleotide
guaaggaaauugcuuccgc

SEQ ID NO: 449396 - RNA, 19 nt, Artificial Sequence
  Description of Artificial Sequence: Synthetic oligonucleotide
acuuaagcugaauauuguu

SEQ ID NO: 449397 - RNA, 19 nt, Artificial Sequence
  Description of Artificial Sequence: Synthetic oligonucleotide
guuuguucgauccguucug

SEQ ID NO: 449398 - RNA, 19 nt, Artificial Sequence
  Description of Artificial Sequence: Synthetic oligonucleotide
cuaccuuucauguacuaaa

SEQ ID NO: 449399 - RNA, 19 nt, Artificial Sequence
  Description of Artificial Sequence: Synthetic oligonucleotide
caguaggucaucaaaaugu

SEQ ID NO: 449400 - RNA, 19 nt, Artificial Sequence
  Description of Artificial Sequence: Synthetic oligonucleotide
aagcugaauauuguuguaa

SEQ ID NO: 449401 - RNA, 19 nt, Artificial Sequence
  Description of Artificial Sequence: Synthetic oligonucleotide
ugcauugugccaucuguaa

SEQ ID NO: 449402 - RNA, 19 nt, Artificial Sequence
  Description of Artificial Sequence: Synthetic oligonucleotide
ucgaucagacuucuguaau

SEQ ID NO: 449403 - RNA, 19 nt, Artificial Sequence
  Description of Artificial Sequence: Synthetic oligonucleotide
uaggacuaugcuuucuuau

SEQ ID NO: 449404 - RNA, 19 nt, Artificial Sequence
  Description of Artificial Sequence: Synthetic oligonucleotide
uguucgauccguucuguua

SEQ ID NO: 449405 - RNA, 19 nt, Artificial Sequence
  Description of Artificial Sequence: Synthetic oligonucleotide
uugcuaaggcugaaguagu

SEQ ID NO: 449406 - RNA, 19 nt, Artificial Sequence
  Description of Artificial Sequence: Synthetic oligonucleotide
uugguacuaucccaaggaa

SEQ ID NO: 449407 - RNA, 19 nt, Artificial Sequence
  Description of Artificial Sequence: Synthetic oligonucleotide
acuaaggaguaaacugugg

SEQ ID NO: 449408 - RNA, 19 nt, Artificial Sequence
  Description of Artificial Sequence: Synthetic oligonucleotide
uaaggugcuuaacuggauu

SEQ ID NO: 449409 - RNA, 19 nt, Artificial Sequence
  Description of Artificial Sequence: Synthetic oligonucleotide
ggaugcuuuucaaagugcg

SEQ ID NO: 449410 - RNA, 19 nt, Artificial Sequence
  Description of Artificial Sequence: Synthetic oligonucleotide
gauaggauugauguagucu

SEQ ID NO: 449411 - RNA, 19 nt, Artificial Sequence
  Description of Artificial Sequence: Synthetic oligonucleotide
aagguguuacuuggaaaug

SEQ ID NO: 449412 - RNA, 19 nt, Artificial Sequence
  Description of Artificial Sequence: Synthetic oligonucleotide
uuaucuuggccuucauaaa

SEQ ID NO: 449413 - RNA, 19 nt, Artificial Sequence
  Description of Artificial Sequence: Synthetic oligonucleotide
aguaaggugcuuaacugga

SEQ ID NO: 449414 - RNA, 19 nt, Artificial Sequence
  Description of Artificial Sequence: Synthetic oligonucleotide
guuguaacgucacuguucu

SEQ ID NO: 449415 - RNA, 19 nt, Artificial Sequence
  Description of Artificial Sequence: Synthetic oligonucleotide
uaccaagacuguaaauguc

SEQ ID NO: 449416 - RNA, 19 nt, Artificial Sequence
  Description of Artificial Sequence: Synthetic oligonucleotide
uaacuggauuaacuggguc

SEQ ID NO: 449417 - RNA, 19 nt, Artificial Sequence
  Description of Artificial Sequence: Synthetic oligonucleotide
cauaguauaucuuccacau

SEQ ID NO: 449418 - RNA, 19 nt, Artificial Sequence
  Description of Artificial Sequence: Synthetic oligonucleotide
uacaagaguuuaacaaauu

SEQ ID NO: 449419 - RNA, 19 nt, Artificial Sequence
  Description of Artificial Sequence: Synthetic oligonucleotide
gaguaagucgcucauuccu

SEQ ID NO: 449420 - RNA, 19 nt, Artificial Sequence
  Description of Artificial Sequence: Synthetic oligonucleotide
cacuguccaauaaucucag

SEQ ID NO: 449421 - RNA, 19 nt, Artificial Sequence
  Description of Artificial Sequence: Synthetic oligonucleotide
guaagucgcucauuccuug

SEQ ID NO: 449422 - RNA, 19 nt, Artificial Sequence
  Description of Artificial Sequence: Synthetic oligonucleotide
auuucguugaagccauaau

SEQ ID NO: 449423 - RNA, 19 nt, Artificial Sequence
  Description of Artificial Sequence: Synthetic oligonucleotide
uccacguucaagagucuuc

SEQ ID NO: 449424 - RNA, 19 nt, Artificial Sequence
  Description of Artificial Sequence: Synthetic oligonucleotide
aaaaugucgugaagcaaaa

SEQ ID NO: 449425 - RNA, 19 nt, Artificial Sequence
  Description of Artificial Sequence: Synthetic oligonucleotide
accaauuaaugcauuauua

SEQ ID NO: 449426 - RNA, 19 nt, Artificial Sequence
  Description of Artificial Sequence: Synthetic oligonucleotide
cuaucccaaggaaaauaac

SEQ ID NO: 449427 - RNA, 19 nt, Artificial Sequence
  Description of Artificial Sequence: Synthetic oligonucleotide
aaaucaguccuggguuauc

SEQ ID NO: 449428 - RNA, 19 nt, Artificial Sequence
  Description of Artificial Sequence: Synthetic oligonucleotide
gaaaacacuauuucagcuu

SEQ ID NO: 449429 - RNA, 19 nt, Artificial Sequence
  Description of Artificial Sequence: Synthetic oligonucleotide
aaucucaguaaggugcuua

SEQ ID NO: 449430 - RNA, 19 nt, Artificial Sequence
  Description of Artificial Sequence: Synthetic oligonucleotide
aguaaacuacacuggugaa

SEQ ID NO: 449431 - RNA, 19 nt, Artificial Sequence
  Description of Artificial Sequence: Synthetic oligonucleotide
aucuuugacauaagcuauc

SEQ ID NO: 449432 - RNA, 19 nt, Artificial Sequence
  Description of Artificial Sequence: Synthetic oligonucleotide
auauaaaagaggggagagu

SEQ ID NO: 449433 - RNA, 19 nt, Artificial Sequence
  Description of Artificial Sequence: Synthetic oligonucleotide
aaaaugcacuucacuauaa

SEQ ID NO: 449434 - RNA, 19 nt, Artificial Sequence
  Description of Artificial Sequence: Synthetic oligonucleotide
aaauaacccagaagaaauu

SEQ ID NO: 449435 - RNA, 19 nt, Artificial Sequence
  Description of Artificial Sequence: Synthetic oligonucleotide
auuccuugcauugugccau

SEQ ID NO: 449436 - RNA, 19 nt, Artificial Sequence
  Description of Artificial Sequence: Synthetic oligonucleotide
acuuguuuguucgauccgu

SEQ ID NO: 449437 - RNA, 19 nt, Artificial Sequence
  Description of Artificial Sequence: Synthetic oligonucleotide
ugucuaccuuucauguacu

SEQ ID NO: 449438 - RNA, 19 nt, Artificial Sequence
  Description of Artificial Sequence: Synthetic oligonucleotide
ggacuaugcuuucuuauac

SEQ ID NO: 449439 - RNA, 19 nt, Artificial Sequence
  Description of Artificial Sequence: Synthetic oligonucleotide
agaauuucguugaagccau

SEQ ID NO: 449440 - RNA, 19 nt, Artificial Sequence
  Description of Artificial Sequence: Synthetic oligonucleotide
guucgauccguucuguuaa

SEQ ID NO: 449441 - RNA, 19 nt, Artificial Sequence
  Description of Artificial Sequence: Synthetic oligonucleotide
auaaucucaguaaggugcu

SEQ ID NO: 449442 - RNA, 19 nt, Artificial Sequence
  Description of Artificial Sequence: Synthetic oligonucleotide
cccaaggaaaauaacccag

SEQ ID NO: 449443 - RNA, 19 nt, Artificial Sequence
  Description of Artificial Sequence: Synthetic oligonucleotide
agcaugauccauaccaaga

SEQ ID NO: 449444 - RNA, 19 nt, Artificial Sequence
  Description of Artificial Sequence: Synthetic oligonucleotide
aggacuaugcuuucuuaua

SEQ ID NO: 449445 - RNA, 19 nt, Artificial Sequence
  Description of Artificial Sequence: Synthetic oligonucleotide
cuguccaauaaucucagua

SEQ ID NO: 449446 - RNA, 19 nt, Artificial Sequence
  Description of Artificial Sequence: Synthetic oligonucleotide
ucgcugacagacuuccacu

SEQ ID NO: 449447 - RNA, 19 nt, Artificial Sequence
  Description of Artificial Sequence: Synthetic oligonucleotide
cauucuccaucacauauaa

SEQ ID NO: 449448 - RNA, 19 nt, Artificial Sequence
  Description of Artificial Sequence: Synthetic oligonucleotide
ccaguuauguuaauuccac

SEQ ID NO: 449449 - RNA, 19 nt, Artificial Sequence
  Description of Artificial Sequence: Synthetic oligonucleotide
uaacgucacuguucugaag

SEQ ID NO: 449450 - RNA, 19 nt, Artificial Sequence
  Description of Artificial Sequence: Synthetic oligonucleotide
gauuccaggauagcacaac

SEQ ID NO: 449451 - RNA, 19 nt, Artificial Sequence
  Description of Artificial Sequence: Synthetic oligonucleotide
auauugaagcauguauuaa

SEQ ID NO: 449452 - RNA, 19 nt, Artificial Sequence
  Description of Artificial Sequence: Synthetic oligonucleotide
guaguuucauccugaagua

SEQ ID NO: 449453 - RNA, 19 nt, Artificial Sequence
  Description of Artificial Sequence: Synthetic oligonucleotide
uagccaacuaaggaguaaa

SEQ ID NO: 449454 - RNA, 19 nt, Artificial Sequence
  Description of Artificial Sequence: Synthetic oligonucleotide
uuguuuguucgauccguuc

SEQ ID NO: 449455 - RNA, 19 nt, Artificial Sequence
  Description of Artificial Sequence: Synthetic oligonucleotide
gguacuaucccaaggaaaa

SEQ ID NO: 449456 - RNA, 19 nt, Artificial Sequence
  Description of Artificial Sequence: Synthetic oligonucleotide
uguuaaucugcaggcauuu

SEQ ID NO: 449457 - RNA, 19 nt, Artificial Sequence
  Description of Artificial Sequence: Synthetic oligonucleotide
uccuuguauauauccuaaa

SEQ ID NO: 449458 - RNA, 19 nt, Artificial Sequence
  Description of Artificial Sequence: Synthetic oligonucleotide
acguucaagagucuuccuu

SEQ ID NO: 449459 - RNA, 19 nt, Artificial Sequence
  Description of Artificial Sequence: Synthetic oligonucleotide
cacucagccagaauaaaua

SEQ ID NO: 449460 - RNA, 19 nt, Artificial Sequence
  Description of Artificial Sequence: Synthetic oligonucleotide
caugaccucccauagucga

SEQ ID NO: 449461 - RNA, 19 nt, Artificial Sequence
  Description of Artificial Sequence: Synthetic oligonucleotide
cgaagaauaucuagaaaac

SEQ ID NO: 449462 - RNA, 19 nt, Artificial Sequence
  Description of Artificial Sequence: Synthetic oligonucleotide
uaagucgcucauuccuugu

SEQ ID NO: 449463 - RNA, 19 nt, Artificial Sequence
  Description of Artificial Sequence: Synthetic oligonucleotide
ucgcucauuccuuguauau

SEQ ID NO: 449464 - RNA, 19 nt, Artificial Sequence
  Description of Artificial Sequence: Synthetic oligonucleotide
ugaucaugcagguguuaau

SEQ ID NO: 449465 - RNA, 19 nt, Artificial Sequence
  Description of Artificial Sequence: Synthetic oligonucleotide
ggcaauuccuugcauugug

SEQ ID NO: 449466 - RNA, 19 nt, Artificial Sequence
  Description of Artificial Sequence: Synthetic oligonucleotide
augcauuauuaggaaaaga

SEQ ID NO: 449467 - RNA, 19 nt, Artificial Sequence
  Description of Artificial Sequence: Synthetic oligonucleotide
caccauuuaauuucaucaa

SEQ ID NO: 449468 - RNA, 19 nt, Artificial Sequence
  Description of Artificial Sequence: Synthetic oligonucleotide
gaugcauuugguccaugua

SEQ ID NO: 449469 - RNA, 19 nt, Artificial Sequence
  Description of Artificial Sequence: Synthetic oligonucleotide
ggauagcacaacauagaag

SEQ ID NO: 449470 - RNA, 19 nt, Artificial Sequence
  Description of Artificial Sequence: Synthetic oligonucleotide
auaggacuaugcuuucuua

SEQ ID NO: 449471 - RNA, 19 nt, Artificial Sequence
  Description of Artificial Sequence: Synthetic oligonucleotide
caugcaauacugcauggua

SEQ ID NO: 449472 - RNA, 19 nt, Artificial Sequence
  Description of Artificial Sequence: Synthetic oligonucleotide
acugcuuguggcaauuccu

SEQ ID NO: 449473 - RNA, 19 nt, Artificial Sequence
  Description of Artificial Sequence: Synthetic oligonucleotide
uuuguucgauccguucugu

SEQ ID NO: 449474 - RNA, 19 nt, Artificial Sequence
  Description of Artificial Sequence: Synthetic oligonucleotide
ucccauagucgaagaauau

SEQ ID NO: 449475 - RNA, 19 nt, Artificial Sequence
  Description of Artificial Sequence: Synthetic oligonucleotide
gacaauucauugaugugcu

SEQ ID NO: 449476 - RNA, 19 nt, Artificial Sequence
  Description of Artificial Sequence: Synthetic oligonucleotide
gaacaaguaguaccaacau

SEQ ID NO: 449477 - RNA, 19 nt, Artificial Sequence
  Description of Artificial Sequence: Synthetic oligonucleotide
augaucaugcagguguuaa

SEQ ID NO: 449478 - RNA, 19 nt, Artificial Sequence
  Description of Artificial Sequence: Synthetic oligonucleotide
acaugaccucccauagucg

SEQ ID NO: 449479 - RNA, 19 nt, Artificial Sequence
  Description of Artificial Sequence: Synthetic oligonucleotide
cauacugccaaauccacuu

SEQ ID NO: 449480 - RNA, 19 nt, Artificial Sequence
  Description of Artificial Sequence: Synthetic oligonucleotide
agucgcucauuccuuguau

SEQ ID NO: 449481 - RNA, 19 nt, Artificial Sequence
  Description of Artificial Sequence: Synthetic oligonucleotide
agccaacuaaggaguaaac

SEQ ID NO: 449482 - RNA, 19 nt, Artificial Sequence
  Description of Artificial Sequence: Synthetic oligonucleotide
uugaaaaggaaaggcuauu

SEQ ID NO: 449483 - RNA, 19 nt, Artificial Sequence
  Description of Artificial Sequence: Synthetic oligonucleotide
acuggauuaacugggucuu

SEQ ID NO: 449484 - RNA, 19 nt, Artificial Sequence
  Description of Artificial Sequence: Synthetic oligonucleotide
ugcuaaugucugugcggag

SEQ ID NO: 449485 - RNA, 19 nt, Artificial Sequence
  Description of Artificial Sequence: Synthetic oligonucleotide
cuugcauugugccaucugu

SEQ ID NO: 449486 - RNA, 19 nt, Artificial Sequence
  Description of Artificial Sequence: Synthetic oligonucleotide
cucccauagucgaagaaua

SEQ ID NO: 449487 - RNA, 19 nt, Artificial Sequence
  Description of Artificial Sequence: Synthetic oligonucleotide
aaaugucgugaagcaaaau

SEQ ID NO: 449488 - RNA, 19 nt, Artificial Sequence
  Description of Artificial Sequence: Synthetic oligonucleotide
acaucaguacacugucuuu

SEQ ID NO: 449489 - RNA, 19 nt, Artificial Sequence
  Description of Artificial Sequence: Synthetic oligonucleotide
augcguuauaaaggcucac

SEQ ID NO: 449490 - RNA, 19 nt, Artificial Sequence
  Description of Artificial Sequence: Synthetic oligonucleotide
augcaauacugcaugguaa

SEQ ID NO: 449491 - RNA, 19 nt, Artificial Sequence
  Description of Artificial Sequence: Synthetic oligonucleotide
gcguuauaaaggcucacca

SEQ ID NO: 449492 - RNA, 19 nt, Artificial Sequence
  Description of Artificial Sequence: Synthetic oligonucleotide
guaacgucacuguucugaa

SEQ ID NO: 449493 - RNA, 19 nt, Artificial Sequence
  Description of Artificial Sequence: Synthetic oligonucleotide
aaguucuuacaaggcaguu

SEQ ID NO: 449494 - RNA, 19 nt, Artificial Sequence
  Description of Artificial Sequence: Synthetic oligonucleotide
auccauaccaagacuguaa

SEQ ID NO: 449495 - RNA, 19 nt, Artificial Sequence
  Description of Artificial Sequence: Synthetic oligonucleotide
ugcuaaggcugaaguaguu

SEQ ID NO: 449496 - RNA, 19 nt, Artificial Sequence
  Description of Artificial Sequence: Synthetic oligonucleotide
cuuguaguauuuauccaau

SEQ ID NO: 449497 - RNA, 19 nt, Artificial Sequence
  Description of Artificial Sequence: Synthetic oligonucleotide
ucucaguaaggugcuuaac

SEQ ID NO: 449498 - RNA, 19 nt, Artificial Sequence
  Description of Artificial Sequence: Synthetic oligonucleotide
ugcggagcugucgucuuug

SEQ ID NO: 449499 - RNA, 19 nt, Artificial Sequence
  Description of Artificial Sequence: Synthetic oligonucleotide
gaacaacaggucgcucucc

SEQ ID NO: 449500 - RNA, 19 nt, Artificial Sequence
  Description of Artificial Sequence: Synthetic oligonucleotide
guuaaucugcaggcauuug

SEQ ID NO: 449501 - RNA, 19 nt, Artificial Sequence
  Description of Artificial Sequence: Synthetic oligonucleotide
uucgauccguucuguuaac

SEQ ID NO: 449502 - RNA, 19 nt, Artificial Sequence
  Description of Artificial Sequence: Synthetic oligonucleotide
guaauucccaaagcaucca

SEQ ID NO: 449503 - RNA, 19 nt, Artificial Sequence
  Description of Artificial Sequence: Synthetic oligonucleotide
ucgauccguucuguuaaca

SEQ ID NO: 449504 - RNA, 19 nt, Artificial Sequence
  Description of Artificial Sequence: Synthetic oligonucleotide
caguuauguuaauuccaca

SEQ ID NO: 449505 - RNA, 19 nt, Artificial Sequence
  Description of Artificial Sequence: Synthetic oligonucleotide
ugucgucuuuggcuucacu

SEQ ID NO: 449506 - RNA, 19 nt, Artificial Sequence
  Description of Artificial Sequence: Synthetic oligonucleotide
acauacugccaaauccacu

SEQ ID NO: 449507 - RNA, 19 nt, Artificial Sequence
  Description of Artificial Sequence: Synthetic oligonucleotide
aggggagaguaagucgcuc

SEQ ID NO: 449508 - RNA, 19 nt, Artificial Sequence
  Description of Artificial Sequence: Synthetic oligonucleotide
acacucagccagaauaaau

SEQ ID NO: 449509 - RNA, 19 nt, Artificial Sequence
  Description of Artificial Sequence: Synthetic oligonucleotide
uggcaauuccuugcauugu

SEQ ID NO: 449510 - RNA, 19 nt, Artificial Sequence
  Description of Artificial Sequence: Synthetic oligonucleotide
auagccaacuaaggaguaa

SEQ ID NO: 449511 - RNA, 19 nt, Artificial Sequence
  Description of Artificial Sequence: Synthetic oligonucleotide
gcauuauuaggaaaagaua

SEQ ID NO: 449512 - RNA, 19 nt, Artificial Sequence
  Description of Artificial Sequence: Synthetic oligonucleotide
ggaguuguaacgucacugu

SEQ ID NO: 449513 - RNA, 19 nt, Artificial Sequence
  Description of Artificial Sequence: Synthetic oligonucleotide
gcguaauucccaaagcauc

SEQ ID NO: 449514 - RNA, 19 nt, Artificial Sequence
  Description of Artificial Sequence: Synthetic oligonucleotide
ucucaaccuagaguuccuc

SEQ ID NO: 449515 - RNA, 19 nt, Artificial Sequence
  Description of Artificial Sequence: Synthetic oligonucleotide
agguguuaaucugcaggca

SEQ ID NO: 449516 - RNA, 19 nt, Artificial Sequence
  Description of Artificial Sequence: Synthetic oligonucleotide
uucaugccuugcauuuguu

SEQ ID NO: 449517 - RNA, 19 nt, Artificial Sequence
  Description of Artificial Sequence: Synthetic oligonucleotide
ucuccacguucaagagucu

SEQ ID NO: 449518 - RNA, 19 nt, Artificial Sequence
  Description of Artificial Sequence: Synthetic oligonucleotide
ggugcuuaacuggauuaac

SEQ ID NO: 449519 - RNA, 19 nt, Artificial Sequence
  Description of Artificial Sequence: Synthetic oligonucleotide
ccacguucaagagucuucc

SEQ ID NO: 449520 - RNA, 19 nt, Artificial Sequence
  Description of Artificial Sequence: Synthetic oligonucleotide
acggaaccaguuauguuaa

SEQ ID NO: 449521 - RNA, 19 nt, Artificial Sequence
  Description of Artificial Sequence: Synthetic oligonucleotide
aggugcuuaacuggauuaa

SEQ ID NO: 449522 - RNA, 19 nt, Artificial Sequence
  Description of Artificial Sequence: Synthetic oligonucleotide
ccaaauccacuugcuaagg

SEQ ID NO: 449523 - RNA, 19 nt, Artificial Sequence
  Description of Artificial Sequence: Synthetic oligonucleotide
gcauuuggggaugcuaaug

SEQ ID NO: 449524 - RNA, 19 nt, Artificial Sequence
  Description of Artificial Sequence: Synthetic oligonucleotide
auagcacaacauagaagaa

SEQ ID NO: 449525 - RNA, 19 nt, Artificial Sequence
  Description of Artificial Sequence: Synthetic oligonucleotide
uuguucgauccguucuguu

SEQ ID NO: 449526 - RNA, 19 nt, Artificial Sequence
  Description of Artificial Sequence: Synthetic oligonucleotide
gguguuaaucugcaggcau

SEQ ID NO: 449527 - RNA, 19 nt, Artificial Sequence
  Description of Artificial Sequence: Synthetic oligonucleotide
accucccauagucgaagaa

SEQ ID NO: 449528 - RNA, 19 nt, Artificial Sequence
  Description of Artificial Sequence: Synthetic oligonucleotide
agcuaucugcaaagaauau

SEQ ID NO: 449529 - RNA, 19 nt, Artificial Sequence
  Description of Artificial Sequence: Synthetic oligonucleotide
gugcuuaacuggauuaacu

SEQ ID NO: 449530 - RNA, 19 nt, Artificial Sequence
  Description of Artificial Sequence: Synthetic oligonucleotide
gcaagguguuacuuggaaa

SEQ ID NO: 449531 - RNA, 19 nt, Artificial Sequence
  Description of Artificial Sequence: Synthetic oligonucleotide
uccguucuguuaacaucuu

SEQ ID NO: 449532 - RNA, 19 nt, Artificial Sequence
  Description of Artificial Sequence: Synthetic oligonucleotide
ggcaagguguuacuuggaa

SEQ ID NO: 449533 - RNA, 19 nt, Artificial Sequence
  Description of Artificial Sequence: Synthetic oligonucleotide
gaccucccauagucgaaga

SEQ ID NO: 449534 - RNA, 19 nt, Artificial Sequence
  Description of Artificial Sequence: Synthetic oligonucleotide
cuuugaacaacaggucgcu

SEQ ID NO: 449535 - RNA, 19 nt, Artificial Sequence
  Description of Artificial Sequence: Synthetic oligonucleotide
ucaacacucuugguccauu

SEQ ID NO: 449536 - RNA, 19 nt, Artificial Sequence
  Description of Artificial Sequence: Synthetic oligonucleotide
ugugcggagcugucgucuu

SEQ ID NO: 449537 - RNA, 19 nt, Artificial Sequence
  Description of Artificial Sequence: Synthetic oligonucleotide
cucaaccuagaguuccucu

SEQ ID NO: 449538 - RNA, 19 nt, Artificial Sequence
  Description of Artificial Sequence: Synthetic oligonucleotide
gcuaaggcugaaguaguuc

SEQ ID NO: 449539 - RNA, 19 nt, Artificial Sequence
  Description of Artificial Sequence: Synthetic oligonucleotide
gucgcucauuccuuguaua

SEQ ID NO: 449540 - RNA, 19 nt, Artificial Sequence
  Description of Artificial Sequence: Synthetic oligonucleotide
cccauagucgaagaauauc

SEQ ID NO: 449541 - RNA, 19 nt, Artificial Sequence
  Description of Artificial Sequence: Synthetic oligonucleotide
gcuuccgcuuuacauagua

SEQ ID NO: 449542 - RNA, 19 nt, Artificial Sequence
  Description of Artificial Sequence: Synthetic oligonucleotide
cuuugagacucaugacagu

SEQ ID NO: 449543 - RNA, 19 nt, Artificial Sequence
  Description of Artificial Sequence: Synthetic oligonucleotide
cagccagaauaaauacuua

SEQ ID NO: 449544 - RNA, 19 nt, Artificial Sequence
  Description of Artificial Sequence: Synthetic oligonucleotide
cgaucagacuucuguaauc

SEQ ID NO: 449545 - RNA, 19 nt, Artificial Sequence
  Description of Artificial Sequence: Synthetic oligonucleotide
caaguaguaccaacauuuu

SEQ ID NO: 449546 - RNA, 19 nt, Artificial Sequence
  Description of Artificial Sequence: Synthetic oligonucleotide
cuggauuaacugggucuuc

SEQ ID NO: 449547 - RNA, 19 nt, Artificial Sequence
  Description of Artificial Sequence: Synthetic oligonucleotide
cgcuuuacauaguauaucu

SEQ ID NO: 449548 - RNA, 19 nt, Artificial Sequence
  Description of Artificial Sequence: Synthetic oligonucleotide
ccuuguauauauccuaaau

SEQ ID NO: 449549 - RNA, 19 nt, Artificial Sequence
  Description of Artificial Sequence: Synthetic oligonucleotide
cuuguuuguucgauccguu

SEQ ID NO: 449550 - RNA, 19 nt, Artificial Sequence
  Description of Artificial Sequence: Synthetic oligonucleotide
augaccucccauagucgaa

SEQ ID NO: 449551 - RNA, 19 nt, Artificial Sequence
  Description of Artificial Sequence: Synthetic oligonucleotide
gaugggcaagguguuacuu

SEQ ID NO: 449552 - RNA, 19 nt, Artificial Sequence
  Description of Artificial Sequence: Synthetic oligonucleotide
ccuugcauugugccaucug

SEQ ID NO: 449553 - RNA, 19 nt, Artificial Sequence
  Description of Artificial Sequence: Synthetic oligonucleotide
ccgcuuuacauaguauauc

SEQ ID NO: 449554 - RNA, 19 nt, Artificial Sequence
  Description of Artificial Sequence: Synthetic oligonucleotide
cuuccgcuuuacauaguau

SEQ ID NO: 449555 - RNA, 19 nt, Artificial Sequence
  Description of Artificial Sequence: Synthetic oligonucleotide
guacuaucccaaggaaaau

SEQ ID NO: 449556 - RNA, 19 nt, Artificial Sequence
  Description of Artificial Sequence: Synthetic oligonucleotide
guaaggugcuuaacuggau

SEQ ID NO: 449557 - RNA, 19 nt, Artificial Sequence
  Description of Artificial Sequence: Synthetic oligonucleotide
cuggaguuguaacgucacu

SEQ ID NO: 449558 - RNA, 19 nt, Artificial Sequence
  Description of Artificial Sequence: Synthetic oligonucleotide
gggagaguaagucgcucau

SEQ ID NO: 449559 - RNA, 19 nt, Artificial Sequence
  Description of Artificial Sequence: Synthetic oligonucleotide
gaauuucguugaagccaua

SEQ ID NO: 449560 - RNA, 19 nt, Artificial Sequence
  Description of Artificial Sequence: Synthetic oligonucleotide
ggaguaaacuguggaugcu

SEQ ID NO: 449561 - RNA, 19 nt, Artificial Sequence
  Description of Artificial Sequence: Synthetic oligonucleotide
cacuggugaaaugucuaau

SEQ ID NO: 449562 - RNA, 19 nt, Artificial Sequence
  Description of Artificial Sequence: Synthetic oligonucleotide
ggaugggcaagguguuacu

SEQ ID NO: 449563 - RNA, 19 nt, Artificial Sequence
  Description of Artificial Sequence: Synthetic oligonucleotide
gcaaagcaccaaaaggcau

SEQ ID NO: 449564 - RNA, 19 nt, Artificial Sequence
  Description of Artificial Sequence: Synthetic oligonucleotide
cugugcggagcugucgucu

SEQ ID NO: 449565 - RNA, 19 nt, Artificial Sequence
  Description of Artificial Sequence: Synthetic oligonucleotide
cguuauaaaggcucaccau

SEQ ID NO: 449566 - RNA, 19 nt, Artificial Sequence
  Description of Artificial Sequence: Synthetic oligonucleotide
ccugaaguacucauccguu

SEQ ID NO: 449567 - RNA, 19 nt, Artificial Sequence
  Description of Artificial Sequence: Synthetic oligonucleotide
gggcaagguguuacuugga

SEQ ID NO: 449568 - RNA, 19 nt, Artificial Sequence
  Description of Artificial Sequence: Synthetic oligonucleotide
ccucccauagucgaagaau

SEQ ID NO: 449569 - RNA, 19 nt, Artificial Sequence
  Description of Artificial Sequence: Synthetic oligonucleotide
ccauaccaagacuguaaau

SEQ ID NO: 449570 - RNA, 19 nt, Artificial Sequence
  Description of Artificial Sequence: Synthetic oligonucleotide
cuccacguucaagagucuu

SEQ ID NO: 449571 - RNA, 19 nt, Artificial Sequence
  Description of Artificial Sequence: Synthetic oligonucleotide
ggagaguaagucgcucauu

SEQ ID NO: 449572 - RNA, 19 nt, Artificial Sequence
  Description of Artificial Sequence: Synthetic oligonucleotide
cgauccguucuguuaacau

SEQ ID NO: 449573 - RNA, 19 nt, Artificial Sequence
  Description of Artificial Sequence: Synthetic oligonucleotide
ccuggguuaucuuggccuu

SEQ ID NO: 449574 - RNA, 19 nt, Artificial Sequence
  Description of Artificial Sequence: Synthetic oligonucleotide
cgcucauuccuuguauaua

SEQ ID NO: 449575 - RNA, 19 nt, Artificial Sequence
  Description of Artificial Sequence: Synthetic oligonucleotide
ccguucuguuaacaucuuu

SEQ ID NO: 449576 - RNA, 19 nt, Artificial Sequence
  Description of Artificial Sequence: Synthetic oligonucleotide
aaaguaauccccugcauac

SEQ ID NO: 449577 - RNA, 19 nt, Artificial Sequence
  Description of Artificial Sequence: Synthetic oligonucleotide
aauucauugaggcucacag

SEQ ID NO: 449578 - RNA, 19 nt, Artificial Sequence
  Description of Artificial Sequence: Synthetic oligonucleotide
aacgugaagacccaagugg

SEQ ID NO: 449579 - RNA, 19 nt, Artificial Sequence
  Description of Artificial Sequence: Synthetic oligonucleotide
cuugccguaaauuauaaag

SEQ ID NO: 449580 - RNA, 19 nt, Artificial Sequence
  Description of Artificial Sequence: Synthetic oligonucleotide
gauagaaccaccugguccg

SEQ ID NO: 449581 - RNA, 19 nt, Artificial Sequence
  Description of Artificial Sequence: Synthetic oligonucleotide
aacgucgucugucauaucg

SEQ ID NO: 449582 - RNA, 19 nt, Artificial Sequence
  Description of Artificial Sequence: Synthetic oligonucleotide
acucguaugaaacaggguc

SEQ ID NO: 449583 - RNA, 19 nt, Artificial Sequence
  Description of Artificial Sequence: Synthetic oligonucleotide
auuccauacuguucgaucc

SEQ ID NO: 449584 - RNA, 19 nt, Artificial Sequence
  Description of Artificial Sequence: Synthetic oligonucleotide
aaucaaucaucccacugac

SEQ ID NO: 449585 - RNA, 19 nt, Artificial Sequence
  Description of Artificial Sequence: Synthetic oligonucleotide
aauguaaccuucuacucug

SEQ ID NO: 449586 - RNA, 19 nt, Artificial Sequence
  Description of Artificial Sequence: Synthetic oligonucleotide
aucaaaaucaaucauccca

SEQ ID NO: 449587 - RNA, 19 nt, Artificial Sequence
  Description of Artificial Sequence: Synthetic oligonucleotide
aaaaugcgcuaauaggagg

SEQ ID NO: 449588 - RNA, 19 nt, Artificial Sequence
  Description of Artificial Sequence: Synthetic oligonucleotide
gaugacauugugcacacag

SEQ ID NO: 449589 - RNA, 19 nt, Artificial Sequence
  Description of Artificial Sequence: Synthetic oligonucleotide
aacgccauucuccuguggc

SEQ ID NO: 449590 - RNA, 19 nt, Artificial Sequence
  Description of Artificial Sequence: Synthetic oligonucleotide
uuugcuacauucaaguagu

SEQ ID NO: 449591 - RNA, 19 nt, Artificial Sequence
  Description of Artificial Sequence: Synthetic oligonucleotide
ugaaaauuccccuguagag

SEQ ID NO: 449592 - RNA, 19 nt, Artificial Sequence
  Description of Artificial Sequence: Synthetic oligonucleotide
uguagaguuaucagaauca

SEQ ID NO: 449593 - RNA, 19 nt, Artificial Sequence
  Description of Artificial Sequence: Synthetic oligonucleotide
ucaaaaucaaucaucccac

SEQ ID NO: 449594 - RNA, 19 nt, Artificial Sequence
  Description of Artificial Sequence: Synthetic oligonucleotide
uugaauguaaccuucuacu

SEQ ID NO: 449595 - RNA, 19 nt, Artificial Sequence
  Description of Artificial Sequence: Synthetic oligonucleotide
uguguuuaaaccauuuuaa

SEQ ID NO: 449596 - RNA, 19 nt, Artificial Sequence
  Description of Artificial Sequence: Synthetic oligonucleotide
uacuguucgauccauagcu

SEQ ID NO: 449597 - RNA, 19 nt, Artificial Sequence
  Description of Artificial Sequence: Synthetic oligonucleotide
ugauuaauguguuugcuac

SEQ ID NO: 449598 - RNA, 19 nt, Artificial Sequence
  Description of Artificial Sequence: Synthetic oligonucleotide
cacuauuccauacuguucg

SEQ ID NO: 449599 - RNA, 19 nt, Artificial Sequence
  Description of Artificial Sequence: Synthetic oligonucleotide
aaaaucaaucaucccacug

SEQ ID NO: 449600 - RNA, 19 nt, Artificial Sequence
  Description of Artificial Sequence: Synthetic oligonucleotide
uggacuagaacaugcaugc

SEQ ID NO: 449601 - RNA, 19 nt, Artificial Sequence
  Description of Artificial Sequence: Synthetic oligonucleotide
aaccuguucagauauaaau

SEQ ID NO: 449602 - RNA, 19 nt, Artificial Sequence
  Description of Artificial Sequence: Synthetic oligonucleotide
uggagcuucacuuaguaga

SEQ ID NO: 449603 - RNA, 19 nt, Artificial Sequence
  Description of Artificial Sequence: Synthetic oligonucleotide
cuuuugaacgccauucucc

SEQ ID NO: 449604 - RNA, 19 nt, Artificial Sequence
  Description of Artificial Sequence: Synthetic oligonucleotide
ugccguaaauuauaaagag

SEQ ID NO: 449605 - RNA, 19 nt, Artificial Sequence
  Description of Artificial Sequence: Synthetic oligonucleotide
uccucgauuacacauuuug

SEQ ID NO: 449606 - RNA, 19 nt, Artificial Sequence
  Description of Artificial Sequence: Synthetic oligonucleotide
acuuaguagaugucugggc

SEQ ID NO: 449607 - RNA, 19 nt, Artificial Sequence
  Description of Artificial Sequence: Synthetic oligonucleotide
auccaagucacaguguucc

SEQ ID NO: 449608 - RNA, 19 nt, Artificial Sequence
  Description of Artificial Sequence: Synthetic oligonucleotide
aaaugcgcuaauaggaggg

SEQ ID NO: 449609 - RNA, 19 nt, Artificial Sequence
  Description of Artificial Sequence: Synthetic oligonucleotide
ugacauugugcacacagca

SEQ ID NO: 449610 - RNA, 19 nt, Artificial Sequence
  Description of Artificial Sequence: Synthetic oligonucleotide
cauacaaccagucgggagc

SEQ ID NO: 449611 - RNA, 19 nt, Artificial Sequence
  Description of Artificial Sequence: Synthetic oligonucleotide
ucagauugguagaagaguc

SEQ ID NO: 449612 - RNA, 19 nt, Artificial Sequence
  Description of Artificial Sequence: Synthetic oligonucleotide
uugccguaaauuauaaaga

SEQ ID NO: 449613 - RNA, 19 nt, Artificial Sequence
  Description of Artificial Sequence: Synthetic oligonucleotide
ucauaugucucucccaaga

SEQ ID NO: 449614 - RNA, 19 nt, Artificial Sequence
  Description of Artificial Sequence: Synthetic oligonucleotide
uacacuuaucuccaguucu

SEQ ID NO: 449615 - RNA, 19 nt, Artificial Sequence
  Description of Artificial Sequence: Synthetic oligonucleotide
guaaauuauaaagagcuuc

SEQ ID NO: 449616 - RNA, 19 nt, Artificial Sequence
  Description of Artificial Sequence: Synthetic oligonucleotide
uuagugccuggauagaacc

SEQ ID NO: 449617 - RNA, 19 nt, Artificial Sequence
  Description of Artificial Sequence: Synthetic oligonucleotide
ugucauaucgccaggcaca

SEQ ID NO: 449618 - RNA, 19 nt, Artificial Sequence
  Description of Artificial Sequence: Synthetic oligonucleotide
ugaaguuguacaucugagc

SEQ ID NO: 449619 - RNA, 19 nt, Artificial Sequence
  Description of Artificial Sequence: Synthetic oligonucleotide
aagugaaguauacacuuau

SEQ ID NO: 449620 - RNA, 19 nt, Artificial Sequence
  Description of Artificial Sequence: Synthetic oligonucleotide
guaaaaugcgcuaauagga

SEQ ID NO: 449621 - RNA, 19 nt, Artificial Sequence
  Description of Artificial Sequence: Synthetic oligonucleotide
ugauuuaggaucuccacua

SEQ ID NO: 449622 - RNA, 19 nt, Artificial Sequence
  Description of Artificial Sequence: Synthetic oligonucleotide
cuacuuucaagacccaugc

SEQ ID NO: 449623 - RNA, 19 nt, Artificial Sequence
  Description of Artificial Sequence: Synthetic oligonucleotide
cucguaugaaacagggucg

SEQ ID NO: 449624 - RNA, 19 nt, Artificial Sequence
  Description of Artificial Sequence: Synthetic oligonucleotide
uucacuuaguagaugucug

SEQ ID NO: 449625 - RNA, 19 nt, Artificial Sequence
  Description of Artificial Sequence: Synthetic oligonucleotide
aaccagaugggauuugccu

SEQ ID NO: 449626 - RNA, 19 nt, Artificial Sequence
  Description of Artificial Sequence: Synthetic oligonucleotide
auacuguucgauccauagc

SEQ ID NO: 449627 - RNA, 19 nt, Artificial Sequence
  Description of Artificial Sequence: Synthetic oligonucleotide
ucgauuacacauuuuguaa

SEQ ID NO: 449628 - RNA, 19 nt, Artificial Sequence
  Description of Artificial Sequence: Synthetic oligonucleotide
agaacaugcaugcugggga

SEQ ID NO: 449629 - RNA, 19 nt, Artificial Sequence
  Description of Artificial Sequence: Synthetic oligonucleotide
ucacgugugaaaagaacug

SEQ ID NO: 449630 - RNA, 19 nt, Artificial Sequence
  Description of Artificial Sequence: Synthetic oligonucleotide
uguacaucugagcugaauu

SEQ ID NO: 449631 - RNA, 19 nt, Artificial Sequence
  Description of Artificial Sequence: Synthetic oligonucleotide
cauuucuacauaaagucca

SEQ ID NO: 449632 - RNA, 19 nt, Artificial Sequence
  Description of Artificial Sequence: Synthetic oligonucleotide
uuaaaccauuuuaaugaca

SEQ ID NO: 449633 - RNA, 19 nt, Artificial Sequence
  Description of Artificial Sequence: Synthetic oligonucleotide
ugucuuugaugcaaagagc

SEQ ID NO: 449634 - RNA, 19 nt, Artificial Sequence
  Description of Artificial Sequence: Synthetic oligonucleotide
aaggacucguaugaaacag

SEQ ID NO: 449635 - RNA, 19 nt, Artificial Sequence
  Description of Artificial Sequence: Synthetic oligonucleotide
uugaacgccauucuccugu

SEQ ID NO: 449636 - RNA, 19 nt, Artificial Sequence
  Description of Artificial Sequence: Synthetic oligonucleotide
uuaguagaugucugggcag

SEQ ID NO: 449637 - RNA, 19 nt, Artificial Sequence
  Description of Artificial Sequence: Synthetic oligonucleotide
uuuuguaacggagugugcu

SEQ ID NO: 449638 - RNA, 19 nt, Artificial Sequence
  Description of Artificial Sequence: Synthetic oligonucleotide
gaaguuguacaucugagcu

SEQ ID NO: 449639 - RNA, 19 nt, Artificial Sequence
  Description of Artificial Sequence: Synthetic oligonucleotide
ugaucaacucauaugucuc

SEQ ID NO: 449640 - RNA, 19 nt, Artificial Sequence
  Description of Artificial Sequence: Synthetic oligonucleotide
ucuccacuauuccauacug

SEQ ID NO: 449641 - RNA, 19 nt, Artificial Sequence
  Description of Artificial Sequence: Synthetic oligonucleotide
ugugauuuaggaucuccac

SEQ ID NO: 449642 - RNA, 19 nt, Artificial Sequence
  Description of Artificial Sequence: Synthetic oligonucleotide
ggaaggaacacacagguga

SEQ ID NO: 449643 - RNA, 19 nt, Artificial Sequence
  Description of Artificial Sequence: Synthetic oligonucleotide
guagauggaaccauggaac

SEQ ID NO: 449644 - RNA, 19 nt, Artificial Sequence
  Description of Artificial Sequence: Synthetic oligonucleotide
aacggagugugcugccagc

SEQ ID NO: 449645 - RNA, 19 nt, Artificial Sequence
  Description of Artificial Sequence: Synthetic oligonucleotide
caugccacggaugucaggg

SEQ ID NO: 449646 - RNA, 19 nt, Artificial Sequence
  Description of Artificial Sequence: Synthetic oligonucleotide
ugcgcucaaaguaaucccc

SEQ ID NO: 449647 - RNA, 19 nt, Artificial Sequence
  Description of Artificial Sequence: Synthetic oligonucleotide
uuuggcacguuccuuucug

SEQ ID NO: 449648 - RNA, 19 nt, Artificial Sequence
  Description of Artificial Sequence: Synthetic oligonucleotide
uuuguaacggagugugcug

SEQ ID NO: 449649 - RNA, 19 nt, Artificial Sequence
  Description of Artificial Sequence: Synthetic oligonucleotide
ugaacccuaagucuucccu

SEQ ID NO: 449650 - RNA, 19 nt, Artificial Sequence
  Description of Artificial Sequence: Synthetic oligonucleotide
ucugucacgugugaaaaga

SEQ ID NO: 449651 - RNA, 19 nt, Artificial Sequence
  Description of Artificial Sequence: Synthetic oligonucleotide
uguucgauccauagcugcc

SEQ ID NO: 449652 - RNA, 19 nt, Artificial Sequence
  Description of Artificial Sequence: Synthetic oligonucleotide
aagacccaugcuccccucc

SEQ ID NO: 449653 - RNA, 19 nt, Artificial Sequence
  Description of Artificial Sequence: Synthetic oligonucleotide
agauauaaaucugaacccu

SEQ ID NO: 449654 - RNA, 19 nt, Artificial Sequence
  Description of Artificial Sequence: Synthetic oligonucleotide
aguuguacaucugagcuga

SEQ ID NO: 449655 - RNA, 19 nt, Artificial Sequence
  Description of Artificial Sequence: Synthetic oligonucleotide
auuggcaucgugaucuugg

SEQ ID NO: 449656 - RNA, 19 nt, Artificial Sequence
  Description of Artificial Sequence: Synthetic oligonucleotide
uauuccauacuguucgauc

SEQ ID NO: 449657 - RNA, 19 nt, Artificial Sequence
  Description of Artificial Sequence: Synthetic oligonucleotide
caucacagccuuuagagga

SEQ ID NO: 449658 - RNA, 19 nt, Artificial Sequence
  Description of Artificial Sequence: Synthetic oligonucleotide
uucagauugguagaagagu

SEQ ID NO: 449659 - RNA, 19 nt, Artificial Sequence
  Description of Artificial Sequence: Synthetic oligonucleotide
cuuaguagaugucugggca

SEQ ID NO: 449660 - RNA, 19 nt, Artificial Sequence
  Description of Artificial Sequence: Synthetic oligonucleotide
aagaauucuuccuccccgu

SEQ ID NO: 449661 - RNA, 19 nt, Artificial Sequence
  Description of Artificial Sequence: Synthetic oligonucleotide
cauaucgccaggcacauca

SEQ ID NO: 449662 - RNA, 19 nt, Artificial Sequence
  Description of Artificial Sequence: Synthetic oligonucleotide
ugcacuucugucacgugug

SEQ ID NO: 449663 - RNA, 19 nt, Artificial Sequence
  Description of Artificial Sequence: Synthetic oligonucleotide
ugaugacuaaccuguucag

SEQ ID NO: 449664 - RNA, 19 nt, Artificial Sequence
  Description of Artificial Sequence: Synthetic oligonucleotide
ugcgcuaauaggaggguga

SEQ ID NO: 449665 - RNA, 19 nt, Artificial Sequence
  Description of Artificial Sequence: Synthetic oligonucleotide
uauuuugccucugaaaauu

SEQ ID NO: 449666 - RNA, 19 nt, Artificial Sequence
  Description of Artificial Sequence: Synthetic oligonucleotide
aaacccacaucacagccuu

SEQ ID NO: 449667 - RNA, 19 nt, Artificial Sequence
  Description of Artificial Sequence: Synthetic oligonucleotide
ugucacgugugaaaagaac

SEQ ID NO: 449668 - RNA, 19 nt, Artificial Sequence
  Description of Artificial Sequence: Synthetic oligonucleotide
guagaugcugcuucugacc

SEQ ID NO: 449669 - RNA, 19 nt, Artificial Sequence
  Description of Artificial Sequence: Synthetic oligonucleotide
acaaccagaugggauuugc

SEQ ID NO: 449670 - RNA, 19 nt, Artificial Sequence
  Description of Artificial Sequence: Synthetic oligonucleotide
accagaugggauuugccug

SEQ ID NO: 449671 - RNA, 19 nt, Artificial Sequence
  Description of Artificial Sequence: Synthetic oligonucleotide
uggugauuaauguguuugc

SEQ ID NO: 449672 - RNA, 19 nt, Artificial Sequence
  Description of Artificial Sequence: Synthetic oligonucleotide
uuauuuugccucugaaaau

SEQ ID NO: 449673 - RNA, 19 nt, Artificial Sequence
  Description of Artificial Sequence: Synthetic oligonucleotide
uccacuauuccauacuguu

SEQ ID NO: 449674 - RNA, 19 nt, Artificial Sequence
  Description of Artificial Sequence: Synthetic oligonucleotide
gugaaaagaacuggggagc

SEQ ID NO: 449675 - RNA, 19 nt, Artificial Sequence
  Description of Artificial Sequence: Synthetic oligonucleotide
uuucugucuugaauguaac

SEQ ID NO: 449676 - RNA, 19 nt, Artificial Sequence
  Description of Artificial Sequence: Synthetic oligonucleotide
ugacuuuuauuuugccucu

SEQ ID NO: 449677 - RNA, 19 nt, Artificial Sequence
  Description of Artificial Sequence: Synthetic oligonucleotide
gagggugaugacuaaccug

SEQ ID NO: 449678 - RNA, 19 nt, Artificial Sequence
  Description of Artificial Sequence: Synthetic oligonucleotide
uccacuugccguaaauuau

SEQ ID NO: 449679 - RNA, 19 nt, Artificial Sequence
  Description of Artificial Sequence: Synthetic oligonucleotide
auacaaccagucgggagcc

SEQ ID NO: 449680 - RNA, 19 nt, Artificial Sequence
  Description of Artificial Sequence: Synthetic oligonucleotide
ucuuccagaaacccacauc

SEQ ID NO: 449681 - RNA, 19 nt, Artificial Sequence
  Description of Artificial Sequence: Synthetic oligonucleotide
cugaaaauuccccuguaga

SEQ ID NO: 449682 - RNA, 19 nt, Artificial Sequence
  Description of Artificial Sequence: Synthetic oligonucleotide
ugugggagugcugaggcca

SEQ ID NO: 449683 - RNA, 19 nt, Artificial Sequence
  Description of Artificial Sequence: Synthetic oligonucleotide
gauuaauguguuugcuaca

SEQ ID NO: 449684 - RNA, 19 nt, Artificial Sequence
  Description of Artificial Sequence: Synthetic oligonucleotide
ugcuuuugaacgccauucu

SEQ ID NO: 449685 - RNA, 19 nt, Artificial Sequence
  Description of Artificial Sequence: Synthetic oligonucleotide
uaacggagugugcugccag

SEQ ID NO: 449686 - RNA, 19 nt, Artificial Sequence
  Description of Artificial Sequence: Synthetic oligonucleotide
guaugaaacagggucgaug

SEQ ID NO: 449687 - RNA, 19 nt, Artificial Sequence
  Description of Artificial Sequence: Synthetic oligonucleotide
uugccccaaaacuucagcu

SEQ ID NO: 449688 - RNA, 19 nt, Artificial Sequence
  Description of Artificial Sequence: Synthetic oligonucleotide
uuggacagcuccaaaccaa

SEQ ID NO: 449689 - RNA, 19 nt, Artificial Sequence
  Description of Artificial Sequence: Synthetic oligonucleotide
augacauugugcacacagc

SEQ ID NO: 449690 - RNA, 19 nt, Artificial Sequence
  Description of Artificial Sequence: Synthetic oligonucleotide
uccccuguagaguuaucag

SEQ ID NO: 449691 - RNA, 19 nt, Artificial Sequence
  Description of Artificial Sequence: Synthetic oligonucleotide
aaccaaacacaagacugca

SEQ ID NO: 449692 - RNA, 19 nt, Artificial Sequence
  Description of Artificial Sequence: Synthetic oligonucleotide
gcuaauaggagggugauga

SEQ ID NO: 449693 - RNA, 19 nt, Artificial Sequence
  Description of Artificial Sequence: Synthetic oligonucleotide
guaaccuucuacucuguga

SEQ ID NO: 449694 - RNA, 19 nt, Artificial Sequence
  Description of Artificial Sequence: Synthetic oligonucleotide
gaaacagggucgaugcccc

SEQ ID NO: 449695 - RNA, 19 nt, Artificial Sequence
  Description of Artificial Sequence: Synthetic oligonucleotide
cacgugugaaaagaacugg

SEQ ID NO: 449696 - RNA, 19 nt, Artificial Sequence
  Description of Artificial Sequence: Synthetic oligonucleotide
uagaguuaucagaaucaaa

SEQ ID NO: 449697 - RNA, 19 nt, Artificial Sequence
  Description of Artificial Sequence: Synthetic oligonucleotide
ucaaaguaauccccugcau

SEQ ID NO: 449698 - RNA, 19 nt, Artificial Sequence
  Description of Artificial Sequence: Synthetic oligonucleotide
aggcucuacugguucuucc

SEQ ID NO: 449699 - RNA, 19 nt, Artificial Sequence
  Description of Artificial Sequence: Synthetic oligonucleotide
ucauuauguuugagaagcu

SEQ ID NO: 449700 - RNA, 19 nt, Artificial Sequence
  Description of Artificial Sequence: Synthetic oligonucleotide
gaguagcuuacugccaggg

SEQ ID NO: 449701 - RNA, 19 nt, Artificial Sequence
  Description of Artificial Sequence: Synthetic oligonucleotide
gacauugugcacacagcag

SEQ ID NO: 449702 - RNA, 19 nt, Artificial Sequence
  Description of Artificial Sequence: Synthetic oligonucleotide
acgugugaaaagaacuggg

SEQ ID NO: 449703 - RNA, 19 nt, Artificial Sequence
  Description of Artificial Sequence: Synthetic oligonucleotide
aaccuucuacucugugaag

SEQ ID NO: 449704 - RNA, 19 nt, Artificial Sequence
  Description of Artificial Sequence: Synthetic oligonucleotide
acaaccagucgggagcccc

SEQ ID NO: 449705 - RNA, 19 nt, Artificial Sequence
  Description of Artificial Sequence: Synthetic oligonucleotide
uuucaagacccaugcuccc

SEQ ID NO: 449706 - RNA, 19 nt, Artificial Sequence
  Description of Artificial Sequence: Synthetic oligonucleotide
uggggaaaccaaacacaag

SEQ ID NO: 449707 - RNA, 19 nt, Artificial Sequence
  Description of Artificial Sequence: Synthetic oligonucleotide
ugaaaagaacuggggagcu

SEQ ID NO: 449708 - RNA, 19 nt, Artificial Sequence
  Description of Artificial Sequence: Synthetic oligonucleotide
auacuccacacgcugaaau

SEQ ID NO: 449709 - RNA, 19 nt, Artificial Sequence
  Description of Artificial Sequence: Synthetic oligonucleotide
uuguaacggagugugcugc

SEQ ID NO: 449710 - RNA, 19 nt, Artificial Sequence
  Description of Artificial Sequence: Synthetic oligonucleotide
agugaaguauacacuuauc

SEQ ID NO: 449711 - RNA, 19 nt, Artificial Sequence
  Description of Artificial Sequence: Synthetic oligonucleotide
cucgauuacacauuuugua

SEQ ID NO: 449712 - RNA, 19 nt, Artificial Sequence
  Description of Artificial Sequence: Synthetic oligonucleotide
uucugucacgugugaaaag

SEQ ID NO: 449713 - RNA, 19 nt, Artificial Sequence
  Description of Artificial Sequence: Synthetic oligonucleotide
auuuuguaacggagugugc

SEQ ID NO: 449714 - RNA, 19 nt, Artificial Sequence
  Description of Artificial Sequence: Synthetic oligonucleotide
agaguagcuuacugccagg

SEQ ID NO: 449715 - RNA, 19 nt, Artificial Sequence
  Description of Artificial Sequence: Synthetic oligonucleotide
ggcgucaaagaauucuucc

SEQ ID NO: 449716 - RNA, 19 nt, Artificial Sequence
  Description of Artificial Sequence: Synthetic oligonucleotide
cacuguuagcuuucucagg

SEQ ID NO: 449717 - RNA, 19 nt, Artificial Sequence
  Description of Artificial Sequence: Synthetic oligonucleotide
uuggcacguuccuuucugg

SEQ ID NO: 449718 - RNA, 19 nt, Artificial Sequence
  Description of Artificial Sequence: Synthetic oligonucleotide
guguuugcuacauucaagu

SEQ ID NO: 449719 - RNA, 19 nt, Artificial Sequence
  Description of Artificial Sequence: Synthetic oligonucleotide
auguguuugcuacauucaa

SEQ ID NO: 449720 - RNA, 19 nt, Artificial Sequence
  Description of Artificial Sequence: Synthetic oligonucleotide
ucuuccucgauuacacauu

SEQ ID NO: 449721 - RNA, 19 nt, Artificial Sequence
  Description of Artificial Sequence: Synthetic oligonucleotide
gaggugagugaagaaauga

SEQ ID NO: 449722 - RNA, 19 nt, Artificial Sequence
  Description of Artificial Sequence: Synthetic oligonucleotide
agaacuggggagcucuccu

SEQ ID NO: 449723 - RNA, 19 nt, Artificial Sequence
  Description of Artificial Sequence: Synthetic oligonucleotide
uaucagaaucaaagccugu

SEQ ID NO: 449724 - RNA, 19 nt, Artificial Sequence
  Description of Artificial Sequence: Synthetic oligonucleotide
gaugggauuugccuggacu

SEQ ID NO: 449725 - RNA, 19 nt, Artificial Sequence
  Description of Artificial Sequence: Synthetic oligonucleotide
uaaccuguucagauauaaa

SEQ ID NO: 449726 - RNA, 19 nt, Artificial Sequence
  Description of Artificial Sequence: Synthetic oligonucleotide
cccaagaguggguugaagg

SEQ ID NO: 449727 - RNA, 19 nt, Artificial Sequence
  Description of Artificial Sequence: Synthetic oligonucleotide
augaguagaugcugcuucu

SEQ ID NO: 449728 - RNA, 19 nt, Artificial Sequence
  Description of Artificial Sequence: Synthetic oligonucleotide
ggacucguaugaaacaggg

SEQ ID NO: 449729 - RNA, 19 nt, Artificial Sequence
  Description of Artificial Sequence: Synthetic oligonucleotide
ccguaaauuauaaagagcu

SEQ ID NO: 449730 - RNA, 19 nt, Artificial Sequence
  Description of Artificial Sequence: Synthetic oligonucleotide
caggaaugcagagauggac

SEQ ID NO: 449731 - RNA, 19 nt, Artificial Sequence
  Description of Artificial Sequence: Synthetic oligonucleotide
cugaucaacucauaugucu

SEQ ID NO: 449732 - RNA, 19 nt, Artificial Sequence
  Description of Artificial Sequence: Synthetic oligonucleotide
uguuugcuacauucaagua

SEQ ID NO: 449733 - RNA, 19 nt, Artificial Sequence
  Description of Artificial Sequence: Synthetic oligonucleotide
cauagcugcccaaggauga

SEQ ID NO: 449734 - RNA, 19 nt, Artificial Sequence
  Description of Artificial Sequence: Synthetic oligonucleotide
ucguaugaaacagggucga

SEQ ID NO: 449735 - RNA, 19 nt, Artificial Sequence
  Description of Artificial Sequence: Synthetic oligonucleotide
aguggagcuucacuuagua

SEQ ID NO: 449736 - RNA, 19 nt, Artificial Sequence
  Description of Artificial Sequence: Synthetic oligonucleotide
caaccagaugggauuugcc

SEQ ID NO: 449737 - RNA, 19 nt, Artificial Sequence
  Description of Artificial Sequence: Synthetic oligonucleotide
accacaugaguagaugcug

SEQ ID NO: 449738 - RNA, 19 nt, Artificial Sequence
  Description of Artificial Sequence: Synthetic oligonucleotide
ucugaacccuaagucuucc

SEQ ID NO: 449739 - RNA, 19 nt, Artificial Sequence
  Description of Artificial Sequence: Synthetic oligonucleotide
uuugaacgccauucuccug

SEQ ID NO: 449740 - RNA, 19 nt, Artificial Sequence
  Description of Artificial Sequence: Synthetic oligonucleotide
gugauuaauguguuugcua

SEQ ID NO: 449741 - RNA, 19 nt, Artificial Sequence
  Description of Artificial Sequence: Synthetic oligonucleotide
agccuuuagaggagcacac

SEQ ID NO: 449742 - RNA, 19 nt, Artificial Sequence
  Description of Artificial Sequence: Synthetic oligonucleotide
aaugcgcuaauaggagggu

SEQ ID NO: 449743 - RNA, 19 nt, Artificial Sequence
  Description of Artificial Sequence: Synthetic oligonucleotide
gaugacuaaccuguucaga

SEQ ID NO: 449744 - RNA, 19 nt, Artificial Sequence
  Description of Artificial Sequence: Synthetic oligonucleotide
agguauguacacacaguag

SEQ ID NO: 449745 - RNA, 19 nt, Artificial Sequence
  Description of Artificial Sequence: Synthetic oligonucleotide
uaucgccaggcacaucacu

SEQ ID NO: 449746 - RNA, 19 nt, Artificial Sequence
  Description of Artificial Sequence: Synthetic oligonucleotide
aguagcuuacugccaggga

SEQ ID NO: 449747 - RNA, 19 nt, Artificial Sequence
  Description of Artificial Sequence: Synthetic oligonucleotide
aggcaauuggcaucgugau

SEQ ID NO: 449748 - RNA, 19 nt, Artificial Sequence
  Description of Artificial Sequence: Synthetic oligonucleotide
cacugugauccuuggugcc

SEQ ID NO: 449749 - RNA, 19 nt, Artificial Sequence
  Description of Artificial Sequence: Synthetic oligonucleotide
cuguuagcuuucucagggc

SEQ ID NO: 449750 - RNA, 19 nt, Artificial Sequence
  Description of Artificial Sequence: Synthetic oligonucleotide
aguggacucuggccuacag

SEQ ID NO: 449751 - RNA, 19 nt, Artificial Sequence
  Description of Artificial Sequence: Synthetic oligonucleotide
cagguauguacacacagua

SEQ ID NO: 449752 - RNA, 19 nt, Artificial Sequence
  Description of Artificial Sequence: Synthetic oligonucleotide
uugauccuccagaguagcu

SEQ ID NO: 449753 - RNA, 19 nt, Artificial Sequence
  Description of Artificial Sequence: Synthetic oligonucleotide
ugugaagcuccuucccgaa

SEQ ID NO: 449754 - RNA, 19 nt, Artificial Sequence
  Description of Artificial Sequence: Synthetic oligonucleotide
aggacucguaugaaacagg

SEQ ID NO: 449755 - RNA, 19 nt, Artificial Sequence
  Description of Artificial Sequence: Synthetic oligonucleotide
acuauuccauacuguucga

SEQ ID NO: 449756 - RNA, 19 nt, Artificial Sequence
  Description of Artificial Sequence: Synthetic oligonucleotide
guuagugccuggauagaac

SEQ ID NO: 449757 - RNA, 19 nt, Artificial Sequence
  Description of Artificial Sequence: Synthetic oligonucleotide
guugagaccuucugaguaa

SEQ ID NO: 449758 - RNA, 19 nt, Artificial Sequence
  Description of Artificial Sequence: Synthetic oligonucleotide
cuuggacagcuccaaacca

SEQ ID NO: 449759 - RNA, 19 nt, Artificial Sequence
  Description of Artificial Sequence: Synthetic oligonucleotide
acgcugaaaucacuuucug

SEQ ID NO: 449760 - RNA, 19 nt, Artificial Sequence
  Description of Artificial Sequence: Synthetic oligonucleotide
cagccgagacugcaaaggc

SEQ ID NO: 449761 - RNA, 19 nt, Artificial Sequence
  Description of Artificial Sequence: Synthetic oligonucleotide
guagcuuacugccagggau

SEQ ID NO: 449762 - RNA, 19 nt, Artificial Sequence
  Description of Artificial Sequence: Synthetic oligonucleotide
gugaacgugaagacccaag

SEQ ID NO: 449763 - RNA, 19 nt, Artificial Sequence
  Description of Artificial Sequence: Synthetic oligonucleotide
gaacaugcaugcuggggaa

SEQ ID NO: 449764 - RNA, 19 nt, Artificial Sequence
  Description of Artificial Sequence: Synthetic oligonucleotide
aggaucuccacuauuccau

SEQ ID NO: 449765 - RNA, 19 nt, Artificial Sequence
  Description of Artificial Sequence: Synthetic oligonucleotide
cuaaccuguucagauauaa

SEQ ID NO: 449766 - RNA, 19 nt, Artificial Sequence
  Description of Artificial Sequence: Synthetic oligonucleotide
uggacacaccugcuugugu

SEQ ID NO: 449767 - RNA, 19 nt, Artificial Sequence
  Description of Artificial Sequence: Synthetic oligonucleotide
gcauacaaccagucgggag

SEQ ID NO: 449768 - RNA, 19 nt, Artificial Sequence
  Description of Artificial Sequence: Synthetic oligonucleotide
uacauucaaguaguuucaa

SEQ ID NO: 449769 - RNA, 19 nt, Artificial Sequence
  Description of Artificial Sequence: Synthetic oligonucleotide
ucacuucauuccgugggug

SEQ ID NO: 449770 - RNA, 19 nt, Artificial Sequence
  Description of Artificial Sequence: Synthetic oligonucleotide
gcuacuuucaagacccaug

SEQ ID NO: 449771 - RNA, 19 nt, Artificial Sequence
  Description of Artificial Sequence: Synthetic oligonucleotide
ugaacgccauucuccugug

SEQ ID NO: 449772 - RNA, 19 nt, Artificial Sequence
  Description of Artificial Sequence: Synthetic oligonucleotide
auagaaccaccugguccgc

SEQ ID NO: 449773 - RNA, 19 nt, Artificial Sequence
  Description of Artificial Sequence: Synthetic oligonucleotide
guccacuugccguaaauua

SEQ ID NO: 449774 - RNA, 19 nt, Artificial Sequence
  Description of Artificial Sequence: Synthetic oligonucleotide
acacuuaucuccaguucug

SEQ ID NO: 449775 - RNA, 19 nt, Artificial Sequence
  Description of Artificial Sequence: Synthetic oligonucleotide
gaacgccauucuccugugg

SEQ ID NO: 449776 - RNA, 19 nt, Artificial Sequence
  Description of Artificial Sequence: Synthetic oligonucleotide
uugccuuauucagauuggu

SEQ ID NO: 449777 - RNA, 19 nt, Artificial Sequence
  Description of Artificial Sequence: Synthetic oligonucleotide
aucacuugacaggaaugca

SEQ ID NO: 449778 - RNA, 19 nt, Artificial Sequence
  Description of Artificial Sequence: Synthetic oligonucleotide
ugguacuuuugcugguauc

SEQ ID NO: 449779 - RNA, 19 nt, Artificial Sequence
  Description of Artificial Sequence: Synthetic oligonucleotide
cugaacccuaagucuuccc

SEQ ID NO: 449780 - RNA, 19 nt, Artificial Sequence
  Description of Artificial Sequence: Synthetic oligonucleotide
acgugaagacccaagugga

SEQ ID NO: 449781 - RNA, 19 nt, Artificial Sequence
  Description of Artificial Sequence: Synthetic oligonucleotide
gccguaaauuauaaagagc

SEQ ID NO: 449782 - RNA, 19 nt, Artificial Sequence
  Description of Artificial Sequence: Synthetic oligonucleotide
acccaaguggagcuucacu

SEQ ID NO: 449783 - RNA, 19 nt, Artificial Sequence
  Description of Artificial Sequence: Synthetic oligonucleotide
ugcuacauucaaguaguuu

SEQ ID NO: 449784 - RNA, 19 nt, Artificial Sequence
  Description of Artificial Sequence: Synthetic oligonucleotide
gguugagaccuucugagua

SEQ ID NO: 449785 - RNA, 19 nt, Artificial Sequence
  Description of Artificial Sequence: Synthetic oligonucleotide
gacuuuuauuuugccucug

SEQ ID NO: 449786 - RNA, 19 nt, Artificial Sequence
  Description of Artificial Sequence: Synthetic oligonucleotide
cauccaagucacaguguuc

SEQ ID NO: 449787 - RNA, 19 nt, Artificial Sequence
  Description of Artificial Sequence: Synthetic oligonucleotide
cauuccgugggugcccucc

SEQ ID NO: 449788 - RNA, 19 nt, Artificial Sequence
  Description of Artificial Sequence: Synthetic oligonucleotide
aguggugauuaauguguuu

SEQ ID NO: 449789 - RNA, 19 nt, Artificial Sequence
  Description of Artificial Sequence: Synthetic oligonucleotide
gccgagacugcaaaggcag

SEQ ID NO: 449790 - RNA, 19 nt, Artificial Sequence
  Description of Artificial Sequence: Synthetic oligonucleotide
guguuuaaaccauuuuaau

SEQ ID NO: 449791 - RNA, 19 nt, Artificial Sequence
  Description of Artificial Sequence: Synthetic oligonucleotide
aguugcgcucaaaguaauc

SEQ ID NO: 449792 - RNA, 19 nt, Artificial Sequence
  Description of Artificial Sequence: Synthetic oligonucleotide
ugcauacaaccagucggga

SEQ ID NO: 449793 - RNA, 19 nt, Artificial Sequence
  Description of Artificial Sequence: Synthetic oligonucleotide
uugagaccuucugaguaaa

SEQ ID NO: 449794 - RNA, 19 nt, Artificial Sequence
  Description of Artificial Sequence: Synthetic oligonucleotide
cuucauuccgugggugccc

SEQ ID NO: 449795 - RNA, 19 nt, Artificial Sequence
  Description of Artificial Sequence: Synthetic oligonucleotide
gauggacacaccugcuugu

SEQ ID NO: 449796 - RNA, 19 nt, Artificial Sequence
  Description of Artificial Sequence: Synthetic oligonucleotide
uccacguguaggcuucauu

SEQ ID NO: 449797 - RNA, 19 nt, Artificial Sequence
  Description of Artificial Sequence: Synthetic oligonucleotide
acuguucgauccauagcug

SEQ ID NO: 449798 - RNA, 19 nt, Artificial Sequence
  Description of Artificial Sequence: Synthetic oligonucleotide
ucgaugccccacaagcauu

SEQ ID NO: 449799 - RNA, 19 nt, Artificial Sequence
  Description of Artificial Sequence: Synthetic oligonucleotide
gacggcgucaaagaauucu

SEQ ID NO: 449800 - RNA, 19 nt, Artificial Sequence
  Description of Artificial Sequence: Synthetic oligonucleotide
gaaaagaacuggggagcuc

SEQ ID NO: 449801 - RNA, 19 nt, Artificial Sequence
  Description of Artificial Sequence: Synthetic oligonucleotide
cuucacuuaguagaugucu

SEQ ID NO: 449802 - RNA, 19 nt, Artificial Sequence
  Description of Artificial Sequence: Synthetic oligonucleotide
gccugacuccaauucauug

SEQ ID NO: 449803 - RNA, 19 nt, Artificial Sequence
  Description of Artificial Sequence: Synthetic oligonucleotide
acagggucgaugccccaca

SEQ ID NO: 449804 - RNA, 19 nt, Artificial Sequence
  Description of Artificial Sequence: Synthetic oligonucleotide
gaccucccaaugcacacaa

SEQ ID NO: 449805 - RNA, 19 nt, Artificial Sequence
  Description of Artificial Sequence: Synthetic oligonucleotide
cacaguagauugucuuuga

SEQ ID NO: 449806 - RNA, 19 nt, Artificial Sequence
  Description of Artificial Sequence: Synthetic oligonucleotide
cacacagcaggugggguug

SEQ ID NO: 449807 - RNA, 19 nt, Artificial Sequence
  Description of Artificial Sequence: Synthetic oligonucleotide
aggaacgucgucugucaua

SEQ ID NO: 449808 - RNA, 19 nt, Artificial Sequence
  Description of Artificial Sequence: Synthetic oligonucleotide
agggucgaugccccacaag

SEQ ID NO: 449809 - RNA, 19 nt, Artificial Sequence
  Description of Artificial Sequence: Synthetic oligonucleotide
gcuuuugaacgccauucuc

SEQ ID NO: 449810 - RNA, 19 nt, Artificial Sequence
  Description of Artificial Sequence: Synthetic oligonucleotide
caguacacaguggugauua

SEQ ID NO: 449811 - RNA, 19 nt, Artificial Sequence
  Description of Artificial Sequence: Synthetic oligonucleotide
aaguugcgcucaaaguaau

SEQ ID NO: 449812 - RNA, 19 nt, Artificial Sequence
  Description of Artificial Sequence: Synthetic oligonucleotide
cuggguccgcugcaggaag

SEQ ID NO: 449813 - RNA, 19 nt, Artificial Sequence
  Description of Artificial Sequence: Synthetic oligonucleotide
aaguggagcuucacuuagu

SEQ ID NO: 449814 - RNA, 19 nt, Artificial Sequence
  Description of Artificial Sequence: Synthetic oligonucleotide
ucccaagaguggguugaag

SEQ ID NO: 449815 - RNA, 19 nt, Artificial Sequence
  Description of Artificial Sequence: Synthetic oligonucleotide
auaucgccaggcacaucac

SEQ ID NO: 449816 - RNA, 19 nt, Artificial Sequence
  Description of Artificial Sequence: Synthetic oligonucleotide
auaggagggugaugacuaa

SEQ ID NO: 449817 - RNA, 19 nt, Artificial Sequence
  Description of Artificial Sequence: Synthetic oligonucleotide
ugccugacuccaauucauu

SEQ ID NO: 449818 - RNA, 19 nt, Artificial Sequence
  Description of Artificial Sequence: Synthetic oligonucleotide
augcgcuaauaggagggug

SEQ ID NO: 449819 - RNA, 19 nt, Artificial Sequence
  Description of Artificial Sequence: Synthetic oligonucleotide
agcuuacugccagggauga

SEQ ID NO: 449820 - RNA, 19 nt, Artificial Sequence
  Description of Artificial Sequence: Synthetic oligonucleotide
cacgcugaaaucacuuucu

SEQ ID NO: 449821 - RNA, 19 nt, Artificial Sequence
  Description of Artificial Sequence: Synthetic oligonucleotide
uccuuucguguuucuuaaa

SEQ ID NO: 449822 - RNA, 19 nt, Artificial Sequence
  Description of Artificial Sequence: Synthetic oligonucleotide
uguggcggucucuccccgc

SEQ ID NO: 449823 - RNA, 19 nt, Artificial Sequence
  Description of Artificial Sequence: Synthetic oligonucleotide
cacuugccguaaauuauaa

SEQ ID NO: 449824 - RNA, 19 nt, Artificial Sequence
  Description of Artificial Sequence: Synthetic oligonucleotide
gugcacuucugucacgugu

SEQ ID NO: 449825 - RNA, 19 nt, Artificial Sequence
  Description of Artificial Sequence: Synthetic oligonucleotide
gacugcaaaggcagcuaca

SEQ ID NO: 449826 - RNA, 19 nt, Artificial Sequence
  Description of Artificial Sequence: Synthetic oligonucleotide
cccugaucaacucauaugu

SEQ ID NO: 449827 - RNA, 19 nt, Artificial Sequence
  Description of Artificial Sequence: Synthetic oligonucleotide
gaccccucagagacaggag

SEQ ID NO: 449828 - RNA, 19 nt, Artificial Sequence
  Description of Artificial Sequence: Synthetic oligonucleotide
aggauacuccacacgcuga

SEQ ID NO: 449829 - RNA, 19 nt, Artificial Sequence
  Description of Artificial Sequence: Synthetic oligonucleotide
cugguucuuccucgauuac

SEQ ID NO: 449830 - RNA, 19 nt, Artificial Sequence
  Description of Artificial Sequence: Synthetic oligonucleotide
caaaaucaaucaucccacu

SEQ ID NO: 449831 - RNA, 19 nt, Artificial Sequence
  Description of Artificial Sequence: Synthetic oligonucleotide
aaccagucgggagccccug

SEQ ID NO: 449832 - RNA, 19 nt, Artificial Sequence
  Description of Artificial Sequence: Synthetic oligonucleotide
ucgauccauagcugcccaa

SEQ ID NO: 449833 - RNA, 19 nt, Artificial Sequence
  Description of Artificial Sequence: Synthetic oligonucleotide
uugcuacauucaaguaguu

SEQ ID NO: 449834 - RNA, 19 nt, Artificial Sequence
  Description of Artificial Sequence: Synthetic oligonucleotide
gccauucuccaugccacgg

SEQ ID NO: 449835 - RNA, 19 nt, Artificial Sequence
  Description of Artificial Sequence: Synthetic oligonucleotide
ggguagauggaaccaugga

SEQ ID NO: 449836 - RNA, 19 nt, Artificial Sequence
  Description of Artificial Sequence: Synthetic oligonucleotide
agccgagacugcaaaggca

SEQ ID NO: 449837 - RNA, 19 nt, Artificial Sequence
  Description of Artificial Sequence: Synthetic oligonucleotide
ggauacuccacacgcugaa

SEQ ID NO: 449838 - RNA, 19 nt, Artificial Sequence
  Description of Artificial Sequence: Synthetic oligonucleotide
uuccucgauuacacauuuu

SEQ ID NO: 449839 - RNA, 19 nt, Artificial Sequence
  Description of Artificial Sequence: Synthetic oligonucleotide
caauucauugaggcucaca

SEQ ID NO: 449840 - RNA, 19 nt, Artificial Sequence
  Description of Artificial Sequence: Synthetic oligonucleotide
ccugaucaacucauauguc

SEQ ID NO: 449841 - RNA, 19 nt, Artificial Sequence
  Description of Artificial Sequence: Synthetic oligonucleotide
gauccuuggugccaccauu

SEQ ID NO: 449842 - RNA, 19 nt, Artificial Sequence
  Description of Artificial Sequence: Synthetic oligonucleotide
gggcgucaaguuugaaggc

SEQ ID NO: 449843 - RNA, 19 nt, Artificial Sequence
  Description of Artificial Sequence: Synthetic oligonucleotide
ggcgucaaguuugaaggca

SEQ ID NO: 449844 - RNA, 19 nt, Artificial Sequence
  Description of Artificial Sequence: Synthetic oligonucleotide
ggcaauuggcaucgugauc

SEQ ID NO: 449845 - RNA, 19 nt, Artificial Sequence
  Description of Artificial Sequence: Synthetic oligonucleotide
gugacggcgucaaagaauu

SEQ ID NO: 449846 - RNA, 19 nt, Artificial Sequence
  Description of Artificial Sequence: Synthetic oligonucleotide
guggguugaagggguuuug

SEQ ID NO: 449847 - RNA, 19 nt, Artificial Sequence
  Description of Artificial Sequence: Synthetic oligonucleotide
acggcgucaaagaauucuu

SEQ ID NO: 449848 - RNA, 19 nt, Artificial Sequence
  Description of Artificial Sequence: Synthetic oligonucleotide
guaacggagugugcugcca

SEQ ID NO: 449849 - RNA, 19 nt, Artificial Sequence
  Description of Artificial Sequence: Synthetic oligonucleotide
gcgucaaagaauucuuccu

SEQ ID NO: 449850 - RNA, 19 nt, Artificial Sequence
  Description of Artificial Sequence: Synthetic oligonucleotide
ugacggcgucaaagaauuc

SEQ ID NO: 449851 - RNA, 19 nt, Artificial Sequence
  Description of Artificial Sequence: Synthetic oligonucleotide
ggcggcagucugugggugg

SEQ ID NO: 449852 - RNA, 19 nt, Artificial Sequence
  Description of Artificial Sequence: Synthetic oligonucleotide
aaguggacucuggccuaca

SEQ ID NO: 449853 - RNA, 19 nt, Artificial Sequence
  Description of Artificial Sequence: Synthetic oligonucleotide
ggugauuaauguguuugcu

SEQ ID NO: 449854 - RNA, 19 nt, Artificial Sequence
  Description of Artificial Sequence: Synthetic oligonucleotide
cugcuuguguuuaaaccau

SEQ ID NO: 449855 - RNA, 19 nt, Artificial Sequence
  Description of Artificial Sequence: Synthetic oligonucleotide
gguuagugccuggauagaa

SEQ ID NO: 449856 - RNA, 19 nt, Artificial Sequence
  Description of Artificial Sequence: Synthetic oligonucleotide
caagacccaugcuccccuc

SEQ ID NO: 449857 - RNA, 19 nt, Artificial Sequence
  Description of Artificial Sequence: Synthetic oligonucleotide
uacaaccagucgggagccc

SEQ ID NO: 449858 - RNA, 19 nt, Artificial Sequence
  Description of Artificial Sequence: Synthetic oligonucleotide
ggguuuugccaguucucuc

SEQ ID NO: 449859 - RNA, 19 nt, Artificial Sequence
  Description of Artificial Sequence: Synthetic oligonucleotide
cacguuccuuucuggccuc

SEQ ID NO: 449860 - RNA, 19 nt, Artificial Sequence
  Description of Artificial Sequence: Synthetic oligonucleotide
gacccaaguggagcuucac

SEQ ID NO: 449861 - RNA, 19 nt, Artificial Sequence
  Description of Artificial Sequence: Synthetic oligonucleotide
auguaaccuucuacucugu

SEQ ID NO: 449862 - RNA, 19 nt, Artificial Sequence
  Description of Artificial Sequence: Synthetic oligonucleotide
cuccacuauuccauacugu

SEQ ID NO: 449863 - RNA, 19 nt, Artificial Sequence
  Description of Artificial Sequence: Synthetic oligonucleotide
ggaacgucgucugucauau

SEQ ID NO: 449864 - RNA, 19 nt, Artificial Sequence
  Description of Artificial Sequence: Synthetic oligonucleotide
ccccguucauccuucggug

SEQ ID NO: 449865 - RNA, 19 nt, Artificial Sequence
  Description of Artificial Sequence: Synthetic oligonucleotide
gccacggaugucagggcgg

SEQ ID NO: 449866 - RNA, 19 nt, Artificial Sequence
  Description of Artificial Sequence: Synthetic oligonucleotide
ggagggugaugacuaaccu

SEQ ID NO: 449867 - RNA, 19 nt, Artificial Sequence
  Description of Artificial Sequence: Synthetic oligonucleotide
gggaaggaacacacaggug

SEQ ID NO: 449868 - RNA, 19 nt, Artificial Sequence
  Description of Artificial Sequence: Synthetic oligonucleotide
gacucguaugaaacagggu

SEQ ID NO: 449869 - RNA, 19 nt, Artificial Sequence
  Description of Artificial Sequence: Synthetic oligonucleotide
cuuccucgauuacacauuu

SEQ ID NO: 449870 - RNA, 19 nt, Artificial Sequence
  Description of Artificial Sequence: Synthetic oligonucleotide
auuccccuguagaguuauc

SEQ ID NO: 449871 - RNA, 19 nt, Artificial Sequence
  Description of Artificial Sequence: Synthetic oligonucleotide
accagucgggagccccugu

SEQ ID NO: 449872 - RNA, 19 nt, Artificial Sequence
  Description of Artificial Sequence: Synthetic oligonucleotide
gguggucaccucuccuuuc

SEQ ID NO: 449873 - RNA, 19 nt, Artificial Sequence
  Description of Artificial Sequence: Synthetic oligonucleotide
gaggcggcagucugugggu

SEQ ID NO: 449874 - RNA, 19 nt, Artificial Sequence
  Description of Artificial Sequence: Synthetic oligonucleotide
acacacaggugaggugagu

SEQ ID NO: 449875 - RNA, 19 nt, Artificial Sequence
  Description of Artificial Sequence: Synthetic oligonucleotide
agacccaaguggagcuuca

SEQ ID NO: 449876 - RNA, 19 nt, Artificial Sequence
  Description of Artificial Sequence: Synthetic oligonucleotide
ggauuugccuggacuagaa

SEQ ID NO: 449877 - RNA, 19 nt, Artificial Sequence
  Description of Artificial Sequence: Synthetic oligonucleotide
caggcucuacugguucuuc

SEQ ID NO: 449878 - RNA, 19 nt, Artificial Sequence
  Description of Artificial Sequence: Synthetic oligonucleotide
ggcucuacugguucuuccu

SEQ ID NO: 449879 - RNA, 19 nt, Artificial Sequence
  Description of Artificial Sequence: Synthetic oligonucleotide
ggaucuccacuauuccaua

SEQ ID NO: 449880 - RNA, 19 nt, Artificial Sequence
  Description of Artificial Sequence: Synthetic oligonucleotide
gaacgucgucugucauauc

SEQ ID NO: 449881 - RNA, 19 nt, Artificial Sequence
  Description of Artificial Sequence: Synthetic oligonucleotide
cgauccauagcugcccaag

SEQ ID NO: 449882 - RNA, 19 nt, Artificial Sequence
  Description of Artificial Sequence: Synthetic oligonucleotide
gucaaguuugaaggcaauu

SEQ ID NO: 449883 - RNA, 19 nt, Artificial Sequence
  Description of Artificial Sequence: Synthetic oligonucleotide
ccacuugccguaaauuaua

SEQ ID NO: 449884 - RNA, 19 nt, Artificial Sequence
  Description of Artificial Sequence: Synthetic oligonucleotide
ccagaguagcuuacugcca

SEQ ID NO: 449885 - RNA, 19 nt, Artificial Sequence
  Description of Artificial Sequence: Synthetic oligonucleotide
caaucaucccacugacuuu

SEQ ID NO: 449886 - RNA, 19 nt, Artificial Sequence
  Description of Artificial Sequence: Synthetic oligonucleotide
ccacaagcauucuguccac

SEQ ID NO: 449887 - RNA, 19 nt, Artificial Sequence
  Description of Artificial Sequence: Synthetic oligonucleotide
ucuggccuacaggcuacuu

SEQ ID NO: 449888 - RNA, 19 nt, Artificial Sequence
  Description of Artificial Sequence: Synthetic oligonucleotide
aggcggcagucugugggug

SEQ ID NO: 449889 - RNA, 19 nt, Artificial Sequence
  Description of Artificial Sequence: Synthetic oligonucleotide
guugguccacguguaggcu

SEQ ID NO: 449890 - RNA, 19 nt, Artificial Sequence
  Description of Artificial Sequence: Synthetic oligonucleotide
cuauuccauacuguucgau

SEQ ID NO: 449891 - RNA, 19 nt, Artificial Sequence
  Description of Artificial Sequence: Synthetic oligonucleotide
gucauaucgccaggcacau

SEQ ID NO: 449892 - RNA, 19 nt, Artificial Sequence
  Description of Artificial Sequence: Synthetic oligonucleotide
cccgaacaguccacauggc

SEQ ID NO: 449893 - RNA, 19 nt, Artificial Sequence
  Description of Artificial Sequence: Synthetic oligonucleotide
gcgucaaguuugaaggcaa

SEQ ID NO: 449894 - RNA, 19 nt, Artificial Sequence
  Description of Artificial Sequence: Synthetic oligonucleotide
cuggccuacaggcuacuuu

SEQ ID NO: 449895 - RNA, 19 nt, Artificial Sequence
  Description of Artificial Sequence: Synthetic oligonucleotide
ccagucgggagccccugug

SEQ ID NO: 449896 - RNA, 19 nt, Artificial Sequence
  Description of Artificial Sequence: Synthetic oligonucleotide
cguucauccuucggugacc

SEQ ID NO: 449897 - RNA, 19 nt, Artificial Sequence
  Description of Artificial Sequence: Synthetic oligonucleotide
gccaccauuucuacauaaa

SEQ ID NO: 449898 - RNA, 19 nt, Artificial Sequence
  Description of Artificial Sequence: Synthetic oligonucleotide
guggcggucucuccccgcu

SEQ ID NO: 449899 - RNA, 19 nt, Artificial Sequence
  Description of Artificial Sequence: Synthetic oligonucleotide
cugagaaguugcgcucaaa

SEQ ID NO: 449900 - RNA, 19 nt, Artificial Sequence
  Description of Artificial Sequence: Synthetic oligonucleotide
cacggaugucagggcggag

SEQ ID NO: 449901 - RNA, 19 nt, Artificial Sequence
  Description of Artificial Sequence: Synthetic oligonucleotide
acguuccuuucuggccucu

SEQ ID NO: 449902 - RNA, 19 nt, Artificial Sequence
  Description of Artificial Sequence: Synthetic oligonucleotide
cugugcuuuugaacgccau

SEQ ID NO: 449903 - RNA, 19 nt, Artificial Sequence
  Description of Artificial Sequence: Synthetic oligonucleotide
gcacagguauguacacaca

SEQ ID NO: 449904 - RNA, 19 nt, Artificial Sequence
  Description of Artificial Sequence: Synthetic oligonucleotide
cggcgucaaagaauucuuc

SEQ ID NO: 449905 - RNA, 19 nt, Artificial Sequence
  Description of Artificial Sequence: Synthetic oligonucleotide
cccguucauccuucgguga

SEQ ID NO: 449906 - RNA, 19 nt, Artificial Sequence
  Description of Artificial Sequence: Synthetic oligonucleotide
aggcuacuuucaagaccca

SEQ ID NO: 449907 - RNA, 19 nt, Artificial Sequence
  Description of Artificial Sequence: Synthetic oligonucleotide
cagggucgaugccccacaa

SEQ ID NO: 449908 - RNA, 19 nt, Artificial Sequence
  Description of Artificial Sequence: Synthetic oligonucleotide
ccgaacaguccacauggcu

SEQ ID NO: 449909 - RNA, 19 nt, Artificial Sequence
  Description of Artificial Sequence: Synthetic oligonucleotide
aucaucccacugacuuuua

SEQ ID NO: 449910 - RNA, 19 nt, Artificial Sequence
  Description of Artificial Sequence: Synthetic oligonucleotide
gcgcucaaaguaauccccu

SEQ ID NO: 449911 - RNA, 19 nt, Artificial Sequence
  Description of Artificial Sequence: Synthetic oligonucleotide
cgcuaauaggagggugaug

SEQ ID NO: 449912 - RNA, 19 nt, Artificial Sequence
  Description of Artificial Sequence: Synthetic oligonucleotide
cagcuacagacugcauccu

SEQ ID NO: 449913 - RNA, 19 nt, Artificial Sequence
  Description of Artificial Sequence: Synthetic oligonucleotide
ccacggaugucagggcgga

SEQ ID NO: 449914 - RNA, 19 nt, Artificial Sequence
  Description of Artificial Sequence: Synthetic oligonucleotide
gguccacguguaggcuuca

SEQ ID NO: 449915 - RNA, 19 nt, Artificial Sequence
  Description of Artificial Sequence: Synthetic oligonucleotide
gcgcuaauaggagggugau

SEQ ID NO: 449916 - RNA, 19 nt, Artificial Sequence
  Description of Artificial Sequence: Synthetic oligonucleotide
ccugguccgccacucugcu

SEQ ID NO: 449917 - RNA, 19 nt, Artificial Sequence
  Description of Artificial Sequence: Synthetic oligonucleotide
caggggcgucaaguuugaa

SEQ ID NO: 449918 - RNA, 19 nt, Artificial Sequence
  Description of Artificial Sequence: Synthetic oligonucleotide
cugguccgccacucugcuu

SEQ ID NO: 449919 - RNA, 19 nt, Artificial Sequence
  Description of Artificial Sequence: Synthetic oligonucleotide
guccgccacucugcuuccu

SEQ ID NO: 449920 - RNA, 19 nt, Artificial Sequence
  Description of Artificial Sequence: Synthetic oligonucleotide
cguaugaaacagggucgau

SEQ ID NO: 449921 - RNA, 19 nt, Artificial Sequence
  Description of Artificial Sequence: Synthetic oligonucleotide
aauugcuauacucugauag

SEQ ID NO: 449922 - RNA, 19 nt, Artificial Sequence
  Description of Artificial Sequence: Synthetic oligonucleotide
uuagcuauaauucaguaca

SEQ ID NO: 449923 - RNA, 19 nt, Artificial Sequence
  Description of Artificial Sequence: Synthetic oligonucleotide
aauacaacauuaaagacuc

SEQ ID NO: 449924 - RNA, 19 nt, Artificial Sequence
  Description of Artificial Sequence: Synthetic oligonucleotide
uuaacuuucccaaauaaug

SEQ ID NO: 449925 - RNA, 19 nt, Artificial Sequence
  Description of Artificial Sequence: Synthetic oligonucleotide
ucugauuagguccuuaacg

SEQ ID NO: 449926 - RNA, 19 nt, Artificial Sequence
  Description of Artificial Sequence: Synthetic oligonucleotide
aauuauuagugguagacca

SEQ ID NO: 449927 - RNA, 19 nt, Artificial Sequence
  Description of Artificial Sequence: Synthetic oligonucleotide
aguacagcaagacagguac

SEQ ID NO: 449928 - RNA, 19 nt, Artificial Sequence
  Description of Artificial Sequence: Synthetic oligonucleotide
uuuuaaacgcccgagagcg

SEQ ID NO: 449929 - RNA, 19 nt, Artificial Sequence
  Description of Artificial Sequence: Synthetic oligonucleotide
uuugauuuagacuaaccag

SEQ ID NO: 449930 - RNA, 19 nt, Artificial Sequence
  Description of Artificial Sequence: Synthetic oligonucleotide
uuagacauuucauauacag

SEQ ID NO: 449931 - RNA, 19 nt, Artificial Sequence
  Description of Artificial Sequence: Synthetic oligonucleotide
auuuagacuaaccagaacu

SEQ ID NO: 449932 - RNA, 19 nt, Artificial Sequence
  Description of Artificial Sequence: Synthetic oligonucleotide
aacuuucccaaauaauggc

SEQ ID NO: 449933 - RNA, 19 nt, Artificial Sequence
  Description of Artificial Sequence: Synthetic oligonucleotide
caaguaaagacucacagag

SEQ ID NO: 449934 - RNA, 19 nt, Artificial Sequence
  Description of Artificial Sequence: Synthetic oligonucleotide
auuauauuuccacaggguc

SEQ ID NO: 449935 - RNA, 19 nt, Artificial Sequence
  Description of Artificial Sequence: Synthetic oligonucleotide
aagauuacauccaaauacc

SEQ ID NO: 449936 - RNA, 19 nt, Artificial Sequence
  Description of Artificial Sequence: Synthetic oligonucleotide
caagauuacauccaaauac

SEQ ID NO: 449937 - RNA, 19 nt, Artificial Sequence
  Description of Artificial Sequence: Synthetic oligonucleotide
ugagucaugagcuucagca

SEQ ID NO: 449938 - RNA, 19 nt, Artificial Sequence
  Description of Artificial Sequence: Synthetic oligonucleotide
uuuaccaaugucaugauua

SEQ ID NO: 449939 - RNA, 19 nt, Artificial Sequence
  Description of Artificial Sequence: Synthetic oligonucleotide
gauuagacauuucauauac

SEQ ID NO: 449940 - RNA, 19 nt, Artificial Sequence
  Description of Artificial Sequence: Synthetic oligonucleotide
auuacauccaaauaccuga

SEQ ID NO: 449941 - RNA, 19 nt, Artificial Sequence
  Description of Artificial Sequence: Synthetic oligonucleotide
auauaaucaggauuguuag

SEQ ID NO: 449942 - RNA, 19 nt, Artificial Sequence
  Description of Artificial Sequence: Synthetic oligonucleotide
aguaaagacucacagagcu

SEQ ID NO: 449943 - RNA, 19 nt, Artificial Sequence
  Description of Artificial Sequence: Synthetic oligonucleotide
aauuagacagcaaaccuuc

SEQ ID NO: 449944 - RNA, 19 nt, Artificial Sequence
  Description of Artificial Sequence: Synthetic oligonucleotide
ucugguuucagcagagugg

SEQ ID NO: 449945 - RNA, 19 nt, Artificial Sequence
  Description of Artificial Sequence: Synthetic oligonucleotide
ucaaucuacauuaguaaug

SEQ ID NO: 449946 - RNA, 19 nt, Artificial Sequence
  Description of Artificial Sequence: Synthetic oligonucleotide
acuauuacaauacaauuau

SEQ ID NO: 449947 - RNA, 19 nt, Artificial Sequence
  Description of Artificial Sequence: Synthetic oligonucleotide
aaaacaauugcuauacucu

SEQ ID NO: 449948 - RNA, 19 nt, Artificial Sequence
  Description of Artificial Sequence: Synthetic oligonucleotide
auuagugguagaccaauac

SEQ ID NO: 449949 - RNA, 19 nt, Artificial Sequence
  Description of Artificial Sequence: Synthetic oligonucleotide
acaauuauuagugguagac

SEQ ID NO: 449950 - RNA, 19 nt, Artificial Sequence
  Description of Artificial Sequence: Synthetic oligonucleotide
auuugauuuagacuaacca

SEQ ID NO: 449951 - RNA, 19 nt, Artificial Sequence
  Description of Artificial Sequence: Synthetic oligonucleotide
aagacagguaccaaauacc

SEQ ID NO: 449952 - RNA, 19 nt, Artificial Sequence
  Description of Artificial Sequence: Synthetic oligonucleotide
ucuacauuaguaauguaaa

SEQ ID NO: 449953 - RNA, 19 nt, Artificial Sequence
  Description of Artificial Sequence: Synthetic oligonucleotide
aaacaauugcuauacucug

SEQ ID NO: 449954 - RNA, 19 nt, Artificial Sequence
  Description of Artificial Sequence: Synthetic oligonucleotide
cacgagacaauuuucaccc

SEQ ID NO: 449955 - RNA, 19 nt, Artificial Sequence
  Description of Artificial Sequence: Synthetic oligonucleotide
ugauauaaccuuucucacg

SEQ ID NO: 449956 - RNA, 19 nt, Artificial Sequence
  Description of Artificial Sequence: Synthetic oligonucleotide
aguguguucacuauuuagc

SEQ ID NO: 449957 - RNA, 19 nt, Artificial Sequence
  Description of Artificial Sequence: Synthetic oligonucleotide
acacgagacaauuuucacc

SEQ ID NO: 449958 - RNA, 19 nt, Artificial Sequence
  Description of Artificial Sequence: Synthetic oligonucleotide
aauauaaucaggauuguua

SEQ ID NO: 449959 - RNA, 19 nt, Artificial Sequence
  Description of Artificial Sequence: Synthetic oligonucleotide
aauggccuauuucuggagg

SEQ ID NO: 449960 - RNA, 19 nt, Artificial Sequence
  Description of Artificial Sequence: Synthetic oligonucleotide
uuaaagacucuguauacac

SEQ ID NO: 449961 - RNA, 19 nt, Artificial Sequence
  Description of Artificial Sequence: Synthetic oligonucleotide
aagguauccagcaagguug

SEQ ID NO: 449962 - RNA, 19 nt, Artificial Sequence
  Description of Artificial Sequence: Synthetic oligonucleotide
uuaaguacugucagugugc

SEQ ID NO: 449963 - RNA, 19 nt, Artificial Sequence
  Description of Artificial Sequence: Synthetic oligonucleotide
ugagguauaaaaguaugcc

SEQ ID NO: 449964 - RNA, 19 nt, Artificial Sequence
  Description of Artificial Sequence: Synthetic oligonucleotide
uucacuauuuagcaagucu

SEQ ID NO: 449965 - RNA, 19 nt, Artificial Sequence
  Description of Artificial Sequence: Synthetic oligonucleotide
ugauugacggcaaaucuca

SEQ ID NO: 449966 - RNA, 19 nt, Artificial Sequence
  Description of Artificial Sequence: Synthetic oligonucleotide
auugcuauacucugauagg

SEQ ID NO: 449967 - RNA, 19 nt, Artificial Sequence
  Description of Artificial Sequence: Synthetic oligonucleotide
gauagugcuuaauuccagg

SEQ ID NO: 449968 - RNA, 19 nt, Artificial Sequence
  Description of Artificial Sequence: Synthetic oligonucleotide
acccuuuugacauaguuca

SEQ ID NO: 449969 - RNA, 19 nt, Artificial Sequence
  Description of Artificial Sequence: Synthetic oligonucleotide
acaauugauaacuuuuacu

SEQ ID NO: 449970 - RNA, 19 nt, Artificial Sequence
  Description of Artificial Sequence: Synthetic oligonucleotide
acaaauuuuggcacugucc

SEQ ID NO: 449971 - RNA, 19 nt, Artificial Sequence
  Description of Artificial Sequence: Synthetic oligonucleotide
caguuaaucuagaaaauac

SEQ ID NO: 449972 - RNA, 19 nt, Artificial Sequence
  Description of Artificial Sequence: Synthetic oligonucleotide
aauuuucacccuuuugaca

SEQ ID NO: 449973 - RNA, 19 nt, Artificial Sequence
  Description of Artificial Sequence: Synthetic oligonucleotide
aagguugccgcuuacucug

SEQ ID NO: 449974 - RNA, 19 nt, Artificial Sequence
  Description of Artificial Sequence: Synthetic oligonucleotide
cauuguaauacacuauuac

SEQ ID NO: 449975 - RNA, 19 nt, Artificial Sequence
  Description of Artificial Sequence: Synthetic oligonucleotide
uggauccuuucauugagcg

SEQ ID NO: 449976 - RNA, 19 nt, Artificial Sequence
  Description of Artificial Sequence: Synthetic oligonucleotide
uuucuauaacccuuuugag

SEQ ID NO: 449977 - RNA, 19 nt, Artificial Sequence
  Description of Artificial Sequence: Synthetic oligonucleotide
guauugagaguaugaaacg

SEQ ID NO: 449978 - RNA, 19 nt, Artificial Sequence
  Description of Artificial Sequence: Synthetic oligonucleotide
ugauuagaaacauuggguu

SEQ ID NO: 449979 - RNA, 19 nt, Artificial Sequence
  Description of Artificial Sequence: Synthetic oligonucleotide
uuuauuagauuagacauuu

SEQ ID NO: 449980 - RNA, 19 nt, Artificial Sequence
  Description of Artificial Sequence: Synthetic oligonucleotide
ggaagccuaauauucaugg

SEQ ID NO: 449981 - RNA, 19 nt, Artificial Sequence
  Description of Artificial Sequence: Synthetic oligonucleotide
auaaaaguaugccaguaaa

SEQ ID NO: 449982 - RNA, 19 nt, Artificial Sequence
  Description of Artificial Sequence: Synthetic oligonucleotide
uagugguagaccaauacaa

SEQ ID NO: 449983 - RNA, 19 nt, Artificial Sequence
  Description of Artificial Sequence: Synthetic oligonucleotide
uuuagacuaaccagaacuc

SEQ ID NO: 449984 - RNA, 19 nt, Artificial Sequence
  Description of Artificial Sequence: Synthetic oligonucleotide
uauaaaaguaugccaguaa

SEQ ID NO: 449985 - RNA, 19 nt, Artificial Sequence
  Description of Artificial Sequence: Synthetic oligonucleotide
aggauuguuagcuauaauu

SEQ ID NO: 449986 - RNA, 19 nt, Artificial Sequence
  Description of Artificial Sequence: Synthetic oligonucleotide
acauuaaagacucuguaua

SEQ ID NO: 449987 - RNA, 19 nt, Artificial Sequence
  Description of Artificial Sequence: Synthetic oligonucleotide
uacaacauuaaagacucug

SEQ ID NO: 449988 - RNA, 19 nt, Artificial Sequence
  Description of Artificial Sequence: Synthetic oligonucleotide
uuaaucuagaaaauacauu

SEQ ID NO: 449989 - RNA, 19 nt, Artificial Sequence
  Description of Artificial Sequence: Synthetic oligonucleotide
aagcauccaggauaaaaug

SEQ ID NO: 449990 - RNA, 19 nt, Artificial Sequence
  Description of Artificial Sequence: Synthetic oligonucleotide
acucuguauacacacaugu

SEQ ID NO: 449991 - RNA, 19 nt, Artificial Sequence
  Description of Artificial Sequence: Synthetic oligonucleotide
uaaccuuucucacgaacag

SEQ ID NO: 449992 - RNA, 19 nt, Artificial Sequence
  Description of Artificial Sequence: Synthetic oligonucleotide
uagacauuucauauacagc

SEQ ID NO: 449993 - RNA, 19 nt, Artificial Sequence
  Description of Artificial Sequence: Synthetic oligonucleotide
gauaccaucaacauacuaa

SEQ ID NO: 449994 - RNA, 19 nt, Artificial Sequence
  Description of Artificial Sequence: Synthetic oligonucleotide
uaugugacugguuacaauu

SEQ ID NO: 449995 - RNA, 19 nt, Artificial Sequence
  Description of Artificial Sequence: Synthetic oligonucleotide
aaauaccugaucuuugaua

SEQ ID NO: 449996 - RNA, 19 nt, Artificial Sequence
  Description of Artificial Sequence: Synthetic oligonucleotide
uuuccuuacccaguuaucc

SEQ ID NO: 449997 - RNA, 19 nt, Artificial Sequence
  Description of Artificial Sequence: Synthetic oligonucleotide
ucacuauuuagcaagucua

SEQ ID NO: 449998 - RNA, 19 nt, Artificial Sequence
  Description of Artificial Sequence: Synthetic oligonucleotide
aguguaugugacugguuac

SEQ ID NO: 449999 - RNA, 19 nt, Artificial Sequence
  Description of Artificial Sequence: Synthetic oligonucleotide
gguauugagaguaugaaac

SEQ ID NO: 450000 - RNA, 19 nt, Artificial Sequence
  Description of Artificial Sequence: Synthetic oligonucleotide
aguacugucagugugcugu

SEQ ID NO: 450001 - RNA, 19 nt, Artificial Sequence
  Description of Artificial Sequence: Synthetic oligonucleotide
uuacaauucugaguuuugg

SEQ ID NO: 450002 - RNA, 19 nt, Artificial Sequence
  Description of Artificial Sequence: Synthetic oligonucleotide
aauuauauuuccacagggu

SEQ ID NO: 450003 - RNA, 19 nt, Artificial Sequence
  Description of Artificial Sequence: Synthetic oligonucleotide
accuaauuuacacagguuu

SEQ ID NO: 450004 - RNA, 19 nt, Artificial Sequence
  Description of Artificial Sequence: Synthetic oligonucleotide
acuuucccaaauaauggcc

SEQ ID NO: 450005 - RNA, 19 nt, Artificial Sequence
  Description of Artificial Sequence: Synthetic oligonucleotide
uguaauguggggcgucggg

SEQ ID NO: 450006 - RNA, 19 nt, Artificial Sequence
  Description of Artificial Sequence: Synthetic oligonucleotide
uuggguuagauguacucug

SEQ ID NO: 450007 - RNA, 19 nt, Artificial Sequence
  Description of Artificial Sequence: Synthetic oligonucleotide
auguacucugaaccuauac

SEQ ID NO: 450008 - RNA, 19 nt, Artificial Sequence
  Description of Artificial Sequence: Synthetic oligonucleotide
uauaaccuuucucacgaac

SEQ ID NO: 450009 - RNA, 19 nt, Artificial Sequence
  Description of Artificial Sequence: Synthetic oligonucleotide
ugcuauauuuccaguuucc

SEQ ID NO: 450010 - RNA, 19 nt, Artificial Sequence
  Description of Artificial Sequence: Synthetic oligonucleotide
aaucaggauuguuagcuau

SEQ ID NO: 450011 - RNA, 19 nt, Artificial Sequence
  Description of Artificial Sequence: Synthetic oligonucleotide
ucuucgacgugcucaaugc

SEQ ID NO: 450012 - RNA, 19 nt, Artificial Sequence
  Description of Artificial Sequence: Synthetic oligonucleotide
acguuuaccaaugucauga

SEQ ID NO: 450013 - RNA, 19 nt, Artificial Sequence
  Description of Artificial Sequence: Synthetic oligonucleotide
ucacgaacagcuuguaaug

SEQ ID NO: 450014 - RNA, 19 nt, Artificial Sequence
  Description of Artificial Sequence: Synthetic oligonucleotide
ugauuuagacuaaccagaa

SEQ ID NO: 450015 - RNA, 19 nt, Artificial Sequence
  Description of Artificial Sequence: Synthetic oligonucleotide
gauuacauccaaauaccug

SEQ ID NO: 450016 - RNA, 19 nt, Artificial Sequence
  Description of Artificial Sequence: Synthetic oligonucleotide
uuagacagcaaaccuucac

SEQ ID NO: 450017 - RNA, 19 nt, Artificial Sequence
  Description of Artificial Sequence: Synthetic oligonucleotide
ucggguaagaaacuucuuc

SEQ ID NO: 450018 - RNA, 19 nt, Artificial Sequence
  Description of Artificial Sequence: Synthetic oligonucleotide
uucauugagcguaaguuuu

SEQ ID NO: 450019 - RNA, 19 nt, Artificial Sequence
  Description of Artificial Sequence: Synthetic oligonucleotide
gacaguaaauuagacagca

SEQ ID NO: 450020 - RNA, 19 nt, Artificial Sequence
  Description of Artificial Sequence: Synthetic oligonucleotide
uacucugauaggucauucg

SEQ ID NO: 450021 - RNA, 19 nt, Artificial Sequence
  Description of Artificial Sequence: Synthetic oligonucleotide
ugguagaccaauacaacau

SEQ ID NO: 450022 - RNA, 19 nt, Artificial Sequence
  Description of Artificial Sequence: Synthetic oligonucleotide
augauuagaaacauugggu

SEQ ID NO: 450023 - RNA, 19 nt, Artificial Sequence
  Description of Artificial Sequence: Synthetic oligonucleotide
uuugguugauuuucuaaaa

SEQ ID NO: 450024 - RNA, 19 nt, Artificial Sequence
  Description of Artificial Sequence: Synthetic oligonucleotide
aaccuuucucacgaacagc

SEQ ID NO: 450025 - RNA, 19 nt, Artificial Sequence
  Description of Artificial Sequence: Synthetic oligonucleotide
uugagaugucuaaacagaa

SEQ ID NO: 450026 - RNA, 19 nt, Artificial Sequence
  Description of Artificial Sequence: Synthetic oligonucleotide
aacucaauauggcacuaaa

SEQ ID NO: 450027 - RNA, 19 nt, Artificial Sequence
  Description of Artificial Sequence: Synthetic oligonucleotide
cauuuguuuuaaacgcccg

SEQ ID NO: 450028 - RNA, 19 nt, Artificial Sequence
  Description of Artificial Sequence: Synthetic oligonucleotide
uucuaaugucuucuguaca

SEQ ID NO: 450029 - RNA, 19 nt, Artificial Sequence
  Description of Artificial Sequence: Synthetic oligonucleotide
guaugaaacgcaagcaucc

SEQ ID NO: 450030 - RNA, 19 nt, Artificial Sequence
  Description of Artificial Sequence: Synthetic oligonucleotide
ugauuagguccuuaacggc

SEQ ID NO: 450031 - RNA, 19 nt, Artificial Sequence
  Description of Artificial Sequence: Synthetic oligonucleotide
uccuuaacggcagugacac

SEQ ID NO: 450032 - RNA, 19 nt, Artificial Sequence
  Description of Artificial Sequence: Synthetic oligonucleotide
uguaccaaguaaagacuca

SEQ ID NO: 450033 - RNA, 19 nt, Artificial Sequence
  Description of Artificial Sequence: Synthetic oligonucleotide
gaaccuauacaacacaggu

SEQ ID NO: 450034 - RNA, 19 nt, Artificial Sequence
  Description of Artificial Sequence: Synthetic oligonucleotide
aagauagugcuuaauucca

SEQ ID NO: 450035 - RNA, 19 nt, Artificial Sequence
  Description of Artificial Sequence: Synthetic oligonucleotide
uacaauucugaguuuuggu

SEQ ID NO: 450036 - RNA, 19 nt, Artificial Sequence
  Description of Artificial Sequence: Synthetic oligonucleotide
uaagguauccagcaagguu

SEQ ID NO: 450037 - RNA, 19 nt, Artificial Sequence
  Description of Artificial Sequence: Synthetic oligonucleotide
aacugcuauauuuccaguu

SEQ ID NO: 450038 - RNA, 19 nt, Artificial Sequence
  Description of Artificial Sequence: Synthetic oligonucleotide
uucuucgacgugcucaaug

SEQ ID NO: 450039 - RNA, 19 nt, Artificial Sequence
  Description of Artificial Sequence: Synthetic oligonucleotide
ugacuaucauuguaccaag

SEQ ID NO: 450040 - RNA, 19 nt, Artificial Sequence
  Description of Artificial Sequence: Synthetic oligonucleotide
agacuggcaagauuacauc

SEQ ID NO: 450041 - RNA, 19 nt, Artificial Sequence
  Description of Artificial Sequence: Synthetic oligonucleotide
aguuauccaguguauguga

SEQ ID NO: 450042 - RNA, 19 nt, Artificial Sequence
  Description of Artificial Sequence: Synthetic oligonucleotide
aaaccuaaaagugcauggu

SEQ ID NO: 450043 - RNA, 19 nt, Artificial Sequence
  Description of Artificial Sequence: Synthetic oligonucleotide
caugguuuaacuuucccaa

SEQ ID NO: 450044 - RNA, 19 nt, Artificial Sequence
  Description of Artificial Sequence: Synthetic oligonucleotide
aguuaaucuagaaaauaca

SEQ ID NO: 450045 - RNA, 19 nt, Artificial Sequence
  Description of Artificial Sequence: Synthetic oligonucleotide
auagugcuuaauuccagga

SEQ ID NO: 450046 - RNA, 19 nt, Artificial Sequence
  Description of Artificial Sequence: Synthetic oligonucleotide
uccaccuaauuuacacagg

SEQ ID NO: 450047 - RNA, 19 nt, Artificial Sequence
  Description of Artificial Sequence: Synthetic oligonucleotide
ugguacacaguaugaacug

SEQ ID NO: 450048 - RNA, 19 nt, Artificial Sequence
  Description of Artificial Sequence: Synthetic oligonucleotide
aauuacacagucauagcuu

SEQ ID NO: 450049 - RNA, 19 nt, Artificial Sequence
  Description of Artificial Sequence: Synthetic oligonucleotide
aagggguucugguaauucu

SEQ ID NO: 450050 - RNA, 19 nt, Artificial Sequence
  Description of Artificial Sequence: Synthetic oligonucleotide
aaauuucgcagugucauuu

SEQ ID NO: 450051 - RNA, 19 nt, Artificial Sequence
  Description of Artificial Sequence: Synthetic oligonucleotide
aacccuguuuuauuauaca

SEQ ID NO: 450052 - RNA, 19 nt, Artificial Sequence
  Description of Artificial Sequence: Synthetic oligonucleotide
caauuauuagugguagacc

SEQ ID NO: 450053 - RNA, 19 nt, Artificial Sequence
  Description of Artificial Sequence: Synthetic oligonucleotide
ccugauuugauuuagacua

SEQ ID NO: 450054 - RNA, 19 nt, Artificial Sequence
  Description of Artificial Sequence: Synthetic oligonucleotide
cugguuucagcagaguggg

SEQ ID NO: 450055 - RNA, 19 nt, Artificial Sequence
  Description of Artificial Sequence: Synthetic oligonucleotide
acuaucauuguaccaagua

SEQ ID NO: 450056 - RNA, 19 nt, Artificial Sequence
  Description of Artificial Sequence: Synthetic oligonucleotide
ucugauaggucauucgguu

SEQ ID NO: 450057 - RNA, 19 nt, Artificial Sequence
  Description of Artificial Sequence: Synthetic oligonucleotide
gcuauaauucaguacagca

SEQ ID NO: 450058 - RNA, 19 nt, Artificial Sequence
  Description of Artificial Sequence: Synthetic oligonucleotide
ucauuguaauacacuauua

SEQ ID NO: 450059 - RNA, 19 nt, Artificial Sequence
  Description of Artificial Sequence: Synthetic oligonucleotide
uuucgcagugucauuuucu

SEQ ID NO: 450060 - RNA, 19 nt, Artificial Sequence
  Description of Artificial Sequence: Synthetic oligonucleotide
ugguuuaacuuucccaaau

SEQ ID NO: 450061 - RNA, 19 nt, Artificial Sequence
  Description of Artificial Sequence: Synthetic oligonucleotide
acggcagugacacgcugcc

SEQ ID NO: 450062 - RNA, 19 nt, Artificial Sequence
  Description of Artificial Sequence: Synthetic oligonucleotide
ugaaucuggugccuccuca

SEQ ID NO: 450063 - RNA, 19 nt, Artificial Sequence
  Description of Artificial Sequence: Synthetic oligonucleotide
auuucgcagugucauuuuc

SEQ ID NO: 450064 - RNA, 19 nt, Artificial Sequence
  Description of Artificial Sequence: Synthetic oligonucleotide
aacggcagugacacgcugc

SEQ ID NO: 450065 - RNA, 19 nt, Artificial Sequence
  Description of Artificial Sequence: Synthetic oligonucleotide
caauugauaacuuuuacuu

SEQ ID NO: 450066 - RNA, 19 nt, Artificial Sequence
  Description of Artificial Sequence: Synthetic oligonucleotide
gacggcaaaucucagcuuc

SEQ ID NO: 450067 - RNA, 19 nt, Artificial Sequence
  Description of Artificial Sequence: Synthetic oligonucleotide
gauccuuucauugagcgua

SEQ ID NO: 450068 - RNA, 19 nt, Artificial Sequence
  Description of Artificial Sequence: Synthetic oligonucleotide
ugcaugguuuaacuuuccc

SEQ ID NO: 450069 - RNA, 19 nt, Artificial Sequence
  Description of Artificial Sequence: Synthetic oligonucleotide
agugguagaccaauacaac

SEQ ID NO: 450070 - RNA, 19 nt, Artificial Sequence
  Description of Artificial Sequence: Synthetic oligonucleotide
cagcuuguaauguggggcg

SEQ ID NO: 450071 - RNA, 19 nt, Artificial Sequence
  Description of Artificial Sequence: Synthetic oligonucleotide
aucaacauacuaaaccaug

SEQ ID NO: 450072 - RNA, 19 nt, Artificial Sequence
  Description of Artificial Sequence: Synthetic oligonucleotide
acgugcucaaugcauaacu

SEQ ID NO: 450073 - RNA, 19 nt, Artificial Sequence
  Description of Artificial Sequence: Synthetic oligonucleotide
gauuagguccuuaacggca

SEQ ID NO: 450074 - RNA, 19 nt, Artificial Sequence
  Description of Artificial Sequence: Synthetic oligonucleotide
uguucacuauuuagcaagu

SEQ ID NO: 450075 - RNA, 19 nt, Artificial Sequence
  Description of Artificial Sequence: Synthetic oligonucleotide
ugguauugagaguaugaaa

SEQ ID NO: 450076 - RNA, 19 nt, Artificial Sequence
  Description of Artificial Sequence: Synthetic oligonucleotide
agacaguaaauuagacagc

SEQ ID NO: 450077 - RNA, 19 nt, Artificial Sequence
  Description of Artificial Sequence: Synthetic oligonucleotide
ucucauuguaauacacuau

SEQ ID NO: 450078 - RNA, 19 nt, Artificial Sequence
  Description of Artificial Sequence: Synthetic oligonucleotide
augaaacgcaagcauccag

SEQ ID NO: 450079 - RNA, 19 nt, Artificial Sequence
  Description of Artificial Sequence: Synthetic oligonucleotide
aaacaauugauaacuuuua

SEQ ID NO: 450080 - RNA, 19 nt, Artificial Sequence
  Description of Artificial Sequence: Synthetic oligonucleotide
cuuuugagaugucuaaaca

SEQ ID NO: 450081 - RNA, 19 nt, Artificial Sequence
  Description of Artificial Sequence: Synthetic oligonucleotide
aucacaguguuuaaguacu

SEQ ID NO: 450082 - RNA, 19 nt, Artificial Sequence
  Description of Artificial Sequence: Synthetic oligonucleotide
cacuauuacaauacaauua

SEQ ID NO: 450083 - RNA, 19 nt, Artificial Sequence
  Description of Artificial Sequence: Synthetic oligonucleotide
uugcuauacucugauaggu

SEQ ID NO: 450084 - RNA, 19 nt, Artificial Sequence
  Description of Artificial Sequence: Synthetic oligonucleotide
gauuuagacuaaccagaac

SEQ ID NO: 450085 - RNA, 19 nt, Artificial Sequence
  Description of Artificial Sequence: Synthetic oligonucleotide
uaauuuacacagguuucca

SEQ ID NO: 450086 - RNA, 19 nt, Artificial Sequence
  Description of Artificial Sequence: Synthetic oligonucleotide
agugacuaucauuguacca

SEQ ID NO: 450087 - RNA, 19 nt, Artificial Sequence
  Description of Artificial Sequence: Synthetic oligonucleotide
uuugagugcuccagugaca

SEQ ID NO: 450088 - RNA, 19 nt, Artificial Sequence
  Description of Artificial Sequence: Synthetic oligonucleotide
auaaccuuucucacgaaca

SEQ ID NO: 450089 - RNA, 19 nt, Artificial Sequence
  Description of Artificial Sequence: Synthetic oligonucleotide
uaccaaguaaagacucaca

SEQ ID NO: 450090 - RNA, 19 nt, Artificial Sequence
  Description of Artificial Sequence: Synthetic oligonucleotide
ucauaccaagaacucaaua

SEQ ID NO: 450091 - RNA, 19 nt, Artificial Sequence
  Description of Artificial Sequence: Synthetic oligonucleotide
gugguagaccaauacaaca

SEQ ID NO: 450092 - RNA, 19 nt, Artificial Sequence
  Description of Artificial Sequence: Synthetic oligonucleotide
cuaucauuguaccaaguaa

SEQ ID NO: 450093 - RNA, 19 nt, Artificial Sequence
  Description of Artificial Sequence: Synthetic oligonucleotide
ggguuagaauucuauaaug

SEQ ID NO: 450094 - RNA, 19 nt, Artificial Sequence
  Description of Artificial Sequence: Synthetic oligonucleotide
aacaauugcuauacucuga

SEQ ID NO: 450095 - RNA, 19 nt, Artificial Sequence
  Description of Artificial Sequence: Synthetic oligonucleotide
guaccaaauacccugauuu

SEQ ID NO: 450096 - RNA, 19 nt, Artificial Sequence
  Description of Artificial Sequence: Synthetic oligonucleotide
ggauuguuagcuauaauuc

SEQ ID NO: 450097 - RNA, 19 nt, Artificial Sequence
  Description of Artificial Sequence: Synthetic oligonucleotide
uaccauucucauugcagug

SEQ ID NO: 450098 - RNA, 19 nt, Artificial Sequence
  Description of Artificial Sequence: Synthetic oligonucleotide
acgaacagcuuguaaugug

SEQ ID NO: 450099 - RNA, 19 nt, Artificial Sequence
  Description of Artificial Sequence: Synthetic oligonucleotide
uuaaacgcccgagagcgcu

SEQ ID NO: 450100 - RNA, 19 nt, Artificial Sequence
  Description of Artificial Sequence: Synthetic oligonucleotide
auuggguuagauguacucu

SEQ ID NO: 450101 - RNA, 19 nt, Artificial Sequence
  Description of Artificial Sequence: Synthetic oligonucleotide
ugcuauacucugauagguc

SEQ ID NO: 450102 - RNA, 19 nt, Artificial Sequence
  Description of Artificial Sequence: Synthetic oligonucleotide
cuuaggacugccacucaug

SEQ ID NO: 450103 - RNA, 19 nt, Artificial Sequence
  Description of Artificial Sequence: Synthetic oligonucleotide
uucgacgugcucaaugcau

SEQ ID NO: 450104 - RNA, 19 nt, Artificial Sequence
  Description of Artificial Sequence: Synthetic oligonucleotide
uuuuccuuacccaguuauc

SEQ ID NO: 450105 - RNA, 19 nt, Artificial Sequence
  Description of Artificial Sequence: Synthetic oligonucleotide
gaaacgcaagcauccagga

SEQ ID NO: 450106 - RNA, 19 nt, Artificial Sequence
  Description of Artificial Sequence: Synthetic oligonucleotide
uuacacagucauagcuugc

SEQ ID NO: 450107 - RNA, 19 nt, Artificial Sequence
  Description of Artificial Sequence: Synthetic oligonucleotide
guaugaacugcuauauuuc

SEQ ID NO: 450108 - RNA, 19 nt, Artificial Sequence
  Description of Artificial Sequence: Synthetic oligonucleotide
acuaaccagaacuccagua

SEQ ID NO: 450109 - RNA, 19 nt, Artificial Sequence
  Description of Artificial Sequence: Synthetic oligonucleotide
aaacagaaucugcauugua

SEQ ID NO: 450110 - RNA, 19 nt, Artificial Sequence
  Description of Artificial Sequence: Synthetic oligonucleotide
auaucacaguguuuaagua

SEQ ID NO: 450111 - RNA, 19 nt, Artificial Sequence
  Description of Artificial Sequence: Synthetic oligonucleotide
agcuugagaagggaucaac

SEQ ID NO: 450112 - RNA, 19 nt, Artificial Sequence
  Description of Artificial Sequence: Synthetic oligonucleotide
gugacuaucauuguaccaa

SEQ ID NO: 450113 - RNA, 19 nt, Artificial Sequence
  Description of Artificial Sequence: Synthetic oligonucleotide
aauuucgcagugucauuuu

SEQ ID NO: 450114 - RNA, 19 nt, Artificial Sequence
  Description of Artificial Sequence: Synthetic oligonucleotide
ugauuugauuuagacuaac

SEQ ID NO: 450115 - RNA, 19 nt, Artificial Sequence
  Description of Artificial Sequence: Synthetic oligonucleotide
uugccgcuuacucuguaga

SEQ ID NO: 450116 - RNA, 19 nt, Artificial Sequence
  Description of Artificial Sequence: Synthetic oligonucleotide
uuuuaagauccuucugguu

SEQ ID NO: 450117 - RNA, 19 nt, Artificial Sequence
  Description of Artificial Sequence: Synthetic oligonucleotide
caaaaccuuccaaacccug

SEQ ID NO: 450118 - RNA, 19 nt, Artificial Sequence
  Description of Artificial Sequence: Synthetic oligonucleotide
caguauaucacaguguuua

SEQ ID NO: 450119 - RNA, 19 nt, Artificial Sequence
  Description of Artificial Sequence: Synthetic oligonucleotide
cuuguaauguggggcgucg

SEQ ID NO: 450120 - RNA, 19 nt, Artificial Sequence
  Description of Artificial Sequence: Synthetic oligonucleotide
caauacaauuauuaguggu

SEQ ID NO: 450121 - RNA, 19 nt, Artificial Sequence
  Description of Artificial Sequence: Synthetic oligonucleotide
ugccagugaauguaauuaa

SEQ ID NO: 450122 - RNA, 19 nt, Artificial Sequence
  Description of Artificial Sequence: Synthetic oligonucleotide
cuaaaccauguucuucgac

SEQ ID NO: 450123 - RNA, 19 nt, Artificial Sequence
  Description of Artificial Sequence: Synthetic oligonucleotide
uaugaaacgcaagcaucca

SEQ ID NO: 450124 - RNA, 19 nt, Artificial Sequence
  Description of Artificial Sequence: Synthetic oligonucleotide
cuuacccaguuauccagug

SEQ ID NO: 450125 - RNA, 19 nt, Artificial Sequence
  Description of Artificial Sequence: Synthetic oligonucleotide
uauuagugguagaccaaua

SEQ ID NO: 450126 - RNA, 19 nt, Artificial Sequence
  Description of Artificial Sequence: Synthetic oligonucleotide
gaagccuaauauucaugga

SEQ ID NO: 450127 - RNA, 19 nt, Artificial Sequence
  Description of Artificial Sequence: Synthetic oligonucleotide
aaaccuucacccagggacu

SEQ ID NO: 450128 - RNA, 19 nt, Artificial Sequence
  Description of Artificial Sequence: Synthetic oligonucleotide
aaacgcaagcauccaggau

SEQ ID NO: 450129 - RNA, 19 nt, Artificial Sequence
  Description of Artificial Sequence: Synthetic oligonucleotide
ggauaaaaugaauccaaaa

SEQ ID NO: 450130 - RNA, 19 nt, Artificial Sequence
  Description of Artificial Sequence: Synthetic oligonucleotide
uuuaaacgcccgagagcgc

SEQ ID NO: 450131 - RNA, 19 nt, Artificial Sequence
  Description of Artificial Sequence: Synthetic oligonucleotide
uucgcagugucauuuucua

SEQ ID NO: 450132 - RNA, 19 nt, Artificial Sequence
  Description of Artificial Sequence: Synthetic oligonucleotide
gguuucagcagaguggggc

SEQ ID NO: 450133 - RNA, 19 nt, Artificial Sequence
  Description of Artificial Sequence: Synthetic oligonucleotide
uaacccuuuugagaugucu

SEQ ID NO: 450134 - RNA, 19 nt, Artificial Sequence
  Description of Artificial Sequence: Synthetic oligonucleotide
agacuaaccagaacuccag

SEQ ID NO: 450135 - RNA, 19 nt, Artificial Sequence
  Description of Artificial Sequence: Synthetic oligonucleotide
acaaaucaaucuacauuag

SEQ ID NO: 450136 - RNA, 19 nt, Artificial Sequence
  Description of Artificial Sequence: Synthetic oligonucleotide
ucagcacuuaggacugcca

SEQ ID NO: 450137 - RNA, 19 nt, Artificial Sequence
  Description of Artificial Sequence: Synthetic oligonucleotide
uccaguguaugugacuggu

SEQ ID NO: 450138 - RNA, 19 nt, Artificial Sequence
  Description of Artificial Sequence: Synthetic oligonucleotide
aguauaucacaguguuuaa

SEQ ID NO: 450139 - RNA, 19 nt, Artificial Sequence
  Description of Artificial Sequence: Synthetic oligonucleotide
aauguggggcgucggguaa

SEQ ID NO: 450140 - RNA, 19 nt, Artificial Sequence
  Description of Artificial Sequence: Synthetic oligonucleotide
guauccagcaagguugcug

SEQ ID NO: 450141 - RNA, 19 nt, Artificial Sequence
  Description of Artificial Sequence: Synthetic oligonucleotide
uaucugagucaugagcuuc

SEQ ID NO: 450142 - RNA, 19 nt, Artificial Sequence
  Description of Artificial Sequence: Synthetic oligonucleotide
acucuaucugagucaugag

SEQ ID NO: 450143 - RNA, 19 nt, Artificial Sequence
  Description of Artificial Sequence: Synthetic oligonucleotide
uguaugugacugguuacaa

SEQ ID NO: 450144 - RNA, 19 nt, Artificial Sequence
  Description of Artificial Sequence: Synthetic oligonucleotide
uccaguuuggggacagcaa

SEQ ID NO: 450145 - RNA, 19 nt, Artificial Sequence
  Description of Artificial Sequence: Synthetic oligonucleotide
ccaaauaauggccuauuuc

SEQ ID NO: 450146 - RNA, 19 nt, Artificial Sequence
  Description of Artificial Sequence: Synthetic oligonucleotide
agauuacauccaaauaccu

SEQ ID NO: 450147 - RNA, 19 nt, Artificial Sequence
  Description of Artificial Sequence: Synthetic oligonucleotide
uuuuggcacugucccauuc

SEQ ID NO: 450148 - RNA, 19 nt, Artificial Sequence
  Description of Artificial Sequence: Synthetic oligonucleotide
gacagcaaaccuucaccca

SEQ ID NO: 450149 - RNA, 19 nt, Artificial Sequence
  Description of Artificial Sequence: Synthetic oligonucleotide
ugacauaguucaugaccac

SEQ ID NO: 450150 - RNA, 19 nt, Artificial Sequence
  Description of Artificial Sequence: Synthetic oligonucleotide
aggggacccacauaguuuu

SEQ ID NO: 450151 - RNA, 19 nt, Artificial Sequence
  Description of Artificial Sequence: Synthetic oligonucleotide
ucucacgaacagcuuguaa

SEQ ID NO: 450152 - RNA, 19 nt, Artificial Sequence
  Description of Artificial Sequence: Synthetic oligonucleotide
agggguucugguaauucuc

SEQ ID NO: 450153 - RNA, 19 nt, Artificial Sequence
  Description of Artificial Sequence: Synthetic oligonucleotide
accagaacuccaguauauc

SEQ ID NO: 450154 - RNA, 19 nt, Artificial Sequence
  Description of Artificial Sequence: Synthetic oligonucleotide
uggaaacguuuaccaaugu

SEQ ID NO: 450155 - RNA, 19 nt, Artificial Sequence
  Description of Artificial Sequence: Synthetic oligonucleotide
cuauaacccuuuugagaug

SEQ ID NO: 450156 - RNA, 19 nt, Artificial Sequence
  Description of Artificial Sequence: Synthetic oligonucleotide
agcauuucccaguaccauu

SEQ ID NO: 450157 - RNA, 19 nt, Artificial Sequence
  Description of Artificial Sequence: Synthetic oligonucleotide
ucgacgugcucaaugcaua

SEQ ID NO: 450158 - RNA, 19 nt, Artificial Sequence
  Description of Artificial Sequence: Synthetic oligonucleotide
gugauugacggcaaaucuc

SEQ ID NO: 450159 - RNA, 19 nt, Artificial Sequence
  Description of Artificial Sequence: Synthetic oligonucleotide
aaccuuccaaacccuguuu

SEQ ID NO: 450160 - RNA, 19 nt, Artificial Sequence
  Description of Artificial Sequence: Synthetic oligonucleotide
ucgugauugacggcaaauc

SEQ ID NO: 450161 - RNA, 19 nt, Artificial Sequence
  Description of Artificial Sequence: Synthetic oligonucleotide
gacucuguauacacacaug

SEQ ID NO: 450162 - RNA, 19 nt, Artificial Sequence
  Description of Artificial Sequence: Synthetic oligonucleotide
guaccauucucauugcagu

SEQ ID NO: 450163 - RNA, 19 nt, Artificial Sequence
  Description of Artificial Sequence: Synthetic oligonucleotide
agagaaacauggauuuggu

SEQ ID NO: 450164 - RNA, 19 nt, Artificial Sequence
  Description of Artificial Sequence: Synthetic oligonucleotide
uaauguggggcgucgggua

SEQ ID NO: 450165 - RNA, 19 nt, Artificial Sequence
  Description of Artificial Sequence: Synthetic oligonucleotide
cucacgaacagcuuguaau

SEQ ID NO: 450166 - RNA, 19 nt, Artificial Sequence
  Description of Artificial Sequence: Synthetic oligonucleotide
cagcacuuaggacugccac

SEQ ID NO: 450167 - RNA, 19 nt, Artificial Sequence
  Description of Artificial Sequence: Synthetic oligonucleotide
gucugauuagguccuuaac

SEQ ID NO: 450168 - RNA, 19 nt, Artificial Sequence
  Description of Artificial Sequence: Synthetic oligonucleotide
aaccuauacaacacaggua

SEQ ID NO: 450169 - RNA, 19 nt, Artificial Sequence
  Description of Artificial Sequence: Synthetic oligonucleotide
ggaaacguuuaccaauguc

SEQ ID NO: 450170 - RNA, 19 nt, Artificial Sequence
  Description of Artificial Sequence: Synthetic oligonucleotide
aaguacugucagugugcug

SEQ ID NO: 450171 - RNA, 19 nt, Artificial Sequence
  Description of Artificial Sequence: Synthetic oligonucleotide
uuguaauguggggcgucgg

SEQ ID NO: 450172 - RNA, 19 nt, Artificial Sequence
  Description of Artificial Sequence: Synthetic oligonucleotide
augguuuaacuuucccaaa

SEQ ID NO: 450173 - RNA, 19 nt, Artificial Sequence
  Description of Artificial Sequence: Synthetic oligonucleotide
cagggucauaccaagaacu

SEQ ID NO: 450174 - RNA, 19 nt, Artificial Sequence
  Description of Artificial Sequence: Synthetic oligonucleotide
guauaaaaguaugccagua

SEQ ID NO: 450175 - RNA, 19 nt, Artificial Sequence
  Description of Artificial Sequence: Synthetic oligonucleotide
ucaucgugauugacggcaa

SEQ ID NO: 450176 - RNA, 19 nt, Artificial Sequence
  Description of Artificial Sequence: Synthetic oligonucleotide
auuauuagugguagaccaa

SEQ ID NO: 450177 - RNA, 19 nt, Artificial Sequence
  Description of Artificial Sequence: Synthetic oligonucleotide
aacccuuuugagaugucua

SEQ ID NO: 450178 - RNA, 19 nt, Artificial Sequence
  Description of Artificial Sequence: Synthetic oligonucleotide
gcaugguuuaacuuuccca

SEQ ID NO: 450179 - RNA, 19 nt, Artificial Sequence
  Description of Artificial Sequence: Synthetic oligonucleotide
acuauuuagcaagucuauu

SEQ ID NO: 450180 - RNA, 19 nt, Artificial Sequence
  Description of Artificial Sequence: Synthetic oligonucleotide
uuacugguauugagaguau

SEQ ID NO: 450181 - RNA, 19 nt, Artificial Sequence
  Description of Artificial Sequence: Synthetic oligonucleotide
ugacacgcugccucggguc

SEQ ID NO: 450182 - RNA, 19 nt, Artificial Sequence
  Description of Artificial Sequence: Synthetic oligonucleotide
ccgcuuacucuguagauac

SEQ ID NO: 450183 - RNA, 19 nt, Artificial Sequence
  Description of Artificial Sequence: Synthetic oligonucleotide
uauacucugauaggucauu

SEQ ID NO: 450184 - RNA, 19 nt, Artificial Sequence
  Description of Artificial Sequence: Synthetic oligonucleotide
cuuucauugagcguaaguu

SEQ ID NO: 450185 - RNA, 19 nt, Artificial Sequence
  Description of Artificial Sequence: Synthetic oligonucleotide
aaagacucacagagcuuga

SEQ ID NO: 450186 - RNA, 19 nt, Artificial Sequence
  Description of Artificial Sequence: Synthetic oligonucleotide
agcaguuaaucuagaaaau

SEQ ID NO: 450187 - RNA, 19 nt, Artificial Sequence
  Description of Artificial Sequence: Synthetic oligonucleotide
gccuaauauucauggaaac

SEQ ID NO: 450188 - RNA, 19 nt, Artificial Sequence
  Description of Artificial Sequence: Synthetic oligonucleotide
aaacauuggguuagaugua

SEQ ID NO: 450189 - RNA, 19 nt, Artificial Sequence
  Description of Artificial Sequence: Synthetic oligonucleotide
cuaaccagaacuccaguau

SEQ ID NO: 450190 - RNA, 19 nt, Artificial Sequence
  Description of Artificial Sequence: Synthetic oligonucleotide
gguacacaguaugaacugc

SEQ ID NO: 450191 - RNA, 19 nt, Artificial Sequence
  Description of Artificial Sequence: Synthetic oligonucleotide
guguaugugacugguuaca

SEQ ID NO: 450192 - RNA, 19 nt, Artificial Sequence
  Description of Artificial Sequence: Synthetic oligonucleotide
cuauacaacacagguauau

SEQ ID NO: 450193 - RNA, 19 nt, Artificial Sequence
  Description of Artificial Sequence: Synthetic oligonucleotide
auauaaccuuucucacgaa

SEQ ID NO: 450194 - RNA, 19 nt, Artificial Sequence
  Description of Artificial Sequence: Synthetic oligonucleotide
gcagugaucugccagugaa

SEQ ID NO: 450195 - RNA, 19 nt, Artificial Sequence
  Description of Artificial Sequence: Synthetic oligonucleotide
aucgugauugacggcaaau

SEQ ID NO: 450196 - RNA, 19 nt, Artificial Sequence
  Description of Artificial Sequence: Synthetic oligonucleotide
ccuauuucuggaggaagcc

SEQ ID NO: 450197 - RNA, 19 nt, Artificial Sequence
  Description of Artificial Sequence: Synthetic oligonucleotide
cugauuugauuuagacuaa

SEQ ID NO: 450198 - RNA, 19 nt, Artificial Sequence
  Description of Artificial Sequence: Synthetic oligonucleotide
gguuuaacuuucccaaaua

SEQ ID NO: 450199 - RNA, 19 nt, Artificial Sequence
  Description of Artificial Sequence: Synthetic oligonucleotide
ccaaguaaagacucacaga

SEQ ID NO: 450200 - RNA, 19 nt, Artificial Sequence
  Description of Artificial Sequence: Synthetic oligonucleotide
acgagacaauuuucacccu

SEQ ID NO: 450201 - RNA, 19 nt, Artificial Sequence
  Description of Artificial Sequence: Synthetic oligonucleotide
gacgugcucaaugcauaac

SEQ ID NO: 450202 - RNA, 19 nt, Artificial Sequence
  Description of Artificial Sequence: Synthetic oligonucleotide
cacuaaauauaaucaggau

SEQ ID NO: 450203 - RNA, 19 nt, Artificial Sequence
  Description of Artificial Sequence: Synthetic oligonucleotide
uacugucagugugcugucc

SEQ ID NO: 450204 - RNA, 19 nt, Artificial Sequence
  Description of Artificial Sequence: Synthetic oligonucleotide
ccggguugaaucuggugcc

SEQ ID NO: 450205 - RNA, 19 nt, Artificial Sequence
  Description of Artificial Sequence: Synthetic oligonucleotide
cuaaaagugcaugguuuaa

SEQ ID NO: 450206 - RNA, 19 nt, Artificial Sequence
  Description of Artificial Sequence: Synthetic oligonucleotide
cuuuuacuucacaaaggau

SEQ ID NO: 450207 - RNA, 19 nt, Artificial Sequence
  Description of Artificial Sequence: Synthetic oligonucleotide
guucacuauuuagcaaguc

SEQ ID NO: 450208 - RNA, 19 nt, Artificial Sequence
  Description of Artificial Sequence: Synthetic oligonucleotide
gaacucaauauggcacuaa

SEQ ID NO: 450209 - RNA, 19 nt, Artificial Sequence
  Description of Artificial Sequence: Synthetic oligonucleotide
guacagcaagacagguacc

SEQ ID NO: 450210 - RNA, 19 nt, Artificial Sequence
  Description of Artificial Sequence: Synthetic oligonucleotide
uccuuucauugagcguaag

SEQ ID NO: 450211 - RNA, 19 nt, Artificial Sequence
  Description of Artificial Sequence: Synthetic oligonucleotide
cucccuguaacaaaaccuu

SEQ ID NO: 450212 - RNA, 19 nt, Artificial Sequence
  Description of Artificial Sequence: Synthetic oligonucleotide
guguuuaaguacugucagu

SEQ ID NO: 450213 - RNA, 19 nt, Artificial Sequence
  Description of Artificial Sequence: Synthetic oligonucleotide
gcaagcauccaggauaaaa

SEQ ID NO: 450214 - RNA, 19 nt, Artificial Sequence
  Description of Artificial Sequence: Synthetic oligonucleotide
cacuauuuagcaagucuau

SEQ ID NO: 450215 - RNA, 19 nt, Artificial Sequence
  Description of Artificial Sequence: Synthetic oligonucleotide
cacucaugcaggaaacccu

SEQ ID NO: 450216 - RNA, 19 nt, Artificial Sequence
  Description of Artificial Sequence: Synthetic oligonucleotide
cccacauaguuuuccuuac

SEQ ID NO: 450217 - RNA, 19 nt, Artificial Sequence
  Description of Artificial Sequence: Synthetic oligonucleotide
ccuguaagcauauuauagu

SEQ ID NO: 450218 - RNA, 19 nt, Artificial Sequence
  Description of Artificial Sequence: Synthetic oligonucleotide
gcuugagaagggaucaaca

SEQ ID NO: 450219 - RNA, 19 nt, Artificial Sequence
  Description of Artificial Sequence: Synthetic oligonucleotide
guccuuaacggcagugaca

SEQ ID NO: 450220 - RNA, 19 nt, Artificial Sequence
  Description of Artificial Sequence: Synthetic oligonucleotide
agguaccaaauacccugau

SEQ ID NO: 450221 - RNA, 19 nt, Artificial Sequence
  Description of Artificial Sequence: Synthetic oligonucleotide
auaacccuuuugagauguc

SEQ ID NO: 450222 - RNA, 19 nt, Artificial Sequence
  Description of Artificial Sequence: Synthetic oligonucleotide
uggccuauuucuggaggaa

SEQ ID NO: 450223 - RNA, 19 nt, Artificial Sequence
  Description of Artificial Sequence: Synthetic oligonucleotide
ugacggcaaaucucagcuu

SEQ ID NO: 450224 - RNA, 19 nt, Artificial Sequence
  Description of Artificial Sequence: Synthetic oligonucleotide
ugagugcuccagugacaac

SEQ ID NO: 450225 - RNA, 19 nt, Artificial Sequence
  Description of Artificial Sequence: Synthetic oligonucleotide
ugguuacaauucugaguuu

SEQ ID NO: 450226 - RNA, 19 nt, Artificial Sequence
  Description of Artificial Sequence: Synthetic oligonucleotide
cuucgacgugcucaaugca

SEQ ID NO: 450227 - RNA, 19 nt, Artificial Sequence
  Description of Artificial Sequence: Synthetic oligonucleotide
gaaucuggugccuccucau

SEQ ID NO: 450228 - RNA, 19 nt, Artificial Sequence
  Description of Artificial Sequence: Synthetic oligonucleotide
caguacagcaagacaggua

SEQ ID NO: 450229 - RNA, 19 nt, Artificial Sequence
  Description of Artificial Sequence: Synthetic oligonucleotide
uaaacgcccgagagcgcuu

SEQ ID NO: 450230 - RNA, 19 nt, Artificial Sequence
  Description of Artificial Sequence: Synthetic oligonucleotide
acgcaagcauccaggauaa

SEQ ID NO: 450231 - RNA, 19 nt, Artificial Sequence
  Description of Artificial Sequence: Synthetic oligonucleotide
uguggggcgucggguaaga

SEQ ID NO: 450232 - RNA, 19 nt, Artificial Sequence
  Description of Artificial Sequence: Synthetic oligonucleotide
ccuaaaagugcaugguuua

SEQ ID NO: 450233 - RNA, 19 nt, Artificial Sequence
  Description of Artificial Sequence: Synthetic oligonucleotide
agcuuguaauguggggcgu

SEQ ID NO: 450234 - RNA, 19 nt, Artificial Sequence
  Description of Artificial Sequence: Synthetic oligonucleotide
ucccaguaccauucucauu

SEQ ID NO: 450235 - RNA, 19 nt, Artificial Sequence
  Description of Artificial Sequence: Synthetic oligonucleotide
guaugugacugguuacaau

SEQ ID NO: 450236 - RNA, 19 nt, Artificial Sequence
  Description of Artificial Sequence: Synthetic oligonucleotide
gagacaauuuucacccuuu

SEQ ID NO: 450237 - RNA, 19 nt, Artificial Sequence
  Description of Artificial Sequence: Synthetic oligonucleotide
auauggcacuaaauauaau

SEQ ID NO: 450238 - RNA, 19 nt, Artificial Sequence
  Description of Artificial Sequence: Synthetic oligonucleotide
guaauguggggcgucgggu

SEQ ID NO: 450239 - RNA, 19 nt, Artificial Sequence
  Description of Artificial Sequence: Synthetic oligonucleotide
aaacgcccgagagcgcuuu

SEQ ID NO: 450240 - RNA, 19 nt, Artificial Sequence
  Description of Artificial Sequence: Synthetic oligonucleotide
caauugcuauacucugaua

SEQ ID NO: 450241 - RNA, 19 nt, Artificial Sequence
  Description of Artificial Sequence: Synthetic oligonucleotide
uucucacgaacagcuugua

SEQ ID NO: 450242 - RNA, 19 nt, Artificial Sequence
  Description of Artificial Sequence: Synthetic oligonucleotide
auguggggcgucggguaag

SEQ ID NO: 450243 - RNA, 19 nt, Artificial Sequence
  Description of Artificial Sequence: Synthetic oligonucleotide
gguuacaauucugaguuuu

SEQ ID NO: 450244 - RNA, 19 nt, Artificial Sequence
  Description of Artificial Sequence: Synthetic oligonucleotide
auacaacauuaaagacucu

SEQ ID NO: 450245 - RNA, 19 nt, Artificial Sequence
  Description of Artificial Sequence: Synthetic oligonucleotide
cagugacacgcugccucgg

SEQ ID NO: 450246 - RNA, 19 nt, Artificial Sequence
  Description of Artificial Sequence: Synthetic oligonucleotide
agguugcugugagacagua

SEQ ID NO: 450247 - RNA, 19 nt, Artificial Sequence
  Description of Artificial Sequence: Synthetic oligonucleotide
gguagaccaauacaacauu

SEQ ID NO: 450248 - RNA, 19 nt, Artificial Sequence
  Description of Artificial Sequence: Synthetic oligonucleotide
ccaccuaauuuacacaggu

SEQ ID NO: 450249 - RNA, 19 nt, Artificial Sequence
  Description of Artificial Sequence: Synthetic oligonucleotide
acccaguuauccaguguau

SEQ ID NO: 450250 - RNA, 19 nt, Artificial Sequence
  Description of Artificial Sequence: Synthetic oligonucleotide
cauccaguuuggggacagc

SEQ ID NO: 450251 - RNA, 19 nt, Artificial Sequence
  Description of Artificial Sequence: Synthetic oligonucleotide
auccuuucauugagcguaa

SEQ ID NO: 450252 - RNA, 19 nt, Artificial Sequence
  Description of Artificial Sequence: Synthetic oligonucleotide
cugauaggucauucgguuu

SEQ ID NO: 450253 - RNA, 19 nt, Artificial Sequence
  Description of Artificial Sequence: Synthetic oligonucleotide
gguaccaaauacccugauu

SEQ ID NO: 450254 - RNA, 19 nt, Artificial Sequence
  Description of Artificial Sequence: Synthetic oligonucleotide
cacgaacagcuuguaaugu

SEQ ID NO: 450255 - RNA, 19 nt, Artificial Sequence
  Description of Artificial Sequence: Synthetic oligonucleotide
aacgcccgagagcgcuuuu

SEQ ID NO: 450256 - RNA, 19 nt, Artificial Sequence
  Description of Artificial Sequence: Synthetic oligonucleotide
caaauuucgcagugucauu

SEQ ID NO: 450257 - RNA, 19 nt, Artificial Sequence
  Description of Artificial Sequence: Synthetic oligonucleotide
cacuuaggacugccacuca

SEQ ID NO: 450258 - RNA, 19 nt, Artificial Sequence
  Description of Artificial Sequence: Synthetic oligonucleotide
ggacccacauaguuuuccu

SEQ ID NO: 450259 - RNA, 19 nt, Artificial Sequence
  Description of Artificial Sequence: Synthetic oligonucleotide
caucgugauugacggcaaa

SEQ ID NO: 450260 - RNA, 19 nt, Artificial Sequence
  Description of Artificial Sequence: Synthetic oligonucleotide
gcuuguaauguggggcguc

SEQ ID NO: 450261 - RNA, 19 nt, Artificial Sequence
  Description of Artificial Sequence: Synthetic oligonucleotide
caggggacccacauaguuu

SEQ ID NO: 450262 - RNA, 19 nt, Artificial Sequence
  Description of Artificial Sequence: Synthetic oligonucleotide
caccuaauuuacacagguu

SEQ ID NO: 450263 - RNA, 19 nt, Artificial Sequence
  Description of Artificial Sequence: Synthetic oligonucleotide
cgugauugacggcaaaucu

SEQ ID NO: 450264 - RNA, 19 nt, Artificial Sequence
  Description of Artificial Sequence: Synthetic oligonucleotide
gucaugagcuucagcacuu

SEQ ID NO: 450265 - RNA, 19 nt, Artificial Sequence
  Description of Artificial Sequence: Synthetic oligonucleotide
gugacacgcugccucgggu

SEQ ID NO: 450266 - RNA, 19 nt, Artificial Sequence
  Description of Artificial Sequence: Synthetic oligonucleotide
gucauaccaagaacucaau

SEQ ID NO: 450267 - RNA, 19 nt, Artificial Sequence
  Description of Artificial Sequence: Synthetic oligonucleotide
ccuuucauugagcguaagu

SEQ ID NO: 450268 - RNA, 19 nt, Artificial Sequence
  Description of Artificial Sequence: Synthetic oligonucleotide
gcgucggguaagaaacuuc

SEQ ID NO: 450269 - RNA, 19 nt, Artificial Sequence
  Description of Artificial Sequence: Synthetic oligonucleotide
ccuuccaaacccuguuuua

SEQ ID NO: 450270 - RNA, 19 nt, Artificial Sequence
  Description of Artificial Sequence: Synthetic oligonucleotide
cagugaucugccagugaau

SEQ ID NO: 450271 - RNA, 19 nt, Artificial Sequence
  Description of Artificial Sequence: Synthetic oligonucleotide
gggacucuaucugagucau

SEQ ID NO: 450272 - RNA, 19 nt, Artificial Sequence
  Description of Artificial Sequence: Synthetic oligonucleotide
cgucggguaagaaacuucu

SEQ ID NO: 450273 - RNA, 19 nt, Artificial Sequence
  Description of Artificial Sequence: Synthetic oligonucleotide
gccgcuuacucuguagaua

SEQ ID NO: 450274 - RNA, 19 nt, Artificial Sequence
  Description of Artificial Sequence: Synthetic oligonucleotide
agguugccgcuuacucugu

SEQ ID NO: 450275 - RNA, 19 nt, Artificial Sequence
  Description of Artificial Sequence: Synthetic oligonucleotide
ccuuacccaguuauccagu

SEQ ID NO: 450276 - RNA, 19 nt, Artificial Sequence
  Description of Artificial Sequence: Synthetic oligonucleotide
gucggguaagaaacuucuu

SEQ ID NO: 450277 - RNA, 19 nt, Artificial Sequence
  Description of Artificial Sequence: Synthetic oligonucleotide
cgacgugcucaaugcauaa

SEQ ID NO: 450278 - RNA, 19 nt, Artificial Sequence
  Description of Artificial Sequence: Synthetic oligonucleotide
ccagggacucuaucugagu

SEQ ID NO: 450279 - RNA, 19 nt, Artificial Sequence
  Description of Artificial Sequence: Synthetic oligonucleotide
ggggacccacauaguuuuc

SEQ ID NO: 450280 - RNA, 19 nt, Artificial Sequence
  Description of Artificial Sequence: Synthetic oligonucleotide
ggcgucggguaagaaacuu

SEQ ID NO: 450281 - RNA, 19 nt, Artificial Sequence
  Description of Artificial Sequence: Synthetic oligonucleotide
cgagacaauuuucacccuu

SEQ ID NO: 450282 - RNA, 19 nt, Artificial Sequence
  Description of Artificial Sequence: Synthetic oligonucleotide
gguauccagcaagguugcu

SEQ ID NO: 450283 - RNA, 19 nt, Artificial Sequence
  Description of Artificial Sequence: Synthetic oligonucleotide
guucuucgacgugcucaau

SEQ ID NO: 450284 - RNA, 19 nt, Artificial Sequence
  Description of Artificial Sequence: Synthetic oligonucleotide
gccucgggucuuguuuaau

SEQ ID NO: 450285 - RNA, 19 nt, Artificial Sequence
  Description of Artificial Sequence: Synthetic oligonucleotide
auuaaaacugcacagcccc

SEQ ID NO: 450286 - RNA, 19 nt, Artificial Sequence
  Description of Artificial Sequence: Synthetic oligonucleotide
aguagcaucaaucucuacc

SEQ ID NO: 450287 - RNA, 19 nt, Artificial Sequence
  Description of Artificial Sequence: Synthetic oligonucleotide
agaagugaaauacuguccc

SEQ ID NO: 450288 - RNA, 19 nt, Artificial Sequence
  Description of Artificial Sequence: Synthetic oligonucleotide
uuauugcaaaccaacaccg

SEQ ID NO: 450289 - RNA, 19 nt, Artificial Sequence
  Description of Artificial Sequence: Synthetic oligonucleotide
caaagaacuaucuacuugg

SEQ ID NO: 450290 - RNA, 19 nt, Artificial Sequence
  Description of Artificial Sequence: Synthetic oligonucleotide
aaacaugugaggcaaacug

SEQ ID NO: 450291 - RNA, 19 nt, Artificial Sequence
  Description of Artificial Sequence: Synthetic oligonucleotide
uguuuguugaaacagggca

SEQ ID NO: 450292 - RNA, 19 nt, Artificial Sequence
  Description of Artificial Sequence: Synthetic oligonucleotide
uuagagaccaacuuguggc

SEQ ID NO: 450293 - RNA, 19 nt, Artificial Sequence
  Description of Artificial Sequence: Synthetic oligonucleotide
agaaccucagacuuucucc

SEQ ID NO: 450294 - RNA, 19 nt, Artificial Sequence
  Description of Artificial Sequence: Synthetic oligonucleotide
uuuaguguuggccauugag

SEQ ID NO: 450295 - RNA, 19 nt, Artificial Sequence
  Description of Artificial Sequence: Synthetic oligonucleotide
ugaggauugaucaggagug

SEQ ID NO: 450296 - RNA, 19 nt, Artificial Sequence
  Description of Artificial Sequence: Synthetic oligonucleotide
ugugauagacacaaucugc

SEQ ID NO: 450297 - RNA, 19 nt, Artificial Sequence
  Description of Artificial Sequence: Synthetic oligonucleotide
ugcaacguauccaagagga

SEQ ID NO: 450298 - RNA, 19 nt, Artificial Sequence
  Description of Artificial Sequence: Synthetic oligonucleotide
acaucuaauacuauucccc

SEQ ID NO: 450299 - RNA, 19 nt, Artificial Sequence
  Description of Artificial Sequence: Synthetic oligonucleotide
accauaacaugccacaggg

SEQ ID NO: 450300 - RNA, 19 nt, Artificial Sequence
  Description of Artificial Sequence: Synthetic oligonucleotide
acugcacacacacacacac

SEQ ID NO: 450301 - RNA, 19 nt, Artificial Sequence
  Description of Artificial Sequence: Synthetic oligonucleotide
uucaagaaccaaaguaagg

SEQ ID NO: 450302 - RNA, 19 nt, Artificial Sequence
  Description of Artificial Sequence: Synthetic oligonucleotide
uuaaagaccugcaacacua

SEQ ID NO: 450303 - RNA, 19 nt, Artificial Sequence
  Description of Artificial Sequence: Synthetic oligonucleotide
agauuuauugcaaaccaac

SEQ ID NO: 450304 - RNA, 19 nt, Artificial Sequence
  Description of Artificial Sequence: Synthetic oligonucleotide
aauagacccaguuucugcu

SEQ ID NO: 450305 - RNA, 19 nt, Artificial Sequence
  Description of Artificial Sequence: Synthetic oligonucleotide
uuaguguuggccauugaga

SEQ ID NO: 450306 - RNA, 19 nt, Artificial Sequence
  Description of Artificial Sequence: Synthetic oligonucleotide
uguaccauaacaugccaca

SEQ ID NO: 450307 - RNA, 19 nt, Artificial Sequence
  Description of Artificial Sequence: Synthetic oligonucleotide
acuacuaacaugcugugau

SEQ ID NO: 450308 - RNA, 19 nt, Artificial Sequence
  Description of Artificial Sequence: Synthetic oligonucleotide
aaaccaacaccgaggagcc

SEQ ID NO: 450309 - RNA, 19 nt, Artificial Sequence
  Description of Artificial Sequence: Synthetic oligonucleotide
aacauggccgggucgaauc

SEQ ID NO: 450310 - RNA, 19 nt, Artificial Sequence
  Description of Artificial Sequence: Synthetic oligonucleotide
ucacccacuacauuauucc

SEQ ID NO: 450311 - RNA, 19 nt, Artificial Sequence
  Description of Artificial Sequence: Synthetic oligonucleotide
ccaacaggcaaauagaccc

SEQ ID NO: 450312 - RNA, 19 nt, Artificial Sequence
  Description of Artificial Sequence: Synthetic oligonucleotide
caagacugcacacacacac

SEQ ID NO: 450313 - RNA, 19 nt, Artificial Sequence
  Description of Artificial Sequence: Synthetic oligonucleotide
aguggguaaguuuuccuuc

SEQ ID NO: 450314 - RNA, 19 nt, Artificial Sequence
  Description of Artificial Sequence: Synthetic oligonucleotide
ugcacacacacacacacac

SEQ ID NO: 450315 - RNA, 19 nt, Artificial Sequence
  Description of Artificial Sequence: Synthetic oligonucleotide
auagugaggauugaucagg

SEQ ID NO: 450316 - RNA, 19 nt, Artificial Sequence
  Description of Artificial Sequence: Synthetic oligonucleotide
agacugcacacacacacac

SEQ ID NO: 450317 - RNA, 19 nt, Artificial Sequence
  Description of Artificial Sequence: Synthetic oligonucleotide
uagucuugcgaccaggugu

SEQ ID NO: 450318 - RNA, 19 nt, Artificial Sequence
  Description of Artificial Sequence: Synthetic oligonucleotide
agcuuuguaggccggacac

SEQ ID NO: 450319 - RNA, 19 nt, Artificial Sequence
  Description of Artificial Sequence: Synthetic oligonucleotide
uaugguagccacuaccaca

SEQ ID NO: 450320 - RNA, 19 nt, Artificial Sequence
  Description of Artificial Sequence: Synthetic oligonucleotide
agcgagacacaccauagag

SEQ ID NO: 450321 - RNA, 19 nt, Artificial Sequence
  Description of Artificial Sequence: Synthetic oligonucleotide
uaccauaacaugccacagg

SEQ ID NO: 450322 - RNA, 19 nt, Artificial Sequence
  Description of Artificial Sequence: Synthetic oligonucleotide
acacucuucaacuuagcug

SEQ ID NO: 450323 - RNA, 19 nt, Artificial Sequence
  Description of Artificial Sequence: Synthetic oligonucleotide
cacacacacacacacaagc

SEQ ID NO: 450324 - RNA, 19 nt, Artificial Sequence
  Description of Artificial Sequence: Synthetic oligonucleotide
cugccaaugaacuacuaac

SEQ ID NO: 450325 - RNA, 19 nt, Artificial Sequence
  Description of Artificial Sequence: Synthetic oligonucleotide
guugaaacagggcagggac

SEQ ID NO: 450326 - RNA, 19 nt, Artificial Sequence
  Description of Artificial Sequence: Synthetic oligonucleotide
gucaaggcugcuuagggag

SEQ ID NO: 450327 - RNA, 19 nt, Artificial Sequence
  Description of Artificial Sequence: Synthetic oligonucleotide
uuuucuacuucccgaggcc

SEQ ID NO: 450328 - RNA, 19 nt, Artificial Sequence
  Description of Artificial Sequence: Synthetic oligonucleotide
ugccaaugaacuacuaaca

SEQ ID NO: 450329 - RNA, 19 nt, Artificial Sequence
  Description of Artificial Sequence: Synthetic oligonucleotide
cauuaaaacugcacagccc

SEQ ID NO: 450330 - RNA, 19 nt, Artificial Sequence
  Description of Artificial Sequence: Synthetic oligonucleotide
accguguaccauaacaugc

SEQ ID NO: 450331 - RNA, 19 nt, Artificial Sequence
  Description of Artificial Sequence: Synthetic oligonucleotide
aacacgccagcuucagugg

SEQ ID NO: 450332 - RNA, 19 nt, Artificial Sequence
  Description of Artificial Sequence: Synthetic oligonucleotide
aagacuacccacaggauga

SEQ ID NO: 450333 - RNA, 19 nt, Artificial Sequence
  Description of Artificial Sequence: Synthetic oligonucleotide
aaucuggugauuggcacag

SEQ ID NO: 450334 - RNA, 19 nt, Artificial Sequence
  Description of Artificial Sequence: Synthetic oligonucleotide
aagaacuaucuacuuggcu

SEQ ID NO: 450335 - RNA, 19 nt, Artificial Sequence
  Description of Artificial Sequence: Synthetic oligonucleotide
uccaacaggcaaauagacc

SEQ ID NO: 450336 - RNA, 19 nt, Artificial Sequence
  Description of Artificial Sequence: Synthetic oligonucleotide
acuuagcugugccugagag

SEQ ID NO: 450337 - RNA, 19 nt, Artificial Sequence
  Description of Artificial Sequence: Synthetic oligonucleotide
gaaccucagacuuucuccc

SEQ ID NO: 450338 - RNA, 19 nt, Artificial Sequence
  Description of Artificial Sequence: Synthetic oligonucleotide
caacguauccaagaggagg

SEQ ID NO: 450339 - RNA, 19 nt, Artificial Sequence
  Description of Artificial Sequence: Synthetic oligonucleotide
ugggauuuagagaccaacu

SEQ ID NO: 450340 - RNA, 19 nt, Artificial Sequence
  Description of Artificial Sequence: Synthetic oligonucleotide
ugaggcauccuucaagguc

SEQ ID NO: 450341 - RNA, 19 nt, Artificial Sequence
  Description of Artificial Sequence: Synthetic oligonucleotide
uacauuauuccuucuggaa

SEQ ID NO: 450342 - RNA, 19 nt, Artificial Sequence
  Description of Artificial Sequence: Synthetic oligonucleotide
gauugaucaggagugaguc

SEQ ID NO: 450343 - RNA, 19 nt, Artificial Sequence
  Description of Artificial Sequence: Synthetic oligonucleotide
cuucauuuaguguuggcca

SEQ ID NO: 450344 - RNA, 19 nt, Artificial Sequence
  Description of Artificial Sequence: Synthetic oligonucleotide
auaugguagccacuaccac

SEQ ID NO: 450345 - RNA, 19 nt, Artificial Sequence
  Description of Artificial Sequence: Synthetic oligonucleotide
caacacgccagcuucagug

SEQ ID NO: 450346 - RNA, 19 nt, Artificial Sequence
  Description of Artificial Sequence: Synthetic oligonucleotide
cacacacacacacacacac

SEQ ID NO: 450347 - RNA, 19 nt, Artificial Sequence
  Description of Artificial Sequence: Synthetic oligonucleotide
cuaauacuauuccccaggc

SEQ ID NO: 450348 - RNA, 19 nt, Artificial Sequence
  Description of Artificial Sequence: Synthetic oligonucleotide
ggcaaauagacccaguuuc

SEQ ID NO: 450349 - RNA, 19 nt, Artificial Sequence
  Description of Artificial Sequence: Synthetic oligonucleotide
ucaguauagucuugcgacc

SEQ ID NO: 450350 - RNA, 19 nt, Artificial Sequence
  Description of Artificial Sequence: Synthetic oligonucleotide
agaacagcgucaaaacaac

SEQ ID NO: 450351 - RNA, 19 nt, Artificial Sequence
  Description of Artificial Sequence: Synthetic oligonucleotide
auugagacugccaggcagc

SEQ ID NO: 450352 - RNA, 19 nt, Artificial Sequence
  Description of Artificial Sequence: Synthetic oligonucleotide
ggauuuagagaccaacuug

SEQ ID NO: 450353 - RNA, 19 nt, Artificial Sequence
  Description of Artificial Sequence: Synthetic oligonucleotide
cauugagacugccaggcag

SEQ ID NO: 450354 - RNA, 19 nt, Artificial Sequence
  Description of Artificial Sequence: Synthetic oligonucleotide
gauagacacaaucugccaa

SEQ ID NO: 450355 - RNA, 19 nt, Artificial Sequence
  Description of Artificial Sequence: Synthetic oligonucleotide
ucugccaaugaacuacuaa

SEQ ID NO: 450356 - RNA, 19 nt, Artificial Sequence
  Description of Artificial Sequence: Synthetic oligonucleotide
acacaaucugccaaugaac

SEQ ID NO: 450357 - RNA, 19 nt, Artificial Sequence
  Description of Artificial Sequence: Synthetic oligonucleotide
aacguauccaagaggaggu

SEQ ID NO: 450358 - RNA, 19 nt, Artificial Sequence
  Description of Artificial Sequence: Synthetic oligonucleotide
uauagucuugcgaccaggu

SEQ ID NO: 450359 - RNA, 19 nt, Artificial Sequence
  Description of Artificial Sequence: Synthetic oligonucleotide
ucaaggucaaggcugcuua

SEQ ID NO: 450360 - RNA, 19 nt, Artificial Sequence
  Description of Artificial Sequence: Synthetic oligonucleotide
gugauagacacaaucugcc

SEQ ID NO: 450361 - RNA, 19 nt, Artificial Sequence
  Description of Artificial Sequence: Synthetic oligonucleotide
uguagggagcaaguagugg

SEQ ID NO: 450362 - RNA, 19 nt, Artificial Sequence
  Description of Artificial Sequence: Synthetic oligonucleotide
uaucuacuuggcuggcugg

SEQ ID NO: 450363 - RNA, 19 nt, Artificial Sequence
  Description of Artificial Sequence: Synthetic oligonucleotide
uucauuaggugggacagcu

SEQ ID NO: 450364 - RNA, 19 nt, Artificial Sequence
  Description of Artificial Sequence: Synthetic oligonucleotide
gacacaaucugccaaugaa

SEQ ID NO: 450365 - RNA, 19 nt, Artificial Sequence
  Description of Artificial Sequence: Synthetic oligonucleotide
aucuaauacuauuccccag

SEQ ID NO: 450366 - RNA, 19 nt, Artificial Sequence
  Description of Artificial Sequence: Synthetic oligonucleotide
ugauagacacaaucugcca

SEQ ID NO: 450367 - RNA, 19 nt, Artificial Sequence
  Description of Artificial Sequence: Synthetic oligonucleotide
uacuaacaugcugugaucu

SEQ ID NO: 450368 - RNA, 19 nt, Artificial Sequence
  Description of Artificial Sequence: Synthetic oligonucleotide
gagauaaguugccacagaa

SEQ ID NO: 450369 - RNA, 19 nt, Artificial Sequence
  Description of Artificial Sequence: Synthetic oligonucleotide
acacacacacacacaagcc

SEQ ID NO: 450370 - RNA, 19 nt, Artificial Sequence
  Description of Artificial Sequence: Synthetic oligonucleotide
guaagguagcugcagucag

SEQ ID NO: 450371 - RNA, 19 nt, Artificial Sequence
  Description of Artificial Sequence: Synthetic oligonucleotide
augcaacguauccaagagg

SEQ ID NO: 450372 - RNA, 19 nt, Artificial Sequence
  Description of Artificial Sequence: Synthetic oligonucleotide
cagguguauucacaaagag

SEQ ID NO: 450373 - RNA, 19 nt, Artificial Sequence
  Description of Artificial Sequence: Synthetic oligonucleotide
uaauacuauuccccaggcu

SEQ ID NO: 450374 - RNA, 19 nt, Artificial Sequence
  Description of Artificial Sequence: Synthetic oligonucleotide
uuguagggagcaaguagug

SEQ ID NO: 450375 - RNA, 19 nt, Artificial Sequence
  Description of Artificial Sequence: Synthetic oligonucleotide
cuaucuacuuggcuggcug

SEQ ID NO: 450376 - RNA, 19 nt, Artificial Sequence
  Description of Artificial Sequence: Synthetic oligonucleotide
ucuacacuggcuuguuugu

SEQ ID NO: 450377 - RNA, 19 nt, Artificial Sequence
  Description of Artificial Sequence: Synthetic oligonucleotide
aacuaucuacuuggcuggc

SEQ ID NO: 450378 - RNA, 19 nt, Artificial Sequence
  Description of Artificial Sequence: Synthetic oligonucleotide
ucuugaauccuggggagca

SEQ ID NO: 450379 - RNA, 19 nt, Artificial Sequence
  Description of Artificial Sequence: Synthetic oligonucleotide
gaacuacuaacaugcugug

SEQ ID NO: 450380 - RNA, 19 nt, Artificial Sequence
  Description of Artificial Sequence: Synthetic oligonucleotide
cuccaacaggcaaauagac

SEQ ID NO: 450381 - RNA, 19 nt, Artificial Sequence
  Description of Artificial Sequence: Synthetic oligonucleotide
cacucuucaacuuagcugu

SEQ ID NO: 450382 - RNA, 19 nt, Artificial Sequence
  Description of Artificial Sequence: Synthetic oligonucleotide
caggcucguuucaagaacc

SEQ ID NO: 450383 - RNA, 19 nt, Artificial Sequence
  Description of Artificial Sequence: Synthetic oligonucleotide
cuuagggagugugauagac

SEQ ID NO: 450384 - RNA, 19 nt, Artificial Sequence
  Description of Artificial Sequence: Synthetic oligonucleotide
accauuguaacuguccgga

SEQ ID NO: 450385 - RNA, 19 nt, Artificial Sequence
  Description of Artificial Sequence: Synthetic oligonucleotide
agggagauaaguugccaca

SEQ ID NO: 450386 - RNA, 19 nt, Artificial Sequence
  Description of Artificial Sequence: Synthetic oligonucleotide
ggauaugguagccacuacc

SEQ ID NO: 450387 - RNA, 19 nt, Artificial Sequence
  Description of Artificial Sequence: Synthetic oligonucleotide
ccuacaucuaauacuauuc

SEQ ID NO: 450388 - RNA, 19 nt, Artificial Sequence
  Description of Artificial Sequence: Synthetic oligonucleotide
accagguguaguucucacg

SEQ ID NO: 450389 - RNA, 19 nt, Artificial Sequence
  Description of Artificial Sequence: Synthetic oligonucleotide
cacuacauuauuccuucug

SEQ ID NO: 450390 - RNA, 19 nt, Artificial Sequence
  Description of Artificial Sequence: Synthetic oligonucleotide
agaacaggcaacacgccag

SEQ ID NO: 450391 - RNA, 19 nt, Artificial Sequence
  Description of Artificial Sequence: Synthetic oligonucleotide
ucuuuggacaaaggggaug

SEQ ID NO: 450392 - RNA, 19 nt, Artificial Sequence
  Description of Artificial Sequence: Synthetic oligonucleotide
aguauagucuugcgaccag

SEQ ID NO: 450393 - RNA, 19 nt, Artificial Sequence
  Description of Artificial Sequence: Synthetic oligonucleotide
auaacaugccacagggauc

SEQ ID NO: 450394 - RNA, 19 nt, Artificial Sequence
  Description of Artificial Sequence: Synthetic oligonucleotide
gcuucaaugcaacguaucc

SEQ ID NO: 450395 - RNA, 19 nt, Artificial Sequence
  Description of Artificial Sequence: Synthetic oligonucleotide
caucuaauacuauucccca

SEQ ID NO: 450396 - RNA, 19 nt, Artificial Sequence
  Description of Artificial Sequence: Synthetic oligonucleotide
gguguauucacaaagagau

SEQ ID NO: 450397 - RNA, 19 nt, Artificial Sequence
  Description of Artificial Sequence: Synthetic oligonucleotide
uucauuuaguguuggccau

SEQ ID NO: 450398 - RNA, 19 nt, Artificial Sequence
  Description of Artificial Sequence: Synthetic oligonucleotide
gagaacaggcaacacgcca

SEQ ID NO: 450399 - RNA, 19 nt, Artificial Sequence
  Description of Artificial Sequence: Synthetic oligonucleotide
agauaaguugccacagaag

SEQ ID NO: 450400 - RNA, 19 nt, Artificial Sequence
  Description of Artificial Sequence: Synthetic oligonucleotide
guagugguggccaggcucg

SEQ ID NO: 450401 - RNA, 19 nt, Artificial Sequence
  Description of Artificial Sequence: Synthetic oligonucleotide
gcaagcagagagaacaggg

SEQ ID NO: 450402 - RNA, 19 nt, Artificial Sequence
  Description of Artificial Sequence: Synthetic oligonucleotide
agguaccaaggcuucaaug

SEQ ID NO: 450403 - RNA, 19 nt, Artificial Sequence
  Description of Artificial Sequence: Synthetic oligonucleotide
augcuugggcacugguacc

SEQ ID NO: 450404 - RNA, 19 nt, Artificial Sequence
  Description of Artificial Sequence: Synthetic oligonucleotide
uguugaaacagggcaggga

SEQ ID NO: 450405 - RNA, 19 nt, Artificial Sequence
  Description of Artificial Sequence: Synthetic oligonucleotide
auaaguugccacagaagug

SEQ ID NO: 450406 - RNA, 19 nt, Artificial Sequence
  Description of Artificial Sequence: Synthetic oligonucleotide
gauguugaacauggccggg

SEQ ID NO: 450407 - RNA, 19 nt, Artificial Sequence
  Description of Artificial Sequence: Synthetic oligonucleotide
cucacccacuacauuauuc

SEQ ID NO: 450408 - RNA, 19 nt, Artificial Sequence
  Description of Artificial Sequence: Synthetic oligonucleotide
agugaggauugaucaggag

SEQ ID NO: 450409 - RNA, 19 nt, Artificial Sequence
  Description of Artificial Sequence: Synthetic oligonucleotide
auccuggcgagccauguga

SEQ ID NO: 450410 - RNA, 19 nt, Artificial Sequence
  Description of Artificial Sequence: Synthetic oligonucleotide
ccugaggcauccuucaagg

SEQ ID NO: 450411 - RNA, 19 nt, Artificial Sequence
  Description of Artificial Sequence: Synthetic oligonucleotide
guauagucuugcgaccagg

SEQ ID NO: 450412 - RNA, 19 nt, Artificial Sequence
  Description of Artificial Sequence: Synthetic oligonucleotide
caugugaucaaauguuuua

SEQ ID NO: 450413 - RNA, 19 nt, Artificial Sequence
  Description of Artificial Sequence: Synthetic oligonucleotide
cugcccucaugcaagugcc

SEQ ID NO: 450414 - RNA, 19 nt, Artificial Sequence
  Description of Artificial Sequence: Synthetic oligonucleotide
cuacauuauuccuucugga

SEQ ID NO: 450415 - RNA, 19 nt, Artificial Sequence
  Description of Artificial Sequence: Synthetic oligonucleotide
cuguaaaggguugggacac

SEQ ID NO: 450416 - RNA, 19 nt, Artificial Sequence
  Description of Artificial Sequence: Synthetic oligonucleotide
acauggccgggucgaaucg

SEQ ID NO: 450417 - RNA, 19 nt, Artificial Sequence
  Description of Artificial Sequence: Synthetic oligonucleotide
cuuguagggagcaaguagu

SEQ ID NO: 450418 - RNA, 19 nt, Artificial Sequence
  Description of Artificial Sequence: Synthetic oligonucleotide
accugcaacacuaggccgg

SEQ ID NO: 450419 - RNA, 19 nt, Artificial Sequence
  Description of Artificial Sequence: Synthetic oligonucleotide
auagacccaguuucugcug

SEQ ID NO: 450420 - RNA, 19 nt, Artificial Sequence
  Description of Artificial Sequence: Synthetic oligonucleotide
agagcgagacacaccauag

SEQ ID NO: 450421 - RNA, 19 nt, Artificial Sequence
  Description of Artificial Sequence: Synthetic oligonucleotide
aacuacuaacaugcuguga

SEQ ID NO: 450422 - RNA, 19 nt, Artificial Sequence
  Description of Artificial Sequence: Synthetic oligonucleotide
aguguuggccauugagacu

SEQ ID NO: 450423 - RNA, 19 nt, Artificial Sequence
  Description of Artificial Sequence: Synthetic oligonucleotide
aggagugagucccuggcau

SEQ ID NO: 450424 - RNA, 19 nt, Artificial Sequence
  Description of Artificial Sequence: Synthetic oligonucleotide
agguguauucacaaagaga

SEQ ID NO: 450425 - RNA, 19 nt, Artificial Sequence
  Description of Artificial Sequence: Synthetic oligonucleotide
ugcgaccagguguaguucu

SEQ ID NO: 450426 - RNA, 19 nt, Artificial Sequence
  Description of Artificial Sequence: Synthetic oligonucleotide
aaucugccaaugaacuacu

SEQ ID NO: 450427 - RNA, 19 nt, Artificial Sequence
  Description of Artificial Sequence: Synthetic oligonucleotide
guagggagcaaguaguggu

SEQ ID NO: 450428 - RNA, 19 nt, Artificial Sequence
  Description of Artificial Sequence: Synthetic oligonucleotide
caugccaaagggagauaag

SEQ ID NO: 450429 - RNA, 19 nt, Artificial Sequence
  Description of Artificial Sequence: Synthetic oligonucleotide
cacacacacacacacacaa

SEQ ID NO: 450430 - RNA, 19 nt, Artificial Sequence
  Description of Artificial Sequence: Synthetic oligonucleotide
gcgucaaaacaacagcaag

SEQ ID NO: 450431 - RNA, 19 nt, Artificial Sequence
  Description of Artificial Sequence: Synthetic oligonucleotide
uuaggugggacagcuugca

SEQ ID NO: 450432 - RNA, 19 nt, Artificial Sequence
  Description of Artificial Sequence: Synthetic oligonucleotide
caccguguaccauaacaug

SEQ ID NO: 450433 - RNA, 19 nt, Artificial Sequence
  Description of Artificial Sequence: Synthetic oligonucleotide
ugaggcaaacugagauggc

SEQ ID NO: 450434 - RNA, 19 nt, Artificial Sequence
  Description of Artificial Sequence: Synthetic oligonucleotide
cuuuggacaaaggggauga

SEQ ID NO: 450435 - RNA, 19 nt, Artificial Sequence
  Description of Artificial Sequence: Synthetic oligonucleotide
cuucaagccaguggguaag

SEQ ID NO: 450436 - RNA, 19 nt, Artificial Sequence
  Description of Artificial Sequence: Synthetic oligonucleotide
cacacacacacacaagcca

SEQ ID NO: 450437 - RNA, 19 nt, Artificial Sequence
  Description of Artificial Sequence: Synthetic oligonucleotide
cuacuaacaugcugugauc

SEQ ID NO: 450438 - RNA, 19 nt, Artificial Sequence
  Description of Artificial Sequence: Synthetic oligonucleotide
cacaaucugccaaugaacu

SEQ ID NO: 450439 - RNA, 19 nt, Artificial Sequence
  Description of Artificial Sequence: Synthetic oligonucleotide
uuggacaaaggggaugaaa

SEQ ID NO: 450440 - RNA, 19 nt, Artificial Sequence
  Description of Artificial Sequence: Synthetic oligonucleotide
gaggcaaacugagauggca

SEQ ID NO: 450441 - RNA, 19 nt, Artificial Sequence
  Description of Artificial Sequence: Synthetic oligonucleotide
guaccauaacaugccacag

SEQ ID NO: 450442 - RNA, 19 nt, Artificial Sequence
  Description of Artificial Sequence: Synthetic oligonucleotide
ggaagcaaucuggugauug

SEQ ID NO: 450443 - RNA, 19 nt, Artificial Sequence
  Description of Artificial Sequence: Synthetic oligonucleotide
gagugagucccuggcaugc

SEQ ID NO: 450444 - RNA, 19 nt, Artificial Sequence
  Description of Artificial Sequence: Synthetic oligonucleotide
cacuaccacaccguguacc

SEQ ID NO: 450445 - RNA, 19 nt, Artificial Sequence
  Description of Artificial Sequence: Synthetic oligonucleotide
aggcaaacugagauggcag

SEQ ID NO: 450446 - RNA, 19 nt, Artificial Sequence
  Description of Artificial Sequence: Synthetic oligonucleotide
agcaaguagugguggccag

SEQ ID NO: 450447 - RNA, 19 nt, Artificial Sequence
  Description of Artificial Sequence: Synthetic oligonucleotide
uagccacuaccacaccgug

SEQ ID NO: 450448 - RNA, 19 nt, Artificial Sequence
  Description of Artificial Sequence: Synthetic oligonucleotide
aggcaaauagacccaguuu

SEQ ID NO: 450449 - RNA, 19 nt, Artificial Sequence
  Description of Artificial Sequence: Synthetic oligonucleotide
auuuagagaccaacuugug

SEQ ID NO: 450450 - RNA, 19 nt, Artificial Sequence
  Description of Artificial Sequence: Synthetic oligonucleotide
augagcaagacugcacaca

SEQ ID NO: 450451 - RNA, 19 nt, Artificial Sequence
  Description of Artificial Sequence: Synthetic oligonucleotide
acaaucugccaaugaacua

SEQ ID NO: 450452 - RNA, 19 nt, Artificial Sequence
  Description of Artificial Sequence: Synthetic oligonucleotide
aagacugcacacacacaca

SEQ ID NO: 450453 - RNA, 19 nt, Artificial Sequence
  Description of Artificial Sequence: Synthetic oligonucleotide
uggguaaguuuuccuuccu

SEQ ID NO: 450454 - RNA, 19 nt, Artificial Sequence
  Description of Artificial Sequence: Synthetic oligonucleotide
auauggccuacaucuaaua

SEQ ID NO: 450455 - RNA, 19 nt, Artificial Sequence
  Description of Artificial Sequence: Synthetic oligonucleotide
acuaggccggcgugcgcgc

SEQ ID NO: 450456 - RNA, 19 nt, Artificial Sequence
  Description of Artificial Sequence: Synthetic oligonucleotide
aaauagucugaaggugcaa

SEQ ID NO: 450457 - RNA, 19 nt, Artificial Sequence
  Description of Artificial Sequence: Synthetic oligonucleotide
cacacacacacaagccaug

SEQ ID NO: 450458 - RNA, 19 nt, Artificial Sequence
  Description of Artificial Sequence: Synthetic oligonucleotide
caugucccucccuaauuuc

SEQ ID NO: 450459 - RNA, 19 nt, Artificial Sequence
  Description of Artificial Sequence: Synthetic oligonucleotide
gggauugagccccacugug

SEQ ID NO: 450460 - RNA, 19 nt, Artificial Sequence
  Description of Artificial Sequence: Synthetic oligonucleotide
guugagagcgagacacacc

SEQ ID NO: 450461 - RNA, 19 nt, Artificial Sequence
  Description of Artificial Sequence: Synthetic oligonucleotide
cacuaggccggcgugcgcg

SEQ ID NO: 450462 - RNA, 19 nt, Artificial Sequence
  Description of Artificial Sequence: Synthetic oligonucleotide
ucuacuucccgaggcccgc

SEQ ID NO: 450463 - RNA, 19 nt, Artificial Sequence
  Description of Artificial Sequence: Synthetic oligonucleotide
augcaaugcagaaaauaaa

SEQ ID NO: 450464 - RNA, 19 nt, Artificial Sequence
  Description of Artificial Sequence: Synthetic oligonucleotide
gggagugugauagacacaa

SEQ ID NO: 450465 - RNA, 19 nt, Artificial Sequence
  Description of Artificial Sequence: Synthetic oligonucleotide
ccguguaccauaacaugcc

SEQ ID NO: 450466 - RNA, 19 nt, Artificial Sequence
  Description of Artificial Sequence: Synthetic oligonucleotide
caugcugugaucuucucuu

SEQ ID NO: 450467 - RNA, 19 nt, Artificial Sequence
  Description of Artificial Sequence: Synthetic oligonucleotide
ggucgaaucguuggccucg

SEQ ID NO: 450468 - RNA, 19 nt, Artificial Sequence
  Description of Artificial Sequence: Synthetic oligonucleotide
acacacacacacaagccau

SEQ ID NO: 450469 - RNA, 19 nt, Artificial Sequence
  Description of Artificial Sequence: Synthetic oligonucleotide
gggagauaaguugccacag

SEQ ID NO: 450470 - RNA, 19 nt, Artificial Sequence
  Description of Artificial Sequence: Synthetic oligonucleotide
gagauggcaggaagcaaca

SEQ ID NO: 450471 - RNA, 19 nt, Artificial Sequence
  Description of Artificial Sequence: Synthetic oligonucleotide
gauugagccccacugugau

SEQ ID NO: 450472 - RNA, 19 nt, Artificial Sequence
  Description of Artificial Sequence: Synthetic oligonucleotide
agcuucaguggguggguga

SEQ ID NO: 450473 - RNA, 19 nt, Artificial Sequence
  Description of Artificial Sequence: Synthetic oligonucleotide
ggugagccagggcaguucc

SEQ ID NO: 450474 - RNA, 19 nt, Artificial Sequence
  Description of Artificial Sequence: Synthetic oligonucleotide
cuucauuaggugggacagc

SEQ ID NO: 450475 - RNA, 19 nt, Artificial Sequence
  Description of Artificial Sequence: Synthetic oligonucleotide
guguaccauaacaugccac

SEQ ID NO: 450476 - RNA, 19 nt, Artificial Sequence
  Description of Artificial Sequence: Synthetic oligonucleotide
agcgucaaaacaacagcaa

SEQ ID NO: 450477 - RNA, 19 nt, Artificial Sequence
  Description of Artificial Sequence: Synthetic oligonucleotide
guuccugccauauggccua

SEQ ID NO: 450478 - RNA, 19 nt, Artificial Sequence
  Description of Artificial Sequence: Synthetic oligonucleotide
acacuaggccggcgugcgc

SEQ ID NO: 450479 - RNA, 19 nt, Artificial Sequence
  Description of Artificial Sequence: Synthetic oligonucleotide
gaacagcgucaaaacaaca

SEQ ID NO: 450480 - RNA, 19 nt, Artificial Sequence
  Description of Artificial Sequence: Synthetic oligonucleotide
ggguaaguuuuccuuccug

SEQ ID NO: 450481 - RNA, 19 nt, Artificial Sequence
  Description of Artificial Sequence: Synthetic oligonucleotide
ucuugcgaccagguguagu

SEQ ID NO: 450482 - RNA, 19 nt, Artificial Sequence
  Description of Artificial Sequence: Synthetic oligonucleotide
caguauagucuugcgacca

SEQ ID NO: 450483 - RNA, 19 nt, Artificial Sequence
  Description of Artificial Sequence: Synthetic oligonucleotide
caacacuaggccggcgugc

SEQ ID NO: 450484 - RNA, 19 nt, Artificial Sequence
  Description of Artificial Sequence: Synthetic oligonucleotide
acacacacacacacacaag

SEQ ID NO: 450485 - RNA, 19 nt, Artificial Sequence
  Description of Artificial Sequence: Synthetic oligonucleotide
ucccaguuugcugggacau

SEQ ID NO: 450486 - RNA, 19 nt, Artificial Sequence
  Description of Artificial Sequence: Synthetic oligonucleotide
ggccgggucgaaucguugg

SEQ ID NO: 450487 - RNA, 19 nt, Artificial Sequence
  Description of Artificial Sequence: Synthetic oligonucleotide
guucucacggauggcacca

SEQ ID NO: 450488 - RNA, 19 nt, Artificial Sequence
  Description of Artificial Sequence: Synthetic oligonucleotide
acuaucuacuuggcuggcu

SEQ ID NO: 450489 - RNA, 19 nt, Artificial Sequence
  Description of Artificial Sequence: Synthetic oligonucleotide
acguauccaagaggagguc

SEQ ID NO: 450490 - RNA, 19 nt, Artificial Sequence
  Description of Artificial Sequence: Synthetic oligonucleotide
ggagcaaguagugguggcc

SEQ ID NO: 450491 - RNA, 19 nt, Artificial Sequence
  Description of Artificial Sequence: Synthetic oligonucleotide
ucauuuaguguuggccauu

SEQ ID NO: 450492 - RNA, 19 nt, Artificial Sequence
  Description of Artificial Sequence: Synthetic oligonucleotide
ugauuggcacaggggaauc

SEQ ID NO: 450493 - RNA, 19 nt, Artificial Sequence
  Description of Artificial Sequence: Synthetic oligonucleotide
uccuggcgagccaugugau

SEQ ID NO: 450494 - RNA, 19 nt, Artificial Sequence
  Description of Artificial Sequence: Synthetic oligonucleotide
gaugaggguuuccuuuccu

SEQ ID NO: 450495 - RNA, 19 nt, Artificial Sequence
  Description of Artificial Sequence: Synthetic oligonucleotide
ucauuaggugggacagcuu

SEQ ID NO: 450496 - RNA, 19 nt, Artificial Sequence
  Description of Artificial Sequence: Synthetic oligonucleotide
gaggauugaucaggaguga

SEQ ID NO: 450497 - RNA, 19 nt, Artificial Sequence
  Description of Artificial Sequence: Synthetic oligonucleotide
uggccgggucgaaucguug

SEQ ID NO: 450498 - RNA, 19 nt, Artificial Sequence
  Description of Artificial Sequence: Synthetic oligonucleotide
agucuugcgaccaggugua

SEQ ID NO: 450499 - RNA, 19 nt, Artificial Sequence
  Description of Artificial Sequence: Synthetic oligonucleotide
acuucccgaggcccgcuca

SEQ ID NO: 450500 - RNA, 19 nt, Artificial Sequence
  Description of Artificial Sequence: Synthetic oligonucleotide
ugguagccacuaccacacc

SEQ ID NO: 450501 - RNA, 19 nt, Artificial Sequence
  Description of Artificial Sequence: Synthetic oligonucleotide
ugagagcgagacacaccau

SEQ ID NO: 450502 - RNA, 19 nt, Artificial Sequence
  Description of Artificial Sequence: Synthetic oligonucleotide
agaggaggucuuguaggga

SEQ ID NO: 450503 - RNA, 19 nt, Artificial Sequence
  Description of Artificial Sequence: Synthetic oligonucleotide
uucaagccaguggguaagu

SEQ ID NO: 450504 - RNA, 19 nt, Artificial Sequence
  Description of Artificial Sequence: Synthetic oligonucleotide
cucggaagggagagccuuc

SEQ ID NO: 450505 - RNA, 19 nt, Artificial Sequence
  Description of Artificial Sequence: Synthetic oligonucleotide
gccacuaccacaccgugua

SEQ ID NO: 450506 - RNA, 19 nt, Artificial Sequence
  Description of Artificial Sequence: Synthetic oligonucleotide
cuugaauccuggggagcac

SEQ ID NO: 450507 - RNA, 19 nt, Artificial Sequence
  Description of Artificial Sequence: Synthetic oligonucleotide
auccccagucagaagacaa

SEQ ID NO: 450508 - RNA, 19 nt, Artificial Sequence
  Description of Artificial Sequence: Synthetic oligonucleotide
ggucaaggcugcuuaggga

SEQ ID NO: 450509 - RNA, 19 nt, Artificial Sequence
  Description of Artificial Sequence: Synthetic oligonucleotide
caagugccuggccccacac

SEQ ID NO: 450510 - RNA, 19 nt, Artificial Sequence
  Description of Artificial Sequence: Synthetic oligonucleotide
acccacuacauuauuccuu

SEQ ID NO: 450511 - RNA, 19 nt, Artificial Sequence
  Description of Artificial Sequence: Synthetic oligonucleotide
gucgaaucguuggccucgg

SEQ ID NO: 450512 - RNA, 19 nt, Artificial Sequence
  Description of Artificial Sequence: Synthetic oligonucleotide
cuugcgaccagguguaguu

SEQ ID NO: 450513 - RNA, 19 nt, Artificial Sequence
  Description of Artificial Sequence: Synthetic oligonucleotide
cauccuggcgagccaugug

SEQ ID NO: 450514 - RNA, 19 nt, Artificial Sequence
  Description of Artificial Sequence: Synthetic oligonucleotide
cgcucaauucugcaguagc

SEQ ID NO: 450515 - RNA, 19 nt, Artificial Sequence
  Description of Artificial Sequence: Synthetic oligonucleotide
ccaggcucguuucaagaac

SEQ ID NO: 450516 - RNA, 19 nt, Artificial Sequence
  Description of Artificial Sequence: Synthetic oligonucleotide
gacugcacacacacacaca

SEQ ID NO: 450517 - RNA, 19 nt, Artificial Sequence
  Description of Artificial Sequence: Synthetic oligonucleotide
gcaaguagugguggccagg

SEQ ID NO: 450518 - RNA, 19 nt, Artificial Sequence
  Description of Artificial Sequence: Synthetic oligonucleotide
gcaacacuaggccggcgug

SEQ ID NO: 450519 - RNA, 19 nt, Artificial Sequence
  Description of Artificial Sequence: Synthetic oligonucleotide
cccucaugcaagugccugg

SEQ ID NO: 450520 - RNA, 19 nt, Artificial Sequence
  Description of Artificial Sequence: Synthetic oligonucleotide
acacacacacacacacaca

SEQ ID NO: 450521 - RNA, 19 nt, Artificial Sequence
  Description of Artificial Sequence: Synthetic oligonucleotide
gcucguuucaagaaccaaa

SEQ ID NO: 450522 - RNA, 19 nt, Artificial Sequence
  Description of Artificial Sequence: Synthetic oligonucleotide
cauuguaacuguccggauu

SEQ ID NO: 450523 - RNA, 19 nt, Artificial Sequence
  Description of Artificial Sequence: Synthetic oligonucleotide
gcucaauucugcaguagca

SEQ ID NO: 450524 - RNA, 19 nt, Artificial Sequence
  Description of Artificial Sequence: Synthetic oligonucleotide
caguagcaucaaucucuac

SEQ ID NO: 450525 - RNA, 19 nt, Artificial Sequence
  Description of Artificial Sequence: Synthetic oligonucleotide
gggauuuagagaccaacuu

SEQ ID NO: 450526 - RNA, 19 nt, Artificial Sequence
  Description of Artificial Sequence: Synthetic oligonucleotide
guacccugaccuccagguc

SEQ ID NO: 450527 - RNA, 19 nt, Artificial Sequence
  Description of Artificial Sequence: Synthetic oligonucleotide
uacuucccgaggcccgcuc

SEQ ID NO: 450528 - RNA, 19 nt, Artificial Sequence
  Description of Artificial Sequence: Synthetic oligonucleotide
caacucuccugggucuuug

SEQ ID NO: 450529 - RNA, 19 nt, Artificial Sequence
  Description of Artificial Sequence: Synthetic oligonucleotide
cugcacacacacacacaca

SEQ ID NO: 450530 - RNA, 19 nt, Artificial Sequence
  Description of Artificial Sequence: Synthetic oligonucleotide
ucgaaucguuggccucgga

SEQ ID NO: 450531 - RNA, 19 nt, Artificial Sequence
  Description of Artificial Sequence: Synthetic oligonucleotide
uugcgaccagguguaguuc

SEQ ID NO: 450532 - RNA, 19 nt, Artificial Sequence
  Description of Artificial Sequence: Synthetic oligonucleotide
guagccacuaccacaccgu

SEQ ID NO: 450533 - RNA, 19 nt, Artificial Sequence
  Description of Artificial Sequence: Synthetic oligonucleotide
cagcuuuguaggccggaca

SEQ ID NO: 450534 - RNA, 19 nt, Artificial Sequence
  Description of Artificial Sequence: Synthetic oligonucleotide
guaaaggguugggacaccu

SEQ ID NO: 450535 - RNA, 19 nt, Artificial Sequence
  Description of Artificial Sequence: Synthetic oligonucleotide
gcaaaccaacaccgaggag

SEQ ID NO: 450536 - RNA, 19 nt, Artificial Sequence
  Description of Artificial Sequence: Synthetic oligonucleotide
gcaacguauccaagaggag

SEQ ID NO: 450537 - RNA, 19 nt, Artificial Sequence
  Description of Artificial Sequence: Synthetic oligonucleotide
agugagucccuggcaugca

SEQ ID NO: 450538 - RNA, 19 nt, Artificial Sequence
  Description of Artificial Sequence: Synthetic oligonucleotide
caacaccgaggagccagag

SEQ ID NO: 450539 - RNA, 19 nt, Artificial Sequence
  Description of Artificial Sequence: Synthetic oligonucleotide
accacaccguguaccauaa

SEQ ID NO: 450540 - RNA, 19 nt, Artificial Sequence
  Description of Artificial Sequence: Synthetic oligonucleotide
ccucaugcaagugccuggc

SEQ ID NO: 450541 - RNA, 19 nt, Artificial Sequence
  Description of Artificial Sequence: Synthetic oligonucleotide
caguggguaaguuuuccuu

SEQ ID NO: 450542 - RNA, 19 nt, Artificial Sequence
  Description of Artificial Sequence: Synthetic oligonucleotide
aggcucguuucaagaacca

SEQ ID NO: 450543 - RNA, 19 nt, Artificial Sequence
  Description of Artificial Sequence: Synthetic oligonucleotide
gcgagacacaccauagaga

SEQ ID NO: 450544 - RNA, 19 nt, Artificial Sequence
  Description of Artificial Sequence: Synthetic oligonucleotide
agccacuaccacaccgugu

SEQ ID NO: 450545 - RNA, 19 nt, Artificial Sequence
  Description of Artificial Sequence: Synthetic oligonucleotide
gccgggucgaaucguuggc

SEQ ID NO: 450546 - RNA, 19 nt, Artificial Sequence
  Description of Artificial Sequence: Synthetic oligonucleotide
aaccaacaccgaggagcca

SEQ ID NO: 450547 - RNA, 19 nt, Artificial Sequence
  Description of Artificial Sequence: Synthetic oligonucleotide
gggaucacacacagaggac

SEQ ID NO: 450548 - RNA, 19 nt, Artificial Sequence
  Description of Artificial Sequence: Synthetic oligonucleotide
aggcgcugagcuccaggaa

SEQ ID NO: 450549 - RNA, 19 nt, Artificial Sequence
  Description of Artificial Sequence: Synthetic oligonucleotide
cccuguaccuucucuaaaa

SEQ ID NO: 450550 - RNA, 19 nt, Artificial Sequence
  Description of Artificial Sequence: Synthetic oligonucleotide
cacccacuacauuauuccu

SEQ ID NO: 450551 - RNA, 19 nt, Artificial Sequence
  Description of Artificial Sequence: Synthetic oligonucleotide
gccuacaucuaauacuauu

SEQ ID NO: 450552 - RNA, 19 nt, Artificial Sequence
  Description of Artificial Sequence: Synthetic oligonucleotide
caugcuccaucugcccuca

SEQ ID NO: 450553 - RNA, 19 nt, Artificial Sequence
  Description of Artificial Sequence: Synthetic oligonucleotide
gggucgaaucguuggccuc

SEQ ID NO: 450554 - RNA, 19 nt, Artificial Sequence
  Description of Artificial Sequence: Synthetic oligonucleotide
ccuucaagccaguggguaa

SEQ ID NO: 450555 - RNA, 19 nt, Artificial Sequence
  Description of Artificial Sequence: Synthetic oligonucleotide
uucucacggauggcaccau

SEQ ID NO: 450556 - RNA, 19 nt, Artificial Sequence
  Description of Artificial Sequence: Synthetic oligonucleotide
uccugccauauggccuaca

SEQ ID NO: 450557 - RNA, 19 nt, Artificial Sequence
  Description of Artificial Sequence: Synthetic oligonucleotide
ccuugccacaucugggcca

SEQ ID NO: 450558 - RNA, 19 nt, Artificial Sequence
  Description of Artificial Sequence: Synthetic oligonucleotide
cugaggcauccuucaaggu

SEQ ID NO: 450559 - RNA, 19 nt, Artificial Sequence
  Description of Artificial Sequence: Synthetic oligonucleotide
ccaugccaaagggagauaa

SEQ ID NO: 450560 - RNA, 19 nt, Artificial Sequence
  Description of Artificial Sequence: Synthetic oligonucleotide
acaacucuccugggucuuu

SEQ ID NO: 450561 - RNA, 19 nt, Artificial Sequence
  Description of Artificial Sequence: Synthetic oligonucleotide
gucuugcgaccagguguag

SEQ ID NO: 450562 - RNA, 19 nt, Artificial Sequence
  Description of Artificial Sequence: Synthetic oligonucleotide
ccgggucgaaucguuggcc

SEQ ID NO: 450563 - RNA, 19 nt, Artificial Sequence
  Description of Artificial Sequence: Synthetic oligonucleotide
cuaggccggcgugcgcgcc

SEQ ID NO: 450564 - RNA, 19 nt, Artificial Sequence
  Description of Artificial Sequence: Synthetic oligonucleotide
gcugcuuagggagugugau

SEQ ID NO: 450565 - RNA, 19 nt, Artificial Sequence
  Description of Artificial Sequence: Synthetic oligonucleotide
uucccgaggcccgcucaau

SEQ ID NO: 450566 - RNA, 19 nt, Artificial Sequence
  Description of Artificial Sequence: Synthetic oligonucleotide
uuccugccauauggccuac

SEQ ID NO: 450567 - RNA, 19 nt, Artificial Sequence
  Description of Artificial Sequence: Synthetic oligonucleotide
ggccggacacacaacucuc

SEQ ID NO: 450568 - RNA, 19 nt, Artificial Sequence
  Description of Artificial Sequence: Synthetic oligonucleotide
caucugggccaggggccag

SEQ ID NO: 450569 - RNA, 19 nt, Artificial Sequence
  Description of Artificial Sequence: Synthetic oligonucleotide
gcacacacacacacacaca

SEQ ID NO: 450570 - RNA, 19 nt, Artificial Sequence
  Description of Artificial Sequence: Synthetic oligonucleotide
cguguaccauaacaugcca

SEQ ID NO: 450571 - RNA, 19 nt, Artificial Sequence
  Description of Artificial Sequence: Synthetic oligonucleotide
auggccgggucgaaucguu

SEQ ID NO: 450572 - RNA, 19 nt, Artificial Sequence
  Description of Artificial Sequence: Synthetic oligonucleotide
ccuggcgagccaugugauc

SEQ ID NO: 450573 - RNA, 19 nt, Artificial Sequence
  Description of Artificial Sequence: Synthetic oligonucleotide
ggcucguuucaagaaccaa

SEQ ID NO: 450574 - RNA, 19 nt, Artificial Sequence
  Description of Artificial Sequence: Synthetic oligonucleotide
gcccuguaccuucucuaaa

SEQ ID NO: 450575 - RNA, 19 nt, Artificial Sequence
  Description of Artificial Sequence: Synthetic oligonucleotide
ccaugugaucaaauguuuu

SEQ ID NO: 450576 - RNA, 19 nt, Artificial Sequence
  Description of Artificial Sequence: Synthetic oligonucleotide
ccgcucaauucugcaguag

SEQ ID NO: 450577 - RNA, 19 nt, Artificial Sequence
  Description of Artificial Sequence: Synthetic oligonucleotide
gggugagccagggcaguuc

SEQ ID NO: 450578 - RNA, 19 nt, Artificial Sequence
  Description of Artificial Sequence: Synthetic oligonucleotide
gcugggauugagccccacu

SEQ ID NO: 450579 - RNA, 19 nt, Artificial Sequence
  Description of Artificial Sequence: Synthetic oligonucleotide
gccaugugaucaaauguuu

SEQ ID NO: 450580 - RNA, 19 nt, Artificial Sequence
  Description of Artificial Sequence: Synthetic oligonucleotide
ccacuaccacaccguguac

SEQ ID NO: 450581 - RNA, 19 nt, Artificial Sequence
  Description of Artificial Sequence: Synthetic oligonucleotide
cgaggcccgcucaauucug

SEQ ID NO: 450582 - RNA, 19 nt, Artificial Sequence
  Description of Artificial Sequence: Synthetic oligonucleotide
gcgaccagguguaguucuc

SEQ ID NO: 450583 - RNA, 19 nt, Artificial Sequence
  Description of Artificial Sequence: Synthetic oligonucleotide
cauggccgggucgaaucgu

SEQ ID NO: 450584 - RNA, 19 nt, Artificial Sequence
  Description of Artificial Sequence: Synthetic oligonucleotide
ccugccauauggccuacau

SEQ ID NO: 450585 - RNA, 19 nt, Artificial Sequence
  Description of Artificial Sequence: Synthetic oligonucleotide
gcaacacgccagcuucagu

SEQ ID NO: 450586 - RNA, 19 nt, Artificial Sequence
  Description of Artificial Sequence: Synthetic oligonucleotide
ggcgagccaugugaucaaa

SEQ ID NO: 450587 - RNA, 19 nt, Artificial Sequence
  Description of Artificial Sequence: Synthetic oligonucleotide
ggguuccuuagggccuuca

SEQ ID NO: 450588 - RNA, 19 nt, Artificial Sequence
  Description of Artificial Sequence: Synthetic oligonucleotide
gcacuggaacuggcacggc

SEQ ID NO: 450589 - RNA, 19 nt, Artificial Sequence
  Description of Artificial Sequence: Synthetic oligonucleotide
cguauccaagaggaggucu

SEQ ID NO: 450590 - RNA, 19 nt, Artificial Sequence
  Description of Artificial Sequence: Synthetic oligonucleotide
ccacaccguguaccauaac

SEQ ID NO: 450591 - RNA, 19 nt, Artificial Sequence
  Description of Artificial Sequence: Synthetic oligonucleotide
cacaacucuccugggucuu

SEQ ID NO: 450592 - RNA, 19 nt, Artificial Sequence
  Description of Artificial Sequence: Synthetic oligonucleotide
cuaccacaccguguaccau

SEQ ID NO: 450593 - RNA, 19 nt, Artificial Sequence
  Description of Artificial Sequence: Synthetic oligonucleotide
ccgaggcccgcucaauucu

SEQ ID NO: 450594 - RNA, 19 nt, Artificial Sequence
  Description of Artificial Sequence: Synthetic oligonucleotide
ccauuguaacuguccggau

SEQ ID NO: 450595 - RNA, 19 nt, Artificial Sequence
  Description of Artificial Sequence: Synthetic oligonucleotide
cuacuucccgaggcccgcu

SEQ ID NO: 450596 - RNA, 19 nt, Artificial Sequence
  Description of Artificial Sequence: Synthetic oligonucleotide
  modified_base (11)..(11): a, c, u, g, unknown or other
auauauaaganacuuacac

SEQ ID NO: 450597 - RNA, 19 nt, Artificial Sequence
  Description of Artificial Sequence: Synthetic oligonucleotide
uucggaaucauucagagcc

SEQ ID NO: 450598 - RNA, 19 nt, Artificial Sequence
  Description of Artificial Sequence: Synthetic oligonucleotide
aaagcauauuauaagaucg

SEQ ID NO: 450599 - RNA, 19 nt, Artificial Sequence
  Description of Artificial Sequence: Synthetic oligonucleotide
aauagggcaaaauauccgg

SEQ ID NO: 450600 - RNA, 19 nt, Artificial Sequence
  Description of Artificial Sequence: Synthetic oligonucleotide
aaacauccgagcuauauuc

SEQ ID NO: 450601 - RNA, 19 nt, Artificial Sequence
  Description of Artificial Sequence: Synthetic oligonucleotide
aguauauuaguauagugag

SEQ ID NO: 450602 - RNA, 19 nt, Artificial Sequence
  Description of Artificial Sequence: Synthetic oligonucleotide
uuaaauagaacugaagugc

SEQ ID NO: 450603 - RNA, 19 nt, Artificial Sequence
  Description of Artificial Sequence: Synthetic oligonucleotide
uuagcuuuucugcauaucg

SEQ ID NO: 450604 - RNA, 19 nt, Artificial Sequence
  Description of Artificial Sequence: Synthetic oligonucleotide
auucagaucacuugguagc

SEQ ID NO: 450605 - RNA, 19 nt, Artificial Sequence
  Description of Artificial Sequence: Synthetic oligonucleotide
auaucuuacauucucaucu

SEQ ID NO: 450606 - RNA, 19 nt, Artificial Sequence
  Description of Artificial Sequence: Synthetic oligonucleotide
acuuaaauagaacugaagu

SEQ ID NO: 450607 - RNA, 19 nt, Artificial Sequence
  Description of Artificial Sequence: Synthetic oligonucleotide
uguauagugaauauaucug

SEQ ID NO: 450608 - RNA, 19 nt, Artificial Sequence
  Description of Artificial Sequence: Synthetic oligonucleotide
uuaugauguagucacagcc

SEQ ID NO: 450609 - RNA, 19 nt, Artificial Sequence
  Description of Artificial Sequence: Synthetic oligonucleotide
uaaucauacuuuaaguugc

SEQ ID NO: 450610 - RNA, 19 nt, Artificial Sequence
  Description of Artificial Sequence: Synthetic oligonucleotide
  modified_base (9)..(9): a, c, u, g, unknown or other
auauaaganacuuacacau

SEQ ID NO: 450611 - RNA, 19 nt, Artificial Sequence
  Description of Artificial Sequence: Synthetic oligonucleotide
accauuuuguacuuagugc

SEQ ID NO: 450612 - RNA, 19 nt, Artificial Sequence
  Description of Artificial Sequence: Synthetic oligonucleotide
auuacucuggucucaaggc

SEQ ID NO: 450613 - RNA, 19 nt, Artificial Sequence
  Description of Artificial Sequence: Synthetic oligonucleotide
ucuuucaugagaauagggc

SEQ ID NO: 450614 - RNA, 19 nt, Artificial Sequence
  Description of Artificial Sequence: Synthetic oligonucleotide
aacuacaaugauuauuaag

SEQ ID NO: 450615 - RNA, 19 nt, Artificial Sequence
  Description of Artificial Sequence: Synthetic oligonucleotide
  modified_base (7)..(7): a, c, u, g, unknown or other
auaaganacuuacacauga

SEQ ID NO: 450616 - RNA, 19 nt, Artificial Sequence
  Description of Artificial Sequence: Synthetic oligonucleotide
aaucaacacaaauuucuuc

SEQ ID NO: 450617 - RNA, 19 nt, Artificial Sequence
  Description of Artificial Sequence: Synthetic oligonucleotide
uguuguacagccuugauau

SEQ ID NO: 450618 - RNA, 19 nt, Artificial Sequence
  Description of Artificial Sequence: Synthetic oligonucleotide
uuucuuucgaacuuugaag

SEQ ID NO: 450619 - RNA, 19 nt, Artificial Sequence
  Description of Artificial Sequence: Synthetic oligonucleotide
aguuauauaacuugugcug

SEQ ID NO: 450620 - RNA, 19 nt, Artificial Sequence
  Description of Artificial Sequence: Synthetic oligonucleotide
ugaguuguguauuugacca

SEQ ID NO: 450621 - RNA, 19 nt, Artificial Sequence
  Description of Artificial Sequence: Synthetic oligonucleotide
ugguguggcacuaagagcc

SEQ ID NO: 450622 - RNA, 19 nt, Artificial Sequence
  Description of Artificial Sequence: Synthetic oligonucleotide
agaaaugacuucuaaacca

SEQ ID NO: 450623 - RNA, 19 nt, Artificial Sequence
  Description of Artificial Sequence: Synthetic oligonucleotide
cuucuaaacauucuugagg

SEQ ID NO: 450624 - RNA, 19 nt, Artificial Sequence
  Description of Artificial Sequence: Synthetic oligonucleotide
uauaagaucgacuucuccu

SEQ ID NO: 450625 - RNA, 19 nt, Artificial Sequence
  Description of Artificial Sequence: Synthetic oligonucleotide
uucuaaacauucuugaggu

SEQ ID NO: 450626 - RNA, 19 nt, Artificial Sequence
  Description of Artificial Sequence: Synthetic oligonucleotide
uuuaccaugaccugaggug

SEQ ID NO: 450627 - RNA, 19 nt, Artificial Sequence
  Description of Artificial Sequence: Synthetic oligonucleotide
uucuuucgaacuuugaagc

SEQ ID NO: 450628 - RNA, 19 nt, Artificial Sequence
  Description of Artificial Sequence: Synthetic oligonucleotide
auguauagugaauauaucu

SEQ ID NO: 450629 - RNA, 19 nt, Artificial Sequence
  Description of Artificial Sequence: Synthetic oligonucleotide
agaauagggcaaaauaucc

SEQ ID NO: 450630 - RNA, 19 nt, Artificial Sequence
  Description of Artificial Sequence: Synthetic oligonucleotide
uccuuuaggagauaugcag

SEQ ID NO: 450631 - RNA, 19 nt, Artificial Sequence
  Description of Artificial Sequence: Synthetic oligonucleotide
aagucuucccaucaaagca

SEQ ID NO: 450632 - RNA, 19 nt, Artificial Sequence
  Description of Artificial Sequence: Synthetic oligonucleotide
agcauaguucccaagagcc

SEQ ID NO: 450633 - RNA, 19 nt, Artificial Sequence
  Description of Artificial Sequence: Synthetic oligonucleotide
ucucauuucggaaucauuc

SEQ ID NO: 450634 - RNA, 19 nt, Artificial Sequence
  Description of Artificial Sequence: Synthetic oligonucleotide
acuuuauucgggcagcagg

SEQ ID NO: 450635 - RNA, 19 nt, Artificial Sequence
  Description of Artificial Sequence: Synthetic oligonucleotide
aauuaugacuucuuccagu

SEQ ID NO: 450636 - RNA, 19 nt, Artificial Sequence
  Description of Artificial Sequence: Synthetic oligonucleotide
agaacgaagcucuaucuuc

SEQ ID NO: 450637 - RNA, 19 nt, Artificial Sequence
  Description of Artificial Sequence: Synthetic oligonucleotide
gauucagaucacuugguag

SEQ ID NO: 450638 - RNA, 19 nt, Artificial Sequence
  Description of Artificial Sequence: Synthetic oligonucleotide
uacaaagucaagaagugau

SEQ ID NO: 450639 - RNA, 19 nt, Artificial Sequence
  Description of Artificial Sequence: Synthetic oligonucleotide
uaaauagcucucauuucgg

SEQ ID NO: 450640 - RNA, 19 nt, Artificial Sequence
  Description of Artificial Sequence: Synthetic oligonucleotide
cauacuuuaaguugcugag

SEQ ID NO: 450641 - RNA, 19 nt, Artificial Sequence
  Description of Artificial Sequence: Synthetic oligonucleotide
aacuuugaagccuuuucug

SEQ ID NO: 450642 - RNA, 19 nt, Artificial Sequence
  Description of Artificial Sequence: Synthetic oligonucleotide
uccggagaucuucagaacg

SEQ ID NO: 450643 - RNA, 19 nt, Artificial Sequence
  Description of Artificial Sequence: Synthetic oligonucleotide
aguaaggucguuuaccaug

SEQ ID NO: 450644 - RNA, 19 nt, Artificial Sequence
  Description of Artificial Sequence: Synthetic oligonucleotide
ucgucuuucaugagaauag

SEQ ID NO: 450645 - RNA, 19 nt, Artificial Sequence
  Description of Artificial Sequence: Synthetic oligonucleotide
uucuccuauauccaaaccu

SEQ ID NO: 450646 - RNA, 19 nt, Artificial Sequence
  Description of Artificial Sequence: Synthetic oligonucleotide
uuuaaguugcugagcaugc

SEQ ID NO: 450647 - RNA, 19 nt, Artificial Sequence
  Description of Artificial Sequence: Synthetic oligonucleotide
aacuaaggagguuagcaga

SEQ ID NO: 450648 - RNA, 19 nt, Artificial Sequence
  Description of Artificial Sequence: Synthetic oligonucleotide
uuuaaggcaguuauauaac

SEQ ID NO: 450649 - RNA, 19 nt, Artificial Sequence
  Description of Artificial Sequence: Synthetic oligonucleotide
ugguaagauaauucuagag

SEQ ID NO: 450650 - RNA, 19 nt, Artificial Sequence
  Description of Artificial Sequence: Synthetic oligonucleotide
ucaucaguggacuacguac

SEQ ID NO: 450651 - RNA, 19 nt, Artificial Sequence
  Description of Artificial Sequence: Synthetic oligonucleotide
uuguacuuagugcucauca

SEQ ID NO: 450652 - RNA, 19 nt, Artificial Sequence
  Description of Artificial Sequence: Synthetic oligonucleotide
uuauauaacuugugcuggg

SEQ ID NO: 450653 - RNA, 19 nt, Artificial Sequence
  Description of Artificial Sequence: Synthetic oligonucleotide
guuauauaacuugugcugg

SEQ ID NO: 450654 - RNA, 19 nt, Artificial Sequence
  Description of Artificial Sequence: Synthetic oligonucleotide
  modified_base (8)..(8): a, c, u, g, unknown or other
uauaaganacuuacacaug

SEQ ID NO: 450655 - RNA, 19 nt, Artificial Sequence
  Description of Artificial Sequence: Synthetic oligonucleotide
uuucucacggaccauuuug

SEQ ID NO: 450656 - RNA, 19 nt, Artificial Sequence
  Description of Artificial Sequence: Synthetic oligonucleotide
uaagcauaguucccaagag

SEQ ID NO: 450657 - RNA, 19 nt, Artificial Sequence
  Description of Artificial Sequence: Synthetic oligonucleotide
cauauucuuuggaacaugc

SEQ ID NO: 450658 - RNA, 19 nt, Artificial Sequence
  Description of Artificial Sequence: Synthetic oligonucleotide
uacuuagugcucaucagug

SEQ ID NO: 450659 - RNA, 19 nt, Artificial Sequence
  Description of Artificial Sequence: Synthetic oligonucleotide
ucauuucggaaucauucag

SEQ ID NO: 450660 - RNA, 19 nt, Artificial Sequence
  Description of Artificial Sequence: Synthetic oligonucleotide
cauuacucuggucucaagg

SEQ ID NO: 450661 - RNA, 19 nt, Artificial Sequence
  Description of Artificial Sequence: Synthetic oligonucleotide
aauguauagugaauauauc

SEQ ID NO: 450662 - RNA, 19 nt, Artificial Sequence
  Description of Artificial Sequence: Synthetic oligonucleotide
ugcauaucggguuuuauau

SEQ ID NO: 450663 - RNA, 19 nt, Artificial Sequence
  Description of Artificial Sequence: Synthetic oligonucleotide
ucaucugguaagauaauuc

SEQ ID NO: 450664 - RNA, 19 nt, Artificial Sequence
  Description of Artificial Sequence: Synthetic oligonucleotide
ugaaccugucaucucagcc

SEQ ID NO: 450665 - RNA, 19 nt, Artificial Sequence
  Description of Artificial Sequence: Synthetic oligonucleotide
uuugcaagacuccucuuca

SEQ ID NO: 450666 - RNA, 19 nt, Artificial Sequence
  Description of Artificial Sequence: Synthetic oligonucleotide
ucuaguaaggucguuuacc

SEQ ID NO: 450667 - RNA, 19 nt, Artificial Sequence
  Description of Artificial Sequence: Synthetic oligonucleotide
cuuacaaccuggcaguaag

SEQ ID NO: 450668 - RNA, 19 nt, Artificial Sequence
  Description of Artificial Sequence: Synthetic oligonucleotide
acauguuuaaggcaguuau

SEQ ID NO: 450669 - RNA, 19 nt, Artificial Sequence
  Description of Artificial Sequence: Synthetic oligonucleotide
gaauagggcaaaauauccg

SEQ ID NO: 450670 - RNA, 19 nt, Artificial Sequence
  Description of Artificial Sequence: Synthetic oligonucleotide
uuauaagaucgacuucucc

SEQ ID NO: 450671 - RNA, 19 nt, Artificial Sequence
  Description of Artificial Sequence: Synthetic oligonucleotide
gaaaugacuucuaaaccag

SEQ ID NO: 450672 - RNA, 19 nt, Artificial Sequence
  Description of Artificial Sequence: Synthetic oligonucleotide
gaaaccagcguguuauacc

SEQ ID NO: 450673 - RNA, 19 nt, Artificial Sequence
  Description of Artificial Sequence: Synthetic oligonucleotide
aacgaagcucuaucuuccc

SEQ ID NO: 450674 - RNA, 19 nt, Artificial Sequence
  Description of Artificial Sequence: Synthetic oligonucleotide
auuucagacugagacuucc

SEQ ID NO: 450675 - RNA, 19 nt, Artificial Sequence
  Description of Artificial Sequence: Synthetic oligonucleotide
ugaagugccucacauuuac

SEQ ID NO: 450676 - RNA, 19 nt, Artificial Sequence
  Description of Artificial Sequence: Synthetic oligonucleotide
uguuauacccgccgucacg

SEQ ID NO: 450677 - RNA, 19 nt, Artificial Sequence
  Description of Artificial Sequence: Synthetic oligonucleotide
  modified_base (3)..(3): a, c, u, g, unknown or other
ganacuuacacaugaauau

SEQ ID NO: 450678 - RNA, 19 nt, Artificial Sequence
  Description of Artificial Sequence: Synthetic oligonucleotide
guaaucaccuguuguacag

SEQ ID NO: 450679 - RNA, 19 nt, Artificial Sequence
  Description of Artificial Sequence: Synthetic oligonucleotide
gguaagauaauucuagaga

SEQ ID NO: 450680 - RNA, 19 nt, Artificial Sequence
  Description of Artificial Sequence: Synthetic oligonucleotide
ugagacuuccuuucuacca

SEQ ID NO: 450681 - RNA, 19 nt, Artificial Sequence
  Description of Artificial Sequence: Synthetic oligonucleotide
aauagcucucauuucggaa

SEQ ID NO: 450682 - RNA, 19 nt, Artificial Sequence
  Description of Artificial Sequence: Synthetic oligonucleotide
aagugaguuguguauuuga

SEQ ID NO: 450683 - RNA, 19 nt, Artificial Sequence
  Description of Artificial Sequence: Synthetic oligonucleotide
uuaaggcaguuauauaacu

SEQ ID NO: 450684 - RNA, 19 nt, Artificial Sequence
  Description of Artificial Sequence: Synthetic oligonucleotide
uauccggagaucuucagaa

SEQ ID NO: 450685 - RNA, 19 nt, Artificial Sequence
  Description of Artificial Sequence: Synthetic oligonucleotide
uguacuuagugcucaucag

SEQ ID NO: 450686 - RNA, 19 nt, Artificial Sequence
  Description of Artificial Sequence: Synthetic oligonucleotide
uguucuuagcgaagaaaug

SEQ ID NO: 450687 - RNA, 19 nt, Artificial Sequence
  Description of Artificial Sequence: Synthetic oligonucleotide
aauauccggagaucuucag

SEQ ID NO: 450688 - RNA, 19 nt, Artificial Sequence
  Description of Artificial Sequence: Synthetic oligonucleotide
aucaucuagaaacauccga

SEQ ID NO: 450689 - RNA, 19 nt, Artificial Sequence
  Description of Artificial Sequence: Synthetic oligonucleotide
ugauaucacuaccuggugu

SEQ ID NO: 450690 - RNA, 19 nt, Artificial Sequence
  Description of Artificial Sequence: Synthetic oligonucleotide
agcauauuauaagaucgac

SEQ ID NO: 450691 - RNA, 19 nt, Artificial Sequence
  Description of Artificial Sequence: Synthetic oligonucleotide
uuuuggauggcuccaaguu

SEQ ID NO: 450692 - RNA, 19 nt, Artificial Sequence
  Description of Artificial Sequence: Synthetic oligonucleotide
aguugaaccugucaucuca

SEQ ID NO: 450693 - RNA, 19 nt, Artificial Sequence
  Description of Artificial Sequence: Synthetic oligonucleotide
acugccauuauuuaacauu

SEQ ID NO: 450694 - RNA, 19 nt, Artificial Sequence
  Description of Artificial Sequence: Synthetic oligonucleotide
aaauagcucucauuucgga

SEQ ID NO: 450695 - RNA, 19 nt, Artificial Sequence
  Description of Artificial Sequence: Synthetic oligonucleotide
cacacauauucuuuggaac

SEQ ID NO: 450696 - RNA, 19 nt, Artificial Sequence
  Description of Artificial Sequence: Synthetic oligonucleotide
accagcguguuauacccgc

SEQ ID NO: 450697 - RNA, 19 nt, Artificial Sequence
  Description of Artificial Sequence: Synthetic oligonucleotide
uguaugucaaauguauagu

SEQ ID NO: 450698 - RNA, 19 nt, Artificial Sequence
  Description of Artificial Sequence: Synthetic oligonucleotide
accaacacagguagaaacc

SEQ ID NO: 450699 - RNA, 19 nt, Artificial Sequence
  Description of Artificial Sequence: Synthetic oligonucleotide
augagaauagggcaaaaua

SEQ ID NO: 450700 - RNA, 19 nt, Artificial Sequence
  Description of Artificial Sequence: Synthetic oligonucleotide
ucuagaaacauccgagcua

SEQ ID NO: 450701 - RNA, 19 nt, Artificial Sequence
  Description of Artificial Sequence: Synthetic oligonucleotide
ucguuuaccaugaccugag

SEQ ID NO: 450702 - RNA, 19 nt, Artificial Sequence
  Description of Artificial Sequence: Synthetic oligonucleotide
aaagucaagaagugaugaa

SEQ ID NO: 450703 - RNA, 19 nt, Artificial Sequence
  Description of Artificial Sequence: Synthetic oligonucleotide
agugccucacauuuacuag

SEQ ID NO: 450704 - RNA, 19 nt, Artificial Sequence
  Description of Artificial Sequence: Synthetic oligonucleotide
uagggcaaaauauccggag

SEQ ID NO: 450705 - RNA, 19 nt, Artificial Sequence
  Description of Artificial Sequence: Synthetic oligonucleotide
aucuagaaacauccgagcu

SEQ ID NO: 450706 - RNA, 19 nt, Artificial Sequence
  Description of Artificial Sequence: Synthetic oligonucleotide
ucuuucgaacuuugaagcc

SEQ ID NO: 450707 - RNA, 19 nt, Artificial Sequence
  Description of Artificial Sequence: Synthetic oligonucleotide
gucaagaagugaugaaucc

SEQ ID NO: 450708 - RNA, 19 nt, Artificial Sequence
  Description of Artificial Sequence: Synthetic oligonucleotide
uucccgacugucuacaaga

SEQ ID NO: 450709 - RNA, 19 nt, Artificial Sequence
  Description of Artificial Sequence: Synthetic oligonucleotide
agacacuuuauucgggcag

SEQ ID NO: 450710 - RNA, 19 nt, Artificial Sequence
  Description of Artificial Sequence: Synthetic oligonucleotide
cauauuauaagaucgacuu

SEQ ID NO: 450711 - RNA, 19 nt, Artificial Sequence
  Description of Artificial Sequence: Synthetic oligonucleotide
ugaguugaaccugucaucu

SEQ ID NO: 450712 - RNA, 19 nt, Artificial Sequence
  Description of Artificial Sequence: Synthetic oligonucleotide
aauaaugggcugaugcugu

SEQ ID NO: 450713 - RNA, 19 nt, Artificial Sequence
  Description of Artificial Sequence: Synthetic oligonucleotide
agagcugaaaaggauucgg

SEQ ID NO: 450714 - RNA, 19 nt, Artificial Sequence
  Description of Artificial Sequence: Synthetic oligonucleotide
guaagcauaguucccaaga

SEQ ID NO: 450715 - RNA, 19 nt, Artificial Sequence
  Description of Artificial Sequence: Synthetic oligonucleotide
caacuaaggagguuagcag

SEQ ID NO: 450716 - RNA, 19 nt, Artificial Sequence
  Description of Artificial Sequence: Synthetic oligonucleotide
uuagcgaagaaaugacuuc

SEQ ID NO: 450717 - RNA, 19 nt, Artificial Sequence
  Description of Artificial Sequence: Synthetic oligonucleotide
ugacagcuugaguugaacc

SEQ ID NO: 450718 - RNA, 19 nt, Artificial Sequence
  Description of Artificial Sequence: Synthetic oligonucleotide
cagugacacauguuuaagg

SEQ ID NO: 450719 - RNA, 19 nt, Artificial Sequence
  Description of Artificial Sequence: Synthetic oligonucleotide
aagauucgaaagugaguug

SEQ ID NO: 450720 - RNA, 19 nt, Artificial Sequence
  Description of Artificial Sequence: Synthetic oligonucleotide
aagugccucacauuuacua

SEQ ID NO: 450721 - RNA, 19 nt, Artificial Sequence
  Description of Artificial Sequence: Synthetic oligonucleotide
uauuugaccaguucccuua

SEQ ID NO: 450722 - RNA, 19 nt, Artificial Sequence
  Description of Artificial Sequence: Synthetic oligonucleotide
uuggcuuuugcaagacucc

SEQ ID NO: 450723 - RNA, 19 nt, Artificial Sequence
  Description of Artificial Sequence: Synthetic oligonucleotide
acuugguagcauuuguaug

SEQ ID NO: 450724 - RNA, 19 nt, Artificial Sequence
  Description of Artificial Sequence: Synthetic oligonucleotide
auagcucucauuucggaau

SEQ ID NO: 450725 - RNA, 19 nt, Artificial Sequence
  Description of Artificial Sequence: Synthetic oligonucleotide
cuucccaauuaguagguug

SEQ ID NO: 450726 - RNA, 19 nt, Artificial Sequence
  Description of Artificial Sequence: Synthetic oligonucleotide
aagacacuuuauucgggca

SEQ ID NO: 450727 - RNA, 19 nt, Artificial Sequence
  Description of Artificial Sequence: Synthetic oligonucleotide
caacaagcuucucaacucg

SEQ ID NO: 450728 - RNA, 19 nt, Artificial Sequence
  Description of Artificial Sequence: Synthetic oligonucleotide
acuaucucggaaugaggag

SEQ ID NO: 450729 - RNA, 19 nt, Artificial Sequence
  Description of Artificial Sequence: Synthetic oligonucleotide
uauucgggcagcaggacaa

SEQ ID NO: 450730 - RNA, 19 nt, Artificial Sequence
  Description of Artificial Sequence: Synthetic oligonucleotide
guuauacccgccgucacgg

SEQ ID NO: 450731 - RNA, 19 nt, Artificial Sequence
  Description of Artificial Sequence: Synthetic oligonucleotide
agugaguuguguauuugac

SEQ ID NO: 450732 - RNA, 19 nt, Artificial Sequence
  Description of Artificial Sequence: Synthetic oligonucleotide
uaaacauucuugagguguc

SEQ ID NO: 450733 - RNA, 19 nt, Artificial Sequence
  Description of Artificial Sequence: Synthetic oligonucleotide
gaggacaaaccucuacuug

SEQ ID NO: 450734 - RNA, 19 nt, Artificial Sequence
  Description of Artificial Sequence: Synthetic oligonucleotide
gaaugcaagcucugugucc

SEQ ID NO: 450735 - RNA, 19 nt, Artificial Sequence
  Description of Artificial Sequence: Synthetic oligonucleotide
  modified_base (4)..(4): a, c, u, g, unknown or other
aganacuuacacaugaaua

SEQ ID NO: 450736 - RNA, 19 nt, Artificial Sequence
  Description of Artificial Sequence: Synthetic oligonucleotide
agauucgaaagugaguugu

SEQ ID NO: 450737 - RNA, 19 nt, Artificial Sequence
  Description of Artificial Sequence: Synthetic oligonucleotide
ucgaaagugaguuguguau

SEQ ID NO: 450738 - RNA, 19 nt, Artificial Sequence
  Description of Artificial Sequence: Synthetic oligonucleotide
acuucuaaaccagaaguga

SEQ ID NO: 450739 - RNA, 19 nt, Artificial Sequence
  Description of Artificial Sequence: Synthetic oligonucleotide
uugguaaucaccuguugua

SEQ ID NO: 450740 - RNA, 19 nt, Artificial Sequence
  Description of Artificial Sequence: Synthetic oligonucleotide
  modified_base (6)..(6): a, c, u, g, unknown or other
uaaganacuuacacaugaa

SEQ ID NO: 450741 - RNA, 19 nt, Artificial Sequence
  Description of Artificial Sequence: Synthetic oligonucleotide
gugaguuguguauuugacc

SEQ ID NO: 450742 - RNA, 19 nt, Artificial Sequence
  Description of Artificial Sequence: Synthetic oligonucleotide
uuauucgggcagcaggaca

SEQ ID NO: 450743 - RNA, 19 nt, Artificial Sequence
  Description of Artificial Sequence: Synthetic oligonucleotide
agaaaccagcguguuauac

SEQ ID NO: 450744 - RNA, 19 nt, Artificial Sequence
  Description of Artificial Sequence: Synthetic oligonucleotide
ucaagaagugaugaauccu

SEQ ID NO: 450745 - RNA, 19 nt, Artificial Sequence
  Description of Artificial Sequence: Synthetic oligonucleotide
agacugucauagcacuucg

SEQ ID NO: 450746 - RNA, 19 nt, Artificial Sequence
  Description of Artificial Sequence: Synthetic oligonucleotide
gaguuacuugagcacacgc

SEQ ID NO: 450747 - RNA, 19 nt, Artificial Sequence
  Description of Artificial Sequence: Synthetic oligonucleotide
ccugauucagaucacuugg

SEQ ID NO: 450748 - RNA, 19 nt, Artificial Sequence
  Description of Artificial Sequence: Synthetic oligonucleotide
caccaacacagguagaaac

SEQ ID NO: 450749 - RNA, 19 nt, Artificial Sequence
  Description of Artificial Sequence: Synthetic oligonucleotide
aggucguuuaccaugaccu

SEQ ID NO: 450750 - RNA, 19 nt, Artificial Sequence
  Description of Artificial Sequence: Synthetic oligonucleotide
auuugaccaguucccuuac

SEQ ID NO: 450751 - RNA, 19 nt, Artificial Sequence
  Description of Artificial Sequence: Synthetic oligonucleotide
ugggcugaugcuguaaaag

SEQ ID NO: 450752 - RNA, 19 nt, Artificial Sequence
  Description of Artificial Sequence: Synthetic oligonucleotide
auaagaucgacuucuccua

SEQ ID NO: 450753 - RNA, 19 nt, Artificial Sequence
  Description of Artificial Sequence: Synthetic oligonucleotide
cuaguaaggucguuuacca

SEQ ID NO: 450754 - RNA, 19 nt, Artificial Sequence
  Description of Artificial Sequence: Synthetic oligonucleotide
ugucaaauguauagugaau

SEQ ID NO: 450755 - RNA, 19 nt, Artificial Sequence
  Description of Artificial Sequence: Synthetic oligonucleotide
ucggguuuuauaucuuaca

SEQ ID NO: 450756 - RNA, 19 nt, Artificial Sequence
  Description of Artificial Sequence: Synthetic oligonucleotide
aaagugaguuguguauuug

SEQ ID NO: 450757 - RNA, 19 nt, Artificial Sequence
  Description of Artificial Sequence: Synthetic oligonucleotide
uuagacucuccugauucag

SEQ ID NO: 450758 - RNA, 19 nt, Artificial Sequence
  Description of Artificial Sequence: Synthetic oligonucleotide
gagacuuccuuucuaccac

SEQ ID NO: 450759 - RNA, 19 nt, Artificial Sequence
  Description of Artificial Sequence: Synthetic oligonucleotide
gaacgaagcucuaucuucc

SEQ ID NO: 450760 - RNA, 19 nt, Artificial Sequence
  Description of Artificial Sequence: Synthetic oligonucleotide
gaaucauucagagccugug

SEQ ID NO: 450761 - RNA, 19 nt, Artificial Sequence
  Description of Artificial Sequence: Synthetic oligonucleotide
aaaugucaucacucgaaua

SEQ ID NO: 450762 - RNA, 19 nt, Artificial Sequence
  Description of Artificial Sequence: Synthetic oligonucleotide
uuagugcucaucaguggac

SEQ ID NO: 450763 - RNA, 19 nt, Artificial Sequence
  Description of Artificial Sequence: Synthetic oligonucleotide
  modified_base (2)..(2): a, c, u, g, unknown or other
anacuuacacaugaauauu

SEQ ID NO: 450764 - RNA, 19 nt, Artificial Sequence
  Description of Artificial Sequence: Synthetic oligonucleotide
ucuacuuguaagccaugaa

SEQ ID NO: 450765 - RNA, 19 nt, Artificial Sequence
  Description of Artificial Sequence: Synthetic oligonucleotide
uauauaacuugugcuggga

SEQ ID NO: 450766 - RNA, 19 nt, Artificial Sequence
  Description of Artificial Sequence: Synthetic oligonucleotide
ggaaucuuuaguuaaguua

SEQ ID NO: 450767 - RNA, 19 nt, Artificial Sequence
  Description of Artificial Sequence: Synthetic oligonucleotide
uaagagccaagauucgaaa

SEQ ID NO: 450768 - RNA, 19 nt, Artificial Sequence
  Description of Artificial Sequence: Synthetic oligonucleotide
ucauguaaauagcucucau

SEQ ID NO: 450769 - RNA, 19 nt, Artificial Sequence
  Description of Artificial Sequence: Synthetic oligonucleotide
auagugagaguucuuucau

SEQ ID NO: 450770 - RNA, 19 nt, Artificial Sequence
  Description of Artificial Sequence: Synthetic oligonucleotide
guauagugaauauaucugu

SEQ ID NO: 450771 - RNA, 19 nt, Artificial Sequence
  Description of Artificial Sequence: Synthetic oligonucleotide
ugauucagaucacuuggua

SEQ ID NO: 450772 - RNA, 19 nt, Artificial Sequence
  Description of Artificial Sequence: Synthetic oligonucleotide
ucuaaacauucuugaggug

SEQ ID NO: 450773 - RNA, 19 nt, Artificial Sequence
  Description of Artificial Sequence: Synthetic oligonucleotide
cuacguacagauuucaugu

SEQ ID NO: 450774 - RNA, 19 nt, Artificial Sequence
  Description of Artificial Sequence: Synthetic oligonucleotide
ugucuacaagaaugcaagc

SEQ ID NO: 450775 - RNA, 19 nt, Artificial Sequence
  Description of Artificial Sequence: Synthetic oligonucleotide
uucauguaaauagcucuca

SEQ ID NO: 450776 - RNA, 19 nt, Artificial Sequence
  Description of Artificial Sequence: Synthetic oligonucleotide
aaccugucaucucagccau

SEQ ID NO: 450777 - RNA, 19 nt, Artificial Sequence
  Description of Artificial Sequence: Synthetic oligonucleotide
cuuuauucgggcagcagga

SEQ ID NO: 450778 - RNA, 19 nt, Artificial Sequence
  Description of Artificial Sequence: Synthetic oligonucleotide
aaacuacaaugauuauuaa

SEQ ID NO: 450779 - RNA, 19 nt, Artificial Sequence
  Description of Artificial Sequence: Synthetic oligonucleotide
ugcucaucaguggacuacg

SEQ ID NO: 450780 - RNA, 19 nt, Artificial Sequence
  Description of Artificial Sequence: Synthetic oligonucleotide
cacacuaucucggaaugag

SEQ ID NO: 450781 - RNA, 19 nt, Artificial Sequence
  Description of Artificial Sequence: Synthetic oligonucleotide
cacuaucucggaaugagga

SEQ ID NO: 450782 - RNA, 19 nt, Artificial Sequence
  Description of Artificial Sequence: Synthetic oligonucleotide
cuauguuucucacggacca

SEQ ID NO: 450783 - RNA, 19 nt, Artificial Sequence
  Description of Artificial Sequence: Synthetic oligonucleotide
uuucggaaucauucagagc

SEQ ID NO: 450784 - RNA, 19 nt, Artificial Sequence
  Description of Artificial Sequence: Synthetic oligonucleotide
aagcauauuauaagaucga

SEQ ID NO: 450785 - RNA, 19 nt, Artificial Sequence
  Description of Artificial Sequence: Synthetic oligonucleotide
acaaacuacaaugauuauu

SEQ ID NO: 450786 - RNA, 19 nt, Artificial Sequence
  Description of Artificial Sequence: Synthetic oligonucleotide
uucgaaagugaguugugua

SEQ ID NO: 450787 - RNA, 19 nt, Artificial Sequence
  Description of Artificial Sequence: Synthetic oligonucleotide
aaauauccggagaucuuca

SEQ ID NO: 450788 - RNA, 19 nt, Artificial Sequence
  Description of Artificial Sequence: Synthetic oligonucleotide
ugaguuacuugagcacacg

SEQ ID NO: 450789 - RNA, 19 nt, Artificial Sequence
  Description of Artificial Sequence: Synthetic oligonucleotide
auuauaagaucgacuucuc

SEQ ID NO: 450790 - RNA, 19 nt, Artificial Sequence
  Description of Artificial Sequence: Synthetic oligonucleotide
ucucuaguaaggucguuua

SEQ ID NO: 450791 - RNA, 19 nt, Artificial Sequence
  Description of Artificial Sequence: Synthetic oligonucleotide
aguauagugagaguucuuu

SEQ ID NO: 450792 - RNA, 19 nt, Artificial Sequence
  Description of Artificial Sequence: Synthetic oligonucleotide
uuacaaccuggcaguaagc

SEQ ID NO: 450793 - RNA, 19 nt, Artificial Sequence
  Description of Artificial Sequence: Synthetic oligonucleotide
uuguguauuugaccaguuc

SEQ ID NO: 450794 - RNA, 19 nt, Artificial Sequence
  Description of Artificial Sequence: Synthetic oligonucleotide
aaauagaacugaagugccu

SEQ ID NO: 450795 - RNA, 19 nt, Artificial Sequence
  Description of Artificial Sequence: Synthetic oligonucleotide
aacucgucuuucaugagaa

SEQ ID NO: 450796 - RNA, 19 nt, Artificial Sequence
  Description of Artificial Sequence: Synthetic oligonucleotide
uuccacacuaucucggaau

SEQ ID NO: 450797 - RNA, 19 nt, Artificial Sequence
  Description of Artificial Sequence: Synthetic oligonucleotide
uuucgaacuuugaagccuu

SEQ ID NO: 450798 - RNA, 19 nt, Artificial Sequence
  Description of Artificial Sequence: Synthetic oligonucleotide
ugaugcuguaaaagcauuu

SEQ ID NO: 450799 - RNA, 19 nt, Artificial Sequence
  Description of Artificial Sequence: Synthetic oligonucleotide
cauaucggguuuuauaucu

SEQ ID NO: 450800 - RNA, 19 nt, Artificial Sequence
  Description of Artificial Sequence: Synthetic oligonucleotide
aucaguggacuacguacag

SEQ ID NO: 450801 - RNA, 19 nt, Artificial Sequence
  Description of Artificial Sequence: Synthetic oligonucleotide
cugaaguguucaauuauga

SEQ ID NO: 450802 - RNA, 19 nt, Artificial Sequence
  Description of Artificial Sequence: Synthetic oligonucleotide
cauauguccuuccugcuga

SEQ ID NO: 450803 - RNA, 19 nt, Artificial Sequence
  Description of Artificial Sequence: Synthetic oligonucleotide
auauccggagaucuucaga

SEQ ID NO: 450804 - RNA, 19 nt, Artificial Sequence
  Description of Artificial Sequence: Synthetic oligonucleotide
uggacuacguacagauuuc

SEQ ID NO: 450805 - RNA, 19 nt, Artificial Sequence
  Description of Artificial Sequence: Synthetic oligonucleotide
aucggguuuuauaucuuac

SEQ ID NO: 450806 - RNA, 19 nt, Artificial Sequence
  Description of Artificial Sequence: Synthetic oligonucleotide
ucucaccaccucuaguugu

SEQ ID NO: 450807 - RNA, 19 nt, Artificial Sequence
  Description of Artificial Sequence: Synthetic oligonucleotide
agggcaaaauauccggaga

SEQ ID NO: 450808 - RNA, 19 nt, Artificial Sequence
  Description of Artificial Sequence: Synthetic oligonucleotide
ccagggaacaacaagcuuc

SEQ ID NO: 450809 - RNA, 19 nt, Artificial Sequence
  Description of Artificial Sequence: Synthetic oligonucleotide
agcacuucguucuucuaaa

SEQ ID NO: 450810 - RNA, 19 nt, Artificial Sequence
  Description of Artificial Sequence: Synthetic oligonucleotide
guauagugagaguucuuuc

SEQ ID NO: 450811 - RNA, 19 nt, Artificial Sequence
  Description of Artificial Sequence: Synthetic oligonucleotide
aucacucgaauaaugggcu

SEQ ID NO: 450812 - RNA, 19 nt, Artificial Sequence
  Description of Artificial Sequence: Synthetic oligonucleotide
ugguaaucaccuguuguac

SEQ ID NO: 450813 - RNA, 19 nt, Artificial Sequence
  Description of Artificial Sequence: Synthetic oligonucleotide
auccggagaucuucagaac

SEQ ID NO: 450814 - RNA, 19 nt, Artificial Sequence
  Description of Artificial Sequence: Synthetic oligonucleotide
cucauuucggaaucauuca

SEQ ID NO: 450815 - RNA, 19 nt, Artificial Sequence
  Description of Artificial Sequence: Synthetic oligonucleotide
aguucccuuacaaccuggc

SEQ ID NO: 450816 - RNA, 19 nt, Artificial Sequence
  Description of Artificial Sequence: Synthetic oligonucleotide
ugggucuggucauuuacaa

SEQ ID NO: 450817 - RNA, 19 nt, Artificial Sequence
  Description of Artificial Sequence: Synthetic oligonucleotide
ccuugauaucacuaccugg

SEQ ID NO: 450818 - RNA, 19 nt, Artificial Sequence
  Description of Artificial Sequence: Synthetic oligonucleotide
agugaaugccaacauucuu

SEQ ID NO: 450819 - RNA, 19 nt, Artificial Sequence
  Description of Artificial Sequence: Synthetic oligonucleotide
cuaaacauucuugaggugu

SEQ ID NO: 450820 - RNA, 19 nt, Artificial Sequence
  Description of Artificial Sequence: Synthetic oligonucleotide
agaggacaaaccucuacuu

SEQ ID NO: 450821 - RNA, 19 nt, Artificial Sequence
  Description of Artificial Sequence: Synthetic oligonucleotide
aucacuaccugguguggca

SEQ ID NO: 450822 - RNA, 19 nt, Artificial Sequence
  Description of Artificial Sequence: Synthetic oligonucleotide
uaucggguuuuauaucuua

SEQ ID NO: 450823 - RNA, 19 nt, Artificial Sequence
  Description of Artificial Sequence: Synthetic oligonucleotide
gugacacauguuuaaggca

SEQ ID NO: 450824 - RNA, 19 nt, Artificial Sequence
  Description of Artificial Sequence: Synthetic oligonucleotide
ugcugggaauacuuaaaua

SEQ ID NO: 450825 - RNA, 19 nt, Artificial Sequence
  Description of Artificial Sequence: Synthetic oligonucleotide
augcgguuacuuaugaugu

SEQ ID NO: 450826 - RNA, 19 nt, Artificial Sequence
  Description of Artificial Sequence: Synthetic oligonucleotide
uaucacuaccugguguggc

SEQ ID NO: 450827 - RNA, 19 nt, Artificial Sequence
  Description of Artificial Sequence: Synthetic oligonucleotide
ugauuucccgacugucuac

SEQ ID NO: 450828 - RNA, 19 nt, Artificial Sequence
  Description of Artificial Sequence: Synthetic oligonucleotide
gauucgaaagugaguugug

SEQ ID NO: 450829 - RNA, 19 nt, Artificial Sequence
  Description of Artificial Sequence: Synthetic oligonucleotide
caguuauauaacuugugcu

SEQ ID NO: 450830 - RNA, 19 nt, Artificial Sequence
  Description of Artificial Sequence: Synthetic oligonucleotide
caaugacagcuccuuuagg

SEQ ID NO: 450831 - RNA, 19 nt, Artificial Sequence
  Description of Artificial Sequence: Synthetic oligonucleotide
auuuuagacucuccugauu

SEQ ID NO: 450832 - RNA, 19 nt, Artificial Sequence
  Description of Artificial Sequence: Synthetic oligonucleotide
ucacucgaauaaugggcug

SEQ ID NO: 450833 - RNA, 19 nt, Artificial Sequence
  Description of Artificial Sequence: Synthetic oligonucleotide
auaucacuaccuggugugg

SEQ ID NO: 450834 - RNA, 19 nt, Artificial Sequence
  Description of Artificial Sequence: Synthetic oligonucleotide
uauacccgccgucacggaa

SEQ ID NO: 450835 - RNA, 19 nt, Artificial Sequence
  Description of Artificial Sequence: Synthetic oligonucleotide
auucgaaagugaguugugu

SEQ ID NO: 450836 - RNA, 19 nt, Artificial Sequence
  Description of Artificial Sequence: Synthetic oligonucleotide
caugaacuguucuuagcga

SEQ ID NO: 450837 - RNA, 19 nt, Artificial Sequence
  Description of Artificial Sequence: Synthetic oligonucleotide
gagguuagcagacugucau

SEQ ID NO: 450838 - RNA, 19 nt, Artificial Sequence
  Description of Artificial Sequence: Synthetic oligonucleotide
ucggaaucauucagagccu

SEQ ID NO: 450839 - RNA, 19 nt, Artificial Sequence
  Description of Artificial Sequence: Synthetic oligonucleotide
aaacauucuugaggugucu

SEQ ID NO: 450840 - RNA, 19 nt, Artificial Sequence
  Description of Artificial Sequence: Synthetic oligonucleotide
ugucgugauccuugaaguc

SEQ ID NO: 450841 - RNA, 19 nt, Artificial Sequence
  Description of Artificial Sequence: Synthetic oligonucleotide
caucaguggacuacguaca

SEQ ID NO: 450842 - RNA, 19 nt, Artificial Sequence
  Description of Artificial Sequence: Synthetic oligonucleotide
acauauucuuuggaacaug

SEQ ID NO: 450843 - RNA, 19 nt, Artificial Sequence
  Description of Artificial Sequence: Synthetic oligonucleotide
uuaaguugcugagcaugca

SEQ ID NO: 450844 - RNA, 19 nt, Artificial Sequence
  Description of Artificial Sequence: Synthetic oligonucleotide
cuugaguugaaccugucau

SEQ ID NO: 450845 - RNA, 19 nt, Artificial Sequence
  Description of Artificial Sequence: Synthetic oligonucleotide
acaagcuucucaacucguc

SEQ ID NO: 450846 - RNA, 19 nt, Artificial Sequence
  Description of Artificial Sequence: Synthetic oligonucleotide
uguaagccaugaacuguuc

SEQ ID NO: 450847 - RNA, 19 nt, Artificial Sequence
  Description of Artificial Sequence: Synthetic oligonucleotide
ccugaaguguucaauuaug

SEQ ID NO: 450848 - RNA, 19 nt, Artificial Sequence
  Description of Artificial Sequence: Synthetic oligonucleotide
uuugaccaguucccuuaca

SEQ ID NO: 450849 - RNA, 19 nt, Artificial Sequence
  Description of Artificial Sequence: Synthetic oligonucleotide
cagcguguuauacccgccg

SEQ ID NO: 450850 - RNA, 19 nt, Artificial Sequence
  Description of Artificial Sequence: Synthetic oligonucleotide
cuaucucggaaugaggaga

SEQ ID NO: 450851 - RNA, 19 nt, Artificial Sequence
  Description of Artificial Sequence: Synthetic oligonucleotide
gguuacuuaugauguaguc

SEQ ID NO: 450852 - RNA, 19 nt, Artificial Sequence
  Description of Artificial Sequence: Synthetic oligonucleotide
ccugucgugauccuugaag

SEQ ID NO: 450853 - RNA, 19 nt, Artificial Sequence
  Description of Artificial Sequence: Synthetic oligonucleotide
acaagaaugcaagcucugu

SEQ ID NO: 450854 - RNA, 19 nt, Artificial Sequence
  Description of Artificial Sequence: Synthetic oligonucleotide
cuuagcgaagaaaugacuu

SEQ ID NO: 450855 - RNA, 19 nt, Artificial Sequence
  Description of Artificial Sequence: Synthetic oligonucleotide
cacacgcagagauuucuuc

SEQ ID NO: 450856 - RNA, 19 nt, Artificial Sequence
  Description of Artificial Sequence: Synthetic oligonucleotide
cuguucuuagcgaagaaau

SEQ ID NO: 450857 - RNA, 19 nt, Artificial Sequence
  Description of Artificial Sequence: Synthetic oligonucleotide
cugguaagauaauucuaga

SEQ ID NO: 450858 - RNA, 19 nt, Artificial Sequence
  Description of Artificial Sequence: Synthetic oligonucleotide
guaaggucguuuaccauga

SEQ ID NO: 450859 - RNA, 19 nt, Artificial Sequence
  Description of Artificial Sequence: Synthetic oligonucleotide
acacuaucucggaaugagg

SEQ ID NO: 450860 - RNA, 19 nt, Artificial Sequence
  Description of Artificial Sequence: Synthetic oligonucleotide
auacccgccgucacggaac

SEQ ID NO: 450861 - RNA, 19 nt, Artificial Sequence
  Description of Artificial Sequence: Synthetic oligonucleotide
cugagcaugcaucagauuu

SEQ ID NO: 450862 - RNA, 19 nt, Artificial Sequence
  Description of Artificial Sequence: Synthetic oligonucleotide
uuuauucgggcagcaggac

SEQ ID NO: 450863 - RNA, 19 nt, Artificial Sequence
  Description of Artificial Sequence: Synthetic oligonucleotide
guggacuacguacagauuu

SEQ ID NO: 450864 - RNA, 19 nt, Artificial Sequence
  Description of Artificial Sequence: Synthetic oligonucleotide
caagauucgaaagugaguu

SEQ ID NO: 450865 - RNA, 19 nt, Artificial Sequence
  Description of Artificial Sequence: Synthetic oligonucleotide
gauuucccgacugucuaca

SEQ ID NO: 450866 - RNA, 19 nt, Artificial Sequence
  Description of Artificial Sequence: Synthetic oligonucleotide
uagugcucaucaguggacu

SEQ ID NO: 450867 - RNA, 19 nt, Artificial Sequence
  Description of Artificial Sequence: Synthetic oligonucleotide
ucggaaugaggagaagauc

SEQ ID NO: 450868 - RNA, 19 nt, Artificial Sequence
  Description of Artificial Sequence: Synthetic oligonucleotide
cuguaaaggaaucuuuagu

SEQ ID NO: 450869 - RNA, 19 nt, Artificial Sequence
  Description of Artificial Sequence: Synthetic oligonucleotide
cacuucguucuucuaaaca

SEQ ID NO: 450870 - RNA, 19 nt, Artificial Sequence
  Description of Artificial Sequence: Synthetic oligonucleotide
guacuuagugcucaucagu

SEQ ID NO: 450871 - RNA, 19 nt, Artificial Sequence
  Description of Artificial Sequence: Synthetic oligonucleotide
uacguacagauuucaugua

SEQ ID NO: 450872 - RNA, 19 nt, Artificial Sequence
  Description of Artificial Sequence: Synthetic oligonucleotide
uacugccauuauuuaacau

SEQ ID NO: 450873 - RNA, 19 nt, Artificial Sequence
  Description of Artificial Sequence: Synthetic oligonucleotide
accauauguccuuccugcu

SEQ ID NO: 450874 - RNA, 19 nt, Artificial Sequence
  Description of Artificial Sequence: Synthetic oligonucleotide
gggaauacuuaaauagaac

SEQ ID NO: 450875 - RNA, 19 nt, Artificial Sequence
  Description of Artificial Sequence: Synthetic oligonucleotide
gaucauuacucuggucuca

SEQ ID NO: 450876 - RNA, 19 nt, Artificial Sequence
  Description of Artificial Sequence: Synthetic oligonucleotide
auccgagcuauauucuuua

SEQ ID NO: 450877 - RNA, 19 nt, Artificial Sequence
  Description of Artificial Sequence: Synthetic oligonucleotide
acgaagcucuaucuuccca

SEQ ID NO: 450878 - RNA, 19 nt, Artificial Sequence
  Description of Artificial Sequence: Synthetic oligonucleotide
gucucaccaccucuaguug

SEQ ID NO: 450879 - RNA, 19 nt, Artificial Sequence
  Description of Artificial Sequence: Synthetic oligonucleotide
gguaaucaccuguuguaca

SEQ ID NO: 450880 - RNA, 19 nt, Artificial Sequence
  Description of Artificial Sequence: Synthetic oligonucleotide
aggcaguuauauaacuugu

SEQ ID NO: 450881 - RNA, 19 nt, Artificial Sequence
  Description of Artificial Sequence: Synthetic oligonucleotide
uaguaaggucguuuaccau

SEQ ID NO: 450882 - RNA, 19 nt, Artificial Sequence
  Description of Artificial Sequence: Synthetic oligonucleotide
ugaagaggacaaaccucua

SEQ ID NO: 450883 - RNA, 19 nt, Artificial Sequence
  Description of Artificial Sequence: Synthetic oligonucleotide
ggaacaugcucugcaggcg

SEQ ID NO: 450884 - RNA, 19 nt, Artificial Sequence
  Description of Artificial Sequence: Synthetic oligonucleotide
gucguuuaccaugaccuga

SEQ ID NO: 450885 - RNA, 19 nt, Artificial Sequence
  Description of Artificial Sequence: Synthetic oligonucleotide
caccaugcgguuacuuaug

SEQ ID NO: 450886 - RNA, 19 nt, Artificial Sequence
  Description of Artificial Sequence: Synthetic oligonucleotide
gaaagugaguuguguauuu

SEQ ID NO: 450887 - RNA, 19 nt, Artificial Sequence
  Description of Artificial Sequence: Synthetic oligonucleotide
cucaaggcauuucuuucca

SEQ ID NO: 450888 - RNA, 19 nt, Artificial Sequence
  Description of Artificial Sequence: Synthetic oligonucleotide
gcgguuacuuaugauguag

SEQ ID NO: 450889 - RNA, 19 nt, Artificial Sequence
  Description of Artificial Sequence: Synthetic oligonucleotide
gugauuucccgacugucua

SEQ ID NO: 450890 - RNA, 19 nt, Artificial Sequence
  Description of Artificial Sequence: Synthetic oligonucleotide
cauuucagacugagacuuc

SEQ ID NO: 450891 - RNA, 19 nt, Artificial Sequence
  Description of Artificial Sequence: Synthetic oligonucleotide
cuucuaaaccagaagugau

SEQ ID NO: 450892 - RNA, 19 nt, Artificial Sequence
  Description of Artificial Sequence: Synthetic oligonucleotide
gcuauguuucucacggacc

SEQ ID NO: 450893 - RNA, 19 nt, Artificial Sequence
  Description of Artificial Sequence: Synthetic oligonucleotide
ucaccaacacagguagaaa

SEQ ID NO: 450894 - RNA, 19 nt, Artificial Sequence
  Description of Artificial Sequence: Synthetic oligonucleotide
uugcuauguuucucacgga

SEQ ID NO: 450895 - RNA, 19 nt, Artificial Sequence
  Description of Artificial Sequence: Synthetic oligonucleotide
cugcauaucggguuuuaua

SEQ ID NO: 450896 - RNA, 19 nt, Artificial Sequence
  Description of Artificial Sequence: Synthetic oligonucleotide
gccuugauaucacuaccug

SEQ ID NO: 450897 - RNA, 19 nt, Artificial Sequence
  Description of Artificial Sequence: Synthetic oligonucleotide
cugggucuggucauuuaca

SEQ ID NO: 450898 - RNA, 19 nt, Artificial Sequence
  Description of Artificial Sequence: Synthetic oligonucleotide
uaaggucguuuaccaugac

SEQ ID NO: 450899 - RNA, 19 nt, Artificial Sequence
  Description of Artificial Sequence: Synthetic oligonucleotide
gacugucuacaagaaugca

SEQ ID NO: 450900 - RNA, 19 nt, Artificial Sequence
  Description of Artificial Sequence: Synthetic oligonucleotide
guguuauacccgccgucac

SEQ ID NO: 450901 - RNA, 19 nt, Artificial Sequence
  Description of Artificial Sequence: Synthetic oligonucleotide
ucugcauaucggguuuuau

SEQ ID NO: 450902 - RNA, 19 nt, Artificial Sequence
  Description of Artificial Sequence: Synthetic oligonucleotide
ccaacuaaggagguuagca

SEQ ID NO: 450903 - RNA, 19 nt, Artificial Sequence
  Description of Artificial Sequence: Synthetic oligonucleotide
cuuucgaacuuugaagccu

SEQ ID NO: 450904 - RNA, 19 nt, Artificial Sequence
  Description of Artificial Sequence: Synthetic oligonucleotide
aucauuacucuggucucaa

SEQ ID NO: 450905 - RNA, 19 nt, Artificial Sequence
  Description of Artificial Sequence: Synthetic oligonucleotide
cugacagcuugaguugaac

SEQ ID NO: 450906 - RNA, 19 nt, Artificial Sequence
  Description of Artificial Sequence: Synthetic oligonucleotide
ucccaauuaguagguuggu

SEQ ID NO: 450907 - RNA, 19 nt, Artificial Sequence
  Description of Artificial Sequence: Synthetic oligonucleotide
uuauacccgccgucacgga

SEQ ID NO: 450908 - RNA, 19 nt, Artificial Sequence
  Description of Artificial Sequence: Synthetic oligonucleotide
aguucccaagagccuuaug

SEQ ID NO: 450909 - RNA, 19 nt, Artificial Sequence
  Description of Artificial Sequence: Synthetic oligonucleotide
ggucguuuaccaugaccug

SEQ ID NO: 450910 - RNA, 19 nt, Artificial Sequence
  Description of Artificial Sequence: Synthetic oligonucleotide
cacuuuauucgggcagcag

SEQ ID NO: 450911 - RNA, 19 nt, Artificial Sequence
  Description of Artificial Sequence: Synthetic oligonucleotide
caccuguuguacagccuug

SEQ ID NO: 450912 - RNA, 19 nt, Artificial Sequence
  Description of Artificial Sequence: Synthetic oligonucleotide
uauguuucucacggaccau

SEQ ID NO: 450913 - RNA, 19 nt, Artificial Sequence
  Description of Artificial Sequence: Synthetic oligonucleotide
cucggaaugaggagaagau

SEQ ID NO: 450914 - RNA, 19 nt, Artificial Sequence
  Description of Artificial Sequence: Synthetic oligonucleotide
gcauaucggguuuuauauc

SEQ ID NO: 450915 - RNA, 19 nt, Artificial Sequence
  Description of Artificial Sequence: Synthetic oligonucleotide
ucgaacuuugaagccuuuu

SEQ ID NO: 450916 - RNA, 19 nt, Artificial Sequence
  Description of Artificial Sequence: Synthetic oligonucleotide
ucagaucacuugguagcau

SEQ ID NO: 450917 - RNA, 19 nt, Artificial Sequence
  Description of Artificial Sequence: Synthetic oligonucleotide
cgaacuuugaagccuuuuc

SEQ ID NO: 450918 - RNA, 19 nt, Artificial Sequence
  Description of Artificial Sequence: Synthetic oligonucleotide
cacucgaauaaugggcuga

SEQ ID NO: 450919 - RNA, 19 nt, Artificial Sequence
  Description of Artificial Sequence: Synthetic oligonucleotide
uacccgccgucacggaacu

SEQ ID NO: 450920 - RNA, 19 nt, Artificial Sequence
  Description of Artificial Sequence: Synthetic oligonucleotide
guauucuucccugaagcau

SEQ ID NO: 450921 - RNA, 19 nt, Artificial Sequence
  Description of Artificial Sequence: Synthetic oligonucleotide
agaucacuugguagcauuu

SEQ ID NO: 450922 - RNA, 19 nt, Artificial Sequence
  Description of Artificial Sequence: Synthetic oligonucleotide
gcauauuauaagaucgacu

SEQ ID NO: 450923 - RNA, 19 nt, Artificial Sequence
  Description of Artificial Sequence: Synthetic oligonucleotide
uucgaacuuugaagccuuu

SEQ ID NO: 450924 - RNA, 19 nt, Artificial Sequence
  Description of Artificial Sequence: Synthetic oligonucleotide
cugauucagaucacuuggu

SEQ ID NO: 450925 - RNA, 19 nt, Artificial Sequence
  Description of Artificial Sequence: Synthetic oligonucleotide
cucgaauaaugggcugaug

SEQ ID NO: 450926 - RNA, 19 nt, Artificial Sequence
  Description of Artificial Sequence: Synthetic oligonucleotide
cucagccaugugagacugc

SEQ ID NO: 450927 - RNA, 19 nt, Artificial Sequence
  Description of Artificial Sequence: Synthetic oligonucleotide
cucaucaguggacuacgua

SEQ ID NO: 450928 - RNA, 19 nt, Artificial Sequence
  Description of Artificial Sequence: Synthetic oligonucleotide
gccgucacggaacugucuc

SEQ ID NO: 450929 - RNA, 19 nt, Artificial Sequence
  Description of Artificial Sequence: Synthetic oligonucleotide
gcauggccaacaaauguca

SEQ ID NO: 450930 - RNA, 19 nt, Artificial Sequence
  Description of Artificial Sequence: Synthetic oligonucleotide
gcgaagaaaugacuucuaa

SEQ ID NO: 450931 - RNA, 19 nt, Artificial Sequence
  Description of Artificial Sequence: Synthetic oligonucleotide
caugaccugaaguguucaa

SEQ ID NO: 450932 - RNA, 19 nt, Artificial Sequence
  Description of Artificial Sequence: Synthetic oligonucleotide
gauucggauuccagcccca

SEQ ID NO: 450933 - RNA, 19 nt, Artificial Sequence
  Description of Artificial Sequence: Synthetic oligonucleotide
ucuucccaauuaguagguu

SEQ ID NO: 450934 - RNA, 19 nt, Artificial Sequence
  Description of Artificial Sequence: Synthetic oligonucleotide
uccugucgugauccuugaa

SEQ ID NO: 450935 - RNA, 19 nt, Artificial Sequence
  Description of Artificial Sequence: Synthetic oligonucleotide
cugucaucucagccaugug

SEQ ID NO: 450936 - RNA, 19 nt, Artificial Sequence
  Description of Artificial Sequence: Synthetic oligonucleotide
agcucucauuucggaauca

SEQ ID NO: 450937 - RNA, 19 nt, Artificial Sequence
  Description of Artificial Sequence: Synthetic oligonucleotide
guauuugaccaguucccuu

SEQ ID NO: 450938 - RNA, 19 nt, Artificial Sequence
  Description of Artificial Sequence: Synthetic oligonucleotide
gguagaaaccagcguguua

SEQ ID NO: 450939 - RNA, 19 nt, Artificial Sequence
  Description of Artificial Sequence: Synthetic oligonucleotide
auaucggguuuuauaucuu

SEQ ID NO: 450940 - RNA, 19 nt, Artificial Sequence
  Description of Artificial Sequence: Synthetic oligonucleotide
cugaagcauggccaacaaa

SEQ ID NO: 450941 - RNA, 19 nt, Artificial Sequence
  Description of Artificial Sequence: Synthetic oligonucleotide
agggaacaacaagcuucuc

SEQ ID NO: 450942 - RNA, 19 nt, Artificial Sequence
  Description of Artificial Sequence: Synthetic oligonucleotide
agcgaagaaaugacuucua

SEQ ID NO: 450943 - RNA, 19 nt, Artificial Sequence
  Description of Artificial Sequence: Synthetic oligonucleotide
gagccugugaaagcugggu

SEQ ID NO: 450944 - RNA, 19 nt, Artificial Sequence
  Description of Artificial Sequence: Synthetic oligonucleotide
caugagaauagggcaaaau

SEQ ID NO: 450945 - RNA, 19 nt, Artificial Sequence
  Description of Artificial Sequence: Synthetic oligonucleotide
ccgagcuauauucuuuaca

SEQ ID NO: 450946 - RNA, 19 nt, Artificial Sequence
  Description of Artificial Sequence: Synthetic oligonucleotide
gcacuucguucuucuaaac

SEQ ID NO: 450947 - RNA, 19 nt, Artificial Sequence
  Description of Artificial Sequence: Synthetic oligonucleotide
gagcuguuagccaucuuuu

SEQ ID NO: 450948 - RNA, 19 nt, Artificial Sequence
  Description of Artificial Sequence: Synthetic oligonucleotide
ggacuacguacagauuuca

SEQ ID NO: 450949 - RNA, 19 nt, Artificial Sequence
  Description of Artificial Sequence: Synthetic oligonucleotide
cguacagauuucauguaaa

SEQ ID NO: 450950 - RNA, 19 nt, Artificial Sequence
  Description of Artificial Sequence: Synthetic oligonucleotide
auucggauuccagccccaa

SEQ ID NO: 450951 - RNA, 19 nt, Artificial Sequence
  Description of Artificial Sequence: Synthetic oligonucleotide
ccagcguguuauacccgcc

SEQ ID NO: 450952 - RNA, 19 nt, Artificial Sequence
  Description of Artificial Sequence: Synthetic oligonucleotide
gacuacguacagauuucau

SEQ ID NO: 450953 - RNA, 19 nt, Artificial Sequence
  Description of Artificial Sequence: Synthetic oligonucleotide
ggccaacaaaugucaucac

SEQ ID NO: 450954 - RNA, 19 nt, Artificial Sequence
  Description of Artificial Sequence: Synthetic oligonucleotide
gaagugccucacauuuacu

SEQ ID NO: 450955 - RNA, 19 nt, Artificial Sequence
  Description of Artificial Sequence: Synthetic oligonucleotide
gggucuggucauuuacaaa

SEQ ID NO: 450956 - RNA, 19 nt, Artificial Sequence
  Description of Artificial Sequence: Synthetic oligonucleotide
ccaagauucgaaagugagu

SEQ ID NO: 450957 - RNA, 19 nt, Artificial Sequence
  Description of Artificial Sequence: Synthetic oligonucleotide
ccucacauuuacuaggauu

SEQ ID NO: 450958 - RNA, 19 nt, Artificial Sequence
  Description of Artificial Sequence: Synthetic oligonucleotide
ggacaaaccucuacuugua

SEQ ID NO: 450959 - RNA, 19 nt, Artificial Sequence
  Description of Artificial Sequence: Synthetic oligonucleotide
cauggccaacaaaugucau

SEQ ID NO: 450960 - RNA, 19 nt, Artificial Sequence
  Description of Artificial Sequence: Synthetic oligonucleotide
gcuucucaacucgucuuuc

SEQ ID NO: 450961 - RNA, 19 nt, Artificial Sequence
  Description of Artificial Sequence: Synthetic oligonucleotide
cgaauaaugggcugaugcu

SEQ ID NO: 450962 - RNA, 19 nt, Artificial Sequence
  Description of Artificial Sequence: Synthetic oligonucleotide
cguuuaccaugaccugagg

SEQ ID NO: 450963 - RNA, 19 nt, Artificial Sequence
  Description of Artificial Sequence: Synthetic oligonucleotide
cccaacuaaggagguuagc

SEQ ID NO: 450964 - RNA, 19 nt, Artificial Sequence
  Description of Artificial Sequence: Synthetic oligonucleotide
guccagagcugaaaaggau

SEQ ID NO: 450965 - RNA, 19 nt, Artificial Sequence
  Description of Artificial Sequence: Synthetic oligonucleotide
guuguguauuugaccaguu

SEQ ID NO: 450966 - RNA, 19 nt, Artificial Sequence
  Description of Artificial Sequence: Synthetic oligonucleotide
guguggcacuaagagccaa

SEQ ID NO: 450967 - RNA, 19 nt, Artificial Sequence
  Description of Artificial Sequence: Synthetic oligonucleotide
gguguggcacuaagagcca

SEQ ID NO: 450968 - RNA, 19 nt, Artificial Sequence
  Description of Artificial Sequence: Synthetic oligonucleotide
cgucacggaacugucucac

SEQ ID NO: 450969 - RNA, 19 nt, Artificial Sequence
  Description of Artificial Sequence: Synthetic oligonucleotide
ccuggcaguaagcauaguu

SEQ ID NO: 450970 - RNA, 19 nt, Artificial Sequence
  Description of Artificial Sequence: Synthetic oligonucleotide
ggaaucauucagagccugu

SEQ ID NO: 450971 - RNA, 19 nt, Artificial Sequence
  Description of Artificial Sequence: Synthetic oligonucleotide
acggaccauuuuguacuua

SEQ ID NO: 450972 - RNA, 19 nt, Artificial Sequence
  Description of Artificial Sequence: Synthetic oligonucleotide
cacuaccugguguggcacu

SEQ ID NO: 450973 - RNA, 19 nt, Artificial Sequence
  Description of Artificial Sequence: Synthetic oligonucleotide
ggugagcuguuagccaucu

SEQ ID NO: 450974 - RNA, 19 nt, Artificial Sequence
  Description of Artificial Sequence: Synthetic oligonucleotide
gcauaguucccaagagccu

SEQ ID NO: 450975 - RNA, 19 nt, Artificial Sequence
  Description of Artificial Sequence: Synthetic oligonucleotide
cgcagagauuucuucaggu

SEQ ID NO: 450976 - RNA, 19 nt, Artificial Sequence
  Description of Artificial Sequence: Synthetic oligonucleotide
ccgcuugcugcaccauaug

SEQ ID NO: 450977 - RNA, 19 nt, Artificial Sequence
  Description of Artificial Sequence: Synthetic oligonucleotide
ccgucacggaacugucuca

SEQ ID NO: 450978 - RNA, 19 nt, Artificial Sequence
  Description of Artificial Sequence: Synthetic oligonucleotide
ccuuacaaccuggcaguaa

SEQ ID NO: 450979 - RNA, 19 nt, Artificial Sequence
  Description of Artificial Sequence: Synthetic oligonucleotide
ccgccgucacggaacuguc

SEQ ID NO: 450980 - RNA, 19 nt, Artificial Sequence
  Description of Artificial Sequence: Synthetic oligonucleotide
gcucucauuucggaaucau

SEQ ID NO: 450981 - RNA, 19 nt, Artificial Sequence
  Description of Artificial Sequence: Synthetic oligonucleotide
cgaaagugaguuguguauu

SEQ ID NO: 450982 - RNA, 19 nt, Artificial Sequence
  Description of Artificial Sequence: Synthetic oligonucleotide
gcucaucaguggacuacgu

SEQ ID NO: 450983 - RNA, 19 nt, Artificial Sequence
  Description of Artificial Sequence: Synthetic oligonucleotide
cccgccgucacggaacugu

SEQ ID NO: 450984 - RNA, 19 nt, Artificial Sequence
  Description of Artificial Sequence: Synthetic oligonucleotide
cccgacugucuacaagaau

SEQ ID NO: 450985 - RNA, 19 nt, Artificial Sequence
  Description of Artificial Sequence: Synthetic oligonucleotide
cuaccaccaugcgguuacu

SEQ ID NO: 450986 - RNA, 19 nt, Artificial Sequence
  Description of Artificial Sequence: Synthetic oligonucleotide
cccuuacaaccuggcagua

SEQ ID NO: 450987 - RNA, 19 nt, Artificial Sequence
  Description of Artificial Sequence: Synthetic oligonucleotide
cgccgucacggaacugucu

SEQ ID NO: 450988 - RNA, 19 nt, Artificial Sequence
  Description of Artificial Sequence: Synthetic oligonucleotide
uuuaaguuaauuuagacca

SEQ ID NO: 450989 - RNA, 19 nt, Artificial Sequence
  Description of Artificial Sequence: Synthetic oligonucleotide
uuaauuuagaccaagaaaa

SEQ ID NO: 450990 - RNA, 19 nt, Artificial Sequence
  Description of Artificial Sequence: Synthetic oligonucleotide
aacagcggcauucugaggc

SEQ ID NO: 450991 - RNA, 19 nt, Artificial Sequence
  Description of Artificial Sequence: Synthetic oligonucleotide
uugaauaaagaucacagaa

SEQ ID NO: 450992 - RNA, 19 nt, Artificial Sequence
  Description of Artificial Sequence: Synthetic oligonucleotide
aaaacaaaugggacgaagc

SEQ ID NO: 450993 - RNA, 19 nt, Artificial Sequence
  Description of Artificial Sequence: Synthetic oligonucleotide
cuuuaaguuaauuuagacc

SEQ ID NO: 450994 - RNA, 19 nt, Artificial Sequence
  Description of Artificial Sequence: Synthetic oligonucleotide
aaugggacgaagcugccac

SEQ ID NO: 450995 - RNA, 19 nt, Artificial Sequence
  Description of Artificial Sequence: Synthetic oligonucleotide
aaacaagagacccugguca

SEQ ID NO: 450996 - RNA, 19 nt, Artificial Sequence
  Description of Artificial Sequence: Synthetic oligonucleotide
auauacauucaccuugugg

SEQ ID NO: 450997 - RNA, 19 nt, Artificial Sequence
  Description of Artificial Sequence: Synthetic oligonucleotide
uuagaccaagaaaauaaag

SEQ ID NO: 450998 - RNA, 19 nt, Artificial Sequence
  Description of Artificial Sequence: Synthetic oligonucleotide
ucuguugccagguaugcgg

SEQ ID NO: 450999 - RNA, 19 nt, Artificial Sequence
  Description of Artificial Sequence: Synthetic oligonucleotide
acaaaugggacgaagcugc

SEQ ID NO: 451000 - RNA, 19 nt, Artificial Sequence
  Description of Artificial Sequence: Synthetic oligonucleotide
aucaguuggcgccaaaggc

SEQ ID NO: 451001 - RNA, 19 nt, Artificial Sequence
  Description of Artificial Sequence: Synthetic oligonucleotide
auaaagaucacagaaauua

SEQ ID NO: 451002 - RNA, 19 nt, Artificial Sequence
  Description of Artificial Sequence: Synthetic oligonucleotide
aaacaaaugggacgaagcu

SEQ ID NO: 451003 - RNA, 19 nt, Artificial Sequence
  Description of Artificial Sequence: Synthetic oligonucleotide
agugguuagucccaacagc

SEQ ID NO: 451004 - RNA, 19 nt, Artificial Sequence
  Description of Artificial Sequence: Synthetic oligonucleotide
ucucaugcuauauacauuc

SEQ ID NO: 451005 - RNA, 19 nt, Artificial Sequence
  Description of Artificial Sequence: Synthetic oligonucleotide
uauuuguuacccaccagag

SEQ ID NO: 451006 - RNA, 19 nt, Artificial Sequence
  Description of Artificial Sequence: Synthetic oligonucleotide
caugcuauauacauucacc

SEQ ID NO: 451007 - RNA, 19 nt, Artificial Sequence
  Description of Artificial Sequence: Synthetic oligonucleotide
aggcaaaucucacaaaauc

SEQ ID NO: 451008 - RNA, 19 nt, Artificial Sequence
  Description of Artificial Sequence: Synthetic oligonucleotide
auauauaugggaaagggca

SEQ ID NO: 451009 - RNA, 19 nt, Artificial Sequence
  Description of Artificial Sequence: Synthetic oligonucleotide
ucagggucggccaagagug

SEQ ID NO: 451010 - RNA, 19 nt, Artificial Sequence
  Description of Artificial Sequence: Synthetic oligonucleotide
ugaauaaagaucacagaaa

SEQ ID NO: 451011 - RNA, 19 nt, Artificial Sequence
  Description of Artificial Sequence: Synthetic oligonucleotide
aacaacaguggcaggagcc

SEQ ID NO: 451012 - RNA, 19 nt, Artificial Sequence
  Description of Artificial Sequence: Synthetic oligonucleotide
gagcuaaccaccuucuggg

SEQ ID NO: 451013 - RNA, 19 nt, Artificial Sequence
  Description of Artificial Sequence: Synthetic oligonucleotide
ucgccuaugucccagacug

SEQ ID NO: 451014 - RNA, 19 nt, Artificial Sequence
  Description of Artificial Sequence: Synthetic oligonucleotide
uggcacaccaucauuauga

SEQ ID NO: 451015 - RNA, 19 nt, Artificial Sequence
  Description of Artificial Sequence: Synthetic oligonucleotide
uuagggucaugcuugcugg

SEQ ID NO: 451016 - RNA, 19 nt, Artificial Sequence
  Description of Artificial Sequence: Synthetic oligonucleotide
gagguuagugguuaguccc

SEQ ID NO: 451017 - RNA, 19 nt, Artificial Sequence
  Description of Artificial Sequence: Synthetic oligonucleotide
uuagugguuagucccaaca

SEQ ID NO: 451018 - RNA, 19 nt, Artificial Sequence
  Description of Artificial Sequence: Synthetic oligonucleotide
gccaaaagcaccuuagugg

SEQ ID NO: 451019 - RNA, 19 nt, Artificial Sequence
  Description of Artificial Sequence: Synthetic oligonucleotide
aaaucucacaaaaucauau

SEQ ID NO: 451020 - RNA, 19 nt, Artificial Sequence
  Description of Artificial Sequence: Synthetic oligonucleotide
auuuagaccaagaaaauaa

SEQ ID NO: 451021 - RNA, 19 nt, Artificial Sequence
  Description of Artificial Sequence: Synthetic oligonucleotide
uuaugcucaggaacuacag

SEQ ID NO: 451022 - RNA, 19 nt, Artificial Sequence
  Description of Artificial Sequence: Synthetic oligonucleotide
aacaugcuacuccacagca

SEQ ID NO: 451023 - RNA, 19 nt, Artificial Sequence
  Description of Artificial Sequence: Synthetic oligonucleotide
uccugcuucgccuaugucc

SEQ ID NO: 451024 - RNA, 19 nt, Artificial Sequence
  Description of Artificial Sequence: Synthetic oligonucleotide
agccuuauuuguuacccac

SEQ ID NO: 451025 - RNA, 19 nt, Artificial Sequence
  Description of Artificial Sequence: Synthetic oligonucleotide
aaagccaaaagcaccuuag

SEQ ID NO: 451026 - RNA, 19 nt, Artificial Sequence
  Description of Artificial Sequence: Synthetic oligonucleotide
cacaccaucauuaugaaua

SEQ ID NO: 451027 - RNA, 19 nt, Artificial Sequence
  Description of Artificial Sequence: Synthetic oligonucleotide
auugcugacggugugggcg

SEQ ID NO: 451028 - RNA, 19 nt, Artificial Sequence
  Description of Artificial Sequence: Synthetic oligonucleotide
gcuauauacauucaccuug

SEQ ID NO: 451029 - RNA, 19 nt, Artificial Sequence
  Description of Artificial Sequence: Synthetic oligonucleotide
ugggacaugcuccuccugg

SEQ ID NO: 451030 - RNA, 19 nt, Artificial Sequence
  Description of Artificial Sequence: Synthetic oligonucleotide
aacaaaugggacgaagcug

SEQ ID NO: 451031 - RNA, 19 nt, Artificial Sequence
  Description of Artificial Sequence: Synthetic oligonucleotide
auaguaggcagacuggcca

SEQ ID NO: 451032 - RNA, 19 nt, Artificial Sequence
  Description of Artificial Sequence: Synthetic oligonucleotide
aguccuaucaacauugcug

SEQ ID NO: 451033 - RNA, 19 nt, Artificial Sequence
  Description of Artificial Sequence: Synthetic oligonucleotide
ucucacaaaaucauauaua

SEQ ID NO: 451034 - RNA, 19 nt, Artificial Sequence
  Description of Artificial Sequence: Synthetic oligonucleotide
cuaucaacauugcuguccc

SEQ ID NO: 451035 - RNA, 19 nt, Artificial Sequence
  Description of Artificial Sequence: Synthetic oligonucleotide
ugagguuagugguuagucc

SEQ ID NO: 451036 - RNA, 19 nt, Artificial Sequence
  Description of Artificial Sequence: Synthetic oligonucleotide
uagugguuagucccaacag

SEQ ID NO: 451037 - RNA, 19 nt, Artificial Sequence
  Description of Artificial Sequence: Synthetic oligonucleotide
ugugcacucgguaaaggcu

SEQ ID NO: 451038 - RNA, 19 nt, Artificial Sequence
  Description of Artificial Sequence: Synthetic oligonucleotide
aauuuagaccaagaaaaua

SEQ ID NO: 451039 - RNA, 19 nt, Artificial Sequence
  Description of Artificial Sequence: Synthetic oligonucleotide
gugguuagucccaacagcg

SEQ ID NO: 451040 - RNA, 19 nt, Artificial Sequence
  Description of Artificial Sequence: Synthetic oligonucleotide
gauuuggccccucacagca

SEQ ID NO: 451041 - RNA, 19 nt, Artificial Sequence
  Description of Artificial Sequence: Synthetic oligonucleotide
aaucucacaaaaucauaua

SEQ ID NO: 451042 - RNA, 19 nt, Artificial Sequence
  Description of Artificial Sequence: Synthetic oligonucleotide
ucgggcuagacuuaggguc

SEQ ID NO: 451043 - RNA, 19 nt, Artificial Sequence
  Description of Artificial Sequence: Synthetic oligonucleotide
cacagcaaacaucacacac

SEQ ID NO: 451044 - RNA, 19 nt, Artificial Sequence
  Description of Artificial Sequence: Synthetic oligonucleotide
ugggaggcaaaucucacaa

SEQ ID NO: 451045 - RNA, 19 nt, Artificial Sequence
  Description of Artificial Sequence: Synthetic oligonucleotide
ucgguaaaggcugucaugu

SEQ ID NO: 451046 - RNA, 19 nt, Artificial Sequence
  Description of Artificial Sequence: Synthetic oligonucleotide
uagacuuagggucaugcuu

SEQ ID NO: 451047 - RNA, 19 nt, Artificial Sequence
  Description of Artificial Sequence: Synthetic oligonucleotide
agcacaacaugcuacucca

SEQ ID NO: 451048 - RNA, 19 nt, Artificial Sequence
  Description of Artificial Sequence: Synthetic oligonucleotide
ugguuagucccaacagcgg

SEQ ID NO: 451049 - RNA, 19 nt, Artificial Sequence
  Description of Artificial Sequence: Synthetic oligonucleotide
ggagcuaaccaccuucugg

SEQ ID NO: 451050 - RNA, 19 nt, Artificial Sequence
  Description of Artificial Sequence: Synthetic oligonucleotide
ugcggaacgcugcagacaa

SEQ ID NO: 451051 - RNA, 19 nt, Artificial Sequence
  Description of Artificial Sequence: Synthetic oligonucleotide
gacaauggagcugaacaug

SEQ ID NO: 451052 - RNA, 19 nt, Artificial Sequence
  Description of Artificial Sequence: Synthetic oligonucleotide
aaauccaacugagaaggaa

SEQ ID NO: 451053 - RNA, 19 nt, Artificial Sequence
  Description of Artificial Sequence: Synthetic oligonucleotide
guaaaggcugucaugugcc

SEQ ID NO: 451054 - RNA, 19 nt, Artificial Sequence
  Description of Artificial Sequence: Synthetic oligonucleotide
cuaaccaccuucugggcug

SEQ ID NO: 451055 - RNA, 19 nt, Artificial Sequence
  Description of Artificial Sequence: Synthetic oligonucleotide
guaacugggaggcaaaucu

SEQ ID NO: 451056 - RNA, 19 nt, Artificial Sequence
  Description of Artificial Sequence: Synthetic oligonucleotide
cauaguaggcagacuggcc

SEQ ID NO: 451057 - RNA, 19 nt, Artificial Sequence
  Description of Artificial Sequence: Synthetic oligonucleotide
cucaaaccagaugacauug

SEQ ID NO: 451058 - RNA, 19 nt, Artificial Sequence
  Description of Artificial Sequence: Synthetic oligonucleotide
augacaaauguggucagug

SEQ ID NO: 451059 - RNA, 19 nt, Artificial Sequence
  Description of Artificial Sequence: Synthetic oligonucleotide
aaagcaccuuaguggagca

SEQ ID NO: 451060 - RNA, 19 nt, Artificial Sequence
  Description of Artificial Sequence: Synthetic oligonucleotide
uguagcugcccauuccaca

SEQ ID NO: 451061 - RNA, 19 nt, Artificial Sequence
  Description of Artificial Sequence: Synthetic oligonucleotide
aagaacccucuuuucauuu

SEQ ID NO: 451062 - RNA, 19 nt, Artificial Sequence
  Description of Artificial Sequence: Synthetic oligonucleotide
uccaacugagaaggaaggg

SEQ ID NO: 451063 - RNA, 19 nt, Artificial Sequence
  Description of Artificial Sequence: Synthetic oligonucleotide
agucccaacagcggcauuc

SEQ ID NO: 451064 - RNA, 19 nt, Artificial Sequence
  Description of Artificial Sequence: Synthetic oligonucleotide
agcuaaccaccuucugggc

SEQ ID NO: 451065 - RNA, 19 nt, Artificial Sequence
  Description of Artificial Sequence: Synthetic oligonucleotide
caacauugcugucccagcc

SEQ ID NO: 451066 - RNA, 19 nt, Artificial Sequence
  Description of Artificial Sequence: Synthetic oligonucleotide
aauaaagaucacagaaauu

SEQ ID NO: 451067 - RNA, 19 nt, Artificial Sequence
  Description of Artificial Sequence: Synthetic oligonucleotide
cuuguggccagcucacggc

SEQ ID NO: 451068 - RNA, 19 nt, Artificial Sequence
  Description of Artificial Sequence: Synthetic oligonucleotide
cuuauuuguuacccaccag

SEQ ID NO: 451069 - RNA, 19 nt, Artificial Sequence
  Description of Artificial Sequence: Synthetic oligonucleotide
acacccauaguaggcagac

SEQ ID NO: 451070 - RNA, 19 nt, Artificial Sequence
  Description of Artificial Sequence: Synthetic oligonucleotide
aguuaccccaaagaaauaa

SEQ ID NO: 451071 - RNA, 19 nt, Artificial Sequence
  Description of Artificial Sequence: Synthetic oligonucleotide
agacaauggagcugaacau

SEQ ID NO: 451072 - RNA, 19 nt, Artificial Sequence
  Description of Artificial Sequence: Synthetic oligonucleotide
ucaaaccagaugacauugu

SEQ ID NO: 451073 - RNA, 19 nt, Artificial Sequence
  Description of Artificial Sequence: Synthetic oligonucleotide
ugguuugguggcuaagccu

SEQ ID NO: 451074 - RNA, 19 nt, Artificial Sequence
  Description of Artificial Sequence: Synthetic oligonucleotide
ugcuacuccacagcaaugu

SEQ ID NO: 451075 - RNA, 19 nt, Artificial Sequence
  Description of Artificial Sequence: Synthetic oligonucleotide
aguaacugggaggcaaauc

SEQ ID NO: 451076 - RNA, 19 nt, Artificial Sequence
  Description of Artificial Sequence: Synthetic oligonucleotide
cacacgacggucaggacuc

SEQ ID NO: 451077 - RNA, 19 nt, Artificial Sequence
  Description of Artificial Sequence: Synthetic oligonucleotide
ggagggacuacugggaugg

SEQ ID NO: 451078 - RNA, 19 nt, Artificial Sequence
  Description of Artificial Sequence: Synthetic oligonucleotide
acaacaguggcaggagccg

SEQ ID NO: 451079 - RNA, 19 nt, Artificial Sequence
  Description of Artificial Sequence: Synthetic oligonucleotide
cugguuugguggcuaagcc

SEQ ID NO: 451080 - RNA, 19 nt, Artificial Sequence
  Description of Artificial Sequence: Synthetic oligonucleotide
caauguagcugcccauucc

SEQ ID NO: 451081 - RNA, 19 nt, Artificial Sequence
  Description of Artificial Sequence: Synthetic oligonucleotide
acggucaggacucccaaga

SEQ ID NO: 451082 - RNA, 19 nt, Artificial Sequence
  Description of Artificial Sequence: Synthetic oligonucleotide
auauaugggaaagggcaug

SEQ ID NO: 451083 - RNA, 19 nt, Artificial Sequence
  Description of Artificial Sequence: Synthetic oligonucleotide
guuuccuccguagagguca

SEQ ID NO: 451084 - RNA, 19 nt, Artificial Sequence
  Description of Artificial Sequence: Synthetic oligonucleotide
ucggugagugaagucacag

SEQ ID NO: 451085 - RNA, 19 nt, Artificial Sequence
  Description of Artificial Sequence: Synthetic oligonucleotide
uggguccugauuugggagc

SEQ ID NO: 451086 - RNA, 19 nt, Artificial Sequence
  Description of Artificial Sequence: Synthetic oligonucleotide
uccagaggggcacgugccg

SEQ ID NO: 451087 - RNA, 19 nt, Artificial Sequence
  Description of Artificial Sequence: Synthetic oligonucleotide
uuuggcuagggaccugggu

SEQ ID NO: 451088 - RNA, 19 nt, Artificial Sequence
  Description of Artificial Sequence: Synthetic oligonucleotide
ugcuauauacauucaccuu

SEQ ID NO: 451089 - RNA, 19 nt, Artificial Sequence
  Description of Artificial Sequence: Synthetic oligonucleotide
acauucaccuuguggccag

SEQ ID NO: 451090 - RNA, 19 nt, Artificial Sequence
  Description of Artificial Sequence: Synthetic oligonucleotide
uaccgcaacuguacaaacu

SEQ ID NO: 451091 - RNA, 19 nt, Artificial Sequence
  Description of Artificial Sequence: Synthetic oligonucleotide
gguuagucccaacagcggc

SEQ ID NO: 451092 - RNA, 19 nt, Artificial Sequence
  Description of Artificial Sequence: Synthetic oligonucleotide
cuggcgccagaucaguugg

SEQ ID NO: 451093 - RNA, 19 nt, Artificial Sequence
  Description of Artificial Sequence: Synthetic oligonucleotide
uaugcggaacgcugcagac

SEQ ID NO: 451094 - RNA, 19 nt, Artificial Sequence
  Description of Artificial Sequence: Synthetic oligonucleotide
agaucaguuggcgccaaag

SEQ ID NO: 451095 - RNA, 19 nt, Artificial Sequence
  Description of Artificial Sequence: Synthetic oligonucleotide
cucaggaacuacaguugcc

SEQ ID NO: 451096 - RNA, 19 nt, Artificial Sequence
  Description of Artificial Sequence: Synthetic oligonucleotide
uggggcauugcugacggug

SEQ ID NO: 451097 - RNA, 19 nt, Artificial Sequence
  Description of Artificial Sequence: Synthetic oligonucleotide
ugguggcuaagccuuauuu

SEQ ID NO: 451098 - RNA, 19 nt, Artificial Sequence
  Description of Artificial Sequence: Synthetic oligonucleotide
uuagagggaguggggaacc

SEQ ID NO: 451099 - RNA, 19 nt, Artificial Sequence
  Description of Artificial Sequence: Synthetic oligonucleotide
uccguagaggucaggguaa

SEQ ID NO: 451100 - RNA, 19 nt, Artificial Sequence
  Description of Artificial Sequence: Synthetic oligonucleotide
uaacugggaggcaaaucuc

SEQ ID NO: 451101 - RNA, 19 nt, Artificial Sequence
  Description of Artificial Sequence: Synthetic oligonucleotide
agccguuuccuccguagag

SEQ ID NO: 451102 - RNA, 19 nt, Artificial Sequence
  Description of Artificial Sequence: Synthetic oligonucleotide
cagguaugcggaacgcugc

SEQ ID NO: 451103 - RNA, 19 nt, Artificial Sequence
  Description of Artificial Sequence: Synthetic oligonucleotide
aggagacaagugucacccc

SEQ ID NO: 451104 - RNA, 19 nt, Artificial Sequence
  Description of Artificial Sequence: Synthetic oligonucleotide
ugcccguggcagcugagag

SEQ ID NO: 451105 - RNA, 19 nt, Artificial Sequence
  Description of Artificial Sequence: Synthetic oligonucleotide
uucgggaugaugggaaacu

SEQ ID NO: 451106 - RNA, 19 nt, Artificial Sequence
  Description of Artificial Sequence: Synthetic oligonucleotide
uucuguugccagguaugcg

SEQ ID NO: 451107 - RNA, 19 nt, Artificial Sequence
  Description of Artificial Sequence: Synthetic oligonucleotide
ucgacaccaucguagcaga

SEQ ID NO: 451108 - RNA, 19 nt, Artificial Sequence
  Description of Artificial Sequence: Synthetic oligonucleotide
uguacaaacugggcaugug

SEQ ID NO: 451109 - RNA, 19 nt, Artificial Sequence
  Description of Artificial Sequence: Synthetic oligonucleotide
caccagcacaacaugcuac

SEQ ID NO: 451110 - RNA, 19 nt, Artificial Sequence
  Description of Artificial Sequence: Synthetic oligonucleotide
ugccguuuagcaccuccug

SEQ ID NO: 451111 - RNA, 19 nt, Artificial Sequence
  Description of Artificial Sequence: Synthetic oligonucleotide
uucgggcuagacuuagggu

SEQ ID NO: 451112 - RNA, 19 nt, Artificial Sequence
  Description of Artificial Sequence: Synthetic oligonucleotide
ccuaucaacauugcugucc

SEQ ID NO: 451113 - RNA, 19 nt, Artificial Sequence
  Description of Artificial Sequence: Synthetic oligonucleotide
ccugcuucgccuauguccc

SEQ ID NO: 451114 - RNA, 19 nt, Artificial Sequence
  Description of Artificial Sequence: Synthetic oligonucleotide
gacuuagggucaugcuugc

SEQ ID NO: 451115 - RNA, 19 nt, Artificial Sequence
  Description of Artificial Sequence: Synthetic oligonucleotide
guugcccagacucgggccc

SEQ ID NO: 451116 - RNA, 19 nt, Artificial Sequence
  Description of Artificial Sequence: Synthetic oligonucleotide
guggcuaagccuuauuugu

SEQ ID NO: 451117 - RNA, 19 nt, Artificial Sequence
  Description of Artificial Sequence: Synthetic oligonucleotide
guuaugcucaggaacuaca

SEQ ID NO: 451118 - RNA, 19 nt, Artificial Sequence
  Description of Artificial Sequence: Synthetic oligonucleotide
gcaagggauccguuggugg

SEQ ID NO: 451119 - RNA, 19 nt, Artificial Sequence
  Description of Artificial Sequence: Synthetic oligonucleotide
uguaggguccccugaguua

SEQ ID NO: 451120 - RNA, 19 nt, Artificial Sequence
  Description of Artificial Sequence: Synthetic oligonucleotide
uucgccuaugucccagacu

SEQ ID NO: 451121 - RNA, 19 nt, Artificial Sequence
  Description of Artificial Sequence: Synthetic oligonucleotide
agggucggccaagagugcc

SEQ ID NO: 451122 - RNA, 19 nt, Artificial Sequence
  Description of Artificial Sequence: Synthetic oligonucleotide
uggagggacuacugggaug

SEQ ID NO: 451123 - RNA, 19 nt, Artificial Sequence
  Description of Artificial Sequence: Synthetic oligonucleotide
ggagauucaccucggugcc

SEQ ID NO: 451124 - RNA, 19 nt, Artificial Sequence
  Description of Artificial Sequence: Synthetic oligonucleotide
aaaugggacgaagcugcca

SEQ ID NO: 451125 - RNA, 19 nt, Artificial Sequence
  Description of Artificial Sequence: Synthetic oligonucleotide
aagccagaguguguguugu

SEQ ID NO: 451126 - RNA, 19 nt, Artificial Sequence
  Description of Artificial Sequence: Synthetic oligonucleotide
cuaccgcaacuguacaaac

SEQ ID NO: 451127 - RNA, 19 nt, Artificial Sequence
  Description of Artificial Sequence: Synthetic oligonucleotide
uguuacccaccagagcugu

SEQ ID NO: 451128 - RNA, 19 nt, Artificial Sequence
  Description of Artificial Sequence: Synthetic oligonucleotide
acucgguaaaggcugucau

SEQ ID NO: 451129 - RNA, 19 nt, Artificial Sequence
  Description of Artificial Sequence: Synthetic oligonucleotide
guuagagggaguggggaac

SEQ ID NO: 451130 - RNA, 19 nt, Artificial Sequence
  Description of Artificial Sequence: Synthetic oligonucleotide
uuuccuccguagaggucag

SEQ ID NO: 451131 - RNA, 19 nt, Artificial Sequence
  Description of Artificial Sequence: Synthetic oligonucleotide
guaugcggaacgcugcaga

SEQ ID NO: 451132 - RNA, 19 nt, Artificial Sequence
  Description of Artificial Sequence: Synthetic oligonucleotide
uucaccucggugccguuua

SEQ ID NO: 451133 - RNA, 19 nt, Artificial Sequence
  Description of Artificial Sequence: Synthetic oligonucleotide
uggcucaaaccagaugaca

SEQ ID NO: 451134 - RNA, 19 nt, Artificial Sequence
  Description of Artificial Sequence: Synthetic oligonucleotide
uuaguggagcaguguucug

SEQ ID NO: 451135 - RNA, 19 nt, Artificial Sequence
  Description of Artificial Sequence: Synthetic oligonucleotide
uucagccucggugagugaa

SEQ ID NO: 451136 - RNA, 19 nt, Artificial Sequence
  Description of Artificial Sequence: Synthetic oligonucleotide
gacggucaggacucccaag

SEQ ID NO: 451137 - RNA, 19 nt, Artificial Sequence
  Description of Artificial Sequence: Synthetic oligonucleotide
ucguagcagaagccuguca

SEQ ID NO: 451138 - RNA, 19 nt, Artificial Sequence
  Description of Artificial Sequence: Synthetic oligonucleotide
gccguuuagcaccuccugg

SEQ ID NO: 451139 - RNA, 19 nt, Artificial Sequence
  Description of Artificial Sequence: Synthetic oligonucleotide
ucgggaugaugggaaacug

SEQ ID NO: 451140 - RNA, 19 nt, Artificial Sequence
  Description of Artificial Sequence: Synthetic oligonucleotide
ugcuaccgcaacuguacaa

SEQ ID NO: 451141 - RNA, 19 nt, Artificial Sequence
  Description of Artificial Sequence: Synthetic oligonucleotide
cccuacagaggcuggaggg

SEQ ID NO: 451142 - RNA, 19 nt, Artificial Sequence
  Description of Artificial Sequence: Synthetic oligonucleotide
caaauguggucagugacaa

SEQ ID NO: 451143 - RNA, 19 nt, Artificial Sequence
  Description of Artificial Sequence: Synthetic oligonucleotide
gagaccuggguagggcagg

SEQ ID NO: 451144 - RNA, 19 nt, Artificial Sequence
  Description of Artificial Sequence: Synthetic oligonucleotide
cuggcucaaaccagaugac

SEQ ID NO: 451145 - RNA, 19 nt, Artificial Sequence
  Description of Artificial Sequence: Synthetic oligonucleotide
ugggcaugugcacucggua

SEQ ID NO: 451146 - RNA, 19 nt, Artificial Sequence
  Description of Artificial Sequence: Synthetic oligonucleotide
caagagugcccguggcagc

SEQ ID NO: 451147 - RNA, 19 nt, Artificial Sequence
  Description of Artificial Sequence: Synthetic oligonucleotide
uggcuaagccuuauuuguu

SEQ ID NO: 451148 - RNA, 19 nt, Artificial Sequence
  Description of Artificial Sequence: Synthetic oligonucleotide
aaauguggucagugacaaa

SEQ ID NO: 451149 - RNA, 19 nt, Artificial Sequence
  Description of Artificial Sequence: Synthetic oligonucleotide
cguagcagaagccugucag

SEQ ID NO: 451150 - RNA, 19 nt, Artificial Sequence
  Description of Artificial Sequence: Synthetic oligonucleotide
agauucaccucggugccgu

SEQ ID NO: 451151 - RNA, 19 nt, Artificial Sequence
  Description of Artificial Sequence: Synthetic oligonucleotide
gcuagacuuagggucaugc

SEQ ID NO: 451152 - RNA, 19 nt, Artificial Sequence
  Description of Artificial Sequence: Synthetic oligonucleotide
ggagacaagugucacccca

SEQ ID NO: 451153 - RNA, 19 nt, Artificial Sequence
  Description of Artificial Sequence: Synthetic oligonucleotide
ucuucgggaugaugggaaa

SEQ ID NO: 451154 - RNA, 19 nt, Artificial Sequence
  Description of Artificial Sequence: Synthetic oligonucleotide
aaugaccacucuagccaug

SEQ ID NO: 451155 - RNA, 19 nt, Artificial Sequence
  Description of Artificial Sequence: Synthetic oligonucleotide
gaccacucuagccauggcu

SEQ ID NO: 451156 - RNA, 19 nt, Artificial Sequence
  Description of Artificial Sequence: Synthetic oligonucleotide
gccacauccgggcagugcc

SEQ ID NO: 451157 - RNA, 19 nt, Artificial Sequence
  Description of Artificial Sequence: Synthetic oligonucleotide
uuagcaccuccuggacucg

SEQ ID NO: 451158 - RNA, 19 nt, Artificial Sequence
  Description of Artificial Sequence: Synthetic oligonucleotide
aggacucccaagacagcac

SEQ ID NO: 451159 - RNA, 19 nt, Artificial Sequence
  Description of Artificial Sequence: Synthetic oligonucleotide
ccaucucagguucagcccc

SEQ ID NO: 451160 - RNA, 19 nt, Artificial Sequence
  Description of Artificial Sequence: Synthetic oligonucleotide
cacagucccugggacaugc

SEQ ID NO: 451161 - RNA, 19 nt, Artificial Sequence
  Description of Artificial Sequence: Synthetic oligonucleotide
accccgcaaaggaaugacc

SEQ ID NO: 451162 - RNA, 19 nt, Artificial Sequence
  Description of Artificial Sequence: Synthetic oligonucleotide
ccagaguguguguuguggg

SEQ ID NO: 451163 - RNA, 19 nt, Artificial Sequence
  Description of Artificial Sequence: Synthetic oligonucleotide
gacaagugucaccccaaaa

SEQ ID NO: 451164 - RNA, 19 nt, Artificial Sequence
  Description of Artificial Sequence: Synthetic oligonucleotide
accaccuucugggcugggc

SEQ ID NO: 451165 - RNA, 19 nt, Artificial Sequence
  Description of Artificial Sequence: Synthetic oligonucleotide
ugcacucgguaaaggcugu

SEQ ID NO: 451166 - RNA, 19 nt, Artificial Sequence
  Description of Artificial Sequence: Synthetic oligonucleotide
gaacuacaguugcccagac

SEQ ID NO: 451167 - RNA, 19 nt, Artificial Sequence
  Description of Artificial Sequence: Synthetic oligonucleotide
cuggguagggcaggcauug

SEQ ID NO: 451168 - RNA, 19 nt, Artificial Sequence
  Description of Artificial Sequence: Synthetic oligonucleotide
agguaugcggaacgcugca

SEQ ID NO: 451169 - RNA, 19 nt, Artificial Sequence
  Description of Artificial Sequence: Synthetic oligonucleotide
aucguagcagaagccuguc

SEQ ID NO: 451170 - RNA, 19 nt, Artificial Sequence
  Description of Artificial Sequence: Synthetic oligonucleotide
uccccuccacugaggauug

SEQ ID NO: 451171 - RNA, 19 nt, Artificial Sequence
  Description of Artificial Sequence: Synthetic oligonucleotide
ggugccguuuagcaccucc

SEQ ID NO: 451172 - RNA, 19 nt, Artificial Sequence
  Description of Artificial Sequence: Synthetic oligonucleotide
cagugcccgccucucaugc

SEQ ID NO: 451173 - RNA, 19 nt, Artificial Sequence
  Description of Artificial Sequence: Synthetic oligonucleotide
gcggcaguccaccagggcc

SEQ ID NO: 451174 - RNA, 19 nt, Artificial Sequence
  Description of Artificial Sequence: Synthetic oligonucleotide
guuagugguuagucccaac

SEQ ID NO: 451175 - RNA, 19 nt, Artificial Sequence
  Description of Artificial Sequence: Synthetic oligonucleotide
aggagcuaaccaccuucug

SEQ ID NO: 451176 - RNA, 19 nt, Artificial Sequence
  Description of Artificial Sequence: Synthetic oligonucleotide
agccacauccgggcagugc

SEQ ID NO: 451177 - RNA, 19 nt, Artificial Sequence
  Description of Artificial Sequence: Synthetic oligonucleotide
ggagccguuuccuccguag

SEQ ID NO: 451178 - RNA, 19 nt, Artificial Sequence
  Description of Artificial Sequence: Synthetic oligonucleotide
guuagucccaacagcggca

SEQ ID NO: 451179 - RNA, 19 nt, Artificial Sequence
  Description of Artificial Sequence: Synthetic oligonucleotide
uuagucccaacagcggcau

SEQ ID NO: 451180 - RNA, 19 nt, Artificial Sequence
  Description of Artificial Sequence: Synthetic oligonucleotide
ccagguaugcggaacgcug

SEQ ID NO: 451181 - RNA, 19 nt, Artificial Sequence
  Description of Artificial Sequence: Synthetic oligonucleotide
aagcaccuuaguggagcag

SEQ ID NO: 451182 - RNA, 19 nt, Artificial Sequence
  Description of Artificial Sequence: Synthetic oligonucleotide
agccagaucccuccucccu

SEQ ID NO: 451183 - RNA, 19 nt, Artificial Sequence
  Description of Artificial Sequence: Synthetic oligonucleotide
cuuaguggagcaguguucu

SEQ ID NO: 451184 - RNA, 19 nt, Artificial Sequence
  Description of Artificial Sequence: Synthetic oligonucleotide
agcaagggauccguuggug

SEQ ID NO: 451185 - RNA, 19 nt, Artificial Sequence
  Description of Artificial Sequence: Synthetic oligonucleotide
ugaccacucuagccauggc

SEQ ID NO: 451186 - RNA, 19 nt, Artificial Sequence
  Description of Artificial Sequence: Synthetic oligonucleotide
guugccagguaugcggaac

SEQ ID NO: 451187 - RNA, 19 nt, Artificial Sequence
  Description of Artificial Sequence: Synthetic oligonucleotide
cuucgggaugaugggaaac

SEQ ID NO: 451188 - RNA, 19 nt, Artificial Sequence
  Description of Artificial Sequence: Synthetic oligonucleotide
caccuuguggccagcucac

SEQ ID NO: 451189 - RNA, 19 nt, Artificial Sequence
  Description of Artificial Sequence: Synthetic oligonucleotide
gaaugaccacucuagccau

SEQ ID NO: 451190 - RNA, 19 nt, Artificial Sequence
  Description of Artificial Sequence: Synthetic oligonucleotide
ugcggcaguccaccagggc

SEQ ID NO: 451191 - RNA, 19 nt, Artificial Sequence
  Description of Artificial Sequence: Synthetic oligonucleotide
acugcccuggagaugacaa

SEQ ID NO: 451192 - RNA, 19 nt, Artificial Sequence
  Description of Artificial Sequence: Synthetic oligonucleotide
cauugcugacggugugggc

SEQ ID NO: 451193 - RNA, 19 nt, Artificial Sequence
  Description of Artificial Sequence: Synthetic oligonucleotide
cuccguagaggucagggua

SEQ ID NO: 451194 - RNA, 19 nt, Artificial Sequence
  Description of Artificial Sequence: Synthetic oligonucleotide
ucugaaccugaggccagga

SEQ ID NO: 451195 - RNA, 19 nt, Artificial Sequence
  Description of Artificial Sequence: Synthetic oligonucleotide
caacagcggcauucugagg

SEQ ID NO: 451196 - RNA, 19 nt, Artificial Sequence
  Description of Artificial Sequence: Synthetic oligonucleotide
uagcugcuaccgcaacugu

SEQ ID NO: 451197 - RNA, 19 nt, Artificial Sequence
  Description of Artificial Sequence: Synthetic oligonucleotide
ccuuauuuguuacccacca

SEQ ID NO: 451198 - RNA, 19 nt, Artificial Sequence
  Description of Artificial Sequence: Synthetic oligonucleotide
gcauugcugacgguguggg

SEQ ID NO: 451199 - RNA, 19 nt, Artificial Sequence
  Description of Artificial Sequence: Synthetic oligonucleotide
cucaugcuauauacauuca

SEQ ID NO: 451200 - RNA, 19 nt, Artificial Sequence
  Description of Artificial Sequence: Synthetic oligonucleotide
cuucgccuaugucccagac

SEQ ID NO: 451201 - RNA, 19 nt, Artificial Sequence
  Description of Artificial Sequence: Synthetic oligonucleotide
ucccugguuuggcuaggga

SEQ ID NO: 451202 - RNA, 19 nt, Artificial Sequence
  Description of Artificial Sequence: Synthetic oligonucleotide
ggacugaggccacauggac

SEQ ID NO: 451203 - RNA, 19 nt, Artificial Sequence
  Description of Artificial Sequence: Synthetic oligonucleotide
gccaucucagguucagccc

SEQ ID NO: 451204 - RNA, 19 nt, Artificial Sequence
  Description of Artificial Sequence: Synthetic oligonucleotide
ccuuguggccagcucacgg

SEQ ID NO: 451205 - RNA, 19 nt, Artificial Sequence
  Description of Artificial Sequence: Synthetic oligonucleotide
gaggccaggaacacaccca

SEQ ID NO: 451206 - RNA, 19 nt, Artificial Sequence
  Description of Artificial Sequence: Synthetic oligonucleotide
cacauccgggcagugcccg

SEQ ID NO: 451207 - RNA, 19 nt, Artificial Sequence
  Description of Artificial Sequence: Synthetic oligonucleotide
ggccccucggcccagugag

SEQ ID NO: 451208 - RNA, 19 nt, Artificial Sequence
  Description of Artificial Sequence: Synthetic oligonucleotide
ccauaguaggcagacuggc

SEQ ID NO: 451209 - RNA, 19 nt, Artificial Sequence
  Description of Artificial Sequence: Synthetic oligonucleotide
gaucccuccucccugguuu

SEQ ID NO: 451210 - RNA, 19 nt, Artificial Sequence
  Description of Artificial Sequence: Synthetic oligonucleotide
cugggaggcaaaucucaca

SEQ ID NO: 451211 - RNA, 19 nt, Artificial Sequence
  Description of Artificial Sequence: Synthetic oligonucleotide
cccuguagguuccuggcgc

SEQ ID NO: 451212 - RNA, 19 nt, Artificial Sequence
  Description of Artificial Sequence: Synthetic oligonucleotide
caggaacuacaguugccca

SEQ ID NO: 451213 - RNA, 19 nt, Artificial Sequence
  Description of Artificial Sequence: Synthetic oligonucleotide
ccaggagcuaaccaccuuc

SEQ ID NO: 451214 - RNA, 19 nt, Artificial Sequence
  Description of Artificial Sequence: Synthetic oligonucleotide
ggaacuacaguugcccaga

SEQ ID NO: 451215 - RNA, 19 nt, Artificial Sequence
  Description of Artificial Sequence: Synthetic oligonucleotide
ucggugccguuuagcaccu

SEQ ID NO: 451216 - RNA, 19 nt, Artificial Sequence
  Description of Artificial Sequence: Synthetic oligonucleotide
ugccagguaugcggaacgc

SEQ ID NO: 451217 - RNA, 19 nt, Artificial Sequence
  Description of Artificial Sequence: Synthetic oligonucleotide
cuaugucccagacugcccu

SEQ ID NO: 451218 - RNA, 19 nt, Artificial Sequence
  Description of Artificial Sequence: Synthetic oligonucleotide
gggaccugggucugguuug

SEQ ID NO: 451219 - RNA, 19 nt, Artificial Sequence
  Description of Artificial Sequence: Synthetic oligonucleotide
agguuagugguuaguccca

SEQ ID NO: 451220 - RNA, 19 nt, Artificial Sequence
  Description of Artificial Sequence: Synthetic oligonucleotide
gccuaugucccagacugcc

SEQ ID NO: 451221 - RNA, 19 nt, Artificial Sequence
  Description of Artificial Sequence: Synthetic oligonucleotide
cuguugccagguaugcgga

SEQ ID NO: 451222 - RNA, 19 nt, Artificial Sequence
  Description of Artificial Sequence: Synthetic oligonucleotide
guuuggcuagggaccuggg

SEQ ID NO: 451223 - RNA, 19 nt, Artificial Sequence
  Description of Artificial Sequence: Synthetic oligonucleotide
gcacgcacgcacacgacgg

SEQ ID NO: 451224 - RNA, 19 nt, Artificial Sequence
  Description of Artificial Sequence: Synthetic oligonucleotide
ggcgccagaucaguuggcg

SEQ ID NO: 451225 - RNA, 19 nt, Artificial Sequence
  Description of Artificial Sequence: Synthetic oligonucleotide
gagacaagugucaccccaa

SEQ ID NO: 451226 - RNA, 19 nt, Artificial Sequence
  Description of Artificial Sequence: Synthetic oligonucleotide
aggcugucaugugccugcc

SEQ ID NO: 451227 - RNA, 19 nt, Artificial Sequence
  Description of Artificial Sequence: Synthetic oligonucleotide
uccccuuguuuccuuucuu

SEQ ID NO: 451228 - RNA, 19 nt, Artificial Sequence
  Description of Artificial Sequence: Synthetic oligonucleotide
guagcagaagccugucagu

SEQ ID NO: 451229 - RNA, 19 nt, Artificial Sequence
  Description of Artificial Sequence: Synthetic oligonucleotide
uugguggcuaagccuuauu

SEQ ID NO: 451230 - RNA, 19 nt, Artificial Sequence
  Description of Artificial Sequence: Synthetic oligonucleotide
cuagacuuagggucaugcu

SEQ ID NO: 451231 - RNA, 19 nt, Artificial Sequence
  Description of Artificial Sequence: Synthetic oligonucleotide
gguuaugcucaggaacuac

SEQ ID NO: 451232 - RNA, 19 nt, Artificial Sequence
  Description of Artificial Sequence: Synthetic oligonucleotide
acgcacgcacacgacgguc

SEQ ID NO: 451233 - RNA, 19 nt, Artificial Sequence
  Description of Artificial Sequence: Synthetic oligonucleotide
agcugaacaugagggcugu

SEQ ID NO: 451234 - RNA, 19 nt, Artificial Sequence
  Description of Artificial Sequence: Synthetic oligonucleotide
uggcgccagaucaguuggc

SEQ ID NO: 451235 - RNA, 19 nt, Artificial Sequence
  Description of Artificial Sequence: Synthetic oligonucleotide
gcccucgacaccaucguag

SEQ ID NO: 451236 - RNA, 19 nt, Artificial Sequence
  Description of Artificial Sequence: Synthetic oligonucleotide
ggcgccaaaggcagggucc

SEQ ID NO: 451237 - RNA, 19 nt, Artificial Sequence
  Description of Artificial Sequence: Synthetic oligonucleotide
ugguuaugcucaggaacua

SEQ ID NO: 451238 - RNA, 19 nt, Artificial Sequence
  Description of Artificial Sequence: Synthetic oligonucleotide
ccuaugucccagacugccc

SEQ ID NO: 451239 - RNA, 19 nt, Artificial Sequence
  Description of Artificial Sequence: Synthetic oligonucleotide
ggcuaagccuuauuuguua

SEQ ID NO: 451240 - RNA, 19 nt, Artificial Sequence
  Description of Artificial Sequence: Synthetic oligonucleotide
caucguagcagaagccugu

SEQ ID NO: 451241 - RNA, 19 nt, Artificial Sequence
  Description of Artificial Sequence: Synthetic oligonucleotide
aaguuaccccaaagaaaua

SEQ ID NO: 451242 - RNA, 19 nt, Artificial Sequence
  Description of Artificial Sequence: Synthetic oligonucleotide
aagcugcggcaguccacca

SEQ ID NO: 451243 - RNA, 19 nt, Artificial Sequence
  Description of Artificial Sequence: Synthetic oligonucleotide
cucagggucggccaagagu

SEQ ID NO: 451244 - RNA, 19 nt, Artificial Sequence
  Description of Artificial Sequence: Synthetic oligonucleotide
ugacggugugggcggcggc

SEQ ID NO: 451245 - RNA, 19 nt, Artificial Sequence
  Description of Artificial Sequence: Synthetic oligonucleotide
gccuuauuuguuacccacc

SEQ ID NO: 451246 - RNA, 19 nt, Artificial Sequence
  Description of Artificial Sequence: Synthetic oligonucleotide
caaucacagacagcuggca

SEQ ID NO: 451247 - RNA, 19 nt, Artificial Sequence
  Description of Artificial Sequence: Synthetic oligonucleotide
ccuggcgccagaucaguug

SEQ ID NO: 451248 - RNA, 19 nt, Artificial Sequence
  Description of Artificial Sequence: Synthetic oligonucleotide
ggguaagaacccucuuuuc

SEQ ID NO: 451249 - RNA, 19 nt, Artificial Sequence
  Description of Artificial Sequence: Synthetic oligonucleotide
caccccgcaaaggaaugac

SEQ ID NO: 451250 - RNA, 19 nt, Artificial Sequence
  Description of Artificial Sequence: Synthetic oligonucleotide
cacacccauaguaggcaga

SEQ ID NO: 451251 - RNA, 19 nt, Artificial Sequence
  Description of Artificial Sequence: Synthetic oligonucleotide
gcccuguagguuccuggcg

SEQ ID NO: 451252 - RNA, 19 nt, Artificial Sequence
  Description of Artificial Sequence: Synthetic oligonucleotide
uggagagguggagggacua

SEQ ID NO: 451253 - RNA, 19 nt, Artificial Sequence
  Description of Artificial Sequence: Synthetic oligonucleotide
cccucgacaccaucguagc

SEQ ID NO: 451254 - RNA, 19 nt, Artificial Sequence
  Description of Artificial Sequence: Synthetic oligonucleotide
augcuacuccacagcaaug

SEQ ID NO: 451255 - RNA, 19 nt, Artificial Sequence
  Description of Artificial Sequence: Synthetic oligonucleotide
gaggggcacgugccgcuug

SEQ ID NO: 451256 - RNA, 19 nt, Artificial Sequence
  Description of Artificial Sequence: Synthetic oligonucleotide
ccccgcaaaggaaugacca

SEQ ID NO: 451257 - RNA, 19 nt, Artificial Sequence
  Description of Artificial Sequence: Synthetic oligonucleotide
agcaccccgcaaaggaaug

SEQ ID NO: 451258 - RNA, 19 nt, Artificial Sequence
  Description of Artificial Sequence: Synthetic oligonucleotide
ggucggccaagagugcccg

SEQ ID NO: 451259 - RNA, 19 nt, Artificial Sequence
  Description of Artificial Sequence: Synthetic oligonucleotide
agugcccgccucucaugcu

SEQ ID NO: 451260 - RNA, 19 nt, Artificial Sequence
  Description of Artificial Sequence: Synthetic oligonucleotide
cagggucggccaagagugc

SEQ ID NO: 451261 - RNA, 19 nt, Artificial Sequence
  Description of Artificial Sequence: Synthetic oligonucleotide
gguaugcggaacgcugcag

SEQ ID NO: 451262 - RNA, 19 nt, Artificial Sequence
  Description of Artificial Sequence: Synthetic oligonucleotide
gcuaccgcaacuguacaaa

SEQ ID NO: 451263 - RNA, 19 nt, Artificial Sequence
  Description of Artificial Sequence: Synthetic oligonucleotide
gugccgcuuguccugggca

SEQ ID NO: 451264 - RNA, 19 nt, Artificial Sequence
  Description of Artificial Sequence: Synthetic oligonucleotide
acgacggucaggacuccca

SEQ ID NO: 451265 - RNA, 19 nt, Artificial Sequence
  Description of Artificial Sequence: Synthetic oligonucleotide
acaugcuacuccacagcaa

SEQ ID NO: 451266 - RNA, 19 nt, Artificial Sequence
  Description of Artificial Sequence: Synthetic oligonucleotide
ccaguccuaucaacauugc

SEQ ID NO: 451267 - RNA, 19 nt, Artificial Sequence
  Description of Artificial Sequence: Synthetic oligonucleotide
uugcccagacucgggcccc

SEQ ID NO: 451268 - RNA, 19 nt, Artificial Sequence
  Description of Artificial Sequence: Synthetic oligonucleotide
cacucgguaaaggcuguca

SEQ ID NO: 451269 - RNA, 19 nt, Artificial Sequence
  Description of Artificial Sequence: Synthetic oligonucleotide
acacgacggucaggacucc

SEQ ID NO: 451270 - RNA, 19 nt, Artificial Sequence
  Description of Artificial Sequence: Synthetic oligonucleotide
ugugggcggcggcugggau

SEQ ID NO: 451271 - RNA, 19 nt, Artificial Sequence
  Description of Artificial Sequence: Synthetic oligonucleotide
gagagguggagggacuacu

SEQ ID NO: 451272 - RNA, 19 nt, Artificial Sequence
  Description of Artificial Sequence: Synthetic oligonucleotide
cacgugccgcuuguccugg

SEQ ID NO: 451273 - RNA, 19 nt, Artificial Sequence
  Description of Artificial Sequence: Synthetic oligonucleotide
gggcaugugcacucgguaa

SEQ ID NO: 451274 - RNA, 19 nt, Artificial Sequence
  Description of Artificial Sequence: Synthetic oligonucleotide
ugcccgccucucaugcuau

SEQ ID NO: 451275 - RNA, 19 nt, Artificial Sequence
  Description of Artificial Sequence: Synthetic oligonucleotide
agagggaguggggaaccaa

SEQ ID NO: 451276 - RNA, 19 nt, Artificial Sequence
  Description of Artificial Sequence: Synthetic oligonucleotide
cccgcaaaggaaugaccac

SEQ ID NO: 451277 - RNA, 19 nt, Artificial Sequence
  Description of Artificial Sequence: Synthetic oligonucleotide
cucggugagugaagucaca

SEQ ID NO: 451278 - RNA, 19 nt, Artificial Sequence
  Description of Artificial Sequence: Synthetic oligonucleotide
gcccagugaguccucugcc

SEQ ID NO: 451279 - RNA, 19 nt, Artificial Sequence
  Description of Artificial Sequence: Synthetic oligonucleotide
gcacacgacggucaggacu

SEQ ID NO: 451280 - RNA, 19 nt, Artificial Sequence
  Description of Artificial Sequence: Synthetic oligonucleotide
uccuggcgccagaucaguu

SEQ ID NO: 451281 - RNA, 19 nt, Artificial Sequence
  Description of Artificial Sequence: Synthetic oligonucleotide
caccucggugccguuuagc

SEQ ID NO: 451282 - RNA, 19 nt, Artificial Sequence
  Description of Artificial Sequence: Synthetic oligonucleotide
cugggacaugcuccuccug

SEQ ID NO: 451283 - RNA, 19 nt, Artificial Sequence
  Description of Artificial Sequence: Synthetic oligonucleotide
caggagcuaaccaccuucu

SEQ ID NO: 451284 - RNA, 19 nt, Artificial Sequence
  Description of Artificial Sequence: Synthetic oligonucleotide
gacucccaagacagcacaa

SEQ ID NO: 451285 - RNA, 19 nt, Artificial Sequence
  Description of Artificial Sequence: Synthetic oligonucleotide
uggcuucgggcuagacuua

SEQ ID NO: 451286 - RNA, 19 nt, Artificial Sequence
  Description of Artificial Sequence: Synthetic oligonucleotide
gcacgugccgcuuguccug

SEQ ID NO: 451287 - RNA, 19 nt, Artificial Sequence
  Description of Artificial Sequence: Synthetic oligonucleotide
gguuugguggcuaagccuu

SEQ ID NO: 451288 - RNA, 19 nt, Artificial Sequence
  Description of Artificial Sequence: Synthetic oligonucleotide
ggcacaccaucauuaugaa

SEQ ID NO: 451289 - RNA, 19 nt, Artificial Sequence
  Description of Artificial Sequence: Synthetic oligonucleotide
cacgacggucaggacuccc

SEQ ID NO: 451290 - RNA, 19 nt, Artificial Sequence
  Description of Artificial Sequence: Synthetic oligonucleotide
ggugcaagcugcggcaguc

SEQ ID NO: 451291 - RNA, 19 nt, Artificial Sequence
  Description of Artificial Sequence: Synthetic oligonucleotide
cugaaccugaggccaggaa

SEQ ID NO: 451292 - RNA, 19 nt, Artificial Sequence
  Description of Artificial Sequence: Synthetic oligonucleotide
caggguaagaacccucuuu

SEQ ID NO: 451293 - RNA, 19 nt, Artificial Sequence
  Description of Artificial Sequence: Synthetic oligonucleotide
cugcuaccgcaacuguaca

SEQ ID NO: 451294 - RNA, 19 nt, Artificial Sequence
  Description of Artificial Sequence: Synthetic oligonucleotide
gaacuuggggcuggcucaa

SEQ ID NO: 451295 - RNA, 19 nt, Artificial Sequence
  Description of Artificial Sequence: Synthetic oligonucleotide
ggcccuuucaguugccugu

SEQ ID NO: 451296 - RNA, 19 nt, Artificial Sequence
  Description of Artificial Sequence: Synthetic oligonucleotide
cauucaccuuguggccagc

SEQ ID NO: 451297 - RNA, 19 nt, Artificial Sequence
  Description of Artificial Sequence: Synthetic oligonucleotide
cuacuccuuuuggucccag

SEQ ID NO: 451298 - RNA, 19 nt, Artificial Sequence
  Description of Artificial Sequence: Synthetic oligonucleotide
cucucaugcuauauacauu

SEQ ID NO: 451299 - RNA, 19 nt, Artificial Sequence
  Description of Artificial Sequence: Synthetic oligonucleotide
gcgccagaucaguuggcgc

SEQ ID NO: 451300 - RNA, 19 nt, Artificial Sequence
  Description of Artificial Sequence: Synthetic oligonucleotide
agcugcuaccgcaacugua

SEQ ID NO: 451301 - RNA, 19 nt, Artificial Sequence
  Description of Artificial Sequence: Synthetic oligonucleotide
caguccuaucaacauugcu

SEQ ID NO: 451302 - RNA, 19 nt, Artificial Sequence
  Description of Artificial Sequence: Synthetic oligonucleotide
ggucaggguaagaacccuc

SEQ ID NO: 451303 - RNA, 19 nt, Artificial Sequence
  Description of Artificial Sequence: Synthetic oligonucleotide
gagagugagguuagugguu

SEQ ID NO: 451304 - RNA, 19 nt, Artificial Sequence
  Description of Artificial Sequence: Synthetic oligonucleotide
ggccaccaguccuaucaac

SEQ ID NO: 451305 - RNA, 19 nt, Artificial Sequence
  Description of Artificial Sequence: Synthetic oligonucleotide
gcacgcacacgacggucag

SEQ ID NO: 451306 - RNA, 19 nt, Artificial Sequence
  Description of Artificial Sequence: Synthetic oligonucleotide
gugcccgccucucaugcua

SEQ ID NO: 451307 - RNA, 19 nt, Artificial Sequence
  Description of Artificial Sequence: Synthetic oligonucleotide
ggcccuacagaggcuggag

SEQ ID NO: 451308 - RNA, 19 nt, Artificial Sequence
  Description of Artificial Sequence: Synthetic oligonucleotide
cggagcaagggauccguug

SEQ ID NO: 451309 - RNA, 19 nt, Artificial Sequence
  Description of Artificial Sequence: Synthetic oligonucleotide
guggagggacuacugggau

SEQ ID NO: 451310 - RNA, 19 nt, Artificial Sequence
  Description of Artificial Sequence: Synthetic oligonucleotide
cagggccgugaggugcugg

SEQ ID NO: 451311 - RNA, 19 nt, Artificial Sequence
  Description of Artificial Sequence: Synthetic oligonucleotide
caguggcaggagccguuuc

SEQ ID NO: 451312 - RNA, 19 nt, Artificial Sequence
  Description of Artificial Sequence: Synthetic oligonucleotide
ccacauccgggcagugccc

SEQ ID NO: 451313 - RNA, 19 nt, Artificial Sequence
  Description of Artificial Sequence: Synthetic oligonucleotide
agcugagagugagguuagu

SEQ ID NO: 451314 - RNA, 19 nt, Artificial Sequence
  Description of Artificial Sequence: Synthetic oligonucleotide
guccugcuucgccuauguc

SEQ ID NO: 451315 - RNA, 19 nt, Artificial Sequence
  Description of Artificial Sequence: Synthetic oligonucleotide
gggccucuuuucuguugcc

SEQ ID NO: 451316 - RNA, 19 nt, Artificial Sequence
  Description of Artificial Sequence: Synthetic oligonucleotide
gggucggccaagagugccc

SEQ ID NO: 451317 - RNA, 19 nt, Artificial Sequence
  Description of Artificial Sequence: Synthetic oligonucleotide
uagucccaacagcggcauu

SEQ ID NO: 451318 - RNA, 19 nt, Artificial Sequence
  Description of Artificial Sequence: Synthetic oligonucleotide
gguuagugguuagucccaa

SEQ ID NO: 451319 - RNA, 19 nt, Artificial Sequence
  Description of Artificial Sequence: Synthetic oligonucleotide
agugcccguggcagcugag

SEQ ID NO: 451320 - RNA, 19 nt, Artificial Sequence
  Description of Artificial Sequence: Synthetic oligonucleotide
cuggagagguggagggacu

SEQ ID NO: 451321 - RNA, 19 nt, Artificial Sequence
  Description of Artificial Sequence: Synthetic oligonucleotide
gccacucuucgggaugaug

SEQ ID NO: 451322 - RNA, 19 nt, Artificial Sequence
  Description of Artificial Sequence: Synthetic oligonucleotide
aggagccguuuccuccgua

SEQ ID NO: 451323 - RNA, 19 nt, Artificial Sequence
  Description of Artificial Sequence: Synthetic oligonucleotide
cccagacaccagcacaaca

SEQ ID NO: 451324 - RNA, 19 nt, Artificial Sequence
  Description of Artificial Sequence: Synthetic oligonucleotide
guagggacugaggccacau

SEQ ID NO: 451325 - RNA, 19 nt, Artificial Sequence
  Description of Artificial Sequence: Synthetic oligonucleotide
cgggcuagacuuaggguca

SEQ ID NO: 451326 - RNA, 19 nt, Artificial Sequence
  Description of Artificial Sequence: Synthetic oligonucleotide
ggugccccaugccucccuc

SEQ ID NO: 451327 - RNA, 19 nt, Artificial Sequence
  Description of Artificial Sequence: Synthetic oligonucleotide
gccagaucaguuggcgcca

SEQ ID NO: 451328 - RNA, 19 nt, Artificial Sequence
  Description of Artificial Sequence: Synthetic oligonucleotide
gugccguuuagcaccuccu

SEQ ID NO: 451329 - RNA, 19 nt, Artificial Sequence
  Description of Artificial Sequence: Synthetic oligonucleotide
gcuucgccuaugucccaga

SEQ ID NO: 451330 - RNA, 19 nt, Artificial Sequence
  Description of Artificial Sequence: Synthetic oligonucleotide
cgguaaaggcugucaugug

SEQ ID NO: 451331 - RNA, 19 nt, Artificial Sequence
  Description of Artificial Sequence: Synthetic oligonucleotide
ccguagaggucaggguaag

SEQ ID NO: 451332 - RNA, 19 nt, Artificial Sequence
  Description of Artificial Sequence: Synthetic oligonucleotide
ccagcacaacaugcuacuc

SEQ ID NO: 451333 - RNA, 19 nt, Artificial Sequence
  Description of Artificial Sequence: Synthetic oligonucleotide
gguccugauuugggagcug

SEQ ID NO: 451334 - RNA, 19 nt, Artificial Sequence
  Description of Artificial Sequence: Synthetic oligonucleotide
cugcuucgccuauguccca

SEQ ID NO: 451335 - RNA, 19 nt, Artificial Sequence
  Description of Artificial Sequence: Synthetic oligonucleotide
ugccugccguggcccugga

SEQ ID NO: 451336 - RNA, 19 nt, Artificial Sequence
  Description of Artificial Sequence: Synthetic oligonucleotide
ggcuagacuuagggucaug

SEQ ID NO: 451337 - RNA, 19 nt, Artificial Sequence
  Description of Artificial Sequence: Synthetic oligonucleotide
ccguuuccuccguagaggu

SEQ ID NO: 451338 - RNA, 19 nt, Artificial Sequence
  Description of Artificial Sequence: Synthetic oligonucleotide
ccagacugcccuggagaug

SEQ ID NO: 451339 - RNA, 19 nt, Artificial Sequence
  Description of Artificial Sequence: Synthetic oligonucleotide
gggacgaagcugccacucu

SEQ ID NO: 451340 - RNA, 19 nt, Artificial Sequence
  Description of Artificial Sequence: Synthetic oligonucleotide
caccuuaguggagcagugu

SEQ ID NO: 451341 - RNA, 19 nt, Artificial Sequence
  Description of Artificial Sequence: Synthetic oligonucleotide
ggggcauugcugacggugu

SEQ ID NO: 451342 - RNA, 19 nt, Artificial Sequence
  Description of Artificial Sequence: Synthetic oligonucleotide
gggcaggcauugacauaag

SEQ ID NO: 451343 - RNA, 19 nt, Artificial Sequence
  Description of Artificial Sequence: Synthetic oligonucleotide
ccgcaaaggaaugaccacu

SEQ ID NO: 451344 - RNA, 19 nt, Artificial Sequence
  Description of Artificial Sequence: Synthetic oligonucleotide
ccguagcugcuaccgcaac

SEQ ID NO: 451345 - RNA, 19 nt, Artificial Sequence
  Description of Artificial Sequence: Synthetic oligonucleotide
cgcacgcacacgacgguca

SEQ ID NO: 451346 - RNA, 19 nt, Artificial Sequence
  Description of Artificial Sequence: Synthetic oligonucleotide
cguuuccuccguagagguc

SEQ ID NO: 451347 - RNA, 19 nt, Artificial Sequence
  Description of Artificial Sequence: Synthetic oligonucleotide
ccaaggcuccagaggggca

SEQ ID NO: 451348 - RNA, 19 nt, Artificial Sequence
  Description of Artificial Sequence: Synthetic oligonucleotide
gcaccccgcaaaggaauga

SEQ ID NO: 451349 - RNA, 19 nt, Artificial Sequence
  Description of Artificial Sequence: Synthetic oligonucleotide
ggacaguaacugggaggca

SEQ ID NO: 451350 - RNA, 19 nt, Artificial Sequence
  Description of Artificial Sequence: Synthetic oligonucleotide
ccaccaguccuaucaacau

SEQ ID NO: 451351 - RNA, 19 nt, Artificial Sequence
  Description of Artificial Sequence: Synthetic oligonucleotide
gcuggagauucaccucggu

SEQ ID NO: 451352 - RNA, 19 nt, Artificial Sequence
  Description of Artificial Sequence: Synthetic oligonucleotide
caguaacugggaggcaaau

SEQ ID NO: 451353 - RNA, 19 nt, Artificial Sequence
  Description of Artificial Sequence: Synthetic oligonucleotide
cgccuaugucccagacugc

SEQ ID NO: 451354 - RNA, 19 nt, Artificial Sequence
  Description of Artificial Sequence: Synthetic oligonucleotide
ccucgacaccaucguagca

SEQ ID NO: 451355 - RNA, 19 nt, Artificial Sequence
  Description of Artificial Sequence: Synthetic oligonucleotide
ccccucggcccagugaguc

SEQ ID NO: 451356 - RNA, 19 nt, Artificial Sequence
  Description of Artificial Sequence: Synthetic oligonucleotide
gauucaccucggugccguu

SEQ ID NO: 451357 - RNA, 19 nt, Artificial Sequence
  Description of Artificial Sequence: Synthetic oligonucleotide
gccucccucugaaccugag

SEQ ID NO: 451358 - RNA, 19 nt, Artificial Sequence
  Description of Artificial Sequence: Synthetic oligonucleotide
cacgcacgcacacgacggu

SEQ ID NO: 451359 - RNA, 19 nt, Artificial Sequence
  Description of Artificial Sequence: Synthetic oligonucleotide
ggcccucgacaccaucgua

SEQ ID NO: 451360 - RNA, 19 nt, Artificial Sequence
  Description of Artificial Sequence: Synthetic oligonucleotide
ccugauuugggagcugauu

SEQ ID NO: 451361 - RNA, 19 nt, Artificial Sequence
  Description of Artificial Sequence: Synthetic oligonucleotide
gucggccaagagugcccgu

SEQ ID NO: 451362 - RNA, 19 nt, Artificial Sequence
  Description of Artificial Sequence: Synthetic oligonucleotide
ccgccucucaugcuauaua

SEQ ID NO: 451363 - RNA, 19 nt, Artificial Sequence
  Description of Artificial Sequence: Synthetic oligonucleotide
caggagccguuuccuccgu

SEQ ID NO: 451364 - RNA, 19 nt, Artificial Sequence
  Description of Artificial Sequence: Synthetic oligonucleotide
gccgcuuguccugggcaaa

SEQ ID NO: 451365 - RNA, 19 nt, Artificial Sequence
  Description of Artificial Sequence: Synthetic oligonucleotide
cgacggucaggacucccaa

SEQ ID NO: 451366 - RNA, 19 nt, Artificial Sequence
  Description of Artificial Sequence: Synthetic oligonucleotide
ccuggguagggcaggcauu

SEQ ID NO: 451367 - RNA, 19 nt, Artificial Sequence
  Description of Artificial Sequence: Synthetic oligonucleotide
cauggcccuguagguuccu

SEQ ID NO: 451368 - RNA, 19 nt, Artificial Sequence
  Description of Artificial Sequence: Synthetic oligonucleotide
ccccuccacugaggauugg

SEQ ID NO: 451369 - RNA, 19 nt, Artificial Sequence
  Description of Artificial Sequence: Synthetic oligonucleotide
ccagaucaguuggcgccaa

SEQ ID NO: 451370 - RNA, 19 nt, Artificial Sequence
  Description of Artificial Sequence: Synthetic oligonucleotide
ccgcuuguccugggcaaaa

SEQ ID NO: 451371 - RNA, 19 nt, Artificial Sequence
  Description of Artificial Sequence: Synthetic oligonucleotide
gggcuagacuuagggucau

SEQ ID NO: 451372 - RNA, 19 nt, Artificial Sequence
  Description of Artificial Sequence: Synthetic oligonucleotide
gcccgccucucaugcuaua

SEQ ID NO: 451373 - RNA, 19 nt, Artificial Sequence
  Description of Artificial Sequence: Synthetic oligonucleotide
cccgccucucaugcuauau

SEQ ID NO: 451374 - RNA, 19 nt, Artificial Sequence
  Description of Artificial Sequence: Synthetic oligonucleotide
cccaggagcuaaccaccuu

SEQ ID NO: 451375 - RNA, 19 nt, Artificial Sequence
  Description of Artificial Sequence: Synthetic oligonucleotide
gccccucggcccagugagu

SEQ ID NO: 451376 - RNA, 19 nt, Artificial Sequence
  Description of Artificial Sequence: Synthetic oligonucleotide
ccgugaggugcuggagauu

SEQ ID NO: 451377 - RNA, 19 nt, Artificial Sequence
  Description of Artificial Sequence: Synthetic oligonucleotide
cggugccguuuagcaccuc

SEQ ID NO: 451378 - RNA, 19 nt, Artificial Sequence
  Description of Artificial Sequence: Synthetic oligonucleotide
aacauuuagacccugggca

SEQ ID NO: 451379 - RNA, 19 nt, Artificial Sequence
  Description of Artificial Sequence: Synthetic oligonucleotide
uuauauuugggacagggca

SEQ ID NO: 451380 - RNA, 19 nt, Artificial Sequence
  Description of Artificial Sequence: Synthetic oligonucleotide
ucagauuacagcaaaagau

SEQ ID NO: 451381 - RNA, 19 nt, Artificial Sequence
  Description of Artificial Sequence: Synthetic oligonucleotide
ugauguaugacgcugccag

SEQ ID NO: 451382 - RNA, 19 nt, Artificial Sequence
  Description of Artificial Sequence: Synthetic oligonucleotide
acaccuuaaauccuaaagg

SEQ ID NO: 451383 - RNA, 19 nt, Artificial Sequence
  Description of Artificial Sequence: Synthetic oligonucleotide
gcagcuaacauuuagaccc

SEQ ID NO: 451384 - RNA, 19 nt, Artificial Sequence
  Description of Artificial Sequence: Synthetic oligonucleotide
uuagauaacuccaugguau

SEQ ID NO: 451385 - RNA, 19 nt, Artificial Sequence
  Description of Artificial Sequence: Synthetic oligonucleotide
agaucggacaccuuaaauc

SEQ ID NO: 451386 - RNA, 19 nt, Artificial Sequence
  Description of Artificial Sequence: Synthetic oligonucleotide
ugaacacagauucccaagg

SEQ ID NO: 451387 - RNA, 19 nt, Artificial Sequence
  Description of Artificial Sequence: Synthetic oligonucleotide
gacaccuuaaauccuaaag

SEQ ID NO: 451388 - RNA, 19 nt, Artificial Sequence
  Description of Artificial Sequence: Synthetic oligonucleotide
ucuugguuuagauaacucc

SEQ ID NO: 451389 - RNA, 19 nt, Artificial Sequence
  Description of Artificial Sequence: Synthetic oligonucleotide
caccuuaaauccuaaaggg

SEQ ID NO: 451390 - RNA, 19 nt, Artificial Sequence
  Description of Artificial Sequence: Synthetic oligonucleotide
acuaguagagggcugacag

SEQ ID NO: 451391 - RNA, 19 nt, Artificial Sequence
  Description of Artificial Sequence: Synthetic oligonucleotide
agagguaaggcacuaggac

SEQ ID NO: 451392 - RNA, 19 nt, Artificial Sequence
  Description of Artificial Sequence: Synthetic oligonucleotide
auaaccaugaccccaugag

SEQ ID NO: 451393 - RNA, 19 nt, Artificial Sequence
  Description of Artificial Sequence: Synthetic oligonucleotide
uggauacuaacuguggugg

SEQ ID NO: 451394 - RNA, 19 nt, Artificial Sequence
  Description of Artificial Sequence: Synthetic oligonucleotide
ugucuguaaggauuugugg

SEQ ID NO: 451395 - RNA, 19 nt, Artificial Sequence
  Description of Artificial Sequence: Synthetic oligonucleotide
agcagcuaacauuuagacc

SEQ ID NO: 451396 - RNA, 19 nt, Artificial Sequence
  Description of Artificial Sequence: Synthetic oligonucleotide
cagauuacagcaaaagaug

SEQ ID NO: 451397 - RNA, 19 nt, Artificial Sequence
  Description of Artificial Sequence: Synthetic oligonucleotide
aaccaugaccccaugaggg

SEQ ID NO: 451398 - RNA, 19 nt, Artificial Sequence
  Description of Artificial Sequence: Synthetic oligonucleotide
uuugccuuggcagggaugg

SEQ ID NO: 451399 - RNA, 19 nt, Artificial Sequence
  Description of Artificial Sequence: Synthetic oligonucleotide
uaaccaugaccccaugagg

SEQ ID NO: 451400 - RNA, 19 nt, Artificial Sequence
  Description of Artificial Sequence: Synthetic oligonucleotide
auaauguccaggcuuauau

SEQ ID NO: 451401 - RNA, 19 nt, Artificial Sequence
  Description of Artificial Sequence: Synthetic oligonucleotide
gguuuagauaacuccaugg

SEQ ID NO: 451402 - RNA, 19 nt, Artificial Sequence
  Description of Artificial Sequence: Synthetic oligonucleotide
gucuguaaggauuuguggc

SEQ ID NO: 451403 - RNA, 19 nt, Artificial Sequence
  Description of Artificial Sequence: Synthetic oligonucleotide
cuaacauuuagacccuggg

SEQ ID NO: 451404 - RNA, 19 nt, Artificial Sequence
  Description of Artificial Sequence: Synthetic oligonucleotide
cuuaggaagauaaugucca

SEQ ID NO: 451405 - RNA, 19 nt, Artificial Sequence
  Description of Artificial Sequence: Synthetic oligonucleotide
acuaaggucggaauccucc

SEQ ID NO: 451406 - RNA, 19 nt, Artificial Sequence
  Description of Artificial Sequence: Synthetic oligonucleotide
gauaacuccaugguauuag

SEQ ID NO: 451407 - RNA, 19 nt, Artificial Sequence
  Description of Artificial Sequence: Synthetic oligonucleotide
ugacgcucagauuacagca

SEQ ID NO: 451408 - RNA, 19 nt, Artificial Sequence
  Description of Artificial Sequence: Synthetic oligonucleotide
uccuaaagggucucgagga

SEQ ID NO: 451409 - RNA, 19 nt, Artificial Sequence
  Description of Artificial Sequence: Synthetic oligonucleotide
agaaucuggggcucccucc

SEQ ID NO: 451410 - RNA, 19 nt, Artificial Sequence
  Description of Artificial Sequence: Synthetic oligonucleotide
gauuguucccagucaacag

SEQ ID NO: 451411 - RNA, 19 nt, Artificial Sequence
  Description of Artificial Sequence: Synthetic oligonucleotide
cuuauauuugggacagggc

SEQ ID NO: 451412 - RNA, 19 nt, Artificial Sequence
  Description of Artificial Sequence: Synthetic oligonucleotide
cucgcuguagagucgagcc

SEQ ID NO: 451413 - RNA, 19 nt, Artificial Sequence
  Description of Artificial Sequence: Synthetic oligonucleotide
uaagggugaaagucugggg

SEQ ID NO: 451414 - RNA, 19 nt, Artificial Sequence
  Description of Artificial Sequence: Synthetic oligonucleotide
uuacagcaaaagauguggc

SEQ ID NO: 451415 - RNA, 19 nt, Artificial Sequence
  Description of Artificial Sequence: Synthetic oligonucleotide
uuggcaacaggagaaacca

SEQ ID NO: 451416 - RNA, 19 nt, Artificial Sequence
  Description of Artificial Sequence: Synthetic oligonucleotide
auuguucccagucaacagu

SEQ ID NO: 451417 - RNA, 19 nt, Artificial Sequence
  Description of Artificial Sequence: Synthetic oligonucleotide
ggcacuaggacccucaaug

SEQ ID NO: 451418 - RNA, 19 nt, Artificial Sequence
  Description of Artificial Sequence: Synthetic oligonucleotide
augcccuagucucagcucg

SEQ ID NO: 451419 - RNA, 19 nt, Artificial Sequence
  Description of Artificial Sequence: Synthetic oligonucleotide
guaagggugaaagucuggg

SEQ ID NO: 451420 - RNA, 19 nt, Artificial Sequence
  Description of Artificial Sequence: Synthetic oligonucleotide
cuugcuuagacaaagguau

SEQ ID NO: 451421 - RNA, 19 nt, Artificial Sequence
  Description of Artificial Sequence: Synthetic oligonucleotide
uccggauuucugaacaaga

SEQ ID NO: 451422 - RNA, 19 nt, Artificial Sequence
  Description of Artificial Sequence: Synthetic oligonucleotide
gaacuagagcagcagggcc

SEQ ID NO: 451423 - RNA, 19 nt, Artificial Sequence
  Description of Artificial Sequence: Synthetic oligonucleotide
uccuugcuuagacaaaggu

SEQ ID NO: 451424 - RNA, 19 nt, Artificial Sequence
  Description of Artificial Sequence: Synthetic oligonucleotide
ugguuuagauaacuccaug

SEQ ID NO: 451425 - RNA, 19 nt, Artificial Sequence
  Description of Artificial Sequence: Synthetic oligonucleotide
accaugaccccaugagggc

SEQ ID NO: 451426 - RNA, 19 nt, Artificial Sequence
  Description of Artificial Sequence: Synthetic oligonucleotide
acauggguacgguugcugg

SEQ ID NO: 451427 - RNA, 19 nt, Artificial Sequence
  Description of Artificial Sequence: Synthetic oligonucleotide
uggacccagagaaucuggg

SEQ ID NO: 451428 - RNA, 19 nt, Artificial Sequence
  Description of Artificial Sequence: Synthetic oligonucleotide
uuaggaagauaauguccag

SEQ ID NO: 451429 - RNA, 19 nt, Artificial Sequence
  Description of Artificial Sequence: Synthetic oligonucleotide
agcauccuuguucagugag

SEQ ID NO: 451430 - RNA, 19 nt, Artificial Sequence
  Description of Artificial Sequence: Synthetic oligonucleotide
gacucuagaugucccaaug

SEQ ID NO: 451431 - RNA, 19 nt, Artificial Sequence
  Description of Artificial Sequence: Synthetic oligonucleotide
ucggacuuggcaacaggag

SEQ ID NO: 451432 - RNA, 19 nt, Artificial Sequence
  Description of Artificial Sequence: Synthetic oligonucleotide
gacguaggggcagaggagg

SEQ ID NO: 451433 - RNA, 19 nt, Artificial Sequence
  Description of Artificial Sequence: Synthetic oligonucleotide
uccaacgcuugccaggcgc

SEQ ID NO: 451434 - RNA, 19 nt, Artificial Sequence
  Description of Artificial Sequence: Synthetic oligonucleotide
aacaccacgccuucuucgu

SEQ ID NO: 451435 - RNA, 19 nt, Artificial Sequence
  Description of Artificial Sequence: Synthetic oligonucleotide
auccgcucgcuguagaguc

SEQ ID NO: 451436 - RNA, 19 nt, Artificial Sequence
  Description of Artificial Sequence: Synthetic oligonucleotide
gcuuauauuugggacaggg

SEQ ID NO: 451437 - RNA, 19 nt, Artificial Sequence
  Description of Artificial Sequence: Synthetic oligonucleotide
cauccgugagaacaggaag

SEQ ID NO: 451438 - RNA, 19 nt, Artificial Sequence
  Description of Artificial Sequence: Synthetic oligonucleotide
guagguguauucaugcccc

SEQ ID NO: 451439 - RNA, 19 nt, Artificial Sequence
  Description of Artificial Sequence: Synthetic oligonucleotide
uaaauccuaaagggucucg

SEQ ID NO: 451440 - RNA, 19 nt, Artificial Sequence
  Description of Artificial Sequence: Synthetic oligonucleotide
uguauucaugccccggcgu

SEQ ID NO: 451441 - RNA, 19 nt, Artificial Sequence
  Description of Artificial Sequence: Synthetic oligonucleotide
acagugaauccacagccgu

SEQ ID NO: 451442 - RNA, 19 nt, Artificial Sequence
  Description of Artificial Sequence: Synthetic oligonucleotide
aaauccuaaagggucucga

SEQ ID NO: 451443 - RNA, 19 nt, Artificial Sequence
  Description of Artificial Sequence: Synthetic oligonucleotide
acaagagcgguauuccagu

SEQ ID NO: 451444 - RNA, 19 nt, Artificial Sequence
  Description of Artificial Sequence: Synthetic oligonucleotide
uauggcaguuugaacuaga

SEQ ID NO: 451445 - RNA, 19 nt, Artificial Sequence
  Description of Artificial Sequence: Synthetic oligonucleotide
ugaggacucggacuuggca

SEQ ID NO: 451446 - RNA, 19 nt, Artificial Sequence
  Description of Artificial Sequence: Synthetic oligonucleotide
cagagggacagacuccugg

SEQ ID NO: 451447 - RNA, 19 nt, Artificial Sequence
  Description of Artificial Sequence: Synthetic oligonucleotide
ugagacacggccagccgug

SEQ ID NO: 451448 - RNA, 19 nt, Artificial Sequence
  Description of Artificial Sequence: Synthetic oligonucleotide
aacgcuugccaggcgcucc

SEQ ID NO: 451449 - RNA, 19 nt, Artificial Sequence
  Description of Artificial Sequence: Synthetic oligonucleotide
uccaggcuuauauuuggga

SEQ ID NO: 451450 - RNA, 19 nt, Artificial Sequence
  Description of Artificial Sequence: Synthetic oligonucleotide
acgaccuccgugugcagac

SEQ ID NO: 451451 - RNA, 19 nt, Artificial Sequence
  Description of Artificial Sequence: Synthetic oligonucleotide
aggagucucagugacgcuc

SEQ ID NO: 451452 - RNA, 19 nt, Artificial Sequence
  Description of Artificial Sequence: Synthetic oligonucleotide
augcugaccgcucggaaug

SEQ ID NO: 451453 - RNA, 19 nt, Artificial Sequence
  Description of Artificial Sequence: Synthetic oligonucleotide
uccgugagaacaggaagag

SEQ ID NO: 451454 - RNA, 19 nt, Artificial Sequence
  Description of Artificial Sequence: Synthetic oligonucleotide
agaacuugcuuugccuugg

SEQ ID NO: 451455 - RNA, 19 nt, Artificial Sequence
  Description of Artificial Sequence: Synthetic oligonucleotide
aaauaaccaugaccccaug

SEQ ID NO: 451456 - RNA, 19 nt, Artificial Sequence
  Description of Artificial Sequence: Synthetic oligonucleotide
gugcccgugacguaggggc

SEQ ID NO: 451457 - RNA, 19 nt, Artificial Sequence
  Description of Artificial Sequence: Synthetic oligonucleotide
ugcugaauccgcucgcugu

SEQ ID NO: 451458 - RNA, 19 nt, Artificial Sequence
  Description of Artificial Sequence: Synthetic oligonucleotide
aggcuuauauuugggacag

SEQ ID NO: 451459 - RNA, 19 nt, Artificial Sequence
  Description of Artificial Sequence: Synthetic oligonucleotide
auuuagacccugggcauuc

SEQ ID NO: 451460 - RNA, 19 nt, Artificial Sequence
  Description of Artificial Sequence: Synthetic oligonucleotide
uccuaccuggauacuaacu

SEQ ID NO: 451461 - RNA, 19 nt, Artificial Sequence
  Description of Artificial Sequence: Synthetic oligonucleotide
acagugcaggcuguuuucc

SEQ ID NO: 451462 - RNA, 19 nt, Artificial Sequence
  Description of Artificial Sequence: Synthetic oligonucleotide
guagagucgagccagcucu

SEQ ID NO: 451463 - RNA, 19 nt, Artificial Sequence
  Description of Artificial Sequence: Synthetic oligonucleotide
guguauucaugccccggcg

SEQ ID NO: 451464 - RNA, 19 nt, Artificial Sequence
  Description of Artificial Sequence: Synthetic oligonucleotide
gugacguaggggcagagga

SEQ ID NO: 451465 - RNA, 19 nt, Artificial Sequence
  Description of Artificial Sequence: Synthetic oligonucleotide
gugacgcucagauuacagc

SEQ ID NO: 451466 - RNA, 19 nt, Artificial Sequence
  Description of Artificial Sequence: Synthetic oligonucleotide
ugaccgcucggaauguggc

SEQ ID NO: 451467 - RNA, 19 nt, Artificial Sequence
  Description of Artificial Sequence: Synthetic oligonucleotide
cuaguagagggcugacagc

SEQ ID NO: 451468 - RNA, 19 nt, Artificial Sequence
  Description of Artificial Sequence: Synthetic oligonucleotide
uacaagcacauguccaaaa

SEQ ID NO: 451469 - RNA, 19 nt, Artificial Sequence
  Description of Artificial Sequence: Synthetic oligonucleotide
uccgggauuguucccaguc

SEQ ID NO: 451470 - RNA, 19 nt, Artificial Sequence
  Description of Artificial Sequence: Synthetic oligonucleotide
cugacggcgagccaggcuc

SEQ ID NO: 451471 - RNA, 19 nt, Artificial Sequence
  Description of Artificial Sequence: Synthetic oligonucleotide
ggagaaaccaaauggccuc

SEQ ID NO: 451472 - RNA, 19 nt, Artificial Sequence
  Description of Artificial Sequence: Synthetic oligonucleotide
uccugacucuagauguccc

SEQ ID NO: 451473 - RNA, 19 nt, Artificial Sequence
  Description of Artificial Sequence: Synthetic oligonucleotide
uacgguugcuggcaucuga

SEQ ID NO: 451474 - RNA, 19 nt, Artificial Sequence
  Description of Artificial Sequence: Synthetic oligonucleotide
cugaccgcucggaaugugg

SEQ ID NO: 451475 - RNA, 19 nt, Artificial Sequence
  Description of Artificial Sequence: Synthetic oligonucleotide
uagguguauucaugccccg

SEQ ID NO: 451476 - RNA, 19 nt, Artificial Sequence
  Description of Artificial Sequence: Synthetic oligonucleotide
cuuaaauccuaaagggucu

SEQ ID NO: 451477 - RNA, 19 nt, Artificial Sequence
  Description of Artificial Sequence: Synthetic oligonucleotide
ccuaccuggauacuaacug

SEQ ID NO: 451478 - RNA, 19 nt, Artificial Sequence
  Description of Artificial Sequence: Synthetic oligonucleotide
gaugucccaauggugggug

SEQ ID NO: 451479 - RNA, 19 nt, Artificial Sequence
  Description of Artificial Sequence: Synthetic oligonucleotide
aggucgggguugcuugugc

SEQ ID NO: 451480 - RNA, 19 nt, Artificial Sequence
  Description of Artificial Sequence: Synthetic oligonucleotide
uggacgaccuccgugugca

SEQ ID NO: 451481 - RNA, 19 nt, Artificial Sequence
  Description of Artificial Sequence: Synthetic oligonucleotide
cagccguuucucuucuugg

SEQ ID NO: 451482 - RNA, 19 nt, Artificial Sequence
  Description of Artificial Sequence: Synthetic oligonucleotide
accuuaaauccuaaagggu

SEQ ID NO: 451483 - RNA, 19 nt, Artificial Sequence
  Description of Artificial Sequence: Synthetic oligonucleotide
aggucccugacggcgagcc

SEQ ID NO: 451484 - RNA, 19 nt, Artificial Sequence
  Description of Artificial Sequence: Synthetic oligonucleotide
uugcuugugcacacuagua

SEQ ID NO: 451485 - RNA, 19 nt, Artificial Sequence
  Description of Artificial Sequence: Synthetic oligonucleotide
cuugaaggucccgagagca

SEQ ID NO: 451486 - RNA, 19 nt, Artificial Sequence
  Description of Artificial Sequence: Synthetic oligonucleotide
acucggacuuggcaacagg

SEQ ID NO: 451487 - RNA, 19 nt, Artificial Sequence
  Description of Artificial Sequence: Synthetic oligonucleotide
cauggguacgguugcuggc

SEQ ID NO: 451488 - RNA, 19 nt, Artificial Sequence
  Description of Artificial Sequence: Synthetic oligonucleotide
ucagaucggacaccuuaaa

SEQ ID NO: 451489 - RNA, 19 nt, Artificial Sequence
  Description of Artificial Sequence: Synthetic oligonucleotide
caguccagccaccuagccg

SEQ ID NO: 451490 - RNA, 19 nt, Artificial Sequence
  Description of Artificial Sequence: Synthetic oligonucleotide
cuaacugugguggcauagc

SEQ ID NO: 451491 - RNA, 19 nt, Artificial Sequence
  Description of Artificial Sequence: Synthetic oligonucleotide
ugaauccgcucgcuguaga

SEQ ID NO: 451492 - RNA, 19 nt, Artificial Sequence
  Description of Artificial Sequence: Synthetic oligonucleotide
uggcugauguaugacgcug

SEQ ID NO: 451493 - RNA, 19 nt, Artificial Sequence
  Description of Artificial Sequence: Synthetic oligonucleotide
auguaugacgcugccaggu

SEQ ID NO: 451494 - RNA, 19 nt, Artificial Sequence
  Description of Artificial Sequence: Synthetic oligonucleotide
uccgguccaguccagccac

SEQ ID NO: 451495 - RNA, 19 nt, Artificial Sequence
  Description of Artificial Sequence: Synthetic oligonucleotide
cuuuggcuggccguaggcg

SEQ ID NO: 451496 - RNA, 19 nt, Artificial Sequence
  Description of Artificial Sequence: Synthetic oligonucleotide
guaaggauuuguggcuggg

SEQ ID NO: 451497 - RNA, 19 nt, Artificial Sequence
  Description of Artificial Sequence: Synthetic oligonucleotide
gccagguaccuugagaggg

SEQ ID NO: 451498 - RNA, 19 nt, Artificial Sequence
  Description of Artificial Sequence: Synthetic oligonucleotide
ggagcuucggcccugaugu

SEQ ID NO: 451499 - RNA, 19 nt, Artificial Sequence
  Description of Artificial Sequence: Synthetic oligonucleotide
uccuccuccgggauuguuc

SEQ ID NO: 451500 - RNA, 19 nt, Artificial Sequence
  Description of Artificial Sequence: Synthetic oligonucleotide
uugccuggagcagaugucu

SEQ ID NO: 451501 - RNA, 19 nt, Artificial Sequence
  Description of Artificial Sequence: Synthetic oligonucleotide
accaaauggccucuugguu

SEQ ID NO: 451502 - RNA, 19 nt, Artificial Sequence
  Description of Artificial Sequence: Synthetic oligonucleotide
uugcuugacgcuucauguc

SEQ ID NO: 451503 - RNA, 19 nt, Artificial Sequence
  Description of Artificial Sequence: Synthetic oligonucleotide
ugaaggucccgagagcauc

SEQ ID NO: 451504 - RNA, 19 nt, Artificial Sequence
  Description of Artificial Sequence: Synthetic oligonucleotide
uccgcucgcuguagagucg

SEQ ID NO: 451505 - RNA, 19 nt, Artificial Sequence
  Description of Artificial Sequence: Synthetic oligonucleotide
gcacccgggaugcugaccg

SEQ ID NO: 451506 - RNA, 19 nt, Artificial Sequence
  Description of Artificial Sequence: Synthetic oligonucleotide
auccgugagaacaggaaga

SEQ ID NO: 451507 - RNA, 19 nt, Artificial Sequence
  Description of Artificial Sequence: Synthetic oligonucleotide
gaugcccuagucucagcuc

SEQ ID NO: 451508 - RNA, 19 nt, Artificial Sequence
  Description of Artificial Sequence: Synthetic oligonucleotide
caugccccggcguuuggcc

SEQ ID NO: 451509 - RNA, 19 nt, Artificial Sequence
  Description of Artificial Sequence: Synthetic oligonucleotide
ucgcuguagagucgagcca

SEQ ID NO: 451510 - RNA, 19 nt, Artificial Sequence
  Description of Artificial Sequence: Synthetic oligonucleotide
uccuccgggaauccuugga

SEQ ID NO: 451511 - RNA, 19 nt, Artificial Sequence
  Description of Artificial Sequence: Synthetic oligonucleotide
auggcaguuugaacuagag

SEQ ID NO: 451512 - RNA, 19 nt, Artificial Sequence
  Description of Artificial Sequence: Synthetic oligonucleotide
caucuccggaccugugucc

SEQ ID NO: 451513 - RNA, 19 nt, Artificial Sequence
  Description of Artificial Sequence: Synthetic oligonucleotide
cuguaaggauuuguggcug

SEQ ID NO: 451514 - RNA, 19 nt, Artificial Sequence
  Description of Artificial Sequence: Synthetic oligonucleotide
agcagcgguucagggaagc

SEQ ID NO: 451515 - RNA, 19 nt, Artificial Sequence
  Description of Artificial Sequence: Synthetic oligonucleotide
aggucggaauccuccagga

SEQ ID NO: 451516 - RNA, 19 nt, Artificial Sequence
  Description of Artificial Sequence: Synthetic oligonucleotide
gauggucagaucggacacc

SEQ ID NO: 451517 - RNA, 19 nt, Artificial Sequence
  Description of Artificial Sequence: Synthetic oligonucleotide
cucggacuuggcaacagga

SEQ ID NO: 451518 - RNA, 19 nt, Artificial Sequence
  Description of Artificial Sequence: Synthetic oligonucleotide
agccguuucucuucuuggu

SEQ ID NO: 451519 - RNA, 19 nt, Artificial Sequence
  Description of Artificial Sequence: Synthetic oligonucleotide
uggacuugggcgccauccu

SEQ ID NO: 451520 - RNA, 19 nt, Artificial Sequence
  Description of Artificial Sequence: Synthetic oligonucleotide
ugcucuugcuugacgcuuc

SEQ ID NO: 451521 - RNA, 19 nt, Artificial Sequence
  Description of Artificial Sequence: Synthetic oligonucleotide
gcuuagacaaagguauggc

SEQ ID NO: 451522 - RNA, 19 nt, Artificial Sequence
  Description of Artificial Sequence: Synthetic oligonucleotide
agguguauucaugccccgg

SEQ ID NO: 451523 - RNA, 19 nt, Artificial Sequence
  Description of Artificial Sequence: Synthetic oligonucleotide
ugacgucugaggacucgga

SEQ ID NO: 451524 - RNA, 19 nt, Artificial Sequence
  Description of Artificial Sequence: Synthetic oligonucleotide
gcuaacauuuagacccugg

SEQ ID NO: 451525 - RNA, 19 nt, Artificial Sequence
  Description of Artificial Sequence: Synthetic oligonucleotide
cagagguaaggcacuagga

SEQ ID NO: 451526 - RNA, 19 nt, Artificial Sequence
  Description of Artificial Sequence: Synthetic oligonucleotide
agcucucgcacccgggaug

SEQ ID NO: 451527 - RNA, 19 nt, Artificial Sequence
  Description of Artificial Sequence: Synthetic oligonucleotide
gagucgagccagcucucgc

SEQ ID NO: 451528 - RNA, 19 nt, Artificial Sequence
  Description of Artificial Sequence: Synthetic oligonucleotide
guauuaggccuugaagguc

SEQ ID NO: 451529 - RNA, 19 nt, Artificial Sequence
  Description of Artificial Sequence: Synthetic oligonucleotide
guugcuugugcacacuagu

SEQ ID NO: 451530 - RNA, 19 nt, Artificial Sequence
  Description of Artificial Sequence: Synthetic oligonucleotide
gguauuaggccuugaaggu

SEQ ID NO: 451531 - RNA, 19 nt, Artificial Sequence
  Description of Artificial Sequence: Synthetic oligonucleotide
agcugggaacaccacgccu

SEQ ID NO: 451532 - RNA, 19 nt, Artificial Sequence
  Description of Artificial Sequence: Synthetic oligonucleotide
uucugagggugcucgccca

SEQ ID NO: 451533 - RNA, 19 nt, Artificial Sequence
  Description of Artificial Sequence: Synthetic oligonucleotide
gguaccuugagagggcagc

SEQ ID NO: 451534 - RNA, 19 nt, Artificial Sequence
  Description of Artificial Sequence: Synthetic oligonucleotide
uccgggaauccuuggacuu

SEQ ID NO: 451535 - RNA, 19 nt, Artificial Sequence
  Description of Artificial Sequence: Synthetic oligonucleotide
gugacgucugaggacucgg

SEQ ID NO: 451536 - RNA, 19 nt, Artificial Sequence
  Description of Artificial Sequence: Synthetic oligonucleotide
cuuugccuuggcagggaug

SEQ ID NO: 451537 - RNA, 19 nt, Artificial Sequence
  Description of Artificial Sequence: Synthetic oligonucleotide
ucgggguugcuugugcaca

SEQ ID NO: 451538 - RNA, 19 nt, Artificial Sequence
  Description of Artificial Sequence: Synthetic oligonucleotide
cacgggacacagcagucug

SEQ ID NO: 451539 - RNA, 19 nt, Artificial Sequence
  Description of Artificial Sequence: Synthetic oligonucleotide
gacacgaggucggcgucgg

SEQ ID NO: 451540 - RNA, 19 nt, Artificial Sequence
  Description of Artificial Sequence: Synthetic oligonucleotide
agagucgagccagcucucg

SEQ ID NO: 451541 - RNA, 19 nt, Artificial Sequence
  Description of Artificial Sequence: Synthetic oligonucleotide
ugcacgggacacagcaguc

SEQ ID NO: 451542 - RNA, 19 nt, Artificial Sequence
  Description of Artificial Sequence: Synthetic oligonucleotide
agguagagggcugcacggg

SEQ ID NO: 451543 - RNA, 19 nt, Artificial Sequence
  Description of Artificial Sequence: Synthetic oligonucleotide
aaggcacuaggacccucaa

SEQ ID NO: 451544 - RNA, 19 nt, Artificial Sequence
  Description of Artificial Sequence: Synthetic oligonucleotide
ggauuguucccagucaaca

SEQ ID NO: 451545 - RNA, 19 nt, Artificial Sequence
  Description of Artificial Sequence: Synthetic oligonucleotide
uucaugccccggcguuugg

SEQ ID NO: 451546 - RNA, 19 nt, Artificial Sequence
  Description of Artificial Sequence: Synthetic oligonucleotide
ugagggugcucgcccaguc

SEQ ID NO: 451547 - RNA, 19 nt, Artificial Sequence
  Description of Artificial Sequence: Synthetic oligonucleotide
acacuaguagagggcugac

SEQ ID NO: 451548 - RNA, 19 nt, Artificial Sequence
  Description of Artificial Sequence: Synthetic oligonucleotide
acuagagcagcagggccca

SEQ ID NO: 451549 - RNA, 19 nt, Artificial Sequence
  Description of Artificial Sequence: Synthetic oligonucleotide
uggccguaggcgcccacca

SEQ ID NO: 451550 - RNA, 19 nt, Artificial Sequence
  Description of Artificial Sequence: Synthetic oligonucleotide
cuccuaccuggauacuaac

SEQ ID NO: 451551 - RNA, 19 nt, Artificial Sequence
  Description of Artificial Sequence: Synthetic oligonucleotide
acgcuugccaggcgcuccg

SEQ ID NO: 451552 - RNA, 19 nt, Artificial Sequence
  Description of Artificial Sequence: Synthetic oligonucleotide
ugcccuagucucagcucgc

SEQ ID NO: 451553 - RNA, 19 nt, Artificial Sequence
  Description of Artificial Sequence: Synthetic oligonucleotide
gcggcugggguugaggugg

SEQ ID NO: 451554 - RNA, 19 nt, Artificial Sequence
  Description of Artificial Sequence: Synthetic oligonucleotide
aaagggucucgaggagucu

SEQ ID NO: 451555 - RNA, 19 nt, Artificial Sequence
  Description of Artificial Sequence: Synthetic oligonucleotide
gaugaucuccuugcuuaga

SEQ ID NO: 451556 - RNA, 19 nt, Artificial Sequence
  Description of Artificial Sequence: Synthetic oligonucleotide
cacaagcagcauccgugag

SEQ ID NO: 451557 - RNA, 19 nt, Artificial Sequence
  Description of Artificial Sequence: Synthetic oligonucleotide
ggucagaucggacaccuua

SEQ ID NO: 451558 - RNA, 19 nt, Artificial Sequence
  Description of Artificial Sequence: Synthetic oligonucleotide
accccucgcagccgcgggc

SEQ ID NO: 451559 - RNA, 19 nt, Artificial Sequence
  Description of Artificial Sequence: Synthetic oligonucleotide
ucucgcacccgggaugcug

SEQ ID NO: 451560 - RNA, 19 nt, Artificial Sequence
  Description of Artificial Sequence: Synthetic oligonucleotide
gauaauguccaggcuuaua

SEQ ID NO: 451561 - RNA, 19 nt, Artificial Sequence
  Description of Artificial Sequence: Synthetic oligonucleotide
gcugauguaugacgcugcc

SEQ ID NO: 451562 - RNA, 19 nt, Artificial Sequence
  Description of Artificial Sequence: Synthetic oligonucleotide
aaggucgggguugcuugug

SEQ ID NO: 451563 - RNA, 19 nt, Artificial Sequence
  Description of Artificial Sequence: Synthetic oligonucleotide
cacacuaguagagggcuga

SEQ ID NO: 451564 - RNA, 19 nt, Artificial Sequence
  Description of Artificial Sequence: Synthetic oligonucleotide
agauaacuccaugguauua

SEQ ID NO: 451565 - RNA, 19 nt, Artificial Sequence
  Description of Artificial Sequence: Synthetic oligonucleotide
caauggugggugucaccug

SEQ ID NO: 451566 - RNA, 19 nt, Artificial Sequence
  Description of Artificial Sequence: Synthetic oligonucleotide
uagagucgagccagcucuc

SEQ ID NO: 451567 - RNA, 19 nt, Artificial Sequence
  Description of Artificial Sequence: Synthetic oligonucleotide
cccgagagcauccuuguuc

SEQ ID NO: 451568 - RNA, 19 nt, Artificial Sequence
  Description of Artificial Sequence: Synthetic oligonucleotide
uuuagacccugggcauuca

SEQ ID NO: 451569 - RNA, 19 nt, Artificial Sequence
  Description of Artificial Sequence: Synthetic oligonucleotide
ugcccgugacguaggggca

SEQ ID NO: 451570 - RNA, 19 nt, Artificial Sequence
  Description of Artificial Sequence: Synthetic oligonucleotide
cacuaaggucggaauccuc

SEQ ID NO: 451571 - RNA, 19 nt, Artificial Sequence
  Description of Artificial Sequence: Synthetic oligonucleotide
ugucccaaugguggguguc

SEQ ID NO: 451572 - RNA, 19 nt, Artificial Sequence
  Description of Artificial Sequence: Synthetic oligonucleotide
ggucaggcgccaauggcag

SEQ ID NO: 451573 - RNA, 19 nt, Artificial Sequence
  Description of Artificial Sequence: Synthetic oligonucleotide
aggcgccaauggcaguggg

SEQ ID NO: 451574 - RNA, 19 nt, Artificial Sequence
  Description of Artificial Sequence: Synthetic oligonucleotide
agacuccugggcacaguuc

SEQ ID NO: 451575 - RNA, 19 nt, Artificial Sequence
  Description of Artificial Sequence: Synthetic oligonucleotide
cugaauccgcucgcuguag

SEQ ID NO: 451576 - RNA, 19 nt, Artificial Sequence
  Description of Artificial Sequence: Synthetic oligonucleotide
gacgcucagauuacagcaa

SEQ ID NO: 451577 - RNA, 19 nt, Artificial Sequence
  Description of Artificial Sequence: Synthetic oligonucleotide
agcuaacauuuagacccug

SEQ ID NO: 451578 - RNA, 19 nt, Artificial Sequence
  Description of Artificial Sequence: Synthetic oligonucleotide
aucuccggaccuguguccu

SEQ ID NO: 451579 - RNA, 19 nt, Artificial Sequence
  Description of Artificial Sequence: Synthetic oligonucleotide
ccuaaagggucucgaggag

SEQ ID NO: 451580 - RNA, 19 nt, Artificial Sequence
  Description of Artificial Sequence: Synthetic oligonucleotide
cugcugaauccgcucgcug

SEQ ID NO: 451581 - RNA, 19 nt, Artificial Sequence
  Description of Artificial Sequence: Synthetic oligonucleotide
gaccgcucggaauguggca

SEQ ID NO: 451582 - RNA, 19 nt, Artificial Sequence
  Description of Artificial Sequence: Synthetic oligonucleotide
ucgcugcaucugcugaauc

SEQ ID NO: 451583 - RNA, 19 nt, Artificial Sequence
  Description of Artificial Sequence: Synthetic oligonucleotide
ggugacgucugaggacucg

SEQ ID NO: 451584 - RNA, 19 nt, Artificial Sequence
  Description of Artificial Sequence: Synthetic oligonucleotide
uacuaacugugguggcaua

SEQ ID NO: 451585 - RNA, 19 nt, Artificial Sequence
  Description of Artificial Sequence: Synthetic oligonucleotide
gcuuuggcuggccguaggc

SEQ ID NO: 451586 - RNA, 19 nt, Artificial Sequence
  Description of Artificial Sequence: Synthetic oligonucleotide
accgcucggaauguggcau

SEQ ID NO: 451587 - RNA, 19 nt, Artificial Sequence
  Description of Artificial Sequence: Synthetic oligonucleotide
cugggaucugaaggucggg

SEQ ID NO: 451588 - RNA, 19 nt, Artificial Sequence
  Description of Artificial Sequence: Synthetic oligonucleotide
uggguacgguugcuggcau

SEQ ID NO: 451589 - RNA, 19 nt, Artificial Sequence
  Description of Artificial Sequence: Synthetic oligonucleotide
gaagccgggugguucucaa

SEQ ID NO: 451590 - RNA, 19 nt, Artificial Sequence
  Description of Artificial Sequence: Synthetic oligonucleotide
gucagaucggacaccuuaa

SEQ ID NO: 451591 - RNA, 19 nt, Artificial Sequence
  Description of Artificial Sequence: Synthetic oligonucleotide
ggacuugggcgccauccug

SEQ ID NO: 451592 - RNA, 19 nt, Artificial Sequence
  Description of Artificial Sequence: Synthetic oligonucleotide
ucuccggaccuguguccug

SEQ ID NO: 451593 - RNA, 19 nt, Artificial Sequence
  Description of Artificial Sequence: Synthetic oligonucleotide
aaggucccgagagcauccu

SEQ ID NO: 451594 - RNA, 19 nt, Artificial Sequence
  Description of Artificial Sequence: Synthetic oligonucleotide
aguuccuccgggaauccuu

SEQ ID NO: 451595 - RNA, 19 nt, Artificial Sequence
  Description of Artificial Sequence: Synthetic oligonucleotide
gggccggugugucugugag

SEQ ID NO: 451596 - RNA, 19 nt, Artificial Sequence
  Description of Artificial Sequence: Synthetic oligonucleotide
accuagccgccgcuguacu

SEQ ID NO: 451597 - RNA, 19 nt, Artificial Sequence
  Description of Artificial Sequence: Synthetic oligonucleotide
ggcugauguaugacgcugc

SEQ ID NO: 451598 - RNA, 19 nt, Artificial Sequence
  Description of Artificial Sequence: Synthetic oligonucleotide
gacgaccuccgugugcaga

SEQ ID NO: 451599 - RNA, 19 nt, Artificial Sequence
  Description of Artificial Sequence: Synthetic oligonucleotide
ccgagagcauccuuguuca

SEQ ID NO: 451600 - RNA, 19 nt, Artificial Sequence
  Description of Artificial Sequence: Synthetic oligonucleotide
gcauugguggaugcccuag

SEQ ID NO: 451601 - RNA, 19 nt, Artificial Sequence
  Description of Artificial Sequence: Synthetic oligonucleotide
agcucacauacaagcacau

SEQ ID NO: 451602 - RNA, 19 nt, Artificial Sequence
  Description of Artificial Sequence: Synthetic oligonucleotide
accuccuaccuggauacua

SEQ ID NO: 451603 - RNA, 19 nt, Artificial Sequence
  Description of Artificial Sequence: Synthetic oligonucleotide
cuaaagggucucgaggagu

SEQ ID NO: 451604 - RNA, 19 nt, Artificial Sequence
  Description of Artificial Sequence: Synthetic oligonucleotide
cugacucuagaugucccaa

SEQ ID NO: 451605 - RNA, 19 nt, Artificial Sequence
  Description of Artificial Sequence: Synthetic oligonucleotide
caggacacgaggucggcgu

SEQ ID NO: 451606 - RNA, 19 nt, Artificial Sequence
  Description of Artificial Sequence: Synthetic oligonucleotide
aggaagguagagggcugca

SEQ ID NO: 451607 - RNA, 19 nt, Artificial Sequence
  Description of Artificial Sequence: Synthetic oligonucleotide
guauucaugccccggcguu

SEQ ID NO: 451608 - RNA, 19 nt, Artificial Sequence
  Description of Artificial Sequence: Synthetic oligonucleotide
ggacacgaggucggcgucg

SEQ ID NO: 451609 - RNA, 19 nt, Artificial Sequence
  Description of Artificial Sequence: Synthetic oligonucleotide
ccgcuguacuuccugcagg

SEQ ID NO: 451610 - RNA, 19 nt, Artificial Sequence
  Description of Artificial Sequence: Synthetic oligonucleotide
ggcgccaauggcagugggg

SEQ ID NO: 451611 - RNA, 19 nt, Artificial Sequence
  Description of Artificial Sequence: Synthetic oligonucleotide
cugauguaugacgcugcca

SEQ ID NO: 451612 - RNA, 19 nt, Artificial Sequence
  Description of Artificial Sequence: Synthetic oligonucleotide
caccuagccgccgcuguac

SEQ ID NO: 451613 - RNA, 19 nt, Artificial Sequence
  Description of Artificial Sequence: Synthetic oligonucleotide
cuggccguaggcgcccacc

SEQ ID NO: 451614 - RNA, 19 nt, Artificial Sequence
  Description of Artificial Sequence: Synthetic oligonucleotide
ccaucuccggaccuguguc

SEQ ID NO: 451615 - RNA, 19 nt, Artificial Sequence
  Description of Artificial Sequence: Synthetic oligonucleotide
caugcucuugcuugacgcu

SEQ ID NO: 451616 - RNA, 19 nt, Artificial Sequence
  Description of Artificial Sequence: Synthetic oligonucleotide
gcgcuggagacagugaauc

SEQ ID NO: 451617 - RNA, 19 nt, Artificial Sequence
  Description of Artificial Sequence: Synthetic oligonucleotide
gucccaaugguggguguca

SEQ ID NO: 451618 - RNA, 19 nt, Artificial Sequence
  Description of Artificial Sequence: Synthetic oligonucleotide
cuccuccgggauuguuccc

SEQ ID NO: 451619 - RNA, 19 nt, Artificial Sequence
  Description of Artificial Sequence: Synthetic oligonucleotide
cuccaacgcuugccaggcg

SEQ ID NO: 451620 - RNA, 19 nt, Artificial Sequence
  Description of Artificial Sequence: Synthetic oligonucleotide
caggcgccaauggcagugg

SEQ ID NO: 451621 - RNA, 19 nt, Artificial Sequence
  Description of Artificial Sequence: Synthetic oligonucleotide
ugcugaccgcucggaaugu

SEQ ID NO: 451622 - RNA, 19 nt, Artificial Sequence
  Description of Artificial Sequence: Synthetic oligonucleotide
cacuaguagagggcugaca

SEQ ID NO: 451623 - RNA, 19 nt, Artificial Sequence
  Description of Artificial Sequence: Synthetic oligonucleotide
cuccgggaauccuuggacu

SEQ ID NO: 451624 - RNA, 19 nt, Artificial Sequence
  Description of Artificial Sequence: Synthetic oligonucleotide
acacgaggucggcgucggg

SEQ ID NO: 451625 - RNA, 19 nt, Artificial Sequence
  Description of Artificial Sequence: Synthetic oligonucleotide
gggaaggcccacaggcucc

SEQ ID NO: 451626 - RNA, 19 nt, Artificial Sequence
  Description of Artificial Sequence: Synthetic oligonucleotide
cagaucggacaccuuaaau

SEQ ID NO: 451627 - RNA, 19 nt, Artificial Sequence
  Description of Artificial Sequence: Synthetic oligonucleotide
gguacgguugcuggcaucu

SEQ ID NO: 451628 - RNA, 19 nt, Artificial Sequence
  Description of Artificial Sequence: Synthetic oligonucleotide
guacuuccugcaggcgggc

SEQ ID NO: 451629 - RNA, 19 nt, Artificial Sequence
  Description of Artificial Sequence: Synthetic oligonucleotide
ggugaaaguucuggaagcu

SEQ ID NO: 451630 - RNA, 19 nt, Artificial Sequence
  Description of Artificial Sequence: Synthetic oligonucleotide
uccggaccuguguccugac

SEQ ID NO: 451631 - RNA, 19 nt, Artificial Sequence
  Description of Artificial Sequence: Synthetic oligonucleotide
gcgcucaccccucgcagcc

SEQ ID NO: 451632 - RNA, 19 nt, Artificial Sequence
  Description of Artificial Sequence: Synthetic oligonucleotide
guaaggcacuaggacccuc

SEQ ID NO: 451633 - RNA, 19 nt, Artificial Sequence
  Description of Artificial Sequence: Synthetic oligonucleotide
ggugcucgcccaguccucc

SEQ ID NO: 451634 - RNA, 19 nt, Artificial Sequence
  Description of Artificial Sequence: Synthetic oligonucleotide
gcucucgcacccgggaugc

SEQ ID NO: 451635 - RNA, 19 nt, Artificial Sequence
  Description of Artificial Sequence: Synthetic oligonucleotide
agccggaccugggcuuugg

SEQ ID NO: 451636 - RNA, 19 nt, Artificial Sequence
  Description of Artificial Sequence: Synthetic oligonucleotide
ggucgggguugcuugugca

SEQ ID NO: 451637 - RNA, 19 nt, Artificial Sequence
  Description of Artificial Sequence: Synthetic oligonucleotide
ggacaccuuaaauccuaaa

SEQ ID NO: 451638 - RNA, 19 nt, Artificial Sequence
  Description of Artificial Sequence: Synthetic oligonucleotide
gcugaauccgcucgcugua

SEQ ID NO: 451639 - RNA, 19 nt, Artificial Sequence
  Description of Artificial Sequence: Synthetic oligonucleotide
ccaaauggccucuugguuu

SEQ ID NO: 451640 - RNA, 19 nt, Artificial Sequence
  Description of Artificial Sequence: Synthetic oligonucleotide
acguaggggcagaggagga

SEQ ID NO: 451641 - RNA, 19 nt, Artificial Sequence
  Description of Artificial Sequence: Synthetic oligonucleotide
caggcgcucaccccucgca

SEQ ID NO: 451642 - RNA, 19 nt, Artificial Sequence
  Description of Artificial Sequence: Synthetic oligonucleotide
ggcuuauauuugggacagg

SEQ ID NO: 451643 - RNA, 19 nt, Artificial Sequence
  Description of Artificial Sequence: Synthetic oligonucleotide
uggucagaucggacaccuu

SEQ ID NO: 451644 - RNA, 19 nt, Artificial Sequence
  Description of Artificial Sequence: Synthetic oligonucleotide
ggcgcuccggauuucugaa

SEQ ID NO: 451645 - RNA, 19 nt, Artificial Sequence
  Description of Artificial Sequence: Synthetic oligonucleotide
ccgggaugcugaccgcucg

SEQ ID NO: 451646 - RNA, 19 nt, Artificial Sequence
  Description of Artificial Sequence: Synthetic oligonucleotide
uccuuggacuugggcgcca

SEQ ID NO: 451647 - RNA, 19 nt, Artificial Sequence
  Description of Artificial Sequence: Synthetic oligonucleotide
cacccgggaugcugaccgc

SEQ ID NO: 451648 - RNA, 19 nt, Artificial Sequence
  Description of Artificial Sequence: Synthetic oligonucleotide
gcauccgugagaacaggaa

SEQ ID NO: 451649 - RNA, 19 nt, Artificial Sequence
  Description of Artificial Sequence: Synthetic oligonucleotide
cagcuaacauuuagacccu

SEQ ID NO: 451650 - RNA, 19 nt, Artificial Sequence
  Description of Artificial Sequence: Synthetic oligonucleotide
uucggcccugaugucugua

SEQ ID NO: 451651 - RNA, 19 nt, Artificial Sequence
  Description of Artificial Sequence: Synthetic oligonucleotide
cggacuuggcaacaggaga

SEQ ID NO: 451652 - RNA, 19 nt, Artificial Sequence
  Description of Artificial Sequence: Synthetic oligonucleotide
ccuccuaccuggauacuaa

SEQ ID NO: 451653 - RNA, 19 nt, Artificial Sequence
  Description of Artificial Sequence: Synthetic oligonucleotide
cauugguggaugcccuagu

SEQ ID NO: 451654 - RNA, 19 nt, Artificial Sequence
  Description of Artificial Sequence: Synthetic oligonucleotide
aggucccgagagcauccuu

SEQ ID NO: 451655 - RNA, 19 nt, Artificial Sequence
  Description of Artificial Sequence: Synthetic oligonucleotide
caacgcuugccaggcgcuc

SEQ ID NO: 451656 - RNA, 19 nt, Artificial Sequence
  Description of Artificial Sequence: Synthetic oligonucleotide
agccaccuagccgccgcug

SEQ ID NO: 451657 - RNA, 19 nt, Artificial Sequence
  Description of Artificial Sequence: Synthetic oligonucleotide
gacggcgagccaggcucug

SEQ ID NO: 451658 - RNA, 19 nt, Artificial Sequence
  Description of Artificial Sequence: Synthetic oligonucleotide
gcggcaugcucuugcuuga

SEQ ID NO: 451659 - RNA, 19 nt, Artificial Sequence
  Description of Artificial Sequence: Synthetic oligonucleotide
uggaagccgggugguucuc

SEQ ID NO: 451660 - RNA, 19 nt, Artificial Sequence
  Description of Artificial Sequence: Synthetic oligonucleotide
ccuccgggauuguucccag

SEQ ID NO: 451661 - RNA, 19 nt, Artificial Sequence
  Description of Artificial Sequence: Synthetic oligonucleotide
gcagcgguucagggaagcc

SEQ ID NO: 451662 - RNA, 19 nt, Artificial Sequence
  Description of Artificial Sequence: Synthetic oligonucleotide
gcgaguggagagggagggg

SEQ ID NO: 451663 - RNA, 19 nt, Artificial Sequence
  Description of Artificial Sequence: Synthetic oligonucleotide
ccgggugguucucaaagaa

SEQ ID NO: 451664 - RNA, 19 nt, Artificial Sequence
  Description of Artificial Sequence: Synthetic oligonucleotide
gcuccggauuucugaacaa

SEQ ID NO: 451665 - RNA, 19 nt, Artificial Sequence
  Description of Artificial Sequence: Synthetic oligonucleotide
gcgccaauggcaguggggu

SEQ ID NO: 451666 - RNA, 19 nt, Artificial Sequence
  Description of Artificial Sequence: Synthetic oligonucleotide
caagagcgguauuccaguu

SEQ ID NO: 451667 - RNA, 19 nt, Artificial Sequence
  Description of Artificial Sequence: Synthetic oligonucleotide
cgugacguaggggcagagg

SEQ ID NO: 451668 - RNA, 19 nt, Artificial Sequence
  Description of Artificial Sequence: Synthetic oligonucleotide
ccgggauuguucccaguca

SEQ ID NO: 451669 - RNA, 19 nt, Artificial Sequence
  Description of Artificial Sequence: Synthetic oligonucleotide
ccgggaauccuuggacuug

SEQ ID NO: 451670 - RNA, 19 nt, Artificial Sequence
  Description of Artificial Sequence: Synthetic oligonucleotide
gcccgugacguaggggcag

SEQ ID NO: 451671 - RNA, 19 nt, Artificial Sequence
  Description of Artificial Sequence: Synthetic oligonucleotide
gggaugcugaccgcucgga

SEQ ID NO: 451672 - RNA, 19 nt, Artificial Sequence
  Description of Artificial Sequence: Synthetic oligonucleotide
ggguacgguugcuggcauc

SEQ ID NO: 451673 - RNA, 19 nt, Artificial Sequence
  Description of Artificial Sequence: Synthetic oligonucleotide
gcgcuccggauuucugaac

SEQ ID NO: 451674 - RNA, 19 nt, Artificial Sequence
  Description of Artificial Sequence: Synthetic oligonucleotide
cgggaugcugaccgcucgg

SEQ ID NO: 451675 - RNA, 19 nt, Artificial Sequence
  Description of Artificial Sequence: Synthetic oligonucleotide
ggacgaccuccgugugcag

SEQ ID NO: 451676 - RNA, 19 nt, Artificial Sequence
  Description of Artificial Sequence: Synthetic oligonucleotide
gcugaccgcucggaaugug

SEQ ID NO: 451677 - RNA, 19 nt, Artificial Sequence
  Description of Artificial Sequence: Synthetic oligonucleotide
caucuccgccaggucccug

SEQ ID NO: 451678 - RNA, 19 nt, Artificial Sequence
  Description of Artificial Sequence: Synthetic oligonucleotide
ggaagccgggugguucuca

SEQ ID NO: 451679 - RNA, 19 nt, Artificial Sequence
  Description of Artificial Sequence: Synthetic oligonucleotide
gccggaccugggcuuuggc

SEQ ID NO: 451680 - RNA, 19 nt, Artificial Sequence
  Description of Artificial Sequence: Synthetic oligonucleotide
ggggccggugugucuguga

SEQ ID NO: 451681 - RNA, 19 nt, Artificial Sequence
  Description of Artificial Sequence: Synthetic oligonucleotide
acgcugccagguaccuuga

SEQ ID NO: 451682 - RNA, 19 nt, Artificial Sequence
  Description of Artificial Sequence: Synthetic oligonucleotide
cccgggaugcugaccgcuc

SEQ ID NO: 451683 - RNA, 19 nt, Artificial Sequence
  Description of Artificial Sequence: Synthetic oligonucleotide
ccucuugguuuagauaacu

SEQ ID NO: 451684 - RNA, 19 nt, Artificial Sequence
  Description of Artificial Sequence: Synthetic oligonucleotide
ggucggaauccuccaggau

SEQ ID NO: 451685 - RNA, 19 nt, Artificial Sequence
  Description of Artificial Sequence: Synthetic oligonucleotide
gagcgguauuccaguuccu

SEQ ID NO: 451686 - RNA, 19 nt, Artificial Sequence
  Description of Artificial Sequence: Synthetic oligonucleotide
gguaaggcacuaggacccu

SEQ ID NO: 451687 - RNA, 19 nt, Artificial Sequence
  Description of Artificial Sequence: Synthetic oligonucleotide
ggucccugacggcgagcca

SEQ ID NO: 451688 - RNA, 19 nt, Artificial Sequence
  Description of Artificial Sequence: Synthetic oligonucleotide
gcuuugccuuggcagggau

SEQ ID NO: 451689 - RNA, 19 nt, Artificial Sequence
  Description of Artificial Sequence: Synthetic oligonucleotide
gcacgggacacagcagucu

SEQ ID NO: 451690 - RNA, 19 nt, Artificial Sequence
  Description of Artificial Sequence: Synthetic oligonucleotide
cuucggcccugaugucugu

SEQ ID NO: 451691 - RNA, 19 nt, Artificial Sequence
  Description of Artificial Sequence: Synthetic oligonucleotide
ccaacgcuugccaggcgcu

SEQ ID NO: 451692 - RNA, 19 nt, Artificial Sequence
  Description of Artificial Sequence: Synthetic oligonucleotide
ccuccacuaaggucggaau

SEQ ID NO: 451693 - RNA, 19 nt, Artificial Sequence
  Description of Artificial Sequence: Synthetic oligonucleotide
ccggaccugggcuuuggcu

SEQ ID NO: 451694 - RNA, 19 nt, Artificial Sequence
  Description of Artificial Sequence: Synthetic oligonucleotide
ccgugacguaggggcagag

SEQ ID NO: 451695 - RNA, 19 nt, Artificial Sequence
  Description of Artificial Sequence: Synthetic oligonucleotide
ggacauggguacgguugcu

SEQ ID NO: 451696 - RNA, 19 nt, Artificial Sequence
  Description of Artificial Sequence: Synthetic oligonucleotide
ccacuaaggucggaauccu

SEQ ID NO: 451697 - RNA, 19 nt, Artificial Sequence
  Description of Artificial Sequence: Synthetic oligonucleotide
gcgccauccugggucugca

SEQ ID NO: 451698 - RNA, 19 nt, Artificial Sequence
  Description of Artificial Sequence: Synthetic oligonucleotide
ccacgccuucuucgucuuc

SEQ ID NO: 451699 - RNA, 19 nt, Artificial Sequence
  Description of Artificial Sequence: Synthetic oligonucleotide
ccugacggcgagccaggcu

SEQ ID NO: 451700 - RNA, 19 nt, Artificial Sequence
  Description of Artificial Sequence: Synthetic oligonucleotide
cccgugacguaggggcaga

SEQ ID NO: 451701 - RNA, 19 nt, Artificial Sequence
  Description of Artificial Sequence: Synthetic oligonucleotide
ggauggaagccgggugguu

SEQ ID NO: 451702 - RNA, 19 nt, Artificial Sequence
  Description of Artificial Sequence: Synthetic oligonucleotide
caccuccuaccuggauacu

SEQ ID NO: 451703 - RNA, 19 nt, Artificial Sequence
  Description of Artificial Sequence: Synthetic oligonucleotide
gggcggcaugcucuugcuu

SEQ ID NO: 451704 - RNA, 19 nt, Artificial Sequence
  Description of Artificial Sequence: Synthetic oligonucleotide
cacggccagccgugggguu

SEQ ID NO: 451705 - RNA, 19 nt, Artificial Sequence
  Description of Artificial Sequence: Synthetic oligonucleotide
ccuagccgccgcuguacuu

SEQ ID NO: 451706 - RNA, 19 nt, Artificial Sequence
  Description of Artificial Sequence: Synthetic oligonucleotide
ccggaccuguguccugacu

SEQ ID NO: 451707 - RNA, 19 nt, Artificial Sequence
  Description of Artificial Sequence: Synthetic oligonucleotide
cucucgcacccgggaugcu

SEQ ID NO: 451708 - RNA, 19 nt, Artificial Sequence
  Description of Artificial Sequence: Synthetic oligonucleotide
gcggggcucuggacccaga

SEQ ID NO: 451709 - RNA, 19 nt, Artificial Sequence
  Description of Artificial Sequence: Synthetic oligonucleotide
ccgcucggaauguggcauu

SEQ ID NO: 451710 - RNA, 19 nt, Artificial Sequence
  Description of Artificial Sequence: Synthetic oligonucleotide
ggggagcuucggcccugau

SEQ ID NO: 451711 - RNA, 19 nt, Artificial Sequence
  Description of Artificial Sequence: Synthetic oligonucleotide
cgcccaccaccuccuaccu

SEQ ID NO: 451712 - RNA, 19 nt, Artificial Sequence
  Description of Artificial Sequence: Synthetic oligonucleotide
ccccggcguuuggccacaa

SEQ ID NO: 451713 - RNA, 19 nt, Artificial Sequence
  Description of Artificial Sequence: Synthetic oligonucleotide
agaagugucuaauugagcc

SEQ ID NO: 451714 - RNA, 19 nt, Artificial Sequence
  Description of Artificial Sequence: Synthetic oligonucleotide
uauucuaucauuuugcucu

SEQ ID NO: 451715 - RNA, 19 nt, Artificial Sequence
  Description of Artificial Sequence: Synthetic oligonucleotide
ugugauuuaaccaaacgag

SEQ ID NO: 451716 - RNA, 19 nt, Artificial Sequence
  Description of Artificial Sequence: Synthetic oligonucleotide
agauuaaugaaaccugucc

SEQ ID NO: 451717 - RNA, 19 nt, Artificial Sequence
  Description of Artificial Sequence: Synthetic oligonucleotide
aauagcauugugcagccgg

SEQ ID NO: 451718 - RNA, 19 nt, Artificial Sequence
  Description of Artificial Sequence: Synthetic oligonucleotide
ugcacuaucuuucauaacc

SEQ ID NO: 451719 - RNA, 19 nt, Artificial Sequence
  Description of Artificial Sequence: Synthetic oligonucleotide
guaacucucauccuuaugg

SEQ ID NO: 451720 - RNA, 19 nt, Artificial Sequence
  Description of Artificial Sequence: Synthetic oligonucleotide
aguaauuacuugugcaucc

SEQ ID NO: 451721 - RNA, 19 nt, Artificial Sequence
  Description of Artificial Sequence: Synthetic oligonucleotide
uuaucauacagccauugag

SEQ ID NO: 451722 - RNA, 19 nt, Artificial Sequence
  Description of Artificial Sequence: Synthetic oligonucleotide
uauccuuaaaacaggacag

SEQ ID NO: 451723 - RNA, 19 nt, Artificial Sequence
  Description of Artificial Sequence: Synthetic oligonucleotide
caaaggguaaacaacacgc

SEQ ID NO: 451724 - RNA, 19 nt, Artificial Sequence
  Description of Artificial Sequence: Synthetic oligonucleotide
uauaccauuuuauuuagca

SEQ ID NO: 451725 - RNA, 19 nt, Artificial Sequence
  Description of Artificial Sequence: Synthetic oligonucleotide
uuuaucuuggcuacuauac

SEQ ID NO: 451726 - RNA, 19 nt, Artificial Sequence
  Description of Artificial Sequence: Synthetic oligonucleotide
gauuuaaccaaacgagugg

SEQ ID NO: 451727 - RNA, 19 nt, Artificial Sequence
  Description of Artificial Sequence: Synthetic oligonucleotide
uaucauuuugcucucguag

SEQ ID NO: 451728 - RNA, 19 nt, Artificial Sequence
  Description of Artificial Sequence: Synthetic oligonucleotide
aagauuuccccacugaaca

SEQ ID NO: 451729 - RNA, 19 nt, Artificial Sequence
  Description of Artificial Sequence: Synthetic oligonucleotide
acuaauaccagaauagaac

SEQ ID NO: 451730 - RNA, 19 nt, Artificial Sequence
  Description of Artificial Sequence: Synthetic oligonucleotide
auauccuuaaaacaggaca

SEQ ID NO: 451731 - RNA, 19 nt, Artificial Sequence
  Description of Artificial Sequence: Synthetic oligonucleotide
ugauuuaaccaaacgagug

SEQ ID NO: 451732 - RNA, 19 nt, Artificial Sequence
  Description of Artificial Sequence: Synthetic oligonucleotide
aaaauggccauuaguaaac

SEQ ID NO: 451733 - RNA, 19 nt, Artificial Sequence
  Description of Artificial Sequence: Synthetic oligonucleotide
ugagaagugucuaauugag

SEQ ID NO: 451734 - RNA, 19 nt, Artificial Sequence
  Description of Artificial Sequence: Synthetic oligonucleotide
aauuacuugugcauccgcc

SEQ ID NO: 451735 - RNA, 19 nt, Artificial Sequence
  Description of Artificial Sequence: Synthetic oligonucleotide
uuaguaaacagcugcagac

SEQ ID NO: 451736 - RNA, 19 nt, Artificial Sequence
  Description of Artificial Sequence: Synthetic oligonucleotide
cacacaauuaaacaaccgg

SEQ ID NO: 451737 - RNA, 19 nt, Artificial Sequence
  Description of Artificial Sequence: Synthetic oligonucleotide
auuuaaccaaacgaguggc

SEQ ID NO: 451738 - RNA, 19 nt, Artificial Sequence
  Description of Artificial Sequence: Synthetic oligonucleotide
aaugcaauagccaugcaga

SEQ ID NO: 451739 - RNA, 19 nt, Artificial Sequence
  Description of Artificial Sequence: Synthetic oligonucleotide
ucguagauaguccucaccc

SEQ ID NO: 451740 - RNA, 19 nt, Artificial Sequence
  Description of Artificial Sequence: Synthetic oligonucleotide
uuuaugagaugucaacagc

SEQ ID NO: 451741 - RNA, 19 nt, Artificial Sequence
  Description of Artificial Sequence: Synthetic oligonucleotide
aucaaugcaauagccaugc

SEQ ID NO: 451742 - RNA, 19 nt, Artificial Sequence
  Description of Artificial Sequence: Synthetic oligonucleotide
gcaauagccaugcagaugg

SEQ ID NO: 451743 - RNA, 19 nt, Artificial Sequence
  Description of Artificial Sequence: Synthetic oligonucleotide
ucuuuaguaacaagggcca

SEQ ID NO: 451744 - RNA, 19 nt, Artificial Sequence
  Description of Artificial Sequence: Synthetic oligonucleotide
aguguccgaauguaggugc

SEQ ID NO: 451745 - RNA, 19 nt, Artificial Sequence
  Description of Artificial Sequence: Synthetic oligonucleotide
ucaaguacaucaugcauug

SEQ ID NO: 451746 - RNA, 19 nt, Artificial Sequence
  Description of Artificial Sequence: Synthetic oligonucleotide
aguaacaagggccacugag

SEQ ID NO: 451747 - RNA, 19 nt, Artificial Sequence
  Description of Artificial Sequence: Synthetic oligonucleotide
uuugccugcacucuguugu

SEQ ID NO: 451748 - RNA, 19 nt, Artificial Sequence
  Description of Artificial Sequence: Synthetic oligonucleotide
aagugucuaauugagccac

SEQ ID NO: 451749 - RNA, 19 nt, Artificial Sequence
  Description of Artificial Sequence: Synthetic oligonucleotide
uaaacaaccggucacuuua

SEQ ID NO: 451750 - RNA, 19 nt, Artificial Sequence
  Description of Artificial Sequence: Synthetic oligonucleotide
ucuagugugccacuguggc

SEQ ID NO: 451751 - RNA, 19 nt, Artificial Sequence
  Description of Artificial Sequence: Synthetic oligonucleotide
uguccuuacauucagcuua

SEQ ID NO: 451752 - RNA, 19 nt, Artificial Sequence
  Description of Artificial Sequence: Synthetic oligonucleotide
uuccuaaucuucuuucagg

SEQ ID NO: 451753 - RNA, 19 nt, Artificial Sequence
  Description of Artificial Sequence: Synthetic oligonucleotide
aaaggguaaacaacacgcc

SEQ ID NO: 451754 - RNA, 19 nt, Artificial Sequence
  Description of Artificial Sequence: Synthetic oligonucleotide
ucucucauauccuuaaaac

SEQ ID NO: 451755 - RNA, 19 nt, Artificial Sequence
  Description of Artificial Sequence: Synthetic oligonucleotide
uuuaaucacagaagguucu

SEQ ID NO: 451756 - RNA, 19 nt, Artificial Sequence
  Description of Artificial Sequence: Synthetic oligonucleotide
acugagaagugucuaauug

SEQ ID NO: 451757 - RNA, 19 nt, Artificial Sequence
  Description of Artificial Sequence: Synthetic oligonucleotide
ggaagcaugaucuuggccc

SEQ ID NO: 451758 - RNA, 19 nt, Artificial Sequence
  Description of Artificial Sequence: Synthetic oligonucleotide
uaucuuggcuacuauacca

SEQ ID NO: 451759 - RNA, 19 nt, Artificial Sequence
  Description of Artificial Sequence: Synthetic oligonucleotide
aaccggucacuuuaggauc

SEQ ID NO: 451760 - RNA, 19 nt, Artificial Sequence
  Description of Artificial Sequence: Synthetic oligonucleotide
acccaaaagauuccuaauc

SEQ ID NO: 451761 - RNA, 19 nt, Artificial Sequence
  Description of Artificial Sequence: Synthetic oligonucleotide
aggauaagugucucucucc

SEQ ID NO: 451762 - RNA, 19 nt, Artificial Sequence
  Description of Artificial Sequence: Synthetic oligonucleotide
acguuuaugagaugucaac

SEQ ID NO: 451763 - RNA, 19 nt, Artificial Sequence
  Description of Artificial Sequence: Synthetic oligonucleotide
ucuuaugcuucuuugggac

SEQ ID NO: 451764 - RNA, 19 nt, Artificial Sequence
  Description of Artificial Sequence: Synthetic oligonucleotide
ucuauggcauuaaaauggc

SEQ ID NO: 451765 - RNA, 19 nt, Artificial Sequence
  Description of Artificial Sequence: Synthetic oligonucleotide
uaucuuucauaaccagacg

SEQ ID NO: 451766 - RNA, 19 nt, Artificial Sequence
  Description of Artificial Sequence: Synthetic oligonucleotide
uaaccaaacgaguggcucg

SEQ ID NO: 451767 - RNA, 19 nt, Artificial Sequence
  Description of Artificial Sequence: Synthetic oligonucleotide
ugcacacaauuaaacaacc

SEQ ID NO: 451768 - RNA, 19 nt, Artificial Sequence
  Description of Artificial Sequence: Synthetic oligonucleotide
cacucaugacuccagaacg

SEQ ID NO: 451769 - RNA, 19 nt, Artificial Sequence
  Description of Artificial Sequence: Synthetic oligonucleotide
guaaacaacacgccgcaag

SEQ ID NO: 451770 - RNA, 19 nt, Artificial Sequence
  Description of Artificial Sequence: Synthetic oligonucleotide
auuaguaaacagcugcaga

SEQ ID NO: 451771 - RNA, 19 nt, Artificial Sequence
  Description of Artificial Sequence: Synthetic oligonucleotide
aauuaaacaaccggucacu

SEQ ID NO: 451772 - RNA, 19 nt, Artificial Sequence
  Description of Artificial Sequence: Synthetic oligonucleotide
ugucagaguuucuagggcc

SEQ ID NO: 451773 - RNA, 19 nt, Artificial Sequence
  Description of Artificial Sequence: Synthetic oligonucleotide
aauggccauuaguaaacag

SEQ ID NO: 451774 - RNA, 19 nt, Artificial Sequence
  Description of Artificial Sequence: Synthetic oligonucleotide
uuaucuuggcuacuauacc

SEQ ID NO: 451775 - RNA, 19 nt, Artificial Sequence
  Description of Artificial Sequence: Synthetic oligonucleotide
ucauauccuuaaaacagga

SEQ ID NO: 451776 - RNA, 19 nt, Artificial Sequence
  Description of Artificial Sequence: Synthetic oligonucleotide
uaaccagacguuuaugaga

SEQ ID NO: 451777 - RNA, 19 nt, Artificial Sequence
  Description of Artificial Sequence: Synthetic oligonucleotide
cuuggcuacuauaccaugg

SEQ ID NO: 451778 - RNA, 19 nt, Artificial Sequence
  Description of Artificial Sequence: Synthetic oligonucleotide
cacaccuuaaucacugagg

SEQ ID NO: 451779 - RNA, 19 nt, Artificial Sequence
  Description of Artificial Sequence: Synthetic oligonucleotide
uccuaaucuucuuucagga

SEQ ID NO: 451780 - RNA, 19 nt, Artificial Sequence
  Description of Artificial Sequence: Synthetic oligonucleotide
aagauuaaugaaaccuguc

SEQ ID NO: 451781 - RNA, 19 nt, Artificial Sequence
  Description of Artificial Sequence: Synthetic oligonucleotide
gacuuuuacugcuucagca

SEQ ID NO: 451782 - RNA, 19 nt, Artificial Sequence
  Description of Artificial Sequence: Synthetic oligonucleotide
caaugcaauagccaugcag

SEQ ID NO: 451783 - RNA, 19 nt, Artificial Sequence
  Description of Artificial Sequence: Synthetic oligonucleotide
agucaucaaugcaauagcc

SEQ ID NO: 451784 - RNA, 19 nt, Artificial Sequence
  Description of Artificial Sequence: Synthetic oligonucleotide
uaauugagccacuuuagau

SEQ ID NO: 451785 - RNA, 19 nt, Artificial Sequence
  Description of Artificial Sequence: Synthetic oligonucleotide
uacuauaccauggucgcag

SEQ ID NO: 451786 - RNA, 19 nt, Artificial Sequence
  Description of Artificial Sequence: Synthetic oligonucleotide
uuuacuauucagacauuuc

SEQ ID NO: 451787 - RNA, 19 nt, Artificial Sequence
  Description of Artificial Sequence: Synthetic oligonucleotide
uguggguuucccaugcuug

SEQ ID NO: 451788 - RNA, 19 nt, Artificial Sequence
  Description of Artificial Sequence: Synthetic oligonucleotide
cuuguaauggcuuccgguc

SEQ ID NO: 451789 - RNA, 19 nt, Artificial Sequence
  Description of Artificial Sequence: Synthetic oligonucleotide
gaaacagggcaccugucag

SEQ ID NO: 451790 - RNA, 19 nt, Artificial Sequence
  Description of Artificial Sequence: Synthetic oligonucleotide
aacaacacgccgcaaguaa

SEQ ID NO: 451791 - RNA, 19 nt, Artificial Sequence
  Description of Artificial Sequence: Synthetic oligonucleotide
aauuaggcagugccauguc

SEQ ID NO: 451792 - RNA, 19 nt, Artificial Sequence
  Description of Artificial Sequence: Synthetic oligonucleotide
acugagggacuuguaaugc

SEQ ID NO: 451793 - RNA, 19 nt, Artificial Sequence
  Description of Artificial Sequence: Synthetic oligonucleotide
uuaguaacaagggccacug

SEQ ID NO: 451794 - RNA, 19 nt, Artificial Sequence
  Description of Artificial Sequence: Synthetic oligonucleotide
cuacccgaaguauucgucg

SEQ ID NO: 451795 - RNA, 19 nt, Artificial Sequence
  Description of Artificial Sequence: Synthetic oligonucleotide
cacaauuaaacaaccgguc

SEQ ID NO: 451796 - RNA, 19 nt, Artificial Sequence
  Description of Artificial Sequence: Synthetic oligonucleotide
cauaucggagaacaccagg

SEQ ID NO: 451797 - RNA, 19 nt, Artificial Sequence
  Description of Artificial Sequence: Synthetic oligonucleotide
uuguaaugcuucagcaacc

SEQ ID NO: 451798 - RNA, 19 nt, Artificial Sequence
  Description of Artificial Sequence: Synthetic oligonucleotide
acaguaauuacuugugcau

SEQ ID NO: 451799 - RNA, 19 nt, Artificial Sequence
  Description of Artificial Sequence: Synthetic oligonucleotide
cuaaaguguaccagaacuc

SEQ ID NO: 451800 - RNA, 19 nt, Artificial Sequence
  Description of Artificial Sequence: Synthetic oligonucleotide
auaccauggucgcagguag

SEQ ID NO: 451801 - RNA, 19 nt, Artificial Sequence
  Description of Artificial Sequence: Synthetic oligonucleotide
uaacaagggccacugagaa

SEQ ID NO: 451802 - RNA, 19 nt, Artificial Sequence
  Description of Artificial Sequence: Synthetic oligonucleotide
uucauaaccagacguuuau

SEQ ID NO: 451803 - RNA, 19 nt, Artificial Sequence
  Description of Artificial Sequence: Synthetic oligonucleotide
aaugaaaccuguccugaua

SEQ ID NO: 451804 - RNA, 19 nt, Artificial Sequence
  Description of Artificial Sequence: Synthetic oligonucleotide
uuuagauucuggcuugaua

SEQ ID NO: 451805 - RNA, 19 nt, Artificial Sequence
  Description of Artificial Sequence: Synthetic oligonucleotide
uguucuacucccucaacaa

SEQ ID NO: 451806 - RNA, 19 nt, Artificial Sequence
  Description of Artificial Sequence: Synthetic oligonucleotide
gccauuaguaaacagcugc

SEQ ID NO: 451807 - RNA, 19 nt, Artificial Sequence
  Description of Artificial Sequence: Synthetic oligonucleotide
aaaucacugcuguagucau

SEQ ID NO: 451808 - RNA, 19 nt, Artificial Sequence
  Description of Artificial Sequence: Synthetic oligonucleotide
uuuaggaucuagugugcca

SEQ ID NO: 451809 - RNA, 19 nt, Artificial Sequence
  Description of Artificial Sequence: Synthetic oligonucleotide
aacaaccggucacuuuagg

SEQ ID NO: 451810 - RNA, 19 nt, Artificial Sequence
  Description of Artificial Sequence: Synthetic oligonucleotide
cauaaccagacguuuauga

SEQ ID NO: 451811 - RNA, 19 nt, Artificial Sequence
  Description of Artificial Sequence: Synthetic oligonucleotide
gauaagauuuccccacuga

SEQ ID NO: 451812 - RNA, 19 nt, Artificial Sequence
  Description of Artificial Sequence: Synthetic oligonucleotide
uucuuaugcuucuuuggga

SEQ ID NO: 451813 - RNA, 19 nt, Artificial Sequence
  Description of Artificial Sequence: Synthetic oligonucleotide
auuacuugugcauccgcca

SEQ ID NO: 451814 - RNA, 19 nt, Artificial Sequence
  Description of Artificial Sequence: Synthetic oligonucleotide
guauucgucggauccaggc

SEQ ID NO: 451815 - RNA, 19 nt, Artificial Sequence
  Description of Artificial Sequence: Synthetic oligonucleotide
agccaaggugcacacauag

SEQ ID NO: 451816 - RNA, 19 nt, Artificial Sequence
  Description of Artificial Sequence: Synthetic oligonucleotide
gaucuagugugccacugug

SEQ ID NO: 451817 - RNA, 19 nt, Artificial Sequence
  Description of Artificial Sequence: Synthetic oligonucleotide
gauacuggagauaagauuu

SEQ ID NO: 451818 - RNA, 19 nt, Artificial Sequence
  Description of Artificial Sequence: Synthetic oligonucleotide
gaagcaugaucuuggcccc

SEQ ID NO: 451819 - RNA, 19 nt, Artificial Sequence
  Description of Artificial Sequence: Synthetic oligonucleotide
caaugccauccucauaucg

SEQ ID NO: 451820 - RNA, 19 nt, Artificial Sequence
  Description of Artificial Sequence: Synthetic oligonucleotide
cugacacucagauauccac

SEQ ID NO: 451821 - RNA, 19 nt, Artificial Sequence
  Description of Artificial Sequence: Synthetic oligonucleotide
auaguccccaaucucccuc

SEQ ID NO: 451822 - RNA, 19 nt, Artificial Sequence
  Description of Artificial Sequence: Synthetic oligonucleotide
acacaauuaaacaaccggu

SEQ ID NO: 451823 - RNA, 19 nt, Artificial Sequence
  Description of Artificial Sequence: Synthetic oligonucleotide
gauaguccucacccgaagc

SEQ ID NO: 451824 - RNA, 19 nt, Artificial Sequence
  Description of Artificial Sequence: Synthetic oligonucleotide
uuaggaucuagugugccac

SEQ ID NO: 451825 - RNA, 19 nt, Artificial Sequence
  Description of Artificial Sequence: Synthetic oligonucleotide
accaacucccaguagcaag

SEQ ID NO: 451826 - RNA, 19 nt, Artificial Sequence
  Description of Artificial Sequence: Synthetic oligonucleotide
acuuccgaggauaaguguc

SEQ ID NO: 451827 - RNA, 19 nt, Artificial Sequence
  Description of Artificial Sequence: Synthetic oligonucleotide
augaaaccuguccugauau

SEQ ID NO: 451828 - RNA, 19 nt, Artificial Sequence
  Description of Artificial Sequence: Synthetic oligonucleotide
uuuaaccaaacgaguggcu

SEQ ID NO: 451829 - RNA, 19 nt, Artificial Sequence
  Description of Artificial Sequence: Synthetic oligonucleotide
uucucuacccgaaguauuc

SEQ ID NO: 451830 - RNA, 19 nt, Artificial Sequence
  Description of Artificial Sequence: Synthetic oligonucleotide
uucuuguaauggcuuccgg

SEQ ID NO: 451831 - RNA, 19 nt, Artificial Sequence
  Description of Artificial Sequence: Synthetic oligonucleotide
uuaauuaggcagugccaug

SEQ ID NO: 451832 - RNA, 19 nt, Artificial Sequence
  Description of Artificial Sequence: Synthetic oligonucleotide
cucucauauccuuaaaaca

SEQ ID NO: 451833 - RNA, 19 nt, Artificial Sequence
  Description of Artificial Sequence: Synthetic oligonucleotide
ggcuacuauaccauggucg

SEQ ID NO: 451834 - RNA, 19 nt, Artificial Sequence
  Description of Artificial Sequence: Synthetic oligonucleotide
uuggcuacuauaccauggu

SEQ ID NO: 451835 - RNA, 19 nt, Artificial Sequence
  Description of Artificial Sequence: Synthetic oligonucleotide
ucuugcaccguaccgcgug

SEQ ID NO: 451836 - RNA, 19 nt, Artificial Sequence
  Description of Artificial Sequence: Synthetic oligonucleotide
uuuaguaacaagggccacu

SEQ ID NO: 451837 - RNA, 19 nt, Artificial Sequence
  Description of Artificial Sequence: Synthetic oligonucleotide
uuucauaaccagacguuua

SEQ ID NO: 451838 - RNA, 19 nt, Artificial Sequence
  Description of Artificial Sequence: Synthetic oligonucleotide
auuugaaccacaaggaaua

SEQ ID NO: 451839 - RNA, 19 nt, Artificial Sequence
  Description of Artificial Sequence: Synthetic oligonucleotide
gguaaugaccacaauuucc

SEQ ID NO: 451840 - RNA, 19 nt, Artificial Sequence
  Description of Artificial Sequence: Synthetic oligonucleotide
uauucgucggauccaggcu

SEQ ID NO: 451841 - RNA, 19 nt, Artificial Sequence
  Description of Artificial Sequence: Synthetic oligonucleotide
aaccagacguuuaugagau

SEQ ID NO: 451842 - RNA, 19 nt, Artificial Sequence
  Description of Artificial Sequence: Synthetic oligonucleotide
aaacuaggagaggacuauc

SEQ ID NO: 451843 - RNA, 19 nt, Artificial Sequence
  Description of Artificial Sequence: Synthetic oligonucleotide
uacccgaaguauucgucgg

SEQ ID NO: 451844 - RNA, 19 nt, Artificial Sequence
  Description of Artificial Sequence: Synthetic oligonucleotide
caucuugcaccguaccgcg

SEQ ID NO: 451845 - RNA, 19 nt, Artificial Sequence
  Description of Artificial Sequence: Synthetic oligonucleotide
ucauaucggagaacaccag

SEQ ID NO: 451846 - RNA, 19 nt, Artificial Sequence
  Description of Artificial Sequence: Synthetic oligonucleotide
uuaaccaaacgaguggcuc

SEQ ID NO: 451847 - RNA, 19 nt, Artificial Sequence
  Description of Artificial Sequence: Synthetic oligonucleotide
auaguccucacccgaagcu

SEQ ID NO: 451848 - RNA, 19 nt, Artificial Sequence
  Description of Artificial Sequence: Synthetic oligonucleotide
uguaaugcuucagcaacca

SEQ ID NO: 451849 - RNA, 19 nt, Artificial Sequence
  Description of Artificial Sequence: Synthetic oligonucleotide
acucaugacuccagaacgc

SEQ ID NO: 451850 - RNA, 19 nt, Artificial Sequence
  Description of Artificial Sequence: Synthetic oligonucleotide
gaagugucuaauugagcca

SEQ ID NO: 451851 - RNA, 19 nt, Artificial Sequence
  Description of Artificial Sequence: Synthetic oligonucleotide
cauauccuuaaaacaggac

SEQ ID NO: 451852 - RNA, 19 nt, Artificial Sequence
  Description of Artificial Sequence: Synthetic oligonucleotide
aaguguaccagaacucugu

SEQ ID NO: 451853 - RNA, 19 nt, Artificial Sequence
  Description of Artificial Sequence: Synthetic oligonucleotide
ugcauucacugcacuaucu

SEQ ID NO: 451854 - RNA, 19 nt, Artificial Sequence
  Description of Artificial Sequence: Synthetic oligonucleotide
acaaccggucacuuuagga

SEQ ID NO: 451855 - RNA, 19 nt, Artificial Sequence
  Description of Artificial Sequence: Synthetic oligonucleotide
aaaguguaccagaacucug

SEQ ID NO: 451856 - RNA, 19 nt, Artificial Sequence
  Description of Artificial Sequence: Synthetic oligonucleotide
cuucaauagcauugugcag

SEQ ID NO: 451857 - RNA, 19 nt, Artificial Sequence
  Description of Artificial Sequence: Synthetic oligonucleotide
gaggauaagugucucucuc

SEQ ID NO: 451858 - RNA, 19 nt, Artificial Sequence
  Description of Artificial Sequence: Synthetic oligonucleotide
gcuacuauaccauggucgc

SEQ ID NO: 451859 - RNA, 19 nt, Artificial Sequence
  Description of Artificial Sequence: Synthetic oligonucleotide
cauuaguaaacagcugcag

SEQ ID NO: 451860 - RNA, 19 nt, Artificial Sequence
  Description of Artificial Sequence: Synthetic oligonucleotide
ucuacucccucaacaaaau

SEQ ID NO: 451861 - RNA, 19 nt, Artificial Sequence
  Description of Artificial Sequence: Synthetic oligonucleotide
ucuacccgaaguauucguc

SEQ ID NO: 451862 - RNA, 19 nt, Artificial Sequence
  Description of Artificial Sequence: Synthetic oligonucleotide
cugagaagugucuaauuga

SEQ ID NO: 451863 - RNA, 19 nt, Artificial Sequence
  Description of Artificial Sequence: Synthetic oligonucleotide
uaguaaacagcugcagaca

SEQ ID NO: 451864 - RNA, 19 nt, Artificial Sequence
  Description of Artificial Sequence: Synthetic oligonucleotide
uaucggagaacaccaggaa

SEQ ID NO: 451865 - RNA, 19 nt, Artificial Sequence
  Description of Artificial Sequence: Synthetic oligonucleotide
cuauaccauuuuauuuagc

SEQ ID NO: 451866 - RNA, 19 nt, Artificial Sequence
  Description of Artificial Sequence: Synthetic oligonucleotide
agauaguccucacccgaag

SEQ ID NO: 451867 - RNA, 19 nt, Artificial Sequence
  Description of Artificial Sequence: Synthetic oligonucleotide
auugcauucacugcacuau

SEQ ID NO: 451868 - RNA, 19 nt, Artificial Sequence
  Description of Artificial Sequence: Synthetic oligonucleotide
uuugaaccacaaggaauag

SEQ ID NO: 451869 - RNA, 19 nt, Artificial Sequence
  Description of Artificial Sequence: Synthetic oligonucleotide
guagauaguccucacccga

SEQ ID NO: 451870 - RNA, 19 nt, Artificial Sequence
  Description of Artificial Sequence: Synthetic oligonucleotide
ccgcaaguaacucucaucc

SEQ ID NO: 451871 - RNA, 19 nt, Artificial Sequence
  Description of Artificial Sequence: Synthetic oligonucleotide
acgaguggcucguucaaug

SEQ ID NO: 451872 - RNA, 19 nt, Artificial Sequence
  Description of Artificial Sequence: Synthetic oligonucleotide
uucugacuugccuuuggac

SEQ ID NO: 451873 - RNA, 19 nt, Artificial Sequence
  Description of Artificial Sequence: Synthetic oligonucleotide
acuauaccauggucgcagg

SEQ ID NO: 451874 - RNA, 19 nt, Artificial Sequence
  Description of Artificial Sequence: Synthetic oligonucleotide
cacuuuagauucuggcuug

SEQ ID NO: 451875 - RNA, 19 nt, Artificial Sequence
  Description of Artificial Sequence: Synthetic oligonucleotide
cuauggcauuaaaauggcc

SEQ ID NO: 451876 - RNA, 19 nt, Artificial Sequence
  Description of Artificial Sequence: Synthetic oligonucleotide
uugcucucguagauagucc

SEQ ID NO: 451877 - RNA, 19 nt, Artificial Sequence
  Description of Artificial Sequence: Synthetic oligonucleotide
aacacgccgcaaguaacuc

SEQ ID NO: 451878 - RNA, 19 nt, Artificial Sequence
  Description of Artificial Sequence: Synthetic oligonucleotide
cuagaaagcugaguacccc

SEQ ID NO: 451879 - RNA, 19 nt, Artificial Sequence
  Description of Artificial Sequence: Synthetic oligonucleotide
ugaggucacaaguggcagc

SEQ ID NO: 451880 - RNA, 19 nt, Artificial Sequence
  Description of Artificial Sequence: Synthetic oligonucleotide
uagggcccuagaaagcuga

SEQ ID NO: 451881 - RNA, 19 nt, Artificial Sequence
  Description of Artificial Sequence: Synthetic oligonucleotide
cuguuugggaccucuguuc

SEQ ID NO: 451882 - RNA, 19 nt, Artificial Sequence
  Description of Artificial Sequence: Synthetic oligonucleotide
gacaguuaauuaggcagug

SEQ ID NO: 451883 - RNA, 19 nt, Artificial Sequence
  Description of Artificial Sequence: Synthetic oligonucleotide
auaucggagaacaccagga

SEQ ID NO: 451884 - RNA, 19 nt, Artificial Sequence
  Description of Artificial Sequence: Synthetic oligonucleotide
guuguccuuacauucagcu

SEQ ID NO: 451885 - RNA, 19 nt, Artificial Sequence
  Description of Artificial Sequence: Synthetic oligonucleotide
cuaauugagccacuuuaga

SEQ ID NO: 451886 - RNA, 19 nt, Artificial Sequence
  Description of Artificial Sequence: Synthetic oligonucleotide
ccuucaauagcauugugca

SEQ ID NO: 451887 - RNA, 19 nt, Artificial Sequence
  Description of Artificial Sequence: Synthetic oligonucleotide
cuuuaggaucuagugugcc

SEQ ID NO: 451888 - RNA, 19 nt, Artificial Sequence
  Description of Artificial Sequence: Synthetic oligonucleotide
agacguuuaugagauguca

SEQ ID NO: 451889 - RNA, 19 nt, Artificial Sequence
  Description of Artificial Sequence: Synthetic oligonucleotide
accuaaaccccacuuccga

SEQ ID NO: 451890 - RNA, 19 nt, Artificial Sequence
  Description of Artificial Sequence: Synthetic oligonucleotide
aaacgaguggcucguucaa

SEQ ID NO: 451891 - RNA, 19 nt, Artificial Sequence
  Description of Artificial Sequence: Synthetic oligonucleotide
gcagauugcauucacugca

SEQ ID NO: 451892 - RNA, 19 nt, Artificial Sequence
  Description of Artificial Sequence: Synthetic oligonucleotide
acaacacgccgcaaguaac

SEQ ID NO: 451893 - RNA, 19 nt, Artificial Sequence
  Description of Artificial Sequence: Synthetic oligonucleotide
uuaaacaaccggucacuuu

SEQ ID NO: 451894 - RNA, 19 nt, Artificial Sequence
  Description of Artificial Sequence: Synthetic oligonucleotide
ugcaauagccaugcagaug

SEQ ID NO: 451895 - RNA, 19 nt, Artificial Sequence
  Description of Artificial Sequence: Synthetic oligonucleotide
aggaauagguguguagugu

SEQ ID NO: 451896 - RNA, 19 nt, Artificial Sequence
  Description of Artificial Sequence: Synthetic oligonucleotide
cacuaauaccagaauagaa

SEQ ID NO: 451897 - RNA, 19 nt, Artificial Sequence
  Description of Artificial Sequence: Synthetic oligonucleotide
ccaaaggguaaacaacacg

SEQ ID NO: 451898 - RNA, 19 nt, Artificial Sequence
  Description of Artificial Sequence: Synthetic oligonucleotide
caugcauugucaccaugug

SEQ ID NO: 451899 - RNA, 19 nt, Artificial Sequence
  Description of Artificial Sequence: Synthetic oligonucleotide
cucguagauaguccucacc

SEQ ID NO: 451900 - RNA, 19 nt, Artificial Sequence
  Description of Artificial Sequence: Synthetic oligonucleotide
uagauaguccucacccgaa

SEQ ID NO: 451901 - RNA, 19 nt, Artificial Sequence
  Description of Artificial Sequence: Synthetic oligonucleotide
gaccuaaaccccacuuccg

SEQ ID NO: 451902 - RNA, 19 nt, Artificial Sequence
  Description of Artificial Sequence: Synthetic oligonucleotide
agaacgcacccuccgaagu

SEQ ID NO: 451903 - RNA, 19 nt, Artificial Sequence
  Description of Artificial Sequence: Synthetic oligonucleotide
gauuugaaccacaaggaau

SEQ ID NO: 451904 - RNA, 19 nt, Artificial Sequence
  Description of Artificial Sequence: Synthetic oligonucleotide
uuuggaccuaaaccccacu

SEQ ID NO: 451905 - RNA, 19 nt, Artificial Sequence
  Description of Artificial Sequence: Synthetic oligonucleotide
aaacaaccggucacuuuag

SEQ ID NO: 451906 - RNA, 19 nt, Artificial Sequence
  Description of Artificial Sequence: Synthetic oligonucleotide
agguguguaguguguuguc

SEQ ID NO: 451907 - RNA, 19 nt, Artificial Sequence
  Description of Artificial Sequence: Synthetic oligonucleotide
cccuucaauagcauugugc

SEQ ID NO: 451908 - RNA, 19 nt, Artificial Sequence
  Description of Artificial Sequence: Synthetic oligonucleotide
caaacgaguggcucguuca

SEQ ID NO: 451909 - RNA, 19 nt, Artificial Sequence
  Description of Artificial Sequence: Synthetic oligonucleotide
cuuuuaaucacagaagguu

SEQ ID NO: 451910 - RNA, 19 nt, Artificial Sequence
  Description of Artificial Sequence: Synthetic oligonucleotide
auucgucggauccaggcua

SEQ ID NO: 451911 - RNA, 19 nt, Artificial Sequence
  Description of Artificial Sequence: Synthetic oligonucleotide
ucuguucuacucccucaac

SEQ ID NO: 451912 - RNA, 19 nt, Artificial Sequence
  Description of Artificial Sequence: Synthetic oligonucleotide
guaaugcuucagcaaccag

SEQ ID NO: 451913 - RNA, 19 nt, Artificial Sequence
  Description of Artificial Sequence: Synthetic oligonucleotide
cgaaguauucgucggaucc

SEQ ID NO: 451914 - RNA, 19 nt, Artificial Sequence
  Description of Artificial Sequence: Synthetic oligonucleotide
ugcaucugaccaccaacuc

SEQ ID NO: 451915 - RNA, 19 nt, Artificial Sequence
  Description of Artificial Sequence: Synthetic oligonucleotide
ugucuaauugagccacuuu

SEQ ID NO: 451916 - RNA, 19 nt, Artificial Sequence
  Description of Artificial Sequence: Synthetic oligonucleotide
cacgccgcaaguaacucuc

SEQ ID NO: 451917 - RNA, 19 nt, Artificial Sequence
  Description of Artificial Sequence: Synthetic oligonucleotide
cuuuggaccuaaaccccac

SEQ ID NO: 451918 - RNA, 19 nt, Artificial Sequence
  Description of Artificial Sequence: Synthetic oligonucleotide
caguaauuacuugugcauc

SEQ ID NO: 451919 - RNA, 19 nt, Artificial Sequence
  Description of Artificial Sequence: Synthetic oligonucleotide
ugcagccggacaauuccca

SEQ ID NO: 451920 - RNA, 19 nt, Artificial Sequence
  Description of Artificial Sequence: Synthetic oligonucleotide
aaccaaacgaguggcucgu

SEQ ID NO: 451921 - RNA, 19 nt, Artificial Sequence
  Description of Artificial Sequence: Synthetic oligonucleotide
gguuagagggcuugucaag

SEQ ID NO: 451922 - RNA, 19 nt, Artificial Sequence
  Description of Artificial Sequence: Synthetic oligonucleotide
acauaguguccgaauguag

SEQ ID NO: 451923 - RNA, 19 nt, Artificial Sequence
  Description of Artificial Sequence: Synthetic oligonucleotide
uuagagggcuugucaagau

SEQ ID NO: 451924 - RNA, 19 nt, Artificial Sequence
  Description of Artificial Sequence: Synthetic oligonucleotide
guaacaagggccacugaga

SEQ ID NO: 451925 - RNA, 19 nt, Artificial Sequence
  Description of Artificial Sequence: Synthetic oligonucleotide
caccugucagaguuucuag

SEQ ID NO: 451926 - RNA, 19 nt, Artificial Sequence
  Description of Artificial Sequence: Synthetic oligonucleotide
aucuagugugccacugugg

SEQ ID NO: 451927 - RNA, 19 nt, Artificial Sequence
  Description of Artificial Sequence: Synthetic oligonucleotide
agaguuucuagggcccuag

SEQ ID NO: 451928 - RNA, 19 nt, Artificial Sequence
  Description of Artificial Sequence: Synthetic oligonucleotide
aggacuaucuauggcauua

SEQ ID NO: 451929 - RNA, 19 nt, Artificial Sequence
  Description of Artificial Sequence: Synthetic oligonucleotide
gaaguauucgucggaucca

SEQ ID NO: 451930 - RNA, 19 nt, Artificial Sequence
  Description of Artificial Sequence: Synthetic oligonucleotide
guuagagggcuugucaaga

SEQ ID NO: 451931 - RNA, 19 nt, Artificial Sequence
  Description of Artificial Sequence: Synthetic oligonucleotide
cauauucuaucauuuugcu

SEQ ID NO: 451932 - RNA, 19 nt, Artificial Sequence
  Description of Artificial Sequence: Synthetic oligonucleotide
agauugcauucacugcacu

SEQ ID NO: 451933 - RNA, 19 nt, Artificial Sequence
  Description of Artificial Sequence: Synthetic oligonucleotide
agccauugagcaucaagua

SEQ ID NO: 451934 - RNA, 19 nt, Artificial Sequence
  Description of Artificial Sequence: Synthetic oligonucleotide
gcagcuaaaguguaccaga

SEQ ID NO: 451935 - RNA, 19 nt, Artificial Sequence
  Description of Artificial Sequence: Synthetic oligonucleotide
ggauaagugucucucucca

SEQ ID NO: 451936 - RNA, 19 nt, Artificial Sequence
  Description of Artificial Sequence: Synthetic oligonucleotide
cacaggauacuggagauaa

SEQ ID NO: 451937 - RNA, 19 nt, Artificial Sequence
  Description of Artificial Sequence: Synthetic oligonucleotide
agggacuuguaaugcuuca

SEQ ID NO: 451938 - RNA, 19 nt, Artificial Sequence
  Description of Artificial Sequence: Synthetic oligonucleotide
uggcuacuauaccaugguc

SEQ ID NO: 451939 - RNA, 19 nt, Artificial Sequence
  Description of Artificial Sequence: Synthetic oligonucleotide
guuaauuaggcagugccau

SEQ ID NO: 451940 - RNA, 19 nt, Artificial Sequence
  Description of Artificial Sequence: Synthetic oligonucleotide
ccaggcuaccaccucaugg

SEQ ID NO: 451941 - RNA, 19 nt, Artificial Sequence
  Description of Artificial Sequence: Synthetic oligonucleotide
uggcagcuaaaguguacca

SEQ ID NO: 451942 - RNA, 19 nt, Artificial Sequence
  Description of Artificial Sequence: Synthetic oligonucleotide
augcaauagccaugcagau

SEQ ID NO: 451943 - RNA, 19 nt, Artificial Sequence
  Description of Artificial Sequence: Synthetic oligonucleotide
ggagaggacuaucuauggc

SEQ ID NO: 451944 - RNA, 19 nt, Artificial Sequence
  Description of Artificial Sequence: Synthetic oligonucleotide
gguuaucauacagccauug

SEQ ID NO: 451945 - RNA, 19 nt, Artificial Sequence
  Description of Artificial Sequence: Synthetic oligonucleotide
cagaacgcacccuccgaag

SEQ ID NO: 451946 - RNA, 19 nt, Artificial Sequence
  Description of Artificial Sequence: Synthetic oligonucleotide
gaguggcucguucaaugca

SEQ ID NO: 451947 - RNA, 19 nt, Artificial Sequence
  Description of Artificial Sequence: Synthetic oligonucleotide
cuacucccucaacaaaaug

SEQ ID NO: 451948 - RNA, 19 nt, Artificial Sequence
  Description of Artificial Sequence: Synthetic oligonucleotide
ugccagaaucacuguaguc

SEQ ID NO: 451949 - RNA, 19 nt, Artificial Sequence
  Description of Artificial Sequence: Synthetic oligonucleotide
caccguaccgcgugcgucc

SEQ ID NO: 451950 - RNA, 19 nt, Artificial Sequence
  Description of Artificial Sequence: Synthetic oligonucleotide
gacguuuaugagaugucaa

SEQ ID NO: 451951 - RNA, 19 nt, Artificial Sequence
  Description of Artificial Sequence: Synthetic oligonucleotide
ucucguagauaguccucac

SEQ ID NO: 451952 - RNA, 19 nt, Artificial Sequence
  Description of Artificial Sequence: Synthetic oligonucleotide
auggucgcagguagaaauc

SEQ ID NO: 451953 - RNA, 19 nt, Artificial Sequence
  Description of Artificial Sequence: Synthetic oligonucleotide
ugaucacccucuuuaucuu

SEQ ID NO: 451954 - RNA, 19 nt, Artificial Sequence
  Description of Artificial Sequence: Synthetic oligonucleotide
cccacauacucuuugccug

SEQ ID NO: 451955 - RNA, 19 nt, Artificial Sequence
  Description of Artificial Sequence: Synthetic oligonucleotide
uuguccuuacauucagcuu

SEQ ID NO: 451956 - RNA, 19 nt, Artificial Sequence
  Description of Artificial Sequence: Synthetic oligonucleotide
uccgaggauaagugucucu

SEQ ID NO: 451957 - RNA, 19 nt, Artificial Sequence
  Description of Artificial Sequence: Synthetic oligonucleotide
cuuaugcuucuuugggaca

SEQ ID NO: 451958 - RNA, 19 nt, Artificial Sequence
  Description of Artificial Sequence: Synthetic oligonucleotide
gggacaguaauuacuugug

SEQ ID NO: 451959 - RNA, 19 nt, Artificial Sequence
  Description of Artificial Sequence: Synthetic oligonucleotide
aaacaacacgccgcaagua

SEQ ID NO: 451960 - RNA, 19 nt, Artificial Sequence
  Description of Artificial Sequence: Synthetic oligonucleotide
auuaaacaaccggucacuu

SEQ ID NO: 451961 - RNA, 19 nt, Artificial Sequence
  Description of Artificial Sequence: Synthetic oligonucleotide
auagccaugcagauggcuu

SEQ ID NO: 451962 - RNA, 19 nt, Artificial Sequence
  Description of Artificial Sequence: Synthetic oligonucleotide
gcacacaauuaaacaaccg

SEQ ID NO: 451963 - RNA, 19 nt, Artificial Sequence
  Description of Artificial Sequence: Synthetic oligonucleotide
cucuguacucuguuuggga

SEQ ID NO: 451964 - RNA, 19 nt, Artificial Sequence
  Description of Artificial Sequence: Synthetic oligonucleotide
cagauuuaauuuucacaaa

SEQ ID NO: 451965 - RNA, 19 nt, Artificial Sequence
  Description of Artificial Sequence: Synthetic oligonucleotide
ugcauccgccaucuugcac

SEQ ID NO: 451966 - RNA, 19 nt, Artificial Sequence
  Description of Artificial Sequence: Synthetic oligonucleotide
ccggacaauucccacauac

SEQ ID NO: 451967 - RNA, 19 nt, Artificial Sequence
  Description of Artificial Sequence: Synthetic oligonucleotide
gugauuuaaccaaacgagu

SEQ ID NO: 451968 - RNA, 19 nt, Artificial Sequence
  Description of Artificial Sequence: Synthetic oligonucleotide
uaguaacaagggccacuga

SEQ ID NO: 451969 - RNA, 19 nt, Artificial Sequence
  Description of Artificial Sequence: Synthetic oligonucleotide
agcuaacugagggacuugu

SEQ ID NO: 451970 - RNA, 19 nt, Artificial Sequence
  Description of Artificial Sequence: Synthetic oligonucleotide
cuuuaguaacaagggccac

SEQ ID NO: 451971 - RNA, 19 nt, Artificial Sequence
  Description of Artificial Sequence: Synthetic oligonucleotide
aggauacuggagauaagau

SEQ ID NO: 451972 - RNA, 19 nt, Artificial Sequence
  Description of Artificial Sequence: Synthetic oligonucleotide
acacgccgcaaguaacucu

SEQ ID NO: 451973 - RNA, 19 nt, Artificial Sequence
  Description of Artificial Sequence: Synthetic oligonucleotide
aaccugcuuuucaucucuc

SEQ ID NO: 451974 - RNA, 19 nt, Artificial Sequence
  Description of Artificial Sequence: Synthetic oligonucleotide
uaccaccucaugggaagag

SEQ ID NO: 451975 - RNA, 19 nt, Artificial Sequence
  Description of Artificial Sequence: Synthetic oligonucleotide
cauggucgcagguagaaau

SEQ ID NO: 451976 - RNA, 19 nt, Artificial Sequence
  Description of Artificial Sequence: Synthetic oligonucleotide
ggcagcuaaaguguaccag

SEQ ID NO: 451977 - RNA, 19 nt, Artificial Sequence
  Description of Artificial Sequence: Synthetic oligonucleotide
aguauucgucggauccagg

SEQ ID NO: 451978 - RNA, 19 nt, Artificial Sequence
  Description of Artificial Sequence: Synthetic oligonucleotide
ccuuacauucagcuuauca

SEQ ID NO: 451979 - RNA, 19 nt, Artificial Sequence
  Description of Artificial Sequence: Synthetic oligonucleotide
cuugcaccguaccgcgugc

SEQ ID NO: 451980 - RNA, 19 nt, Artificial Sequence
  Description of Artificial Sequence: Synthetic oligonucleotide
ggcuuuuacuauucagaca

SEQ ID NO: 451981 - RNA, 19 nt, Artificial Sequence
  Description of Artificial Sequence: Synthetic oligonucleotide
cucucguagauaguccuca

SEQ ID NO: 451982 - RNA, 19 nt, Artificial Sequence
  Description of Artificial Sequence: Synthetic oligonucleotide
caaccggucacuuuaggau

SEQ ID NO: 451983 - RNA, 19 nt, Artificial Sequence
  Description of Artificial Sequence: Synthetic oligonucleotide
caauagccaugcagauggc

SEQ ID NO: 451984 - RNA, 19 nt, Artificial Sequence
  Description of Artificial Sequence: Synthetic oligonucleotide
cccucuuuaucuuggcuac

SEQ ID NO: 451985 - RNA, 19 nt, Artificial Sequence
  Description of Artificial Sequence: Synthetic oligonucleotide
agggguuagagggcuuguc

SEQ ID NO: 451986 - RNA, 19 nt, Artificial Sequence
  Description of Artificial Sequence: Synthetic oligonucleotide
uguccgaauguaggugcca

SEQ ID NO: 451987 - RNA, 19 nt, Artificial Sequence
  Description of Artificial Sequence: Synthetic oligonucleotide
guugccuguggguuuccca

SEQ ID NO: 451988 - RNA, 19 nt, Artificial Sequence
  Description of Artificial Sequence: Synthetic oligonucleotide
ccuaaaccccacuuccgag

SEQ ID NO: 451989 - RNA, 19 nt, Artificial Sequence
  Description of Artificial Sequence: Synthetic oligonucleotide
cguagauaguccucacccg

SEQ ID NO: 451990 - RNA, 19 nt, Artificial Sequence
  Description of Artificial Sequence: Synthetic oligonucleotide
aacgaguggcucguucaau

SEQ ID NO: 451991 - RNA, 19 nt, Artificial Sequence
  Description of Artificial Sequence: Synthetic oligonucleotide
ugguuaucauacagccauu

SEQ ID NO: 451992 - RNA, 19 nt, Artificial Sequence
  Description of Artificial Sequence: Synthetic oligonucleotide
cagcuaaaguguaccagaa

SEQ ID NO: 451993 - RNA, 19 nt, Artificial Sequence
  Description of Artificial Sequence: Synthetic oligonucleotide
acccgaaguauucgucgga

SEQ ID NO: 451994 - RNA, 19 nt, Artificial Sequence
  Description of Artificial Sequence: Synthetic oligonucleotide
uugcaccguaccgcgugcg

SEQ ID NO: 451995 - RNA, 19 nt, Artificial Sequence
  Description of Artificial Sequence: Synthetic oligonucleotide
cugcacuaucuuucauaac

SEQ ID NO: 451996 - RNA, 19 nt, Artificial Sequence
  Description of Artificial Sequence: Synthetic oligonucleotide
gaccaccaacucccaguag

SEQ ID NO: 451997 - RNA, 19 nt, Artificial Sequence
  Description of Artificial Sequence: Synthetic oligonucleotide
ugcaccguaccgcgugcgu

SEQ ID NO: 451998 - RNA, 19 nt, Artificial Sequence
  Description of Artificial Sequence: Synthetic oligonucleotide
ggccacaccuuaaucacug

SEQ ID NO: 451999 - RNA, 19 nt, Artificial Sequence
  Description of Artificial Sequence: Synthetic oligonucleotide
acuuuagauucuggcuuga

SEQ ID NO: 452000 - RNA, 19 nt, Artificial Sequence
  Description of Artificial Sequence: Synthetic oligonucleotide
gggguuagagggcuuguca

SEQ ID NO: 452001 - RNA, 19 nt, Artificial Sequence
  Description of Artificial Sequence: Synthetic oligonucleotide
cucaugacuccagaacgca

SEQ ID NO: 452002 - RNA, 19 nt, Artificial Sequence
  Description of Artificial Sequence: Synthetic oligonucleotide
ccacuuccgaggauaagug

SEQ ID NO: 452003 - RNA, 19 nt, Artificial Sequence
  Description of Artificial Sequence: Synthetic oligonucleotide
accauggucgcagguagaa

SEQ ID NO: 452004 - RNA, 19 nt, Artificial Sequence
  Description of Artificial Sequence: Synthetic oligonucleotide
cuuccgaggauaagugucu

SEQ ID NO: 452005 - RNA, 19 nt, Artificial Sequence
  Description of Artificial Sequence: Synthetic oligonucleotide
cugaccaccaacucccagu

SEQ ID NO: 452006 - RNA, 19 nt, Artificial Sequence
  Description of Artificial Sequence: Synthetic oligonucleotide
ccauuaguaaacagcugca

SEQ ID NO: 452007 - RNA, 19 nt, Artificial Sequence
  Description of Artificial Sequence: Synthetic oligonucleotide
ggucacaaguggcagcuaa

SEQ ID NO: 452008 - RNA, 19 nt, Artificial Sequence
  Description of Artificial Sequence: Synthetic oligonucleotide
accggucacuuuaggaucu

SEQ ID NO: 452009 - RNA, 19 nt, Artificial Sequence
  Description of Artificial Sequence: Synthetic oligonucleotide
acgcacccuccgaaguucc

SEQ ID NO: 452010 - RNA, 19 nt, Artificial Sequence
  Description of Artificial Sequence: Synthetic oligonucleotide
uggccccauagcagauugc

SEQ ID NO: 452011 - RNA, 19 nt, Artificial Sequence
  Description of Artificial Sequence: Synthetic oligonucleotide
ggauacuggagauaagauu

SEQ ID NO: 452012 - RNA, 19 nt, Artificial Sequence
  Description of Artificial Sequence: Synthetic oligonucleotide
guagucaauguaguccugu

SEQ ID NO: 452013 - RNA, 19 nt, Artificial Sequence
  Description of Artificial Sequence: Synthetic oligonucleotide
caauagcauugugcagccg

SEQ ID NO: 452014 - RNA, 19 nt, Artificial Sequence
  Description of Artificial Sequence: Synthetic oligonucleotide
cccacucaagcaagcagag

SEQ ID NO: 452015 - RNA, 19 nt, Artificial Sequence
  Description of Artificial Sequence: Synthetic oligonucleotide
guagcaagccaaggugcac

SEQ ID NO: 452016 - RNA, 19 nt, Artificial Sequence
  Description of Artificial Sequence: Synthetic oligonucleotide
gccacuuuagauucuggcu

SEQ ID NO: 452017 - RNA, 19 nt, Artificial Sequence
  Description of Artificial Sequence: Synthetic oligonucleotide
gaguuucuagggcccuaga

SEQ ID NO: 452018 - RNA, 19 nt, Artificial Sequence
  Description of Artificial Sequence: Synthetic oligonucleotide
guguccgaauguaggugcc

SEQ ID NO: 452019 - RNA, 19 nt, Artificial Sequence
  Description of Artificial Sequence: Synthetic oligonucleotide
aaguggcagcuaaagugua

SEQ ID NO: 452020 - RNA, 19 nt, Artificial Sequence
  Description of Artificial Sequence: Synthetic oligonucleotide
uuccgaggauaagugucuc

SEQ ID NO: 452021 - RNA, 19 nt, Artificial Sequence
  Description of Artificial Sequence: Synthetic oligonucleotide
accguaccgcgugcguccc

SEQ ID NO: 452022 - RNA, 19 nt, Artificial Sequence
  Description of Artificial Sequence: Synthetic oligonucleotide
acagcucacccaaaagauu

SEQ ID NO: 452023 - RNA, 19 nt, Artificial Sequence
  Description of Artificial Sequence: Synthetic oligonucleotide
accgcgugcgucccgccca

SEQ ID NO: 452024 - RNA, 19 nt, Artificial Sequence
  Description of Artificial Sequence: Synthetic oligonucleotide
uuccugcaucugaccacca

SEQ ID NO: 452025 - RNA, 19 nt, Artificial Sequence
  Description of Artificial Sequence: Synthetic oligonucleotide
ccuuaaucacugaggucac

SEQ ID NO: 452026 - RNA, 19 nt, Artificial Sequence
  Description of Artificial Sequence: Synthetic oligonucleotide
cauccucauaucggagaac

SEQ ID NO: 452027 - RNA, 19 nt, Artificial Sequence
  Description of Artificial Sequence: Synthetic oligonucleotide
gccuuuggaccuaaacccc

SEQ ID NO: 452028 - RNA, 19 nt, Artificial Sequence
  Description of Artificial Sequence: Synthetic oligonucleotide
accagacguuuaugagaug

SEQ ID NO: 452029 - RNA, 19 nt, Artificial Sequence
  Description of Artificial Sequence: Synthetic oligonucleotide
cuacuggaggggucucauc

SEQ ID NO: 452030 - RNA, 19 nt, Artificial Sequence
  Description of Artificial Sequence: Synthetic oligonucleotide
cccaaaagauuccuaaucu

SEQ ID NO: 452031 - RNA, 19 nt, Artificial Sequence
  Description of Artificial Sequence: Synthetic oligonucleotide
caagggccacugagaagug

SEQ ID NO: 452032 - RNA, 19 nt, Artificial Sequence
  Description of Artificial Sequence: Synthetic oligonucleotide
gcccuagaaagcugaguac

SEQ ID NO: 452033 - RNA, 19 nt, Artificial Sequence
  Description of Artificial Sequence: Synthetic oligonucleotide
caacacgccgcaaguaacu

SEQ ID NO: 452034 - RNA, 19 nt, Artificial Sequence
  Description of Artificial Sequence: Synthetic oligonucleotide
ugugccacuguggccuguc

SEQ ID NO: 452035 - RNA, 19 nt, Artificial Sequence
  Description of Artificial Sequence: Synthetic oligonucleotide
gccgcaaguaacucucauc

SEQ ID NO: 452036 - RNA, 19 nt, Artificial Sequence
  Description of Artificial Sequence: Synthetic oligonucleotide
gccagcuucacagcucacc

SEQ ID NO: 452037 - RNA, 19 nt, Artificial Sequence
  Description of Artificial Sequence: Synthetic oligonucleotide
agugucuaauugagccacu

SEQ ID NO: 452038 - RNA, 19 nt, Artificial Sequence
  Description of Artificial Sequence: Synthetic oligonucleotide
agggcuugucaagauuaau

SEQ ID NO: 452039 - RNA, 19 nt, Artificial Sequence
  Description of Artificial Sequence: Synthetic oligonucleotide
cacaaguggcagcuaaagu

SEQ ID NO: 452040 - RNA, 19 nt, Artificial Sequence
  Description of Artificial Sequence: Synthetic oligonucleotide
ccgaggauaagugucucuc

SEQ ID NO: 452041 - RNA, 19 nt, Artificial Sequence
  Description of Artificial Sequence: Synthetic oligonucleotide
gacuacuggaggggucuca

SEQ ID NO: 452042 - RNA, 19 nt, Artificial Sequence
  Description of Artificial Sequence: Synthetic oligonucleotide
ccccacucaagcaagcaga

SEQ ID NO: 452043 - RNA, 19 nt, Artificial Sequence
  Description of Artificial Sequence: Synthetic oligonucleotide
gucgcagguagaaaucacu

SEQ ID NO: 452044 - RNA, 19 nt, Artificial Sequence
  Description of Artificial Sequence: Synthetic oligonucleotide
cguucaaugcacacaauua

SEQ ID NO: 452045 - RNA, 19 nt, Artificial Sequence
  Description of Artificial Sequence: Synthetic oligonucleotide
cucuacccgaaguauucgu

SEQ ID NO: 452046 - RNA, 19 nt, Artificial Sequence
  Description of Artificial Sequence: Synthetic oligonucleotide
ggccccauagcagauugca

SEQ ID NO: 452047 - RNA, 19 nt, Artificial Sequence
  Description of Artificial Sequence: Synthetic oligonucleotide
caaacuaggagaggacuau

SEQ ID NO: 452048 - RNA, 19 nt, Artificial Sequence
  Description of Artificial Sequence: Synthetic oligonucleotide
cagcuucacagcucaccca

SEQ ID NO: 452049 - RNA, 19 nt, Artificial Sequence
  Description of Artificial Sequence: Synthetic oligonucleotide
ccaaacgaguggcucguuc

SEQ ID NO: 452050 - RNA, 19 nt, Artificial Sequence
  Description of Artificial Sequence: Synthetic oligonucleotide
cucuguuugggaccucugu

SEQ ID NO: 452051 - RNA, 19 nt, Artificial Sequence
  Description of Artificial Sequence: Synthetic oligonucleotide
cuacuauaccauggucgca

SEQ ID NO: 452052 - RNA, 19 nt, Artificial Sequence
  Description of Artificial Sequence: Synthetic oligonucleotide
gcaaacuaggagaggacua

SEQ ID NO: 452053 - RNA, 19 nt, Artificial Sequence
  Description of Artificial Sequence: Synthetic oligonucleotide
gucacaaguggcagcuaaa

SEQ ID NO: 452054 - RNA, 19 nt, Artificial Sequence
  Description of Artificial Sequence: Synthetic oligonucleotide
gaacgcacccuccgaaguu

SEQ ID NO: 452055 - RNA, 19 nt, Artificial Sequence
  Description of Artificial Sequence: Synthetic oligonucleotide
guuugggaccucuguucua

SEQ ID NO: 452056 - RNA, 19 nt, Artificial Sequence
  Description of Artificial Sequence: Synthetic oligonucleotide
gcagccggacaauucccac

SEQ ID NO: 452057 - RNA, 19 nt, Artificial Sequence
  Description of Artificial Sequence: Synthetic oligonucleotide
cacuuccgaggauaagugu

SEQ ID NO: 452058 - RNA, 19 nt, Artificial Sequence
  Description of Artificial Sequence: Synthetic oligonucleotide
gugcacacauaguguccga

SEQ ID NO: 452059 - RNA, 19 nt, Artificial Sequence
  Description of Artificial Sequence: Synthetic oligonucleotide
ccagacguuuaugagaugu

SEQ ID NO: 452060 - RNA, 19 nt, Artificial Sequence
  Description of Artificial Sequence: Synthetic oligonucleotide
cagcuaacugagggacuug

SEQ ID NO: 452061 - RNA, 19 nt, Artificial Sequence
  Description of Artificial Sequence: Synthetic oligonucleotide
ccgaaguauucgucggauc

SEQ ID NO: 452062 - RNA, 19 nt, Artificial Sequence
  Description of Artificial Sequence: Synthetic oligonucleotide
cuauaccauggucgcaggu

SEQ ID NO: 452063 - RNA, 19 nt, Artificial Sequence
  Description of Artificial Sequence: Synthetic oligonucleotide
ucgucggauccaggcuacc

SEQ ID NO: 452064 - RNA, 19 nt, Artificial Sequence
  Description of Artificial Sequence: Synthetic oligonucleotide
gugcauccgccaucuugca

SEQ ID NO: 452065 - RNA, 19 nt, Artificial Sequence
  Description of Artificial Sequence: Synthetic oligonucleotide
caugucugaaagugugcuu

SEQ ID NO: 452066 - RNA, 19 nt, Artificial Sequence
  Description of Artificial Sequence: Synthetic oligonucleotide
auccaggcuaccaccucau

SEQ ID NO: 452067 - RNA, 19 nt, Artificial Sequence
  Description of Artificial Sequence: Synthetic oligonucleotide
ccacuuuagauucuggcuu

SEQ ID NO: 452068 - RNA, 19 nt, Artificial Sequence
  Description of Artificial Sequence: Synthetic oligonucleotide
ggucacuuuaggaucuagu

SEQ ID NO: 452069 - RNA, 19 nt, Artificial Sequence
  Description of Artificial Sequence: Synthetic oligonucleotide
cgugcgucccgcccaagcc

SEQ ID NO: 452070 - RNA, 19 nt, Artificial Sequence
  Description of Artificial Sequence: Synthetic oligonucleotide
ggaucuagugugccacugu

SEQ ID NO: 452071 - RNA, 19 nt, Artificial Sequence
  Description of Artificial Sequence: Synthetic oligonucleotide
cuaccaccucaugggaaga

SEQ ID NO: 452072 - RNA, 19 nt, Artificial Sequence
  Description of Artificial Sequence: Synthetic oligonucleotide
guaccgcgugcgucccgcc

SEQ ID NO: 452073 - RNA, 19 nt, Artificial Sequence
  Description of Artificial Sequence: Synthetic oligonucleotide
aggcagugccaugucugaa

SEQ ID NO: 452074 - RNA, 19 nt, Artificial Sequence
  Description of Artificial Sequence: Synthetic oligonucleotide
gugcgucccgcccaagccu

SEQ ID NO: 452075 - RNA, 19 nt, Artificial Sequence
  Description of Artificial Sequence: Synthetic oligonucleotide
gcgugcgucccgcccaagc

SEQ ID NO: 452076 - RNA, 19 nt, Artificial Sequence
  Description of Artificial Sequence: Synthetic oligonucleotide
ccucuuuacugcagcaaua

SEQ ID NO: 452077 - RNA, 19 nt, Artificial Sequence
  Description of Artificial Sequence: Synthetic oligonucleotide
gggacuacuggaggggucu

SEQ ID NO: 452078 - RNA, 19 nt, Artificial Sequence
  Description of Artificial Sequence: Synthetic oligonucleotide
caucaugcauugucaccau

SEQ ID NO: 452079 - RNA, 19 nt, Artificial Sequence
  Description of Artificial Sequence: Synthetic oligonucleotide
ccucacccgaagcugccuc

SEQ ID NO: 452080 - RNA, 19 nt, Artificial Sequence
  Description of Artificial Sequence: Synthetic oligonucleotide
gacuugccuuuggaccuaa

SEQ ID NO: 452081 - RNA, 19 nt, Artificial Sequence
  Description of Artificial Sequence: Synthetic oligonucleotide
gugucuaauugagccacuu

SEQ ID NO: 452082 - RNA, 19 nt, Artificial Sequence
  Description of Artificial Sequence: Synthetic oligonucleotide
ccagaacgcacccuccgaa

SEQ ID NO: 452083 - RNA, 19 nt, Artificial Sequence
  Description of Artificial Sequence: Synthetic oligonucleotide
gcucucguagauaguccuc

SEQ ID NO: 452084 - RNA, 19 nt, Artificial Sequence
  Description of Artificial Sequence: Synthetic oligonucleotide
cuuuagauucuggcuugau

SEQ ID NO: 452085 - RNA, 19 nt, Artificial Sequence
  Description of Artificial Sequence: Synthetic oligonucleotide
caccaacucccaguagcaa

SEQ ID NO: 452086 - RNA, 19 nt, Artificial Sequence
  Description of Artificial Sequence: Synthetic oligonucleotide
cagaaucacuguagucaau

SEQ ID NO: 452087 - RNA, 19 nt, Artificial Sequence
  Description of Artificial Sequence: Synthetic oligonucleotide
ccgaauguaggugccagcu

SEQ ID NO: 452088 - RNA, 19 nt, Artificial Sequence
  Description of Artificial Sequence: Synthetic oligonucleotide
gcagcuaacugagggacuu

SEQ ID NO: 452089 - RNA, 19 nt, Artificial Sequence
  Description of Artificial Sequence: Synthetic oligonucleotide
acgccgcaaguaacucuca

SEQ ID NO: 452090 - RNA, 19 nt, Artificial Sequence
  Description of Artificial Sequence: Synthetic oligonucleotide
ccuaaucuucuuucaggau

SEQ ID NO: 452091 - RNA, 19 nt, Artificial Sequence
  Description of Artificial Sequence: Synthetic oligonucleotide
gcaccguaccgcgugcguc

SEQ ID NO: 452092 - RNA, 19 nt, Artificial Sequence
  Description of Artificial Sequence: Synthetic oligonucleotide
cauugugcagccggacaau

SEQ ID NO: 452093 - RNA, 19 nt, Artificial Sequence
  Description of Artificial Sequence: Synthetic oligonucleotide
gcacucuguugugauuuaa

SEQ ID NO: 452094 - RNA, 19 nt, Artificial Sequence
  Description of Artificial Sequence: Synthetic oligonucleotide
ggggacuacuggagggguc

SEQ ID NO: 452095 - RNA, 19 nt, Artificial Sequence
  Description of Artificial Sequence: Synthetic oligonucleotide
cguaccgcgugcgucccgc

SEQ ID NO: 452096 - RNA, 19 nt, Artificial Sequence
  Description of Artificial Sequence: Synthetic oligonucleotide
accaaacgaguggcucguu

SEQ ID NO: 452097 - RNA, 19 nt, Artificial Sequence
  Description of Artificial Sequence: Synthetic oligonucleotide
guacucuguuugggaccuc

SEQ ID NO: 452098 - RNA, 19 nt, Artificial Sequence
  Description of Artificial Sequence: Synthetic oligonucleotide
ggacuacuggaggggucuc

SEQ ID NO: 452099 - RNA, 19 nt, Artificial Sequence
  Description of Artificial Sequence: Synthetic oligonucleotide
cgaggauaagugucucucu

SEQ ID NO: 452100 - RNA, 19 nt, Artificial Sequence
  Description of Artificial Sequence: Synthetic oligonucleotide
gggcccuagaaagcugagu

SEQ ID NO: 452101 - RNA, 19 nt, Artificial Sequence
  Description of Artificial Sequence: Synthetic oligonucleotide
ccacugagaagugucuaau

SEQ ID NO: 452102 - RNA, 19 nt, Artificial Sequence
  Description of Artificial Sequence: Synthetic oligonucleotide
ccguaccgcgugcgucccg

SEQ ID NO: 452103 - RNA, 19 nt, Artificial Sequence
  Description of Artificial Sequence: Synthetic oligonucleotide
cgucggauccaggcuacca

SEQ ID NO: 452104 - RNA, 19 nt, Artificial Sequence
  Description of Artificial Sequence: Synthetic oligonucleotide
ccauggucgcagguagaaa

SEQ ID NO: 452105 - RNA, 19 nt, Artificial Sequence
  Description of Artificial Sequence: Synthetic oligonucleotide
cccgaaguauucgucggau

SEQ ID NO: 452106 - RNA, 19 nt, Artificial Sequence
  Description of Artificial Sequence: Synthetic oligonucleotide
ccugcacucuguugugauu

SEQ ID NO: 452107 - RNA, 19 nt, Artificial Sequence
  Description of Artificial Sequence: Synthetic oligonucleotide
ccggucacuuuaggaucua

SEQ ID NO: 452108 - RNA, 19 nt, Artificial Sequence
  Description of Artificial Sequence: Synthetic oligonucleotide
cgccgcaaguaacucucau

SEQ ID NO: 452109 - RNA, 19 nt, Artificial Sequence
  Description of Artificial Sequence: Synthetic oligonucleotide
ccgcgugcgucccgcccaa

SEQ ID NO: 452110 - RNA, 19 nt, Artificial Sequence
  Description of Artificial Sequence: Synthetic oligonucleotide
cgcgugcgucccgcccaag

SEQ ID NO: 452111 - RNA, 19 nt, Artificial Sequence
  Description of Artificial Sequence: Synthetic oligonucleotide
aaacauauaauauuagccc

SEQ ID NO: 452112 - RNA, 19 nt, Artificial Sequence
  Description of Artificial Sequence: Synthetic oligonucleotide
uguauauaagaucuuuugg

SEQ ID NO: 452113 - RNA, 19 nt, Artificial Sequence
  Description of Artificial Sequence: Synthetic oligonucleotide
aauauuagcccucuaacca

SEQ ID NO: 452114 - RNA, 19 nt, Artificial Sequence
  Description of Artificial Sequence: Synthetic oligonucleotide
agauaugagaaauacuugg

SEQ ID NO: 452115 - RNA, 19 nt, Artificial Sequence
  Description of Artificial Sequence: Synthetic oligonucleotide
uaaugugacggacacaugg

SEQ ID NO: 452116 - RNA, 19 nt, Artificial Sequence
  Description of Artificial Sequence: Synthetic oligonucleotide
acaauuagaacuuguauag

SEQ ID NO: 452117 - RNA, 19 nt, Artificial Sequence
  Description of Artificial Sequence: Synthetic oligonucleotide
uugacuuauauuuauauaa

SEQ ID NO: 452118 - RNA, 19 nt, Artificial Sequence
  Description of Artificial Sequence: Synthetic oligonucleotide
uauagauuuaucuuaggga

SEQ ID NO: 452119 - RNA, 19 nt, Artificial Sequence
  Description of Artificial Sequence: Synthetic oligonucleotide
aacauauaauauuagcccu

SEQ ID NO: 452120 - RNA, 19 nt, Artificial Sequence
  Description of Artificial Sequence: Synthetic oligonucleotide
uauauguuaucuuuguaug

SEQ ID NO: 452121 - RNA, 19 nt, Artificial Sequence
  Description of Artificial Sequence: Synthetic oligonucleotide
aauuagaacuuguauagau

SEQ ID NO: 452122 - RNA, 19 nt, Artificial Sequence
  Description of Artificial Sequence: Synthetic oligonucleotide
guauagauuuaucuuaggg

SEQ ID NO: 452123 - RNA, 19 nt, Artificial Sequence
  Description of Artificial Sequence: Synthetic oligonucleotide
aacaaccacccauaauucc

SEQ ID NO: 452124 - RNA, 19 nt, Artificial Sequence
  Description of Artificial Sequence: Synthetic oligonucleotide
ugucauuuagcacucagca

SEQ ID NO: 452125 - RNA, 19 nt, Artificial Sequence
  Description of Artificial Sequence: Synthetic oligonucleotide
uauauaagaucuuuuggca

SEQ ID NO: 452126 - RNA, 19 nt, Artificial Sequence
  Description of Artificial Sequence: Synthetic oligonucleotide
ugauugggcaacaauauca

SEQ ID NO: 452127 - RNA, 19 nt, Artificial Sequence
  Description of Artificial Sequence: Synthetic oligonucleotide
auauguuaucuuuguaugc

SEQ ID NO: 452128 - RNA, 19 nt, Artificial Sequence
  Description of Artificial Sequence: Synthetic oligonucleotide
auagauuuaucuuagggaa

SEQ ID NO: 452129 - RNA, 19 nt, Artificial Sequence
  Description of Artificial Sequence: Synthetic oligonucleotide
uguaggauaaauucuguga

SEQ ID NO: 452130 - RNA, 19 nt, Artificial Sequence
  Description of Artificial Sequence: Synthetic oligonucleotide
ugaagauaaggauggaucc

SEQ ID NO: 452131 - RNA, 19 nt, Artificial Sequence
  Description of Artificial Sequence: Synthetic oligonucleotide
uugacgaugggucuggugc

SEQ ID NO: 452132 - RNA, 19 nt, Artificial Sequence
  Description of Artificial Sequence: Synthetic oligonucleotide
aagacuuaaauuauacaag

SEQ ID NO: 452133 - RNA, 19 nt, Artificial Sequence
  Description of Artificial Sequence: Synthetic oligonucleotide
uucuguacuagaaaauuug

SEQ ID NO: 452134 - RNA, 19 nt, Artificial Sequence
  Description of Artificial Sequence: Synthetic oligonucleotide
uacuacaugaacagucugg

SEQ ID NO: 452135 - RNA, 19 nt, Artificial Sequence
  Description of Artificial Sequence: Synthetic oligonucleotide
uaauauuagcccucuaacc

SEQ ID NO: 452136 - RNA, 19 nt, Artificial Sequence
  Description of Artificial Sequence: Synthetic oligonucleotide
acauagauaugagaaauac

SEQ ID NO: 452137 - RNA, 19 nt, Artificial Sequence
  Description of Artificial Sequence: Synthetic oligonucleotide
aaagaguugggcucuagca

SEQ ID NO: 452138 - RNA, 19 nt, Artificial Sequence
  Description of Artificial Sequence: Synthetic oligonucleotide
auauaaguaguauuuacaa

SEQ ID NO: 452139 - RNA, 19 nt, Artificial Sequence
  Description of Artificial Sequence: Synthetic oligonucleotide
auaaggauggauccgaaga

SEQ ID NO: 452140 - RNA, 19 nt, Artificial Sequence
  Description of Artificial Sequence: Synthetic oligonucleotide
uucaguacugucaugggcu

SEQ ID NO: 452141 - RNA, 19 nt, Artificial Sequence
  Description of Artificial Sequence: Synthetic oligonucleotide
uuuguaugcaauuuccuuc

SEQ ID NO: 452142 - RNA, 19 nt, Artificial Sequence
  Description of Artificial Sequence: Synthetic oligonucleotide
ugaguucugaaacauagau

SEQ ID NO: 452143 - RNA, 19 nt, Artificial Sequence
  Description of Artificial Sequence: Synthetic oligonucleotide
uauuauucugggcugcgag

SEQ ID NO: 452144 - RNA, 19 nt, Artificial Sequence
  Description of Artificial Sequence: Synthetic oligonucleotide
aauaacugacuccacuacu

SEQ ID NO: 452145 - RNA, 19 nt, Artificial Sequence
  Description of Artificial Sequence: Synthetic oligonucleotide
uuuggugugucaauuaaaa

SEQ ID NO: 452146 - RNA, 19 nt, Artificial Sequence
  Description of Artificial Sequence: Synthetic oligonucleotide
ucuguacuagaaaauuugc

SEQ ID NO: 452147 - RNA, 19 nt, Artificial Sequence
  Description of Artificial Sequence: Synthetic oligonucleotide
aauacuuauagcaacuaaa

SEQ ID NO: 452148 - RNA, 19 nt, Artificial Sequence
  Description of Artificial Sequence: Synthetic oligonucleotide
acaguugugagacuguaug

SEQ ID NO: 452149 - RNA, 19 nt, Artificial Sequence
  Description of Artificial Sequence: Synthetic oligonucleotide
ucuaaugugacggacacau

SEQ ID NO: 452150 - RNA, 19 nt, Artificial Sequence
  Description of Artificial Sequence: Synthetic oligonucleotide
gauggaauggcuuguagga

SEQ ID NO: 452151 - RNA, 19 nt, Artificial Sequence
  Description of Artificial Sequence: Synthetic oligonucleotide
ucaucgucuauguauauaa

SEQ ID NO: 452152 - RNA, 19 nt, Artificial Sequence
  Description of Artificial Sequence: Synthetic oligonucleotide
aggaagcuaauacaguguc

SEQ ID NO: 452153 - RNA, 19 nt, Artificial Sequence
  Description of Artificial Sequence: Synthetic oligonucleotide
uggauauauguuaucuuug

SEQ ID NO: 452154 - RNA, 19 nt, Artificial Sequence
  Description of Artificial Sequence: Synthetic oligonucleotide
auugcuuguaaggaccugc

SEQ ID NO: 452155 - RNA, 19 nt, Artificial Sequence
  Description of Artificial Sequence: Synthetic oligonucleotide
uguacuacaugaacagucu

SEQ ID NO: 452156 - RNA, 19 nt, Artificial Sequence
  Description of Artificial Sequence: Synthetic oligonucleotide
agguuauuuccagacaacc

SEQ ID NO: 452157 - RNA, 19 nt, Artificial Sequence
  Description of Artificial Sequence: Synthetic oligonucleotide
ugacguuucuuucaguacu

SEQ ID NO: 452158 - RNA, 19 nt, Artificial Sequence
  Description of Artificial Sequence: Synthetic oligonucleotide
cucauuauguaguucuggc

SEQ ID NO: 452159 - RNA, 19 nt, Artificial Sequence
  Description of Artificial Sequence: Synthetic oligonucleotide
uuucaguacugucaugggc

SEQ ID NO: 452160 - RNA, 19 nt, Artificial Sequence
  Description of Artificial Sequence: Synthetic oligonucleotide
uguugacuuauauuuauau

SEQ ID NO: 452161 - RNA, 19 nt, Artificial Sequence
  Description of Artificial Sequence: Synthetic oligonucleotide
uaagugacaucauaaaauu

SEQ ID NO: 452162 - RNA, 19 nt, Artificial Sequence
  Description of Artificial Sequence: Synthetic oligonucleotide
auauuauuauucugggcug

SEQ ID NO: 452163 - RNA, 19 nt, Artificial Sequence
  Description of Artificial Sequence: Synthetic oligonucleotide
auaaguuucuugcaucuga

SEQ ID NO: 452164 - RNA, 19 nt, Artificial Sequence
  Description of Artificial Sequence: Synthetic oligonucleotide
ugaagauacucuugaucgg

SEQ ID NO: 452165 - RNA, 19 nt, Artificial Sequence
  Description of Artificial Sequence: Synthetic oligonucleotide
uguauagauuuaucuuagg

SEQ ID NO: 452166 - RNA, 19 nt, Artificial Sequence
  Description of Artificial Sequence: Synthetic oligonucleotide
uuuagaggauuccuaaaau

SEQ ID NO: 452167 - RNA, 19 nt, Artificial Sequence
  Description of Artificial Sequence: Synthetic oligonucleotide
ucuacuucagaaacuugga

SEQ ID NO: 452168 - RNA, 19 nt, Artificial Sequence
  Description of Artificial Sequence: Synthetic oligonucleotide
uguaucguccuaauacucu

SEQ ID NO: 452169 - RNA, 19 nt, Artificial Sequence
  Description of Artificial Sequence: Synthetic oligonucleotide
uguagcaugacguuucuuu

SEQ ID NO: 452170 - RNA, 19 nt, Artificial Sequence
  Description of Artificial Sequence: Synthetic oligonucleotide
ugaauccaaacugacagcu

SEQ ID NO: 452171 - RNA, 19 nt, Artificial Sequence
  Description of Artificial Sequence: Synthetic oligonucleotide
aacuuggauccucaucguc

SEQ ID NO: 452172 - RNA, 19 nt, Artificial Sequence
  Description of Artificial Sequence: Synthetic oligonucleotide
aagaacucuacuucagaaa

SEQ ID NO: 452173 - RNA, 19 nt, Artificial Sequence
  Description of Artificial Sequence: Synthetic oligonucleotide
cuugauuccgacuugaugu

SEQ ID NO: 452174 - RNA, 19 nt, Artificial Sequence
  Description of Artificial Sequence: Synthetic oligonucleotide
gaagauaaggauggauccg

SEQ ID NO: 452175 - RNA, 19 nt, Artificial Sequence
  Description of Artificial Sequence: Synthetic oligonucleotide
ugaucgguuugcuugauuc

SEQ ID NO: 452176 - RNA, 19 nt, Artificial Sequence
  Description of Artificial Sequence: Synthetic oligonucleotide
uuccuauauaaauuucaug

SEQ ID NO: 452177 - RNA, 19 nt, Artificial Sequence
  Description of Artificial Sequence: Synthetic oligonucleotide
uggcuuguaggauaaauuc

SEQ ID NO: 452178 - RNA, 19 nt, Artificial Sequence
  Description of Artificial Sequence: Synthetic oligonucleotide
aaugugacggacacauggg

SEQ ID NO: 452179 - RNA, 19 nt, Artificial Sequence
  Description of Artificial Sequence: Synthetic oligonucleotide
caucaaguaaggcuguggc

SEQ ID NO: 452180 - RNA, 19 nt, Artificial Sequence
  Description of Artificial Sequence: Synthetic oligonucleotide
ugcaucugagucaagacuu

SEQ ID NO: 452181 - RNA, 19 nt, Artificial Sequence
  Description of Artificial Sequence: Synthetic oligonucleotide
augacguuucuuucaguac

SEQ ID NO: 452182 - RNA, 19 nt, Artificial Sequence
  Description of Artificial Sequence: Synthetic oligonucleotide
aagacaauggaaggaggag

SEQ ID NO: 452183 - RNA, 19 nt, Artificial Sequence
  Description of Artificial Sequence: Synthetic oligonucleotide
acuggauacuaccaucaag

SEQ ID NO: 452184 - RNA, 19 nt, Artificial Sequence
  Description of Artificial Sequence: Synthetic oligonucleotide
gauaaggauggauccgaag

SEQ ID NO: 452185 - RNA, 19 nt, Artificial Sequence
  Description of Artificial Sequence: Synthetic oligonucleotide
gauacucuugaucgguuug

SEQ ID NO: 452186 - RNA, 19 nt, Artificial Sequence
  Description of Artificial Sequence: Synthetic oligonucleotide
ugugacggacacaugggug

SEQ ID NO: 452187 - RNA, 19 nt, Artificial Sequence
  Description of Artificial Sequence: Synthetic oligonucleotide
ucauuauguaguucuggcu

SEQ ID NO: 452188 - RNA, 19 nt, Artificial Sequence
  Description of Artificial Sequence: Synthetic oligonucleotide
uggggagugaggcuccugg

SEQ ID NO: 452189 - RNA, 19 nt, Artificial Sequence
  Description of Artificial Sequence: Synthetic oligonucleotide
  modified_base (4)..(4): a, c, u, g, unknown or other
uucngugauuguagcauga

SEQ ID NO: 452190 - RNA, 19 nt, Artificial Sequence
  Description of Artificial Sequence: Synthetic oligonucleotide
ucccuuggcccuuugaagc

SEQ ID NO: 452191 - RNA, 19 nt, Artificial Sequence
  Description of Artificial Sequence: Synthetic oligonucleotide
uauuauuauucugggcugc

SEQ ID NO: 452192 - RNA, 19 nt, Artificial Sequence
  Description of Artificial Sequence: Synthetic oligonucleotide
acauauaauauuagcccuc

SEQ ID NO: 452193 - RNA, 19 nt, Artificial Sequence
  Description of Artificial Sequence: Synthetic oligonucleotide
uauguuaacaaggcuggcu

SEQ ID NO: 452194 - RNA, 19 nt, Artificial Sequence
  Description of Artificial Sequence: Synthetic oligonucleotide
agcaguuaugcuuuuguaa

SEQ ID NO: 452195 - RNA, 19 nt, Artificial Sequence
  Description of Artificial Sequence: Synthetic oligonucleotide
auacucuugaucgguuugc

SEQ ID NO: 452196 - RNA, 19 nt, Artificial Sequence
  Description of Artificial Sequence: Synthetic oligonucleotide
uggagcuuuagaauucccu

SEQ ID NO: 452197 - RNA, 19 nt, Artificial Sequence
  Description of Artificial Sequence: Synthetic oligonucleotide
agcuaauacagugucaagu

SEQ ID NO: 452198 - RNA, 19 nt, Artificial Sequence
  Description of Artificial Sequence: Synthetic oligonucleotide
auaaauucugugagcuggc

SEQ ID NO: 452199 - RNA, 19 nt, Artificial Sequence
  Description of Artificial Sequence: Synthetic oligonucleotide
augagaaauacuugguuuu

SEQ ID NO: 452200 - RNA, 19 nt, Artificial Sequence
  Description of Artificial Sequence: Synthetic oligonucleotide
ugacacgacuacuggaacc

SEQ ID NO: 452201 - RNA, 19 nt, Artificial Sequence
  Description of Artificial Sequence: Synthetic oligonucleotide
gaagcuaauacagugucaa

SEQ ID NO: 452202 - RNA, 19 nt, Artificial Sequence
  Description of Artificial Sequence: Synthetic oligonucleotide
agcaugacguuucuuucag

SEQ ID NO: 452203 - RNA, 19 nt, Artificial Sequence
  Description of Artificial Sequence: Synthetic oligonucleotide
uucaaaugaucuucagccu

SEQ ID NO: 452204 - RNA, 19 nt, Artificial Sequence
  Description of Artificial Sequence: Synthetic oligonucleotide
aaacguuuagaggauuccu

SEQ ID NO: 452205 - RNA, 19 nt, Artificial Sequence
  Description of Artificial Sequence: Synthetic oligonucleotide
aauaaguuucuugcaucug

SEQ ID NO: 452206 - RNA, 19 nt, Artificial Sequence
  Description of Artificial Sequence: Synthetic oligonucleotide
uguaugcaacugcugguug

SEQ ID NO: 452207 - RNA, 19 nt, Artificial Sequence
  Description of Artificial Sequence: Synthetic oligonucleotide
gagggaaacccauuugaac

SEQ ID NO: 452208 - RNA, 19 nt, Artificial Sequence
  Description of Artificial Sequence: Synthetic oligonucleotide
uuaugguugugucuccuuc

SEQ ID NO: 452209 - RNA, 19 nt, Artificial Sequence
  Description of Artificial Sequence: Synthetic oligonucleotide
  modified_base (2)..(2): a, c, u, g, unknown or other
cngugauuguagcaugacg

SEQ ID NO: 452210 - RNA, 19 nt, Artificial Sequence
  Description of Artificial Sequence: Synthetic oligonucleotide
aagcuaauacagugucaag

SEQ ID NO: 452211 - RNA, 19 nt, Artificial Sequence
  Description of Artificial Sequence: Synthetic oligonucleotide
aauggcuuguaggauaaau

SEQ ID NO: 452212 - RNA, 19 nt, Artificial Sequence
  Description of Artificial Sequence: Synthetic oligonucleotide
aacuucgagagaaggucac

SEQ ID NO: 452213 - RNA, 19 nt, Artificial Sequence
  Description of Artificial Sequence: Synthetic oligonucleotide
ccagacaaccaaaacauag

SEQ ID NO: 452214 - RNA, 19 nt, Artificial Sequence
  Description of Artificial Sequence: Synthetic oligonucleotide
agaacuuuacaugauuuaa

SEQ ID NO: 452215 - RNA, 19 nt, Artificial Sequence
  Description of Artificial Sequence: Synthetic oligonucleotide
uguuaucuuuguaugcaau

SEQ ID NO: 452216 - RNA, 19 nt, Artificial Sequence
  Description of Artificial Sequence: Synthetic oligonucleotide
caucuaaugugacggacac

SEQ ID NO: 452217 - RNA, 19 nt, Artificial Sequence
  Description of Artificial Sequence: Synthetic oligonucleotide
auuauuauucugggcugcg

SEQ ID NO: 452218 - RNA, 19 nt, Artificial Sequence
  Description of Artificial Sequence: Synthetic oligonucleotide
gucaagacuuaaauuauac

SEQ ID NO: 452219 - RNA, 19 nt, Artificial Sequence
  Description of Artificial Sequence: Synthetic oligonucleotide
aucgguuugcuugauuccg

SEQ ID NO: 452220 - RNA, 19 nt, Artificial Sequence
  Description of Artificial Sequence: Synthetic oligonucleotide
gauuguagcaugacguuuc

SEQ ID NO: 452221 - RNA, 19 nt, Artificial Sequence
  Description of Artificial Sequence: Synthetic oligonucleotide
gaucgguuugcuugauucc

SEQ ID NO: 452222 - RNA, 19 nt, Artificial Sequence
  Description of Artificial Sequence: Synthetic oligonucleotide
uugauuccgacuugaugug

SEQ ID NO: 452223 - RNA, 19 nt, Artificial Sequence
  Description of Artificial Sequence: Synthetic oligonucleotide
ucuugaucgguuugcuuga

SEQ ID NO: 452224 - RNA, 19 nt, Artificial Sequence
  Description of Artificial Sequence: Synthetic oligonucleotide
guaucguccuaauacucug

SEQ ID NO: 452225 - RNA, 19 nt, Artificial Sequence
  Description of Artificial Sequence: Synthetic oligonucleotide
aagaucucauuauguaguu

SEQ ID NO: 452226 - RNA, 19 nt, Artificial Sequence
  Description of Artificial Sequence: Synthetic oligonucleotide
uggcacuugacgauggguc

SEQ ID NO: 452227 - RNA, 19 nt, Artificial Sequence
  Description of Artificial Sequence: Synthetic oligonucleotide
ucauguugacuuauauuua

SEQ ID NO: 452228 - RNA, 19 nt, Artificial Sequence
  Description of Artificial Sequence: Synthetic oligonucleotide
ucggcuaggacgcucgcga

SEQ ID NO: 452229 - RNA, 19 nt, Artificial Sequence
  Description of Artificial Sequence: Synthetic oligonucleotide
ggagcuuuagaauucccug

SEQ ID NO: 452230 - RNA, 19 nt, Artificial Sequence
  Description of Artificial Sequence: Synthetic oligonucleotide
auacuuauagcaacuaaaa

SEQ ID NO: 452231 - RNA, 19 nt, Artificial Sequence
  Description of Artificial Sequence: Synthetic oligonucleotide
guaauaacugacuccacua

SEQ ID NO: 452232 - RNA, 19 nt, Artificial Sequence
  Description of Artificial Sequence: Synthetic oligonucleotide
auauuagcccucuaaccau

SEQ ID NO: 452233 - RNA, 19 nt, Artificial Sequence
  Description of Artificial Sequence: Synthetic oligonucleotide
agauuuaucuuagggaaaa

SEQ ID NO: 452234 - RNA, 19 nt, Artificial Sequence
  Description of Artificial Sequence: Synthetic oligonucleotide
uccuaauacucugaacuga

SEQ ID NO: 452235 - RNA, 19 nt, Artificial Sequence
  Description of Artificial Sequence: Synthetic oligonucleotide
aguugugagacuguaugca

SEQ ID NO: 452236 - RNA, 19 nt, Artificial Sequence
  Description of Artificial Sequence: Synthetic oligonucleotide
aauacagugucaaguuaga

SEQ ID NO: 452237 - RNA, 19 nt, Artificial Sequence
  Description of Artificial Sequence: Synthetic oligonucleotide
ucuaugcuggaacuuggau

SEQ ID NO: 452238 - RNA, 19 nt, Artificial Sequence
  Description of Artificial Sequence: Synthetic oligonucleotide
cuggauacuaccaucaagu

SEQ ID NO: 452239 - RNA, 19 nt, Artificial Sequence
  Description of Artificial Sequence: Synthetic oligonucleotide
cuaauacucugaacugaag

SEQ ID NO: 452240 - RNA, 19 nt, Artificial Sequence
  Description of Artificial Sequence: Synthetic oligonucleotide
cuucagaggaacuaaauau

SEQ ID NO: 452241 - RNA, 19 nt, Artificial Sequence
  Description of Artificial Sequence: Synthetic oligonucleotide
ucuuuaaacucuggggagu

SEQ ID NO: 452242 - RNA, 19 nt, Artificial Sequence
  Description of Artificial Sequence: Synthetic oligonucleotide
aagguuuucuguacuagaa

SEQ ID NO: 452243 - RNA, 19 nt, Artificial Sequence
  Description of Artificial Sequence: Synthetic oligonucleotide
cuucugaugccuguguggc

SEQ ID NO: 452244 - RNA, 19 nt, Artificial Sequence
  Description of Artificial Sequence: Synthetic oligonucleotide
gcuuugauaacagagguga

SEQ ID NO: 452245 - RNA, 19 nt, Artificial Sequence
  Description of Artificial Sequence: Synthetic oligonucleotide
aguaacuauuuuaacaauu

SEQ ID NO: 452246 - RNA, 19 nt, Artificial Sequence
  Description of Artificial Sequence: Synthetic oligonucleotide
gucaagcuaagugacauca

SEQ ID NO: 452247 - RNA, 19 nt, Artificial Sequence
  Description of Artificial Sequence: Synthetic oligonucleotide
guaugcaacugcugguugc

SEQ ID NO: 452248 - RNA, 19 nt, Artificial Sequence
  Description of Artificial Sequence: Synthetic oligonucleotide
guccuaauacucugaacug

SEQ ID NO: 452249 - RNA, 19 nt, Artificial Sequence
  Description of Artificial Sequence: Synthetic oligonucleotide
uagcaugacguuucuuuca

SEQ ID NO: 452250 - RNA, 19 nt, Artificial Sequence
  Description of Artificial Sequence: Synthetic oligonucleotide
uuccugagcuuugauaaca

SEQ ID NO: 452251 - RNA, 19 nt, Artificial Sequence
  Description of Artificial Sequence: Synthetic oligonucleotide
cugguuaugguugugucuc

SEQ ID NO: 452252 - RNA, 19 nt, Artificial Sequence
  Description of Artificial Sequence: Synthetic oligonucleotide
cacgacuacuggaaccugg

SEQ ID NO: 452253 - RNA, 19 nt, Artificial Sequence
  Description of Artificial Sequence: Synthetic oligonucleotide
uccucaucgucuauguaua

SEQ ID NO: 452254 - RNA, 19 nt, Artificial Sequence
  Description of Artificial Sequence: Synthetic oligonucleotide
agcuaagugacaucauaaa

SEQ ID NO: 452255 - RNA, 19 nt, Artificial Sequence
  Description of Artificial Sequence: Synthetic oligonucleotide
aucaaguaaggcuguggcu

SEQ ID NO: 452256 - RNA, 19 nt, Artificial Sequence
  Description of Artificial Sequence: Synthetic oligonucleotide
gacgcucgcgaccaggagc

SEQ ID NO: 452257 - RNA, 19 nt, Artificial Sequence
  Description of Artificial Sequence: Synthetic oligonucleotide
aacuaaagucaagcuaagu

SEQ ID NO: 452258 - RNA, 19 nt, Artificial Sequence
  Description of Artificial Sequence: Synthetic oligonucleotide
cuggcuguacuacaugaac

SEQ ID NO: 452259 - RNA, 19 nt, Artificial Sequence
  Description of Artificial Sequence: Synthetic oligonucleotide
acuagcucaggacucuggu

SEQ ID NO: 452260 - RNA, 19 nt, Artificial Sequence
  Description of Artificial Sequence: Synthetic oligonucleotide
gaacuggauacuaccauca

SEQ ID NO: 452261 - RNA, 19 nt, Artificial Sequence
  Description of Artificial Sequence: Synthetic oligonucleotide
uaucguccuaauacucuga

SEQ ID NO: 452262 - RNA, 19 nt, Artificial Sequence
  Description of Artificial Sequence: Synthetic oligonucleotide
acguuuagaggauuccuaa

SEQ ID NO: 452263 - RNA, 19 nt, Artificial Sequence
  Description of Artificial Sequence: Synthetic oligonucleotide
acaugggugauugggcaac

SEQ ID NO: 452264 - RNA, 19 nt, Artificial Sequence
  Description of Artificial Sequence: Synthetic oligonucleotide
ucaguacugucaugggcug

SEQ ID NO: 452265 - RNA, 19 nt, Artificial Sequence
  Description of Artificial Sequence: Synthetic oligonucleotide
gaagcccugucucucucag

SEQ ID NO: 452266 - RNA, 19 nt, Artificial Sequence
  Description of Artificial Sequence: Synthetic oligonucleotide
ggauccgaagacucuaugc

SEQ ID NO: 452267 - RNA, 19 nt, Artificial Sequence
  Description of Artificial Sequence: Synthetic oligonucleotide
caacuaaagucaagcuaag

SEQ ID NO: 452268 - RNA, 19 nt, Artificial Sequence
  Description of Artificial Sequence: Synthetic oligonucleotide
guagcaugacguuucuuuc

SEQ ID NO: 452269 - RNA, 19 nt, Artificial Sequence
  Description of Artificial Sequence: Synthetic oligonucleotide
uauuagcccucuaaccaua

SEQ ID NO: 452270 - RNA, 19 nt, Artificial Sequence
  Description of Artificial Sequence: Synthetic oligonucleotide
aauuugcagacaacuaauu

SEQ ID NO: 452271 - RNA, 19 nt, Artificial Sequence
  Description of Artificial Sequence: Synthetic oligonucleotide
cucucagaacagcaguuug

SEQ ID NO: 452272 - RNA, 19 nt, Artificial Sequence
  Description of Artificial Sequence: Synthetic oligonucleotide
acuuggauccucaucgucu

SEQ ID NO: 452273 - RNA, 19 nt, Artificial Sequence
  Description of Artificial Sequence: Synthetic oligonucleotide
acuucgagagaaggucacc

SEQ ID NO: 452274 - RNA, 19 nt, Artificial Sequence
  Description of Artificial Sequence: Synthetic oligonucleotide
caggugacacgacuacugg

SEQ ID NO: 452275 - RNA, 19 nt, Artificial Sequence
  Description of Artificial Sequence: Synthetic oligonucleotide
cauugcagauggauugaac

SEQ ID NO: 452276 - RNA, 19 nt, Artificial Sequence
  Description of Artificial Sequence: Synthetic oligonucleotide
caugacguuucuuucagua

SEQ ID NO: 452277 - RNA, 19 nt, Artificial Sequence
  Description of Artificial Sequence: Synthetic oligonucleotide
agcccucuaaccauaauga

SEQ ID NO: 452278 - RNA, 19 nt, Artificial Sequence
  Description of Artificial Sequence: Synthetic oligonucleotide
uuggagcuuuagaauuccc

SEQ ID NO: 452279 - RNA, 19 nt, Artificial Sequence
  Description of Artificial Sequence: Synthetic oligonucleotide
cuguaucguccuaauacuc

SEQ ID NO: 452280 - RNA, 19 nt, Artificial Sequence
  Description of Artificial Sequence: Synthetic oligonucleotide
agcccugucucucucagaa

SEQ ID NO: 452281 - RNA, 19 nt, Artificial Sequence
  Description of Artificial Sequence: Synthetic oligonucleotide
ggacacaugggugauuggg

SEQ ID NO: 452282 - RNA, 19 nt, Artificial Sequence
  Description of Artificial Sequence: Synthetic oligonucleotide
  modified_base (2)..(2): a, c, u, g, unknown or other
  modified_base (6)..(6): a, c, u, g, unknown or other
gnuucngugauuguagcau

SEQ ID NO: 452283 - RNA, 19 nt, Artificial Sequence
  Description of Artificial Sequence: Synthetic oligonucleotide
cugguugccaggugacacg

SEQ ID NO: 452284 - RNA, 19 nt, Artificial Sequence
  Description of Artificial Sequence: Synthetic oligonucleotide
uaccugagagggaaaccca

SEQ ID NO: 452285 - RNA, 19 nt, Artificial Sequence
  Description of Artificial Sequence: Synthetic oligonucleotide
gugacggacacauggguga

SEQ ID NO: 452286 - RNA, 19 nt, Artificial Sequence
  Description of Artificial Sequence: Synthetic oligonucleotide
cuggaucccgggaggagcg

SEQ ID NO: 452287 - RNA, 19 nt, Artificial Sequence
  Description of Artificial Sequence: Synthetic oligonucleotide
augugacggacacaugggu

SEQ ID NO: 452288 - RNA, 19 nt, Artificial Sequence
  Description of Artificial Sequence: Synthetic oligonucleotide
auuguagcaugacguuucu

SEQ ID NO: 452289 - RNA, 19 nt, Artificial Sequence
  Description of Artificial Sequence: Synthetic oligonucleotide
gacguuucuuucaguacug

SEQ ID NO: 452290 - RNA, 19 nt, Artificial Sequence
  Description of Artificial Sequence: Synthetic oligonucleotide
uuauuauucugggcugcga

SEQ ID NO: 452291 - RNA, 19 nt, Artificial Sequence
  Description of Artificial Sequence: Synthetic oligonucleotide
ucgguuugcuugauuccga

SEQ ID NO: 452292 - RNA, 19 nt, Artificial Sequence
  Description of Artificial Sequence: Synthetic oligonucleotide
acggacacaugggugauug

SEQ ID NO: 452293 - RNA, 19 nt, Artificial Sequence
  Description of Artificial Sequence: Synthetic oligonucleotide
  modified_base (3)..(3): a, c, u, g, unknown or other
ucngugauuguagcaugac

SEQ ID NO: 452294 - RNA, 19 nt, Artificial Sequence
  Description of Artificial Sequence: Synthetic oligonucleotide
agaugaauccaaacugaca

SEQ ID NO: 452295 - RNA, 19 nt, Artificial Sequence
  Description of Artificial Sequence: Synthetic oligonucleotide
aggaccgcgggauggagcu

SEQ ID NO: 452296 - RNA, 19 nt, Artificial Sequence
  Description of Artificial Sequence: Synthetic oligonucleotide
gauggauugaacauugcuu

SEQ ID NO: 452297 - RNA, 19 nt, Artificial Sequence
  Description of Artificial Sequence: Synthetic oligonucleotide
uggauacuaccaucaagua

SEQ ID NO: 452298 - RNA, 19 nt, Artificial Sequence
  Description of Artificial Sequence: Synthetic oligonucleotide
ugggugauugggcaacaau

SEQ ID NO: 452299 - RNA, 19 nt, Artificial Sequence
  Description of Artificial Sequence: Synthetic oligonucleotide
cagaaacuuggauauaugu

SEQ ID NO: 452300 - RNA, 19 nt, Artificial Sequence
  Description of Artificial Sequence: Synthetic oligonucleotide
ugguuguucccuuggcccu

SEQ ID NO: 452301 - RNA, 19 nt, Artificial Sequence
  Description of Artificial Sequence: Synthetic oligonucleotide
ugcagauggauugaacauu

SEQ ID NO: 452302 - RNA, 19 nt, Artificial Sequence
  Description of Artificial Sequence: Synthetic oligonucleotide
ugauaacagaggugaucac

SEQ ID NO: 452303 - RNA, 19 nt, Artificial Sequence
  Description of Artificial Sequence: Synthetic oligonucleotide
gaacuucgagagaagguca

SEQ ID NO: 452304 - RNA, 19 nt, Artificial Sequence
  Description of Artificial Sequence: Synthetic oligonucleotide
ugauuguagcaugacguuu

SEQ ID NO: 452305 - RNA, 19 nt, Artificial Sequence
  Description of Artificial Sequence: Synthetic oligonucleotide
  modified_base (3)..(3): a, c, u, g, unknown or other
  modified_base (7)..(7): a, c, u, g, unknown or other
ggnuucngugauuguagca

SEQ ID NO: 452306 - RNA, 19 nt, Artificial Sequence
  Description of Artificial Sequence: Synthetic oligonucleotide
ugacgaugggucuggugcu

SEQ ID NO: 452307 - RNA, 19 nt, Artificial Sequence
  Description of Artificial Sequence: Synthetic oligonucleotide
cucgcgaccaggagcuccg

SEQ ID NO: 452308 - RNA, 19 nt, Artificial Sequence
  Description of Artificial Sequence: Synthetic oligonucleotide
ugcagccaacuaaagucaa

SEQ ID NO: 452309 - RNA, 19 nt, Artificial Sequence
  Description of Artificial Sequence: Synthetic oligonucleotide
cuuuuauuccuggacuuga

SEQ ID NO: 452310 - RNA, 19 nt, Artificial Sequence
  Description of Artificial Sequence: Synthetic oligonucleotide
aucguccuaauacucugaa

SEQ ID NO: 452311 - RNA, 19 nt, Artificial Sequence
  Description of Artificial Sequence: Synthetic oligonucleotide
gaccgcgggauggagcucg

SEQ ID NO: 452312 - RNA, 19 nt, Artificial Sequence
  Description of Artificial Sequence: Synthetic oligonucleotide
aggugacacgacuacugga

SEQ ID NO: 452313 - RNA, 19 nt, Artificial Sequence
  Description of Artificial Sequence: Synthetic oligonucleotide
ucguccuaauacucugaac

SEQ ID NO: 452314 - RNA, 19 nt, Artificial Sequence
  Description of Artificial Sequence: Synthetic oligonucleotide
auacuaccaucaaguaagg

SEQ ID NO: 452315 - RNA, 19 nt, Artificial Sequence
  Description of Artificial Sequence: Synthetic oligonucleotide
agaggauuccuaaaauuuu

SEQ ID NO: 452316 - RNA, 19 nt, Artificial Sequence
  Description of Artificial Sequence: Synthetic oligonucleotide
uacuaccaucaaguaaggc

SEQ ID NO: 452317 - RNA, 19 nt, Artificial Sequence
  Description of Artificial Sequence: Synthetic oligonucleotide
ggugggcuaaagacaaugg

SEQ ID NO: 452318 - RNA, 19 nt, Artificial Sequence
  Description of Artificial Sequence: Synthetic oligonucleotide
acuacuagcucaggacucu

SEQ ID NO: 452319 - RNA, 19 nt, Artificial Sequence
  Description of Artificial Sequence: Synthetic oligonucleotide
  modified_base (5)..(5): a, c, u, g, unknown or other
  modified_base (9)..(9): a, c, u, g, unknown or other
ccggnuucngugauuguag

SEQ ID NO: 452320 - RNA, 19 nt, Artificial Sequence
  Description of Artificial Sequence: Synthetic oligonucleotide
ggaaagucaaaaguaacua

SEQ ID NO: 452321 - RNA, 19 nt, Artificial Sequence
  Description of Artificial Sequence: Synthetic oligonucleotide
ggauacuaccaucaaguaa

SEQ ID NO: 452322 - RNA, 19 nt, Artificial Sequence
  Description of Artificial Sequence: Synthetic oligonucleotide
ugguuaugguugugucucc

SEQ ID NO: 452323 - RNA, 19 nt, Artificial Sequence
  Description of Artificial Sequence: Synthetic oligonucleotide
cugcgagccagcucgcgag

SEQ ID NO: 452324 - RNA, 19 nt, Artificial Sequence
  Description of Artificial Sequence: Synthetic oligonucleotide
caugaacagucuggaagag

SEQ ID NO: 452325 - RNA, 19 nt, Artificial Sequence
  Description of Artificial Sequence: Synthetic oligonucleotide
agcuuugauaacagaggug

SEQ ID NO: 452326 - RNA, 19 nt, Artificial Sequence
  Description of Artificial Sequence: Synthetic oligonucleotide
aagccuguaucguccuaau

SEQ ID NO: 452327 - RNA, 19 nt, Artificial Sequence
  Description of Artificial Sequence: Synthetic oligonucleotide
ucgcgaguggagguucugg

SEQ ID NO: 452328 - RNA, 19 nt, Artificial Sequence
  Description of Artificial Sequence: Synthetic oligonucleotide
cuaauacagugucaaguua

SEQ ID NO: 452329 - RNA, 19 nt, Artificial Sequence
  Description of Artificial Sequence: Synthetic oligonucleotide
  modified_base (8)..(8): a, c, u, g, unknown or other
  modified_base (12)..(12): a, c, u, g, unknown or other
agcccggnuucngugauug

SEQ ID NO: 452330 - RNA, 19 nt, Artificial Sequence
  Description of Artificial Sequence: Synthetic oligonucleotide
aaacccauuugaacuggau

SEQ ID NO: 452331 - RNA, 19 nt, Artificial Sequence
  Description of Artificial Sequence: Synthetic oligonucleotide
gauggauccgaagacucua

SEQ ID NO: 452332 - RNA, 19 nt, Artificial Sequence
  Description of Artificial Sequence: Synthetic oligonucleotide
agcgaggaccgcgggaugg

SEQ ID NO: 452333 - RNA, 19 nt, Artificial Sequence
  Description of Artificial Sequence: Synthetic oligonucleotide
ggauauauguuaucuuugu

SEQ ID NO: 452334 - RNA, 19 nt, Artificial Sequence
  Description of Artificial Sequence: Synthetic oligonucleotide
uaggacgcucgcgaccagg

SEQ ID NO: 452335 - RNA, 19 nt, Artificial Sequence
  Description of Artificial Sequence: Synthetic oligonucleotide
cuggacuugaagauacucu

SEQ ID NO: 452336 - RNA, 19 nt, Artificial Sequence
  Description of Artificial Sequence: Synthetic oligonucleotide
gguuauuuccagacaacca

SEQ ID NO: 452337 - RNA, 19 nt, Artificial Sequence
  Description of Artificial Sequence: Synthetic oligonucleotide
ugguugccaggugacacga

SEQ ID NO: 452338 - RNA, 19 nt, Artificial Sequence
  Description of Artificial Sequence: Synthetic oligonucleotide
gugacacgacuacuggaac

SEQ ID NO: 452339 - RNA, 19 nt, Artificial Sequence
  Description of Artificial Sequence: Synthetic oligonucleotide
gacacgacuacuggaaccu

SEQ ID NO: 452340 - RNA, 19 nt, Artificial Sequence
  Description of Artificial Sequence: Synthetic oligonucleotide
cuuuguaugcaauuuccuu

SEQ ID NO: 452341 - RNA, 19 nt, Artificial Sequence
  Description of Artificial Sequence: Synthetic oligonucleotide
ggauuccuaaaauuuuaaa

SEQ ID NO: 452342 - RNA, 19 nt, Artificial Sequence
  Description of Artificial Sequence: Synthetic oligonucleotide
uuguaaggaccugcuguac

SEQ ID NO: 452343 - RNA, 19 nt, Artificial Sequence
  Description of Artificial Sequence: Synthetic oligonucleotide
ccaggugacacgacuacug

SEQ ID NO: 452344 - RNA, 19 nt, Artificial Sequence
  Description of Artificial Sequence: Synthetic oligonucleotide
auggcuuguaggauaaauu

SEQ ID NO: 452345 - RNA, 19 nt, Artificial Sequence
  Description of Artificial Sequence: Synthetic oligonucleotide
gaauccaaacugacagcuc

SEQ ID NO: 452346 - RNA, 19 nt, Artificial Sequence
  Description of Artificial Sequence: Synthetic oligonucleotide
auauaauauuagcccucua

SEQ ID NO: 452347 - RNA, 19 nt, Artificial Sequence
  Description of Artificial Sequence: Synthetic oligonucleotide
ugaggguugcacuguccuc

SEQ ID NO: 452348 - RNA, 19 nt, Artificial Sequence
  Description of Artificial Sequence: Synthetic oligonucleotide
ugcuugauuccgacuugau

SEQ ID NO: 452349 - RNA, 19 nt, Artificial Sequence
  Description of Artificial Sequence: Synthetic oligonucleotide
uuagcccucuaaccauaau

SEQ ID NO: 452350 - RNA, 19 nt, Artificial Sequence
  Description of Artificial Sequence: Synthetic oligonucleotide
agagggaaacccauuugaa

SEQ ID NO: 452351 - RNA, 19 nt, Artificial Sequence
  Description of Artificial Sequence: Synthetic oligonucleotide
uucugaugccuguguggcu

SEQ ID NO: 452352 - RNA, 19 nt, Artificial Sequence
  Description of Artificial Sequence: Synthetic oligonucleotide
gccaacuaaagucaagcua

SEQ ID NO: 452353 - RNA, 19 nt, Artificial Sequence
  Description of Artificial Sequence: Synthetic oligonucleotide
gaucccgggaggagcgagg

SEQ ID NO: 452354 - RNA, 19 nt, Artificial Sequence
  Description of Artificial Sequence: Synthetic oligonucleotide
caaacaauucaggaagcua

SEQ ID NO: 452355 - RNA, 19 nt, Artificial Sequence
  Description of Artificial Sequence: Synthetic oligonucleotide
ccucuaaccauaaugauuu

SEQ ID NO: 452356 - RNA, 19 nt, Artificial Sequence
  Description of Artificial Sequence: Synthetic oligonucleotide
acaauucaggaagcuaaua

SEQ ID NO: 452357 - RNA, 19 nt, Artificial Sequence
  Description of Artificial Sequence: Synthetic oligonucleotide
cauauaauauuagcccucu

SEQ ID NO: 452358 - RNA, 19 nt, Artificial Sequence
  Description of Artificial Sequence: Synthetic oligonucleotide
gagucaagacuuaaauuau

SEQ ID NO: 452359 - RNA, 19 nt, Artificial Sequence
  Description of Artificial Sequence: Synthetic oligonucleotide
agcucggcuaggacgcucg

SEQ ID NO: 452360 - RNA, 19 nt, Artificial Sequence
  Description of Artificial Sequence: Synthetic oligonucleotide
cuuggauccucaucgucua

SEQ ID NO: 452361 - RNA, 19 nt, Artificial Sequence
  Description of Artificial Sequence: Synthetic oligonucleotide
uugaucgguuugcuugauu

SEQ ID NO: 452362 - RNA, 19 nt, Artificial Sequence
  Description of Artificial Sequence: Synthetic oligonucleotide
aagcccugucucucucaga

SEQ ID NO: 452363 - RNA, 19 nt, Artificial Sequence
  Description of Artificial Sequence: Synthetic oligonucleotide
ggugacacgacuacuggaa

SEQ ID NO: 452364 - RNA, 19 nt, Artificial Sequence
  Description of Artificial Sequence: Synthetic oligonucleotide
agcucgcgaguggagguuc

SEQ ID NO: 452365 - RNA, 19 nt, Artificial Sequence
  Description of Artificial Sequence: Synthetic oligonucleotide
gcuaauacagugucaaguu

SEQ ID NO: 452366 - RNA, 19 nt, Artificial Sequence
  Description of Artificial Sequence: Synthetic oligonucleotide
caggaucuuuggguuuugg

SEQ ID NO: 452367 - RNA, 19 nt, Artificial Sequence
  Description of Artificial Sequence: Synthetic oligonucleotide
cguccuaauacucugaacu

SEQ ID NO: 452368 - RNA, 19 nt, Artificial Sequence
  Description of Artificial Sequence: Synthetic oligonucleotide
gacgaugggucuggugcug

SEQ ID NO: 452369 - RNA, 19 nt, Artificial Sequence
  Description of Artificial Sequence: Synthetic oligonucleotide
guacuugggugggcuaaag

SEQ ID NO: 452370 - RNA, 19 nt, Artificial Sequence
  Description of Artificial Sequence: Synthetic oligonucleotide
gaggaccgcgggauggagc

SEQ ID NO: 452371 - RNA, 19 nt, Artificial Sequence
  Description of Artificial Sequence: Synthetic oligonucleotide
cucggcuaggacgcucgcg

SEQ ID NO: 452372 - RNA, 19 nt, Artificial Sequence
  Description of Artificial Sequence: Synthetic oligonucleotide
gaacuuggauccucaucgu

SEQ ID NO: 452373 - RNA, 19 nt, Artificial Sequence
  Description of Artificial Sequence: Synthetic oligonucleotide
gggugauugggcaacaaua

SEQ ID NO: 452374 - RNA, 19 nt, Artificial Sequence
  Description of Artificial Sequence: Synthetic oligonucleotide
cauaauuccuuuggugugu

SEQ ID NO: 452375 - RNA, 19 nt, Artificial Sequence
  Description of Artificial Sequence: Synthetic oligonucleotide
ccaucuaaugugacggaca

SEQ ID NO: 452376 - RNA, 19 nt, Artificial Sequence
  Description of Artificial Sequence: Synthetic oligonucleotide
cauugcuuguaaggaccug

SEQ ID NO: 452377 - RNA, 19 nt, Artificial Sequence
  Description of Artificial Sequence: Synthetic oligonucleotide
aucuaaugugacggacaca

SEQ ID NO: 452378 - RNA, 19 nt, Artificial Sequence
  Description of Artificial Sequence: Synthetic oligonucleotide
acuccacuacuagcucagg

SEQ ID NO: 452379 - RNA, 19 nt, Artificial Sequence
  Description of Artificial Sequence: Synthetic oligonucleotide
acguuucuuucaguacugu

SEQ ID NO: 452380 - RNA, 19 nt, Artificial Sequence
  Description of Artificial Sequence: Synthetic oligonucleotide
  modified_base (4)..(4): a, c, u, g, unknown or other
  modified_base (8)..(8): a, c, u, g, unknown or other
cggnuucngugauuguagc

SEQ ID NO: 452381 - RNA, 19 nt, Artificial Sequence
  Description of Artificial Sequence: Synthetic oligonucleotide
cuacuagcucaggacucug

SEQ ID NO: 452382 - RNA, 19 nt, Artificial Sequence
  Description of Artificial Sequence: Synthetic oligonucleotide
agauaaggauggauccgaa

SEQ ID NO: 452383 - RNA, 19 nt, Artificial Sequence
  Description of Artificial Sequence: Synthetic oligonucleotide
gcugguugccaggugacac

SEQ ID NO: 452384 - RNA, 19 nt, Artificial Sequence
  Description of Artificial Sequence: Synthetic oligonucleotide
ggcuaggacgcucgcgacc

SEQ ID NO: 452385 - RNA, 19 nt, Artificial Sequence
  Description of Artificial Sequence: Synthetic oligonucleotide
cauuuagcacucagcauuu

SEQ ID NO: 452386 - RNA, 19 nt, Artificial Sequence
  Description of Artificial Sequence: Synthetic oligonucleotide
gugauuguagcaugacguu

SEQ ID NO: 452387 - RNA, 19 nt, Artificial Sequence
  Description of Artificial Sequence: Synthetic oligonucleotide
ggaagcuaauacaguguca

SEQ ID NO: 452388 - RNA, 19 nt, Artificial Sequence
  Description of Artificial Sequence: Synthetic oligonucleotide
uuggcccuuugaagcccug

SEQ ID NO: 452389 - RNA, 19 nt, Artificial Sequence
  Description of Artificial Sequence: Synthetic oligonucleotide
gcuaggacgcucgcgacca

SEQ ID NO: 452390 - RNA, 19 nt, Artificial Sequence
  Description of Artificial Sequence: Synthetic oligonucleotide
gccagcucgcgaguggagg

SEQ ID NO: 452391 - RNA, 19 nt, Artificial Sequence
  Description of Artificial Sequence: Synthetic oligonucleotide
cucaucgucuauguauaua

SEQ ID NO: 452392 - RNA, 19 nt, Artificial Sequence
  Description of Artificial Sequence: Synthetic oligonucleotide
ggcuuguaggauaaauucu

SEQ ID NO: 452393 - RNA, 19 nt, Artificial Sequence
  Description of Artificial Sequence: Synthetic oligonucleotide
gagcgaggaccgcgggaug

SEQ ID NO: 452394 - RNA, 19 nt, Artificial Sequence
  Description of Artificial Sequence: Synthetic oligonucleotide
acacgacuacuggaaccug

SEQ ID NO: 452395 - RNA, 19 nt, Artificial Sequence
  Description of Artificial Sequence: Synthetic oligonucleotide
cuuugauaacagaggugau

SEQ ID NO: 452396 - RNA, 19 nt, Artificial Sequence
  Description of Artificial Sequence: Synthetic oligonucleotide
ccuguaucguccuaauacu

SEQ ID NO: 452397 - RNA, 19 nt, Artificial Sequence
  Description of Artificial Sequence: Synthetic oligonucleotide
aucccgggaggagcgagga

SEQ ID NO: 452398 - RNA, 19 nt, Artificial Sequence
  Description of Artificial Sequence: Synthetic oligonucleotide
cuguacuugggugggcuaa

SEQ ID NO: 452399 - RNA, 19 nt, Artificial Sequence
  Description of Artificial Sequence: Synthetic oligonucleotide
gaugccuguguggcuucca

SEQ ID NO: 452400 - RNA, 19 nt, Artificial Sequence
  Description of Artificial Sequence: Synthetic oligonucleotide
ccuuuggugugucaauuaa

SEQ ID NO: 452401 - RNA, 19 nt, Artificial Sequence
  Description of Artificial Sequence: Synthetic oligonucleotide
auuuagcacucagcauuuu

SEQ ID NO: 452402 - RNA, 19 nt, Artificial Sequence
  Description of Artificial Sequence: Synthetic oligonucleotide
caacugaguucugaaacau

SEQ ID NO: 452403 - RNA, 19 nt, Artificial Sequence
  Description of Artificial Sequence: Synthetic oligonucleotide
cuucguguuuaagaguuuu

SEQ ID NO: 452404 - RNA, 19 nt, Artificial Sequence
  Description of Artificial Sequence: Synthetic oligonucleotide
ucccgggaggagcgaggac

SEQ ID NO: 452405 - RNA, 19 nt, Artificial Sequence
  Description of Artificial Sequence: Synthetic oligonucleotide
cugcuucguguuuaagagu

SEQ ID NO: 452406 - RNA, 19 nt, Artificial Sequence
  Description of Artificial Sequence: Synthetic oligonucleotide
cuaggacgcucgcgaccag

SEQ ID NO: 452407 - RNA, 19 nt, Artificial Sequence
  Description of Artificial Sequence: Synthetic oligonucleotide
ggaucccgggaggagcgag

SEQ ID NO: 452408 - RNA, 19 nt, Artificial Sequence
  Description of Artificial Sequence: Synthetic oligonucleotide
ucgcgaccaggagcuccgg

SEQ ID NO: 452409 - RNA, 19 nt, Artificial Sequence
  Description of Artificial Sequence: Synthetic oligonucleotide
gcugcgagccagcucgcga

SEQ ID NO: 452410 - RNA, 19 nt, Artificial Sequence
  Description of Artificial Sequence: Synthetic oligonucleotide
cuagcucaggacucugguu

SEQ ID NO: 452411 - RNA, 19 nt, Artificial Sequence
  Description of Artificial Sequence: Synthetic oligonucleotide
cucgcgaguggagguucug

SEQ ID NO: 452412 - RNA, 19 nt, Artificial Sequence
  Description of Artificial Sequence: Synthetic oligonucleotide
gagcucggcuaggacgcuc

SEQ ID NO: 452413 - RNA, 19 nt, Artificial Sequence
  Description of Artificial Sequence: Synthetic oligonucleotide
  modified_base (6)..(6): a, c, u, g, unknown or other
  modified_base (10)..(10): a, c, u, g, unknown or other
cccggnuucngugauugua

SEQ ID NO: 452414 - RNA, 19 nt, Artificial Sequence
  Description of Artificial Sequence: Synthetic oligonucleotide
ggcuucuaacucacagaga

SEQ ID NO: 452415 - RNA, 19 nt, Artificial Sequence
  Description of Artificial Sequence: Synthetic oligonucleotide
cgguuugcuugauuccgac

SEQ ID NO: 452416 - RNA, 19 nt, Artificial Sequence
  Description of Artificial Sequence: Synthetic oligonucleotide
cccucuaaccauaaugauu

SEQ ID NO: 452417 - RNA, 19 nt, Artificial Sequence
  Description of Artificial Sequence: Synthetic oligonucleotide
cguuuagaggauuccuaaa

SEQ ID NO: 452418 - RNA, 19 nt, Artificial Sequence
  Description of Artificial Sequence: Synthetic oligonucleotide
gcccuuugaagcccugucu

SEQ ID NO: 452419 - RNA, 19 nt, Artificial Sequence
  Description of Artificial Sequence: Synthetic oligonucleotide
gcuguacuacaugaacagu

SEQ ID NO: 452420 - RNA, 19 nt, Artificial Sequence
  Description of Artificial Sequence: Synthetic oligonucleotide
ggagcgaggaccgcgggau

SEQ ID NO: 452421 - RNA, 19 nt, Artificial Sequence
  Description of Artificial Sequence: Synthetic oligonucleotide
gcuguacuugggugggcua

SEQ ID NO: 452422 - RNA, 19 nt, Artificial Sequence
  Description of Artificial Sequence: Synthetic oligonucleotide
cucuaaccauaaugauuuu

SEQ ID NO: 452423 - RNA, 19 nt, Artificial Sequence
  Description of Artificial Sequence: Synthetic oligonucleotide
gcccucuaaccauaaugau

SEQ ID NO: 452424 - RNA, 19 nt, Artificial Sequence
  Description of Artificial Sequence: Synthetic oligonucleotide
ggugugcaaccagcuguga

SEQ ID NO: 452425 - RNA, 19 nt, Artificial Sequence
  Description of Artificial Sequence: Synthetic oligonucleotide
gcucggcuaggacgcucgc

SEQ ID NO: 452426 - RNA, 19 nt, Artificial Sequence
  Description of Artificial Sequence: Synthetic oligonucleotide
gcaugacguuucuuucagu

SEQ ID NO: 452427 - RNA, 19 nt, Artificial Sequence
  Description of Artificial Sequence: Synthetic oligonucleotide
ccauugcagauggauugaa

SEQ ID NO: 452428 - RNA, 19 nt, Artificial Sequence
  Description of Artificial Sequence: Synthetic oligonucleotide
cuugaucgguuugcuugau

SEQ ID NO: 452429 - RNA, 19 nt, Artificial Sequence
  Description of Artificial Sequence: Synthetic oligonucleotide
ccagcucgcgaguggaggu

SEQ ID NO: 452430 - RNA, 19 nt, Artificial Sequence
  Description of Artificial Sequence: Synthetic oligonucleotide
gacggacacaugggugauu

SEQ ID NO: 452431 - RNA, 19 nt, Artificial Sequence
  Description of Artificial Sequence: Synthetic oligonucleotide
gccaggugacacgacuacu

SEQ ID NO: 452432 - RNA, 19 nt, Artificial Sequence
  Description of Artificial Sequence: Synthetic oligonucleotide
cggcuaggacgcucgcgac

SEQ ID NO: 452433 - RNA, 19 nt, Artificial Sequence
  Description of Artificial Sequence: Synthetic oligonucleotide
caguggccccuccuuuuau

SEQ ID NO: 452434 - RNA, 19 nt, Artificial Sequence
  Description of Artificial Sequence: Synthetic oligonucleotide
gcgaggaccgcgggaugga

SEQ ID NO: 452435 - RNA, 19 nt, Artificial Sequence
  Description of Artificial Sequence: Synthetic oligonucleotide
  modified_base (7)..(7): a, c, u, g, unknown or other
  modified_base (11)..(11): a, c, u, g, unknown or other
gcccggnuucngugauugu

SEQ ID NO: 452436 - RNA, 19 nt, Artificial Sequence
  Description of Artificial Sequence: Synthetic oligonucleotide
  modified_base (9)..(9): a, c, u, g, unknown or other
  modified_base (13)..(13): a, c, u, g, unknown or other
gagcccggnuucngugauu

SEQ ID NO: 452437 - RNA, 19 nt, Artificial Sequence
  Description of Artificial Sequence: Synthetic oligonucleotide
ccucaucgucuauguauau

SEQ ID NO: 452438 - RNA, 19 nt, Artificial Sequence
  Description of Artificial Sequence: Synthetic oligonucleotide
ggaccgcgggauggagcuc

SEQ ID NO: 452439 - RNA, 19 nt, Artificial Sequence
  Description of Artificial Sequence: Synthetic oligonucleotide
cagcucgcgaguggagguu

SEQ ID NO: 452440 - RNA, 19 nt, Artificial Sequence
  Description of Artificial Sequence: Synthetic oligonucleotide
gcucgcgaguggagguucu

SEQ ID NO: 452441 - RNA, 19 nt, Artificial Sequence
  Description of Artificial Sequence: Synthetic oligonucleotide
cgcucgcgaccaggagcuc

SEQ ID NO: 452442 - RNA, 19 nt, Artificial Sequence
  Description of Artificial Sequence: Synthetic oligonucleotide
  modified_base (1)..(1): a, c, u, g, unknown or other
  modified_base (5)..(5): a, c, u, g, unknown or other
nuucngugauuguagcaug

SEQ ID NO: 452443 - RNA, 19 nt, Artificial Sequence
  Description of Artificial Sequence: Synthetic oligonucleotide
ugaauaaccauaaucagag

SEQ ID NO: 452444 - RNA, 19 nt, Artificial Sequence
  Description of Artificial Sequence: Synthetic oligonucleotide
aacagcacgaugaagaagc

SEQ ID NO: 452445 - RNA, 19 nt, Artificial Sequence
  Description of Artificial Sequence: Synthetic oligonucleotide
uccugaauaaccauaauca

SEQ ID NO: 452446 - RNA, 19 nt, Artificial Sequence
  Description of Artificial Sequence: Synthetic oligonucleotide
uucgaaaccaauaagcgug

SEQ ID NO: 452447 - RNA, 19 nt, Artificial Sequence
  Description of Artificial Sequence: Synthetic oligonucleotide
uguuuguuaaagcagggcc

SEQ ID NO: 452448 - RNA, 19 nt, Artificial Sequence
  Description of Artificial Sequence: Synthetic oligonucleotide
ucaauucuaagucaggcca

SEQ ID NO: 452449 - RNA, 19 nt, Artificial Sequence
  Description of Artificial Sequence: Synthetic oligonucleotide
aauccaggcgcccaagccc

SEQ ID NO: 452450 - RNA, 19 nt, Artificial Sequence
  Description of Artificial Sequence: Synthetic oligonucleotide
gacacggagagccagaugc

SEQ ID NO: 452451 - RNA, 19 nt, Artificial Sequence
  Description of Artificial Sequence: Synthetic oligonucleotide
agagcagauacccaagcac

SEQ ID NO: 452452 - RNA, 19 nt, Artificial Sequence
  Description of Artificial Sequence: Synthetic oligonucleotide
uggaaaucaacacaguaaa

SEQ ID NO: 452453 - RNA, 19 nt, Artificial Sequence
  Description of Artificial Sequence: Synthetic oligonucleotide
ugugccaugucccugcuag

SEQ ID NO: 452454 - RNA, 19 nt, Artificial Sequence
  Description of Artificial Sequence: Synthetic oligonucleotide
uaacccuaaacuuaucuga

SEQ ID NO: 452455 - RNA, 19 nt, Artificial Sequence
  Description of Artificial Sequence: Synthetic oligonucleotide
aaaccaauaagcgugcacu

SEQ ID NO: 452456 - RNA, 19 nt, Artificial Sequence
  Description of Artificial Sequence: Synthetic oligonucleotide
uauggcgaugacaagguug

SEQ ID NO: 452457 - RNA, 19 nt, Artificial Sequence
  Description of Artificial Sequence: Synthetic oligonucleotide
acucaauucuaagucaggc

SEQ ID NO: 452458 - RNA, 19 nt, Artificial Sequence
  Description of Artificial Sequence: Synthetic oligonucleotide
ugguguugcgcccacaucc

SEQ ID NO: 452459 - RNA, 19 nt, Artificial Sequence
  Description of Artificial Sequence: Synthetic oligonucleotide
aauaagcgugcacuccugg

SEQ ID NO: 452460 - RNA, 19 nt, Artificial Sequence
  Description of Artificial Sequence: Synthetic oligonucleotide
gucaccaugacaauggugc

SEQ ID NO: 452461 - RNA, 19 nt, Artificial Sequence
  Description of Artificial Sequence: Synthetic oligonucleotide
auaaaucagaaggcuaacc

SEQ ID NO: 452462 - RNA, 19 nt, Artificial Sequence
  Description of Artificial Sequence: Synthetic oligonucleotide
aaacgcucaggcaucauac

SEQ ID NO: 452463 - RNA, 19 nt, Artificial Sequence
  Description of Artificial Sequence: Synthetic oligonucleotide
acuacacagccacacaccg

SEQ ID NO: 452464 - RNA, 19 nt, Artificial Sequence
  Description of Artificial Sequence: Synthetic oligonucleotide
cauaaucagaguaaaauaa

SEQ ID NO: 452465 - RNA, 19 nt, Artificial Sequence
  Description of Artificial Sequence: Synthetic oligonucleotide
uuccugaauaaccauaauc

SEQ ID NO: 452466 - RNA, 19 nt, Artificial Sequence
  Description of Artificial Sequence: Synthetic oligonucleotide
gagauaauauuccugaaua

SEQ ID NO: 452467 - RNA, 19 nt, Artificial Sequence
  Description of Artificial Sequence: Synthetic oligonucleotide
aguuugaccuucucauagc

SEQ ID NO: 452468 - RNA, 19 nt, Artificial Sequence
  Description of Artificial Sequence: Synthetic oligonucleotide
aaccaauaagcgugcacuc

SEQ ID NO: 452469 - RNA, 19 nt, Artificial Sequence
  Description of Artificial Sequence: Synthetic oligonucleotide
cuuguuuccuugauggccc

SEQ ID NO: 452470 - RNA, 19 nt, Artificial Sequence
  Description of Artificial Sequence: Synthetic oligonucleotide
ugcauucgaaaccaauaag

SEQ ID NO: 452471 - RNA, 19 nt, Artificial Sequence
  Description of Artificial Sequence: Synthetic oligonucleotide
agguccgaaagccugacuc

SEQ ID NO: 452472 - RNA, 19 nt, Artificial Sequence
  Description of Artificial Sequence: Synthetic oligonucleotide
aaaugccauagccauguca

SEQ ID NO: 452473 - RNA, 19 nt, Artificial Sequence
  Description of Artificial Sequence: Synthetic oligonucleotide
auacccaagcaccuggcac

SEQ ID NO: 452474 - RNA, 19 nt, Artificial Sequence
  Description of Artificial Sequence: Synthetic oligonucleotide
aaagccugacuccucggag

SEQ ID NO: 452475 - RNA, 19 nt, Artificial Sequence
  Description of Artificial Sequence: Synthetic oligonucleotide
auaagcgugcacuccuggc

SEQ ID NO: 452476 - RNA, 19 nt, Artificial Sequence
  Description of Artificial Sequence: Synthetic oligonucleotide
acauacagugucccggugg

SEQ ID NO: 452477 - RNA, 19 nt, Artificial Sequence
  Description of Artificial Sequence: Synthetic oligonucleotide
cuaguuagcaccuccacca

SEQ ID NO: 452478 - RNA, 19 nt, Artificial Sequence
  Description of Artificial Sequence: Synthetic oligonucleotide
cacaaggagacuugcaccc

SEQ ID NO: 452479 - RNA, 19 nt, Artificial Sequence
  Description of Artificial Sequence: Synthetic oligonucleotide
uguagacgcacaaggagac

SEQ ID NO: 452480 - RNA, 19 nt, Artificial Sequence
  Description of Artificial Sequence: Synthetic oligonucleotide
cucaauucuaagucaggcc

SEQ ID NO: 452481 - RNA, 19 nt, Artificial Sequence
  Description of Artificial Sequence: Synthetic oligonucleotide
uccaaagugagcucacagc

SEQ ID NO: 452482 - RNA, 19 nt, Artificial Sequence
  Description of Artificial Sequence: Synthetic oligonucleotide
ugacuacacagccacacac

SEQ ID NO: 452483 - RNA, 19 nt, Artificial Sequence
  Description of Artificial Sequence: Synthetic oligonucleotide
auucgaaaccaauaagcgu

SEQ ID NO: 452484 - RNA, 19 nt, Artificial Sequence
  Description of Artificial Sequence: Synthetic oligonucleotide
cuaacccuaaacuuaucug

SEQ ID NO: 452485 - RNA, 19 nt, Artificial Sequence
  Description of Artificial Sequence: Synthetic oligonucleotide
agagauaauauuccugaau

SEQ ID NO: 452486 - RNA, 19 nt, Artificial Sequence
  Description of Artificial Sequence: Synthetic oligonucleotide
agacccuggaggcuuagac

SEQ ID NO: 452487 - RNA, 19 nt, Artificial Sequence
  Description of Artificial Sequence: Synthetic oligonucleotide
agagucauggaaaaggcca

SEQ ID NO: 452488 - RNA, 19 nt, Artificial Sequence
  Description of Artificial Sequence: Synthetic oligonucleotide
ugguuauggaaaucaacac

SEQ ID NO: 452489 - RNA, 19 nt, Artificial Sequence
  Description of Artificial Sequence: Synthetic oligonucleotide
aaugagagaacaggaacau

SEQ ID NO: 452490 - RNA, 19 nt, Artificial Sequence
  Description of Artificial Sequence: Synthetic oligonucleotide
caguuugaccuucucauag

SEQ ID NO: 452491 - RNA, 19 nt, Artificial Sequence
  Description of Artificial Sequence: Synthetic oligonucleotide
ugugcauggagaccucugc

SEQ ID NO: 452492 - RNA, 19 nt, Artificial Sequence
  Description of Artificial Sequence: Synthetic oligonucleotide
gaaagugcauucgaaacca

SEQ ID NO: 452493 - RNA, 19 nt, Artificial Sequence
  Description of Artificial Sequence: Synthetic oligonucleotide
ucccgagacaagcacgggg

SEQ ID NO: 452494 - RNA, 19 nt, Artificial Sequence
  Description of Artificial Sequence: Synthetic oligonucleotide
aggcuuagacacucaauuc

SEQ ID NO: 452495 - RNA, 19 nt, Artificial Sequence
  Description of Artificial Sequence: Synthetic oligonucleotide
guagucagugacuccacag

SEQ ID NO: 452496 - RNA, 19 nt, Artificial Sequence
  Description of Artificial Sequence: Synthetic oligonucleotide
gaugacuacacagccacac

SEQ ID NO: 452497 - RNA, 19 nt, Artificial Sequence
  Description of Artificial Sequence: Synthetic oligonucleotide
ucaggccagaacaugugca

SEQ ID NO: 452498 - RNA, 19 nt, Artificial Sequence
  Description of Artificial Sequence: Synthetic oligonucleotide
ugcauggagaccucugccc

SEQ ID NO: 452499 - RNA, 19 nt, Artificial Sequence
  Description of Artificial Sequence: Synthetic oligonucleotide
gucccugcuaguuagcacc

SEQ ID NO: 452500 - RNA, 19 nt, Artificial Sequence
  Description of Artificial Sequence: Synthetic oligonucleotide
gacacucaauucuaaguca

SEQ ID NO: 452501 - RNA, 19 nt, Artificial Sequence
  Description of Artificial Sequence: Synthetic oligonucleotide
uaagcgugcacuccuggcu

SEQ ID NO: 452502 - RNA, 19 nt, Artificial Sequence
  Description of Artificial Sequence: Synthetic oligonucleotide
accaauaagcgugcacucc

SEQ ID NO: 452503 - RNA, 19 nt, Artificial Sequence
  Description of Artificial Sequence: Synthetic oligonucleotide
gaaaccaauaagcgugcac

SEQ ID NO: 452504 - RNA, 19 nt, Artificial Sequence
  Description of Artificial Sequence: Synthetic oligonucleotide
acggcaguggccuugguga

SEQ ID NO: 452505 - RNA, 19 nt, Artificial Sequence
  Description of Artificial Sequence: Synthetic oligonucleotide
ucgaaaccaauaagcgugc

SEQ ID NO: 452506 - RNA, 19 nt, Artificial Sequence
  Description of Artificial Sequence: Synthetic oligonucleotide
guggccaucuaguguaugg

SEQ ID NO: 452507 - RNA, 19 nt, Artificial Sequence
  Description of Artificial Sequence: Synthetic oligonucleotide
ugcagaucgcuuguguggg

SEQ ID NO: 452508 - RNA, 19 nt, Artificial Sequence
  Description of Artificial Sequence: Synthetic oligonucleotide
cagacaaggcauugcaagc

SEQ ID NO: 452509 - RNA, 19 nt, Artificial Sequence
  Description of Artificial Sequence: Synthetic oligonucleotide
agggcaggggcagaaaccc

SEQ ID NO: 452510 - RNA, 19 nt, Artificial Sequence
  Description of Artificial Sequence: Synthetic oligonucleotide
ggcaggauuguccaaagug

SEQ ID NO: 452511 - RNA, 19 nt, Artificial Sequence
  Description of Artificial Sequence: Synthetic oligonucleotide
agacuugcacccugacacc

SEQ ID NO: 452512 - RNA, 19 nt, Artificial Sequence
  Description of Artificial Sequence: Synthetic oligonucleotide
gccucuacccuccaaaagg

SEQ ID NO: 452513 - RNA, 19 nt, Artificial Sequence
  Description of Artificial Sequence: Synthetic oligonucleotide
aggugcaggaauccaggcg

SEQ ID NO: 452514 - RNA, 19 nt, Artificial Sequence
  Description of Artificial Sequence: Synthetic oligonucleotide
gugagagaggucucaaggc

SEQ ID NO: 452515 - RNA, 19 nt, Artificial Sequence
  Description of Artificial Sequence: Synthetic oligonucleotide
gcauucgaaaccaauaagc

SEQ ID NO: 452516 - RNA, 19 nt, Artificial Sequence
  Description of Artificial Sequence: Synthetic oligonucleotide
gaauccaggcgcccaagcc

SEQ ID NO: 452517 - RNA, 19 nt, Artificial Sequence
  Description of Artificial Sequence: Synthetic oligonucleotide
caggcauuuccuugaagcc

SEQ ID NO: 452518 - RNA, 19 nt, Artificial Sequence
  Description of Artificial Sequence: Synthetic oligonucleotide
cagauacccaagcaccugg

SEQ ID NO: 452519 - RNA, 19 nt, Artificial Sequence
  Description of Artificial Sequence: Synthetic oligonucleotide
uccacuugaagacccugga

SEQ ID NO: 452520 - RNA, 19 nt, Artificial Sequence
  Description of Artificial Sequence: Synthetic oligonucleotide
uucgugaucugguuaugga

SEQ ID NO: 452521 - RNA, 19 nt, Artificial Sequence
  Description of Artificial Sequence: Synthetic oligonucleotide
gguuauggaaaucaacaca

SEQ ID NO: 452522 - RNA, 19 nt, Artificial Sequence
  Description of Artificial Sequence: Synthetic oligonucleotide
caagcagaaagugcauucg

SEQ ID NO: 452523 - RNA, 19 nt, Artificial Sequence
  Description of Artificial Sequence: Synthetic oligonucleotide
aaucagaaggcuaacccua

SEQ ID NO: 452524 - RNA, 19 nt, Artificial Sequence
  Description of Artificial Sequence: Synthetic oligonucleotide
agaucgcuugugugggacc

SEQ ID NO: 452525 - RNA, 19 nt, Artificial Sequence
  Description of Artificial Sequence: Synthetic oligonucleotide
uauaaaucagaaggcuaac

SEQ ID NO: 452526 - RNA, 19 nt, Artificial Sequence
  Description of Artificial Sequence: Synthetic oligonucleotide
gcucagagaguguagacgc

SEQ ID NO: 452527 - RNA, 19 nt, Artificial Sequence
  Description of Artificial Sequence: Synthetic oligonucleotide
cacgugcaaaccaagagga

SEQ ID NO: 452528 - RNA, 19 nt, Artificial Sequence
  Description of Artificial Sequence: Synthetic oligonucleotide
cagaggauagcugagccac

SEQ ID NO: 452529 - RNA, 19 nt, Artificial Sequence
  Description of Artificial Sequence: Synthetic oligonucleotide
aauucuaagucaggccaga

SEQ ID NO: 452530 - RNA, 19 nt, Artificial Sequence
  Description of Artificial Sequence: Synthetic oligonucleotide
ugccauagccaugucaggc

SEQ ID NO: 452531 - RNA, 19 nt, Artificial Sequence
  Description of Artificial Sequence: Synthetic oligonucleotide
gcgucuuuggcaaauaugc

SEQ ID NO: 452532 - RNA, 19 nt, Artificial Sequence
  Description of Artificial Sequence: Synthetic oligonucleotide
uguagucagugacuccaca

SEQ ID NO: 452533 - RNA, 19 nt, Artificial Sequence
  Description of Artificial Sequence: Synthetic oligonucleotide
aagccugacuccucggagu

SEQ ID NO: 452534 - RNA, 19 nt, Artificial Sequence
  Description of Artificial Sequence: Synthetic oligonucleotide
gccuggaugauauuccagg

SEQ ID NO: 452535 - RNA, 19 nt, Artificial Sequence
  Description of Artificial Sequence: Synthetic oligonucleotide
ucgcuguggagaaaugcca

SEQ ID NO: 452536 - RNA, 19 nt, Artificial Sequence
  Description of Artificial Sequence: Synthetic oligonucleotide
cagagucauggaaaaggcc

SEQ ID NO: 452537 - RNA, 19 nt, Artificial Sequence
  Description of Artificial Sequence: Synthetic oligonucleotide
agugugaggaagggcaggg

SEQ ID NO: 452538 - RNA, 19 nt, Artificial Sequence
  Description of Artificial Sequence: Synthetic oligonucleotide
acacucaauucuaagucag

SEQ ID NO: 452539 - RNA, 19 nt, Artificial Sequence
  Description of Artificial Sequence: Synthetic oligonucleotide
ucgugaucugguuauggaa

SEQ ID NO: 452540 - RNA, 19 nt, Artificial Sequence
  Description of Artificial Sequence: Synthetic oligonucleotide
uaugcaggugcaggaaucc

SEQ ID NO: 452541 - RNA, 19 nt, Artificial Sequence
  Description of Artificial Sequence: Synthetic oligonucleotide
ucaggcacuauguucucuc

SEQ ID NO: 452542 - RNA, 19 nt, Artificial Sequence
  Description of Artificial Sequence: Synthetic oligonucleotide
auucccgagacaagcacgg

SEQ ID NO: 452543 - RNA, 19 nt, Artificial Sequence
  Description of Artificial Sequence: Synthetic oligonucleotide
cacucaauucuaagucagg

SEQ ID NO: 452544 - RNA, 19 nt, Artificial Sequence
  Description of Artificial Sequence: Synthetic oligonucleotide
cagaaggcuaacccuaaac

SEQ ID NO: 452545 - RNA, 19 nt, Artificial Sequence
  Description of Artificial Sequence: Synthetic oligonucleotide
caaguggagguccgaaagc

SEQ ID NO: 452546 - RNA, 19 nt, Artificial Sequence
  Description of Artificial Sequence: Synthetic oligonucleotide
uggccaucuaguguauggg

SEQ ID NO: 452547 - RNA, 19 nt, Artificial Sequence
  Description of Artificial Sequence: Synthetic oligonucleotide
cccuaaacuuaucugagag

SEQ ID NO: 452548 - RNA, 19 nt, Artificial Sequence
  Description of Artificial Sequence: Synthetic oligonucleotide
aaggggacaacaauuccau

SEQ ID NO: 452549 - RNA, 19 nt, Artificial Sequence
  Description of Artificial Sequence: Synthetic oligonucleotide
aacgcucaggcaucauacu

SEQ ID NO: 452550 - RNA, 19 nt, Artificial Sequence
  Description of Artificial Sequence: Synthetic oligonucleotide
augagaggggacaccagac

SEQ ID NO: 452551 - RNA, 19 nt, Artificial Sequence
  Description of Artificial Sequence: Synthetic oligonucleotide
ucggagugcccacgcaggg

SEQ ID NO: 452552 - RNA, 19 nt, Artificial Sequence
  Description of Artificial Sequence: Synthetic oligonucleotide
ugcuaguuagcaccuccac

SEQ ID NO: 452553 - RNA, 19 nt, Artificial Sequence
  Description of Artificial Sequence: Synthetic oligonucleotide
cuucgugaucugguuaugg

SEQ ID NO: 452554 - RNA, 19 nt, Artificial Sequence
  Description of Artificial Sequence: Synthetic oligonucleotide
caacaauuccauccacuug

SEQ ID NO: 452555 - RNA, 19 nt, Artificial Sequence
  Description of Artificial Sequence: Synthetic oligonucleotide
ucguucaccuuguccaugu

SEQ ID NO: 452556 - RNA, 19 nt, Artificial Sequence
  Description of Artificial Sequence: Synthetic oligonucleotide
aagcgcaggugagagaggu

SEQ ID NO: 452557 - RNA, 19 nt, Artificial Sequence
  Description of Artificial Sequence: Synthetic oligonucleotide
cagggugacacugugccag

SEQ ID NO: 452558 - RNA, 19 nt, Artificial Sequence
  Description of Artificial Sequence: Synthetic oligonucleotide
uuacccguccgguggaugu

SEQ ID NO: 452559 - RNA, 19 nt, Artificial Sequence
  Description of Artificial Sequence: Synthetic oligonucleotide
gaagccugucaccaugaca

SEQ ID NO: 452560 - RNA, 19 nt, Artificial Sequence
  Description of Artificial Sequence: Synthetic oligonucleotide
gagaguguagacgcacaag

SEQ ID NO: 452561 - RNA, 19 nt, Artificial Sequence
  Description of Artificial Sequence: Synthetic oligonucleotide
auauuccaggcguucuuga

SEQ ID NO: 452562 - RNA, 19 nt, Artificial Sequence
  Description of Artificial Sequence: Synthetic oligonucleotide
gcgaugacaagguuggcug

SEQ ID NO: 452563 - RNA, 19 nt, Artificial Sequence
  Description of Artificial Sequence: Synthetic oligonucleotide
cagcccguucuccacaagg

SEQ ID NO: 452564 - RNA, 19 nt, Artificial Sequence
  Description of Artificial Sequence: Synthetic oligonucleotide
cucggagugcccacgcagg

SEQ ID NO: 452565 - RNA, 19 nt, Artificial Sequence
  Description of Artificial Sequence: Synthetic oligonucleotide
aggaugaccaacagcacga

SEQ ID NO: 452566 - RNA, 19 nt, Artificial Sequence
  Description of Artificial Sequence: Synthetic oligonucleotide
cacuauguucucucccagc

SEQ ID NO: 452567 - RNA, 19 nt, Artificial Sequence
  Description of Artificial Sequence: Synthetic oligonucleotide
gugcauucgaaaccaauaa

SEQ ID NO: 452568 - RNA, 19 nt, Artificial Sequence
  Description of Artificial Sequence: Synthetic oligonucleotide
gucgcuguggagaaaugcc

SEQ ID NO: 452569 - RNA, 19 nt, Artificial Sequence
  Description of Artificial Sequence: Synthetic oligonucleotide
gaaagccugacuccucgga

SEQ ID NO: 452570 - RNA, 19 nt, Artificial Sequence
  Description of Artificial Sequence: Synthetic oligonucleotide
acucgguguggccaucuag

SEQ ID NO: 452571 - RNA, 19 nt, Artificial Sequence
  Description of Artificial Sequence: Synthetic oligonucleotide
agacaaggcauugcaagca

SEQ ID NO: 452572 - RNA, 19 nt, Artificial Sequence
  Description of Artificial Sequence: Synthetic oligonucleotide
agagaaggggacaacaauu

SEQ ID NO: 452573 - RNA, 19 nt, Artificial Sequence
  Description of Artificial Sequence: Synthetic oligonucleotide
gaggacauucccagucagg

SEQ ID NO: 452574 - RNA, 19 nt, Artificial Sequence
  Description of Artificial Sequence: Synthetic oligonucleotide
gucaggccagaacaugugc

SEQ ID NO: 452575 - RNA, 19 nt, Artificial Sequence
  Description of Artificial Sequence: Synthetic oligonucleotide
uggcacauacagugucccg

SEQ ID NO: 452576 - RNA, 19 nt, Artificial Sequence
  Description of Artificial Sequence: Synthetic oligonucleotide
caugcagacucuguagaug

SEQ ID NO: 452577 - RNA, 19 nt, Artificial Sequence
  Description of Artificial Sequence: Synthetic oligonucleotide
ccacgugcaaaccaagagg

SEQ ID NO: 452578 - RNA, 19 nt, Artificial Sequence
  Description of Artificial Sequence: Synthetic oligonucleotide
gccuauggcgaugacaagg

SEQ ID NO: 452579 - RNA, 19 nt, Artificial Sequence
  Description of Artificial Sequence: Synthetic oligonucleotide
acauggacggcaguggccu

SEQ ID NO: 452580 - RNA, 19 nt, Artificial Sequence
  Description of Artificial Sequence: Synthetic oligonucleotide
ugggccucuacccuccaaa

SEQ ID NO: 452581 - RNA, 19 nt, Artificial Sequence
  Description of Artificial Sequence: Synthetic oligonucleotide
gcuaguuagcaccuccacc

SEQ ID NO: 452582 - RNA, 19 nt, Artificial Sequence
  Description of Artificial Sequence: Synthetic oligonucleotide
ugggaccuggaggaaacag

SEQ ID NO: 452583 - RNA, 19 nt, Artificial Sequence
  Description of Artificial Sequence: Synthetic oligonucleotide
caagggaagcgcaggugag

SEQ ID NO: 452584 - RNA, 19 nt, Artificial Sequence
  Description of Artificial Sequence: Synthetic oligonucleotide
gacggcaguggccuuggug

SEQ ID NO: 452585 - RNA, 19 nt, Artificial Sequence
  Description of Artificial Sequence: Synthetic oligonucleotide
cacauagccagaauaucaa

SEQ ID NO: 452586 - RNA, 19 nt, Artificial Sequence
  Description of Artificial Sequence: Synthetic oligonucleotide
agugcauucgaaaccaaua

SEQ ID NO: 452587 - RNA, 19 nt, Artificial Sequence
  Description of Artificial Sequence: Synthetic oligonucleotide
agacucuccaccccacaca

SEQ ID NO: 452588 - RNA, 19 nt, Artificial Sequence
  Description of Artificial Sequence: Synthetic oligonucleotide
agggugacacugugccagc

SEQ ID NO: 452589 - RNA, 19 nt, Artificial Sequence
  Description of Artificial Sequence: Synthetic oligonucleotide
ucgguguggccaucuagug

SEQ ID NO: 452590 - RNA, 19 nt, Artificial Sequence
  Description of Artificial Sequence: Synthetic oligonucleotide
uggaggcuuagacacucaa

SEQ ID NO: 452591 - RNA, 19 nt, Artificial Sequence
  Description of Artificial Sequence: Synthetic oligonucleotide
aaguugccuugggacacgg

SEQ ID NO: 452592 - RNA, 19 nt, Artificial Sequence
  Description of Artificial Sequence: Synthetic oligonucleotide
cacauggacggcaguggcc

SEQ ID NO: 452593 - RNA, 19 nt, Artificial Sequence
  Description of Artificial Sequence: Synthetic oligonucleotide
agggaagcgcaggugagag

SEQ ID NO: 452594 - RNA, 19 nt, Artificial Sequence
  Description of Artificial Sequence: Synthetic oligonucleotide
ugacaagguuggcugcaga

SEQ ID NO: 452595 - RNA, 19 nt, Artificial Sequence
  Description of Artificial Sequence: Synthetic oligonucleotide
gauacccaagcaccuggca

SEQ ID NO: 452596 - RNA, 19 nt, Artificial Sequence
  Description of Artificial Sequence: Synthetic oligonucleotide
gugccuauggcgaugacaa

SEQ ID NO: 452597 - RNA, 19 nt, Artificial Sequence
  Description of Artificial Sequence: Synthetic oligonucleotide
guguagacgcacaaggaga

SEQ ID NO: 452598 - RNA, 19 nt, Artificial Sequence
  Description of Artificial Sequence: Synthetic oligonucleotide
uggagguccgaaagccuga

SEQ ID NO: 452599 - RNA, 19 nt, Artificial Sequence
  Description of Artificial Sequence: Synthetic oligonucleotide
uagacgcacaaggagacuu

SEQ ID NO: 452600 - RNA, 19 nt, Artificial Sequence
  Description of Artificial Sequence: Synthetic oligonucleotide
gcacaaggagacuugcacc

SEQ ID NO: 452601 - RNA, 19 nt, Artificial Sequence
  Description of Artificial Sequence: Synthetic oligonucleotide
aggcauuuccuugaagcca

SEQ ID NO: 452602 - RNA, 19 nt, Artificial Sequence
  Description of Artificial Sequence: Synthetic oligonucleotide
cuggguaccagucugugua

SEQ ID NO: 452603 - RNA, 19 nt, Artificial Sequence
  Description of Artificial Sequence: Synthetic oligonucleotide
ugacaccugucgcugugga

SEQ ID NO: 452604 - RNA, 19 nt, Artificial Sequence
  Description of Artificial Sequence: Synthetic oligonucleotide
caauaagcgugcacuccug

SEQ ID NO: 452605 - RNA, 19 nt, Artificial Sequence
  Description of Artificial Sequence: Synthetic oligonucleotide
uuccauccacuugaagacc

SEQ ID NO: 452606 - RNA, 19 nt, Artificial Sequence
  Description of Artificial Sequence: Synthetic oligonucleotide
aagugcauucgaaaccaau

SEQ ID NO: 452607 - RNA, 19 nt, Artificial Sequence
  Description of Artificial Sequence: Synthetic oligonucleotide
ugucccugcuaguuagcac

SEQ ID NO: 452608 - RNA, 19 nt, Artificial Sequence
  Description of Artificial Sequence: Synthetic oligonucleotide
gaaguugccuugggacacg

SEQ ID NO: 452609 - RNA, 19 nt, Artificial Sequence
  Description of Artificial Sequence: Synthetic oligonucleotide
gaggggacaccagaccaag

SEQ ID NO: 452610 - RNA, 19 nt, Artificial Sequence
  Description of Artificial Sequence: Synthetic oligonucleotide
uucucauagcagcccguuc

SEQ ID NO: 452611 - RNA, 19 nt, Artificial Sequence
  Description of Artificial Sequence: Synthetic oligonucleotide
gccacgugcaaaccaagag

SEQ ID NO: 452612 - RNA, 19 nt, Artificial Sequence
  Description of Artificial Sequence: Synthetic oligonucleotide
ggaacagagucauggaaaa

SEQ ID NO: 452613 - RNA, 19 nt, Artificial Sequence
  Description of Artificial Sequence: Synthetic oligonucleotide
caaggagacuugcacccug

SEQ ID NO: 452614 - RNA, 19 nt, Artificial Sequence
  Description of Artificial Sequence: Synthetic oligonucleotide
aaguuacacuauaguauaa

SEQ ID NO: 452615 - RNA, 19 nt, Artificial Sequence
  Description of Artificial Sequence: Synthetic oligonucleotide
cauagccagaauaucaaau

SEQ ID NO: 452616 - RNA, 19 nt, Artificial Sequence
  Description of Artificial Sequence: Synthetic oligonucleotide
gacgcacaaggagacuugc

SEQ ID NO: 452617 - RNA, 19 nt, Artificial Sequence
  Description of Artificial Sequence: Synthetic oligonucleotide
uggcgaaguugccuuggga

SEQ ID NO: 452618 - RNA, 19 nt, Artificial Sequence
  Description of Artificial Sequence: Synthetic oligonucleotide
agcccguucuccacaaggg

SEQ ID NO: 452619 - RNA, 19 nt, Artificial Sequence
  Description of Artificial Sequence: Synthetic oligonucleotide
agucaggucugcagaucgc

SEQ ID NO: 452620 - RNA, 19 nt, Artificial Sequence
  Description of Artificial Sequence: Synthetic oligonucleotide
caggcacuauguucucucc

SEQ ID NO: 452621 - RNA, 19 nt, Artificial Sequence
  Description of Artificial Sequence: Synthetic oligonucleotide
gaguguagacgcacaagga

SEQ ID NO: 452622 - RNA, 19 nt, Artificial Sequence
  Description of Artificial Sequence: Synthetic oligonucleotide
agcaccuggcacccagcuc

SEQ ID NO: 452623 - RNA, 19 nt, Artificial Sequence
  Description of Artificial Sequence: Synthetic oligonucleotide
gguccgaaagccugacucc

SEQ ID NO: 452624 - RNA, 19 nt, Artificial Sequence
  Description of Artificial Sequence: Synthetic oligonucleotide
aucccugagaguucuccau

SEQ ID NO: 452625 - RNA, 19 nt, Artificial Sequence
  Description of Artificial Sequence: Synthetic oligonucleotide
ugaccugguggugccaccc

SEQ ID NO: 452626 - RNA, 19 nt, Artificial Sequence
  Description of Artificial Sequence: Synthetic oligonucleotide
ggcuuagacacucaauucu

SEQ ID NO: 452627 - RNA, 19 nt, Artificial Sequence
  Description of Artificial Sequence: Synthetic oligonucleotide
auaucaaauugaacaggaa

SEQ ID NO: 452628 - RNA, 19 nt, Artificial Sequence
  Description of Artificial Sequence: Synthetic oligonucleotide
agugcccacgcagggagag

SEQ ID NO: 452629 - RNA, 19 nt, Artificial Sequence
  Description of Artificial Sequence: Synthetic oligonucleotide
ugaucugguuauggaaauc

SEQ ID NO: 452630 - RNA, 19 nt, Artificial Sequence
  Description of Artificial Sequence: Synthetic oligonucleotide
gacaacaauuccauccacu

SEQ ID NO: 452631 - RNA, 19 nt, Artificial Sequence
  Description of Artificial Sequence: Synthetic oligonucleotide
acgcucaggcaucauacuu

SEQ ID NO: 452632 - RNA, 19 nt, Artificial Sequence
  Description of Artificial Sequence: Synthetic oligonucleotide
guaccagucuguguaguca

SEQ ID NO: 452633 - RNA, 19 nt, Artificial Sequence
  Description of Artificial Sequence: Synthetic oligonucleotide
uggcgucuuuggcaaauau

SEQ ID NO: 452634 - RNA, 19 nt, Artificial Sequence
  Description of Artificial Sequence: Synthetic oligonucleotide
cucuguagaugacuacaca

SEQ ID NO: 452635 - RNA, 19 nt, Artificial Sequence
  Description of Artificial Sequence: Synthetic oligonucleotide
guggcgaaguugccuuggg

SEQ ID NO: 452636 - RNA, 19 nt, Artificial Sequence
  Description of Artificial Sequence: Synthetic oligonucleotide
ccaugucccugcuaguuag

SEQ ID NO: 452637 - RNA, 19 nt, Artificial Sequence
  Description of Artificial Sequence: Synthetic oligonucleotide
cacccugcacccuggcccg

SEQ ID NO: 452638 - RNA, 19 nt, Artificial Sequence
  Description of Artificial Sequence: Synthetic oligonucleotide
aaggagacuugcacccuga

SEQ ID NO: 452639 - RNA, 19 nt, Artificial Sequence
  Description of Artificial Sequence: Synthetic oligonucleotide
cacggagagccagaugccc

SEQ ID NO: 452640 - RNA, 19 nt, Artificial Sequence
  Description of Artificial Sequence: Synthetic oligonucleotide
ugcaagcagaaagugcauu

SEQ ID NO: 452641 - RNA, 19 nt, Artificial Sequence
  Description of Artificial Sequence: Synthetic oligonucleotide
gcagcggucaggcacuaug

SEQ ID NO: 452642 - RNA, 19 nt, Artificial Sequence
  Description of Artificial Sequence: Synthetic oligonucleotide
ggcauuuccuugaagccac

SEQ ID NO: 452643 - RNA, 19 nt, Artificial Sequence
  Description of Artificial Sequence: Synthetic oligonucleotide
cugaggucucugcacgaug

SEQ ID NO: 452644 - RNA, 19 nt, Artificial Sequence
  Description of Artificial Sequence: Synthetic oligonucleotide
uuguuuccuugauggccca

SEQ ID NO: 452645 - RNA, 19 nt, Artificial Sequence
  Description of Artificial Sequence: Synthetic oligonucleotide
acgugcaaaccaagaggac

SEQ ID NO: 452646 - RNA, 19 nt, Artificial Sequence
  Description of Artificial Sequence: Synthetic oligonucleotide
gcuaacccuaaacuuaucu

SEQ ID NO: 452647 - RNA, 19 nt, Artificial Sequence
  Description of Artificial Sequence: Synthetic oligonucleotide
guacuucaagcagcacagg

SEQ ID NO: 452648 - RNA, 19 nt, Artificial Sequence
  Description of Artificial Sequence: Synthetic oligonucleotide
cucuacccuccaaaagguc

SEQ ID NO: 452649 - RNA, 19 nt, Artificial Sequence
  Description of Artificial Sequence: Synthetic oligonucleotide
gaggucucaaggcaggauu

SEQ ID NO: 452650 - RNA, 19 nt, Artificial Sequence
  Description of Artificial Sequence: Synthetic oligonucleotide
guugcgcccacaucccuga

SEQ ID NO: 452651 - RNA, 19 nt, Artificial Sequence
  Description of Artificial Sequence: Synthetic oligonucleotide
ugacuccucggagugccca

SEQ ID NO: 452652 - RNA, 19 nt, Artificial Sequence
  Description of Artificial Sequence: Synthetic oligonucleotide
cagcgaggggaaacugggg

SEQ ID NO: 452653 - RNA, 19 nt, Artificial Sequence
  Description of Artificial Sequence: Synthetic oligonucleotide
gaagcgcaggugagagagg

SEQ ID NO: 452654 - RNA, 19 nt, Artificial Sequence
  Description of Artificial Sequence: Synthetic oligonucleotide
acccugcccacccuggcgu

SEQ ID NO: 452655 - RNA, 19 nt, Artificial Sequence
  Description of Artificial Sequence: Synthetic oligonucleotide
acccguccgguggaugugc

SEQ ID NO: 452656 - RNA, 19 nt, Artificial Sequence
  Description of Artificial Sequence: Synthetic oligonucleotide
cagaucgcuugugugggac

SEQ ID NO: 452657 - RNA, 19 nt, Artificial Sequence
  Description of Artificial Sequence: Synthetic oligonucleotide
uggcccgcucucuggcugg

SEQ ID NO: 452658 - RNA, 19 nt, Artificial Sequence
  Description of Artificial Sequence: Synthetic oligonucleotide
aggggcagaaacccaucaa

SEQ ID NO: 452659 - RNA, 19 nt, Artificial Sequence
  Description of Artificial Sequence: Synthetic oligonucleotide
caagcaccuggcacccagc

SEQ ID NO: 452660 - RNA, 19 nt, Artificial Sequence
  Description of Artificial Sequence: Synthetic oligonucleotide
cacgggguucaggacaccc

SEQ ID NO: 452661 - RNA, 19 nt, Artificial Sequence
  Description of Artificial Sequence: Synthetic oligonucleotide
ggaacaugagaggggacac

SEQ ID NO: 452662 - RNA, 19 nt, Artificial Sequence
  Description of Artificial Sequence: Synthetic oligonucleotide
augucccugcuaguuagca

SEQ ID NO: 452663 - RNA, 19 nt, Artificial Sequence
  Description of Artificial Sequence: Synthetic oligonucleotide
ggcgucuuuggcaaauaug

SEQ ID NO: 452664 - RNA, 19 nt, Artificial Sequence
  Description of Artificial Sequence: Synthetic oligonucleotide
uucccgagacaagcacggg

SEQ ID NO: 452665 - RNA, 19 nt, Artificial Sequence
  Description of Artificial Sequence: Synthetic oligonucleotide
agcaaacacuuguuuccuu

SEQ ID NO: 452666 - RNA, 19 nt, Artificial Sequence
  Description of Artificial Sequence: Synthetic oligonucleotide
cugcuaguuagcaccucca

SEQ ID NO: 452667 - RNA, 19 nt, Artificial Sequence
  Description of Artificial Sequence: Synthetic oligonucleotide
caucccugagaguucucca

SEQ ID NO: 452668 - RNA, 19 nt, Artificial Sequence
  Description of Artificial Sequence: Synthetic oligonucleotide
caaacgcucaggcaucaua

SEQ ID NO: 452669 - RNA, 19 nt, Artificial Sequence
  Description of Artificial Sequence: Synthetic oligonucleotide
ggccucuacccuccaaaag

SEQ ID NO: 452670 - RNA, 19 nt, Artificial Sequence
  Description of Artificial Sequence: Synthetic oligonucleotide
gcccguucuccacaagggg

SEQ ID NO: 452671 - RNA, 19 nt, Artificial Sequence
  Description of Artificial Sequence: Synthetic oligonucleotide
cucugcacgaugccuccuc

SEQ ID NO: 452672 - RNA, 19 nt, Artificial Sequence
  Description of Artificial Sequence: Synthetic oligonucleotide
gacuccucggagugcccac

SEQ ID NO: 452673 - RNA, 19 nt, Artificial Sequence
  Description of Artificial Sequence: Synthetic oligonucleotide
ucccauggccucacucggu

SEQ ID NO: 452674 - RNA, 19 nt, Artificial Sequence
  Description of Artificial Sequence: Synthetic oligonucleotide
agacgcacaaggagacuug

SEQ ID NO: 452675 - RNA, 19 nt, Artificial Sequence
  Description of Artificial Sequence: Synthetic oligonucleotide
cucgguguggccaucuagu

SEQ ID NO: 452676 - RNA, 19 nt, Artificial Sequence
  Description of Artificial Sequence: Synthetic oligonucleotide
ggacaacaauuccauccac

SEQ ID NO: 452677 - RNA, 19 nt, Artificial Sequence
  Description of Artificial Sequence: Synthetic oligonucleotide
ccuaaacuuaucugagaga

SEQ ID NO: 452678 - RNA, 19 nt, Artificial Sequence
  Description of Artificial Sequence: Synthetic oligonucleotide
gguggcgaaguugccuugg

SEQ ID NO: 452679 - RNA, 19 nt, Artificial Sequence
  Description of Artificial Sequence: Synthetic oligonucleotide
caucauaauggaggaggga

SEQ ID NO: 452680 - RNA, 19 nt, Artificial Sequence
  Description of Artificial Sequence: Synthetic oligonucleotide
cugaccugguggugccacc

SEQ ID NO: 452681 - RNA, 19 nt, Artificial Sequence
  Description of Artificial Sequence: Synthetic oligonucleotide
aggcgcccaagcccugagg

SEQ ID NO: 452682 - RNA, 19 nt, Artificial Sequence
  Description of Artificial Sequence: Synthetic oligonucleotide
agguggcgaaguugccuug

SEQ ID NO: 452683 - RNA, 19 nt, Artificial Sequence
  Description of Artificial Sequence: Synthetic oligonucleotide
cacgugcuuguugucauca

SEQ ID NO: 452684 - RNA, 19 nt, Artificial Sequence
  Description of Artificial Sequence: Synthetic oligonucleotide
cagcacgaugaagaagcug

SEQ ID NO: 452685 - RNA, 19 nt, Artificial Sequence
  Description of Artificial Sequence: Synthetic oligonucleotide
aucagaaggcuaacccuaa

SEQ ID NO: 452686 - RNA, 19 nt, Artificial Sequence
  Description of Artificial Sequence: Synthetic oligonucleotide
aggaauccaggcgcccaag

SEQ ID NO: 452687 - RNA, 19 nt, Artificial Sequence
  Description of Artificial Sequence: Synthetic oligonucleotide
gucccgguggggccaggcg

SEQ ID NO: 452688 - RNA, 19 nt, Artificial Sequence
  Description of Artificial Sequence: Synthetic oligonucleotide
caucaaugccagggcuucc

SEQ ID NO: 452689 - RNA, 19 nt, Artificial Sequence
  Description of Artificial Sequence: Synthetic oligonucleotide
auggacggcaguggccuug

SEQ ID NO: 452690 - RNA, 19 nt, Artificial Sequence
  Description of Artificial Sequence: Synthetic oligonucleotide
gaucgcuugugugggaccu

SEQ ID NO: 452691 - RNA, 19 nt, Artificial Sequence
  Description of Artificial Sequence: Synthetic oligonucleotide
ggcuggcguagagacaggg

SEQ ID NO: 452692 - RNA, 19 nt, Artificial Sequence
  Description of Artificial Sequence: Synthetic oligonucleotide
cugucgcuguggagaaaug

SEQ ID NO: 452693 - RNA, 19 nt, Artificial Sequence
  Description of Artificial Sequence: Synthetic oligonucleotide
ggugccuauggcgaugaca

SEQ ID NO: 452694 - RNA, 19 nt, Artificial Sequence
  Description of Artificial Sequence: Synthetic oligonucleotide
gguguugcgcccacauccc

SEQ ID NO: 452695 - RNA, 19 nt, Artificial Sequence
  Description of Artificial Sequence: Synthetic oligonucleotide
cugacuccucggagugccc

SEQ ID NO: 452696 - RNA, 19 nt, Artificial Sequence
  Description of Artificial Sequence: Synthetic oligonucleotide
cauucucguucaccuuguc

SEQ ID NO: 452697 - RNA, 19 nt, Artificial Sequence
  Description of Artificial Sequence: Synthetic oligonucleotide
gcacccugacaccugucgc

SEQ ID NO: 452698 - RNA, 19 nt, Artificial Sequence
  Description of Artificial Sequence: Synthetic oligonucleotide
uugcgcccacaucccugag

SEQ ID NO: 452699 - RNA, 19 nt, Artificial Sequence
  Description of Artificial Sequence: Synthetic oligonucleotide
acgugcuuguugucaucaa

SEQ ID NO: 452700 - RNA, 19 nt, Artificial Sequence
  Description of Artificial Sequence: Synthetic oligonucleotide
uggccaucggagggcagac

SEQ ID NO: 452701 - RNA, 19 nt, Artificial Sequence
  Description of Artificial Sequence: Synthetic oligonucleotide
acagcacgaugaagaagcu

SEQ ID NO: 452702 - RNA, 19 nt, Artificial Sequence
  Description of Artificial Sequence: Synthetic oligonucleotide
gcagauacccaagcaccug

SEQ ID NO: 452703 - RNA, 19 nt, Artificial Sequence
  Description of Artificial Sequence: Synthetic oligonucleotide
cacagccacacaccgcuaa

SEQ ID NO: 452704 - RNA, 19 nt, Artificial Sequence
  Description of Artificial Sequence: Synthetic oligonucleotide
gugguguugcgcccacauc

SEQ ID NO: 452705 - RNA, 19 nt, Artificial Sequence
  Description of Artificial Sequence: Synthetic oligonucleotide
uuuuacccguccgguggau

SEQ ID NO: 452706 - RNA, 19 nt, Artificial Sequence
  Description of Artificial Sequence: Synthetic oligonucleotide
gaccuggaggaaacagcuc

SEQ ID NO: 452707 - RNA, 19 nt, Artificial Sequence
  Description of Artificial Sequence: Synthetic oligonucleotide
uggccuuggugaggcagac

SEQ ID NO: 452708 - RNA, 19 nt, Artificial Sequence
  Description of Artificial Sequence: Synthetic oligonucleotide
gucugcagaucgcuugugu

SEQ ID NO: 452709 - RNA, 19 nt, Artificial Sequence
  Description of Artificial Sequence: Synthetic oligonucleotide
ccaucggagggcagacagg

SEQ ID NO: 452710 - RNA, 19 nt, Artificial Sequence
  Description of Artificial Sequence: Synthetic oligonucleotide
ugucccgguggggccaggc

SEQ ID NO: 452711 - RNA, 19 nt, Artificial Sequence
  Description of Artificial Sequence: Synthetic oligonucleotide
caggcgccgccaaacgcuc

SEQ ID NO: 452712 - RNA, 19 nt, Artificial Sequence
  Description of Artificial Sequence: Synthetic oligonucleotide
ggccauucccaggaucugc

SEQ ID NO: 452713 - RNA, 19 nt, Artificial Sequence
  Description of Artificial Sequence: Synthetic oligonucleotide
uacccguccgguggaugug

SEQ ID NO: 452714 - RNA, 19 nt, Artificial Sequence
  Description of Artificial Sequence: Synthetic oligonucleotide
ggcguagagacagggugac

SEQ ID NO: 452715 - RNA, 19 nt, Artificial Sequence
  Description of Artificial Sequence: Synthetic oligonucleotide
acgcagggagaggaggcca

SEQ ID NO: 452716 - RNA, 19 nt, Artificial Sequence
  Description of Artificial Sequence: Synthetic oligonucleotide
cguccgguggaugugcugg

SEQ ID NO: 452717 - RNA, 19 nt, Artificial Sequence
  Description of Artificial Sequence: Synthetic oligonucleotide
ggggcagaaacccaucaau

SEQ ID NO: 452718 - RNA, 19 nt, Artificial Sequence
  Description of Artificial Sequence: Synthetic oligonucleotide
ggcgccgccaaacgcucag

SEQ ID NO: 452719 - RNA, 19 nt, Artificial Sequence
  Description of Artificial Sequence: Synthetic oligonucleotide
ggccaggcgccgccaaacg

SEQ ID NO: 452720 - RNA, 19 nt, Artificial Sequence
  Description of Artificial Sequence: Synthetic oligonucleotide
ggacuucgugaucugguua

SEQ ID NO: 452721 - RNA, 19 nt, Artificial Sequence
  Description of Artificial Sequence: Synthetic oligonucleotide
cuugcacccugacaccugu

SEQ ID NO: 452722 - RNA, 19 nt, Artificial Sequence
  Description of Artificial Sequence: Synthetic oligonucleotide
agccugucaccaugacaau

SEQ ID NO: 452723 - RNA, 19 nt, Artificial Sequence
  Description of Artificial Sequence: Synthetic oligonucleotide
agacaagcacgggguucag

SEQ ID NO: 452724 - RNA, 19 nt, Artificial Sequence
  Description of Artificial Sequence: Synthetic oligonucleotide
acgcacaaggagacuugca

SEQ ID NO: 452725 - RNA, 19 nt, Artificial Sequence
  Description of Artificial Sequence: Synthetic oligonucleotide
uccgguggaugugcuggaa

SEQ ID NO: 452726 - RNA, 19 nt, Artificial Sequence
  Description of Artificial Sequence: Synthetic oligonucleotide
cacccugacaccugucgcu

SEQ ID NO: 452727 - RNA, 19 nt, Artificial Sequence
  Description of Artificial Sequence: Synthetic oligonucleotide
ccugacaccugucgcugug

SEQ ID NO: 452728 - RNA, 19 nt, Artificial Sequence
  Description of Artificial Sequence: Synthetic oligonucleotide
gguccucuccccuggcaca

SEQ ID NO: 452729 - RNA, 19 nt, Artificial Sequence
  Description of Artificial Sequence: Synthetic oligonucleotide
caggaugcacauucccacu

SEQ ID NO: 452730 - RNA, 19 nt, Artificial Sequence
  Description of Artificial Sequence: Synthetic oligonucleotide
ccaauaagcgugcacuccu

SEQ ID NO: 452731 - RNA, 19 nt, Artificial Sequence
  Description of Artificial Sequence: Synthetic oligonucleotide
gccaggcgccgccaaacgc

SEQ ID NO: 452732 - RNA, 19 nt, Artificial Sequence
  Description of Artificial Sequence: Synthetic oligonucleotide
ggacacggagagccagaug

SEQ ID NO: 452733 - RNA, 19 nt, Artificial Sequence
  Description of Artificial Sequence: Synthetic oligonucleotide
accagucuguguagucagu

SEQ ID NO: 452734 - RNA, 19 nt, Artificial Sequence
  Description of Artificial Sequence: Synthetic oligonucleotide
ccuauggcgaugacaaggu

SEQ ID NO: 452735 - RNA, 19 nt, Artificial Sequence
  Description of Artificial Sequence: Synthetic oligonucleotide
caggaauccaggcgcccaa

SEQ ID NO: 452736 - RNA, 19 nt, Artificial Sequence
  Description of Artificial Sequence: Synthetic oligonucleotide
cgaaagccugacuccucgg

SEQ ID NO: 452737 - RNA, 19 nt, Artificial Sequence
  Description of Artificial Sequence: Synthetic oligonucleotide
gggccugaccugguggugc

SEQ ID NO: 452738 - RNA, 19 nt, Artificial Sequence
  Description of Artificial Sequence: Synthetic oligonucleotide
uggugccuauggcgaugac

SEQ ID NO: 452739 - RNA, 19 nt, Artificial Sequence
  Description of Artificial Sequence: Synthetic oligonucleotide
cuugaagacccuggaggcu

SEQ ID NO: 452740 - RNA, 19 nt, Artificial Sequence
  Description of Artificial Sequence: Synthetic oligonucleotide
cagcggucaggcacuaugu

SEQ ID NO: 452741 - RNA, 19 nt, Artificial Sequence
  Description of Artificial Sequence: Synthetic oligonucleotide
gcauuuccuugaagccacg

SEQ ID NO: 452742 - RNA, 19 nt, Artificial Sequence
  Description of Artificial Sequence: Synthetic oligonucleotide
ggcgcccaagcccugaggu

SEQ ID NO: 452743 - RNA, 19 nt, Artificial Sequence
  Description of Artificial Sequence: Synthetic oligonucleotide
gugcccacgcagggagagg

SEQ ID NO: 452744 - RNA, 19 nt, Artificial Sequence
  Description of Artificial Sequence: Synthetic oligonucleotide
ggugguguugcgcccacau

SEQ ID NO: 452745 - RNA, 19 nt, Artificial Sequence
  Description of Artificial Sequence: Synthetic oligonucleotide
ggagguccgaaagccugac

SEQ ID NO: 452746 - RNA, 19 nt, Artificial Sequence
  Description of Artificial Sequence: Synthetic oligonucleotide
gagguccgaaagccugacu

SEQ ID NO: 452747 - RNA, 19 nt, Artificial Sequence
  Description of Artificial Sequence: Synthetic oligonucleotide
cccgguggggccaggcgcc

SEQ ID NO: 452748 - RNA, 19 nt, Artificial Sequence
  Description of Artificial Sequence: Synthetic oligonucleotide
ggggacgaagguggcgaag

SEQ ID NO: 452749 - RNA, 19 nt, Artificial Sequence
  Description of Artificial Sequence: Synthetic oligonucleotide
cugccccaugcagacucug

SEQ ID NO: 452750 - RNA, 19 nt, Artificial Sequence
  Description of Artificial Sequence: Synthetic oligonucleotide
cgggguucaggacacccac

SEQ ID NO: 452751 - RNA, 19 nt, Artificial Sequence
  Description of Artificial Sequence: Synthetic oligonucleotide
cgucuuuggcaaauaugca

SEQ ID NO: 452752 - RNA, 19 nt, Artificial Sequence
  Description of Artificial Sequence: Synthetic oligonucleotide
cagccacacaccgcuaaaa

SEQ ID NO: 452753 - RNA, 19 nt, Artificial Sequence
  Description of Artificial Sequence: Synthetic oligonucleotide
uggugguguugcgcccaca

SEQ ID NO: 452754 - RNA, 19 nt, Artificial Sequence
  Description of Artificial Sequence: Synthetic oligonucleotide
aguugccuugggacacgga

SEQ ID NO: 452755 - RNA, 19 nt, Artificial Sequence
  Description of Artificial Sequence: Synthetic oligonucleotide
gggccucuacccuccaaaa

SEQ ID NO: 452756 - RNA, 19 nt, Artificial Sequence
  Description of Artificial Sequence: Synthetic oligonucleotide
gccaugucccugcuaguua

SEQ ID NO: 452757 - RNA, 19 nt, Artificial Sequence
  Description of Artificial Sequence: Synthetic oligonucleotide
gggacgaagguggcgaagu

SEQ ID NO: 452758 - RNA, 19 nt, Artificial Sequence
  Description of Artificial Sequence: Synthetic oligonucleotide
ccucuacccuccaaaaggu

SEQ ID NO: 452759 - RNA, 19 nt, Artificial Sequence
  Description of Artificial Sequence: Synthetic oligonucleotide
cccgagacaagcacggggu

SEQ ID NO: 452760 - RNA, 19 nt, Artificial Sequence
  Description of Artificial Sequence: Synthetic oligonucleotide
cccagcacgugcuuguugu

SEQ ID NO: 452761 - RNA, 19 nt, Artificial Sequence
  Description of Artificial Sequence: Synthetic oligonucleotide
gaccugguggugccacccu

SEQ ID NO: 452762 - RNA, 19 nt, Artificial Sequence
  Description of Artificial Sequence: Synthetic oligonucleotide
cggagagccagaugcccac

SEQ ID NO: 452763 - RNA, 19 nt, Artificial Sequence
  Description of Artificial Sequence: Synthetic oligonucleotide
gcucaggcaucauacuuuu

SEQ ID NO: 452764 - RNA, 19 nt, Artificial Sequence
  Description of Artificial Sequence: Synthetic oligonucleotide
gucaggcacuauguucucu

SEQ ID NO: 452765 - RNA, 19 nt, Artificial Sequence
  Description of Artificial Sequence: Synthetic oligonucleotide
guagacgcacaaggagacu

SEQ ID NO: 452766 - RNA, 19 nt, Artificial Sequence
  Description of Artificial Sequence: Synthetic oligonucleotide
cccacguuguucucggugu

SEQ ID NO: 452767 - RNA, 19 nt, Artificial Sequence
  Description of Artificial Sequence: Synthetic oligonucleotide
guguugcgcccacaucccu

SEQ ID NO: 452768 - RNA, 19 nt, Artificial Sequence
  Description of Artificial Sequence: Synthetic oligonucleotide
ccaagagggucagaggaua

SEQ ID NO: 452769 - RNA, 19 nt, Artificial Sequence
  Description of Artificial Sequence: Synthetic oligonucleotide
cccuggcccgcucucuggc

SEQ ID NO: 452770 - RNA, 19 nt, Artificial Sequence
  Description of Artificial Sequence: Synthetic oligonucleotide
gcagaucgcuuguguggga

SEQ ID NO: 452771 - RNA, 19 nt, Artificial Sequence
  Description of Artificial Sequence: Synthetic oligonucleotide
cucacucgguguggccauc

SEQ ID NO: 452772 - RNA, 19 nt, Artificial Sequence
  Description of Artificial Sequence: Synthetic oligonucleotide
uggugccacccugcacccu

SEQ ID NO: 452773 - RNA, 19 nt, Artificial Sequence
  Description of Artificial Sequence: Synthetic oligonucleotide
ccgccaaacgcucaggcau

SEQ ID NO: 452774 - RNA, 19 nt, Artificial Sequence
  Description of Artificial Sequence: Synthetic oligonucleotide
cgccgccaaacgcucaggc

SEQ ID NO: 452775 - RNA, 19 nt, Artificial Sequence
  Description of Artificial Sequence: Synthetic oligonucleotide
gcagcccguucuccacaag

SEQ ID NO: 452776 - RNA, 19 nt, Artificial Sequence
  Description of Artificial Sequence: Synthetic oligonucleotide
gccaaacgcucaggcauca

SEQ ID NO: 452777 - RNA, 19 nt, Artificial Sequence
  Description of Artificial Sequence: Synthetic oligonucleotide
cccacugugcccagcacgu

SEQ ID NO: 452778 - RNA, 19 nt, Artificial Sequence
  Description of Artificial Sequence: Synthetic oligonucleotide
ccgcucucuggcugggcac

SEQ ID NO: 452779 - RNA, 19 nt, Artificial Sequence
  Description of Artificial Sequence: Synthetic oligonucleotide
ggaggcuuagacacucaau

SEQ ID NO: 452780 - RNA, 19 nt, Artificial Sequence
  Description of Artificial Sequence: Synthetic oligonucleotide
ggcuaacccuaaacuuauc

SEQ ID NO: 452781 - RNA, 19 nt, Artificial Sequence
  Description of Artificial Sequence: Synthetic oligonucleotide
cuauggcgaugacaagguu

SEQ ID NO: 452782 - RNA, 19 nt, Artificial Sequence
  Description of Artificial Sequence: Synthetic oligonucleotide
ccuugacacccugcccacc

SEQ ID NO: 452783 - RNA, 19 nt, Artificial Sequence
  Description of Artificial Sequence: Synthetic oligonucleotide
gugccaugucccugcuagu

SEQ ID NO: 452784 - RNA, 19 nt, Artificial Sequence
  Description of Artificial Sequence: Synthetic oligonucleotide
ggcaggggcagaaacccau

SEQ ID NO: 452785 - RNA, 19 nt, Artificial Sequence
  Description of Artificial Sequence: Synthetic oligonucleotide
acacagccacacaccgcua

SEQ ID NO: 452786 - RNA, 19 nt, Artificial Sequence
  Description of Artificial Sequence: Synthetic oligonucleotide
ccguccgguggaugugcug

SEQ ID NO: 452787 - RNA, 19 nt, Artificial Sequence
  Description of Artificial Sequence: Synthetic oligonucleotide
gcgccgccaaacgcucagg

SEQ ID NO: 452788 - RNA, 19 nt, Artificial Sequence
  Description of Artificial Sequence: Synthetic oligonucleotide
gcuggcguagagacagggu

SEQ ID NO: 452789 - RNA, 19 nt, Artificial Sequence
  Description of Artificial Sequence: Synthetic oligonucleotide
gugucccgguggggccagg

SEQ ID NO: 452790 - RNA, 19 nt, Artificial Sequence
  Description of Artificial Sequence: Synthetic oligonucleotide
gcguagagacagggugaca

SEQ ID NO: 452791 - RNA, 19 nt, Artificial Sequence
  Description of Artificial Sequence: Synthetic oligonucleotide
cccagucaggucugcagau

SEQ ID NO: 452792 - RNA, 19 nt, Artificial Sequence
  Description of Artificial Sequence: Synthetic oligonucleotide
cgaaaccaauaagcgugca

SEQ ID NO: 452793 - RNA, 19 nt, Artificial Sequence
  Description of Artificial Sequence: Synthetic oligonucleotide
cgcucaggcaucauacuuu

SEQ ID NO: 452794 - RNA, 19 nt, Artificial Sequence
  Description of Artificial Sequence: Synthetic oligonucleotide
cacccacccugugcaugga

SEQ ID NO: 452795 - RNA, 19 nt, Artificial Sequence
  Description of Artificial Sequence: Synthetic oligonucleotide
guguggccaucuaguguau

SEQ ID NO: 452796 - RNA, 19 nt, Artificial Sequence
  Description of Artificial Sequence: Synthetic oligonucleotide
gcgugcacuccuggcucuc

SEQ ID NO: 452797 - RNA, 19 nt, Artificial Sequence
  Description of Artificial Sequence: Synthetic oligonucleotide
cgguguggccaucuagugu

SEQ ID NO: 452798 - RNA, 19 nt, Artificial Sequence
  Description of Artificial Sequence: Synthetic oligonucleotide
ccucacucgguguggccau

SEQ ID NO: 452799 - RNA, 19 nt, Artificial Sequence
  Description of Artificial Sequence: Synthetic oligonucleotide
ccuggcgucuuuggcaaau

SEQ ID NO: 452800 - RNA, 19 nt, Artificial Sequence
  Description of Artificial Sequence: Synthetic oligonucleotide
gcccgcucucuggcugggc

SEQ ID NO: 452801 - RNA, 19 nt, Artificial Sequence
  Description of Artificial Sequence: Synthetic oligonucleotide
ggccuuggugaggcagacu

SEQ ID NO: 452802 - RNA, 19 nt, Artificial Sequence
  Description of Artificial Sequence: Synthetic oligonucleotide
cccugacaccugucgcugu

SEQ ID NO: 452803 - RNA, 19 nt, Artificial Sequence
  Description of Artificial Sequence: Synthetic oligonucleotide
ccgagacaagcacgggguu

SEQ ID NO: 452804 - RNA, 19 nt, Artificial Sequence
  Description of Artificial Sequence: Synthetic oligonucleotide
caccucccauggccucacu

SEQ ID NO: 452805 - RNA, 19 nt, Artificial Sequence
  Description of Artificial Sequence: Synthetic oligonucleotide
cccguccgguggaugugcu

SEQ ID NO: 452806 - RNA, 19 nt, Artificial Sequence
  Description of Artificial Sequence: Synthetic oligonucleotide
cccuggcgucuuuggcaaa

SEQ ID NO: 452807 - RNA, 19 nt, Artificial Sequence
  Description of Artificial Sequence: Synthetic oligonucleotide
aauuguucaauucuaauca

SEQ ID NO: 452808 - RNA, 19 nt, Artificial Sequence
  Description of Artificial Sequence: Synthetic oligonucleotide
ugaacuagcauccacuugg

SEQ ID NO: 452809 - RNA, 19 nt, Artificial Sequence
  Description of Artificial Sequence: Synthetic oligonucleotide
aaagguuuauccuaaauga

SEQ ID NO: 452810 - RNA, 19 nt, Artificial Sequence
  Description of Artificial Sequence: Synthetic oligonucleotide
uuaguaacaauauacagac

SEQ ID NO: 452811 - RNA, 19 nt, Artificial Sequence
  Description of Artificial Sequence: Synthetic oligonucleotide
ugauaugaaaaccaauacg

SEQ ID NO: 452812 - RNA, 19 nt, Artificial Sequence
  Description of Artificial Sequence: Synthetic oligonucleotide
uuuaggucaacacacagcc

SEQ ID NO: 452813 - RNA, 19 nt, Artificial Sequence
  Description of Artificial Sequence: Synthetic oligonucleotide
aacaauguaagcccacugc

SEQ ID NO: 452814 - RNA, 19 nt, Artificial Sequence
  Description of Artificial Sequence: Synthetic oligonucleotide
aguaacaauauacagacca

SEQ ID NO: 452815 - RNA, 19 nt, Artificial Sequence
  Description of Artificial Sequence: Synthetic oligonucleotide
aauguauugcaauucacug

SEQ ID NO: 452816 - RNA, 19 nt, Artificial Sequence
  Description of Artificial Sequence: Synthetic oligonucleotide
uguauugcaauucacugag

SEQ ID NO: 452817 - RNA, 19 nt, Artificial Sequence
  Description of Artificial Sequence: Synthetic oligonucleotide
auauauaaugcaucuaggg

SEQ ID NO: 452818 - RNA, 19 nt, Artificial Sequence
  Description of Artificial Sequence: Synthetic oligonucleotide
acuaaccuugcuuacaggc

SEQ ID NO: 452819 - RNA, 19 nt, Artificial Sequence
  Description of Artificial Sequence: Synthetic oligonucleotide
uuaaaggguacuuagaaaa

SEQ ID NO: 452820 - RNA, 19 nt, Artificial Sequence
  Description of Artificial Sequence: Synthetic oligonucleotide
aacaacucaaaauguauug

SEQ ID NO: 452821 - RNA, 19 nt, Artificial Sequence
  Description of Artificial Sequence: Synthetic oligonucleotide
uauauaaugcaucuaggga

SEQ ID NO: 452822 - RNA, 19 nt, Artificial Sequence
  Description of Artificial Sequence: Synthetic oligonucleotide
uuacauaugaaaaggaguc

SEQ ID NO: 452823 - RNA, 19 nt, Artificial Sequence
  Description of Artificial Sequence: Synthetic oligonucleotide
aacaauaaucccuaagcca

SEQ ID NO: 452824 - RNA, 19 nt, Artificial Sequence
  Description of Artificial Sequence: Synthetic oligonucleotide
acuaucacaagccaaagcu

SEQ ID NO: 452825 - RNA, 19 nt, Artificial Sequence
  Description of Artificial Sequence: Synthetic oligonucleotide
acaauguaagcccacugcc

SEQ ID NO: 452826 - RNA, 19 nt, Artificial Sequence
  Description of Artificial Sequence: Synthetic oligonucleotide
caugcaauagcuaauuaag

SEQ ID NO: 452827 - RNA, 19 nt, Artificial Sequence
  Description of Artificial Sequence: Synthetic oligonucleotide
gauuauagcuuacauuucc

SEQ ID NO: 452828 - RNA, 19 nt, Artificial Sequence
  Description of Artificial Sequence: Synthetic oligonucleotide
agaacuaacacauuacaga

SEQ ID NO: 452829 - RNA, 19 nt, Artificial Sequence
  Description of Artificial Sequence: Synthetic oligonucleotide
acuuugaagaucucaaguc

SEQ ID NO: 452830 - RNA, 19 nt, Artificial Sequence
  Description of Artificial Sequence: Synthetic oligonucleotide
aggauuauagcuuacauuu

SEQ ID NO: 452831 - RNA, 19 nt, Artificial Sequence
  Description of Artificial Sequence: Synthetic oligonucleotide
aaugcugaaagaauauagg

SEQ ID NO: 452832 - RNA, 19 nt, Artificial Sequence
  Description of Artificial Sequence: Synthetic oligonucleotide
uaauucaugacaguaaugu

SEQ ID NO: 452833 - RNA, 19 nt, Artificial Sequence
  Description of Artificial Sequence: Synthetic oligonucleotide
aucaucuuacaugugaacc

SEQ ID NO: 452834 - RNA, 19 nt, Artificial Sequence
  Description of Artificial Sequence: Synthetic oligonucleotide
uauguguuuggcauggaag

SEQ ID NO: 452835 - RNA, 19 nt, Artificial Sequence
  Description of Artificial Sequence: Synthetic oligonucleotide
auauaaugcaucuagggaa

SEQ ID NO: 452836 - RNA, 19 nt, Artificial Sequence
  Description of Artificial Sequence: Synthetic oligonucleotide
aaugacacucaacuuaacu

SEQ ID NO: 452837 - RNA, 19 nt, Artificial Sequence
  Description of Artificial Sequence: Synthetic oligonucleotide
ugacacucaacuuaacuag

SEQ ID NO: 452838 - RNA, 19 nt, Artificial Sequence
  Description of Artificial Sequence: Synthetic oligonucleotide
ucuugugcaaucuugguac

SEQ ID NO: 452839 - RNA, 19 nt, Artificial Sequence
  Description of Artificial Sequence: Synthetic oligonucleotide
uuacuauucccuuaggugu

SEQ ID NO: 452840 - RNA, 19 nt, Artificial Sequence
  Description of Artificial Sequence: Synthetic oligonucleotide
uacaugugaaccaauauau

SEQ ID NO: 452841 - RNA, 19 nt, Artificial Sequence
  Description of Artificial Sequence: Synthetic oligonucleotide
aaagaauauaggaacaaca

SEQ ID NO: 452842 - RNA, 19 nt, Artificial Sequence
  Description of Artificial Sequence: Synthetic oligonucleotide
uaauuaaggucuaccacag

SEQ ID NO: 452843 - RNA, 19 nt, Artificial Sequence
  Description of Artificial Sequence: Synthetic oligonucleotide
ucaauuuaguucaacaaua

SEQ ID NO: 452844 - RNA, 19 nt, Artificial Sequence
  Description of Artificial Sequence: Synthetic oligonucleotide
uaauuguucaauucuaauc

SEQ ID NO: 452845 - RNA, 19 nt, Artificial Sequence
  Description of Artificial Sequence: Synthetic oligonucleotide
aauauacagaccaagugca

SEQ ID NO: 452846 - RNA, 19 nt, Artificial Sequence
  Description of Artificial Sequence: Synthetic oligonucleotide
aauucuaaucaacaggcuu

SEQ ID NO: 452847 - RNA, 19 nt, Artificial Sequence
  Description of Artificial Sequence: Synthetic oligonucleotide
gacauagcaaaauucacca

SEQ ID NO: 452848 - RNA, 19 nt, Artificial Sequence
  Description of Artificial Sequence: Synthetic oligonucleotide
ugaccaguuaccaugguga

SEQ ID NO: 452849 - RNA, 19 nt, Artificial Sequence
  Description of Artificial Sequence: Synthetic oligonucleotide
ugcaauagcuaauuaaggu

SEQ ID NO: 452850 - RNA, 19 nt, Artificial Sequence
  Description of Artificial Sequence: Synthetic oligonucleotide
agaaugaaaccacccacac

SEQ ID NO: 452851 - RNA, 19 nt, Artificial Sequence
  Description of Artificial Sequence: Synthetic oligonucleotide
uguccugacuaucacaagc

SEQ ID NO: 452852 - RNA, 19 nt, Artificial Sequence
  Description of Artificial Sequence: Synthetic oligonucleotide
aaaggguacuuagaaaauc

SEQ ID NO: 452853 - RNA, 19 nt, Artificial Sequence
  Description of Artificial Sequence: Synthetic oligonucleotide
aauucaugacaguaaugug

SEQ ID NO: 452854 - RNA, 19 nt, Artificial Sequence
  Description of Artificial Sequence: Synthetic oligonucleotide
cuuagaauuguucacacga

SEQ ID NO: 452855 - RNA, 19 nt, Artificial Sequence
  Description of Artificial Sequence: Synthetic oligonucleotide
agaguuuacauauuaguau

SEQ ID NO: 452856 - RNA, 19 nt, Artificial Sequence
  Description of Artificial Sequence: Synthetic oligonucleotide
aauguaagcccacugccgu

SEQ ID NO: 452857 - RNA, 19 nt, Artificial Sequence
  Description of Artificial Sequence: Synthetic oligonucleotide
caagauacaaacgguaacg

SEQ ID NO: 452858 - RNA, 19 nt, Artificial Sequence
  Description of Artificial Sequence: Synthetic oligonucleotide
ugauaauauccugaaagcc

SEQ ID NO: 452859 - RNA, 19 nt, Artificial Sequence
  Description of Artificial Sequence: Synthetic oligonucleotide
aagauacaaacgguaacgg

SEQ ID NO: 452860 - RNA, 19 nt, Artificial Sequence
  Description of Artificial Sequence: Synthetic oligonucleotide
agguacuuaaagcaaacug

SEQ ID NO: 452861 - RNA, 19 nt, Artificial Sequence
  Description of Artificial Sequence: Synthetic oligonucleotide
uagaauuguucacacgaag

SEQ ID NO: 452862 - RNA, 19 nt, Artificial Sequence
  Description of Artificial Sequence: Synthetic oligonucleotide
cuuaacuagauauaauaca

SEQ ID NO: 452863 - RNA, 19 nt, Artificial Sequence
  Description of Artificial Sequence: Synthetic oligonucleotide
cuaauuaaggucuaccaca

SEQ ID NO: 452864 - RNA, 19 nt, Artificial Sequence
  Description of Artificial Sequence: Synthetic oligonucleotide
uauauggaggcuucucccg

SEQ ID NO: 452865 - RNA, 19 nt, Artificial Sequence
  Description of Artificial Sequence: Synthetic oligonucleotide
uucaagagucugacgagcg

SEQ ID NO: 452866 - RNA, 19 nt, Artificial Sequence
  Description of Artificial Sequence: Synthetic oligonucleotide
uuguaacacuuucauuucg

SEQ ID NO: 452867 - RNA, 19 nt, Artificial Sequence
  Description of Artificial Sequence: Synthetic oligonucleotide
uuacaugugaaccaauaua

SEQ ID NO: 452868 - RNA, 19 nt, Artificial Sequence
  Description of Artificial Sequence: Synthetic oligonucleotide
cuagugaccaguuaccaug

SEQ ID NO: 452869 - RNA, 19 nt, Artificial Sequence
  Description of Artificial Sequence: Synthetic oligonucleotide
uuaagacagugacauagca

SEQ ID NO: 452870 - RNA, 19 nt, Artificial Sequence
  Description of Artificial Sequence: Synthetic oligonucleotide
ucaucuuacaugugaacca

SEQ ID NO: 452871 - RNA, 19 nt, Artificial Sequence
  Description of Artificial Sequence: Synthetic oligonucleotide
uuuacauauuaguauugcu

SEQ ID NO: 452872 - RNA, 19 nt, Artificial Sequence
  Description of Artificial Sequence: Synthetic oligonucleotide
cuuauauggaggcuucucc

SEQ ID NO: 452873 - RNA, 19 nt, Artificial Sequence
  Description of Artificial Sequence: Synthetic oligonucleotide
caacaauaaucccuaagcc

SEQ ID NO: 452874 - RNA, 19 nt, Artificial Sequence
  Description of Artificial Sequence: Synthetic oligonucleotide
ucaagauacaaacgguaac

SEQ ID NO: 452875 - RNA, 19 nt, Artificial Sequence
  Description of Artificial Sequence: Synthetic oligonucleotide
auucuaaucaacaggcuuc

SEQ ID NO: 452876 - RNA, 19 nt, Artificial Sequence
  Description of Artificial Sequence: Synthetic oligonucleotide
aaacaauguaagcccacug

SEQ ID NO: 452877 - RNA, 19 nt, Artificial Sequence
  Description of Artificial Sequence: Synthetic oligonucleotide
aauguagaagaagacauuu

SEQ ID NO: 452878 - RNA, 19 nt, Artificial Sequence
  Description of Artificial Sequence: Synthetic oligonucleotide
uucaugacaguaauguguc

SEQ ID NO: 452879 - RNA, 19 nt, Artificial Sequence
  Description of Artificial Sequence: Synthetic oligonucleotide
ucuuauacccuuguaacac

SEQ ID NO: 452880 - RNA, 19 nt, Artificial Sequence
  Description of Artificial Sequence: Synthetic oligonucleotide
agaagacaauuuugcacgc

SEQ ID NO: 452881 - RNA, 19 nt, Artificial Sequence
  Description of Artificial Sequence: Synthetic oligonucleotide
uuagguguaaauccuuuaa

SEQ ID NO: 452882 - RNA, 19 nt, Artificial Sequence
  Description of Artificial Sequence: Synthetic oligonucleotide
ucaugaacuagcauccacu

SEQ ID NO: 452883 - RNA, 19 nt, Artificial Sequence
  Description of Artificial Sequence: Synthetic oligonucleotide
auacuaaccuugcuuacag

SEQ ID NO: 452884 - RNA, 19 nt, Artificial Sequence
  Description of Artificial Sequence: Synthetic oligonucleotide
uacaggcuaauugagaaug

SEQ ID NO: 452885 - RNA, 19 nt, Artificial Sequence
  Description of Artificial Sequence: Synthetic oligonucleotide
uauaaugcaucuagggaaa

SEQ ID NO: 452886 - RNA, 19 nt, Artificial Sequence
  Description of Artificial Sequence: Synthetic oligonucleotide
acaauguaauucaugacag

SEQ ID NO: 452887 - RNA, 19 nt, Artificial Sequence
  Description of Artificial Sequence: Synthetic oligonucleotide
uaacaauauacagaccaag

SEQ ID NO: 452888 - RNA, 19 nt, Artificial Sequence
  Description of Artificial Sequence: Synthetic oligonucleotide
uuuauccuaaaugauaaua

SEQ ID NO: 452889 - RNA, 19 nt, Artificial Sequence
  Description of Artificial Sequence: Synthetic oligonucleotide
gaauauguguuguggauuc

SEQ ID NO: 452890 - RNA, 19 nt, Artificial Sequence
  Description of Artificial Sequence: Synthetic oligonucleotide
uauccuuagggaauaugug

SEQ ID NO: 452891 - RNA, 19 nt, Artificial Sequence
  Description of Artificial Sequence: Synthetic oligonucleotide
cugugcuuaguucugauac

SEQ ID NO: 452892 - RNA, 19 nt, Artificial Sequence
  Description of Artificial Sequence: Synthetic oligonucleotide
uauagcuuacauuuccuaa

SEQ ID NO: 452893 - RNA, 19 nt, Artificial Sequence
  Description of Artificial Sequence: Synthetic oligonucleotide
ucaucaagauacaaacggu

SEQ ID NO: 452894 - RNA, 19 nt, Artificial Sequence
  Description of Artificial Sequence: Synthetic oligonucleotide
augguuucaugucauagca

SEQ ID NO: 452895 - RNA, 19 nt, Artificial Sequence
  Description of Artificial Sequence: Synthetic oligonucleotide
augcugaaagaauauagga

SEQ ID NO: 452896 - RNA, 19 nt, Artificial Sequence
  Description of Artificial Sequence: Synthetic oligonucleotide
acaauuuugcacgcuaagg

SEQ ID NO: 452897 - RNA, 19 nt, Artificial Sequence
  Description of Artificial Sequence: Synthetic oligonucleotide
gaagcuucaguguuauaug

SEQ ID NO: 452898 - RNA, 19 nt, Artificial Sequence
  Description of Artificial Sequence: Synthetic oligonucleotide
gacuacuccagcaccaugg

SEQ ID NO: 452899 - RNA, 19 nt, Artificial Sequence
  Description of Artificial Sequence: Synthetic oligonucleotide
cauaaaucaucuuacaugu

SEQ ID NO: 452900 - RNA, 19 nt, Artificial Sequence
  Description of Artificial Sequence: Synthetic oligonucleotide
aaaugauuggcaagucagg

SEQ ID NO: 452901 - RNA, 19 nt, Artificial Sequence
  Description of Artificial Sequence: Synthetic oligonucleotide
ucacacgaagcccugaggu

SEQ ID NO: 452902 - RNA, 19 nt, Artificial Sequence
  Description of Artificial Sequence: Synthetic oligonucleotide
uagggaauauguguugugg

SEQ ID NO: 452903 - RNA, 19 nt, Artificial Sequence
  Description of Artificial Sequence: Synthetic oligonucleotide
augaaaaccaauacgguca

SEQ ID NO: 452904 - RNA, 19 nt, Artificial Sequence
  Description of Artificial Sequence: Synthetic oligonucleotide
accaagugcacuucuagug

SEQ ID NO: 452905 - RNA, 19 nt, Artificial Sequence
  Description of Artificial Sequence: Synthetic oligonucleotide
uaacucaucaagauacaaa

SEQ ID NO: 452906 - RNA, 19 nt, Artificial Sequence
  Description of Artificial Sequence: Synthetic oligonucleotide
auauggaggcuucucccgc

SEQ ID NO: 452907 - RNA, 19 nt, Artificial Sequence
  Description of Artificial Sequence: Synthetic oligonucleotide
cauggugauacucugaaga

SEQ ID NO: 452908 - RNA, 19 nt, Artificial Sequence
  Description of Artificial Sequence: Synthetic oligonucleotide
cuauuaacgugaaauauaa

SEQ ID NO: 452909 - RNA, 19 nt, Artificial Sequence
  Description of Artificial Sequence: Synthetic oligonucleotide
agcuaauuaaggucuacca

SEQ ID NO: 452910 - RNA, 19 nt, Artificial Sequence
  Description of Artificial Sequence: Synthetic oligonucleotide
aauacggucacuguaccaa

SEQ ID NO: 452911 - RNA, 19 nt, Artificial Sequence
  Description of Artificial Sequence: Synthetic oligonucleotide
caugguuucaugucauagc

SEQ ID NO: 452912 - RNA, 19 nt, Artificial Sequence
  Description of Artificial Sequence: Synthetic oligonucleotide
gaagagccuaguaauaccc

SEQ ID NO: 452913 - RNA, 19 nt, Artificial Sequence
  Description of Artificial Sequence: Synthetic oligonucleotide
uaucacaagccaaagcuua

SEQ ID NO: 452914 - RNA, 19 nt, Artificial Sequence
  Description of Artificial Sequence: Synthetic oligonucleotide
gagaaugacacucaacuua

SEQ ID NO: 452915 - RNA, 19 nt, Artificial Sequence
  Description of Artificial Sequence: Synthetic oligonucleotide
ucugcucuauuuaaagggu

SEQ ID NO: 452916 - RNA, 19 nt, Artificial Sequence
  Description of Artificial Sequence: Synthetic oligonucleotide
aaacaagcaucccaagaaa

SEQ ID NO: 452917 - RNA, 19 nt, Artificial Sequence
  Description of Artificial Sequence: Synthetic oligonucleotide
aauacuaaccuugcuuaca

SEQ ID NO: 452918 - RNA, 19 nt, Artificial Sequence
  Description of Artificial Sequence: Synthetic oligonucleotide
aacuaccuuuuacuuagug

SEQ ID NO: 452919 - RNA, 19 nt, Artificial Sequence
  Description of Artificial Sequence: Synthetic oligonucleotide
uaacacauuacagaguuua

SEQ ID NO: 452920 - RNA, 19 nt, Artificial Sequence
  Description of Artificial Sequence: Synthetic oligonucleotide
uugaucaauaccacuuuaa

SEQ ID NO: 452921 - RNA, 19 nt, Artificial Sequence
  Description of Artificial Sequence: Synthetic oligonucleotide
uugggaaacacaugcuuug

SEQ ID NO: 452922 - RNA, 19 nt, Artificial Sequence
  Description of Artificial Sequence: Synthetic oligonucleotide
uucuuauacccuuguaaca

SEQ ID NO: 452923 - RNA, 19 nt, Artificial Sequence
  Description of Artificial Sequence: Synthetic oligonucleotide
gacaauuuugcacgcuaag

SEQ ID NO: 452924 - RNA, 19 nt, Artificial Sequence
  Description of Artificial Sequence: Synthetic oligonucleotide
auucccuuagguguaaauc

SEQ ID NO: 452925 - RNA, 19 nt, Artificial Sequence
  Description of Artificial Sequence: Synthetic oligonucleotide
uuguucaauucuaaucaac

SEQ ID NO: 452926 - RNA, 19 nt, Artificial Sequence
  Description of Artificial Sequence: Synthetic oligonucleotide
auccuuagggaauaugugu

SEQ ID NO: 452927 - RNA, 19 nt, Artificial Sequence
  Description of Artificial Sequence: Synthetic oligonucleotide
auauuugaucaauaccacu

SEQ ID NO: 452928 - RNA, 19 nt, Artificial Sequence
  Description of Artificial Sequence: Synthetic oligonucleotide
caauguaagcccacugccg

SEQ ID NO: 452929 - RNA, 19 nt, Artificial Sequence
  Description of Artificial Sequence: Synthetic oligonucleotide
uaguaauaccccuugggaa

SEQ ID NO: 452930 - RNA, 19 nt, Artificial Sequence
  Description of Artificial Sequence: Synthetic oligonucleotide
ugcucuauuuaaaggguac

SEQ ID NO: 452931 - RNA, 19 nt, Artificial Sequence
  Description of Artificial Sequence: Synthetic oligonucleotide
cuucuagugaccaguuacc

SEQ ID NO: 452932 - RNA, 19 nt, Artificial Sequence
  Description of Artificial Sequence: Synthetic oligonucleotide
aagacaauuuugcacgcua

SEQ ID NO: 452933 - RNA, 19 nt, Artificial Sequence
  Description of Artificial Sequence: Synthetic oligonucleotide
aacgguguccacucucguc

SEQ ID NO: 452934 - RNA, 19 nt, Artificial Sequence
  Description of Artificial Sequence: Synthetic oligonucleotide
augacacucaacuuaacua

SEQ ID NO: 452935 - RNA, 19 nt, Artificial Sequence
  Description of Artificial Sequence: Synthetic oligonucleotide
gcaaacugcaguuugaaca

SEQ ID NO: 452936 - RNA, 19 nt, Artificial Sequence
  Description of Artificial Sequence: Synthetic oligonucleotide
uuaaggucuaccacagaaa

SEQ ID NO: 452937 - RNA, 19 nt, Artificial Sequence
  Description of Artificial Sequence: Synthetic oligonucleotide
aguagcucagcauuaguaa

SEQ ID NO: 452938 - RNA, 19 nt, Artificial Sequence
  Description of Artificial Sequence: Synthetic oligonucleotide
aaucccuaagccaaaugug

SEQ ID NO: 452939 - RNA, 19 nt, Artificial Sequence
  Description of Artificial Sequence: Synthetic oligonucleotide
auguauugcaauucacuga

SEQ ID NO: 452940 - RNA, 19 nt, Artificial Sequence
  Description of Artificial Sequence: Synthetic oligonucleotide
ugcacuuagaauuguucac

SEQ ID NO: 452941 - RNA, 19 nt, Artificial Sequence
  Description of Artificial Sequence: Synthetic oligonucleotide
ugcaaucuugguaccaucu

SEQ ID NO: 452942 - RNA, 19 nt, Artificial Sequence
  Description of Artificial Sequence: Synthetic oligonucleotide
ucuuacaugugaaccaaua

SEQ ID NO: 452943 - RNA, 19 nt, Artificial Sequence
  Description of Artificial Sequence: Synthetic oligonucleotide
gaccauaaaugaguaacag

SEQ ID NO: 452944 - RNA, 19 nt, Artificial Sequence
  Description of Artificial Sequence: Synthetic oligonucleotide
gaucucaagucaugcagug

SEQ ID NO: 452945 - RNA, 19 nt, Artificial Sequence
  Description of Artificial Sequence: Synthetic oligonucleotide
uuagaauuguucacacgaa

SEQ ID NO: 452946 - RNA, 19 nt, Artificial Sequence
  Description of Artificial Sequence: Synthetic oligonucleotide
aaaucaaaauggccuucca

SEQ ID NO: 452947 - RNA, 19 nt, Artificial Sequence
  Description of Artificial Sequence: Synthetic oligonucleotide
aauaccccuugggaaacac

SEQ ID NO: 452948 - RNA, 19 nt, Artificial Sequence
  Description of Artificial Sequence: Synthetic oligonucleotide
aacacauuacagaguuuac

SEQ ID NO: 452949 - RNA, 19 nt, Artificial Sequence
  Description of Artificial Sequence: Synthetic oligonucleotide
accauaaaugaguaacagu

SEQ ID NO: 452950 - RNA, 19 nt, Artificial Sequence
  Description of Artificial Sequence: Synthetic oligonucleotide
uaguuuauccuuagggaau

SEQ ID NO: 452951 - RNA, 19 nt, Artificial Sequence
  Description of Artificial Sequence: Synthetic oligonucleotide
aaaccaauacggucacugu

SEQ ID NO: 452952 - RNA, 19 nt, Artificial Sequence
  Description of Artificial Sequence: Synthetic oligonucleotide
ugcagaagacaauuuugca

SEQ ID NO: 452953 - RNA, 19 nt, Artificial Sequence
  Description of Artificial Sequence: Synthetic oligonucleotide
uuugaucaauaccacuuua

SEQ ID NO: 452954 - RNA, 19 nt, Artificial Sequence
  Description of Artificial Sequence: Synthetic oligonucleotide
agaccaagugcacuucuag

SEQ ID NO: 452955 - RNA, 19 nt, Artificial Sequence
  Description of Artificial Sequence: Synthetic oligonucleotide
uaaaggguacuuagaaaau

SEQ ID NO: 452956 - RNA, 19 nt, Artificial Sequence
  Description of Artificial Sequence: Synthetic oligonucleotide
ugggguauguguuuggcau

SEQ ID NO: 452957 - RNA, 19 nt, Artificial Sequence
  Description of Artificial Sequence: Synthetic oligonucleotide
ggcuaauugagaaugacac

SEQ ID NO: 452958 - RNA, 19 nt, Artificial Sequence
  Description of Artificial Sequence: Synthetic oligonucleotide
aggagaacuaacacauuac

SEQ ID NO: 452959 - RNA, 19 nt, Artificial Sequence
  Description of Artificial Sequence: Synthetic oligonucleotide
uccuauuaacgugaaauau

SEQ ID NO: 452960 - RNA, 19 nt, Artificial Sequence
  Description of Artificial Sequence: Synthetic oligonucleotide
ucccuaagccaaauguggc

SEQ ID NO: 452961 - RNA, 19 nt, Artificial Sequence
  Description of Artificial Sequence: Synthetic oligonucleotide
augcaauagcuaauuaagg

SEQ ID NO: 452962 - RNA, 19 nt, Artificial Sequence
  Description of Artificial Sequence: Synthetic oligonucleotide
ucucuuuuaagaggccuag

SEQ ID NO: 452963 - RNA, 19 nt, Artificial Sequence
  Description of Artificial Sequence: Synthetic oligonucleotide
uuaccauggugauacucug

SEQ ID NO: 452964 - RNA, 19 nt, Artificial Sequence
  Description of Artificial Sequence: Synthetic oligonucleotide
acacacaccucuuuuggcu

SEQ ID NO: 452965 - RNA, 19 nt, Artificial Sequence
  Description of Artificial Sequence: Synthetic oligonucleotide
uuagggaauauguguugug

SEQ ID NO: 452966 - RNA, 19 nt, Artificial Sequence
  Description of Artificial Sequence: Synthetic oligonucleotide
aaccaauacggucacugua

SEQ ID NO: 452967 - RNA, 19 nt, Artificial Sequence
  Description of Artificial Sequence: Synthetic oligonucleotide
cuaguaauaccccuuggga

SEQ ID NO: 452968 - RNA, 19 nt, Artificial Sequence
  Description of Artificial Sequence: Synthetic oligonucleotide
aguaauguguccugacuau

SEQ ID NO: 452969 - RNA, 19 nt, Artificial Sequence
  Description of Artificial Sequence: Synthetic oligonucleotide
acgguaacgguguccacuc

SEQ ID NO: 452970 - RNA, 19 nt, Artificial Sequence
  Description of Artificial Sequence: Synthetic oligonucleotide
ugcuuacaggcaauguuac

SEQ ID NO: 452971 - RNA, 19 nt, Artificial Sequence
  Description of Artificial Sequence: Synthetic oligonucleotide
acaguaauguguccugacu

SEQ ID NO: 452972 - RNA, 19 nt, Artificial Sequence
  Description of Artificial Sequence: Synthetic oligonucleotide
uuauagcuuacauuuccua

SEQ ID NO: 452973 - RNA, 19 nt, Artificial Sequence
  Description of Artificial Sequence: Synthetic oligonucleotide
agucauacauauaaggcau

SEQ ID NO: 452974 - RNA, 19 nt, Artificial Sequence
  Description of Artificial Sequence: Synthetic oligonucleotide
caaagcuuaugaacaacuc

SEQ ID NO: 452975 - RNA, 19 nt, Artificial Sequence
  Description of Artificial Sequence: Synthetic oligonucleotide
caauagcuaauuaaggucu

SEQ ID NO: 452976 - RNA, 19 nt, Artificial Sequence
  Description of Artificial Sequence: Synthetic oligonucleotide
uuccuauuaacgugaaaua

SEQ ID NO: 452977 - RNA, 19 nt, Artificial Sequence
  Description of Artificial Sequence: Synthetic oligonucleotide
aggucuaccacagaaaaua

SEQ ID NO: 452978 - RNA, 19 nt, Artificial Sequence
  Description of Artificial Sequence: Synthetic oligonucleotide
gcaauagcuaauuaagguc

SEQ ID NO: 452979 - RNA, 19 nt, Artificial Sequence
  Description of Artificial Sequence: Synthetic oligonucleotide
ucucaugcgugucacucac

SEQ ID NO: 452980 - RNA, 19 nt, Artificial Sequence
  Description of Artificial Sequence: Synthetic oligonucleotide
aacgguaacgguguccacu

SEQ ID NO: 452981 - RNA, 19 nt, Artificial Sequence
  Description of Artificial Sequence: Synthetic oligonucleotide
ugugcuuaguucugauaca

SEQ ID NO: 452982 - RNA, 19 nt, Artificial Sequence
  Description of Artificial Sequence: Synthetic oligonucleotide
agaaagguuuauccuaaau

SEQ ID NO: 452983 - RNA, 19 nt, Artificial Sequence
  Description of Artificial Sequence: Synthetic oligonucleotide
acacgaagcccugagguuc

SEQ ID NO: 452984 - RNA, 19 nt, Artificial Sequence
  Description of Artificial Sequence: Synthetic oligonucleotide
uagcuaauuaaggucuacc

SEQ ID NO: 452985 - RNA, 19 nt, Artificial Sequence
  Description of Artificial Sequence: Synthetic oligonucleotide
acgguguccacucucgucu

SEQ ID NO: 452986 - RNA, 19 nt, Artificial Sequence
  Description of Artificial Sequence: Synthetic oligonucleotide
guagcucagcauuaguaac

SEQ ID NO: 452987 - RNA, 19 nt, Artificial Sequence
  Description of Artificial Sequence: Synthetic oligonucleotide
auagcuaauuaaggucuac

SEQ ID NO: 452988 - RNA, 19 nt, Artificial Sequence
  Description of Artificial Sequence: Synthetic oligonucleotide
acacagaccauaaaugagu

SEQ ID NO: 452989 - RNA, 19 nt, Artificial Sequence
  Description of Artificial Sequence: Synthetic oligonucleotide
cuuugcagcuagcaccagg

SEQ ID NO: 452990 - RNA, 19 nt, Artificial Sequence
  Description of Artificial Sequence: Synthetic oligonucleotide
auuguucaauucuaaucaa

SEQ ID NO: 452991 - RNA, 19 nt, Artificial Sequence
  Description of Artificial Sequence: Synthetic oligonucleotide
aauuaaggucuaccacaga

SEQ ID NO: 452992 - RNA, 19 nt, Artificial Sequence
  Description of Artificial Sequence: Synthetic oligonucleotide
auagcaaaauucaccaccu

SEQ ID NO: 452993 - RNA, 19 nt, Artificial Sequence
  Description of Artificial Sequence: Synthetic oligonucleotide
agugggguauguguuuggc

SEQ ID NO: 452994 - RNA, 19 nt, Artificial Sequence
  Description of Artificial Sequence: Synthetic oligonucleotide
auuuugcacgcuaagguga

SEQ ID NO: 452995 - RNA, 19 nt, Artificial Sequence
  Description of Artificial Sequence: Synthetic oligonucleotide
acauaugaaaaggagucau

SEQ ID NO: 452996 - RNA, 19 nt, Artificial Sequence
  Description of Artificial Sequence: Synthetic oligonucleotide
acucucgucuucguacucc

SEQ ID NO: 452997 - RNA, 19 nt, Artificial Sequence
  Description of Artificial Sequence: Synthetic oligonucleotide
uauuaacgugaaauauaaa

SEQ ID NO: 452998 - RNA, 19 nt, Artificial Sequence
  Description of Artificial Sequence: Synthetic oligonucleotide
uucuaaucaacaggcuuca

SEQ ID NO: 452999 - RNA, 19 nt, Artificial Sequence
  Description of Artificial Sequence: Synthetic oligonucleotide
ucauacauauaaggcauau

SEQ ID NO: 453000 - RNA, 19 nt, Artificial Sequence
  Description of Artificial Sequence: Synthetic oligonucleotide
gcuaauuaaggucuaccac

SEQ ID NO: 453001 - RNA, 19 nt, Artificial Sequence
  Description of Artificial Sequence: Synthetic oligonucleotide
guuacauaugaaaaggagu

SEQ ID NO: 453002 - RNA, 19 nt, Artificial Sequence
  Description of Artificial Sequence: Synthetic oligonucleotide
cagaguuuacauauuagua

SEQ ID NO: 453003 - RNA, 19 nt, Artificial Sequence
  Description of Artificial Sequence: Synthetic oligonucleotide
uucugauacaggagaacua

SEQ ID NO: 453004 - RNA, 19 nt, Artificial Sequence
  Description of Artificial Sequence: Synthetic oligonucleotide
guaacgguguccacucucg

SEQ ID NO: 453005 - RNA, 19 nt, Artificial Sequence
  Description of Artificial Sequence: Synthetic oligonucleotide
uuauugaugcaggcugugc

SEQ ID NO: 453006 - RNA, 19 nt, Artificial Sequence
  Description of Artificial Sequence: Synthetic oligonucleotide
guuaccgccuccuucuaac

SEQ ID NO: 453007 - RNA, 19 nt, Artificial Sequence
  Description of Artificial Sequence: Synthetic oligonucleotide
ccuaguaauaccccuuggg

SEQ ID NO: 453008 - RNA, 19 nt, Artificial Sequence
  Description of Artificial Sequence: Synthetic oligonucleotide
uggggacuacuccagcacc

SEQ ID NO: 453009 - RNA, 19 nt, Artificial Sequence
  Description of Artificial Sequence: Synthetic oligonucleotide
uuuugcacgcuaaggugaa

SEQ ID NO: 453010 - RNA, 19 nt, Artificial Sequence
  Description of Artificial Sequence: Synthetic oligonucleotide
uccugacuaucacaagcca

SEQ ID NO: 453011 - RNA, 19 nt, Artificial Sequence
  Description of Artificial Sequence: Synthetic oligonucleotide
ggucagaacagagagcugc

SEQ ID NO: 453012 - RNA, 19 nt, Artificial Sequence
  Description of Artificial Sequence: Synthetic oligonucleotide
acacauuacagaguuuaca

SEQ ID NO: 453013 - RNA, 19 nt, Artificial Sequence
  Description of Artificial Sequence: Synthetic oligonucleotide
ugagaaugacacucaacuu

SEQ ID NO: 453014 - RNA, 19 nt, Artificial Sequence
  Description of Artificial Sequence: Synthetic oligonucleotide
accaccuacuuugaagauc

SEQ ID NO: 453015 - RNA, 19 nt, Artificial Sequence
  Description of Artificial Sequence: Synthetic oligonucleotide
aaagccuuauauggaggcu

SEQ ID NO: 453016 - RNA, 19 nt, Artificial Sequence
  Description of Artificial Sequence: Synthetic oligonucleotide
caauuuaguucaacaauaa

SEQ ID NO: 453017 - RNA, 19 nt, Artificial Sequence
  Description of Artificial Sequence: Synthetic oligonucleotide
gcaacugauaauauguaac

SEQ ID NO: 453018 - RNA, 19 nt, Artificial Sequence
  Description of Artificial Sequence: Synthetic oligonucleotide
auacagaccaagugcacuu

SEQ ID NO: 453019 - RNA, 19 nt, Artificial Sequence
  Description of Artificial Sequence: Synthetic oligonucleotide
cugacuaucacaagccaaa

SEQ ID NO: 453020 - RNA, 19 nt, Artificial Sequence
  Description of Artificial Sequence: Synthetic oligonucleotide
gugaccaguuaccauggug

SEQ ID NO: 453021 - RNA, 19 nt, Artificial Sequence
  Description of Artificial Sequence: Synthetic oligonucleotide
auuauagcuuacauuuccu

SEQ ID NO: 453022 - RNA, 19 nt, Artificial Sequence
  Description of Artificial Sequence: Synthetic oligonucleotide
uaagaggccuagucuguca

SEQ ID NO: 453023 - RNA, 19 nt, Artificial Sequence
  Description of Artificial Sequence: Synthetic oligonucleotide
agccuaguaauaccccuug

SEQ ID NO: 453024 - RNA, 19 nt, Artificial Sequence
  Description of Artificial Sequence: Synthetic oligonucleotide
ggaacaacaugguuucaug

SEQ ID NO: 453025 - RNA, 19 nt, Artificial Sequence
  Description of Artificial Sequence: Synthetic oligonucleotide
gagucugacgagcgucugg

SEQ ID NO: 453026 - RNA, 19 nt, Artificial Sequence
  Description of Artificial Sequence: Synthetic oligonucleotide
uccuaaauauucagucaua

SEQ ID NO: 453027 - RNA, 19 nt, Artificial Sequence
  Description of Artificial Sequence: Synthetic oligonucleotide
uacuauucccuuaggugua

SEQ ID NO: 453028 - RNA, 19 nt, Artificial Sequence
  Description of Artificial Sequence: Synthetic oligonucleotide
uccaguuagcauuguccug

SEQ ID NO: 453029 - RNA, 19 nt, Artificial Sequence
  Description of Artificial Sequence: Synthetic oligonucleotide
acaggcaauguuacacuac

SEQ ID NO: 453030 - RNA, 19 nt, Artificial Sequence
  Description of Artificial Sequence: Synthetic oligonucleotide
acauuacagaguuuacaua

SEQ ID NO: 453031 - RNA, 19 nt, Artificial Sequence
  Description of Artificial Sequence: Synthetic oligonucleotide
caucaagauacaaacggua

SEQ ID NO: 453032 - RNA, 19 nt, Artificial Sequence
  Description of Artificial Sequence: Synthetic oligonucleotide
cuugugcaaucuugguacc

SEQ ID NO: 453033 - RNA, 19 nt, Artificial Sequence
  Description of Artificial Sequence: Synthetic oligonucleotide
aagaaagguuuauccuaaa

SEQ ID NO: 453034 - RNA, 19 nt, Artificial Sequence
  Description of Artificial Sequence: Synthetic oligonucleotide
ucaagucaugcaguggggu

SEQ ID NO: 453035 - RNA, 19 nt, Artificial Sequence
  Description of Artificial Sequence: Synthetic oligonucleotide
aagucaugcagugggguau

SEQ ID NO: 453036 - RNA, 19 nt, Artificial Sequence
  Description of Artificial Sequence: Synthetic oligonucleotide
gcuaaggugaacauaucug

SEQ ID NO: 453037 - RNA, 19 nt, Artificial Sequence
  Description of Artificial Sequence: Synthetic oligonucleotide
uuuggugcuuagaguccag

SEQ ID NO: 453038 - RNA, 19 nt, Artificial Sequence
  Description of Artificial Sequence: Synthetic oligonucleotide
ucaugacaguaaugugucc

SEQ ID NO: 453039 - RNA, 19 nt, Artificial Sequence
  Description of Artificial Sequence: Synthetic oligonucleotide
cuaaccuugcuuacaggca

SEQ ID NO: 453040 - RNA, 19 nt, Artificial Sequence
  Description of Artificial Sequence: Synthetic oligonucleotide
aucaagauacaaacgguaa

SEQ ID NO: 453041 - RNA, 19 nt, Artificial Sequence
  Description of Artificial Sequence: Synthetic oligonucleotide
accgccuccuucuaacuca

SEQ ID NO: 453042 - RNA, 19 nt, Artificial Sequence
  Description of Artificial Sequence: Synthetic oligonucleotide
guccugacuaucacaagcc

SEQ ID NO: 453043 - RNA, 19 nt, Artificial Sequence
  Description of Artificial Sequence: Synthetic oligonucleotide
uaccuugucuugcccaccu

SEQ ID NO: 453044 - RNA, 19 nt, Artificial Sequence
  Description of Artificial Sequence: Synthetic oligonucleotide
uuaggucaacacacagccu

SEQ ID NO: 453045 - RNA, 19 nt, Artificial Sequence
  Description of Artificial Sequence: Synthetic oligonucleotide
augggcaucuuuccuauua

SEQ ID NO: 453046 - RNA, 19 nt, Artificial Sequence
  Description of Artificial Sequence: Synthetic oligonucleotide
ucuuuccuauuaacgugaa

SEQ ID NO: 453047 - RNA, 19 nt, Artificial Sequence
  Description of Artificial Sequence: Synthetic oligonucleotide
uuggugcuuagaguccagg

SEQ ID NO: 453048 - RNA, 19 nt, Artificial Sequence
  Description of Artificial Sequence: Synthetic oligonucleotide
ucgagcucugucaucugaa

SEQ ID NO: 453049 - RNA, 19 nt, Artificial Sequence
  Description of Artificial Sequence: Synthetic oligonucleotide
ucacaagccaaagcuuaug

SEQ ID NO: 453050 - RNA, 19 nt, Artificial Sequence
  Description of Artificial Sequence: Synthetic oligonucleotide
ccuaaauauucagucauac

SEQ ID NO: 453051 - RNA, 19 nt, Artificial Sequence
  Description of Artificial Sequence: Synthetic oligonucleotide
agaccauaaaugaguaaca

SEQ ID NO: 453052 - RNA, 19 nt, Artificial Sequence
  Description of Artificial Sequence: Synthetic oligonucleotide
caggcaauguuacacuaca

SEQ ID NO: 453053 - RNA, 19 nt, Artificial Sequence
  Description of Artificial Sequence: Synthetic oligonucleotide
acugacuaccaccuacuuu

SEQ ID NO: 453054 - RNA, 19 nt, Artificial Sequence
  Description of Artificial Sequence: Synthetic oligonucleotide
aauagcuaauuaaggucua

SEQ ID NO: 453055 - RNA, 19 nt, Artificial Sequence
  Description of Artificial Sequence: Synthetic oligonucleotide
caagagucugacgagcguc

SEQ ID NO: 453056 - RNA, 19 nt, Artificial Sequence
  Description of Artificial Sequence: Synthetic oligonucleotide
ugucauucccaggcaaugu

SEQ ID NO: 453057 - RNA, 19 nt, Artificial Sequence
  Description of Artificial Sequence: Synthetic oligonucleotide
ggguacuuagaaaauccag

SEQ ID NO: 453058 - RNA, 19 nt, Artificial Sequence
  Description of Artificial Sequence: Synthetic oligonucleotide
ugccguggggacuacucca

SEQ ID NO: 453059 - RNA, 19 nt, Artificial Sequence
  Description of Artificial Sequence: Synthetic oligonucleotide
ugcgugucacucacugucu

SEQ ID NO: 453060 - RNA, 19 nt, Artificial Sequence
  Description of Artificial Sequence: Synthetic oligonucleotide
agaucucaagucaugcagu

SEQ ID NO: 453061 - RNA, 19 nt, Artificial Sequence
  Description of Artificial Sequence: Synthetic oligonucleotide
acuacuccagcaccaugga

SEQ ID NO: 453062 - RNA, 19 nt, Artificial Sequence
  Description of Artificial Sequence: Synthetic oligonucleotide
uauacccuuguaacacuuu

SEQ ID NO: 453063 - RNA, 19 nt, Artificial Sequence
  Description of Artificial Sequence: Synthetic oligonucleotide
uccucuauucugcucuauu

SEQ ID NO: 453064 - RNA, 19 nt, Artificial Sequence
  Description of Artificial Sequence: Synthetic oligonucleotide
ggcaauguuacacuacaaa

SEQ ID NO: 453065 - RNA, 19 nt, Artificial Sequence
  Description of Artificial Sequence: Synthetic oligonucleotide
ccauaaaugaguaacaguu

SEQ ID NO: 453066 - RNA, 19 nt, Artificial Sequence
  Description of Artificial Sequence: Synthetic oligonucleotide
ugcagaucggcugcucuug

SEQ ID NO: 453067 - RNA, 19 nt, Artificial Sequence
  Description of Artificial Sequence: Synthetic oligonucleotide
aggcuaauugagaaugaca

SEQ ID NO: 453068 - RNA, 19 nt, Artificial Sequence
  Description of Artificial Sequence: Synthetic oligonucleotide
guuaccauggugauacucu

SEQ ID NO: 453069 - RNA, 19 nt, Artificial Sequence
  Description of Artificial Sequence: Synthetic oligonucleotide
cacgcuaaggugaacauau

SEQ ID NO: 453070 - RNA, 19 nt, Artificial Sequence
  Description of Artificial Sequence: Synthetic oligonucleotide
auacugauaugaaaaccaa

SEQ ID NO: 453071 - RNA, 19 nt, Artificial Sequence
  Description of Artificial Sequence: Synthetic oligonucleotide
uccccauucucaugcgugu

SEQ ID NO: 453072 - RNA, 19 nt, Artificial Sequence
  Description of Artificial Sequence: Synthetic oligonucleotide
gaacuagcauccacuuggc

SEQ ID NO: 453073 - RNA, 19 nt, Artificial Sequence
  Description of Artificial Sequence: Synthetic oligonucleotide
uggugauacucugaagaau

SEQ ID NO: 453074 - RNA, 19 nt, Artificial Sequence
  Description of Artificial Sequence: Synthetic oligonucleotide
aggaacaacaugguuucau

SEQ ID NO: 453075 - RNA, 19 nt, Artificial Sequence
  Description of Artificial Sequence: Synthetic oligonucleotide
caaaggauuauagcuuaca

SEQ ID NO: 453076 - RNA, 19 nt, Artificial Sequence
  Description of Artificial Sequence: Synthetic oligonucleotide
guccuguuacauaugaaaa

SEQ ID NO: 453077 - RNA, 19 nt, Artificial Sequence
  Description of Artificial Sequence: Synthetic oligonucleotide
aguuuauccuuagggaaua

SEQ ID NO: 453078 - RNA, 19 nt, Artificial Sequence
  Description of Artificial Sequence: Synthetic oligonucleotide
acugccguggggacuacuc

SEQ ID NO: 453079 - RNA, 19 nt, Artificial Sequence
  Description of Artificial Sequence: Synthetic oligonucleotide
auaaaucaucuuacaugug

SEQ ID NO: 453080 - RNA, 19 nt, Artificial Sequence
  Description of Artificial Sequence: Synthetic oligonucleotide
guauuugacuuugcccagc

SEQ ID NO: 453081 - RNA, 19 nt, Artificial Sequence
  Description of Artificial Sequence: Synthetic oligonucleotide
cauuguccuguuacauaug

SEQ ID NO: 453082 - RNA, 19 nt, Artificial Sequence
  Description of Artificial Sequence: Synthetic oligonucleotide
acagaccauaaaugaguaa

SEQ ID NO: 453083 - RNA, 19 nt, Artificial Sequence
  Description of Artificial Sequence: Synthetic oligonucleotide
caggcuaauugagaaugac

SEQ ID NO: 453084 - RNA, 19 nt, Artificial Sequence
  Description of Artificial Sequence: Synthetic oligonucleotide
ucccgccuugucuuuaggu

SEQ ID NO: 453085 - RNA, 19 nt, Artificial Sequence
  Description of Artificial Sequence: Synthetic oligonucleotide
ucaguguuauaugggcauc

SEQ ID NO: 453086 - RNA, 19 nt, Artificial Sequence
  Description of Artificial Sequence: Synthetic oligonucleotide
uuagugcuuuggugugcag

SEQ ID NO: 453087 - RNA, 19 nt, Artificial Sequence
  Description of Artificial Sequence: Synthetic oligonucleotide
auaccacuuuaauguagaa

SEQ ID NO: 453088 - RNA, 19 nt, Artificial Sequence
  Description of Artificial Sequence: Synthetic oligonucleotide
uagcauuguccuguuacau

SEQ ID NO: 453089 - RNA, 19 nt, Artificial Sequence
  Description of Artificial Sequence: Synthetic oligonucleotide
gguacuuagaaaauccagu

SEQ ID NO: 453090 - RNA, 19 nt, Artificial Sequence
  Description of Artificial Sequence: Synthetic oligonucleotide
agcgucuggggauggauua

SEQ ID NO: 453091 - RNA, 19 nt, Artificial Sequence
  Description of Artificial Sequence: Synthetic oligonucleotide
guaggcacucugugcuuag

SEQ ID NO: 453092 - RNA, 19 nt, Artificial Sequence
  Description of Artificial Sequence: Synthetic oligonucleotide
auauccugaaagccuuaua

SEQ ID NO: 453093 - RNA, 19 nt, Artificial Sequence
  Description of Artificial Sequence: Synthetic oligonucleotide
uaacgguguccacucucgu

SEQ ID NO: 453094 - RNA, 19 nt, Artificial Sequence
  Description of Artificial Sequence: Synthetic oligonucleotide
cacagaccauaaaugagua

SEQ ID NO: 453095 - RNA, 19 nt, Artificial Sequence
  Description of Artificial Sequence: Synthetic oligonucleotide
auacggucacuguaccaaa

SEQ ID NO: 453096 - RNA, 19 nt, Artificial Sequence
  Description of Artificial Sequence: Synthetic oligonucleotide
ggugcuuagaguccaggaa

SEQ ID NO: 453097 - RNA, 19 nt, Artificial Sequence
  Description of Artificial Sequence: Synthetic oligonucleotide
aggagucaugaacuagcau

SEQ ID NO: 453098 - RNA, 19 nt, Artificial Sequence
  Description of Artificial Sequence: Synthetic oligonucleotide
cuuacaugugaaccaauau

SEQ ID NO: 453099 - RNA, 19 nt, Artificial Sequence
  Description of Artificial Sequence: Synthetic oligonucleotide
ggucuaccacagaaaauag

SEQ ID NO: 453100 - RNA, 19 nt, Artificial Sequence
  Description of Artificial Sequence: Synthetic oligonucleotide
cuacuccagcaccauggac

SEQ ID NO: 453101 - RNA, 19 nt, Artificial Sequence
  Description of Artificial Sequence: Synthetic oligonucleotide
uuaccuugucuugcccacc

SEQ ID NO: 453102 - RNA, 19 nt, Artificial Sequence
  Description of Artificial Sequence: Synthetic oligonucleotide
gacagugacauagcaaaau

SEQ ID NO: 453103 - RNA, 19 nt, Artificial Sequence
  Description of Artificial Sequence: Synthetic oligonucleotide
gguaacgguguccacucuc

SEQ ID NO: 453104 - RNA, 19 nt, Artificial Sequence
  Description of Artificial Sequence: Synthetic oligonucleotide
uguucacacgaagcccuga

SEQ ID NO: 453105 - RNA, 19 nt, Artificial Sequence
  Description of Artificial Sequence: Synthetic oligonucleotide
gguaccaucuucccuacgu

SEQ ID NO: 453106 - RNA, 19 nt, Artificial Sequence
  Description of Artificial Sequence: Synthetic oligonucleotide
cugccguggggacuacucc

SEQ ID NO: 453107 - RNA, 19 nt, Artificial Sequence
  Description of Artificial Sequence: Synthetic oligonucleotide
auuacagaguuuacauauu

SEQ ID NO: 453108 - RNA, 19 nt, Artificial Sequence
  Description of Artificial Sequence: Synthetic oligonucleotide
auuucgccaccacugucuu

SEQ ID NO: 453109 - RNA, 19 nt, Artificial Sequence
  Description of Artificial Sequence: Synthetic oligonucleotide
acacucaacuuaacuagau

SEQ ID NO: 453110 - RNA, 19 nt, Artificial Sequence
  Description of Artificial Sequence: Synthetic oligonucleotide
aggucguguuaacuuguaa

SEQ ID NO: 453111 - RNA, 19 nt, Artificial Sequence
  Description of Artificial Sequence: Synthetic oligonucleotide
uaccaccuacuuugaagau

SEQ ID NO: 453112 - RNA, 19 nt, Artificial Sequence
  Description of Artificial Sequence: Synthetic oligonucleotide
ggggauggauuaguuaagc

SEQ ID NO: 453113 - RNA, 19 nt, Artificial Sequence
  Description of Artificial Sequence: Synthetic oligonucleotide
agacaauuuugcacgcuaa

SEQ ID NO: 453114 - RNA, 19 nt, Artificial Sequence
  Description of Artificial Sequence: Synthetic oligonucleotide
gaaugacacucaacuuaac

SEQ ID NO: 453115 - RNA, 19 nt, Artificial Sequence
  Description of Artificial Sequence: Synthetic oligonucleotide
ccaugcaauagcuaauuaa

SEQ ID NO: 453116 - RNA, 19 nt, Artificial Sequence
  Description of Artificial Sequence: Synthetic oligonucleotide
gucgagcucugucaucuga

SEQ ID NO: 453117 - RNA, 19 nt, Artificial Sequence
  Description of Artificial Sequence: Synthetic oligonucleotide
caucuuacaugugaaccaa

SEQ ID NO: 453118 - RNA, 19 nt, Artificial Sequence
  Description of Artificial Sequence: Synthetic oligonucleotide
gucauucccaggcaaugua

SEQ ID NO: 453119 - RNA, 19 nt, Artificial Sequence
  Description of Artificial Sequence: Synthetic oligonucleotide
acaggucguguuaacuugu

SEQ ID NO: 453120 - RNA, 19 nt, Artificial Sequence
  Description of Artificial Sequence: Synthetic oligonucleotide
ggucguguuaacuuguaau

SEQ ID NO: 453121 - RNA, 19 nt, Artificial Sequence
  Description of Artificial Sequence: Synthetic oligonucleotide
gucugacgagcgucugggg

SEQ ID NO: 453122 - RNA, 19 nt, Artificial Sequence
  Description of Artificial Sequence: Synthetic oligonucleotide
gccuaguaauaccccuugg

SEQ ID NO: 453123 - RNA, 19 nt, Artificial Sequence
  Description of Artificial Sequence: Synthetic oligonucleotide
auuugacuuugcccagcaa

SEQ ID NO: 453124 - RNA, 19 nt, Artificial Sequence
  Description of Artificial Sequence: Synthetic oligonucleotide
ccaauacggucacuguacc

SEQ ID NO: 453125 - RNA, 19 nt, Artificial Sequence
  Description of Artificial Sequence: Synthetic oligonucleotide
uaauaccccuugggaaaca

SEQ ID NO: 453126 - RNA, 19 nt, Artificial Sequence
  Description of Artificial Sequence: Synthetic oligonucleotide
agugaccaguuaccauggu

SEQ ID NO: 453127 - RNA, 19 nt, Artificial Sequence
  Description of Artificial Sequence: Synthetic oligonucleotide
aaacuaccuuuuacuuagu

SEQ ID NO: 453128 - RNA, 19 nt, Artificial Sequence
  Description of Artificial Sequence: Synthetic oligonucleotide
acaugugaaccaauauauu

SEQ ID NO: 453129 - RNA, 19 nt, Artificial Sequence
  Description of Artificial Sequence: Synthetic oligonucleotide
auaaugcaucuagggaaaa

SEQ ID NO: 453130 - RNA, 19 nt, Artificial Sequence
  Description of Artificial Sequence: Synthetic oligonucleotide
agucaugaacuagcaucca

SEQ ID NO: 453131 - RNA, 19 nt, Artificial Sequence
  Description of Artificial Sequence: Synthetic oligonucleotide
aguguuauaugggcaucuu

SEQ ID NO: 453132 - RNA, 19 nt, Artificial Sequence
  Description of Artificial Sequence: Synthetic oligonucleotide
cacucaacuuaacuagaua

SEQ ID NO: 453133 - RNA, 19 nt, Artificial Sequence
  Description of Artificial Sequence: Synthetic oligonucleotide
ggauuauagcuuacauuuc

SEQ ID NO: 453134 - RNA, 19 nt, Artificial Sequence
  Description of Artificial Sequence: Synthetic oligonucleotide
ccgcuuacuauucccuuag

SEQ ID NO: 453135 - RNA, 19 nt, Artificial Sequence
  Description of Artificial Sequence: Synthetic oligonucleotide
agucgagcucugucaucug

SEQ ID NO: 453136 - RNA, 19 nt, Artificial Sequence
  Description of Artificial Sequence: Synthetic oligonucleotide
cuaucacaagccaaagcuu

SEQ ID NO: 453137 - RNA, 19 nt, Artificial Sequence
  Description of Artificial Sequence: Synthetic oligonucleotide
gaagacaauuuugcacgcu

SEQ ID NO: 453138 - RNA, 19 nt, Artificial Sequence
  Description of Artificial Sequence: Synthetic oligonucleotide
agagucugacgagcgucug

SEQ ID NO: 453139 - RNA, 19 nt, Artificial Sequence
  Description of Artificial Sequence: Synthetic oligonucleotide
ccaaaggauuauagcuuac

SEQ ID NO: 453140 - RNA, 19 nt, Artificial Sequence
  Description of Artificial Sequence: Synthetic oligonucleotide
ccaaagcuuaugaacaacu

SEQ ID NO: 453141 - RNA, 19 nt, Artificial Sequence
  Description of Artificial Sequence: Synthetic oligonucleotide
ucuaaucaacaggcuucau

SEQ ID NO: 453142 - RNA, 19 nt, Artificial Sequence
  Description of Artificial Sequence: Synthetic oligonucleotide
gcuaauugagaaugacacu

SEQ ID NO: 453143 - RNA, 19 nt, Artificial Sequence
  Description of Artificial Sequence: Synthetic oligonucleotide
gacgagcgucuggggaugg

SEQ ID NO: 453144 - RNA, 19 nt, Artificial Sequence
  Description of Artificial Sequence: Synthetic oligonucleotide
gcaauucacugagucgagc

SEQ ID NO: 453145 - RNA, 19 nt, Artificial Sequence
  Description of Artificial Sequence: Synthetic oligonucleotide
acuauucccuuagguguaa

SEQ ID NO: 453146 - RNA, 19 nt, Artificial Sequence
  Description of Artificial Sequence: Synthetic oligonucleotide
auauucagucauacauaua

SEQ ID NO: 453147 - RNA, 19 nt, Artificial Sequence
  Description of Artificial Sequence: Synthetic oligonucleotide
ggacuacuccagcaccaug

SEQ ID NO: 453148 - RNA, 19 nt, Artificial Sequence
  Description of Artificial Sequence: Synthetic oligonucleotide
gccaaagcuuaugaacaac

SEQ ID NO: 453149 - RNA, 19 nt, Artificial Sequence
  Description of Artificial Sequence: Synthetic oligonucleotide
ccugacuaucacaagccaa

SEQ ID NO: 453150 - RNA, 19 nt, Artificial Sequence
  Description of Artificial Sequence: Synthetic oligonucleotide
ccuuauauggaggcuucuc

SEQ ID NO: 453151 - RNA, 19 nt, Artificial Sequence
  Description of Artificial Sequence: Synthetic oligonucleotide
guguuauaugggcaucuuu

SEQ ID NO: 453152 - RNA, 19 nt, Artificial Sequence
  Description of Artificial Sequence: Synthetic oligonucleotide
agcuagcaccaggguuacc

SEQ ID NO: 453153 - RNA, 19 nt, Artificial Sequence
  Description of Artificial Sequence: Synthetic oligonucleotide
aggcaauguuacacuacaa

SEQ ID NO: 453154 - RNA, 19 nt, Artificial Sequence
  Description of Artificial Sequence: Synthetic oligonucleotide
cacucucgucuucguacuc

SEQ ID NO: 453155 - RNA, 19 nt, Artificial Sequence
  Description of Artificial Sequence: Synthetic oligonucleotide
accccuugggaaacacaug

SEQ ID NO: 453156 - RNA, 19 nt, Artificial Sequence
  Description of Artificial Sequence: Synthetic oligonucleotide
accaguuaccauggugaua

SEQ ID NO: 453157 - RNA, 19 nt, Artificial Sequence
  Description of Artificial Sequence: Synthetic oligonucleotide
cagaccaagugcacuucua

SEQ ID NO: 453158 - RNA, 19 nt, Artificial Sequence
  Description of Artificial Sequence: Synthetic oligonucleotide
auagggguuucugcacuua

SEQ ID NO: 453159 - RNA, 19 nt, Artificial Sequence
  Description of Artificial Sequence: Synthetic oligonucleotide
caagaagcuucaguguuau

SEQ ID NO: 453160 - RNA, 19 nt, Artificial Sequence
  Description of Artificial Sequence: Synthetic oligonucleotide
ggaauauguguuguggauu

SEQ ID NO: 453161 - RNA, 19 nt, Artificial Sequence
  Description of Artificial Sequence: Synthetic oligonucleotide
gccuagucugucaggagca

SEQ ID NO: 453162 - RNA, 19 nt, Artificial Sequence
  Description of Artificial Sequence: Synthetic oligonucleotide
cagcuagcaccaggguuac

SEQ ID NO: 453163 - RNA, 19 nt, Artificial Sequence
  Description of Artificial Sequence: Synthetic oligonucleotide
caguguuauaugggcaucu

SEQ ID NO: 453164 - RNA, 19 nt, Artificial Sequence
  Description of Artificial Sequence: Synthetic oligonucleotide
ccugaagagccuaguaaua

SEQ ID NO: 453165 - RNA, 19 nt, Artificial Sequence
  Description of Artificial Sequence: Synthetic oligonucleotide
cacuuucauuucgccacca

SEQ ID NO: 453166 - RNA, 19 nt, Artificial Sequence
  Description of Artificial Sequence: Synthetic oligonucleotide
caggucguguuaacuugua

SEQ ID NO: 453167 - RNA, 19 nt, Artificial Sequence
  Description of Artificial Sequence: Synthetic oligonucleotide
ggcaagucagguacuuaaa

SEQ ID NO: 453168 - RNA, 19 nt, Artificial Sequence
  Description of Artificial Sequence: Synthetic oligonucleotide
gcccagcaaggugcaaugg

SEQ ID NO: 453169 - RNA, 19 nt, Artificial Sequence
  Description of Artificial Sequence: Synthetic oligonucleotide
guaaauccuuuaagacagu

SEQ ID NO: 453170 - RNA, 19 nt, Artificial Sequence
  Description of Artificial Sequence: Synthetic oligonucleotide
gagccuaguaauaccccuu

SEQ ID NO: 453171 - RNA, 19 nt, Artificial Sequence
  Description of Artificial Sequence: Synthetic oligonucleotide
gcgucuggggauggauuag

SEQ ID NO: 453172 - RNA, 19 nt, Artificial Sequence
  Description of Artificial Sequence: Synthetic oligonucleotide
cacacgaagcccugagguu

SEQ ID NO: 453173 - RNA, 19 nt, Artificial Sequence
  Description of Artificial Sequence: Synthetic oligonucleotide
guauugcaauucacugagu

SEQ ID NO: 453174 - RNA, 19 nt, Artificial Sequence
  Description of Artificial Sequence: Synthetic oligonucleotide
cgcuuacuauucccuuagg

SEQ ID NO: 453175 - RNA, 19 nt, Artificial Sequence
  Description of Artificial Sequence: Synthetic oligonucleotide
guuuauccuuagggaauau

SEQ ID NO: 453176 - RNA, 19 nt, Artificial Sequence
  Description of Artificial Sequence: Synthetic oligonucleotide
cacccacacagaccauaaa

SEQ ID NO: 453177 - RNA, 19 nt, Artificial Sequence
  Description of Artificial Sequence: Synthetic oligonucleotide
ccucuauucugcucuauuu

SEQ ID NO: 453178 - RNA, 19 nt, Artificial Sequence
  Description of Artificial Sequence: Synthetic oligonucleotide
gugcagaucggcugcucuu

SEQ ID NO: 453179 - RNA, 19 nt, Artificial Sequence
  Description of Artificial Sequence: Synthetic oligonucleotide
cgcuaaggugaacauaucu

SEQ ID NO: 453180 - RNA, 19 nt, Artificial Sequence
  Description of Artificial Sequence: Synthetic oligonucleotide
cagaucggcugcucuugcu

SEQ ID NO: 453181 - RNA, 19 nt, Artificial Sequence
  Description of Artificial Sequence: Synthetic oligonucleotide
cguggggacuacuccagca

SEQ ID NO: 453182 - RNA, 19 nt, Artificial Sequence
  Description of Artificial Sequence: Synthetic oligonucleotide
acgagcgucuggggaugga

SEQ ID NO: 453183 - RNA, 19 nt, Artificial Sequence
  Description of Artificial Sequence: Synthetic oligonucleotide
gagcugcagaagacaauuu

SEQ ID NO: 453184 - RNA, 19 nt, Artificial Sequence
  Description of Artificial Sequence: Synthetic oligonucleotide
ccguggggacuacuccagc

SEQ ID NO: 453185 - RNA, 19 nt, Artificial Sequence
  Description of Artificial Sequence: Synthetic oligonucleotide
gagcgucuggggauggauu

SEQ ID NO: 453186 - RNA, 19 nt, Artificial Sequence
  Description of Artificial Sequence: Synthetic oligonucleotide
cucaugcgugucacucacu

SEQ ID NO: 453187 - RNA, 19 nt, Artificial Sequence
  Description of Artificial Sequence: Synthetic oligonucleotide
cccgcuuacuauucccuua

SEQ ID NO: 453188 - RNA, 19 nt, Artificial Sequence
  Description of Artificial Sequence: Synthetic oligonucleotide
ccauggacaggucguguua

SEQ ID NO: 453189 - RNA, 19 nt, Artificial Sequence
  Description of Artificial Sequence: Synthetic oligonucleotide
gcacgcuaaggugaacaua

SEQ ID NO: 453190 - RNA, 19 nt, Artificial Sequence
  Description of Artificial Sequence: Synthetic oligonucleotide
cacugacuaccaccuacuu

SEQ ID NO: 453191 - RNA, 19 nt, Artificial Sequence
  Description of Artificial Sequence: Synthetic oligonucleotide
ccacucucgucuucguacu

SEQ ID NO: 453192 - RNA, 19 nt, Artificial Sequence
  Description of Artificial Sequence: Synthetic oligonucleotide
caccauggacaggucgugu

SEQ ID NO: 453193 - RNA, 19 nt, Artificial Sequence
  Description of Artificial Sequence: Synthetic oligonucleotide
ccccauucucaugcguguc

SEQ ID NO: 453194 - RNA, 19 nt, Artificial Sequence
  Description of Artificial Sequence: Synthetic oligonucleotide
cccuugggaaacacaugcu

SEQ ID NO: 453195 - RNA, 19 nt, Artificial Sequence
  Description of Artificial Sequence: Synthetic oligonucleotide
ccuugcuuacaggcaaugu

SEQ ID NO: 453196 - RNA, 19 nt, Artificial Sequence
  Description of Artificial Sequence: Synthetic oligonucleotide
ggguuaccgccuccuucua

SEQ ID NO: 453197 - RNA, 19 nt, Artificial Sequence
  Description of Artificial Sequence: Synthetic oligonucleotide
gggacuacuccagcaccau

SEQ ID NO: 453198 - RNA, 19 nt, Artificial Sequence
  Description of Artificial Sequence: Synthetic oligonucleotide
ccuagucugucaggagcaa

SEQ ID NO: 453199 - RNA, 19 nt, Artificial Sequence
  Description of Artificial Sequence: Synthetic oligonucleotide
gcgugucacucacugucuu

SEQ ID NO: 453200 - RNA, 19 nt, Artificial Sequence
  Description of Artificial Sequence: Synthetic oligonucleotide
cacugccguggggacuacu

SEQ ID NO: 453201 - RNA, 19 nt, Artificial Sequence
  Description of Artificial Sequence: Synthetic oligonucleotide
cgagcgucuggggauggau

SEQ ID NO: 453202 - RNA, 19 nt, Artificial Sequence
  Description of Artificial Sequence: Synthetic oligonucleotide
cgguaacgguguccacucu

SEQ ID NO: 453203 - RNA, 19 nt, Artificial Sequence
  Description of Artificial Sequence: Synthetic oligonucleotide
aacucuuguacccacaagc

SEQ ID NO: 453204 - RNA, 19 nt, Artificial Sequence
  Description of Artificial Sequence: Synthetic oligonucleotide
uuaaagaggaucuauuucc

SEQ ID NO: 453205 - RNA, 19 nt, Artificial Sequence
  Description of Artificial Sequence: Synthetic oligonucleotide
ucaaguauucucccuacgg

SEQ ID NO: 453206 - RNA, 19 nt, Artificial Sequence
  Description of Artificial Sequence: Synthetic oligonucleotide
cuaagguggaugaaaagcc

SEQ ID NO: 453207 - RNA, 19 nt, Artificial Sequence
  Description of Artificial Sequence: Synthetic oligonucleotide
ucuaagguggaugaaaagc

SEQ ID NO: 453208 - RNA, 19 nt, Artificial Sequence
  Description of Artificial Sequence: Synthetic oligonucleotide
uuuaaagaggaucuauuuc

SEQ ID NO: 453209 - RNA, 19 nt, Artificial Sequence
  Description of Artificial Sequence: Synthetic oligonucleotide
augaucuccgaccuucucc

SEQ ID NO: 453210 - RNA, 19 nt, Artificial Sequence
  Description of Artificial Sequence: Synthetic oligonucleotide
aguuaaacaccuuucccag

SEQ ID NO: 453211 - RNA, 19 nt, Artificial Sequence
  Description of Artificial Sequence: Synthetic oligonucleotide
gauguggucguucuuguag

SEQ ID NO: 453212 - RNA, 19 nt, Artificial Sequence
  Description of Artificial Sequence: Synthetic oligonucleotide
ugugcaaaccagcggaggg

SEQ ID NO: 453213 - RNA, 19 nt, Artificial Sequence
  Description of Artificial Sequence: Synthetic oligonucleotide
ucuuguacccacaagcgcu

SEQ ID NO: 453214 - RNA, 19 nt, Artificial Sequence
  Description of Artificial Sequence: Synthetic oligonucleotide
agugcugggugucuugugc

SEQ ID NO: 453215 - RNA, 19 nt, Artificial Sequence
  Description of Artificial Sequence: Synthetic oligonucleotide
ugacagagaagguauggcc

SEQ ID NO: 453216 - RNA, 19 nt, Artificial Sequence
  Description of Artificial Sequence: Synthetic oligonucleotide
uucacggucaggccggacg

SEQ ID NO: 453217 - RNA, 19 nt, Artificial Sequence
  Description of Artificial Sequence: Synthetic oligonucleotide
aagggcacgaaguccggcg

SEQ ID NO: 453218 - RNA, 19 nt, Artificial Sequence
  Description of Artificial Sequence: Synthetic oligonucleotide
caaguauucucccuacggg

SEQ ID NO: 453219 - RNA, 19 nt, Artificial Sequence
  Description of Artificial Sequence: Synthetic oligonucleotide
auguggucguucuuguagc

SEQ ID NO: 453220 - RNA, 19 nt, Artificial Sequence
  Description of Artificial Sequence: Synthetic oligonucleotide
agaggagaaacugaugauc

SEQ ID NO: 453221 - RNA, 19 nt, Artificial Sequence
  Description of Artificial Sequence: Synthetic oligonucleotide
acuagaaaguuaaacaccu

SEQ ID NO: 453222 - RNA, 19 nt, Artificial Sequence
  Description of Artificial Sequence: Synthetic oligonucleotide
ucuuguagcggauuccgug

SEQ ID NO: 453223 - RNA, 19 nt, Artificial Sequence
  Description of Artificial Sequence: Synthetic oligonucleotide
acaaccauccaucacuaga

SEQ ID NO: 453224 - RNA, 19 nt, Artificial Sequence
  Description of Artificial Sequence: Synthetic oligonucleotide
agugcgcucaacuucaagu

SEQ ID NO: 453225 - RNA, 19 nt, Artificial Sequence
  Description of Artificial Sequence: Synthetic oligonucleotide
ucggcauccaccagcacag

SEQ ID NO: 453226 - RNA, 19 nt, Artificial Sequence
  Description of Artificial Sequence: Synthetic oligonucleotide
agcgccaaccuucaccagc

SEQ ID NO: 453227 - RNA, 19 nt, Artificial Sequence
  Description of Artificial Sequence: Synthetic oligonucleotide
uucuuagaggccaccacca

SEQ ID NO: 453228 - RNA, 19 nt, Artificial Sequence
  Description of Artificial Sequence: Synthetic oligonucleotide
uguaguacagcgucaaguu

SEQ ID NO: 453229 - RNA, 19 nt, Artificial Sequence
  Description of Artificial Sequence: Synthetic oligonucleotide
cuuguagcggauuccgugc

SEQ ID NO: 453230 - RNA, 19 nt, Artificial Sequence
  Description of Artificial Sequence: Synthetic oligonucleotide
auggggucggccucggugc

SEQ ID NO: 453231 - RNA, 19 nt, Artificial Sequence
  Description of Artificial Sequence: Synthetic oligonucleotide
agaggcaaugugcaaacca

SEQ ID NO: 453232 - RNA, 19 nt, Artificial Sequence
  Description of Artificial Sequence: Synthetic oligonucleotide
ugaucuccgaccuucucca

SEQ ID NO: 453233 - RNA, 19 nt, Artificial Sequence
  Description of Artificial Sequence: Synthetic oligonucleotide
ucuccgaccuucuccagag

SEQ ID NO: 453234 - RNA, 19 nt, Artificial Sequence
  Description of Artificial Sequence: Synthetic oligonucleotide
caucacuagaaaguuaaac

SEQ ID NO: 453235 - RNA, 19 nt, Artificial Sequence
  Description of Artificial Sequence: Synthetic oligonucleotide
auugacuggaaaucuuaga

SEQ ID NO: 453236 - RNA, 19 nt, Artificial Sequence
  Description of Artificial Sequence: Synthetic oligonucleotide
auucagcgggcgcagcugc

SEQ ID NO: 453237 - RNA, 19 nt, Artificial Sequence
  Description of Artificial Sequence: Synthetic oligonucleotide
ucacggucaggccggacgg

SEQ ID NO: 453238 - RNA, 19 nt, Artificial Sequence
  Description of Artificial Sequence: Synthetic oligonucleotide
acucgagguucacucagac

SEQ ID NO: 453239 - RNA, 19 nt, Artificial Sequence
  Description of Artificial Sequence: Synthetic oligonucleotide
caaugugcaaaccagcgga

SEQ ID NO: 453240 - RNA, 19 nt, Artificial Sequence
  Description of Artificial Sequence: Synthetic oligonucleotide
guuguauugacuggaaauc

SEQ ID NO: 453241 - RNA, 19 nt, Artificial Sequence
  Description of Artificial Sequence: Synthetic oligonucleotide
agacacgugcaccacccac

SEQ ID NO: 453242 - RNA, 19 nt, Artificial Sequence
  Description of Artificial Sequence: Synthetic oligonucleotide
uuccgugcagugcauagcu

SEQ ID NO: 453243 - RNA, 19 nt, Artificial Sequence
  Description of Artificial Sequence: Synthetic oligonucleotide
ugaucuaagguggaugaaa

SEQ ID NO: 453244 - RNA, 19 nt, Artificial Sequence
  Description of Artificial Sequence: Synthetic oligonucleotide
acucuuguacccacaagcg

SEQ ID NO: 453245 - RNA, 19 nt, Artificial Sequence
  Description of Artificial Sequence: Synthetic oligonucleotide
aucuaagguggaugaaaag

SEQ ID NO: 453246 - RNA, 19 nt, Artificial Sequence
  Description of Artificial Sequence: Synthetic oligonucleotide
uucaggugcagcgugugcc

SEQ ID NO: 453247 - RNA, 19 nt, Artificial Sequence
  Description of Artificial Sequence: Synthetic oligonucleotide
guuguggagcaccucgggg

SEQ ID NO: 453248 - RNA, 19 nt, Artificial Sequence
  Description of Artificial Sequence: Synthetic oligonucleotide
ugcagugcauagcuguugu

SEQ ID NO: 453249 - RNA, 19 nt, Artificial Sequence
  Description of Artificial Sequence: Synthetic oligonucleotide
gcuguuguggagcaccucg

SEQ ID NO: 453250 - RNA, 19 nt, Artificial Sequence
  Description of Artificial Sequence: Synthetic oligonucleotide
aacaaccauccaucacuag

SEQ ID NO: 453251 - RNA, 19 nt, Artificial Sequence
  Description of Artificial Sequence: Synthetic oligonucleotide
uggucguucuuguagcgga

SEQ ID NO: 453252 - RNA, 19 nt, Artificial Sequence
  Description of Artificial Sequence: Synthetic oligonucleotide
aaugugcaaaccagcggag

SEQ ID NO: 453253 - RNA, 19 nt, Artificial Sequence
  Description of Artificial Sequence: Synthetic oligonucleotide
agagcccggaggccgaggc

SEQ ID NO: 453254 - RNA, 19 nt, Artificial Sequence
  Description of Artificial Sequence: Synthetic oligonucleotide
cucgggacuccacagacac

SEQ ID NO: 453255 - RNA, 19 nt, Artificial Sequence
  Description of Artificial Sequence: Synthetic oligonucleotide
agguggaugaaaagccacc

SEQ ID NO: 453256 - RNA, 19 nt, Artificial Sequence
  Description of Artificial Sequence: Synthetic oligonucleotide
ucuugugcaaacgguggcc

SEQ ID NO: 453257 - RNA, 19 nt, Artificial Sequence
  Description of Artificial Sequence: Synthetic oligonucleotide
aggugcacgagccccgacg

SEQ ID NO: 453258 - RNA, 19 nt, Artificial Sequence
  Description of Artificial Sequence: Synthetic oligonucleotide
acaaaggguuggugcuucc

SEQ ID NO: 453259 - RNA, 19 nt, Artificial Sequence
  Description of Artificial Sequence: Synthetic oligonucleotide
uugagcguugcuuccauuu

SEQ ID NO: 453260 - RNA, 19 nt, Artificial Sequence
  Description of Artificial Sequence: Synthetic oligonucleotide
ucauaguugagcguugcuu

SEQ ID NO: 453261 - RNA, 19 nt, Artificial Sequence
  Description of Artificial Sequence: Synthetic oligonucleotide
uucauaguugagcguugcu

SEQ ID NO: 453262 - RNA, 19 nt, Artificial Sequence
  Description of Artificial Sequence: Synthetic oligonucleotide
ugcaaacgguggccgagag

SEQ ID NO: 453263 - RNA, 19 nt, Artificial Sequence
  Description of Artificial Sequence: Synthetic oligonucleotide
aggcguagaucuucacagg

SEQ ID NO: 453264 - RNA, 19 nt, Artificial Sequence
  Description of Artificial Sequence: Synthetic oligonucleotide
gcaaugugcaaaccagcgg

SEQ ID NO: 453265 - RNA, 19 nt, Artificial Sequence
  Description of Artificial Sequence: Synthetic oligonucleotide
aggaucuauuuccugggau

SEQ ID NO: 453266 - RNA, 19 nt, Artificial Sequence
  Description of Artificial Sequence: Synthetic oligonucleotide
aagcgcuucugagucacug

SEQ ID NO: 453267 - RNA, 19 nt, Artificial Sequence
  Description of Artificial Sequence: Synthetic oligonucleotide
guacaaaaggacagauccc

SEQ ID NO: 453268 - RNA, 19 nt, Artificial Sequence
  Description of Artificial Sequence: Synthetic oligonucleotide
cacgcugaaccagaagagg

SEQ ID NO: 453269 - RNA, 19 nt, Artificial Sequence
  Description of Artificial Sequence: Synthetic oligonucleotide
aggcccgcaguacucauug

SEQ ID NO: 453270 - RNA, 19 nt, Artificial Sequence
  Description of Artificial Sequence: Synthetic oligonucleotide
acccacaagcgcuucugag

SEQ ID NO: 453271 - RNA, 19 nt, Artificial Sequence
  Description of Artificial Sequence: Synthetic oligonucleotide
aguacagcgucaaguucac

SEQ ID NO: 453272 - RNA, 19 nt, Artificial Sequence
  Description of Artificial Sequence: Synthetic oligonucleotide
gucuugugcaaacgguggc

SEQ ID NO: 453273 - RNA, 19 nt, Artificial Sequence
  Description of Artificial Sequence: Synthetic oligonucleotide
cagcgugugccgcaggucc

SEQ ID NO: 453274 - RNA, 19 nt, Artificial Sequence
  Description of Artificial Sequence: Synthetic oligonucleotide
uuggagccgguucacuaac

SEQ ID NO: 453275 - RNA, 19 nt, Artificial Sequence
  Description of Artificial Sequence: Synthetic oligonucleotide
agacacgugcagguagggc

SEQ ID NO: 453276 - RNA, 19 nt, Artificial Sequence
  Description of Artificial Sequence: Synthetic oligonucleotide
uguacccacaagcgcuucu

SEQ ID NO: 453277 - RNA, 19 nt, Artificial Sequence
  Description of Artificial Sequence: Synthetic oligonucleotide
agccgguucacuaacuucu

SEQ ID NO: 453278 - RNA, 19 nt, Artificial Sequence
  Description of Artificial Sequence: Synthetic oligonucleotide
ucugugaacuggagcccgc

SEQ ID NO: 453279 - RNA, 19 nt, Artificial Sequence
  Description of Artificial Sequence: Synthetic oligonucleotide
agggacccgaaguacaaaa

SEQ ID NO: 453280 - RNA, 19 nt, Artificial Sequence
  Description of Artificial Sequence: Synthetic oligonucleotide
uacgggguguuguauugac

SEQ ID NO: 453281 - RNA, 19 nt, Artificial Sequence
  Description of Artificial Sequence: Synthetic oligonucleotide
auugggcccgcggugggcc

SEQ ID NO: 453282 - RNA, 19 nt, Artificial Sequence
  Description of Artificial Sequence: Synthetic oligonucleotide
cuucauaguugagcguugc

SEQ ID NO: 453283 - RNA, 19 nt, Artificial Sequence
  Description of Artificial Sequence: Synthetic oligonucleotide
augaaaagccacccagcaa

SEQ ID NO: 453284 - RNA, 19 nt, Artificial Sequence
  Description of Artificial Sequence: Synthetic oligonucleotide
agcacauucagcgggcgca

SEQ ID NO: 453285 - RNA, 19 nt, Artificial Sequence
  Description of Artificial Sequence: Synthetic oligonucleotide
augugcaaaccagcggagg

SEQ ID NO: 453286 - RNA, 19 nt, Artificial Sequence
  Description of Artificial Sequence: Synthetic oligonucleotide
agggaucggugguugccac

SEQ ID NO: 453287 - RNA, 19 nt, Artificial Sequence
  Description of Artificial Sequence: Synthetic oligonucleotide
cugggugucuugugcaaac

SEQ ID NO: 453288 - RNA, 19 nt, Artificial Sequence
  Description of Artificial Sequence: Synthetic oligonucleotide
aaguccggcgucacggcag

SEQ ID NO: 453289 - RNA, 19 nt, Artificial Sequence
  Description of Artificial Sequence: Synthetic oligonucleotide
gacgggaggggcguggacc

SEQ ID NO: 453290 - RNA, 19 nt, Artificial Sequence
  Description of Artificial Sequence: Synthetic oligonucleotide
ggugcacgagccccgacgg

SEQ ID NO: 453291 - RNA, 19 nt, Artificial Sequence
  Description of Artificial Sequence: Synthetic oligonucleotide
gauucccggagcgccaacc

SEQ ID NO: 453292 - RNA, 19 nt, Artificial Sequence
  Description of Artificial Sequence: Synthetic oligonucleotide
uagcggauuccgugcagug

SEQ ID NO: 453293 - RNA, 19 nt, Artificial Sequence
  Description of Artificial Sequence: Synthetic oligonucleotide
gagccgguucacuaacuuc

SEQ ID NO: 453294 - RNA, 19 nt, Artificial Sequence
  Description of Artificial Sequence: Synthetic oligonucleotide
gagugcgcucaacuucaag

SEQ ID NO: 453295 - RNA, 19 nt, Artificial Sequence
  Description of Artificial Sequence: Synthetic oligonucleotide
ggagcgccaaccuucacca

SEQ ID NO: 453296 - RNA, 19 nt, Artificial Sequence
  Description of Artificial Sequence: Synthetic oligonucleotide
agugguguaaugggcugug

SEQ ID NO: 453297 - RNA, 19 nt, Artificial Sequence
  Description of Artificial Sequence: Synthetic oligonucleotide
agccaacaaccauccauca

SEQ ID NO: 453298 - RNA, 19 nt, Artificial Sequence
  Description of Artificial Sequence: Synthetic oligonucleotide
aucuccgaccuucuccaga

SEQ ID NO: 453299 - RNA, 19 nt, Artificial Sequence
  Description of Artificial Sequence: Synthetic oligonucleotide
gggguguuguauugacugg

SEQ ID NO: 453300 - RNA, 19 nt, Artificial Sequence
  Description of Artificial Sequence: Synthetic oligonucleotide
aguccggcgucacggcagg

SEQ ID NO: 453301 - RNA, 19 nt, Artificial Sequence
  Description of Artificial Sequence: Synthetic oligonucleotide
ucucccuacgggguguugu

SEQ ID NO: 453302 - RNA, 19 nt, Artificial Sequence
  Description of Artificial Sequence: Synthetic oligonucleotide
aggagugcgcucaacuuca

SEQ ID NO: 453303 - RNA, 19 nt, Artificial Sequence
  Description of Artificial Sequence: Synthetic oligonucleotide
guggucguucuuguagcgg

SEQ ID NO: 453304 - RNA, 19 nt, Artificial Sequence
  Description of Artificial Sequence: Synthetic oligonucleotide
uagcuguuguggagcaccu

SEQ ID NO: 453305 - RNA, 19 nt, Artificial Sequence
  Description of Artificial Sequence: Synthetic oligonucleotide
agagugcuggcgaaggccu

SEQ ID NO: 453306 - RNA, 19 nt, Artificial Sequence
  Description of Artificial Sequence: Synthetic oligonucleotide
uggccucgggacuccacag

SEQ ID NO: 453307 - RNA, 19 nt, Artificial Sequence
  Description of Artificial Sequence: Synthetic oligonucleotide
aaacgguggccgagagugg

SEQ ID NO: 453308 - RNA, 19 nt, Artificial Sequence
  Description of Artificial Sequence: Synthetic oligonucleotide
gugaacuggagcccgccga

SEQ ID NO: 453309 - RNA, 19 nt, Artificial Sequence
  Description of Artificial Sequence: Synthetic oligonucleotide
acggcaggcucccgcuccc

SEQ ID NO: 453310 - RNA, 19 nt, Artificial Sequence
  Description of Artificial Sequence: Synthetic oligonucleotide
gcagcacgcagucacggcc

SEQ ID NO: 453311 - RNA, 19 nt, Artificial Sequence
  Description of Artificial Sequence: Synthetic oligonucleotide
aguugagcguugcuuccau

SEQ ID NO: 453312 - RNA, 19 nt, Artificial Sequence
  Description of Artificial Sequence: Synthetic oligonucleotide
cagccuccagacugugugg

SEQ ID NO: 453313 - RNA, 19 nt, Artificial Sequence
  Description of Artificial Sequence: Synthetic oligonucleotide
agugaucagggaggccacg

SEQ ID NO: 453314 - RNA, 19 nt, Artificial Sequence
  Description of Artificial Sequence: Synthetic oligonucleotide
cgguucacuaacuucuuag

SEQ ID NO: 453315 - RNA, 19 nt, Artificial Sequence
  Description of Artificial Sequence: Synthetic oligonucleotide
gaucuccgaccuucuccag

SEQ ID NO: 453316 - RNA, 19 nt, Artificial Sequence
  Description of Artificial Sequence: Synthetic oligonucleotide
cccgcaguacucauuguag

SEQ ID NO: 453317 - RNA, 19 nt, Artificial Sequence
  Description of Artificial Sequence: Synthetic oligonucleotide
gaaguccggcgucacggca

SEQ ID NO: 453318 - RNA, 19 nt, Artificial Sequence
  Description of Artificial Sequence: Synthetic oligonucleotide
cacgcagucacggcccgcg

SEQ ID NO: 453319 - RNA, 19 nt, Artificial Sequence
  Description of Artificial Sequence: Synthetic oligonucleotide
aggggacgcacaccuucuc

SEQ ID NO: 453320 - RNA, 19 nt, Artificial Sequence
  Description of Artificial Sequence: Synthetic oligonucleotide
ggcgcagcugcacgaaggg

SEQ ID NO: 453321 - RNA, 19 nt, Artificial Sequence
  Description of Artificial Sequence: Synthetic oligonucleotide
ugcaggauucccggagcgc

SEQ ID NO: 453322 - RNA, 19 nt, Artificial Sequence
  Description of Artificial Sequence: Synthetic oligonucleotide
uggagccgguucacuaacu

SEQ ID NO: 453323 - RNA, 19 nt, Artificial Sequence
  Description of Artificial Sequence: Synthetic oligonucleotide
cuuggagccgguucacuaa

SEQ ID NO: 453324 - RNA, 19 nt, Artificial Sequence
  Description of Artificial Sequence: Synthetic oligonucleotide
gaagggcacgaaguccggc

SEQ ID NO: 453325 - RNA, 19 nt, Artificial Sequence
  Description of Artificial Sequence: Synthetic oligonucleotide
acggucaggccggacggcg

SEQ ID NO: 453326 - RNA, 19 nt, Artificial Sequence
  Description of Artificial Sequence: Synthetic oligonucleotide
cccucuuuccccuccagug

SEQ ID NO: 453327 - RNA, 19 nt, Artificial Sequence
  Description of Artificial Sequence: Synthetic oligonucleotide
ccgaguagaggagaaacug

SEQ ID NO: 453328 - RNA, 19 nt, Artificial Sequence
  Description of Artificial Sequence: Synthetic oligonucleotide
cacggcaggcucccgcucc

SEQ ID NO: 453329 - RNA, 19 nt, Artificial Sequence
  Description of Artificial Sequence: Synthetic oligonucleotide
cccgaaguacaaaaggaca

SEQ ID NO: 453330 - RNA, 19 nt, Artificial Sequence
  Description of Artificial Sequence: Synthetic oligonucleotide
ccacaagcgcuucugaguc

SEQ ID NO: 453331 - RNA, 19 nt, Artificial Sequence
  Description of Artificial Sequence: Synthetic oligonucleotide
agcguugcuuccauuugcu

SEQ ID NO: 453332 - RNA, 19 nt, Artificial Sequence
  Description of Artificial Sequence: Synthetic oligonucleotide
augugcucgucgugggcca

SEQ ID NO: 453333 - RNA, 19 nt, Artificial Sequence
  Description of Artificial Sequence: Synthetic oligonucleotide
ccgccuggagcucaggucc

SEQ ID NO: 453334 - RNA, 19 nt, Artificial Sequence
  Description of Artificial Sequence: Synthetic oligonucleotide
gccucggugcgccaggaag

SEQ ID NO: 453335 - RNA, 19 nt, Artificial Sequence
  Description of Artificial Sequence: Synthetic oligonucleotide
agcauguaguacagcguca

SEQ ID NO: 453336 - RNA, 19 nt, Artificial Sequence
  Description of Artificial Sequence: Synthetic oligonucleotide
gcggauuccgugcagugca

SEQ ID NO: 453337 - RNA, 19 nt, Artificial Sequence
  Description of Artificial Sequence: Synthetic oligonucleotide
uggcgaaggccuuggggau

SEQ ID NO: 453338 - RNA, 19 nt, Artificial Sequence
  Description of Artificial Sequence: Synthetic oligonucleotide
agucacggcccgcgcccgc

SEQ ID NO: 453339 - RNA, 19 nt, Artificial Sequence
  Description of Artificial Sequence: Synthetic oligonucleotide
aggccggacggcguguggg

SEQ ID NO: 453340 - RNA, 19 nt, Artificial Sequence
  Description of Artificial Sequence: Synthetic oligonucleotide
gcaggauucccggagcgcc

SEQ ID NO: 453341 - RNA, 19 nt, Artificial Sequence
  Description of Artificial Sequence: Synthetic oligonucleotide
acgcagucacggcccgcgc

SEQ ID NO: 453342 - RNA, 19 nt, Artificial Sequence
  Description of Artificial Sequence: Synthetic oligonucleotide
cauucagcgggcgcagcug

SEQ ID NO: 453343 - RNA, 19 nt, Artificial Sequence
  Description of Artificial Sequence: Synthetic oligonucleotide
cucgagguucacucagaca

SEQ ID NO: 453344 - RNA, 19 nt, Artificial Sequence
  Description of Artificial Sequence: Synthetic oligonucleotide
acggcgugugggcaucugu

SEQ ID NO: 453345 - RNA, 19 nt, Artificial Sequence
  Description of Artificial Sequence: Synthetic oligonucleotide
ggggacgcacaccuucucc

SEQ ID NO: 453346 - RNA, 19 nt, Artificial Sequence
  Description of Artificial Sequence: Synthetic oligonucleotide
guggccgagagugggacuc

SEQ ID NO: 453347 - RNA, 19 nt, Artificial Sequence
  Description of Artificial Sequence: Synthetic oligonucleotide
aaccagcggagggcagggg

SEQ ID NO: 453348 - RNA, 19 nt, Artificial Sequence
  Description of Artificial Sequence: Synthetic oligonucleotide
gggacgcacaccuucucca

SEQ ID NO: 453349 - RNA, 19 nt, Artificial Sequence
  Description of Artificial Sequence: Synthetic oligonucleotide
gggacccgaaguacaaaag

SEQ ID NO: 453350 - RNA, 19 nt, Artificial Sequence
  Description of Artificial Sequence: Synthetic oligonucleotide
gcagucacggcccgcgccc

SEQ ID NO: 453351 - RNA, 19 nt, Artificial Sequence
  Description of Artificial Sequence: Synthetic oligonucleotide
agcuguuguggagcaccuc

SEQ ID NO: 453352 - RNA, 19 nt, Artificial Sequence
  Description of Artificial Sequence: Synthetic oligonucleotide
uccggcgucacggcaggcu

SEQ ID NO: 453353 - RNA, 19 nt, Artificial Sequence
  Description of Artificial Sequence: Synthetic oligonucleotide
gcaggggacgcacaccuuc

SEQ ID NO: 453354 - RNA, 19 nt, Artificial Sequence
  Description of Artificial Sequence: Synthetic oligonucleotide
acacccgggcugaacagcu

SEQ ID NO: 453355 - RNA, 19 nt, Artificial Sequence
  Description of Artificial Sequence: Synthetic oligonucleotide
ggguguuguauugacugga

SEQ ID NO: 453356 - RNA, 19 nt, Artificial Sequence
  Description of Artificial Sequence: Synthetic oligonucleotide
gauugggcccgcggugggc

SEQ ID NO: 453357 - RNA, 19 nt, Artificial Sequence
  Description of Artificial Sequence: Synthetic oligonucleotide
acgugcagguagggcuugc

SEQ ID NO: 453358 - RNA, 19 nt, Artificial Sequence
  Description of Artificial Sequence: Synthetic oligonucleotide
gugcaaacucuuguaccca

SEQ ID NO: 453359 - RNA, 19 nt, Artificial Sequence
  Description of Artificial Sequence: Synthetic oligonucleotide
gcccgaguagaggagaaac

SEQ ID NO: 453360 - RNA, 19 nt, Artificial Sequence
  Description of Artificial Sequence: Synthetic oligonucleotide
gacucgagguucacucaga

SEQ ID NO: 453361 - RNA, 19 nt, Artificial Sequence
  Description of Artificial Sequence: Synthetic oligonucleotide
gagagugggacucgagguu

SEQ ID NO: 453362 - RNA, 19 nt, Artificial Sequence
  Description of Artificial Sequence: Synthetic oligonucleotide
cagcgggcgcagcugcacg

SEQ ID NO: 453363 - RNA, 19 nt, Artificial Sequence
  Description of Artificial Sequence: Synthetic oligonucleotide
guacagcgucaaguucacg

SEQ ID NO: 453364 - RNA, 19 nt, Artificial Sequence
  Description of Artificial Sequence: Synthetic oligonucleotide
gagcgccaaccuucaccag

SEQ ID NO: 453365 - RNA, 19 nt, Artificial Sequence
  Description of Artificial Sequence: Synthetic oligonucleotide
gugcacgagccccgacggg

SEQ ID NO: 453366 - RNA, 19 nt, Artificial Sequence
  Description of Artificial Sequence: Synthetic oligonucleotide
cuccagugcaaacucuugu

SEQ ID NO: 453367 - RNA, 19 nt, Artificial Sequence
  Description of Artificial Sequence: Synthetic oligonucleotide
ggaucggugguugccacca

SEQ ID NO: 453368 - RNA, 19 nt, Artificial Sequence
  Description of Artificial Sequence: Synthetic oligonucleotide
gccucgggacuccacagac

SEQ ID NO: 453369 - RNA, 19 nt, Artificial Sequence
  Description of Artificial Sequence: Synthetic oligonucleotide
gugcuggcgaaggccuugg

SEQ ID NO: 453370 - RNA, 19 nt, Artificial Sequence
  Description of Artificial Sequence: Synthetic oligonucleotide
gccgaagcugagcaccaug

SEQ ID NO: 453371 - RNA, 19 nt, Artificial Sequence
  Description of Artificial Sequence: Synthetic oligonucleotide
ggggauugggcccgcggug

SEQ ID NO: 453372 - RNA, 19 nt, Artificial Sequence
  Description of Artificial Sequence: Synthetic oligonucleotide
gcaggagagcauguaguac

SEQ ID NO: 453373 - RNA, 19 nt, Artificial Sequence
  Description of Artificial Sequence: Synthetic oligonucleotide
cacgagccccgacgggagg

SEQ ID NO: 453374 - RNA, 19 nt, Artificial Sequence
  Description of Artificial Sequence: Synthetic oligonucleotide
ucacggcaggcucccgcuc

SEQ ID NO: 453375 - RNA, 19 nt, Artificial Sequence
  Description of Artificial Sequence: Synthetic oligonucleotide
agcgcacucggcgcagcag

SEQ ID NO: 453376 - RNA, 19 nt, Artificial Sequence
  Description of Artificial Sequence: Synthetic oligonucleotide
cccgccgagagcccggagg

SEQ ID NO: 453377 - RNA, 19 nt, Artificial Sequence
  Description of Artificial Sequence: Synthetic oligonucleotide
gaggccggcccggcgacgc

SEQ ID NO: 453378 - RNA, 19 nt, Artificial Sequence
  Description of Artificial Sequence: Synthetic oligonucleotide
cucggugcgccaggaaguc

SEQ ID NO: 453379 - RNA, 19 nt, Artificial Sequence
  Description of Artificial Sequence: Synthetic oligonucleotide
cccgccgaagcugagcacc

SEQ ID NO: 453380 - RNA, 19 nt, Artificial Sequence
  Description of Artificial Sequence: Synthetic oligonucleotide
cauuguagaugagcuugaa

SEQ ID NO: 453381 - RNA, 19 nt, Artificial Sequence
  Description of Artificial Sequence: Synthetic oligonucleotide
cggagcgccaaccuucacc

SEQ ID NO: 453382 - RNA, 19 nt, Artificial Sequence
  Description of Artificial Sequence: Synthetic oligonucleotide
gcagggaucggugguugcc

SEQ ID NO: 453383 - RNA, 19 nt, Artificial Sequence
  Description of Artificial Sequence: Synthetic oligonucleotide
cagcaccgucucauccagc

SEQ ID NO: 453384 - RNA, 19 nt, Artificial Sequence
  Description of Artificial Sequence: Synthetic oligonucleotide
gggaucggugguugccacc

SEQ ID NO: 453385 - RNA, 19 nt, Artificial Sequence
  Description of Artificial Sequence: Synthetic oligonucleotide
gcauguaguacagcgucaa

SEQ ID NO: 453386 - RNA, 19 nt, Artificial Sequence
  Description of Artificial Sequence: Synthetic oligonucleotide
ucccuacgggguguuguau

SEQ ID NO: 453387 - RNA, 19 nt, Artificial Sequence
  Description of Artificial Sequence: Synthetic oligonucleotide
cuacgggguguuguauuga

SEQ ID NO: 453388 - RNA, 19 nt, Artificial Sequence
  Description of Artificial Sequence: Synthetic oligonucleotide
cagggaucggugguugcca

SEQ ID NO: 453389 - RNA, 19 nt, Artificial Sequence
  Description of Artificial Sequence: Synthetic oligonucleotide
gccggugagcaggagagca

SEQ ID NO: 453390 - RNA, 19 nt, Artificial Sequence
  Description of Artificial Sequence: Synthetic oligonucleotide
cguucuuguagcggauucc

SEQ ID NO: 453391 - RNA, 19 nt, Artificial Sequence
  Description of Artificial Sequence: Synthetic oligonucleotide
cagcgcggccacccgcucc

SEQ ID NO: 453392 - RNA, 19 nt, Artificial Sequence
  Description of Artificial Sequence: Synthetic oligonucleotide
ccgccgagagcccggaggc

SEQ ID NO: 453393 - RNA, 19 nt, Artificial Sequence
  Description of Artificial Sequence: Synthetic oligonucleotide
caggccggacggcgugugg

SEQ ID NO: 453394 - RNA, 19 nt, Artificial Sequence
  Description of Artificial Sequence: Synthetic oligonucleotide
cuuguacccacaagcgcuu

SEQ ID NO: 453395 - RNA, 19 nt, Artificial Sequence
  Description of Artificial Sequence: Synthetic oligonucleotide
cugaucuaagguggaugaa

SEQ ID NO: 453396 - RNA, 19 nt, Artificial Sequence
  Description of Artificial Sequence: Synthetic oligonucleotide
gggagccacuuggagccgg

SEQ ID NO: 453397 - RNA, 19 nt, Artificial Sequence
  Description of Artificial Sequence: Synthetic oligonucleotide
gucacggcaggcucccgcu

SEQ ID NO: 453398 - RNA, 19 nt, Artificial Sequence
  Description of Artificial Sequence: Synthetic oligonucleotide
gugcaaacgguggccgaga

SEQ ID NO: 453399 - RNA, 19 nt, Artificial Sequence
  Description of Artificial Sequence: Synthetic oligonucleotide
gccuccgggugccaaccag

SEQ ID NO: 453400 - RNA, 19 nt, Artificial Sequence
  Description of Artificial Sequence: Synthetic oligonucleotide
ccaugugcucgucgugggc

SEQ ID NO: 453401 - RNA, 19 nt, Artificial Sequence
  Description of Artificial Sequence: Synthetic oligonucleotide
ccgcaguacucauuguaga

SEQ ID NO: 453402 - RNA, 19 nt, Artificial Sequence
  Description of Artificial Sequence: Synthetic oligonucleotide
cguucccuguggcucagag

SEQ ID NO: 453403 - RNA, 19 nt, Artificial Sequence
  Description of Artificial Sequence: Synthetic oligonucleotide
gaucggugguugccaccaa

SEQ ID NO: 453404 - RNA, 19 nt, Artificial Sequence
  Description of Artificial Sequence: Synthetic oligonucleotide
gacggcgugugggcaucug

SEQ ID NO: 453405 - RNA, 19 nt, Artificial Sequence
  Description of Artificial Sequence: Synthetic oligonucleotide
cagucacggcccgcgcccg

SEQ ID NO: 453406 - RNA, 19 nt, Artificial Sequence
  Description of Artificial Sequence: Synthetic oligonucleotide
gccgccuggagcucagguc

SEQ ID NO: 453407 - RNA, 19 nt, Artificial Sequence
  Description of Artificial Sequence: Synthetic oligonucleotide
cacggucaggccggacggc

SEQ ID NO: 453408 - RNA, 19 nt, Artificial Sequence
  Description of Artificial Sequence: Synthetic oligonucleotide
guuggccucgggacuccac

SEQ ID NO: 453409 - RNA, 19 nt, Artificial Sequence
  Description of Artificial Sequence: Synthetic oligonucleotide
ggucuucauaguugagcgu

SEQ ID NO: 453410 - RNA, 19 nt, Artificial Sequence
  Description of Artificial Sequence: Synthetic oligonucleotide
cucccuacgggguguugua

SEQ ID NO: 453411 - RNA, 19 nt, Artificial Sequence
  Description of Artificial Sequence: Synthetic oligonucleotide
agcgugugccgcagguccu

SEQ ID NO: 453412 - RNA, 19 nt, Artificial Sequence
  Description of Artificial Sequence: Synthetic oligonucleotide
gcccgcaguacucauugua

SEQ ID NO: 453413 - RNA, 19 nt, Artificial Sequence
  Description of Artificial Sequence: Synthetic oligonucleotide
ggcacgaaguccggcguca

SEQ ID NO: 453414 - RNA, 19 nt, Artificial Sequence
  Description of Artificial Sequence: Synthetic oligonucleotide
ggccggacggcgugugggc

SEQ ID NO: 453415 - RNA, 19 nt, Artificial Sequence
  Description of Artificial Sequence: Synthetic oligonucleotide
guggaccggcccgaguaga

SEQ ID NO: 453416 - RNA, 19 nt, Artificial Sequence
  Description of Artificial Sequence: Synthetic oligonucleotide
ggaggagugcgcucaacuu

SEQ ID NO: 453417 - RNA, 19 nt, Artificial Sequence
  Description of Artificial Sequence: Synthetic oligonucleotide
gcguggaccggcccgagua

SEQ ID NO: 453418 - RNA, 19 nt, Artificial Sequence
  Description of Artificial Sequence: Synthetic oligonucleotide
ggcgucacggcaggcuccc

SEQ ID NO: 453419 - RNA, 19 nt, Artificial Sequence
  Description of Artificial Sequence: Synthetic oligonucleotide
gcugcgucuugggagccac

SEQ ID NO: 453420 - RNA, 19 nt, Artificial Sequence
  Description of Artificial Sequence: Synthetic oligonucleotide
ccucccgccagcacauuca

SEQ ID NO: 453421 - RNA, 19 nt, Artificial Sequence
  Description of Artificial Sequence: Synthetic oligonucleotide
cgaaguccggcgucacggc

SEQ ID NO: 453422 - RNA, 19 nt, Artificial Sequence
  Description of Artificial Sequence: Synthetic oligonucleotide
caggggacgcacaccuucu

SEQ ID NO: 453423 - RNA, 19 nt, Artificial Sequence
  Description of Artificial Sequence: Synthetic oligonucleotide
cgucacggcaggcucccgc

SEQ ID NO: 453424 - RNA, 19 nt, Artificial Sequence
  Description of Artificial Sequence: Synthetic oligonucleotide
cgcggugggccccacaguc

SEQ ID NO: 453425 - RNA, 19 nt, Artificial Sequence
  Description of Artificial Sequence: Synthetic oligonucleotide
ggccucgggacuccacaga

SEQ ID NO: 453426 - RNA, 19 nt, Artificial Sequence
  Description of Artificial Sequence: Synthetic oligonucleotide
cucggcccucuuuccccuc

SEQ ID NO: 453427 - RNA, 19 nt, Artificial Sequence
  Description of Artificial Sequence: Synthetic oligonucleotide
ggggucggccuggaacugc

SEQ ID NO: 453428 - RNA, 19 nt, Artificial Sequence
  Description of Artificial Sequence: Synthetic oligonucleotide
ggagccgguucacuaacuu

SEQ ID NO: 453429 - RNA, 19 nt, Artificial Sequence
  Description of Artificial Sequence: Synthetic oligonucleotide
acccgcuccgugggguugu

SEQ ID NO: 453430 - RNA, 19 nt, Artificial Sequence
  Description of Artificial Sequence: Synthetic oligonucleotide
guugagcguugcuuccauu

SEQ ID NO: 453431 - RNA, 19 nt, Artificial Sequence
  Description of Artificial Sequence: Synthetic oligonucleotide
cacccgcuccgugggguug

SEQ ID NO: 453432 - RNA, 19 nt, Artificial Sequence
  Description of Artificial Sequence: Synthetic oligonucleotide
ccggcgucacggcaggcuc

SEQ ID NO: 453433 - RNA, 19 nt, Artificial Sequence
  Description of Artificial Sequence: Synthetic oligonucleotide
cgcagucacggcccgcgcc

SEQ ID NO: 453434 - RNA, 19 nt, Artificial Sequence
  Description of Artificial Sequence: Synthetic oligonucleotide
ggauucccggagcgccaac

SEQ ID NO: 453435 - RNA, 19 nt, Artificial Sequence
  Description of Artificial Sequence: Synthetic oligonucleotide
cccgaguagaggagaaacu

SEQ ID NO: 453436 - RNA, 19 nt, Artificial Sequence
  Description of Artificial Sequence: Synthetic oligonucleotide
cguggaccggcccgaguag

SEQ ID NO: 453437 - RNA, 19 nt, Artificial Sequence
  Description of Artificial Sequence: Synthetic oligonucleotide
cgucaaguucacggucagg

SEQ ID NO: 453438 - RNA, 19 nt, Artificial Sequence
  Description of Artificial Sequence: Synthetic oligonucleotide
cagcgcacucggcgcagca

SEQ ID NO: 453439 - RNA, 19 nt, Artificial Sequence
  Description of Artificial Sequence: Synthetic oligonucleotide
cagggacccgaaguacaaa

SEQ ID NO: 453440 - RNA, 19 nt, Artificial Sequence
  Description of Artificial Sequence: Synthetic oligonucleotide
gcaaacgguggccgagagu

SEQ ID NO: 453441 - RNA, 19 nt, Artificial Sequence
  Description of Artificial Sequence: Synthetic oligonucleotide
ccucgggacuccacagaca

SEQ ID NO: 453442 - RNA, 19 nt, Artificial Sequence
  Description of Artificial Sequence: Synthetic oligonucleotide
gucguucuuguagcggauu

SEQ ID NO: 453443 - RNA, 19 nt, Artificial Sequence
  Description of Artificial Sequence: Synthetic oligonucleotide
cugccucacaggcguagau

SEQ ID NO: 453444 - RNA, 19 nt, Artificial Sequence
  Description of Artificial Sequence: Synthetic oligonucleotide
gugguguaaugggcugugu

SEQ ID NO: 453445 - RNA, 19 nt, Artificial Sequence
  Description of Artificial Sequence: Synthetic oligonucleotide
ccucggugcgccaggaagu

SEQ ID NO: 453446 - RNA, 19 nt, Artificial Sequence
  Description of Artificial Sequence: Synthetic oligonucleotide
ggauuccgugcagugcaua

SEQ ID NO: 453447 - RNA, 19 nt, Artificial Sequence
  Description of Artificial Sequence: Synthetic oligonucleotide
gcgugugccgcagguccug

SEQ ID NO: 453448 - RNA, 19 nt, Artificial Sequence
  Description of Artificial Sequence: Synthetic oligonucleotide
gcgcucaacuucaaguauu

SEQ ID NO: 453449 - RNA, 19 nt, Artificial Sequence
  Description of Artificial Sequence: Synthetic oligonucleotide
cggcgucacggcaggcucc

SEQ ID NO: 453450 - RNA, 19 nt, Artificial Sequence
  Description of Artificial Sequence: Synthetic oligonucleotide
caagcgcuucugagucacu

SEQ ID NO: 453451 - RNA, 19 nt, Artificial Sequence
  Description of Artificial Sequence: Synthetic oligonucleotide
gcgccuugagcuccuuggu

SEQ ID NO: 453452 - RNA, 19 nt, Artificial Sequence
  Description of Artificial Sequence: Synthetic oligonucleotide
gcguagaucuucacagguu

SEQ ID NO: 453453 - RNA, 19 nt, Artificial Sequence
  Description of Artificial Sequence: Synthetic oligonucleotide
guccggcgucacggcaggc

SEQ ID NO: 453454 - RNA, 19 nt, Artificial Sequence
  Description of Artificial Sequence: Synthetic oligonucleotide
ccgguucacuaacuucuua

SEQ ID NO: 453455 - RNA, 19 nt, Artificial Sequence
  Description of Artificial Sequence: Synthetic oligonucleotide
ccgccgaagcugagcacca

SEQ ID NO: 453456 - RNA, 19 nt, Artificial Sequence
  Description of Artificial Sequence: Synthetic oligonucleotide
gcgacgccagcggcggggc

SEQ ID NO: 453457 - RNA, 19 nt, Artificial Sequence
  Description of Artificial Sequence: Synthetic oligonucleotide
ggccuccgggugccaacca

SEQ ID NO: 453458 - RNA, 19 nt, Artificial Sequence
  Description of Artificial Sequence: Synthetic oligonucleotide
ccgcagguccugcaggugu

SEQ ID NO: 453459 - RNA, 19 nt, Artificial Sequence
  Description of Artificial Sequence: Synthetic oligonucleotide
ccauuugcucucguucccu

SEQ ID NO: 453460 - RNA, 19 nt, Artificial Sequence
  Description of Artificial Sequence: Synthetic oligonucleotide
ggagugcgcucaacuucaa

SEQ ID NO: 453461 - RNA, 19 nt, Artificial Sequence
  Description of Artificial Sequence: Synthetic oligonucleotide
cuccgaccuucuccagagu

SEQ ID NO: 453462 - RNA, 19 nt, Artificial Sequence
  Description of Artificial Sequence: Synthetic oligonucleotide
cacggcccgcgcccgccga

SEQ ID NO: 453463 - RNA, 19 nt, Artificial Sequence
  Description of Artificial Sequence: Synthetic oligonucleotide
gccggacggcgugugggca

SEQ ID NO: 453464 - RNA, 19 nt, Artificial Sequence
  Description of Artificial Sequence: Synthetic oligonucleotide
cgggcgcagcugcacgaag

SEQ ID NO: 453465 - RNA, 19 nt, Artificial Sequence
  Description of Artificial Sequence: Synthetic oligonucleotide
cgugugccgcagguccugc

SEQ ID NO: 453466 - RNA, 19 nt, Artificial Sequence
  Description of Artificial Sequence: Synthetic oligonucleotide
cugcgucuugggagccacu

SEQ ID NO: 453467 - RNA, 19 nt, Artificial Sequence
  Description of Artificial Sequence: Synthetic oligonucleotide
gcacaaaggguuggugcuu

SEQ ID NO: 453468 - RNA, 19 nt, Artificial Sequence
  Description of Artificial Sequence: Synthetic oligonucleotide
ccggcccgaguagaggaga

SEQ ID NO: 453469 - RNA, 19 nt, Artificial Sequence
  Description of Artificial Sequence: Synthetic oligonucleotide
gcgucacggcaggcucccg

SEQ ID NO: 453470 - RNA, 19 nt, Artificial Sequence
  Description of Artificial Sequence: Synthetic oligonucleotide
cccuacgggguguuguauu

SEQ ID NO: 453471 - RNA, 19 nt, Artificial Sequence
  Description of Artificial Sequence: Synthetic oligonucleotide
ggcccgcaguacucauugu

SEQ ID NO: 453472 - RNA, 19 nt, Artificial Sequence
  Description of Artificial Sequence: Synthetic oligonucleotide
ccggagcgccaaccuucac

SEQ ID NO: 453473 - RNA, 19 nt, Artificial Sequence
  Description of Artificial Sequence: Synthetic oligonucleotide
gcggagggcaggggacgca

SEQ ID NO: 453474 - RNA, 19 nt, Artificial Sequence
  Description of Artificial Sequence: Synthetic oligonucleotide
gccacccgcuccguggggu

SEQ ID NO: 453475 - RNA, 19 nt, Artificial Sequence
  Description of Artificial Sequence: Synthetic oligonucleotide
ggcgaaggccuuggggauu

SEQ ID NO: 453476 - RNA, 19 nt, Artificial Sequence
  Description of Artificial Sequence: Synthetic oligonucleotide
gcgggcgcagcugcacgaa

SEQ ID NO: 453477 - RNA, 19 nt, Artificial Sequence
  Description of Artificial Sequence: Synthetic oligonucleotide
cggacggcgugugggcauc

SEQ ID NO: 453478 - RNA, 19 nt, Artificial Sequence
  Description of Artificial Sequence: Synthetic oligonucleotide
cggggucggccuggaacug

SEQ ID NO: 453479 - RNA, 19 nt, Artificial Sequence
  Description of Artificial Sequence: Synthetic oligonucleotide
ccgcuccgugggguuguug

SEQ ID NO: 453480 - RNA, 19 nt, Artificial Sequence
  Description of Artificial Sequence: Synthetic oligonucleotide
ggacggcgugugggcaucu

SEQ ID NO: 453481 - RNA, 19 nt, Artificial Sequence
  Description of Artificial Sequence: Synthetic oligonucleotide
gcccgcggugggccccaca

SEQ ID NO: 453482 - RNA, 19 nt, Artificial Sequence
  Description of Artificial Sequence: Synthetic oligonucleotide
cccuugcagccucgcuucu

SEQ ID NO: 453483 - RNA, 19 nt, Artificial Sequence
  Description of Artificial Sequence: Synthetic oligonucleotide
ccccgacgggaggggcgug

SEQ ID NO: 453484 - RNA, 19 nt, Artificial Sequence
  Description of Artificial Sequence: Synthetic oligonucleotide
ccacccgcuccgugggguu

SEQ ID NO: 453485 - RNA, 19 nt, Artificial Sequence
  Description of Artificial Sequence: Synthetic oligonucleotide
ccgucucauccagcugcgu

SEQ ID NO: 453486 - RNA, 19 nt, Artificial Sequence
  Description of Artificial Sequence: Synthetic oligonucleotide
gcgcggccacccgcuccgu

SEQ ID NO: 453487 - RNA, 19 nt, Artificial Sequence
  Description of Artificial Sequence: Synthetic oligonucleotide
cccgcuccgugggguuguu

SEQ ID NO: 453488 - RNA, 19 nt, Artificial Sequence
  Description of Artificial Sequence: Synthetic oligonucleotide
cgccagcggcggggcccga

SEQ ID NO: 453489 - RNA, 19 nt, Artificial Sequence
  Description of Artificial Sequence: Synthetic oligonucleotide
aauucuuuucagcagauug

SEQ ID NO: 453490 - RNA, 19 nt, Artificial Sequence
  Description of Artificial Sequence: Synthetic oligonucleotide
aucaaauucagguaggguc

SEQ ID NO: 453491 - RNA, 19 nt, Artificial Sequence
  Description of Artificial Sequence: Synthetic oligonucleotide
ugaaaugauagucagccag

SEQ ID NO: 453492 - RNA, 19 nt, Artificial Sequence
  Description of Artificial Sequence: Synthetic oligonucleotide
uauucaauccacaaggaca

SEQ ID NO: 453493 - RNA, 19 nt, Artificial Sequence
  Description of Artificial Sequence: Synthetic oligonucleotide
aagcaaacgaguguaaggc

SEQ ID NO: 453494 - RNA, 19 nt, Artificial Sequence
  Description of Artificial Sequence: Synthetic oligonucleotide
ugcuuaaugagcauguaag

SEQ ID NO: 453495 - RNA, 19 nt, Artificial Sequence
  Description of Artificial Sequence: Synthetic oligonucleotide
auaaauagggcauccuccc

SEQ ID NO: 453496 - RNA, 19 nt, Artificial Sequence
  Description of Artificial Sequence: Synthetic oligonucleotide
uauaagauccaccugcuga

SEQ ID NO: 453497 - RNA, 19 nt, Artificial Sequence
  Description of Artificial Sequence: Synthetic oligonucleotide
aauucgacuggcccgggcc

SEQ ID NO: 453498 - RNA, 19 nt, Artificial Sequence
  Description of Artificial Sequence: Synthetic oligonucleotide
uuaaugagcauguaagucu

SEQ ID NO: 453499 - RNA, 19 nt, Artificial Sequence
  Description of Artificial Sequence: Synthetic oligonucleotide
ugagccaucggcuagcugc

SEQ ID NO: 453500 - RNA, 19 nt, Artificial Sequence
  Description of Artificial Sequence: Synthetic oligonucleotide
gaagcaaacgaguguaagg

SEQ ID NO: 453501 - RNA, 19 nt, Artificial Sequence
  Description of Artificial Sequence: Synthetic oligonucleotide
cauaaauagggcauccucc

SEQ ID NO: 453502 - RNA, 19 nt, Artificial Sequence
  Description of Artificial Sequence: Synthetic oligonucleotide
ugagguucccucaauguag

SEQ ID NO: 453503 - RNA, 19 nt, Artificial Sequence
  Description of Artificial Sequence: Synthetic oligonucleotide
ugcuguauaagcucaggag

SEQ ID NO: 453504 - RNA, 19 nt, Artificial Sequence
  Description of Artificial Sequence: Synthetic oligonucleotide
aaugucgugcauguagaac

SEQ ID NO: 453505 - RNA, 19 nt, Artificial Sequence
  Description of Artificial Sequence: Synthetic oligonucleotide
ucccauauaagauccaccu

SEQ ID NO: 453506 - RNA, 19 nt, Artificial Sequence
  Description of Artificial Sequence: Synthetic oligonucleotide
uccuuuugcgauuaggccu

SEQ ID NO: 453507 - RNA, 19 nt, Artificial Sequence
  Description of Artificial Sequence: Synthetic oligonucleotide
gaugguagcaauucuuuuc

SEQ ID NO: 453508 - RNA, 19 nt, Artificial Sequence
  Description of Artificial Sequence: Synthetic oligonucleotide
aaugauagucagccaggag

SEQ ID NO: 453509 - RNA, 19 nt, Artificial Sequence
  Description of Artificial Sequence: Synthetic oligonucleotide
auuggcagcugacugggcg

SEQ ID NO: 453510 - RNA, 19 nt, Artificial Sequence
  Description of Artificial Sequence: Synthetic oligonucleotide
acgaguguaaggcauagga

SEQ ID NO: 453511 - RNA, 19 nt, Artificial Sequence
  Description of Artificial Sequence: Synthetic oligonucleotide
acucaaacauaaauagggc

SEQ ID NO: 453512 - RNA, 19 nt, Artificial Sequence
  Description of Artificial Sequence: Synthetic oligonucleotide
aauucagguagggucuugg

SEQ ID NO: 453513 - RNA, 19 nt, Artificial Sequence
  Description of Artificial Sequence: Synthetic oligonucleotide
uugaaggacuugcacguag

SEQ ID NO: 453514 - RNA, 19 nt, Artificial Sequence
  Description of Artificial Sequence: Synthetic oligonucleotide
uccugaauucgacuggccc

SEQ ID NO: 453515 - RNA, 19 nt, Artificial Sequence
  Description of Artificial Sequence: Synthetic oligonucleotide
agcaaccucacugguaucc

SEQ ID NO: 453516 - RNA, 19 nt, Artificial Sequence
  Description of Artificial Sequence: Synthetic oligonucleotide
ccauauaagauccaccugc

SEQ ID NO: 453517 - RNA, 19 nt, Artificial Sequence
  Description of Artificial Sequence: Synthetic oligonucleotide
gaugacagaggcuugacgu

SEQ ID NO: 453518 - RNA, 19 nt, Artificial Sequence
  Description of Artificial Sequence: Synthetic oligonucleotide
aaauagggcauccucccau

SEQ ID NO: 453519 - RNA, 19 nt, Artificial Sequence
  Description of Artificial Sequence: Synthetic oligonucleotide
uuccuuuugcgauuaggcc

SEQ ID NO: 453520 - RNA, 19 nt, Artificial Sequence
  Description of Artificial Sequence: Synthetic oligonucleotide
uugggcuuaaaauacucaa

SEQ ID NO: 453521 - RNA, 19 nt, Artificial Sequence
  Description of Artificial Sequence: Synthetic oligonucleotide
gcaaaugucgugcauguag

SEQ ID NO: 453522 - RNA, 19 nt, Artificial Sequence
  Description of Artificial Sequence: Synthetic oligonucleotide
ucugugcggggcacgaugg

SEQ ID NO: 453523 - RNA, 19 nt, Artificial Sequence
  Description of Artificial Sequence: Synthetic oligonucleotide
gagcauguaagucucugac

SEQ ID NO: 453524 - RNA, 19 nt, Artificial Sequence
  Description of Artificial Sequence: Synthetic oligonucleotide
uuugcgauuaggccuugga

SEQ ID NO: 453525 - RNA, 19 nt, Artificial Sequence
  Description of Artificial Sequence: Synthetic oligonucleotide
gagacuuuguccaugcuca

SEQ ID NO: 453526 - RNA, 19 nt, Artificial Sequence
  Description of Artificial Sequence: Synthetic oligonucleotide
uguggcauguuuccagaug

SEQ ID NO: 453527 - RNA, 19 nt, Artificial Sequence
  Description of Artificial Sequence: Synthetic oligonucleotide
guagaaucgcagcagcgcc

SEQ ID NO: 453528 - RNA, 19 nt, Artificial Sequence
  Description of Artificial Sequence: Synthetic oligonucleotide
ugccccaucuggaaggcag

SEQ ID NO: 453529 - RNA, 19 nt, Artificial Sequence
  Description of Artificial Sequence: Synthetic oligonucleotide
uccaucgcucuucagcuca

SEQ ID NO: 453530 - RNA, 19 nt, Artificial Sequence
  Description of Artificial Sequence: Synthetic oligonucleotide
gugaugucuguucugaguc

SEQ ID NO: 453531 - RNA, 19 nt, Artificial Sequence
  Description of Artificial Sequence: Synthetic oligonucleotide
aaaugauagucagccagga

SEQ ID NO: 453532 - RNA, 19 nt, Artificial Sequence
  Description of Artificial Sequence: Synthetic oligonucleotide
gcaauagaagcacugcucc

SEQ ID NO: 453533 - RNA, 19 nt, Artificial Sequence
  Description of Artificial Sequence: Synthetic oligonucleotide
aaacgaguguaaggcauag

SEQ ID NO: 453534 - RNA, 19 nt, Artificial Sequence
  Description of Artificial Sequence: Synthetic oligonucleotide
gaaagcucagcagaccggc

SEQ ID NO: 453535 - RNA, 19 nt, Artificial Sequence
  Description of Artificial Sequence: Synthetic oligonucleotide
ugggcuuaaaauacucaaa

SEQ ID NO: 453536 - RNA, 19 nt, Artificial Sequence
  Description of Artificial Sequence: Synthetic oligonucleotide
agauccaccugcugagccg

SEQ ID NO: 453537 - RNA, 19 nt, Artificial Sequence
  Description of Artificial Sequence: Synthetic oligonucleotide
ucgugcauguagaacuuga

SEQ ID NO: 453538 - RNA, 19 nt, Artificial Sequence
  Description of Artificial Sequence: Synthetic oligonucleotide
gagcgcaucagcuggcaag

SEQ ID NO: 453539 - RNA, 19 nt, Artificial Sequence
  Description of Artificial Sequence: Synthetic oligonucleotide
ugaaggacuugcacguaga

SEQ ID NO: 453540 - RNA, 19 nt, Artificial Sequence
  Description of Artificial Sequence: Synthetic oligonucleotide
agauuggccaagucagcag

SEQ ID NO: 453541 - RNA, 19 nt, Artificial Sequence
  Description of Artificial Sequence: Synthetic oligonucleotide
uggguacuuccgaugcugg

SEQ ID NO: 453542 - RNA, 19 nt, Artificial Sequence
  Description of Artificial Sequence: Synthetic oligonucleotide
gggaccuuagugcuggugg

SEQ ID NO: 453543 - RNA, 19 nt, Artificial Sequence
  Description of Artificial Sequence: Synthetic oligonucleotide
auucaauccacaaggacaa

SEQ ID NO: 453544 - RNA, 19 nt, Artificial Sequence
  Description of Artificial Sequence: Synthetic oligonucleotide
ucggagaugcugccuuugg

SEQ ID NO: 453545 - RNA, 19 nt, Artificial Sequence
  Description of Artificial Sequence: Synthetic oligonucleotide
ugagcauguaagucucuga

SEQ ID NO: 453546 - RNA, 19 nt, Artificial Sequence
  Description of Artificial Sequence: Synthetic oligonucleotide
ugguggugagcguuacugg

SEQ ID NO: 453547 - RNA, 19 nt, Artificial Sequence
  Description of Artificial Sequence: Synthetic oligonucleotide
gugcauguagaacuugaug

SEQ ID NO: 453548 - RNA, 19 nt, Artificial Sequence
  Description of Artificial Sequence: Synthetic oligonucleotide
ggaaucaaaccuguugggg

SEQ ID NO: 453549 - RNA, 19 nt, Artificial Sequence
  Description of Artificial Sequence: Synthetic oligonucleotide
aucucaagagcccuccgga

SEQ ID NO: 453550 - RNA, 19 nt, Artificial Sequence
  Description of Artificial Sequence: Synthetic oligonucleotide
ugagggagggcaacugaug

SEQ ID NO: 453551 - RNA, 19 nt, Artificial Sequence
  Description of Artificial Sequence: Synthetic oligonucleotide
uagaaucgcagcagcgccc

SEQ ID NO: 453552 - RNA, 19 nt, Artificial Sequence
  Description of Artificial Sequence: Synthetic oligonucleotide
cuugcacguagaaucgcag

SEQ ID NO: 453553 - RNA, 19 nt, Artificial Sequence
  Description of Artificial Sequence: Synthetic oligonucleotide
gcugucaaucucaagagcc

SEQ ID NO: 453554 - RNA, 19 nt, Artificial Sequence
  Description of Artificial Sequence: Synthetic oligonucleotide
gacugggcggacaggaugg

SEQ ID NO: 453555 - RNA, 19 nt, Artificial Sequence
  Description of Artificial Sequence: Synthetic oligonucleotide
aggcaauagaagcacugcu

SEQ ID NO: 453556 - RNA, 19 nt, Artificial Sequence
  Description of Artificial Sequence: Synthetic oligonucleotide
auauaagauccaccugcug

SEQ ID NO: 453557 - RNA, 19 nt, Artificial Sequence
  Description of Artificial Sequence: Synthetic oligonucleotide
agcauguaagucucugaca

SEQ ID NO: 453558 - RNA, 19 nt, Artificial Sequence
  Description of Artificial Sequence: Synthetic oligonucleotide
cugaauucgacuggcccgg

SEQ ID NO: 453559 - RNA, 19 nt, Artificial Sequence
  Description of Artificial Sequence: Synthetic oligonucleotide
ugggaaagcuguacaggca

SEQ ID NO: 453560 - RNA, 19 nt, Artificial Sequence
  Description of Artificial Sequence: Synthetic oligonucleotide
ucaauccacaaggacaaau

SEQ ID NO: 453561 - RNA, 19 nt, Artificial Sequence
  Description of Artificial Sequence: Synthetic oligonucleotide
guaggcauccagcaggaga

SEQ ID NO: 453562 - RNA, 19 nt, Artificial Sequence
  Description of Artificial Sequence: Synthetic oligonucleotide
uguauaagcucaggaggca

SEQ ID NO: 453563 - RNA, 19 nt, Artificial Sequence
  Description of Artificial Sequence: Synthetic oligonucleotide
cucaagagcccuccggaag

SEQ ID NO: 453564 - RNA, 19 nt, Artificial Sequence
  Description of Artificial Sequence: Synthetic oligonucleotide
gagguucccucaauguagg

SEQ ID NO: 453565 - RNA, 19 nt, Artificial Sequence
  Description of Artificial Sequence: Synthetic oligonucleotide
caauugguugagagggccc

SEQ ID NO: 453566 - RNA, 19 nt, Artificial Sequence
  Description of Artificial Sequence: Synthetic oligonucleotide
agcguuacugggcuuggug

SEQ ID NO: 453567 - RNA, 19 nt, Artificial Sequence
  Description of Artificial Sequence: Synthetic oligonucleotide
acuuccgaugcuggggacc

SEQ ID NO: 453568 - RNA, 19 nt, Artificial Sequence
  Description of Artificial Sequence: Synthetic oligonucleotide
caaaugucgugcauguaga

SEQ ID NO: 453569 - RNA, 19 nt, Artificial Sequence
  Description of Artificial Sequence: Synthetic oligonucleotide
uacaggugggcucggcacc

SEQ ID NO: 453570 - RNA, 19 nt, Artificial Sequence
  Description of Artificial Sequence: Synthetic oligonucleotide
ccugaauucgacuggcccg

SEQ ID NO: 453571 - RNA, 19 nt, Artificial Sequence
  Description of Artificial Sequence: Synthetic oligonucleotide
uggugagcguuacugggcu

SEQ ID NO: 453572 - RNA, 19 nt, Artificial Sequence
  Description of Artificial Sequence: Synthetic oligonucleotide
gacauggugccauauucaa

SEQ ID NO: 453573 - RNA, 19 nt, Artificial Sequence
  Description of Artificial Sequence: Synthetic oligonucleotide
gagggagggcaacugauga

SEQ ID NO: 453574 - RNA, 19 nt, Artificial Sequence
  Description of Artificial Sequence: Synthetic oligonucleotide
aagcggaguggguuguugu

SEQ ID NO: 453575 - RNA, 19 nt, Artificial Sequence
  Description of Artificial Sequence: Synthetic oligonucleotide
uagcuaucaaauucaggua

SEQ ID NO: 453576 - RNA, 19 nt, Artificial Sequence
  Description of Artificial Sequence: Synthetic oligonucleotide
guuggcgggaagcaaacga

SEQ ID NO: 453577 - RNA, 19 nt, Artificial Sequence
  Description of Artificial Sequence: Synthetic oligonucleotide
cuggugguagccucuggcc

SEQ ID NO: 453578 - RNA, 19 nt, Artificial Sequence
  Description of Artificial Sequence: Synthetic oligonucleotide
agcaaacgaguguaaggca

SEQ ID NO: 453579 - RNA, 19 nt, Artificial Sequence
  Description of Artificial Sequence: Synthetic oligonucleotide
gacuuuguccaugcucagg

SEQ ID NO: 453580 - RNA, 19 nt, Artificial Sequence
  Description of Artificial Sequence: Synthetic oligonucleotide
aacgaguguaaggcauagg

SEQ ID NO: 453581 - RNA, 19 nt, Artificial Sequence
  Description of Artificial Sequence: Synthetic oligonucleotide
uugagagggcccacuuugc

SEQ ID NO: 453582 - RNA, 19 nt, Artificial Sequence
  Description of Artificial Sequence: Synthetic oligonucleotide
guauaagcucaggaggcag

SEQ ID NO: 453583 - RNA, 19 nt, Artificial Sequence
  Description of Artificial Sequence: Synthetic oligonucleotide
ugcgcuguguugagcagca

SEQ ID NO: 453584 - RNA, 19 nt, Artificial Sequence
  Description of Artificial Sequence: Synthetic oligonucleotide
ucggcuagcugcuguauaa

SEQ ID NO: 453585 - RNA, 19 nt, Artificial Sequence
  Description of Artificial Sequence: Synthetic oligonucleotide
uuuccgcuccccacccugg

SEQ ID NO: 453586 - RNA, 19 nt, Artificial Sequence
  Description of Artificial Sequence: Synthetic oligonucleotide
gcagaugcaaaugucgugc

SEQ ID NO: 453587 - RNA, 19 nt, Artificial Sequence
  Description of Artificial Sequence: Synthetic oligonucleotide
ugaugucuguucugagucu

SEQ ID NO: 453588 - RNA, 19 nt, Artificial Sequence
  Description of Artificial Sequence: Synthetic oligonucleotide
cuacaggugggcucggcac

SEQ ID NO: 453589 - RNA, 19 nt, Artificial Sequence
  Description of Artificial Sequence: Synthetic oligonucleotide
agcgcaucagcuggcaagg

SEQ ID NO: 453590 - RNA, 19 nt, Artificial Sequence
  Description of Artificial Sequence: Synthetic oligonucleotide
uggugugacggugaucuca

SEQ ID NO: 453591 - RNA, 19 nt, Artificial Sequence
  Description of Artificial Sequence: Synthetic oligonucleotide
cugguauccaugaguucag

SEQ ID NO: 453592 - RNA, 19 nt, Artificial Sequence
  Description of Artificial Sequence: Synthetic oligonucleotide
agcggaguggguuguuguc

SEQ ID NO: 453593 - RNA, 19 nt, Artificial Sequence
  Description of Artificial Sequence: Synthetic oligonucleotide
aacuuggugguggccgagg

SEQ ID NO: 453594 - RNA, 19 nt, Artificial Sequence
  Description of Artificial Sequence: Synthetic oligonucleotide
gcagggucgggguaggugg

SEQ ID NO: 453595 - RNA, 19 nt, Artificial Sequence
  Description of Artificial Sequence: Synthetic oligonucleotide
accguugcagggaagaagu

SEQ ID NO: 453596 - RNA, 19 nt, Artificial Sequence
  Description of Artificial Sequence: Synthetic oligonucleotide
agccgaguguuccuccagg

SEQ ID NO: 453597 - RNA, 19 nt, Artificial Sequence
  Description of Artificial Sequence: Synthetic oligonucleotide
ugucgggagcugaugcuca

SEQ ID NO: 453598 - RNA, 19 nt, Artificial Sequence
  Description of Artificial Sequence: Synthetic oligonucleotide
cacgcgguaggcauccagc

SEQ ID NO: 453599 - RNA, 19 nt, Artificial Sequence
  Description of Artificial Sequence: Synthetic oligonucleotide
cucggcaccagucuggcca

SEQ ID NO: 453600 - RNA, 19 nt, Artificial Sequence
  Description of Artificial Sequence: Synthetic oligonucleotide
agaugcagcaagcuccuuu

SEQ ID NO: 453601 - RNA, 19 nt, Artificial Sequence
  Description of Artificial Sequence: Synthetic oligonucleotide
aucgcagcagcgcccaucu

SEQ ID NO: 453602 - RNA, 19 nt, Artificial Sequence
  Description of Artificial Sequence: Synthetic oligonucleotide
guggcgaacagcaaccuca

SEQ ID NO: 453603 - RNA, 19 nt, Artificial Sequence
  Description of Artificial Sequence: Synthetic oligonucleotide
cuuuguccaugcucagggc

SEQ ID NO: 453604 - RNA, 19 nt, Artificial Sequence
  Description of Artificial Sequence: Synthetic oligonucleotide
gguauccaugaguucagug

SEQ ID NO: 453605 - RNA, 19 nt, Artificial Sequence
  Description of Artificial Sequence: Synthetic oligonucleotide
guggccggggaauuccggg

SEQ ID NO: 453606 - RNA, 19 nt, Artificial Sequence
  Description of Artificial Sequence: Synthetic oligonucleotide
agacuuuguccaugcucag

SEQ ID NO: 453607 - RNA, 19 nt, Artificial Sequence
  Description of Artificial Sequence: Synthetic oligonucleotide
uccucacauuggcagcuga

SEQ ID NO: 453608 - RNA, 19 nt, Artificial Sequence
  Description of Artificial Sequence: Synthetic oligonucleotide
acguagaaucgcagcagcg

SEQ ID NO: 453609 - RNA, 19 nt, Artificial Sequence
  Description of Artificial Sequence: Synthetic oligonucleotide
cagugcagucuccucgucc

SEQ ID NO: 453610 - RNA, 19 nt, Artificial Sequence
  Description of Artificial Sequence: Synthetic oligonucleotide
gaauucgacuggcccgggc

SEQ ID NO: 453611 - RNA, 19 nt, Artificial Sequence
  Description of Artificial Sequence: Synthetic oligonucleotide
ugagcguuacugggcuugg

SEQ ID NO: 453612 - RNA, 19 nt, Artificial Sequence
  Description of Artificial Sequence: Synthetic oligonucleotide
uuuugcgauuaggccuugg

SEQ ID NO: 453613 - RNA, 19 nt, Artificial Sequence
  Description of Artificial Sequence: Synthetic oligonucleotide
aggugaugucuguucugag

SEQ ID NO: 453614 - RNA, 19 nt, Artificial Sequence
  Description of Artificial Sequence: Synthetic oligonucleotide
uaagcggaguggguuguug

SEQ ID NO: 453615 - RNA, 19 nt, Artificial Sequence
  Description of Artificial Sequence: Synthetic oligonucleotide
ugagccgaguguuccucca

SEQ ID NO: 453616 - RNA, 19 nt, Artificial Sequence
  Description of Artificial Sequence: Synthetic oligonucleotide
ugucgugcauguagaacuu

SEQ ID NO: 453617 - RNA, 19 nt, Artificial Sequence
  Description of Artificial Sequence: Synthetic oligonucleotide
uguaagcggaguggguugu

SEQ ID NO: 453618 - RNA, 19 nt, Artificial Sequence
  Description of Artificial Sequence: Synthetic oligonucleotide
cuggguacuuccgaugcug

SEQ ID NO: 453619 - RNA, 19 nt, Artificial Sequence
  Description of Artificial Sequence: Synthetic oligonucleotide
guaggggugaguguccuca

SEQ ID NO: 453620 - RNA, 19 nt, Artificial Sequence
  Description of Artificial Sequence: Synthetic oligonucleotide
gauggguccaucgcucuuc

SEQ ID NO: 453621 - RNA, 19 nt, Artificial Sequence
  Description of Artificial Sequence: Synthetic oligonucleotide
uccucggagaugcugccuu

SEQ ID NO: 453622 - RNA, 19 nt, Artificial Sequence
  Description of Artificial Sequence: Synthetic oligonucleotide
acucaugcgcuguguugag

SEQ ID NO: 453623 - RNA, 19 nt, Artificial Sequence
  Description of Artificial Sequence: Synthetic oligonucleotide
uggacucagccuugccuug

SEQ ID NO: 453624 - RNA, 19 nt, Artificial Sequence
  Description of Artificial Sequence: Synthetic oligonucleotide
uaggacauggugccauauu

SEQ ID NO: 453625 - RNA, 19 nt, Artificial Sequence
  Description of Artificial Sequence: Synthetic oligonucleotide
auucgacuggcccgggcca

SEQ ID NO: 453626 - RNA, 19 nt, Artificial Sequence
  Description of Artificial Sequence: Synthetic oligonucleotide
ggcauccucccauauaaga

SEQ ID NO: 453627 - RNA, 19 nt, Artificial Sequence
  Description of Artificial Sequence: Synthetic oligonucleotide
caauagaagcacugcucca

SEQ ID NO: 453628 - RNA, 19 nt, Artificial Sequence
  Description of Artificial Sequence: Synthetic oligonucleotide
auguagucgucauccucgu

SEQ ID NO: 453629 - RNA, 19 nt, Artificial Sequence
  Description of Artificial Sequence: Synthetic oligonucleotide
agaugcaaaugucgugcau

SEQ ID NO: 453630 - RNA, 19 nt, Artificial Sequence
  Description of Artificial Sequence: Synthetic oligonucleotide
gacugugccgugguucuug

SEQ ID NO: 453631 - RNA, 19 nt, Artificial Sequence
  Description of Artificial Sequence: Synthetic oligonucleotide
gugagcguuacugggcuug

SEQ ID NO: 453632 - RNA, 19 nt, Artificial Sequence
  Description of Artificial Sequence: Synthetic oligonucleotide
caggaggcgggauuugguc

SEQ ID NO: 453633 - RNA, 19 nt, Artificial Sequence
  Description of Artificial Sequence: Synthetic oligonucleotide
gcaauugguugagagggcc

SEQ ID NO: 453634 - RNA, 19 nt, Artificial Sequence
  Description of Artificial Sequence: Synthetic oligonucleotide
uccuuguaggggugagugu

SEQ ID NO: 453635 - RNA, 19 nt, Artificial Sequence
  Description of Artificial Sequence: Synthetic oligonucleotide
caguuggcgggaagcaaac

SEQ ID NO: 453636 - RNA, 19 nt, Artificial Sequence
  Description of Artificial Sequence: Synthetic oligonucleotide
gcauguaagucucugacau

SEQ ID NO: 453637 - RNA, 19 nt, Artificial Sequence
  Description of Artificial Sequence: Synthetic oligonucleotide
caggguaccucagcugagg

SEQ ID NO: 453638 - RNA, 19 nt, Artificial Sequence
  Description of Artificial Sequence: Synthetic oligonucleotide
caucugaauugcagcacca

SEQ ID NO: 453639 - RNA, 19 nt, Artificial Sequence
  Description of Artificial Sequence: Synthetic oligonucleotide
aguuggcgggaagcaaacg

SEQ ID NO: 453640 - RNA, 19 nt, Artificial Sequence
  Description of Artificial Sequence: Synthetic oligonucleotide
cugagccgaguguuccucc

SEQ ID NO: 453641 - RNA, 19 nt, Artificial Sequence
  Description of Artificial Sequence: Synthetic oligonucleotide
agaaucgcagcagcgccca

SEQ ID NO: 453642 - RNA, 19 nt, Artificial Sequence
  Description of Artificial Sequence: Synthetic oligonucleotide
aggguaccucagcugaggu

SEQ ID NO: 453643 - RNA, 19 nt, Artificial Sequence
  Description of Artificial Sequence: Synthetic oligonucleotide
cucucgggugucuggguac

SEQ ID NO: 453644 - RNA, 19 nt, Artificial Sequence
  Description of Artificial Sequence: Synthetic oligonucleotide
ggaaagcucagcagaccgg

SEQ ID NO: 453645 - RNA, 19 nt, Artificial Sequence
  Description of Artificial Sequence: Synthetic oligonucleotide
ggugugacggugaucucag

SEQ ID NO: 453646 - RNA, 19 nt, Artificial Sequence
  Description of Artificial Sequence: Synthetic oligonucleotide
ggcaggguaccucagcuga

SEQ ID NO: 453647 - RNA, 19 nt, Artificial Sequence
  Description of Artificial Sequence: Synthetic oligonucleotide
ggcaauagaagcacugcuc

SEQ ID NO: 453648 - RNA, 19 nt, Artificial Sequence
  Description of Artificial Sequence: Synthetic oligonucleotide
uucaguuggcgggaagcaa

SEQ ID NO: 453649 - RNA, 19 nt, Artificial Sequence
  Description of Artificial Sequence: Synthetic oligonucleotide
uggugggugcauccccuga

SEQ ID NO: 453650 - RNA, 19 nt, Artificial Sequence
  Description of Artificial Sequence: Synthetic oligonucleotide
ggacaaauuagagcuguca

SEQ ID NO: 453651 - RNA, 19 nt, Artificial Sequence
  Description of Artificial Sequence: Synthetic oligonucleotide
guggugagcguuacugggc

SEQ ID NO: 453652 - RNA, 19 nt, Artificial Sequence
  Description of Artificial Sequence: Synthetic oligonucleotide
gagccgaguguuccuccag

SEQ ID NO: 453653 - RNA, 19 nt, Artificial Sequence
  Description of Artificial Sequence: Synthetic oligonucleotide
gaguucagugggcccugcc

SEQ ID NO: 453654 - RNA, 19 nt, Artificial Sequence
  Description of Artificial Sequence: Synthetic oligonucleotide
gugcggggcacgaugguag

SEQ ID NO: 453655 - RNA, 19 nt, Artificial Sequence
  Description of Artificial Sequence: Synthetic oligonucleotide
ugccgugguucuuggggug

SEQ ID NO: 453656 - RNA, 19 nt, Artificial Sequence
  Description of Artificial Sequence: Synthetic oligonucleotide
ggugggugcauccccugag

SEQ ID NO: 453657 - RNA, 19 nt, Artificial Sequence
  Description of Artificial Sequence: Synthetic oligonucleotide
ggaccuuagugcugguggc

SEQ ID NO: 453658 - RNA, 19 nt, Artificial Sequence
  Description of Artificial Sequence: Synthetic oligonucleotide
cagauuggccaagucagca

SEQ ID NO: 453659 - RNA, 19 nt, Artificial Sequence
  Description of Artificial Sequence: Synthetic oligonucleotide
auagggcauccucccauau

SEQ ID NO: 453660 - RNA, 19 nt, Artificial Sequence
  Description of Artificial Sequence: Synthetic oligonucleotide
ugguugagagggcccacuu

SEQ ID NO: 453661 - RNA, 19 nt, Artificial Sequence
  Description of Artificial Sequence: Synthetic oligonucleotide
gcagcgcccaucugaauug

SEQ ID NO: 453662 - RNA, 19 nt, Artificial Sequence
  Description of Artificial Sequence: Synthetic oligonucleotide
aaagcucagcagaccggcu

SEQ ID NO: 453663 - RNA, 19 nt, Artificial Sequence
  Description of Artificial Sequence: Synthetic oligonucleotide
ggcacgaugguagcaauuc

SEQ ID NO: 453664 - RNA, 19 nt, Artificial Sequence
  Description of Artificial Sequence: Synthetic oligonucleotide
auggguccaucgcucuuca

SEQ ID NO: 453665 - RNA, 19 nt, Artificial Sequence
  Description of Artificial Sequence: Synthetic oligonucleotide
caaacgaguguaaggcaua

SEQ ID NO: 453666 - RNA, 19 nt, Artificial Sequence
  Description of Artificial Sequence: Synthetic oligonucleotide
gcccuguugccacacgcgg

SEQ ID NO: 453667 - RNA, 19 nt, Artificial Sequence
  Description of Artificial Sequence: Synthetic oligonucleotide
aguguuccuccagguaucu

SEQ ID NO: 453668 - RNA, 19 nt, Artificial Sequence
  Description of Artificial Sequence: Synthetic oligonucleotide
ugcggggcacgaugguagc

SEQ ID NO: 453669 - RNA, 19 nt, Artificial Sequence
  Description of Artificial Sequence: Synthetic oligonucleotide
gcuuaaugagcauguaagu

SEQ ID NO: 453670 - RNA, 19 nt, Artificial Sequence
  Description of Artificial Sequence: Synthetic oligonucleotide
ucgggguagguggugugac

SEQ ID NO: 453671 - RNA, 19 nt, Artificial Sequence
  Description of Artificial Sequence: Synthetic oligonucleotide
uucgacuggcccgggccag

SEQ ID NO: 453672 - RNA, 19 nt, Artificial Sequence
  Description of Artificial Sequence: Synthetic oligonucleotide
ggucugccccaucuggaag

SEQ ID NO: 453673 - RNA, 19 nt, Artificial Sequence
  Description of Artificial Sequence: Synthetic oligonucleotide
gggugcauccccugaggcc

SEQ ID NO: 453674 - RNA, 19 nt, Artificial Sequence
  Description of Artificial Sequence: Synthetic oligonucleotide
ucuuuccgcuccccacccu

SEQ ID NO: 453675 - RNA, 19 nt, Artificial Sequence
  Description of Artificial Sequence: Synthetic oligonucleotide
gcggaguggguuguugucg

SEQ ID NO: 453676 - RNA, 19 nt, Artificial Sequence
  Description of Artificial Sequence: Synthetic oligonucleotide
cauguagaacuugauggcu

SEQ ID NO: 453677 - RNA, 19 nt, Artificial Sequence
  Description of Artificial Sequence: Synthetic oligonucleotide
cgaguguaaggcauaggac

SEQ ID NO: 453678 - RNA, 19 nt, Artificial Sequence
  Description of Artificial Sequence: Synthetic oligonucleotide
aucggcuagcugcuguaua

SEQ ID NO: 453679 - RNA, 19 nt, Artificial Sequence
  Description of Artificial Sequence: Synthetic oligonucleotide
uguaggggugaguguccuc

SEQ ID NO: 453680 - RNA, 19 nt, Artificial Sequence
  Description of Artificial Sequence: Synthetic oligonucleotide
ggugaugucuguucugagu

SEQ ID NO: 453681 - RNA, 19 nt, Artificial Sequence
  Description of Artificial Sequence: Synthetic oligonucleotide
ucucgggugucuggguacu

SEQ ID NO: 453682 - RNA, 19 nt, Artificial Sequence
  Description of Artificial Sequence: Synthetic oligonucleotide
gugacugugccgugguucu

SEQ ID NO: 453683 - RNA, 19 nt, Artificial Sequence
  Description of Artificial Sequence: Synthetic oligonucleotide
cccauauaagauccaccug

SEQ ID NO: 453684 - RNA, 19 nt, Artificial Sequence
  Description of Artificial Sequence: Synthetic oligonucleotide
gugugacggugaucucagg

SEQ ID NO: 453685 - RNA, 19 nt, Artificial Sequence
  Description of Artificial Sequence: Synthetic oligonucleotide
gaacagguguggcauguuu

SEQ ID NO: 453686 - RNA, 19 nt, Artificial Sequence
  Description of Artificial Sequence: Synthetic oligonucleotide
uuccgggaucuguggacaa

SEQ ID NO: 453687 - RNA, 19 nt, Artificial Sequence
  Description of Artificial Sequence: Synthetic oligonucleotide
gaguucagcuuguccugaa

SEQ ID NO: 453688 - RNA, 19 nt, Artificial Sequence
  Description of Artificial Sequence: Synthetic oligonucleotide
gcgauuaggccuuggaggu

SEQ ID NO: 453689 - RNA, 19 nt, Artificial Sequence
  Description of Artificial Sequence: Synthetic oligonucleotide
gucgugcauguagaacuug

SEQ ID NO: 453690 - RNA, 19 nt, Artificial Sequence
  Description of Artificial Sequence: Synthetic oligonucleotide
ggacauggugccauauuca

SEQ ID NO: 453691 - RNA, 19 nt, Artificial Sequence
  Description of Artificial Sequence: Synthetic oligonucleotide
caugaguucagugggcccu

SEQ ID NO: 453692 - RNA, 19 nt, Artificial Sequence
  Description of Artificial Sequence: Synthetic oligonucleotide
guugucgggagcugaugcu

SEQ ID NO: 453693 - RNA, 19 nt, Artificial Sequence
  Description of Artificial Sequence: Synthetic oligonucleotide
ccaugaguucagugggccc

SEQ ID NO: 453694 - RNA, 19 nt, Artificial Sequence
  Description of Artificial Sequence: Synthetic oligonucleotide
agugcuggucuuguagcua

SEQ ID NO: 453695 - RNA, 19 nt, Artificial Sequence
  Description of Artificial Sequence: Synthetic oligonucleotide
guaucuggccuugcucuuc

SEQ ID NO: 453696 - RNA, 19 nt, Artificial Sequence
  Description of Artificial Sequence: Synthetic oligonucleotide
ggaccugacagaacuucac

SEQ ID NO: 453697 - RNA, 19 nt, Artificial Sequence
  Description of Artificial Sequence: Synthetic oligonucleotide
aggcgggauuugguccugc

SEQ ID NO: 453698 - RNA, 19 nt, Artificial Sequence
  Description of Artificial Sequence: Synthetic oligonucleotide
cacgaugguagcaauucuu

SEQ ID NO: 453699 - RNA, 19 nt, Artificial Sequence
  Description of Artificial Sequence: Synthetic oligonucleotide
ggccgaggggaucaccagc

SEQ ID NO: 453700 - RNA, 19 nt, Artificial Sequence
  Description of Artificial Sequence: Synthetic oligonucleotide
ugcaaaugucgugcaugua

SEQ ID NO: 453701 - RNA, 19 nt, Artificial Sequence
  Description of Artificial Sequence: Synthetic oligonucleotide
guaccucagcugagguucc

SEQ ID NO: 453702 - RNA, 19 nt, Artificial Sequence
  Description of Artificial Sequence: Synthetic oligonucleotide
ccucacauuggcagcugac

SEQ ID NO: 453703 - RNA, 19 nt, Artificial Sequence
  Description of Artificial Sequence: Synthetic oligonucleotide
cuggacucagccuugccuu

SEQ ID NO: 453704 - RNA, 19 nt, Artificial Sequence
  Description of Artificial Sequence: Synthetic oligonucleotide
gcuacaggugggcucggca

SEQ ID NO: 453705 - RNA, 19 nt, Artificial Sequence
  Description of Artificial Sequence: Synthetic oligonucleotide
agguggugugacggugauc

SEQ ID NO: 453706 - RNA, 19 nt, Artificial Sequence
  Description of Artificial Sequence: Synthetic oligonucleotide
gcgggauuugguccugcug

SEQ ID NO: 453707 - RNA, 19 nt, Artificial Sequence
  Description of Artificial Sequence: Synthetic oligonucleotide
cuguugccacacgcgguag

SEQ ID NO: 453708 - RNA, 19 nt, Artificial Sequence
  Description of Artificial Sequence: Synthetic oligonucleotide
cccaaguacucaugcgcug

SEQ ID NO: 453709 - RNA, 19 nt, Artificial Sequence
  Description of Artificial Sequence: Synthetic oligonucleotide
guccaucgcucuucagcuc

SEQ ID NO: 453710 - RNA, 19 nt, Artificial Sequence
  Description of Artificial Sequence: Synthetic oligonucleotide
gcagauuggccaagucagc

SEQ ID NO: 453711 - RNA, 19 nt, Artificial Sequence
  Description of Artificial Sequence: Synthetic oligonucleotide
gguggcgaacagcaaccuc

SEQ ID NO: 453712 - RNA, 19 nt, Artificial Sequence
  Description of Artificial Sequence: Synthetic oligonucleotide
agucugugguagagguuga

SEQ ID NO: 453713 - RNA, 19 nt, Artificial Sequence
  Description of Artificial Sequence: Synthetic oligonucleotide
cagcgcccaucugaauugc

SEQ ID NO: 453714 - RNA, 19 nt, Artificial Sequence
  Description of Artificial Sequence: Synthetic oligonucleotide
ccuuagugcugguggcuug

SEQ ID NO: 453715 - RNA, 19 nt, Artificial Sequence
  Description of Artificial Sequence: Synthetic oligonucleotide
ggcuugacgugggagucac

SEQ ID NO: 453716 - RNA, 19 nt, Artificial Sequence
  Description of Artificial Sequence: Synthetic oligonucleotide
agggcggccuggaagcaga

SEQ ID NO: 453717 - RNA, 19 nt, Artificial Sequence
  Description of Artificial Sequence: Synthetic oligonucleotide
gcguuacugggcuuggugu

SEQ ID NO: 453718 - RNA, 19 nt, Artificial Sequence
  Description of Artificial Sequence: Synthetic oligonucleotide
gcaaacgaguguaaggcau

SEQ ID NO: 453719 - RNA, 19 nt, Artificial Sequence
  Description of Artificial Sequence: Synthetic oligonucleotide
gaccuuagugcugguggcu

SEQ ID NO: 453720 - RNA, 19 nt, Artificial Sequence
  Description of Artificial Sequence: Synthetic oligonucleotide
cuuuugcgauuaggccuug

SEQ ID NO: 453721 - RNA, 19 nt, Artificial Sequence
  Description of Artificial Sequence: Synthetic oligonucleotide
ggucgggguagguggugug

SEQ ID NO: 453722 - RNA, 19 nt, Artificial Sequence
  Description of Artificial Sequence: Synthetic oligonucleotide
agaacagguguggcauguu

SEQ ID NO: 453723 - RNA, 19 nt, Artificial Sequence
  Description of Artificial Sequence: Synthetic oligonucleotide
uggcuacaggugggcucgg

SEQ ID NO: 453724 - RNA, 19 nt, Artificial Sequence
  Description of Artificial Sequence: Synthetic oligonucleotide
gguguaagcggaguggguu

SEQ ID NO: 453725 - RNA, 19 nt, Artificial Sequence
  Description of Artificial Sequence: Synthetic oligonucleotide
gccggucccuuggagggcg

SEQ ID NO: 453726 - RNA, 19 nt, Artificial Sequence
  Description of Artificial Sequence: Synthetic oligonucleotide
ccacacgcgguaggcaucc

SEQ ID NO: 453727 - RNA, 19 nt, Artificial Sequence
  Description of Artificial Sequence: Synthetic oligonucleotide
gccaccguugcagggaaga

SEQ ID NO: 453728 - RNA, 19 nt, Artificial Sequence
  Description of Artificial Sequence: Synthetic oligonucleotide
cuuccgaugcuggggaccu

SEQ ID NO: 453729 - RNA, 19 nt, Artificial Sequence
  Description of Artificial Sequence: Synthetic oligonucleotide
ucgacuggcccgggccaga

SEQ ID NO: 453730 - RNA, 19 nt, Artificial Sequence
  Description of Artificial Sequence: Synthetic oligonucleotide
gcauccucccauauaagau

SEQ ID NO: 453731 - RNA, 19 nt, Artificial Sequence
  Description of Artificial Sequence: Synthetic oligonucleotide
guuguugucgggagcugau

SEQ ID NO: 453732 - RNA, 19 nt, Artificial Sequence
  Description of Artificial Sequence: Synthetic oligonucleotide
gcaggguaccucagcugag

SEQ ID NO: 453733 - RNA, 19 nt, Artificial Sequence
  Description of Artificial Sequence: Synthetic oligonucleotide
gcugagccgaguguuccuc

SEQ ID NO: 453734 - RNA, 19 nt, Artificial Sequence
  Description of Artificial Sequence: Synthetic oligonucleotide
ggagguaguagagcucacu

SEQ ID NO: 453735 - RNA, 19 nt, Artificial Sequence
  Description of Artificial Sequence: Synthetic oligonucleotide
ccuguugccacacgcggua

SEQ ID NO: 453736 - RNA, 19 nt, Artificial Sequence
  Description of Artificial Sequence: Synthetic oligonucleotide
ccuguuggggcagaugcaa

SEQ ID NO: 453737 - RNA, 19 nt, Artificial Sequence
  Description of Artificial Sequence: Synthetic oligonucleotide
gcggcccaggucauaggcc

SEQ ID NO: 453738 - RNA, 19 nt, Artificial Sequence
  Description of Artificial Sequence: Synthetic oligonucleotide
ccuuuugcgauuaggccuu

SEQ ID NO: 453739 - RNA, 19 nt, Artificial Sequence
  Description of Artificial Sequence: Synthetic oligonucleotide
caaccucacugguauccau

SEQ ID NO: 453740 - RNA, 19 nt, Artificial Sequence
  Description of Artificial Sequence: Synthetic oligonucleotide
gcauaggacauggugccau

SEQ ID NO: 453741 - RNA, 19 nt, Artificial Sequence
  Description of Artificial Sequence: Synthetic oligonucleotide
agccaucggcuagcugcug

SEQ ID NO: 453742 - RNA, 19 nt, Artificial Sequence
  Description of Artificial Sequence: Synthetic oligonucleotide
ggagcgcaucagcuggcaa

SEQ ID NO: 453743 - RNA, 19 nt, Artificial Sequence
  Description of Artificial Sequence: Synthetic oligonucleotide
gcgcaucagcuggcaaggg

SEQ ID NO: 453744 - RNA, 19 nt, Artificial Sequence
  Description of Artificial Sequence: Synthetic oligonucleotide
gccgaguguuccuccaggu

SEQ ID NO: 453745 - RNA, 19 nt, Artificial Sequence
  Description of Artificial Sequence: Synthetic oligonucleotide
gccaucggcuagcugcugu

SEQ ID NO: 453746 - RNA, 19 nt, Artificial Sequence
  Description of Artificial Sequence: Synthetic oligonucleotide
cguuacugggcuuggugua

SEQ ID NO: 453747 - RNA, 19 nt, Artificial Sequence
  Description of Artificial Sequence: Synthetic oligonucleotide
gccgaggggaucaccagcu

SEQ ID NO: 453748 - RNA, 19 nt, Artificial Sequence
  Description of Artificial Sequence: Synthetic oligonucleotide
caccugcugagccgagugu

SEQ ID NO: 453749 - RNA, 19 nt, Artificial Sequence
  Description of Artificial Sequence: Synthetic oligonucleotide
gagcguuacugggcuuggu

SEQ ID NO: 453750 - RNA, 19 nt, Artificial Sequence
  Description of Artificial Sequence: Synthetic oligonucleotide
ggguaccucagcugagguu

SEQ ID NO: 453751 - RNA, 19 nt, Artificial Sequence
  Description of Artificial Sequence: Synthetic oligonucleotide
ggcgggauuugguccugcu

SEQ ID NO: 453752 - RNA, 19 nt, Artificial Sequence
  Description of Artificial Sequence: Synthetic oligonucleotide
gccacacgcgguaggcauc

SEQ ID NO: 453753 - RNA, 19 nt, Artificial Sequence
  Description of Artificial Sequence: Synthetic oligonucleotide
gaaucgcagcagcgcccau

SEQ ID NO: 453754 - RNA, 19 nt, Artificial Sequence
  Description of Artificial Sequence: Synthetic oligonucleotide
ccgaguguuccuccaggua

SEQ ID NO: 453755 - RNA, 19 nt, Artificial Sequence
  Description of Artificial Sequence: Synthetic oligonucleotide
ggccggucccuuggagggc

SEQ ID NO: 453756 - RNA, 19 nt, Artificial Sequence
  Description of Artificial Sequence: Synthetic oligonucleotide
caucggcuagcugcuguau

SEQ ID NO: 453757 - RNA, 19 nt, Artificial Sequence
  Description of Artificial Sequence: Synthetic oligonucleotide
cugugcggggcacgauggu

SEQ ID NO: 453758 - RNA, 19 nt, Artificial Sequence
  Description of Artificial Sequence: Synthetic oligonucleotide
gcuuggcuacaggugggcu

SEQ ID NO: 453759 - RNA, 19 nt, Artificial Sequence
  Description of Artificial Sequence: Synthetic oligonucleotide
gggagucacugggccucug

SEQ ID NO: 453760 - RNA, 19 nt, Artificial Sequence
  Description of Artificial Sequence: Synthetic oligonucleotide
cgugcauguagaacuugau

SEQ ID NO: 453761 - RNA, 19 nt, Artificial Sequence
  Description of Artificial Sequence: Synthetic oligonucleotide
caaugcggcccaggucaua

SEQ ID NO: 453762 - RNA, 19 nt, Artificial Sequence
  Description of Artificial Sequence: Synthetic oligonucleotide
guaagcggaguggguuguu

SEQ ID NO: 453763 - RNA, 19 nt, Artificial Sequence
  Description of Artificial Sequence: Synthetic oligonucleotide
cccuguugccacacgcggu

SEQ ID NO: 453764 - RNA, 19 nt, Artificial Sequence
  Description of Artificial Sequence: Synthetic oligonucleotide
ggugagcguuacugggcuu

SEQ ID NO: 453765 - RNA, 19 nt, Artificial Sequence
  Description of Artificial Sequence: Synthetic oligonucleotide
cgaugguagcaauucuuuu

SEQ ID NO: 453766 - RNA, 19 nt, Artificial Sequence
  Description of Artificial Sequence: Synthetic oligonucleotide
ccggggaauuccgggaucu

SEQ ID NO: 453767 - RNA, 19 nt, Artificial Sequence
  Description of Artificial Sequence: Synthetic oligonucleotide
cggggcacgaugguagcaa

SEQ ID NO: 453768 - RNA, 19 nt, Artificial Sequence
  Description of Artificial Sequence: Synthetic oligonucleotide
cuccccgggcucccauggu

SEQ ID NO: 453769 - RNA, 19 nt, Artificial Sequence
  Description of Artificial Sequence: Synthetic oligonucleotide
cagcagcgcccaucugaau

SEQ ID NO: 453770 - RNA, 19 nt, Artificial Sequence
  Description of Artificial Sequence: Synthetic oligonucleotide
cggggaauuccgggaucug

SEQ ID NO: 453771 - RNA, 19 nt, Artificial Sequence
  Description of Artificial Sequence: Synthetic oligonucleotide
ccaucgcucuucagcucau

SEQ ID NO: 453772 - RNA, 19 nt, Artificial Sequence
  Description of Artificial Sequence: Synthetic oligonucleotide
ccguugcagggaagaaguu

SEQ ID NO: 453773 - RNA, 19 nt, Artificial Sequence
  Description of Artificial Sequence: Synthetic oligonucleotide
gcuugacgugggagucacu

SEQ ID NO: 453774 - RNA, 19 nt, Artificial Sequence
  Description of Artificial Sequence: Synthetic oligonucleotide
gcgcuguguugagcagcau

SEQ ID NO: 453775 - RNA, 19 nt, Artificial Sequence
  Description of Artificial Sequence: Synthetic oligonucleotide
uauauggcaauuaagacgg

SEQ ID NO: 453776 - RNA, 19 nt, Artificial Sequence
  Description of Artificial Sequence: Synthetic oligonucleotide
aauuuguucacccaauuag

SEQ ID NO: 453777 - RNA, 19 nt, Artificial Sequence
  Description of Artificial Sequence: Synthetic oligonucleotide
uuauauggcaauuaagacg

SEQ ID NO: 453778 - RNA, 19 nt, Artificial Sequence
  Description of Artificial Sequence: Synthetic oligonucleotide
uuuuaauuggucccgaagg

SEQ ID NO: 453779 - RNA, 19 nt, Artificial Sequence
  Description of Artificial Sequence: Synthetic oligonucleotide
aaaacauugauucccacug

SEQ ID NO: 453780 - RNA, 19 nt, Artificial Sequence
  Description of Artificial Sequence: Synthetic oligonucleotide
aguaguacaaaccuuacag

SEQ ID NO: 453781 - RNA, 19 nt, Artificial Sequence
  Description of Artificial Sequence: Synthetic oligonucleotide
agaauacugaaccagaguc

SEQ ID NO: 453782 - RNA, 19 nt, Artificial Sequence
  Description of Artificial Sequence: Synthetic oligonucleotide
aaugagagagcugauaaac

SEQ ID NO: 453783 - RNA, 19 nt, Artificial Sequence
  Description of Artificial Sequence: Synthetic oligonucleotide
aguaauuuguacuguauac

SEQ ID NO: 453784 - RNA, 19 nt, Artificial Sequence
  Description of Artificial Sequence: Synthetic oligonucleotide
acagcuauuaugugaaugc

SEQ ID NO: 453785 - RNA, 19 nt, Artificial Sequence
  Description of Artificial Sequence: Synthetic oligonucleotide
uuaacauuauaacuuuggg

SEQ ID NO: 453786 - RNA, 19 nt, Artificial Sequence
  Description of Artificial Sequence: Synthetic oligonucleotide
aaaugaucugcuuuuaaug

SEQ ID NO: 453787 - RNA, 19 nt, Artificial Sequence
  Description of Artificial Sequence: Synthetic oligonucleotide
uucuacauaaauuacuacc

SEQ ID NO: 453788 - RNA, 19 nt, Artificial Sequence
  Description of Artificial Sequence: Synthetic oligonucleotide
gaauguaucaccccaacag

SEQ ID NO: 453789 - RNA, 19 nt, Artificial Sequence
  Description of Artificial Sequence: Synthetic oligonucleotide
aaacaaguggcucacucac

SEQ ID NO: 453790 - RNA, 19 nt, Artificial Sequence
  Description of Artificial Sequence: Synthetic oligonucleotide
uuaaaugucccuaaagaga

SEQ ID NO: 453791 - RNA, 19 nt, Artificial Sequence
  Description of Artificial Sequence: Synthetic oligonucleotide
aacagcacgacauucaacu

SEQ ID NO: 453792 - RNA, 19 nt, Artificial Sequence
  Description of Artificial Sequence: Synthetic oligonucleotide
uguuacauuauauugucug

SEQ ID NO: 453793 - RNA, 19 nt, Artificial Sequence
  Description of Artificial Sequence: Synthetic oligonucleotide
auuguuacauuauauuguc

SEQ ID NO: 453794 - RNA, 19 nt, Artificial Sequence
  Description of Artificial Sequence: Synthetic oligonucleotide
ugucuguacaauuaaaugu

SEQ ID NO: 453795 - RNA, 19 nt, Artificial Sequence
  Description of Artificial Sequence: Synthetic oligonucleotide
aauuacaauaaaugccaag

SEQ ID NO: 453796 - RNA, 19 nt, Artificial Sequence
  Description of Artificial Sequence: Synthetic oligonucleotide
auuauucagcaucaucugc

SEQ ID NO: 453797 - RNA, 19 nt, Artificial Sequence
  Description of Artificial Sequence: Synthetic oligonucleotide
uagcaagcaacuuacagag

SEQ ID NO: 453798 - RNA, 19 nt, Artificial Sequence
  Description of Artificial Sequence: Synthetic oligonucleotide
cauuguuugcugaagagcc

SEQ ID NO: 453799 - RNA, 19 nt, Artificial Sequence
  Description of Artificial Sequence: Synthetic oligonucleotide
uuuaaauccggguauugcc

SEQ ID NO: 453800 - RNA, 19 nt, Artificial Sequence
  Description of Artificial Sequence: Synthetic oligonucleotide
uaaucauuuuaaauccggg

SEQ ID NO: 453801 - RNA, 19 nt, Artificial Sequence
  Description of Artificial Sequence: Synthetic oligonucleotide
aaauaggggauuauucagc

SEQ ID NO: 453802 - RNA, 19 nt, Artificial Sequence
  Description of Artificial Sequence: Synthetic oligonucleotide
aaucauuuuaaauccgggu

SEQ ID NO: 453803 - RNA, 19 nt, Artificial Sequence
  Description of Artificial Sequence: Synthetic oligonucleotide
aagcaaguuaguuggacag

SEQ ID NO: 453804 - RNA, 19 nt, Artificial Sequence
  Description of Artificial Sequence: Synthetic oligonucleotide
uuuauauggcaauuaagac

SEQ ID NO: 453805 - RNA, 19 nt, Artificial Sequence
  Description of Artificial Sequence: Synthetic oligonucleotide
acuucuucguaauagaacu

SEQ ID NO: 453806 - RNA, 19 nt, Artificial Sequence
  Description of Artificial Sequence: Synthetic oligonucleotide
agcauagccaaacuuacuc

SEQ ID NO: 453807 - RNA, 19 nt, Artificial Sequence
  Description of Artificial Sequence: Synthetic oligonucleotide
ucaaccuuuuaauagcaag

SEQ ID NO: 453808 - RNA, 19 nt, Artificial Sequence
  Description of Artificial Sequence: Synthetic oligonucleotide
uguucacccaauuagaaaa

SEQ ID NO: 453809 - RNA, 19 nt, Artificial Sequence
  Description of Artificial Sequence: Synthetic oligonucleotide
ucaauugcugcguugaugu

SEQ ID NO: 453810 - RNA, 19 nt, Artificial Sequence
  Description of Artificial Sequence: Synthetic oligonucleotide
aaccuuacagcauuauuug

SEQ ID NO: 453811 - RNA, 19 nt, Artificial Sequence
  Description of Artificial Sequence: Synthetic oligonucleotide
ugugcaguaauuuguacug

SEQ ID NO: 453812 - RNA, 19 nt, Artificial Sequence
  Description of Artificial Sequence: Synthetic oligonucleotide
ucuggggucaaccugaccu

SEQ ID NO: 453813 - RNA, 19 nt, Artificial Sequence
  Description of Artificial Sequence: Synthetic oligonucleotide
uucguaauagaacuaggca

SEQ ID NO: 453814 - RNA, 19 nt, Artificial Sequence
  Description of Artificial Sequence: Synthetic oligonucleotide
aauaggggauuauucagca

SEQ ID NO: 453815 - RNA, 19 nt, Artificial Sequence
  Description of Artificial Sequence: Synthetic oligonucleotide
acgacauucaacuacuucu

SEQ ID NO: 453816 - RNA, 19 nt, Artificial Sequence
  Description of Artificial Sequence: Synthetic oligonucleotide
uugucaguaguacaaaccu

SEQ ID NO: 453817 - RNA, 19 nt, Artificial Sequence
  Description of Artificial Sequence: Synthetic oligonucleotide
auuuacagcuauuauguga

SEQ ID NO: 453818 - RNA, 19 nt, Artificial Sequence
  Description of Artificial Sequence: Synthetic oligonucleotide
uugguuacaggaauuuugc

SEQ ID NO: 453819 - RNA, 19 nt, Artificial Sequence
  Description of Artificial Sequence: Synthetic oligonucleotide
aaaguugggagcuguuguc

SEQ ID NO: 453820 - RNA, 19 nt, Artificial Sequence
  Description of Artificial Sequence: Synthetic oligonucleotide
ucguaauagaacuaggcaa

SEQ ID NO: 453821 - RNA, 19 nt, Artificial Sequence
  Description of Artificial Sequence: Synthetic oligonucleotide
aauguaucaccccaacagu

SEQ ID NO: 453822 - RNA, 19 nt, Artificial Sequence
  Description of Artificial Sequence: Synthetic oligonucleotide
auuaugugaaugcugagau

SEQ ID NO: 453823 - RNA, 19 nt, Artificial Sequence
  Description of Artificial Sequence: Synthetic oligonucleotide
uuuaauuggucccgaagga

SEQ ID NO: 453824 - RNA, 19 nt, Artificial Sequence
  Description of Artificial Sequence: Synthetic oligonucleotide
uaauuuguacuguauacaa

SEQ ID NO: 453825 - RNA, 19 nt, Artificial Sequence
  Description of Artificial Sequence: Synthetic oligonucleotide
uugucuguacaauuaaaug

SEQ ID NO: 453826 - RNA, 19 nt, Artificial Sequence
  Description of Artificial Sequence: Synthetic oligonucleotide
guacaaaagucucuaaccc

SEQ ID NO: 453827 - RNA, 19 nt, Artificial Sequence
  Description of Artificial Sequence: Synthetic oligonucleotide
ucaacugugaaaacggcuc

SEQ ID NO: 453828 - RNA, 19 nt, Artificial Sequence
  Description of Artificial Sequence: Synthetic oligonucleotide
agaaacaaguggcucacuc

SEQ ID NO: 453829 - RNA, 19 nt, Artificial Sequence
  Description of Artificial Sequence: Synthetic oligonucleotide
agauucagaacccagcaca

SEQ ID NO: 453830 - RNA, 19 nt, Artificial Sequence
  Description of Artificial Sequence: Synthetic oligonucleotide
uacauaaauuacuaccaug

SEQ ID NO: 453831 - RNA, 19 nt, Artificial Sequence
  Description of Artificial Sequence: Synthetic oligonucleotide
aauuaagacggaaacguca

SEQ ID NO: 453832 - RNA, 19 nt, Artificial Sequence
  Description of Artificial Sequence: Synthetic oligonucleotide
uauaacuuuggguaacugu

SEQ ID NO: 453833 - RNA, 19 nt, Artificial Sequence
  Description of Artificial Sequence: Synthetic oligonucleotide
acgagcacuaccuucacag

SEQ ID NO: 453834 - RNA, 19 nt, Artificial Sequence
  Description of Artificial Sequence: Synthetic oligonucleotide
cuucguaauagaacuaggc

SEQ ID NO: 453835 - RNA, 19 nt, Artificial Sequence
  Description of Artificial Sequence: Synthetic oligonucleotide
uaacccagacauaaggcag

SEQ ID NO: 453836 - RNA, 19 nt, Artificial Sequence
  Description of Artificial Sequence: Synthetic oligonucleotide
auucuacauaaauuacuac

SEQ ID NO: 453837 - RNA, 19 nt, Artificial Sequence
  Description of Artificial Sequence: Synthetic oligonucleotide
caaccuuuuaauagcaagc

SEQ ID NO: 453838 - RNA, 19 nt, Artificial Sequence
  Description of Artificial Sequence: Synthetic oligonucleotide
ugagaguuaggcaaacaga

SEQ ID NO: 453839 - RNA, 19 nt, Artificial Sequence
  Description of Artificial Sequence: Synthetic oligonucleotide
ucuucguaauagaacuagg

SEQ ID NO: 453840 - RNA, 19 nt, Artificial Sequence
  Description of Artificial Sequence: Synthetic oligonucleotide
uuuugcuuagaugaccuag

SEQ ID NO: 453841 - RNA, 19 nt, Artificial Sequence
  Description of Artificial Sequence: Synthetic oligonucleotide
ucccuaaagagauaaccag

SEQ ID NO: 453842 - RNA, 19 nt, Artificial Sequence
  Description of Artificial Sequence: Synthetic oligonucleotide
caaauaggggauuauucag

SEQ ID NO: 453843 - RNA, 19 nt, Artificial Sequence
  Description of Artificial Sequence: Synthetic oligonucleotide
ucuacuuuuauauggcaau

SEQ ID NO: 453844 - RNA, 19 nt, Artificial Sequence
  Description of Artificial Sequence: Synthetic oligonucleotide
ugacccuaaaguuauauuu

SEQ ID NO: 453845 - RNA, 19 nt, Artificial Sequence
  Description of Artificial Sequence: Synthetic oligonucleotide
aaaacggcucuuuguguuc

SEQ ID NO: 453846 - RNA, 19 nt, Artificial Sequence
  Description of Artificial Sequence: Synthetic oligonucleotide
uuaaauccggguauugccu

SEQ ID NO: 453847 - RNA, 19 nt, Artificial Sequence
  Description of Artificial Sequence: Synthetic oligonucleotide
aaccauggagcgcaaauga

SEQ ID NO: 453848 - RNA, 19 nt, Artificial Sequence
  Description of Artificial Sequence: Synthetic oligonucleotide
ugagauauuguuacauuau

SEQ ID NO: 453849 - RNA, 19 nt, Artificial Sequence
  Description of Artificial Sequence: Synthetic oligonucleotide
gugagaguuaggcaaacag

SEQ ID NO: 453850 - RNA, 19 nt, Artificial Sequence
  Description of Artificial Sequence: Synthetic oligonucleotide
aacacuucagaaacaagug

SEQ ID NO: 453851 - RNA, 19 nt, Artificial Sequence
  Description of Artificial Sequence: Synthetic oligonucleotide
uagaacuaggcaaacacuu

SEQ ID NO: 453852 - RNA, 19 nt, Artificial Sequence
  Description of Artificial Sequence: Synthetic oligonucleotide
uucuucguaauagaacuag

SEQ ID NO: 453853 - RNA, 19 nt, Artificial Sequence
  Description of Artificial Sequence: Synthetic oligonucleotide
uauuaugugaaugcugaga

SEQ ID NO: 453854 - RNA, 19 nt, Artificial Sequence
  Description of Artificial Sequence: Synthetic oligonucleotide
aaauuuguucacccaauua

SEQ ID NO: 453855 - RNA, 19 nt, Artificial Sequence
  Description of Artificial Sequence: Synthetic oligonucleotide
aaacuuacucaacugugaa

SEQ ID NO: 453856 - RNA, 19 nt, Artificial Sequence
  Description of Artificial Sequence: Synthetic oligonucleotide
uggcaauuaagacggaaac

SEQ ID NO: 453857 - RNA, 19 nt, Artificial Sequence
  Description of Artificial Sequence: Synthetic oligonucleotide
guguucaccagacugacac

SEQ ID NO: 453858 - RNA, 19 nt, Artificial Sequence
  Description of Artificial Sequence: Synthetic oligonucleotide
aacaccaggagaaagcccu

SEQ ID NO: 453859 - RNA, 19 nt, Artificial Sequence
  Description of Artificial Sequence: Synthetic oligonucleotide
uuuguuugucugaagucac

SEQ ID NO: 453860 - RNA, 19 nt, Artificial Sequence
  Description of Artificial Sequence: Synthetic oligonucleotide
uguaugcauaaacucuuca

SEQ ID NO: 453861 - RNA, 19 nt, Artificial Sequence
  Description of Artificial Sequence: Synthetic oligonucleotide
aaaauuuguucacccaauu

SEQ ID NO: 453862 - RNA, 19 nt, Artificial Sequence
  Description of Artificial Sequence: Synthetic oligonucleotide
uacacaauuaggaauccuu

SEQ ID NO: 453863 - RNA, 19 nt, Artificial Sequence
  Description of Artificial Sequence: Synthetic oligonucleotide
gauucuacacaauuaggaa

SEQ ID NO: 453864 - RNA, 19 nt, Artificial Sequence
  Description of Artificial Sequence: Synthetic oligonucleotide
ugaacaaaauauagguaau

SEQ ID NO: 453865 - RNA, 19 nt, Artificial Sequence
  Description of Artificial Sequence: Synthetic oligonucleotide
agauucuacacaauuagga

SEQ ID NO: 453866 - RNA, 19 nt, Artificial Sequence
  Description of Artificial Sequence: Synthetic oligonucleotide
ugcauuguuugcugaagag

SEQ ID NO: 453867 - RNA, 19 nt, Artificial Sequence
  Description of Artificial Sequence: Synthetic oligonucleotide
uaagacggaaacgucagca

SEQ ID NO: 453868 - RNA, 19 nt, Artificial Sequence
  Description of Artificial Sequence: Synthetic oligonucleotide
aacuuuggguaacuguaca

SEQ ID NO: 453869 - RNA, 19 nt, Artificial Sequence
  Description of Artificial Sequence: Synthetic oligonucleotide
cacccaauuagaaaaggug

SEQ ID NO: 453870 - RNA, 19 nt, Artificial Sequence
  Description of Artificial Sequence: Synthetic oligonucleotide
aauugcugcguugauguca

SEQ ID NO: 453871 - RNA, 19 nt, Artificial Sequence
  Description of Artificial Sequence: Synthetic oligonucleotide
gaauuuugcuuagaugacc

SEQ ID NO: 453872 - RNA, 19 nt, Artificial Sequence
  Description of Artificial Sequence: Synthetic oligonucleotide
gagaauacaaugaccuaag

SEQ ID NO: 453873 - RNA, 19 nt, Artificial Sequence
  Description of Artificial Sequence: Synthetic oligonucleotide
uagccaaacuuacucaacu

SEQ ID NO: 453874 - RNA, 19 nt, Artificial Sequence
  Description of Artificial Sequence: Synthetic oligonucleotide
uucaacuacuucuucguaa

SEQ ID NO: 453875 - RNA, 19 nt, Artificial Sequence
  Description of Artificial Sequence: Synthetic oligonucleotide
uguaucaccccaacagugu

SEQ ID NO: 453876 - RNA, 19 nt, Artificial Sequence
  Description of Artificial Sequence: Synthetic oligonucleotide
augucacugacccuaaagu

SEQ ID NO: 453877 - RNA, 19 nt, Artificial Sequence
  Description of Artificial Sequence: Synthetic oligonucleotide
ucacaguaagcaauauugu

SEQ ID NO: 453878 - RNA, 19 nt, Artificial Sequence
  Description of Artificial Sequence: Synthetic oligonucleotide
gagucagccaaguauguca

SEQ ID NO: 453879 - RNA, 19 nt, Artificial Sequence
  Description of Artificial Sequence: Synthetic oligonucleotide
gaguuaggcaaacagaacu

SEQ ID NO: 453880 - RNA, 19 nt, Artificial Sequence
  Description of Artificial Sequence: Synthetic oligonucleotide
ucaacuacuucuucguaau

SEQ ID NO: 453881 - RNA, 19 nt, Artificial Sequence
  Description of Artificial Sequence: Synthetic oligonucleotide
auuaagacggaaacgucag

SEQ ID NO: 453882 - RNA, 19 nt, Artificial Sequence
  Description of Artificial Sequence: Synthetic oligonucleotide
augaccuagaaaugugcag

SEQ ID NO: 453883 - RNA, 19 nt, Artificial Sequence
  Description of Artificial Sequence: Synthetic oligonucleotide
aggaauguaucaccccaac

SEQ ID NO: 453884 - RNA, 19 nt, Artificial Sequence
  Description of Artificial Sequence: Synthetic oligonucleotide
augagagagcugauaaacc

SEQ ID NO: 453885 - RNA, 19 nt, Artificial Sequence
  Description of Artificial Sequence: Synthetic oligonucleotide
caaccguucaauugcugcg

SEQ ID NO: 453886 - RNA, 19 nt, Artificial Sequence
  Description of Artificial Sequence: Synthetic oligonucleotide
aaguaugucacugacccua

SEQ ID NO: 453887 - RNA, 19 nt, Artificial Sequence
  Description of Artificial Sequence: Synthetic oligonucleotide
cauuauauugucuguacaa

SEQ ID NO: 453888 - RNA, 19 nt, Artificial Sequence
  Description of Artificial Sequence: Synthetic oligonucleotide
acuaaucauuuuaaauccg

SEQ ID NO: 453889 - RNA, 19 nt, Artificial Sequence
  Description of Artificial Sequence: Synthetic oligonucleotide
uucacuaggugcaguguug

SEQ ID NO: 453890 - RNA, 19 nt, Artificial Sequence
  Description of Artificial Sequence: Synthetic oligonucleotide
aacauugauucccacuguu

SEQ ID NO: 453891 - RNA, 19 nt, Artificial Sequence
  Description of Artificial Sequence: Synthetic oligonucleotide
uucacccaauuagaaaagg

SEQ ID NO: 453892 - RNA, 19 nt, Artificial Sequence
  Description of Artificial Sequence: Synthetic oligonucleotide
acuucccuugauuuguuug

SEQ ID NO: 453893 - RNA, 19 nt, Artificial Sequence
  Description of Artificial Sequence: Synthetic oligonucleotide
aguucccaugaaauaaagc

SEQ ID NO: 453894 - RNA, 19 nt, Artificial Sequence
  Description of Artificial Sequence: Synthetic oligonucleotide
aaaccauggagcgcaaaug

SEQ ID NO: 453895 - RNA, 19 nt, Artificial Sequence
  Description of Artificial Sequence: Synthetic oligonucleotide
uugucaguaucacuuaguu

SEQ ID NO: 453896 - RNA, 19 nt, Artificial Sequence
  Description of Artificial Sequence: Synthetic oligonucleotide
ucaguaucacuuaguucag

SEQ ID NO: 453897 - RNA, 19 nt, Artificial Sequence
  Description of Artificial Sequence: Synthetic oligonucleotide
gcuuagaugaccuagaaau

SEQ ID NO: 453898 - RNA, 19 nt, Artificial Sequence
  Description of Artificial Sequence: Synthetic oligonucleotide
agagccguuaucaaaauaa

SEQ ID NO: 453899 - RNA, 19 nt, Artificial Sequence
  Description of Artificial Sequence: Synthetic oligonucleotide
guucaccccagcaagagcc

SEQ ID NO: 453900 - RNA, 19 nt, Artificial Sequence
  Description of Artificial Sequence: Synthetic oligonucleotide
aacuuacucaacugugaaa

SEQ ID NO: 453901 - RNA, 19 nt, Artificial Sequence
  Description of Artificial Sequence: Synthetic oligonucleotide
acacacgagcacuaccuuc

SEQ ID NO: 453902 - RNA, 19 nt, Artificial Sequence
  Description of Artificial Sequence: Synthetic oligonucleotide
cacuacuguaugcauaaac

SEQ ID NO: 453903 - RNA, 19 nt, Artificial Sequence
  Description of Artificial Sequence: Synthetic oligonucleotide
caccccaacagugugagag

SEQ ID NO: 453904 - RNA, 19 nt, Artificial Sequence
  Description of Artificial Sequence: Synthetic oligonucleotide
uauuucugcugagaggugu

SEQ ID NO: 453905 - RNA, 19 nt, Artificial Sequence
  Description of Artificial Sequence: Synthetic oligonucleotide
acuuacagaguuaaagagu

SEQ ID NO: 453906 - RNA, 19 nt, Artificial Sequence
  Description of Artificial Sequence: Synthetic oligonucleotide
augaccuaagagaauacug

SEQ ID NO: 453907 - RNA, 19 nt, Artificial Sequence
  Description of Artificial Sequence: Synthetic oligonucleotide
uggagcgcaaaugaucugc

SEQ ID NO: 453908 - RNA, 19 nt, Artificial Sequence
  Description of Artificial Sequence: Synthetic oligonucleotide
auugcugcguugaugucac

SEQ ID NO: 453909 - RNA, 19 nt, Artificial Sequence
  Description of Artificial Sequence: Synthetic oligonucleotide
caggaauuuugcuuagaug

SEQ ID NO: 453910 - RNA, 19 nt, Artificial Sequence
  Description of Artificial Sequence: Synthetic oligonucleotide
acccaauuagaaaagguga

SEQ ID NO: 453911 - RNA, 19 nt, Artificial Sequence
  Description of Artificial Sequence: Synthetic oligonucleotide
agugcuugcaaguuugcuu

SEQ ID NO: 453912 - RNA, 19 nt, Artificial Sequence
  Description of Artificial Sequence: Synthetic oligonucleotide
uuguuacauuauauugucu

SEQ ID NO: 453913 - RNA, 19 nt, Artificial Sequence
  Description of Artificial Sequence: Synthetic oligonucleotide
aacuaggcaaacacuucag

SEQ ID NO: 453914 - RNA, 19 nt, Artificial Sequence
  Description of Artificial Sequence: Synthetic oligonucleotide
uuguucacccaauuagaaa

SEQ ID NO: 453915 - RNA, 19 nt, Artificial Sequence
  Description of Artificial Sequence: Synthetic oligonucleotide
auuacuaccaugggguuau

SEQ ID NO: 453916 - RNA, 19 nt, Artificial Sequence
  Description of Artificial Sequence: Synthetic oligonucleotide
uguuacagugcuccucagu

SEQ ID NO: 453917 - RNA, 19 nt, Artificial Sequence
  Description of Artificial Sequence: Synthetic oligonucleotide
cuugaagcugaggauuucc

SEQ ID NO: 453918 - RNA, 19 nt, Artificial Sequence
  Description of Artificial Sequence: Synthetic oligonucleotide
gagauauuguuacauuaua

SEQ ID NO: 453919 - RNA, 19 nt, Artificial Sequence
  Description of Artificial Sequence: Synthetic oligonucleotide
cuauuaugugaaugcugag

SEQ ID NO: 453920 - RNA, 19 nt, Artificial Sequence
  Description of Artificial Sequence: Synthetic oligonucleotide
aucgcugagagcgugucag

SEQ ID NO: 453921 - RNA, 19 nt, Artificial Sequence
  Description of Artificial Sequence: Synthetic oligonucleotide
ugucaguaucacuuaguuc

SEQ ID NO: 453922 - RNA, 19 nt, Artificial Sequence
  Description of Artificial Sequence: Synthetic oligonucleotide
acuaccaugggguuauguu

SEQ ID NO: 453923 - RNA, 19 nt, Artificial Sequence
  Description of Artificial Sequence: Synthetic oligonucleotide
agccaaacuuacucaacug

SEQ ID NO: 453924 - RNA, 19 nt, Artificial Sequence
  Description of Artificial Sequence: Synthetic oligonucleotide
agaacuaggcaaacacuuc

SEQ ID NO: 453925 - RNA, 19 nt, Artificial Sequence
  Description of Artificial Sequence: Synthetic oligonucleotide
uuaauuggucccgaaggaa

SEQ ID NO: 453926 - RNA, 19 nt, Artificial Sequence
  Description of Artificial Sequence: Synthetic oligonucleotide
gaagucuuacugcacucca

SEQ ID NO: 453927 - RNA, 19 nt, Artificial Sequence
  Description of Artificial Sequence: Synthetic oligonucleotide
accagacugacacuacugu

SEQ ID NO: 453928 - RNA, 19 nt, Artificial Sequence
  Description of Artificial Sequence: Synthetic oligonucleotide
ucuacacaauuaggaaucc

SEQ ID NO: 453929 - RNA, 19 nt, Artificial Sequence
  Description of Artificial Sequence: Synthetic oligonucleotide
caauuaagacggaaacguc

SEQ ID NO: 453930 - RNA, 19 nt, Artificial Sequence
  Description of Artificial Sequence: Synthetic oligonucleotide
acacaauuaggaauccuug

SEQ ID NO: 453931 - RNA, 19 nt, Artificial Sequence
  Description of Artificial Sequence: Synthetic oligonucleotide
agcgcaaaugaucugcuuu

SEQ ID NO: 453932 - RNA, 19 nt, Artificial Sequence
  Description of Artificial Sequence: Synthetic oligonucleotide
auagccaaacuuacucaac

SEQ ID NO: 453933 - RNA, 19 nt, Artificial Sequence
  Description of Artificial Sequence: Synthetic oligonucleotide
gaugaccuagaaaugugca

SEQ ID NO: 453934 - RNA, 19 nt, Artificial Sequence
  Description of Artificial Sequence: Synthetic oligonucleotide
ggcaauuaagacggaaacg

SEQ ID NO: 453935 - RNA, 19 nt, Artificial Sequence
  Description of Artificial Sequence: Synthetic oligonucleotide
aaggaagaggcuauagcau

SEQ ID NO: 453936 - RNA, 19 nt, Artificial Sequence
  Description of Artificial Sequence: Synthetic oligonucleotide
ugacacuacuguaugcaua

SEQ ID NO: 453937 - RNA, 19 nt, Artificial Sequence
  Description of Artificial Sequence: Synthetic oligonucleotide
agaauacaaugaccuaaga

SEQ ID NO: 453938 - RNA, 19 nt, Artificial Sequence
  Description of Artificial Sequence: Synthetic oligonucleotide
gaaaguugggagcuguugu

SEQ ID NO: 453939 - RNA, 19 nt, Artificial Sequence
  Description of Artificial Sequence: Synthetic oligonucleotide
aaugcacuggagucuguua

SEQ ID NO: 453940 - RNA, 19 nt, Artificial Sequence
  Description of Artificial Sequence: Synthetic oligonucleotide
uuauuucugcugagaggug

SEQ ID NO: 453941 - RNA, 19 nt, Artificial Sequence
  Description of Artificial Sequence: Synthetic oligonucleotide
caugggguuauguuuaaaa

SEQ ID NO: 453942 - RNA, 19 nt, Artificial Sequence
  Description of Artificial Sequence: Synthetic oligonucleotide
acaaguggcucacucacua

SEQ ID NO: 453943 - RNA, 19 nt, Artificial Sequence
  Description of Artificial Sequence: Synthetic oligonucleotide
ugcugcguugaugucaccc

SEQ ID NO: 453944 - RNA, 19 nt, Artificial Sequence
  Description of Artificial Sequence: Synthetic oligonucleotide
cuuaguucaggcuggccca

SEQ ID NO: 453945 - RNA, 19 nt, Artificial Sequence
  Description of Artificial Sequence: Synthetic oligonucleotide
cccaauccagaauagauuc

SEQ ID NO: 453946 - RNA, 19 nt, Artificial Sequence
  Description of Artificial Sequence: Synthetic oligonucleotide
guaucaccccaacagugug

SEQ ID NO: 453947 - RNA, 19 nt, Artificial Sequence
  Description of Artificial Sequence: Synthetic oligonucleotide
aaccugaccucucaaccuu

SEQ ID NO: 453948 - RNA, 19 nt, Artificial Sequence
  Description of Artificial Sequence: Synthetic oligonucleotide
gcuauuaugugaaugcuga

SEQ ID NO: 453949 - RNA, 19 nt, Artificial Sequence
  Description of Artificial Sequence: Synthetic oligonucleotide
aauuacuaccaugggguua

SEQ ID NO: 453950 - RNA, 19 nt, Artificial Sequence
  Description of Artificial Sequence: Synthetic oligonucleotide
auguaucaccccaacagug

SEQ ID NO: 453951 - RNA, 19 nt, Artificial Sequence
  Description of Artificial Sequence: Synthetic oligonucleotide
gaguucccaugaaauaaag

SEQ ID NO: 453952 - RNA, 19 nt, Artificial Sequence
  Description of Artificial Sequence: Synthetic oligonucleotide
uuuuaauagcaagcaacuu

SEQ ID NO: 453953 - RNA, 19 nt, Artificial Sequence
  Description of Artificial Sequence: Synthetic oligonucleotide
ugucaguaguacaaaccuu

SEQ ID NO: 453954 - RNA, 19 nt, Artificial Sequence
  Description of Artificial Sequence: Synthetic oligonucleotide
uccucagucugaacaaaau

SEQ ID NO: 453955 - RNA, 19 nt, Artificial Sequence
  Description of Artificial Sequence: Synthetic oligonucleotide
uacuuuuauauggcaauua

SEQ ID NO: 453956 - RNA, 19 nt, Artificial Sequence
  Description of Artificial Sequence: Synthetic oligonucleotide
aacggcucuuuguguucac

SEQ ID NO: 453957 - RNA, 19 nt, Artificial Sequence
  Description of Artificial Sequence: Synthetic oligonucleotide
uaugaaugagagagcugau

SEQ ID NO: 453958 - RNA, 19 nt, Artificial Sequence
  Description of Artificial Sequence: Synthetic oligonucleotide
acuaggugcaguguugggu

SEQ ID NO: 453959 - RNA, 19 nt, Artificial Sequence
  Description of Artificial Sequence: Synthetic oligonucleotide
ugcuuuuaaugccuuuauu

SEQ ID NO: 453960 - RNA, 19 nt, Artificial Sequence
  Description of Artificial Sequence: Synthetic oligonucleotide
uaaauccggguauugccua

SEQ ID NO: 453961 - RNA, 19 nt, Artificial Sequence
  Description of Artificial Sequence: Synthetic oligonucleotide
ugccuaugaaugagagagc

SEQ ID NO: 453962 - RNA, 19 nt, Artificial Sequence
  Description of Artificial Sequence: Synthetic oligonucleotide
cauagccaaacuuacucaa

SEQ ID NO: 453963 - RNA, 19 nt, Artificial Sequence
  Description of Artificial Sequence: Synthetic oligonucleotide
uaacuguacaagagagaau

SEQ ID NO: 453964 - RNA, 19 nt, Artificial Sequence
  Description of Artificial Sequence: Synthetic oligonucleotide
ccaaacuuacucaacugug

SEQ ID NO: 453965 - RNA, 19 nt, Artificial Sequence
  Description of Artificial Sequence: Synthetic oligonucleotide
agcgaggucaggguucugg

SEQ ID NO: 453966 - RNA, 19 nt, Artificial Sequence
  Description of Artificial Sequence: Synthetic oligonucleotide
gcaaccguucaauugcugc

SEQ ID NO: 453967 - RNA, 19 nt, Artificial Sequence
  Description of Artificial Sequence: Synthetic oligonucleotide
ccugguguguugaacauac

SEQ ID NO: 453968 - RNA, 19 nt, Artificial Sequence
  Description of Artificial Sequence: Synthetic oligonucleotide
aaccguucaauugcugcgu

SEQ ID NO: 453969 - RNA, 19 nt, Artificial Sequence
  Description of Artificial Sequence: Synthetic oligonucleotide
auugccugcugccccaaca

SEQ ID NO: 453970 - RNA, 19 nt, Artificial Sequence
  Description of Artificial Sequence: Synthetic oligonucleotide
aaauccggguauugccuau

SEQ ID NO: 453971 - RNA, 19 nt, Artificial Sequence
  Description of Artificial Sequence: Synthetic oligonucleotide
cucguguuuucacuaggug

SEQ ID NO: 453972 - RNA, 19 nt, Artificial Sequence
  Description of Artificial Sequence: Synthetic oligonucleotide
cucuacuuuuauauggcaa

SEQ ID NO: 453973 - RNA, 19 nt, Artificial Sequence
  Description of Artificial Sequence: Synthetic oligonucleotide
agaauugccugcugcccca

SEQ ID NO: 453974 - RNA, 19 nt, Artificial Sequence
  Description of Artificial Sequence: Synthetic oligonucleotide
guucacccaauuagaaaag

SEQ ID NO: 453975 - RNA, 19 nt, Artificial Sequence
  Description of Artificial Sequence: Synthetic oligonucleotide
cacacgagcacuaccuuca

SEQ ID NO: 453976 - RNA, 19 nt, Artificial Sequence
  Description of Artificial Sequence: Synthetic oligonucleotide
ugcaagcccugcuggaucu

SEQ ID NO: 453977 - RNA, 19 nt, Artificial Sequence
  Description of Artificial Sequence: Synthetic oligonucleotide
gaaccugacuucugggcuc

SEQ ID NO: 453978 - RNA, 19 nt, Artificial Sequence
  Description of Artificial Sequence: Synthetic oligonucleotide
cauggagcgcaaaugaucu

SEQ ID NO: 453979 - RNA, 19 nt, Artificial Sequence
  Description of Artificial Sequence: Synthetic oligonucleotide
gguugucaguaucacuuag

SEQ ID NO: 453980 - RNA, 19 nt, Artificial Sequence
  Description of Artificial Sequence: Synthetic oligonucleotide
aguggcucacucacuaauc

SEQ ID NO: 453981 - RNA, 19 nt, Artificial Sequence
  Description of Artificial Sequence: Synthetic oligonucleotide
cuuaacugaaaacauugau

SEQ ID NO: 453982 - RNA, 19 nt, Artificial Sequence
  Description of Artificial Sequence: Synthetic oligonucleotide
aaacggcucuuuguguuca

SEQ ID NO: 453983 - RNA, 19 nt, Artificial Sequence
  Description of Artificial Sequence: Synthetic oligonucleotide
cacgacauucaacuacuuc

SEQ ID NO: 453984 - RNA, 19 nt, Artificial Sequence
  Description of Artificial Sequence: Synthetic oligonucleotide
caccagacugacacuacug

SEQ ID NO: 453985 - RNA, 19 nt, Artificial Sequence
  Description of Artificial Sequence: Synthetic oligonucleotide
gucaguaguacaaaccuua

SEQ ID NO: 453986 - RNA, 19 nt, Artificial Sequence
  Description of Artificial Sequence: Synthetic oligonucleotide
gagauaaccagagucaguu

SEQ ID NO: 453987 - RNA, 19 nt, Artificial Sequence
  Description of Artificial Sequence: Synthetic oligonucleotide
auauuuuaauuggucccga

SEQ ID NO: 453988 - RNA, 19 nt, Artificial Sequence
  Description of Artificial Sequence: Synthetic oligonucleotide
ggaagacaacauuucaauc

SEQ ID NO: 453989 - RNA, 19 nt, Artificial Sequence
  Description of Artificial Sequence: Synthetic oligonucleotide
guaauagaacuaggcaaac

SEQ ID NO: 453990 - RNA, 19 nt, Artificial Sequence
  Description of Artificial Sequence: Synthetic oligonucleotide
gagaauacugaaccagagu

SEQ ID NO: 453991 - RNA, 19 nt, Artificial Sequence
  Description of Artificial Sequence: Synthetic oligonucleotide
gucaaccugaccucucaac

SEQ ID NO: 453992 - RNA, 19 nt, Artificial Sequence
  Description of Artificial Sequence: Synthetic oligonucleotide
acuuuuguacaugcuuucu

SEQ ID NO: 453993 - RNA, 19 nt, Artificial Sequence
  Description of Artificial Sequence: Synthetic oligonucleotide
caaguuaguuggacagaug

SEQ ID NO: 453994 - RNA, 19 nt, Artificial Sequence
  Description of Artificial Sequence: Synthetic oligonucleotide
agugcuccucagucugaac

SEQ ID NO: 453995 - RNA, 19 nt, Artificial Sequence
  Description of Artificial Sequence: Synthetic oligonucleotide
agcacgacauucaacuacu

SEQ ID NO: 453996 - RNA, 19 nt, Artificial Sequence
  Description of Artificial Sequence: Synthetic oligonucleotide
gcaauuaagacggaaacgu

SEQ ID NO: 453997 - RNA, 19 nt, Artificial Sequence
  Description of Artificial Sequence: Synthetic oligonucleotide
gagagguguuuaucaaaga

SEQ ID NO: 453998 - RNA, 19 nt, Artificial Sequence
  Description of Artificial Sequence: Synthetic oligonucleotide
ugugagaguuaggcaaaca

SEQ ID NO: 453999 - RNA, 19 nt, Artificial Sequence
  Description of Artificial Sequence: Synthetic oligonucleotide
guggcucacucacuaauca

SEQ ID NO: 454000 - RNA, 19 nt, Artificial Sequence
  Description of Artificial Sequence: Synthetic oligonucleotide
accaguacaaaagucucua

SEQ ID NO: 454001 - RNA, 19 nt, Artificial Sequence
  Description of Artificial Sequence: Synthetic oligonucleotide
aaaugcacuggagucuguu

SEQ ID NO: 454002 - RNA, 19 nt, Artificial Sequence
  Description of Artificial Sequence: Synthetic oligonucleotide
auggcaauuaagacggaaa

SEQ ID NO: 454003 - RNA, 19 nt, Artificial Sequence
  Description of Artificial Sequence: Synthetic oligonucleotide
gaccuugguugucaguauc

SEQ ID NO: 454004 - RNA, 19 nt, Artificial Sequence
  Description of Artificial Sequence: Synthetic oligonucleotide
uugacaucgcugagagcgu

SEQ ID NO: 454005 - RNA, 19 nt, Artificial Sequence
  Description of Artificial Sequence: Synthetic oligonucleotide
auauuguaccacaaaccau

SEQ ID NO: 454006 - RNA, 19 nt, Artificial Sequence
  Description of Artificial Sequence: Synthetic oligonucleotide
acacgagcacuaccuucac

SEQ ID NO: 454007 - RNA, 19 nt, Artificial Sequence
  Description of Artificial Sequence: Synthetic oligonucleotide
uuacugcacuccaccucag

SEQ ID NO: 454008 - RNA, 19 nt, Artificial Sequence
  Description of Artificial Sequence: Synthetic oligonucleotide
ugcauaagcugcggguucu

SEQ ID NO: 454009 - RNA, 19 nt, Artificial Sequence
  Description of Artificial Sequence: Synthetic oligonucleotide
cuaccuucacagccaggcc

SEQ ID NO: 454010 - RNA, 19 nt, Artificial Sequence
  Description of Artificial Sequence: Synthetic oligonucleotide
agccccggaaaaugcacug

SEQ ID NO: 454011 - RNA, 19 nt, Artificial Sequence
  Description of Artificial Sequence: Synthetic oligonucleotide
aaggaauguaucaccccaa

SEQ ID NO: 454012 - RNA, 19 nt, Artificial Sequence
  Description of Artificial Sequence: Synthetic oligonucleotide
aguuaggcaaacagaacuu

SEQ ID NO: 454013 - RNA, 19 nt, Artificial Sequence
  Description of Artificial Sequence: Synthetic oligonucleotide
ccaacagugugagaguuag

SEQ ID NO: 454014 - RNA, 19 nt, Artificial Sequence
  Description of Artificial Sequence: Synthetic oligonucleotide
ugaggauuuccagcaaaua

SEQ ID NO: 454015 - RNA, 19 nt, Artificial Sequence
  Description of Artificial Sequence: Synthetic oligonucleotide
aggggauuauucagcauca

SEQ ID NO: 454016 - RNA, 19 nt, Artificial Sequence
  Description of Artificial Sequence: Synthetic oligonucleotide
aacaaguggcucacucacu

SEQ ID NO: 454017 - RNA, 19 nt, Artificial Sequence
  Description of Artificial Sequence: Synthetic oligonucleotide
agcacuaccuucacagcca

SEQ ID NO: 454018 - RNA, 19 nt, Artificial Sequence
  Description of Artificial Sequence: Synthetic oligonucleotide
uaccggucucuuuuauaac

SEQ ID NO: 454019 - RNA, 19 nt, Artificial Sequence
  Description of Artificial Sequence: Synthetic oligonucleotide
cacuaggugcaguguuggg

SEQ ID NO: 454020 - RNA, 19 nt, Artificial Sequence
  Description of Artificial Sequence: Synthetic oligonucleotide
uggucccgaaggaauguau

SEQ ID NO: 454021 - RNA, 19 nt, Artificial Sequence
  Description of Artificial Sequence: Synthetic oligonucleotide
acaccuauggggagcagga

SEQ ID NO: 454022 - RNA, 19 nt, Artificial Sequence
  Description of Artificial Sequence: Synthetic oligonucleotide
ggauaaacugcugguggcc

SEQ ID NO: 454023 - RNA, 19 nt, Artificial Sequence
  Description of Artificial Sequence: Synthetic oligonucleotide
uggcucacucacuaaucau

SEQ ID NO: 454024 - RNA, 19 nt, Artificial Sequence
  Description of Artificial Sequence: Synthetic oligonucleotide
caguaguacaaaccuuaca

SEQ ID NO: 454025 - RNA, 19 nt, Artificial Sequence
  Description of Artificial Sequence: Synthetic oligonucleotide
guacaaaccuuacagcauu

SEQ ID NO: 454026 - RNA, 19 nt, Artificial Sequence
  Description of Artificial Sequence: Synthetic oligonucleotide
augaaugagagagcugaua

SEQ ID NO: 454027 - RNA, 19 nt, Artificial Sequence
  Description of Artificial Sequence: Synthetic oligonucleotide
ugcauagcucuaggguuug

SEQ ID NO: 454028 - RNA, 19 nt, Artificial Sequence
  Description of Artificial Sequence: Synthetic oligonucleotide
gaccucucaaccuuuuaau

SEQ ID NO: 454029 - RNA, 19 nt, Artificial Sequence
  Description of Artificial Sequence: Synthetic oligonucleotide
ucucaguuauuugcugcaa

SEQ ID NO: 454030 - RNA, 19 nt, Artificial Sequence
  Description of Artificial Sequence: Synthetic oligonucleotide
ggcucguguuuucacuagg

SEQ ID NO: 454031 - RNA, 19 nt, Artificial Sequence
  Description of Artificial Sequence: Synthetic oligonucleotide
auuguuugcugaagagccu

SEQ ID NO: 454032 - RNA, 19 nt, Artificial Sequence
  Description of Artificial Sequence: Synthetic oligonucleotide
ggaauguaucaccccaaca

SEQ ID NO: 454033 - RNA, 19 nt, Artificial Sequence
  Description of Artificial Sequence: Synthetic oligonucleotide
agcaaguuaguuggacaga

SEQ ID NO: 454034 - RNA, 19 nt, Artificial Sequence
  Description of Artificial Sequence: Synthetic oligonucleotide
agauaaccagagucaguuu

SEQ ID NO: 454035 - RNA, 19 nt, Artificial Sequence
  Description of Artificial Sequence: Synthetic oligonucleotide
gcauagccaaacuuacuca

SEQ ID NO: 454036 - RNA, 19 nt, Artificial Sequence
  Description of Artificial Sequence: Synthetic oligonucleotide
aaccagagucagccaagua

SEQ ID NO: 454037 - RNA, 19 nt, Artificial Sequence
  Description of Artificial Sequence: Synthetic oligonucleotide
uacuaccaugggguuaugu

SEQ ID NO: 454038 - RNA, 19 nt, Artificial Sequence
  Description of Artificial Sequence: Synthetic oligonucleotide
ccauggagcgcaaaugauc

SEQ ID NO: 454039 - RNA, 19 nt, Artificial Sequence
  Description of Artificial Sequence: Synthetic oligonucleotide
agccguuaucaaaauaaau

SEQ ID NO: 454040 - RNA, 19 nt, Artificial Sequence
  Description of Artificial Sequence: Synthetic oligonucleotide
uccggguauugccuaugaa

SEQ ID NO: 454041 - RNA, 19 nt, Artificial Sequence
  Description of Artificial Sequence: Synthetic oligonucleotide
ucacuuaguucaggcuggc

SEQ ID NO: 454042 - RNA, 19 nt, Artificial Sequence
  Description of Artificial Sequence: Synthetic oligonucleotide
ucuuggggacaaugucaga

SEQ ID NO: 454043 - RNA, 19 nt, Artificial Sequence
  Description of Artificial Sequence: Synthetic oligonucleotide
auggagcgcaaaugaucug

SEQ ID NO: 454044 - RNA, 19 nt, Artificial Sequence
  Description of Artificial Sequence: Synthetic oligonucleotide
aagccccggaaaaugcacu

SEQ ID NO: 454045 - RNA, 19 nt, Artificial Sequence
  Description of Artificial Sequence: Synthetic oligonucleotide
cugcauaagcugcggguuc

SEQ ID NO: 454046 - RNA, 19 nt, Artificial Sequence
  Description of Artificial Sequence: Synthetic oligonucleotide
auccggguauugccuauga

SEQ ID NO: 454047 - RNA, 19 nt, Artificial Sequence
  Description of Artificial Sequence: Synthetic oligonucleotide
agugugagaguuaggcaaa

SEQ ID NO: 454048 - RNA, 19 nt, Artificial Sequence
  Description of Artificial Sequence: Synthetic oligonucleotide
uucccuugauuuguuuguc

SEQ ID NO: 454049 - RNA, 19 nt, Artificial Sequence
  Description of Artificial Sequence: Synthetic oligonucleotide
guuugacaucgcugagagc

SEQ ID NO: 454050 - RNA, 19 nt, Artificial Sequence
  Description of Artificial Sequence: Synthetic oligonucleotide
ccggucucuuuuauaacag

SEQ ID NO: 454051 - RNA, 19 nt, Artificial Sequence
  Description of Artificial Sequence: Synthetic oligonucleotide
gcaagcaacuuacagaguu

SEQ ID NO: 454052 - RNA, 19 nt, Artificial Sequence
  Description of Artificial Sequence: Synthetic oligonucleotide
cagaccuugguugucagua

SEQ ID NO: 454053 - RNA, 19 nt, Artificial Sequence
  Description of Artificial Sequence: Synthetic oligonucleotide
uccuaccggucucuuuuau

SEQ ID NO: 454054 - RNA, 19 nt, Artificial Sequence
  Description of Artificial Sequence: Synthetic oligonucleotide
ugagagcgugucagggcuc

SEQ ID NO: 454055 - RNA, 19 nt, Artificial Sequence
  Description of Artificial Sequence: Synthetic oligonucleotide
caacaaugccugcauagcu

SEQ ID NO: 454056 - RNA, 19 nt, Artificial Sequence
  Description of Artificial Sequence: Synthetic oligonucleotide
cccuaaagagauaaccaga

SEQ ID NO: 454057 - RNA, 19 nt, Artificial Sequence
  Description of Artificial Sequence: Synthetic oligonucleotide
acagcacgacauucaacua

SEQ ID NO: 454058 - RNA, 19 nt, Artificial Sequence
  Description of Artificial Sequence: Synthetic oligonucleotide
gccguuaucaaaauaaauu

SEQ ID NO: 454059 - RNA, 19 nt, Artificial Sequence
  Description of Artificial Sequence: Synthetic oligonucleotide
cuucuucguaauagaacua

SEQ ID NO: 454060 - RNA, 19 nt, Artificial Sequence
  Description of Artificial Sequence: Synthetic oligonucleotide
gguaacuguacaagagaga

SEQ ID NO: 454061 - RNA, 19 nt, Artificial Sequence
  Description of Artificial Sequence: Synthetic oligonucleotide
cugagagcgugucagggcu

SEQ ID NO: 454062 - RNA, 19 nt, Artificial Sequence
  Description of Artificial Sequence: Synthetic oligonucleotide
cuaccaugggguuauguuu

SEQ ID NO: 454063 - RNA, 19 nt, Artificial Sequence
  Description of Artificial Sequence: Synthetic oligonucleotide
ccuaugaaugagagagcug

SEQ ID NO: 454064 - RNA, 19 nt, Artificial Sequence
  Description of Artificial Sequence: Synthetic oligonucleotide
uacuucccuugauuuguuu

SEQ ID NO: 454065 - RNA, 19 nt, Artificial Sequence
  Description of Artificial Sequence: Synthetic oligonucleotide
caaaccauggagcgcaaau

SEQ ID NO: 454066 - RNA, 19 nt, Artificial Sequence
  Description of Artificial Sequence: Synthetic oligonucleotide
caauugcugcguugauguc

SEQ ID NO: 454067 - RNA, 19 nt, Artificial Sequence
  Description of Artificial Sequence: Synthetic oligonucleotide
guugggugcauuguuugcu

SEQ ID NO: 454068 - RNA, 19 nt, Artificial Sequence
  Description of Artificial Sequence: Synthetic oligonucleotide
gagacagcucuacuuuuau

SEQ ID NO: 454069 - RNA, 19 nt, Artificial Sequence
  Description of Artificial Sequence: Synthetic oligonucleotide
accuagaaaugugcaguaa

SEQ ID NO: 454070 - RNA, 19 nt, Artificial Sequence
  Description of Artificial Sequence: Synthetic oligonucleotide
guugucaguaucacuuagu

SEQ ID NO: 454071 - RNA, 19 nt, Artificial Sequence
  Description of Artificial Sequence: Synthetic oligonucleotide
caaccugaccucucaaccu

SEQ ID NO: 454072 - RNA, 19 nt, Artificial Sequence
  Description of Artificial Sequence: Synthetic oligonucleotide
uuccuaccggucucuuuua

SEQ ID NO: 454073 - RNA, 19 nt, Artificial Sequence
  Description of Artificial Sequence: Synthetic oligonucleotide
aguaugucacugacccuaa

SEQ ID NO: 454074 - RNA, 19 nt, Artificial Sequence
  Description of Artificial Sequence: Synthetic oligonucleotide
gggcucguguuuucacuag

SEQ ID NO: 454075 - RNA, 19 nt, Artificial Sequence
  Description of Artificial Sequence: Synthetic oligonucleotide
gugugagaguuaggcaaac

SEQ ID NO: 454076 - RNA, 19 nt, Artificial Sequence
  Description of Artificial Sequence: Synthetic oligonucleotide
agcaaccguucaauugcug

SEQ ID NO: 454077 - RNA, 19 nt, Artificial Sequence
  Description of Artificial Sequence: Synthetic oligonucleotide
ugcaugcagcagccuuaac

SEQ ID NO: 454078 - RNA, 19 nt, Artificial Sequence
  Description of Artificial Sequence: Synthetic oligonucleotide
caacugugaaaacggcucu

SEQ ID NO: 454079 - RNA, 19 nt, Artificial Sequence
  Description of Artificial Sequence: Synthetic oligonucleotide
accccgacuuuuguacaug

SEQ ID NO: 454080 - RNA, 19 nt, Artificial Sequence
  Description of Artificial Sequence: Synthetic oligonucleotide
ccccgacuuuuguacaugc

SEQ ID NO: 454081 - RNA, 19 nt, Artificial Sequence
  Description of Artificial Sequence: Synthetic oligonucleotide
gcggguucucaguuauuug

SEQ ID NO: 454082 - RNA, 19 nt, Artificial Sequence
  Description of Artificial Sequence: Synthetic oligonucleotide
ugcacagucuggggucaac

SEQ ID NO: 454083 - RNA, 19 nt, Artificial Sequence
  Description of Artificial Sequence: Synthetic oligonucleotide
gccuaugaaugagagagcu

SEQ ID NO: 454084 - RNA, 19 nt, Artificial Sequence
  Description of Artificial Sequence: Synthetic oligonucleotide
ggucccgaaggaauguauc

SEQ ID NO: 454085 - RNA, 19 nt, Artificial Sequence
  Description of Artificial Sequence: Synthetic oligonucleotide
caaguggcucacucacuaa

SEQ ID NO: 454086 - RNA, 19 nt, Artificial Sequence
  Description of Artificial Sequence: Synthetic oligonucleotide
ucaccccaacagugugaga

SEQ ID NO: 454087 - RNA, 19 nt, Artificial Sequence
  Description of Artificial Sequence: Synthetic oligonucleotide
agcaagcaacuuacagagu

SEQ ID NO: 454088 - RNA, 19 nt, Artificial Sequence
  Description of Artificial Sequence: Synthetic oligonucleotide
acggaaacgucagcacuuu

SEQ ID NO: 454089 - RNA, 19 nt, Artificial Sequence
  Description of Artificial Sequence: Synthetic oligonucleotide
cacgagcacuaccuucaca

SEQ ID NO: 454090 - RNA, 19 nt, Artificial Sequence
  Description of Artificial Sequence: Synthetic oligonucleotide
uuacuaccaugggguuaug

SEQ ID NO: 454091 - RNA, 19 nt, Artificial Sequence
  Description of Artificial Sequence: Synthetic oligonucleotide
caucgcugagagcguguca

SEQ ID NO: 454092 - RNA, 19 nt, Artificial Sequence
  Description of Artificial Sequence: Synthetic oligonucleotide
gcaaguuaguuggacagau

SEQ ID NO: 454093 - RNA, 19 nt, Artificial Sequence
  Description of Artificial Sequence: Synthetic oligonucleotide
gccccggaaaaugcacugg

SEQ ID NO: 454094 - RNA, 19 nt, Artificial Sequence
  Description of Artificial Sequence: Synthetic oligonucleotide
auauggcaauuaagacgga

SEQ ID NO: 454095 - RNA, 19 nt, Artificial Sequence
  Description of Artificial Sequence: Synthetic oligonucleotide
augugaaugcugagauauu

SEQ ID NO: 454096 - RNA, 19 nt, Artificial Sequence
  Description of Artificial Sequence: Synthetic oligonucleotide
cccaauuagaaaaggugau

SEQ ID NO: 454097 - RNA, 19 nt, Artificial Sequence
  Description of Artificial Sequence: Synthetic oligonucleotide
ccguucaauugcugcguug

SEQ ID NO: 454098 - RNA, 19 nt, Artificial Sequence
  Description of Artificial Sequence: Synthetic oligonucleotide
cguucaauugcugcguuga

SEQ ID NO: 454099 - RNA, 19 nt, Artificial Sequence
  Description of Artificial Sequence: Synthetic oligonucleotide
ccggguauugccuaugaau

SEQ ID NO: 454100 - RNA, 19 nt, Artificial Sequence
  Description of Artificial Sequence: Synthetic oligonucleotide
ccggaaaaugcacuggagu

SEQ ID NO: 454101 - RNA, 19 nt, Artificial Sequence
  Description of Artificial Sequence: Synthetic oligonucleotide
ggcccaauccagaauagau

SEQ ID NO: 454102 - RNA, 19 nt, Artificial Sequence
  Description of Artificial Sequence: Synthetic oligonucleotide
ggucaaccugaccucucaa

SEQ ID NO: 454103 - RNA, 19 nt, Artificial Sequence
  Description of Artificial Sequence: Synthetic oligonucleotide
cuccaccccgacuuuugua

SEQ ID NO: 454104 - RNA, 19 nt, Artificial Sequence
  Description of Artificial Sequence: Synthetic oligonucleotide
cccggcucaguagugcccc

SEQ ID NO: 454105 - RNA, 19 nt, Artificial Sequence
  Description of Artificial Sequence: Synthetic oligonucleotide
cagcaaccguucaauugcu

SEQ ID NO: 454106 - RNA, 19 nt, Artificial Sequence
  Description of Artificial Sequence: Synthetic oligonucleotide
gcaguaauuuguacuguau

SEQ ID NO: 454107 - RNA, 19 nt, Artificial Sequence
  Description of Artificial Sequence: Synthetic oligonucleotide
gcgcaaaugaucugcuuuu

SEQ ID NO: 454108 - RNA, 19 nt, Artificial Sequence
  Description of Artificial Sequence: Synthetic oligonucleotide
gagcgcaaaugaucugcuu

SEQ ID NO: 454109 - RNA, 19 nt, Artificial Sequence
  Description of Artificial Sequence: Synthetic oligonucleotide
gcagguuauuuuaaagauu

SEQ ID NO: 454110 - RNA, 19 nt, Artificial Sequence
  Description of Artificial Sequence: Synthetic oligonucleotide
ggcucacucacuaaucauu

SEQ ID NO: 454111 - RNA, 19 nt, Artificial Sequence
  Description of Artificial Sequence: Synthetic oligonucleotide
cacaaaccauggagcgcaa

SEQ ID NO: 454112 - RNA, 19 nt, Artificial Sequence
  Description of Artificial Sequence: Synthetic oligonucleotide
guggcccggcucaguagug

SEQ ID NO: 454113 - RNA, 19 nt, Artificial Sequence
  Description of Artificial Sequence: Synthetic oligonucleotide
cagcaaauaggggauuauu

SEQ ID NO: 454114 - RNA, 19 nt, Artificial Sequence
  Description of Artificial Sequence: Synthetic oligonucleotide
gcucguguuuucacuaggu

SEQ ID NO: 454115 - RNA, 19 nt, Artificial Sequence
  Description of Artificial Sequence: Synthetic oligonucleotide
ggagcgcaaaugaucugcu

SEQ ID NO: 454116 - RNA, 19 nt, Artificial Sequence
  Description of Artificial Sequence: Synthetic oligonucleotide
caccccgacuuuuguacau

SEQ ID NO: 454117 - RNA, 19 nt, Artificial Sequence
  Description of Artificial Sequence: Synthetic oligonucleotide
ccuaccggucucuuuuaua

SEQ ID NO: 454118 - RNA, 19 nt, Artificial Sequence
  Description of Artificial Sequence: Synthetic oligonucleotide
cgacuuuuguacaugcuuu

SEQ ID NO: 454119 - RNA, 19 nt, Artificial Sequence
  Description of Artificial Sequence: Synthetic oligonucleotide
ccaccccgacuuuuguaca

SEQ ID NO: 454120 - RNA, 19 nt, Artificial Sequence
  Description of Artificial Sequence: Synthetic oligonucleotide
gcccaauccagaauagauu

SEQ ID NO: 454121 - RNA, 19 nt, Artificial Sequence
  Description of Artificial Sequence: Synthetic oligonucleotide
caccuauggggagcaggaa

SEQ ID NO: 454122 - RNA, 19 nt, Artificial Sequence
  Description of Artificial Sequence: Synthetic oligonucleotide
ccaugaaauaaagcagguu

SEQ ID NO: 454123 - RNA, 19 nt, Artificial Sequence
  Description of Artificial Sequence: Synthetic oligonucleotide
gcauagcucuaggguuuga

SEQ ID NO: 454124 - RNA, 19 nt, Artificial Sequence
  Description of Artificial Sequence: Synthetic oligonucleotide
cagcgaggucaggguucug

SEQ ID NO: 454125 - RNA, 19 nt, Artificial Sequence
  Description of Artificial Sequence: Synthetic oligonucleotide
ccagcaaauaggggauuau

SEQ ID NO: 454126 - RNA, 19 nt, Artificial Sequence
  Description of Artificial Sequence: Synthetic oligonucleotide
gcgugucagggcucugcau

SEQ ID NO: 454127 - RNA, 19 nt, Artificial Sequence
  Description of Artificial Sequence: Synthetic oligonucleotide
ccuccaccccgacuuuugu

SEQ ID NO: 454128 - RNA, 19 nt, Artificial Sequence
  Description of Artificial Sequence: Synthetic oligonucleotide
gcacgacauucaacuacuu

SEQ ID NO: 454129 - RNA, 19 nt, Artificial Sequence
  Description of Artificial Sequence: Synthetic oligonucleotide
aaaauuugcaaaauucccc

SEQ ID NO: 454130 - RNA, 19 nt, Artificial Sequence
  Description of Artificial Sequence: Synthetic oligonucleotide
auuauguucagauggacac

SEQ ID NO: 454131 - RNA, 19 nt, Artificial Sequence
  Description of Artificial Sequence: Synthetic oligonucleotide
uuaaaaucguauuauaaga

SEQ ID NO: 454132 - RNA, 19 nt, Artificial Sequence
  Description of Artificial Sequence: Synthetic oligonucleotide
uaauaaaucagcuuggaaa

SEQ ID NO: 454133 - RNA, 19 nt, Artificial Sequence
  Description of Artificial Sequence: Synthetic oligonucleotide
uguacacggagaaacaugg

SEQ ID NO: 454134 - RNA, 19 nt, Artificial Sequence
  Description of Artificial Sequence: Synthetic oligonucleotide
aauaccucaacauguuggg

SEQ ID NO: 454135 - RNA, 19 nt, Artificial Sequence
  Description of Artificial Sequence: Synthetic oligonucleotide
aagaauuaaaagcuagaug

SEQ ID NO: 454136 - RNA, 19 nt, Artificial Sequence
  Description of Artificial Sequence: Synthetic oligonucleotide
acuaguuugaaacagaauu

SEQ ID NO: 454137 - RNA, 19 nt, Artificial Sequence
  Description of Artificial Sequence: Synthetic oligonucleotide
uuauaacuaauaaaucagc

SEQ ID NO: 454138 - RNA, 19 nt, Artificial Sequence
  Description of Artificial Sequence: Synthetic oligonucleotide
uuuauugauuuucagugcu

SEQ ID NO: 454139 - RNA, 19 nt, Artificial Sequence
  Description of Artificial Sequence: Synthetic oligonucleotide
aauucaaaaucuucguggu

SEQ ID NO: 454140 - RNA, 19 nt, Artificial Sequence
  Description of Artificial Sequence: Synthetic oligonucleotide
guuauaacuaauaaaucag

SEQ ID NO: 454141 - RNA, 19 nt, Artificial Sequence
  Description of Artificial Sequence: Synthetic oligonucleotide
uaagcggcaacucggaagg

SEQ ID NO: 454142 - RNA, 19 nt, Artificial Sequence
  Description of Artificial Sequence: Synthetic oligonucleotide
aagaaagguaagcuugcac

SEQ ID NO: 454143 - RNA, 19 nt, Artificial Sequence
  Description of Artificial Sequence: Synthetic oligonucleotide
ucauacucagaaucgaucc

SEQ ID NO: 454144 - RNA, 19 nt, Artificial Sequence
  Description of Artificial Sequence: Synthetic oligonucleotide
aaaaucguauuauaagaau

SEQ ID NO: 454145 - RNA, 19 nt, Artificial Sequence
  Description of Artificial Sequence: Synthetic oligonucleotide
uaaaaucguauuauaagaa

SEQ ID NO: 454146 - RNA, 19 nt, Artificial Sequence
  Description of Artificial Sequence: Synthetic oligonucleotide
ucauucgccacaucaaagg

SEQ ID NO: 454147 - RNA, 19 nt, Artificial Sequence
  Description of Artificial Sequence: Synthetic oligonucleotide
aucgucagcacuuuggcuc

SEQ ID NO: 454148 - RNA, 19 nt, Artificial Sequence
  Description of Artificial Sequence: Synthetic oligonucleotide
ugcauauccacuuuauuga

SEQ ID NO: 454149 - RNA, 19 nt, Artificial Sequence
  Description of Artificial Sequence: Synthetic oligonucleotide
uaagcuugcacccucguga

SEQ ID NO: 454150 - RNA, 19 nt, Artificial Sequence
  Description of Artificial Sequence: Synthetic oligonucleotide
uguuguaagcggcaacucg

SEQ ID NO: 454151 - RNA, 19 nt, Artificial Sequence
  Description of Artificial Sequence: Synthetic oligonucleotide
gaauaccucaacauguugg

SEQ ID NO: 454152 - RNA, 19 nt, Artificial Sequence
  Description of Artificial Sequence: Synthetic oligonucleotide
aagaccagagauguguuac

SEQ ID NO: 454153 - RNA, 19 nt, Artificial Sequence
  Description of Artificial Sequence: Synthetic oligonucleotide
aagcuugugaugcacacca

SEQ ID NO: 454154 - RNA, 19 nt, Artificial Sequence
  Description of Artificial Sequence: Synthetic oligonucleotide
auaaccaucuuaauguagg

SEQ ID NO: 454155 - RNA, 19 nt, Artificial Sequence
  Description of Artificial Sequence: Synthetic oligonucleotide
uucgggauuucgaagaaug

SEQ ID NO: 454156 - RNA, 19 nt, Artificial Sequence
  Description of Artificial Sequence: Synthetic oligonucleotide
ucguauuauaagaauauua

SEQ ID NO: 454157 - RNA, 19 nt, Artificial Sequence
  Description of Artificial Sequence: Synthetic oligonucleotide
ugugcaaaccacgaaagcc

SEQ ID NO: 454158 - RNA, 19 nt, Artificial Sequence
  Description of Artificial Sequence: Synthetic oligonucleotide
cauggguuggcucauagag

SEQ ID NO: 454159 - RNA, 19 nt, Artificial Sequence
  Description of Artificial Sequence: Synthetic oligonucleotide
aaggauuuguaguacucca

SEQ ID NO: 454160 - RNA, 19 nt, Artificial Sequence
  Description of Artificial Sequence: Synthetic oligonucleotide
ucauacgaggcauccacgg

SEQ ID NO: 454161 - RNA, 19 nt, Artificial Sequence
  Description of Artificial Sequence: Synthetic oligonucleotide
aauccuaagacagaagcau

SEQ ID NO: 454162 - RNA, 19 nt, Artificial Sequence
  Description of Artificial Sequence: Synthetic oligonucleotide
auguguagcugucagaacu

SEQ ID NO: 454163 - RNA, 19 nt, Artificial Sequence
  Description of Artificial Sequence: Synthetic oligonucleotide
ucagaaucgaucccaguga

SEQ ID NO: 454164 - RNA, 19 nt, Artificial Sequence
  Description of Artificial Sequence: Synthetic oligonucleotide
gaagggaacuauuuccaag

SEQ ID NO: 454165 - RNA, 19 nt, Artificial Sequence
  Description of Artificial Sequence: Synthetic oligonucleotide
uucagauggacacaaccac

SEQ ID NO: 454166 - RNA, 19 nt, Artificial Sequence
  Description of Artificial Sequence: Synthetic oligonucleotide
auacgaggcauccacgggg

SEQ ID NO: 454167 - RNA, 19 nt, Artificial Sequence
  Description of Artificial Sequence: Synthetic oligonucleotide
agcuagaugauguauuacu

SEQ ID NO: 454168 - RNA, 19 nt, Artificial Sequence
  Description of Artificial Sequence: Synthetic oligonucleotide
agugaagccuuuuauuucu

SEQ ID NO: 454169 - RNA, 19 nt, Artificial Sequence
  Description of Artificial Sequence: Synthetic oligonucleotide
aaucguauuauaagaauau

SEQ ID NO: 454170 - RNA, 19 nt, Artificial Sequence
  Description of Artificial Sequence: Synthetic oligonucleotide
uucauucgccacaucaaag

SEQ ID NO: 454171 - RNA, 19 nt, Artificial Sequence
  Description of Artificial Sequence: Synthetic oligonucleotide
auuucgaagaauggcuacc

SEQ ID NO: 454172 - RNA, 19 nt, Artificial Sequence
  Description of Artificial Sequence: Synthetic oligonucleotide
aguaaggcgguacugguca

SEQ ID NO: 454173 - RNA, 19 nt, Artificial Sequence
  Description of Artificial Sequence: Synthetic oligonucleotide
auguauuacugguuauaac

SEQ ID NO: 454174 - RNA, 19 nt, Artificial Sequence
  Description of Artificial Sequence: Synthetic oligonucleotide
uguacagccguccagccuc

SEQ ID NO: 454175 - RNA, 19 nt, Artificial Sequence
  Description of Artificial Sequence: Synthetic oligonucleotide
gacgaugucccguuccugg

SEQ ID NO: 454176 - RNA, 19 nt, Artificial Sequence
  Description of Artificial Sequence: Synthetic oligonucleotide
aacuauaggcacugacaag

SEQ ID NO: 454177 - RNA, 19 nt, Artificial Sequence
  Description of Artificial Sequence: Synthetic oligonucleotide
ugcaagaauaccucaacau

SEQ ID NO: 454178 - RNA, 19 nt, Artificial Sequence
  Description of Artificial Sequence: Synthetic oligonucleotide
aaugcuucggcaucaguuu

SEQ ID NO: 454179 - RNA, 19 nt, Artificial Sequence
  Description of Artificial Sequence: Synthetic oligonucleotide
aaaucguauuauaagaaua

SEQ ID NO: 454180 - RNA, 19 nt, Artificial Sequence
  Description of Artificial Sequence: Synthetic oligonucleotide
gaacuauaggcacugacaa

SEQ ID NO: 454181 - RNA, 19 nt, Artificial Sequence
  Description of Artificial Sequence: Synthetic oligonucleotide
uaaugcuucggcaucaguu

SEQ ID NO: 454182 - RNA, 19 nt, Artificial Sequence
  Description of Artificial Sequence: Synthetic oligonucleotide
cucagaaucgaucccagug

SEQ ID NO: 454183 - RNA, 19 nt, Artificial Sequence
  Description of Artificial Sequence: Synthetic oligonucleotide
aaaacugugcaaaccacga

SEQ ID NO: 454184 - RNA, 19 nt, Artificial Sequence
  Description of Artificial Sequence: Synthetic oligonucleotide
uacacggagaaacaugguc

SEQ ID NO: 454185 - RNA, 19 nt, Artificial Sequence
  Description of Artificial Sequence: Synthetic oligonucleotide
ucacgugccaguuugcgca

SEQ ID NO: 454186 - RNA, 19 nt, Artificial Sequence
  Description of Artificial Sequence: Synthetic oligonucleotide
acagauugcaagaauaccu

SEQ ID NO: 454187 - RNA, 19 nt, Artificial Sequence
  Description of Artificial Sequence: Synthetic oligonucleotide
aaaggagucgcccaaccuu

SEQ ID NO: 454188 - RNA, 19 nt, Artificial Sequence
  Description of Artificial Sequence: Synthetic oligonucleotide
uucauacgaggcauccacg

SEQ ID NO: 454189 - RNA, 19 nt, Artificial Sequence
  Description of Artificial Sequence: Synthetic oligonucleotide
caaaccacgaaagccaacc

SEQ ID NO: 454190 - RNA, 19 nt, Artificial Sequence
  Description of Artificial Sequence: Synthetic oligonucleotide
uucagcacuuaacacagau

SEQ ID NO: 454191 - RNA, 19 nt, Artificial Sequence
  Description of Artificial Sequence: Synthetic oligonucleotide
uaaggauuuguaguacucc

SEQ ID NO: 454192 - RNA, 19 nt, Artificial Sequence
  Description of Artificial Sequence: Synthetic oligonucleotide
ucauaguaauccauccgcu

SEQ ID NO: 454193 - RNA, 19 nt, Artificial Sequence
  Description of Artificial Sequence: Synthetic oligonucleotide
uauuacugguuauaacuaa

SEQ ID NO: 454194 - RNA, 19 nt, Artificial Sequence
  Description of Artificial Sequence: Synthetic oligonucleotide
agagcgaaggcuguacagc

SEQ ID NO: 454195 - RNA, 19 nt, Artificial Sequence
  Description of Artificial Sequence: Synthetic oligonucleotide
guaaauucgguccaggacu

SEQ ID NO: 454196 - RNA, 19 nt, Artificial Sequence
  Description of Artificial Sequence: Synthetic oligonucleotide
ucgggauuucgaagaaugg

SEQ ID NO: 454197 - RNA, 19 nt, Artificial Sequence
  Description of Artificial Sequence: Synthetic oligonucleotide
ugacaaguugaugacaccu

SEQ ID NO: 454198 - RNA, 19 nt, Artificial Sequence
  Description of Artificial Sequence: Synthetic oligonucleotide
guaagcggcaacucggaag

SEQ ID NO: 454199 - RNA, 19 nt, Artificial Sequence
  Description of Artificial Sequence: Synthetic oligonucleotide
uccuaagacagaagcauaa

SEQ ID NO: 454200 - RNA, 19 nt, Artificial Sequence
  Description of Artificial Sequence: Synthetic oligonucleotide
gagaccuugacggauguug

SEQ ID NO: 454201 - RNA, 19 nt, Artificial Sequence
  Description of Artificial Sequence: Synthetic oligonucleotide
ggagaaauaaagcuuguga

SEQ ID NO: 454202 - RNA, 19 nt, Artificial Sequence
  Description of Artificial Sequence: Synthetic oligonucleotide
aagcuagaugauguauuac

SEQ ID NO: 454203 - RNA, 19 nt, Artificial Sequence
  Description of Artificial Sequence: Synthetic oligonucleotide
ucaccauccaaaguguagc

SEQ ID NO: 454204 - RNA, 19 nt, Artificial Sequence
  Description of Artificial Sequence: Synthetic oligonucleotide
uggguuucgcaacugaaau

SEQ ID NO: 454205 - RNA, 19 nt, Artificial Sequence
  Description of Artificial Sequence: Synthetic oligonucleotide
aacuauuuccaaggugauc

SEQ ID NO: 454206 - RNA, 19 nt, Artificial Sequence
  Description of Artificial Sequence: Synthetic oligonucleotide
gauuucgaagaauggcuac

SEQ ID NO: 454207 - RNA, 19 nt, Artificial Sequence
  Description of Artificial Sequence: Synthetic oligonucleotide
ugcaguuuauucucuggca

SEQ ID NO: 454208 - RNA, 19 nt, Artificial Sequence
  Description of Artificial Sequence: Synthetic oligonucleotide
cuccaaucagccaaucccc

SEQ ID NO: 454209 - RNA, 19 nt, Artificial Sequence
  Description of Artificial Sequence: Synthetic oligonucleotide
agucguugacaucacagga

SEQ ID NO: 454210 - RNA, 19 nt, Artificial Sequence
  Description of Artificial Sequence: Synthetic oligonucleotide
uuaauguaggggugguucu

SEQ ID NO: 454211 - RNA, 19 nt, Artificial Sequence
  Description of Artificial Sequence: Synthetic oligonucleotide
gguuucgcaacugaaaugc

SEQ ID NO: 454212 - RNA, 19 nt, Artificial Sequence
  Description of Artificial Sequence: Synthetic oligonucleotide
guagcagggaaugccaugg

SEQ ID NO: 454213 - RNA, 19 nt, Artificial Sequence
  Description of Artificial Sequence: Synthetic oligonucleotide
cauucgccacaucaaaggg

SEQ ID NO: 454214 - RNA, 19 nt, Artificial Sequence
  Description of Artificial Sequence: Synthetic oligonucleotide
caacauguuggguugcaag

SEQ ID NO: 454215 - RNA, 19 nt, Artificial Sequence
  Description of Artificial Sequence: Synthetic oligonucleotide
ggaacuauuuccaagguga

SEQ ID NO: 454216 - RNA, 19 nt, Artificial Sequence
  Description of Artificial Sequence: Synthetic oligonucleotide
uuucgcaacugaaaugcaa

SEQ ID NO: 454217 - RNA, 19 nt, Artificial Sequence
  Description of Artificial Sequence: Synthetic oligonucleotide
guuacacuaguuugaaaca

SEQ ID NO: 454218 - RNA, 19 nt, Artificial Sequence
  Description of Artificial Sequence: Synthetic oligonucleotide
cuucguggugcucagaguc

SEQ ID NO: 454219 - RNA, 19 nt, Artificial Sequence
  Description of Artificial Sequence: Synthetic oligonucleotide
cguguaaggagaaauaaag

SEQ ID NO: 454220 - RNA, 19 nt, Artificial Sequence
  Description of Artificial Sequence: Synthetic oligonucleotide
cauaguaauccauccgcug

SEQ ID NO: 454221 - RNA, 19 nt, Artificial Sequence
  Description of Artificial Sequence: Synthetic oligonucleotide
aucuccuccaaucagccaa

SEQ ID NO: 454222 - RNA, 19 nt, Artificial Sequence
  Description of Artificial Sequence: Synthetic oligonucleotide
cuaaggauuuguaguacuc

SEQ ID NO: 454223 - RNA, 19 nt, Artificial Sequence
  Description of Artificial Sequence: Synthetic oligonucleotide
agugccaugcucacggucg

SEQ ID NO: 454224 - RNA, 19 nt, Artificial Sequence
  Description of Artificial Sequence: Synthetic oligonucleotide
uccggaugaggcaugccag

SEQ ID NO: 454225 - RNA, 19 nt, Artificial Sequence
  Description of Artificial Sequence: Synthetic oligonucleotide
caaaguguagcagggaaug

SEQ ID NO: 454226 - RNA, 19 nt, Artificial Sequence
  Description of Artificial Sequence: Synthetic oligonucleotide
cugaaaugcaaagacagca

SEQ ID NO: 454227 - RNA, 19 nt, Artificial Sequence
  Description of Artificial Sequence: Synthetic oligonucleotide
agaauaccucaacauguug

SEQ ID NO: 454228 - RNA, 19 nt, Artificial Sequence
  Description of Artificial Sequence: Synthetic oligonucleotide
uggguguccugcauuagca

SEQ ID NO: 454229 - RNA, 19 nt, Artificial Sequence
  Description of Artificial Sequence: Synthetic oligonucleotide
ugaagccuuuuauuucucc

SEQ ID NO: 454230 - RNA, 19 nt, Artificial Sequence
  Description of Artificial Sequence: Synthetic oligonucleotide
cagauugcaagaauaccuc

SEQ ID NO: 454231 - RNA, 19 nt, Artificial Sequence
  Description of Artificial Sequence: Synthetic oligonucleotide
uggguugcaagggagggag

SEQ ID NO: 454232 - RNA, 19 nt, Artificial Sequence
  Description of Artificial Sequence: Synthetic oligonucleotide
ucgcaacugaaaugcaaag

SEQ ID NO: 454233 - RNA, 19 nt, Artificial Sequence
  Description of Artificial Sequence: Synthetic oligonucleotide
ucaaagggacaucaucauc

SEQ ID NO: 454234 - RNA, 19 nt, Artificial Sequence
  Description of Artificial Sequence: Synthetic oligonucleotide
cauaggagauggaaagaug

SEQ ID NO: 454235 - RNA, 19 nt, Artificial Sequence
  Description of Artificial Sequence: Synthetic oligonucleotide
gagcgaaggcuguacagcc

SEQ ID NO: 454236 - RNA, 19 nt, Artificial Sequence
  Description of Artificial Sequence: Synthetic oligonucleotide
caucccucuguucacagac

SEQ ID NO: 454237 - RNA, 19 nt, Artificial Sequence
  Description of Artificial Sequence: Synthetic oligonucleotide
ucgugaaucugccuggcau

SEQ ID NO: 454238 - RNA, 19 nt, Artificial Sequence
  Description of Artificial Sequence: Synthetic oligonucleotide
agacacauuaagaccagag

SEQ ID NO: 454239 - RNA, 19 nt, Artificial Sequence
  Description of Artificial Sequence: Synthetic oligonucleotide
acauguuggguugcaaggg

SEQ ID NO: 454240 - RNA, 19 nt, Artificial Sequence
  Description of Artificial Sequence: Synthetic oligonucleotide
acagucguugacaucacag

SEQ ID NO: 454241 - RNA, 19 nt, Artificial Sequence
  Description of Artificial Sequence: Synthetic oligonucleotide
ggucuagccaaguuuagug

SEQ ID NO: 454242 - RNA, 19 nt, Artificial Sequence
  Description of Artificial Sequence: Synthetic oligonucleotide
agauugcaagaauaccuca

SEQ ID NO: 454243 - RNA, 19 nt, Artificial Sequence
  Description of Artificial Sequence: Synthetic oligonucleotide
aaugccacuggaccucggu

SEQ ID NO: 454244 - RNA, 19 nt, Artificial Sequence
  Description of Artificial Sequence: Synthetic oligonucleotide
gauguauuacugguuauaa

SEQ ID NO: 454245 - RNA, 19 nt, Artificial Sequence
  Description of Artificial Sequence: Synthetic oligonucleotide
aggaguaaggcgguacugg

SEQ ID NO: 454246 - RNA, 19 nt, Artificial Sequence
  Description of Artificial Sequence: Synthetic oligonucleotide
cagcacuuuggcuccaugg

SEQ ID NO: 454247 - RNA, 19 nt, Artificial Sequence
  Description of Artificial Sequence: Synthetic oligonucleotide
uucgcaaccuccgcaaugc

SEQ ID NO: 454248 - RNA, 19 nt, Artificial Sequence
  Description of Artificial Sequence: Synthetic oligonucleotide
guagccccucucuagaagc

SEQ ID NO: 454249 - RNA, 19 nt, Artificial Sequence
  Description of Artificial Sequence: Synthetic oligonucleotide
gguuggcucauagagaucc

SEQ ID NO: 454250 - RNA, 19 nt, Artificial Sequence
  Description of Artificial Sequence: Synthetic oligonucleotide
uccccuuguuccauaacca

SEQ ID NO: 454251 - RNA, 19 nt, Artificial Sequence
  Description of Artificial Sequence: Synthetic oligonucleotide
aaguacucccucucucuca

SEQ ID NO: 454252 - RNA, 19 nt, Artificial Sequence
  Description of Artificial Sequence: Synthetic oligonucleotide
aaaccacgaaagccaaccu

SEQ ID NO: 454253 - RNA, 19 nt, Artificial Sequence
  Description of Artificial Sequence: Synthetic oligonucleotide
uuauuucuccugcccgugc

SEQ ID NO: 454254 - RNA, 19 nt, Artificial Sequence
  Description of Artificial Sequence: Synthetic oligonucleotide
agcacuuaacacagauugc

SEQ ID NO: 454255 - RNA, 19 nt, Artificial Sequence
  Description of Artificial Sequence: Synthetic oligonucleotide
ucgguccaggacuugaaga

SEQ ID NO: 454256 - RNA, 19 nt, Artificial Sequence
  Description of Artificial Sequence: Synthetic oligonucleotide
cagcauacaucauaggaga

SEQ ID NO: 454257 - RNA, 19 nt, Artificial Sequence
  Description of Artificial Sequence: Synthetic oligonucleotide
uuauugagaccuugacgga

SEQ ID NO: 454258 - RNA, 19 nt, Artificial Sequence
  Description of Artificial Sequence: Synthetic oligonucleotide
ugcacccucgugaaucugc

SEQ ID NO: 454259 - RNA, 19 nt, Artificial Sequence
  Description of Artificial Sequence: Synthetic oligonucleotide
aaagaaagguaagcuugca

SEQ ID NO: 454260 - RNA, 19 nt, Artificial Sequence
  Description of Artificial Sequence: Synthetic oligonucleotide
cugcaaacagcuucgcaac

SEQ ID NO: 454261 - RNA, 19 nt, Artificial Sequence
  Description of Artificial Sequence: Synthetic oligonucleotide
uucgguccaggacuugaag

SEQ ID NO: 454262 - RNA, 19 nt, Artificial Sequence
  Description of Artificial Sequence: Synthetic oligonucleotide
agcucggcaggaguaaggc

SEQ ID NO: 454263 - RNA, 19 nt, Artificial Sequence
  Description of Artificial Sequence: Synthetic oligonucleotide
aauucgguccaggacuuga

SEQ ID NO: 454264 - RNA, 19 nt, Artificial Sequence
  Description of Artificial Sequence: Synthetic oligonucleotide
guagagccccuuaacaucc

SEQ ID NO: 454265 - RNA, 19 nt, Artificial Sequence
  Description of Artificial Sequence: Synthetic oligonucleotide
uccuccaaucagccaaucc

SEQ ID NO: 454266 - RNA, 19 nt, Artificial Sequence
  Description of Artificial Sequence: Synthetic oligonucleotide
aaacugugcaaaccacgaa

SEQ ID NO: 454267 - RNA, 19 nt, Artificial Sequence
  Description of Artificial Sequence: Synthetic oligonucleotide
cacagauugcaagaauacc

SEQ ID NO: 454268 - RNA, 19 nt, Artificial Sequence
  Description of Artificial Sequence: Synthetic oligonucleotide
gucucguccaacaauauaa

SEQ ID NO: 454269 - RNA, 19 nt, Artificial Sequence
  Description of Artificial Sequence: Synthetic oligonucleotide
cagaacuauaggcacugac

SEQ ID NO: 454270 - RNA, 19 nt, Artificial Sequence
  Description of Artificial Sequence: Synthetic oligonucleotide
uuccuucacuucauacgag

SEQ ID NO: 454271 - RNA, 19 nt, Artificial Sequence
  Description of Artificial Sequence: Synthetic oligonucleotide
caggaauuauguucagaug

SEQ ID NO: 454272 - RNA, 19 nt, Artificial Sequence
  Description of Artificial Sequence: Synthetic oligonucleotide
uaaauucgguccaggacuu

SEQ ID NO: 454273 - RNA, 19 nt, Artificial Sequence
  Description of Artificial Sequence: Synthetic oligonucleotide
cauacgaggcauccacggg

SEQ ID NO: 454274 - RNA, 19 nt, Artificial Sequence
  Description of Artificial Sequence: Synthetic oligonucleotide
uuguaagcggcaacucgga

SEQ ID NO: 454275 - RNA, 19 nt, Artificial Sequence
  Description of Artificial Sequence: Synthetic oligonucleotide
caggaguccguuuucagca

SEQ ID NO: 454276 - RNA, 19 nt, Artificial Sequence
  Description of Artificial Sequence: Synthetic oligonucleotide
aucaaagggacaucaucau

SEQ ID NO: 454277 - RNA, 19 nt, Artificial Sequence
  Description of Artificial Sequence: Synthetic oligonucleotide
aaggcuguacagccgucca

SEQ ID NO: 454278 - RNA, 19 nt, Artificial Sequence
  Description of Artificial Sequence: Synthetic oligonucleotide
uacccggcggcccucauac

SEQ ID NO: 454279 - RNA, 19 nt, Artificial Sequence
  Description of Artificial Sequence: Synthetic oligonucleotide
uguggacuggguuucgcaa

SEQ ID NO: 454280 - RNA, 19 nt, Artificial Sequence
  Description of Artificial Sequence: Synthetic oligonucleotide
ugcgauccugcguguaagg

SEQ ID NO: 454281 - RNA, 19 nt, Artificial Sequence
  Description of Artificial Sequence: Synthetic oligonucleotide
ugcgcauccguguuccuga

SEQ ID NO: 454282 - RNA, 19 nt, Artificial Sequence
  Description of Artificial Sequence: Synthetic oligonucleotide
aguuugcgcauccguguuc

SEQ ID NO: 454283 - RNA, 19 nt, Artificial Sequence
  Description of Artificial Sequence: Synthetic oligonucleotide
gauccugcguguaaggaga

SEQ ID NO: 454284 - RNA, 19 nt, Artificial Sequence
  Description of Artificial Sequence: Synthetic oligonucleotide
aucagagcgaaggcuguac

SEQ ID NO: 454285 - RNA, 19 nt, Artificial Sequence
  Description of Artificial Sequence: Synthetic oligonucleotide
agccaugaagccuucugga

SEQ ID NO: 454286 - RNA, 19 nt, Artificial Sequence
  Description of Artificial Sequence: Synthetic oligonucleotide
uuauguucagauggacaca

SEQ ID NO: 454287 - RNA, 19 nt, Artificial Sequence
  Description of Artificial Sequence: Synthetic oligonucleotide
gagaaaugcugucggugac

SEQ ID NO: 454288 - RNA, 19 nt, Artificial Sequence
  Description of Artificial Sequence: Synthetic oligonucleotide
cacgaaagccaaccucucg

SEQ ID NO: 454289 - RNA, 19 nt, Artificial Sequence
  Description of Artificial Sequence: Synthetic oligonucleotide
gccauggcaaaccagguac

SEQ ID NO: 454290 - RNA, 19 nt, Artificial Sequence
  Description of Artificial Sequence: Synthetic oligonucleotide
uggcucauagagauccuuc

SEQ ID NO: 454291 - RNA, 19 nt, Artificial Sequence
  Description of Artificial Sequence: Synthetic oligonucleotide
uacgaggcauccacgggga

SEQ ID NO: 454292 - RNA, 19 nt, Artificial Sequence
  Description of Artificial Sequence: Synthetic oligonucleotide
uggucuguuuucaggaauu

SEQ ID NO: 454293 - RNA, 19 nt, Artificial Sequence
  Description of Artificial Sequence: Synthetic oligonucleotide
gcauuagcagagcaugucc

SEQ ID NO: 454294 - RNA, 19 nt, Artificial Sequence
  Description of Artificial Sequence: Synthetic oligonucleotide
aagaauaccucaacauguu

SEQ ID NO: 454295 - RNA, 19 nt, Artificial Sequence
  Description of Artificial Sequence: Synthetic oligonucleotide
agcauguccguuguggacu

SEQ ID NO: 454296 - RNA, 19 nt, Artificial Sequence
  Description of Artificial Sequence: Synthetic oligonucleotide
aaauuggcuccugccacca

SEQ ID NO: 454297 - RNA, 19 nt, Artificial Sequence
  Description of Artificial Sequence: Synthetic oligonucleotide
uucguggugcucagaguca

SEQ ID NO: 454298 - RNA, 19 nt, Artificial Sequence
  Description of Artificial Sequence: Synthetic oligonucleotide
uccguguuccugaaaugaa

SEQ ID NO: 454299 - RNA, 19 nt, Artificial Sequence
  Description of Artificial Sequence: Synthetic oligonucleotide
uccguuguggacuggguuu

SEQ ID NO: 454300 - RNA, 19 nt, Artificial Sequence
  Description of Artificial Sequence: Synthetic oligonucleotide
caggguucaagacacccuc

SEQ ID NO: 454301 - RNA, 19 nt, Artificial Sequence
  Description of Artificial Sequence: Synthetic oligonucleotide
agccccuuaacaucccucu

SEQ ID NO: 454302 - RNA, 19 nt, Artificial Sequence
  Description of Artificial Sequence: Synthetic oligonucleotide
cagagcgaaggcuguacag

SEQ ID NO: 454303 - RNA, 19 nt, Artificial Sequence
  Description of Artificial Sequence: Synthetic oligonucleotide
gauugcaagaauaccucaa

SEQ ID NO: 454304 - RNA, 19 nt, Artificial Sequence
  Description of Artificial Sequence: Synthetic oligonucleotide
ucauuccaguaaauucggu

SEQ ID NO: 454305 - RNA, 19 nt, Artificial Sequence
  Description of Artificial Sequence: Synthetic oligonucleotide
cucggaagggaacuauuuc

SEQ ID NO: 454306 - RNA, 19 nt, Artificial Sequence
  Description of Artificial Sequence: Synthetic oligonucleotide
gcaguuuauucucuggcac

SEQ ID NO: 454307 - RNA, 19 nt, Artificial Sequence
  Description of Artificial Sequence: Synthetic oligonucleotide
guaagcuugcacccucgug

SEQ ID NO: 454308 - RNA, 19 nt, Artificial Sequence
  Description of Artificial Sequence: Synthetic oligonucleotide
cuugacggauguugucacc

SEQ ID NO: 454309 - RNA, 19 nt, Artificial Sequence
  Description of Artificial Sequence: Synthetic oligonucleotide
auugagaccuugacggaug

SEQ ID NO: 454310 - RNA, 19 nt, Artificial Sequence
  Description of Artificial Sequence: Synthetic oligonucleotide
cacuucauacgaggcaucc

SEQ ID NO: 454311 - RNA, 19 nt, Artificial Sequence
  Description of Artificial Sequence: Synthetic oligonucleotide
uggcccagcauacaucaua

SEQ ID NO: 454312 - RNA, 19 nt, Artificial Sequence
  Description of Artificial Sequence: Synthetic oligonucleotide
agggaacuauuuccaaggu

SEQ ID NO: 454313 - RNA, 19 nt, Artificial Sequence
  Description of Artificial Sequence: Synthetic oligonucleotide
gcuagaugauguauuacug

SEQ ID NO: 454314 - RNA, 19 nt, Artificial Sequence
  Description of Artificial Sequence: Synthetic oligonucleotide
guaguacuccaccaacaca

SEQ ID NO: 454315 - RNA, 19 nt, Artificial Sequence
  Description of Artificial Sequence: Synthetic oligonucleotide
aggcaugccagccgggucu

SEQ ID NO: 454316 - RNA, 19 nt, Artificial Sequence
  Description of Artificial Sequence: Synthetic oligonucleotide
cauccuucguccagccacc

SEQ ID NO: 454317 - RNA, 19 nt, Artificial Sequence
  Description of Artificial Sequence: Synthetic oligonucleotide
guaaguggaaaagacacau

SEQ ID NO: 454318 - RNA, 19 nt, Artificial Sequence
  Description of Artificial Sequence: Synthetic oligonucleotide
accuugacggauguuguca

SEQ ID NO: 454319 - RNA, 19 nt, Artificial Sequence
  Description of Artificial Sequence: Synthetic oligonucleotide
cucgguuggcccagcauac

SEQ ID NO: 454320 - RNA, 19 nt, Artificial Sequence
  Description of Artificial Sequence: Synthetic oligonucleotide
cauuaagaccagagaugug

SEQ ID NO: 454321 - RNA, 19 nt, Artificial Sequence
  Description of Artificial Sequence: Synthetic oligonucleotide
agaccagagauguguuaca

SEQ ID NO: 454322 - RNA, 19 nt, Artificial Sequence
  Description of Artificial Sequence: Synthetic oligonucleotide
gggaacuauuuccaaggug

SEQ ID NO: 454323 - RNA, 19 nt, Artificial Sequence
  Description of Artificial Sequence: Synthetic oligonucleotide
cucuaaggauuuguaguac

SEQ ID NO: 454324 - RNA, 19 nt, Artificial Sequence
  Description of Artificial Sequence: Synthetic oligonucleotide
uuguuccccacugucuggc

SEQ ID NO: 454325 - RNA, 19 nt, Artificial Sequence
  Description of Artificial Sequence: Synthetic oligonucleotide
uugcgauccugcguguaag

SEQ ID NO: 454326 - RNA, 19 nt, Artificial Sequence
  Description of Artificial Sequence: Synthetic oligonucleotide
cuucgcaaccuccgcaaug

SEQ ID NO: 454327 - RNA, 19 nt, Artificial Sequence
  Description of Artificial Sequence: Synthetic oligonucleotide
ucuucguggugcucagagu

SEQ ID NO: 454328 - RNA, 19 nt, Artificial Sequence
  Description of Artificial Sequence: Synthetic oligonucleotide
ucgcccaaccuucugccaa

SEQ ID NO: 454329 - RNA, 19 nt, Artificial Sequence
  Description of Artificial Sequence: Synthetic oligonucleotide
ucuuuccggugcucgaaaa

SEQ ID NO: 454330 - RNA, 19 nt, Artificial Sequence
  Description of Artificial Sequence: Synthetic oligonucleotide
gucggugacugcguggucc

SEQ ID NO: 454331 - RNA, 19 nt, Artificial Sequence
  Description of Artificial Sequence: Synthetic oligonucleotide
agaaaugcugucggugacu

SEQ ID NO: 454332 - RNA, 19 nt, Artificial Sequence
  Description of Artificial Sequence: Synthetic oligonucleotide
ugucaccauccaaagugua

SEQ ID NO: 454333 - RNA, 19 nt, Artificial Sequence
  Description of Artificial Sequence: Synthetic oligonucleotide
ccaaacaaggucuagccaa

SEQ ID NO: 454334 - RNA, 19 nt, Artificial Sequence
  Description of Artificial Sequence: Synthetic oligonucleotide
ucgcaaccuccgcaaugcg

SEQ ID NO: 454335 - RNA, 19 nt, Artificial Sequence
  Description of Artificial Sequence: Synthetic oligonucleotide
aaccuccgcaaugcgucgg

SEQ ID NO: 454336 - RNA, 19 nt, Artificial Sequence
  Description of Artificial Sequence: Synthetic oligonucleotide
caccugaccucucuuguuc

SEQ ID NO: 454337 - RNA, 19 nt, Artificial Sequence
  Description of Artificial Sequence: Synthetic oligonucleotide
gcacuuaacacagauugca

SEQ ID NO: 454338 - RNA, 19 nt, Artificial Sequence
  Description of Artificial Sequence: Synthetic oligonucleotide
aucguauuauaagaauauu

SEQ ID NO: 454339 - RNA, 19 nt, Artificial Sequence
  Description of Artificial Sequence: Synthetic oligonucleotide
cauccguguuccugaaaug

SEQ ID NO: 454340 - RNA, 19 nt, Artificial Sequence
  Description of Artificial Sequence: Synthetic oligonucleotide
auguuggguugcaagggag

SEQ ID NO: 454341 - RNA, 19 nt, Artificial Sequence
  Description of Artificial Sequence: Synthetic oligonucleotide
uaaggcgguacuggucaag

SEQ ID NO: 454342 - RNA, 19 nt, Artificial Sequence
  Description of Artificial Sequence: Synthetic oligonucleotide
agcuucgcaaccuccgcaa

SEQ ID NO: 454343 - RNA, 19 nt, Artificial Sequence
  Description of Artificial Sequence: Synthetic oligonucleotide
ccuucguccagccaccaag

SEQ ID NO: 454344 - RNA, 19 nt, Artificial Sequence
  Description of Artificial Sequence: Synthetic oligonucleotide
cauccgugcucugcaaugc

SEQ ID NO: 454345 - RNA, 19 nt, Artificial Sequence
  Description of Artificial Sequence: Synthetic oligonucleotide
aggacggggcgccgguagc

SEQ ID NO: 454346 - RNA, 19 nt, Artificial Sequence
  Description of Artificial Sequence: Synthetic oligonucleotide
guccguuuucagcaccagc

SEQ ID NO: 454347 - RNA, 19 nt, Artificial Sequence
  Description of Artificial Sequence: Synthetic oligonucleotide
agaaucgaucccagugaag

SEQ ID NO: 454348 - RNA, 19 nt, Artificial Sequence
  Description of Artificial Sequence: Synthetic oligonucleotide
gccaucgucagcacuuugg

SEQ ID NO: 454349 - RNA, 19 nt, Artificial Sequence
  Description of Artificial Sequence: Synthetic oligonucleotide
cagaccgguccugucagcc

SEQ ID NO: 454350 - RNA, 19 nt, Artificial Sequence
  Description of Artificial Sequence: Synthetic oligonucleotide
ggguuucgcaacugaaaug

SEQ ID NO: 454351 - RNA, 19 nt, Artificial Sequence
  Description of Artificial Sequence: Synthetic oligonucleotide
aaauucgguccaggacuug

SEQ ID NO: 454352 - RNA, 19 nt, Artificial Sequence
  Description of Artificial Sequence: Synthetic oligonucleotide
uuagcagagcauguccguu

SEQ ID NO: 454353 - RNA, 19 nt, Artificial Sequence
  Description of Artificial Sequence: Synthetic oligonucleotide
uagagccccuuaacauccc

SEQ ID NO: 454354 - RNA, 19 nt, Artificial Sequence
  Description of Artificial Sequence: Synthetic oligonucleotide
uugcgcauccguguuccug

SEQ ID NO: 454355 - RNA, 19 nt, Artificial Sequence
  Description of Artificial Sequence: Synthetic oligonucleotide
ucgaucccagugaagccuu

SEQ ID NO: 454356 - RNA, 19 nt, Artificial Sequence
  Description of Artificial Sequence: Synthetic oligonucleotide
ggcacaacgcuccucuuuc

SEQ ID NO: 454357 - RNA, 19 nt, Artificial Sequence
  Description of Artificial Sequence: Synthetic oligonucleotide
gaccuugacggauguuguc

SEQ ID NO: 454358 - RNA, 19 nt, Artificial Sequence
  Description of Artificial Sequence: Synthetic oligonucleotide
ugaggcaugccagccgggu

SEQ ID NO: 454359 - RNA, 19 nt, Artificial Sequence
  Description of Artificial Sequence: Synthetic oligonucleotide
uucccugucuccggaugag

SEQ ID NO: 454360 - RNA, 19 nt, Artificial Sequence
  Description of Artificial Sequence: Synthetic oligonucleotide
ucccugucuccggaugagg

SEQ ID NO: 454361 - RNA, 19 nt, Artificial Sequence
  Description of Artificial Sequence: Synthetic oligonucleotide
ggcccagcauacaucauag

SEQ ID NO: 454362 - RNA, 19 nt, Artificial Sequence
  Description of Artificial Sequence: Synthetic oligonucleotide
acgaugucccguuccugga

SEQ ID NO: 454363 - RNA, 19 nt, Artificial Sequence
  Description of Artificial Sequence: Synthetic oligonucleotide
aggucuagccaaguuuagu

SEQ ID NO: 454364 - RNA, 19 nt, Artificial Sequence
  Description of Artificial Sequence: Synthetic oligonucleotide
uuggguugcaagggaggga

SEQ ID NO: 454365 - RNA, 19 nt, Artificial Sequence
  Description of Artificial Sequence: Synthetic oligonucleotide
ccaucgucagcacuuuggc

SEQ ID NO: 454366 - RNA, 19 nt, Artificial Sequence
  Description of Artificial Sequence: Synthetic oligonucleotide
acugcgugguccccucugu

SEQ ID NO: 454367 - RNA, 19 nt, Artificial Sequence
  Description of Artificial Sequence: Synthetic oligonucleotide
agguaagcuugcacccucg

SEQ ID NO: 454368 - RNA, 19 nt, Artificial Sequence
  Description of Artificial Sequence: Synthetic oligonucleotide
agaccuugacggauguugu

SEQ ID NO: 454369 - RNA, 19 nt, Artificial Sequence
  Description of Artificial Sequence: Synthetic oligonucleotide
ggcagacuuucucuaagga

SEQ ID NO: 454370 - RNA, 19 nt, Artificial Sequence
  Description of Artificial Sequence: Synthetic oligonucleotide
gaguaaggcgguacugguc

SEQ ID NO: 454371 - RNA, 19 nt, Artificial Sequence
  Description of Artificial Sequence: Synthetic oligonucleotide
auaccucaacauguugggu

SEQ ID NO: 454372 - RNA, 19 nt, Artificial Sequence
  Description of Artificial Sequence: Synthetic oligonucleotide
guugcgauccugcguguaa

SEQ ID NO: 454373 - RNA, 19 nt, Artificial Sequence
  Description of Artificial Sequence: Synthetic oligonucleotide
uggaccucgguuggcccag

SEQ ID NO: 454374 - RNA, 19 nt, Artificial Sequence
  Description of Artificial Sequence: Synthetic oligonucleotide
acgaggcauccacggggac

SEQ ID NO: 454375 - RNA, 19 nt, Artificial Sequence
  Description of Artificial Sequence: Synthetic oligonucleotide
caugcucacggucgucuuc

SEQ ID NO: 454376 - RNA, 19 nt, Artificial Sequence
  Description of Artificial Sequence: Synthetic oligonucleotide
ugaaucugccuggcauugu

SEQ ID NO: 454377 - RNA, 19 nt, Artificial Sequence
  Description of Artificial Sequence: Synthetic oligonucleotide
ggugaucaggccaggggcc

SEQ ID NO: 454378 - RNA, 19 nt, Artificial Sequence
  Description of Artificial Sequence: Synthetic oligonucleotide
ugucuggcacaacgcuccu

SEQ ID NO: 454379 - RNA, 19 nt, Artificial Sequence
  Description of Artificial Sequence: Synthetic oligonucleotide
caggaguaaggcgguacug

SEQ ID NO: 454380 - RNA, 19 nt, Artificial Sequence
  Description of Artificial Sequence: Synthetic oligonucleotide
ucuuaauguaggggugguu

SEQ ID NO: 454381 - RNA, 19 nt, Artificial Sequence
  Description of Artificial Sequence: Synthetic oligonucleotide
caucaucauccuucgucca

SEQ ID NO: 454382 - RNA, 19 nt, Artificial Sequence
  Description of Artificial Sequence: Synthetic oligonucleotide
accauccgugcucugcaau

SEQ ID NO: 454383 - RNA, 19 nt, Artificial Sequence
  Description of Artificial Sequence: Synthetic oligonucleotide
gcuugcacccucgugaauc

SEQ ID NO: 454384 - RNA, 19 nt, Artificial Sequence
  Description of Artificial Sequence: Synthetic oligonucleotide
ggguguccugcauuagcag

SEQ ID NO: 454385 - RNA, 19 nt, Artificial Sequence
  Description of Artificial Sequence: Synthetic oligonucleotide
gggauuucgaagaauggcu

SEQ ID NO: 454386 - RNA, 19 nt, Artificial Sequence
  Description of Artificial Sequence: Synthetic oligonucleotide
gaccgguccugucagccaa

SEQ ID NO: 454387 - RNA, 19 nt, Artificial Sequence
  Description of Artificial Sequence: Synthetic oligonucleotide
aagcggcaacucggaaggg

SEQ ID NO: 454388 - RNA, 19 nt, Artificial Sequence
  Description of Artificial Sequence: Synthetic oligonucleotide
agaccgguccugucagcca

SEQ ID NO: 454389 - RNA, 19 nt, Artificial Sequence
  Description of Artificial Sequence: Synthetic oligonucleotide
ugcgucggacauucucuuc

SEQ ID NO: 454390 - RNA, 19 nt, Artificial Sequence
  Description of Artificial Sequence: Synthetic oligonucleotide
cagggaaugccauggcaaa

SEQ ID NO: 454391 - RNA, 19 nt, Artificial Sequence
  Description of Artificial Sequence: Synthetic oligonucleotide
gcgguacuggucaagacca

SEQ ID NO: 454392 - RNA, 19 nt, Artificial Sequence
  Description of Artificial Sequence: Synthetic oligonucleotide
gaggcaugccagccggguc

SEQ ID NO: 454393 - RNA, 19 nt, Artificial Sequence
  Description of Artificial Sequence: Synthetic oligonucleotide
guccugcauuagcagagca

SEQ ID NO: 454394 - RNA, 19 nt, Artificial Sequence
  Description of Artificial Sequence: Synthetic oligonucleotide
uuguugcgauccugcgugu

SEQ ID NO: 454395 - RNA, 19 nt, Artificial Sequence
  Description of Artificial Sequence: Synthetic oligonucleotide
ccuugacggauguugucac

SEQ ID NO: 454396 - RNA, 19 nt, Artificial Sequence
  Description of Artificial Sequence: Synthetic oligonucleotide
ucguggugcucagagucau

SEQ ID NO: 454397 - RNA, 19 nt, Artificial Sequence
  Description of Artificial Sequence: Synthetic oligonucleotide
ggggacgaugucccguucc

SEQ ID NO: 454398 - RNA, 19 nt, Artificial Sequence
  Description of Artificial Sequence: Synthetic oligonucleotide
gugcucagagucauaguaa

SEQ ID NO: 454399 - RNA, 19 nt, Artificial Sequence
  Description of Artificial Sequence: Synthetic oligonucleotide
auccuaagacagaagcaua

SEQ ID NO: 454400 - RNA, 19 nt, Artificial Sequence
  Description of Artificial Sequence: Synthetic oligonucleotide
cgauccugcguguaaggag

SEQ ID NO: 454401 - RNA, 19 nt, Artificial Sequence
  Description of Artificial Sequence: Synthetic oligonucleotide
cugcguguaaggagaaaua

SEQ ID NO: 454402 - RNA, 19 nt, Artificial Sequence
  Description of Artificial Sequence: Synthetic oligonucleotide
cagugccaugcucacgguc

SEQ ID NO: 454403 - RNA, 19 nt, Artificial Sequence
  Description of Artificial Sequence: Synthetic oligonucleotide
caaugccacuggaccucgg

SEQ ID NO: 454404 - RNA, 19 nt, Artificial Sequence
  Description of Artificial Sequence: Synthetic oligonucleotide
cgggauuucgaagaauggc

SEQ ID NO: 454405 - RNA, 19 nt, Artificial Sequence
  Description of Artificial Sequence: Synthetic oligonucleotide
gaauggcuacccggcggcc

SEQ ID NO: 454406 - RNA, 19 nt, Artificial Sequence
  Description of Artificial Sequence: Synthetic oligonucleotide
uccuucguccagccaccaa

SEQ ID NO: 454407 - RNA, 19 nt, Artificial Sequence
  Description of Artificial Sequence: Synthetic oligonucleotide
cauuguugcgauccugcgu

SEQ ID NO: 454408 - RNA, 19 nt, Artificial Sequence
  Description of Artificial Sequence: Synthetic oligonucleotide
guuucgcaacugaaaugca

SEQ ID NO: 454409 - RNA, 19 nt, Artificial Sequence
  Description of Artificial Sequence: Synthetic oligonucleotide
accuccgcaaugcgucgga

SEQ ID NO: 454410 - RNA, 19 nt, Artificial Sequence
  Description of Artificial Sequence: Synthetic oligonucleotide
uuugcgcauccguguuccu

SEQ ID NO: 454411 - RNA, 19 nt, Artificial Sequence
  Description of Artificial Sequence: Synthetic oligonucleotide
cuccgcaaugcgucggaca

SEQ ID NO: 454412 - RNA, 19 nt, Artificial Sequence
  Description of Artificial Sequence: Synthetic oligonucleotide
ggauuucgaagaauggcua

SEQ ID NO: 454413 - RNA, 19 nt, Artificial Sequence
  Description of Artificial Sequence: Synthetic oligonucleotide
ccaccaagaggauggagga

SEQ ID NO: 454414 - RNA, 19 nt, Artificial Sequence
  Description of Artificial Sequence: Synthetic oligonucleotide
caauccccuuguuccauaa

SEQ ID NO: 454415 - RNA, 19 nt, Artificial Sequence
  Description of Artificial Sequence: Synthetic oligonucleotide
cucucaugaagccguucaa

SEQ ID NO: 454416 - RNA, 19 nt, Artificial Sequence
  Description of Artificial Sequence: Synthetic oligonucleotide
gcauguccguuguggacug

SEQ ID NO: 454417 - RNA, 19 nt, Artificial Sequence
  Description of Artificial Sequence: Synthetic oligonucleotide
gcauccguguuccugaaau

SEQ ID NO: 454418 - RNA, 19 nt, Artificial Sequence
  Description of Artificial Sequence: Synthetic oligonucleotide
uguugcgauccugcgugua

SEQ ID NO: 454419 - RNA, 19 nt, Artificial Sequence
  Description of Artificial Sequence: Synthetic oligonucleotide
gguacuggucaagaccauc

SEQ ID NO: 454420 - RNA, 19 nt, Artificial Sequence
  Description of Artificial Sequence: Synthetic oligonucleotide
acggggacgaugucccguu

SEQ ID NO: 454421 - RNA, 19 nt, Artificial Sequence
  Description of Artificial Sequence: Synthetic oligonucleotide
ucuccggaugaggcaugcc

SEQ ID NO: 454422 - RNA, 19 nt, Artificial Sequence
  Description of Artificial Sequence: Synthetic oligonucleotide
auacaucauaggagaugga

SEQ ID NO: 454423 - RNA, 19 nt, Artificial Sequence
  Description of Artificial Sequence: Synthetic oligonucleotide
ucgguuggcccagcauaca

SEQ ID NO: 454424 - RNA, 19 nt, Artificial Sequence
  Description of Artificial Sequence: Synthetic oligonucleotide
gaacuauuuccaaggugau

SEQ ID NO: 454425 - RNA, 19 nt, Artificial Sequence
  Description of Artificial Sequence: Synthetic oligonucleotide
cugcaaugccacuggaccu

SEQ ID NO: 454426 - RNA, 19 nt, Artificial Sequence
  Description of Artificial Sequence: Synthetic oligonucleotide
accucgguuggcccagcau

SEQ ID NO: 454427 - RNA, 19 nt, Artificial Sequence
  Description of Artificial Sequence: Synthetic oligonucleotide
gcagacuuucucuaaggau

SEQ ID NO: 454428 - RNA, 19 nt, Artificial Sequence
  Description of Artificial Sequence: Synthetic oligonucleotide
cuggaccucgguuggccca

SEQ ID NO: 454429 - RNA, 19 nt, Artificial Sequence
  Description of Artificial Sequence: Synthetic oligonucleotide
gcagggaaugccauggcaa

SEQ ID NO: 454430 - RNA, 19 nt, Artificial Sequence
  Description of Artificial Sequence: Synthetic oligonucleotide
gucuccggaugaggcaugc

SEQ ID NO: 454431 - RNA, 19 nt, Artificial Sequence
  Description of Artificial Sequence: Synthetic oligonucleotide
cucaacauguuggguugca

SEQ ID NO: 454432 - RNA, 19 nt, Artificial Sequence
  Description of Artificial Sequence: Synthetic oligonucleotide
gcaaugccacuggaccucg

SEQ ID NO: 454433 - RNA, 19 nt, Artificial Sequence
  Description of Artificial Sequence: Synthetic oligonucleotide
uggcuccauggguuggcuc

SEQ ID NO: 454434 - RNA, 19 nt, Artificial Sequence
  Description of Artificial Sequence: Synthetic oligonucleotide
caucacaggaguccguuuu

SEQ ID NO: 454435 - RNA, 19 nt, Artificial Sequence
  Description of Artificial Sequence: Synthetic oligonucleotide
gugacugcgugguccccuc

SEQ ID NO: 454436 - RNA, 19 nt, Artificial Sequence
  Description of Artificial Sequence: Synthetic oligonucleotide
cacagucguugacaucaca

SEQ ID NO: 454437 - RNA, 19 nt, Artificial Sequence
  Description of Artificial Sequence: Synthetic oligonucleotide
gcccagcauacaucauagg

SEQ ID NO: 454438 - RNA, 19 nt, Artificial Sequence
  Description of Artificial Sequence: Synthetic oligonucleotide
ccggaugaggcaugccagc

SEQ ID NO: 454439 - RNA, 19 nt, Artificial Sequence
  Description of Artificial Sequence: Synthetic oligonucleotide
ugucggugacugcgugguc

SEQ ID NO: 454440 - RNA, 19 nt, Artificial Sequence
  Description of Artificial Sequence: Synthetic oligonucleotide
auucgguccaggacuugaa

SEQ ID NO: 454441 - RNA, 19 nt, Artificial Sequence
  Description of Artificial Sequence: Synthetic oligonucleotide
guaaugcuucggcaucagu

SEQ ID NO: 454442 - RNA, 19 nt, Artificial Sequence
  Description of Artificial Sequence: Synthetic oligonucleotide
gacggggcgccgguagccc

SEQ ID NO: 454443 - RNA, 19 nt, Artificial Sequence
  Description of Artificial Sequence: Synthetic oligonucleotide
ggucucguccaacaauaua

SEQ ID NO: 454444 - RNA, 19 nt, Artificial Sequence
  Description of Artificial Sequence: Synthetic oligonucleotide
caucgucagcacuuuggcu

SEQ ID NO: 454445 - RNA, 19 nt, Artificial Sequence
  Description of Artificial Sequence: Synthetic oligonucleotide
cucgugaaucugccuggca

SEQ ID NO: 454446 - RNA, 19 nt, Artificial Sequence
  Description of Artificial Sequence: Synthetic oligonucleotide
gcacaacgcuccucuuucc

SEQ ID NO: 454447 - RNA, 19 nt, Artificial Sequence
  Description of Artificial Sequence: Synthetic oligonucleotide
auuccccaaacaaggucua

SEQ ID NO: 454448 - RNA, 19 nt, Artificial Sequence
  Description of Artificial Sequence: Synthetic oligonucleotide
ccucauacaucagagcgaa

SEQ ID NO: 454449 - RNA, 19 nt, Artificial Sequence
  Description of Artificial Sequence: Synthetic oligonucleotide
caacacaguccaggccuug

SEQ ID NO: 454450 - RNA, 19 nt, Artificial Sequence
  Description of Artificial Sequence: Synthetic oligonucleotide
gcguguaaggagaaauaaa

SEQ ID NO: 454451 - RNA, 19 nt, Artificial Sequence
  Description of Artificial Sequence: Synthetic oligonucleotide
uccugcguguaaggagaaa

SEQ ID NO: 454452 - RNA, 19 nt, Artificial Sequence
  Description of Artificial Sequence: Synthetic oligonucleotide
gucgcccaaccuucugcca

SEQ ID NO: 454453 - RNA, 19 nt, Artificial Sequence
  Description of Artificial Sequence: Synthetic oligonucleotide
auucagcacuuaacacaga

SEQ ID NO: 454454 - RNA, 19 nt, Artificial Sequence
  Description of Artificial Sequence: Synthetic oligonucleotide
cguucaaaggagucgccca

SEQ ID NO: 454455 - RNA, 19 nt, Artificial Sequence
  Description of Artificial Sequence: Synthetic oligonucleotide
cccgugcuuucuuguagag

SEQ ID NO: 454456 - RNA, 19 nt, Artificial Sequence
  Description of Artificial Sequence: Synthetic oligonucleotide
ggguucaagacacccuccu

SEQ ID NO: 454457 - RNA, 19 nt, Artificial Sequence
  Description of Artificial Sequence: Synthetic oligonucleotide
ccguuuucagcaccagcuc

SEQ ID NO: 454458 - RNA, 19 nt, Artificial Sequence
  Description of Artificial Sequence: Synthetic oligonucleotide
gcgucggacauucucuucu

SEQ ID NO: 454459 - RNA, 19 nt, Artificial Sequence
  Description of Artificial Sequence: Synthetic oligonucleotide
agcuugcacccucgugaau

SEQ ID NO: 454460 - RNA, 19 nt, Artificial Sequence
  Description of Artificial Sequence: Synthetic oligonucleotide
acgugccaguuugcgcauc

SEQ ID NO: 454461 - RNA, 19 nt, Artificial Sequence
  Description of Artificial Sequence: Synthetic oligonucleotide
gcacccucgugaaucugcc

SEQ ID NO: 454462 - RNA, 19 nt, Artificial Sequence
  Description of Artificial Sequence: Synthetic oligonucleotide
cacaucaaagggacaucau

SEQ ID NO: 454463 - RNA, 19 nt, Artificial Sequence
  Description of Artificial Sequence: Synthetic oligonucleotide
gccccuuaacaucccucug

SEQ ID NO: 454464 - RNA, 19 nt, Artificial Sequence
  Description of Artificial Sequence: Synthetic oligonucleotide
cgugccaguuugcgcaucc

SEQ ID NO: 454465 - RNA, 19 nt, Artificial Sequence
  Description of Artificial Sequence: Synthetic oligonucleotide
ccacgaaagccaaccucuc

SEQ ID NO: 454466 - RNA, 19 nt, Artificial Sequence
  Description of Artificial Sequence: Synthetic oligonucleotide
ggagcaguuuauacuuuua

SEQ ID NO: 454467 - RNA, 19 nt, Artificial Sequence
  Description of Artificial Sequence: Synthetic oligonucleotide
aggagucgcccaaccuucu

SEQ ID NO: 454468 - RNA, 19 nt, Artificial Sequence
  Description of Artificial Sequence: Synthetic oligonucleotide
agggagcaguuuauacuuu

SEQ ID NO: 454469 - RNA, 19 nt, Artificial Sequence
  Description of Artificial Sequence: Synthetic oligonucleotide
guccguuguggacuggguu

SEQ ID NO: 454470 - RNA, 19 nt, Artificial Sequence
  Description of Artificial Sequence: Synthetic oligonucleotide
ggacgaugucccguuccug

SEQ ID NO: 454471 - RNA, 19 nt, Artificial Sequence
  Description of Artificial Sequence: Synthetic oligonucleotide
ggccaucgucagcacuuug

SEQ ID NO: 454472 - RNA, 19 nt, Artificial Sequence
  Description of Artificial Sequence: Synthetic oligonucleotide
gggagcaguuuauacuuuu

SEQ ID NO: 454473 - RNA, 19 nt, Artificial Sequence
  Description of Artificial Sequence: Synthetic oligonucleotide
cggucgucuucccugcccc

SEQ ID NO: 454474 - RNA, 19 nt, Artificial Sequence
  Description of Artificial Sequence: Synthetic oligonucleotide
cugucuccggaugaggcau

SEQ ID NO: 454475 - RNA, 19 nt, Artificial Sequence
  Description of Artificial Sequence: Synthetic oligonucleotide
gguaagcuugcacccucgu

SEQ ID NO: 454476 - RNA, 19 nt, Artificial Sequence
  Description of Artificial Sequence: Synthetic oligonucleotide
gcgauccugcguguaagga

SEQ ID NO: 454477 - RNA, 19 nt, Artificial Sequence
  Description of Artificial Sequence: Synthetic oligonucleotide
ggacggggcgccgguagcc

SEQ ID NO: 454478 - RNA, 19 nt, Artificial Sequence
  Description of Artificial Sequence: Synthetic oligonucleotide
gggacgaugucccguuccu

SEQ ID NO: 454479 - RNA, 19 nt, Artificial Sequence
  Description of Artificial Sequence: Synthetic oligonucleotide
auccugcguguaaggagaa

SEQ ID NO: 454480 - RNA, 19 nt, Artificial Sequence
  Description of Artificial Sequence: Synthetic oligonucleotide
guacacggagaaacauggu

SEQ ID NO: 454481 - RNA, 19 nt, Artificial Sequence
  Description of Artificial Sequence: Synthetic oligonucleotide
gcacugcaaguacucccuc

SEQ ID NO: 454482 - RNA, 19 nt, Artificial Sequence
  Description of Artificial Sequence: Synthetic oligonucleotide
gucuggcacaacgcuccuc

SEQ ID NO: 454483 - RNA, 19 nt, Artificial Sequence
  Description of Artificial Sequence: Synthetic oligonucleotide
ccauggguuggcucauaga

SEQ ID NO: 454484 - RNA, 19 nt, Artificial Sequence
  Description of Artificial Sequence: Synthetic oligonucleotide
ccguuguggacuggguuuc

SEQ ID NO: 454485 - RNA, 19 nt, Artificial Sequence
  Description of Artificial Sequence: Synthetic oligonucleotide
gaucccagugaagccuuuu

SEQ ID NO: 454486 - RNA, 19 nt, Artificial Sequence
  Description of Artificial Sequence: Synthetic oligonucleotide
ccagaccgguccugucagc

SEQ ID NO: 454487 - RNA, 19 nt, Artificial Sequence
  Description of Artificial Sequence: Synthetic oligonucleotide
caacucggaagggaacuau

SEQ ID NO: 454488 - RNA, 19 nt, Artificial Sequence
  Description of Artificial Sequence: Synthetic oligonucleotide
ccugcguguaaggagaaau

SEQ ID NO: 454489 - RNA, 19 nt, Artificial Sequence
  Description of Artificial Sequence: Synthetic oligonucleotide
cgggucucguccaacaaua

SEQ ID NO: 454490 - RNA, 19 nt, Artificial Sequence
  Description of Artificial Sequence: Synthetic oligonucleotide
caguuugcgcauccguguu

SEQ ID NO: 454491 - RNA, 19 nt, Artificial Sequence
  Description of Artificial Sequence: Synthetic oligonucleotide
gaccuucacgugccaguuu

SEQ ID NO: 454492 - RNA, 19 nt, Artificial Sequence
  Description of Artificial Sequence: Synthetic oligonucleotide
ccccagaccgguccuguca

SEQ ID NO: 454493 - RNA, 19 nt, Artificial Sequence
  Description of Artificial Sequence: Synthetic oligonucleotide
cagccgggucucguccaac

SEQ ID NO: 454494 - RNA, 19 nt, Artificial Sequence
  Description of Artificial Sequence: Synthetic oligonucleotide
ccacggggacgaugucccg

SEQ ID NO: 454495 - RNA, 19 nt, Artificial Sequence
  Description of Artificial Sequence: Synthetic oligonucleotide
acccggcggcccucauaca

SEQ ID NO: 454496 - RNA, 19 nt, Artificial Sequence
  Description of Artificial Sequence: Synthetic oligonucleotide
ccguguuccugaaaugaau

SEQ ID NO: 454497 - RNA, 19 nt, Artificial Sequence
  Description of Artificial Sequence: Synthetic oligonucleotide
cuacccggcggcccucaua

SEQ ID NO: 454498 - RNA, 19 nt, Artificial Sequence
  Description of Artificial Sequence: Synthetic oligonucleotide
ccauggcaaaccagguacu

SEQ ID NO: 454499 - RNA, 19 nt, Artificial Sequence
  Description of Artificial Sequence: Synthetic oligonucleotide
accgguccugucagccaaa

SEQ ID NO: 454500 - RNA, 19 nt, Artificial Sequence
  Description of Artificial Sequence: Synthetic oligonucleotide
cacccucgugaaucugccu

SEQ ID NO: 454501 - RNA, 19 nt, Artificial Sequence
  Description of Artificial Sequence: Synthetic oligonucleotide
ccaauccccuuguuccaua

SEQ ID NO: 454502 - RNA, 19 nt, Artificial Sequence
  Description of Artificial Sequence: Synthetic oligonucleotide
cacgugccaguuugcgcau

SEQ ID NO: 454503 - RNA, 19 nt, Artificial Sequence
  Description of Artificial Sequence: Synthetic oligonucleotide
guacagccguccagccucu

SEQ ID NO: 454504 - RNA, 19 nt, Artificial Sequence
  Description of Artificial Sequence: Synthetic oligonucleotide
ccuccgcaaugcgucggac

SEQ ID NO: 454505 - RNA, 19 nt, Artificial Sequence
  Description of Artificial Sequence: Synthetic oligonucleotide
cgguccugucagccaaaac

SEQ ID NO: 454506 - RNA, 19 nt, Artificial Sequence
  Description of Artificial Sequence: Synthetic oligonucleotide
gcgcauccguguuccugaa

SEQ ID NO: 454507 - RNA, 19 nt, Artificial Sequence
  Description of Artificial Sequence: Synthetic oligonucleotide
cgccacaucaaagggacau

SEQ ID NO: 454508 - RNA, 19 nt, Artificial Sequence
  Description of Artificial Sequence: Synthetic oligonucleotide
gccaauccccuuguuccau

SEQ ID NO: 454509 - RNA, 19 nt, Artificial Sequence
  Description of Artificial Sequence: Synthetic oligonucleotide
ccagccgggucucguccaa

SEQ ID NO: 454510 - RNA, 19 nt, Artificial Sequence
  Description of Artificial Sequence: Synthetic oligonucleotide
ggggcgccgguagccccuc

SEQ ID NO: 454511 - RNA, 19 nt, Artificial Sequence
  Description of Artificial Sequence: Synthetic oligonucleotide
cgcauccguguuccugaaa

SEQ ID NO: 454512 - RNA, 19 nt, Artificial Sequence
  Description of Artificial Sequence: Synthetic oligonucleotide
gcuacccggcggcccucau

SEQ ID NO: 454513 - RNA, 19 nt, Artificial Sequence
  Description of Artificial Sequence: Synthetic oligonucleotide
cgaucccagugaagccuuu

SEQ ID NO: 454514 - RNA, 19 nt, Artificial Sequence
  Description of Artificial Sequence: Synthetic oligonucleotide
ccgcaaugcgucggacauu

SEQ ID NO: 454515 - RNA, 19 nt, Artificial Sequence
  Description of Artificial Sequence: Synthetic oligonucleotide
auuuaugucucuuaaaggc

SEQ ID NO: 454516 - RNA, 19 nt, Artificial Sequence
  Description of Artificial Sequence: Synthetic oligonucleotide
uuuaauucgaaaacugugg

SEQ ID NO: 454517 - RNA, 19 nt, Artificial Sequence
  Description of Artificial Sequence: Synthetic oligonucleotide
aaagacauagcaccagggc

SEQ ID NO: 454518 - RNA, 19 nt, Artificial Sequence
  Description of Artificial Sequence: Synthetic oligonucleotide
aaaaucagaccuucguccc

SEQ ID NO: 454519 - RNA, 19 nt, Artificial Sequence
  Description of Artificial Sequence: Synthetic oligonucleotide
uauacaaaggaauaccucc

SEQ ID NO: 454520 - RNA, 19 nt, Artificial Sequence
  Description of Artificial Sequence: Synthetic oligonucleotide
uugccuaucaggaucaugg

SEQ ID NO: 454521 - RNA, 19 nt, Artificial Sequence
  Description of Artificial Sequence: Synthetic oligonucleotide
acauucuuaucccuaaugc

SEQ ID NO: 454522 - RNA, 19 nt, Artificial Sequence
  Description of Artificial Sequence: Synthetic oligonucleotide
gauagguuaacccuuuucc

SEQ ID NO: 454523 - RNA, 19 nt, Artificial Sequence
  Description of Artificial Sequence: Synthetic oligonucleotide
auaauuacugucuacccag

SEQ ID NO: 454524 - RNA, 19 nt, Artificial Sequence
  Description of Artificial Sequence: Synthetic oligonucleotide
agcguuucccaacaaaucc

SEQ ID NO: 454525 - RNA, 19 nt, Artificial Sequence
  Description of Artificial Sequence: Synthetic oligonucleotide
aauucgaaaacuguggcug

SEQ ID NO: 454526 - RNA, 19 nt, Artificial Sequence
  Description of Artificial Sequence: Synthetic oligonucleotide
uuaaagacauagcaccagg

SEQ ID NO: 454527 - RNA, 19 nt, Artificial Sequence
  Description of Artificial Sequence: Synthetic oligonucleotide
aguacaguauauauaauac

SEQ ID NO: 454528 - RNA, 19 nt, Artificial Sequence
  Description of Artificial Sequence: Synthetic oligonucleotide
ugagacaugaucuuguggu

SEQ ID NO: 454529 - RNA, 19 nt, Artificial Sequence
  Description of Artificial Sequence: Synthetic oligonucleotide
uaguguaaaggacacuugg

SEQ ID NO: 454530 - RNA, 19 nt, Artificial Sequence
  Description of Artificial Sequence: Synthetic oligonucleotide
ucaacuaucuauaaaguuu

SEQ ID NO: 454531 - RNA, 19 nt, Artificial Sequence
  Description of Artificial Sequence: Synthetic oligonucleotide
uauuauuuaaguacaguau

SEQ ID NO: 454532 - RNA, 19 nt, Artificial Sequence
  Description of Artificial Sequence: Synthetic oligonucleotide
auuacugucuacccaggcc

SEQ ID NO: 454533 - RNA, 19 nt, Artificial Sequence
  Description of Artificial Sequence: Synthetic oligonucleotide
uuaauucgaaaacuguggc

SEQ ID NO: 454534 - RNA, 19 nt, Artificial Sequence
  Description of Artificial Sequence: Synthetic oligonucleotide
agucuagguaauuaguaac

SEQ ID NO: 454535 - RNA, 19 nt, Artificial Sequence
  Description of Artificial Sequence: Synthetic oligonucleotide
aguggcauugugucgagcc

SEQ ID NO: 454536 - RNA, 19 nt, Artificial Sequence
  Description of Artificial Sequence: Synthetic oligonucleotide
aucauggacauuuugguug

SEQ ID NO: 454537 - RNA, 19 nt, Artificial Sequence
  Description of Artificial Sequence: Synthetic oligonucleotide
uguauacaaaggaauaccu

SEQ ID NO: 454538 - RNA, 19 nt, Artificial Sequence
  Description of Artificial Sequence: Synthetic oligonucleotide
uguuguaagugucauaauc

SEQ ID NO: 454539 - RNA, 19 nt, Artificial Sequence
  Description of Artificial Sequence: Synthetic oligonucleotide
uacuguugagacaugaucu

SEQ ID NO: 454540 - RNA, 19 nt, Artificial Sequence
  Description of Artificial Sequence: Synthetic oligonucleotide
ugguaucuaugucacagcg

SEQ ID NO: 454541 - RNA, 19 nt, Artificial Sequence
  Description of Artificial Sequence: Synthetic oligonucleotide
aauaccucuggauuuauua

SEQ ID NO: 454542 - RNA, 19 nt, Artificial Sequence
  Description of Artificial Sequence: Synthetic oligonucleotide
aacauaacaguccucacuu

SEQ ID NO: 454543 - RNA, 19 nt, Artificial Sequence
  Description of Artificial Sequence: Synthetic oligonucleotide
aagacauagcaccagggcu

SEQ ID NO: 454544 - RNA, 19 nt, Artificial Sequence
  Description of Artificial Sequence: Synthetic oligonucleotide
caguaucuaaagaugauag

SEQ ID NO: 454545 - RNA, 19 nt, Artificial Sequence
  Description of Artificial Sequence: Synthetic oligonucleotide
uuaugucucuuaaaggccc

SEQ ID NO: 454546 - RNA, 19 nt, Artificial Sequence
  Description of Artificial Sequence: Synthetic oligonucleotide
cauuuaugucucuuaaagg

SEQ ID NO: 454547 - RNA, 19 nt, Artificial Sequence
  Description of Artificial Sequence: Synthetic oligonucleotide
cucuuaaaggcccugcugg

SEQ ID NO: 454548 - RNA, 19 nt, Artificial Sequence
  Description of Artificial Sequence: Synthetic oligonucleotide
caagaccacuuuaagaugc

SEQ ID NO: 454549 - RNA, 19 nt, Artificial Sequence
  Description of Artificial Sequence: Synthetic oligonucleotide
guguuuauugaccauacac

SEQ ID NO: 454550 - RNA, 19 nt, Artificial Sequence
  Description of Artificial Sequence: Synthetic oligonucleotide
uuuauugaccauacacacc

SEQ ID NO: 454551 - RNA, 19 nt, Artificial Sequence
  Description of Artificial Sequence: Synthetic oligonucleotide
cauugaagcaucuuggcuc

SEQ ID NO: 454552 - RNA, 19 nt, Artificial Sequence
  Description of Artificial Sequence: Synthetic oligonucleotide
aaggaauaccucccaagag

SEQ ID NO: 454553 - RNA, 19 nt, Artificial Sequence
  Description of Artificial Sequence: Synthetic oligonucleotide
aguaauuaugauuccccag

SEQ ID NO: 454554 - RNA, 19 nt, Artificial Sequence
  Description of Artificial Sequence: Synthetic oligonucleotide
ugugaugguuuuauuaaac

SEQ ID NO: 454555 - RNA, 19 nt, Artificial Sequence
  Description of Artificial Sequence: Synthetic oligonucleotide
aaggucauguguuuauuga

SEQ ID NO: 454556 - RNA, 19 nt, Artificial Sequence
  Description of Artificial Sequence: Synthetic oligonucleotide
uacauucuuaucccuaaug

SEQ ID NO: 454557 - RNA, 19 nt, Artificial Sequence
  Description of Artificial Sequence: Synthetic oligonucleotide
ugaaaacaugcaaauugug

SEQ ID NO: 454558 - RNA, 19 nt, Artificial Sequence
  Description of Artificial Sequence: Synthetic oligonucleotide
uaauuaugauuccccaggc

SEQ ID NO: 454559 - RNA, 19 nt, Artificial Sequence
  Description of Artificial Sequence: Synthetic oligonucleotide
uuacuguugagacaugauc

SEQ ID NO: 454560 - RNA, 19 nt, Artificial Sequence
  Description of Artificial Sequence: Synthetic oligonucleotide
uacuucaauuauuaaaauc

SEQ ID NO: 454561 - RNA, 19 nt, Artificial Sequence
  Description of Artificial Sequence: Synthetic oligonucleotide
uugggugugucuucuauag

SEQ ID NO: 454562 - RNA, 19 nt, Artificial Sequence
  Description of Artificial Sequence: Synthetic oligonucleotide
ugucgagccaccauugcag

SEQ ID NO: 454563 - RNA, 19 nt, Artificial Sequence
  Description of Artificial Sequence: Synthetic oligonucleotide
ugguccagaguacaaaaug

SEQ ID NO: 454564 - RNA, 19 nt, Artificial Sequence
  Description of Artificial Sequence: Synthetic oligonucleotide
uaacccuuuuccaacauaa

SEQ ID NO: 454565 - RNA, 19 nt, Artificial Sequence
  Description of Artificial Sequence: Synthetic oligonucleotide
ggggcuaugaucuagccag

SEQ ID NO: 454566 - RNA, 19 nt, Artificial Sequence
  Description of Artificial Sequence: Synthetic oligonucleotide
gaucauggaauuccacggg

SEQ ID NO: 454567 - RNA, 19 nt, Artificial Sequence
  Description of Artificial Sequence: Synthetic oligonucleotide
agguuaacccuuuuccaac

SEQ ID NO: 454568 - RNA, 19 nt, Artificial Sequence
  Description of Artificial Sequence: Synthetic oligonucleotide
ugcaacuucugacaggcac

SEQ ID NO: 454569 - RNA, 19 nt, Artificial Sequence
  Description of Artificial Sequence: Synthetic oligonucleotide
uuaaaggcccugcugggcc

SEQ ID NO: 454570 - RNA, 19 nt, Artificial Sequence
  Description of Artificial Sequence: Synthetic oligonucleotide
aauaccucccaagaguuga

SEQ ID NO: 454571 - RNA, 19 nt, Artificial Sequence
  Description of Artificial Sequence: Synthetic oligonucleotide
auacaaaggaauaccuccc

SEQ ID NO: 454572 - RNA, 19 nt, Artificial Sequence
  Description of Artificial Sequence: Synthetic oligonucleotide
aggucauguguuuauugac

SEQ ID NO: 454573 - RNA, 19 nt, Artificial Sequence
  Description of Artificial Sequence: Synthetic oligonucleotide
ucucaacuaucuauaaagu

SEQ ID NO: 454574 - RNA, 19 nt, Artificial Sequence
  Description of Artificial Sequence: Synthetic oligonucleotide
ugcaaugucauuguuguaa

SEQ ID NO: 454575 - RNA, 19 nt, Artificial Sequence
  Description of Artificial Sequence: Synthetic oligonucleotide
guauguucugcccaagacc

SEQ ID NO: 454576 - RNA, 19 nt, Artificial Sequence
  Description of Artificial Sequence: Synthetic oligonucleotide
uccuccuuuaauucgaaaa

SEQ ID NO: 454577 - RNA, 19 nt, Artificial Sequence
  Description of Artificial Sequence: Synthetic oligonucleotide
aauacagaguuaugguaaa

SEQ ID NO: 454578 - RNA, 19 nt, Artificial Sequence
  Description of Artificial Sequence: Synthetic oligonucleotide
uccguccuucaucacaugg

SEQ ID NO: 454579 - RNA, 19 nt, Artificial Sequence
  Description of Artificial Sequence: Synthetic oligonucleotide
uauacauucuuaucccuaa

SEQ ID NO: 454580 - RNA, 19 nt, Artificial Sequence
  Description of Artificial Sequence: Synthetic oligonucleotide
uucuauagaagaggaaggc

SEQ ID NO: 454581 - RNA, 19 nt, Artificial Sequence
  Description of Artificial Sequence: Synthetic oligonucleotide
ucuuaaaggcccugcuggg

SEQ ID NO: 454582 - RNA, 19 nt, Artificial Sequence
  Description of Artificial Sequence: Synthetic oligonucleotide
uaugucacagcguuuccca

SEQ ID NO: 454583 - RNA, 19 nt, Artificial Sequence
  Description of Artificial Sequence: Synthetic oligonucleotide
gccuuaaagacauagcacc

SEQ ID NO: 454584 - RNA, 19 nt, Artificial Sequence
  Description of Artificial Sequence: Synthetic oligonucleotide
aagauggcagccugccacg

SEQ ID NO: 454585 - RNA, 19 nt, Artificial Sequence
  Description of Artificial Sequence: Synthetic oligonucleotide
uaauuacugucuacccagg

SEQ ID NO: 454586 - RNA, 19 nt, Artificial Sequence
  Description of Artificial Sequence: Synthetic oligonucleotide
aucuaugucacagcguuuc

SEQ ID NO: 454587 - RNA, 19 nt, Artificial Sequence
  Description of Artificial Sequence: Synthetic oligonucleotide
ugcaaauugugaaguaccu

SEQ ID NO: 454588 - RNA, 19 nt, Artificial Sequence
  Description of Artificial Sequence: Synthetic oligonucleotide
aaauugugaaguaccuguc

SEQ ID NO: 454589 - RNA, 19 nt, Artificial Sequence
  Description of Artificial Sequence: Synthetic oligonucleotide
cuuaggacaagcuggcaug

SEQ ID NO: 454590 - RNA, 19 nt, Artificial Sequence
  Description of Artificial Sequence: Synthetic oligonucleotide
uggagaauauuugauuuca

SEQ ID NO: 454591 - RNA, 19 nt, Artificial Sequence
  Description of Artificial Sequence: Synthetic oligonucleotide
aaguaccugucacaaauaa

SEQ ID NO: 454592 - RNA, 19 nt, Artificial Sequence
  Description of Artificial Sequence: Synthetic oligonucleotide
ucauggaauuccacgggag

SEQ ID NO: 454593 - RNA, 19 nt, Artificial Sequence
  Description of Artificial Sequence: Synthetic oligonucleotide
agaugauaguguaaaggac

SEQ ID NO: 454594 - RNA, 19 nt, Artificial Sequence
  Description of Artificial Sequence: Synthetic oligonucleotide
agaacucugggauauacuu

SEQ ID NO: 454595 - RNA, 19 nt, Artificial Sequence
  Description of Artificial Sequence: Synthetic oligonucleotide
auagguuaacccuuuucca

SEQ ID NO: 454596 - RNA, 19 nt, Artificial Sequence
  Description of Artificial Sequence: Synthetic oligonucleotide
uaauucgaaaacuguggcu

SEQ ID NO: 454597 - RNA, 19 nt, Artificial Sequence
  Description of Artificial Sequence: Synthetic oligonucleotide
augauaguguaaaggacac

SEQ ID NO: 454598 - RNA, 19 nt, Artificial Sequence
  Description of Artificial Sequence: Synthetic oligonucleotide
ugggauauacuucccugcc

SEQ ID NO: 454599 - RNA, 19 nt, Artificial Sequence
  Description of Artificial Sequence: Synthetic oligonucleotide
ucacaguauucccauguca

SEQ ID NO: 454600 - RNA, 19 nt, Artificial Sequence
  Description of Artificial Sequence: Synthetic oligonucleotide
ucuauagaagaggaaggca

SEQ ID NO: 454601 - RNA, 19 nt, Artificial Sequence
  Description of Artificial Sequence: Synthetic oligonucleotide
guaauuaguaaccuuggua

SEQ ID NO: 454602 - RNA, 19 nt, Artificial Sequence
  Description of Artificial Sequence: Synthetic oligonucleotide
ugcuauuccaguugaugca

SEQ ID NO: 454603 - RNA, 19 nt, Artificial Sequence
  Description of Artificial Sequence: Synthetic oligonucleotide
ugcuauauccucuccuaca

SEQ ID NO: 454604 - RNA, 19 nt, Artificial Sequence
  Description of Artificial Sequence: Synthetic oligonucleotide
uauggggcuaugaucuagc

SEQ ID NO: 454605 - RNA, 19 nt, Artificial Sequence
  Description of Artificial Sequence: Synthetic oligonucleotide
uagguuaacccuuuuccaa

SEQ ID NO: 454606 - RNA, 19 nt, Artificial Sequence
  Description of Artificial Sequence: Synthetic oligonucleotide
uguugcucugguaucuaug

SEQ ID NO: 454607 - RNA, 19 nt, Artificial Sequence
  Description of Artificial Sequence: Synthetic oligonucleotide
gaaaggagaugauuccuca

SEQ ID NO: 454608 - RNA, 19 nt, Artificial Sequence
  Description of Artificial Sequence: Synthetic oligonucleotide
uccggcaauaauuacuguc

SEQ ID NO: 454609 - RNA, 19 nt, Artificial Sequence
  Description of Artificial Sequence: Synthetic oligonucleotide
auagccagacagcucgcac

SEQ ID NO: 454610 - RNA, 19 nt, Artificial Sequence
  Description of Artificial Sequence: Synthetic oligonucleotide
gaagcaucuuggcucacug

SEQ ID NO: 454611 - RNA, 19 nt, Artificial Sequence
  Description of Artificial Sequence: Synthetic oligonucleotide
aagcggugcugacagagcu

SEQ ID NO: 454612 - RNA, 19 nt, Artificial Sequence
  Description of Artificial Sequence: Synthetic oligonucleotide
augcuauauccucuccuac

SEQ ID NO: 454613 - RNA, 19 nt, Artificial Sequence
  Description of Artificial Sequence: Synthetic oligonucleotide
uggauuccggcaauaauua

SEQ ID NO: 454614 - RNA, 19 nt, Artificial Sequence
  Description of Artificial Sequence: Synthetic oligonucleotide
uggacuuuggucuacccuu

SEQ ID NO: 454615 - RNA, 19 nt, Artificial Sequence
  Description of Artificial Sequence: Synthetic oligonucleotide
aucacaguauucccauguc

SEQ ID NO: 454616 - RNA, 19 nt, Artificial Sequence
  Description of Artificial Sequence: Synthetic oligonucleotide
cuuaaagacauagcaccag

SEQ ID NO: 454617 - RNA, 19 nt, Artificial Sequence
  Description of Artificial Sequence: Synthetic oligonucleotide
uuuacuguugagacaugau

SEQ ID NO: 454618 - RNA, 19 nt, Artificial Sequence
  Description of Artificial Sequence: Synthetic oligonucleotide
ucccaugucagcuuuccgu

SEQ ID NO: 454619 - RNA, 19 nt, Artificial Sequence
  Description of Artificial Sequence: Synthetic oligonucleotide
uggucuacccuucuuuuaa

SEQ ID NO: 454620 - RNA, 19 nt, Artificial Sequence
  Description of Artificial Sequence: Synthetic oligonucleotide
ugccacgauagguuaaccc

SEQ ID NO: 454621 - RNA, 19 nt, Artificial Sequence
  Description of Artificial Sequence: Synthetic oligonucleotide
cugggauauacuucccugc

SEQ ID NO: 454622 - RNA, 19 nt, Artificial Sequence
  Description of Artificial Sequence: Synthetic oligonucleotide
cugccuuaaagacauagca

SEQ ID NO: 454623 - RNA, 19 nt, Artificial Sequence
  Description of Artificial Sequence: Synthetic oligonucleotide
agcauguugcucugguauc

SEQ ID NO: 454624 - RNA, 19 nt, Artificial Sequence
  Description of Artificial Sequence: Synthetic oligonucleotide
agggacagaacacugcuau

SEQ ID NO: 454625 - RNA, 19 nt, Artificial Sequence
  Description of Artificial Sequence: Synthetic oligonucleotide
ugugaaaaguccuccuuua

SEQ ID NO: 454626 - RNA, 19 nt, Artificial Sequence
  Description of Artificial Sequence: Synthetic oligonucleotide
auuccggcaauaauuacug

SEQ ID NO: 454627 - RNA, 19 nt, Artificial Sequence
  Description of Artificial Sequence: Synthetic oligonucleotide
ucgcacucuguccagucag

SEQ ID NO: 454628 - RNA, 19 nt, Artificial Sequence
  Description of Artificial Sequence: Synthetic oligonucleotide
cauucuuaucccuaaugca

SEQ ID NO: 454629 - RNA, 19 nt, Artificial Sequence
  Description of Artificial Sequence: Synthetic oligonucleotide
aaaucagaccuucgucccu

SEQ ID NO: 454630 - RNA, 19 nt, Artificial Sequence
  Description of Artificial Sequence: Synthetic oligonucleotide
ugaucagcaccccuccaca

SEQ ID NO: 454631 - RNA, 19 nt, Artificial Sequence
  Description of Artificial Sequence: Synthetic oligonucleotide
auuaguaaccuugguauau

SEQ ID NO: 454632 - RNA, 19 nt, Artificial Sequence
  Description of Artificial Sequence: Synthetic oligonucleotide
uguguuuauugaccauaca

SEQ ID NO: 454633 - RNA, 19 nt, Artificial Sequence
  Description of Artificial Sequence: Synthetic oligonucleotide
auggggcuaugaucuagcc

SEQ ID NO: 454634 - RNA, 19 nt, Artificial Sequence
  Description of Artificial Sequence: Synthetic oligonucleotide
agguaauuaguaaccuugg

SEQ ID NO: 454635 - RNA, 19 nt, Artificial Sequence
  Description of Artificial Sequence: Synthetic oligonucleotide
ugcuaaugcuacuucaauu

SEQ ID NO: 454636 - RNA, 19 nt, Artificial Sequence
  Description of Artificial Sequence: Synthetic oligonucleotide
aucauggaauuccacggga

SEQ ID NO: 454637 - RNA, 19 nt, Artificial Sequence
  Description of Artificial Sequence: Synthetic oligonucleotide
uaggaaucucucuccagga

SEQ ID NO: 454638 - RNA, 19 nt, Artificial Sequence
  Description of Artificial Sequence: Synthetic oligonucleotide
ugucuacccaggccgagug

SEQ ID NO: 454639 - RNA, 19 nt, Artificial Sequence
  Description of Artificial Sequence: Synthetic oligonucleotide
auugugucgagccaccauu

SEQ ID NO: 454640 - RNA, 19 nt, Artificial Sequence
  Description of Artificial Sequence: Synthetic oligonucleotide
uaaugcaaacuuucucuuc

SEQ ID NO: 454641 - RNA, 19 nt, Artificial Sequence
  Description of Artificial Sequence: Synthetic oligonucleotide
uuguauugccucaggccgc

SEQ ID NO: 454642 - RNA, 19 nt, Artificial Sequence
  Description of Artificial Sequence: Synthetic oligonucleotide
uggcccgaaaagcauguug

SEQ ID NO: 454643 - RNA, 19 nt, Artificial Sequence
  Description of Artificial Sequence: Synthetic oligonucleotide
aaucagaccuucgucccug

SEQ ID NO: 454644 - RNA, 19 nt, Artificial Sequence
  Description of Artificial Sequence: Synthetic oligonucleotide
agaguugugggaggguugg

SEQ ID NO: 454645 - RNA, 19 nt, Artificial Sequence
  Description of Artificial Sequence: Synthetic oligonucleotide
ucugugaaguacagcggcu

SEQ ID NO: 454646 - RNA, 19 nt, Artificial Sequence
  Description of Artificial Sequence: Synthetic oligonucleotide
uaguaaccuugguauauac

SEQ ID NO: 454647 - RNA, 19 nt, Artificial Sequence
  Description of Artificial Sequence: Synthetic oligonucleotide
gcuauauccucuccuacag

SEQ ID NO: 454648 - RNA, 19 nt, Artificial Sequence
  Description of Artificial Sequence: Synthetic oligonucleotide
agccagccaacauuuaugu

SEQ ID NO: 454649 - RNA, 19 nt, Artificial Sequence
  Description of Artificial Sequence: Synthetic oligonucleotide
uuauggggcuaugaucuag

SEQ ID NO: 454650 - RNA, 19 nt, Artificial Sequence
  Description of Artificial Sequence: Synthetic oligonucleotide
cuauaggugaugcccuggc

SEQ ID NO: 454651 - RNA, 19 nt, Artificial Sequence
  Description of Artificial Sequence: Synthetic oligonucleotide
cucacugcaacuucugaca

SEQ ID NO: 454652 - RNA, 19 nt, Artificial Sequence
  Description of Artificial Sequence: Synthetic oligonucleotide
ucuacccaggccgagugcc

SEQ ID NO: 454653 - RNA, 19 nt, Artificial Sequence
  Description of Artificial Sequence: Synthetic oligonucleotide
agccagacagcucgcacuc

SEQ ID NO: 454654 - RNA, 19 nt, Artificial Sequence
  Description of Artificial Sequence: Synthetic oligonucleotide
auaccucuggauuuauuau

SEQ ID NO: 454655 - RNA, 19 nt, Artificial Sequence
  Description of Artificial Sequence: Synthetic oligonucleotide
cuugaauccagucuaggua

SEQ ID NO: 454656 - RNA, 19 nt, Artificial Sequence
  Description of Artificial Sequence: Synthetic oligonucleotide
uguggcuguuuguauugcc

SEQ ID NO: 454657 - RNA, 19 nt, Artificial Sequence
  Description of Artificial Sequence: Synthetic oligonucleotide
ucuggauuccggcaauaau

SEQ ID NO: 454658 - RNA, 19 nt, Artificial Sequence
  Description of Artificial Sequence: Synthetic oligonucleotide
acauaggaaucucucucca

SEQ ID NO: 454659 - RNA, 19 nt, Artificial Sequence
  Description of Artificial Sequence: Synthetic oligonucleotide
uaacaugggcuuccuucag

SEQ ID NO: 454660 - RNA, 19 nt, Artificial Sequence
  Description of Artificial Sequence: Synthetic oligonucleotide
agccgaucagagaagaaag

SEQ ID NO: 454661 - RNA, 19 nt, Artificial Sequence
  Description of Artificial Sequence: Synthetic oligonucleotide
cuaacaugggcuuccuuca

SEQ ID NO: 454662 - RNA, 19 nt, Artificial Sequence
  Description of Artificial Sequence: Synthetic oligonucleotide
ugaucuagccagccaacau

SEQ ID NO: 454663 - RNA, 19 nt, Artificial Sequence
  Description of Artificial Sequence: Synthetic oligonucleotide
gacugaucagcaccccucc

SEQ ID NO: 454664 - RNA, 19 nt, Artificial Sequence
  Description of Artificial Sequence: Synthetic oligonucleotide
ucggagaaauacagggccu

SEQ ID NO: 454665 - RNA, 19 nt, Artificial Sequence
  Description of Artificial Sequence: Synthetic oligonucleotide
uggacauuuugguugccuc

SEQ ID NO: 454666 - RNA, 19 nt, Artificial Sequence
  Description of Artificial Sequence: Synthetic oligonucleotide
gucuuauggggcuaugauc

SEQ ID NO: 454667 - RNA, 19 nt, Artificial Sequence
  Description of Artificial Sequence: Synthetic oligonucleotide
  modified_base (8)..(8): a, c, u, g, unknown or other
agugggcncagccacgacu

SEQ ID NO: 454668 - RNA, 19 nt, Artificial Sequence
  Description of Artificial Sequence: Synthetic oligonucleotide
uuuggucuacccuucuuuu

SEQ ID NO: 454669 - RNA, 19 nt, Artificial Sequence
  Description of Artificial Sequence: Synthetic oligonucleotide
uuaggacaagcuggcaugc

SEQ ID NO: 454670 - RNA, 19 nt, Artificial Sequence
  Description of Artificial Sequence: Synthetic oligonucleotide
uggggcuaugaucuagcca

SEQ ID NO: 454671 - RNA, 19 nt, Artificial Sequence
  Description of Artificial Sequence: Synthetic oligonucleotide
cuaugaucuagccagccaa

SEQ ID NO: 454672 - RNA, 19 nt, Artificial Sequence
  Description of Artificial Sequence: Synthetic oligonucleotide
gcuaaugcuacuucaauua

SEQ ID NO: 454673 - RNA, 19 nt, Artificial Sequence
  Description of Artificial Sequence: Synthetic oligonucleotide
auaguucucucaacuaucu

SEQ ID NO: 454674 - RNA, 19 nt, Artificial Sequence
  Description of Artificial Sequence: Synthetic oligonucleotide
auucgaaaacuguggcugu

SEQ ID NO: 454675 - RNA, 19 nt, Artificial Sequence
  Description of Artificial Sequence: Synthetic oligonucleotide
guauacaaaggaauaccuc

SEQ ID NO: 454676 - RNA, 19 nt, Artificial Sequence
  Description of Artificial Sequence: Synthetic oligonucleotide
ccuaacaugggcuuccuuc

SEQ ID NO: 454677 - RNA, 19 nt, Artificial Sequence
  Description of Artificial Sequence: Synthetic oligonucleotide
uucucucaacuaucuauaa

SEQ ID NO: 454678 - RNA, 19 nt, Artificial Sequence
  Description of Artificial Sequence: Synthetic oligonucleotide
agauuaaccugggcuuuac

SEQ ID NO: 454679 - RNA, 19 nt, Artificial Sequence
  Description of Artificial Sequence: Synthetic oligonucleotide
ucuugugguccagaguaca

SEQ ID NO: 454680 - RNA, 19 nt, Artificial Sequence
  Description of Artificial Sequence: Synthetic oligonucleotide
cuaugucacagcguuuccc

SEQ ID NO: 454681 - RNA, 19 nt, Artificial Sequence
  Description of Artificial Sequence: Synthetic oligonucleotide
guggagaauauuugauuuc

SEQ ID NO: 454682 - RNA, 19 nt, Artificial Sequence
  Description of Artificial Sequence: Synthetic oligonucleotide
acaaagucggagaaauaca

SEQ ID NO: 454683 - RNA, 19 nt, Artificial Sequence
  Description of Artificial Sequence: Synthetic oligonucleotide
ucgggugucuccagcacac

SEQ ID NO: 454684 - RNA, 19 nt, Artificial Sequence
  Description of Artificial Sequence: Synthetic oligonucleotide
accgaguggcauugugucg

SEQ ID NO: 454685 - RNA, 19 nt, Artificial Sequence
  Description of Artificial Sequence: Synthetic oligonucleotide
guaucuaugucacagcguu

SEQ ID NO: 454686 - RNA, 19 nt, Artificial Sequence
  Description of Artificial Sequence: Synthetic oligonucleotide
ugugggugccacgauaggu

SEQ ID NO: 454687 - RNA, 19 nt, Artificial Sequence
  Description of Artificial Sequence: Synthetic oligonucleotide
ggagcaguaucuaaagaug

SEQ ID NO: 454688 - RNA, 19 nt, Artificial Sequence
  Description of Artificial Sequence: Synthetic oligonucleotide
uccacuucgggugucucca

SEQ ID NO: 454689 - RNA, 19 nt, Artificial Sequence
  Description of Artificial Sequence: Synthetic oligonucleotide
uguucugcccaagaccacu

SEQ ID NO: 454690 - RNA, 19 nt, Artificial Sequence
  Description of Artificial Sequence: Synthetic oligonucleotide
caguaauuaugauucccca

SEQ ID NO: 454691 - RNA, 19 nt, Artificial Sequence
  Description of Artificial Sequence: Synthetic oligonucleotide
ggucauguguuuauugacc

SEQ ID NO: 454692 - RNA, 19 nt, Artificial Sequence
  Description of Artificial Sequence: Synthetic oligonucleotide
gauuccggcaauaauuacu

SEQ ID NO: 454693 - RNA, 19 nt, Artificial Sequence
  Description of Artificial Sequence: Synthetic oligonucleotide
accuucgucccugaaaaca

SEQ ID NO: 454694 - RNA, 19 nt, Artificial Sequence
  Description of Artificial Sequence: Synthetic oligonucleotide
ugcagcggcaguacuucca

SEQ ID NO: 454695 - RNA, 19 nt, Artificial Sequence
  Description of Artificial Sequence: Synthetic oligonucleotide
ucucggucuggguuucugc

SEQ ID NO: 454696 - RNA, 19 nt, Artificial Sequence
  Description of Artificial Sequence: Synthetic oligonucleotide
caccgaguggcauuguguc

SEQ ID NO: 454697 - RNA, 19 nt, Artificial Sequence
  Description of Artificial Sequence: Synthetic oligonucleotide
acuaucuauaaaguuuaua

SEQ ID NO: 454698 - RNA, 19 nt, Artificial Sequence
  Description of Artificial Sequence: Synthetic oligonucleotide
aguugaggagugggaagcg

SEQ ID NO: 454699 - RNA, 19 nt, Artificial Sequence
  Description of Artificial Sequence: Synthetic oligonucleotide
cacugcaacuucugacagg

SEQ ID NO: 454700 - RNA, 19 nt, Artificial Sequence
  Description of Artificial Sequence: Synthetic oligonucleotide
  modified_base (7)..(7): a, c, u, g, unknown or other
gugggcncagccacgacug

SEQ ID NO: 454701 - RNA, 19 nt, Artificial Sequence
  Description of Artificial Sequence: Synthetic oligonucleotide
uuaguaaccuugguauaua

SEQ ID NO: 454702 - RNA, 19 nt, Artificial Sequence
  Description of Artificial Sequence: Synthetic oligonucleotide
aguaaccuugguauauacu

SEQ ID NO: 454703 - RNA, 19 nt, Artificial Sequence
  Description of Artificial Sequence: Synthetic oligonucleotide
cugaggagcaguaucuaaa

SEQ ID NO: 454704 - RNA, 19 nt, Artificial Sequence
  Description of Artificial Sequence: Synthetic oligonucleotide
acgggugcgaagugauguc

SEQ ID NO: 454705 - RNA, 19 nt, Artificial Sequence
  Description of Artificial Sequence: Synthetic oligonucleotide
cagucuagguaauuaguaa

SEQ ID NO: 454706 - RNA, 19 nt, Artificial Sequence
  Description of Artificial Sequence: Synthetic oligonucleotide
uguauugccucaggccgca

SEQ ID NO: 454707 - RNA, 19 nt, Artificial Sequence
  Description of Artificial Sequence: Synthetic oligonucleotide
gaaguacagcggcucggug

SEQ ID NO: 454708 - RNA, 19 nt, Artificial Sequence
  Description of Artificial Sequence: Synthetic oligonucleotide
cuucccugccuuaaagaca

SEQ ID NO: 454709 - RNA, 19 nt, Artificial Sequence
  Description of Artificial Sequence: Synthetic oligonucleotide
ugggugugucuucuauaga

SEQ ID NO: 454710 - RNA, 19 nt, Artificial Sequence
  Description of Artificial Sequence: Synthetic oligonucleotide
acccuguauguucugccca

SEQ ID NO: 454711 - RNA, 19 nt, Artificial Sequence
  Description of Artificial Sequence: Synthetic oligonucleotide
auacauucuuaucccuaau

SEQ ID NO: 454712 - RNA, 19 nt, Artificial Sequence
  Description of Artificial Sequence: Synthetic oligonucleotide
agcaccccuccacauagga

SEQ ID NO: 454713 - RNA, 19 nt, Artificial Sequence
  Description of Artificial Sequence: Synthetic oligonucleotide
acaugcaaauugugaagua

SEQ ID NO: 454714 - RNA, 19 nt, Artificial Sequence
  Description of Artificial Sequence: Synthetic oligonucleotide
aagcggguggagaauauuu

SEQ ID NO: 454715 - RNA, 19 nt, Artificial Sequence
  Description of Artificial Sequence: Synthetic oligonucleotide
aaaggucuuauggggcuau

SEQ ID NO: 454716 - RNA, 19 nt, Artificial Sequence
  Description of Artificial Sequence: Synthetic oligonucleotide
gaauaccucccaagaguug

SEQ ID NO: 454717 - RNA, 19 nt, Artificial Sequence
  Description of Artificial Sequence: Synthetic oligonucleotide
ggacagaacacugcuauuc

SEQ ID NO: 454718 - RNA, 19 nt, Artificial Sequence
  Description of Artificial Sequence: Synthetic oligonucleotide
gauuccucaugcuugccau

SEQ ID NO: 454719 - RNA, 19 nt, Artificial Sequence
  Description of Artificial Sequence: Synthetic oligonucleotide
ggcccgaaaagcauguugc

SEQ ID NO: 454720 - RNA, 19 nt, Artificial Sequence
  Description of Artificial Sequence: Synthetic oligonucleotide
ugguugccuccacuucggg

SEQ ID NO: 454721 - RNA, 19 nt, Artificial Sequence
  Description of Artificial Sequence: Synthetic oligonucleotide
agacauagcaccagggcuu

SEQ ID NO: 454722 - RNA, 19 nt, Artificial Sequence
  Description of Artificial Sequence: Synthetic oligonucleotide
uguuugugaugguuuuauu

SEQ ID NO: 454723 - RNA, 19 nt, Artificial Sequence
  Description of Artificial Sequence: Synthetic oligonucleotide
cuggauuccggcaauaauu

SEQ ID NO: 454724 - RNA, 19 nt, Artificial Sequence
  Description of Artificial Sequence: Synthetic oligonucleotide
uugugguccagaguacaaa

SEQ ID NO: 454725 - RNA, 19 nt, Artificial Sequence
  Description of Artificial Sequence: Synthetic oligonucleotide
gaucuagccagccaacauu

SEQ ID NO: 454726 - RNA, 19 nt, Artificial Sequence
  Description of Artificial Sequence: Synthetic oligonucleotide
cauguguuuauugaccaua

SEQ ID NO: 454727 - RNA, 19 nt, Artificial Sequence
  Description of Artificial Sequence: Synthetic oligonucleotide
gaugccaaccaaggucaug

SEQ ID NO: 454728 - RNA, 19 nt, Artificial Sequence
  Description of Artificial Sequence: Synthetic oligonucleotide
agccccauuuucugcugag

SEQ ID NO: 454729 - RNA, 19 nt, Artificial Sequence
  Description of Artificial Sequence: Synthetic oligonucleotide
gaauuccacgggaggcagg

SEQ ID NO: 454730 - RNA, 19 nt, Artificial Sequence
  Description of Artificial Sequence: Synthetic oligonucleotide
ccaacaaauccaucaggac

SEQ ID NO: 454731 - RNA, 19 nt, Artificial Sequence
  Description of Artificial Sequence: Synthetic oligonucleotide
gguauauacuccagggaca

SEQ ID NO: 454732 - RNA, 19 nt, Artificial Sequence
  Description of Artificial Sequence: Synthetic oligonucleotide
uaucuaugucacagcguuu

SEQ ID NO: 454733 - RNA, 19 nt, Artificial Sequence
  Description of Artificial Sequence: Synthetic oligonucleotide
ucagccgaucagagaagaa

SEQ ID NO: 454734 - RNA, 19 nt, Artificial Sequence
  Description of Artificial Sequence: Synthetic oligonucleotide
gauauacuucccugccuua

SEQ ID NO: 454735 - RNA, 19 nt, Artificial Sequence
  Description of Artificial Sequence: Synthetic oligonucleotide
ggaggaaaccuuuccacaa

SEQ ID NO: 454736 - RNA, 19 nt, Artificial Sequence
  Description of Artificial Sequence: Synthetic oligonucleotide
aagauuaaccugggcuuua

SEQ ID NO: 454737 - RNA, 19 nt, Artificial Sequence
  Description of Artificial Sequence: Synthetic oligonucleotide
cagcugaugaugccaacca

SEQ ID NO: 454738 - RNA, 19 nt, Artificial Sequence
  Description of Artificial Sequence: Synthetic oligonucleotide
auggacauuuugguugccu

SEQ ID NO: 454739 - RNA, 19 nt, Artificial Sequence
  Description of Artificial Sequence: Synthetic oligonucleotide
agcggguggagaauauuug

SEQ ID NO: 454740 - RNA, 19 nt, Artificial Sequence
  Description of Artificial Sequence: Synthetic oligonucleotide
gugucgagccaccauugca

SEQ ID NO: 454741 - RNA, 19 nt, Artificial Sequence
  Description of Artificial Sequence: Synthetic oligonucleotide
gguuaacccuuuuccaaca

SEQ ID NO: 454742 - RNA, 19 nt, Artificial Sequence
  Description of Artificial Sequence: Synthetic oligonucleotide
gcaagcggugcugacagag

SEQ ID NO: 454743 - RNA, 19 nt, Artificial Sequence
  Description of Artificial Sequence: Synthetic oligonucleotide
aguaccugucacaaauaaa

SEQ ID NO: 454744 - RNA, 19 nt, Artificial Sequence
  Description of Artificial Sequence: Synthetic oligonucleotide
cagccuaacaugggcuucc

SEQ ID NO: 454745 - RNA, 19 nt, Artificial Sequence
  Description of Artificial Sequence: Synthetic oligonucleotide
gcaaauugugaaguaccug

SEQ ID NO: 454746 - RNA, 19 nt, Artificial Sequence
  Description of Artificial Sequence: Synthetic oligonucleotide
aaccaaggucauguguuua

SEQ ID NO: 454747 - RNA, 19 nt, Artificial Sequence
  Description of Artificial Sequence: Synthetic oligonucleotide
ccaagaccacuuuaagaug

SEQ ID NO: 454748 - RNA, 19 nt, Artificial Sequence
  Description of Artificial Sequence: Synthetic oligonucleotide
augcuacuucaauuauuaa

SEQ ID NO: 454749 - RNA, 19 nt, Artificial Sequence
  Description of Artificial Sequence: Synthetic oligonucleotide
acauaacaguccucacuuu

SEQ ID NO: 454750 - RNA, 19 nt, Artificial Sequence
  Description of Artificial Sequence: Synthetic oligonucleotide
uuccggcaauaauuacugu

SEQ ID NO: 454751 - RNA, 19 nt, Artificial Sequence
  Description of Artificial Sequence: Synthetic oligonucleotide
cacuucgggugucuccagc

SEQ ID NO: 454752 - RNA, 19 nt, Artificial Sequence
  Description of Artificial Sequence: Synthetic oligonucleotide
aggucuuauggggcuauga

SEQ ID NO: 454753 - RNA, 19 nt, Artificial Sequence
  Description of Artificial Sequence: Synthetic oligonucleotide
uggagcacggggacacauc

SEQ ID NO: 454754 - RNA, 19 nt, Artificial Sequence
  Description of Artificial Sequence: Synthetic oligonucleotide
gccgaucagagaagaaagg

SEQ ID NO: 454755 - RNA, 19 nt, Artificial Sequence
  Description of Artificial Sequence: Synthetic oligonucleotide
ucgaaaacuguggcuguuu

SEQ ID NO: 454756 - RNA, 19 nt, Artificial Sequence
  Description of Artificial Sequence: Synthetic oligonucleotide
aaggucuuauggggcuaug

SEQ ID NO: 454757 - RNA, 19 nt, Artificial Sequence
  Description of Artificial Sequence: Synthetic oligonucleotide
accuugguauauacuccag

SEQ ID NO: 454758 - RNA, 19 nt, Artificial Sequence
  Description of Artificial Sequence: Synthetic oligonucleotide
cauaacaguccucacuuuu

SEQ ID NO: 454759 - RNA, 19 nt, Artificial Sequence
  Description of Artificial Sequence: Synthetic oligonucleotide
gccacgauagguuaacccu

SEQ ID NO: 454760 - RNA, 19 nt, Artificial Sequence
  Description of Artificial Sequence: Synthetic oligonucleotide
gguggguacagccuaacau

SEQ ID NO: 454761 - RNA, 19 nt, Artificial Sequence
  Description of Artificial Sequence: Synthetic oligonucleotide
uuggagucucggucugggu

SEQ ID NO: 454762 - RNA, 19 nt, Artificial Sequence
  Description of Artificial Sequence: Synthetic oligonucleotide
ccgagugccugugaguugg

SEQ ID NO: 454763 - RNA, 19 nt, Artificial Sequence
  Description of Artificial Sequence: Synthetic oligonucleotide
cccuaaugcaaacuuucuc

SEQ ID NO: 454764 - RNA, 19 nt, Artificial Sequence
  Description of Artificial Sequence: Synthetic oligonucleotide
guauauacuccagggacau

SEQ ID NO: 454765 - RNA, 19 nt, Artificial Sequence
  Description of Artificial Sequence: Synthetic oligonucleotide
ggauuccggcaauaauuac

SEQ ID NO: 454766 - RNA, 19 nt, Artificial Sequence
  Description of Artificial Sequence: Synthetic oligonucleotide
ggcuuuacuguugagacau

SEQ ID NO: 454767 - RNA, 19 nt, Artificial Sequence
  Description of Artificial Sequence: Synthetic oligonucleotide
gguaauuaguaaccuuggu

SEQ ID NO: 454768 - RNA, 19 nt, Artificial Sequence
  Description of Artificial Sequence: Synthetic oligonucleotide
accagugguccucccgagu

SEQ ID NO: 454769 - RNA, 19 nt, Artificial Sequence
  Description of Artificial Sequence: Synthetic oligonucleotide
cuaaugcuacuucaauuau

SEQ ID NO: 454770 - RNA, 19 nt, Artificial Sequence
  Description of Artificial Sequence: Synthetic oligonucleotide
acugucuacccaggccgag

SEQ ID NO: 454771 - RNA, 19 nt, Artificial Sequence
  Description of Artificial Sequence: Synthetic oligonucleotide
cagccgaucagagaagaaa

SEQ ID NO: 454772 - RNA, 19 nt, Artificial Sequence
  Description of Artificial Sequence: Synthetic oligonucleotide
gugccccuauaggugaugc

SEQ ID NO: 454773 - RNA, 19 nt, Artificial Sequence
  Description of Artificial Sequence: Synthetic oligonucleotide
gugcgaagugaugucugug

SEQ ID NO: 454774 - RNA, 19 nt, Artificial Sequence
  Description of Artificial Sequence: Synthetic oligonucleotide
uauauacuccagggacauc

SEQ ID NO: 454775 - RNA, 19 nt, Artificial Sequence
  Description of Artificial Sequence: Synthetic oligonucleotide
ccacuuuaagaugcugggg

SEQ ID NO: 454776 - RNA, 19 nt, Artificial Sequence
  Description of Artificial Sequence: Synthetic oligonucleotide
cuagguaauuaguaaccuu

SEQ ID NO: 454777 - RNA, 19 nt, Artificial Sequence
  Description of Artificial Sequence: Synthetic oligonucleotide
ccgaaaagcauguugcucu

SEQ ID NO: 454778 - RNA, 19 nt, Artificial Sequence
  Description of Artificial Sequence: Synthetic oligonucleotide
cagaccuucgucccugaaa

SEQ ID NO: 454779 - RNA, 19 nt, Artificial Sequence
  Description of Artificial Sequence: Synthetic oligonucleotide
guaucugaccucagcugca

SEQ ID NO: 454780 - RNA, 19 nt, Artificial Sequence
  Description of Artificial Sequence: Synthetic oligonucleotide
gcggguggagaauauuuga

SEQ ID NO: 454781 - RNA, 19 nt, Artificial Sequence
  Description of Artificial Sequence: Synthetic oligonucleotide
ugccacgggugcgaaguga

SEQ ID NO: 454782 - RNA, 19 nt, Artificial Sequence
  Description of Artificial Sequence: Synthetic oligonucleotide
caccagugguccucccgag

SEQ ID NO: 454783 - RNA, 19 nt, Artificial Sequence
  Description of Artificial Sequence: Synthetic oligonucleotide
gucuacccaggccgagugc

SEQ ID NO: 454784 - RNA, 19 nt, Artificial Sequence
  Description of Artificial Sequence: Synthetic oligonucleotide
cuaucaggaucauggaauu

SEQ ID NO: 454785 - RNA, 19 nt, Artificial Sequence
  Description of Artificial Sequence: Synthetic oligonucleotide
ccaacauaacaguccucac

SEQ ID NO: 454786 - RNA, 19 nt, Artificial Sequence
  Description of Artificial Sequence: Synthetic oligonucleotide
cccugccuuaaagacauag

SEQ ID NO: 454787 - RNA, 19 nt, Artificial Sequence
  Description of Artificial Sequence: Synthetic oligonucleotide
gcaguaucuaaagaugaua

SEQ ID NO: 454788 - RNA, 19 nt, Artificial Sequence
  Description of Artificial Sequence: Synthetic oligonucleotide
ggcuaugaucuagccagcc

SEQ ID NO: 454789 - RNA, 19 nt, Artificial Sequence
  Description of Artificial Sequence: Synthetic oligonucleotide
ggugccacgauagguuaac

SEQ ID NO: 454790 - RNA, 19 nt, Artificial Sequence
  Description of Artificial Sequence: Synthetic oligonucleotide
gcuguguaacucuugccua

SEQ ID NO: 454791 - RNA, 19 nt, Artificial Sequence
  Description of Artificial Sequence: Synthetic oligonucleotide
ccuauaggugaugcccugg

SEQ ID NO: 454792 - RNA, 19 nt, Artificial Sequence
  Description of Artificial Sequence: Synthetic oligonucleotide
gugaaguaccugucacaaa

SEQ ID NO: 454793 - RNA, 19 nt, Artificial Sequence
  Description of Artificial Sequence: Synthetic oligonucleotide
cagcggcaguacuuccacc

SEQ ID NO: 454794 - RNA, 19 nt, Artificial Sequence
  Description of Artificial Sequence: Synthetic oligonucleotide
acgauagguuaacccuuuu

SEQ ID NO: 454795 - RNA, 19 nt, Artificial Sequence
  Description of Artificial Sequence: Synthetic oligonucleotide
ggacugaucagcaccccuc

SEQ ID NO: 454796 - RNA, 19 nt, Artificial Sequence
  Description of Artificial Sequence: Synthetic oligonucleotide
cagcaccccuccacauagg

SEQ ID NO: 454797 - RNA, 19 nt, Artificial Sequence
  Description of Artificial Sequence: Synthetic oligonucleotide
caucauggacauuuugguu

SEQ ID NO: 454798 - RNA, 19 nt, Artificial Sequence
  Description of Artificial Sequence: Synthetic oligonucleotide
gcagcggcaguacuuccac

SEQ ID NO: 454799 - RNA, 19 nt, Artificial Sequence
  Description of Artificial Sequence: Synthetic oligonucleotide
ccggcaauaauuacugucu

SEQ ID NO: 454800 - RNA, 19 nt, Artificial Sequence
  Description of Artificial Sequence: Synthetic oligonucleotide
gucuacccuucuuuuaaau

SEQ ID NO: 454801 - RNA, 19 nt, Artificial Sequence
  Description of Artificial Sequence: Synthetic oligonucleotide
ccgaucagagaagaaagga

SEQ ID NO: 454802 - RNA, 19 nt, Artificial Sequence
  Description of Artificial Sequence: Synthetic oligonucleotide
gaguggcauugugucgagc

SEQ ID NO: 454803 - RNA, 19 nt, Artificial Sequence
  Description of Artificial Sequence: Synthetic oligonucleotide
cucgcacucuguccaguca

SEQ ID NO: 454804 - RNA, 19 nt, Artificial Sequence
  Description of Artificial Sequence: Synthetic oligonucleotide
ggucuuauggggcuaugau

SEQ ID NO: 454805 - RNA, 19 nt, Artificial Sequence
  Description of Artificial Sequence: Synthetic oligonucleotide
cgauagguuaacccuuuuc

SEQ ID NO: 454806 - RNA, 19 nt, Artificial Sequence
  Description of Artificial Sequence: Synthetic oligonucleotide
cuuauggggcuaugaucua

SEQ ID NO: 454807 - RNA, 19 nt, Artificial Sequence
  Description of Artificial Sequence: Synthetic oligonucleotide
caucauggacuauguauuu

SEQ ID NO: 454808 - RNA, 19 nt, Artificial Sequence
  Description of Artificial Sequence: Synthetic oligonucleotide
gugccacgauagguuaacc

SEQ ID NO: 454809 - RNA, 19 nt, Artificial Sequence
  Description of Artificial Sequence: Synthetic oligonucleotide
cacgggugcgaagugaugu

SEQ ID NO: 454810 - RNA, 19 nt, Artificial Sequence
  Description of Artificial Sequence: Synthetic oligonucleotide
gggcuuuacuguugagaca

SEQ ID NO: 454811 - RNA, 19 nt, Artificial Sequence
  Description of Artificial Sequence: Synthetic oligonucleotide
gcacggggacacaucacag

SEQ ID NO: 454812 - RNA, 19 nt, Artificial Sequence
  Description of Artificial Sequence: Synthetic oligonucleotide
aggaggcccuagaaguggu

SEQ ID NO: 454813 - RNA, 19 nt, Artificial Sequence
  Description of Artificial Sequence: Synthetic oligonucleotide
gggugcgaagugaugucug

SEQ ID NO: 454814 - RNA, 19 nt, Artificial Sequence
  Description of Artificial Sequence: Synthetic oligonucleotide
gagcacggggacacaucac

SEQ ID NO: 454815 - RNA, 19 nt, Artificial Sequence
  Description of Artificial Sequence: Synthetic oligonucleotide
agacaaagucggagaaaua

SEQ ID NO: 454816 - RNA, 19 nt, Artificial Sequence
  Description of Artificial Sequence: Synthetic oligonucleotide
ccaacccucugcugaggag

SEQ ID NO: 454817 - RNA, 19 nt, Artificial Sequence
  Description of Artificial Sequence: Synthetic oligonucleotide
gagugccugugaguugguc

SEQ ID NO: 454818 - RNA, 19 nt, Artificial Sequence
  Description of Artificial Sequence: Synthetic oligonucleotide
cccgaaaagcauguugcuc

SEQ ID NO: 454819 - RNA, 19 nt, Artificial Sequence
  Description of Artificial Sequence: Synthetic oligonucleotide
ccaugcuguguaacucuug

SEQ ID NO: 454820 - RNA, 19 nt, Artificial Sequence
  Description of Artificial Sequence: Synthetic oligonucleotide
cagugguccucccgaguca

SEQ ID NO: 454821 - RNA, 19 nt, Artificial Sequence
  Description of Artificial Sequence: Synthetic oligonucleotide
gggauauacuucccugccu

SEQ ID NO: 454822 - RNA, 19 nt, Artificial Sequence
  Description of Artificial Sequence: Synthetic oligonucleotide
cccuauaggugaugcccug

SEQ ID NO: 454823 - RNA, 19 nt, Artificial Sequence
  Description of Artificial Sequence: Synthetic oligonucleotide
caccauugcagcggcagua

SEQ ID NO: 454824 - RNA, 19 nt, Artificial Sequence
  Description of Artificial Sequence: Synthetic oligonucleotide
cacggggacacaucacagu

SEQ ID NO: 454825 - RNA, 19 nt, Artificial Sequence
  Description of Artificial Sequence: Synthetic oligonucleotide
agcucgcacucuguccagu

SEQ ID NO: 454826 - RNA, 19 nt, Artificial Sequence
  Description of Artificial Sequence: Synthetic oligonucleotide
agccuaacaugggcuuccu

SEQ ID NO: 454827 - RNA, 19 nt, Artificial Sequence
  Description of Artificial Sequence: Synthetic oligonucleotide
gcggcagacagcacccagc

SEQ ID NO: 454828 - RNA, 19 nt, Artificial Sequence
  Description of Artificial Sequence: Synthetic oligonucleotide
gaauccagucuagguaauu

SEQ ID NO: 454829 - RNA, 19 nt, Artificial Sequence
  Description of Artificial Sequence: Synthetic oligonucleotide
agugggcggcagacagcac

SEQ ID NO: 454830 - RNA, 19 nt, Artificial Sequence
  Description of Artificial Sequence: Synthetic oligonucleotide
cauugugucgagccaccau

SEQ ID NO: 454831 - RNA, 19 nt, Artificial Sequence
  Description of Artificial Sequence: Synthetic oligonucleotide
cacgauagguuaacccuuu

SEQ ID NO: 454832 - RNA, 19 nt, Artificial Sequence
  Description of Artificial Sequence: Synthetic oligonucleotide
ccgaguggcauugugucga

SEQ ID NO: 454833 - RNA, 19 nt, Artificial Sequence
  Description of Artificial Sequence: Synthetic oligonucleotide
cucgguggguacagccuaa

SEQ ID NO: 454834 - RNA, 19 nt, Artificial Sequence
  Description of Artificial Sequence: Synthetic oligonucleotide
ggguuggcauuuucccauc

SEQ ID NO: 454835 - RNA, 19 nt, Artificial Sequence
  Description of Artificial Sequence: Synthetic oligonucleotide
  modified_base (9)..(9): a, c, u, g, unknown or other
cagugggcncagccacgac

SEQ ID NO: 454836 - RNA, 19 nt, Artificial Sequence
  Description of Artificial Sequence: Synthetic oligonucleotide
gcucgcacucuguccaguc

SEQ ID NO: 454837 - RNA, 19 nt, Artificial Sequence
  Description of Artificial Sequence: Synthetic oligonucleotide
gguugccuccacuucgggu

SEQ ID NO: 454838 - RNA, 19 nt, Artificial Sequence
  Description of Artificial Sequence: Synthetic oligonucleotide
ugccugugaguugguccuc

SEQ ID NO: 454839 - RNA, 19 nt, Artificial Sequence
  Description of Artificial Sequence: Synthetic oligonucleotide
gaagcggguggagaauauu

SEQ ID NO: 454840 - RNA, 19 nt, Artificial Sequence
  Description of Artificial Sequence: Synthetic oligonucleotide
ggcugugggugccacgaua

SEQ ID NO: 454841 - RNA, 19 nt, Artificial Sequence
  Description of Artificial Sequence: Synthetic oligonucleotide
gggcuaugaucuagccagc

SEQ ID NO: 454842 - RNA, 19 nt, Artificial Sequence
  Description of Artificial Sequence: Synthetic oligonucleotide
gggacugaucagcaccccu

SEQ ID NO: 454843 - RNA, 19 nt, Artificial Sequence
  Description of Artificial Sequence: Synthetic oligonucleotide
gcuuuacuguugagacaug

SEQ ID NO: 454844 - RNA, 19 nt, Artificial Sequence
  Description of Artificial Sequence: Synthetic oligonucleotide
ccgagucacccuggcaugc

SEQ ID NO: 454845 - RNA, 19 nt, Artificial Sequence
  Description of Artificial Sequence: Synthetic oligonucleotide
ccuucgucccugaaaacau

SEQ ID NO: 454846 - RNA, 19 nt, Artificial Sequence
  Description of Artificial Sequence: Synthetic oligonucleotide
agccaaugccccagcugau

SEQ ID NO: 454847 - RNA, 19 nt, Artificial Sequence
  Description of Artificial Sequence: Synthetic oligonucleotide
gggaagcggguggagaaua

SEQ ID NO: 454848 - RNA, 19 nt, Artificial Sequence
  Description of Artificial Sequence: Synthetic oligonucleotide
ucccugccuuaaagacaua

SEQ ID NO: 454849 - RNA, 19 nt, Artificial Sequence
  Description of Artificial Sequence: Synthetic oligonucleotide
gcccgaaaagcauguugcu

SEQ ID NO: 454850 - RNA, 19 nt, Artificial Sequence
  Description of Artificial Sequence: Synthetic oligonucleotide
agucucggucuggguuucu

SEQ ID NO: 454851 - RNA, 19 nt, Artificial Sequence
  Description of Artificial Sequence: Synthetic oligonucleotide
ccacgggugcgaagugaug

SEQ ID NO: 454852 - RNA, 19 nt, Artificial Sequence
  Description of Artificial Sequence: Synthetic oligonucleotide
ggcccagcuugauggcauc

SEQ ID NO: 454853 - RNA, 19 nt, Artificial Sequence
  Description of Artificial Sequence: Synthetic oligonucleotide
cgaguggcauugugucgag

SEQ ID NO: 454854 - RNA, 19 nt, Artificial Sequence
  Description of Artificial Sequence: Synthetic oligonucleotide
gcaccgaguggcauugugu

SEQ ID NO: 454855 - RNA, 19 nt, Artificial Sequence
  Description of Artificial Sequence: Synthetic oligonucleotide
guucugcccaagaccacuu

SEQ ID NO: 454856 - RNA, 19 nt, Artificial Sequence
  Description of Artificial Sequence: Synthetic oligonucleotide
cugucuacccaggccgagu

SEQ ID NO: 454857 - RNA, 19 nt, Artificial Sequence
  Description of Artificial Sequence: Synthetic oligonucleotide
ccacgauagguuaacccuu

SEQ ID NO: 454858 - RNA, 19 nt, Artificial Sequence
  Description of Artificial Sequence: Synthetic oligonucleotide
cacugcuauuccaguugau

SEQ ID NO: 454859 - RNA, 19 nt, Artificial Sequence
  Description of Artificial Sequence: Synthetic oligonucleotide
ccuggcccgaaaagcaugu

SEQ ID NO: 454860 - RNA, 19 nt, Artificial Sequence
  Description of Artificial Sequence: Synthetic oligonucleotide
ccgacugcuucugagcagu

SEQ ID NO: 454861 - RNA, 19 nt, Artificial Sequence
  Description of Artificial Sequence: Synthetic oligonucleotide
ggaagcggguggagaauau

SEQ ID NO: 454862 - RNA, 19 nt, Artificial Sequence
  Description of Artificial Sequence: Synthetic oligonucleotide
gccacgggugcgaagugau

SEQ ID NO: 454863 - RNA, 19 nt, Artificial Sequence
  Description of Artificial Sequence: Synthetic oligonucleotide
ccaccauugcagcggcagu

SEQ ID NO: 454864 - RNA, 19 nt, Artificial Sequence
  Description of Artificial Sequence: Synthetic oligonucleotide
guacagcggcucggugggu

SEQ ID NO: 454865 - RNA, 19 nt, Artificial Sequence
  Description of Artificial Sequence: Synthetic oligonucleotide
gccuaacaugggcuuccuu

SEQ ID NO: 454866 - RNA, 19 nt, Artificial Sequence
  Description of Artificial Sequence: Synthetic oligonucleotide
cuggcccgaaaagcauguu

SEQ ID NO: 454867 - RNA, 19 nt, Artificial Sequence
  Description of Artificial Sequence: Synthetic oligonucleotide
cgggugcgaagugaugucu

SEQ ID NO: 454868 - RNA, 19 nt, Artificial Sequence
  Description of Artificial Sequence: Synthetic oligonucleotide
cgggugucuccagcacaca

SEQ ID NO: 454869 - RNA, 19 nt, Artificial Sequence
  Description of Artificial Sequence: Synthetic oligonucleotide
cgagugccugugaguuggu

SEQ ID NO: 454870 - RNA, 19 nt, Artificial Sequence
  Description of Artificial Sequence: Synthetic oligonucleotide
uauauuuauauauauaucc

SEQ ID NO: 454871 - RNA, 19 nt, Artificial Sequence
  Description of Artificial Sequence: Synthetic oligonucleotide
aaacauguaacuuuugguc

SEQ ID NO: 454872 - RNA, 19 nt, Artificial Sequence
  Description of Artificial Sequence: Synthetic oligonucleotide
uauauauuuauauauauau

SEQ ID NO: 454873 - RNA, 19 nt, Artificial Sequence
  Description of Artificial Sequence: Synthetic oligonucleotide
uauauauauauuuauauau

SEQ ID NO: 454874 - RNA, 19 nt, Artificial Sequence
  Description of Artificial Sequence: Synthetic oligonucleotide
uguacaaauauauauauau

SEQ ID NO: 454875 - RNA, 19 nt, Artificial Sequence
  Description of Artificial Sequence: Synthetic oligonucleotide
aauauauauauauauuuau

SEQ ID NO: 454876 - RNA, 19 nt, Artificial Sequence
  Description of Artificial Sequence: Synthetic oligonucleotide
uauauauauauauuuauau

SEQ ID NO: 454877 - RNA, 19 nt, Artificial Sequence
  Description of Artificial Sequence: Synthetic oligonucleotide
aaguucauggcccuuacuc

SEQ ID NO: 454878 - RNA, 19 nt, Artificial Sequence
  Description of Artificial Sequence: Synthetic oligonucleotide
uacaaauauauauauauau

SEQ ID NO: 454879 - RNA, 19 nt, Artificial Sequence
  Description of Artificial Sequence: Synthetic oligonucleotide
aaaggugcaaacauguaac

SEQ ID NO: 454880 - RNA, 19 nt, Artificial Sequence
  Description of Artificial Sequence: Synthetic oligonucleotide
agaacagcgggacucagcc

SEQ ID NO: 454881 - RNA, 19 nt, Artificial Sequence
  Description of Artificial Sequence: Synthetic oligonucleotide
uauauauauuuauauauau

SEQ ID NO: 454882 - RNA, 19 nt, Artificial Sequence
  Description of Artificial Sequence: Synthetic oligonucleotide
uuaacuuagauaacuguac

SEQ ID NO: 454883 - RNA, 19 nt, Artificial Sequence
  Description of Artificial Sequence: Synthetic oligonucleotide
ucgaauuagaaugucagag

SEQ ID NO: 454884 - RNA, 19 nt, Artificial Sequence
  Description of Artificial Sequence: Synthetic oligonucleotide
uggguauacauucuggcgc

SEQ ID NO: 454885 - RNA, 19 nt, Artificial Sequence
  Description of Artificial Sequence: Synthetic oligonucleotide
gacauuugaacuccacugg

SEQ ID NO: 454886 - RNA, 19 nt, Artificial Sequence
  Description of Artificial Sequence: Synthetic oligonucleotide
aaauuuuagggguacggau

SEQ ID NO: 454887 - RNA, 19 nt, Artificial Sequence
  Description of Artificial Sequence: Synthetic oligonucleotide
guaacuuuuggucacacuc

SEQ ID NO: 454888 - RNA, 19 nt, Artificial Sequence
  Description of Artificial Sequence: Synthetic oligonucleotide
cuuuauguccuacccaugg

SEQ ID NO: 454889 - RNA, 19 nt, Artificial Sequence
  Description of Artificial Sequence: Synthetic oligonucleotide
auauauuuauauauauauc

SEQ ID NO: 454890 - RNA, 19 nt, Artificial Sequence
  Description of Artificial Sequence: Synthetic oligonucleotide
aaauauauauauauauuua

SEQ ID NO: 454891 - RNA, 19 nt, Artificial Sequence
  Description of Artificial Sequence: Synthetic oligonucleotide
gauggccucagauaguacc

SEQ ID NO: 454892 - RNA, 19 nt, Artificial Sequence
  Description of Artificial Sequence: Synthetic oligonucleotide
auauauauauauuuauaua

SEQ ID NO: 454893 - RNA, 19 nt, Artificial Sequence
  Description of Artificial Sequence: Synthetic oligonucleotide
agucuaauagacaggauuc

SEQ ID NO: 454894 - RNA, 19 nt, Artificial Sequence
  Description of Artificial Sequence: Synthetic oligonucleotide
uuagauaacuguacaaaua

SEQ ID NO: 454895 - RNA, 19 nt, Artificial Sequence
  Description of Artificial Sequence: Synthetic oligonucleotide
uaacuuagauaacuguaca

SEQ ID NO: 454896 - RNA, 19 nt, Artificial Sequence
  Description of Artificial Sequence: Synthetic oligonucleotide
uggacacggacucugggcg

SEQ ID NO: 454897 - RNA, 19 nt, Artificial Sequence
  Description of Artificial Sequence: Synthetic oligonucleotide
uguaacguucucacuuugg

SEQ ID NO: 454898 - RNA, 19 nt, Artificial Sequence
  Description of Artificial Sequence: Synthetic oligonucleotide
aauuuuagggguacggaug

SEQ ID NO: 454899 - RNA, 19 nt, Artificial Sequence
  Description of Artificial Sequence: Synthetic oligonucleotide
gaaugucagagcugaaucc

SEQ ID NO: 454900 - RNA, 19 nt, Artificial Sequence
  Description of Artificial Sequence: Synthetic oligonucleotide
acaccgacccaccaaagac

SEQ ID NO: 454901 - RNA, 19 nt, Artificial Sequence
  Description of Artificial Sequence: Synthetic oligonucleotide
gaggcuaucacuuuaaaau

SEQ ID NO: 454902 - RNA, 19 nt, Artificial Sequence
  Description of Artificial Sequence: Synthetic oligonucleotide
augagauggaacucaguuc

SEQ ID NO: 454903 - RNA, 19 nt, Artificial Sequence
  Description of Artificial Sequence: Synthetic oligonucleotide
guuauagucuaacaaguuc

SEQ ID NO: 454904 - RNA, 19 nt, Artificial Sequence
  Description of Artificial Sequence: Synthetic oligonucleotide
caaacaaucuccacucagc

SEQ ID NO: 454905 - RNA, 19 nt, Artificial Sequence
  Description of Artificial Sequence: Synthetic oligonucleotide
cuuguuacaggcaaauuca

SEQ ID NO: 454906 - RNA, 19 nt, Artificial Sequence
  Description of Artificial Sequence: Synthetic oligonucleotide
aauccacuauucucaguuc

SEQ ID NO: 454907 - RNA, 19 nt, Artificial Sequence
  Description of Artificial Sequence: Synthetic oligonucleotide
aacuuagauaacuguacaa

SEQ ID NO: 454908 - RNA, 19 nt, Artificial Sequence
  Description of Artificial Sequence: Synthetic oligonucleotide
auucgaauuagaaugucag

SEQ ID NO: 454909 - RNA, 19 nt, Artificial Sequence
  Description of Artificial Sequence: Synthetic oligonucleotide
uuaaugugcuacuguaaug

SEQ ID NO: 454910 - RNA, 19 nt, Artificial Sequence
  Description of Artificial Sequence: Synthetic oligonucleotide
uuugaaucacagacaagcu

SEQ ID NO: 454911 - RNA, 19 nt, Artificial Sequence
  Description of Artificial Sequence: Synthetic oligonucleotide
cucaguucaagaacagcgg

SEQ ID NO: 454912 - RNA, 19 nt, Artificial Sequence
  Description of Artificial Sequence: Synthetic oligonucleotide
caagcuuuauguccuaccc

SEQ ID NO: 454913 - RNA, 19 nt, Artificial Sequence
  Description of Artificial Sequence: Synthetic oligonucleotide
caucuaggaggauacacag

SEQ ID NO: 454914 - RNA, 19 nt, Artificial Sequence
  Description of Artificial Sequence: Synthetic oligonucleotide
ugugcgcuaaugaagucca

SEQ ID NO: 454915 - RNA, 19 nt, Artificial Sequence
  Description of Artificial Sequence: Synthetic oligonucleotide
uaacuuuuggucacacucu

SEQ ID NO: 454916 - RNA, 19 nt, Artificial Sequence
  Description of Artificial Sequence: Synthetic oligonucleotide
gagacuauuuguaugacaa

SEQ ID NO: 454917 - RNA, 19 nt, Artificial Sequence
  Description of Artificial Sequence: Synthetic oligonucleotide
gagacugggagacuauuug

SEQ ID NO: 454918 - RNA, 19 nt, Artificial Sequence
  Description of Artificial Sequence: Synthetic oligonucleotide
uccagucuaauagacagga

SEQ ID NO: 454919 - RNA, 19 nt, Artificial Sequence
  Description of Artificial Sequence: Synthetic oligonucleotide
ugucaagucugaacugucc

SEQ ID NO: 454920 - RNA, 19 nt, Artificial Sequence
  Description of Artificial Sequence: Synthetic oligonucleotide
caaauauauauauauauuu

SEQ ID NO: 454921 - RNA, 19 nt, Artificial Sequence
  Description of Artificial Sequence: Synthetic oligonucleotide
cucaacaaauaaacugccc

SEQ ID NO: 454922 - RNA, 19 nt, Artificial Sequence
  Description of Artificial Sequence: Synthetic oligonucleotide
ucguugcuaacccgggugg

SEQ ID NO: 454923 - RNA, 19 nt, Artificial Sequence
  Description of Artificial Sequence: Synthetic oligonucleotide
aaggugcaaacauguaacu

SEQ ID NO: 454924 - RNA, 19 nt, Artificial Sequence
  Description of Artificial Sequence: Synthetic oligonucleotide
aaugugcuacuguaauggu

SEQ ID NO: 454925 - RNA, 19 nt, Artificial Sequence
  Description of Artificial Sequence: Synthetic oligonucleotide
cauaaugucgccgucagga

SEQ ID NO: 454926 - RNA, 19 nt, Artificial Sequence
  Description of Artificial Sequence: Synthetic oligonucleotide
uucaagaacagcgggacuc

SEQ ID NO: 454927 - RNA, 19 nt, Artificial Sequence
  Description of Artificial Sequence: Synthetic oligonucleotide
uugaaucacagacaagcuu

SEQ ID NO: 454928 - RNA, 19 nt, Artificial Sequence
  Description of Artificial Sequence: Synthetic oligonucleotide
uucgaauuagaaugucaga

SEQ ID NO: 454929 - RNA, 19 nt, Artificial Sequence
  Description of Artificial Sequence: Synthetic oligonucleotide
ugacaaugguguaacguuc

SEQ ID NO: 454930 - RNA, 19 nt, Artificial Sequence
  Description of Artificial Sequence: Synthetic oligonucleotide
acuuagauaacuguacaaa

SEQ ID NO: 454931 - RNA, 19 nt, Artificial Sequence
  Description of Artificial Sequence: Synthetic oligonucleotide
ugucuggacgcuccaggcg

SEQ ID NO: 454932 - RNA, 19 nt, Artificial Sequence
  Description of Artificial Sequence: Synthetic oligonucleotide
augacaaugguguaacguu

SEQ ID NO: 454933 - RNA, 19 nt, Artificial Sequence
  Description of Artificial Sequence: Synthetic oligonucleotide
uaaugucgccgucaggaca

SEQ ID NO: 454934 - RNA, 19 nt, Artificial Sequence
  Description of Artificial Sequence: Synthetic oligonucleotide
accacugucauucgaauua

SEQ ID NO: 454935 - RNA, 19 nt, Artificial Sequence
  Description of Artificial Sequence: Synthetic oligonucleotide
uaauaaaggccguuuguuu

SEQ ID NO: 454936 - RNA, 19 nt, Artificial Sequence
  Description of Artificial Sequence: Synthetic oligonucleotide
uuuauguccuacccauggu

SEQ ID NO: 454937 - RNA, 19 nt, Artificial Sequence
  Description of Artificial Sequence: Synthetic oligonucleotide
guucauggcccuuacuccc

SEQ ID NO: 454938 - RNA, 19 nt, Artificial Sequence
  Description of Artificial Sequence: Synthetic oligonucleotide
auauauauauauauuuaua

SEQ ID NO: 454939 - RNA, 19 nt, Artificial Sequence
  Description of Artificial Sequence: Synthetic oligonucleotide
acaaauauauauauauauu

SEQ ID NO: 454940 - RNA, 19 nt, Artificial Sequence
  Description of Artificial Sequence: Synthetic oligonucleotide
cauccguccagcaccaggc

SEQ ID NO: 454941 - RNA, 19 nt, Artificial Sequence
  Description of Artificial Sequence: Synthetic oligonucleotide
auauauauauuuauauaua

SEQ ID NO: 454942 - RNA, 19 nt, Artificial Sequence
  Description of Artificial Sequence: Synthetic oligonucleotide
ggaaauuuuagggguacgg

SEQ ID NO: 454943 - RNA, 19 nt, Artificial Sequence
  Description of Artificial Sequence: Synthetic oligonucleotide
aauuaaugugcuacuguaa

SEQ ID NO: 454944 - RNA, 19 nt, Artificial Sequence
  Description of Artificial Sequence: Synthetic oligonucleotide
gucuggacgcuccaggcgg

SEQ ID NO: 454945 - RNA, 19 nt, Artificial Sequence
  Description of Artificial Sequence: Synthetic oligonucleotide
guacggaugcacuucuugc

SEQ ID NO: 454946 - RNA, 19 nt, Artificial Sequence
  Description of Artificial Sequence: Synthetic oligonucleotide
gacgggaggacgcacagca

SEQ ID NO: 454947 - RNA, 19 nt, Artificial Sequence
  Description of Artificial Sequence: Synthetic oligonucleotide
gaaauuuuagggguacgga

SEQ ID NO: 454948 - RNA, 19 nt, Artificial Sequence
  Description of Artificial Sequence: Synthetic oligonucleotide
acuguuugcaagcaugcua

SEQ ID NO: 454949 - RNA, 19 nt, Artificial Sequence
  Description of Artificial Sequence: Synthetic oligonucleotide
uuaacccuucucgggaagg

SEQ ID NO: 454950 - RNA, 19 nt, Artificial Sequence
  Description of Artificial Sequence: Synthetic oligonucleotide
cugaccuccaaacaaucuc

SEQ ID NO: 454951 - RNA, 19 nt, Artificial Sequence
  Description of Artificial Sequence: Synthetic oligonucleotide
auauauauuuauauauaua

SEQ ID NO: 454952 - RNA, 19 nt, Artificial Sequence
  Description of Artificial Sequence: Synthetic oligonucleotide
uuagggguacggaugcacu

SEQ ID NO: 454953 - RNA, 19 nt, Artificial Sequence
  Description of Artificial Sequence: Synthetic oligonucleotide
uacaccgacccaccaaaga

SEQ ID NO: 454954 - RNA, 19 nt, Artificial Sequence
  Description of Artificial Sequence: Synthetic oligonucleotide
cauucgaauuagaauguca

SEQ ID NO: 454955 - RNA, 19 nt, Artificial Sequence
  Description of Artificial Sequence: Synthetic oligonucleotide
uuuucauaaugucgccguc

SEQ ID NO: 454956 - RNA, 19 nt, Artificial Sequence
  Description of Artificial Sequence: Synthetic oligonucleotide
uugcaagcaugcuauaguu

SEQ ID NO: 454957 - RNA, 19 nt, Artificial Sequence
  Description of Artificial Sequence: Synthetic oligonucleotide
agacugggagacuauuugu

SEQ ID NO: 454958 - RNA, 19 nt, Artificial Sequence
  Description of Artificial Sequence: Synthetic oligonucleotide
ugcaagcaugcuauaguuc

SEQ ID NO: 454959 - RNA, 19 nt, Artificial Sequence
  Description of Artificial Sequence: Synthetic oligonucleotide
aaugucgccgucaggacau

SEQ ID NO: 454960 - RNA, 19 nt, Artificial Sequence
  Description of Artificial Sequence: Synthetic oligonucleotide
cauugucguugcuaacccg

SEQ ID NO: 454961 - RNA, 19 nt, Artificial Sequence
  Description of Artificial Sequence: Synthetic oligonucleotide
cagcuuaacccuucucggg

SEQ ID NO: 454962 - RNA, 19 nt, Artificial Sequence
  Description of Artificial Sequence: Synthetic oligonucleotide
gcagcuuaacccuucucgg

SEQ ID NO: 454963 - RNA, 19 nt, Artificial Sequence
  Description of Artificial Sequence: Synthetic oligonucleotide
aggcuaucacuuuaaaaua

SEQ ID NO: 454964 - RNA, 19 nt, Artificial Sequence
  Description of Artificial Sequence: Synthetic oligonucleotide
uuuguaugacaauggugua

SEQ ID NO: 454965 - RNA, 19 nt, Artificial Sequence
  Description of Artificial Sequence: Synthetic oligonucleotide
acguucucacuuugguggg

SEQ ID NO: 454966 - RNA, 19 nt, Artificial Sequence
  Description of Artificial Sequence: Synthetic oligonucleotide
guaugacaaugguguaacg

SEQ ID NO: 454967 - RNA, 19 nt, Artificial Sequence
  Description of Artificial Sequence: Synthetic oligonucleotide
cugugcgcuaaugaagucc

SEQ ID NO: 454968 - RNA, 19 nt, Artificial Sequence
  Description of Artificial Sequence: Synthetic oligonucleotide
gugcauaccccacagaacu

SEQ ID NO: 454969 - RNA, 19 nt, Artificial Sequence
  Description of Artificial Sequence: Synthetic oligonucleotide
ccaaacgugucuuccaggc

SEQ ID NO: 454970 - RNA, 19 nt, Artificial Sequence
  Description of Artificial Sequence: Synthetic oligonucleotide
cuuagauaacuguacaaau

SEQ ID NO: 454971 - RNA, 19 nt, Artificial Sequence
  Description of Artificial Sequence: Synthetic oligonucleotide
accacggugcgauccuugg

SEQ ID NO: 454972 - RNA, 19 nt, Artificial Sequence
  Description of Artificial Sequence: Synthetic oligonucleotide
ugcacacaccgaucuugcg

SEQ ID NO: 454973 - RNA, 19 nt, Artificial Sequence
  Description of Artificial Sequence: Synthetic oligonucleotide
ucgccgucaggacauuuga

SEQ ID NO: 454974 - RNA, 19 nt, Artificial Sequence
  Description of Artificial Sequence: Synthetic oligonucleotide
aucaugucggggcgcgacg

SEQ ID NO: 454975 - RNA, 19 nt, Artificial Sequence
  Description of Artificial Sequence: Synthetic oligonucleotide
ucaugucggggcgcgacgg

SEQ ID NO: 454976 - RNA, 19 nt, Artificial Sequence
  Description of Artificial Sequence: Synthetic oligonucleotide
aagcguggcggaggggacc

SEQ ID NO: 454977 - RNA, 19 nt, Artificial Sequence
  Description of Artificial Sequence: Synthetic oligonucleotide
ugcgcuaaugaaguccaac

SEQ ID NO: 454978 - RNA, 19 nt, Artificial Sequence
  Description of Artificial Sequence: Synthetic oligonucleotide
aggcggacguccaugcugc

SEQ ID NO: 454979 - RNA, 19 nt, Artificial Sequence
  Description of Artificial Sequence: Synthetic oligonucleotide
agcaccaaagcguggcgga

SEQ ID NO: 454980 - RNA, 19 nt, Artificial Sequence
  Description of Artificial Sequence: Synthetic oligonucleotide
cgaauuagaaugucagagc

SEQ ID NO: 454981 - RNA, 19 nt, Artificial Sequence
  Description of Artificial Sequence: Synthetic oligonucleotide
cuuaacccuucucgggaag

SEQ ID NO: 454982 - RNA, 19 nt, Artificial Sequence
  Description of Artificial Sequence: Synthetic oligonucleotide
gguacggaugcacuucuug

SEQ ID NO: 454983 - RNA, 19 nt, Artificial Sequence
  Description of Artificial Sequence: Synthetic oligonucleotide
ccaacugucaagucugaac

SEQ ID NO: 454984 - RNA, 19 nt, Artificial Sequence
  Description of Artificial Sequence: Synthetic oligonucleotide
guacaaauauauauauaua

SEQ ID NO: 454985 - RNA, 19 nt, Artificial Sequence
  Description of Artificial Sequence: Synthetic oligonucleotide
ucauucgaauuagaauguc

SEQ ID NO: 454986 - RNA, 19 nt, Artificial Sequence
  Description of Artificial Sequence: Synthetic oligonucleotide
agauaguaccagccuuucu

SEQ ID NO: 454987 - RNA, 19 nt, Artificial Sequence
  Description of Artificial Sequence: Synthetic oligonucleotide
aggcgaucaugucggggcg

SEQ ID NO: 454988 - RNA, 19 nt, Artificial Sequence
  Description of Artificial Sequence: Synthetic oligonucleotide
guaacguucucacuuuggu

SEQ ID NO: 454989 - RNA, 19 nt, Artificial Sequence
  Description of Artificial Sequence: Synthetic oligonucleotide
gucgaggcaagugcauugg

SEQ ID NO: 454990 - RNA, 19 nt, Artificial Sequence
  Description of Artificial Sequence: Synthetic oligonucleotide
accagcuaccccgagccag

SEQ ID NO: 454991 - RNA, 19 nt, Artificial Sequence
  Description of Artificial Sequence: Synthetic oligonucleotide
cuauuuguaugacaauggu

SEQ ID NO: 454992 - RNA, 19 nt, Artificial Sequence
  Description of Artificial Sequence: Synthetic oligonucleotide
gcauugucguugcuaaccc

SEQ ID NO: 454993 - RNA, 19 nt, Artificial Sequence
  Description of Artificial Sequence: Synthetic oligonucleotide
ugucggggcgcgacgggag

SEQ ID NO: 454994 - RNA, 19 nt, Artificial Sequence
  Description of Artificial Sequence: Synthetic oligonucleotide
guguaacguucucacuuug

SEQ ID NO: 454995 - RNA, 19 nt, Artificial Sequence
  Description of Artificial Sequence: Synthetic oligonucleotide
gagccgaagucgcaguaga

SEQ ID NO: 454996 - RNA, 19 nt, Artificial Sequence
  Description of Artificial Sequence: Synthetic oligonucleotide
gccgucaggacauuugaac

SEQ ID NO: 454997 - RNA, 19 nt, Artificial Sequence
  Description of Artificial Sequence: Synthetic oligonucleotide
caagcaugcuauaguucuc

SEQ ID NO: 454998 - RNA, 19 nt, Artificial Sequence
  Description of Artificial Sequence: Synthetic oligonucleotide
augguguaacguucucacu

SEQ ID NO: 454999 - RNA, 19 nt, Artificial Sequence
  Description of Artificial Sequence: Synthetic oligonucleotide
gaucaugucggggcgcgac

SEQ ID NO: 455000 - RNA, 19 nt, Artificial Sequence
  Description of Artificial Sequence: Synthetic oligonucleotide
ggagacuauuuguaugaca

SEQ ID NO: 455001 - RNA, 19 nt, Artificial Sequence
  Description of Artificial Sequence: Synthetic oligonucleotide
uucgcagggccugaccaug

SEQ ID NO: 455002 - RNA, 19 nt, Artificial Sequence
  Description of Artificial Sequence: Synthetic oligonucleotide
gaacuuagcccgguagguc

SEQ ID NO: 455003 - RNA, 19 nt, Artificial Sequence
  Description of Artificial Sequence: Synthetic oligonucleotide
ucuugcgauuggccgggga

SEQ ID NO: 455004 - RNA, 19 nt, Artificial Sequence
  Description of Artificial Sequence: Synthetic oligonucleotide
ucgaggcaagugcauuggu

SEQ ID NO: 455005 - RNA, 19 nt, Artificial Sequence
  Description of Artificial Sequence: Synthetic oligonucleotide
caaagcguggcggagggga

SEQ ID NO: 455006 - RNA, 19 nt, Artificial Sequence
  Description of Artificial Sequence: Synthetic oligonucleotide
aucggccauccgugcauac

SEQ ID NO: 455007 - RNA, 19 nt, Artificial Sequence
  Description of Artificial Sequence: Synthetic oligonucleotide
gcuccgucgaggcaagugc

SEQ ID NO: 455008 - RNA, 19 nt, Artificial Sequence
  Description of Artificial Sequence: Synthetic oligonucleotide
ggccaaacgugucuuccag

SEQ ID NO: 455009 - RNA, 19 nt, Artificial Sequence
  Description of Artificial Sequence: Synthetic oligonucleotide
caagcuguccagucuaaua

SEQ ID NO: 455010 - RNA, 19 nt, Artificial Sequence
  Description of Artificial Sequence: Synthetic oligonucleotide
ugcauaccccacagaacuu

SEQ ID NO: 455011 - RNA, 19 nt, Artificial Sequence
  Description of Artificial Sequence: Synthetic oligonucleotide
caaugguguaacguucuca

SEQ ID NO: 455012 - RNA, 19 nt, Artificial Sequence
  Description of Artificial Sequence: Synthetic oligonucleotide
caccgacccaccaaagaca

SEQ ID NO: 455013 - RNA, 19 nt, Artificial Sequence
  Description of Artificial Sequence: Synthetic oligonucleotide
uggcccuuacucccuggcu

SEQ ID NO: 455014 - RNA, 19 nt, Artificial Sequence
  Description of Artificial Sequence: Synthetic oligonucleotide
cauggcccuuacucccugg

SEQ ID NO: 455015 - RNA, 19 nt, Artificial Sequence
  Description of Artificial Sequence: Synthetic oligonucleotide
uccgugcauaccccacaga

SEQ ID NO: 455016 - RNA, 19 nt, Artificial Sequence
  Description of Artificial Sequence: Synthetic oligonucleotide
acggugcgauccuugggcu

SEQ ID NO: 455017 - RNA, 19 nt, Artificial Sequence
  Description of Artificial Sequence: Synthetic oligonucleotide
cuucgcuuugaaucacaga

SEQ ID NO: 455018 - RNA, 19 nt, Artificial Sequence
  Description of Artificial Sequence: Synthetic oligonucleotide
uguuugcaagcaugcuaua

SEQ ID NO: 455019 - RNA, 19 nt, Artificial Sequence
  Description of Artificial Sequence: Synthetic oligonucleotide
gggaggacgcacagcagcg

SEQ ID NO: 455020 - RNA, 19 nt, Artificial Sequence
  Description of Artificial Sequence: Synthetic oligonucleotide
uccgucgaggcaagugcau

SEQ ID NO: 455021 - RNA, 19 nt, Artificial Sequence
  Description of Artificial Sequence: Synthetic oligonucleotide
gcacacaccgaucuugcga

SEQ ID NO: 455022 - RNA, 19 nt, Artificial Sequence
  Description of Artificial Sequence: Synthetic oligonucleotide
caggucaacuucgcagggc

SEQ ID NO: 455023 - RNA, 19 nt, Artificial Sequence
  Description of Artificial Sequence: Synthetic oligonucleotide
ccuucgcuuugaaucacag

SEQ ID NO: 455024 - RNA, 19 nt, Artificial Sequence
  Description of Artificial Sequence: Synthetic oligonucleotide
cagauaguaccagccuuuc

SEQ ID NO: 455025 - RNA, 19 nt, Artificial Sequence
  Description of Artificial Sequence: Synthetic oligonucleotide
caugucggggcgcgacggg

SEQ ID NO: 455026 - RNA, 19 nt, Artificial Sequence
  Description of Artificial Sequence: Synthetic oligonucleotide
ggacacggacucugggcgg

SEQ ID NO: 455027 - RNA, 19 nt, Artificial Sequence
  Description of Artificial Sequence: Synthetic oligonucleotide
guggcgucuggagcugucg

SEQ ID NO: 455028 - RNA, 19 nt, Artificial Sequence
  Description of Artificial Sequence: Synthetic oligonucleotide
caaaccagugucugagacu

SEQ ID NO: 455029 - RNA, 19 nt, Artificial Sequence
  Description of Artificial Sequence: Synthetic oligonucleotide
aaccgccauccguccagca

SEQ ID NO: 455030 - RNA, 19 nt, Artificial Sequence
  Description of Artificial Sequence: Synthetic oligonucleotide
acgcuccgugcacaguucu

SEQ ID NO: 455031 - RNA, 19 nt, Artificial Sequence
  Description of Artificial Sequence: Synthetic oligonucleotide
caccgaucuugcgauuggc

SEQ ID NO: 455032 - RNA, 19 nt, Artificial Sequence
  Description of Artificial Sequence: Synthetic oligonucleotide
ccauccguccagcaccagg

SEQ ID NO: 455033 - RNA, 19 nt, Artificial Sequence
  Description of Artificial Sequence: Synthetic oligonucleotide
cuccgucgaggcaagugca

SEQ ID NO: 455034 - RNA, 19 nt, Artificial Sequence
  Description of Artificial Sequence: Synthetic oligonucleotide
gucggggcgcgacgggagg

SEQ ID NO: 455035 - RNA, 19 nt, Artificial Sequence
  Description of Artificial Sequence: Synthetic oligonucleotide
uuagcccgguaggucuuca

SEQ ID NO: 455036 - RNA, 19 nt, Artificial Sequence
  Description of Artificial Sequence: Synthetic oligonucleotide
ggcgcugugcgcuaaugaa

SEQ ID NO: 455037 - RNA, 19 nt, Artificial Sequence
  Description of Artificial Sequence: Synthetic oligonucleotide
ggagccgaagucgcaguag

SEQ ID NO: 455038 - RNA, 19 nt, Artificial Sequence
  Description of Artificial Sequence: Synthetic oligonucleotide
agccgaagucgcaguagag

SEQ ID NO: 455039 - RNA, 19 nt, Artificial Sequence
  Description of Artificial Sequence: Synthetic oligonucleotide
gcgcuaaugaaguccaacu

SEQ ID NO: 455040 - RNA, 19 nt, Artificial Sequence
  Description of Artificial Sequence: Synthetic oligonucleotide
gacacggacucugggcgga

SEQ ID NO: 455041 - RNA, 19 nt, Artificial Sequence
  Description of Artificial Sequence: Synthetic oligonucleotide
uuacuagggcaggacuguu

SEQ ID NO: 455042 - RNA, 19 nt, Artificial Sequence
  Description of Artificial Sequence: Synthetic oligonucleotide
aggggcgagucagggcugg

SEQ ID NO: 455043 - RNA, 19 nt, Artificial Sequence
  Description of Artificial Sequence: Synthetic oligonucleotide
gccgcugcgguacaccgac

SEQ ID NO: 455044 - RNA, 19 nt, Artificial Sequence
  Description of Artificial Sequence: Synthetic oligonucleotide
aaggggcgagucagggcug

SEQ ID NO: 455045 - RNA, 19 nt, Artificial Sequence
  Description of Artificial Sequence: Synthetic oligonucleotide
gcgcugugcgcuaaugaag

SEQ ID NO: 455046 - RNA, 19 nt, Artificial Sequence
  Description of Artificial Sequence: Synthetic oligonucleotide
ggugcgauccuugggcuca

SEQ ID NO: 455047 - RNA, 19 nt, Artificial Sequence
  Description of Artificial Sequence: Synthetic oligonucleotide
ucuggcgcugugcgcuaau

SEQ ID NO: 455048 - RNA, 19 nt, Artificial Sequence
  Description of Artificial Sequence: Synthetic oligonucleotide
gaccacugucauucgaauu

SEQ ID NO: 455049 - RNA, 19 nt, Artificial Sequence
  Description of Artificial Sequence: Synthetic oligonucleotide
cucgccgcugcgguacacc

SEQ ID NO: 455050 - RNA, 19 nt, Artificial Sequence
  Description of Artificial Sequence: Synthetic oligonucleotide
gcgaucaugucggggcgcg

SEQ ID NO: 455051 - RNA, 19 nt, Artificial Sequence
  Description of Artificial Sequence: Synthetic oligonucleotide
cgugcauaccccacagaac

SEQ ID NO: 455052 - RNA, 19 nt, Artificial Sequence
  Description of Artificial Sequence: Synthetic oligonucleotide
cggccauccgugcauaccc

SEQ ID NO: 455053 - RNA, 19 nt, Artificial Sequence
  Description of Artificial Sequence: Synthetic oligonucleotide
ggaacaggcgcuccacucu

SEQ ID NO: 455054 - RNA, 19 nt, Artificial Sequence
  Description of Artificial Sequence: Synthetic oligonucleotide
ccgugcauaccccacagaa

SEQ ID NO: 455055 - RNA, 19 nt, Artificial Sequence
  Description of Artificial Sequence: Synthetic oligonucleotide
agcuaccccgagccagcca

SEQ ID NO: 455056 - RNA, 19 nt, Artificial Sequence
  Description of Artificial Sequence: Synthetic oligonucleotide
gcgacgggaggacgcacag

SEQ ID NO: 455057 - RNA, 19 nt, Artificial Sequence
  Description of Artificial Sequence: Synthetic oligonucleotide
cucgggaaggggcgaguca

SEQ ID NO: 455058 - RNA, 19 nt, Artificial Sequence
  Description of Artificial Sequence: Synthetic oligonucleotide
augucggggcgcgacggga

SEQ ID NO: 455059 - RNA, 19 nt, Artificial Sequence
  Description of Artificial Sequence: Synthetic oligonucleotide
cgucgaggcaagugcauug

SEQ ID NO: 455060 - RNA, 19 nt, Artificial Sequence
  Description of Artificial Sequence: Synthetic oligonucleotide
cucacaccggcggggcagc

SEQ ID NO: 455061 - RNA, 19 nt, Artificial Sequence
  Description of Artificial Sequence: Synthetic oligonucleotide
gguguaacguucucacuuu

SEQ ID NO: 455062 - RNA, 19 nt, Artificial Sequence
  Description of Artificial Sequence: Synthetic oligonucleotide
gaacagcgggacucagccu

SEQ ID NO: 455063 - RNA, 19 nt, Artificial Sequence
  Description of Artificial Sequence: Synthetic oligonucleotide
gcggccggagccuggacac

SEQ ID NO: 455064 - RNA, 19 nt, Artificial Sequence
  Description of Artificial Sequence: Synthetic oligonucleotide
gccggcucggugcacuggc

SEQ ID NO: 455065 - RNA, 19 nt, Artificial Sequence
  Description of Artificial Sequence: Synthetic oligonucleotide
gaacucaguucaaguuaua

SEQ ID NO: 455066 - RNA, 19 nt, Artificial Sequence
  Description of Artificial Sequence: Synthetic oligonucleotide
ggacccgcgacggaggcga

SEQ ID NO: 455067 - RNA, 19 nt, Artificial Sequence
  Description of Artificial Sequence: Synthetic oligonucleotide
auucuggcgcugugcgcua

SEQ ID NO: 455068 - RNA, 19 nt, Artificial Sequence
  Description of Artificial Sequence: Synthetic oligonucleotide
acucgccgcugcgguacac

SEQ ID NO: 455069 - RNA, 19 nt, Artificial Sequence
  Description of Artificial Sequence: Synthetic oligonucleotide
ccuggcagcuuaacccuuc

SEQ ID NO: 455070 - RNA, 19 nt, Artificial Sequence
  Description of Artificial Sequence: Synthetic oligonucleotide
ccacggugcgauccuuggg

SEQ ID NO: 455071 - RNA, 19 nt, Artificial Sequence
  Description of Artificial Sequence: Synthetic oligonucleotide
caacuucgcagggccugac

SEQ ID NO: 455072 - RNA, 19 nt, Artificial Sequence
  Description of Artificial Sequence: Synthetic oligonucleotide
acacaccgaucuugcgauu

SEQ ID NO: 455073 - RNA, 19 nt, Artificial Sequence
  Description of Artificial Sequence: Synthetic oligonucleotide
gugggucgcaggggucacg

SEQ ID NO: 455074 - RNA, 19 nt, Artificial Sequence
  Description of Artificial Sequence: Synthetic oligonucleotide
gcaccaaagcguggcggag

SEQ ID NO: 455075 - RNA, 19 nt, Artificial Sequence
  Description of Artificial Sequence: Synthetic oligonucleotide
ggcggagguuggugucugg

SEQ ID NO: 455076 - RNA, 19 nt, Artificial Sequence
  Description of Artificial Sequence: Synthetic oligonucleotide
gccauccgugcauacccca

SEQ ID NO: 455077 - RNA, 19 nt, Artificial Sequence
  Description of Artificial Sequence: Synthetic oligonucleotide
caaguucauggcccuuacu

SEQ ID NO: 455078 - RNA, 19 nt, Artificial Sequence
  Description of Artificial Sequence: Synthetic oligonucleotide
guucagaauuugaggcuau

SEQ ID NO: 455079 - RNA, 19 nt, Artificial Sequence
  Description of Artificial Sequence: Synthetic oligonucleotide
gacucgccgcugcgguaca

SEQ ID NO: 455080 - RNA, 19 nt, Artificial Sequence
  Description of Artificial Sequence: Synthetic oligonucleotide
acccgcgacggaggcgauc

SEQ ID NO: 455081 - RNA, 19 nt, Artificial Sequence
  Description of Artificial Sequence: Synthetic oligonucleotide
gcugcgguacaccgaccca

SEQ ID NO: 455082 - RNA, 19 nt, Artificial Sequence
  Description of Artificial Sequence: Synthetic oligonucleotide
cuggacgcuccaggcggug

SEQ ID NO: 455083 - RNA, 19 nt, Artificial Sequence
  Description of Artificial Sequence: Synthetic oligonucleotide
gcgacggaggcgaucaugu

SEQ ID NO: 455084 - RNA, 19 nt, Artificial Sequence
  Description of Artificial Sequence: Synthetic oligonucleotide
cuucgcagggccugaccau

SEQ ID NO: 455085 - RNA, 19 nt, Artificial Sequence
  Description of Artificial Sequence: Synthetic oligonucleotide
ggcccuuacucccuggcuu

SEQ ID NO: 455086 - RNA, 19 nt, Artificial Sequence
  Description of Artificial Sequence: Synthetic oligonucleotide
gcggagguuggugucugga

SEQ ID NO: 455087 - RNA, 19 nt, Artificial Sequence
  Description of Artificial Sequence: Synthetic oligonucleotide
gggagccgaagucgcagua

SEQ ID NO: 455088 - RNA, 19 nt, Artificial Sequence
  Description of Artificial Sequence: Synthetic oligonucleotide
cgcugugcgcuaaugaagu

SEQ ID NO: 455089 - RNA, 19 nt, Artificial Sequence
  Description of Artificial Sequence: Synthetic oligonucleotide
gcgguacaccgacccacca

SEQ ID NO: 455090 - RNA, 19 nt, Artificial Sequence
  Description of Artificial Sequence: Synthetic oligonucleotide
cccgcgacggaggcgauca

SEQ ID NO: 455091 - RNA, 19 nt, Artificial Sequence
  Description of Artificial Sequence: Synthetic oligonucleotide
gcggacguccaugcugcac

SEQ ID NO: 455092 - RNA, 19 nt, Artificial Sequence
  Description of Artificial Sequence: Synthetic oligonucleotide
gcugccgucuggaggaggu

SEQ ID NO: 455093 - RNA, 19 nt, Artificial Sequence
  Description of Artificial Sequence: Synthetic oligonucleotide
gcgggccggcugcagagga

SEQ ID NO: 455094 - RNA, 19 nt, Artificial Sequence
  Description of Artificial Sequence: Synthetic oligonucleotide
gcgucuggagcugucggcu

SEQ ID NO: 455095 - RNA, 19 nt, Artificial Sequence
  Description of Artificial Sequence: Synthetic oligonucleotide
caucggccauccgugcaua

SEQ ID NO: 455096 - RNA, 19 nt, Artificial Sequence
  Description of Artificial Sequence: Synthetic oligonucleotide
gguggcgucuggagcuguc

SEQ ID NO: 455097 - RNA, 19 nt, Artificial Sequence
  Description of Artificial Sequence: Synthetic oligonucleotide
caccggcggggcagcgcug

SEQ ID NO: 455098 - RNA, 19 nt, Artificial Sequence
  Description of Artificial Sequence: Synthetic oligonucleotide
ggggagccgaagucgcagu

SEQ ID NO: 455099 - RNA, 19 nt, Artificial Sequence
  Description of Artificial Sequence: Synthetic oligonucleotide
gugcgcuaaugaaguccaa

SEQ ID NO: 455100 - RNA, 19 nt, Artificial Sequence
  Description of Artificial Sequence: Synthetic oligonucleotide
cuaccccgagccagccacu

SEQ ID NO: 455101 - RNA, 19 nt, Artificial Sequence
  Description of Artificial Sequence: Synthetic oligonucleotide
gcccuuacucccuggcuuu

SEQ ID NO: 455102 - RNA, 19 nt, Artificial Sequence
  Description of Artificial Sequence: Synthetic oligonucleotide
ccaaccacggugcgauccu

SEQ ID NO: 455103 - RNA, 19 nt, Artificial Sequence
  Description of Artificial Sequence: Synthetic oligonucleotide
cggugcgauccuugggcuc

SEQ ID NO: 455104 - RNA, 19 nt, Artificial Sequence
  Description of Artificial Sequence: Synthetic oligonucleotide
cgacggaggcgaucauguc

SEQ ID NO: 455105 - RNA, 19 nt, Artificial Sequence
  Description of Artificial Sequence: Synthetic oligonucleotide
ccagucuaauagacaggau

SEQ ID NO: 455106 - RNA, 19 nt, Artificial Sequence
  Description of Artificial Sequence: Synthetic oligonucleotide
cgauuggccggggagccga

SEQ ID NO: 455107 - RNA, 19 nt, Artificial Sequence
  Description of Artificial Sequence: Synthetic oligonucleotide
ccgcugcgguacaccgacc

SEQ ID NO: 455108 - RNA, 19 nt, Artificial Sequence
  Description of Artificial Sequence: Synthetic oligonucleotide
cguugcuaacccgggugga

SEQ ID NO: 455109 - RNA, 19 nt, Artificial Sequence
  Description of Artificial Sequence: Synthetic oligonucleotide
ggcgcggccggagccugga

SEQ ID NO: 455110 - RNA, 19 nt, Artificial Sequence
  Description of Artificial Sequence: Synthetic oligonucleotide
gcgcuccacucuguggucu

SEQ ID NO: 455111 - RNA, 19 nt, Artificial Sequence
  Description of Artificial Sequence: Synthetic oligonucleotide
cgccggcucggugcacugg

SEQ ID NO: 455112 - RNA, 19 nt, Artificial Sequence
  Description of Artificial Sequence: Synthetic oligonucleotide
cgccgcugcgguacaccga

SEQ ID NO: 455113 - RNA, 19 nt, Artificial Sequence
  Description of Artificial Sequence: Synthetic oligonucleotide
ccgucgaggcaagugcauu

SEQ ID NO: 455114 - RNA, 19 nt, Artificial Sequence
  Description of Artificial Sequence: Synthetic oligonucleotide
gcugucggcuggggcggcu

SEQ ID NO: 455115 - RNA, 19 nt, Artificial Sequence
  Description of Artificial Sequence: Synthetic oligonucleotide
cgaucaugucggggcgcga

SEQ ID NO: 455116 - RNA, 19 nt, Artificial Sequence
  Description of Artificial Sequence: Synthetic oligonucleotide
cgguggcgucuggagcugu

SEQ ID NO: 455117 - RNA, 19 nt, Artificial Sequence
  Description of Artificial Sequence: Synthetic oligonucleotide
ccgcgacggaggcgaucau

SEQ ID NO: 455118 - RNA, 19 nt, Artificial Sequence
  Description of Artificial Sequence: Synthetic oligonucleotide
aaccuugucacacagguac

SEQ ID NO: 455119 - RNA, 19 nt, Artificial Sequence
  Description of Artificial Sequence: Synthetic oligonucleotide
caugaaaucgauauuaucc

SEQ ID NO: 455120 - RNA, 19 nt, Artificial Sequence
  Description of Artificial Sequence: Synthetic oligonucleotide
ucaaaucgagacaagaugg

SEQ ID NO: 455121 - RNA, 19 nt, Artificial Sequence
  Description of Artificial Sequence: Synthetic oligonucleotide
ugaaguauggguccaaugg

SEQ ID NO: 455122 - RNA, 19 nt, Artificial Sequence
  Description of Artificial Sequence: Synthetic oligonucleotide
aaaucgauauuauccuccc

SEQ ID NO: 455123 - RNA, 19 nt, Artificial Sequence
  Description of Artificial Sequence: Synthetic oligonucleotide
gauguguacaccccaaugg

SEQ ID NO: 455124 - RNA, 19 nt, Artificial Sequence
  Description of Artificial Sequence: Synthetic oligonucleotide
aaggguugcaguuucaucu

SEQ ID NO: 455125 - RNA, 19 nt, Artificial Sequence
  Description of Artificial Sequence: Synthetic oligonucleotide
agagugaucacauguuugg

SEQ ID NO: 455126 - RNA, 19 nt, Artificial Sequence
  Description of Artificial Sequence: Synthetic oligonucleotide
auauaggaacuccggaugc

SEQ ID NO: 455127 - RNA, 19 nt, Artificial Sequence
  Description of Artificial Sequence: Synthetic oligonucleotide
gauauaggaacuccggaug

SEQ ID NO: 455128 - RNA, 19 nt, Artificial Sequence
  Description of Artificial Sequence: Synthetic oligonucleotide
gaaguauggguccaauggg

SEQ ID NO: 455129 - RNA, 19 nt, Artificial Sequence
  Description of Artificial Sequence: Synthetic oligonucleotide
uucaaggugguagugaucc

SEQ ID NO: 455130 - RNA, 19 nt, Artificial Sequence
  Description of Artificial Sequence: Synthetic oligonucleotide
uccgcaugaugauauagcg

SEQ ID NO: 455131 - RNA, 19 nt, Artificial Sequence
  Description of Artificial Sequence: Synthetic oligonucleotide
guaagaacucuuugaagcg

SEQ ID NO: 455132 - RNA, 19 nt, Artificial Sequence
  Description of Artificial Sequence: Synthetic oligonucleotide
uguacaaguagucggccag

SEQ ID NO: 455133 - RNA, 19 nt, Artificial Sequence
  Description of Artificial Sequence: Synthetic oligonucleotide
aaauacggguagcuuuggc

SEQ ID NO: 455134 - RNA, 19 nt, Artificial Sequence
  Description of Artificial Sequence: Synthetic oligonucleotide
aaagcggcgcuugaguugc

SEQ ID NO: 455135 - RNA, 19 nt, Artificial Sequence
  Description of Artificial Sequence: Synthetic oligonucleotide
agcaaugcgcacaauagcc

SEQ ID NO: 455136 - RNA, 19 nt, Artificial Sequence
  Description of Artificial Sequence: Synthetic oligonucleotide
ugcagcaccuuucggaugg

SEQ ID NO: 455137 - RNA, 19 nt, Artificial Sequence
  Description of Artificial Sequence: Synthetic oligonucleotide
ugauccauauugcacuucc

SEQ ID NO: 455138 - RNA, 19 nt, Artificial Sequence
  Description of Artificial Sequence: Synthetic oligonucleotide
uuuugucucaucccaucgg

SEQ ID NO: 455139 - RNA, 19 nt, Artificial Sequence
  Description of Artificial Sequence: Synthetic oligonucleotide
augaaaucgauauuauccu

SEQ ID NO: 455140 - RNA, 19 nt, Artificial Sequence
  Description of Artificial Sequence: Synthetic oligonucleotide
aguagaguugcauaugccu

SEQ ID NO: 455141 - RNA, 19 nt, Artificial Sequence
  Description of Artificial Sequence: Synthetic oligonucleotide
gaaaucgauauuauccucc

SEQ ID NO: 455142 - RNA, 19 nt, Artificial Sequence
  Description of Artificial Sequence: Synthetic oligonucleotide
aucgauauuauccuccccu

SEQ ID NO: 455143 - RNA, 19 nt, Artificial Sequence
  Description of Artificial Sequence: Synthetic oligonucleotide
aggguauuguggcagcugc

SEQ ID NO: 455144 - RNA, 19 nt, Artificial Sequence
  Description of Artificial Sequence: Synthetic oligonucleotide
accuggaauaaccugagug

SEQ ID NO: 455145 - RNA, 19 nt, Artificial Sequence
  Description of Artificial Sequence: Synthetic oligonucleotide
gucaaaucgagacaagaug

SEQ ID NO: 455146 - RNA, 19 nt, Artificial Sequence
  Description of Artificial Sequence: Synthetic oligonucleotide
gauggcaugcucuggauac

SEQ ID NO: 455147 - RNA, 19 nt, Artificial Sequence
  Description of Artificial Sequence: Synthetic oligonucleotide
aucgagacaagaugguagg

SEQ ID NO: 455148 - RNA, 19 nt, Artificial Sequence
  Description of Artificial Sequence: Synthetic oligonucleotide
auguguacaccccaauggg

SEQ ID NO: 455149 - RNA, 19 nt, Artificial Sequence
  Description of Artificial Sequence: Synthetic oligonucleotide
ucgcuguagaaaaugccgg

SEQ ID NO: 455150 - RNA, 19 nt, Artificial Sequence
  Description of Artificial Sequence: Synthetic oligonucleotide
accucgauccaguauuccc

SEQ ID NO: 455151 - RNA, 19 nt, Artificial Sequence
  Description of Artificial Sequence: Synthetic oligonucleotide
auguagagugaucacaugu

SEQ ID NO: 455152 - RNA, 19 nt, Artificial Sequence
  Description of Artificial Sequence: Synthetic oligonucleotide
auggcaauauuggugaggg

SEQ ID NO: 455153 - RNA, 19 nt, Artificial Sequence
  Description of Artificial Sequence: Synthetic oligonucleotide
caagcuauagccuucuuca

SEQ ID NO: 455154 - RNA, 19 nt, Artificial Sequence
  Description of Artificial Sequence: Synthetic oligonucleotide
uugaguugcuucucgauac

SEQ ID NO: 455155 - RNA, 19 nt, Artificial Sequence
  Description of Artificial Sequence: Synthetic oligonucleotide
guugaugucaccucggcga

SEQ ID NO: 455156 - RNA, 19 nt, Artificial Sequence
  Description of Artificial Sequence: Synthetic oligonucleotide
uagagugaucacauguuug

SEQ ID NO: 455157 - RNA, 19 nt, Artificial Sequence
  Description of Artificial Sequence: Synthetic oligonucleotide
uuauccuccccuuuugucu

SEQ ID NO: 455158 - RNA, 19 nt, Artificial Sequence
  Description of Artificial Sequence: Synthetic oligonucleotide
aggacccggauauaggaac

SEQ ID NO: 455159 - RNA, 19 nt, Artificial Sequence
  Description of Artificial Sequence: Synthetic oligonucleotide
aguugcauaugccugggca

SEQ ID NO: 455160 - RNA, 19 nt, Artificial Sequence
  Description of Artificial Sequence: Synthetic oligonucleotide
uguaaugccgcuugaguuc

SEQ ID NO: 455161 - RNA, 19 nt, Artificial Sequence
  Description of Artificial Sequence: Synthetic oligonucleotide
aggaacaaccuugucacac

SEQ ID NO: 455162 - RNA, 19 nt, Artificial Sequence
  Description of Artificial Sequence: Synthetic oligonucleotide
caucccaucggccaaacac

SEQ ID NO: 455163 - RNA, 19 nt, Artificial Sequence
  Description of Artificial Sequence: Synthetic oligonucleotide
cuuuugucucaucccaucg

SEQ ID NO: 455164 - RNA, 19 nt, Artificial Sequence
  Description of Artificial Sequence: Synthetic oligonucleotide
ucaugucaaaucgagacaa

SEQ ID NO: 455165 - RNA, 19 nt, Artificial Sequence
  Description of Artificial Sequence: Synthetic oligonucleotide
cguaagaacucuuugaagc

SEQ ID NO: 455166 - RNA, 19 nt, Artificial Sequence
  Description of Artificial Sequence: Synthetic oligonucleotide
gaugauauagcgguucuuc

SEQ ID NO: 455167 - RNA, 19 nt, Artificial Sequence
  Description of Artificial Sequence: Synthetic oligonucleotide
cacacuugcacuugucagg

SEQ ID NO: 455168 - RNA, 19 nt, Artificial Sequence
  Description of Artificial Sequence: Synthetic oligonucleotide
cucgauacggcucagcauc

SEQ ID NO: 455169 - RNA, 19 nt, Artificial Sequence
  Description of Artificial Sequence: Synthetic oligonucleotide
caggcgacgaaauuccucc

SEQ ID NO: 455170 - RNA, 19 nt, Artificial Sequence
  Description of Artificial Sequence: Synthetic oligonucleotide
ugucgcuguagaaaaugcc

SEQ ID NO: 455171 - RNA, 19 nt, Artificial Sequence
  Description of Artificial Sequence: Synthetic oligonucleotide
acacuugcacuugucaggc

SEQ ID NO: 455172 - RNA, 19 nt, Artificial Sequence
  Description of Artificial Sequence: Synthetic oligonucleotide
ugaguugcuucucgauacg

SEQ ID NO: 455173 - RNA, 19 nt, Artificial Sequence
  Description of Artificial Sequence: Synthetic oligonucleotide
acagacaaccccaccaucg

SEQ ID NO: 455174 - RNA, 19 nt, Artificial Sequence
  Description of Artificial Sequence: Synthetic oligonucleotide
aaguccugaacaaugcugu

SEQ ID NO: 455175 - RNA, 19 nt, Artificial Sequence
  Description of Artificial Sequence: Synthetic oligonucleotide
gaacaaccuugucacacag

SEQ ID NO: 455176 - RNA, 19 nt, Artificial Sequence
  Description of Artificial Sequence: Synthetic oligonucleotide
agauguguacaccccaaug

SEQ ID NO: 455177 - RNA, 19 nt, Artificial Sequence
  Description of Artificial Sequence: Synthetic oligonucleotide
uguguacaccccaauggga

SEQ ID NO: 455178 - RNA, 19 nt, Artificial Sequence
  Description of Artificial Sequence: Synthetic oligonucleotide
caaacaccgaguuggcugc

SEQ ID NO: 455179 - RNA, 19 nt, Artificial Sequence
  Description of Artificial Sequence: Synthetic oligonucleotide
uggaaauacggguagcuuu

SEQ ID NO: 455180 - RNA, 19 nt, Artificial Sequence
  Description of Artificial Sequence: Synthetic oligonucleotide
uggguagugaagcccuccg

SEQ ID NO: 455181 - RNA, 19 nt, Artificial Sequence
  Description of Artificial Sequence: Synthetic oligonucleotide
ucagguuugaggguugaca

SEQ ID NO: 455182 - RNA, 19 nt, Artificial Sequence
  Description of Artificial Sequence: Synthetic oligonucleotide
caugacugcaccucaccgc

SEQ ID NO: 455183 - RNA, 19 nt, Artificial Sequence
  Description of Artificial Sequence: Synthetic oligonucleotide
agcccgacaugacugcacc

SEQ ID NO: 455184 - RNA, 19 nt, Artificial Sequence
  Description of Artificial Sequence: Synthetic oligonucleotide
ugccguaagaacucuuuga

SEQ ID NO: 455185 - RNA, 19 nt, Artificial Sequence
  Description of Artificial Sequence: Synthetic oligonucleotide
aucaugucaaaucgagaca

SEQ ID NO: 455186 - RNA, 19 nt, Artificial Sequence
  Description of Artificial Sequence: Synthetic oligonucleotide
guuuguacaaguagucggc

SEQ ID NO: 455187 - RNA, 19 nt, Artificial Sequence
  Description of Artificial Sequence: Synthetic oligonucleotide
guaggcaugaaaucgauau

SEQ ID NO: 455188 - RNA, 19 nt, Artificial Sequence
  Description of Artificial Sequence: Synthetic oligonucleotide
aaagcuacggccagagcca

SEQ ID NO: 455189 - RNA, 19 nt, Artificial Sequence
  Description of Artificial Sequence: Synthetic oligonucleotide
aucccaucggccaaacacc

SEQ ID NO: 455190 - RNA, 19 nt, Artificial Sequence
  Description of Artificial Sequence: Synthetic oligonucleotide
acacgaaacaccgcucccc

SEQ ID NO: 455191 - RNA, 19 nt, Artificial Sequence
  Description of Artificial Sequence: Synthetic oligonucleotide
gauggaauagaugcccaug

SEQ ID NO: 455192 - RNA, 19 nt, Artificial Sequence
  Description of Artificial Sequence: Synthetic oligonucleotide
aguucaaggugguagugau

SEQ ID NO: 455193 - RNA, 19 nt, Artificial Sequence
  Description of Artificial Sequence: Synthetic oligonucleotide
uguuggaccucuccccugc

SEQ ID NO: 455194 - RNA, 19 nt, Artificial Sequence
  Description of Artificial Sequence: Synthetic oligonucleotide
uuuguacaaguagucggcc

SEQ ID NO: 455195 - RNA, 19 nt, Artificial Sequence
  Description of Artificial Sequence: Synthetic oligonucleotide
aacuccggaugcccacacc

SEQ ID NO: 455196 - RNA, 19 nt, Artificial Sequence
  Description of Artificial Sequence: Synthetic oligonucleotide
augauauagcgguucuuca

SEQ ID NO: 455197 - RNA, 19 nt, Artificial Sequence
  Description of Artificial Sequence: Synthetic oligonucleotide
ugacucuguucccaggaac

SEQ ID NO: 455198 - RNA, 19 nt, Artificial Sequence
  Description of Artificial Sequence: Synthetic oligonucleotide
augaaguauggguccaaug

SEQ ID NO: 455199 - RNA, 19 nt, Artificial Sequence
  Description of Artificial Sequence: Synthetic oligonucleotide
cugcaugcgguguuggacc

SEQ ID NO: 455200 - RNA, 19 nt, Artificial Sequence
  Description of Artificial Sequence: Synthetic oligonucleotide
aaugccggggucgucgaag

SEQ ID NO: 455201 - RNA, 19 nt, Artificial Sequence
  Description of Artificial Sequence: Synthetic oligonucleotide
uacuaagggccucagcaau

SEQ ID NO: 455202 - RNA, 19 nt, Artificial Sequence
  Description of Artificial Sequence: Synthetic oligonucleotide
ugggcgcauggcaauauug

SEQ ID NO: 455203 - RNA, 19 nt, Artificial Sequence
  Description of Artificial Sequence: Synthetic oligonucleotide
uuacuaagggccucagcaa

SEQ ID NO: 455204 - RNA, 19 nt, Artificial Sequence
  Description of Artificial Sequence: Synthetic oligonucleotide
ucuuacuaagggccucagc

SEQ ID NO: 455205 - RNA, 19 nt, Artificial Sequence
  Description of Artificial Sequence: Synthetic oligonucleotide
ccgcauucagguuugaggg

SEQ ID NO: 455206 - RNA, 19 nt, Artificial Sequence
  Description of Artificial Sequence: Synthetic oligonucleotide
aucugacuugagcacugac

SEQ ID NO: 455207 - RNA, 19 nt, Artificial Sequence
  Description of Artificial Sequence: Synthetic oligonucleotide
gucccucucgugcugacgg

SEQ ID NO: 455208 - RNA, 19 nt, Artificial Sequence
  Description of Artificial Sequence: Synthetic oligonucleotide
agguuugaggguugacagg

SEQ ID NO: 455209 - RNA, 19 nt, Artificial Sequence
  Description of Artificial Sequence: Synthetic oligonucleotide
ucgucgaagcccgacauga

SEQ ID NO: 455210 - RNA, 19 nt, Artificial Sequence
  Description of Artificial Sequence: Synthetic oligonucleotide
gauauagcgguucuucagu

SEQ ID NO: 455211 - RNA, 19 nt, Artificial Sequence
  Description of Artificial Sequence: Synthetic oligonucleotide
uccuggguagugaagcccu

SEQ ID NO: 455212 - RNA, 19 nt, Artificial Sequence
  Description of Artificial Sequence: Synthetic oligonucleotide
uagugaagcccuccgcccc

SEQ ID NO: 455213 - RNA, 19 nt, Artificial Sequence
  Description of Artificial Sequence: Synthetic oligonucleotide
acggcgaucacugucccuc

SEQ ID NO: 455214 - RNA, 19 nt, Artificial Sequence
  Description of Artificial Sequence: Synthetic oligonucleotide
gguagugaagcccuccgcc

SEQ ID NO: 455215 - RNA, 19 nt, Artificial Sequence
  Description of Artificial Sequence: Synthetic oligonucleotide
uugcaguuucaucuuacua

SEQ ID NO: 455216 - RNA, 19 nt, Artificial Sequence
  Description of Artificial Sequence: Synthetic oligonucleotide
cauggcaauauuggugagg

SEQ ID NO: 455217 - RNA, 19 nt, Artificial Sequence
  Description of Artificial Sequence: Synthetic oligonucleotide
gguuugaggguugacaggc

SEQ ID NO: 455218 - RNA, 19 nt, Artificial Sequence
  Description of Artificial Sequence: Synthetic oligonucleotide
gacgaaauuccuccucuuc

SEQ ID NO: 455219 - RNA, 19 nt, Artificial Sequence
  Description of Artificial Sequence: Synthetic oligonucleotide
uauaggaacuccggaugcc

SEQ ID NO: 455220 - RNA, 19 nt, Artificial Sequence
  Description of Artificial Sequence: Synthetic oligonucleotide
uggaacggcgaucacuguc

SEQ ID NO: 455221 - RNA, 19 nt, Artificial Sequence
  Description of Artificial Sequence: Synthetic oligonucleotide
aggaacuccggaugcccac

SEQ ID NO: 455222 - RNA, 19 nt, Artificial Sequence
  Description of Artificial Sequence: Synthetic oligonucleotide
cucaucaccgcagucgggc

SEQ ID NO: 455223 - RNA, 19 nt, Artificial Sequence
  Description of Artificial Sequence: Synthetic oligonucleotide
ucccgcgucaccgaggcag

SEQ ID NO: 455224 - RNA, 19 nt, Artificial Sequence
  Description of Artificial Sequence: Synthetic oligonucleotide
agccugauccauauugcac

SEQ ID NO: 455225 - RNA, 19 nt, Artificial Sequence
  Description of Artificial Sequence: Synthetic oligonucleotide
gaguugcuucucgauacgg

SEQ ID NO: 455226 - RNA, 19 nt, Artificial Sequence
  Description of Artificial Sequence: Synthetic oligonucleotide
acgaugaagaucaugucaa

SEQ ID NO: 455227 - RNA, 19 nt, Artificial Sequence
  Description of Artificial Sequence: Synthetic oligonucleotide
aggcaugaaaucgauauua

SEQ ID NO: 455228 - RNA, 19 nt, Artificial Sequence
  Description of Artificial Sequence: Synthetic oligonucleotide
gaaauacggguagcuuugg

SEQ ID NO: 455229 - RNA, 19 nt, Artificial Sequence
  Description of Artificial Sequence: Synthetic oligonucleotide
uguacaccccaaugggaga

SEQ ID NO: 455230 - RNA, 19 nt, Artificial Sequence
  Description of Artificial Sequence: Synthetic oligonucleotide
uggagcaacucaucaccgc

SEQ ID NO: 455231 - RNA, 19 nt, Artificial Sequence
  Description of Artificial Sequence: Synthetic oligonucleotide
ggugacgccggcuuucgcg

SEQ ID NO: 455232 - RNA, 19 nt, Artificial Sequence
  Description of Artificial Sequence: Synthetic oligonucleotide
ggagccaauggcaaagcgg

SEQ ID NO: 455233 - RNA, 19 nt, Artificial Sequence
  Description of Artificial Sequence: Synthetic oligonucleotide
uaccugucacaguagaguu

SEQ ID NO: 455234 - RNA, 19 nt, Artificial Sequence
  Description of Artificial Sequence: Synthetic oligonucleotide
ugcgguguuggaccucucc

SEQ ID NO: 455235 - RNA, 19 nt, Artificial Sequence
  Description of Artificial Sequence: Synthetic oligonucleotide
augccggggucgucgaagc

SEQ ID NO: 455236 - RNA, 19 nt, Artificial Sequence
  Description of Artificial Sequence: Synthetic oligonucleotide
uggauacuucugcuuggug

SEQ ID NO: 455237 - RNA, 19 nt, Artificial Sequence
  Description of Artificial Sequence: Synthetic oligonucleotide
cuaagggccucagcaaugc

SEQ ID NO: 455238 - RNA, 19 nt, Artificial Sequence
  Description of Artificial Sequence: Synthetic oligonucleotide
caucagggagccucuuccg

SEQ ID NO: 455239 - RNA, 19 nt, Artificial Sequence
  Description of Artificial Sequence: Synthetic oligonucleotide
acauguagagugaucacau

SEQ ID NO: 455240 - RNA, 19 nt, Artificial Sequence
  Description of Artificial Sequence: Synthetic oligonucleotide
gguugaugucaccucggcg

SEQ ID NO: 455241 - RNA, 19 nt, Artificial Sequence
  Description of Artificial Sequence: Synthetic oligonucleotide
acuccgcaugaugauauag

SEQ ID NO: 455242 - RNA, 19 nt, Artificial Sequence
  Description of Artificial Sequence: Synthetic oligonucleotide
ucgcucggcaguaagcaau

SEQ ID NO: 455243 - RNA, 19 nt, Artificial Sequence
  Description of Artificial Sequence: Synthetic oligonucleotide
ugauggaauagaugcccau

SEQ ID NO: 455244 - RNA, 19 nt, Artificial Sequence
  Description of Artificial Sequence: Synthetic oligonucleotide
guauuguggcagcugcggc

SEQ ID NO: 455245 - RNA, 19 nt, Artificial Sequence
  Description of Artificial Sequence: Synthetic oligonucleotide
ggaaauacggguagcuuug

SEQ ID NO: 455246 - RNA, 19 nt, Artificial Sequence
  Description of Artificial Sequence: Synthetic oligonucleotide
cauguagagugaucacaug

SEQ ID NO: 455247 - RNA, 19 nt, Artificial Sequence
  Description of Artificial Sequence: Synthetic oligonucleotide
ucggcgagugaguccauca

SEQ ID NO: 455248 - RNA, 19 nt, Artificial Sequence
  Description of Artificial Sequence: Synthetic oligonucleotide
ucggccaaacaccgaguug

SEQ ID NO: 455249 - RNA, 19 nt, Artificial Sequence
  Description of Artificial Sequence: Synthetic oligonucleotide
uugcuucucgauacggcuc

SEQ ID NO: 455250 - RNA, 19 nt, Artificial Sequence
  Description of Artificial Sequence: Synthetic oligonucleotide
gaagggcauagcccucuag

SEQ ID NO: 455251 - RNA, 19 nt, Artificial Sequence
  Description of Artificial Sequence: Synthetic oligonucleotide
ucguggauugccacacggu

SEQ ID NO: 455252 - RNA, 19 nt, Artificial Sequence
  Description of Artificial Sequence: Synthetic oligonucleotide
auauagcgguucuucaguu

SEQ ID NO: 455253 - RNA, 19 nt, Artificial Sequence
  Description of Artificial Sequence: Synthetic oligonucleotide
aagcccgacaugacugcac

SEQ ID NO: 455254 - RNA, 19 nt, Artificial Sequence
  Description of Artificial Sequence: Synthetic oligonucleotide
gacugcaccucaccgccgc

SEQ ID NO: 455255 - RNA, 19 nt, Artificial Sequence
  Description of Artificial Sequence: Synthetic oligonucleotide
ucgauauuauccuccccuu

SEQ ID NO: 455256 - RNA, 19 nt, Artificial Sequence
  Description of Artificial Sequence: Synthetic oligonucleotide
agcccuccgccccugacag

SEQ ID NO: 455257 - RNA, 19 nt, Artificial Sequence
  Description of Artificial Sequence: Synthetic oligonucleotide
uagaaaaugccggggucgu

SEQ ID NO: 455258 - RNA, 19 nt, Artificial Sequence
  Description of Artificial Sequence: Synthetic oligonucleotide
uggaugaggggucccgcgu

SEQ ID NO: 455259 - RNA, 19 nt, Artificial Sequence
  Description of Artificial Sequence: Synthetic oligonucleotide
gugggcucacuugaggcgg

SEQ ID NO: 455260 - RNA, 19 nt, Artificial Sequence
  Description of Artificial Sequence: Synthetic oligonucleotide
uagcccucuagaccugggc

SEQ ID NO: 455261 - RNA, 19 nt, Artificial Sequence
  Description of Artificial Sequence: Synthetic oligonucleotide
uacggguagcuuuggcaug

SEQ ID NO: 455262 - RNA, 19 nt, Artificial Sequence
  Description of Artificial Sequence: Synthetic oligonucleotide
ugguaggcaugaaaucgau

SEQ ID NO: 455263 - RNA, 19 nt, Artificial Sequence
  Description of Artificial Sequence: Synthetic oligonucleotide
ucgguacugccguaagaac

SEQ ID NO: 455264 - RNA, 19 nt, Artificial Sequence
  Description of Artificial Sequence: Synthetic oligonucleotide
cauauugcacuuccuggga

SEQ ID NO: 455265 - RNA, 19 nt, Artificial Sequence
  Description of Artificial Sequence: Synthetic oligonucleotide
guauggguccaaugggcac

SEQ ID NO: 455266 - RNA, 19 nt, Artificial Sequence
  Description of Artificial Sequence: Synthetic oligonucleotide
guacaccccaaugggagag

SEQ ID NO: 455267 - RNA, 19 nt, Artificial Sequence
  Description of Artificial Sequence: Synthetic oligonucleotide
uccggaugcccacacccac

SEQ ID NO: 455268 - RNA, 19 nt, Artificial Sequence
  Description of Artificial Sequence: Synthetic oligonucleotide
guacaaguagucggccagg

SEQ ID NO: 455269 - RNA, 19 nt, Artificial Sequence
  Description of Artificial Sequence: Synthetic oligonucleotide
cacauguagagugaucaca

SEQ ID NO: 455270 - RNA, 19 nt, Artificial Sequence
  Description of Artificial Sequence: Synthetic oligonucleotide
ucgauacggcucagcaucu

SEQ ID NO: 455271 - RNA, 19 nt, Artificial Sequence
  Description of Artificial Sequence: Synthetic oligonucleotide
ucucgauacggcucagcau

SEQ ID NO: 455272 - RNA, 19 nt, Artificial Sequence
  Description of Artificial Sequence: Synthetic oligonucleotide
ugcaccucaccgccgcgcc

SEQ ID NO: 455273 - RNA, 19 nt, Artificial Sequence
  Description of Artificial Sequence: Synthetic oligonucleotide
ugacugcaccucaccgccg

SEQ ID NO: 455274 - RNA, 19 nt, Artificial Sequence
  Description of Artificial Sequence: Synthetic oligonucleotide
caccuuucggauggcaugc

SEQ ID NO: 455275 - RNA, 19 nt, Artificial Sequence
  Description of Artificial Sequence: Synthetic oligonucleotide
uacaaguagucggccaggu

SEQ ID NO: 455276 - RNA, 19 nt, Artificial Sequence
  Description of Artificial Sequence: Synthetic oligonucleotide
gaguucaaggugguaguga

SEQ ID NO: 455277 - RNA, 19 nt, Artificial Sequence
  Description of Artificial Sequence: Synthetic oligonucleotide
ggaauucaagccaaacuuc

SEQ ID NO: 455278 - RNA, 19 nt, Artificial Sequence
  Description of Artificial Sequence: Synthetic oligonucleotide
uagugaucccagccuuggc

SEQ ID NO: 455279 - RNA, 19 nt, Artificial Sequence
  Description of Artificial Sequence: Synthetic oligonucleotide
cacacgaaacaccgcuccc

SEQ ID NO: 455280 - RNA, 19 nt, Artificial Sequence
  Description of Artificial Sequence: Synthetic oligonucleotide
auaugccugggcaucucuc

SEQ ID NO: 455281 - RNA, 19 nt, Artificial Sequence
  Description of Artificial Sequence: Synthetic oligonucleotide
ccggauauaggaacuccgg

SEQ ID NO: 455282 - RNA, 19 nt, Artificial Sequence
  Description of Artificial Sequence: Synthetic oligonucleotide
ggaacggcgaucacugucc

SEQ ID NO: 455283 - RNA, 19 nt, Artificial Sequence
  Description of Artificial Sequence: Synthetic oligonucleotide
ggcaauauuggugagggua

SEQ ID NO: 455284 - RNA, 19 nt, Artificial Sequence
  Description of Artificial Sequence: Synthetic oligonucleotide
cuugaguugcuucucgaua

SEQ ID NO: 455285 - RNA, 19 nt, Artificial Sequence
  Description of Artificial Sequence: Synthetic oligonucleotide
caccuugcgcugcaugcgg

SEQ ID NO: 455286 - RNA, 19 nt, Artificial Sequence
  Description of Artificial Sequence: Synthetic oligonucleotide
gucggugcccacucgguac

SEQ ID NO: 455287 - RNA, 19 nt, Artificial Sequence
  Description of Artificial Sequence: Synthetic oligonucleotide
acucacauguagagugauc

SEQ ID NO: 455288 - RNA, 19 nt, Artificial Sequence
  Description of Artificial Sequence: Synthetic oligonucleotide
ggagcaacucaucaccgca

SEQ ID NO: 455289 - RNA, 19 nt, Artificial Sequence
  Description of Artificial Sequence: Synthetic oligonucleotide
uggcuaguucaaucucccc

SEQ ID NO: 455290 - RNA, 19 nt, Artificial Sequence
  Description of Artificial Sequence: Synthetic oligonucleotide
ucaccgccgcgccacacga

SEQ ID NO: 455291 - RNA, 19 nt, Artificial Sequence
  Description of Artificial Sequence: Synthetic oligonucleotide
acaaccccaccaucggcca

SEQ ID NO: 455292 - RNA, 19 nt, Artificial Sequence
  Description of Artificial Sequence: Synthetic oligonucleotide
gaacggcgaucacuguccc

SEQ ID NO: 455293 - RNA, 19 nt, Artificial Sequence
  Description of Artificial Sequence: Synthetic oligonucleotide
gcaagcuauagccuucuuc

SEQ ID NO: 455294 - RNA, 19 nt, Artificial Sequence
  Description of Artificial Sequence: Synthetic oligonucleotide
ggcgguagagcaccuugcg

SEQ ID NO: 455295 - RNA, 19 nt, Artificial Sequence
  Description of Artificial Sequence: Synthetic oligonucleotide
cucgguggcaaaggguugc

SEQ ID NO: 455296 - RNA, 19 nt, Artificial Sequence
  Description of Artificial Sequence: Synthetic oligonucleotide
acuaagggccucagcaaug

SEQ ID NO: 455297 - RNA, 19 nt, Artificial Sequence
  Description of Artificial Sequence: Synthetic oligonucleotide
aggcgguagagcaccuugc

SEQ ID NO: 455298 - RNA, 19 nt, Artificial Sequence
  Description of Artificial Sequence: Synthetic oligonucleotide
gcaugaaaucgauauuauc

SEQ ID NO: 455299 - RNA, 19 nt, Artificial Sequence
  Description of Artificial Sequence: Synthetic oligonucleotide
accucggcgagugagucca

SEQ ID NO: 455300 - RNA, 19 nt, Artificial Sequence
  Description of Artificial Sequence: Synthetic oligonucleotide
aucggccaaacaccgaguu

SEQ ID NO: 455301 - RNA, 19 nt, Artificial Sequence
  Description of Artificial Sequence: Synthetic oligonucleotide
gcaccgagaguucaaggug

SEQ ID NO: 455302 - RNA, 19 nt, Artificial Sequence
  Description of Artificial Sequence: Synthetic oligonucleotide
accucgcucggcaguaagc

SEQ ID NO: 455303 - RNA, 19 nt, Artificial Sequence
  Description of Artificial Sequence: Synthetic oligonucleotide
gaggguauuguggcagcug

SEQ ID NO: 455304 - RNA, 19 nt, Artificial Sequence
  Description of Artificial Sequence: Synthetic oligonucleotide
guaaugccgcuugaguuca

SEQ ID NO: 455305 - RNA, 19 nt, Artificial Sequence
  Description of Artificial Sequence: Synthetic oligonucleotide
cccggauauaggaacuccg

SEQ ID NO: 455306 - RNA, 19 nt, Artificial Sequence
  Description of Artificial Sequence: Synthetic oligonucleotide
ggaauaaccugagugccuc

SEQ ID NO: 455307 - RNA, 19 nt, Artificial Sequence
  Description of Artificial Sequence: Synthetic oligonucleotide
gggcgcauggcaauauugg

SEQ ID NO: 455308 - RNA, 19 nt, Artificial Sequence
  Description of Artificial Sequence: Synthetic oligonucleotide
aaaugcucuuggagaugag

SEQ ID NO: 455309 - RNA, 19 nt, Artificial Sequence
  Description of Artificial Sequence: Synthetic oligonucleotide
ucggugcccacucgguacu

SEQ ID NO: 455310 - RNA, 19 nt, Artificial Sequence
  Description of Artificial Sequence: Synthetic oligonucleotide
ugcauaugccugggcaucu

SEQ ID NO: 455311 - RNA, 19 nt, Artificial Sequence
  Description of Artificial Sequence: Synthetic oligonucleotide
gcgaucacugucccucucg

SEQ ID NO: 455312 - RNA, 19 nt, Artificial Sequence
  Description of Artificial Sequence: Synthetic oligonucleotide
agugaagcccuccgccccu

SEQ ID NO: 455313 - RNA, 19 nt, Artificial Sequence
  Description of Artificial Sequence: Synthetic oligonucleotide
gguagagcaccuugcgcug

SEQ ID NO: 455314 - RNA, 19 nt, Artificial Sequence
  Description of Artificial Sequence: Synthetic oligonucleotide
aacggcgaucacugucccu

SEQ ID NO: 455315 - RNA, 19 nt, Artificial Sequence
  Description of Artificial Sequence: Synthetic oligonucleotide
cuucguggauugccacacg

SEQ ID NO: 455316 - RNA, 19 nt, Artificial Sequence
  Description of Artificial Sequence: Synthetic oligonucleotide
ccguaagaacucuuugaag

SEQ ID NO: 455317 - RNA, 19 nt, Artificial Sequence
  Description of Artificial Sequence: Synthetic oligonucleotide
cuccgccccugacagauug

SEQ ID NO: 455318 - RNA, 19 nt, Artificial Sequence
  Description of Artificial Sequence: Synthetic oligonucleotide
caggcaagcuauagccuuc

SEQ ID NO: 455319 - RNA, 19 nt, Artificial Sequence
  Description of Artificial Sequence: Synthetic oligonucleotide
cagugcacucacauguaga

SEQ ID NO: 455320 - RNA, 19 nt, Artificial Sequence
  Description of Artificial Sequence: Synthetic oligonucleotide
ugaggguauuguggcagcu

SEQ ID NO: 455321 - RNA, 19 nt, Artificial Sequence
  Description of Artificial Sequence: Synthetic oligonucleotide
cucaccgccgcgccacacg

SEQ ID NO: 455322 - RNA, 19 nt, Artificial Sequence
  Description of Artificial Sequence: Synthetic oligonucleotide
ugcggucggugcccacucg

SEQ ID NO: 455323 - RNA, 19 nt, Artificial Sequence
  Description of Artificial Sequence: Synthetic oligonucleotide
ggauauaggaacuccggau

SEQ ID NO: 455324 - RNA, 19 nt, Artificial Sequence
  Description of Artificial Sequence: Synthetic oligonucleotide
ccacacgaaacaccgcucc

SEQ ID NO: 455325 - RNA, 19 nt, Artificial Sequence
  Description of Artificial Sequence: Synthetic oligonucleotide
uguguucauccuugacgau

SEQ ID NO: 455326 - RNA, 19 nt, Artificial Sequence
  Description of Artificial Sequence: Synthetic oligonucleotide
gccguaagaacucuuugaa

SEQ ID NO: 455327 - RNA, 19 nt, Artificial Sequence
  Description of Artificial Sequence: Synthetic oligonucleotide
caaaucgagacaagauggu

SEQ ID NO: 455328 - RNA, 19 nt, Artificial Sequence
  Description of Artificial Sequence: Synthetic oligonucleotide
guuggaccucuccccugcg

SEQ ID NO: 455329 - RNA, 19 nt, Artificial Sequence
  Description of Artificial Sequence: Synthetic oligonucleotide
gguaccugucacaguagag

SEQ ID NO: 455330 - RNA, 19 nt, Artificial Sequence
  Description of Artificial Sequence: Synthetic oligonucleotide
ugcugacgggccccacucc

SEQ ID NO: 455331 - RNA, 19 nt, Artificial Sequence
  Description of Artificial Sequence: Synthetic oligonucleotide
guugcauaugccugggcau

SEQ ID NO: 455332 - RNA, 19 nt, Artificial Sequence
  Description of Artificial Sequence: Synthetic oligonucleotide
aggugacgccggcuuucgc

SEQ ID NO: 455333 - RNA, 19 nt, Artificial Sequence
  Description of Artificial Sequence: Synthetic oligonucleotide
uggcuucguggauugccac

SEQ ID NO: 455334 - RNA, 19 nt, Artificial Sequence
  Description of Artificial Sequence: Synthetic oligonucleotide
augcuguguucagacaccu

SEQ ID NO: 455335 - RNA, 19 nt, Artificial Sequence
  Description of Artificial Sequence: Synthetic oligonucleotide
aucuuacuaagggccucag

SEQ ID NO: 455336 - RNA, 19 nt, Artificial Sequence
  Description of Artificial Sequence: Synthetic oligonucleotide
gugcccacucgguacugcc

SEQ ID NO: 455337 - RNA, 19 nt, Artificial Sequence
  Description of Artificial Sequence: Synthetic oligonucleotide
guagagugaucacauguuu

SEQ ID NO: 455338 - RNA, 19 nt, Artificial Sequence
  Description of Artificial Sequence: Synthetic oligonucleotide
agguuguaaugccgcuuga

SEQ ID NO: 455339 - RNA, 19 nt, Artificial Sequence
  Description of Artificial Sequence: Synthetic oligonucleotide
ugaugauauagcgguucuu

SEQ ID NO: 455340 - RNA, 19 nt, Artificial Sequence
  Description of Artificial Sequence: Synthetic oligonucleotide
uguggacaccuggaauaac

SEQ ID NO: 455341 - RNA, 19 nt, Artificial Sequence
  Description of Artificial Sequence: Synthetic oligonucleotide
accgaguuggcugcagcca

SEQ ID NO: 455342 - RNA, 19 nt, Artificial Sequence
  Description of Artificial Sequence: Synthetic oligonucleotide
acugccguaagaacucuuu

SEQ ID NO: 455343 - RNA, 19 nt, Artificial Sequence
  Description of Artificial Sequence: Synthetic oligonucleotide
gccaauggcaaagcggcgc

SEQ ID NO: 455344 - RNA, 19 nt, Artificial Sequence
  Description of Artificial Sequence: Synthetic oligonucleotide
agucgggccgggucaccuc

SEQ ID NO: 455345 - RNA, 19 nt, Artificial Sequence
  Description of Artificial Sequence: Synthetic oligonucleotide
ucaccucggcgagugaguc

SEQ ID NO: 455346 - RNA, 19 nt, Artificial Sequence
  Description of Artificial Sequence: Synthetic oligonucleotide
gucgucgaagcccgacaug

SEQ ID NO: 455347 - RNA, 19 nt, Artificial Sequence
  Description of Artificial Sequence: Synthetic oligonucleotide
gcgcauggcaauauuggug

SEQ ID NO: 455348 - RNA, 19 nt, Artificial Sequence
  Description of Artificial Sequence: Synthetic oligonucleotide
gcuggaauucaagccaaac

SEQ ID NO: 455349 - RNA, 19 nt, Artificial Sequence
  Description of Artificial Sequence: Synthetic oligonucleotide
cgcauggcaauauugguga

SEQ ID NO: 455350 - RNA, 19 nt, Artificial Sequence
  Description of Artificial Sequence: Synthetic oligonucleotide
uccgccccugacagauugc

SEQ ID NO: 455351 - RNA, 19 nt, Artificial Sequence
  Description of Artificial Sequence: Synthetic oligonucleotide
uacugccguaagaacucuu

SEQ ID NO: 455352 - RNA, 19 nt, Artificial Sequence
  Description of Artificial Sequence: Synthetic oligonucleotide
gcccucuagaccugggcgc

SEQ ID NO: 455353 - RNA, 19 nt, Artificial Sequence
  Description of Artificial Sequence: Synthetic oligonucleotide
augggcacuuugggcgccc

SEQ ID NO: 455354 - RNA, 19 nt, Artificial Sequence
  Description of Artificial Sequence: Synthetic oligonucleotide
accgccgcgccacacgaaa

SEQ ID NO: 455355 - RNA, 19 nt, Artificial Sequence
  Description of Artificial Sequence: Synthetic oligonucleotide
ggguagugaagcccuccgc

SEQ ID NO: 455356 - RNA, 19 nt, Artificial Sequence
  Description of Artificial Sequence: Synthetic oligonucleotide
caccucggcgagugagucc

SEQ ID NO: 455357 - RNA, 19 nt, Artificial Sequence
  Description of Artificial Sequence: Synthetic oligonucleotide
gcgugccuggcccucgucg

SEQ ID NO: 455358 - RNA, 19 nt, Artificial Sequence
  Description of Artificial Sequence: Synthetic oligonucleotide
aggcgacgaaauuccuccu

SEQ ID NO: 455359 - RNA, 19 nt, Artificial Sequence
  Description of Artificial Sequence: Synthetic oligonucleotide
caccucgcucggcaguaag

SEQ ID NO: 455360 - RNA, 19 nt, Artificial Sequence
  Description of Artificial Sequence: Synthetic oligonucleotide
gaccucuccccugcgcagc

SEQ ID NO: 455361 - RNA, 19 nt, Artificial Sequence
  Description of Artificial Sequence: Synthetic oligonucleotide
aggcaagcuauagccuucu

SEQ ID NO: 455362 - RNA, 19 nt, Artificial Sequence
  Description of Artificial Sequence: Synthetic oligonucleotide
caccucgauccaguauucc

SEQ ID NO: 455363 - RNA, 19 nt, Artificial Sequence
  Description of Artificial Sequence: Synthetic oligonucleotide
caggugacgccggcuuucg

SEQ ID NO: 455364 - RNA, 19 nt, Artificial Sequence
  Description of Artificial Sequence: Synthetic oligonucleotide
gaagcccgacaugacugca

SEQ ID NO: 455365 - RNA, 19 nt, Artificial Sequence
  Description of Artificial Sequence: Synthetic oligonucleotide
cugcgacuugcgugccugg

SEQ ID NO: 455366 - RNA, 19 nt, Artificial Sequence
  Description of Artificial Sequence: Synthetic oligonucleotide
caauagccuccagcugccg

SEQ ID NO: 455367 - RNA, 19 nt, Artificial Sequence
  Description of Artificial Sequence: Synthetic oligonucleotide
ucgguggcaaaggguugca

SEQ ID NO: 455368 - RNA, 19 nt, Artificial Sequence
  Description of Artificial Sequence: Synthetic oligonucleotide
ggcgacgaaauuccuccuc

SEQ ID NO: 455369 - RNA, 19 nt, Artificial Sequence
  Description of Artificial Sequence: Synthetic oligonucleotide
ggggucgccgccaaagcug

SEQ ID NO: 455370 - RNA, 19 nt, Artificial Sequence
  Description of Artificial Sequence: Synthetic oligonucleotide
guggccgcauucagguuug

SEQ ID NO: 455371 - RNA, 19 nt, Artificial Sequence
  Description of Artificial Sequence: Synthetic oligonucleotide
uugcgcugcaugcgguguu

SEQ ID NO: 455372 - RNA, 19 nt, Artificial Sequence
  Description of Artificial Sequence: Synthetic oligonucleotide
gcggucggugcccacucgg

SEQ ID NO: 455373 - RNA, 19 nt, Artificial Sequence
  Description of Artificial Sequence: Synthetic oligonucleotide
caggacccggauauaggaa

SEQ ID NO: 455374 - RNA, 19 nt, Artificial Sequence
  Description of Artificial Sequence: Synthetic oligonucleotide
caccccaaugggagagcac

SEQ ID NO: 455375 - RNA, 19 nt, Artificial Sequence
  Description of Artificial Sequence: Synthetic oligonucleotide
ccgaguuggcugcagccag

SEQ ID NO: 455376 - RNA, 19 nt, Artificial Sequence
  Description of Artificial Sequence: Synthetic oligonucleotide
ccggggucgucgaagcccg

SEQ ID NO: 455377 - RNA, 19 nt, Artificial Sequence
  Description of Artificial Sequence: Synthetic oligonucleotide
ggaccucuccccugcgcag

SEQ ID NO: 455378 - RNA, 19 nt, Artificial Sequence
  Description of Artificial Sequence: Synthetic oligonucleotide
cugagugccuccuccacau

SEQ ID NO: 455379 - RNA, 19 nt, Artificial Sequence
  Description of Artificial Sequence: Synthetic oligonucleotide
cugcaccucaccgccgcgc

SEQ ID NO: 455380 - RNA, 19 nt, Artificial Sequence
  Description of Artificial Sequence: Synthetic oligonucleotide
guguggacaccuggaauaa

SEQ ID NO: 455381 - RNA, 19 nt, Artificial Sequence
  Description of Artificial Sequence: Synthetic oligonucleotide
gacagccgagggccacacc

SEQ ID NO: 455382 - RNA, 19 nt, Artificial Sequence
  Description of Artificial Sequence: Synthetic oligonucleotide
agucggccagguuccucgu

SEQ ID NO: 455383 - RNA, 19 nt, Artificial Sequence
  Description of Artificial Sequence: Synthetic oligonucleotide
gucgggccgggucaccuca

SEQ ID NO: 455384 - RNA, 19 nt, Artificial Sequence
  Description of Artificial Sequence: Synthetic oligonucleotide
cgacuugcgugccuggccc

SEQ ID NO: 455385 - RNA, 19 nt, Artificial Sequence
  Description of Artificial Sequence: Synthetic oligonucleotide
caccucaccgccgcgccac

SEQ ID NO: 455386 - RNA, 19 nt, Artificial Sequence
  Description of Artificial Sequence: Synthetic oligonucleotide
ggcuucguggauugccaca

SEQ ID NO: 455387 - RNA, 19 nt, Artificial Sequence
  Description of Artificial Sequence: Synthetic oligonucleotide
gucaagccugcagcacugc

SEQ ID NO: 455388 - RNA, 19 nt, Artificial Sequence
  Description of Artificial Sequence: Synthetic oligonucleotide
agcugcgacuugcgugccu

SEQ ID NO: 455389 - RNA, 19 nt, Artificial Sequence
  Description of Artificial Sequence: Synthetic oligonucleotide
ggcaaagcggcgcuugagu

SEQ ID NO: 455390 - RNA, 19 nt, Artificial Sequence
  Description of Artificial Sequence: Synthetic oligonucleotide
ccugaacaaugcuguguuc

SEQ ID NO: 455391 - RNA, 19 nt, Artificial Sequence
  Description of Artificial Sequence: Synthetic oligonucleotide
uaaugccgcuugaguucau

SEQ ID NO: 455392 - RNA, 19 nt, Artificial Sequence
  Description of Artificial Sequence: Synthetic oligonucleotide
gcgacgaaauuccuccucu

SEQ ID NO: 455393 - RNA, 19 nt, Artificial Sequence
  Description of Artificial Sequence: Synthetic oligonucleotide
gguccuccuggguagugaa

SEQ ID NO: 455394 - RNA, 19 nt, Artificial Sequence
  Description of Artificial Sequence: Synthetic oligonucleotide
cugcgcagcaugagcugca

SEQ ID NO: 455395 - RNA, 19 nt, Artificial Sequence
  Description of Artificial Sequence: Synthetic oligonucleotide
aggggucccgcgucaccga

SEQ ID NO: 455396 - RNA, 19 nt, Artificial Sequence
  Description of Artificial Sequence: Synthetic oligonucleotide
cucgcucggcaguaagcaa

SEQ ID NO: 455397 - RNA, 19 nt, Artificial Sequence
  Description of Artificial Sequence: Synthetic oligonucleotide
ggcgcauggcaauauuggu

SEQ ID NO: 455398 - RNA, 19 nt, Artificial Sequence
  Description of Artificial Sequence: Synthetic oligonucleotide
gguggccgcauucagguuu

SEQ ID NO: 455399 - RNA, 19 nt, Artificial Sequence
  Description of Artificial Sequence: Synthetic oligonucleotide
ucccggcccuugcuggaau

SEQ ID NO: 455400 - RNA, 19 nt, Artificial Sequence
  Description of Artificial Sequence: Synthetic oligonucleotide
gugcggucggugcccacuc

SEQ ID NO: 455401 - RNA, 19 nt, Artificial Sequence
  Description of Artificial Sequence: Synthetic oligonucleotide
ggcucacuugaggcgguag

SEQ ID NO: 455402 - RNA, 19 nt, Artificial Sequence
  Description of Artificial Sequence: Synthetic oligonucleotide
gggucgucgaagcccgaca

SEQ ID NO: 455403 - RNA, 19 nt, Artificial Sequence
  Description of Artificial Sequence: Synthetic oligonucleotide
cggaugcccacacccaccc

SEQ ID NO: 455404 - RNA, 19 nt, Artificial Sequence
  Description of Artificial Sequence: Synthetic oligonucleotide
gcaggcaagcuauagccuu

SEQ ID NO: 455405 - RNA, 19 nt, Artificial Sequence
  Description of Artificial Sequence: Synthetic oligonucleotide
caucugacuugagcacuga

SEQ ID NO: 455406 - RNA, 19 nt, Artificial Sequence
  Description of Artificial Sequence: Synthetic oligonucleotide
cgagacaagaugguaggca

SEQ ID NO: 455407 - RNA, 19 nt, Artificial Sequence
  Description of Artificial Sequence: Synthetic oligonucleotide
caguguggacaccuggaau

SEQ ID NO: 455408 - RNA, 19 nt, Artificial Sequence
  Description of Artificial Sequence: Synthetic oligonucleotide
cucggcgagugaguccauc

SEQ ID NO: 455409 - RNA, 19 nt, Artificial Sequence
  Description of Artificial Sequence: Synthetic oligonucleotide
ggggucccgcgucaccgag

SEQ ID NO: 455410 - RNA, 19 nt, Artificial Sequence
  Description of Artificial Sequence: Synthetic oligonucleotide
cggauauaggaacuccgga

SEQ ID NO: 455411 - RNA, 19 nt, Artificial Sequence
  Description of Artificial Sequence: Synthetic oligonucleotide
ccaccucgauccaguauuc

SEQ ID NO: 455412 - RNA, 19 nt, Artificial Sequence
  Description of Artificial Sequence: Synthetic oligonucleotide
ccgcgccacacgaaacacc

SEQ ID NO: 455413 - RNA, 19 nt, Artificial Sequence
  Description of Artificial Sequence: Synthetic oligonucleotide
ccucgguggcaaaggguug

SEQ ID NO: 455414 - RNA, 19 nt, Artificial Sequence
  Description of Artificial Sequence: Synthetic oligonucleotide
ugaagcccgugcggucggu

SEQ ID NO: 455415 - RNA, 19 nt, Artificial Sequence
  Description of Artificial Sequence: Synthetic oligonucleotide
ggcaugaaaucgauauuau

SEQ ID NO: 455416 - RNA, 19 nt, Artificial Sequence
  Description of Artificial Sequence: Synthetic oligonucleotide
gggccgggucaccucauca

SEQ ID NO: 455417 - RNA, 19 nt, Artificial Sequence
  Description of Artificial Sequence: Synthetic oligonucleotide
ccgacaugacugcaccuca

SEQ ID NO: 455418 - RNA, 19 nt, Artificial Sequence
  Description of Artificial Sequence: Synthetic oligonucleotide
cagauguguacaccccaau

SEQ ID NO: 455419 - RNA, 19 nt, Artificial Sequence
  Description of Artificial Sequence: Synthetic oligonucleotide
gguaggcaugaaaucgaua

SEQ ID NO: 455420 - RNA, 19 nt, Artificial Sequence
  Description of Artificial Sequence: Synthetic oligonucleotide
gcaaagcggcgcuugaguu

SEQ ID NO: 455421 - RNA, 19 nt, Artificial Sequence
  Description of Artificial Sequence: Synthetic oligonucleotide
gcgucaccgaggcagucaa

SEQ ID NO: 455422 - RNA, 19 nt, Artificial Sequence
  Description of Artificial Sequence: Synthetic oligonucleotide
cgcucggcaguaagcaaug

SEQ ID NO: 455423 - RNA, 19 nt, Artificial Sequence
  Description of Artificial Sequence: Synthetic oligonucleotide
cggcaguaagcaaugaacu

SEQ ID NO: 455424 - RNA, 19 nt, Artificial Sequence
  Description of Artificial Sequence: Synthetic oligonucleotide
ccucgcucggcaguaagca

SEQ ID NO: 455425 - RNA, 19 nt, Artificial Sequence
  Description of Artificial Sequence: Synthetic oligonucleotide
agguggccgcauucagguu

SEQ ID NO: 455426 - RNA, 19 nt, Artificial Sequence
  Description of Artificial Sequence: Synthetic oligonucleotide
ggucgucgaagcccgacau

SEQ ID NO: 455427 - RNA, 19 nt, Artificial Sequence
  Description of Artificial Sequence: Synthetic oligonucleotide
ucgggccgggucaccucau

SEQ ID NO: 455428 - RNA, 19 nt, Artificial Sequence
  Description of Artificial Sequence: Synthetic oligonucleotide
ccgccccugacagauugcc

SEQ ID NO: 455429 - RNA, 19 nt, Artificial Sequence
  Description of Artificial Sequence: Synthetic oligonucleotide
ggcaugcucuggauacuuc

SEQ ID NO: 455430 - RNA, 19 nt, Artificial Sequence
  Description of Artificial Sequence: Synthetic oligonucleotide
uuugggcgcccagccugau

SEQ ID NO: 455431 - RNA, 19 nt, Artificial Sequence
  Description of Artificial Sequence: Synthetic oligonucleotide
guacugccguaagaacucu

SEQ ID NO: 455432 - RNA, 19 nt, Artificial Sequence
  Description of Artificial Sequence: Synthetic oligonucleotide
ggcgaucacugucccucuc

SEQ ID NO: 455433 - RNA, 19 nt, Artificial Sequence
  Description of Artificial Sequence: Synthetic oligonucleotide
cacaccucgcucggcagua

SEQ ID NO: 455434 - RNA, 19 nt, Artificial Sequence
  Description of Artificial Sequence: Synthetic oligonucleotide
gccacacgaaacaccgcuc

SEQ ID NO: 455435 - RNA, 19 nt, Artificial Sequence
  Description of Artificial Sequence: Synthetic oligonucleotide
accucaccgccgcgccaca

SEQ ID NO: 455436 - RNA, 19 nt, Artificial Sequence
  Description of Artificial Sequence: Synthetic oligonucleotide
gcugcggcacugaauggaa

SEQ ID NO: 455437 - RNA, 19 nt, Artificial Sequence
  Description of Artificial Sequence: Synthetic oligonucleotide
cacuccgcaugaugauaua

SEQ ID NO: 455438 - RNA, 19 nt, Artificial Sequence
  Description of Artificial Sequence: Synthetic oligonucleotide
ggucggugcccacucggua

SEQ ID NO: 455439 - RNA, 19 nt, Artificial Sequence
  Description of Artificial Sequence: Synthetic oligonucleotide
accugggcgcauggcaaua

SEQ ID NO: 455440 - RNA, 19 nt, Artificial Sequence
  Description of Artificial Sequence: Synthetic oligonucleotide
ccuggguagugaagcccuc

SEQ ID NO: 455441 - RNA, 19 nt, Artificial Sequence
  Description of Artificial Sequence: Synthetic oligonucleotide
ggggucgucgaagcccgac

SEQ ID NO: 455442 - RNA, 19 nt, Artificial Sequence
  Description of Artificial Sequence: Synthetic oligonucleotide
gccgcgccacacgaaacac

SEQ ID NO: 455443 - RNA, 19 nt, Artificial Sequence
  Description of Artificial Sequence: Synthetic oligonucleotide
augcgguguuggaccucuc

SEQ ID NO: 455444 - RNA, 19 nt, Artificial Sequence
  Description of Artificial Sequence: Synthetic oligonucleotide
ggacccggauauaggaacu

SEQ ID NO: 455445 - RNA, 19 nt, Artificial Sequence
  Description of Artificial Sequence: Synthetic oligonucleotide
caauauuggugaggguauu

SEQ ID NO: 455446 - RNA, 19 nt, Artificial Sequence
  Description of Artificial Sequence: Synthetic oligonucleotide
ccacuccgcaugaugauau

SEQ ID NO: 455447 - RNA, 19 nt, Artificial Sequence
  Description of Artificial Sequence: Synthetic oligonucleotide
cauguuuggccagcaucau

SEQ ID NO: 455448 - RNA, 19 nt, Artificial Sequence
  Description of Artificial Sequence: Synthetic oligonucleotide
gccucgguggcaaaggguu

SEQ ID NO: 455449 - RNA, 19 nt, Artificial Sequence
  Description of Artificial Sequence: Synthetic oligonucleotide
ugcccaggacccggauaua

SEQ ID NO: 455450 - RNA, 19 nt, Artificial Sequence
  Description of Artificial Sequence: Synthetic oligonucleotide
gcauaugccugggcaucuc

SEQ ID NO: 455451 - RNA, 19 nt, Artificial Sequence
  Description of Artificial Sequence: Synthetic oligonucleotide
ucgugcugacgggccccac

SEQ ID NO: 455452 - RNA, 19 nt, Artificial Sequence
  Description of Artificial Sequence: Synthetic oligonucleotide
cuggaacggcgaucacugu

SEQ ID NO: 455453 - RNA, 19 nt, Artificial Sequence
  Description of Artificial Sequence: Synthetic oligonucleotide
aagcggcgcuugaguugcu

SEQ ID NO: 455454 - RNA, 19 nt, Artificial Sequence
  Description of Artificial Sequence: Synthetic oligonucleotide
acgccggcuuucgcgggaa

SEQ ID NO: 455455 - RNA, 19 nt, Artificial Sequence
  Description of Artificial Sequence: Synthetic oligonucleotide
cgccacacgaaacaccgcu

SEQ ID NO: 455456 - RNA, 19 nt, Artificial Sequence
  Description of Artificial Sequence: Synthetic oligonucleotide
ccgccgcgccacacgaaac

SEQ ID NO: 455457 - RNA, 19 nt, Artificial Sequence
  Description of Artificial Sequence: Synthetic oligonucleotide
gccggcuuucgcgggaaaa

SEQ ID NO: 455458 - RNA, 19 nt, Artificial Sequence
  Description of Artificial Sequence: Synthetic oligonucleotide
uggguccaaugggcacuuu

SEQ ID NO: 455459 - RNA, 19 nt, Artificial Sequence
  Description of Artificial Sequence: Synthetic oligonucleotide
gcgccacacgaaacaccgc

SEQ ID NO: 455460 - RNA, 19 nt, Artificial Sequence
  Description of Artificial Sequence: Synthetic oligonucleotide
gcccgugcggucggugccc

SEQ ID NO: 455461 - RNA, 19 nt, Artificial Sequence
  Description of Artificial Sequence: Synthetic oligonucleotide
ccgcagucgggccggguca

SEQ ID NO: 455462 - RNA, 19 nt, Artificial Sequence
  Description of Artificial Sequence: Synthetic oligonucleotide
cgucaccgaggcagucaag

SEQ ID NO: 455463 - RNA, 19 nt, Artificial Sequence
  Description of Artificial Sequence: Synthetic oligonucleotide
gggucgccgccaaagcugu

SEQ ID NO: 455464 - RNA, 19 nt, Artificial Sequence
  Description of Artificial Sequence: Synthetic oligonucleotide
cugggcgcauggcaauauu

SEQ ID NO: 455465 - RNA, 19 nt, Artificial Sequence
  Description of Artificial Sequence: Synthetic oligonucleotide
gucccgcgucaccgaggca

SEQ ID NO: 455466 - RNA, 19 nt, Artificial Sequence
  Description of Artificial Sequence: Synthetic oligonucleotide
caccgccgcgccacacgaa

SEQ ID NO: 455467 - RNA, 19 nt, Artificial Sequence
  Description of Artificial Sequence: Synthetic oligonucleotide
cccacuccgcaugaugaua

SEQ ID NO: 455468 - RNA, 19 nt, Artificial Sequence
  Description of Artificial Sequence: Synthetic oligonucleotide
ccacucgguacugccguaa

SEQ ID NO: 455469 - RNA, 19 nt, Artificial Sequence
  Description of Artificial Sequence: Synthetic oligonucleotide
gacaggcagugggcucacu

SEQ ID NO: 455470 - RNA, 19 nt, Artificial Sequence
  Description of Artificial Sequence: Synthetic oligonucleotide
ccgccaaagcugucgcugu

SEQ ID NO: 455471 - RNA, 19 nt, Artificial Sequence
  Description of Artificial Sequence: Synthetic oligonucleotide
cagacaccugggagccaau

SEQ ID NO: 455472 - RNA, 19 nt, Artificial Sequence
  Description of Artificial Sequence: Synthetic oligonucleotide
cgauauuauccuccccuuu

SEQ ID NO: 455473 - RNA, 19 nt, Artificial Sequence
  Description of Artificial Sequence: Synthetic oligonucleotide
cgcugcaugcgguguugga

SEQ ID NO: 455474 - RNA, 19 nt, Artificial Sequence
  Description of Artificial Sequence: Synthetic oligonucleotide
ccucaccgccgcgccacac

SEQ ID NO: 455475 - RNA, 19 nt, Artificial Sequence
  Description of Artificial Sequence: Synthetic oligonucleotide
ggcaagcuauagccuucuu

SEQ ID NO: 455476 - RNA, 19 nt, Artificial Sequence
  Description of Artificial Sequence: Synthetic oligonucleotide
cgcgucaccgaggcaguca

SEQ ID NO: 455477 - RNA, 19 nt, Artificial Sequence
  Description of Artificial Sequence: Synthetic oligonucleotide
cgcagucgggccgggucac

SEQ ID NO: 455478 - RNA, 19 nt, Artificial Sequence
  Description of Artificial Sequence: Synthetic oligonucleotide
ccgagaguucaagguggua

SEQ ID NO: 455479 - RNA, 19 nt, Artificial Sequence
  Description of Artificial Sequence: Synthetic oligonucleotide
gcgcccagccugauccaua

SEQ ID NO: 455480 - RNA, 19 nt, Artificial Sequence
  Description of Artificial Sequence: Synthetic oligonucleotide
ccccacuccgcaugaugau

SEQ ID NO: 455481 - RNA, 19 nt, Artificial Sequence
  Description of Artificial Sequence: Synthetic oligonucleotide
cgugcugacgggccccacu

SEQ ID NO: 455482 - RNA, 19 nt, Artificial Sequence
  Description of Artificial Sequence: Synthetic oligonucleotide
cggggucgccgccaaagcu

SEQ ID NO: 455483 - RNA, 19 nt, Artificial Sequence
  Description of Artificial Sequence: Synthetic oligonucleotide
gcccuccgccccugacaga

SEQ ID NO: 455484 - RNA, 19 nt, Artificial Sequence
  Description of Artificial Sequence: Synthetic oligonucleotide
cgacgaaauuccuccucuu

SEQ ID NO: 455485 - RNA, 19 nt, Artificial Sequence
  Description of Artificial Sequence: Synthetic oligonucleotide
ggcgcccagccugauccau

SEQ ID NO: 455486 - RNA, 19 nt, Artificial Sequence
  Description of Artificial Sequence: Synthetic oligonucleotide
ccgugcggucggugcccac

SEQ ID NO: 455487 - RNA, 19 nt, Artificial Sequence
  Description of Artificial Sequence: Synthetic oligonucleotide
ccgcgucaccgaggcaguc

SEQ ID NO: 455488 - RNA, 19 nt, Artificial Sequence
  Description of Artificial Sequence: Synthetic oligonucleotide
cccgcgucaccgaggcagu

SEQ ID NO: 455489 - RNA, 19 nt, Artificial Sequence
  Description of Artificial Sequence: Synthetic oligonucleotide
ccuugacgaugaagaucau

SEQ ID NO: 455490 - RNA, 19 nt, Artificial Sequence
  Description of Artificial Sequence: Synthetic oligonucleotide
cgugcggucggugcccacu

SEQ ID NO: 455491 - RNA, 19 nt, Artificial Sequence
  Description of Artificial Sequence: Synthetic oligonucleotide
cggucggugcccacucggu

SEQ ID NO: 455492 - RNA, 19 nt, Artificial Sequence
  Description of Artificial Sequence: Synthetic oligonucleotide
cccgugcggucggugccca

SEQ ID NO: 455493 - RNA, 19 nt, Artificial Sequence
  Description of Artificial Sequence: Synthetic oligonucleotide
caccgcagucgggccgggu

SEQ ID NO: 455494 - RNA, 19 nt, Artificial Sequence
  Description of Artificial Sequence: Synthetic oligonucleotide
cggcgaucacugucccucu

SEQ ID NO: 455495 - RNA, 19 nt, Artificial Sequence
  Description of Artificial Sequence: Synthetic oligonucleotide
ccucuagaccugggcgcau

SEQ ID NO: 455496 - RNA, 19 nt, Artificial Sequence
  Description of Artificial Sequence: Synthetic oligonucleotide
cggggucgucgaagcccga

SEQ ID NO: 455497 - RNA, 19 nt, Artificial Sequence
  Description of Artificial Sequence: Synthetic oligonucleotide
ccuccgccccugacagauu

SEQ ID NO: 455498 - RNA, 19 nt, Artificial Sequence
  Description of Artificial Sequence: Synthetic oligonucleotide
ccucggcgagugaguccau

SEQ ID NO: 455499 - RNA, 19 nt, Artificial Sequence
  Description of Artificial Sequence: Synthetic oligonucleotide
cggguagcuuuggcaugcu

SEQ ID NO: 455500 - RNA, 19 nt, Artificial Sequence
  Description of Artificial Sequence: Synthetic oligonucleotide
aaaauauuagauuugccac

SEQ ID NO: 455501 - RNA, 19 nt, Artificial Sequence
  Description of Artificial Sequence: Synthetic oligonucleotide
aagaggucugcacaaaucc

SEQ ID NO: 455502 - RNA, 19 nt, Artificial Sequence
  Description of Artificial Sequence: Synthetic oligonucleotide
uuugccacuaauaagaauc

SEQ ID NO: 455503 - RNA, 19 nt, Artificial Sequence
  Description of Artificial Sequence: Synthetic oligonucleotide
acuaauaagaaucaccuca

SEQ ID NO: 455504 - RNA, 19 nt, Artificial Sequence
  Description of Artificial Sequence: Synthetic oligonucleotide
aauuaggccaucgaucugc

SEQ ID NO: 455505 - RNA, 19 nt, Artificial Sequence
  Description of Artificial Sequence: Synthetic oligonucleotide
aaacgcagaaaguuguugg

SEQ ID NO: 455506 - RNA, 19 nt, Artificial Sequence
  Description of Artificial Sequence: Synthetic oligonucleotide
aauacuucuggcuggaugu

SEQ ID NO: 455507 - RNA, 19 nt, Artificial Sequence
  Description of Artificial Sequence: Synthetic oligonucleotide
acaacagcgagauagaacu

SEQ ID NO: 455508 - RNA, 19 nt, Artificial Sequence
  Description of Artificial Sequence: Synthetic oligonucleotide
aaauauuagauuugccacu

SEQ ID NO: 455509 - RNA, 19 nt, Artificial Sequence
  Description of Artificial Sequence: Synthetic oligonucleotide
gaguacaacagcgagauag

SEQ ID NO: 455510 - RNA, 19 nt, Artificial Sequence
  Description of Artificial Sequence: Synthetic oligonucleotide
aagucgauuaccuuaacaa

SEQ ID NO: 455511 - RNA, 19 nt, Artificial Sequence
  Description of Artificial Sequence: Synthetic oligonucleotide
uuggugucgauccagagca

SEQ ID NO: 455512 - RNA, 19 nt, Artificial Sequence
  Description of Artificial Sequence: Synthetic oligonucleotide
caguguaugaccauugagg

SEQ ID NO: 455513 - RNA, 19 nt, Artificial Sequence
  Description of Artificial Sequence: Synthetic oligonucleotide
aggucaucgauguugauag

SEQ ID NO: 455514 - RNA, 19 nt, Artificial Sequence
  Description of Artificial Sequence: Synthetic oligonucleotide
aaucuuugguggcauuccc

SEQ ID NO: 455515 - RNA, 19 nt, Artificial Sequence
  Description of Artificial Sequence: Synthetic oligonucleotide
uggcuuauuaaccccacgg

SEQ ID NO: 455516 - RNA, 19 nt, Artificial Sequence
  Description of Artificial Sequence: Synthetic oligonucleotide
uaggccaucgaucugcccg

SEQ ID NO: 455517 - RNA, 19 nt, Artificial Sequence
  Description of Artificial Sequence: Synthetic oligonucleotide
agauagaacuuucccaugg

SEQ ID NO: 455518 - RNA, 19 nt, Artificial Sequence
  Description of Artificial Sequence: Synthetic oligonucleotide
aaacugaucagcuuguguu

SEQ ID NO: 455519 - RNA, 19 nt, Artificial Sequence
  Description of Artificial Sequence: Synthetic oligonucleotide
uuuagcuuagagcaggcgu

SEQ ID NO: 455520 - RNA, 19 nt, Artificial Sequence
  Description of Artificial Sequence: Synthetic oligonucleotide
agcgagauagaacuuuccc

SEQ ID NO: 455521 - RNA, 19 nt, Artificial Sequence
  Description of Artificial Sequence: Synthetic oligonucleotide
aguucuagcagcuugcaca

SEQ ID NO: 455522 - RNA, 19 nt, Artificial Sequence
  Description of Artificial Sequence: Synthetic oligonucleotide
ugucacaauaucugguagg

SEQ ID NO: 455523 - RNA, 19 nt, Artificial Sequence
  Description of Artificial Sequence: Synthetic oligonucleotide
gugacaaccaaucuugcag

SEQ ID NO: 455524 - RNA, 19 nt, Artificial Sequence
  Description of Artificial Sequence: Synthetic oligonucleotide
gaucucgugaugcaggugc

SEQ ID NO: 455525 - RNA, 19 nt, Artificial Sequence
  Description of Artificial Sequence: Synthetic oligonucleotide
uucauccucaaauaauuug

SEQ ID NO: 455526 - RNA, 19 nt, Artificial Sequence
  Description of Artificial Sequence: Synthetic oligonucleotide
agagcuuuacaacuacagg

SEQ ID NO: 455527 - RNA, 19 nt, Artificial Sequence
  Description of Artificial Sequence: Synthetic oligonucleotide
uuuacaacuacaggcagca

SEQ ID NO: 455528 - RNA, 19 nt, Artificial Sequence
  Description of Artificial Sequence: Synthetic oligonucleotide
aauccggagaaacugccug

SEQ ID NO: 455529 - RNA, 19 nt, Artificial Sequence
  Description of Artificial Sequence: Synthetic oligonucleotide
agauuugccacuaauaaga

SEQ ID NO: 455530 - RNA, 19 nt, Artificial Sequence
  Description of Artificial Sequence: Synthetic oligonucleotide
auuucggcuaccugggugg

SEQ ID NO: 455531 - RNA, 19 nt, Artificial Sequence
  Description of Artificial Sequence: Synthetic oligonucleotide
aaucuuuguggaaugauga

SEQ ID NO: 455532 - RNA, 19 nt, Artificial Sequence
  Description of Artificial Sequence: Synthetic oligonucleotide
aauuucggcuaccugggug

SEQ ID NO: 455533 - RNA, 19 nt, Artificial Sequence
  Description of Artificial Sequence: Synthetic oligonucleotide
gucgauuaccuuaacaagg

SEQ ID NO: 455534 - RNA, 19 nt, Artificial Sequence
  Description of Artificial Sequence: Synthetic oligonucleotide
cacaauaucugguaggguc

SEQ ID NO: 455535 - RNA, 19 nt, Artificial Sequence
  Description of Artificial Sequence: Synthetic oligonucleotide
ucaguguaugaccauugag

SEQ ID NO: 455536 - RNA, 19 nt, Artificial Sequence
  Description of Artificial Sequence: Synthetic oligonucleotide
agucgauuaccuuaacaag

SEQ ID NO: 455537 - RNA, 19 nt, Artificial Sequence
  Description of Artificial Sequence: Synthetic oligonucleotide
uguaugaccauugaggauu

SEQ ID NO: 455538 - RNA, 19 nt, Artificial Sequence
  Description of Artificial Sequence: Synthetic oligonucleotide
ugaccauugaggauucgcc

SEQ ID NO: 455539 - RNA, 19 nt, Artificial Sequence
  Description of Artificial Sequence: Synthetic oligonucleotide
ugcaauuaggccaucgauc

SEQ ID NO: 455540 - RNA, 19 nt, Artificial Sequence
  Description of Artificial Sequence: Synthetic oligonucleotide
cuuguguucuggaaugugc

SEQ ID NO: 455541 - RNA, 19 nt, Artificial Sequence
  Description of Artificial Sequence: Synthetic oligonucleotide
caguugguccuucagacgg

SEQ ID NO: 455542 - RNA, 19 nt, Artificial Sequence
  Description of Artificial Sequence: Synthetic oligonucleotide
ucgauuaccuuaacaaggu

SEQ ID NO: 455543 - RNA, 19 nt, Artificial Sequence
  Description of Artificial Sequence: Synthetic oligonucleotide
aaacgcauaauuuccucau

SEQ ID NO: 455544 - RNA, 19 nt, Artificial Sequence
  Description of Artificial Sequence: Synthetic oligonucleotide
gauuaccuuaacaagguca

SEQ ID NO: 455545 - RNA, 19 nt, Artificial Sequence
  Description of Artificial Sequence: Synthetic oligonucleotide
uauuagauuugccacuaau

SEQ ID NO: 455546 - RNA, 19 nt, Artificial Sequence
  Description of Artificial Sequence: Synthetic oligonucleotide
uggguuucaaauguggaug

SEQ ID NO: 455547 - RNA, 19 nt, Artificial Sequence
  Description of Artificial Sequence: Synthetic oligonucleotide
uccagacaaaauauuagau

SEQ ID NO: 455548 - RNA, 19 nt, Artificial Sequence
  Description of Artificial Sequence: Synthetic oligonucleotide
aaggcagaccccguggggc

SEQ ID NO: 455549 - RNA, 19 nt, Artificial Sequence
  Description of Artificial Sequence: Synthetic oligonucleotide
uuuaaggacuuaagggacu

SEQ ID NO: 455550 - RNA, 19 nt, Artificial Sequence
  Description of Artificial Sequence: Synthetic oligonucleotide
uuagcuuagagcaggcguc

SEQ ID NO: 455551 - RNA, 19 nt, Artificial Sequence
  Description of Artificial Sequence: Synthetic oligonucleotide
uucccauggcuuauuaacc

SEQ ID NO: 455552 - RNA, 19 nt, Artificial Sequence
  Description of Artificial Sequence: Synthetic oligonucleotide
ucuaucguguccuggagaa

SEQ ID NO: 455553 - RNA, 19 nt, Artificial Sequence
  Description of Artificial Sequence: Synthetic oligonucleotide
guuggacucgcuuugucag

SEQ ID NO: 455554 - RNA, 19 nt, Artificial Sequence
  Description of Artificial Sequence: Synthetic oligonucleotide
ugccguauccuucagugcu

SEQ ID NO: 455555 - RNA, 19 nt, Artificial Sequence
  Description of Artificial Sequence: Synthetic oligonucleotide
uccaccaagucgauuaccu

SEQ ID NO: 455556 - RNA, 19 nt, Artificial Sequence
  Description of Artificial Sequence: Synthetic oligonucleotide
gucacaauaucugguaggg

SEQ ID NO: 455557 - RNA, 19 nt, Artificial Sequence
  Description of Artificial Sequence: Synthetic oligonucleotide
aauauuagauuugccacua

SEQ ID NO: 455558 - RNA, 19 nt, Artificial Sequence
  Description of Artificial Sequence: Synthetic oligonucleotide
gaggauucgccacagcaug

SEQ ID NO: 455559 - RNA, 19 nt, Artificial Sequence
  Description of Artificial Sequence: Synthetic oligonucleotide
acaaauccggagaaacugc

SEQ ID NO: 455560 - RNA, 19 nt, Artificial Sequence
  Description of Artificial Sequence: Synthetic oligonucleotide
ugacaaccaaucuugcaga

SEQ ID NO: 455561 - RNA, 19 nt, Artificial Sequence
  Description of Artificial Sequence: Synthetic oligonucleotide
gauagaacuuucccauggc

SEQ ID NO: 455562 - RNA, 19 nt, Artificial Sequence
  Description of Artificial Sequence: Synthetic oligonucleotide
augagugccagcugcgcac

SEQ ID NO: 455563 - RNA, 19 nt, Artificial Sequence
  Description of Artificial Sequence: Synthetic oligonucleotide
uaguguuucagcucaucca

SEQ ID NO: 455564 - RNA, 19 nt, Artificial Sequence
  Description of Artificial Sequence: Synthetic oligonucleotide
ugugcaauuaggccaucga

SEQ ID NO: 455565 - RNA, 19 nt, Artificial Sequence
  Description of Artificial Sequence: Synthetic oligonucleotide
aacgcagaaaguuguuggu

SEQ ID NO: 455566 - RNA, 19 nt, Artificial Sequence
  Description of Artificial Sequence: Synthetic oligonucleotide
ugcacaaauccggagaaac

SEQ ID NO: 455567 - RNA, 19 nt, Artificial Sequence
  Description of Artificial Sequence: Synthetic oligonucleotide
uguuggacucgcuuuguca

SEQ ID NO: 455568 - RNA, 19 nt, Artificial Sequence
  Description of Artificial Sequence: Synthetic oligonucleotide
aaucaccucaaagcaauca

SEQ ID NO: 455569 - RNA, 19 nt, Artificial Sequence
  Description of Artificial Sequence: Synthetic oligonucleotide
ucccauggcuuauuaaccc

SEQ ID NO: 455570 - RNA, 19 nt, Artificial Sequence
  Description of Artificial Sequence: Synthetic oligonucleotide
uucaaacccuccagcacag

SEQ ID NO: 455571 - RNA, 19 nt, Artificial Sequence
  Description of Artificial Sequence: Synthetic oligonucleotide
aaugauguggggaucucgu

SEQ ID NO: 455572 - RNA, 19 nt, Artificial Sequence
  Description of Artificial Sequence: Synthetic oligonucleotide
acaauuucggcuaccuggg

SEQ ID NO: 455573 - RNA, 19 nt, Artificial Sequence
  Description of Artificial Sequence: Synthetic oligonucleotide
caugcgggcagcuaucuug

SEQ ID NO: 455574 - RNA, 19 nt, Artificial Sequence
  Description of Artificial Sequence: Synthetic oligonucleotide
uuacuaccaccugagcugg

SEQ ID NO: 455575 - RNA, 19 nt, Artificial Sequence
  Description of Artificial Sequence: Synthetic oligonucleotide
uaucguguccuggagaaac

SEQ ID NO: 455576 - RNA, 19 nt, Artificial Sequence
  Description of Artificial Sequence: Synthetic oligonucleotide
caucgauguugauagugcc

SEQ ID NO: 455577 - RNA, 19 nt, Artificial Sequence
  Description of Artificial Sequence: Synthetic oligonucleotide
gacaaccaaucuugcagag

SEQ ID NO: 455578 - RNA, 19 nt, Artificial Sequence
  Description of Artificial Sequence: Synthetic oligonucleotide
ucgaucugcccgaucaucu

SEQ ID NO: 455579 - RNA, 19 nt, Artificial Sequence
  Description of Artificial Sequence: Synthetic oligonucleotide
guaagguggacuugagcug

SEQ ID NO: 455580 - RNA, 19 nt, Artificial Sequence
  Description of Artificial Sequence: Synthetic oligonucleotide
caugguaguaguguuucag

SEQ ID NO: 455581 - RNA, 19 nt, Artificial Sequence
  Description of Artificial Sequence: Synthetic oligonucleotide
auuaaccccacgguccugg

SEQ ID NO: 455582 - RNA, 19 nt, Artificial Sequence
  Description of Artificial Sequence: Synthetic oligonucleotide
ucuguaagguggacuugag

SEQ ID NO: 455583 - RNA, 19 nt, Artificial Sequence
  Description of Artificial Sequence: Synthetic oligonucleotide
uguggggaucucgugaugc

SEQ ID NO: 455584 - RNA, 19 nt, Artificial Sequence
  Description of Artificial Sequence: Synthetic oligonucleotide
cuugcaauggugcccuggc

SEQ ID NO: 455585 - RNA, 19 nt, Artificial Sequence
  Description of Artificial Sequence: Synthetic oligonucleotide
uccauguugcccuugcaau

SEQ ID NO: 455586 - RNA, 19 nt, Artificial Sequence
  Description of Artificial Sequence: Synthetic oligonucleotide
ugagcuuccuuugucacaa

SEQ ID NO: 455587 - RNA, 19 nt, Artificial Sequence
  Description of Artificial Sequence: Synthetic oligonucleotide
ucuuuacuaccaccugagc

SEQ ID NO: 455588 - RNA, 19 nt, Artificial Sequence
  Description of Artificial Sequence: Synthetic oligonucleotide
cuaauaagaaucaccucaa

SEQ ID NO: 455589 - RNA, 19 nt, Artificial Sequence
  Description of Artificial Sequence: Synthetic oligonucleotide
gguacauggcccgagacag

SEQ ID NO: 455590 - RNA, 19 nt, Artificial Sequence
  Description of Artificial Sequence: Synthetic oligonucleotide
gauagugccguccuuauuu

SEQ ID NO: 455591 - RNA, 19 nt, Artificial Sequence
  Description of Artificial Sequence: Synthetic oligonucleotide
uccugugacaaccaaucuu

SEQ ID NO: 455592 - RNA, 19 nt, Artificial Sequence
  Description of Artificial Sequence: Synthetic oligonucleotide
uuuauggaccucagccgca

SEQ ID NO: 455593 - RNA, 19 nt, Artificial Sequence
  Description of Artificial Sequence: Synthetic oligonucleotide
gagauagaacuuucccaug

SEQ ID NO: 455594 - RNA, 19 nt, Artificial Sequence
  Description of Artificial Sequence: Synthetic oligonucleotide
gucaucgauguugauagug

SEQ ID NO: 455595 - RNA, 19 nt, Artificial Sequence
  Description of Artificial Sequence: Synthetic oligonucleotide
uugguguagcaugaugaag

SEQ ID NO: 455596 - RNA, 19 nt, Artificial Sequence
  Description of Artificial Sequence: Synthetic oligonucleotide
gguacugagguccugugac

SEQ ID NO: 455597 - RNA, 19 nt, Artificial Sequence
  Description of Artificial Sequence: Synthetic oligonucleotide
uccucuaucguguccugga

SEQ ID NO: 455598 - RNA, 19 nt, Artificial Sequence
  Description of Artificial Sequence: Synthetic oligonucleotide
ggugccguauccuucagug

SEQ ID NO: 455599 - RNA, 19 nt, Artificial Sequence
  Description of Artificial Sequence: Synthetic oligonucleotide
cauucuguugacuggucuc

SEQ ID NO: 455600 - RNA, 19 nt, Artificial Sequence
  Description of Artificial Sequence: Synthetic oligonucleotide
cuaucacagaguccucucc

SEQ ID NO: 455601 - RNA, 19 nt, Artificial Sequence
  Description of Artificial Sequence: Synthetic oligonucleotide
gauucgccacagcaugcgg

SEQ ID NO: 455602 - RNA, 19 nt, Artificial Sequence
  Description of Artificial Sequence: Synthetic oligonucleotide
uguugucuacuuccucgcc

SEQ ID NO: 455603 - RNA, 19 nt, Artificial Sequence
  Description of Artificial Sequence: Synthetic oligonucleotide
ucuuggugucgauccagag

SEQ ID NO: 455604 - RNA, 19 nt, Artificial Sequence
  Description of Artificial Sequence: Synthetic oligonucleotide
aauguggauggcagcaugu

SEQ ID NO: 455605 - RNA, 19 nt, Artificial Sequence
  Description of Artificial Sequence: Synthetic oligonucleotide
cuagcuuuggauucuucga

SEQ ID NO: 455606 - RNA, 19 nt, Artificial Sequence
  Description of Artificial Sequence: Synthetic oligonucleotide
cacaucagguaccuuuagc

SEQ ID NO: 455607 - RNA, 19 nt, Artificial Sequence
  Description of Artificial Sequence: Synthetic oligonucleotide
auuagauuugccacuaaua

SEQ ID NO: 455608 - RNA, 19 nt, Artificial Sequence
  Description of Artificial Sequence: Synthetic oligonucleotide
auggcuuauuaaccccacg

SEQ ID NO: 455609 - RNA, 19 nt, Artificial Sequence
  Description of Artificial Sequence: Synthetic oligonucleotide
aguucauccucaaauaauu

SEQ ID NO: 455610 - RNA, 19 nt, Artificial Sequence
  Description of Artificial Sequence: Synthetic oligonucleotide
aucgauguugauagugccg

SEQ ID NO: 455611 - RNA, 19 nt, Artificial Sequence
  Description of Artificial Sequence: Synthetic oligonucleotide
ugauuugcuucauggcgcu

SEQ ID NO: 455612 - RNA, 19 nt, Artificial Sequence
  Description of Artificial Sequence: Synthetic oligonucleotide
gaaggcagaccccgugggg

SEQ ID NO: 455613 - RNA, 19 nt, Artificial Sequence
  Description of Artificial Sequence: Synthetic oligonucleotide
ucagacugcucacuccuuc

SEQ ID NO: 455614 - RNA, 19 nt, Artificial Sequence
  Description of Artificial Sequence: Synthetic oligonucleotide
uccuugacauucagacugc

SEQ ID NO: 455615 - RNA, 19 nt, Artificial Sequence
  Description of Artificial Sequence: Synthetic oligonucleotide
cuuuacccgaaguucuuuc

SEQ ID NO: 455616 - RNA, 19 nt, Artificial Sequence
  Description of Artificial Sequence: Synthetic oligonucleotide
ucggcuaccugggugguag

SEQ ID NO: 455617 - RNA, 19 nt, Artificial Sequence
  Description of Artificial Sequence: Synthetic oligonucleotide
aacugccugcgcucccggc

SEQ ID NO: 455618 - RNA, 19 nt, Artificial Sequence
  Description of Artificial Sequence: Synthetic oligonucleotide
augagcaaugaugugggga

SEQ ID NO: 455619 - RNA, 19 nt, Artificial Sequence
  Description of Artificial Sequence: Synthetic oligonucleotide
uccggagaaacugccugcg

SEQ ID NO: 455620 - RNA, 19 nt, Artificial Sequence
  Description of Artificial Sequence: Synthetic oligonucleotide
agacggucuucugugacuc

SEQ ID NO: 455621 - RNA, 19 nt, Artificial Sequence
  Description of Artificial Sequence: Synthetic oligonucleotide
agaggucugcacaaauccg

SEQ ID NO: 455622 - RNA, 19 nt, Artificial Sequence
  Description of Artificial Sequence: Synthetic oligonucleotide
acaauaucugguagggucu

SEQ ID NO: 455623 - RNA, 19 nt, Artificial Sequence
  Description of Artificial Sequence: Synthetic oligonucleotide
ucgaccuuuucuuccuucu

SEQ ID NO: 455624 - RNA, 19 nt, Artificial Sequence
  Description of Artificial Sequence: Synthetic oligonucleotide
uacauggcccgagacagga

SEQ ID NO: 455625 - RNA, 19 nt, Artificial Sequence
  Description of Artificial Sequence: Synthetic oligonucleotide
cucauugcugggucucucc

SEQ ID NO: 455626 - RNA, 19 nt, Artificial Sequence
  Description of Artificial Sequence: Synthetic oligonucleotide
cuguaagguggacuugagc

SEQ ID NO: 455627 - RNA, 19 nt, Artificial Sequence
  Description of Artificial Sequence: Synthetic oligonucleotide
gacuuaagggacuucucua

SEQ ID NO: 455628 - RNA, 19 nt, Artificial Sequence
  Description of Artificial Sequence: Synthetic oligonucleotide
agguacauggcccgagaca

SEQ ID NO: 455629 - RNA, 19 nt, Artificial Sequence
  Description of Artificial Sequence: Synthetic oligonucleotide
ucgacaugcugccugcaau

SEQ ID NO: 455630 - RNA, 19 nt, Artificial Sequence
  Description of Artificial Sequence: Synthetic oligonucleotide
acagcgagauagaacuuuc

SEQ ID NO: 455631 - RNA, 19 nt, Artificial Sequence
  Description of Artificial Sequence: Synthetic oligonucleotide
cacuaauaagaaucaccuc

SEQ ID NO: 455632 - RNA, 19 nt, Artificial Sequence
  Description of Artificial Sequence: Synthetic oligonucleotide
gccacuaauaagaaucacc

SEQ ID NO: 455633 - RNA, 19 nt, Artificial Sequence
  Description of Artificial Sequence: Synthetic oligonucleotide
caaugauguggggaucucg

SEQ ID NO: 455634 - RNA, 19 nt, Artificial Sequence
  Description of Artificial Sequence: Synthetic oligonucleotide
auuaggccaucgaucugcc

SEQ ID NO: 455635 - RNA, 19 nt, Artificial Sequence
  Description of Artificial Sequence: Synthetic oligonucleotide
agugcucucaugccucgug

SEQ ID NO: 455636 - RNA, 19 nt, Artificial Sequence
  Description of Artificial Sequence: Synthetic oligonucleotide
cuuuagcuuagagcaggcg

SEQ ID NO: 455637 - RNA, 19 nt, Artificial Sequence
  Description of Artificial Sequence: Synthetic oligonucleotide
uacccgaaguucuuucuuc

SEQ ID NO: 455638 - RNA, 19 nt, Artificial Sequence
  Description of Artificial Sequence: Synthetic oligonucleotide
aacgcauaauuuccucauu

SEQ ID NO: 455639 - RNA, 19 nt, Artificial Sequence
  Description of Artificial Sequence: Synthetic oligonucleotide
ucgugcucgacaugcugcc

SEQ ID NO: 455640 - RNA, 19 nt, Artificial Sequence
  Description of Artificial Sequence: Synthetic oligonucleotide
ucgugaugcaggugcaagu

SEQ ID NO: 455641 - RNA, 19 nt, Artificial Sequence
  Description of Artificial Sequence: Synthetic oligonucleotide
cagacugcucacuccuucc

SEQ ID NO: 455642 - RNA, 19 nt, Artificial Sequence
  Description of Artificial Sequence: Synthetic oligonucleotide
cagcuugccauucuguuga

SEQ ID NO: 455643 - RNA, 19 nt, Artificial Sequence
  Description of Artificial Sequence: Synthetic oligonucleotide
agaaacuuggcuagcucca

SEQ ID NO: 455644 - RNA, 19 nt, Artificial Sequence
  Description of Artificial Sequence: Synthetic oligonucleotide
acccgucuuugaaaguucc

SEQ ID NO: 455645 - RNA, 19 nt, Artificial Sequence
  Description of Artificial Sequence: Synthetic oligonucleotide
caagugcucucaugccucg

SEQ ID NO: 455646 - RNA, 19 nt, Artificial Sequence
  Description of Artificial Sequence: Synthetic oligonucleotide
caagucgauuaccuuaaca

SEQ ID NO: 455647 - RNA, 19 nt, Artificial Sequence
  Description of Artificial Sequence: Synthetic oligonucleotide
gguugguguagcaugauga

SEQ ID NO: 455648 - RNA, 19 nt, Artificial Sequence
  Description of Artificial Sequence: Synthetic oligonucleotide
aucgaucugcccgaucauc

SEQ ID NO: 455649 - RNA, 19 nt, Artificial Sequence
  Description of Artificial Sequence: Synthetic oligonucleotide
aggauucgccacagcaugc

SEQ ID NO: 455650 - RNA, 19 nt, Artificial Sequence
  Description of Artificial Sequence: Synthetic oligonucleotide
cauggcuuauuaaccccac

SEQ ID NO: 455651 - RNA, 19 nt, Artificial Sequence
  Description of Artificial Sequence: Synthetic oligonucleotide
ucaccugagcuuccuuugu

SEQ ID NO: 455652 - RNA, 19 nt, Artificial Sequence
  Description of Artificial Sequence: Synthetic oligonucleotide
aaauccggagaaacugccu

SEQ ID NO: 455653 - RNA, 19 nt, Artificial Sequence
  Description of Artificial Sequence: Synthetic oligonucleotide
guccaagggacuucuuuac

SEQ ID NO: 455654 - RNA, 19 nt, Artificial Sequence
  Description of Artificial Sequence: Synthetic oligonucleotide
uuaaggacuuaagggacuu

SEQ ID NO: 455655 - RNA, 19 nt, Artificial Sequence
  Description of Artificial Sequence: Synthetic oligonucleotide
acuacaggcagcaggaauu

SEQ ID NO: 455656 - RNA, 19 nt, Artificial Sequence
  Description of Artificial Sequence: Synthetic oligonucleotide
acugaucagcuuguguucu

SEQ ID NO: 455657 - RNA, 19 nt, Artificial Sequence
  Description of Artificial Sequence: Synthetic oligonucleotide
ugggugguagagaucugaa

SEQ ID NO: 455658 - RNA, 19 nt, Artificial Sequence
  Description of Artificial Sequence: Synthetic oligonucleotide
agugccguccuuauuuuca

SEQ ID NO: 455659 - RNA, 19 nt, Artificial Sequence
  Description of Artificial Sequence: Synthetic oligonucleotide
gagguacauggcccgagac

SEQ ID NO: 455660 - RNA, 19 nt, Artificial Sequence
  Description of Artificial Sequence: Synthetic oligonucleotide
cgauguauuucucaucacc

SEQ ID NO: 455661 - RNA, 19 nt, Artificial Sequence
  Description of Artificial Sequence: Synthetic oligonucleotide
uucagacggucuucuguga

SEQ ID NO: 455662 - RNA, 19 nt, Artificial Sequence
  Description of Artificial Sequence: Synthetic oligonucleotide
cagcgagauagaacuuucc

SEQ ID NO: 455663 - RNA, 19 nt, Artificial Sequence
  Description of Artificial Sequence: Synthetic oligonucleotide
ugcucgacaugcugccugc

SEQ ID NO: 455664 - RNA, 19 nt, Artificial Sequence
  Description of Artificial Sequence: Synthetic oligonucleotide
ucgauccagagcaggcgga

SEQ ID NO: 455665 - RNA, 19 nt, Artificial Sequence
  Description of Artificial Sequence: Synthetic oligonucleotide
gcaauuaggccaucgaucu

SEQ ID NO: 455666 - RNA, 19 nt, Artificial Sequence
  Description of Artificial Sequence: Synthetic oligonucleotide
ucgauguauuucucaucac

SEQ ID NO: 455667 - RNA, 19 nt, Artificial Sequence
  Description of Artificial Sequence: Synthetic oligonucleotide
guugguguagcaugaugaa

SEQ ID NO: 455668 - RNA, 19 nt, Artificial Sequence
  Description of Artificial Sequence: Synthetic oligonucleotide
ccacugauucaguuggucc

SEQ ID NO: 455669 - RNA, 19 nt, Artificial Sequence
  Description of Artificial Sequence: Synthetic oligonucleotide
cagccgcaugguaagcugg

SEQ ID NO: 455670 - RNA, 19 nt, Artificial Sequence
  Description of Artificial Sequence: Synthetic oligonucleotide
ggcaguucuaauucuucac

SEQ ID NO: 455671 - RNA, 19 nt, Artificial Sequence
  Description of Artificial Sequence: Synthetic oligonucleotide
aauaucugguagggucugu

SEQ ID NO: 455672 - RNA, 19 nt, Artificial Sequence
  Description of Artificial Sequence: Synthetic oligonucleotide
uucgaccuuuucuuccuuc

SEQ ID NO: 455673 - RNA, 19 nt, Artificial Sequence
  Description of Artificial Sequence: Synthetic oligonucleotide
uaggggaggugaugagugc

SEQ ID NO: 455674 - RNA, 19 nt, Artificial Sequence
  Description of Artificial Sequence: Synthetic oligonucleotide
ugguagagaucugaacauc

SEQ ID NO: 455675 - RNA, 19 nt, Artificial Sequence
  Description of Artificial Sequence: Synthetic oligonucleotide
gcgagauagaacuuuccca

SEQ ID NO: 455676 - RNA, 19 nt, Artificial Sequence
  Description of Artificial Sequence: Synthetic oligonucleotide
cucgugaugcaggugcaag

SEQ ID NO: 455677 - RNA, 19 nt, Artificial Sequence
  Description of Artificial Sequence: Synthetic oligonucleotide
uccuaggggaggugaugag

SEQ ID NO: 455678 - RNA, 19 nt, Artificial Sequence
  Description of Artificial Sequence: Synthetic oligonucleotide
cuuuugaagcugagguaca

SEQ ID NO: 455679 - RNA, 19 nt, Artificial Sequence
  Description of Artificial Sequence: Synthetic oligonucleotide
caccaagucgauuaccuua

SEQ ID NO: 455680 - RNA, 19 nt, Artificial Sequence
  Description of Artificial Sequence: Synthetic oligonucleotide
agacugcucacuccuuccu

SEQ ID NO: 455681 - RNA, 19 nt, Artificial Sequence
  Description of Artificial Sequence: Synthetic oligonucleotide
gugcucgacaugcugccug

SEQ ID NO: 455682 - RNA, 19 nt, Artificial Sequence
  Description of Artificial Sequence: Synthetic oligonucleotide
cuggaguacaacagcgaga

SEQ ID NO: 455683 - RNA, 19 nt, Artificial Sequence
  Description of Artificial Sequence: Synthetic oligonucleotide
aggccucgugagguuaucc

SEQ ID NO: 455684 - RNA, 19 nt, Artificial Sequence
  Description of Artificial Sequence: Synthetic oligonucleotide
ccacuaauaagaaucaccu

SEQ ID NO: 455685 - RNA, 19 nt, Artificial Sequence
  Description of Artificial Sequence: Synthetic oligonucleotide
auauuagauuugccacuaa

SEQ ID NO: 455686 - RNA, 19 nt, Artificial Sequence
  Description of Artificial Sequence: Synthetic oligonucleotide
auacuucuggcuggauguc

SEQ ID NO: 455687 - RNA, 19 nt, Artificial Sequence
  Description of Artificial Sequence: Synthetic oligonucleotide
ggugucgauccagagcagg

SEQ ID NO: 455688 - RNA, 19 nt, Artificial Sequence
  Description of Artificial Sequence: Synthetic oligonucleotide
ggauucuucgauguauuuc

SEQ ID NO: 455689 - RNA, 19 nt, Artificial Sequence
  Description of Artificial Sequence: Synthetic oligonucleotide
ucucaugccucgugcucga

SEQ ID NO: 455690 - RNA, 19 nt, Artificial Sequence
  Description of Artificial Sequence: Synthetic oligonucleotide
gauguggggaucucgugau

SEQ ID NO: 455691 - RNA, 19 nt, Artificial Sequence
  Description of Artificial Sequence: Synthetic oligonucleotide
auagugccguccuuauuuu

SEQ ID NO: 455692 - RNA, 19 nt, Artificial Sequence
  Description of Artificial Sequence: Synthetic oligonucleotide
ugccacuaauaagaaucac

SEQ ID NO: 455693 - RNA, 19 nt, Artificial Sequence
  Description of Artificial Sequence: Synthetic oligonucleotide
caauaucugguagggucug

SEQ ID NO: 455694 - RNA, 19 nt, Artificial Sequence
  Description of Artificial Sequence: Synthetic oligonucleotide
accaagucgauuaccuuaa

SEQ ID NO: 455695 - RNA, 19 nt, Artificial Sequence
  Description of Artificial Sequence: Synthetic oligonucleotide
caggcgagagggugucugg

SEQ ID NO: 455696 - RNA, 19 nt, Artificial Sequence
  Description of Artificial Sequence: Synthetic oligonucleotide
ggauucgccacagcaugcg

SEQ ID NO: 455697 - RNA, 19 nt, Artificial Sequence
  Description of Artificial Sequence: Synthetic oligonucleotide
cacugauucaguugguccu

SEQ ID NO: 455698 - RNA, 19 nt, Artificial Sequence
  Description of Artificial Sequence: Synthetic oligonucleotide
uguugauagugccguccuu

SEQ ID NO: 455699 - RNA, 19 nt, Artificial Sequence
  Description of Artificial Sequence: Synthetic oligonucleotide
ggcgcugaugagcucacug

SEQ ID NO: 455700 - RNA, 19 nt, Artificial Sequence
  Description of Artificial Sequence: Synthetic oligonucleotide
uggugucgauccagagcag

SEQ ID NO: 455701 - RNA, 19 nt, Artificial Sequence
  Description of Artificial Sequence: Synthetic oligonucleotide
uucuguugacuggucucca

SEQ ID NO: 455702 - RNA, 19 nt, Artificial Sequence
  Description of Artificial Sequence: Synthetic oligonucleotide
aggccaucgaucugcccga

SEQ ID NO: 455703 - RNA, 19 nt, Artificial Sequence
  Description of Artificial Sequence: Synthetic oligonucleotide
ugauagugccguccuuauu

SEQ ID NO: 455704 - RNA, 19 nt, Artificial Sequence
  Description of Artificial Sequence: Synthetic oligonucleotide
ccucgugagguuauccagc

SEQ ID NO: 455705 - RNA, 19 nt, Artificial Sequence
  Description of Artificial Sequence: Synthetic oligonucleotide
gugccguauccuucagugc

SEQ ID NO: 455706 - RNA, 19 nt, Artificial Sequence
  Description of Artificial Sequence: Synthetic oligonucleotide
aaccaaucuugcagaggca

SEQ ID NO: 455707 - RNA, 19 nt, Artificial Sequence
  Description of Artificial Sequence: Synthetic oligonucleotide
cucuaucguguccuggaga

SEQ ID NO: 455708 - RNA, 19 nt, Artificial Sequence
  Description of Artificial Sequence: Synthetic oligonucleotide
acggucuucugugacucca

SEQ ID NO: 455709 - RNA, 19 nt, Artificial Sequence
  Description of Artificial Sequence: Synthetic oligonucleotide
cccauggcuuauuaacccc

SEQ ID NO: 455710 - RNA, 19 nt, Artificial Sequence
  Description of Artificial Sequence: Synthetic oligonucleotide
gaagguacugagguccugu

SEQ ID NO: 455711 - RNA, 19 nt, Artificial Sequence
  Description of Artificial Sequence: Synthetic oligonucleotide
aggcgagagggugucuggg

SEQ ID NO: 455712 - RNA, 19 nt, Artificial Sequence
  Description of Artificial Sequence: Synthetic oligonucleotide
uauuaaccccacgguccug

SEQ ID NO: 455713 - RNA, 19 nt, Artificial Sequence
  Description of Artificial Sequence: Synthetic oligonucleotide
ccaucgaucugcccgauca

SEQ ID NO: 455714 - RNA, 19 nt, Artificial Sequence
  Description of Artificial Sequence: Synthetic oligonucleotide
ucgugagguuauccagcgu

SEQ ID NO: 455715 - RNA, 19 nt, Artificial Sequence
  Description of Artificial Sequence: Synthetic oligonucleotide
gcgagagggugucugggag

SEQ ID NO: 455716 - RNA, 19 nt, Artificial Sequence
  Description of Artificial Sequence: Synthetic oligonucleotide
acuuucaccugagcuuccu

SEQ ID NO: 455717 - RNA, 19 nt, Artificial Sequence
  Description of Artificial Sequence: Synthetic oligonucleotide
auguggggaucucgugaug

SEQ ID NO: 455718 - RNA, 19 nt, Artificial Sequence
  Description of Artificial Sequence: Synthetic oligonucleotide
cagcuuuacccgaaguucu

SEQ ID NO: 455719 - RNA, 19 nt, Artificial Sequence
  Description of Artificial Sequence: Synthetic oligonucleotide
uaaggacuuaagggacuuc

SEQ ID NO: 455720 - RNA, 19 nt, Artificial Sequence
  Description of Artificial Sequence: Synthetic oligonucleotide
gugcaauuaggccaucgau

SEQ ID NO: 455721 - RNA, 19 nt, Artificial Sequence
  Description of Artificial Sequence: Synthetic oligonucleotide
acugauucaguugguccuu

SEQ ID NO: 455722 - RNA, 19 nt, Artificial Sequence
  Description of Artificial Sequence: Synthetic oligonucleotide
cuguuggacucgcuuuguc

SEQ ID NO: 455723 - RNA, 19 nt, Artificial Sequence
  Description of Artificial Sequence: Synthetic oligonucleotide
uaacaaggucaucgauguu

SEQ ID NO: 455724 - RNA, 19 nt, Artificial Sequence
  Description of Artificial Sequence: Synthetic oligonucleotide
ugacuccaagugcucucau

SEQ ID NO: 455725 - RNA, 19 nt, Artificial Sequence
  Description of Artificial Sequence: Synthetic oligonucleotide
aggcggaagccaugguagu

SEQ ID NO: 455726 - RNA, 19 nt, Artificial Sequence
  Description of Artificial Sequence: Synthetic oligonucleotide
guacauggcccgagacagg

SEQ ID NO: 455727 - RNA, 19 nt, Artificial Sequence
  Description of Artificial Sequence: Synthetic oligonucleotide
gguagagaucugaacaucu

SEQ ID NO: 455728 - RNA, 19 nt, Artificial Sequence
  Description of Artificial Sequence: Synthetic oligonucleotide
guacaacagcgagauagaa

SEQ ID NO: 455729 - RNA, 19 nt, Artificial Sequence
  Description of Artificial Sequence: Synthetic oligonucleotide
guccaccaagucgauuacc

SEQ ID NO: 455730 - RNA, 19 nt, Artificial Sequence
  Description of Artificial Sequence: Synthetic oligonucleotide
guugguccuucagacgguc

SEQ ID NO: 455731 - RNA, 19 nt, Artificial Sequence
  Description of Artificial Sequence: Synthetic oligonucleotide
gugcaagucgagccacuga

SEQ ID NO: 455732 - RNA, 19 nt, Artificial Sequence
  Description of Artificial Sequence: Synthetic oligonucleotide
ggcuuauuaaccccacggu

SEQ ID NO: 455733 - RNA, 19 nt, Artificial Sequence
  Description of Artificial Sequence: Synthetic oligonucleotide
guagggucuguaaggugga

SEQ ID NO: 455734 - RNA, 19 nt, Artificial Sequence
  Description of Artificial Sequence: Synthetic oligonucleotide
caugccucgugcucgacau

SEQ ID NO: 455735 - RNA, 19 nt, Artificial Sequence
  Description of Artificial Sequence: Synthetic oligonucleotide
cuuuggauucuucgaugua

SEQ ID NO: 455736 - RNA, 19 nt, Artificial Sequence
  Description of Artificial Sequence: Synthetic oligonucleotide
cucccggcgagucagugua

SEQ ID NO: 455737 - RNA, 19 nt, Artificial Sequence
  Description of Artificial Sequence: Synthetic oligonucleotide
aucguguccuggagaaacu

SEQ ID NO: 455738 - RNA, 19 nt, Artificial Sequence
  Description of Artificial Sequence: Synthetic oligonucleotide
cugauucaguugguccuuc

SEQ ID NO: 455739 - RNA, 19 nt, Artificial Sequence
  Description of Artificial Sequence: Synthetic oligonucleotide
gguaagcuggaaacgcaga

SEQ ID NO: 455740 - RNA, 19 nt, Artificial Sequence
  Description of Artificial Sequence: Synthetic oligonucleotide
acucgcuuugucagccucu

SEQ ID NO: 455741 - RNA, 19 nt, Artificial Sequence
  Description of Artificial Sequence: Synthetic oligonucleotide
gcuuguguucuggaaugug

SEQ ID NO: 455742 - RNA, 19 nt, Artificial Sequence
  Description of Artificial Sequence: Synthetic oligonucleotide
cagcaugcgggcagcuauc

SEQ ID NO: 455743 - RNA, 19 nt, Artificial Sequence
  Description of Artificial Sequence: Synthetic oligonucleotide
gcuaccagcugaggccucg

SEQ ID NO: 455744 - RNA, 19 nt, Artificial Sequence
  Description of Artificial Sequence: Synthetic oligonucleotide
acuaggcggaagaggucug

SEQ ID NO: 455745 - RNA, 19 nt, Artificial Sequence
  Description of Artificial Sequence: Synthetic oligonucleotide
ggcagcuaucuuggugucg

SEQ ID NO: 455746 - RNA, 19 nt, Artificial Sequence
  Description of Artificial Sequence: Synthetic oligonucleotide
uuucggcuaccuggguggu

SEQ ID NO: 455747 - RNA, 19 nt, Artificial Sequence
  Description of Artificial Sequence: Synthetic oligonucleotide
cacuaggcggaagaggucu

SEQ ID NO: 455748 - RNA, 19 nt, Artificial Sequence
  Description of Artificial Sequence: Synthetic oligonucleotide
gcgagucaguguaugacca

SEQ ID NO: 455749 - RNA, 19 nt, Artificial Sequence
  Description of Artificial Sequence: Synthetic oligonucleotide
gcuggaaacgcagaaaguu

SEQ ID NO: 455750 - RNA, 19 nt, Artificial Sequence
  Description of Artificial Sequence: Synthetic oligonucleotide
guguaugaccauugaggau

SEQ ID NO: 455751 - RNA, 19 nt, Artificial Sequence
  Description of Artificial Sequence: Synthetic oligonucleotide
caggaauaguggcuuccaa

SEQ ID NO: 455752 - RNA, 19 nt, Artificial Sequence
  Description of Artificial Sequence: Synthetic oligonucleotide
ccucuaucguguccuggag

SEQ ID NO: 455753 - RNA, 19 nt, Artificial Sequence
  Description of Artificial Sequence: Synthetic oligonucleotide
ccuugcaauggugcccugg

SEQ ID NO: 455754 - RNA, 19 nt, Artificial Sequence
  Description of Artificial Sequence: Synthetic oligonucleotide
gccugcaauuccuugacau

SEQ ID NO: 455755 - RNA, 19 nt, Artificial Sequence
  Description of Artificial Sequence: Synthetic oligonucleotide
cucuaucacagaguccucu

SEQ ID NO: 455756 - RNA, 19 nt, Artificial Sequence
  Description of Artificial Sequence: Synthetic oligonucleotide
cagcgucaguucauccuca

SEQ ID NO: 455757 - RNA, 19 nt, Artificial Sequence
  Description of Artificial Sequence: Synthetic oligonucleotide
ugccugcgcucccggcgag

SEQ ID NO: 455758 - RNA, 19 nt, Artificial Sequence
  Description of Artificial Sequence: Synthetic oligonucleotide
caggguuggcuggaguaca

SEQ ID NO: 455759 - RNA, 19 nt, Artificial Sequence
  Description of Artificial Sequence: Synthetic oligonucleotide
guccugugacaaccaaucu

SEQ ID NO: 455760 - RNA, 19 nt, Artificial Sequence
  Description of Artificial Sequence: Synthetic oligonucleotide
guucauccucaaauaauuu

SEQ ID NO: 455761 - RNA, 19 nt, Artificial Sequence
  Description of Artificial Sequence: Synthetic oligonucleotide
caggugccguauccuucag

SEQ ID NO: 455762 - RNA, 19 nt, Artificial Sequence
  Description of Artificial Sequence: Synthetic oligonucleotide
agcuuuacccgaaguucuu

SEQ ID NO: 455763 - RNA, 19 nt, Artificial Sequence
  Description of Artificial Sequence: Synthetic oligonucleotide
aucugcccgaucaucuguu

SEQ ID NO: 455764 - RNA, 19 nt, Artificial Sequence
  Description of Artificial Sequence: Synthetic oligonucleotide
gaacuuucccauggcuuau

SEQ ID NO: 455765 - RNA, 19 nt, Artificial Sequence
  Description of Artificial Sequence: Synthetic oligonucleotide
gccaauggacugaaguucu

SEQ ID NO: 455766 - RNA, 19 nt, Artificial Sequence
  Description of Artificial Sequence: Synthetic oligonucleotide
ggaagguacugagguccug

SEQ ID NO: 455767 - RNA, 19 nt, Artificial Sequence
  Description of Artificial Sequence: Synthetic oligonucleotide
ggcuggaguacaacagcga

SEQ ID NO: 455768 - RNA, 19 nt, Artificial Sequence
  Description of Artificial Sequence: Synthetic oligonucleotide
ggaucucgugaugcaggug

SEQ ID NO: 455769 - RNA, 19 nt, Artificial Sequence
  Description of Artificial Sequence: Synthetic oligonucleotide
cugccugcgcucccggcga

SEQ ID NO: 455770 - RNA, 19 nt, Artificial Sequence
  Description of Artificial Sequence: Synthetic oligonucleotide
ucccggcgagucaguguau

SEQ ID NO: 455771 - RNA, 19 nt, Artificial Sequence
  Description of Artificial Sequence: Synthetic oligonucleotide
ccggagaaacugccugcgc

SEQ ID NO: 455772 - RNA, 19 nt, Artificial Sequence
  Description of Artificial Sequence: Synthetic oligonucleotide
ggacaggaucacaucaggu

SEQ ID NO: 455773 - RNA, 19 nt, Artificial Sequence
  Description of Artificial Sequence: Synthetic oligonucleotide
gaggccucgugagguuauc

SEQ ID NO: 455774 - RNA, 19 nt, Artificial Sequence
  Description of Artificial Sequence: Synthetic oligonucleotide
ccaagucgauuaccuuaac

SEQ ID NO: 455775 - RNA, 19 nt, Artificial Sequence
  Description of Artificial Sequence: Synthetic oligonucleotide
gugccguccuuauuuucau

SEQ ID NO: 455776 - RNA, 19 nt, Artificial Sequence
  Description of Artificial Sequence: Synthetic oligonucleotide
ggcccgagacaggaugagc

SEQ ID NO: 455777 - RNA, 19 nt, Artificial Sequence
  Description of Artificial Sequence: Synthetic oligonucleotide
guguagccuccagcuuugc

SEQ ID NO: 455778 - RNA, 19 nt, Artificial Sequence
  Description of Artificial Sequence: Synthetic oligonucleotide
gcccgaucaucuguuggac

SEQ ID NO: 455779 - RNA, 19 nt, Artificial Sequence
  Description of Artificial Sequence: Synthetic oligonucleotide
ccguccuuauuuucaucca

SEQ ID NO: 455780 - RNA, 19 nt, Artificial Sequence
  Description of Artificial Sequence: Synthetic oligonucleotide
gcuuagagcaggcgucacu

SEQ ID NO: 455781 - RNA, 19 nt, Artificial Sequence
  Description of Artificial Sequence: Synthetic oligonucleotide
caaauguggauggcagcau

SEQ ID NO: 455782 - RNA, 19 nt, Artificial Sequence
  Description of Artificial Sequence: Synthetic oligonucleotide
cuaucguguccuggagaaa

SEQ ID NO: 455783 - RNA, 19 nt, Artificial Sequence
  Description of Artificial Sequence: Synthetic oligonucleotide
caauuucggcuaccugggu

SEQ ID NO: 455784 - RNA, 19 nt, Artificial Sequence
  Description of Artificial Sequence: Synthetic oligonucleotide
ggcauuccccuuggcugcc

SEQ ID NO: 455785 - RNA, 19 nt, Artificial Sequence
  Description of Artificial Sequence: Synthetic oligonucleotide
gccaggcaguucuaauucu

SEQ ID NO: 455786 - RNA, 19 nt, Artificial Sequence
  Description of Artificial Sequence: Synthetic oligonucleotide
gcgcacaggaagguacuga

SEQ ID NO: 455787 - RNA, 19 nt, Artificial Sequence
  Description of Artificial Sequence: Synthetic oligonucleotide
ccaugguaguaguguuuca

SEQ ID NO: 455788 - RNA, 19 nt, Artificial Sequence
  Description of Artificial Sequence: Synthetic oligonucleotide
ccgcaugguaagcuggaaa

SEQ ID NO: 455789 - RNA, 19 nt, Artificial Sequence
  Description of Artificial Sequence: Synthetic oligonucleotide
caacagcgagauagaacuu

SEQ ID NO: 455790 - RNA, 19 nt, Artificial Sequence
  Description of Artificial Sequence: Synthetic oligonucleotide
ccguauccuucagugcuuc

SEQ ID NO: 455791 - RNA, 19 nt, Artificial Sequence
  Description of Artificial Sequence: Synthetic oligonucleotide
cccggcgagucaguguaug

SEQ ID NO: 455792 - RNA, 19 nt, Artificial Sequence
  Description of Artificial Sequence: Synthetic oligonucleotide
ccucagccgcaugguaagc

SEQ ID NO: 455793 - RNA, 19 nt, Artificial Sequence
  Description of Artificial Sequence: Synthetic oligonucleotide
cggagaaacugccugcgcu

SEQ ID NO: 455794 - RNA, 19 nt, Artificial Sequence
  Description of Artificial Sequence: Synthetic oligonucleotide
ccggcgagucaguguauga

SEQ ID NO: 455795 - RNA, 19 nt, Artificial Sequence
  Description of Artificial Sequence: Synthetic oligonucleotide
cacugacacugaugacacu

SEQ ID NO: 455796 - RNA, 19 nt, Artificial Sequence
  Description of Artificial Sequence: Synthetic oligonucleotide
ggaguacaacagcgagaua

SEQ ID NO: 455797 - RNA, 19 nt, Artificial Sequence
  Description of Artificial Sequence: Synthetic oligonucleotide
cuucgaccuuuucuuccuu

SEQ ID NO: 455798 - RNA, 19 nt, Artificial Sequence
  Description of Artificial Sequence: Synthetic oligonucleotide
cccugucucccggaucuuc

SEQ ID NO: 455799 - RNA, 19 nt, Artificial Sequence
  Description of Artificial Sequence: Synthetic oligonucleotide
ccuaggggaggugaugagu

SEQ ID NO: 455800 - RNA, 19 nt, Artificial Sequence
  Description of Artificial Sequence: Synthetic oligonucleotide
cucgcuuugucagccucuu

SEQ ID NO: 455801 - RNA, 19 nt, Artificial Sequence
  Description of Artificial Sequence: Synthetic oligonucleotide
cccgaucaucuguuggacu

SEQ ID NO: 455802 - RNA, 19 nt, Artificial Sequence
  Description of Artificial Sequence: Synthetic oligonucleotide
gcuuuacccgaaguucuuu

SEQ ID NO: 455803 - RNA, 19 nt, Artificial Sequence
  Description of Artificial Sequence: Synthetic oligonucleotide
gcucccggcgagucagugu

SEQ ID NO: 455804 - RNA, 19 nt, Artificial Sequence
  Description of Artificial Sequence: Synthetic oligonucleotide
cccgucuuugaaaguuccu

SEQ ID NO: 455805 - RNA, 19 nt, Artificial Sequence
  Description of Artificial Sequence: Synthetic oligonucleotide
gcuugccauucuguugacu

SEQ ID NO: 455806 - RNA, 19 nt, Artificial Sequence
  Description of Artificial Sequence: Synthetic oligonucleotide
gcucgacaugcugccugca

SEQ ID NO: 455807 - RNA, 19 nt, Artificial Sequence
  Description of Artificial Sequence: Synthetic oligonucleotide
cuaccagcugaggccucgu

SEQ ID NO: 455808 - RNA, 19 nt, Artificial Sequence
  Description of Artificial Sequence: Synthetic oligonucleotide
cagcuaucuuggugucgau

SEQ ID NO: 455809 - RNA, 19 nt, Artificial Sequence
  Description of Artificial Sequence: Synthetic oligonucleotide
gccguauccuucagugcuu

SEQ ID NO: 455810 - RNA, 19 nt, Artificial Sequence
  Description of Artificial Sequence: Synthetic oligonucleotide
gcaugcgggcagcuaucuu

SEQ ID NO: 455811 - RNA, 19 nt, Artificial Sequence
  Description of Artificial Sequence: Synthetic oligonucleotide
cgcucccggcgagucagug

SEQ ID NO: 455812 - RNA, 19 nt, Artificial Sequence
  Description of Artificial Sequence: Synthetic oligonucleotide
gccucgugcucgacaugcu

SEQ ID NO: 455813 - RNA, 19 nt, Artificial Sequence
  Description of Artificial Sequence: Synthetic oligonucleotide
cagaccccguggggccaaa

SEQ ID NO: 455814 - RNA, 19 nt, Artificial Sequence
  Description of Artificial Sequence: Synthetic oligonucleotide
cggcuaccugggugguaga

SEQ ID NO: 455815 - RNA, 19 nt, Artificial Sequence
  Description of Artificial Sequence: Synthetic oligonucleotide
cgugcucgacaugcugccu

SEQ ID NO: 455816 - RNA, 19 nt, Artificial Sequence
  Description of Artificial Sequence: Synthetic oligonucleotide
gccugcgcucccggcgagu

SEQ ID NO: 455817 - RNA, 19 nt, Artificial Sequence
  Description of Artificial Sequence: Synthetic oligonucleotide
ccccugucucccggaucuu

SEQ ID NO: 455818 - RNA, 19 nt, Artificial Sequence
  Description of Artificial Sequence: Synthetic oligonucleotide
uauuccaucagucagauaa

SEQ ID NO: 455819 - RNA, 19 nt, Artificial Sequence
  Description of Artificial Sequence: Synthetic oligonucleotide
uguguuaccacacuugaag

SEQ ID NO: 455820 - RNA, 19 nt, Artificial Sequence
  Description of Artificial Sequence: Synthetic oligonucleotide
uguaaguggguaaugaaag

SEQ ID NO: 455821 - RNA, 19 nt, Artificial Sequence
  Description of Artificial Sequence: Synthetic oligonucleotide
uuaaaagcacuaaagacac

SEQ ID NO: 455822 - RNA, 19 nt, Artificial Sequence
  Description of Artificial Sequence: Synthetic oligonucleotide
aacuagacucauuggaagc

SEQ ID NO: 455823 - RNA, 19 nt, Artificial Sequence
  Description of Artificial Sequence: Synthetic oligonucleotide
uaauccugcgagcagagcg

SEQ ID NO: 455824 - RNA, 19 nt, Artificial Sequence
  Description of Artificial Sequence: Synthetic oligonucleotide
cuaggaaacauuaaccacc

SEQ ID NO: 455825 - RNA, 19 nt, Artificial Sequence
  Description of Artificial Sequence: Synthetic oligonucleotide
aaacaacuacacuugggcg

SEQ ID NO: 455826 - RNA, 19 nt, Artificial Sequence
  Description of Artificial Sequence: Synthetic oligonucleotide
auacauuugaaaauucugc

SEQ ID NO: 455827 - RNA, 19 nt, Artificial Sequence
  Description of Artificial Sequence: Synthetic oligonucleotide
ugaacuguaaaauuaaguu

SEQ ID NO: 455828 - RNA, 19 nt, Artificial Sequence
  Description of Artificial Sequence: Synthetic oligonucleotide
cuuaaaagcacuaaagaca

SEQ ID NO: 455829 - RNA, 19 nt, Artificial Sequence
  Description of Artificial Sequence: Synthetic oligonucleotide
cauuuaugcauuuuaacac

SEQ ID NO: 455830 - RNA, 19 nt, Artificial Sequence
  Description of Artificial Sequence: Synthetic oligonucleotide
ucuguauguagguuggugg

SEQ ID NO: 455831 - RNA, 19 nt, Artificial Sequence
  Description of Artificial Sequence: Synthetic oligonucleotide
acaagacugccauagacac

SEQ ID NO: 455832 - RNA, 19 nt, Artificial Sequence
  Description of Artificial Sequence: Synthetic oligonucleotide
aaauugguuuccuuagguc

SEQ ID NO: 455833 - RNA, 19 nt, Artificial Sequence
  Description of Artificial Sequence: Synthetic oligonucleotide
aaacuagacucauuggaag

SEQ ID NO: 455834 - RNA, 19 nt, Artificial Sequence
  Description of Artificial Sequence: Synthetic oligonucleotide
aagacaagcaaacagugau

SEQ ID NO: 455835 - RNA, 19 nt, Artificial Sequence
  Description of Artificial Sequence: Synthetic oligonucleotide
uucaguaacaguaugugaa

SEQ ID NO: 455836 - RNA, 19 nt, Artificial Sequence
  Description of Artificial Sequence: Synthetic oligonucleotide
agauaaagcuguaagaggg

SEQ ID NO: 455837 - RNA, 19 nt, Artificial Sequence
  Description of Artificial Sequence: Synthetic oligonucleotide
aagacaagguuccucgaac

SEQ ID NO: 455838 - RNA, 19 nt, Artificial Sequence
  Description of Artificial Sequence: Synthetic oligonucleotide
ugugaaauguaucugacuu

SEQ ID NO: 455839 - RNA, 19 nt, Artificial Sequence
  Description of Artificial Sequence: Synthetic oligonucleotide
uuacuaauggcuaguacug

SEQ ID NO: 455840 - RNA, 19 nt, Artificial Sequence
  Description of Artificial Sequence: Synthetic oligonucleotide
gaaaauucugcugagacca

SEQ ID NO: 455841 - RNA, 19 nt, Artificial Sequence
  Description of Artificial Sequence: Synthetic oligonucleotide
aacaacuacacuugggcgu

SEQ ID NO: 455842 - RNA, 19 nt, Artificial Sequence
  Description of Artificial Sequence: Synthetic oligonucleotide
ugcuuauccuguaaguggg

SEQ ID NO: 455843 - RNA, 19 nt, Artificial Sequence
  Description of Artificial Sequence: Synthetic oligonucleotide
uuagaaacucuuuuggggu

SEQ ID NO: 455844 - RNA, 19 nt, Artificial Sequence
  Description of Artificial Sequence: Synthetic oligonucleotide
aacaauaacuggaagucag

SEQ ID NO: 455845 - RNA, 19 nt, Artificial Sequence
  Description of Artificial Sequence: Synthetic oligonucleotide
ucuuuaacaaucugcgccc

SEQ ID NO: 455846 - RNA, 19 nt, Artificial Sequence
  Description of Artificial Sequence: Synthetic oligonucleotide
ucuccuaagagccaugagu

SEQ ID NO: 455847 - RNA, 19 nt, Artificial Sequence
  Description of Artificial Sequence: Synthetic oligonucleotide
aauuguuguguuaccacac

SEQ ID NO: 455848 - RNA, 19 nt, Artificial Sequence
  Description of Artificial Sequence: Synthetic oligonucleotide
uccauuaagacuuggugcu

SEQ ID NO: 455849 - RNA, 19 nt, Artificial Sequence
  Description of Artificial Sequence: Synthetic oligonucleotide
uuuaauauuaaggcagcug

SEQ ID NO: 455850 - RNA, 19 nt, Artificial Sequence
  Description of Artificial Sequence: Synthetic oligonucleotide
ugcuaggaaacauuaacca

SEQ ID NO: 455851 - RNA, 19 nt, Artificial Sequence
  Description of Artificial Sequence: Synthetic oligonucleotide
auuaaguucauaaaggcau

SEQ ID NO: 455852 - RNA, 19 nt, Artificial Sequence
  Description of Artificial Sequence: Synthetic oligonucleotide
uuauuaguagcugggacag

SEQ ID NO: 455853 - RNA, 19 nt, Artificial Sequence
  Description of Artificial Sequence: Synthetic oligonucleotide
aacauuaaccaccauggua

SEQ ID NO: 455854 - RNA, 19 nt, Artificial Sequence
  Description of Artificial Sequence: Synthetic oligonucleotide
uguggugaaacaacuacac

SEQ ID NO: 455855 - RNA, 19 nt, Artificial Sequence
  Description of Artificial Sequence: Synthetic oligonucleotide
aaauauuaaagggauucgu

SEQ ID NO: 455856 - RNA, 19 nt, Artificial Sequence
  Description of Artificial Sequence: Synthetic oligonucleotide
uaaauugguuuccuuaggu

SEQ ID NO: 455857 - RNA, 19 nt, Artificial Sequence
  Description of Artificial Sequence: Synthetic oligonucleotide
gacgacacaaaauaauuca

SEQ ID NO: 455858 - RNA, 19 nt, Artificial Sequence
  Description of Artificial Sequence: Synthetic oligonucleotide
gacgcuauaaauugguuuc

SEQ ID NO: 455859 - RNA, 19 nt, Artificial Sequence
  Description of Artificial Sequence: Synthetic oligonucleotide
uucacuacagcauuuccga

SEQ ID NO: 455860 - RNA, 19 nt, Artificial Sequence
  Description of Artificial Sequence: Synthetic oligonucleotide
auuuaugcauuuuaacaca

SEQ ID NO: 455861 - RNA, 19 nt, Artificial Sequence
  Description of Artificial Sequence: Synthetic oligonucleotide
uaaaccuguccucugcuag

SEQ ID NO: 455862 - RNA, 19 nt, Artificial Sequence
  Description of Artificial Sequence: Synthetic oligonucleotide
uuacaagacugccauagac

SEQ ID NO: 455863 - RNA, 19 nt, Artificial Sequence
  Description of Artificial Sequence: Synthetic oligonucleotide
agagggacgcuauaaauug

SEQ ID NO: 455864 - RNA, 19 nt, Artificial Sequence
  Description of Artificial Sequence: Synthetic oligonucleotide
ugcaagagcacuucaauuc

SEQ ID NO: 455865 - RNA, 19 nt, Artificial Sequence
  Description of Artificial Sequence: Synthetic oligonucleotide
agacaagguuccucgaacc

SEQ ID NO: 455866 - RNA, 19 nt, Artificial Sequence
  Description of Artificial Sequence: Synthetic oligonucleotide
uacaagacugccauagaca

SEQ ID NO: 455867 - RNA, 19 nt, Artificial Sequence
  Description of Artificial Sequence: Synthetic oligonucleotide
gaagcuagagguccguuag

SEQ ID NO: 455868 - RNA, 19 nt, Artificial Sequence
  Description of Artificial Sequence: Synthetic oligonucleotide
uggugaaacaacuacacuu

SEQ ID NO: 455869 - RNA, 19 nt, Artificial Sequence
  Description of Artificial Sequence: Synthetic oligonucleotide
uguauaacagggguuguag

SEQ ID NO: 455870 - RNA, 19 nt, Artificial Sequence
  Description of Artificial Sequence: Synthetic oligonucleotide
cagauaaagcuguaagagg

SEQ ID NO: 455871 - RNA, 19 nt, Artificial Sequence
  Description of Artificial Sequence: Synthetic oligonucleotide
uuugaucaaacuagacuca

SEQ ID NO: 455872 - RNA, 19 nt, Artificial Sequence
  Description of Artificial Sequence: Synthetic oligonucleotide
aaagguaccuugaagacaa

SEQ ID NO: 455873 - RNA, 19 nt, Artificial Sequence
  Description of Artificial Sequence: Synthetic oligonucleotide
cacagauagcauuugacug

SEQ ID NO: 455874 - RNA, 19 nt, Artificial Sequence
  Description of Artificial Sequence: Synthetic oligonucleotide
ugauagggcagaaugggac

SEQ ID NO: 455875 - RNA, 19 nt, Artificial Sequence
  Description of Artificial Sequence: Synthetic oligonucleotide
cuaacuccuacuuuauuug

SEQ ID NO: 455876 - RNA, 19 nt, Artificial Sequence
  Description of Artificial Sequence: Synthetic oligonucleotide
uaauggcuaguacugauaa

SEQ ID NO: 455877 - RNA, 19 nt, Artificial Sequence
  Description of Artificial Sequence: Synthetic oligonucleotide
aguucugucuagcaaggag

SEQ ID NO: 455878 - RNA, 19 nt, Artificial Sequence
  Description of Artificial Sequence: Synthetic oligonucleotide
ggaaacauuaaccaccaug

SEQ ID NO: 455879 - RNA, 19 nt, Artificial Sequence
  Description of Artificial Sequence: Synthetic oligonucleotide
cugcuaggaaacauuaacc

SEQ ID NO: 455880 - RNA, 19 nt, Artificial Sequence
  Description of Artificial Sequence: Synthetic oligonucleotide
cuccuaagagccaugagug

SEQ ID NO: 455881 - RNA, 19 nt, Artificial Sequence
  Description of Artificial Sequence: Synthetic oligonucleotide
uuuaugcauuuuaacacaa

SEQ ID NO: 455882 - RNA, 19 nt, Artificial Sequence
  Description of Artificial Sequence: Synthetic oligonucleotide
ucguucagagaucagaaua

SEQ ID NO: 455883 - RNA, 19 nt, Artificial Sequence
  Description of Artificial Sequence: Synthetic oligonucleotide
acagauagcauuugacuga

SEQ ID NO: 455884 - RNA, 19 nt, Artificial Sequence
  Description of Artificial Sequence: Synthetic oligonucleotide
gaaccuagagugcaagagc

SEQ ID NO: 455885 - RNA, 19 nt, Artificial Sequence
  Description of Artificial Sequence: Synthetic oligonucleotide
acauuaaccaccaugguaa

SEQ ID NO: 455886 - RNA, 19 nt, Artificial Sequence
  Description of Artificial Sequence: Synthetic oligonucleotide
uagaccgaacaucaguuga

SEQ ID NO: 455887 - RNA, 19 nt, Artificial Sequence
  Description of Artificial Sequence: Synthetic oligonucleotide
uacuugguuauuaguagcu

SEQ ID NO: 455888 - RNA, 19 nt, Artificial Sequence
  Description of Artificial Sequence: Synthetic oligonucleotide
uuagcuacagugcuuggau

SEQ ID NO: 455889 - RNA, 19 nt, Artificial Sequence
  Description of Artificial Sequence: Synthetic oligonucleotide
caguugauagggcagaaug

SEQ ID NO: 455890 - RNA, 19 nt, Artificial Sequence
  Description of Artificial Sequence: Synthetic oligonucleotide
gcuuaaaagcacuaaagac

SEQ ID NO: 455891 - RNA, 19 nt, Artificial Sequence
  Description of Artificial Sequence: Synthetic oligonucleotide
uuaaccaccaugguaauuu

SEQ ID NO: 455892 - RNA, 19 nt, Artificial Sequence
  Description of Artificial Sequence: Synthetic oligonucleotide
uguagaccgaacaucaguu

SEQ ID NO: 455893 - RNA, 19 nt, Artificial Sequence
  Description of Artificial Sequence: Synthetic oligonucleotide
uguuuugaucaaacuagac

SEQ ID NO: 455894 - RNA, 19 nt, Artificial Sequence
  Description of Artificial Sequence: Synthetic oligonucleotide
aauggcuaguacugauaag

SEQ ID NO: 455895 - RNA, 19 nt, Artificial Sequence
  Description of Artificial Sequence: Synthetic oligonucleotide
agcagagcguccuuugaac

SEQ ID NO: 455896 - RNA, 19 nt, Artificial Sequence
  Description of Artificial Sequence: Synthetic oligonucleotide
uguccaguuagcugaacug

SEQ ID NO: 455897 - RNA, 19 nt, Artificial Sequence
  Description of Artificial Sequence: Synthetic oligonucleotide
uguguaagugguauaggau

SEQ ID NO: 455898 - RNA, 19 nt, Artificial Sequence
  Description of Artificial Sequence: Synthetic oligonucleotide
uguuaccacacuugaagcu

SEQ ID NO: 455899 - RNA, 19 nt, Artificial Sequence
  Description of Artificial Sequence: Synthetic oligonucleotide
guaugugaaauguaucuga

SEQ ID NO: 455900 - RNA, 19 nt, Artificial Sequence
  Description of Artificial Sequence: Synthetic oligonucleotide
gaagcuuccugcaugcugc

SEQ ID NO: 455901 - RNA, 19 nt, Artificial Sequence
  Description of Artificial Sequence: Synthetic oligonucleotide
auggcuaguacugauaagu

SEQ ID NO: 455902 - RNA, 19 nt, Artificial Sequence
  Description of Artificial Sequence: Synthetic oligonucleotide
acacucuguauguagguug

SEQ ID NO: 455903 - RNA, 19 nt, Artificial Sequence
  Description of Artificial Sequence: Synthetic oligonucleotide
gacucgaugcacugagugg

SEQ ID NO: 455904 - RNA, 19 nt, Artificial Sequence
  Description of Artificial Sequence: Synthetic oligonucleotide
auuuguagaccgaacauca

SEQ ID NO: 455905 - RNA, 19 nt, Artificial Sequence
  Description of Artificial Sequence: Synthetic oligonucleotide
aaaccugugagggugucug

SEQ ID NO: 455906 - RNA, 19 nt, Artificial Sequence
  Description of Artificial Sequence: Synthetic oligonucleotide
uccauguuauuccaucagu

SEQ ID NO: 455907 - RNA, 19 nt, Artificial Sequence
  Description of Artificial Sequence: Synthetic oligonucleotide
agaaccuagagugcaagag

SEQ ID NO: 455908 - RNA, 19 nt, Artificial Sequence
  Description of Artificial Sequence: Synthetic oligonucleotide
gguacuugguuauuaguag

SEQ ID NO: 455909 - RNA, 19 nt, Artificial Sequence
  Description of Artificial Sequence: Synthetic oligonucleotide
caaguucugucuagcaagg

SEQ ID NO: 455910 - RNA, 19 nt, Artificial Sequence
  Description of Artificial Sequence: Synthetic oligonucleotide
uguuacuaauggcuaguac

SEQ ID NO: 455911 - RNA, 19 nt, Artificial Sequence
  Description of Artificial Sequence: Synthetic oligonucleotide
uaccuugaagacaagcaaa

SEQ ID NO: 455912 - RNA, 19 nt, Artificial Sequence
  Description of Artificial Sequence: Synthetic oligonucleotide
gaugccccuguauaacagg

SEQ ID NO: 455913 - RNA, 19 nt, Artificial Sequence
  Description of Artificial Sequence: Synthetic oligonucleotide
gaugcaauccagugaggug

SEQ ID NO: 455914 - RNA, 19 nt, Artificial Sequence
  Description of Artificial Sequence: Synthetic oligonucleotide
uuauguuugguuguccagu

SEQ ID NO: 455915 - RNA, 19 nt, Artificial Sequence
  Description of Artificial Sequence: Synthetic oligonucleotide
aguugauagggcagaaugg

SEQ ID NO: 455916 - RNA, 19 nt, Artificial Sequence
  Description of Artificial Sequence: Synthetic oligonucleotide
aaccuagagugcaagagca

SEQ ID NO: 455917 - RNA, 19 nt, Artificial Sequence
  Description of Artificial Sequence: Synthetic oligonucleotide
guacuugguuauuaguagc

SEQ ID NO: 455918 - RNA, 19 nt, Artificial Sequence
  Description of Artificial Sequence: Synthetic oligonucleotide
guauuuacuagaacuuaag

SEQ ID NO: 455919 - RNA, 19 nt, Artificial Sequence
  Description of Artificial Sequence: Synthetic oligonucleotide
gcaaguucugucuagcaag

SEQ ID NO: 455920 - RNA, 19 nt, Artificial Sequence
  Description of Artificial Sequence: Synthetic oligonucleotide
uaggauuugaugccccugu

SEQ ID NO: 455921 - RNA, 19 nt, Artificial Sequence
  Description of Artificial Sequence: Synthetic oligonucleotide
uaagagggacgcuauaaau

SEQ ID NO: 455922 - RNA, 19 nt, Artificial Sequence
  Description of Artificial Sequence: Synthetic oligonucleotide
uauuaaggcagcuguuagu

SEQ ID NO: 455923 - RNA, 19 nt, Artificial Sequence
  Description of Artificial Sequence: Synthetic oligonucleotide
guagguacuugguuauuag

SEQ ID NO: 455924 - RNA, 19 nt, Artificial Sequence
  Description of Artificial Sequence: Synthetic oligonucleotide
cuagagguccguuagacaa

SEQ ID NO: 455925 - RNA, 19 nt, Artificial Sequence
  Description of Artificial Sequence: Synthetic oligonucleotide
aguaugugaaauguaucug

SEQ ID NO: 455926 - RNA, 19 nt, Artificial Sequence
  Description of Artificial Sequence: Synthetic oligonucleotide
auuaguagcugggacaggu

SEQ ID NO: 455927 - RNA, 19 nt, Artificial Sequence
  Description of Artificial Sequence: Synthetic oligonucleotide
cugucuagcaaggagcacc

SEQ ID NO: 455928 - RNA, 19 nt, Artificial Sequence
  Description of Artificial Sequence: Synthetic oligonucleotide
cuauaaauugguuuccuua

SEQ ID NO: 455929 - RNA, 19 nt, Artificial Sequence
  Description of Artificial Sequence: Synthetic oligonucleotide
cacucuguauguagguugg

SEQ ID NO: 455930 - RNA, 19 nt, Artificial Sequence
  Description of Artificial Sequence: Synthetic oligonucleotide
agaccauugcuuaaaagca

SEQ ID NO: 455931 - RNA, 19 nt, Artificial Sequence
  Description of Artificial Sequence: Synthetic oligonucleotide
uuaguuauuggucccucuu

SEQ ID NO: 455932 - RNA, 19 nt, Artificial Sequence
  Description of Artificial Sequence: Synthetic oligonucleotide
uggacggugacccacccaa

SEQ ID NO: 455933 - RNA, 19 nt, Artificial Sequence
  Description of Artificial Sequence: Synthetic oligonucleotide
ugggacgacacaaaauaau

SEQ ID NO: 455934 - RNA, 19 nt, Artificial Sequence
  Description of Artificial Sequence: Synthetic oligonucleotide
gauuugaugccccuguaua

SEQ ID NO: 455935 - RNA, 19 nt, Artificial Sequence
  Description of Artificial Sequence: Synthetic oligonucleotide
aaaguuaauacagguccau

SEQ ID NO: 455936 - RNA, 19 nt, Artificial Sequence
  Description of Artificial Sequence: Synthetic oligonucleotide
agguaccuugaagacaagc

SEQ ID NO: 455937 - RNA, 19 nt, Artificial Sequence
  Description of Artificial Sequence: Synthetic oligonucleotide
ucuagauccugagugggga

SEQ ID NO: 455938 - RNA, 19 nt, Artificial Sequence
  Description of Artificial Sequence: Synthetic oligonucleotide
auaauucauucuauggucu

SEQ ID NO: 455939 - RNA, 19 nt, Artificial Sequence
  Description of Artificial Sequence: Synthetic oligonucleotide
uggaguuauguuugguugu

SEQ ID NO: 455940 - RNA, 19 nt, Artificial Sequence
  Description of Artificial Sequence: Synthetic oligonucleotide
agcuagagguccguuagac

SEQ ID NO: 455941 - RNA, 19 nt, Artificial Sequence
  Description of Artificial Sequence: Synthetic oligonucleotide
uacuagaacuuaaguacaa

SEQ ID NO: 455942 - RNA, 19 nt, Artificial Sequence
  Description of Artificial Sequence: Synthetic oligonucleotide
aauccuaagagggacgcua

SEQ ID NO: 455943 - RNA, 19 nt, Artificial Sequence
  Description of Artificial Sequence: Synthetic oligonucleotide
agguccguuagacaaguca

SEQ ID NO: 455944 - RNA, 19 nt, Artificial Sequence
  Description of Artificial Sequence: Synthetic oligonucleotide
uuuuaauauuaaggcagcu

SEQ ID NO: 455945 - RNA, 19 nt, Artificial Sequence
  Description of Artificial Sequence: Synthetic oligonucleotide
ugcuuguggacggugaccc

SEQ ID NO: 455946 - RNA, 19 nt, Artificial Sequence
  Description of Artificial Sequence: Synthetic oligonucleotide
accgaacaucaguugauag

SEQ ID NO: 455947 - RNA, 19 nt, Artificial Sequence
  Description of Artificial Sequence: Synthetic oligonucleotide
cuugcaucuguacuugcug

SEQ ID NO: 455948 - RNA, 19 nt, Artificial Sequence
  Description of Artificial Sequence: Synthetic oligonucleotide
cauguuauuccaucaguca

SEQ ID NO: 455949 - RNA, 19 nt, Artificial Sequence
  Description of Artificial Sequence: Synthetic oligonucleotide
aggacuauggaagucauuu

SEQ ID NO: 455950 - RNA, 19 nt, Artificial Sequence
  Description of Artificial Sequence: Synthetic oligonucleotide
uuuaguuauuggucccucu

SEQ ID NO: 455951 - RNA, 19 nt, Artificial Sequence
  Description of Artificial Sequence: Synthetic oligonucleotide
accaugguaauuuccugcu

SEQ ID NO: 455952 - RNA, 19 nt, Artificial Sequence
  Description of Artificial Sequence: Synthetic oligonucleotide
uuaaguucauaaaggcauu

SEQ ID NO: 455953 - RNA, 19 nt, Artificial Sequence
  Description of Artificial Sequence: Synthetic oligonucleotide
cuagcaaggagcaccuuuc

SEQ ID NO: 455954 - RNA, 19 nt, Artificial Sequence
  Description of Artificial Sequence: Synthetic oligonucleotide
gcauuugacugacaguagg

SEQ ID NO: 455955 - RNA, 19 nt, Artificial Sequence
  Description of Artificial Sequence: Synthetic oligonucleotide
aggagcaccuuucaugacu

SEQ ID NO: 455956 - RNA, 19 nt, Artificial Sequence
  Description of Artificial Sequence: Synthetic oligonucleotide
uaauucauucuauggucuc

SEQ ID NO: 455957 - RNA, 19 nt, Artificial Sequence
  Description of Artificial Sequence: Synthetic oligonucleotide
auuauccucugcuggccuc

SEQ ID NO: 455958 - RNA, 19 nt, Artificial Sequence
  Description of Artificial Sequence: Synthetic oligonucleotide
agacaagucaguaccacug

SEQ ID NO: 455959 - RNA, 19 nt, Artificial Sequence
  Description of Artificial Sequence: Synthetic oligonucleotide
uaacaaucugcgcccacac

SEQ ID NO: 455960 - RNA, 19 nt, Artificial Sequence
  Description of Artificial Sequence: Synthetic oligonucleotide
ugccauuuguccugguuca

SEQ ID NO: 455961 - RNA, 19 nt, Artificial Sequence
  Description of Artificial Sequence: Synthetic oligonucleotide
ugucuagcaaggagcaccu

SEQ ID NO: 455962 - RNA, 19 nt, Artificial Sequence
  Description of Artificial Sequence: Synthetic oligonucleotide
acuaauggcuaguacugau

SEQ ID NO: 455963 - RNA, 19 nt, Artificial Sequence
  Description of Artificial Sequence: Synthetic oligonucleotide
uuugaugccccuguauaac

SEQ ID NO: 455964 - RNA, 19 nt, Artificial Sequence
  Description of Artificial Sequence: Synthetic oligonucleotide
caugggacgacacaaaaua

SEQ ID NO: 455965 - RNA, 19 nt, Artificial Sequence
  Description of Artificial Sequence: Synthetic oligonucleotide
cacugaauuguuguguuac

SEQ ID NO: 455966 - RNA, 19 nt, Artificial Sequence
  Description of Artificial Sequence: Synthetic oligonucleotide
uagacaagucaguaccacu

SEQ ID NO: 455967 - RNA, 19 nt, Artificial Sequence
  Description of Artificial Sequence: Synthetic oligonucleotide
cguuagacaagucaguacc

SEQ ID NO: 455968 - RNA, 19 nt, Artificial Sequence
  Description of Artificial Sequence: Synthetic oligonucleotide
uuagacaagucaguaccac

SEQ ID NO: 455969 - RNA, 19 nt, Artificial Sequence
  Description of Artificial Sequence: Synthetic oligonucleotide
uagagguccguuagacaag

SEQ ID NO: 455970 - RNA, 19 nt, Artificial Sequence
  Description of Artificial Sequence: Synthetic oligonucleotide
ggugaaacaacuacacuug

SEQ ID NO: 455971 - RNA, 19 nt, Artificial Sequence
  Description of Artificial Sequence: Synthetic oligonucleotide
uuaugcauuuuaacacaaa

SEQ ID NO: 455972 - RNA, 19 nt, Artificial Sequence
  Description of Artificial Sequence: Synthetic oligonucleotide
cuguguaagugguauagga

SEQ ID NO: 455973 - RNA, 19 nt, Artificial Sequence
  Description of Artificial Sequence: Synthetic oligonucleotide
acgcuauaaauugguuucc

SEQ ID NO: 455974 - RNA, 19 nt, Artificial Sequence
  Description of Artificial Sequence: Synthetic oligonucleotide
ugcgcccacacucugagua

SEQ ID NO: 455975 - RNA, 19 nt, Artificial Sequence
  Description of Artificial Sequence: Synthetic oligonucleotide
caaacuagacucauuggaa

SEQ ID NO: 455976 - RNA, 19 nt, Artificial Sequence
  Description of Artificial Sequence: Synthetic oligonucleotide
ugcucuaggagcugagccu

SEQ ID NO: 455977 - RNA, 19 nt, Artificial Sequence
  Description of Artificial Sequence: Synthetic oligonucleotide
uguuagucggauguguuua

SEQ ID NO: 455978 - RNA, 19 nt, Artificial Sequence
  Description of Artificial Sequence: Synthetic oligonucleotide
ugcaugcugcuuguggacg

SEQ ID NO: 455979 - RNA, 19 nt, Artificial Sequence
  Description of Artificial Sequence: Synthetic oligonucleotide
uagguacuugguuauuagu

SEQ ID NO: 455980 - RNA, 19 nt, Artificial Sequence
  Description of Artificial Sequence: Synthetic oligonucleotide
ugacuuugaguccccgcug

SEQ ID NO: 455981 - RNA, 19 nt, Artificial Sequence
  Description of Artificial Sequence: Synthetic oligonucleotide
caauccagugaggugacag

SEQ ID NO: 455982 - RNA, 19 nt, Artificial Sequence
  Description of Artificial Sequence: Synthetic oligonucleotide
uuaguagcugggacaggug

SEQ ID NO: 455983 - RNA, 19 nt, Artificial Sequence
  Description of Artificial Sequence: Synthetic oligonucleotide
gacggugacccacccaaag

SEQ ID NO: 455984 - RNA, 19 nt, Artificial Sequence
  Description of Artificial Sequence: Synthetic oligonucleotide
aagagggacgcuauaaauu

SEQ ID NO: 455985 - RNA, 19 nt, Artificial Sequence
  Description of Artificial Sequence: Synthetic oligonucleotide
caugguagaaaaccuguga

SEQ ID NO: 455986 - RNA, 19 nt, Artificial Sequence
  Description of Artificial Sequence: Synthetic oligonucleotide
uuugaguccccgcugugua

SEQ ID NO: 455987 - RNA, 19 nt, Artificial Sequence
  Description of Artificial Sequence: Synthetic oligonucleotide
aguuauuggucccucuuuu

SEQ ID NO: 455988 - RNA, 19 nt, Artificial Sequence
  Description of Artificial Sequence: Synthetic oligonucleotide
ucaugggacgacacaaaau

SEQ ID NO: 455989 - RNA, 19 nt, Artificial Sequence
  Description of Artificial Sequence: Synthetic oligonucleotide
uccuguaaguggguaauga

SEQ ID NO: 455990 - RNA, 19 nt, Artificial Sequence
  Description of Artificial Sequence: Synthetic oligonucleotide
caccuuucaugacugcagg

SEQ ID NO: 455991 - RNA, 19 nt, Artificial Sequence
  Description of Artificial Sequence: Synthetic oligonucleotide
uccaguuagcugaacuguc

SEQ ID NO: 455992 - RNA, 19 nt, Artificial Sequence
  Description of Artificial Sequence: Synthetic oligonucleotide
guguuuaguuauugguccc

SEQ ID NO: 455993 - RNA, 19 nt, Artificial Sequence
  Description of Artificial Sequence: Synthetic oligonucleotide
ucauuauccucugcuggcc

SEQ ID NO: 455994 - RNA, 19 nt, Artificial Sequence
  Description of Artificial Sequence: Synthetic oligonucleotide
gguuauuaguagcugggac

SEQ ID NO: 455995 - RNA, 19 nt, Artificial Sequence
  Description of Artificial Sequence: Synthetic oligonucleotide
agcaaguucugucuagcaa

SEQ ID NO: 455996 - RNA, 19 nt, Artificial Sequence
  Description of Artificial Sequence: Synthetic oligonucleotide
acuagacucauuggaagca

SEQ ID NO: 455997 - RNA, 19 nt, Artificial Sequence
  Description of Artificial Sequence: Synthetic oligonucleotide
ugcuaggauuugaugcccc

SEQ ID NO: 455998 - RNA, 19 nt, Artificial Sequence
  Description of Artificial Sequence: Synthetic oligonucleotide
acucgaugcacugagugga

SEQ ID NO: 455999 - RNA, 19 nt, Artificial Sequence
  Description of Artificial Sequence: Synthetic oligonucleotide
agccugugccccuuacagc

SEQ ID NO: 456000 - RNA, 19 nt, Artificial Sequence
  Description of Artificial Sequence: Synthetic oligonucleotide
uguuuaguuauuggucccu

SEQ ID NO: 456001 - RNA, 19 nt, Artificial Sequence
  Description of Artificial Sequence: Synthetic oligonucleotide
uaacaguaugugaaaugua

SEQ ID NO: 456002 - RNA, 19 nt, Artificial Sequence
  Description of Artificial Sequence: Synthetic oligonucleotide
uucauucuauggucucugc

SEQ ID NO: 456003 - RNA, 19 nt, Artificial Sequence
  Description of Artificial Sequence: Synthetic oligonucleotide
ugaagcuagagguccguua

SEQ ID NO: 456004 - RNA, 19 nt, Artificial Sequence
  Description of Artificial Sequence: Synthetic oligonucleotide
agugcuuggauccgcuccu

SEQ ID NO: 456005 - RNA, 19 nt, Artificial Sequence
  Description of Artificial Sequence: Synthetic oligonucleotide
agucggauguguuuaguua

SEQ ID NO: 456006 - RNA, 19 nt, Artificial Sequence
  Description of Artificial Sequence: Synthetic oligonucleotide
acuacaggaugcaauccag

SEQ ID NO: 456007 - RNA, 19 nt, Artificial Sequence
  Description of Artificial Sequence: Synthetic oligonucleotide
guaccuugaagacaagcaa

SEQ ID NO: 456008 - RNA, 19 nt, Artificial Sequence
  Description of Artificial Sequence: Synthetic oligonucleotide
uggggugacucgcaauggc

SEQ ID NO: 456009 - RNA, 19 nt, Artificial Sequence
  Description of Artificial Sequence: Synthetic oligonucleotide
guagaccgaacaucaguug

SEQ ID NO: 456010 - RNA, 19 nt, Artificial Sequence
  Description of Artificial Sequence: Synthetic oligonucleotide
caucuguacuugcuguggc

SEQ ID NO: 456011 - RNA, 19 nt, Artificial Sequence
  Description of Artificial Sequence: Synthetic oligonucleotide
uaguuauuggucccucuuu

SEQ ID NO: 456012 - RNA, 19 nt, Artificial Sequence
  Description of Artificial Sequence: Synthetic oligonucleotide
ccgaacaucaguugauagg

SEQ ID NO: 456013 - RNA, 19 nt, Artificial Sequence
  Description of Artificial Sequence: Synthetic oligonucleotide
uccucgaaccucuccuaag

SEQ ID NO: 456014 - RNA, 19 nt, Artificial Sequence
  Description of Artificial Sequence: Synthetic oligonucleotide
aggguuaagcagaaccuag

SEQ ID NO: 456015 - RNA, 19 nt, Artificial Sequence
  Description of Artificial Sequence: Synthetic oligonucleotide
acugauuguaacaauucua

SEQ ID NO: 456016 - RNA, 19 nt, Artificial Sequence
  Description of Artificial Sequence: Synthetic oligonucleotide
cauagacacaugaaguucu

SEQ ID NO: 456017 - RNA, 19 nt, Artificial Sequence
  Description of Artificial Sequence: Synthetic oligonucleotide
gguccguuagacaagucag

SEQ ID NO: 456018 - RNA, 19 nt, Artificial Sequence
  Description of Artificial Sequence: Synthetic oligonucleotide
agugaggugacaggaugag

SEQ ID NO: 456019 - RNA, 19 nt, Artificial Sequence
  Description of Artificial Sequence: Synthetic oligonucleotide
gucaguaccacugaauugu

SEQ ID NO: 456020 - RNA, 19 nt, Artificial Sequence
  Description of Artificial Sequence: Synthetic oligonucleotide
uauccuguaaguggguaau

SEQ ID NO: 456021 - RNA, 19 nt, Artificial Sequence
  Description of Artificial Sequence: Synthetic oligonucleotide
guauguagguugguggaug

SEQ ID NO: 456022 - RNA, 19 nt, Artificial Sequence
  Description of Artificial Sequence: Synthetic oligonucleotide
cucucggcaucaugggacg

SEQ ID NO: 456023 - RNA, 19 nt, Artificial Sequence
  Description of Artificial Sequence: Synthetic oligonucleotide
ggcuaguacugauaaguug

SEQ ID NO: 456024 - RNA, 19 nt, Artificial Sequence
  Description of Artificial Sequence: Synthetic oligonucleotide
ggucccugcgauugcaugg

SEQ ID NO: 456025 - RNA, 19 nt, Artificial Sequence
  Description of Artificial Sequence: Synthetic oligonucleotide
gcugacucgaugcacugag

SEQ ID NO: 456026 - RNA, 19 nt, Artificial Sequence
  Description of Artificial Sequence: Synthetic oligonucleotide
uaagugguauaggauucac

SEQ ID NO: 456027 - RNA, 19 nt, Artificial Sequence
  Description of Artificial Sequence: Synthetic oligonucleotide
guagaauguggugaaacaa

SEQ ID NO: 456028 - RNA, 19 nt, Artificial Sequence
  Description of Artificial Sequence: Synthetic oligonucleotide
agaaacucuuuugggguug

SEQ ID NO: 456029 - RNA, 19 nt, Artificial Sequence
  Description of Artificial Sequence: Synthetic oligonucleotide
cuagacucauuggaagcag

SEQ ID NO: 456030 - RNA, 19 nt, Artificial Sequence
  Description of Artificial Sequence: Synthetic oligonucleotide
uuaaaccuguccucugcua

SEQ ID NO: 456031 - RNA, 19 nt, Artificial Sequence
  Description of Artificial Sequence: Synthetic oligonucleotide
guauaacagggguuguaga

SEQ ID NO: 456032 - RNA, 19 nt, Artificial Sequence
  Description of Artificial Sequence: Synthetic oligonucleotide
acucgcaauggccuucugu

SEQ ID NO: 456033 - RNA, 19 nt, Artificial Sequence
  Description of Artificial Sequence: Synthetic oligonucleotide
gaggaucuuugauuugcca

SEQ ID NO: 456034 - RNA, 19 nt, Artificial Sequence
  Description of Artificial Sequence: Synthetic oligonucleotide
uacuaauggcuaguacuga

SEQ ID NO: 456035 - RNA, 19 nt, Artificial Sequence
  Description of Artificial Sequence: Synthetic oligonucleotide
agguacuugguuauuagua

SEQ ID NO: 456036 - RNA, 19 nt, Artificial Sequence
  Description of Artificial Sequence: Synthetic oligonucleotide
gguggaggaagcuuccaug

SEQ ID NO: 456037 - RNA, 19 nt, Artificial Sequence
  Description of Artificial Sequence: Synthetic oligonucleotide
uaucugacuuugagucccc

SEQ ID NO: 456038 - RNA, 19 nt, Artificial Sequence
  Description of Artificial Sequence: Synthetic oligonucleotide
uagaaacucuuuugggguu

SEQ ID NO: 456039 - RNA, 19 nt, Artificial Sequence
  Description of Artificial Sequence: Synthetic oligonucleotide
agagugcaagagcacuuca

SEQ ID NO: 456040 - RNA, 19 nt, Artificial Sequence
  Description of Artificial Sequence: Synthetic oligonucleotide
ugccauuuguagaccgaac

SEQ ID NO: 456041 - RNA, 19 nt, Artificial Sequence
  Description of Artificial Sequence: Synthetic oligonucleotide
uggcuaguacugauaaguu

SEQ ID NO: 456042 - RNA, 19 nt, Artificial Sequence
  Description of Artificial Sequence: Synthetic oligonucleotide
gguaccuugaagacaagca

SEQ ID NO: 456043 - RNA, 19 nt, Artificial Sequence
  Description of Artificial Sequence: Synthetic oligonucleotide
guuaagcagaaccuagagu

SEQ ID NO: 456044 - RNA, 19 nt, Artificial Sequence
  Description of Artificial Sequence: Synthetic oligonucleotide
cucuguauguagguuggug

SEQ ID NO: 456045 - RNA, 19 nt, Artificial Sequence
  Description of Artificial Sequence: Synthetic oligonucleotide
gaacaucaguugauagggc

SEQ ID NO: 456046 - RNA, 19 nt, Artificial Sequence
  Description of Artificial Sequence: Synthetic oligonucleotide
uagucggauguguuuaguu

SEQ ID NO: 456047 - RNA, 19 nt, Artificial Sequence
  Description of Artificial Sequence: Synthetic oligonucleotide
uuaagacuuggugcuuucu

SEQ ID NO: 456048 - RNA, 19 nt, Artificial Sequence
  Description of Artificial Sequence: Synthetic oligonucleotide
cagauagcauuugacugac

SEQ ID NO: 456049 - RNA, 19 nt, Artificial Sequence
  Description of Artificial Sequence: Synthetic oligonucleotide
cuacacuugggcguugcug

SEQ ID NO: 456050 - RNA, 19 nt, Artificial Sequence
  Description of Artificial Sequence: Synthetic oligonucleotide
uguggacggugacccaccc

SEQ ID NO: 456051 - RNA, 19 nt, Artificial Sequence
  Description of Artificial Sequence: Synthetic oligonucleotide
ccauguuauuccaucaguc

SEQ ID NO: 456052 - RNA, 19 nt, Artificial Sequence
  Description of Artificial Sequence: Synthetic oligonucleotide
cuuguggacggugacccac

SEQ ID NO: 456053 - RNA, 19 nt, Artificial Sequence
  Description of Artificial Sequence: Synthetic oligonucleotide
ugagggugucugaaaccac

SEQ ID NO: 456054 - RNA, 19 nt, Artificial Sequence
  Description of Artificial Sequence: Synthetic oligonucleotide
aguagguacuugguuauua

SEQ ID NO: 456055 - RNA, 19 nt, Artificial Sequence
  Description of Artificial Sequence: Synthetic oligonucleotide
gauccgcuccugcugguac

SEQ ID NO: 456056 - RNA, 19 nt, Artificial Sequence
  Description of Artificial Sequence: Synthetic oligonucleotide
acuagaacuuaaguacaaa

SEQ ID NO: 456057 - RNA, 19 nt, Artificial Sequence
  Description of Artificial Sequence: Synthetic oligonucleotide
cggaagacaagguuccucg

SEQ ID NO: 456058 - RNA, 19 nt, Artificial Sequence
  Description of Artificial Sequence: Synthetic oligonucleotide
gccauuuguagaccgaaca

SEQ ID NO: 456059 - RNA, 19 nt, Artificial Sequence
  Description of Artificial Sequence: Synthetic oligonucleotide
acggugacccacccaaagu

SEQ ID NO: 456060 - RNA, 19 nt, Artificial Sequence
  Description of Artificial Sequence: Synthetic oligonucleotide
cuaagagggacgcuauaaa

SEQ ID NO: 456061 - RNA, 19 nt, Artificial Sequence
  Description of Artificial Sequence: Synthetic oligonucleotide
uagagugcaagagcacuuc

SEQ ID NO: 456062 - RNA, 19 nt, Artificial Sequence
  Description of Artificial Sequence: Synthetic oligonucleotide
uaaccaccaugguaauuuc

SEQ ID NO: 456063 - RNA, 19 nt, Artificial Sequence
  Description of Artificial Sequence: Synthetic oligonucleotide
guuagacaagucaguacca

SEQ ID NO: 456064 - RNA, 19 nt, Artificial Sequence
  Description of Artificial Sequence: Synthetic oligonucleotide
cugccuuuucacagauagc

SEQ ID NO: 456065 - RNA, 19 nt, Artificial Sequence
  Description of Artificial Sequence: Synthetic oligonucleotide
uuagucggauguguuuagu

SEQ ID NO: 456066 - RNA, 19 nt, Artificial Sequence
  Description of Artificial Sequence: Synthetic oligonucleotide
agagguccguuagacaagu

SEQ ID NO: 456067 - RNA, 19 nt, Artificial Sequence
  Description of Artificial Sequence: Synthetic oligonucleotide
gcuaguacugauaaguugu

SEQ ID NO: 456068 - RNA, 19 nt, Artificial Sequence
  Description of Artificial Sequence: Synthetic oligonucleotide
acgacacaaaauaauucau

SEQ ID NO: 456069 - RNA, 19 nt, Artificial Sequence
  Description of Artificial Sequence: Synthetic oligonucleotide
agcauuugacugacaguag

SEQ ID NO: 456070 - RNA, 19 nt, Artificial Sequence
  Description of Artificial Sequence: Synthetic oligonucleotide
cuaauggcuaguacugaua

SEQ ID NO: 456071 - RNA, 19 nt, Artificial Sequence
  Description of Artificial Sequence: Synthetic oligonucleotide
caaccauuguugcacugca

SEQ ID NO: 456072 - RNA, 19 nt, Artificial Sequence
  Description of Artificial Sequence: Synthetic oligonucleotide
auagacacaugaaguucug

SEQ ID NO: 456073 - RNA, 19 nt, Artificial Sequence
  Description of Artificial Sequence: Synthetic oligonucleotide
agggauucguucagagauc

SEQ ID NO: 456074 - RNA, 19 nt, Artificial Sequence
  Description of Artificial Sequence: Synthetic oligonucleotide
aguucugcccagguuuucu

SEQ ID NO: 456075 - RNA, 19 nt, Artificial Sequence
  Description of Artificial Sequence: Synthetic oligonucleotide
agguggucccugcgauugc

SEQ ID NO: 456076 - RNA, 19 nt, Artificial Sequence
  Description of Artificial Sequence: Synthetic oligonucleotide
uuccugcuuugaaaagaaa

SEQ ID NO: 456077 - RNA, 19 nt, Artificial Sequence
  Description of Artificial Sequence: Synthetic oligonucleotide
gugaggugacaggaugagg

SEQ ID NO: 456078 - RNA, 19 nt, Artificial Sequence
  Description of Artificial Sequence: Synthetic oligonucleotide
accuagagugcaagagcac

SEQ ID NO: 456079 - RNA, 19 nt, Artificial Sequence
  Description of Artificial Sequence: Synthetic oligonucleotide
agguccauuagaaacucuu

SEQ ID NO: 456080 - RNA, 19 nt, Artificial Sequence
  Description of Artificial Sequence: Synthetic oligonucleotide
agaaaaccucugccgcuga

SEQ ID NO: 456081 - RNA, 19 nt, Artificial Sequence
  Description of Artificial Sequence: Synthetic oligonucleotide
aaccugugagggugucuga

SEQ ID NO: 456082 - RNA, 19 nt, Artificial Sequence
  Description of Artificial Sequence: Synthetic oligonucleotide
gacaagguuccucgaaccu

SEQ ID NO: 456083 - RNA, 19 nt, Artificial Sequence
  Description of Artificial Sequence: Synthetic oligonucleotide
guaagugguauaggauuca

SEQ ID NO: 456084 - RNA, 19 nt, Artificial Sequence
  Description of Artificial Sequence: Synthetic oligonucleotide
agauccugaguggggaacu

SEQ ID NO: 456085 - RNA, 19 nt, Artificial Sequence
  Description of Artificial Sequence: Synthetic oligonucleotide
gagcaaccccugcauuuug

SEQ ID NO: 456086 - RNA, 19 nt, Artificial Sequence
  Description of Artificial Sequence: Synthetic oligonucleotide
ggacgacacaaaauaauuc

SEQ ID NO: 456087 - RNA, 19 nt, Artificial Sequence
  Description of Artificial Sequence: Synthetic oligonucleotide
ucggcaucaugggacgaca

SEQ ID NO: 456088 - RNA, 19 nt, Artificial Sequence
  Description of Artificial Sequence: Synthetic oligonucleotide
acaacuacacuugggcguu

SEQ ID NO: 456089 - RNA, 19 nt, Artificial Sequence
  Description of Artificial Sequence: Synthetic oligonucleotide
ccuuaggucaaauacauuu

SEQ ID NO: 456090 - RNA, 19 nt, Artificial Sequence
  Description of Artificial Sequence: Synthetic oligonucleotide
ugacccacccaaaguuaau

SEQ ID NO: 456091 - RNA, 19 nt, Artificial Sequence
  Description of Artificial Sequence: Synthetic oligonucleotide
uccuuaggucaaauacauu

SEQ ID NO: 456092 - RNA, 19 nt, Artificial Sequence
  Description of Artificial Sequence: Synthetic oligonucleotide
caugcugacucgaugcacu

SEQ ID NO: 456093 - RNA, 19 nt, Artificial Sequence
  Description of Artificial Sequence: Synthetic oligonucleotide
ggagcaccuuucaugacug

SEQ ID NO: 456094 - RNA, 19 nt, Artificial Sequence
  Description of Artificial Sequence: Synthetic oligonucleotide
gacuuugaguccccgcugu

SEQ ID NO: 456095 - RNA, 19 nt, Artificial Sequence
  Description of Artificial Sequence: Synthetic oligonucleotide
acuacacuugggcguugcu

SEQ ID NO: 456096 - RNA, 19 nt, Artificial Sequence
  Description of Artificial Sequence: Synthetic oligonucleotide
aucugacuuugaguccccg

SEQ ID NO: 456097 - RNA, 19 nt, Artificial Sequence
  Description of Artificial Sequence: Synthetic oligonucleotide
gcuguguaagugguauagg

SEQ ID NO: 456098 - RNA, 19 nt, Artificial Sequence
  Description of Artificial Sequence: Synthetic oligonucleotide
guaacaauucuaacuccua

SEQ ID NO: 456099 - RNA, 19 nt, Artificial Sequence
  Description of Artificial Sequence: Synthetic oligonucleotide
cuacagugcuuggauccgc

SEQ ID NO: 456100 - RNA, 19 nt, Artificial Sequence
  Description of Artificial Sequence: Synthetic oligonucleotide
uccuaagagggacgcuaua

SEQ ID NO: 456101 - RNA, 19 nt, Artificial Sequence
  Description of Artificial Sequence: Synthetic oligonucleotide
uugaguccccgcuguguaa

SEQ ID NO: 456102 - RNA, 19 nt, Artificial Sequence
  Description of Artificial Sequence: Synthetic oligonucleotide
agaaaaccugugagggugu

SEQ ID NO: 456103 - RNA, 19 nt, Artificial Sequence
  Description of Artificial Sequence: Synthetic oligonucleotide
guccuuugaacagugcuua

SEQ ID NO: 456104 - RNA, 19 nt, Artificial Sequence
  Description of Artificial Sequence: Synthetic oligonucleotide
ucugucuagcaaggagcac

SEQ ID NO: 456105 - RNA, 19 nt, Artificial Sequence
  Description of Artificial Sequence: Synthetic oligonucleotide
auggcaguagguacuuggu

SEQ ID NO: 456106 - RNA, 19 nt, Artificial Sequence
  Description of Artificial Sequence: Synthetic oligonucleotide
uccugcgagcagagcgucc

SEQ ID NO: 456107 - RNA, 19 nt, Artificial Sequence
  Description of Artificial Sequence: Synthetic oligonucleotide
aagcuguaagagggaaaau

SEQ ID NO: 456108 - RNA, 19 nt, Artificial Sequence
  Description of Artificial Sequence: Synthetic oligonucleotide
agcguccuuugaacagugc

SEQ ID NO: 456109 - RNA, 19 nt, Artificial Sequence
  Description of Artificial Sequence: Synthetic oligonucleotide
ccgcugaaaaggcucacag

SEQ ID NO: 456110 - RNA, 19 nt, Artificial Sequence
  Description of Artificial Sequence: Synthetic oligonucleotide
cagaaccuagagugcaaga

SEQ ID NO: 456111 - RNA, 19 nt, Artificial Sequence
  Description of Artificial Sequence: Synthetic oligonucleotide
gcagaaugggacacucuag

SEQ ID NO: 456112 - RNA, 19 nt, Artificial Sequence
  Description of Artificial Sequence: Synthetic oligonucleotide
gagugcaagagcacuucaa

SEQ ID NO: 456113 - RNA, 19 nt, Artificial Sequence
  Description of Artificial Sequence: Synthetic oligonucleotide
gcuacagugcuuggauccg

SEQ ID NO: 456114 - RNA, 19 nt, Artificial Sequence
  Description of Artificial Sequence: Synthetic oligonucleotide
agaccgaacaucaguugau

SEQ ID NO: 456115 - RNA, 19 nt, Artificial Sequence
  Description of Artificial Sequence: Synthetic oligonucleotide
cuggugaaugcugcugcug

SEQ ID NO: 456116 - RNA, 19 nt, Artificial Sequence
  Description of Artificial Sequence: Synthetic oligonucleotide
gagcaccuuucaugacugc

SEQ ID NO: 456117 - RNA, 19 nt, Artificial Sequence
  Description of Artificial Sequence: Synthetic oligonucleotide
ugacucgcaauggccuucu

SEQ ID NO: 456118 - RNA, 19 nt, Artificial Sequence
  Description of Artificial Sequence: Synthetic oligonucleotide
auccugcgagcagagcguc

SEQ ID NO: 456119 - RNA, 19 nt, Artificial Sequence
  Description of Artificial Sequence: Synthetic oligonucleotide
augggacgacacaaaauaa

SEQ ID NO: 456120 - RNA, 19 nt, Artificial Sequence
  Description of Artificial Sequence: Synthetic oligonucleotide
gcagaaccuagagugcaag

SEQ ID NO: 456121 - RNA, 19 nt, Artificial Sequence
  Description of Artificial Sequence: Synthetic oligonucleotide
aagguuccucgaaccucuc

SEQ ID NO: 456122 - RNA, 19 nt, Artificial Sequence
  Description of Artificial Sequence: Synthetic oligonucleotide
aggaagcuuccauguuacu

SEQ ID NO: 456123 - RNA, 19 nt, Artificial Sequence
  Description of Artificial Sequence: Synthetic oligonucleotide
auuaaccaccaugguaauu

SEQ ID NO: 456124 - RNA, 19 nt, Artificial Sequence
  Description of Artificial Sequence: Synthetic oligonucleotide
ugcugacucgaugcacuga

SEQ ID NO: 456125 - RNA, 19 nt, Artificial Sequence
  Description of Artificial Sequence: Synthetic oligonucleotide
caucaugggacgacacaaa

SEQ ID NO: 456126 - RNA, 19 nt, Artificial Sequence
  Description of Artificial Sequence: Synthetic oligonucleotide
cccugcgauugcauggugg

SEQ ID NO: 456127 - RNA, 19 nt, Artificial Sequence
  Description of Artificial Sequence: Synthetic oligonucleotide
gggauucguucagagauca

SEQ ID NO: 456128 - RNA, 19 nt, Artificial Sequence
  Description of Artificial Sequence: Synthetic oligonucleotide
ccuuacagcuggcugcuug

SEQ ID NO: 456129 - RNA, 19 nt, Artificial Sequence
  Description of Artificial Sequence: Synthetic oligonucleotide
ccguuagacaagucaguac

SEQ ID NO: 456130 - RNA, 19 nt, Artificial Sequence
  Description of Artificial Sequence: Synthetic oligonucleotide
auccuguaaguggguaaug

SEQ ID NO: 456131 - RNA, 19 nt, Artificial Sequence
  Description of Artificial Sequence: Synthetic oligonucleotide
gagggugucugaaaccacu

SEQ ID NO: 456132 - RNA, 19 nt, Artificial Sequence
  Description of Artificial Sequence: Synthetic oligonucleotide
gucacugauuguaacaauu

SEQ ID NO: 456133 - RNA, 19 nt, Artificial Sequence
  Description of Artificial Sequence: Synthetic oligonucleotide
aggaugcaauccagugagg

SEQ ID NO: 456134 - RNA, 19 nt, Artificial Sequence
  Description of Artificial Sequence: Synthetic oligonucleotide
guggugaaacaacuacacu

SEQ ID NO: 456135 - RNA, 19 nt, Artificial Sequence
  Description of Artificial Sequence: Synthetic oligonucleotide
guuaccacacuugaagcuu

SEQ ID NO: 456136 - RNA, 19 nt, Artificial Sequence
  Description of Artificial Sequence: Synthetic oligonucleotide
ggaguuauguuugguuguc

SEQ ID NO: 456137 - RNA, 19 nt, Artificial Sequence
  Description of Artificial Sequence: Synthetic oligonucleotide
ucccugcgauugcauggug

SEQ ID NO: 456138 - RNA, 19 nt, Artificial Sequence
  Description of Artificial Sequence: Synthetic oligonucleotide
aucaguugauagggcagaa

SEQ ID NO: 456139 - RNA, 19 nt, Artificial Sequence
  Description of Artificial Sequence: Synthetic oligonucleotide
gcaucaugggacgacacaa

SEQ ID NO: 456140 - RNA, 19 nt, Artificial Sequence
  Description of Artificial Sequence: Synthetic oligonucleotide
guccaguuagcugaacugu

SEQ ID NO: 456141 - RNA, 19 nt, Artificial Sequence
  Description of Artificial Sequence: Synthetic oligonucleotide
ucaugacugcaggguuaag

SEQ ID NO: 456142 - RNA, 19 nt, Artificial Sequence
  Description of Artificial Sequence: Synthetic oligonucleotide
gaccgaacaucaguugaua

SEQ ID NO: 456143 - RNA, 19 nt, Artificial Sequence
  Description of Artificial Sequence: Synthetic oligonucleotide
cugagaccauugcuuaaaa

SEQ ID NO: 456144 - RNA, 19 nt, Artificial Sequence
  Description of Artificial Sequence: Synthetic oligonucleotide
gugacccacccaaaguuaa

SEQ ID NO: 456145 - RNA, 19 nt, Artificial Sequence
  Description of Artificial Sequence: Synthetic oligonucleotide
gcgauugcaugguggaaga

SEQ ID NO: 456146 - RNA, 19 nt, Artificial Sequence
  Description of Artificial Sequence: Synthetic oligonucleotide
ggacgcuauaaauugguuu

SEQ ID NO: 456147 - RNA, 19 nt, Artificial Sequence
  Description of Artificial Sequence: Synthetic oligonucleotide
ugguuuccuuaggucaaau

SEQ ID NO: 456148 - RNA, 19 nt, Artificial Sequence
  Description of Artificial Sequence: Synthetic oligonucleotide
accugugagggugucugaa

SEQ ID NO: 456149 - RNA, 19 nt, Artificial Sequence
  Description of Artificial Sequence: Synthetic oligonucleotide
auguagguugguggaugcu

SEQ ID NO: 456150 - RNA, 19 nt, Artificial Sequence
  Description of Artificial Sequence: Synthetic oligonucleotide
gcuagagguccguuagaca

SEQ ID NO: 456151 - RNA, 19 nt, Artificial Sequence
  Description of Artificial Sequence: Synthetic oligonucleotide
cuacaggaugcaauccagu

SEQ ID NO: 456152 - RNA, 19 nt, Artificial Sequence
  Description of Artificial Sequence: Synthetic oligonucleotide
aggaaacauuaaccaccau

SEQ ID NO: 456153 - RNA, 19 nt, Artificial Sequence
  Description of Artificial Sequence: Synthetic oligonucleotide
gugcaagagcacuucaauu

SEQ ID NO: 456154 - RNA, 19 nt, Artificial Sequence
  Description of Artificial Sequence: Synthetic oligonucleotide
cgcuguguaagugguauag

SEQ ID NO: 456155 - RNA, 19 nt, Artificial Sequence
  Description of Artificial Sequence: Synthetic oligonucleotide
caaucugcgcccacacucu

SEQ ID NO: 456156 - RNA, 19 nt, Artificial Sequence
  Description of Artificial Sequence: Synthetic oligonucleotide
ccugcgauugcauggugga

SEQ ID NO: 456157 - RNA, 19 nt, Artificial Sequence
  Description of Artificial Sequence: Synthetic oligonucleotide
auccuaagagggacgcuau

SEQ ID NO: 456158 - RNA, 19 nt, Artificial Sequence
  Description of Artificial Sequence: Synthetic oligonucleotide
ucucggcaucaugggacga

SEQ ID NO: 456159 - RNA, 19 nt, Artificial Sequence
  Description of Artificial Sequence: Synthetic oligonucleotide
ggguuaagcagaaccuaga

SEQ ID NO: 456160 - RNA, 19 nt, Artificial Sequence
  Description of Artificial Sequence: Synthetic oligonucleotide
ugcgagcagagcguccuuu

SEQ ID NO: 456161 - RNA, 19 nt, Artificial Sequence
  Description of Artificial Sequence: Synthetic oligonucleotide
ccuguaaguggguaaugaa

SEQ ID NO: 456162 - RNA, 19 nt, Artificial Sequence
  Description of Artificial Sequence: Synthetic oligonucleotide
acucuguauguagguuggu

SEQ ID NO: 456163 - RNA, 19 nt, Artificial Sequence
  Description of Artificial Sequence: Synthetic oligonucleotide
accacacuugaagcuuccu

SEQ ID NO: 456164 - RNA, 19 nt, Artificial Sequence
  Description of Artificial Sequence: Synthetic oligonucleotide
agcagaaccuagagugcaa

SEQ ID NO: 456165 - RNA, 19 nt, Artificial Sequence
  Description of Artificial Sequence: Synthetic oligonucleotide
gugacucgcaauggccuuc

SEQ ID NO: 456166 - RNA, 19 nt, Artificial Sequence
  Description of Artificial Sequence: Synthetic oligonucleotide
cuguauaacagggguugua

SEQ ID NO: 456167 - RNA, 19 nt, Artificial Sequence
  Description of Artificial Sequence: Synthetic oligonucleotide
gcguccuuugaacagugcu

SEQ ID NO: 456168 - RNA, 19 nt, Artificial Sequence
  Description of Artificial Sequence: Synthetic oligonucleotide
ccuaagagggacgcuauaa

SEQ ID NO: 456169 - RNA, 19 nt, Artificial Sequence
  Description of Artificial Sequence: Synthetic oligonucleotide
guaccuguaccugcugugu

SEQ ID NO: 456170 - RNA, 19 nt, Artificial Sequence
  Description of Artificial Sequence: Synthetic oligonucleotide
ggauuugaugccccuguau

SEQ ID NO: 456171 - RNA, 19 nt, Artificial Sequence
  Description of Artificial Sequence: Synthetic oligonucleotide
gcaguagguacuugguuau

SEQ ID NO: 456172 - RNA, 19 nt, Artificial Sequence
  Description of Artificial Sequence: Synthetic oligonucleotide
cugggacugcuucccuauc

SEQ ID NO: 456173 - RNA, 19 nt, Artificial Sequence
  Description of Artificial Sequence: Synthetic oligonucleotide
cuguuagucggauguguuu

SEQ ID NO: 456174 - RNA, 19 nt, Artificial Sequence
  Description of Artificial Sequence: Synthetic oligonucleotide
gggacgacacaaaauaauu

SEQ ID NO: 456175 - RNA, 19 nt, Artificial Sequence
  Description of Artificial Sequence: Synthetic oligonucleotide
agauagcauuugacugaca

SEQ ID NO: 456176 - RNA, 19 nt, Artificial Sequence
  Description of Artificial Sequence: Synthetic oligonucleotide
caguaacaguaugugaaau

SEQ ID NO: 456177 - RNA, 19 nt, Artificial Sequence
  Description of Artificial Sequence: Synthetic oligonucleotide
cauuaagacuuggugcuuu

SEQ ID NO: 456178 - RNA, 19 nt, Artificial Sequence
  Description of Artificial Sequence: Synthetic oligonucleotide
ugcccuggauagacaucuu

SEQ ID NO: 456179 - RNA, 19 nt, Artificial Sequence
  Description of Artificial Sequence: Synthetic oligonucleotide
gcuucccuaucauuauccu

SEQ ID NO: 456180 - RNA, 19 nt, Artificial Sequence
  Description of Artificial Sequence: Synthetic oligonucleotide
ggugacccacccaaaguua

SEQ ID NO: 456181 - RNA, 19 nt, Artificial Sequence
  Description of Artificial Sequence: Synthetic oligonucleotide
gcuaggauuugaugccccu

SEQ ID NO: 456182 - RNA, 19 nt, Artificial Sequence
  Description of Artificial Sequence: Synthetic oligonucleotide
gagguccguuagacaaguc

SEQ ID NO: 456183 - RNA, 19 nt, Artificial Sequence
  Description of Artificial Sequence: Synthetic oligonucleotide
ggacuauggaagucauuuu

SEQ ID NO: 456184 - RNA, 19 nt, Artificial Sequence
  Description of Artificial Sequence: Synthetic oligonucleotide
cucugccgcugaaaaggcu

SEQ ID NO: 456185 - RNA, 19 nt, Artificial Sequence
  Description of Artificial Sequence: Synthetic oligonucleotide
cagguccauuagaaacucu

SEQ ID NO: 456186 - RNA, 19 nt, Artificial Sequence
  Description of Artificial Sequence: Synthetic oligonucleotide
cacuuucuauugcuacuuu

SEQ ID NO: 456187 - RNA, 19 nt, Artificial Sequence
  Description of Artificial Sequence: Synthetic oligonucleotide
caauggccuucugugcucu

SEQ ID NO: 456188 - RNA, 19 nt, Artificial Sequence
  Description of Artificial Sequence: Synthetic oligonucleotide
cacacucuguauguagguu

SEQ ID NO: 456189 - RNA, 19 nt, Artificial Sequence
  Description of Artificial Sequence: Synthetic oligonucleotide
ggggaacugcuaggauuug

SEQ ID NO: 456190 - RNA, 19 nt, Artificial Sequence
  Description of Artificial Sequence: Synthetic oligonucleotide
cugcgauugcaugguggaa

SEQ ID NO: 456191 - RNA, 19 nt, Artificial Sequence
  Description of Artificial Sequence: Synthetic oligonucleotide
gcuuguggacggugaccca

SEQ ID NO: 456192 - RNA, 19 nt, Artificial Sequence
  Description of Artificial Sequence: Synthetic oligonucleotide
ggugacucgcaauggccuu

SEQ ID NO: 456193 - RNA, 19 nt, Artificial Sequence
  Description of Artificial Sequence: Synthetic oligonucleotide
ccacacucuguauguaggu

SEQ ID NO: 456194 - RNA, 19 nt, Artificial Sequence
  Description of Artificial Sequence: Synthetic oligonucleotide
gcuguuagucggauguguu

SEQ ID NO: 456195 - RNA, 19 nt, Artificial Sequence
  Description of Artificial Sequence: Synthetic oligonucleotide
caugcugcuuguggacggu

SEQ ID NO: 456196 - RNA, 19 nt, Artificial Sequence
  Description of Artificial Sequence: Synthetic oligonucleotide
ggacugcuucccuaucauu

SEQ ID NO: 456197 - RNA, 19 nt, Artificial Sequence
  Description of Artificial Sequence: Synthetic oligonucleotide
ggaccacacucuguaugua

SEQ ID NO: 456198 - RNA, 19 nt, Artificial Sequence
  Description of Artificial Sequence: Synthetic oligonucleotide
gcccuggauagacaucuuu

SEQ ID NO: 456199 - RNA, 19 nt, Artificial Sequence
  Description of Artificial Sequence: Synthetic oligonucleotide
gcuuauccuguaagugggu

SEQ ID NO: 456200 - RNA, 19 nt, Artificial Sequence
  Description of Artificial Sequence: Synthetic oligonucleotide
ccugggacugcuucccuau

SEQ ID NO: 456201 - RNA, 19 nt, Artificial Sequence
  Description of Artificial Sequence: Synthetic oligonucleotide
cccgcuguguaagugguau

SEQ ID NO: 456202 - RNA, 19 nt, Artificial Sequence
  Description of Artificial Sequence: Synthetic oligonucleotide
gggacgcuauaaauugguu

SEQ ID NO: 456203 - RNA, 19 nt, Artificial Sequence
  Description of Artificial Sequence: Synthetic oligonucleotide
ccugcgagcagagcguccu

SEQ ID NO: 456204 - RNA, 19 nt, Artificial Sequence
  Description of Artificial Sequence: Synthetic oligonucleotide
gcgcccacacucugaguau

SEQ ID NO: 456205 - RNA, 19 nt, Artificial Sequence
  Description of Artificial Sequence: Synthetic oligonucleotide
ccgcuguguaagugguaua

SEQ ID NO: 456206 - RNA, 19 nt, Artificial Sequence
  Description of Artificial Sequence: Synthetic oligonucleotide
cugcgagcagagcguccuu

SEQ ID NO: 456207 - RNA, 19 nt, Artificial Sequence
  Description of Artificial Sequence: Synthetic oligonucleotide
cgauugcaugguggaagaa

SEQ ID NO: 456208 - RNA, 19 nt, Artificial Sequence
  Description of Artificial Sequence: Synthetic oligonucleotide
ccccgcuguguaaguggua

SEQ ID NO: 456209 - RNA, 19 nt, Artificial Sequence
  Description of Artificial Sequence: Synthetic oligonucleotide
aaagaauacggguagaugg

SEQ ID NO: 456210 - RNA, 19 nt, Artificial Sequence
  Description of Artificial Sequence: Synthetic oligonucleotide
aauaguaauuucuuaagag

SEQ ID NO: 456211 - RNA, 19 nt, Artificial Sequence
  Description of Artificial Sequence: Synthetic oligonucleotide
uauauuucgauuaucagug

SEQ ID NO: 456212 - RNA, 19 nt, Artificial Sequence
  Description of Artificial Sequence: Synthetic oligonucleotide
gauaccaacacacugagag

SEQ ID NO: 456213 - RNA, 19 nt, Artificial Sequence
  Description of Artificial Sequence: Synthetic oligonucleotide
ugacccguaacuaugaccg

SEQ ID NO: 456214 - RNA, 19 nt, Artificial Sequence
  Description of Artificial Sequence: Synthetic oligonucleotide
uaguaauuucuuaagagcc

SEQ ID NO: 456215 - RNA, 19 nt, Artificial Sequence
  Description of Artificial Sequence: Synthetic oligonucleotide
uuaaauuuuagugauguca

SEQ ID NO: 456216 - RNA, 19 nt, Artificial Sequence
  Description of Artificial Sequence: Synthetic oligonucleotide
ugcagaaugccuuagaaca

SEQ ID NO: 456217 - RNA, 19 nt, Artificial Sequence
  Description of Artificial Sequence: Synthetic oligonucleotide
aaaucucacaggcucacac

SEQ ID NO: 456218 - RNA, 19 nt, Artificial Sequence
  Description of Artificial Sequence: Synthetic oligonucleotide
uacucuaaaucucacaggc

SEQ ID NO: 456219 - RNA, 19 nt, Artificial Sequence
  Description of Artificial Sequence: Synthetic oligonucleotide
aacuuauuccauugcaggg

SEQ ID NO: 456220 - RNA, 19 nt, Artificial Sequence
  Description of Artificial Sequence: Synthetic oligonucleotide
ucaucuucguuuaaaauac

SEQ ID NO: 456221 - RNA, 19 nt, Artificial Sequence
  Description of Artificial Sequence: Synthetic oligonucleotide
caaagucuagcaaagacag

SEQ ID NO: 456222 - RNA, 19 nt, Artificial Sequence
  Description of Artificial Sequence: Synthetic oligonucleotide
accguuacuuucuucaacc

SEQ ID NO: 456223 - RNA, 19 nt, Artificial Sequence
  Description of Artificial Sequence: Synthetic oligonucleotide
auugaaagaauacggguag

SEQ ID NO: 456224 - RNA, 19 nt, Artificial Sequence
  Description of Artificial Sequence: Synthetic oligonucleotide
aaccugguaauuucugagc

SEQ ID NO: 456225 - RNA, 19 nt, Artificial Sequence
  Description of Artificial Sequence: Synthetic oligonucleotide
ucuugcauaauacauaauu

SEQ ID NO: 456226 - RNA, 19 nt, Artificial Sequence
  Description of Artificial Sequence: Synthetic oligonucleotide
acauaauugaaagaauacg

SEQ ID NO: 456227 - RNA, 19 nt, Artificial Sequence
  Description of Artificial Sequence: Synthetic oligonucleotide
uuacuucaaauguugaccc

SEQ ID NO: 456228 - RNA, 19 nt, Artificial Sequence
  Description of Artificial Sequence: Synthetic oligonucleotide
ucauuuaaaguguaguuuc

SEQ ID NO: 456229 - RNA, 19 nt, Artificial Sequence
  Description of Artificial Sequence: Synthetic oligonucleotide
ugguaaaguaauuugauua

SEQ ID NO: 456230 - RNA, 19 nt, Artificial Sequence
  Description of Artificial Sequence: Synthetic oligonucleotide
aguugguaaucacagcagc

SEQ ID NO: 456231 - RNA, 19 nt, Artificial Sequence
  Description of Artificial Sequence: Synthetic oligonucleotide
uccaugaugaacgaacacg

SEQ ID NO: 456232 - RNA, 19 nt, Artificial Sequence
  Description of Artificial Sequence: Synthetic oligonucleotide
uaauugaaagaauacgggu

SEQ ID NO: 456233 - RNA, 19 nt, Artificial Sequence
  Description of Artificial Sequence: Synthetic oligonucleotide
aauacggguagauggcuuc

SEQ ID NO: 456234 - RNA, 19 nt, Artificial Sequence
  Description of Artificial Sequence: Synthetic oligonucleotide
ucuuuagucucugagguag

SEQ ID NO: 456235 - RNA, 19 nt, Artificial Sequence
  Description of Artificial Sequence: Synthetic oligonucleotide
auaauugaaagaauacggg

SEQ ID NO: 456236 - RNA, 19 nt, Artificial Sequence
  Description of Artificial Sequence: Synthetic oligonucleotide
aaauaguaacgauggcuuc

SEQ ID NO: 456237 - RNA, 19 nt, Artificial Sequence
  Description of Artificial Sequence: Synthetic oligonucleotide
ugcuauuaggaaaacaguc

SEQ ID NO: 456238 - RNA, 19 nt, Artificial Sequence
  Description of Artificial Sequence: Synthetic oligonucleotide
uauugcuuagguugaagag

SEQ ID NO: 456239 - RNA, 19 nt, Artificial Sequence
  Description of Artificial Sequence: Synthetic oligonucleotide
uugacaaggagugauacca

SEQ ID NO: 456240 - RNA, 19 nt, Artificial Sequence
  Description of Artificial Sequence: Synthetic oligonucleotide
uauuucgauuaucagugcc

SEQ ID NO: 456241 - RNA, 19 nt, Artificial Sequence
  Description of Artificial Sequence: Synthetic oligonucleotide
acagguaguacauucuguc

SEQ ID NO: 456242 - RNA, 19 nt, Artificial Sequence
  Description of Artificial Sequence: Synthetic oligonucleotide
aagaauacggguagauggc

SEQ ID NO: 456243 - RNA, 19 nt, Artificial Sequence
  Description of Artificial Sequence: Synthetic oligonucleotide
aacuauauuucgauuauca

SEQ ID NO: 456244 - RNA, 19 nt, Artificial Sequence
  Description of Artificial Sequence: Synthetic oligonucleotide
ugaauauagucucuuuugu

SEQ ID NO: 456245 - RNA, 19 nt, Artificial Sequence
  Description of Artificial Sequence: Synthetic oligonucleotide
ucuuuauacugacaguaga

SEQ ID NO: 456246 - RNA, 19 nt, Artificial Sequence
  Description of Artificial Sequence: Synthetic oligonucleotide
ucuagcaaagacaguagca

SEQ ID NO: 456247 - RNA, 19 nt, Artificial Sequence
  Description of Artificial Sequence: Synthetic oligonucleotide
acaguugguaaucacagca

SEQ ID NO: 456248 - RNA, 19 nt, Artificial Sequence
  Description of Artificial Sequence: Synthetic oligonucleotide
uacaaacuaagucuuacau

SEQ ID NO: 456249 - RNA, 19 nt, Artificial Sequence
  Description of Artificial Sequence: Synthetic oligonucleotide
caguagaccacaaacggcc

SEQ ID NO: 456250 - RNA, 19 nt, Artificial Sequence
  Description of Artificial Sequence: Synthetic oligonucleotide
acuuauuccauugcagggc

SEQ ID NO: 456251 - RNA, 19 nt, Artificial Sequence
  Description of Artificial Sequence: Synthetic oligonucleotide
aguguaucauaucucaugu

SEQ ID NO: 456252 - RNA, 19 nt, Artificial Sequence
  Description of Artificial Sequence: Synthetic oligonucleotide
ugaugaacgaacacggcac

SEQ ID NO: 456253 - RNA, 19 nt, Artificial Sequence
  Description of Artificial Sequence: Synthetic oligonucleotide
ugccuuagaacaaauagua

SEQ ID NO: 456254 - RNA, 19 nt, Artificial Sequence
  Description of Artificial Sequence: Synthetic oligonucleotide
uuuauugccagcacggaua

SEQ ID NO: 456255 - RNA, 19 nt, Artificial Sequence
  Description of Artificial Sequence: Synthetic oligonucleotide
acuauauuucgauuaucag

SEQ ID NO: 456256 - RNA, 19 nt, Artificial Sequence
  Description of Artificial Sequence: Synthetic oligonucleotide
agauggaugaaccacugca

SEQ ID NO: 456257 - RNA, 19 nt, Artificial Sequence
  Description of Artificial Sequence: Synthetic oligonucleotide
agacuguuuacuuuguuga

SEQ ID NO: 456258 - RNA, 19 nt, Artificial Sequence
  Description of Artificial Sequence: Synthetic oligonucleotide
auaauuuccauuguucucu

SEQ ID NO: 456259 - RNA, 19 nt, Artificial Sequence
  Description of Artificial Sequence: Synthetic oligonucleotide
acuaaaccuuucuaugcac

SEQ ID NO: 456260 - RNA, 19 nt, Artificial Sequence
  Description of Artificial Sequence: Synthetic oligonucleotide
guacuuuaaauuuuaguga

SEQ ID NO: 456261 - RNA, 19 nt, Artificial Sequence
  Description of Artificial Sequence: Synthetic oligonucleotide
aauguugacccguaacuau

SEQ ID NO: 456262 - RNA, 19 nt, Artificial Sequence
  Description of Artificial Sequence: Synthetic oligonucleotide
ucaaauguugacccguaac

SEQ ID NO: 456263 - RNA, 19 nt, Artificial Sequence
  Description of Artificial Sequence: Synthetic oligonucleotide
uugcuuacuucaaauguug

SEQ ID NO: 456264 - RNA, 19 nt, Artificial Sequence
  Description of Artificial Sequence: Synthetic oligonucleotide
uacuaaaccuuucuaugca

SEQ ID NO: 456265 - RNA, 19 nt, Artificial Sequence
  Description of Artificial Sequence: Synthetic oligonucleotide
guagauggcuucaaaauag

SEQ ID NO: 456266 - RNA, 19 nt, Artificial Sequence
  Description of Artificial Sequence: Synthetic oligonucleotide
uguauuauucaucuucguu

SEQ ID NO: 456267 - RNA, 19 nt, Artificial Sequence
  Description of Artificial Sequence: Synthetic oligonucleotide
uuuagugaugucauuuaaa

SEQ ID NO: 456268 - RNA, 19 nt, Artificial Sequence
  Description of Artificial Sequence: Synthetic oligonucleotide
ugcacaagacuugagacug

SEQ ID NO: 456269 - RNA, 19 nt, Artificial Sequence
  Description of Artificial Sequence: Synthetic oligonucleotide
ugcucaucauguuuuaucu

SEQ ID NO: 456270 - RNA, 19 nt, Artificial Sequence
  Description of Artificial Sequence: Synthetic oligonucleotide
auuguuugauaguacccag

SEQ ID NO: 456271 - RNA, 19 nt, Artificial Sequence
  Description of Artificial Sequence: Synthetic oligonucleotide
uuuuaucuagcuuguauua

SEQ ID NO: 456272 - RNA, 19 nt, Artificial Sequence
  Description of Artificial Sequence: Synthetic oligonucleotide
uccgagaccagccugagua

SEQ ID NO: 456273 - RNA, 19 nt, Artificial Sequence
  Description of Artificial Sequence: Synthetic oligonucleotide
aauugaaagaauacgggua

SEQ ID NO: 456274 - RNA, 19 nt, Artificial Sequence
  Description of Artificial Sequence: Synthetic oligonucleotide
cucuaaaucucacaggcuc

SEQ ID NO: 456275 - RNA, 19 nt, Artificial Sequence
  Description of Artificial Sequence: Synthetic oligonucleotide
auauugcuuagguugaaga

SEQ ID NO: 456276 - RNA, 19 nt, Artificial Sequence
  Description of Artificial Sequence: Synthetic oligonucleotide
auauuucgauuaucagugc

SEQ ID NO: 456277 - RNA, 19 nt, Artificial Sequence
  Description of Artificial Sequence: Synthetic oligonucleotide
uuucgauuaucagugccgg

SEQ ID NO: 456278 - RNA, 19 nt, Artificial Sequence
  Description of Artificial Sequence: Synthetic oligonucleotide
augaugaacgaacacggca

SEQ ID NO: 456279 - RNA, 19 nt, Artificial Sequence
  Description of Artificial Sequence: Synthetic oligonucleotide
ucgugugagucuaaagugc

SEQ ID NO: 456280 - RNA, 19 nt, Artificial Sequence
  Description of Artificial Sequence: Synthetic oligonucleotide
agagcuaacaaaggccacc

SEQ ID NO: 456281 - RNA, 19 nt, Artificial Sequence
  Description of Artificial Sequence: Synthetic oligonucleotide
ucuaaaucucacaggcuca

SEQ ID NO: 456282 - RNA, 19 nt, Artificial Sequence
  Description of Artificial Sequence: Synthetic oligonucleotide
ucgaucuggcaaaaccugg

SEQ ID NO: 456283 - RNA, 19 nt, Artificial Sequence
  Description of Artificial Sequence: Synthetic oligonucleotide
uggaugagagggaauuucc

SEQ ID NO: 456284 - RNA, 19 nt, Artificial Sequence
  Description of Artificial Sequence: Synthetic oligonucleotide
auuucgauuaucagugccg

SEQ ID NO: 456285 - RNA, 19 nt, Artificial Sequence
  Description of Artificial Sequence: Synthetic oligonucleotide
agugccggcuucuuuaguc

SEQ ID NO: 456286 - RNA, 19 nt, Artificial Sequence
  Description of Artificial Sequence: Synthetic oligonucleotide
uuuugguacucuaaaucuc

SEQ ID NO: 456287 - RNA, 19 nt, Artificial Sequence
  Description of Artificial Sequence: Synthetic oligonucleotide
uaucuagcuuguauuauuc

SEQ ID NO: 456288 - RNA, 19 nt, Artificial Sequence
  Description of Artificial Sequence: Synthetic oligonucleotide
cacaaagucuagcaaagac

SEQ ID NO: 456289 - RNA, 19 nt, Artificial Sequence
  Description of Artificial Sequence: Synthetic oligonucleotide
ucuagcuuguauuauucau

SEQ ID NO: 456290 - RNA, 19 nt, Artificial Sequence
  Description of Artificial Sequence: Synthetic oligonucleotide
aaaguguaguuuccagcug

SEQ ID NO: 456291 - RNA, 19 nt, Artificial Sequence
  Description of Artificial Sequence: Synthetic oligonucleotide
acauccauauugcuuaggu

SEQ ID NO: 456292 - RNA, 19 nt, Artificial Sequence
  Description of Artificial Sequence: Synthetic oligonucleotide
acuugacaaggagugauac

SEQ ID NO: 456293 - RNA, 19 nt, Artificial Sequence
  Description of Artificial Sequence: Synthetic oligonucleotide
agcauuccaacaaaggcuc

SEQ ID NO: 456294 - RNA, 19 nt, Artificial Sequence
  Description of Artificial Sequence: Synthetic oligonucleotide
agucuaaagugcuugcaca

SEQ ID NO: 456295 - RNA, 19 nt, Artificial Sequence
  Description of Artificial Sequence: Synthetic oligonucleotide
guaauuucuuaagagccag

SEQ ID NO: 456296 - RNA, 19 nt, Artificial Sequence
  Description of Artificial Sequence: Synthetic oligonucleotide
acacguuuccaugacaauc

SEQ ID NO: 456297 - RNA, 19 nt, Artificial Sequence
  Description of Artificial Sequence: Synthetic oligonucleotide
cucgugugagucuaaagug

SEQ ID NO: 456298 - RNA, 19 nt, Artificial Sequence
  Description of Artificial Sequence: Synthetic oligonucleotide
aacgucaacaucugggcua

SEQ ID NO: 456299 - RNA, 19 nt, Artificial Sequence
  Description of Artificial Sequence: Synthetic oligonucleotide
uuuuauugccagcacggau

SEQ ID NO: 456300 - RNA, 19 nt, Artificial Sequence
  Description of Artificial Sequence: Synthetic oligonucleotide
gaaacgacuggccacgauc

SEQ ID NO: 456301 - RNA, 19 nt, Artificial Sequence
  Description of Artificial Sequence: Synthetic oligonucleotide
auauauagcaacacugaca

SEQ ID NO: 456302 - RNA, 19 nt, Artificial Sequence
  Description of Artificial Sequence: Synthetic oligonucleotide
gaugcuccuugcuggauag

SEQ ID NO: 456303 - RNA, 19 nt, Artificial Sequence
  Description of Artificial Sequence: Synthetic oligonucleotide
auugcuuagguugaagaga

SEQ ID NO: 456304 - RNA, 19 nt, Artificial Sequence
  Description of Artificial Sequence: Synthetic oligonucleotide
uugacccguaacuaugacc

SEQ ID NO: 456305 - RNA, 19 nt, Artificial Sequence
  Description of Artificial Sequence: Synthetic oligonucleotide
uucggacagucucagguug

SEQ ID NO: 456306 - RNA, 19 nt, Artificial Sequence
  Description of Artificial Sequence: Synthetic oligonucleotide
agcacaugcuauuaggaaa

SEQ ID NO: 456307 - RNA, 19 nt, Artificial Sequence
  Description of Artificial Sequence: Synthetic oligonucleotide
uacuucaaauguugacccg

SEQ ID NO: 456308 - RNA, 19 nt, Artificial Sequence
  Description of Artificial Sequence: Synthetic oligonucleotide
gauacaucuauguguaugu

SEQ ID NO: 456309 - RNA, 19 nt, Artificial Sequence
  Description of Artificial Sequence: Synthetic oligonucleotide
ucgauuaucagugccggcu

SEQ ID NO: 456310 - RNA, 19 nt, Artificial Sequence
  Description of Artificial Sequence: Synthetic oligonucleotide
gaaagaauacggguagaug

SEQ ID NO: 456311 - RNA, 19 nt, Artificial Sequence
  Description of Artificial Sequence: Synthetic oligonucleotide
gagucuaaagugcuugcac

SEQ ID NO: 456312 - RNA, 19 nt, Artificial Sequence
  Description of Artificial Sequence: Synthetic oligonucleotide
agcacggauauuucccaac

SEQ ID NO: 456313 - RNA, 19 nt, Artificial Sequence
  Description of Artificial Sequence: Synthetic oligonucleotide
auccaugaugaacgaacac

SEQ ID NO: 456314 - RNA, 19 nt, Artificial Sequence
  Description of Artificial Sequence: Synthetic oligonucleotide
uguugacccguaacuauga

SEQ ID NO: 456315 - RNA, 19 nt, Artificial Sequence
  Description of Artificial Sequence: Synthetic oligonucleotide
uuguuugauaguacccaga

SEQ ID NO: 456316 - RNA, 19 nt, Artificial Sequence
  Description of Artificial Sequence: Synthetic oligonucleotide
uuaucuagcuuguauuauu

SEQ ID NO: 456317 - RNA, 19 nt, Artificial Sequence
  Description of Artificial Sequence: Synthetic oligonucleotide
ucauaucucaugugguuaa

SEQ ID NO: 456318 - RNA, 19 nt, Artificial Sequence
  Description of Artificial Sequence: Synthetic oligonucleotide
auacauaauugaaagaaua

SEQ ID NO: 456319 - RNA, 19 nt, Artificial Sequence
  Description of Artificial Sequence: Synthetic oligonucleotide
cuugacaaggagugauacc

SEQ ID NO: 456320 - RNA, 19 nt, Artificial Sequence
  Description of Artificial Sequence: Synthetic oligonucleotide
auggaugagagggaauuuc

SEQ ID NO: 456321 - RNA, 19 nt, Artificial Sequence
  Description of Artificial Sequence: Synthetic oligonucleotide
ucuaaagugcuugcacaag

SEQ ID NO: 456322 - RNA, 19 nt, Artificial Sequence
  Description of Artificial Sequence: Synthetic oligonucleotide
gaaagauuugggaaaucca

SEQ ID NO: 456323 - RNA, 19 nt, Artificial Sequence
  Description of Artificial Sequence: Synthetic oligonucleotide
ugaacacguuuccaugaca

SEQ ID NO: 456324 - RNA, 19 nt, Artificial Sequence
  Description of Artificial Sequence: Synthetic oligonucleotide
agguugaagagaauggaug

SEQ ID NO: 456325 - RNA, 19 nt, Artificial Sequence
  Description of Artificial Sequence: Synthetic oligonucleotide
aaacgacuggccacgauca

SEQ ID NO: 456326 - RNA, 19 nt, Artificial Sequence
  Description of Artificial Sequence: Synthetic oligonucleotide
aaauguugacccguaacua

SEQ ID NO: 456327 - RNA, 19 nt, Artificial Sequence
  Description of Artificial Sequence: Synthetic oligonucleotide
gauaguacccagaaguucu

SEQ ID NO: 456328 - RNA, 19 nt, Artificial Sequence
  Description of Artificial Sequence: Synthetic oligonucleotide
acaaacggccuugaugggg

SEQ ID NO: 456329 - RNA, 19 nt, Artificial Sequence
  Description of Artificial Sequence: Synthetic oligonucleotide
cuguccuuaggcucugagg

SEQ ID NO: 456330 - RNA, 19 nt, Artificial Sequence
  Description of Artificial Sequence: Synthetic oligonucleotide
ugaaagaauacggguagau

SEQ ID NO: 456331 - RNA, 19 nt, Artificial Sequence
  Description of Artificial Sequence: Synthetic oligonucleotide
acuggccacgaucaaacca

SEQ ID NO: 456332 - RNA, 19 nt, Artificial Sequence
  Description of Artificial Sequence: Synthetic oligonucleotide
gaacacggcacacaaugga

SEQ ID NO: 456333 - RNA, 19 nt, Artificial Sequence
  Description of Artificial Sequence: Synthetic oligonucleotide
uuaggcucugaggacagca

SEQ ID NO: 456334 - RNA, 19 nt, Artificial Sequence
  Description of Artificial Sequence: Synthetic oligonucleotide
aauuugggaugacuucgau

SEQ ID NO: 456335 - RNA, 19 nt, Artificial Sequence
  Description of Artificial Sequence: Synthetic oligonucleotide
aguaauuucuuaagagcca

SEQ ID NO: 456336 - RNA, 19 nt, Artificial Sequence
  Description of Artificial Sequence: Synthetic oligonucleotide
guugguaaucacagcagcc

SEQ ID NO: 456337 - RNA, 19 nt, Artificial Sequence
  Description of Artificial Sequence: Synthetic oligonucleotide
ccuacuaaaccuuucuaug

SEQ ID NO: 456338 - RNA, 19 nt, Artificial Sequence
  Description of Artificial Sequence: Synthetic oligonucleotide
augguaaaguaauuugauu

SEQ ID NO: 456339 - RNA, 19 nt, Artificial Sequence
  Description of Artificial Sequence: Synthetic oligonucleotide
gguugaagagaauggauga

SEQ ID NO: 456340 - RNA, 19 nt, Artificial Sequence
  Description of Artificial Sequence: Synthetic oligonucleotide
aaaccucccauucguucca

SEQ ID NO: 456341 - RNA, 19 nt, Artificial Sequence
  Description of Artificial Sequence: Synthetic oligonucleotide
ggcucacacauccauauug

SEQ ID NO: 456342 - RNA, 19 nt, Artificial Sequence
  Description of Artificial Sequence: Synthetic oligonucleotide
uauuccauugcagggcaca

SEQ ID NO: 456343 - RNA, 19 nt, Artificial Sequence
  Description of Artificial Sequence: Synthetic oligonucleotide
aagauuugggaaauccaaa

SEQ ID NO: 456344 - RNA, 19 nt, Artificial Sequence
  Description of Artificial Sequence: Synthetic oligonucleotide
ugauaguacccagaaguuc

SEQ ID NO: 456345 - RNA, 19 nt, Artificial Sequence
  Description of Artificial Sequence: Synthetic oligonucleotide
ugguaauuucugagccagg

SEQ ID NO: 456346 - RNA, 19 nt, Artificial Sequence
  Description of Artificial Sequence: Synthetic oligonucleotide
cugcucaucauguuuuauc

SEQ ID NO: 456347 - RNA, 19 nt, Artificial Sequence
  Description of Artificial Sequence: Synthetic oligonucleotide
guugaagagaauggaugag

SEQ ID NO: 456348 - RNA, 19 nt, Artificial Sequence
  Description of Artificial Sequence: Synthetic oligonucleotide
gcuaguguaucauaucuca

SEQ ID NO: 456349 - RNA, 19 nt, Artificial Sequence
  Description of Artificial Sequence: Synthetic oligonucleotide
cuuuagucucugagguagg

SEQ ID NO: 456350 - RNA, 19 nt, Artificial Sequence
  Description of Artificial Sequence: Synthetic oligonucleotide
ugagucuaaagugcuugca

SEQ ID NO: 456351 - RNA, 19 nt, Artificial Sequence
  Description of Artificial Sequence: Synthetic oligonucleotide
cuuauuccauugcagggca

SEQ ID NO: 456352 - RNA, 19 nt, Artificial Sequence
  Description of Artificial Sequence: Synthetic oligonucleotide
gaacacguuuccaugacaa

SEQ ID NO: 456353 - RNA, 19 nt, Artificial Sequence
  Description of Artificial Sequence: Synthetic oligonucleotide
uucaaauguugacccguaa

SEQ ID NO: 456354 - RNA, 19 nt, Artificial Sequence
  Description of Artificial Sequence: Synthetic oligonucleotide
guauuugcagaguacuuua

SEQ ID NO: 456355 - RNA, 19 nt, Artificial Sequence
  Description of Artificial Sequence: Synthetic oligonucleotide
gaugaacgaacacggcaca

SEQ ID NO: 456356 - RNA, 19 nt, Artificial Sequence
  Description of Artificial Sequence: Synthetic oligonucleotide
uuaccacaguucaaauaaa

SEQ ID NO: 456357 - RNA, 19 nt, Artificial Sequence
  Description of Artificial Sequence: Synthetic oligonucleotide
uccacucaucagcaauuug

SEQ ID NO: 456358 - RNA, 19 nt, Artificial Sequence
  Description of Artificial Sequence: Synthetic oligonucleotide
aaagcaccuacuaaaccuu

SEQ ID NO: 456359 - RNA, 19 nt, Artificial Sequence
  Description of Artificial Sequence: Synthetic oligonucleotide
uccaucuagaagacuguuu

SEQ ID NO: 456360 - RNA, 19 nt, Artificial Sequence
  Description of Artificial Sequence: Synthetic oligonucleotide
ucagugccggcuucuuuag

SEQ ID NO: 456361 - RNA, 19 nt, Artificial Sequence
  Description of Artificial Sequence: Synthetic oligonucleotide
cuaaaucucacaggcucac

SEQ ID NO: 456362 - RNA, 19 nt, Artificial Sequence
  Description of Artificial Sequence: Synthetic oligonucleotide
aguacccagaaguucuaau

SEQ ID NO: 456363 - RNA, 19 nt, Artificial Sequence
  Description of Artificial Sequence: Synthetic oligonucleotide
gugagucuaaagugcuugc

SEQ ID NO: 456364 - RNA, 19 nt, Artificial Sequence
  Description of Artificial Sequence: Synthetic oligonucleotide
acaucugggcuaguguauc

SEQ ID NO: 456365 - RNA, 19 nt, Artificial Sequence
  Description of Artificial Sequence: Synthetic oligonucleotide
uugucucggaauguuguac

SEQ ID NO: 456366 - RNA, 19 nt, Artificial Sequence
  Description of Artificial Sequence: Synthetic oligonucleotide
augaacgaacacggcacac

SEQ ID NO: 456367 - RNA, 19 nt, Artificial Sequence
  Description of Artificial Sequence: Synthetic oligonucleotide
cacaguugguaaucacagc

SEQ ID NO: 456368 - RNA, 19 nt, Artificial Sequence
  Description of Artificial Sequence: Synthetic oligonucleotide
cacuccagcagaccuuccg

SEQ ID NO: 456369 - RNA, 19 nt, Artificial Sequence
  Description of Artificial Sequence: Synthetic oligonucleotide
acuuuaaauuuuagugaug

SEQ ID NO: 456370 - RNA, 19 nt, Artificial Sequence
  Description of Artificial Sequence: Synthetic oligonucleotide
gcacggauauuucccaacg

SEQ ID NO: 456371 - RNA, 19 nt, Artificial Sequence
  Description of Artificial Sequence: Synthetic oligonucleotide
uggcaccuagcaccaagcc

SEQ ID NO: 456372 - RNA, 19 nt, Artificial Sequence
  Description of Artificial Sequence: Synthetic oligonucleotide
uugaaagaauacggguaga

SEQ ID NO: 456373 - RNA, 19 nt, Artificial Sequence
  Description of Artificial Sequence: Synthetic oligonucleotide
ccaacgucaacaucugggc

SEQ ID NO: 456374 - RNA, 19 nt, Artificial Sequence
  Description of Artificial Sequence: Synthetic oligonucleotide
guguaucauaucucaugug

SEQ ID NO: 456375 - RNA, 19 nt, Artificial Sequence
  Description of Artificial Sequence: Synthetic oligonucleotide
gcuuacuucaaauguugac

SEQ ID NO: 456376 - RNA, 19 nt, Artificial Sequence
  Description of Artificial Sequence: Synthetic oligonucleotide
cacgaucaaaccaucugca

SEQ ID NO: 456377 - RNA, 19 nt, Artificial Sequence
  Description of Artificial Sequence: Synthetic oligonucleotide
gaugguaaaguaauuugau

SEQ ID NO: 456378 - RNA, 19 nt, Artificial Sequence
  Description of Artificial Sequence: Synthetic oligonucleotide
uucgauuaucagugccggc

SEQ ID NO: 456379 - RNA, 19 nt, Artificial Sequence
  Description of Artificial Sequence: Synthetic oligonucleotide
cugaacacguuuccaugac

SEQ ID NO: 456380 - RNA, 19 nt, Artificial Sequence
  Description of Artificial Sequence: Synthetic oligonucleotide
guaacgauggcuucauuau

SEQ ID NO: 456381 - RNA, 19 nt, Artificial Sequence
  Description of Artificial Sequence: Synthetic oligonucleotide
ugauaccaacacacugaga

SEQ ID NO: 456382 - RNA, 19 nt, Artificial Sequence
  Description of Artificial Sequence: Synthetic oligonucleotide
acagcacaugcuauuagga

SEQ ID NO: 456383 - RNA, 19 nt, Artificial Sequence
  Description of Artificial Sequence: Synthetic oligonucleotide
ucggaauguuguacuauuu

SEQ ID NO: 456384 - RNA, 19 nt, Artificial Sequence
  Description of Artificial Sequence: Synthetic oligonucleotide
agccugaacacguuuccau

SEQ ID NO: 456385 - RNA, 19 nt, Artificial Sequence
  Description of Artificial Sequence: Synthetic oligonucleotide
cucccgaaguuuuguguag

SEQ ID NO: 456386 - RNA, 19 nt, Artificial Sequence
  Description of Artificial Sequence: Synthetic oligonucleotide
agaauacggguagauggcu

SEQ ID NO: 456387 - RNA, 19 nt, Artificial Sequence
  Description of Artificial Sequence: Synthetic oligonucleotide
ucgaaggcugucugagaca

SEQ ID NO: 456388 - RNA, 19 nt, Artificial Sequence
  Description of Artificial Sequence: Synthetic oligonucleotide
aucauaucucaugugguua

SEQ ID NO: 456389 - RNA, 19 nt, Artificial Sequence
  Description of Artificial Sequence: Synthetic oligonucleotide
aucuucguuuaaaauacaa

SEQ ID NO: 456390 - RNA, 19 nt, Artificial Sequence
  Description of Artificial Sequence: Synthetic oligonucleotide
auguugacccguaacuaug

SEQ ID NO: 456391 - RNA, 19 nt, Artificial Sequence
  Description of Artificial Sequence: Synthetic oligonucleotide
gguagauggcuucaaaaua

SEQ ID NO: 456392 - RNA, 19 nt, Artificial Sequence
  Description of Artificial Sequence: Synthetic oligonucleotide
gaugaccccuccccucucc

SEQ ID NO: 456393 - RNA, 19 nt, Artificial Sequence
  Description of Artificial Sequence: Synthetic oligonucleotide
acgaucaaaccaucugcau

SEQ ID NO: 456394 - RNA, 19 nt, Artificial Sequence
  Description of Artificial Sequence: Synthetic oligonucleotide
agccugaguaaucccagaa

SEQ ID NO: 456395 - RNA, 19 nt, Artificial Sequence
  Description of Artificial Sequence: Synthetic oligonucleotide
caaaggcucuuuauacuga

SEQ ID NO: 456396 - RNA, 19 nt, Artificial Sequence
  Description of Artificial Sequence: Synthetic oligonucleotide
aaagucuagcaaagacagu

SEQ ID NO: 456397 - RNA, 19 nt, Artificial Sequence
  Description of Artificial Sequence: Synthetic oligonucleotide
gguaaaguaauuugauuau

SEQ ID NO: 456398 - RNA, 19 nt, Artificial Sequence
  Description of Artificial Sequence: Synthetic oligonucleotide
acgucaacaucugggcuag

SEQ ID NO: 456399 - RNA, 19 nt, Artificial Sequence
  Description of Artificial Sequence: Synthetic oligonucleotide
cugggacuuuccaucauca

SEQ ID NO: 456400 - RNA, 19 nt, Artificial Sequence
  Description of Artificial Sequence: Synthetic oligonucleotide
gaugagagggaauuuccuu

SEQ ID NO: 456401 - RNA, 19 nt, Artificial Sequence
  Description of Artificial Sequence: Synthetic oligonucleotide
auaguaacgauggcuucau

SEQ ID NO: 456402 - RNA, 19 nt, Artificial Sequence
  Description of Artificial Sequence: Synthetic oligonucleotide
aggaaagauuugggaaauc

SEQ ID NO: 456403 - RNA, 19 nt, Artificial Sequence
  Description of Artificial Sequence: Synthetic oligonucleotide
ucccgaaguuuuguguagc

SEQ ID NO: 456404 - RNA, 19 nt, Artificial Sequence
  Description of Artificial Sequence: Synthetic oligonucleotide
cacaaacggccuugauggg

SEQ ID NO: 456405 - RNA, 19 nt, Artificial Sequence
  Description of Artificial Sequence: Synthetic oligonucleotide
gagagggaauuuccuuuca

SEQ ID NO: 456406 - RNA, 19 nt, Artificial Sequence
  Description of Artificial Sequence: Synthetic oligonucleotide
ucccacgcauuucuguuuu

SEQ ID NO: 456407 - RNA, 19 nt, Artificial Sequence
  Description of Artificial Sequence: Synthetic oligonucleotide
acuugagacuggggucugc

SEQ ID NO: 456408 - RNA, 19 nt, Artificial Sequence
  Description of Artificial Sequence: Synthetic oligonucleotide
uagcaccaagccugaacac

SEQ ID NO: 456409 - RNA, 19 nt, Artificial Sequence
  Description of Artificial Sequence: Synthetic oligonucleotide
guugacccguaacuaugac

SEQ ID NO: 456410 - RNA, 19 nt, Artificial Sequence
  Description of Artificial Sequence: Synthetic oligonucleotide
aggggagaggcaauaaaau

SEQ ID NO: 456411 - RNA, 19 nt, Artificial Sequence
  Description of Artificial Sequence: Synthetic oligonucleotide
ugucuugucucggaauguu

SEQ ID NO: 456412 - RNA, 19 nt, Artificial Sequence
  Description of Artificial Sequence: Synthetic oligonucleotide
gcacaagucuuuaccacag

SEQ ID NO: 456413 - RNA, 19 nt, Artificial Sequence
  Description of Artificial Sequence: Synthetic oligonucleotide
ucaggcucgugugagucua

SEQ ID NO: 456414 - RNA, 19 nt, Artificial Sequence
  Description of Artificial Sequence: Synthetic oligonucleotide
acucuaaaucucacaggcu

SEQ ID NO: 456415 - RNA, 19 nt, Artificial Sequence
  Description of Artificial Sequence: Synthetic oligonucleotide
agaagacuguuuacuuugu

SEQ ID NO: 456416 - RNA, 19 nt, Artificial Sequence
  Description of Artificial Sequence: Synthetic oligonucleotide
gcucgugugagucuaaagu

SEQ ID NO: 456417 - RNA, 19 nt, Artificial Sequence
  Description of Artificial Sequence: Synthetic oligonucleotide
cagcacaugcuauuaggaa

SEQ ID NO: 456418 - RNA, 19 nt, Artificial Sequence
  Description of Artificial Sequence: Synthetic oligonucleotide
aucagcaauuugggaugac

SEQ ID NO: 456419 - RNA, 19 nt, Artificial Sequence
  Description of Artificial Sequence: Synthetic oligonucleotide
aacgacuggccacgaucaa

SEQ ID NO: 456420 - RNA, 19 nt, Artificial Sequence
  Description of Artificial Sequence: Synthetic oligonucleotide
cagguuucggacagucuca

SEQ ID NO: 456421 - RNA, 19 nt, Artificial Sequence
  Description of Artificial Sequence: Synthetic oligonucleotide
gcugaacuauuuccucucc

SEQ ID NO: 456422 - RNA, 19 nt, Artificial Sequence
  Description of Artificial Sequence: Synthetic oligonucleotide
guaguacauucugucugug

SEQ ID NO: 456423 - RNA, 19 nt, Artificial Sequence
  Description of Artificial Sequence: Synthetic oligonucleotide
auaucucaugugguuaauu

SEQ ID NO: 456424 - RNA, 19 nt, Artificial Sequence
  Description of Artificial Sequence: Synthetic oligonucleotide
gaaugccuuagaacaaaua

SEQ ID NO: 456425 - RNA, 19 nt, Artificial Sequence
  Description of Artificial Sequence: Synthetic oligonucleotide
acacggcacacaauggaga

SEQ ID NO: 456426 - RNA, 19 nt, Artificial Sequence
  Description of Artificial Sequence: Synthetic oligonucleotide
ggcaguuaacuauuaaaau

SEQ ID NO: 456427 - RNA, 19 nt, Artificial Sequence
  Description of Artificial Sequence: Synthetic oligonucleotide
caucuucguuuaaaauaca

SEQ ID NO: 456428 - RNA, 19 nt, Artificial Sequence
  Description of Artificial Sequence: Synthetic oligonucleotide
aguagaccacaaacggccu

SEQ ID NO: 456429 - RNA, 19 nt, Artificial Sequence
  Description of Artificial Sequence: Synthetic oligonucleotide
gggcuaguguaucauaucu

SEQ ID NO: 456430 - RNA, 19 nt, Artificial Sequence
  Description of Artificial Sequence: Synthetic oligonucleotide
ccuagcaccaagccugaac

SEQ ID NO: 456431 - RNA, 19 nt, Artificial Sequence
  Description of Artificial Sequence: Synthetic oligonucleotide
cuucaaauguugacccgua

SEQ ID NO: 456432 - RNA, 19 nt, Artificial Sequence
  Description of Artificial Sequence: Synthetic oligonucleotide
gguaguacauucugucugu

SEQ ID NO: 456433 - RNA, 19 nt, Artificial Sequence
  Description of Artificial Sequence: Synthetic oligonucleotide
ggcucgugugagucuaaag

SEQ ID NO: 456434 - RNA, 19 nt, Artificial Sequence
  Description of Artificial Sequence: Synthetic oligonucleotide
gaucccacgcauuucuguu

SEQ ID NO: 456435 - RNA, 19 nt, Artificial Sequence
  Description of Artificial Sequence: Synthetic oligonucleotide
gguaauuucugagccaggu

SEQ ID NO: 456436 - RNA, 19 nt, Artificial Sequence
  Description of Artificial Sequence: Synthetic oligonucleotide
acccguaacuaugaccgau

SEQ ID NO: 456437 - RNA, 19 nt, Artificial Sequence
  Description of Artificial Sequence: Synthetic oligonucleotide
aucccacgcauuucuguuu

SEQ ID NO: 456438 - RNA, 19 nt, Artificial Sequence
  Description of Artificial Sequence: Synthetic oligonucleotide
cugagccagguuucggaca

SEQ ID NO: 456439 - RNA, 19 nt, Artificial Sequence
  Description of Artificial Sequence: Synthetic oligonucleotide
auacggguagauggcuuca

SEQ ID NO: 456440 - RNA, 19 nt, Artificial Sequence
  Description of Artificial Sequence: Synthetic oligonucleotide
gcuguccuuaggcucugag

SEQ ID NO: 456441 - RNA, 19 nt, Artificial Sequence
  Description of Artificial Sequence: Synthetic oligonucleotide
ugcuuagguugaagagaau

SEQ ID NO: 456442 - RNA, 19 nt, Artificial Sequence
  Description of Artificial Sequence: Synthetic oligonucleotide
cagguaguacauucugucu

SEQ ID NO: 456443 - RNA, 19 nt, Artificial Sequence
  Description of Artificial Sequence: Synthetic oligonucleotide
cggauauuucccaacguca

SEQ ID NO: 456444 - RNA, 19 nt, Artificial Sequence
  Description of Artificial Sequence: Synthetic oligonucleotide
cuuccgagaccagccugag

SEQ ID NO: 456445 - RNA, 19 nt, Artificial Sequence
  Description of Artificial Sequence: Synthetic oligonucleotide
acgacuggccacgaucaaa

SEQ ID NO: 456446 - RNA, 19 nt, Artificial Sequence
  Description of Artificial Sequence: Synthetic oligonucleotide
cuaguguaucauaucucau

SEQ ID NO: 456447 - RNA, 19 nt, Artificial Sequence
  Description of Artificial Sequence: Synthetic oligonucleotide
uacggguagauggcuucaa

SEQ ID NO: 456448 - RNA, 19 nt, Artificial Sequence
  Description of Artificial Sequence: Synthetic oligonucleotide
ggcuaguguaucauaucuc

SEQ ID NO: 456449 - RNA, 19 nt, Artificial Sequence
  Description of Artificial Sequence: Synthetic oligonucleotide
gucucggaauguuguacua

SEQ ID NO: 456450 - RNA, 19 nt, Artificial Sequence
  Description of Artificial Sequence: Synthetic oligonucleotide
gacccguaacuaugaccga

SEQ ID NO: 456451 - RNA, 19 nt, Artificial Sequence
  Description of Artificial Sequence: Synthetic oligonucleotide
ggagaugguaaaguaauuu

SEQ ID NO: 456452 - RNA, 19 nt, Artificial Sequence
  Description of Artificial Sequence: Synthetic oligonucleotide
ccaggguacagcugaauaa

SEQ ID NO: 456453 - RNA, 19 nt, Artificial Sequence
  Description of Artificial Sequence: Synthetic oligonucleotide
aacagucaucugagaugcu

SEQ ID NO: 456454 - RNA, 19 nt, Artificial Sequence
  Description of Artificial Sequence: Synthetic oligonucleotide
auaguacccagaaguucua

SEQ ID NO: 456455 - RNA, 19 nt, Artificial Sequence
  Description of Artificial Sequence: Synthetic oligonucleotide
caacgucaacaucugggcu

SEQ ID NO: 456456 - RNA, 19 nt, Artificial Sequence
  Description of Artificial Sequence: Synthetic oligonucleotide
caagcuguugcugcccgaa

SEQ ID NO: 456457 - RNA, 19 nt, Artificial Sequence
  Description of Artificial Sequence: Synthetic oligonucleotide
gaauacggguagauggcuu

SEQ ID NO: 456458 - RNA, 19 nt, Artificial Sequence
  Description of Artificial Sequence: Synthetic oligonucleotide
gcacaagacuugagacugg

SEQ ID NO: 456459 - RNA, 19 nt, Artificial Sequence
  Description of Artificial Sequence: Synthetic oligonucleotide
auguuuuaucuagcuugua

SEQ ID NO: 456460 - RNA, 19 nt, Artificial Sequence
  Description of Artificial Sequence: Synthetic oligonucleotide
cacggcacacaauggagau

SEQ ID NO: 456461 - RNA, 19 nt, Artificial Sequence
  Description of Artificial Sequence: Synthetic oligonucleotide
caccaaccucacuccagca

SEQ ID NO: 456462 - RNA, 19 nt, Artificial Sequence
  Description of Artificial Sequence: Synthetic oligonucleotide
ggcaccuagcaccaagccu

SEQ ID NO: 456463 - RNA, 19 nt, Artificial Sequence
  Description of Artificial Sequence: Synthetic oligonucleotide
gaccuuccgagaccagccu

SEQ ID NO: 456464 - RNA, 19 nt, Artificial Sequence
  Description of Artificial Sequence: Synthetic oligonucleotide
aaccucccauucguuccau

SEQ ID NO: 456465 - RNA, 19 nt, Artificial Sequence
  Description of Artificial Sequence: Synthetic oligonucleotide
cuggucugucuugcacaag

SEQ ID NO: 456466 - RNA, 19 nt, Artificial Sequence
  Description of Artificial Sequence: Synthetic oligonucleotide
ucguuccaucauggcaccu

SEQ ID NO: 456467 - RNA, 19 nt, Artificial Sequence
  Description of Artificial Sequence: Synthetic oligonucleotide
cacggauauuucccaacgu

SEQ ID NO: 456468 - RNA, 19 nt, Artificial Sequence
  Description of Artificial Sequence: Synthetic oligonucleotide
gagugggguggaaacgacu

SEQ ID NO: 456469 - RNA, 19 nt, Artificial Sequence
  Description of Artificial Sequence: Synthetic oligonucleotide
cagcacggauauuucccaa

SEQ ID NO: 456470 - RNA, 19 nt, Artificial Sequence
  Description of Artificial Sequence: Synthetic oligonucleotide
ccuuccgagaccagccuga

SEQ ID NO: 456471 - RNA, 19 nt, Artificial Sequence
  Description of Artificial Sequence: Synthetic oligonucleotide
guagaccacaaacggccuu

SEQ ID NO: 456472 - RNA, 19 nt, Artificial Sequence
  Description of Artificial Sequence: Synthetic oligonucleotide
ggacagucucagguugaug

SEQ ID NO: 456473 - RNA, 19 nt, Artificial Sequence
  Description of Artificial Sequence: Synthetic oligonucleotide
ggagugggguggaaacgac

SEQ ID NO: 456474 - RNA, 19 nt, Artificial Sequence
  Description of Artificial Sequence: Synthetic oligonucleotide
ccguuacuuucuucaacca

SEQ ID NO: 456475 - RNA, 19 nt, Artificial Sequence
  Description of Artificial Sequence: Synthetic oligonucleotide
cccgaaguuuuguguagca

SEQ ID NO: 456476 - RNA, 19 nt, Artificial Sequence
  Description of Artificial Sequence: Synthetic oligonucleotide
aggcucgugugagucuaaa

SEQ ID NO: 456477 - RNA, 19 nt, Artificial Sequence
  Description of Artificial Sequence: Synthetic oligonucleotide
cucuugcauaauacauaau

SEQ ID NO: 456478 - RNA, 19 nt, Artificial Sequence
  Description of Artificial Sequence: Synthetic oligonucleotide
cugucuugucucggaaugu

SEQ ID NO: 456479 - RNA, 19 nt, Artificial Sequence
  Description of Artificial Sequence: Synthetic oligonucleotide
cauaucucaugugguuaau

SEQ ID NO: 456480 - RNA, 19 nt, Artificial Sequence
  Description of Artificial Sequence: Synthetic oligonucleotide
cagccucuaaaugucuuuu

SEQ ID NO: 456481 - RNA, 19 nt, Artificial Sequence
  Description of Artificial Sequence: Synthetic oligonucleotide
gcugaauaauggagccaaa

SEQ ID NO: 456482 - RNA, 19 nt, Artificial Sequence
  Description of Artificial Sequence: Synthetic oligonucleotide
cggaauguuguacuauuuu

SEQ ID NO: 456483 - RNA, 19 nt, Artificial Sequence
  Description of Artificial Sequence: Synthetic oligonucleotide
ggccacgaucaaaccaucu

SEQ ID NO: 456484 - RNA, 19 nt, Artificial Sequence
  Description of Artificial Sequence: Synthetic oligonucleotide
gagccagguuucggacagu

SEQ ID NO: 456485 - RNA, 19 nt, Artificial Sequence
  Description of Artificial Sequence: Synthetic oligonucleotide
ccgaaguuuuguguagcau

SEQ ID NO: 456486 - RNA, 19 nt, Artificial Sequence
  Description of Artificial Sequence: Synthetic oligonucleotide
cgauuaucagugccggcuu

SEQ ID NO: 456487 - RNA, 19 nt, Artificial Sequence
  Description of Artificial Sequence: Synthetic oligonucleotide
ggguugcuuucuggggcuu

SEQ ID NO: 456488 - RNA, 19 nt, Artificial Sequence
  Description of Artificial Sequence: Synthetic oligonucleotide
cggccuugauggggccaca

SEQ ID NO: 456489 - RNA, 19 nt, Artificial Sequence
  Description of Artificial Sequence: Synthetic oligonucleotide
cgucaacaucugggcuagu

SEQ ID NO: 456490 - RNA, 19 nt, Artificial Sequence
  Description of Artificial Sequence: Synthetic oligonucleotide
auauauauaauauauaugc

SEQ ID NO: 456491 - RNA, 19 nt, Artificial Sequence
  Description of Artificial Sequence: Synthetic oligonucleotide
uuugaaacaaauuaacgcg

SEQ ID NO: 456492 - RNA, 19 nt, Artificial Sequence
  Description of Artificial Sequence: Synthetic oligonucleotide
uuaucuuaaagcauguuca

SEQ ID NO: 456493 - RNA, 19 nt, Artificial Sequence
  Description of Artificial Sequence: Synthetic oligonucleotide
uauguauggaauauggacc

SEQ ID NO: 456494 - RNA, 19 nt, Artificial Sequence
  Description of Artificial Sequence: Synthetic oligonucleotide
ucauauauauaauauauau

SEQ ID NO: 456495 - RNA, 19 nt, Artificial Sequence
  Description of Artificial Sequence: Synthetic oligonucleotide
aaaguacaaguccaugccc

SEQ ID NO: 456496 - RNA, 19 nt, Artificial Sequence
  Description of Artificial Sequence: Synthetic oligonucleotide
uuuaaugcaaugcagccug

SEQ ID NO: 456497 - RNA, 19 nt, Artificial Sequence
  Description of Artificial Sequence: Synthetic oligonucleotide
ucuucuaugguccugguca

SEQ ID NO: 456498 - RNA, 19 nt, Artificial Sequence
  Description of Artificial Sequence: Synthetic oligonucleotide
auacagagcuaucagauac

SEQ ID NO: 456499 - RNA, 19 nt, Artificial Sequence
  Description of Artificial Sequence: Synthetic oligonucleotide
gauacagagggccaggugg

SEQ ID NO: 456500 - RNA, 19 nt, Artificial Sequence
  Description of Artificial Sequence: Synthetic oligonucleotide
gaacugaucagacauagcc

SEQ ID NO: 456501 - RNA, 19 nt, Artificial Sequence
  Description of Artificial Sequence: Synthetic oligonucleotide
uucguaaaaguccaaaagc

SEQ ID NO: 456502 - RNA, 19 nt, Artificial Sequence
  Description of Artificial Sequence: Synthetic oligonucleotide
uuccuuauaacuuauguac

SEQ ID NO: 456503 - RNA, 19 nt, Artificial Sequence
  Description of Artificial Sequence: Synthetic oligonucleotide
uaauacguguaucugauug

SEQ ID NO: 456504 - RNA, 19 nt, Artificial Sequence
  Description of Artificial Sequence: Synthetic oligonucleotide
uuucguaaaaguccaaaag

SEQ ID NO: 456505 - RNA, 19 nt, Artificial Sequence
  Description of Artificial Sequence: Synthetic oligonucleotide
aacaaauuaacgcguaacu

SEQ ID NO: 456506 - RNA, 19 nt, Artificial Sequence
  Description of Artificial Sequence: Synthetic oligonucleotide
auauauaauauauaugcaa

SEQ ID NO: 456507 - RNA, 19 nt, Artificial Sequence
  Description of Artificial Sequence: Synthetic oligonucleotide
aaacaaauuaacgcguaac

SEQ ID NO: 456508 - RNA, 19 nt, Artificial Sequence
  Description of Artificial Sequence: Synthetic oligonucleotide
acugaucagacauagccac

SEQ ID NO: 456509 - RNA, 19 nt, Artificial Sequence
  Description of Artificial Sequence: Synthetic oligonucleotide
aauucaacuaugccucaac

SEQ ID NO: 456510 - RNA, 19 nt, Artificial Sequence
  Description of Artificial Sequence: Synthetic oligonucleotide
uauauauaauauauaugca

SEQ ID NO: 456511 - RNA, 19 nt, Artificial Sequence
  Description of Artificial Sequence: Synthetic oligonucleotide
uaacacaagauacucgucc

SEQ ID NO: 456512 - RNA, 19 nt, Artificial Sequence
  Description of Artificial Sequence: Synthetic oligonucleotide
aaggcuugacuuaagaaac

SEQ ID NO: 456513 - RNA, 19 nt, Artificial Sequence
  Description of Artificial Sequence: Synthetic oligonucleotide
ucguaaaaguccaaaagca

SEQ ID NO: 456514 - RNA, 19 nt, Artificial Sequence
  Description of Artificial Sequence: Synthetic oligonucleotide
uggucuaugggucacuagg

SEQ ID NO: 456515 - RNA, 19 nt, Artificial Sequence
  Description of Artificial Sequence: Synthetic oligonucleotide
ugccuaaauauuuugaaac

SEQ ID NO: 456516 - RNA, 19 nt, Artificial Sequence
  Description of Artificial Sequence: Synthetic oligonucleotide
agcaucuaggaauuaauuc

SEQ ID NO: 456517 - RNA, 19 nt, Artificial Sequence
  Description of Artificial Sequence: Synthetic oligonucleotide
agagcuaucagauaccccu

SEQ ID NO: 456518 - RNA, 19 nt, Artificial Sequence
  Description of Artificial Sequence: Synthetic oligonucleotide
cauauauauaauauauaug

SEQ ID NO: 456519 - RNA, 19 nt, Artificial Sequence
  Description of Artificial Sequence: Synthetic oligonucleotide
aaacagcuaaaugacuacc

SEQ ID NO: 456520 - RNA, 19 nt, Artificial Sequence
  Description of Artificial Sequence: Synthetic oligonucleotide
aauauggaccaagugacag

SEQ ID NO: 456521 - RNA, 19 nt, Artificial Sequence
  Description of Artificial Sequence: Synthetic oligonucleotide
aacagcuaaaugacuaccc

SEQ ID NO: 456522 - RNA, 19 nt, Artificial Sequence
  Description of Artificial Sequence: Synthetic oligonucleotide
uucacaccgacacuugugg

SEQ ID NO: 456523 - RNA, 19 nt, Artificial Sequence
  Description of Artificial Sequence: Synthetic oligonucleotide
uggaauggcgaucaaagga

SEQ ID NO: 456524 - RNA, 19 nt, Artificial Sequence
  Description of Artificial Sequence: Synthetic oligonucleotide
agauacucgucccaucccc

SEQ ID NO: 456525 - RNA, 19 nt, Artificial Sequence
  Description of Artificial Sequence: Synthetic oligonucleotide
aagauacucgucccauccc

SEQ ID NO: 456526 - RNA, 19 nt, Artificial Sequence
  Description of Artificial Sequence: Synthetic oligonucleotide
uaggaauuaauuccggcac

SEQ ID NO: 456527 - RNA, 19 nt, Artificial Sequence
  Description of Artificial Sequence: Synthetic oligonucleotide
uugaaacaaauuaacgcgu

SEQ ID NO: 456528 - RNA, 19 nt, Artificial Sequence
  Description of Artificial Sequence: Synthetic oligonucleotide
uggaauucauuucaagugu

SEQ ID NO: 456529 - RNA, 19 nt, Artificial Sequence
  Description of Artificial Sequence: Synthetic oligonucleotide
uggaacaguucuuugaaga

SEQ ID NO: 456530 - RNA, 19 nt, Artificial Sequence
  Description of Artificial Sequence: Synthetic oligonucleotide
uuggguuuaaugcaaugca

SEQ ID NO: 456531 - RNA, 19 nt, Artificial Sequence
  Description of Artificial Sequence: Synthetic oligonucleotide
aaugacuacccacuuggca

SEQ ID NO: 456532 - RNA, 19 nt, Artificial Sequence
  Description of Artificial Sequence: Synthetic oligonucleotide
ucuugcuacauaauacgug

SEQ ID NO: 456533 - RNA, 19 nt, Artificial Sequence
  Description of Artificial Sequence: Synthetic oligonucleotide
uggguuaucugaacagugg

SEQ ID NO: 456534 - RNA, 19 nt, Artificial Sequence
  Description of Artificial Sequence: Synthetic oligonucleotide
aguagguuaaaauacuuuu

SEQ ID NO: 456535 - RNA, 19 nt, Artificial Sequence
  Description of Artificial Sequence: Synthetic oligonucleotide
aauacguguaucugauugu

SEQ ID NO: 456536 - RNA, 19 nt, Artificial Sequence
  Description of Artificial Sequence: Synthetic oligonucleotide
ugcaguaccaaccaaccaa

SEQ ID NO: 456537 - RNA, 19 nt, Artificial Sequence
  Description of Artificial Sequence: Synthetic oligonucleotide
ucaacuaugccucaacauu

SEQ ID NO: 456538 - RNA, 19 nt, Artificial Sequence
  Description of Artificial Sequence: Synthetic oligonucleotide
ggcaacaccaagcagagag

SEQ ID NO: 456539 - RNA, 19 nt, Artificial Sequence
  Description of Artificial Sequence: Synthetic oligonucleotide
uuucguuucuaacacuugu

SEQ ID NO: 456540 - RNA, 19 nt, Artificial Sequence
  Description of Artificial Sequence: Synthetic oligonucleotide
cuaauggauacagagggcc

SEQ ID NO: 456541 - RNA, 19 nt, Artificial Sequence
  Description of Artificial Sequence: Synthetic oligonucleotide
ugugcaguaccaaccaacc

SEQ ID NO: 456542 - RNA, 19 nt, Artificial Sequence
  Description of Artificial Sequence: Synthetic oligonucleotide
aucccuuugcccuaggaag

SEQ ID NO: 456543 - RNA, 19 nt, Artificial Sequence
  Description of Artificial Sequence: Synthetic oligonucleotide
uggguuuaaugcaaugcag

SEQ ID NO: 456544 - RNA, 19 nt, Artificial Sequence
  Description of Artificial Sequence: Synthetic oligonucleotide
gcaucuaggaauuaauucc

SEQ ID NO: 456545 - RNA, 19 nt, Artificial Sequence
  Description of Artificial Sequence: Synthetic oligonucleotide
uguauuacugaguuggguu

SEQ ID NO: 456546 - RNA, 19 nt, Artificial Sequence
  Description of Artificial Sequence: Synthetic oligonucleotide
ucuuacuuagcucccgggc

SEQ ID NO: 456547 - RNA, 19 nt, Artificial Sequence
  Description of Artificial Sequence: Synthetic oligonucleotide
gaaucuugcuacauaauac

SEQ ID NO: 456548 - RNA, 19 nt, Artificial Sequence
  Description of Artificial Sequence: Synthetic oligonucleotide
ugauugcuauauuuccugg

SEQ ID NO: 456549 - RNA, 19 nt, Artificial Sequence
  Description of Artificial Sequence: Synthetic oligonucleotide
agacugaaguuuucuauag

SEQ ID NO: 456550 - RNA, 19 nt, Artificial Sequence
  Description of Artificial Sequence: Synthetic oligonucleotide
auguauggaauauggacca

SEQ ID NO: 456551 - RNA, 19 nt, Artificial Sequence
  Description of Artificial Sequence: Synthetic oligonucleotide
ucuaggaauuaauuccggc

SEQ ID NO: 456552 - RNA, 19 nt, Artificial Sequence
  Description of Artificial Sequence: Synthetic oligonucleotide
aacuaugccucaacauucc

SEQ ID NO: 456553 - RNA, 19 nt, Artificial Sequence
  Description of Artificial Sequence: Synthetic oligonucleotide
uccccaacagaaaaguaca

SEQ ID NO: 456554 - RNA, 19 nt, Artificial Sequence
  Description of Artificial Sequence: Synthetic oligonucleotide
uauggaauauggaccaagu

SEQ ID NO: 456555 - RNA, 19 nt, Artificial Sequence
  Description of Artificial Sequence: Synthetic oligonucleotide
uaaaggcacugcacaaugg

SEQ ID NO: 456556 - RNA, 19 nt, Artificial Sequence
  Description of Artificial Sequence: Synthetic oligonucleotide
agaaugccuaaauauuuug

SEQ ID NO: 456557 - RNA, 19 nt, Artificial Sequence
  Description of Artificial Sequence: Synthetic oligonucleotide
gaagacuuuagaaagcaga

SEQ ID NO: 456558 - RNA, 19 nt, Artificial Sequence
  Description of Artificial Sequence: Synthetic oligonucleotide
acuuccauaacaaaauaca

SEQ ID NO: 456559 - RNA, 19 nt, Artificial Sequence
  Description of Artificial Sequence: Synthetic oligonucleotide
cuugcucagucauacuugg

SEQ ID NO: 456560 - RNA, 19 nt, Artificial Sequence
  Description of Artificial Sequence: Synthetic oligonucleotide
caagauacucgucccaucc

SEQ ID NO: 456561 - RNA, 19 nt, Artificial Sequence
  Description of Artificial Sequence: Synthetic oligonucleotide
uucucagguacacugggcu

SEQ ID NO: 456562 - RNA, 19 nt, Artificial Sequence
  Description of Artificial Sequence: Synthetic oligonucleotide
ccuuauguauggaauaugg

SEQ ID NO: 456563 - RNA, 19 nt, Artificial Sequence
  Description of Artificial Sequence: Synthetic oligonucleotide
uguaucugauuguaauaug

SEQ ID NO: 456564 - RNA, 19 nt, Artificial Sequence
  Description of Artificial Sequence: Synthetic oligonucleotide
auauggaccaagugacagg

SEQ ID NO: 456565 - RNA, 19 nt, Artificial Sequence
  Description of Artificial Sequence: Synthetic oligonucleotide
aauuccggcacuuggguuu

SEQ ID NO: 456566 - RNA, 19 nt, Artificial Sequence
  Description of Artificial Sequence: Synthetic oligonucleotide
cuucuuucguuucuaacac

SEQ ID NO: 456567 - RNA, 19 nt, Artificial Sequence
  Description of Artificial Sequence: Synthetic oligonucleotide
uguuuacagguucaucugu

SEQ ID NO: 456568 - RNA, 19 nt, Artificial Sequence
  Description of Artificial Sequence: Synthetic oligonucleotide
uccaugcccagaauuaaca

SEQ ID NO: 456569 - RNA, 19 nt, Artificial Sequence
  Description of Artificial Sequence: Synthetic oligonucleotide
uggguaagcaucauggauu

SEQ ID NO: 456570 - RNA, 19 nt, Artificial Sequence
  Description of Artificial Sequence: Synthetic oligonucleotide
aaccaaccaacacauuacu

SEQ ID NO: 456571 - RNA, 19 nt, Artificial Sequence
  Description of Artificial Sequence: Synthetic oligonucleotide
gguuuaugcugacagaccc

SEQ ID NO: 456572 - RNA, 19 nt, Artificial Sequence
  Description of Artificial Sequence: Synthetic oligonucleotide
aauggcgaucaaaggaaac

SEQ ID NO: 456573 - RNA, 19 nt, Artificial Sequence
  Description of Artificial Sequence: Synthetic oligonucleotide
ucucaagucauccggucac

SEQ ID NO: 456574 - RNA, 19 nt, Artificial Sequence
  Description of Artificial Sequence: Synthetic oligonucleotide
uacauaauacguguaucug

SEQ ID NO: 456575 - RNA, 19 nt, Artificial Sequence
  Description of Artificial Sequence: Synthetic oligonucleotide
cauuacugguggaauggcg

SEQ ID NO: 456576 - RNA, 19 nt, Artificial Sequence
  Description of Artificial Sequence: Synthetic oligonucleotide
gacagucccuuauguaugg

SEQ ID NO: 456577 - RNA, 19 nt, Artificial Sequence
  Description of Artificial Sequence: Synthetic oligonucleotide
ugugaaugucucauucaca

SEQ ID NO: 456578 - RNA, 19 nt, Artificial Sequence
  Description of Artificial Sequence: Synthetic oligonucleotide
caucauauauauaauauau

SEQ ID NO: 456579 - RNA, 19 nt, Artificial Sequence
  Description of Artificial Sequence: Synthetic oligonucleotide
caucuuauucugcuuacac

SEQ ID NO: 456580 - RNA, 19 nt, Artificial Sequence
  Description of Artificial Sequence: Synthetic oligonucleotide
ucucauuuuaaaggccccg

SEQ ID NO: 456581 - RNA, 19 nt, Artificial Sequence
  Description of Artificial Sequence: Synthetic oligonucleotide
gguuuaaugcaaugcagcc

SEQ ID NO: 456582 - RNA, 19 nt, Artificial Sequence
  Description of Artificial Sequence: Synthetic oligonucleotide
ugaaacaaauuaacgcgua

SEQ ID NO: 456583 - RNA, 19 nt, Artificial Sequence
  Description of Artificial Sequence: Synthetic oligonucleotide
auucagagguaagucaggg

SEQ ID NO: 456584 - RNA, 19 nt, Artificial Sequence
  Description of Artificial Sequence: Synthetic oligonucleotide
agauccaaacuccaacugu

SEQ ID NO: 456585 - RNA, 19 nt, Artificial Sequence
  Description of Artificial Sequence: Synthetic oligonucleotide
ugcuacauaauacguguau

SEQ ID NO: 456586 - RNA, 19 nt, Artificial Sequence
  Description of Artificial Sequence: Synthetic oligonucleotide
cuaugggucacuaggguuc

SEQ ID NO: 456587 - RNA, 19 nt, Artificial Sequence
  Description of Artificial Sequence: Synthetic oligonucleotide
uuugcccuaggaaguauca

SEQ ID NO: 456588 - RNA, 19 nt, Artificial Sequence
  Description of Artificial Sequence: Synthetic oligonucleotide
aaauuaacgcguaacuuuu

SEQ ID NO: 456589 - RNA, 19 nt, Artificial Sequence
  Description of Artificial Sequence: Synthetic oligonucleotide
aaaugacuacccacuuggc

SEQ ID NO: 456590 - RNA, 19 nt, Artificial Sequence
  Description of Artificial Sequence: Synthetic oligonucleotide
ucacaaguuuauaauucaa

SEQ ID NO: 456591 - RNA, 19 nt, Artificial Sequence
  Description of Artificial Sequence: Synthetic oligonucleotide
uggucuacuucugagcaag

SEQ ID NO: 456592 - RNA, 19 nt, Artificial Sequence
  Description of Artificial Sequence: Synthetic oligonucleotide
aaagacagucccuuaugua

SEQ ID NO: 456593 - RNA, 19 nt, Artificial Sequence
  Description of Artificial Sequence: Synthetic oligonucleotide
agagaagggaacugaucag

SEQ ID NO: 456594 - RNA, 19 nt, Artificial Sequence
  Description of Artificial Sequence: Synthetic oligonucleotide
acaucuaaaggcacugcac

SEQ ID NO: 456595 - RNA, 19 nt, Artificial Sequence
  Description of Artificial Sequence: Synthetic oligonucleotide
uucuauagagccacauaaa

SEQ ID NO: 456596 - RNA, 19 nt, Artificial Sequence
  Description of Artificial Sequence: Synthetic oligonucleotide
uucccuguauuacugaguu

SEQ ID NO: 456597 - RNA, 19 nt, Artificial Sequence
  Description of Artificial Sequence: Synthetic oligonucleotide
auucaacuaugccucaaca

SEQ ID NO: 456598 - RNA, 19 nt, Artificial Sequence
  Description of Artificial Sequence: Synthetic oligonucleotide
uucaacuaugccucaacau

SEQ ID NO: 456599 - RNA, 19 nt, Artificial Sequence
  Description of Artificial Sequence: Synthetic oligonucleotide
auaguuucguaaaagucca

SEQ ID NO: 456600 - RNA, 19 nt, Artificial Sequence
  Description of Artificial Sequence: Synthetic oligonucleotide
ugauuguaauaugaacagc

SEQ ID NO: 456601 - RNA, 19 nt, Artificial Sequence
  Description of Artificial Sequence: Synthetic oligonucleotide
ggaauauggaccaagugac

SEQ ID NO: 456602 - RNA, 19 nt, Artificial Sequence
  Description of Artificial Sequence: Synthetic oligonucleotide
aaguacaaguccaugccca

SEQ ID NO: 456603 - RNA, 19 nt, Artificial Sequence
  Description of Artificial Sequence: Synthetic oligonucleotide
uuuaugcugacagacccgu

SEQ ID NO: 456604 - RNA, 19 nt, Artificial Sequence
  Description of Artificial Sequence: Synthetic oligonucleotide
acagcuaaaugacuaccca

SEQ ID NO: 456605 - RNA, 19 nt, Artificial Sequence
  Description of Artificial Sequence: Synthetic oligonucleotide
auaguuaaggcuugacuua

SEQ ID NO: 456606 - RNA, 19 nt, Artificial Sequence
  Description of Artificial Sequence: Synthetic oligonucleotide
gacccguauuaucuuaaag

SEQ ID NO: 456607 - RNA, 19 nt, Artificial Sequence
  Description of Artificial Sequence: Synthetic oligonucleotide
uuagcucccgggcuucagg

SEQ ID NO: 456608 - RNA, 19 nt, Artificial Sequence
  Description of Artificial Sequence: Synthetic oligonucleotide
agccugguaacaucagagg

SEQ ID NO: 456609 - RNA, 19 nt, Artificial Sequence
  Description of Artificial Sequence: Synthetic oligonucleotide
acaaugguguucggguucc

SEQ ID NO: 456610 - RNA, 19 nt, Artificial Sequence
  Description of Artificial Sequence: Synthetic oligonucleotide
aucagacauagccaccaag

SEQ ID NO: 456611 - RNA, 19 nt, Artificial Sequence
  Description of Artificial Sequence: Synthetic oligonucleotide
cguauuaucuuaaagcaug

SEQ ID NO: 456612 - RNA, 19 nt, Artificial Sequence
  Description of Artificial Sequence: Synthetic oligonucleotide
guuauggguaagcaucaug

SEQ ID NO: 456613 - RNA, 19 nt, Artificial Sequence
  Description of Artificial Sequence: Synthetic oligonucleotide
cuaaaugacuacccacuug

SEQ ID NO: 456614 - RNA, 19 nt, Artificial Sequence
  Description of Artificial Sequence: Synthetic oligonucleotide
cuucaguccccucuagggg

SEQ ID NO: 456615 - RNA, 19 nt, Artificial Sequence
  Description of Artificial Sequence: Synthetic oligonucleotide
uccguagacagacccuucc

SEQ ID NO: 456616 - RNA, 19 nt, Artificial Sequence
  Description of Artificial Sequence: Synthetic oligonucleotide
aacugaucagacauagcca

SEQ ID NO: 456617 - RNA, 19 nt, Artificial Sequence
  Description of Artificial Sequence: Synthetic oligonucleotide
caccccagaaucuugcuac

SEQ ID NO: 456618 - RNA, 19 nt, Artificial Sequence
  Description of Artificial Sequence: Synthetic oligonucleotide
cuuuagaaagcagaacauc

SEQ ID NO: 456619 - RNA, 19 nt, Artificial Sequence
  Description of Artificial Sequence: Synthetic oligonucleotide
augacuuuauccaaaugga

SEQ ID NO: 456620 - RNA, 19 nt, Artificial Sequence
  Description of Artificial Sequence: Synthetic oligonucleotide
aucagauaccccuggaaaa

SEQ ID NO: 456621 - RNA, 19 nt, Artificial Sequence
  Description of Artificial Sequence: Synthetic oligonucleotide
cauaaaacuugcucaguca

SEQ ID NO: 456622 - RNA, 19 nt, Artificial Sequence
  Description of Artificial Sequence: Synthetic oligonucleotide
agcuaucagauaccccugg

SEQ ID NO: 456623 - RNA, 19 nt, Artificial Sequence
  Description of Artificial Sequence: Synthetic oligonucleotide
uccaaccaaagccuggguc

SEQ ID NO: 456624 - RNA, 19 nt, Artificial Sequence
  Description of Artificial Sequence: Synthetic oligonucleotide
agaagggaacugaucagac

SEQ ID NO: 456625 - RNA, 19 nt, Artificial Sequence
  Description of Artificial Sequence: Synthetic oligonucleotide
acaagauacucgucccauc

SEQ ID NO: 456626 - RNA, 19 nt, Artificial Sequence
  Description of Artificial Sequence: Synthetic oligonucleotide
cagguuuaugcugacagac

SEQ ID NO: 456627 - RNA, 19 nt, Artificial Sequence
  Description of Artificial Sequence: Synthetic oligonucleotide
acguguaucugauuguaau

SEQ ID NO: 456628 - RNA, 19 nt, Artificial Sequence
  Description of Artificial Sequence: Synthetic oligonucleotide
ugguuugaugggcaacacc

SEQ ID NO: 456629 - RNA, 19 nt, Artificial Sequence
  Description of Artificial Sequence: Synthetic oligonucleotide
ugguaugguuucccaaacc

SEQ ID NO: 456630 - RNA, 19 nt, Artificial Sequence
  Description of Artificial Sequence: Synthetic oligonucleotide
uucggguuccuuauaacuu

SEQ ID NO: 456631 - RNA, 19 nt, Artificial Sequence
  Description of Artificial Sequence: Synthetic oligonucleotide
uugguaugguuucccaaac

SEQ ID NO: 456632 - RNA, 19 nt, Artificial Sequence
  Description of Artificial Sequence: Synthetic oligonucleotide
auggguaagcaucauggau

SEQ ID NO: 456633 - RNA, 19 nt, Artificial Sequence
  Description of Artificial Sequence: Synthetic oligonucleotide
cuaugccucaacauuccug

SEQ ID NO: 456634 - RNA, 19 nt, Artificial Sequence
  Description of Artificial Sequence: Synthetic oligonucleotide
cuuugugguccaaccaaag

SEQ ID NO: 456635 - RNA, 19 nt, Artificial Sequence
  Description of Artificial Sequence: Synthetic oligonucleotide
cuugcuacauaauacgugu

SEQ ID NO: 456636 - RNA, 19 nt, Artificial Sequence
  Description of Artificial Sequence: Synthetic oligonucleotide
uugccggucuuacuuagcu

SEQ ID NO: 456637 - RNA, 19 nt, Artificial Sequence
  Description of Artificial Sequence: Synthetic oligonucleotide
uuaaccccgccucccaccc

SEQ ID NO: 456638 - RNA, 19 nt, Artificial Sequence
  Description of Artificial Sequence: Synthetic oligonucleotide
guuaaggcuugacuuaaga

SEQ ID NO: 456639 - RNA, 19 nt, Artificial Sequence
  Description of Artificial Sequence: Synthetic oligonucleotide
cuggguuaucugaacagug

SEQ ID NO: 456640 - RNA, 19 nt, Artificial Sequence
  Description of Artificial Sequence: Synthetic oligonucleotide
agguuuaugcugacagacc

SEQ ID NO: 456641 - RNA, 19 nt, Artificial Sequence
  Description of Artificial Sequence: Synthetic oligonucleotide
gaagucaucuucacaugug

SEQ ID NO: 456642 - RNA, 19 nt, Artificial Sequence
  Description of Artificial Sequence: Synthetic oligonucleotide
cuuauguauggaauaugga

SEQ ID NO: 456643 - RNA, 19 nt, Artificial Sequence
  Description of Artificial Sequence: Synthetic oligonucleotide
uggcaguggaauauaacuu

SEQ ID NO: 456644 - RNA, 19 nt, Artificial Sequence
  Description of Artificial Sequence: Synthetic oligonucleotide
aguuggguuuaaugcaaug

SEQ ID NO: 456645 - RNA, 19 nt, Artificial Sequence
  Description of Artificial Sequence: Synthetic oligonucleotide
cagcuaaaugacuacccac

SEQ ID NO: 456646 - RNA, 19 nt, Artificial Sequence
  Description of Artificial Sequence: Synthetic oligonucleotide
gacaaccagacacaacaga

SEQ ID NO: 456647 - RNA, 19 nt, Artificial Sequence
  Description of Artificial Sequence: Synthetic oligonucleotide
ucuaugggucacuaggguu

SEQ ID NO: 456648 - RNA, 19 nt, Artificial Sequence
  Description of Artificial Sequence: Synthetic oligonucleotide
gaaacaaauuaacgcguaa

SEQ ID NO: 456649 - RNA, 19 nt, Artificial Sequence
  Description of Artificial Sequence: Synthetic oligonucleotide
agcuaaaugacuacccacu

SEQ ID NO: 456650 - RNA, 19 nt, Artificial Sequence
  Description of Artificial Sequence: Synthetic oligonucleotide
cauaguuaaggcuugacuu

SEQ ID NO: 456651 - RNA, 19 nt, Artificial Sequence
  Description of Artificial Sequence: Synthetic oligonucleotide
guuucguaaaaguccaaaa

SEQ ID NO: 456652 - RNA, 19 nt, Artificial Sequence
  Description of Artificial Sequence: Synthetic oligonucleotide
uaaaacuugcucagucaua

SEQ ID NO: 456653 - RNA, 19 nt, Artificial Sequence
  Description of Artificial Sequence: Synthetic oligonucleotide
gguaugguuucccaaacca

SEQ ID NO: 456654 - RNA, 19 nt, Artificial Sequence
  Description of Artificial Sequence: Synthetic oligonucleotide
gaaguuuucuauagagcca

SEQ ID NO: 456655 - RNA, 19 nt, Artificial Sequence
  Description of Artificial Sequence: Synthetic oligonucleotide
gguuugaugggcaacacca

SEQ ID NO: 456656 - RNA, 19 nt, Artificial Sequence
  Description of Artificial Sequence: Synthetic oligonucleotide
acaaauuaacgcguaacuu

SEQ ID NO: 456657 - RNA, 19 nt, Artificial Sequence
  Description of Artificial Sequence: Synthetic oligonucleotide
gcccuuuacagguuuaugc

SEQ ID NO: 456658 - RNA, 19 nt, Artificial Sequence
  Description of Artificial Sequence: Synthetic oligonucleotide
ugcuuacacagaugucuag

SEQ ID NO: 456659 - RNA, 19 nt, Artificial Sequence
  Description of Artificial Sequence: Synthetic oligonucleotide
gaacaaaauucucaucccu

SEQ ID NO: 456660 - RNA, 19 nt, Artificial Sequence
  Description of Artificial Sequence: Synthetic oligonucleotide
acaaccagacacaacagaa

SEQ ID NO: 456661 - RNA, 19 nt, Artificial Sequence
  Description of Artificial Sequence: Synthetic oligonucleotide
guuuaugcugacagacccg

SEQ ID NO: 456662 - RNA, 19 nt, Artificial Sequence
  Description of Artificial Sequence: Synthetic oligonucleotide
ugcccuaggaaguaucaau

SEQ ID NO: 456663 - RNA, 19 nt, Artificial Sequence
  Description of Artificial Sequence: Synthetic oligonucleotide
guuccuuauaacuuaugua

SEQ ID NO: 456664 - RNA, 19 nt, Artificial Sequence
  Description of Artificial Sequence: Synthetic oligonucleotide
acaccgacacuuguggccg

SEQ ID NO: 456665 - RNA, 19 nt, Artificial Sequence
  Description of Artificial Sequence: Synthetic oligonucleotide
acauacgccucacuauugu

SEQ ID NO: 456666 - RNA, 19 nt, Artificial Sequence
  Description of Artificial Sequence: Synthetic oligonucleotide
uaggguucccuguauuacu

SEQ ID NO: 456667 - RNA, 19 nt, Artificial Sequence
  Description of Artificial Sequence: Synthetic oligonucleotide
auggcgaucaaaggaaaca

SEQ ID NO: 456668 - RNA, 19 nt, Artificial Sequence
  Description of Artificial Sequence: Synthetic oligonucleotide
gucuuacuuagcucccggg

SEQ ID NO: 456669 - RNA, 19 nt, Artificial Sequence
  Description of Artificial Sequence: Synthetic oligonucleotide
cucuagggguucaucacug

SEQ ID NO: 456670 - RNA, 19 nt, Artificial Sequence
  Description of Artificial Sequence: Synthetic oligonucleotide
cuuaaccccgccucccacc

SEQ ID NO: 456671 - RNA, 19 nt, Artificial Sequence
  Description of Artificial Sequence: Synthetic oligonucleotide
uguuucuauuccugaguuc

SEQ ID NO: 456672 - RNA, 19 nt, Artificial Sequence
  Description of Artificial Sequence: Synthetic oligonucleotide
cacaucuuauucugcuuac

SEQ ID NO: 456673 - RNA, 19 nt, Artificial Sequence
  Description of Artificial Sequence: Synthetic oligonucleotide
uuaaaggccccguguuucu

SEQ ID NO: 456674 - RNA, 19 nt, Artificial Sequence
  Description of Artificial Sequence: Synthetic oligonucleotide
gccggucuuacuuagcucc

SEQ ID NO: 456675 - RNA, 19 nt, Artificial Sequence
  Description of Artificial Sequence: Synthetic oligonucleotide
gaauuaauuccggcacuug

SEQ ID NO: 456676 - RNA, 19 nt, Artificial Sequence
  Description of Artificial Sequence: Synthetic oligonucleotide
ugcccagaauuaacaacca

SEQ ID NO: 456677 - RNA, 19 nt, Artificial Sequence
  Description of Artificial Sequence: Synthetic oligonucleotide
aacauacgccucacuauug

SEQ ID NO: 456678 - RNA, 19 nt, Artificial Sequence
  Description of Artificial Sequence: Synthetic oligonucleotide
cauacuugguaugguuucc

SEQ ID NO: 456679 - RNA, 19 nt, Artificial Sequence
  Description of Artificial Sequence: Synthetic oligonucleotide
ugguaacaucagaggagag

SEQ ID NO: 456680 - RNA, 19 nt, Artificial Sequence
  Description of Artificial Sequence: Synthetic oligonucleotide
ggaacaguucuuugaagac

SEQ ID NO: 456681 - RNA, 19 nt, Artificial Sequence
  Description of Artificial Sequence: Synthetic oligonucleotide
ucggguuccuuauaacuua

SEQ ID NO: 456682 - RNA, 19 nt, Artificial Sequence
  Description of Artificial Sequence: Synthetic oligonucleotide
caaauuaacgcguaacuuu

SEQ ID NO: 456683 - RNA, 19 nt, Artificial Sequence
  Description of Artificial Sequence: Synthetic oligonucleotide
uguucggguuccuuauaac

SEQ ID NO: 456684 - RNA, 19 nt, Artificial Sequence
  Description of Artificial Sequence: Synthetic oligonucleotide
uacgccucacuauuguuua

SEQ ID NO: 456685 - RNA, 19 nt, Artificial Sequence
  Description of Artificial Sequence: Synthetic oligonucleotide
ggacaaacagcuaaaugac

SEQ ID NO: 456686 - RNA, 19 nt, Artificial Sequence
  Description of Artificial Sequence: Synthetic oligonucleotide
aucauauauauaauauaua

SEQ ID NO: 456687 - RNA, 19 nt, Artificial Sequence
  Description of Artificial Sequence: Synthetic oligonucleotide
cugacagacccguauuauc

SEQ ID NO: 456688 - RNA, 19 nt, Artificial Sequence
  Description of Artificial Sequence: Synthetic oligonucleotide
uucauaguuaaggcuugac

SEQ ID NO: 456689 - RNA, 19 nt, Artificial Sequence
  Description of Artificial Sequence: Synthetic oligonucleotide
uuaaugcaaugcagccuga

SEQ ID NO: 456690 - RNA, 19 nt, Artificial Sequence
  Description of Artificial Sequence: Synthetic oligonucleotide
cugcuccguagacagaccc

SEQ ID NO: 456691 - RNA, 19 nt, Artificial Sequence
  Description of Artificial Sequence: Synthetic oligonucleotide
ggguuuaaugcaaugcagc

SEQ ID NO: 456692 - RNA, 19 nt, Artificial Sequence
  Description of Artificial Sequence: Synthetic oligonucleotide
ggaaagacagucccuuaug

SEQ ID NO: 456693 - RNA, 19 nt, Artificial Sequence
  Description of Artificial Sequence: Synthetic oligonucleotide
cagcauaguuucguaaaag

SEQ ID NO: 456694 - RNA, 19 nt, Artificial Sequence
  Description of Artificial Sequence: Synthetic oligonucleotide
uacguguaucugauuguaa

SEQ ID NO: 456695 - RNA, 19 nt, Artificial Sequence
  Description of Artificial Sequence: Synthetic oligonucleotide
uuccugaguucacaccgac

SEQ ID NO: 456696 - RNA, 19 nt, Artificial Sequence
  Description of Artificial Sequence: Synthetic oligonucleotide
acuaggguucccuguauua

SEQ ID NO: 456697 - RNA, 19 nt, Artificial Sequence
  Description of Artificial Sequence: Synthetic oligonucleotide
uggcgaucaaaggaaacaa

SEQ ID NO: 456698 - RNA, 19 nt, Artificial Sequence
  Description of Artificial Sequence: Synthetic oligonucleotide
gggaacugaucagacauag

SEQ ID NO: 456699 - RNA, 19 nt, Artificial Sequence
  Description of Artificial Sequence: Synthetic oligonucleotide
gauugcuauauuuccuggu

SEQ ID NO: 456700 - RNA, 19 nt, Artificial Sequence
  Description of Artificial Sequence: Synthetic oligonucleotide
ucacaaaucccugcaucac

SEQ ID NO: 456701 - RNA, 19 nt, Artificial Sequence
  Description of Artificial Sequence: Synthetic oligonucleotide
aaguccaugcccagaauua

SEQ ID NO: 456702 - RNA, 19 nt, Artificial Sequence
  Description of Artificial Sequence: Synthetic oligonucleotide
uuuuccccucuucuauggu

SEQ ID NO: 456703 - RNA, 19 nt, Artificial Sequence
  Description of Artificial Sequence: Synthetic oligonucleotide
cccguauuaucuuaaagca

SEQ ID NO: 456704 - RNA, 19 nt, Artificial Sequence
  Description of Artificial Sequence: Synthetic oligonucleotide
ucacaccgacacuuguggc

SEQ ID NO: 456705 - RNA, 19 nt, Artificial Sequence
  Description of Artificial Sequence: Synthetic oligonucleotide
ugggguuauggguaagcau

SEQ ID NO: 456706 - RNA, 19 nt, Artificial Sequence
  Description of Artificial Sequence: Synthetic oligonucleotide
ugcuuuagauucagaggua

SEQ ID NO: 456707 - RNA, 19 nt, Artificial Sequence
  Description of Artificial Sequence: Synthetic oligonucleotide
gucucauucacaaaucccu

SEQ ID NO: 456708 - RNA, 19 nt, Artificial Sequence
  Description of Artificial Sequence: Synthetic oligonucleotide
ucccuuauguauggaauau

SEQ ID NO: 456709 - RNA, 19 nt, Artificial Sequence
  Description of Artificial Sequence: Synthetic oligonucleotide
gggguuauggguaagcauc

SEQ ID NO: 456710 - RNA, 19 nt, Artificial Sequence
  Description of Artificial Sequence: Synthetic oligonucleotide
uccugaguucacaccgaca

SEQ ID NO: 456711 - RNA, 19 nt, Artificial Sequence
  Description of Artificial Sequence: Synthetic oligonucleotide
ugugugcaguaccaaccaa

SEQ ID NO: 456712 - RNA, 19 nt, Artificial Sequence
  Description of Artificial Sequence: Synthetic oligonucleotide
ucugcuccguagacagacc

SEQ ID NO: 456713 - RNA, 19 nt, Artificial Sequence
  Description of Artificial Sequence: Synthetic oligonucleotide
ggucuaugggucacuaggg

SEQ ID NO: 456714 - RNA, 19 nt, Artificial Sequence
  Description of Artificial Sequence: Synthetic oligonucleotide
cagggucaucauuccaccg

SEQ ID NO: 456715 - RNA, 19 nt, Artificial Sequence
  Description of Artificial Sequence: Synthetic oligonucleotide
agacagucccuuauguaug

SEQ ID NO: 456716 - RNA, 19 nt, Artificial Sequence
  Description of Artificial Sequence: Synthetic oligonucleotide
cagaugucuagugaaguca

SEQ ID NO: 456717 - RNA, 19 nt, Artificial Sequence
  Description of Artificial Sequence: Synthetic oligonucleotide
aaacuccaacugugugcag

SEQ ID NO: 456718 - RNA, 19 nt, Artificial Sequence
  Description of Artificial Sequence: Synthetic oligonucleotide
acuaugccucaacauuccu

SEQ ID NO: 456719 - RNA, 19 nt, Artificial Sequence
  Description of Artificial Sequence: Synthetic oligonucleotide
guucggguuccuuauaacu

SEQ ID NO: 456720 - RNA, 19 nt, Artificial Sequence
  Description of Artificial Sequence: Synthetic oligonucleotide
ugccccauuccagaggaac

SEQ ID NO: 456721 - RNA, 19 nt, Artificial Sequence
  Description of Artificial Sequence: Synthetic oligonucleotide
ucaacggcgcuauccugcu

SEQ ID NO: 456722 - RNA, 19 nt, Artificial Sequence
  Description of Artificial Sequence: Synthetic oligonucleotide
gcuaggaauucaacuaugc

SEQ ID NO: 456723 - RNA, 19 nt, Artificial Sequence
  Description of Artificial Sequence: Synthetic oligonucleotide
gguuccuuauaacuuaugu

SEQ ID NO: 456724 - RNA, 19 nt, Artificial Sequence
  Description of Artificial Sequence: Synthetic oligonucleotide
cuaggaaguaucaaugauu

SEQ ID NO: 456725 - RNA, 19 nt, Artificial Sequence
  Description of Artificial Sequence: Synthetic oligonucleotide
gaauauggaccaagugaca

SEQ ID NO: 456726 - RNA, 19 nt, Artificial Sequence
  Description of Artificial Sequence: Synthetic oligonucleotide
ugcuccguagacagacccu

SEQ ID NO: 456727 - RNA, 19 nt, Artificial Sequence
  Description of Artificial Sequence: Synthetic oligonucleotide
ggcuugacuuaagaaacag

SEQ ID NO: 456728 - RNA, 19 nt, Artificial Sequence
  Description of Artificial Sequence: Synthetic oligonucleotide
uugcuacauaauacgugua

SEQ ID NO: 456729 - RNA, 19 nt, Artificial Sequence
  Description of Artificial Sequence: Synthetic oligonucleotide
gaacuugccggucuuacuu

SEQ ID NO: 456730 - RNA, 19 nt, Artificial Sequence
  Description of Artificial Sequence: Synthetic oligonucleotide
ccuuuacagguuuaugcug

SEQ ID NO: 456731 - RNA, 19 nt, Artificial Sequence
  Description of Artificial Sequence: Synthetic oligonucleotide
uaauuccggcacuuggguu

SEQ ID NO: 456732 - RNA, 19 nt, Artificial Sequence
  Description of Artificial Sequence: Synthetic oligonucleotide
cacaaaucccugcaucaca

SEQ ID NO: 456733 - RNA, 19 nt, Artificial Sequence
  Description of Artificial Sequence: Synthetic oligonucleotide
cauuuuaaaggccccgugu

SEQ ID NO: 456734 - RNA, 19 nt, Artificial Sequence
  Description of Artificial Sequence: Synthetic oligonucleotide
agcuaggaauucaacuaug

SEQ ID NO: 456735 - RNA, 19 nt, Artificial Sequence
  Description of Artificial Sequence: Synthetic oligonucleotide
cuaucagauaccccuggaa

SEQ ID NO: 456736 - RNA, 19 nt, Artificial Sequence
  Description of Artificial Sequence: Synthetic oligonucleotide
cuugccggucuuacuuagc

SEQ ID NO: 456737 - RNA, 19 nt, Artificial Sequence
  Description of Artificial Sequence: Synthetic oligonucleotide
gguaacaucagaggagaga

SEQ ID NO: 456738 - RNA, 19 nt, Artificial Sequence
  Description of Artificial Sequence: Synthetic oligonucleotide
gggucaucauuccaccgcc

SEQ ID NO: 456739 - RNA, 19 nt, Artificial Sequence
  Description of Artificial Sequence: Synthetic oligonucleotide
uuuugggguuauggguaag

SEQ ID NO: 456740 - RNA, 19 nt, Artificial Sequence
  Description of Artificial Sequence: Synthetic oligonucleotide
auaauacguguaucugauu

SEQ ID NO: 456741 - RNA, 19 nt, Artificial Sequence
  Description of Artificial Sequence: Synthetic oligonucleotide
agaugucuagugaagucau

SEQ ID NO: 456742 - RNA, 19 nt, Artificial Sequence
  Description of Artificial Sequence: Synthetic oligonucleotide
acgccucacuauuguuuac

SEQ ID NO: 456743 - RNA, 19 nt, Artificial Sequence
  Description of Artificial Sequence: Synthetic oligonucleotide
auacguguaucugauugua

SEQ ID NO: 456744 - RNA, 19 nt, Artificial Sequence
  Description of Artificial Sequence: Synthetic oligonucleotide
ggaauggcgaucaaaggaa

SEQ ID NO: 456745 - RNA, 19 nt, Artificial Sequence
  Description of Artificial Sequence: Synthetic oligonucleotide
cuuacuuagcucccgggcu

SEQ ID NO: 456746 - RNA, 19 nt, Artificial Sequence
  Description of Artificial Sequence: Synthetic oligonucleotide
uacucgucccauccccaac

SEQ ID NO: 456747 - RNA, 19 nt, Artificial Sequence
  Description of Artificial Sequence: Synthetic oligonucleotide
acggcgcuauccugcuccc

SEQ ID NO: 456748 - RNA, 19 nt, Artificial Sequence
  Description of Artificial Sequence: Synthetic oligonucleotide
gagcuaucagauaccccug

SEQ ID NO: 456749 - RNA, 19 nt, Artificial Sequence
  Description of Artificial Sequence: Synthetic oligonucleotide
cuauaacauuacaucauau

SEQ ID NO: 456750 - RNA, 19 nt, Artificial Sequence
  Description of Artificial Sequence: Synthetic oligonucleotide
uaguuucguaaaaguccaa

SEQ ID NO: 456751 - RNA, 19 nt, Artificial Sequence
  Description of Artificial Sequence: Synthetic oligonucleotide
ccagaauuaacaaccagcu

SEQ ID NO: 456752 - RNA, 19 nt, Artificial Sequence
  Description of Artificial Sequence: Synthetic oligonucleotide
cugugugcaguaccaacca

SEQ ID NO: 456753 - RNA, 19 nt, Artificial Sequence
  Description of Artificial Sequence: Synthetic oligonucleotide
guuuaaugcaaugcagccu

SEQ ID NO: 456754 - RNA, 19 nt, Artificial Sequence
  Description of Artificial Sequence: Synthetic oligonucleotide
gucccuuauguauggaaua

SEQ ID NO: 456755 - RNA, 19 nt, Artificial Sequence
  Description of Artificial Sequence: Synthetic oligonucleotide
gcuacauaauacguguauc

SEQ ID NO: 456756 - RNA, 19 nt, Artificial Sequence
  Description of Artificial Sequence: Synthetic oligonucleotide
aggccccguguuucuauuc

SEQ ID NO: 456757 - RNA, 19 nt, Artificial Sequence
  Description of Artificial Sequence: Synthetic oligonucleotide
uuguggccggccccucuag

SEQ ID NO: 456758 - RNA, 19 nt, Artificial Sequence
  Description of Artificial Sequence: Synthetic oligonucleotide
gauacucgucccaucccca

SEQ ID NO: 456759 - RNA, 19 nt, Artificial Sequence
  Description of Artificial Sequence: Synthetic oligonucleotide
gaacuaucagcuaggaauu

SEQ ID NO: 456760 - RNA, 19 nt, Artificial Sequence
  Description of Artificial Sequence: Synthetic oligonucleotide
guccuuugugguccaacca

SEQ ID NO: 456761 - RNA, 19 nt, Artificial Sequence
  Description of Artificial Sequence: Synthetic oligonucleotide
auacgccucacuauuguuu

SEQ ID NO: 456762 - RNA, 19 nt, Artificial Sequence
  Description of Artificial Sequence: Synthetic oligonucleotide
caucccuuugcccuaggaa

SEQ ID NO: 456763 - RNA, 19 nt, Artificial Sequence
  Description of Artificial Sequence: Synthetic oligonucleotide
agcuuaaccccgccuccca

SEQ ID NO: 456764 - RNA, 19 nt, Artificial Sequence
  Description of Artificial Sequence: Synthetic oligonucleotide
uuccuaccucuucuuucgu

SEQ ID NO: 456765 - RNA, 19 nt, Artificial Sequence
  Description of Artificial Sequence: Synthetic oligonucleotide
agacccguauuaucuuaaa

SEQ ID NO: 456766 - RNA, 19 nt, Artificial Sequence
  Description of Artificial Sequence: Synthetic oligonucleotide
gaauggcgaucaaaggaaa

SEQ ID NO: 456767 - RNA, 19 nt, Artificial Sequence
  Description of Artificial Sequence: Synthetic oligonucleotide
auacucgucccauccccaa

SEQ ID NO: 456768 - RNA, 19 nt, Artificial Sequence
  Description of Artificial Sequence: Synthetic oligonucleotide
uccuaccucuucuuucguu

SEQ ID NO: 456769 - RNA, 19 nt, Artificial Sequence
  Description of Artificial Sequence: Synthetic oligonucleotide
gguuugggaaggaacaaaa

SEQ ID NO: 456770 - RNA, 19 nt, Artificial Sequence
  Description of Artificial Sequence: Synthetic oligonucleotide
agucauccggucaccaccu

SEQ ID NO: 456771 - RNA, 19 nt, Artificial Sequence
  Description of Artificial Sequence: Synthetic oligonucleotide
cugccaagaagggguuugg

SEQ ID NO: 456772 - RNA, 19 nt, Artificial Sequence
  Description of Artificial Sequence: Synthetic oligonucleotide
guauuaucuuaaagcaugu

SEQ ID NO: 456773 - RNA, 19 nt, Artificial Sequence
  Description of Artificial Sequence: Synthetic oligonucleotide
cucgucccauccccaacag

SEQ ID NO: 456774 - RNA, 19 nt, Artificial Sequence
  Description of Artificial Sequence: Synthetic oligonucleotide
ugccggucuuacuuagcuc

SEQ ID NO: 456775 - RNA, 19 nt, Artificial Sequence
  Description of Artificial Sequence: Synthetic oligonucleotide
ggaccaagugacaggacac

SEQ ID NO: 456776 - RNA, 19 nt, Artificial Sequence
  Description of Artificial Sequence: Synthetic oligonucleotide
uuaugcugacagacccgua

SEQ ID NO: 456777 - RNA, 19 nt, Artificial Sequence
  Description of Artificial Sequence: Synthetic oligonucleotide
gcaguaccaaccaaccaac

SEQ ID NO: 456778 - RNA, 19 nt, Artificial Sequence
  Description of Artificial Sequence: Synthetic oligonucleotide
gcuaauggauacagagggc

SEQ ID NO: 456779 - RNA, 19 nt, Artificial Sequence
  Description of Artificial Sequence: Synthetic oligonucleotide
gugcaguaccaaccaacca

SEQ ID NO: 456780 - RNA, 19 nt, Artificial Sequence
  Description of Artificial Sequence: Synthetic oligonucleotide
ucaguccccucuagggguu

SEQ ID NO: 456781 - RNA, 19 nt, Artificial Sequence
  Description of Artificial Sequence: Synthetic oligonucleotide
cagucccuuauguauggaa

SEQ ID NO: 456782 - RNA, 19 nt, Artificial Sequence
  Description of Artificial Sequence: Synthetic oligonucleotide
uugcccuaggaaguaucaa

SEQ ID NO: 456783 - RNA, 19 nt, Artificial Sequence
  Description of Artificial Sequence: Synthetic oligonucleotide
aggcuugacuuaagaaaca

SEQ ID NO: 456784 - RNA, 19 nt, Artificial Sequence
  Description of Artificial Sequence: Synthetic oligonucleotide
auggaccaagugacaggac

SEQ ID NO: 456785 - RNA, 19 nt, Artificial Sequence
  Description of Artificial Sequence: Synthetic oligonucleotide
gucuaugggucacuagggu

SEQ ID NO: 456786 - RNA, 19 nt, Artificial Sequence
  Description of Artificial Sequence: Synthetic oligonucleotide
acuuggcaguggaauauaa

SEQ ID NO: 456787 - RNA, 19 nt, Artificial Sequence
  Description of Artificial Sequence: Synthetic oligonucleotide
ggaauucaacuaugccuca

SEQ ID NO: 456788 - RNA, 19 nt, Artificial Sequence
  Description of Artificial Sequence: Synthetic oligonucleotide
cagcuuaaccccgccuccc

SEQ ID NO: 456789 - RNA, 19 nt, Artificial Sequence
  Description of Artificial Sequence: Synthetic oligonucleotide
cagacccguauuaucuuaa

SEQ ID NO: 456790 - RNA, 19 nt, Artificial Sequence
  Description of Artificial Sequence: Synthetic oligonucleotide
cuauauuuccuggucuacu

SEQ ID NO: 456791 - RNA, 19 nt, Artificial Sequence
  Description of Artificial Sequence: Synthetic oligonucleotide
ggucucaagucauccgguc

SEQ ID NO: 456792 - RNA, 19 nt, Artificial Sequence
  Description of Artificial Sequence: Synthetic oligonucleotide
ugcccacuucuugggagug

SEQ ID NO: 456793 - RNA, 19 nt, Artificial Sequence
  Description of Artificial Sequence: Synthetic oligonucleotide
ggcaguggaauauaacuuu

SEQ ID NO: 456794 - RNA, 19 nt, Artificial Sequence
  Description of Artificial Sequence: Synthetic oligonucleotide
ggccaugcccuuuacaggu

SEQ ID NO: 456795 - RNA, 19 nt, Artificial Sequence
  Description of Artificial Sequence: Synthetic oligonucleotide
agccaugacuuuauccaaa

SEQ ID NO: 456796 - RNA, 19 nt, Artificial Sequence
  Description of Artificial Sequence: Synthetic oligonucleotide
guucauaguuaaggcuuga

SEQ ID NO: 456797 - RNA, 19 nt, Artificial Sequence
  Description of Artificial Sequence: Synthetic oligonucleotide
guaagagaagggaacugau

SEQ ID NO: 456798 - RNA, 19 nt, Artificial Sequence
  Description of Artificial Sequence: Synthetic oligonucleotide
ccagcuuaaccccgccucc

SEQ ID NO: 456799 - RNA, 19 nt, Artificial Sequence
  Description of Artificial Sequence: Synthetic oligonucleotide
ggcgcuauccugcucccca

SEQ ID NO: 456800 - RNA, 19 nt, Artificial Sequence
  Description of Artificial Sequence: Synthetic oligonucleotide
cuccguagacagacccuuc

SEQ ID NO: 456801 - RNA, 19 nt, Artificial Sequence
  Description of Artificial Sequence: Synthetic oligonucleotide
ggaacugaucagacauagc

SEQ ID NO: 456802 - RNA, 19 nt, Artificial Sequence
  Description of Artificial Sequence: Synthetic oligonucleotide
gcuaucagauaccccugga

SEQ ID NO: 456803 - RNA, 19 nt, Artificial Sequence
  Description of Artificial Sequence: Synthetic oligonucleotide
guacaaguccaugcccaga

SEQ ID NO: 456804 - RNA, 19 nt, Artificial Sequence
  Description of Artificial Sequence: Synthetic oligonucleotide
caccacccagccugguaac

SEQ ID NO: 456805 - RNA, 19 nt, Artificial Sequence
  Description of Artificial Sequence: Synthetic oligonucleotide
gacagacccguauuaucuu

SEQ ID NO: 456806 - RNA, 19 nt, Artificial Sequence
  Description of Artificial Sequence: Synthetic oligonucleotide
ccguagacagacccuuccc

SEQ ID NO: 456807 - RNA, 19 nt, Artificial Sequence
  Description of Artificial Sequence: Synthetic oligonucleotide
cuguauuacugaguugggu

SEQ ID NO: 456808 - RNA, 19 nt, Artificial Sequence
  Description of Artificial Sequence: Synthetic oligonucleotide
gccccucuagcagacacug

SEQ ID NO: 456809 - RNA, 19 nt, Artificial Sequence
  Description of Artificial Sequence: Synthetic oligonucleotide
cuauccugcuccccauaaa

SEQ ID NO: 456810 - RNA, 19 nt, Artificial Sequence
  Description of Artificial Sequence: Synthetic oligonucleotide
acagucccuuauguaugga

SEQ ID NO: 456811 - RNA, 19 nt, Artificial Sequence
  Description of Artificial Sequence: Synthetic oligonucleotide
caccgacacuuguggccgg

SEQ ID NO: 456812 - RNA, 19 nt, Artificial Sequence
  Description of Artificial Sequence: Synthetic oligonucleotide
cagcaucuaggaauuaauu

SEQ ID NO: 456813 - RNA, 19 nt, Artificial Sequence
  Description of Artificial Sequence: Synthetic oligonucleotide
ccgccucuucaaucgaagc

SEQ ID NO: 456814 - RNA, 19 nt, Artificial Sequence
  Description of Artificial Sequence: Synthetic oligonucleotide
cccuuuacagguuuaugcu

SEQ ID NO: 456815 - RNA, 19 nt, Artificial Sequence
  Description of Artificial Sequence: Synthetic oligonucleotide
gggaaagacagucccuuau

SEQ ID NO: 456816 - RNA, 19 nt, Artificial Sequence
  Description of Artificial Sequence: Synthetic oligonucleotide
ccggucuuacuuagcuccc

SEQ ID NO: 456817 - RNA, 19 nt, Artificial Sequence
  Description of Artificial Sequence: Synthetic oligonucleotide
gcuuaaccccgccucccac

SEQ ID NO: 456818 - RNA, 19 nt, Artificial Sequence
  Description of Artificial Sequence: Synthetic oligonucleotide
ggcgaucaaaggaaacaaa

SEQ ID NO: 456819 - RNA, 19 nt, Artificial Sequence
  Description of Artificial Sequence: Synthetic oligonucleotide
cacaagauacucgucccau

SEQ ID NO: 456820 - RNA, 19 nt, Artificial Sequence
  Description of Artificial Sequence: Synthetic oligonucleotide
gcuaaaugacuacccacuu

SEQ ID NO: 456821 - RNA, 19 nt, Artificial Sequence
  Description of Artificial Sequence: Synthetic oligonucleotide
auuccggcacuuggguuuu

SEQ ID NO: 456822 - RNA, 19 nt, Artificial Sequence
  Description of Artificial Sequence: Synthetic oligonucleotide
uucccacaauccugcccuu

SEQ ID NO: 456823 - RNA, 19 nt, Artificial Sequence
  Description of Artificial Sequence: Synthetic oligonucleotide
cccguguuucuauuccuga

SEQ ID NO: 456824 - RNA, 19 nt, Artificial Sequence
  Description of Artificial Sequence: Synthetic oligonucleotide
ggaacuugccggucuuacu

SEQ ID NO: 456825 - RNA, 19 nt, Artificial Sequence
  Description of Artificial Sequence: Synthetic oligonucleotide
agcccaaguucugcuccgu

SEQ ID NO: 456826 - RNA, 19 nt, Artificial Sequence
  Description of Artificial Sequence: Synthetic oligonucleotide
cauacgccucacuauuguu

SEQ ID NO: 456827 - RNA, 19 nt, Artificial Sequence
  Description of Artificial Sequence: Synthetic oligonucleotide
cguguaucugauuguaaua

SEQ ID NO: 456828 - RNA, 19 nt, Artificial Sequence
  Description of Artificial Sequence: Synthetic oligonucleotide
ccuaggaaguaucaaugau

SEQ ID NO: 456829 - RNA, 19 nt, Artificial Sequence
  Description of Artificial Sequence: Synthetic oligonucleotide
cuuguggccggccccucua

SEQ ID NO: 456830 - RNA, 19 nt, Artificial Sequence
  Description of Artificial Sequence: Synthetic oligonucleotide
cacaugugaaugucucauu

SEQ ID NO: 456831 - RNA, 19 nt, Artificial Sequence
  Description of Artificial Sequence: Synthetic oligonucleotide
caacugugugcaguaccaa

SEQ ID NO: 456832 - RNA, 19 nt, Artificial Sequence
  Description of Artificial Sequence: Synthetic oligonucleotide
cagucccuuuccuggggaa

SEQ ID NO: 456833 - RNA, 19 nt, Artificial Sequence
  Description of Artificial Sequence: Synthetic oligonucleotide
guccaaccaaagccugggu

SEQ ID NO: 456834 - RNA, 19 nt, Artificial Sequence
  Description of Artificial Sequence: Synthetic oligonucleotide
ccguauuaucuuaaagcau

SEQ ID NO: 456835 - RNA, 19 nt, Artificial Sequence
  Description of Artificial Sequence: Synthetic oligonucleotide
ggggaaagacagucccuua

SEQ ID NO: 456836 - RNA, 19 nt, Artificial Sequence
  Description of Artificial Sequence: Synthetic oligonucleotide
ccccucuagcagacacugg

SEQ ID NO: 456837 - RNA, 19 nt, Artificial Sequence
  Description of Artificial Sequence: Synthetic oligonucleotide
gguguucggguuccuuaua

SEQ ID NO: 456838 - RNA, 19 nt, Artificial Sequence
  Description of Artificial Sequence: Synthetic oligonucleotide
caacggcgcuauccugcuc

SEQ ID NO: 456839 - RNA, 19 nt, Artificial Sequence
  Description of Artificial Sequence: Synthetic oligonucleotide
gaacugccaagaagggguu

SEQ ID NO: 456840 - RNA, 19 nt, Artificial Sequence
  Description of Artificial Sequence: Synthetic oligonucleotide
gccucacuauuguuuacau

SEQ ID NO: 456841 - RNA, 19 nt, Artificial Sequence
  Description of Artificial Sequence: Synthetic oligonucleotide
cguguuucuauuccugagu

SEQ ID NO: 456842 - RNA, 19 nt, Artificial Sequence
  Description of Artificial Sequence: Synthetic oligonucleotide
cggucuuacuuagcucccg

SEQ ID NO: 456843 - RNA, 19 nt, Artificial Sequence
  Description of Artificial Sequence: Synthetic oligonucleotide
ggucaccaccuuccuaccu

SEQ ID NO: 456844 - RNA, 19 nt, Artificial Sequence
  Description of Artificial Sequence: Synthetic oligonucleotide
cacuaggguucccuguauu

SEQ ID NO: 456845 - RNA, 19 nt, Artificial Sequence
  Description of Artificial Sequence: Synthetic oligonucleotide
caguccccucuagggguuc

SEQ ID NO: 456846 - RNA, 19 nt, Artificial Sequence
  Description of Artificial Sequence: Synthetic oligonucleotide
ccugcaucacaaguuuaua

SEQ ID NO: 456847 - RNA, 19 nt, Artificial Sequence
  Description of Artificial Sequence: Synthetic oligonucleotide
ccgacacuuguggccggcc

SEQ ID NO: 456848 - RNA, 19 nt, Artificial Sequence
  Description of Artificial Sequence: Synthetic oligonucleotide
gcuccguagacagacccuu

SEQ ID NO: 456849 - RNA, 19 nt, Artificial Sequence
  Description of Artificial Sequence: Synthetic oligonucleotide
gguuauggguaagcaucau

SEQ ID NO: 456850 - RNA, 19 nt, Artificial Sequence
  Description of Artificial Sequence: Synthetic oligonucleotide
gucauccggucaccaccuu

SEQ ID NO: 456851 - RNA, 19 nt, Artificial Sequence
  Description of Artificial Sequence: Synthetic oligonucleotide
ccaugcccuuuacagguuu

SEQ ID NO: 456852 - RNA, 19 nt, Artificial Sequence
  Description of Artificial Sequence: Synthetic oligonucleotide
gcgcuauccugcuccccau

SEQ ID NO: 456853 - RNA, 19 nt, Artificial Sequence
  Description of Artificial Sequence: Synthetic oligonucleotide
cggcgcuauccugcucccc

SEQ ID NO: 456854 - RNA, 19 nt, Artificial Sequence
  Description of Artificial Sequence: Synthetic oligonucleotide
ccccagaaucuugcuacau

SEQ ID NO: 456855 - RNA, 19 nt, Artificial Sequence
  Description of Artificial Sequence: Synthetic oligonucleotide
cagguacacugggcuccuu

SEQ ID NO: 456856 - RNA, 19 nt, Artificial Sequence
  Description of Artificial Sequence: Synthetic oligonucleotide
aauaauucggucuucucuc

SEQ ID NO: 456857 - RNA, 19 nt, Artificial Sequence
  Description of Artificial Sequence: Synthetic oligonucleotide
aaauucaaguuacauauga

SEQ ID NO: 456858 - RNA, 19 nt, Artificial Sequence
  Description of Artificial Sequence: Synthetic oligonucleotide
uucaaguuacauaugauac

SEQ ID NO: 456859 - RNA, 19 nt, Artificial Sequence
  Description of Artificial Sequence: Synthetic oligonucleotide
aguuuuaaggcaaauacac

SEQ ID NO: 456860 - RNA, 19 nt, Artificial Sequence
  Description of Artificial Sequence: Synthetic oligonucleotide
aauacgcuaauaguuaagg

SEQ ID NO: 456861 - RNA, 19 nt, Artificial Sequence
  Description of Artificial Sequence: Synthetic oligonucleotide
aagacaugcgguugcagcc

SEQ ID NO: 456862 - RNA, 19 nt, Artificial Sequence
  Description of Artificial Sequence: Synthetic oligonucleotide
uuuacuaauaguguaacga

SEQ ID NO: 456863 - RNA, 19 nt, Artificial Sequence
  Description of Artificial Sequence: Synthetic oligonucleotide
uuuaaggcaaauacaccgg

SEQ ID NO: 456864 - RNA, 19 nt, Artificial Sequence
  Description of Artificial Sequence: Synthetic oligonucleotide
aaauacuagauucucucca

SEQ ID NO: 456865 - RNA, 19 nt, Artificial Sequence
  Description of Artificial Sequence: Synthetic oligonucleotide
uguaacgaguucuugaucu

SEQ ID NO: 456866 - RNA, 19 nt, Artificial Sequence
  Description of Artificial Sequence: Synthetic oligonucleotide
aauacuagauucucuccag

SEQ ID NO: 456867 - RNA, 19 nt, Artificial Sequence
  Description of Artificial Sequence: Synthetic oligonucleotide
agaucaugcacuuuuaacu

SEQ ID NO: 456868 - RNA, 19 nt, Artificial Sequence
  Description of Artificial Sequence: Synthetic oligonucleotide
uuacuaauaguguaacgag

SEQ ID NO: 456869 - RNA, 19 nt, Artificial Sequence
  Description of Artificial Sequence: Synthetic oligonucleotide
aaagucguaguugacucgc

SEQ ID NO: 456870 - RNA, 19 nt, Artificial Sequence
  Description of Artificial Sequence: Synthetic oligonucleotide
ugucauucagacuaguagc

SEQ ID NO: 456871 - RNA, 19 nt, Artificial Sequence
  Description of Artificial Sequence: Synthetic oligonucleotide
aaggguaucagaccugaag

SEQ ID NO: 456872 - RNA, 19 nt, Artificial Sequence
  Description of Artificial Sequence: Synthetic oligonucleotide
uaguuaagguacuuggagg

SEQ ID NO: 456873 - RNA, 19 nt, Artificial Sequence
  Description of Artificial Sequence: Synthetic oligonucleotide
uaacauaacccuuugcuac

SEQ ID NO: 456874 - RNA, 19 nt, Artificial Sequence
  Description of Artificial Sequence: Synthetic oligonucleotide
guaguuuaaacagacuugg

SEQ ID NO: 456875 - RNA, 19 nt, Artificial Sequence
  Description of Artificial Sequence: Synthetic oligonucleotide
auagaaacucgacagaggu

SEQ ID NO: 456876 - RNA, 19 nt, Artificial Sequence
  Description of Artificial Sequence: Synthetic oligonucleotide
agaaacucgacagagguag

SEQ ID NO: 456877 - RNA, 19 nt, Artificial Sequence
  Description of Artificial Sequence: Synthetic oligonucleotide
gaugagacauucuuugcag

SEQ ID NO: 456878 - RNA, 19 nt, Artificial Sequence
  Description of Artificial Sequence: Synthetic oligonucleotide
guugggucgguccagaggg

SEQ ID NO: 456879 - RNA, 19 nt, Artificial Sequence
  Description of Artificial Sequence: Synthetic oligonucleotide
ucgcacauuggguagaggg

SEQ ID NO: 456880 - RNA, 19 nt, Artificial Sequence
  Description of Artificial Sequence: Synthetic oligonucleotide
uuuaggcaacuucauauca

SEQ ID NO: 456881 - RNA, 19 nt, Artificial Sequence
  Description of Artificial Sequence: Synthetic oligonucleotide
acaggaccuauguugaugg

SEQ ID NO: 456882 - RNA, 19 nt, Artificial Sequence
  Description of Artificial Sequence: Synthetic oligonucleotide
gugacagucagucagcacc

SEQ ID NO: 456883 - RNA, 19 nt, Artificial Sequence
  Description of Artificial Sequence: Synthetic oligonucleotide
caaaucauaguaauucuuc

SEQ ID NO: 456884 - RNA, 19 nt, Artificial Sequence
  Description of Artificial Sequence: Synthetic oligonucleotide
guucaagugacccacagca

SEQ ID NO: 456885 - RNA, 19 nt, Artificial Sequence
  Description of Artificial Sequence: Synthetic oligonucleotide
uuuaaguguucacaaacau

SEQ ID NO: 456886 - RNA, 19 nt, Artificial Sequence
  Description of Artificial Sequence: Synthetic oligonucleotide
guucuagugggacaggccg

SEQ ID NO: 456887 - RNA, 19 nt, Artificial Sequence
  Description of Artificial Sequence: Synthetic oligonucleotide
acgcuaauaguuaagguac

SEQ ID NO: 456888 - RNA, 19 nt, Artificial Sequence
  Description of Artificial Sequence: Synthetic oligonucleotide
ucauguagggcccacuuga

SEQ ID NO: 456889 - RNA, 19 nt, Artificial Sequence
  Description of Artificial Sequence: Synthetic oligonucleotide
uucaauucgagcagcaguc

SEQ ID NO: 456890 - RNA, 19 nt, Artificial Sequence
  Description of Artificial Sequence: Synthetic oligonucleotide
ucaaguuacauaugauaca

SEQ ID NO: 456891 - RNA, 19 nt, Artificial Sequence
  Description of Artificial Sequence: Synthetic oligonucleotide
uuuuaucacuguccaacag

SEQ ID NO: 456892 - RNA, 19 nt, Artificial Sequence
  Description of Artificial Sequence: Synthetic oligonucleotide
agcacaguucaagugaccc

SEQ ID NO: 456893 - RNA, 19 nt, Artificial Sequence
  Description of Artificial Sequence: Synthetic oligonucleotide
cauacuaaggugagacugg

SEQ ID NO: 456894 - RNA, 19 nt, Artificial Sequence
  Description of Artificial Sequence: Synthetic oligonucleotide
agacuaguagcacaguuca

SEQ ID NO: 456895 - RNA, 19 nt, Artificial Sequence
  Description of Artificial Sequence: Synthetic oligonucleotide
ugcauaguguccuuugagc

SEQ ID NO: 456896 - RNA, 19 nt, Artificial Sequence
  Description of Artificial Sequence: Synthetic oligonucleotide
uucagauuugaugaggcca

SEQ ID NO: 456897 - RNA, 19 nt, Artificial Sequence
  Description of Artificial Sequence: Synthetic oligonucleotide
ucaugcacuuuuaacuuug

SEQ ID NO: 456898 - RNA, 19 nt, Artificial Sequence
  Description of Artificial Sequence: Synthetic oligonucleotide
uaauaguguaacgaguucu

SEQ ID NO: 456899 - RNA, 19 nt, Artificial Sequence
  Description of Artificial Sequence: Synthetic oligonucleotide
uacuaauaguguaacgagu

SEQ ID NO: 456900 - RNA, 19 nt, Artificial Sequence
  Description of Artificial Sequence: Synthetic oligonucleotide
aguuuaaacagacuugguu

SEQ ID NO: 456901 - RNA, 19 nt, Artificial Sequence
  Description of Artificial Sequence: Synthetic oligonucleotide
aguucaagugacccacagc

SEQ ID NO: 456902 - RNA, 19 nt, Artificial Sequence
  Description of Artificial Sequence: Synthetic oligonucleotide
guaguugacucgcacauug

SEQ ID NO: 456903 - RNA, 19 nt, Artificial Sequence
  Description of Artificial Sequence: Synthetic oligonucleotide
cacaguaguuuaaacagac

SEQ ID NO: 456904 - RNA, 19 nt, Artificial Sequence
  Description of Artificial Sequence: Synthetic oligonucleotide
guacauucaaaucauagua

SEQ ID NO: 456905 - RNA, 19 nt, Artificial Sequence
  Description of Artificial Sequence: Synthetic oligonucleotide
acccauacuaaggugagac

SEQ ID NO: 456906 - RNA, 19 nt, Artificial Sequence
  Description of Artificial Sequence: Synthetic oligonucleotide
auaacccuuugcuacaucu

SEQ ID NO: 456907 - RNA, 19 nt, Artificial Sequence
  Description of Artificial Sequence: Synthetic oligonucleotide
acagcggcaagacaugcgg

SEQ ID NO: 456908 - RNA, 19 nt, Artificial Sequence
  Description of Artificial Sequence: Synthetic oligonucleotide
aacacuuaaccaucuacuu

SEQ ID NO: 456909 - RNA, 19 nt, Artificial Sequence
  Description of Artificial Sequence: Synthetic oligonucleotide
cacuuaaccaucuacuuca

SEQ ID NO: 456910 - RNA, 19 nt, Artificial Sequence
  Description of Artificial Sequence: Synthetic oligonucleotide
ugggguggauaauaauucg

SEQ ID NO: 456911 - RNA, 19 nt, Artificial Sequence
  Description of Artificial Sequence: Synthetic oligonucleotide
uggauaauaauucggucuu

SEQ ID NO: 456912 - RNA, 19 nt, Artificial Sequence
  Description of Artificial Sequence: Synthetic oligonucleotide
uucauaucauccuggcuug

SEQ ID NO: 456913 - RNA, 19 nt, Artificial Sequence
  Description of Artificial Sequence: Synthetic oligonucleotide
agcaucgcuggucaagugg

SEQ ID NO: 456914 - RNA, 19 nt, Artificial Sequence
  Description of Artificial Sequence: Synthetic oligonucleotide
aaauuggccugcugagauc

SEQ ID NO: 456915 - RNA, 19 nt, Artificial Sequence
  Description of Artificial Sequence: Synthetic oligonucleotide
uguacagaauggucugggg

SEQ ID NO: 456916 - RNA, 19 nt, Artificial Sequence
  Description of Artificial Sequence: Synthetic oligonucleotide
aauaguuaagguacuugga

SEQ ID NO: 456917 - RNA, 19 nt, Artificial Sequence
  Description of Artificial Sequence: Synthetic oligonucleotide
aguaguuuaaacagacuug

SEQ ID NO: 456918 - RNA, 19 nt, Artificial Sequence
  Description of Artificial Sequence: Synthetic oligonucleotide
ggcagaaauggucauagcc

SEQ ID NO: 456919 - RNA, 19 nt, Artificial Sequence
  Description of Artificial Sequence: Synthetic oligonucleotide
ucuuuuguacaaagugaga

SEQ ID NO: 456920 - RNA, 19 nt, Artificial Sequence
  Description of Artificial Sequence: Synthetic oligonucleotide
caagugagcaucagcacac

SEQ ID NO: 456921 - RNA, 19 nt, Artificial Sequence
  Description of Artificial Sequence: Synthetic oligonucleotide
uaucauccuggcuugcaag

SEQ ID NO: 456922 - RNA, 19 nt, Artificial Sequence
  Description of Artificial Sequence: Synthetic oligonucleotide
agaccugaaggaucagugg

SEQ ID NO: 456923 - RNA, 19 nt, Artificial Sequence
  Description of Artificial Sequence: Synthetic oligonucleotide
guccuuugagcucauguag

SEQ ID NO: 456924 - RNA, 19 nt, Artificial Sequence
  Description of Artificial Sequence: Synthetic oligonucleotide
aguguaacgaguucuugau

SEQ ID NO: 456925 - RNA, 19 nt, Artificial Sequence
  Description of Artificial Sequence: Synthetic oligonucleotide
aaauacgcuaauaguuaag

SEQ ID NO: 456926 - RNA, 19 nt, Artificial Sequence
  Description of Artificial Sequence: Synthetic oligonucleotide
ugacagucagucagcaccc

SEQ ID NO: 456927 - RNA, 19 nt, Artificial Sequence
  Description of Artificial Sequence: Synthetic oligonucleotide
cuaauaguuaagguacuug

SEQ ID NO: 456928 - RNA, 19 nt, Artificial Sequence
  Description of Artificial Sequence: Synthetic oligonucleotide
uggaacauuccuggcaagg

SEQ ID NO: 456929 - RNA, 19 nt, Artificial Sequence
  Description of Artificial Sequence: Synthetic oligonucleotide
acacgcuguacuuucucgg

SEQ ID NO: 456930 - RNA, 19 nt, Artificial Sequence
  Description of Artificial Sequence: Synthetic oligonucleotide
uugacuuucugaucauaga

SEQ ID NO: 456931 - RNA, 19 nt, Artificial Sequence
  Description of Artificial Sequence: Synthetic oligonucleotide
agucguaguugacucgcac

SEQ ID NO: 456932 - RNA, 19 nt, Artificial Sequence
  Description of Artificial Sequence: Synthetic oligonucleotide
ucguaguugacucgcacau

SEQ ID NO: 456933 - RNA, 19 nt, Artificial Sequence
  Description of Artificial Sequence: Synthetic oligonucleotide
cauugauagaaacucgaca

SEQ ID NO: 456934 - RNA, 19 nt, Artificial Sequence
  Description of Artificial Sequence: Synthetic oligonucleotide
uuaggcaacuucauaucau

SEQ ID NO: 456935 - RNA, 19 nt, Artificial Sequence
  Description of Artificial Sequence: Synthetic oligonucleotide
uugacucgcacauugggua

SEQ ID NO: 456936 - RNA, 19 nt, Artificial Sequence
  Description of Artificial Sequence: Synthetic oligonucleotide
cugggguggauaauaauuc

SEQ ID NO: 456937 - RNA, 19 nt, Artificial Sequence
  Description of Artificial Sequence: Synthetic oligonucleotide
cagaccugaaggaucagug

SEQ ID NO: 456938 - RNA, 19 nt, Artificial Sequence
  Description of Artificial Sequence: Synthetic oligonucleotide
ugguugggaaggaacacgu

SEQ ID NO: 456939 - RNA, 19 nt, Artificial Sequence
  Description of Artificial Sequence: Synthetic oligonucleotide
aguugggucgguccagagg

SEQ ID NO: 456940 - RNA, 19 nt, Artificial Sequence
  Description of Artificial Sequence: Synthetic oligonucleotide
cuuucgggugauugcauag

SEQ ID NO: 456941 - RNA, 19 nt, Artificial Sequence
  Description of Artificial Sequence: Synthetic oligonucleotide
gaagccaagacuccaccca

SEQ ID NO: 456942 - RNA, 19 nt, Artificial Sequence
  Description of Artificial Sequence: Synthetic oligonucleotide
ugcgguugcagccuucaga

SEQ ID NO: 456943 - RNA, 19 nt, Artificial Sequence
  Description of Artificial Sequence: Synthetic oligonucleotide
acuccacccauacuaaggu

SEQ ID NO: 456944 - RNA, 19 nt, Artificial Sequence
  Description of Artificial Sequence: Synthetic oligonucleotide
gaugcguuugaauguguuc

SEQ ID NO: 456945 - RNA, 19 nt, Artificial Sequence
  Description of Artificial Sequence: Synthetic oligonucleotide
acuccccauagcaacaucg

SEQ ID NO: 456946 - RNA, 19 nt, Artificial Sequence
  Description of Artificial Sequence: Synthetic oligonucleotide
aggaccuauguugaugggg

SEQ ID NO: 456947 - RNA, 19 nt, Artificial Sequence
  Description of Artificial Sequence: Synthetic oligonucleotide
caagacuccacccauacua

SEQ ID NO: 456948 - RNA, 19 nt, Artificial Sequence
  Description of Artificial Sequence: Synthetic oligonucleotide
cugaugagacauucuuugc

SEQ ID NO: 456949 - RNA, 19 nt, Artificial Sequence
  Description of Artificial Sequence: Synthetic oligonucleotide
cagacuaguagcacaguuc

SEQ ID NO: 456950 - RNA, 19 nt, Artificial Sequence
  Description of Artificial Sequence: Synthetic oligonucleotide
auacuaaggugagacuggg

SEQ ID NO: 456951 - RNA, 19 nt, Artificial Sequence
  Description of Artificial Sequence: Synthetic oligonucleotide
acuaauaguguaacgaguu

SEQ ID NO: 456952 - RNA, 19 nt, Artificial Sequence
  Description of Artificial Sequence: Synthetic oligonucleotide
accgggaguggcuaggcag

SEQ ID NO: 456953 - RNA, 19 nt, Artificial Sequence
  Description of Artificial Sequence: Synthetic oligonucleotide
cacacgcuguacuuucucg

SEQ ID NO: 456954 - RNA, 19 nt, Artificial Sequence
  Description of Artificial Sequence: Synthetic oligonucleotide
uggcuugcaagcaggcugc

SEQ ID NO: 456955 - RNA, 19 nt, Artificial Sequence
  Description of Artificial Sequence: Synthetic oligonucleotide
cuaauaguguaacgaguuc

SEQ ID NO: 456956 - RNA, 19 nt, Artificial Sequence
  Description of Artificial Sequence: Synthetic oligonucleotide
aaacucgacagagguagca

SEQ ID NO: 456957 - RNA, 19 nt, Artificial Sequence
  Description of Artificial Sequence: Synthetic oligonucleotide
aggagagcgaggaugcugg

SEQ ID NO: 456958 - RNA, 19 nt, Artificial Sequence
  Description of Artificial Sequence: Synthetic oligonucleotide
uaacauuggcccagugaca

SEQ ID NO: 456959 - RNA, 19 nt, Artificial Sequence
  Description of Artificial Sequence: Synthetic oligonucleotide
uuggaggauccugucaugc

SEQ ID NO: 456960 - RNA, 19 nt, Artificial Sequence
  Description of Artificial Sequence: Synthetic oligonucleotide
cacaguucaagugacccac

SEQ ID NO: 456961 - RNA, 19 nt, Artificial Sequence
  Description of Artificial Sequence: Synthetic oligonucleotide
uaguuuaaacagacuuggu

SEQ ID NO: 456962 - RNA, 19 nt, Artificial Sequence
  Description of Artificial Sequence: Synthetic oligonucleotide
acaaauacgcuaauaguua

SEQ ID NO: 456963 - RNA, 19 nt, Artificial Sequence
  Description of Artificial Sequence: Synthetic oligonucleotide
agcuacacgaaggggcacc

SEQ ID NO: 456964 - RNA, 19 nt, Artificial Sequence
  Description of Artificial Sequence: Synthetic oligonucleotide
uggaaacuccccauagcaa

SEQ ID NO: 456965 - RNA, 19 nt, Artificial Sequence
  Description of Artificial Sequence: Synthetic oligonucleotide
auaauucggucuucucucu

SEQ ID NO: 456966 - RNA, 19 nt, Artificial Sequence
  Description of Artificial Sequence: Synthetic oligonucleotide
aaggggcuaccguaggaga

SEQ ID NO: 456967 - RNA, 19 nt, Artificial Sequence
  Description of Artificial Sequence: Synthetic oligonucleotide
gcuaagugcaaauacuaga

SEQ ID NO: 456968 - RNA, 19 nt, Artificial Sequence
  Description of Artificial Sequence: Synthetic oligonucleotide
uacuagauucucuccaguu

SEQ ID NO: 456969 - RNA, 19 nt, Artificial Sequence
  Description of Artificial Sequence: Synthetic oligonucleotide
ugggugucagaagcgaugc

SEQ ID NO: 456970 - RNA, 19 nt, Artificial Sequence
  Description of Artificial Sequence: Synthetic oligonucleotide
uaccguaggagagcgagga

SEQ ID NO: 456971 - RNA, 19 nt, Artificial Sequence
  Description of Artificial Sequence: Synthetic oligonucleotide
cacaaauacgcuaauaguu

SEQ ID NO: 456972 - RNA, 19 nt, Artificial Sequence
  Description of Artificial Sequence: Synthetic oligonucleotide
aggggaagcuacacgaagg

SEQ ID NO: 456973 - RNA, 19 nt, Artificial Sequence
  Description of Artificial Sequence: Synthetic oligonucleotide
uguacuuucucggcuggcu

SEQ ID NO: 456974 - RNA, 19 nt, Artificial Sequence
  Description of Artificial Sequence: Synthetic oligonucleotide
ggcaaauacaccgggagug

SEQ ID NO: 456975 - RNA, 19 nt, Artificial Sequence
  Description of Artificial Sequence: Synthetic oligonucleotide
aggacaccggcccaccauc

SEQ ID NO: 456976 - RNA, 19 nt, Artificial Sequence
  Description of Artificial Sequence: Synthetic oligonucleotide
agguuagcgugccagcugu

SEQ ID NO: 456977 - RNA, 19 nt, Artificial Sequence
  Description of Artificial Sequence: Synthetic oligonucleotide
cuaggcaguuucucagacc

SEQ ID NO: 456978 - RNA, 19 nt, Artificial Sequence
  Description of Artificial Sequence: Synthetic oligonucleotide
aaauacaccgggaguggcu

SEQ ID NO: 456979 - RNA, 19 nt, Artificial Sequence
  Description of Artificial Sequence: Synthetic oligonucleotide
ugcuacaucuggaaaucuu

SEQ ID NO: 456980 - RNA, 19 nt, Artificial Sequence
  Description of Artificial Sequence: Synthetic oligonucleotide
guacguagggugcuggcac

SEQ ID NO: 456981 - RNA, 19 nt, Artificial Sequence
  Description of Artificial Sequence: Synthetic oligonucleotide
ucgggugauugcauagugu

SEQ ID NO: 456982 - RNA, 19 nt, Artificial Sequence
  Description of Artificial Sequence: Synthetic oligonucleotide
aacgaguucuugaucuacu

SEQ ID NO: 456983 - RNA, 19 nt, Artificial Sequence
  Description of Artificial Sequence: Synthetic oligonucleotide
uuugggugucagaagcgau

SEQ ID NO: 456984 - RNA, 19 nt, Artificial Sequence
  Description of Artificial Sequence: Synthetic oligonucleotide
aguggcuaggcaguuucuc

SEQ ID NO: 456985 - RNA, 19 nt, Artificial Sequence
  Description of Artificial Sequence: Synthetic oligonucleotide
agugagcaucagcacacug

SEQ ID NO: 456986 - RNA, 19 nt, Artificial Sequence
  Description of Artificial Sequence: Synthetic oligonucleotide
cacgcuguacuuucucggc

SEQ ID NO: 456987 - RNA, 19 nt, Artificial Sequence
  Description of Artificial Sequence: Synthetic oligonucleotide
caaauacgcuaauaguuaa

SEQ ID NO: 456988 - RNA, 19 nt, Artificial Sequence
  Description of Artificial Sequence: Synthetic oligonucleotide
gaagcuacacgaaggggca

SEQ ID NO: 456989 - RNA, 19 nt, Artificial Sequence
  Description of Artificial Sequence: Synthetic oligonucleotide
auaucauccuggcuugcaa

SEQ ID NO: 456990 - RNA, 19 nt, Artificial Sequence
  Description of Artificial Sequence: Synthetic oligonucleotide
gagucaguuuggaauaguc

SEQ ID NO: 456991 - RNA, 19 nt, Artificial Sequence
  Description of Artificial Sequence: Synthetic oligonucleotide
acauaugauacagucuuuu

SEQ ID NO: 456992 - RNA, 19 nt, Artificial Sequence
  Description of Artificial Sequence: Synthetic oligonucleotide
agaagcgaugccguggcug

SEQ ID NO: 456993 - RNA, 19 nt, Artificial Sequence
  Description of Artificial Sequence: Synthetic oligonucleotide
uccguucauaguauuugua

SEQ ID NO: 456994 - RNA, 19 nt, Artificial Sequence
  Description of Artificial Sequence: Synthetic oligonucleotide
gagaggaccuuucggguga

SEQ ID NO: 456995 - RNA, 19 nt, Artificial Sequence
  Description of Artificial Sequence: Synthetic oligonucleotide
aggcaaauacaccgggagu

SEQ ID NO: 456996 - RNA, 19 nt, Artificial Sequence
  Description of Artificial Sequence: Synthetic oligonucleotide
aucgacacucaaucagcug

SEQ ID NO: 456997 - RNA, 19 nt, Artificial Sequence
  Description of Artificial Sequence: Synthetic oligonucleotide
aggaccuuucgggugauug

SEQ ID NO: 456998 - RNA, 19 nt, Artificial Sequence
  Description of Artificial Sequence: Synthetic oligonucleotide
gagguuagcgugccagcug

SEQ ID NO: 456999 - RNA, 19 nt, Artificial Sequence
  Description of Artificial Sequence: Synthetic oligonucleotide
uuccacacgcuguacuuuc

SEQ ID NO: 457000 - RNA, 19 nt, Artificial Sequence
  Description of Artificial Sequence: Synthetic oligonucleotide
accuauguugauggggaag

SEQ ID NO: 457001 - RNA, 19 nt, Artificial Sequence
  Description of Artificial Sequence: Synthetic oligonucleotide
ucgcuggucaaguggaguc

SEQ ID NO: 457002 - RNA, 19 nt, Artificial Sequence
  Description of Artificial Sequence: Synthetic oligonucleotide
auaguguaacgaguucuug

SEQ ID NO: 457003 - RNA, 19 nt, Artificial Sequence
  Description of Artificial Sequence: Synthetic oligonucleotide
ugcccuaacauuggcccag

SEQ ID NO: 457004 - RNA, 19 nt, Artificial Sequence
  Description of Artificial Sequence: Synthetic oligonucleotide
uggggaaguuguugaacac

SEQ ID NO: 457005 - RNA, 19 nt, Artificial Sequence
  Description of Artificial Sequence: Synthetic oligonucleotide
ccauacuaaggugagacug

SEQ ID NO: 457006 - RNA, 19 nt, Artificial Sequence
  Description of Artificial Sequence: Synthetic oligonucleotide
cacagcggcaagacaugcg

SEQ ID NO: 457007 - RNA, 19 nt, Artificial Sequence
  Description of Artificial Sequence: Synthetic oligonucleotide
ucaauucgagcagcaguca

SEQ ID NO: 457008 - RNA, 19 nt, Artificial Sequence
  Description of Artificial Sequence: Synthetic oligonucleotide
gguggauaauaauucgguc

SEQ ID NO: 457009 - RNA, 19 nt, Artificial Sequence
  Description of Artificial Sequence: Synthetic oligonucleotide
agaaggacaccggcccacc

SEQ ID NO: 457010 - RNA, 19 nt, Artificial Sequence
  Description of Artificial Sequence: Synthetic oligonucleotide
caucaagagggaagccaag

SEQ ID NO: 457011 - RNA, 19 nt, Artificial Sequence
  Description of Artificial Sequence: Synthetic oligonucleotide
ucagaccugaaggaucagu

SEQ ID NO: 457012 - RNA, 19 nt, Artificial Sequence
  Description of Artificial Sequence: Synthetic oligonucleotide
uguccccacauguucucca

SEQ ID NO: 457013 - RNA, 19 nt, Artificial Sequence
  Description of Artificial Sequence: Synthetic oligonucleotide
gcuacaucuggaaaucuug

SEQ ID NO: 457014 - RNA, 19 nt, Artificial Sequence
  Description of Artificial Sequence: Synthetic oligonucleotide
aagcaucgcuggucaagug

SEQ ID NO: 457015 - RNA, 19 nt, Artificial Sequence
  Description of Artificial Sequence: Synthetic oligonucleotide
gggguggauaauaauucgg

SEQ ID NO: 457016 - RNA, 19 nt, Artificial Sequence
  Description of Artificial Sequence: Synthetic oligonucleotide
aagugcaugggcagguuau

SEQ ID NO: 457017 - RNA, 19 nt, Artificial Sequence
  Description of Artificial Sequence: Synthetic oligonucleotide
ggggaaguuguugaacacg

SEQ ID NO: 457018 - RNA, 19 nt, Artificial Sequence
  Description of Artificial Sequence: Synthetic oligonucleotide
cauuggcccagugacaguc

SEQ ID NO: 457019 - RNA, 19 nt, Artificial Sequence
  Description of Artificial Sequence: Synthetic oligonucleotide
aagcuacacgaaggggcac

SEQ ID NO: 457020 - RNA, 19 nt, Artificial Sequence
  Description of Artificial Sequence: Synthetic oligonucleotide
caaggggcuaccguaggag

SEQ ID NO: 457021 - RNA, 19 nt, Artificial Sequence
  Description of Artificial Sequence: Synthetic oligonucleotide
ugcguuugaauguguucuc

SEQ ID NO: 457022 - RNA, 19 nt, Artificial Sequence
  Description of Artificial Sequence: Synthetic oligonucleotide
uacuaaggugagacugggu

SEQ ID NO: 457023 - RNA, 19 nt, Artificial Sequence
  Description of Artificial Sequence: Synthetic oligonucleotide
uuuggauaaucuggguuuu

SEQ ID NO: 457024 - RNA, 19 nt, Artificial Sequence
  Description of Artificial Sequence: Synthetic oligonucleotide
gcuaccguaggagagcgag

SEQ ID NO: 457025 - RNA, 19 nt, Artificial Sequence
  Description of Artificial Sequence: Synthetic oligonucleotide
uuucgggugauugcauagu

SEQ ID NO: 457026 - RNA, 19 nt, Artificial Sequence
  Description of Artificial Sequence: Synthetic oligonucleotide
cucauguagggcccacuug

SEQ ID NO: 457027 - RNA, 19 nt, Artificial Sequence
  Description of Artificial Sequence: Synthetic oligonucleotide
caccggacaagcucaucag

SEQ ID NO: 457028 - RNA, 19 nt, Artificial Sequence
  Description of Artificial Sequence: Synthetic oligonucleotide
ugggugcacaaaggcauag

SEQ ID NO: 457029 - RNA, 19 nt, Artificial Sequence
  Description of Artificial Sequence: Synthetic oligonucleotide
agcuucuuguccccacaug

SEQ ID NO: 457030 - RNA, 19 nt, Artificial Sequence
  Description of Artificial Sequence: Synthetic oligonucleotide
auagcaacaucgacacuca

SEQ ID NO: 457031 - RNA, 19 nt, Artificial Sequence
  Description of Artificial Sequence: Synthetic oligonucleotide
uacguagggugcuggcaca

SEQ ID NO: 457032 - RNA, 19 nt, Artificial Sequence
  Description of Artificial Sequence: Synthetic oligonucleotide
uuguugaacacgggccgca

SEQ ID NO: 457033 - RNA, 19 nt, Artificial Sequence
  Description of Artificial Sequence: Synthetic oligonucleotide
acagaaggacaccggccca

SEQ ID NO: 457034 - RNA, 19 nt, Artificial Sequence
  Description of Artificial Sequence: Synthetic oligonucleotide
agaccggguccaguguggc

SEQ ID NO: 457035 - RNA, 19 nt, Artificial Sequence
  Description of Artificial Sequence: Synthetic oligonucleotide
acgcuguacuuucucggcu

SEQ ID NO: 457036 - RNA, 19 nt, Artificial Sequence
  Description of Artificial Sequence: Synthetic oligonucleotide
guuguugaacacgggccgc

SEQ ID NO: 457037 - RNA, 19 nt, Artificial Sequence
  Description of Artificial Sequence: Synthetic oligonucleotide
agacuugguucucuauuuu

SEQ ID NO: 457038 - RNA, 19 nt, Artificial Sequence
  Description of Artificial Sequence: Synthetic oligonucleotide
caaaggguaucagaccuga

SEQ ID NO: 457039 - RNA, 19 nt, Artificial Sequence
  Description of Artificial Sequence: Synthetic oligonucleotide
ugggucgguccagagggag

SEQ ID NO: 457040 - RNA, 19 nt, Artificial Sequence
  Description of Artificial Sequence: Synthetic oligonucleotide
ggaguggcuaggcaguuuc

SEQ ID NO: 457041 - RNA, 19 nt, Artificial Sequence
  Description of Artificial Sequence: Synthetic oligonucleotide
cuccacccauacuaaggug

SEQ ID NO: 457042 - RNA, 19 nt, Artificial Sequence
  Description of Artificial Sequence: Synthetic oligonucleotide
guguaacgaguucuugauc

SEQ ID NO: 457043 - RNA, 19 nt, Artificial Sequence
  Description of Artificial Sequence: Synthetic oligonucleotide
caacaucgacacucaauca

SEQ ID NO: 457044 - RNA, 19 nt, Artificial Sequence
  Description of Artificial Sequence: Synthetic oligonucleotide
uccacacgcuguacuuucu

SEQ ID NO: 457045 - RNA, 19 nt, Artificial Sequence
  Description of Artificial Sequence: Synthetic oligonucleotide
ucauaucauccuggcuugc

SEQ ID NO: 457046 - RNA, 19 nt, Artificial Sequence
  Description of Artificial Sequence: Synthetic oligonucleotide
caggaccuauguugauggg

SEQ ID NO: 457047 - RNA, 19 nt, Artificial Sequence
  Description of Artificial Sequence: Synthetic oligonucleotide
ucaguugggucgguccaga

SEQ ID NO: 457048 - RNA, 19 nt, Artificial Sequence
  Description of Artificial Sequence: Synthetic oligonucleotide
caaauuggccugcugagau

SEQ ID NO: 457049 - RNA, 19 nt, Artificial Sequence
  Description of Artificial Sequence: Synthetic oligonucleotide
agcgugccagcugucuugg

SEQ ID NO: 457050 - RNA, 19 nt, Artificial Sequence
  Description of Artificial Sequence: Synthetic oligonucleotide
ggaccuauguugaugggga

SEQ ID NO: 457051 - RNA, 19 nt, Artificial Sequence
  Description of Artificial Sequence: Synthetic oligonucleotide
gagcugcccuaacauuggc

SEQ ID NO: 457052 - RNA, 19 nt, Artificial Sequence
  Description of Artificial Sequence: Synthetic oligonucleotide
aggggcuaccguaggagag

SEQ ID NO: 457053 - RNA, 19 nt, Artificial Sequence
  Description of Artificial Sequence: Synthetic oligonucleotide
caucgcuggucaaguggag

SEQ ID NO: 457054 - RNA, 19 nt, Artificial Sequence
  Description of Artificial Sequence: Synthetic oligonucleotide
uucagacuaguagcacagu

SEQ ID NO: 457055 - RNA, 19 nt, Artificial Sequence
  Description of Artificial Sequence: Synthetic oligonucleotide
gcaccggacaagcucauca

SEQ ID NO: 457056 - RNA, 19 nt, Artificial Sequence
  Description of Artificial Sequence: Synthetic oligonucleotide
gcuaggcaguuucucagac

SEQ ID NO: 457057 - RNA, 19 nt, Artificial Sequence
  Description of Artificial Sequence: Synthetic oligonucleotide
agacaugcgguugcagccu

SEQ ID NO: 457058 - RNA, 19 nt, Artificial Sequence
  Description of Artificial Sequence: Synthetic oligonucleotide
gaagcaucgcuggucaagu

SEQ ID NO: 457059 - RNA, 19 nt, Artificial Sequence
  Description of Artificial Sequence: Synthetic oligonucleotide
ugauugcauaguguccuuu

SEQ ID NO: 457060 - RNA, 19 nt, Artificial Sequence
  Description of Artificial Sequence: Synthetic oligonucleotide
ggugauugcauaguguccu

SEQ ID NO: 457061 - RNA, 19 nt, Artificial Sequence
  Description of Artificial Sequence: Synthetic oligonucleotide
uguugaacacgggccgcac

SEQ ID NO: 457062 - RNA, 19 nt, Artificial Sequence
  Description of Artificial Sequence: Synthetic oligonucleotide
acgaaggggcaccggacaa

SEQ ID NO: 457063 - RNA, 19 nt, Artificial Sequence
  Description of Artificial Sequence: Synthetic oligonucleotide
gccaagacuccacccauac

SEQ ID NO: 457064 - RNA, 19 nt, Artificial Sequence
  Description of Artificial Sequence: Synthetic oligonucleotide
cuggcaaggggcuaccgua

SEQ ID NO: 457065 - RNA, 19 nt, Artificial Sequence
  Description of Artificial Sequence: Synthetic oligonucleotide
gcuuugggugucagaagcg

SEQ ID NO: 457066 - RNA, 19 nt, Artificial Sequence
  Description of Artificial Sequence: Synthetic oligonucleotide
aggugggugcacaaaggca

SEQ ID NO: 457067 - RNA, 19 nt, Artificial Sequence
  Description of Artificial Sequence: Synthetic oligonucleotide
agagcucccgaggcaccgc

SEQ ID NO: 457068 - RNA, 19 nt, Artificial Sequence
  Description of Artificial Sequence: Synthetic oligonucleotide
agcacccaaaggguaucag

SEQ ID NO: 457069 - RNA, 19 nt, Artificial Sequence
  Description of Artificial Sequence: Synthetic oligonucleotide
gcuucuuguccccacaugu

SEQ ID NO: 457070 - RNA, 19 nt, Artificial Sequence
  Description of Artificial Sequence: Synthetic oligonucleotide
ugaucuacuugagcagcuu

SEQ ID NO: 457071 - RNA, 19 nt, Artificial Sequence
  Description of Artificial Sequence: Synthetic oligonucleotide
cauaacccuuugcuacauc

SEQ ID NO: 457072 - RNA, 19 nt, Artificial Sequence
  Description of Artificial Sequence: Synthetic oligonucleotide
guaacgaguucuugaucua

SEQ ID NO: 457073 - RNA, 19 nt, Artificial Sequence
  Description of Artificial Sequence: Synthetic oligonucleotide
aagcgaugccguggcuggg

SEQ ID NO: 457074 - RNA, 19 nt, Artificial Sequence
  Description of Artificial Sequence: Synthetic oligonucleotide
cauaucauccuggcuugca

SEQ ID NO: 457075 - RNA, 19 nt, Artificial Sequence
  Description of Artificial Sequence: Synthetic oligonucleotide
ggucauagccauugauaga

SEQ ID NO: 457076 - RNA, 19 nt, Artificial Sequence
  Description of Artificial Sequence: Synthetic oligonucleotide
ccagagguuagcgugccag

SEQ ID NO: 457077 - RNA, 19 nt, Artificial Sequence
  Description of Artificial Sequence: Synthetic oligonucleotide
aagucguaguugacucgca

SEQ ID NO: 457078 - RNA, 19 nt, Artificial Sequence
  Description of Artificial Sequence: Synthetic oligonucleotide
gcauguggcccaucuuucc

SEQ ID NO: 457079 - RNA, 19 nt, Artificial Sequence
  Description of Artificial Sequence: Synthetic oligonucleotide
cgggugauugcauaguguc

SEQ ID NO: 457080 - RNA, 19 nt, Artificial Sequence
  Description of Artificial Sequence: Synthetic oligonucleotide
gugagcaucagcacacugu

SEQ ID NO: 457081 - RNA, 19 nt, Artificial Sequence
  Description of Artificial Sequence: Synthetic oligonucleotide
uugggucgguccagaggga

SEQ ID NO: 457082 - RNA, 19 nt, Artificial Sequence
  Description of Artificial Sequence: Synthetic oligonucleotide
gaaggacaccggcccacca

SEQ ID NO: 457083 - RNA, 19 nt, Artificial Sequence
  Description of Artificial Sequence: Synthetic oligonucleotide
ccuaacauuggcccaguga

SEQ ID NO: 457084 - RNA, 19 nt, Artificial Sequence
  Description of Artificial Sequence: Synthetic oligonucleotide
aguggaccuugcaaaggga

SEQ ID NO: 457085 - RNA, 19 nt, Artificial Sequence
  Description of Artificial Sequence: Synthetic oligonucleotide
guugacucgcacauugggu

SEQ ID NO: 457086 - RNA, 19 nt, Artificial Sequence
  Description of Artificial Sequence: Synthetic oligonucleotide
guggaccuugcaaagggaa

SEQ ID NO: 457087 - RNA, 19 nt, Artificial Sequence
  Description of Artificial Sequence: Synthetic oligonucleotide
ucgacagagguagcacauc

SEQ ID NO: 457088 - RNA, 19 nt, Artificial Sequence
  Description of Artificial Sequence: Synthetic oligonucleotide
ccacccauacuaaggugag

SEQ ID NO: 457089 - RNA, 19 nt, Artificial Sequence
  Description of Artificial Sequence: Synthetic oligonucleotide
gggugauugcauagugucc

SEQ ID NO: 457090 - RNA, 19 nt, Artificial Sequence
  Description of Artificial Sequence: Synthetic oligonucleotide
gaccuauguugauggggaa

SEQ ID NO: 457091 - RNA, 19 nt, Artificial Sequence
  Description of Artificial Sequence: Synthetic oligonucleotide
cuagugggacaggccgugg

SEQ ID NO: 457092 - RNA, 19 nt, Artificial Sequence
  Description of Artificial Sequence: Synthetic oligonucleotide
cauaggcugcagugacuuc

SEQ ID NO: 457093 - RNA, 19 nt, Artificial Sequence
  Description of Artificial Sequence: Synthetic oligonucleotide
acguagggugcuggcacag

SEQ ID NO: 457094 - RNA, 19 nt, Artificial Sequence
  Description of Artificial Sequence: Synthetic oligonucleotide
gcacccaaaggguaucaga

SEQ ID NO: 457095 - RNA, 19 nt, Artificial Sequence
  Description of Artificial Sequence: Synthetic oligonucleotide
cuguacuuucucggcuggc

SEQ ID NO: 457096 - RNA, 19 nt, Artificial Sequence
  Description of Artificial Sequence: Synthetic oligonucleotide
cagggaacacaaauacgcu

SEQ ID NO: 457097 - RNA, 19 nt, Artificial Sequence
  Description of Artificial Sequence: Synthetic oligonucleotide
acgugcagcugccuuccau

SEQ ID NO: 457098 - RNA, 19 nt, Artificial Sequence
  Description of Artificial Sequence: Synthetic oligonucleotide
gcuacacgaaggggcaccg

SEQ ID NO: 457099 - RNA, 19 nt, Artificial Sequence
  Description of Artificial Sequence: Synthetic oligonucleotide
ggaaaaggugggugcacaa

SEQ ID NO: 457100 - RNA, 19 nt, Artificial Sequence
  Description of Artificial Sequence: Synthetic oligonucleotide
cuacacgaaggggcaccgg

SEQ ID NO: 457101 - RNA, 19 nt, Artificial Sequence
  Description of Artificial Sequence: Synthetic oligonucleotide
ggacaagcucaucagcaua

SEQ ID NO: 457102 - RNA, 19 nt, Artificial Sequence
  Description of Artificial Sequence: Synthetic oligonucleotide
ggauaauaauucggucuuc

SEQ ID NO: 457103 - RNA, 19 nt, Artificial Sequence
  Description of Artificial Sequence: Synthetic oligonucleotide
gcacaguucaagugaccca

SEQ ID NO: 457104 - RNA, 19 nt, Artificial Sequence
  Description of Artificial Sequence: Synthetic oligonucleotide
cucgcacauuggguagagg

SEQ ID NO: 457105 - RNA, 19 nt, Artificial Sequence
  Description of Artificial Sequence: Synthetic oligonucleotide
gccgaugcguuugaaugug

SEQ ID NO: 457106 - RNA, 19 nt, Artificial Sequence
  Description of Artificial Sequence: Synthetic oligonucleotide
ggguggauaauaauucggu

SEQ ID NO: 457107 - RNA, 19 nt, Artificial Sequence
  Description of Artificial Sequence: Synthetic oligonucleotide
aucagaccugaaggaucag

SEQ ID NO: 457108 - RNA, 19 nt, Artificial Sequence
  Description of Artificial Sequence: Synthetic oligonucleotide
acaguucaagugacccaca

SEQ ID NO: 457109 - RNA, 19 nt, Artificial Sequence
  Description of Artificial Sequence: Synthetic oligonucleotide
agcgaggaugcuggcagaa

SEQ ID NO: 457110 - RNA, 19 nt, Artificial Sequence
  Description of Artificial Sequence: Synthetic oligonucleotide
cugcccuaacauuggccca

SEQ ID NO: 457111 - RNA, 19 nt, Artificial Sequence
  Description of Artificial Sequence: Synthetic oligonucleotide
ggucgguccagagggagca

SEQ ID NO: 457112 - RNA, 19 nt, Artificial Sequence
  Description of Artificial Sequence: Synthetic oligonucleotide
ggguacguagggugcuggc

SEQ ID NO: 457113 - RNA, 19 nt, Artificial Sequence
  Description of Artificial Sequence: Synthetic oligonucleotide
gggguacguagggugcugg

SEQ ID NO: 457114 - RNA, 19 nt, Artificial Sequence
  Description of Artificial Sequence: Synthetic oligonucleotide
accguaggagagcgaggau

SEQ ID NO: 457115 - RNA, 19 nt, Artificial Sequence
  Description of Artificial Sequence: Synthetic oligonucleotide
gguaucagaccugaaggau

SEQ ID NO: 457116 - RNA, 19 nt, Artificial Sequence
  Description of Artificial Sequence: Synthetic oligonucleotide
gcgguugcagccuucagau

SEQ ID NO: 457117 - RNA, 19 nt, Artificial Sequence
  Description of Artificial Sequence: Synthetic oligonucleotide
guuagcgugccagcugucu

SEQ ID NO: 457118 - RNA, 19 nt, Artificial Sequence
  Description of Artificial Sequence: Synthetic oligonucleotide
agcucauguagggcccacu

SEQ ID NO: 457119 - RNA, 19 nt, Artificial Sequence
  Description of Artificial Sequence: Synthetic oligonucleotide
guuaagguacuuggaggau

SEQ ID NO: 457120 - RNA, 19 nt, Artificial Sequence
  Description of Artificial Sequence: Synthetic oligonucleotide
cacagggagcugcccuaac

SEQ ID NO: 457121 - RNA, 19 nt, Artificial Sequence
  Description of Artificial Sequence: Synthetic oligonucleotide
gggugucagaagcgaugcc

SEQ ID NO: 457122 - RNA, 19 nt, Artificial Sequence
  Description of Artificial Sequence: Synthetic oligonucleotide
gcugggguggauaauaauu

SEQ ID NO: 457123 - RNA, 19 nt, Artificial Sequence
  Description of Artificial Sequence: Synthetic oligonucleotide
ccuauguugauggggaagu

SEQ ID NO: 457124 - RNA, 19 nt, Artificial Sequence
  Description of Artificial Sequence: Synthetic oligonucleotide
accuuucgggugauugcau

SEQ ID NO: 457125 - RNA, 19 nt, Artificial Sequence
  Description of Artificial Sequence: Synthetic oligonucleotide
gugcaugggcagguuaugu

SEQ ID NO: 457126 - RNA, 19 nt, Artificial Sequence
  Description of Artificial Sequence: Synthetic oligonucleotide
cggcaagacaugcgguugc

SEQ ID NO: 457127 - RNA, 19 nt, Artificial Sequence
  Description of Artificial Sequence: Synthetic oligonucleotide
ccacacgcuguacuuucuc

SEQ ID NO: 457128 - RNA, 19 nt, Artificial Sequence
  Description of Artificial Sequence: Synthetic oligonucleotide
cugggccccagagguuagc

SEQ ID NO: 457129 - RNA, 19 nt, Artificial Sequence
  Description of Artificial Sequence: Synthetic oligonucleotide
cauggccaaagucguaguu

SEQ ID NO: 457130 - RNA, 19 nt, Artificial Sequence
  Description of Artificial Sequence: Synthetic oligonucleotide
gagcucccgaggcaccgcu

SEQ ID NO: 457131 - RNA, 19 nt, Artificial Sequence
  Description of Artificial Sequence: Synthetic oligonucleotide
ggugagacuggguccuccu

SEQ ID NO: 457132 - RNA, 19 nt, Artificial Sequence
  Description of Artificial Sequence: Synthetic oligonucleotide
cuuaaccaucuacuucauu

SEQ ID NO: 457133 - RNA, 19 nt, Artificial Sequence
  Description of Artificial Sequence: Synthetic oligonucleotide
ccggguccaguguggcugg

SEQ ID NO: 457134 - RNA, 19 nt, Artificial Sequence
  Description of Artificial Sequence: Synthetic oligonucleotide
ggcaagacaugcgguugca

SEQ ID NO: 457135 - RNA, 19 nt, Artificial Sequence
  Description of Artificial Sequence: Synthetic oligonucleotide
gacaugcgguugcagccuu

SEQ ID NO: 457136 - RNA, 19 nt, Artificial Sequence
  Description of Artificial Sequence: Synthetic oligonucleotide
gggucgguccagagggagc

SEQ ID NO: 457137 - RNA, 19 nt, Artificial Sequence
  Description of Artificial Sequence: Synthetic oligonucleotide
cacccacccgugaggccuc

SEQ ID NO: 457138 - RNA, 19 nt, Artificial Sequence
  Description of Artificial Sequence: Synthetic oligonucleotide
cacccauacuaaggugaga

SEQ ID NO: 457139 - RNA, 19 nt, Artificial Sequence
  Description of Artificial Sequence: Synthetic oligonucleotide
gcuaauaguuaagguacuu

SEQ ID NO: 457140 - RNA, 19 nt, Artificial Sequence
  Description of Artificial Sequence: Synthetic oligonucleotide
gugauugcauaguguccuu

SEQ ID NO: 457141 - RNA, 19 nt, Artificial Sequence
  Description of Artificial Sequence: Synthetic oligonucleotide
agccaagacuccacccaua

SEQ ID NO: 457142 - RNA, 19 nt, Artificial Sequence
  Description of Artificial Sequence: Synthetic oligonucleotide
gcuuccacacgcuguacuu

SEQ ID NO: 457143 - RNA, 19 nt, Artificial Sequence
  Description of Artificial Sequence: Synthetic oligonucleotide
ccuuucgggugauugcaua

SEQ ID NO: 457144 - RNA, 19 nt, Artificial Sequence
  Description of Artificial Sequence: Synthetic oligonucleotide
caccgggaguggcuaggca

SEQ ID NO: 457145 - RNA, 19 nt, Artificial Sequence
  Description of Artificial Sequence: Synthetic oligonucleotide
gaguggcuaggcaguuucu

SEQ ID NO: 457146 - RNA, 19 nt, Artificial Sequence
  Description of Artificial Sequence: Synthetic oligonucleotide
caaaggcauaggguggcau

SEQ ID NO: 457147 - RNA, 19 nt, Artificial Sequence
  Description of Artificial Sequence: Synthetic oligonucleotide
ggagucaguuuggaauagu

SEQ ID NO: 457148 - RNA, 19 nt, Artificial Sequence
  Description of Artificial Sequence: Synthetic oligonucleotide
gcguuugaauguguucucu

SEQ ID NO: 457149 - RNA, 19 nt, Artificial Sequence
  Description of Artificial Sequence: Synthetic oligonucleotide
ggacaccggcccaccauca

SEQ ID NO: 457150 - RNA, 19 nt, Artificial Sequence
  Description of Artificial Sequence: Synthetic oligonucleotide
ggcaccgcugugugcccca

SEQ ID NO: 457151 - RNA, 19 nt, Artificial Sequence
  Description of Artificial Sequence: Synthetic oligonucleotide
cccuaacauuggcccagug

SEQ ID NO: 457152 - RNA, 19 nt, Artificial Sequence
  Description of Artificial Sequence: Synthetic oligonucleotide
ccguggcagagcuuccaca

SEQ ID NO: 457153 - RNA, 19 nt, Artificial Sequence
  Description of Artificial Sequence: Synthetic oligonucleotide
acgggccgcacaggugcca

SEQ ID NO: 457154 - RNA, 19 nt, Artificial Sequence
  Description of Artificial Sequence: Synthetic oligonucleotide
ccccagagguuagcgugcc

SEQ ID NO: 457155 - RNA, 19 nt, Artificial Sequence
  Description of Artificial Sequence: Synthetic oligonucleotide
gcgugccagcugucuuggg

SEQ ID NO: 457156 - RNA, 19 nt, Artificial Sequence
  Description of Artificial Sequence: Synthetic oligonucleotide
cuauguugauggggaaguu

SEQ ID NO: 457157 - RNA, 19 nt, Artificial Sequence
  Description of Artificial Sequence: Synthetic oligonucleotide
cccauacuaaggugagacu

SEQ ID NO: 457158 - RNA, 19 nt, Artificial Sequence
  Description of Artificial Sequence: Synthetic oligonucleotide
gguuagcgugccagcuguc

SEQ ID NO: 457159 - RNA, 19 nt, Artificial Sequence
  Description of Artificial Sequence: Synthetic oligonucleotide
cgcuaauaguuaagguacu

SEQ ID NO: 457160 - RNA, 19 nt, Artificial Sequence
  Description of Artificial Sequence: Synthetic oligonucleotide
ggcaccggacaagcucauc

SEQ ID NO: 457161 - RNA, 19 nt, Artificial Sequence
  Description of Artificial Sequence: Synthetic oligonucleotide
acccacccgugaggccucu

SEQ ID NO: 457162 - RNA, 19 nt, Artificial Sequence
  Description of Artificial Sequence: Synthetic oligonucleotide
ggcuaccguaggagagcga

SEQ ID NO: 457163 - RNA, 19 nt, Artificial Sequence
  Description of Artificial Sequence: Synthetic oligonucleotide
cgaugcguuugaauguguu

SEQ ID NO: 457164 - RNA, 19 nt, Artificial Sequence
  Description of Artificial Sequence: Synthetic oligonucleotide
ggauccugucaugcagcau

SEQ ID NO: 457165 - RNA, 19 nt, Artificial Sequence
  Description of Artificial Sequence: Synthetic oligonucleotide
gcaccgcugugugccccac

SEQ ID NO: 457166 - RNA, 19 nt, Artificial Sequence
  Description of Artificial Sequence: Synthetic oligonucleotide
ccugcagaccggguccagu

SEQ ID NO: 457167 - RNA, 19 nt, Artificial Sequence
  Description of Artificial Sequence: Synthetic oligonucleotide
gcccuaacauuggcccagu

SEQ ID NO: 457168 - RNA, 19 nt, Artificial Sequence
  Description of Artificial Sequence: Synthetic oligonucleotide
cccacccgugaggccucug

SEQ ID NO: 457169 - RNA, 19 nt, Artificial Sequence
  Description of Artificial Sequence: Synthetic oligonucleotide
cguaguugacucgcacauu

SEQ ID NO: 457170 - RNA, 19 nt, Artificial Sequence
  Description of Artificial Sequence: Synthetic oligonucleotide
gggcaccggacaagcucau

SEQ ID NO: 457171 - RNA, 19 nt, Artificial Sequence
  Description of Artificial Sequence: Synthetic oligonucleotide
cgguugcagccuucagauu

SEQ ID NO: 457172 - RNA, 19 nt, Artificial Sequence
  Description of Artificial Sequence: Synthetic oligonucleotide
uuuacuaugguacuuacag

SEQ ID NO: 457173 - RNA, 19 nt, Artificial Sequence
  Description of Artificial Sequence: Synthetic oligonucleotide
uuuaauacgggacauauga

SEQ ID NO: 457174 - RNA, 19 nt, Artificial Sequence
  Description of Artificial Sequence: Synthetic oligonucleotide
uauauauuaauaugguugg

SEQ ID NO: 457175 - RNA, 19 nt, Artificial Sequence
  Description of Artificial Sequence: Synthetic oligonucleotide
aauagugagaguugaugcc

SEQ ID NO: 457176 - RNA, 19 nt, Artificial Sequence
  Description of Artificial Sequence: Synthetic oligonucleotide
uuaaauugaacuaaccgug

SEQ ID NO: 457177 - RNA, 19 nt, Artificial Sequence
  Description of Artificial Sequence: Synthetic oligonucleotide
aaugccuaagguuaugaac

SEQ ID NO: 457178 - RNA, 19 nt, Artificial Sequence
  Description of Artificial Sequence: Synthetic oligonucleotide
ugaaggguuauucagaagc

SEQ ID NO: 457179 - RNA, 19 nt, Artificial Sequence
  Description of Artificial Sequence: Synthetic oligonucleotide
aauauguaagccauggucg

SEQ ID NO: 457180 - RNA, 19 nt, Artificial Sequence
  Description of Artificial Sequence: Synthetic oligonucleotide
aguaaguucaaccaacuuc

SEQ ID NO: 457181 - RNA, 19 nt, Artificial Sequence
  Description of Artificial Sequence: Synthetic oligonucleotide
uucauuucgacuuucaucu

SEQ ID NO: 457182 - RNA, 19 nt, Artificial Sequence
  Description of Artificial Sequence: Synthetic oligonucleotide
aauaauucuuagaacacac

SEQ ID NO: 457183 - RNA, 19 nt, Artificial Sequence
  Description of Artificial Sequence: Synthetic oligonucleotide
auuguaaggauucggauuc

SEQ ID NO: 457184 - RNA, 19 nt, Artificial Sequence
  Description of Artificial Sequence: Synthetic oligonucleotide
gagaacuuggcuuaaauug

SEQ ID NO: 457185 - RNA, 19 nt, Artificial Sequence
  Description of Artificial Sequence: Synthetic oligonucleotide
cuuagaacacacaaaaggc

SEQ ID NO: 457186 - RNA, 19 nt, Artificial Sequence
  Description of Artificial Sequence: Synthetic oligonucleotide
  modified_base (18)..(18): a, c, u, g, unknown or other
aauacaacauucccauanc

SEQ ID NO: 457187 - RNA, 19 nt, Artificial Sequence
  Description of Artificial Sequence: Synthetic oligonucleotide
  modified_base (7)..(7): a, c, u, g, unknown or other
ugaaacngaauucaaagua

SEQ ID NO: 457188 - RNA, 19 nt, Artificial Sequence
  Description of Artificial Sequence: Synthetic oligonucleotide
caaucauuagugcagaucc

SEQ ID NO: 457189 - RNA, 19 nt, Artificial Sequence
  Description of Artificial Sequence: Synthetic oligonucleotide
aaugaaacaucguuuguga

SEQ ID NO: 457190 - RNA, 19 nt, Artificial Sequence
  Description of Artificial Sequence: Synthetic oligonucleotide
uacuaugguacuuacagca

SEQ ID NO: 457191 - RNA, 19 nt, Artificial Sequence
  Description of Artificial Sequence: Synthetic oligonucleotide
ugaaucuaaaauauguguc

SEQ ID NO: 457192 - RNA, 19 nt, Artificial Sequence
  Description of Artificial Sequence: Synthetic oligonucleotide
uauucagaagcaaaccucc

SEQ ID NO: 457193 - RNA, 19 nt, Artificial Sequence
  Description of Artificial Sequence: Synthetic oligonucleotide
agauacuaaaaccaacuag

SEQ ID NO: 457194 - RNA, 19 nt, Artificial Sequence
  Description of Artificial Sequence: Synthetic oligonucleotide
uuuaauugccauaugacuu

SEQ ID NO: 457195 - RNA, 19 nt, Artificial Sequence
  Description of Artificial Sequence: Synthetic oligonucleotide
ugugcaauggaaaaggcuc

SEQ ID NO: 457196 - RNA, 19 nt, Artificial Sequence
  Description of Artificial Sequence: Synthetic oligonucleotide
ugcugauaacauuagacag

SEQ ID NO: 457197 - RNA, 19 nt, Artificial Sequence
  Description of Artificial Sequence: Synthetic oligonucleotide
uugaaucuaaaauaugugu

SEQ ID NO: 457198 - RNA, 19 nt, Artificial Sequence
  Description of Artificial Sequence: Synthetic oligonucleotide
aacaucguuugugagauuc

SEQ ID NO: 457199 - RNA, 19 nt, Artificial Sequence
  Description of Artificial Sequence: Synthetic oligonucleotide
aagugaaacaaucccagca

SEQ ID NO: 457200 - RNA, 19 nt, Artificial Sequence
  Description of Artificial Sequence: Synthetic oligonucleotide
agugcuuacugcaacaugc

SEQ ID NO: 457201 - RNA, 19 nt, Artificial Sequence
  Description of Artificial Sequence: Synthetic oligonucleotide
auuagugcagaucccauuc

SEQ ID NO: 457202 - RNA, 19 nt, Artificial Sequence
  Description of Artificial Sequence: Synthetic oligonucleotide
uucguuauauuguaugugc

SEQ ID NO: 457203 - RNA, 19 nt, Artificial Sequence
  Description of Artificial Sequence: Synthetic oligonucleotide
uuagaacacacaaaaggca

SEQ ID NO: 457204 - RNA, 19 nt, Artificial Sequence
  Description of Artificial Sequence: Synthetic oligonucleotide
agcaugaacgcuaauaugg

SEQ ID NO: 457205 - RNA, 19 nt, Artificial Sequence
  Description of Artificial Sequence: Synthetic oligonucleotide
agugcuaaguuucaaaccu

SEQ ID NO: 457206 - RNA, 19 nt, Artificial Sequence
  Description of Artificial Sequence: Synthetic oligonucleotide
uuuuaguaggcucuucuug

SEQ ID NO: 457207 - RNA, 19 nt, Artificial Sequence
  Description of Artificial Sequence: Synthetic oligonucleotide
uauuguaugugcaauggaa

SEQ ID NO: 457208 - RNA, 19 nt, Artificial Sequence
  Description of Artificial Sequence: Synthetic oligonucleotide
uugaaguauauauuaauau

SEQ ID NO: 457209 - RNA, 19 nt, Artificial Sequence
  Description of Artificial Sequence: Synthetic oligonucleotide
uucuauauacuucaucccu

SEQ ID NO: 457210 - RNA, 19 nt, Artificial Sequence
  Description of Artificial Sequence: Synthetic oligonucleotide
guaaguucaaccaacuucc

SEQ ID NO: 457211 - RNA, 19 nt, Artificial Sequence
  Description of Artificial Sequence: Synthetic oligonucleotide
uucaguuggacgagaaagg

SEQ ID NO: 457212 - RNA, 19 nt, Artificial Sequence
  Description of Artificial Sequence: Synthetic oligonucleotide
caaaccuccaucuugauga

SEQ ID NO: 457213 - RNA, 19 nt, Artificial Sequence
  Description of Artificial Sequence: Synthetic oligonucleotide
ucuaagucguaauaaauau

SEQ ID NO: 457214 - RNA, 19 nt, Artificial Sequence
  Description of Artificial Sequence: Synthetic oligonucleotide
ucuguaaugaaacaucguu

SEQ ID NO: 457215 - RNA, 19 nt, Artificial Sequence
  Description of Artificial Sequence: Synthetic oligonucleotide
uuuaagaccaacagauacu

SEQ ID NO: 457216 - RNA, 19 nt, Artificial Sequence
  Description of Artificial Sequence: Synthetic oligonucleotide
aauuguaaggauucggauu

SEQ ID NO: 457217 - RNA, 19 nt, Artificial Sequence
  Description of Artificial Sequence: Synthetic oligonucleotide
auacgggacauaugaaugc

SEQ ID NO: 457218 - RNA, 19 nt, Artificial Sequence
  Description of Artificial Sequence: Synthetic oligonucleotide
ugugucaggagguaacagg

SEQ ID NO: 457219 - RNA, 19 nt, Artificial Sequence
  Description of Artificial Sequence: Synthetic oligonucleotide
gcuuaaauugaacuaaccg

SEQ ID NO: 457220 - RNA, 19 nt, Artificial Sequence
  Description of Artificial Sequence: Synthetic oligonucleotide
  modified_base (14)..(14): a, c, u, g, unknown or other
uagccuuugaaacngaauu

SEQ ID NO: 457221 - RNA, 19 nt, Artificial Sequence
  Description of Artificial Sequence: Synthetic oligonucleotide
ugacuuaucacuauacuuu

SEQ ID NO: 457222 - RNA, 19 nt, Artificial Sequence
  Description of Artificial Sequence: Synthetic oligonucleotide
ugaacuaaccgugaaacca

SEQ ID NO: 457223 - RNA, 19 nt, Artificial Sequence
  Description of Artificial Sequence: Synthetic oligonucleotide
aaaaccaacuagcacagua

SEQ ID NO: 457224 - RNA, 19 nt, Artificial Sequence
  Description of Artificial Sequence: Synthetic oligonucleotide
aguuuauacugacagccuc

SEQ ID NO: 457225 - RNA, 19 nt, Artificial Sequence
  Description of Artificial Sequence: Synthetic oligonucleotide
ugcuguuucaaucauuagu

SEQ ID NO: 457226 - RNA, 19 nt, Artificial Sequence
  Description of Artificial Sequence: Synthetic oligonucleotide
accaacuaaggcuuguacg

SEQ ID NO: 457227 - RNA, 19 nt, Artificial Sequence
  Description of Artificial Sequence: Synthetic oligonucleotide
gauucaagcuguucaaagc

SEQ ID NO: 457228 - RNA, 19 nt, Artificial Sequence
  Description of Artificial Sequence: Synthetic oligonucleotide
ugauguguuugucaggaug

SEQ ID NO: 457229 - RNA, 19 nt, Artificial Sequence
  Description of Artificial Sequence: Synthetic oligonucleotide
uaguuucugaacacaaaag

SEQ ID NO: 457230 - RNA, 19 nt, Artificial Sequence
  Description of Artificial Sequence: Synthetic oligonucleotide
cuauacacucuaauggugc

SEQ ID NO: 457231 - RNA, 19 nt, Artificial Sequence
  Description of Artificial Sequence: Synthetic oligonucleotide
cugacagccuccuaaauag

SEQ ID NO: 457232 - RNA, 19 nt, Artificial Sequence
  Description of Artificial Sequence: Synthetic oligonucleotide
augaacgcuaauauggccc

SEQ ID NO: 457233 - RNA, 19 nt, Artificial Sequence
  Description of Artificial Sequence: Synthetic oligonucleotide
aauacgggacauaugaaug

SEQ ID NO: 457234 - RNA, 19 nt, Artificial Sequence
  Description of Artificial Sequence: Synthetic oligonucleotide
caauauguaagccaugguc

SEQ ID NO: 457235 - RNA, 19 nt, Artificial Sequence
  Description of Artificial Sequence: Synthetic oligonucleotide
gaagcaaaccuccaucuug

SEQ ID NO: 457236 - RNA, 19 nt, Artificial Sequence
  Description of Artificial Sequence: Synthetic oligonucleotide
cagacuuuaaucuggguac

SEQ ID NO: 457237 - RNA, 19 nt, Artificial Sequence
  Description of Artificial Sequence: Synthetic oligonucleotide
uuuaguaggcucuucuugu

SEQ ID NO: 457238 - RNA, 19 nt, Artificial Sequence
  Description of Artificial Sequence: Synthetic oligonucleotide
aaguacuuuuaauacggga

SEQ ID NO: 457239 - RNA, 19 nt, Artificial Sequence
  Description of Artificial Sequence: Synthetic oligonucleotide
acucuaauggugcaucggg

SEQ ID NO: 457240 - RNA, 19 nt, Artificial Sequence
  Description of Artificial Sequence: Synthetic oligonucleotide
gaaguuagcaauacuuugc

SEQ ID NO: 457241 - RNA, 19 nt, Artificial Sequence
  Description of Artificial Sequence: Synthetic oligonucleotide
uguagcacugcugauaaca

SEQ ID NO: 457242 - RNA, 19 nt, Artificial Sequence
  Description of Artificial Sequence: Synthetic oligonucleotide
cuugagucagacuuuaauc

SEQ ID NO: 457243 - RNA, 19 nt, Artificial Sequence
  Description of Artificial Sequence: Synthetic oligonucleotide
ucuaauggugcaucgggcc

SEQ ID NO: 457244 - RNA, 19 nt, Artificial Sequence
  Description of Artificial Sequence: Synthetic oligonucleotide
cacaugacaggauugaauc

SEQ ID NO: 457245 - RNA, 19 nt, Artificial Sequence
  Description of Artificial Sequence: Synthetic oligonucleotide
  modified_base (6)..(6): a, c, u, g, unknown or other
gaaacngaauucaaaguac

SEQ ID NO: 457246 - RNA, 19 nt, Artificial Sequence
  Description of Artificial Sequence: Synthetic oligonucleotide
agucguaauaaauauggaa

SEQ ID NO: 457247 - RNA, 19 nt, Artificial Sequence
  Description of Artificial Sequence: Synthetic oligonucleotide
acuuggcuuaaauugaacu

SEQ ID NO: 457248 - RNA, 19 nt, Artificial Sequence
  Description of Artificial Sequence: Synthetic oligonucleotide
uuaauugccauaugacuuc

SEQ ID NO: 457249 - RNA, 19 nt, Artificial Sequence
  Description of Artificial Sequence: Synthetic oligonucleotide
  modified_base (16)..(16): a, c, u, g, unknown or other
uacaacauucccauancuu

SEQ ID NO: 457250 - RNA, 19 nt, Artificial Sequence
  Description of Artificial Sequence: Synthetic oligonucleotide
uacgccuucaguuggacga

SEQ ID NO: 457251 - RNA, 19 nt, Artificial Sequence
  Description of Artificial Sequence: Synthetic oligonucleotide
cuuaaauugaacuaaccgu

SEQ ID NO: 457252 - RNA, 19 nt, Artificial Sequence
  Description of Artificial Sequence: Synthetic oligonucleotide
aaugacguucugugagaac

SEQ ID NO: 457253 - RNA, 19 nt, Artificial Sequence
  Description of Artificial Sequence: Synthetic oligonucleotide
uguucguuauauuguaugu

SEQ ID NO: 457254 - RNA, 19 nt, Artificial Sequence
  Description of Artificial Sequence: Synthetic oligonucleotide
uaauacgggacauaugaau

SEQ ID NO: 457255 - RNA, 19 nt, Artificial Sequence
  Description of Artificial Sequence: Synthetic oligonucleotide
ugcagaucccauucuaucc

SEQ ID NO: 457256 - RNA, 19 nt, Artificial Sequence
  Description of Artificial Sequence: Synthetic oligonucleotide
aaaauguagaaugacucuu

SEQ ID NO: 457257 - RNA, 19 nt, Artificial Sequence
  Description of Artificial Sequence: Synthetic oligonucleotide
uacguugugguauuccuca

SEQ ID NO: 457258 - RNA, 19 nt, Artificial Sequence
  Description of Artificial Sequence: Synthetic oligonucleotide
agaugacuaaaagcaaagc

SEQ ID NO: 457259 - RNA, 19 nt, Artificial Sequence
  Description of Artificial Sequence: Synthetic oligonucleotide
uacugcaacaugcuuuacc

SEQ ID NO: 457260 - RNA, 19 nt, Artificial Sequence
  Description of Artificial Sequence: Synthetic oligonucleotide
ucgugugaaaaucucugug

SEQ ID NO: 457261 - RNA, 19 nt, Artificial Sequence
  Description of Artificial Sequence: Synthetic oligonucleotide
ugagucagacuuuaaucug

SEQ ID NO: 457262 - RNA, 19 nt, Artificial Sequence
  Description of Artificial Sequence: Synthetic oligonucleotide
  modified_base (5)..(5): a, c, u, g, unknown or other
aaacngaauucaaaguacu

SEQ ID NO: 457263 - RNA, 19 nt, Artificial Sequence
  Description of Artificial Sequence: Synthetic oligonucleotide
uuuuaauacgggacauaug

SEQ ID NO: 457264 - RNA, 19 nt, Artificial Sequence
  Description of Artificial Sequence: Synthetic oligonucleotide
uuugucuaagucguaauaa

SEQ ID NO: 457265 - RNA, 19 nt, Artificial Sequence
  Description of Artificial Sequence: Synthetic oligonucleotide
uguucauuucuuucuauau

SEQ ID NO: 457266 - RNA, 19 nt, Artificial Sequence
  Description of Artificial Sequence: Synthetic oligonucleotide
cagaauuacauggacuucc

SEQ ID NO: 457267 - RNA, 19 nt, Artificial Sequence
  Description of Artificial Sequence: Synthetic oligonucleotide
auuuugacagucccgacaa

SEQ ID NO: 457268 - RNA, 19 nt, Artificial Sequence
  Description of Artificial Sequence: Synthetic oligonucleotide
  modified_base (15)..(15): a, c, u, g, unknown or other
acaacauucccauancuuu

SEQ ID NO: 457269 - RNA, 19 nt, Artificial Sequence
  Description of Artificial Sequence: Synthetic oligonucleotide
aaccaauuaaggccaaaau

SEQ ID NO: 457270 - RNA, 19 nt, Artificial Sequence
  Description of Artificial Sequence: Synthetic oligonucleotide
uuugacagucccgacaaug

SEQ ID NO: 457271 - RNA, 19 nt, Artificial Sequence
  Description of Artificial Sequence: Synthetic oligonucleotide
ugucuaagucguaauaaau

SEQ ID NO: 457272 - RNA, 19 nt, Artificial Sequence
  Description of Artificial Sequence: Synthetic oligonucleotide
aucaauuguaaggauucgg

SEQ ID NO: 457273 - RNA, 19 nt, Artificial Sequence
  Description of Artificial Sequence: Synthetic oligonucleotide
agagaaucggauuuccccu

SEQ ID NO: 457274 - RNA, 19 nt, Artificial Sequence
  Description of Artificial Sequence: Synthetic oligonucleotide
auugaaucuaaaauaugug

SEQ ID NO: 457275 - RNA, 19 nt, Artificial Sequence
  Description of Artificial Sequence: Synthetic oligonucleotide
uucacacaugacaggauug

SEQ ID NO: 457276 - RNA, 19 nt, Artificial Sequence
  Description of Artificial Sequence: Synthetic oligonucleotide
cuaagucguaauaaauaug

SEQ ID NO: 457277 - RNA, 19 nt, Artificial Sequence
  Description of Artificial Sequence: Synthetic oligonucleotide
ugaguaaguucaaccaacu

SEQ ID NO: 457278 - RNA, 19 nt, Artificial Sequence
  Description of Artificial Sequence: Synthetic oligonucleotide
uuuaaccagccccugucug

SEQ ID NO: 457279 - RNA, 19 nt, Artificial Sequence
  Description of Artificial Sequence: Synthetic oligonucleotide
gagucagacuuuaaucugg

SEQ ID NO: 457280 - RNA, 19 nt, Artificial Sequence
  Description of Artificial Sequence: Synthetic oligonucleotide
aggauucggauuccucucc

SEQ ID NO: 457281 - RNA, 19 nt, Artificial Sequence
  Description of Artificial Sequence: Synthetic oligonucleotide
aaaaugccuaagguuauga

SEQ ID NO: 457282 - RNA, 19 nt, Artificial Sequence
  Description of Artificial Sequence: Synthetic oligonucleotide
uuucgacuuucaucuaggg

SEQ ID NO: 457283 - RNA, 19 nt, Artificial Sequence
  Description of Artificial Sequence: Synthetic oligonucleotide
cuguucguuauauuguaug

SEQ ID NO: 457284 - RNA, 19 nt, Artificial Sequence
  Description of Artificial Sequence: Synthetic oligonucleotide
acaucacucucauaccguc

SEQ ID NO: 457285 - RNA, 19 nt, Artificial Sequence
  Description of Artificial Sequence: Synthetic oligonucleotide
ugaacgcuaauauggcccc

SEQ ID NO: 457286 - RNA, 19 nt, Artificial Sequence
  Description of Artificial Sequence: Synthetic oligonucleotide
ucguuauauuguaugugca

SEQ ID NO: 457287 - RNA, 19 nt, Artificial Sequence
  Description of Artificial Sequence: Synthetic oligonucleotide
uguacguugugguauuccu

SEQ ID NO: 457288 - RNA, 19 nt, Artificial Sequence
  Description of Artificial Sequence: Synthetic oligonucleotide
uuacuaugguacuuacagc

SEQ ID NO: 457289 - RNA, 19 nt, Artificial Sequence
  Description of Artificial Sequence: Synthetic oligonucleotide
cuaugguacuuacagcagc

SEQ ID NO: 457290 - RNA, 19 nt, Artificial Sequence
  Description of Artificial Sequence: Synthetic oligonucleotide
aacuaaggcuuguacgccu

SEQ ID NO: 457291 - RNA, 19 nt, Artificial Sequence
  Description of Artificial Sequence: Synthetic oligonucleotide
uuguaugugcaauggaaaa

SEQ ID NO: 457292 - RNA, 19 nt, Artificial Sequence
  Description of Artificial Sequence: Synthetic oligonucleotide
acagauacuaaaaccaacu

SEQ ID NO: 457293 - RNA, 19 nt, Artificial Sequence
  Description of Artificial Sequence: Synthetic oligonucleotide
ucaaaccuccaauauguaa

SEQ ID NO: 457294 - RNA, 19 nt, Artificial Sequence
  Description of Artificial Sequence: Synthetic oligonucleotide
aguccaccaauguaaccac

SEQ ID NO: 457295 - RNA, 19 nt, Artificial Sequence
  Description of Artificial Sequence: Synthetic oligonucleotide
gcuaauauggccccugugc

SEQ ID NO: 457296 - RNA, 19 nt, Artificial Sequence
  Description of Artificial Sequence: Synthetic oligonucleotide
uuucacacaugacaggauu

SEQ ID NO: 457297 - RNA, 19 nt, Artificial Sequence
  Description of Artificial Sequence: Synthetic oligonucleotide
uuaagaccaacagauacua

SEQ ID NO: 457298 - RNA, 19 nt, Artificial Sequence
  Description of Artificial Sequence: Synthetic oligonucleotide
ucuauauacuucaucccuu

SEQ ID NO: 457299 - RNA, 19 nt, Artificial Sequence
  Description of Artificial Sequence: Synthetic oligonucleotide
guaauaaaaugccuaaggu

SEQ ID NO: 457300 - RNA, 19 nt, Artificial Sequence
  Description of Artificial Sequence: Synthetic oligonucleotide
cauuucgacuuucaucuag

SEQ ID NO: 457301 - RNA, 19 nt, Artificial Sequence
  Description of Artificial Sequence: Synthetic oligonucleotide
ugagcccaacuuucgauag

SEQ ID NO: 457302 - RNA, 19 nt, Artificial Sequence
  Description of Artificial Sequence: Synthetic oligonucleotide
ugcagacccuggaagaacc

SEQ ID NO: 457303 - RNA, 19 nt, Artificial Sequence
  Description of Artificial Sequence: Synthetic oligonucleotide
gacagucccgacaaugacg

SEQ ID NO: 457304 - RNA, 19 nt, Artificial Sequence
  Description of Artificial Sequence: Synthetic oligonucleotide
cugcaaaguagccuggagc

SEQ ID NO: 457305 - RNA, 19 nt, Artificial Sequence
  Description of Artificial Sequence: Synthetic oligonucleotide
aaccaacuagcacaguaau

SEQ ID NO: 457306 - RNA, 19 nt, Artificial Sequence
  Description of Artificial Sequence: Synthetic oligonucleotide
caugaacgcuaauauggcc

SEQ ID NO: 457307 - RNA, 19 nt, Artificial Sequence
  Description of Artificial Sequence: Synthetic oligonucleotide
cugaugaggcucuaauggc

SEQ ID NO: 457308 - RNA, 19 nt, Artificial Sequence
  Description of Artificial Sequence: Synthetic oligonucleotide
uaaccaccaacuaaggcuu

SEQ ID NO: 457309 - RNA, 19 nt, Artificial Sequence
  Description of Artificial Sequence: Synthetic oligonucleotide
uuauuugucuaagucguaa

SEQ ID NO: 457310 - RNA, 19 nt, Artificial Sequence
  Description of Artificial Sequence: Synthetic oligonucleotide
auaugugucaggagguaac

SEQ ID NO: 457311 - RNA, 19 nt, Artificial Sequence
  Description of Artificial Sequence: Synthetic oligonucleotide
uuucgauagaguuccucac

SEQ ID NO: 457312 - RNA, 19 nt, Artificial Sequence
  Description of Artificial Sequence: Synthetic oligonucleotide
aacuagcacaguaauaaaa

SEQ ID NO: 457313 - RNA, 19 nt, Artificial Sequence
  Description of Artificial Sequence: Synthetic oligonucleotide
aaaugccuaagguuaugaa

SEQ ID NO: 457314 - RNA, 19 nt, Artificial Sequence
  Description of Artificial Sequence: Synthetic oligonucleotide
uuaauacgggacauaugaa

SEQ ID NO: 457315 - RNA, 19 nt, Artificial Sequence
  Description of Artificial Sequence: Synthetic oligonucleotide
ugcugacuuaucacuauac

SEQ ID NO: 457316 - RNA, 19 nt, Artificial Sequence
  Description of Artificial Sequence: Synthetic oligonucleotide
agucccgacaaugacguuc

SEQ ID NO: 457317 - RNA, 19 nt, Artificial Sequence
  Description of Artificial Sequence: Synthetic oligonucleotide
caggauugaaucuaaaaua

SEQ ID NO: 457318 - RNA, 19 nt, Artificial Sequence
  Description of Artificial Sequence: Synthetic oligonucleotide
ugcgauugaaguauauauu

SEQ ID NO: 457319 - RNA, 19 nt, Artificial Sequence
  Description of Artificial Sequence: Synthetic oligonucleotide
aacuuggcuuaaauugaac

SEQ ID NO: 457320 - RNA, 19 nt, Artificial Sequence
  Description of Artificial Sequence: Synthetic oligonucleotide
gaacaucuuaaauacuuua

SEQ ID NO: 457321 - RNA, 19 nt, Artificial Sequence
  Description of Artificial Sequence: Synthetic oligonucleotide
auuucgacuuucaucuagg

SEQ ID NO: 457322 - RNA, 19 nt, Artificial Sequence
  Description of Artificial Sequence: Synthetic oligonucleotide
uguuuuaaccagccccugu

SEQ ID NO: 457323 - RNA, 19 nt, Artificial Sequence
  Description of Artificial Sequence: Synthetic oligonucleotide
uggcacauauauuaauaaa

SEQ ID NO: 457324 - RNA, 19 nt, Artificial Sequence
  Description of Artificial Sequence: Synthetic oligonucleotide
gacauaugaaugcucaccu

SEQ ID NO: 457325 - RNA, 19 nt, Artificial Sequence
  Description of Artificial Sequence: Synthetic oligonucleotide
uacucgugugaaaaucucu

SEQ ID NO: 457326 - RNA, 19 nt, Artificial Sequence
  Description of Artificial Sequence: Synthetic oligonucleotide
cugcugauaacauuagaca

SEQ ID NO: 457327 - RNA, 19 nt, Artificial Sequence
  Description of Artificial Sequence: Synthetic oligonucleotide
uuaaccagccccugucuga

SEQ ID NO: 457328 - RNA, 19 nt, Artificial Sequence
  Description of Artificial Sequence: Synthetic oligonucleotide
guuuauacugacagccucc

SEQ ID NO: 457329 - RNA, 19 nt, Artificial Sequence
  Description of Artificial Sequence: Synthetic oligonucleotide
cuuuaauugccauaugacu

SEQ ID NO: 457330 - RNA, 19 nt, Artificial Sequence
  Description of Artificial Sequence: Synthetic oligonucleotide
cuaaccgugaaaccauuuc

SEQ ID NO: 457331 - RNA, 19 nt, Artificial Sequence
  Description of Artificial Sequence: Synthetic oligonucleotide
agugauugguucacucgcc

SEQ ID NO: 457332 - RNA, 19 nt, Artificial Sequence
  Description of Artificial Sequence: Synthetic oligonucleotide
acuagcacaguaauaaaau

SEQ ID NO: 457333 - RNA, 19 nt, Artificial Sequence
  Description of Artificial Sequence: Synthetic oligonucleotide
uauuugucuaagucguaau

SEQ ID NO: 457334 - RNA, 19 nt, Artificial Sequence
  Description of Artificial Sequence: Synthetic oligonucleotide
agggauacuauacacucua

SEQ ID NO: 457335 - RNA, 19 nt, Artificial Sequence
  Description of Artificial Sequence: Synthetic oligonucleotide
cucuaauggugcaucgggc

SEQ ID NO: 457336 - RNA, 19 nt, Artificial Sequence
  Description of Artificial Sequence: Synthetic oligonucleotide
  modified_base (3)..(3): a, c, u, g, unknown or other
acngaauucaaaguacuuu

SEQ ID NO: 457337 - RNA, 19 nt, Artificial Sequence
  Description of Artificial Sequence: Synthetic oligonucleotide
uucacucgccaauaauucu

SEQ ID NO: 457338 - RNA, 19 nt, Artificial Sequence
  Description of Artificial Sequence: Synthetic oligonucleotide
ucuagggguauguuuucac

SEQ ID NO: 457339 - RNA, 19 nt, Artificial Sequence
  Description of Artificial Sequence: Synthetic oligonucleotide
uaaccaauuaaggccaaaa

SEQ ID NO: 457340 - RNA, 19 nt, Artificial Sequence
  Description of Artificial Sequence: Synthetic oligonucleotide
acuuuaaucuggguacaag

SEQ ID NO: 457341 - RNA, 19 nt, Artificial Sequence
  Description of Artificial Sequence: Synthetic oligonucleotide
uuuauacugacagccuccu

SEQ ID NO: 457342 - RNA, 19 nt, Artificial Sequence
  Description of Artificial Sequence: Synthetic oligonucleotide
uuacucgugugaaaaucuc

SEQ ID NO: 457343 - RNA, 19 nt, Artificial Sequence
  Description of Artificial Sequence: Synthetic oligonucleotide
aaaccaacuagcacaguaa

SEQ ID NO: 457344 - RNA, 19 nt, Artificial Sequence
  Description of Artificial Sequence: Synthetic oligonucleotide
agaaucggauuuccccuuc

SEQ ID NO: 457345 - RNA, 19 nt, Artificial Sequence
  Description of Artificial Sequence: Synthetic oligonucleotide
uaacauuagacagcuuggu

SEQ ID NO: 457346 - RNA, 19 nt, Artificial Sequence
  Description of Artificial Sequence: Synthetic oligonucleotide
ccucuguuuacuaugguac

SEQ ID NO: 457347 - RNA, 19 nt, Artificial Sequence
  Description of Artificial Sequence: Synthetic oligonucleotide
acuauacacucuaauggug

SEQ ID NO: 457348 - RNA, 19 nt, Artificial Sequence
  Description of Artificial Sequence: Synthetic oligonucleotide
caaccacaccucuuguucc

SEQ ID NO: 457349 - RNA, 19 nt, Artificial Sequence
  Description of Artificial Sequence: Synthetic oligonucleotide
uugaugccaggaaaaugac

SEQ ID NO: 457350 - RNA, 19 nt, Artificial Sequence
  Description of Artificial Sequence: Synthetic oligonucleotide
gugucaggagguaacaggc

SEQ ID NO: 457351 - RNA, 19 nt, Artificial Sequence
  Description of Artificial Sequence: Synthetic oligonucleotide
uccguuuaccuguaucuuc

SEQ ID NO: 457352 - RNA, 19 nt, Artificial Sequence
  Description of Artificial Sequence: Synthetic oligonucleotide
guuggggcuaagagaaucg

SEQ ID NO: 457353 - RNA, 19 nt, Artificial Sequence
  Description of Artificial Sequence: Synthetic oligonucleotide
ugagaacacgucugagccc

SEQ ID NO: 457354 - RNA, 19 nt, Artificial Sequence
  Description of Artificial Sequence: Synthetic oligonucleotide
augcucaccuuuguaaguc

SEQ ID NO: 457355 - RNA, 19 nt, Artificial Sequence
  Description of Artificial Sequence: Synthetic oligonucleotide
gcuaccuuaggacaugcug

SEQ ID NO: 457356 - RNA, 19 nt, Artificial Sequence
  Description of Artificial Sequence: Synthetic oligonucleotide
gagaacacgucugagccca

SEQ ID NO: 457357 - RNA, 19 nt, Artificial Sequence
  Description of Artificial Sequence: Synthetic oligonucleotide
ugacagucccgacaaugac

SEQ ID NO: 457358 - RNA, 19 nt, Artificial Sequence
  Description of Artificial Sequence: Synthetic oligonucleotide
gaaacaucguuugugagau

SEQ ID NO: 457359 - RNA, 19 nt, Artificial Sequence
  Description of Artificial Sequence: Synthetic oligonucleotide
gucguaauaaauauggaau

SEQ ID NO: 457360 - RNA, 19 nt, Artificial Sequence
  Description of Artificial Sequence: Synthetic oligonucleotide
ucugagcccaacuuucgau

SEQ ID NO: 457361 - RNA, 19 nt, Artificial Sequence
  Description of Artificial Sequence: Synthetic oligonucleotide
  modified_base (4)..(4): a, c, u, g, unknown or other
aacngaauucaaaguacuu

SEQ ID NO: 457362 - RNA, 19 nt, Artificial Sequence
  Description of Artificial Sequence: Synthetic oligonucleotide
acucgugugaaaaucucug

SEQ ID NO: 457363 - RNA, 19 nt, Artificial Sequence
  Description of Artificial Sequence: Synthetic oligonucleotide
cauuuugacagucccgaca

SEQ ID NO: 457364 - RNA, 19 nt, Artificial Sequence
  Description of Artificial Sequence: Synthetic oligonucleotide
agcccaacuuucgauagag

SEQ ID NO: 457365 - RNA, 19 nt, Artificial Sequence
  Description of Artificial Sequence: Synthetic oligonucleotide
ucuguucguuauauuguau

SEQ ID NO: 457366 - RNA, 19 nt, Artificial Sequence
  Description of Artificial Sequence: Synthetic oligonucleotide
agucagacuuuaaucuggg

SEQ ID NO: 457367 - RNA, 19 nt, Artificial Sequence
  Description of Artificial Sequence: Synthetic oligonucleotide
gacguucugugagaacacg

SEQ ID NO: 457368 - RNA, 19 nt, Artificial Sequence
  Description of Artificial Sequence: Synthetic oligonucleotide
gcaagugaaacaaucccag

SEQ ID NO: 457369 - RNA, 19 nt, Artificial Sequence
  Description of Artificial Sequence: Synthetic oligonucleotide
caucacucucauaccgucc

SEQ ID NO: 457370 - RNA, 19 nt, Artificial Sequence
  Description of Artificial Sequence: Synthetic oligonucleotide
ucuaauggcuugccacagu

SEQ ID NO: 457371 - RNA, 19 nt, Artificial Sequence
  Description of Artificial Sequence: Synthetic oligonucleotide
aagucguaauaaauaugga

SEQ ID NO: 457372 - RNA, 19 nt, Artificial Sequence
  Description of Artificial Sequence: Synthetic oligonucleotide
uuucccaugugugacuguc

SEQ ID NO: 457373 - RNA, 19 nt, Artificial Sequence
  Description of Artificial Sequence: Synthetic oligonucleotide
acagucccgacaaugacgu

SEQ ID NO: 457374 - RNA, 19 nt, Artificial Sequence
  Description of Artificial Sequence: Synthetic oligonucleotide
gucaaggggagauccugag

SEQ ID NO: 457375 - RNA, 19 nt, Artificial Sequence
  Description of Artificial Sequence: Synthetic oligonucleotide
aggagguaacaggccaucc

SEQ ID NO: 457376 - RNA, 19 nt, Artificial Sequence
  Description of Artificial Sequence: Synthetic oligonucleotide
gcugauaacauuagacagc

SEQ ID NO: 457377 - RNA, 19 nt, Artificial Sequence
  Description of Artificial Sequence: Synthetic oligonucleotide
ucugcugacuuaucacuau

SEQ ID NO: 457378 - RNA, 19 nt, Artificial Sequence
  Description of Artificial Sequence: Synthetic oligonucleotide
auacuuuaauugccauaug

SEQ ID NO: 457379 - RNA, 19 nt, Artificial Sequence
  Description of Artificial Sequence: Synthetic oligonucleotide
acuaugguacuuacagcag

SEQ ID NO: 457380 - RNA, 19 nt, Artificial Sequence
  Description of Artificial Sequence: Synthetic oligonucleotide
ucgggccagauacauuuac

SEQ ID NO: 457381 - RNA, 19 nt, Artificial Sequence
  Description of Artificial Sequence: Synthetic oligonucleotide
agguuaugaacaucuuaaa

SEQ ID NO: 457382 - RNA, 19 nt, Artificial Sequence
  Description of Artificial Sequence: Synthetic oligonucleotide
acucuguucguuauauugu

SEQ ID NO: 457383 - RNA, 19 nt, Artificial Sequence
  Description of Artificial Sequence: Synthetic oligonucleotide
aaauaugugucaggaggua

SEQ ID NO: 457384 - RNA, 19 nt, Artificial Sequence
  Description of Artificial Sequence: Synthetic oligonucleotide
gucgcuuggagagugccag

SEQ ID NO: 457385 - RNA, 19 nt, Artificial Sequence
  Description of Artificial Sequence: Synthetic oligonucleotide
uggacgagaaaggaaguua

SEQ ID NO: 457386 - RNA, 19 nt, Artificial Sequence
  Description of Artificial Sequence: Synthetic oligonucleotide
guucacucgccaauaauuc

SEQ ID NO: 457387 - RNA, 19 nt, Artificial Sequence
  Description of Artificial Sequence: Synthetic oligonucleotide
cagcaugaacgcuaauaug

SEQ ID NO: 457388 - RNA, 19 nt, Artificial Sequence
  Description of Artificial Sequence: Synthetic oligonucleotide
ucuucaggcuuguguacgu

SEQ ID NO: 457389 - RNA, 19 nt, Artificial Sequence
  Description of Artificial Sequence: Synthetic oligonucleotide
uguaaggauucggauuccu

SEQ ID NO: 457390 - RNA, 19 nt, Artificial Sequence
  Description of Artificial Sequence: Synthetic oligonucleotide
ggacgagaaaggaaguuag

SEQ ID NO: 457391 - RNA, 19 nt, Artificial Sequence
  Description of Artificial Sequence: Synthetic oligonucleotide
acgucugagcccaacuuuc

SEQ ID NO: 457392 - RNA, 19 nt, Artificial Sequence
  Description of Artificial Sequence: Synthetic oligonucleotide
ggcucuaauggcuugccac

SEQ ID NO: 457393 - RNA, 19 nt, Artificial Sequence
  Description of Artificial Sequence: Synthetic oligonucleotide
gucuaagucguaauaaaua

SEQ ID NO: 457394 - RNA, 19 nt, Artificial Sequence
  Description of Artificial Sequence: Synthetic oligonucleotide
uacgggacauaugaaugcu

SEQ ID NO: 457395 - RNA, 19 nt, Artificial Sequence
  Description of Artificial Sequence: Synthetic oligonucleotide
gaaacaaucccagcaugaa

SEQ ID NO: 457396 - RNA, 19 nt, Artificial Sequence
  Description of Artificial Sequence: Synthetic oligonucleotide
uugauccagcggcaaguga

SEQ ID NO: 457397 - RNA, 19 nt, Artificial Sequence
  Description of Artificial Sequence: Synthetic oligonucleotide
ugauugguucacucgccaa

SEQ ID NO: 457398 - RNA, 19 nt, Artificial Sequence
  Description of Artificial Sequence: Synthetic oligonucleotide
acguugugguauuccucac

SEQ ID NO: 457399 - RNA, 19 nt, Artificial Sequence
  Description of Artificial Sequence: Synthetic oligonucleotide
gacgagaaaggaaguuagc

SEQ ID NO: 457400 - RNA, 19 nt, Artificial Sequence
  Description of Artificial Sequence: Synthetic oligonucleotide
caacuaaggcuuguacgcc

SEQ ID NO: 457401 - RNA, 19 nt, Artificial Sequence
  Description of Artificial Sequence: Synthetic oligonucleotide
cugaaggguuauucagaag

SEQ ID NO: 457402 - RNA, 19 nt, Artificial Sequence
  Description of Artificial Sequence: Synthetic oligonucleotide
gcuuguacgccuucaguug

SEQ ID NO: 457403 - RNA, 19 nt, Artificial Sequence
  Description of Artificial Sequence: Synthetic oligonucleotide
cuagggguauguuuucaca

SEQ ID NO: 457404 - RNA, 19 nt, Artificial Sequence
  Description of Artificial Sequence: Synthetic oligonucleotide
uucaaaccuccaauaugua

SEQ ID NO: 457405 - RNA, 19 nt, Artificial Sequence
  Description of Artificial Sequence: Synthetic oligonucleotide
acucgccaauaauucuuag

SEQ ID NO: 457406 - RNA, 19 nt, Artificial Sequence
  Description of Artificial Sequence: Synthetic oligonucleotide
ugguucacucgccaauaau

SEQ ID NO: 457407 - RNA, 19 nt, Artificial Sequence
  Description of Artificial Sequence: Synthetic oligonucleotide
auaaaaugccuaagguuau

SEQ ID NO: 457408 - RNA, 19 nt, Artificial Sequence
  Description of Artificial Sequence: Synthetic oligonucleotide
caccaacuaaggcuuguac

SEQ ID NO: 457409 - RNA, 19 nt, Artificial Sequence
  Description of Artificial Sequence: Synthetic oligonucleotide
cucgccaauaauucuuaga

SEQ ID NO: 457410 - RNA, 19 nt, Artificial Sequence
  Description of Artificial Sequence: Synthetic oligonucleotide
  modified_base (2)..(2): a, c, u, g, unknown or other
cngaauucaaaguacuuuu

SEQ ID NO: 457411 - RNA, 19 nt, Artificial Sequence
  Description of Artificial Sequence: Synthetic oligonucleotide
uugguucacucgccaauaa

SEQ ID NO: 457412 - RNA, 19 nt, Artificial Sequence
  Description of Artificial Sequence: Synthetic oligonucleotide
auugauccagcggcaagug

SEQ ID NO: 457413 - RNA, 19 nt, Artificial Sequence
  Description of Artificial Sequence: Synthetic oligonucleotide
ugacaggauugaaucuaaa

SEQ ID NO: 457414 - RNA, 19 nt, Artificial Sequence
  Description of Artificial Sequence: Synthetic oligonucleotide
uaauauggccccugugcuu

SEQ ID NO: 457415 - RNA, 19 nt, Artificial Sequence
  Description of Artificial Sequence: Synthetic oligonucleotide
agaauuacauggacuuccu

SEQ ID NO: 457416 - RNA, 19 nt, Artificial Sequence
  Description of Artificial Sequence: Synthetic oligonucleotide
uggguacaaguccaccaau

SEQ ID NO: 457417 - RNA, 19 nt, Artificial Sequence
  Description of Artificial Sequence: Synthetic oligonucleotide
ugacagccuccuaaauagu

SEQ ID NO: 457418 - RNA, 19 nt, Artificial Sequence
  Description of Artificial Sequence: Synthetic oligonucleotide
cuaauggugcaucgggcca

SEQ ID NO: 457419 - RNA, 19 nt, Artificial Sequence
  Description of Artificial Sequence: Synthetic oligonucleotide
cugauaacauuagacagcu

SEQ ID NO: 457420 - RNA, 19 nt, Artificial Sequence
  Description of Artificial Sequence: Synthetic oligonucleotide
ggauugaaucuaaaauaug

SEQ ID NO: 457421 - RNA, 19 nt, Artificial Sequence
  Description of Artificial Sequence: Synthetic oligonucleotide
cauaccguccugugcccag

SEQ ID NO: 457422 - RNA, 19 nt, Artificial Sequence
  Description of Artificial Sequence: Synthetic oligonucleotide
ugcuuacugcaacaugcuu

SEQ ID NO: 457423 - RNA, 19 nt, Artificial Sequence
  Description of Artificial Sequence: Synthetic oligonucleotide
cucauaccguccugugccc

SEQ ID NO: 457424 - RNA, 19 nt, Artificial Sequence
  Description of Artificial Sequence: Synthetic oligonucleotide
cucuaauggcuugccacag

SEQ ID NO: 457425 - RNA, 19 nt, Artificial Sequence
  Description of Artificial Sequence: Synthetic oligonucleotide
ccauaugacuucuguaaug

SEQ ID NO: 457426 - RNA, 19 nt, Artificial Sequence
  Description of Artificial Sequence: Synthetic oligonucleotide
uaccguccugugcccaggg

SEQ ID NO: 457427 - RNA, 19 nt, Artificial Sequence
  Description of Artificial Sequence: Synthetic oligonucleotide
ccuaagguuaugaacaucu

SEQ ID NO: 457428 - RNA, 19 nt, Artificial Sequence
  Description of Artificial Sequence: Synthetic oligonucleotide
cuuuuaauacgggacauau

SEQ ID NO: 457429 - RNA, 19 nt, Artificial Sequence
  Description of Artificial Sequence: Synthetic oligonucleotide
ccaacuagcacaguaauaa

SEQ ID NO: 457430 - RNA, 19 nt, Artificial Sequence
  Description of Artificial Sequence: Synthetic oligonucleotide
auucggauuccucucccuu

SEQ ID NO: 457431 - RNA, 19 nt, Artificial Sequence
  Description of Artificial Sequence: Synthetic oligonucleotide
acauaugaaugcucaccuu

SEQ ID NO: 457432 - RNA, 19 nt, Artificial Sequence
  Description of Artificial Sequence: Synthetic oligonucleotide
accgugaaaccauuucauu

SEQ ID NO: 457433 - RNA, 19 nt, Artificial Sequence
  Description of Artificial Sequence: Synthetic oligonucleotide
cauggucgcuuggagagug

SEQ ID NO: 457434 - RNA, 19 nt, Artificial Sequence
  Description of Artificial Sequence: Synthetic oligonucleotide
uucggauuccucucccuuu

SEQ ID NO: 457435 - RNA, 19 nt, Artificial Sequence
  Description of Artificial Sequence: Synthetic oligonucleotide
gacuuaucacuauacuuuu

SEQ ID NO: 457436 - RNA, 19 nt, Artificial Sequence
  Description of Artificial Sequence: Synthetic oligonucleotide
gugauugguucacucgcca

SEQ ID NO: 457437 - RNA, 19 nt, Artificial Sequence
  Description of Artificial Sequence: Synthetic oligonucleotide
ggcuuaaauugaacuaacc

SEQ ID NO: 457438 - RNA, 19 nt, Artificial Sequence
  Description of Artificial Sequence: Synthetic oligonucleotide
aggcuuguacgccuucagu

SEQ ID NO: 457439 - RNA, 19 nt, Artificial Sequence
  Description of Artificial Sequence: Synthetic oligonucleotide
gauugguucacucgccaau

SEQ ID NO: 457440 - RNA, 19 nt, Artificial Sequence
  Description of Artificial Sequence: Synthetic oligonucleotide
gacuucuguaaugaaacau

SEQ ID NO: 457441 - RNA, 19 nt, Artificial Sequence
  Description of Artificial Sequence: Synthetic oligonucleotide
cuuaggagcagaagugcua

SEQ ID NO: 457442 - RNA, 19 nt, Artificial Sequence
  Description of Artificial Sequence: Synthetic oligonucleotide
aucauuccccagugcauau

SEQ ID NO: 457443 - RNA, 19 nt, Artificial Sequence
  Description of Artificial Sequence: Synthetic oligonucleotide
ugcaucgggccagauacau

SEQ ID NO: 457444 - RNA, 19 nt, Artificial Sequence
  Description of Artificial Sequence: Synthetic oligonucleotide
uuguguacguugugguauu

SEQ ID NO: 457445 - RNA, 19 nt, Artificial Sequence
  Description of Artificial Sequence: Synthetic oligonucleotide
ggcaagugaaacaauccca

SEQ ID NO: 457446 - RNA, 19 nt, Artificial Sequence
  Description of Artificial Sequence: Synthetic oligonucleotide
cagauacuaaaaccaacua

SEQ ID NO: 457447 - RNA, 19 nt, Artificial Sequence
  Description of Artificial Sequence: Synthetic oligonucleotide
uggucgcuuggagagugcc

SEQ ID NO: 457448 - RNA, 19 nt, Artificial Sequence
  Description of Artificial Sequence: Synthetic oligonucleotide
guguacguugugguauucc

SEQ ID NO: 457449 - RNA, 19 nt, Artificial Sequence
  Description of Artificial Sequence: Synthetic oligonucleotide
cucuguucguuauauugua

SEQ ID NO: 457450 - RNA, 19 nt, Artificial Sequence
  Description of Artificial Sequence: Synthetic oligonucleotide
acacgucugagcccaacuu

SEQ ID NO: 457451 - RNA, 19 nt, Artificial Sequence
  Description of Artificial Sequence: Synthetic oligonucleotide
  modified_base (15)..(15): a, c, u, g, unknown or other
auagccuuugaaacngaau

SEQ ID NO: 457452 - RNA, 19 nt, Artificial Sequence
  Description of Artificial Sequence: Synthetic oligonucleotide
auugguucacucgccaaua

SEQ ID NO: 457453 - RNA, 19 nt, Artificial Sequence
  Description of Artificial Sequence: Synthetic oligonucleotide
acgggacauaugaaugcuc

SEQ ID NO: 457454 - RNA, 19 nt, Artificial Sequence
  Description of Artificial Sequence: Synthetic oligonucleotide
uagggcuagaagguuuguc

SEQ ID NO: 457455 - RNA, 19 nt, Artificial Sequence
  Description of Artificial Sequence: Synthetic oligonucleotide
gcaugaacgcuaauauggc

SEQ ID NO: 457456 - RNA, 19 nt, Artificial Sequence
  Description of Artificial Sequence: Synthetic oligonucleotide
uguacgccuucaguuggac

SEQ ID NO: 457457 - RNA, 19 nt, Artificial Sequence
  Description of Artificial Sequence: Synthetic oligonucleotide
ggauucggauuccucuccc

SEQ ID NO: 457458 - RNA, 19 nt, Artificial Sequence
  Description of Artificial Sequence: Synthetic oligonucleotide
agcugaugaauuggcuucu

SEQ ID NO: 457459 - RNA, 19 nt, Artificial Sequence
  Description of Artificial Sequence: Synthetic oligonucleotide
aucuagggguauguuuuca

SEQ ID NO: 457460 - RNA, 19 nt, Artificial Sequence
  Description of Artificial Sequence: Synthetic oligonucleotide
caauuguaaggauucggau

SEQ ID NO: 457461 - RNA, 19 nt, Artificial Sequence
  Description of Artificial Sequence: Synthetic oligonucleotide
aaucgagaacuuggcuuaa

SEQ ID NO: 457462 - RNA, 19 nt, Artificial Sequence
  Description of Artificial Sequence: Synthetic oligonucleotide
acguucugugagaacacgu

SEQ ID NO: 457463 - RNA, 19 nt, Artificial Sequence
  Description of Artificial Sequence: Synthetic oligonucleotide
caucgggccagauacauuu

SEQ ID NO: 457464 - RNA, 19 nt, Artificial Sequence
  Description of Artificial Sequence: Synthetic oligonucleotide
ucauuucgacuuucaucua

SEQ ID NO: 457465 - RNA, 19 nt, Artificial Sequence
  Description of Artificial Sequence: Synthetic oligonucleotide
gaacuaaccgugaaaccau

SEQ ID NO: 457466 - RNA, 19 nt, Artificial Sequence
  Description of Artificial Sequence: Synthetic oligonucleotide
uaaccagccccugucugau

SEQ ID NO: 457467 - RNA, 19 nt, Artificial Sequence
  Description of Artificial Sequence: Synthetic oligonucleotide
acgcuaauauggccccugu

SEQ ID NO: 457468 - RNA, 19 nt, Artificial Sequence
  Description of Artificial Sequence: Synthetic oligonucleotide
caacuagcacaguaauaaa

SEQ ID NO: 457469 - RNA, 19 nt, Artificial Sequence
  Description of Artificial Sequence: Synthetic oligonucleotide
ucauaccguccugugccca

SEQ ID NO: 457470 - RNA, 19 nt, Artificial Sequence
  Description of Artificial Sequence: Synthetic oligonucleotide
uccuugagucagacuuuaa

SEQ ID NO: 457471 - RNA, 19 nt, Artificial Sequence
  Description of Artificial Sequence: Synthetic oligonucleotide
auguaagccauggucgcuu

SEQ ID NO: 457472 - RNA, 19 nt, Artificial Sequence
  Description of Artificial Sequence: Synthetic oligonucleotide
uuucaucuagggguauguu

SEQ ID NO: 457473 - RNA, 19 nt, Artificial Sequence
  Description of Artificial Sequence: Synthetic oligonucleotide
agcagcuaccuuaggacau

SEQ ID NO: 457474 - RNA, 19 nt, Artificial Sequence
  Description of Artificial Sequence: Synthetic oligonucleotide
cuuguguacguugugguau

SEQ ID NO: 457475 - RNA, 19 nt, Artificial Sequence
  Description of Artificial Sequence: Synthetic oligonucleotide
auaccguccugugcccagg

SEQ ID NO: 457476 - RNA, 19 nt, Artificial Sequence
  Description of Artificial Sequence: Synthetic oligonucleotide
guacguugugguauuccuc

SEQ ID NO: 457477 - RNA, 19 nt, Artificial Sequence
  Description of Artificial Sequence: Synthetic oligonucleotide
ugauaacauuagacagcuu

SEQ ID NO: 457478 - RNA, 19 nt, Artificial Sequence
  Description of Artificial Sequence: Synthetic oligonucleotide
aggcucuaauggcuugcca

SEQ ID NO: 457479 - RNA, 19 nt, Artificial Sequence
  Description of Artificial Sequence: Synthetic oligonucleotide
auaaccaauuaaggccaaa

SEQ ID NO: 457480 - RNA, 19 nt, Artificial Sequence
  Description of Artificial Sequence: Synthetic oligonucleotide
acaucguuugugagauuca

SEQ ID NO: 457481 - RNA, 19 nt, Artificial Sequence
  Description of Artificial Sequence: Synthetic oligonucleotide
gcuaagagaaucggauuuc

SEQ ID NO: 457482 - RNA, 19 nt, Artificial Sequence
  Description of Artificial Sequence: Synthetic oligonucleotide
gauucggauuccucucccu

SEQ ID NO: 457483 - RNA, 19 nt, Artificial Sequence
  Description of Artificial Sequence: Synthetic oligonucleotide
cuaaauagugagaguugau

SEQ ID NO: 457484 - RNA, 19 nt, Artificial Sequence
  Description of Artificial Sequence: Synthetic oligonucleotide
gugcuaaguuucaaaccuc

SEQ ID NO: 457485 - RNA, 19 nt, Artificial Sequence
  Description of Artificial Sequence: Synthetic oligonucleotide
gagcccaacuuucgauaga

SEQ ID NO: 457486 - RNA, 19 nt, Artificial Sequence
  Description of Artificial Sequence: Synthetic oligonucleotide
cugugcuuacaccacagau

SEQ ID NO: 457487 - RNA, 19 nt, Artificial Sequence
  Description of Artificial Sequence: Synthetic oligonucleotide
uguguacguugugguauuc

SEQ ID NO: 457488 - RNA, 19 nt, Artificial Sequence
  Description of Artificial Sequence: Synthetic oligonucleotide
ggauacuauacacucuaau

SEQ ID NO: 457489 - RNA, 19 nt, Artificial Sequence
  Description of Artificial Sequence: Synthetic oligonucleotide
cagcuaccuuaggacaugc

SEQ ID NO: 457490 - RNA, 19 nt, Artificial Sequence
  Description of Artificial Sequence: Synthetic oligonucleotide
ggcuaagagaaucggauuu

SEQ ID NO: 457491 - RNA, 19 nt, Artificial Sequence
  Description of Artificial Sequence: Synthetic oligonucleotide
aaccaccaacuaaggcuug

SEQ ID NO: 457492 - RNA, 19 nt, Artificial Sequence
  Description of Artificial Sequence: Synthetic oligonucleotide
gaguaaguucaaccaacuu

SEQ ID NO: 457493 - RNA, 19 nt, Artificial Sequence
  Description of Artificial Sequence: Synthetic oligonucleotide
cuaauggcuugccacaguu

SEQ ID NO: 457494 - RNA, 19 nt, Artificial Sequence
  Description of Artificial Sequence: Synthetic oligonucleotide
agaucccauucuauccuga

SEQ ID NO: 457495 - RNA, 19 nt, Artificial Sequence
  Description of Artificial Sequence: Synthetic oligonucleotide
caucguuugugagauucaa

SEQ ID NO: 457496 - RNA, 19 nt, Artificial Sequence
  Description of Artificial Sequence: Synthetic oligonucleotide
caguuuauacugacagccu

SEQ ID NO: 457497 - RNA, 19 nt, Artificial Sequence
  Description of Artificial Sequence: Synthetic oligonucleotide
uacuuacagcagcuaccuu

SEQ ID NO: 457498 - RNA, 19 nt, Artificial Sequence
  Description of Artificial Sequence: Synthetic oligonucleotide
gauccagcggcaagugaaa

SEQ ID NO: 457499 - RNA, 19 nt, Artificial Sequence
  Description of Artificial Sequence: Synthetic oligonucleotide
gaacacgucugagcccaac

SEQ ID NO: 457500 - RNA, 19 nt, Artificial Sequence
  Description of Artificial Sequence: Synthetic oligonucleotide
gccccugucugauauuuuc

SEQ ID NO: 457501 - RNA, 19 nt, Artificial Sequence
  Description of Artificial Sequence: Synthetic oligonucleotide
accaacuagcacaguaaua

SEQ ID NO: 457502 - RNA, 19 nt, Artificial Sequence
  Description of Artificial Sequence: Synthetic oligonucleotide
cucgugugaaaaucucugu

SEQ ID NO: 457503 - RNA, 19 nt, Artificial Sequence
  Description of Artificial Sequence: Synthetic oligonucleotide
gagagugccagugcuuacu

SEQ ID NO: 457504 - RNA, 19 nt, Artificial Sequence
  Description of Artificial Sequence: Synthetic oligonucleotide
acuaaccgugaaaccauuu

SEQ ID NO: 457505 - RNA, 19 nt, Artificial Sequence
  Description of Artificial Sequence: Synthetic oligonucleotide
augcauggcuccaacucau

SEQ ID NO: 457506 - RNA, 19 nt, Artificial Sequence
  Description of Artificial Sequence: Synthetic oligonucleotide
caaugacguucugugagaa

SEQ ID NO: 457507 - RNA, 19 nt, Artificial Sequence
  Description of Artificial Sequence: Synthetic oligonucleotide
acgccuucaguuggacgag

SEQ ID NO: 457508 - RNA, 19 nt, Artificial Sequence
  Description of Artificial Sequence: Synthetic oligonucleotide
ggcuccguuuaccuguauc

SEQ ID NO: 457509 - RNA, 19 nt, Artificial Sequence
  Description of Artificial Sequence: Synthetic oligonucleotide
cacucgccaauaauucuua

SEQ ID NO: 457510 - RNA, 19 nt, Artificial Sequence
  Description of Artificial Sequence: Synthetic oligonucleotide
gagaaucggauuuccccuu

SEQ ID NO: 457511 - RNA, 19 nt, Artificial Sequence
  Description of Artificial Sequence: Synthetic oligonucleotide
gcucaccuuuguaaguccc

SEQ ID NO: 457512 - RNA, 19 nt, Artificial Sequence
  Description of Artificial Sequence: Synthetic oligonucleotide
gaugaggcucuaauggcuu

SEQ ID NO: 457513 - RNA, 19 nt, Artificial Sequence
  Description of Artificial Sequence: Synthetic oligonucleotide
aacuuucgauagaguuccu

SEQ ID NO: 457514 - RNA, 19 nt, Artificial Sequence
  Description of Artificial Sequence: Synthetic oligonucleotide
gguucacucgccaauaauu

SEQ ID NO: 457515 - RNA, 19 nt, Artificial Sequence
  Description of Artificial Sequence: Synthetic oligonucleotide
cguuauauuguaugugcaa

SEQ ID NO: 457516 - RNA, 19 nt, Artificial Sequence
  Description of Artificial Sequence: Synthetic oligonucleotide
caauggaaaaggcuccguu

SEQ ID NO: 457517 - RNA, 19 nt, Artificial Sequence
  Description of Artificial Sequence: Synthetic oligonucleotide
cgggacauaugaaugcuca

SEQ ID NO: 457518 - RNA, 19 nt, Artificial Sequence
  Description of Artificial Sequence: Synthetic oligonucleotide
guuggacgagaaaggaagu

SEQ ID NO: 457519 - RNA, 19 nt, Artificial Sequence
  Description of Artificial Sequence: Synthetic oligonucleotide
ggcuuguguacguuguggu

SEQ ID NO: 457520 - RNA, 19 nt, Artificial Sequence
  Description of Artificial Sequence: Synthetic oligonucleotide
ggagagugccagugcuuac

SEQ ID NO: 457521 - RNA, 19 nt, Artificial Sequence
  Description of Artificial Sequence: Synthetic oligonucleotide
aucgagaacuuggcuuaaa

SEQ ID NO: 457522 - RNA, 19 nt, Artificial Sequence
  Description of Artificial Sequence: Synthetic oligonucleotide
cuuuaccuuugcuccauuu

SEQ ID NO: 457523 - RNA, 19 nt, Artificial Sequence
  Description of Artificial Sequence: Synthetic oligonucleotide
cccauucuauccugaagga

SEQ ID NO: 457524 - RNA, 19 nt, Artificial Sequence
  Description of Artificial Sequence: Synthetic oligonucleotide
gcgucaaggggagauccug

SEQ ID NO: 457525 - RNA, 19 nt, Artificial Sequence
  Description of Artificial Sequence: Synthetic oligonucleotide
ucccgacaaugacguucug

SEQ ID NO: 457526 - RNA, 19 nt, Artificial Sequence
  Description of Artificial Sequence: Synthetic oligonucleotide
cuaagguuaugaacaucuu

SEQ ID NO: 457527 - RNA, 19 nt, Artificial Sequence
  Description of Artificial Sequence: Synthetic oligonucleotide
gcuuacugcaacaugcuuu

SEQ ID NO: 457528 - RNA, 19 nt, Artificial Sequence
  Description of Artificial Sequence: Synthetic oligonucleotide
gucagacuuuaaucugggu

SEQ ID NO: 457529 - RNA, 19 nt, Artificial Sequence
  Description of Artificial Sequence: Synthetic oligonucleotide
ccagcaugaacgcuaauau

SEQ ID NO: 457530 - RNA, 19 nt, Artificial Sequence
  Description of Artificial Sequence: Synthetic oligonucleotide
gcagcuaccuuaggacaug

SEQ ID NO: 457531 - RNA, 19 nt, Artificial Sequence
  Description of Artificial Sequence: Synthetic oligonucleotide
gucccgacaaugacguucu

SEQ ID NO: 457532 - RNA, 19 nt, Artificial Sequence
  Description of Artificial Sequence: Synthetic oligonucleotide
cacauugauccagcggcaa

SEQ ID NO: 457533 - RNA, 19 nt, Artificial Sequence
  Description of Artificial Sequence: Synthetic oligonucleotide
agcuaccuuaggacaugcu

SEQ ID NO: 457534 - RNA, 19 nt, Artificial Sequence
  Description of Artificial Sequence: Synthetic oligonucleotide
agcgucaaggggagauccu

SEQ ID NO: 457535 - RNA, 19 nt, Artificial Sequence
  Description of Artificial Sequence: Synthetic oligonucleotide
cccaacuuucgauagaguu

SEQ ID NO: 457536 - RNA, 19 nt, Artificial Sequence
  Description of Artificial Sequence: Synthetic oligonucleotide
gaagaaccucgggcaucug

SEQ ID NO: 457537 - RNA, 19 nt, Artificial Sequence
  Description of Artificial Sequence: Synthetic oligonucleotide
ccccagugcauauucugca

SEQ ID NO: 457538 - RNA, 19 nt, Artificial Sequence
  Description of Artificial Sequence: Synthetic oligonucleotide
gugcuuacugcaacaugcu

SEQ ID NO: 457539 - RNA, 19 nt, Artificial Sequence
  Description of Artificial Sequence: Synthetic oligonucleotide
ccguuuaccuguaucuucu

SEQ ID NO: 457540 - RNA, 19 nt, Artificial Sequence
  Description of Artificial Sequence: Synthetic oligonucleotide
cacgucugagcccaacuuu

SEQ ID NO: 457541 - RNA, 19 nt, Artificial Sequence
  Description of Artificial Sequence: Synthetic oligonucleotide
caucuggcuagggcuagaa

SEQ ID NO: 457542 - RNA, 19 nt, Artificial Sequence
  Description of Artificial Sequence: Synthetic oligonucleotide
ccuugagucagacuuuaau

SEQ ID NO: 457543 - RNA, 19 nt, Artificial Sequence
  Description of Artificial Sequence: Synthetic oligonucleotide
gggauacuauacacucuaa

SEQ ID NO: 457544 - RNA, 19 nt, Artificial Sequence
  Description of Artificial Sequence: Synthetic oligonucleotide
gaacgcuaauauggccccu

SEQ ID NO: 457545 - RNA, 19 nt, Artificial Sequence
  Description of Artificial Sequence: Synthetic oligonucleotide
auguuggggcuaagagaau

SEQ ID NO: 457546 - RNA, 19 nt, Artificial Sequence
  Description of Artificial Sequence: Synthetic oligonucleotide
cccagugcauauucugcaa

SEQ ID NO: 457547 - RNA, 19 nt, Artificial Sequence
  Description of Artificial Sequence: Synthetic oligonucleotide
ggucgcuuggagagugcca

SEQ ID NO: 457548 - RNA, 19 nt, Artificial Sequence
  Description of Artificial Sequence: Synthetic oligonucleotide
aucgggccagauacauuua

SEQ ID NO: 457549 - RNA, 19 nt, Artificial Sequence
  Description of Artificial Sequence: Synthetic oligonucleotide
gugcaucgggccagauaca

SEQ ID NO: 457550 - RNA, 19 nt, Artificial Sequence
  Description of Artificial Sequence: Synthetic oligonucleotide
ccaauauguaagccauggu

SEQ ID NO: 457551 - RNA, 19 nt, Artificial Sequence
  Description of Artificial Sequence: Synthetic oligonucleotide
cugauguguuugucaggau

SEQ ID NO: 457552 - RNA, 19 nt, Artificial Sequence
  Description of Artificial Sequence: Synthetic oligonucleotide
cgucaaggggagauccuga

SEQ ID NO: 457553 - RNA, 19 nt, Artificial Sequence
  Description of Artificial Sequence: Synthetic oligonucleotide
aggcuccguuuaccuguau

SEQ ID NO: 457554 - RNA, 19 nt, Artificial Sequence
  Description of Artificial Sequence: Synthetic oligonucleotide
cuccguuuaccuguaucuu

SEQ ID NO: 457555 - RNA, 19 nt, Artificial Sequence
  Description of Artificial Sequence: Synthetic oligonucleotide
gcaauggaaaaggcuccgu

SEQ ID NO: 457556 - RNA, 19 nt, Artificial Sequence
  Description of Artificial Sequence: Synthetic oligonucleotide
ccagcgucaaggggagauc

SEQ ID NO: 457557 - RNA, 19 nt, Artificial Sequence
  Description of Artificial Sequence: Synthetic oligonucleotide
agccccugucugauauuuu

SEQ ID NO: 457558 - RNA, 19 nt, Artificial Sequence
  Description of Artificial Sequence: Synthetic oligonucleotide
agaacacgucugagcccaa

SEQ ID NO: 457559 - RNA, 19 nt, Artificial Sequence
  Description of Artificial Sequence: Synthetic oligonucleotide
cuagggcuagaagguuugu

SEQ ID NO: 457560 - RNA, 19 nt, Artificial Sequence
  Description of Artificial Sequence: Synthetic oligonucleotide
cagccccugucugauauuu

SEQ ID NO: 457561 - RNA, 19 nt, Artificial Sequence
  Description of Artificial Sequence: Synthetic oligonucleotide
ccauucuauccugaaggau

SEQ ID NO: 457562 - RNA, 19 nt, Artificial Sequence
  Description of Artificial Sequence: Synthetic oligonucleotide
cuucaggcuuguguacguu

SEQ ID NO: 457563 - RNA, 19 nt, Artificial Sequence
  Description of Artificial Sequence: Synthetic oligonucleotide
ccuugcgauugaaguauau

SEQ ID NO: 457564 - RNA, 19 nt, Artificial Sequence
  Description of Artificial Sequence: Synthetic oligonucleotide
cagcggcaagugaaacaau

SEQ ID NO: 457565 - RNA, 19 nt, Artificial Sequence
  Description of Artificial Sequence: Synthetic oligonucleotide
ccaccaacuaaggcuugua

SEQ ID NO: 457566 - RNA, 19 nt, Artificial Sequence
  Description of Artificial Sequence: Synthetic oligonucleotide
gcaucgggccagauacauu

SEQ ID NO: 457567 - RNA, 19 nt, Artificial Sequence
  Description of Artificial Sequence: Synthetic oligonucleotide
cagucccgacaaugacguu

SEQ ID NO: 457568 - RNA, 19 nt, Artificial Sequence
  Description of Artificial Sequence: Synthetic oligonucleotide
cgccuucaguuggacgaga

SEQ ID NO: 457569 - RNA, 19 nt, Artificial Sequence
  Description of Artificial Sequence: Synthetic oligonucleotide
ccccagcgucaaggggaga

SEQ ID NO: 457570 - RNA, 19 nt, Artificial Sequence
  Description of Artificial Sequence: Synthetic oligonucleotide
aacccauacacccugaucc

SEQ ID NO: 457571 - RNA, 19 nt, Artificial Sequence
  Description of Artificial Sequence: Synthetic oligonucleotide
ucuggcaugaguaaaaugc

SEQ ID NO: 457572 - RNA, 19 nt, Artificial Sequence
  Description of Artificial Sequence: Synthetic oligonucleotide
acaacacuaaaugagaugg

SEQ ID NO: 457573 - RNA, 19 nt, Artificial Sequence
  Description of Artificial Sequence: Synthetic oligonucleotide
aagauggguaaguuugucc

SEQ ID NO: 457574 - RNA, 19 nt, Artificial Sequence
  Description of Artificial Sequence: Synthetic oligonucleotide
ugcagcaucaguaauauau

SEQ ID NO: 457575 - RNA, 19 nt, Artificial Sequence
  Description of Artificial Sequence: Synthetic oligonucleotide
gaggcuucgaguuaaggcg

SEQ ID NO: 457576 - RNA, 19 nt, Artificial Sequence
  Description of Artificial Sequence: Synthetic oligonucleotide
aacaagugcagacaguuca

SEQ ID NO: 457577 - RNA, 19 nt, Artificial Sequence
  Description of Artificial Sequence: Synthetic oligonucleotide
aacucuuaacucuugccuc

SEQ ID NO: 457578 - RNA, 19 nt, Artificial Sequence
  Description of Artificial Sequence: Synthetic oligonucleotide
gaacucuauaucuagcugc

SEQ ID NO: 457579 - RNA, 19 nt, Artificial Sequence
  Description of Artificial Sequence: Synthetic oligonucleotide
aacagaguugaauaugaca

SEQ ID NO: 457580 - RNA, 19 nt, Artificial Sequence
  Description of Artificial Sequence: Synthetic oligonucleotide
ucaguaauauaucccagug

SEQ ID NO: 457581 - RNA, 19 nt, Artificial Sequence
  Description of Artificial Sequence: Synthetic oligonucleotide
ugaacagaguugaauauga

SEQ ID NO: 457582 - RNA, 19 nt, Artificial Sequence
  Description of Artificial Sequence: Synthetic oligonucleotide
aacuaacccauaaagucac

SEQ ID NO: 457583 - RNA, 19 nt, Artificial Sequence
  Description of Artificial Sequence: Synthetic oligonucleotide
ucuaucucaaggauuuuca

SEQ ID NO: 457584 - RNA, 19 nt, Artificial Sequence
  Description of Artificial Sequence: Synthetic oligonucleotide
auaccaaggggcauaaugc

SEQ ID NO: 457585 - RNA, 19 nt, Artificial Sequence
  Description of Artificial Sequence: Synthetic oligonucleotide
aaugcaagacggucuauca

SEQ ID NO: 457586 - RNA, 19 nt, Artificial Sequence
  Description of Artificial Sequence: Synthetic oligonucleotide
aaaucuaauccugaucucu

SEQ ID NO: 457587 - RNA, 19 nt, Artificial Sequence
  Description of Artificial Sequence: Synthetic oligonucleotide
cuacaaucuuacuaucucg

SEQ ID NO: 457588 - RNA, 19 nt, Artificial Sequence
  Description of Artificial Sequence: Synthetic oligonucleotide
uguuuuagccuuuaagauc

SEQ ID NO: 457589 - RNA, 19 nt, Artificial Sequence
  Description of Artificial Sequence: Synthetic oligonucleotide
uagaacaugacucccucca

SEQ ID NO: 457590 - RNA, 19 nt, Artificial Sequence
  Description of Artificial Sequence: Synthetic oligonucleotide
ugcuuaaacucuaggagga

SEQ ID NO: 457591 - RNA, 19 nt, Artificial Sequence
  Description of Artificial Sequence: Synthetic oligonucleotide
ugaugggcccauaaaaccc

SEQ ID NO: 457592 - RNA, 19 nt, Artificial Sequence
  Description of Artificial Sequence: Synthetic oligonucleotide
aagagacacuagcagagug

SEQ ID NO: 457593 - RNA, 19 nt, Artificial Sequence
  Description of Artificial Sequence: Synthetic oligonucleotide
agagauucucccuauucag

SEQ ID NO: 457594 - RNA, 19 nt, Artificial Sequence
  Description of Artificial Sequence: Synthetic oligonucleotide
acguagaggaaccuagaac

SEQ ID NO: 457595 - RNA, 19 nt, Artificial Sequence
  Description of Artificial Sequence: Synthetic oligonucleotide
gaaccuagaacaugacucc

SEQ ID NO: 457596 - RNA, 19 nt, Artificial Sequence
  Description of Artificial Sequence: Synthetic oligonucleotide
uuagcuagugagcaaaaua

SEQ ID NO: 457597 - RNA, 19 nt, Artificial Sequence
  Description of Artificial Sequence: Synthetic oligonucleotide
aaacccauacacccugauc

SEQ ID NO: 457598 - RNA, 19 nt, Artificial Sequence
  Description of Artificial Sequence: Synthetic oligonucleotide
cagucaacagcucaaagug

SEQ ID NO: 457599 - RNA, 19 nt, Artificial Sequence
  Description of Artificial Sequence: Synthetic oligonucleotide
acucuaggaggauuacugc

SEQ ID NO: 457600 - RNA, 19 nt, Artificial Sequence
  Description of Artificial Sequence: Synthetic oligonucleotide
agaguugccacccucaaaa

SEQ ID NO: 457601 - RNA, 19 nt, Artificial Sequence
  Description of Artificial Sequence: Synthetic oligonucleotide
uauaucuagcugcuagccc

SEQ ID NO: 457602 - RNA, 19 nt, Artificial Sequence
  Description of Artificial Sequence: Synthetic oligonucleotide
aauggugguacuacaaucu

SEQ ID NO: 457603 - RNA, 19 nt, Artificial Sequence
  Description of Artificial Sequence: Synthetic oligonucleotide
aacacuaaaugagauggga

SEQ ID NO: 457604 - RNA, 19 nt, Artificial Sequence
  Description of Artificial Sequence: Synthetic oligonucleotide
agagagcuaaucuaucuca

SEQ ID NO: 457605 - RNA, 19 nt, Artificial Sequence
  Description of Artificial Sequence: Synthetic oligonucleotide
ugcagacaguucaauaacc

SEQ ID NO: 457606 - RNA, 19 nt, Artificial Sequence
  Description of Artificial Sequence: Synthetic oligonucleotide
aaucuaauccugaucucuc

SEQ ID NO: 457607 - RNA, 19 nt, Artificial Sequence
  Description of Artificial Sequence: Synthetic oligonucleotide
agaguugaauaugacauug

SEQ ID NO: 457608 - RNA, 19 nt, Artificial Sequence
  Description of Artificial Sequence: Synthetic oligonucleotide
gacaacacuaaaugagaug

SEQ ID NO: 457609 - RNA, 19 nt, Artificial Sequence
  Description of Artificial Sequence: Synthetic oligonucleotide
aauauaucccagugccuca

SEQ ID NO: 457610 - RNA, 19 nt, Artificial Sequence
  Description of Artificial Sequence: Synthetic oligonucleotide
auuucagcagguaaaguag

SEQ ID NO: 457611 - RNA, 19 nt, Artificial Sequence
  Description of Artificial Sequence: Synthetic oligonucleotide
uuuaagaucugggaacucu

SEQ ID NO: 457612 - RNA, 19 nt, Artificial Sequence
  Description of Artificial Sequence: Synthetic oligonucleotide
aaucuuuccaugauaggga

SEQ ID NO: 457613 - RNA, 19 nt, Artificial Sequence
  Description of Artificial Sequence: Synthetic oligonucleotide
agcuaaucuaucucaagga

SEQ ID NO: 457614 - RNA, 19 nt, Artificial Sequence
  Description of Artificial Sequence: Synthetic oligonucleotide
acuaucucgcuccagcuca

SEQ ID NO: 457615 - RNA, 19 nt, Artificial Sequence
  Description of Artificial Sequence: Synthetic oligonucleotide
aagggagaguaaaccaacc

SEQ ID NO: 457616 - RNA, 19 nt, Artificial Sequence
  Description of Artificial Sequence: Synthetic oligonucleotide
cuaggcaauaagagcagcc

SEQ ID NO: 457617 - RNA, 19 nt, Artificial Sequence
  Description of Artificial Sequence: Synthetic oligonucleotide
agaucugggaacucuauau

SEQ ID NO: 457618 - RNA, 19 nt, Artificial Sequence
  Description of Artificial Sequence: Synthetic oligonucleotide
aucaguaauauaucccagu

SEQ ID NO: 457619 - RNA, 19 nt, Artificial Sequence
  Description of Artificial Sequence: Synthetic oligonucleotide
auaggagcuaggcaauaag

SEQ ID NO: 457620 - RNA, 19 nt, Artificial Sequence
  Description of Artificial Sequence: Synthetic oligonucleotide
cuaaaugagaugggaaaag

SEQ ID NO: 457621 - RNA, 19 nt, Artificial Sequence
  Description of Artificial Sequence: Synthetic oligonucleotide
cccauaaugacucauuagc

SEQ ID NO: 457622 - RNA, 19 nt, Artificial Sequence
  Description of Artificial Sequence: Synthetic oligonucleotide
gagcuaggcaauaagagca

SEQ ID NO: 457623 - RNA, 19 nt, Artificial Sequence
  Description of Artificial Sequence: Synthetic oligonucleotide
cugacagaagaaugaacag

SEQ ID NO: 457624 - RNA, 19 nt, Artificial Sequence
  Description of Artificial Sequence: Synthetic oligonucleotide
ugguaaaaccuaagaauaa

SEQ ID NO: 457625 - RNA, 19 nt, Artificial Sequence
  Description of Artificial Sequence: Synthetic oligonucleotide
aaagccccgagucaggaua

SEQ ID NO: 457626 - RNA, 19 nt, Artificial Sequence
  Description of Artificial Sequence: Synthetic oligonucleotide
uguguugugugugugugug

SEQ ID NO: 457627 - RNA, 19 nt, Artificial Sequence
  Description of Artificial Sequence: Synthetic oligonucleotide
cuauaucuagcugcuagcc

SEQ ID NO: 457628 - RNA, 19 nt, Artificial Sequence
  Description of Artificial Sequence: Synthetic oligonucleotide
guagcgucgccguacacag

SEQ ID NO: 457629 - RNA, 19 nt, Artificial Sequence
  Description of Artificial Sequence: Synthetic oligonucleotide
caugguguagucugauacc

SEQ ID NO: 457630 - RNA, 19 nt, Artificial Sequence
  Description of Artificial Sequence: Synthetic oligonucleotide
acguaguuccuaucaauug

SEQ ID NO: 457631 - RNA, 19 nt, Artificial Sequence
  Description of Artificial Sequence: Synthetic oligonucleotide
uguugugugugugugugug

SEQ ID NO: 457632 - RNA, 19 nt, Artificial Sequence
  Description of Artificial Sequence: Synthetic oligonucleotide
ucauuagcuagugagcaaa

SEQ ID NO: 457633 - RNA, 19 nt, Artificial Sequence
  Description of Artificial Sequence: Synthetic oligonucleotide
ugcucuuauuccucaaaac

SEQ ID NO: 457634 - RNA, 19 nt, Artificial Sequence
  Description of Artificial Sequence: Synthetic oligonucleotide
ggaacaauacuggaguucc

SEQ ID NO: 457635 - RNA, 19 nt, Artificial Sequence
  Description of Artificial Sequence: Synthetic oligonucleotide
gcuagugagcaaaauauag

SEQ ID NO: 457636 - RNA, 19 nt, Artificial Sequence
  Description of Artificial Sequence: Synthetic oligonucleotide
agucaacagcucaaagugc

SEQ ID NO: 457637 - RNA, 19 nt, Artificial Sequence
  Description of Artificial Sequence: Synthetic oligonucleotide
caaucuuacuaucucgcuc

SEQ ID NO: 457638 - RNA, 19 nt, Artificial Sequence
  Description of Artificial Sequence: Synthetic oligonucleotide
aacuguguugugugugugu

SEQ ID NO: 457639 - RNA, 19 nt, Artificial Sequence
  Description of Artificial Sequence: Synthetic oligonucleotide
uucgaguuaaggcgccgag

SEQ ID NO: 457640 - RNA, 19 nt, Artificial Sequence
  Description of Artificial Sequence: Synthetic oligonucleotide
aacucuauaucuagcugcu

SEQ ID NO: 457641 - RNA, 19 nt, Artificial Sequence
  Description of Artificial Sequence: Synthetic oligonucleotide
ugggaacucuauaucuagc

SEQ ID NO: 457642 - RNA, 19 nt, Artificial Sequence
  Description of Artificial Sequence: Synthetic oligonucleotide
ggagcuaggcaauaagagc

SEQ ID NO: 457643 - RNA, 19 nt, Artificial Sequence
  Description of Artificial Sequence: Synthetic oligonucleotide
gguguagucugauaccaag

SEQ ID NO: 457644 - RNA, 19 nt, Artificial Sequence
  Description of Artificial Sequence: Synthetic oligonucleotide
agggacguaguuccuauca

SEQ ID NO: 457645 - RNA, 19 nt, Artificial Sequence
  Description of Artificial Sequence: Synthetic oligonucleotide
acaaucuuacuaucucgcu

SEQ ID NO: 457646 - RNA, 19 nt, Artificial Sequence
  Description of Artificial Sequence: Synthetic oligonucleotide
caacacuaaaugagauggg

SEQ ID NO: 457647 - RNA, 19 nt, Artificial Sequence
  Description of Artificial Sequence: Synthetic oligonucleotide
aagucacuguagcgucgcc

SEQ ID NO: 457648 - RNA, 19 nt, Artificial Sequence
  Description of Artificial Sequence: Synthetic oligonucleotide
augucauuucagcagguaa

SEQ ID NO: 457649 - RNA, 19 nt, Artificial Sequence
  Description of Artificial Sequence: Synthetic oligonucleotide
guaaaguagagggcaagug

SEQ ID NO: 457650 - RNA, 19 nt, Artificial Sequence
  Description of Artificial Sequence: Synthetic oligonucleotide
acuaaaugagaugggaaaa

SEQ ID NO: 457651 - RNA, 19 nt, Artificial Sequence
  Description of Artificial Sequence: Synthetic oligonucleotide
aaggggcauaaugcaagac

SEQ ID NO: 457652 - RNA, 19 nt, Artificial Sequence
  Description of Artificial Sequence: Synthetic oligonucleotide
aggaggauuacugccauga

SEQ ID NO: 457653 - RNA, 19 nt, Artificial Sequence
  Description of Artificial Sequence: Synthetic oligonucleotide
cacuaaaugagaugggaaa

SEQ ID NO: 457654 - RNA, 19 nt, Artificial Sequence
  Description of Artificial Sequence: Synthetic oligonucleotide
uucuggcaugaguaaaaug

SEQ ID NO: 457655 - RNA, 19 nt, Artificial Sequence
  Description of Artificial Sequence: Synthetic oligonucleotide
uguagcgucgccguacaca

SEQ ID NO: 457656 - RNA, 19 nt, Artificial Sequence
  Description of Artificial Sequence: Synthetic oligonucleotide
ggagucuaagcaaagaguc

SEQ ID NO: 457657 - RNA, 19 nt, Artificial Sequence
  Description of Artificial Sequence: Synthetic oligonucleotide
agugguaaguugcucuuau

SEQ ID NO: 457658 - RNA, 19 nt, Artificial Sequence
  Description of Artificial Sequence: Synthetic oligonucleotide
agcgucgccguacacagga

SEQ ID NO: 457659 - RNA, 19 nt, Artificial Sequence
  Description of Artificial Sequence: Synthetic oligonucleotide
agaguuaacuugcucucau

SEQ ID NO: 457660 - RNA, 19 nt, Artificial Sequence
  Description of Artificial Sequence: Synthetic oligonucleotide
gguacuacaaucuuacuau

SEQ ID NO: 457661 - RNA, 19 nt, Artificial Sequence
  Description of Artificial Sequence: Synthetic oligonucleotide
uugugugugugugugugug

SEQ ID NO: 457662 - RNA, 19 nt, Artificial Sequence
  Description of Artificial Sequence: Synthetic oligonucleotide
uaaugcaagacggucuauc

SEQ ID NO: 457663 - RNA, 19 nt, Artificial Sequence
  Description of Artificial Sequence: Synthetic oligonucleotide
guaaguugcucuuauuccu

SEQ ID NO: 457664 - RNA, 19 nt, Artificial Sequence
  Description of Artificial Sequence: Synthetic oligonucleotide
gugugugugugugugugcg

SEQ ID NO: 457665 - RNA, 19 nt, Artificial Sequence
  Description of Artificial Sequence: Synthetic oligonucleotide
cgagucaggauauauacac

SEQ ID NO: 457666 - RNA, 19 nt, Artificial Sequence
  Description of Artificial Sequence: Synthetic oligonucleotide
agucacuguagcgucgccg

SEQ ID NO: 457667 - RNA, 19 nt, Artificial Sequence
  Description of Artificial Sequence: Synthetic oligonucleotide
agugagcaaaauauagaca

SEQ ID NO: 457668 - RNA, 19 nt, Artificial Sequence
  Description of Artificial Sequence: Synthetic oligonucleotide
acuguguugugugugugug

SEQ ID NO: 457669 - RNA, 19 nt, Artificial Sequence
  Description of Artificial Sequence: Synthetic oligonucleotide
aaacuguguugugugugug

SEQ ID NO: 457670 - RNA, 19 nt, Artificial Sequence
  Description of Artificial Sequence: Synthetic oligonucleotide
gugugugugugugugcgcg

SEQ ID NO: 457671 - RNA, 19 nt, Artificial Sequence
  Description of Artificial Sequence: Synthetic oligonucleotide
gagccauaaagggauagga

SEQ ID NO: 457672 - RNA, 19 nt, Artificial Sequence
  Description of Artificial Sequence: Synthetic oligonucleotide
aaggacccacauagaaaac

SEQ ID NO: 457673 - RNA, 19 nt, Artificial Sequence
  Description of Artificial Sequence: Synthetic oligonucleotide
ugugugugugugugugugc

SEQ ID NO: 457674 - RNA, 19 nt, Artificial Sequence
  Description of Artificial Sequence: Synthetic oligonucleotide
ucuuuccaugauagggagu

SEQ ID NO: 457675 - RNA, 19 nt, Artificial Sequence
  Description of Artificial Sequence: Synthetic oligonucleotide
ucuaucaggccaggggaug

SEQ ID NO: 457676 - RNA, 19 nt, Artificial Sequence
  Description of Artificial Sequence: Synthetic oligonucleotide
uacuggcgcaccuucccag

SEQ ID NO: 457677 - RNA, 19 nt, Artificial Sequence
  Description of Artificial Sequence: Synthetic oligonucleotide
agggaaaacugcuggccca

SEQ ID NO: 457678 - RNA, 19 nt, Artificial Sequence
  Description of Artificial Sequence: Synthetic oligonucleotide
cagagauucucccuauuca

SEQ ID NO: 457679 - RNA, 19 nt, Artificial Sequence
  Description of Artificial Sequence: Synthetic oligonucleotide
uguagacagcguucauucu

SEQ ID NO: 457680 - RNA, 19 nt, Artificial Sequence
  Description of Artificial Sequence: Synthetic oligonucleotide
aaagagagagaggcuuagu

SEQ ID NO: 457681 - RNA, 19 nt, Artificial Sequence
  Description of Artificial Sequence: Synthetic oligonucleotide
auaaaagccccgagucagg

SEQ ID NO: 457682 - RNA, 19 nt, Artificial Sequence
  Description of Artificial Sequence: Synthetic oligonucleotide
cccgagucaggauauauac

SEQ ID NO: 457683 - RNA, 19 nt, Artificial Sequence
  Description of Artificial Sequence: Synthetic oligonucleotide
ucuaagcaaagagucccaa

SEQ ID NO: 457684 - RNA, 19 nt, Artificial Sequence
  Description of Artificial Sequence: Synthetic oligonucleotide
cguaguuccuaucaauugc

SEQ ID NO: 457685 - RNA, 19 nt, Artificial Sequence
  Description of Artificial Sequence: Synthetic oligonucleotide
agcaaaauauagacagcca

SEQ ID NO: 457686 - RNA, 19 nt, Artificial Sequence
  Description of Artificial Sequence: Synthetic oligonucleotide
ccaaggggcauaaugcaag

SEQ ID NO: 457687 - RNA, 19 nt, Artificial Sequence
  Description of Artificial Sequence: Synthetic oligonucleotide
gugugcuucuacccuuggg

SEQ ID NO: 457688 - RNA, 19 nt, Artificial Sequence
  Description of Artificial Sequence: Synthetic oligonucleotide
agcuagagagcuaaucuau

SEQ ID NO: 457689 - RNA, 19 nt, Artificial Sequence
  Description of Artificial Sequence: Synthetic oligonucleotide
ugugugugugugugugcgc

SEQ ID NO: 457690 - RNA, 19 nt, Artificial Sequence
  Description of Artificial Sequence: Synthetic oligonucleotide
uaggagaguugccacccuc

SEQ ID NO: 457691 - RNA, 19 nt, Artificial Sequence
  Description of Artificial Sequence: Synthetic oligonucleotide
ugguuucccaccucucuuc

SEQ ID NO: 457692 - RNA, 19 nt, Artificial Sequence
  Description of Artificial Sequence: Synthetic oligonucleotide
caagguuagccuucuggca

SEQ ID NO: 457693 - RNA, 19 nt, Artificial Sequence
  Description of Artificial Sequence: Synthetic oligonucleotide
cccaagguuagccuucugg

SEQ ID NO: 457694 - RNA, 19 nt, Artificial Sequence
  Description of Artificial Sequence: Synthetic oligonucleotide
cuagagagcuaaucuaucu

SEQ ID NO: 457695 - RNA, 19 nt, Artificial Sequence
  Description of Artificial Sequence: Synthetic oligonucleotide
uuuuagccuuuaagaucug

SEQ ID NO: 457696 - RNA, 19 nt, Artificial Sequence
  Description of Artificial Sequence: Synthetic oligonucleotide
caacucuuaacucuugccu

SEQ ID NO: 457697 - RNA, 19 nt, Artificial Sequence
  Description of Artificial Sequence: Synthetic oligonucleotide
caagacggucuaucaggcc

SEQ ID NO: 457698 - RNA, 19 nt, Artificial Sequence
  Description of Artificial Sequence: Synthetic oligonucleotide
gcccuauuucaauuucugg

SEQ ID NO: 457699 - RNA, 19 nt, Artificial Sequence
  Description of Artificial Sequence: Synthetic oligonucleotide
ugugugugugugugugugu

SEQ ID NO: 457700 - RNA, 19 nt, Artificial Sequence
  Description of Artificial Sequence: Synthetic oligonucleotide
guuuguccgcaugcgaacc

SEQ ID NO: 457701 - RNA, 19 nt, Artificial Sequence
  Description of Artificial Sequence: Synthetic oligonucleotide
uguccgcaugcgaaccuca

SEQ ID NO: 457702 - RNA, 19 nt, Artificial Sequence
  Description of Artificial Sequence: Synthetic oligonucleotide
ugugugugugugugcgcgc

SEQ ID NO: 457703 - RNA, 19 nt, Artificial Sequence
  Description of Artificial Sequence: Synthetic oligonucleotide
cuguuuuagccuuuaagau

SEQ ID NO: 457704 - RNA, 19 nt, Artificial Sequence
  Description of Artificial Sequence: Synthetic oligonucleotide
ccgcaugcgaaccucauag

SEQ ID NO: 457705 - RNA, 19 nt, Artificial Sequence
  Description of Artificial Sequence: Synthetic oligonucleotide
ggcaauaagagcagccuac

SEQ ID NO: 457706 - RNA, 19 nt, Artificial Sequence
  Description of Artificial Sequence: Synthetic oligonucleotide
guuacuuggcggcccauaa

SEQ ID NO: 457707 - RNA, 19 nt, Artificial Sequence
  Description of Artificial Sequence: Synthetic oligonucleotide
caccgucuguggauuaaag

SEQ ID NO: 457708 - RNA, 19 nt, Artificial Sequence
  Description of Artificial Sequence: Synthetic oligonucleotide
gugugugugugugugugug

SEQ ID NO: 457709 - RNA, 19 nt, Artificial Sequence
  Description of Artificial Sequence: Synthetic oligonucleotide
ugugugugugugcgcgcgc

SEQ ID NO: 457710 - RNA, 19 nt, Artificial Sequence
  Description of Artificial Sequence: Synthetic oligonucleotide
agucugauaccaaggggca

SEQ ID NO: 457711 - RNA, 19 nt, Artificial Sequence
  Description of Artificial Sequence: Synthetic oligonucleotide
auuagcuagugagcaaaau

SEQ ID NO: 457712 - RNA, 19 nt, Artificial Sequence
  Description of Artificial Sequence: Synthetic oligonucleotide
ugguguagucugauaccaa

SEQ ID NO: 457713 - RNA, 19 nt, Artificial Sequence
  Description of Artificial Sequence: Synthetic oligonucleotide
ggagccauaaagggauagg

SEQ ID NO: 457714 - RNA, 19 nt, Artificial Sequence
  Description of Artificial Sequence: Synthetic oligonucleotide
acccauacacccugaucca

SEQ ID NO: 457715 - RNA, 19 nt, Artificial Sequence
  Description of Artificial Sequence: Synthetic oligonucleotide
gauaggagcuaggcaauaa

SEQ ID NO: 457716 - RNA, 19 nt, Artificial Sequence
  Description of Artificial Sequence: Synthetic oligonucleotide
gugugugugugugcgcgcg

SEQ ID NO: 457717 - RNA, 19 nt, Artificial Sequence
  Description of Artificial Sequence: Synthetic oligonucleotide
agcuaggcaauaagagcag

SEQ ID NO: 457718 - RNA, 19 nt, Artificial Sequence
  Description of Artificial Sequence: Synthetic oligonucleotide
auggugguacuacaaucuu

SEQ ID NO: 457719 - RNA, 19 nt, Artificial Sequence
  Description of Artificial Sequence: Synthetic oligonucleotide
agacacuagcagagugccc

SEQ ID NO: 457720 - RNA, 19 nt, Artificial Sequence
  Description of Artificial Sequence: Synthetic oligonucleotide
ggcauaaugcaagacgguc

SEQ ID NO: 457721 - RNA, 19 nt, Artificial Sequence
  Description of Artificial Sequence: Synthetic oligonucleotide
ucgaguuaaggcgccgagu

SEQ ID NO: 457722 - RNA, 19 nt, Artificial Sequence
  Description of Artificial Sequence: Synthetic oligonucleotide
aaauggggccucagagucu

SEQ ID NO: 457723 - RNA, 19 nt, Artificial Sequence
  Description of Artificial Sequence: Synthetic oligonucleotide
gagagcuaaucuaucucaa

SEQ ID NO: 457724 - RNA, 19 nt, Artificial Sequence
  Description of Artificial Sequence: Synthetic oligonucleotide
caguaaccaugaugauggg

SEQ ID NO: 457725 - RNA, 19 nt, Artificial Sequence
  Description of Artificial Sequence: Synthetic oligonucleotide
ccagaguuaacuugcucuc

SEQ ID NO: 457726 - RNA, 19 nt, Artificial Sequence
  Description of Artificial Sequence: Synthetic oligonucleotide
acuuuucaugcagguagga

SEQ ID NO: 457727 - RNA, 19 nt, Artificial Sequence
  Description of Artificial Sequence: Synthetic oligonucleotide
gggacaacacuaaaugaga

SEQ ID NO: 457728 - RNA, 19 nt, Artificial Sequence
  Description of Artificial Sequence: Synthetic oligonucleotide
gcagcuagagagcuaaucu

SEQ ID NO: 457729 - RNA, 19 nt, Artificial Sequence
  Description of Artificial Sequence: Synthetic oligonucleotide
ccugguaaaaccuaagaau

SEQ ID NO: 457730 - RNA, 19 nt, Artificial Sequence
  Description of Artificial Sequence: Synthetic oligonucleotide
ggacccacauagaaaacac

SEQ ID NO: 457731 - RNA, 19 nt, Artificial Sequence
  Description of Artificial Sequence: Synthetic oligonucleotide
acuguucgaggcccugccu

SEQ ID NO: 457732 - RNA, 19 nt, Artificial Sequence
  Description of Artificial Sequence: Synthetic oligonucleotide
cgucuguggauuaaagaug

SEQ ID NO: 457733 - RNA, 19 nt, Artificial Sequence
  Description of Artificial Sequence: Synthetic oligonucleotide
cacuguagcgucgccguac

SEQ ID NO: 457734 - RNA, 19 nt, Artificial Sequence
  Description of Artificial Sequence: Synthetic oligonucleotide
caaggggcauaaugcaaga

SEQ ID NO: 457735 - RNA, 19 nt, Artificial Sequence
  Description of Artificial Sequence: Synthetic oligonucleotide
gucgccguacacaggauuc

SEQ ID NO: 457736 - RNA, 19 nt, Artificial Sequence
  Description of Artificial Sequence: Synthetic oligonucleotide
cagcuagagagcuaaucua

SEQ ID NO: 457737 - RNA, 19 nt, Artificial Sequence
  Description of Artificial Sequence: Synthetic oligonucleotide
aauugccuuccaguccaau

SEQ ID NO: 457738 - RNA, 19 nt, Artificial Sequence
  Description of Artificial Sequence: Synthetic oligonucleotide
gucacuguagcgucgccgu

SEQ ID NO: 457739 - RNA, 19 nt, Artificial Sequence
  Description of Artificial Sequence: Synthetic oligonucleotide
cauuagcuagugagcaaaa

SEQ ID NO: 457740 - RNA, 19 nt, Artificial Sequence
  Description of Artificial Sequence: Synthetic oligonucleotide
gcaagacggucuaucaggc

SEQ ID NO: 457741 - RNA, 19 nt, Artificial Sequence
  Description of Artificial Sequence: Synthetic oligonucleotide
ccuaggagaguugccaccc

SEQ ID NO: 457742 - RNA, 19 nt, Artificial Sequence
  Description of Artificial Sequence: Synthetic oligonucleotide
cacguagaggaaccuagaa

SEQ ID NO: 457743 - RNA, 19 nt, Artificial Sequence
  Description of Artificial Sequence: Synthetic oligonucleotide
gcuuaggagaaaucagaaa

SEQ ID NO: 457744 - RNA, 19 nt, Artificial Sequence
  Description of Artificial Sequence: Synthetic oligonucleotide
ccuagaacaugacucccuc

SEQ ID NO: 457745 - RNA, 19 nt, Artificial Sequence
  Description of Artificial Sequence: Synthetic oligonucleotide
agcuagugagcaaaauaua

SEQ ID NO: 457746 - RNA, 19 nt, Artificial Sequence
  Description of Artificial Sequence: Synthetic oligonucleotide
ggguaaguuuguccgcaug

SEQ ID NO: 457747 - RNA, 19 nt, Artificial Sequence
  Description of Artificial Sequence: Synthetic oligonucleotide
uggguaaguuuguccgcau

SEQ ID NO: 457748 - RNA, 19 nt, Artificial Sequence
  Description of Artificial Sequence: Synthetic oligonucleotide
gacggucuaucaggccagg

SEQ ID NO: 457749 - RNA, 19 nt, Artificial Sequence
  Description of Artificial Sequence: Synthetic oligonucleotide
cuagacuugcagcaucagu

SEQ ID NO: 457750 - RNA, 19 nt, Artificial Sequence
  Description of Artificial Sequence: Synthetic oligonucleotide
gcuaaucuaucucaaggau

SEQ ID NO: 457751 - RNA, 19 nt, Artificial Sequence
  Description of Artificial Sequence: Synthetic oligonucleotide
cuauucaguguuccuggua

SEQ ID NO: 457752 - RNA, 19 nt, Artificial Sequence
  Description of Artificial Sequence: Synthetic oligonucleotide
acggucuaucaggccaggg

SEQ ID NO: 457753 - RNA, 19 nt, Artificial Sequence
  Description of Artificial Sequence: Synthetic oligonucleotide
cuagcugcuagcccuauuu

SEQ ID NO: 457754 - RNA, 19 nt, Artificial Sequence
  Description of Artificial Sequence: Synthetic oligonucleotide
accaaggggcauaaugcaa

SEQ ID NO: 457755 - RNA, 19 nt, Artificial Sequence
  Description of Artificial Sequence: Synthetic oligonucleotide
cuacccuugggacaacacu

SEQ ID NO: 457756 - RNA, 19 nt, Artificial Sequence
  Description of Artificial Sequence: Synthetic oligonucleotide
ucgccguacacaggauucu

SEQ ID NO: 457757 - RNA, 19 nt, Artificial Sequence
  Description of Artificial Sequence: Synthetic oligonucleotide
uccuuaccacguagaggaa

SEQ ID NO: 457758 - RNA, 19 nt, Artificial Sequence
  Description of Artificial Sequence: Synthetic oligonucleotide
caauaagagcagccuacua

SEQ ID NO: 457759 - RNA, 19 nt, Artificial Sequence
  Description of Artificial Sequence: Synthetic oligonucleotide
gccuaggagaguugccacc

SEQ ID NO: 457760 - RNA, 19 nt, Artificial Sequence
  Description of Artificial Sequence: Synthetic oligonucleotide
gcaugaguaaaaugcccaa

SEQ ID NO: 457761 - RNA, 19 nt, Artificial Sequence
  Description of Artificial Sequence: Synthetic oligonucleotide
agcagagauucucccuauu

SEQ ID NO: 457762 - RNA, 19 nt, Artificial Sequence
  Description of Artificial Sequence: Synthetic oligonucleotide
cauaaagggauaggagcua

SEQ ID NO: 457763 - RNA, 19 nt, Artificial Sequence
  Description of Artificial Sequence: Synthetic oligonucleotide
gcuaggcaauaagagcagc

SEQ ID NO: 457764 - RNA, 19 nt, Artificial Sequence
  Description of Artificial Sequence: Synthetic oligonucleotide
ucacuguagcgucgccgua

SEQ ID NO: 457765 - RNA, 19 nt, Artificial Sequence
  Description of Artificial Sequence: Synthetic oligonucleotide
gcaugcgaaccucauaggu

SEQ ID NO: 457766 - RNA, 19 nt, Artificial Sequence
  Description of Artificial Sequence: Synthetic oligonucleotide
acgcccaccgucuguggau

SEQ ID NO: 457767 - RNA, 19 nt, Artificial Sequence
  Description of Artificial Sequence: Synthetic oligonucleotide
gcuagagagcuaaucuauc

SEQ ID NO: 457768 - RNA, 19 nt, Artificial Sequence
  Description of Artificial Sequence: Synthetic oligonucleotide
aguuacuuggcggcccaua

SEQ ID NO: 457769 - RNA, 19 nt, Artificial Sequence
  Description of Artificial Sequence: Synthetic oligonucleotide
cuucgaguuaaggcgccga

SEQ ID NO: 457770 - RNA, 19 nt, Artificial Sequence
  Description of Artificial Sequence: Synthetic oligonucleotide
ccgucuguggauuaaagau

SEQ ID NO: 457771 - RNA, 19 nt, Artificial Sequence
  Description of Artificial Sequence: Synthetic oligonucleotide
cuuaaacucuaggaggauu

SEQ ID NO: 457772 - RNA, 19 nt, Artificial Sequence
  Description of Artificial Sequence: Synthetic oligonucleotide
gguaaaguagagggcaagu

SEQ ID NO: 457773 - RNA, 19 nt, Artificial Sequence
  Description of Artificial Sequence: Synthetic oligonucleotide
guugugugugugugugugu

SEQ ID NO: 457774 - RNA, 19 nt, Artificial Sequence
  Description of Artificial Sequence: Synthetic oligonucleotide
ggugagagggacuccuacu

SEQ ID NO: 457775 - RNA, 19 nt, Artificial Sequence
  Description of Artificial Sequence: Synthetic oligonucleotide
gaagcgcgcgcggcccacg

SEQ ID NO: 457776 - RNA, 19 nt, Artificial Sequence
  Description of Artificial Sequence: Synthetic oligonucleotide
gacuccuacuggcgcaccu

SEQ ID NO: 457777 - RNA, 19 nt, Artificial Sequence
  Description of Artificial Sequence: Synthetic oligonucleotide
gggacguaguuccuaucaa

SEQ ID NO: 457778 - RNA, 19 nt, Artificial Sequence
  Description of Artificial Sequence: Synthetic oligonucleotide
cuaggaggauuacugccau

SEQ ID NO: 457779 - RNA, 19 nt, Artificial Sequence
  Description of Artificial Sequence: Synthetic oligonucleotide
cagaguugaauaugacauu

SEQ ID NO: 457780 - RNA, 19 nt, Artificial Sequence
  Description of Artificial Sequence: Synthetic oligonucleotide
gcuucgaguuaaggcgccg

SEQ ID NO: 457781 - RNA, 19 nt, Artificial Sequence
  Description of Artificial Sequence: Synthetic oligonucleotide
acucuauaucuagcugcua

SEQ ID NO: 457782 - RNA, 19 nt, Artificial Sequence
  Description of Artificial Sequence: Synthetic oligonucleotide
ggaggauuacugccaugaa

SEQ ID NO: 457783 - RNA, 19 nt, Artificial Sequence
  Description of Artificial Sequence: Synthetic oligonucleotide
acuccuacuggcgcaccuu

SEQ ID NO: 457784 - RNA, 19 nt, Artificial Sequence
  Description of Artificial Sequence: Synthetic oligonucleotide
cgcaugcgaaccucauagg

SEQ ID NO: 457785 - RNA, 19 nt, Artificial Sequence
  Description of Artificial Sequence: Synthetic oligonucleotide
ccgagucaggauauauaca

SEQ ID NO: 457786 - RNA, 19 nt, Artificial Sequence
  Description of Artificial Sequence: Synthetic oligonucleotide
cuguagcgucgccguacac

SEQ ID NO: 457787 - RNA, 19 nt, Artificial Sequence
  Description of Artificial Sequence: Synthetic oligonucleotide
ugaagcgcgcgcggcccac

SEQ ID NO: 457788 - RNA, 19 nt, Artificial Sequence
  Description of Artificial Sequence: Synthetic oligonucleotide
cccuagacuugcagcauca

SEQ ID NO: 457789 - RNA, 19 nt, Artificial Sequence
  Description of Artificial Sequence: Synthetic oligonucleotide
ggacaacacuaaaugagau

SEQ ID NO: 457790 - RNA, 19 nt, Artificial Sequence
  Description of Artificial Sequence: Synthetic oligonucleotide
ggaguuccaugggaaacaa

SEQ ID NO: 457791 - RNA, 19 nt, Artificial Sequence
  Description of Artificial Sequence: Synthetic oligonucleotide
cuacuacccuauggcuuuc

SEQ ID NO: 457792 - RNA, 19 nt, Artificial Sequence
  Description of Artificial Sequence: Synthetic oligonucleotide
cuguguugugugugugugu

SEQ ID NO: 457793 - RNA, 19 nt, Artificial Sequence
  Description of Artificial Sequence: Synthetic oligonucleotide
guguugugugugugugugu

SEQ ID NO: 457794 - RNA, 19 nt, Artificial Sequence
  Description of Artificial Sequence: Synthetic oligonucleotide
ccuagacuugcagcaucag

SEQ ID NO: 457795 - RNA, 19 nt, Artificial Sequence
  Description of Artificial Sequence: Synthetic oligonucleotide
ccugaggcuucgaguuaag

SEQ ID NO: 457796 - RNA, 19 nt, Artificial Sequence
  Description of Artificial Sequence: Synthetic oligonucleotide
ccuugggacaacacuaaau

SEQ ID NO: 457797 - RNA, 19 nt, Artificial Sequence
  Description of Artificial Sequence: Synthetic oligonucleotide
ggaaacaagugcagacagu

SEQ ID NO: 457798 - RNA, 19 nt, Artificial Sequence
  Description of Artificial Sequence: Synthetic oligonucleotide
ccccuagacuugcagcauc

SEQ ID NO: 457799 - RNA, 19 nt, Artificial Sequence
  Description of Artificial Sequence: Synthetic oligonucleotide
ccuacuacccuauggcuuu

SEQ ID NO: 457800 - RNA, 19 nt, Artificial Sequence
  Description of Artificial Sequence: Synthetic oligonucleotide
gugguaaguugcucuuauu

SEQ ID NO: 457801 - RNA, 19 nt, Artificial Sequence
  Description of Artificial Sequence: Synthetic oligonucleotide
cuucuacccuugggacaac

SEQ ID NO: 457802 - RNA, 19 nt, Artificial Sequence
  Description of Artificial Sequence: Synthetic oligonucleotide
cuaggagaguugccacccu

SEQ ID NO: 457803 - RNA, 19 nt, Artificial Sequence
  Description of Artificial Sequence: Synthetic oligonucleotide
gcgugugugcuucuacccu

SEQ ID NO: 457804 - RNA, 19 nt, Artificial Sequence
  Description of Artificial Sequence: Synthetic oligonucleotide
cagugguaaguugcucuua

SEQ ID NO: 457805 - RNA, 19 nt, Artificial Sequence
  Description of Artificial Sequence: Synthetic oligonucleotide
cccagcaauuuuguuaaua

SEQ ID NO: 457806 - RNA, 19 nt, Artificial Sequence
  Description of Artificial Sequence: Synthetic oligonucleotide
accuucccagggacguagu

SEQ ID NO: 457807 - RNA, 19 nt, Artificial Sequence
  Description of Artificial Sequence: Synthetic oligonucleotide
gccuacuacccuauggcuu

SEQ ID NO: 457808 - RNA, 19 nt, Artificial Sequence
  Description of Artificial Sequence: Synthetic oligonucleotide
ccaguccaaucccucccca

SEQ ID NO: 457809 - RNA, 19 nt, Artificial Sequence
  Description of Artificial Sequence: Synthetic oligonucleotide
gcuuaaacucuaggaggau

SEQ ID NO: 457810 - RNA, 19 nt, Artificial Sequence
  Description of Artificial Sequence: Synthetic oligonucleotide
gggcuccaagacccauguc

SEQ ID NO: 457811 - RNA, 19 nt, Artificial Sequence
  Description of Artificial Sequence: Synthetic oligonucleotide
cccuugggacaacacuaaa

SEQ ID NO: 457812 - RNA, 19 nt, Artificial Sequence
  Description of Artificial Sequence: Synthetic oligonucleotide
gggugcccagcaauuuugu

SEQ ID NO: 457813 - RNA, 19 nt, Artificial Sequence
  Description of Artificial Sequence: Synthetic oligonucleotide
guccgcaugcgaaccucau

SEQ ID NO: 457814 - RNA, 19 nt, Artificial Sequence
  Description of Artificial Sequence: Synthetic oligonucleotide
gccccuagacuugcagcau

SEQ ID NO: 457815 - RNA, 19 nt, Artificial Sequence
  Description of Artificial Sequence: Synthetic oligonucleotide
cgucgccguacacaggauu

SEQ ID NO: 457816 - RNA, 19 nt, Artificial Sequence
  Description of Artificial Sequence: Synthetic oligonucleotide
gcgucgccguacacaggau

SEQ ID NO: 457817 - RNA, 19 nt, Artificial Sequence
  Description of Artificial Sequence: Synthetic oligonucleotide
cgcggcccacgcccaccgu

SEQ ID NO: 457818 - RNA, 19 nt, Artificial Sequence
  Description of Artificial Sequence: Synthetic oligonucleotide
aaacauaaugaucaugucc

SEQ ID NO: 457819 - RNA, 19 nt, Artificial Sequence
  Description of Artificial Sequence: Synthetic oligonucleotide
agcucaauaauuuaucagg

SEQ ID NO: 457820 - RNA, 19 nt, Artificial Sequence
  Description of Artificial Sequence: Synthetic oligonucleotide
agauucugcagucauaacg

SEQ ID NO: 457821 - RNA, 19 nt, Artificial Sequence
  Description of Artificial Sequence: Synthetic oligonucleotide
uguucaaucaagaugcgca

SEQ ID NO: 457822 - RNA, 19 nt, Artificial Sequence
  Description of Artificial Sequence: Synthetic oligonucleotide
uuuauuguaagugaagcug

SEQ ID NO: 457823 - RNA, 19 nt, Artificial Sequence
  Description of Artificial Sequence: Synthetic oligonucleotide
ugugaauauccacaguggg

SEQ ID NO: 457824 - RNA, 19 nt, Artificial Sequence
  Description of Artificial Sequence: Synthetic oligonucleotide
agaauaacugaucaucauc

SEQ ID NO: 457825 - RNA, 19 nt, Artificial Sequence
  Description of Artificial Sequence: Synthetic oligonucleotide
ucaaucaagaugcgcaagg

SEQ ID NO: 457826 - RNA, 19 nt, Artificial Sequence
  Description of Artificial Sequence: Synthetic oligonucleotide
gaagauccgggauuuaugg

SEQ ID NO: 457827 - RNA, 19 nt, Artificial Sequence
  Description of Artificial Sequence: Synthetic oligonucleotide
agaacaguaucccuagucg

SEQ ID NO: 457828 - RNA, 19 nt, Artificial Sequence
  Description of Artificial Sequence: Synthetic oligonucleotide
auccagaaacaguagacgc

SEQ ID NO: 457829 - RNA, 19 nt, Artificial Sequence
  Description of Artificial Sequence: Synthetic oligonucleotide
uguucgagcaacaucaccu

SEQ ID NO: 457830 - RNA, 19 nt, Artificial Sequence
  Description of Artificial Sequence: Synthetic oligonucleotide
gacaccaugauguaucgag

SEQ ID NO: 457831 - RNA, 19 nt, Artificial Sequence
  Description of Artificial Sequence: Synthetic oligonucleotide
cuauccauagccauguccc

SEQ ID NO: 457832 - RNA, 19 nt, Artificial Sequence
  Description of Artificial Sequence: Synthetic oligonucleotide
aacaucaccuccucgccac

SEQ ID NO: 457833 - RNA, 19 nt, Artificial Sequence
  Description of Artificial Sequence: Synthetic oligonucleotide
aaugugaggcucaugguac

SEQ ID NO: 457834 - RNA, 19 nt, Artificial Sequence
  Description of Artificial Sequence: Synthetic oligonucleotide
aagcucaauaauuuaucag

SEQ ID NO: 457835 - RNA, 19 nt, Artificial Sequence
  Description of Artificial Sequence: Synthetic oligonucleotide
aaucaagaugcgcaagguc

SEQ ID NO: 457836 - RNA, 19 nt, Artificial Sequence
  Description of Artificial Sequence: Synthetic oligonucleotide
uggucgaacuuuaagacca

SEQ ID NO: 457837 - RNA, 19 nt, Artificial Sequence
  Description of Artificial Sequence: Synthetic oligonucleotide
aacuguucgagcaacauca

SEQ ID NO: 457838 - RNA, 19 nt, Artificial Sequence
  Description of Artificial Sequence: Synthetic oligonucleotide
ugucauagcgagaaguggc

SEQ ID NO: 457839 - RNA, 19 nt, Artificial Sequence
  Description of Artificial Sequence: Synthetic oligonucleotide
uuaugguccaagauuaagu

SEQ ID NO: 457840 - RNA, 19 nt, Artificial Sequence
  Description of Artificial Sequence: Synthetic oligonucleotide
aucaccagcaauuugucug

SEQ ID NO: 457841 - RNA, 19 nt, Artificial Sequence
  Description of Artificial Sequence: Synthetic oligonucleotide
acaaacauaaugaucaugu

SEQ ID NO: 457842 - RNA, 19 nt, Artificial Sequence
  Description of Artificial Sequence: Synthetic oligonucleotide
uucaugugaauauccacag

SEQ ID NO: 457843 - RNA, 19 nt, Artificial Sequence
  Description of Artificial Sequence: Synthetic oligonucleotide
agauccgggauuuaugguc

SEQ ID NO: 457844 - RNA, 19 nt, Artificial Sequence
  Description of Artificial Sequence: Synthetic oligonucleotide
uuuuauuguaagugaagcu

SEQ ID NO: 457845 - RNA, 19 nt, Artificial Sequence
  Description of Artificial Sequence: Synthetic oligonucleotide
uagcuaucuacaaacauaa

SEQ ID NO: 457846 - RNA, 19 nt, Artificial Sequence
  Description of Artificial Sequence: Synthetic oligonucleotide
gaaaagagagacccugucc

SEQ ID NO: 457847 - RNA, 19 nt, Artificial Sequence
  Description of Artificial Sequence: Synthetic oligonucleotide
aaagagagacccugucccg

SEQ ID NO: 457848 - RNA, 19 nt, Artificial Sequence
  Description of Artificial Sequence: Synthetic oligonucleotide
uccaagauuaaguuugagu

SEQ ID NO: 457849 - RNA, 19 nt, Artificial Sequence
  Description of Artificial Sequence: Synthetic oligonucleotide
aguggucagugucauagcg

SEQ ID NO: 457850 - RNA, 19 nt, Artificial Sequence
  Description of Artificial Sequence: Synthetic oligonucleotide
ucgaguguagaauaacuga

SEQ ID NO: 457851 - RNA, 19 nt, Artificial Sequence
  Description of Artificial Sequence: Synthetic oligonucleotide
ugaauauccacagugggaa

SEQ ID NO: 457852 - RNA, 19 nt, Artificial Sequence
  Description of Artificial Sequence: Synthetic oligonucleotide
cacagugggaacauucucg

SEQ ID NO: 457853 - RNA, 19 nt, Artificial Sequence
  Description of Artificial Sequence: Synthetic oligonucleotide
uacgccugggauauguagg

SEQ ID NO: 457854 - RNA, 19 nt, Artificial Sequence
  Description of Artificial Sequence: Synthetic oligonucleotide
gacaucggcaaugugaggc

SEQ ID NO: 457855 - RNA, 19 nt, Artificial Sequence
  Description of Artificial Sequence: Synthetic oligonucleotide
acuuuaagaccacuucauc

SEQ ID NO: 457856 - RNA, 19 nt, Artificial Sequence
  Description of Artificial Sequence: Synthetic oligonucleotide
auauguagggcacauucca

SEQ ID NO: 457857 - RNA, 19 nt, Artificial Sequence
  Description of Artificial Sequence: Synthetic oligonucleotide
uuuaugguccaagauuaag

SEQ ID NO: 457858 - RNA, 19 nt, Artificial Sequence
  Description of Artificial Sequence: Synthetic oligonucleotide
gaacaguaucccuagucgc

SEQ ID NO: 457859 - RNA, 19 nt, Artificial Sequence
  Description of Artificial Sequence: Synthetic oligonucleotide
agugggaacauucucguau

SEQ ID NO: 457860 - RNA, 19 nt, Artificial Sequence
  Description of Artificial Sequence: Synthetic oligonucleotide
ucucguauccuccagccaa

SEQ ID NO: 457861 - RNA, 19 nt, Artificial Sequence
  Description of Artificial Sequence: Synthetic oligonucleotide
uagcggaccacgaaguuca

SEQ ID NO: 457862 - RNA, 19 nt, Artificial Sequence
  Description of Artificial Sequence: Synthetic oligonucleotide
ucccucauaguccacgccc

SEQ ID NO: 457863 - RNA, 19 nt, Artificial Sequence
  Description of Artificial Sequence: Synthetic oligonucleotide
gugauugagggcaacauug

SEQ ID NO: 457864 - RNA, 19 nt, Artificial Sequence
  Description of Artificial Sequence: Synthetic oligonucleotide
gauuuaugguccaagauua

SEQ ID NO: 457865 - RNA, 19 nt, Artificial Sequence
  Description of Artificial Sequence: Synthetic oligonucleotide
agaaguggccagcagucgg

SEQ ID NO: 457866 - RNA, 19 nt, Artificial Sequence
  Description of Artificial Sequence: Synthetic oligonucleotide
gaaggccauaucugggucg

SEQ ID NO: 457867 - RNA, 19 nt, Artificial Sequence
  Description of Artificial Sequence: Synthetic oligonucleotide
aauaacugaucaucaucau

SEQ ID NO: 457868 - RNA, 19 nt, Artificial Sequence
  Description of Artificial Sequence: Synthetic oligonucleotide
aucaagaugcgcaaggucu

SEQ ID NO: 457869 - RNA, 19 nt, Artificial Sequence
  Description of Artificial Sequence: Synthetic oligonucleotide
ucccuagucgcccaacaag

SEQ ID NO: 457870 - RNA, 19 nt, Artificial Sequence
  Description of Artificial Sequence: Synthetic oligonucleotide
uuaccuuccuguuuuguuc

SEQ ID NO: 457871 - RNA, 19 nt, Artificial Sequence
  Description of Artificial Sequence: Synthetic oligonucleotide
gagaacaguagaugacugc

SEQ ID NO: 457872 - RNA, 19 nt, Artificial Sequence
  Description of Artificial Sequence: Synthetic oligonucleotide
auaauacucaucggggcuc

SEQ ID NO: 457873 - RNA, 19 nt, Artificial Sequence
  Description of Artificial Sequence: Synthetic oligonucleotide
gaacauucagugcaaggca

SEQ ID NO: 457874 - RNA, 19 nt, Artificial Sequence
  Description of Artificial Sequence: Synthetic oligonucleotide
gauauguagggcacauucc

SEQ ID NO: 457875 - RNA, 19 nt, Artificial Sequence
  Description of Artificial Sequence: Synthetic oligonucleotide
uggguaauccagaaacagu

SEQ ID NO: 457876 - RNA, 19 nt, Artificial Sequence
  Description of Artificial Sequence: Synthetic oligonucleotide
uaagaccacuucaucuaag

SEQ ID NO: 457877 - RNA, 19 nt, Artificial Sequence
  Description of Artificial Sequence: Synthetic oligonucleotide
ugauugagggcaacauuga

SEQ ID NO: 457878 - RNA, 19 nt, Artificial Sequence
  Description of Artificial Sequence: Synthetic oligonucleotide
acaguaucccuagucgccc

SEQ ID NO: 457879 - RNA, 19 nt, Artificial Sequence
  Description of Artificial Sequence: Synthetic oligonucleotide
uaucccucugucucugccg

SEQ ID NO: 457880 - RNA, 19 nt, Artificial Sequence
  Description of Artificial Sequence: Synthetic oligonucleotide
auggcgggaaagcaugggg

SEQ ID NO: 457881 - RNA, 19 nt, Artificial Sequence
  Description of Artificial Sequence: Synthetic oligonucleotide
auacgccugggauauguag

SEQ ID NO: 457882 - RNA, 19 nt, Artificial Sequence
  Description of Artificial Sequence: Synthetic oligonucleotide
caugauguaucgagugccc

SEQ ID NO: 457883 - RNA, 19 nt, Artificial Sequence
  Description of Artificial Sequence: Synthetic oligonucleotide
ucgagcaacaucaccuccu

SEQ ID NO: 457884 - RNA, 19 nt, Artificial Sequence
  Description of Artificial Sequence: Synthetic oligonucleotide
cagucauaacgcaggaagc

SEQ ID NO: 457885 - RNA, 19 nt, Artificial Sequence
  Description of Artificial Sequence: Synthetic oligonucleotide
caucuaaggcuccauugag

SEQ ID NO: 457886 - RNA, 19 nt, Artificial Sequence
  Description of Artificial Sequence: Synthetic oligonucleotide
uagcuuugcagcugagaag

SEQ ID NO: 457887 - RNA, 19 nt, Artificial Sequence
  Description of Artificial Sequence: Synthetic oligonucleotide
aaacucaugcugauugcug

SEQ ID NO: 457888 - RNA, 19 nt, Artificial Sequence
  Description of Artificial Sequence: Synthetic oligonucleotide
auagcgagaaguggccagc

SEQ ID NO: 457889 - RNA, 19 nt, Artificial Sequence
  Description of Artificial Sequence: Synthetic oligonucleotide
guagaauaacugaucauca

SEQ ID NO: 457890 - RNA, 19 nt, Artificial Sequence
  Description of Artificial Sequence: Synthetic oligonucleotide
gaugcgcaaggucuccggg

SEQ ID NO: 457891 - RNA, 19 nt, Artificial Sequence
  Description of Artificial Sequence: Synthetic oligonucleotide
augauguaucgagugcccc

SEQ ID NO: 457892 - RNA, 19 nt, Artificial Sequence
  Description of Artificial Sequence: Synthetic oligonucleotide
aagauccgggauuuauggu

SEQ ID NO: 457893 - RNA, 19 nt, Artificial Sequence
  Description of Artificial Sequence: Synthetic oligonucleotide
acgccugggauauguaggg

SEQ ID NO: 457894 - RNA, 19 nt, Artificial Sequence
  Description of Artificial Sequence: Synthetic oligonucleotide
uagaauaacugaucaucau

SEQ ID NO: 457895 - RNA, 19 nt, Artificial Sequence
  Description of Artificial Sequence: Synthetic oligonucleotide
uucgagcaacaucaccucc

SEQ ID NO: 457896 - RNA, 19 nt, Artificial Sequence
  Description of Artificial Sequence: Synthetic oligonucleotide
ucgaacuuuaagaccacuu

SEQ ID NO: 457897 - RNA, 19 nt, Artificial Sequence
  Description of Artificial Sequence: Synthetic oligonucleotide
ucggaugcgcacacgauuc

SEQ ID NO: 457898 - RNA, 19 nt, Artificial Sequence
  Description of Artificial Sequence: Synthetic oligonucleotide
acagugggaacauucucgu

SEQ ID NO: 457899 - RNA, 19 nt, Artificial Sequence
  Description of Artificial Sequence: Synthetic oligonucleotide
uugcauauuucuccauuuc

SEQ ID NO: 457900 - RNA, 19 nt, Artificial Sequence
  Description of Artificial Sequence: Synthetic oligonucleotide
cauagcgagaaguggccag

SEQ ID NO: 457901 - RNA, 19 nt, Artificial Sequence
  Description of Artificial Sequence: Synthetic oligonucleotide
gauccgggauuuauggucc

SEQ ID NO: 457902 - RNA, 19 nt, Artificial Sequence
  Description of Artificial Sequence: Synthetic oligonucleotide
uucaaucaagaugcgcaag

SEQ ID NO: 457903 - RNA, 19 nt, Artificial Sequence
  Description of Artificial Sequence: Synthetic oligonucleotide
caccaugauguaucgagug

SEQ ID NO: 457904 - RNA, 19 nt, Artificial Sequence
  Description of Artificial Sequence: Synthetic oligonucleotide
ugugauugagggcaacauu

SEQ ID NO: 457905 - RNA, 19 nt, Artificial Sequence
  Description of Artificial Sequence: Synthetic oligonucleotide
aagugaagcuggaagcuca

SEQ ID NO: 457906 - RNA, 19 nt, Artificial Sequence
  Description of Artificial Sequence: Synthetic oligonucleotide
ccauuggggacauaguugc

SEQ ID NO: 457907 - RNA, 19 nt, Artificial Sequence
  Description of Artificial Sequence: Synthetic oligonucleotide
ugguacaccucauuauuau

SEQ ID NO: 457908 - RNA, 19 nt, Artificial Sequence
  Description of Artificial Sequence: Synthetic oligonucleotide
uuguucaaucaagaugcgc

SEQ ID NO: 457909 - RNA, 19 nt, Artificial Sequence
  Description of Artificial Sequence: Synthetic oligonucleotide
auuaccuuccuguuuuguu

SEQ ID NO: 457910 - RNA, 19 nt, Artificial Sequence
  Description of Artificial Sequence: Synthetic oligonucleotide
cuggaccaauuccacauag

SEQ ID NO: 457911 - RNA, 19 nt, Artificial Sequence
  Description of Artificial Sequence: Synthetic oligonucleotide
acacgauucuggucgaacu

SEQ ID NO: 457912 - RNA, 19 nt, Artificial Sequence
  Description of Artificial Sequence: Synthetic oligonucleotide
agugucauagcgagaagug

SEQ ID NO: 457913 - RNA, 19 nt, Artificial Sequence
  Description of Artificial Sequence: Synthetic oligonucleotide
ggaaggugaccccagagac

SEQ ID NO: 457914 - RNA, 19 nt, Artificial Sequence
  Description of Artificial Sequence: Synthetic oligonucleotide
ucguagcuaucuacaaaca

SEQ ID NO: 457915 - RNA, 19 nt, Artificial Sequence
  Description of Artificial Sequence: Synthetic oligonucleotide
auaucugggucggugucac

SEQ ID NO: 457916 - RNA, 19 nt, Artificial Sequence
  Description of Artificial Sequence: Synthetic oligonucleotide
gaugagucaugguguggcc

SEQ ID NO: 457917 - RNA, 19 nt, Artificial Sequence
  Description of Artificial Sequence: Synthetic oligonucleotide
ucaugugaauauccacagu

SEQ ID NO: 457918 - RNA, 19 nt, Artificial Sequence
  Description of Artificial Sequence: Synthetic oligonucleotide
cugauugcugagguggagg

SEQ ID NO: 457919 - RNA, 19 nt, Artificial Sequence
  Description of Artificial Sequence: Synthetic oligonucleotide
gucgaguguagaauaacug

SEQ ID NO: 457920 - RNA, 19 nt, Artificial Sequence
  Description of Artificial Sequence: Synthetic oligonucleotide
aucacauacgccugggaua

SEQ ID NO: 457921 - RNA, 19 nt, Artificial Sequence
  Description of Artificial Sequence: Synthetic oligonucleotide
ucacauacgccugggauau

SEQ ID NO: 457922 - RNA, 19 nt, Artificial Sequence
  Description of Artificial Sequence: Synthetic oligonucleotide
gaaguagaauucacacuug

SEQ ID NO: 457923 - RNA, 19 nt, Artificial Sequence
  Description of Artificial Sequence: Synthetic oligonucleotide
gucuucguaccccaccugc

SEQ ID NO: 457924 - RNA, 19 nt, Artificial Sequence
  Description of Artificial Sequence: Synthetic oligonucleotide
gguguggccgaagugaggg

SEQ ID NO: 457925 - RNA, 19 nt, Artificial Sequence
  Description of Artificial Sequence: Synthetic oligonucleotide
ccgacagcuauccauagcc

SEQ ID NO: 457926 - RNA, 19 nt, Artificial Sequence
  Description of Artificial Sequence: Synthetic oligonucleotide
uaucccuagucgcccaaca

SEQ ID NO: 457927 - RNA, 19 nt, Artificial Sequence
  Description of Artificial Sequence: Synthetic oligonucleotide
uuaucaggcagggaacccu

SEQ ID NO: 457928 - RNA, 19 nt, Artificial Sequence
  Description of Artificial Sequence: Synthetic oligonucleotide
caguagaugacugccacuc

SEQ ID NO: 457929 - RNA, 19 nt, Artificial Sequence
  Description of Artificial Sequence: Synthetic oligonucleotide
ggaccaauuccacauaguc

SEQ ID NO: 457930 - RNA, 19 nt, Artificial Sequence
  Description of Artificial Sequence: Synthetic oligonucleotide
cucaugaauauacuguucu

SEQ ID NO: 457931 - RNA, 19 nt, Artificial Sequence
  Description of Artificial Sequence: Synthetic oligonucleotide
ucccacucgcuuccgcugg

SEQ ID NO: 457932 - RNA, 19 nt, Artificial Sequence
  Description of Artificial Sequence: Synthetic oligonucleotide
ugugagggauguuggggca

SEQ ID NO: 457933 - RNA, 19 nt, Artificial Sequence
  Description of Artificial Sequence: Synthetic oligonucleotide
accugcuucaugugaauau

SEQ ID NO: 457934 - RNA, 19 nt, Artificial Sequence
  Description of Artificial Sequence: Synthetic oligonucleotide
uucggaugcgcacacgauu

SEQ ID NO: 457935 - RNA, 19 nt, Artificial Sequence
  Description of Artificial Sequence: Synthetic oligonucleotide
ggaacauucucguauccuc

SEQ ID NO: 457936 - RNA, 19 nt, Artificial Sequence
  Description of Artificial Sequence: Synthetic oligonucleotide
ggcccuacuagcuuugcag

SEQ ID NO: 457937 - RNA, 19 nt, Artificial Sequence
  Description of Artificial Sequence: Synthetic oligonucleotide
gcuauccauagccaugucc

SEQ ID NO: 457938 - RNA, 19 nt, Artificial Sequence
  Description of Artificial Sequence: Synthetic oligonucleotide
gcucaauaauuuaucaggc

SEQ ID NO: 457939 - RNA, 19 nt, Artificial Sequence
  Description of Artificial Sequence: Synthetic oligonucleotide
guaucgagugccccgggug

SEQ ID NO: 457940 - RNA, 19 nt, Artificial Sequence
  Description of Artificial Sequence: Synthetic oligonucleotide
ucuucguaccccaccugcu

SEQ ID NO: 457941 - RNA, 19 nt, Artificial Sequence
  Description of Artificial Sequence: Synthetic oligonucleotide
uguaucgagugccccgggu

SEQ ID NO: 457942 - RNA, 19 nt, Artificial Sequence
  Description of Artificial Sequence: Synthetic oligonucleotide
guaguugagcuggagcuug

SEQ ID NO: 457943 - RNA, 19 nt, Artificial Sequence
  Description of Artificial Sequence: Synthetic oligonucleotide
agucgaguguagaauaacu

SEQ ID NO: 457944 - RNA, 19 nt, Artificial Sequence
  Description of Artificial Sequence: Synthetic oligonucleotide
uguaaguggucagugucau

SEQ ID NO: 457945 - RNA, 19 nt, Artificial Sequence
  Description of Artificial Sequence: Synthetic oligonucleotide
uggguguaaguggucagug

SEQ ID NO: 457946 - RNA, 19 nt, Artificial Sequence
  Description of Artificial Sequence: Synthetic oligonucleotide
aacgccgguaucccucugu

SEQ ID NO: 457947 - RNA, 19 nt, Artificial Sequence
  Description of Artificial Sequence: Synthetic oligonucleotide
ugugguagccagggaacag

SEQ ID NO: 457948 - RNA, 19 nt, Artificial Sequence
  Description of Artificial Sequence: Synthetic oligonucleotide
gaacagguacucugucaug

SEQ ID NO: 457949 - RNA, 19 nt, Artificial Sequence
  Description of Artificial Sequence: Synthetic oligonucleotide
ucugggucggugucacugc

SEQ ID NO: 457950 - RNA, 19 nt, Artificial Sequence
  Description of Artificial Sequence: Synthetic oligonucleotide
ucggcggagaacaguagau

SEQ ID NO: 457951 - RNA, 19 nt, Artificial Sequence
  Description of Artificial Sequence: Synthetic oligonucleotide
ccguggguaauccagaaac

SEQ ID NO: 457952 - RNA, 19 nt, Artificial Sequence
  Description of Artificial Sequence: Synthetic oligonucleotide
ugucccguaggcucuuaca

SEQ ID NO: 457953 - RNA, 19 nt, Artificial Sequence
  Description of Artificial Sequence: Synthetic oligonucleotide
gacgcugcaggaaccgagg

SEQ ID NO: 457954 - RNA, 19 nt, Artificial Sequence
  Description of Artificial Sequence: Synthetic oligonucleotide
uggggucaguggaagguga

SEQ ID NO: 457955 - RNA, 19 nt, Artificial Sequence
  Description of Artificial Sequence: Synthetic oligonucleotide
gaaccgaggcaggaagggg

SEQ ID NO: 457956 - RNA, 19 nt, Artificial Sequence
  Description of Artificial Sequence: Synthetic oligonucleotide
gaucacauacgccugggau

SEQ ID NO: 457957 - RNA, 19 nt, Artificial Sequence
  Description of Artificial Sequence: Synthetic oligonucleotide
ucuggcccuacuagcuuug

SEQ ID NO: 457958 - RNA, 19 nt, Artificial Sequence
  Description of Artificial Sequence: Synthetic oligonucleotide
uguggccagacaucggcaa

SEQ ID NO: 457959 - RNA, 19 nt, Artificial Sequence
  Description of Artificial Sequence: Synthetic oligonucleotide
agaaaacgccgguaucccu

SEQ ID NO: 457960 - RNA, 19 nt, Artificial Sequence
  Description of Artificial Sequence: Synthetic oligonucleotide
uucguaccccaccugcuuc

SEQ ID NO: 457961 - RNA, 19 nt, Artificial Sequence
  Description of Artificial Sequence: Synthetic oligonucleotide
ucuggaagauccgggauuu

SEQ ID NO: 457962 - RNA, 19 nt, Artificial Sequence
  Description of Artificial Sequence: Synthetic oligonucleotide
cccuagucgcccaacaagg

SEQ ID NO: 457963 - RNA, 19 nt, Artificial Sequence
  Description of Artificial Sequence: Synthetic oligonucleotide
uauuaccuuccuguuuugu

SEQ ID NO: 457964 - RNA, 19 nt, Artificial Sequence
  Description of Artificial Sequence: Synthetic oligonucleotide
cagaaaacgccgguauccc

SEQ ID NO: 457965 - RNA, 19 nt, Artificial Sequence
  Description of Artificial Sequence: Synthetic oligonucleotide
caugccggccuccagacca

SEQ ID NO: 457966 - RNA, 19 nt, Artificial Sequence
  Description of Artificial Sequence: Synthetic oligonucleotide
aacccucagaaguccacuu

SEQ ID NO: 457967 - RNA, 19 nt, Artificial Sequence
  Description of Artificial Sequence: Synthetic oligonucleotide
guucaaucaagaugcgcaa

SEQ ID NO: 457968 - RNA, 19 nt, Artificial Sequence
  Description of Artificial Sequence: Synthetic oligonucleotide
ucccguaggcucuuacaga

SEQ ID NO: 457969 - RNA, 19 nt, Artificial Sequence
  Description of Artificial Sequence: Synthetic oligonucleotide
acauacgccugggauaugu

SEQ ID NO: 457970 - RNA, 19 nt, Artificial Sequence
  Description of Artificial Sequence: Synthetic oligonucleotide
ugagaacaguaucccuagu

SEQ ID NO: 457971 - RNA, 19 nt, Artificial Sequence
  Description of Artificial Sequence: Synthetic oligonucleotide
uggaagauccgggauuuau

SEQ ID NO: 457972 - RNA, 19 nt, Artificial Sequence
  Description of Artificial Sequence: Synthetic oligonucleotide
ucauagcgagaaguggcca

SEQ ID NO: 457973 - RNA, 19 nt, Artificial Sequence
  Description of Artificial Sequence: Synthetic oligonucleotide
uaauacucaucggggcuca

SEQ ID NO: 457974 - RNA, 19 nt, Artificial Sequence
  Description of Artificial Sequence: Synthetic oligonucleotide
ugguugagugucagggguc

SEQ ID NO: 457975 - RNA, 19 nt, Artificial Sequence
  Description of Artificial Sequence: Synthetic oligonucleotide
auacucaucggggcucagg

SEQ ID NO: 457976 - RNA, 19 nt, Artificial Sequence
  Description of Artificial Sequence: Synthetic oligonucleotide
cauaauacucaucggggcu

SEQ ID NO: 457977 - RNA, 19 nt, Artificial Sequence
  Description of Artificial Sequence: Synthetic oligonucleotide
guucgagcaacaucaccuc

SEQ ID NO: 457978 - RNA, 19 nt, Artificial Sequence
  Description of Artificial Sequence: Synthetic oligonucleotide
ggcggagaacaguagauga

SEQ ID NO: 457979 - RNA, 19 nt, Artificial Sequence
  Description of Artificial Sequence: Synthetic oligonucleotide
cagacaagauuuggcagac

SEQ ID NO: 457980 - RNA, 19 nt, Artificial Sequence
  Description of Artificial Sequence: Synthetic oligonucleotide
cauagucuucagagcgggc

SEQ ID NO: 457981 - RNA, 19 nt, Artificial Sequence
  Description of Artificial Sequence: Synthetic oligonucleotide
aguccuggguccaaguaca

SEQ ID NO: 457982 - RNA, 19 nt, Artificial Sequence
  Description of Artificial Sequence: Synthetic oligonucleotide
gugggaacauucucguauc

SEQ ID NO: 457983 - RNA, 19 nt, Artificial Sequence
  Description of Artificial Sequence: Synthetic oligonucleotide
aguacacaucugggcaugg

SEQ ID NO: 457984 - RNA, 19 nt, Artificial Sequence
  Description of Artificial Sequence: Synthetic oligonucleotide
ugccgacagcuauccauag

SEQ ID NO: 457985 - RNA, 19 nt, Artificial Sequence
  Description of Artificial Sequence: Synthetic oligonucleotide
guccacgcccuugugauug

SEQ ID NO: 457986 - RNA, 19 nt, Artificial Sequence
  Description of Artificial Sequence: Synthetic oligonucleotide
ccagcagucggccaaacuc

SEQ ID NO: 457987 - RNA, 19 nt, Artificial Sequence
  Description of Artificial Sequence: Synthetic oligonucleotide
cuagucgcccaacaaggca

SEQ ID NO: 457988 - RNA, 19 nt, Artificial Sequence
  Description of Artificial Sequence: Synthetic oligonucleotide
acgccgguaucccucuguc

SEQ ID NO: 457989 - RNA, 19 nt, Artificial Sequence
  Description of Artificial Sequence: Synthetic oligonucleotide
uggccagacaucggcaaug

SEQ ID NO: 457990 - RNA, 19 nt, Artificial Sequence
  Description of Artificial Sequence: Synthetic oligonucleotide
ucguaccccaccugcuuca

SEQ ID NO: 457991 - RNA, 19 nt, Artificial Sequence
  Description of Artificial Sequence: Synthetic oligonucleotide
cuauuaccuuccuguuuug

SEQ ID NO: 457992 - RNA, 19 nt, Artificial Sequence
  Description of Artificial Sequence: Synthetic oligonucleotide
ugcgcaaggucuccggguu

SEQ ID NO: 457993 - RNA, 19 nt, Artificial Sequence
  Description of Artificial Sequence: Synthetic oligonucleotide
agugccccgggugguaggc

SEQ ID NO: 457994 - RNA, 19 nt, Artificial Sequence
  Description of Artificial Sequence: Synthetic oligonucleotide
ggggcuauuaccuuccugu

SEQ ID NO: 457995 - RNA, 19 nt, Artificial Sequence
  Description of Artificial Sequence: Synthetic oligonucleotide
acuguucgagcaacaucac

SEQ ID NO: 457996 - RNA, 19 nt, Artificial Sequence
  Description of Artificial Sequence: Synthetic oligonucleotide
cuucagagcgggcauaaua

SEQ ID NO: 457997 - RNA, 19 nt, Artificial Sequence
  Description of Artificial Sequence: Synthetic oligonucleotide
uacuagcuuugcagcugag

SEQ ID NO: 457998 - RNA, 19 nt, Artificial Sequence
  Description of Artificial Sequence: Synthetic oligonucleotide
ggugaucaccagcaauuug

SEQ ID NO: 457999 - RNA, 19 nt, Artificial Sequence
  Description of Artificial Sequence: Synthetic oligonucleotide
uggccgguagcggaccacg

SEQ ID NO: 458000 - RNA, 19 nt, Artificial Sequence
  Description of Artificial Sequence: Synthetic oligonucleotide
uggccagaaucacaucgua

SEQ ID NO: 458001 - RNA, 19 nt, Artificial Sequence
  Description of Artificial Sequence: Synthetic oligonucleotide
auguaucgagugccccggg

SEQ ID NO: 458002 - RNA, 19 nt, Artificial Sequence
  Description of Artificial Sequence: Synthetic oligonucleotide
agggucuccccgcggauca

SEQ ID NO: 458003 - RNA, 19 nt, Artificial Sequence
  Description of Artificial Sequence: Synthetic oligonucleotide
ugggauauguagggcacau

SEQ ID NO: 458004 - RNA, 19 nt, Artificial Sequence
  Description of Artificial Sequence: Synthetic oligonucleotide
aggggucaacaaaggacac

SEQ ID NO: 458005 - RNA, 19 nt, Artificial Sequence
  Description of Artificial Sequence: Synthetic oligonucleotide
acggugaucaccagcaauu

SEQ ID NO: 458006 - RNA, 19 nt, Artificial Sequence
  Description of Artificial Sequence: Synthetic oligonucleotide
acggccagaaguacccggg

SEQ ID NO: 458007 - RNA, 19 nt, Artificial Sequence
  Description of Artificial Sequence: Synthetic oligonucleotide
gacagcuauccauagccau

SEQ ID NO: 458008 - RNA, 19 nt, Artificial Sequence
  Description of Artificial Sequence: Synthetic oligonucleotide
agcccgaugcucucucucu

SEQ ID NO: 458009 - RNA, 19 nt, Artificial Sequence
  Description of Artificial Sequence: Synthetic oligonucleotide
gcaacaucaccuccucgcc

SEQ ID NO: 458010 - RNA, 19 nt, Artificial Sequence
  Description of Artificial Sequence: Synthetic oligonucleotide
ugugaggcucaugguacac

SEQ ID NO: 458011 - RNA, 19 nt, Artificial Sequence
  Description of Artificial Sequence: Synthetic oligonucleotide
cauggcgggaaagcauggg

SEQ ID NO: 458012 - RNA, 19 nt, Artificial Sequence
  Description of Artificial Sequence: Synthetic oligonucleotide
uggcccuacuagcuuugca

SEQ ID NO: 458013 - RNA, 19 nt, Artificial Sequence
  Description of Artificial Sequence: Synthetic oligonucleotide
augcgcaaggucuccgggu

SEQ ID NO: 458014 - RNA, 19 nt, Artificial Sequence
  Description of Artificial Sequence: Synthetic oligonucleotide
aauacucaucggggcucag

SEQ ID NO: 458015 - RNA, 19 nt, Artificial Sequence
  Description of Artificial Sequence: Synthetic oligonucleotide
gaagugaggguugcucauc

SEQ ID NO: 458016 - RNA, 19 nt, Artificial Sequence
  Description of Artificial Sequence: Synthetic oligonucleotide
uucucccgcaguccugggu

SEQ ID NO: 458017 - RNA, 19 nt, Artificial Sequence
  Description of Artificial Sequence: Synthetic oligonucleotide
aggucuggguguaaguggu

SEQ ID NO: 458018 - RNA, 19 nt, Artificial Sequence
  Description of Artificial Sequence: Synthetic oligonucleotide
aauucacacuugggguccu

SEQ ID NO: 458019 - RNA, 19 nt, Artificial Sequence
  Description of Artificial Sequence: Synthetic oligonucleotide
agucggccaaacucaugcu

SEQ ID NO: 458020 - RNA, 19 nt, Artificial Sequence
  Description of Artificial Sequence: Synthetic oligonucleotide
guagcggaccacgaaguuc

SEQ ID NO: 458021 - RNA, 19 nt, Artificial Sequence
  Description of Artificial Sequence: Synthetic oligonucleotide
cacacgauucuggucgaac

SEQ ID NO: 458022 - RNA, 19 nt, Artificial Sequence
  Description of Artificial Sequence: Synthetic oligonucleotide
cagucgaguguagaauaac

SEQ ID NO: 458023 - RNA, 19 nt, Artificial Sequence
  Description of Artificial Sequence: Synthetic oligonucleotide
caagauuaaguuugaguuu

SEQ ID NO: 458024 - RNA, 19 nt, Artificial Sequence
  Description of Artificial Sequence: Synthetic oligonucleotide
aucuggccgguagcggacc

SEQ ID NO: 458025 - RNA, 19 nt, Artificial Sequence
  Description of Artificial Sequence: Synthetic oligonucleotide
ucaugccggccuccagacc

SEQ ID NO: 458026 - RNA, 19 nt, Artificial Sequence
  Description of Artificial Sequence: Synthetic oligonucleotide
cucagggcaccccagaagu

SEQ ID NO: 458027 - RNA, 19 nt, Artificial Sequence
  Description of Artificial Sequence: Synthetic oligonucleotide
gcuauuaccuuccuguuuu

SEQ ID NO: 458028 - RNA, 19 nt, Artificial Sequence
  Description of Artificial Sequence: Synthetic oligonucleotide
aucccuagucgcccaacaa

SEQ ID NO: 458029 - RNA, 19 nt, Artificial Sequence
  Description of Artificial Sequence: Synthetic oligonucleotide
uugggguccugccgacagc

SEQ ID NO: 458030 - RNA, 19 nt, Artificial Sequence
  Description of Artificial Sequence: Synthetic oligonucleotide
aggcucuuacagaaggcca

SEQ ID NO: 458031 - RNA, 19 nt, Artificial Sequence
  Description of Artificial Sequence: Synthetic oligonucleotide
cugggucggugucacugcc

SEQ ID NO: 458032 - RNA, 19 nt, Artificial Sequence
  Description of Artificial Sequence: Synthetic oligonucleotide
ggggacauaguugcccagg

SEQ ID NO: 458033 - RNA, 19 nt, Artificial Sequence
  Description of Artificial Sequence: Synthetic oligonucleotide
cucccucauaguccacgcc

SEQ ID NO: 458034 - RNA, 19 nt, Artificial Sequence
  Description of Artificial Sequence: Synthetic oligonucleotide
agaugcccuugucccguag

SEQ ID NO: 458035 - RNA, 19 nt, Artificial Sequence
  Description of Artificial Sequence: Synthetic oligonucleotide
acgauucuggucgaacuuu

SEQ ID NO: 458036 - RNA, 19 nt, Artificial Sequence
  Description of Artificial Sequence: Synthetic oligonucleotide
gugaggcucaugguacacc

SEQ ID NO: 458037 - RNA, 19 nt, Artificial Sequence
  Description of Artificial Sequence: Synthetic oligonucleotide
aguaucccuagucgcccaa

SEQ ID NO: 458038 - RNA, 19 nt, Artificial Sequence
  Description of Artificial Sequence: Synthetic oligonucleotide
cucggcggagaacaguaga

SEQ ID NO: 458039 - RNA, 19 nt, Artificial Sequence
  Description of Artificial Sequence: Synthetic oligonucleotide
aggcacacagauacauuca

SEQ ID NO: 458040 - RNA, 19 nt, Artificial Sequence
  Description of Artificial Sequence: Synthetic oligonucleotide
cucugccguagccacggug

SEQ ID NO: 458041 - RNA, 19 nt, Artificial Sequence
  Description of Artificial Sequence: Synthetic oligonucleotide
uggaauccucaugccggcc

SEQ ID NO: 458042 - RNA, 19 nt, Artificial Sequence
  Description of Artificial Sequence: Synthetic oligonucleotide
augguacaccucauuauua

SEQ ID NO: 458043 - RNA, 19 nt, Artificial Sequence
  Description of Artificial Sequence: Synthetic oligonucleotide
gagcccgaugcucucucuc

SEQ ID NO: 458044 - RNA, 19 nt, Artificial Sequence
  Description of Artificial Sequence: Synthetic oligonucleotide
cugaagccacuggucuucg

SEQ ID NO: 458045 - RNA, 19 nt, Artificial Sequence
  Description of Artificial Sequence: Synthetic oligonucleotide
auuuaugguccaagauuaa

SEQ ID NO: 458046 - RNA, 19 nt, Artificial Sequence
  Description of Artificial Sequence: Synthetic oligonucleotide
gugagggauguuggggcag

SEQ ID NO: 458047 - RNA, 19 nt, Artificial Sequence
  Description of Artificial Sequence: Synthetic oligonucleotide
gauucuggucgaacuuuaa

SEQ ID NO: 458048 - RNA, 19 nt, Artificial Sequence
  Description of Artificial Sequence: Synthetic oligonucleotide
agggcccggcuguaguucu

SEQ ID NO: 458049 - RNA, 19 nt, Artificial Sequence
  Description of Artificial Sequence: Synthetic oligonucleotide
cgcccaacaaggcacaaug

SEQ ID NO: 458050 - RNA, 19 nt, Artificial Sequence
  Description of Artificial Sequence: Synthetic oligonucleotide
agagcuugccauggcggga

SEQ ID NO: 458051 - RNA, 19 nt, Artificial Sequence
  Description of Artificial Sequence: Synthetic oligonucleotide
uagacgcugcaggaaccga

SEQ ID NO: 458052 - RNA, 19 nt, Artificial Sequence
  Description of Artificial Sequence: Synthetic oligonucleotide
ggcaacauugagggugaag

SEQ ID NO: 458053 - RNA, 19 nt, Artificial Sequence
  Description of Artificial Sequence: Synthetic oligonucleotide
ccgguagcggaccacgaag

SEQ ID NO: 458054 - RNA, 19 nt, Artificial Sequence
  Description of Artificial Sequence: Synthetic oligonucleotide
caacauugagggugaaggu

SEQ ID NO: 458055 - RNA, 19 nt, Artificial Sequence
  Description of Artificial Sequence: Synthetic oligonucleotide
uggccgaagugaggguugc

SEQ ID NO: 458056 - RNA, 19 nt, Artificial Sequence
  Description of Artificial Sequence: Synthetic oligonucleotide
ucgugccccaggcccagaa

SEQ ID NO: 458057 - RNA, 19 nt, Artificial Sequence
  Description of Artificial Sequence: Synthetic oligonucleotide
cccgguuugcauauuucuc

SEQ ID NO: 458058 - RNA, 19 nt, Artificial Sequence
  Description of Artificial Sequence: Synthetic oligonucleotide
cugccgacagcuauccaua

SEQ ID NO: 458059 - RNA, 19 nt, Artificial Sequence
  Description of Artificial Sequence: Synthetic oligonucleotide
caaacucaugcugauugcu

SEQ ID NO: 458060 - RNA, 19 nt, Artificial Sequence
  Description of Artificial Sequence: Synthetic oligonucleotide
auccgggauuuauggucca

SEQ ID NO: 458061 - RNA, 19 nt, Artificial Sequence
  Description of Artificial Sequence: Synthetic oligonucleotide
cgcagacugcagaaaacgc

SEQ ID NO: 458062 - RNA, 19 nt, Artificial Sequence
  Description of Artificial Sequence: Synthetic oligonucleotide
uccucgccacucgugcccc

SEQ ID NO: 458063 - RNA, 19 nt, Artificial Sequence
  Description of Artificial Sequence: Synthetic oligonucleotide
accaacuguucgagcaaca

SEQ ID NO: 458064 - RNA, 19 nt, Artificial Sequence
  Description of Artificial Sequence: Synthetic oligonucleotide
gaagcccucggcggagaac

SEQ ID NO: 458065 - RNA, 19 nt, Artificial Sequence
  Description of Artificial Sequence: Synthetic oligonucleotide
guacagucgaguguagaau

SEQ ID NO: 458066 - RNA, 19 nt, Artificial Sequence
  Description of Artificial Sequence: Synthetic oligonucleotide
gugugguagccagggaaca

SEQ ID NO: 458067 - RNA, 19 nt, Artificial Sequence
  Description of Artificial Sequence: Synthetic oligonucleotide
gggauuuaugguccaagau

SEQ ID NO: 458068 - RNA, 19 nt, Artificial Sequence
  Description of Artificial Sequence: Synthetic oligonucleotide
ccauggcgggaaagcaugg

SEQ ID NO: 458069 - RNA, 19 nt, Artificial Sequence
  Description of Artificial Sequence: Synthetic oligonucleotide
cacuugggguccugccgac

SEQ ID NO: 458070 - RNA, 19 nt, Artificial Sequence
  Description of Artificial Sequence: Synthetic oligonucleotide
cuggccagaaucacaucgu

SEQ ID NO: 458071 - RNA, 19 nt, Artificial Sequence
  Description of Artificial Sequence: Synthetic oligonucleotide
ucggcaaugugaggcucau

SEQ ID NO: 458072 - RNA, 19 nt, Artificial Sequence
  Description of Artificial Sequence: Synthetic oligonucleotide
ggccacauuucggaugcgc

SEQ ID NO: 458073 - RNA, 19 nt, Artificial Sequence
  Description of Artificial Sequence: Synthetic oligonucleotide
agacaagauuuggcagacu

SEQ ID NO: 458074 - RNA, 19 nt, Artificial Sequence
  Description of Artificial Sequence: Synthetic oligonucleotide
uccugccgacagcuaucca

SEQ ID NO: 458075 - RNA, 19 nt, Artificial Sequence
  Description of Artificial Sequence: Synthetic oligonucleotide
cccguaggcucuuacagaa

SEQ ID NO: 458076 - RNA, 19 nt, Artificial Sequence
  Description of Artificial Sequence: Synthetic oligonucleotide
guaucccuagucgcccaac

SEQ ID NO: 458077 - RNA, 19 nt, Artificial Sequence
  Description of Artificial Sequence: Synthetic oligonucleotide
uccgggauuuaugguccaa

SEQ ID NO: 458078 - RNA, 19 nt, Artificial Sequence
  Description of Artificial Sequence: Synthetic oligonucleotide
uucugccgggcugcuggcc

SEQ ID NO: 458079 - RNA, 19 nt, Artificial Sequence
  Description of Artificial Sequence: Synthetic oligonucleotide
gguaucccucugucucugc

SEQ ID NO: 458080 - RNA, 19 nt, Artificial Sequence
  Description of Artificial Sequence: Synthetic oligonucleotide
caguaucccuagucgccca

SEQ ID NO: 458081 - RNA, 19 nt, Artificial Sequence
  Description of Artificial Sequence: Synthetic oligonucleotide
ggaucacauacgccuggga

SEQ ID NO: 458082 - RNA, 19 nt, Artificial Sequence
  Description of Artificial Sequence: Synthetic oligonucleotide
ccauaucugggucgguguc

SEQ ID NO: 458083 - RNA, 19 nt, Artificial Sequence
  Description of Artificial Sequence: Synthetic oligonucleotide
ggaauccucaugccggccu

SEQ ID NO: 458084 - RNA, 19 nt, Artificial Sequence
  Description of Artificial Sequence: Synthetic oligonucleotide
aggaagcggcagccaccuc

SEQ ID NO: 458085 - RNA, 19 nt, Artificial Sequence
  Description of Artificial Sequence: Synthetic oligonucleotide
ucgcccaacaaggcacaau

SEQ ID NO: 458086 - RNA, 19 nt, Artificial Sequence
  Description of Artificial Sequence: Synthetic oligonucleotide
cauaggccacauuucggau

SEQ ID NO: 458087 - RNA, 19 nt, Artificial Sequence
  Description of Artificial Sequence: Synthetic oligonucleotide
guaaguggucagugucaua

SEQ ID NO: 458088 - RNA, 19 nt, Artificial Sequence
  Description of Artificial Sequence: Synthetic oligonucleotide
gcgagaaguggccagcagu

SEQ ID NO: 458089 - RNA, 19 nt, Artificial Sequence
  Description of Artificial Sequence: Synthetic oligonucleotide
gccacauuucggaugcgca

SEQ ID NO: 458090 - RNA, 19 nt, Artificial Sequence
  Description of Artificial Sequence: Synthetic oligonucleotide
ccgggauuuaugguccaag

SEQ ID NO: 458091 - RNA, 19 nt, Artificial Sequence
  Description of Artificial Sequence: Synthetic oligonucleotide
cauacgccugggauaugua

SEQ ID NO: 458092 - RNA, 19 nt, Artificial Sequence
  Description of Artificial Sequence: Synthetic oligonucleotide
cuggcccuacuagcuuugc

SEQ ID NO: 458093 - RNA, 19 nt, Artificial Sequence
  Description of Artificial Sequence: Synthetic oligonucleotide
gccgaagugaggguugcuc

SEQ ID NO: 458094 - RNA, 19 nt, Artificial Sequence
  Description of Artificial Sequence: Synthetic oligonucleotide
augccggccuccagaccac

SEQ ID NO: 458095 - RNA, 19 nt, Artificial Sequence
  Description of Artificial Sequence: Synthetic oligonucleotide
cacucgugccccaggccca

SEQ ID NO: 458096 - RNA, 19 nt, Artificial Sequence
  Description of Artificial Sequence: Synthetic oligonucleotide
caucggggcucagggcacc

SEQ ID NO: 458097 - RNA, 19 nt, Artificial Sequence
  Description of Artificial Sequence: Synthetic oligonucleotide
gagcgggcauaauacucau

SEQ ID NO: 458098 - RNA, 19 nt, Artificial Sequence
  Description of Artificial Sequence: Synthetic oligonucleotide
ccccgcggaucacauacgc

SEQ ID NO: 458099 - RNA, 19 nt, Artificial Sequence
  Description of Artificial Sequence: Synthetic oligonucleotide
aucaggcagggaacccuca

SEQ ID NO: 458100 - RNA, 19 nt, Artificial Sequence
  Description of Artificial Sequence: Synthetic oligonucleotide
cccgcggaucacauacgcc

SEQ ID NO: 458101 - RNA, 19 nt, Artificial Sequence
  Description of Artificial Sequence: Synthetic oligonucleotide
ugccguagccacggugauc

SEQ ID NO: 458102 - RNA, 19 nt, Artificial Sequence
  Description of Artificial Sequence: Synthetic oligonucleotide
cauguccucccgguuugca

SEQ ID NO: 458103 - RNA, 19 nt, Artificial Sequence
  Description of Artificial Sequence: Synthetic oligonucleotide
cacgauucuggucgaacuu

SEQ ID NO: 458104 - RNA, 19 nt, Artificial Sequence
  Description of Artificial Sequence: Synthetic oligonucleotide
cagggcccggcuguaguuc

SEQ ID NO: 458105 - RNA, 19 nt, Artificial Sequence
  Description of Artificial Sequence: Synthetic oligonucleotide
gggacauaguugcccaggu

SEQ ID NO: 458106 - RNA, 19 nt, Artificial Sequence
  Description of Artificial Sequence: Synthetic oligonucleotide
ucuccccgcggaucacaua

SEQ ID NO: 458107 - RNA, 19 nt, Artificial Sequence
  Description of Artificial Sequence: Synthetic oligonucleotide
ccgcggaucacauacgccu

SEQ ID NO: 458108 - RNA, 19 nt, Artificial Sequence
  Description of Artificial Sequence: Synthetic oligonucleotide
gccauaucugggucggugu

SEQ ID NO: 458109 - RNA, 19 nt, Artificial Sequence
  Description of Artificial Sequence: Synthetic oligonucleotide
ggucgaacuuuaagaccac

SEQ ID NO: 458110 - RNA, 19 nt, Artificial Sequence
  Description of Artificial Sequence: Synthetic oligonucleotide
ggcagaacauucagugcaa

SEQ ID NO: 458111 - RNA, 19 nt, Artificial Sequence
  Description of Artificial Sequence: Synthetic oligonucleotide
gucgaacuuuaagaccacu

SEQ ID NO: 458112 - RNA, 19 nt, Artificial Sequence
  Description of Artificial Sequence: Synthetic oligonucleotide
gagacccugucccgugggu

SEQ ID NO: 458113 - RNA, 19 nt, Artificial Sequence
  Description of Artificial Sequence: Synthetic oligonucleotide
ccguaggcucuuacagaag

SEQ ID NO: 458114 - RNA, 19 nt, Artificial Sequence
  Description of Artificial Sequence: Synthetic oligonucleotide
cagggucuccccgcggauc

SEQ ID NO: 458115 - RNA, 19 nt, Artificial Sequence
  Description of Artificial Sequence: Synthetic oligonucleotide
gccacucgugccccaggcc

SEQ ID NO: 458116 - RNA, 19 nt, Artificial Sequence
  Description of Artificial Sequence: Synthetic oligonucleotide
cgaguguagaauaacugau

SEQ ID NO: 458117 - RNA, 19 nt, Artificial Sequence
  Description of Artificial Sequence: Synthetic oligonucleotide
gggaacauucucguauccu

SEQ ID NO: 458118 - RNA, 19 nt, Artificial Sequence
  Description of Artificial Sequence: Synthetic oligonucleotide
cgcaaggucuccggguugg

SEQ ID NO: 458119 - RNA, 19 nt, Artificial Sequence
  Description of Artificial Sequence: Synthetic oligonucleotide
guccauggggucaguggaa

SEQ ID NO: 458120 - RNA, 19 nt, Artificial Sequence
  Description of Artificial Sequence: Synthetic oligonucleotide
ggcuauuaccuuccuguuu

SEQ ID NO: 458121 - RNA, 19 nt, Artificial Sequence
  Description of Artificial Sequence: Synthetic oligonucleotide
ccucggcggagaacaguag

SEQ ID NO: 458122 - RNA, 19 nt, Artificial Sequence
  Description of Artificial Sequence: Synthetic oligonucleotide
gguccugccgacagcuauc

SEQ ID NO: 458123 - RNA, 19 nt, Artificial Sequence
  Description of Artificial Sequence: Synthetic oligonucleotide
cucguauccuccagccaau

SEQ ID NO: 458124 - RNA, 19 nt, Artificial Sequence
  Description of Artificial Sequence: Synthetic oligonucleotide
gccccacauauguccucag

SEQ ID NO: 458125 - RNA, 19 nt, Artificial Sequence
  Description of Artificial Sequence: Synthetic oligonucleotide
gcgcaaggucuccggguug

SEQ ID NO: 458126 - RNA, 19 nt, Artificial Sequence
  Description of Artificial Sequence: Synthetic oligonucleotide
ggcucuuacagaaggccau

SEQ ID NO: 458127 - RNA, 19 nt, Artificial Sequence
  Description of Artificial Sequence: Synthetic oligonucleotide
ucgcuuccgcuggaccaau

SEQ ID NO: 458128 - RNA, 19 nt, Artificial Sequence
  Description of Artificial Sequence: Synthetic oligonucleotide
caugucccuggccuccccu

SEQ ID NO: 458129 - RNA, 19 nt, Artificial Sequence
  Description of Artificial Sequence: Synthetic oligonucleotide
ccuugugauugagggcaac

SEQ ID NO: 458130 - RNA, 19 nt, Artificial Sequence
  Description of Artificial Sequence: Synthetic oligonucleotide
cccucggcggagaacagua

SEQ ID NO: 458131 - RNA, 19 nt, Artificial Sequence
  Description of Artificial Sequence: Synthetic oligonucleotide
cucugucaugggccccaca

SEQ ID NO: 458132 - RNA, 19 nt, Artificial Sequence
  Description of Artificial Sequence: Synthetic oligonucleotide
ccaccugaccuucuggccu

SEQ ID NO: 458133 - RNA, 19 nt, Artificial Sequence
  Description of Artificial Sequence: Synthetic oligonucleotide
cacauacgccugggauaug

SEQ ID NO: 458134 - RNA, 19 nt, Artificial Sequence
  Description of Artificial Sequence: Synthetic oligonucleotide
gccaaucuggaauccucau

SEQ ID NO: 458135 - RNA, 19 nt, Artificial Sequence
  Description of Artificial Sequence: Synthetic oligonucleotide
gccgguagcggaccacgaa

SEQ ID NO: 458136 - RNA, 19 nt, Artificial Sequence
  Description of Artificial Sequence: Synthetic oligonucleotide
cgacagcuauccauagcca

SEQ ID NO: 458137 - RNA, 19 nt, Artificial Sequence
  Description of Artificial Sequence: Synthetic oligonucleotide
acccugucccguggguaau

SEQ ID NO: 458138 - RNA, 19 nt, Artificial Sequence
  Description of Artificial Sequence: Synthetic oligonucleotide
cccuacuagcuuugcagcu

SEQ ID NO: 458139 - RNA, 19 nt, Artificial Sequence
  Description of Artificial Sequence: Synthetic oligonucleotide
gcucuuacagaaggccaua

SEQ ID NO: 458140 - RNA, 19 nt, Artificial Sequence
  Description of Artificial Sequence: Synthetic oligonucleotide
cggcggagaacaguagaug

SEQ ID NO: 458141 - RNA, 19 nt, Artificial Sequence
  Description of Artificial Sequence: Synthetic oligonucleotide
cgccacucgugccccaggc

SEQ ID NO: 458142 - RNA, 19 nt, Artificial Sequence
  Description of Artificial Sequence: Synthetic oligonucleotide
cgauucuggucgaacuuua

SEQ ID NO: 458143 - RNA, 19 nt, Artificial Sequence
  Description of Artificial Sequence: Synthetic oligonucleotide
gggcuauuaccuuccuguu

SEQ ID NO: 458144 - RNA, 19 nt, Artificial Sequence
  Description of Artificial Sequence: Synthetic oligonucleotide
ccccgggugguaggcagcc

SEQ ID NO: 458145 - RNA, 19 nt, Artificial Sequence
  Description of Artificial Sequence: Synthetic oligonucleotide
gucgcccaacaaggcacaa

SEQ ID NO: 458146 - RNA, 19 nt, Artificial Sequence
  Description of Artificial Sequence: Synthetic oligonucleotide
ggccagacaucggcaaugu

SEQ ID NO: 458147 - RNA, 19 nt, Artificial Sequence
  Description of Artificial Sequence: Synthetic oligonucleotide
gcggaccacgaaguucauc

SEQ ID NO: 458148 - RNA, 19 nt, Artificial Sequence
  Description of Artificial Sequence: Synthetic oligonucleotide
uccucccgguuugcauauu

SEQ ID NO: 458149 - RNA, 19 nt, Artificial Sequence
  Description of Artificial Sequence: Synthetic oligonucleotide
cuggaagauccgggauuua

SEQ ID NO: 458150 - RNA, 19 nt, Artificial Sequence
  Description of Artificial Sequence: Synthetic oligonucleotide
gugaggcggccagggugca

SEQ ID NO: 458151 - RNA, 19 nt, Artificial Sequence
  Description of Artificial Sequence: Synthetic oligonucleotide
gugccccgggugguaggca

SEQ ID NO: 458152 - RNA, 19 nt, Artificial Sequence
  Description of Artificial Sequence: Synthetic oligonucleotide
ccacuagccccugcccauc

SEQ ID NO: 458153 - RNA, 19 nt, Artificial Sequence
  Description of Artificial Sequence: Synthetic oligonucleotide
ccgguaucccucugucucu

SEQ ID NO: 458154 - RNA, 19 nt, Artificial Sequence
  Description of Artificial Sequence: Synthetic oligonucleotide
cgguagcggaccacgaagu

SEQ ID NO: 458155 - RNA, 19 nt, Artificial Sequence
  Description of Artificial Sequence: Synthetic oligonucleotide
ggccgguagcggaccacga

SEQ ID NO: 458156 - RNA, 19 nt, Artificial Sequence
  Description of Artificial Sequence: Synthetic oligonucleotide
gccccgggugguaggcagc

SEQ ID NO: 458157 - RNA, 19 nt, Artificial Sequence
  Description of Artificial Sequence: Synthetic oligonucleotide
cgcacacgauucuggucga

SEQ ID NO: 458158 - RNA, 19 nt, Artificial Sequence
  Description of Artificial Sequence: Synthetic oligonucleotide
gcacacgauucuggucgaa

SEQ ID NO: 458159 - RNA, 19 nt, Artificial Sequence
  Description of Artificial Sequence: Synthetic oligonucleotide
ccguagccacggugaucac

SEQ ID NO: 458160 - RNA, 19 nt, Artificial Sequence
  Description of Artificial Sequence: Synthetic oligonucleotide
gcccgaugcucucucucuu

SEQ ID NO: 458161 - RNA, 19 nt, Artificial Sequence
  Description of Artificial Sequence: Synthetic oligonucleotide
cccgaugcucucucucuuu

SEQ ID NO: 458162 - RNA, 19 nt, Artificial Sequence
  Description of Artificial Sequence: Synthetic oligonucleotide
gcccucggcggagaacagu

SEQ ID NO: 458163 - RNA, 19 nt, Artificial Sequence
  Description of Artificial Sequence: Synthetic oligonucleotide
ggccgaagugaggguugcu

SEQ ID NO: 458164 - RNA, 19 nt, Artificial Sequence
  Description of Artificial Sequence: Synthetic oligonucleotide
cgccgguaucccucugucu

SEQ ID NO: 458165 - RNA, 19 nt, Artificial Sequence
  Description of Artificial Sequence: Synthetic oligonucleotide
cggugaucaccagcaauuu

SEQ ID NO: 458166 - RNA, 19 nt, Artificial Sequence
  Description of Artificial Sequence: Synthetic oligonucleotide
auaauugagaacuugaggc

SEQ ID NO: 458167 - RNA, 19 nt, Artificial Sequence
  Description of Artificial Sequence: Synthetic oligonucleotide
aaguaauugauuuacaagu

SEQ ID NO: 458168 - RNA, 19 nt, Artificial Sequence
  Description of Artificial Sequence: Synthetic oligonucleotide
aaugacgucaucuaaaggu

SEQ ID NO: 458169 - RNA, 19 nt, Artificial Sequence
  Description of Artificial Sequence: Synthetic oligonucleotide
uaaccuaggaacuaguucg

SEQ ID NO: 458170 - RNA, 19 nt, Artificial Sequence
  Description of Artificial Sequence: Synthetic oligonucleotide
aacuaguucgcccagcacc

SEQ ID NO: 458171 - RNA, 19 nt, Artificial Sequence
  Description of Artificial Sequence: Synthetic oligonucleotide
ugaaguccgaacuaaaugg

SEQ ID NO: 458172 - RNA, 19 nt, Artificial Sequence
  Description of Artificial Sequence: Synthetic oligonucleotide
guaacgauaaagucgaagg

SEQ ID NO: 458173 - RNA, 19 nt, Artificial Sequence
  Description of Artificial Sequence: Synthetic oligonucleotide
aaucgaauaccuccaaagg

SEQ ID NO: 458174 - RNA, 19 nt, Artificial Sequence
  Description of Artificial Sequence: Synthetic oligonucleotide
gauacgaugacacuggcac

SEQ ID NO: 458175 - RNA, 19 nt, Artificial Sequence
  Description of Artificial Sequence: Synthetic oligonucleotide
aaagcacucaguaucauuc

SEQ ID NO: 458176 - RNA, 19 nt, Artificial Sequence
  Description of Artificial Sequence: Synthetic oligonucleotide
uaaucgaauaccuccaaag

SEQ ID NO: 458177 - RNA, 19 nt, Artificial Sequence
  Description of Artificial Sequence: Synthetic oligonucleotide
ucgaauaccuccaaaggag

SEQ ID NO: 458178 - RNA, 19 nt, Artificial Sequence
  Description of Artificial Sequence: Synthetic oligonucleotide
ugugguuucaacauggcuc

SEQ ID NO: 458179 - RNA, 19 nt, Artificial Sequence
  Description of Artificial Sequence: Synthetic oligonucleotide
aacugguaacgauaaaguc

SEQ ID NO: 458180 - RNA, 19 nt, Artificial Sequence
  Description of Artificial Sequence: Synthetic oligonucleotide
ugaguuuaggggcaugugg

SEQ ID NO: 458181 - RNA, 19 nt, Artificial Sequence
  Description of Artificial Sequence: Synthetic oligonucleotide
gaagguauaaucgaauacc

SEQ ID NO: 458182 - RNA, 19 nt, Artificial Sequence
  Description of Artificial Sequence: Synthetic oligonucleotide
gguaauagcaaucaacucc

SEQ ID NO: 458183 - RNA, 19 nt, Artificial Sequence
  Description of Artificial Sequence: Synthetic oligonucleotide
ucuaacuccguacugcaag

SEQ ID NO: 458184 - RNA, 19 nt, Artificial Sequence
  Description of Artificial Sequence: Synthetic oligonucleotide
uggguaauagcaaucaacu

SEQ ID NO: 458185 - RNA, 19 nt, Artificial Sequence
  Description of Artificial Sequence: Synthetic oligonucleotide
aggguguuaaugcugaggg

SEQ ID NO: 458186 - RNA, 19 nt, Artificial Sequence
  Description of Artificial Sequence: Synthetic oligonucleotide
ucacacaucaguuugcaca

SEQ ID NO: 458187 - RNA, 19 nt, Artificial Sequence
  Description of Artificial Sequence: Synthetic oligonucleotide
aguaguuaaggauacgaug

SEQ ID NO: 458188 - RNA, 19 nt, Artificial Sequence
  Description of Artificial Sequence: Synthetic oligonucleotide
uccaauugcaugaauaguc

SEQ ID NO: 458189 - RNA, 19 nt, Artificial Sequence
  Description of Artificial Sequence: Synthetic oligonucleotide
auaaccuaggaacuaguuc

SEQ ID NO: 458190 - RNA, 19 nt, Artificial Sequence
  Description of Artificial Sequence: Synthetic oligonucleotide
ugaguaagguguuaagucc

SEQ ID NO: 458191 - RNA, 19 nt, Artificial Sequence
  Description of Artificial Sequence: Synthetic oligonucleotide
aagguguuaaguccugggg

SEQ ID NO: 458192 - RNA, 19 nt, Artificial Sequence
  Description of Artificial Sequence: Synthetic oligonucleotide
aacaacguuggguuucugg

SEQ ID NO: 458193 - RNA, 19 nt, Artificial Sequence
  Description of Artificial Sequence: Synthetic oligonucleotide
gaauaaguaauugauuuac

SEQ ID NO: 458194 - RNA, 19 nt, Artificial Sequence
  Description of Artificial Sequence: Synthetic oligonucleotide
guaucauucccagauaugg

SEQ ID NO: 458195 - RNA, 19 nt, Artificial Sequence
  Description of Artificial Sequence: Synthetic oligonucleotide
aaauaauugagaacuugag

SEQ ID NO: 458196 - RNA, 19 nt, Artificial Sequence
  Description of Artificial Sequence: Synthetic oligonucleotide
aauugagaacuugaggcuc

SEQ ID NO: 458197 - RNA, 19 nt, Artificial Sequence
  Description of Artificial Sequence: Synthetic oligonucleotide
ugcaauugaugccauagca

SEQ ID NO: 458198 - RNA, 19 nt, Artificial Sequence
  Description of Artificial Sequence: Synthetic oligonucleotide
uuccaaucccaaaagaaca

SEQ ID NO: 458199 - RNA, 19 nt, Artificial Sequence
  Description of Artificial Sequence: Synthetic oligonucleotide
ucaaugacgucaucuaaag

SEQ ID NO: 458200 - RNA, 19 nt, Artificial Sequence
  Description of Artificial Sequence: Synthetic oligonucleotide
aacuaauucugcuguuuuc

SEQ ID NO: 458201 - RNA, 19 nt, Artificial Sequence
  Description of Artificial Sequence: Synthetic oligonucleotide
cuucaaauacuuauccacc

SEQ ID NO: 458202 - RNA, 19 nt, Artificial Sequence
  Description of Artificial Sequence: Synthetic oligonucleotide
uacuuauccaccauugacu

SEQ ID NO: 458203 - RNA, 19 nt, Artificial Sequence
  Description of Artificial Sequence: Synthetic oligonucleotide
ucccaaaagaacauggcac

SEQ ID NO: 458204 - RNA, 19 nt, Artificial Sequence
  Description of Artificial Sequence: Synthetic oligonucleotide
agcaaucaacuccugaagg

SEQ ID NO: 458205 - RNA, 19 nt, Artificial Sequence
  Description of Artificial Sequence: Synthetic oligonucleotide
aagaacauggcacuuguuu

SEQ ID NO: 458206 - RNA, 19 nt, Artificial Sequence
  Description of Artificial Sequence: Synthetic oligonucleotide
ucgaauuccaagauuggga

SEQ ID NO: 458207 - RNA, 19 nt, Artificial Sequence
  Description of Artificial Sequence: Synthetic oligonucleotide
caagauugggaucaaacug

SEQ ID NO: 458208 - RNA, 19 nt, Artificial Sequence
  Description of Artificial Sequence: Synthetic oligonucleotide
ugaagguauaaucgaauac

SEQ ID NO: 458209 - RNA, 19 nt, Artificial Sequence
  Description of Artificial Sequence: Synthetic oligonucleotide
aaggagaccaguuguucuc

SEQ ID NO: 458210 - RNA, 19 nt, Artificial Sequence
  Description of Artificial Sequence: Synthetic oligonucleotide
guuucgaucugucagacca

SEQ ID NO: 458211 - RNA, 19 nt, Artificial Sequence
  Description of Artificial Sequence: Synthetic oligonucleotide
aucauucccagauauggag

SEQ ID NO: 458212 - RNA, 19 nt, Artificial Sequence
  Description of Artificial Sequence: Synthetic oligonucleotide
uaaggauacgaugacacug

SEQ ID NO: 458213 - RNA, 19 nt, Artificial Sequence
  Description of Artificial Sequence: Synthetic oligonucleotide
cacuuaaggacucaagaag

SEQ ID NO: 458214 - RNA, 19 nt, Artificial Sequence
  Description of Artificial Sequence: Synthetic oligonucleotide
caacacuccuucaagacag

SEQ ID NO: 458215 - RNA, 19 nt, Artificial Sequence
  Description of Artificial Sequence: Synthetic oligonucleotide
agaacauggcacuuguuug

SEQ ID NO: 458216 - RNA, 19 nt, Artificial Sequence
  Description of Artificial Sequence: Synthetic oligonucleotide
ugccauagcaauugcaccc

SEQ ID NO: 458217 - RNA, 19 nt, Artificial Sequence
  Description of Artificial Sequence: Synthetic oligonucleotide
uucuaccacagauaaagcu

SEQ ID NO: 458218 - RNA, 19 nt, Artificial Sequence
  Description of Artificial Sequence: Synthetic oligonucleotide
aaggauacgaugacacugg

SEQ ID NO: 458219 - RNA, 19 nt, Artificial Sequence
  Description of Artificial Sequence: Synthetic oligonucleotide
uaauugagaacuugaggcu

SEQ ID NO: 458220 - RNA, 19 nt, Artificial Sequence
  Description of Artificial Sequence: Synthetic oligonucleotide
ugaguaguuaaggauacga

SEQ ID NO: 458221 - RNA, 19 nt, Artificial Sequence
  Description of Artificial Sequence: Synthetic oligonucleotide
agcacaagcggucuuguag

SEQ ID NO: 458222 - RNA, 19 nt, Artificial Sequence
  Description of Artificial Sequence: Synthetic oligonucleotide
uagucaaagcacaagcggu

SEQ ID NO: 458223 - RNA, 19 nt, Artificial Sequence
  Description of Artificial Sequence: Synthetic oligonucleotide
aaguccgaacuaaauggcc

SEQ ID NO: 458224 - RNA, 19 nt, Artificial Sequence
  Description of Artificial Sequence: Synthetic oligonucleotide
aucgaauaccuccaaagga

SEQ ID NO: 458225 - RNA, 19 nt, Artificial Sequence
  Description of Artificial Sequence: Synthetic oligonucleotide
caaauaauugagaacuuga

SEQ ID NO: 458226 - RNA, 19 nt, Artificial Sequence
  Description of Artificial Sequence: Synthetic oligonucleotide
ugcccaagcucucaaaggc

SEQ ID NO: 458227 - RNA, 19 nt, Artificial Sequence
  Description of Artificial Sequence: Synthetic oligonucleotide
ucggagacucaaauaauug

SEQ ID NO: 458228 - RNA, 19 nt, Artificial Sequence
  Description of Artificial Sequence: Synthetic oligonucleotide
ucaagugaguucuucuuga

SEQ ID NO: 458229 - RNA, 19 nt, Artificial Sequence
  Description of Artificial Sequence: Synthetic oligonucleotide
ggcuccaacacacuuaagg

SEQ ID NO: 458230 - RNA, 19 nt, Artificial Sequence
  Description of Artificial Sequence: Synthetic oligonucleotide
cugggaugaguuuaggggc

SEQ ID NO: 458231 - RNA, 19 nt, Artificial Sequence
  Description of Artificial Sequence: Synthetic oligonucleotide
uaucguuuucaucuucagc

SEQ ID NO: 458232 - RNA, 19 nt, Artificial Sequence
  Description of Artificial Sequence: Synthetic oligonucleotide
guaguuaaggauacgauga

SEQ ID NO: 458233 - RNA, 19 nt, Artificial Sequence
  Description of Artificial Sequence: Synthetic oligonucleotide
ugcuaucccgugaaguccg

SEQ ID NO: 458234 - RNA, 19 nt, Artificial Sequence
  Description of Artificial Sequence: Synthetic oligonucleotide
gaugccauagcaauugcac

SEQ ID NO: 458235 - RNA, 19 nt, Artificial Sequence
  Description of Artificial Sequence: Synthetic oligonucleotide
cuccaaaggagccagguac

SEQ ID NO: 458236 - RNA, 19 nt, Artificial Sequence
  Description of Artificial Sequence: Synthetic oligonucleotide
ugucgaauuccaagauugg

SEQ ID NO: 458237 - RNA, 19 nt, Artificial Sequence
  Description of Artificial Sequence: Synthetic oligonucleotide
ucucgaacucgccacaugu

SEQ ID NO: 458238 - RNA, 19 nt, Artificial Sequence
  Description of Artificial Sequence: Synthetic oligonucleotide
aguccgaacuaaauggccc

SEQ ID NO: 458239 - RNA, 19 nt, Artificial Sequence
  Description of Artificial Sequence: Synthetic oligonucleotide
cuucaagacagccugaaga

SEQ ID NO: 458240 - RNA, 19 nt, Artificial Sequence
  Description of Artificial Sequence: Synthetic oligonucleotide
ugagauucucuuugcaaca

SEQ ID NO: 458241 - RNA, 19 nt, Artificial Sequence
  Description of Artificial Sequence: Synthetic oligonucleotide
uuaaggacucaagaagugc

SEQ ID NO: 458242 - RNA, 19 nt, Artificial Sequence
  Description of Artificial Sequence: Synthetic oligonucleotide
gugaaguccgaacuaaaug

SEQ ID NO: 458243 - RNA, 19 nt, Artificial Sequence
  Description of Artificial Sequence: Synthetic oligonucleotide
aaacaucaagauauugcag

SEQ ID NO: 458244 - RNA, 19 nt, Artificial Sequence
  Description of Artificial Sequence: Synthetic oligonucleotide
cacuguuucgaucugucag

SEQ ID NO: 458245 - RNA, 19 nt, Artificial Sequence
  Description of Artificial Sequence: Synthetic oligonucleotide
ucgaacucgccacauguug

SEQ ID NO: 458246 - RNA, 19 nt, Artificial Sequence
  Description of Artificial Sequence: Synthetic oligonucleotide
aagguauaaucgaauaccu

SEQ ID NO: 458247 - RNA, 19 nt, Artificial Sequence
  Description of Artificial Sequence: Synthetic oligonucleotide
agaugaguaggucuuauuu

SEQ ID NO: 458248 - RNA, 19 nt, Artificial Sequence
  Description of Artificial Sequence: Synthetic oligonucleotide
aggucuguugucugucucc

SEQ ID NO: 458249 - RNA, 19 nt, Artificial Sequence
  Description of Artificial Sequence: Synthetic oligonucleotide
gauaaagucgaaggaauga

SEQ ID NO: 458250 - RNA, 19 nt, Artificial Sequence
  Description of Artificial Sequence: Synthetic oligonucleotide
acuuuucuaacuccguacu

SEQ ID NO: 458251 - RNA, 19 nt, Artificial Sequence
  Description of Artificial Sequence: Synthetic oligonucleotide
aauaaguaauugauuuaca

SEQ ID NO: 458252 - RNA, 19 nt, Artificial Sequence
  Description of Artificial Sequence: Synthetic oligonucleotide
caugaauagucaaagcaca

SEQ ID NO: 458253 - RNA, 19 nt, Artificial Sequence
  Description of Artificial Sequence: Synthetic oligonucleotide
ucgaacuuccgucacggga

SEQ ID NO: 458254 - RNA, 19 nt, Artificial Sequence
  Description of Artificial Sequence: Synthetic oligonucleotide
acaaaccuugcucagaguu

SEQ ID NO: 458255 - RNA, 19 nt, Artificial Sequence
  Description of Artificial Sequence: Synthetic oligonucleotide
gaucaguucacauaaccua

SEQ ID NO: 458256 - RNA, 19 nt, Artificial Sequence
  Description of Artificial Sequence: Synthetic oligonucleotide
agaccacuaagcaaagcgc

SEQ ID NO: 458257 - RNA, 19 nt, Artificial Sequence
  Description of Artificial Sequence: Synthetic oligonucleotide
agauaaagcuucuguucuc

SEQ ID NO: 458258 - RNA, 19 nt, Artificial Sequence
  Description of Artificial Sequence: Synthetic oligonucleotide
aacucccaugcuuucaagu

SEQ ID NO: 458259 - RNA, 19 nt, Artificial Sequence
  Description of Artificial Sequence: Synthetic oligonucleotide
cuuaaggacucaagaagug

SEQ ID NO: 458260 - RNA, 19 nt, Artificial Sequence
  Description of Artificial Sequence: Synthetic oligonucleotide
caagacugcgauuguaaag

SEQ ID NO: 458261 - RNA, 19 nt, Artificial Sequence
  Description of Artificial Sequence: Synthetic oligonucleotide
agacugcgauuguaaagcc

SEQ ID NO: 458262 - RNA, 19 nt, Artificial Sequence
  Description of Artificial Sequence: Synthetic oligonucleotide
agggcagaacuucuuuggc

SEQ ID NO: 458263 - RNA, 19 nt, Artificial Sequence
  Description of Artificial Sequence: Synthetic oligonucleotide
aaagcgcucauaaguuuac

SEQ ID NO: 458264 - RNA, 19 nt, Artificial Sequence
  Description of Artificial Sequence: Synthetic oligonucleotide
gauggcuacaaucuuauau

SEQ ID NO: 458265 - RNA, 19 nt, Artificial Sequence
  Description of Artificial Sequence: Synthetic oligonucleotide
uuucauuuguggugggcug

SEQ ID NO: 458266 - RNA, 19 nt, Artificial Sequence
  Description of Artificial Sequence: Synthetic oligonucleotide
agaauaaguaauugauuua

SEQ ID NO: 458267 - RNA, 19 nt, Artificial Sequence
  Description of Artificial Sequence: Synthetic oligonucleotide
uuuggugcuccgaacuccc

SEQ ID NO: 458268 - RNA, 19 nt, Artificial Sequence
  Description of Artificial Sequence: Synthetic oligonucleotide
ugcaacacuccuucaagac

SEQ ID NO: 458269 - RNA, 19 nt, Artificial Sequence
  Description of Artificial Sequence: Synthetic oligonucleotide
guuucuggguuccugggcc

SEQ ID NO: 458270 - RNA, 19 nt, Artificial Sequence
  Description of Artificial Sequence: Synthetic oligonucleotide
gagucuuagccguucacac

SEQ ID NO: 458271 - RNA, 19 nt, Artificial Sequence
  Description of Artificial Sequence: Synthetic oligonucleotide
aggucuuauuuucuaaaga

SEQ ID NO: 458272 - RNA, 19 nt, Artificial Sequence
  Description of Artificial Sequence: Synthetic oligonucleotide
uggauucucgaacucgcca

SEQ ID NO: 458273 - RNA, 19 nt, Artificial Sequence
  Description of Artificial Sequence: Synthetic oligonucleotide
acucccaugcuuucaagug

SEQ ID NO: 458274 - RNA, 19 nt, Artificial Sequence
  Description of Artificial Sequence: Synthetic oligonucleotide
acuuaaggacucaagaagu

SEQ ID NO: 458275 - RNA, 19 nt, Artificial Sequence
  Description of Artificial Sequence: Synthetic oligonucleotide
aacuccguacugcaagcug

SEQ ID NO: 458276 - RNA, 19 nt, Artificial Sequence
  Description of Artificial Sequence: Synthetic oligonucleotide
cagauauggagguacaaga

SEQ ID NO: 458277 - RNA, 19 nt, Artificial Sequence
  Description of Artificial Sequence: Synthetic oligonucleotide
uuaguuccaaggccuacac

SEQ ID NO: 458278 - RNA, 19 nt, Artificial Sequence
  Description of Artificial Sequence: Synthetic oligonucleotide
ucgagcacuguccauugca

SEQ ID NO: 458279 - RNA, 19 nt, Artificial Sequence
  Description of Artificial Sequence: Synthetic oligonucleotide
aaccuaggaacuaguucgc

SEQ ID NO: 458280 - RNA, 19 nt, Artificial Sequence
  Description of Artificial Sequence: Synthetic oligonucleotide
uugcaauugaugccauagc

SEQ ID NO: 458281 - RNA, 19 nt, Artificial Sequence
  Description of Artificial Sequence: Synthetic oligonucleotide
uccaagacugcgauuguaa

SEQ ID NO: 458282 - RNA, 19 nt, Artificial Sequence
  Description of Artificial Sequence: Synthetic oligonucleotide
ugcacaggauuucugaauu

SEQ ID NO: 458283 - RNA, 19 nt, Artificial Sequence
  Description of Artificial Sequence: Synthetic oligonucleotide
uauaaucgaauaccuccaa

SEQ ID NO: 458284 - RNA, 19 nt, Artificial Sequence
  Description of Artificial Sequence: Synthetic oligonucleotide
uaguuaaggauacgaugac

SEQ ID NO: 458285 - RNA, 19 nt, Artificial Sequence
  Description of Artificial Sequence: Synthetic oligonucleotide
gaaguccgaacuaaauggc

SEQ ID NO: 458286 - RNA, 19 nt, Artificial Sequence
  Description of Artificial Sequence: Synthetic oligonucleotide
cuaacuccguacugcaagc

SEQ ID NO: 458287 - RNA, 19 nt, Artificial Sequence
  Description of Artificial Sequence: Synthetic oligonucleotide
uguuaaugcugagggcucg

SEQ ID NO: 458288 - RNA, 19 nt, Artificial Sequence
  Description of Artificial Sequence: Synthetic oligonucleotide
ucuaaaggucuuccucuca

SEQ ID NO: 458289 - RNA, 19 nt, Artificial Sequence
  Description of Artificial Sequence: Synthetic oligonucleotide
agauauggagguacaagag

SEQ ID NO: 458290 - RNA, 19 nt, Artificial Sequence
  Description of Artificial Sequence: Synthetic oligonucleotide
aggauacgaugacacuggc

SEQ ID NO: 458291 - RNA, 19 nt, Artificial Sequence
  Description of Artificial Sequence: Synthetic oligonucleotide
agcaccgaaacaucaagau

SEQ ID NO: 458292 - RNA, 19 nt, Artificial Sequence
  Description of Artificial Sequence: Synthetic oligonucleotide
acuaguucgcccagcaccg

SEQ ID NO: 458293 - RNA, 19 nt, Artificial Sequence
  Description of Artificial Sequence: Synthetic oligonucleotide
ugagucuuagccguucaca

SEQ ID NO: 458294 - RNA, 19 nt, Artificial Sequence
  Description of Artificial Sequence: Synthetic oligonucleotide
aguuuaccugaguaaggug

SEQ ID NO: 458295 - RNA, 19 nt, Artificial Sequence
  Description of Artificial Sequence: Synthetic oligonucleotide
cacacuuaaggacucaaga

SEQ ID NO: 458296 - RNA, 19 nt, Artificial Sequence
  Description of Artificial Sequence: Synthetic oligonucleotide
uuguucuguagcucggaga

SEQ ID NO: 458297 - RNA, 19 nt, Artificial Sequence
  Description of Artificial Sequence: Synthetic oligonucleotide
cacucaguaucauucccag

SEQ ID NO: 458298 - RNA, 19 nt, Artificial Sequence
  Description of Artificial Sequence: Synthetic oligonucleotide
uuagccguucacacaucag

SEQ ID NO: 458299 - RNA, 19 nt, Artificial Sequence
  Description of Artificial Sequence: Synthetic oligonucleotide
ugacgucaucuaaaggucu

SEQ ID NO: 458300 - RNA, 19 nt, Artificial Sequence
  Description of Artificial Sequence: Synthetic oligonucleotide
aagcgcucauaaguuuacc

SEQ ID NO: 458301 - RNA, 19 nt, Artificial Sequence
  Description of Artificial Sequence: Synthetic oligonucleotide
agucaaagcacaagcgguc

SEQ ID NO: 458302 - RNA, 19 nt, Artificial Sequence
  Description of Artificial Sequence: Synthetic oligonucleotide
cuaggaacuaguucgccca

SEQ ID NO: 458303 - RNA, 19 nt, Artificial Sequence
  Description of Artificial Sequence: Synthetic oligonucleotide
cuugcaccaaagcacucag

SEQ ID NO: 458304 - RNA, 19 nt, Artificial Sequence
  Description of Artificial Sequence: Synthetic oligonucleotide
agcgcucauaaguuuaccu

SEQ ID NO: 458305 - RNA, 19 nt, Artificial Sequence
  Description of Artificial Sequence: Synthetic oligonucleotide
auacaucagggcuguaucu

SEQ ID NO: 458306 - RNA, 19 nt, Artificial Sequence
  Description of Artificial Sequence: Synthetic oligonucleotide
acuaaauggcccauggcga

SEQ ID NO: 458307 - RNA, 19 nt, Artificial Sequence
  Description of Artificial Sequence: Synthetic oligonucleotide
uguuuuccguacagauucc

SEQ ID NO: 458308 - RNA, 19 nt, Artificial Sequence
  Description of Artificial Sequence: Synthetic oligonucleotide
ugacuugucagugaccaau

SEQ ID NO: 458309 - RNA, 19 nt, Artificial Sequence
  Description of Artificial Sequence: Synthetic oligonucleotide
ucaugggagaagacuuggc

SEQ ID NO: 458310 - RNA, 19 nt, Artificial Sequence
  Description of Artificial Sequence: Synthetic oligonucleotide
caccgaaacaucaagauau

SEQ ID NO: 458311 - RNA, 19 nt, Artificial Sequence
  Description of Artificial Sequence: Synthetic oligonucleotide
uuuaccugaguaagguguu

SEQ ID NO: 458312 - RNA, 19 nt, Artificial Sequence
  Description of Artificial Sequence: Synthetic oligonucleotide
auaaucgaauaccuccaaa

SEQ ID NO: 458313 - RNA, 19 nt, Artificial Sequence
  Description of Artificial Sequence: Synthetic oligonucleotide
ucgaaggaaugaguugagg

SEQ ID NO: 458314 - RNA, 19 nt, Artificial Sequence
  Description of Artificial Sequence: Synthetic oligonucleotide
ugucauagccugucgaauu

SEQ ID NO: 458315 - RNA, 19 nt, Artificial Sequence
  Description of Artificial Sequence: Synthetic oligonucleotide
auaaaucauucaaagcuaa

SEQ ID NO: 458316 - RNA, 19 nt, Artificial Sequence
  Description of Artificial Sequence: Synthetic oligonucleotide
ugagggguaugacaauauc

SEQ ID NO: 458317 - RNA, 19 nt, Artificial Sequence
  Description of Artificial Sequence: Synthetic oligonucleotide
gucuccauaguagcuaaag

SEQ ID NO: 458318 - RNA, 19 nt, Artificial Sequence
  Description of Artificial Sequence: Synthetic oligonucleotide
gagacucaaauaauugaga

SEQ ID NO: 458319 - RNA, 19 nt, Artificial Sequence
  Description of Artificial Sequence: Synthetic oligonucleotide
acacuccuucaagacagcc

SEQ ID NO: 458320 - RNA, 19 nt, Artificial Sequence
  Description of Artificial Sequence: Synthetic oligonucleotide
aucccgugaaguccgaacu

SEQ ID NO: 458321 - RNA, 19 nt, Artificial Sequence
  Description of Artificial Sequence: Synthetic oligonucleotide
agccugucgaauuccaaga

SEQ ID NO: 458322 - RNA, 19 nt, Artificial Sequence
  Description of Artificial Sequence: Synthetic oligonucleotide
uaaugcugagggcucgaac

SEQ ID NO: 458323 - RNA, 19 nt, Artificial Sequence
  Description of Artificial Sequence: Synthetic oligonucleotide
uaucccgugaaguccgaac

SEQ ID NO: 458324 - RNA, 19 nt, Artificial Sequence
  Description of Artificial Sequence: Synthetic oligonucleotide
uuccguacagauuccuuaa

SEQ ID NO: 458325 - RNA, 19 nt, Artificial Sequence
  Description of Artificial Sequence: Synthetic oligonucleotide
agugcugcuaucccgugaa

SEQ ID NO: 458326 - RNA, 19 nt, Artificial Sequence
  Description of Artificial Sequence: Synthetic oligonucleotide
guauaaucgaauaccucca

SEQ ID NO: 458327 - RNA, 19 nt, Artificial Sequence
  Description of Artificial Sequence: Synthetic oligonucleotide
aguuaaggauacgaugaca

SEQ ID NO: 458328 - RNA, 19 nt, Artificial Sequence
  Description of Artificial Sequence: Synthetic oligonucleotide
gguaacgauaaagucgaag

SEQ ID NO: 458329 - RNA, 19 nt, Artificial Sequence
  Description of Artificial Sequence: Synthetic oligonucleotide
uuccaauugcaugaauagu

SEQ ID NO: 458330 - RNA, 19 nt, Artificial Sequence
  Description of Artificial Sequence: Synthetic oligonucleotide
gguguuaaguccuggggac

SEQ ID NO: 458331 - RNA, 19 nt, Artificial Sequence
  Description of Artificial Sequence: Synthetic oligonucleotide
aaggccuacaccacuucug

SEQ ID NO: 458332 - RNA, 19 nt, Artificial Sequence
  Description of Artificial Sequence: Synthetic oligonucleotide
uaggaacuaguucgcccag

SEQ ID NO: 458333 - RNA, 19 nt, Artificial Sequence
  Description of Artificial Sequence: Synthetic oligonucleotide
ccauaguagcuaaagacuc

SEQ ID NO: 458334 - RNA, 19 nt, Artificial Sequence
  Description of Artificial Sequence: Synthetic oligonucleotide
gacucaaccaaaagucuuc

SEQ ID NO: 458335 - RNA, 19 nt, Artificial Sequence
  Description of Artificial Sequence: Synthetic oligonucleotide
ugcauucugcugucaaacu

SEQ ID NO: 458336 - RNA, 19 nt, Artificial Sequence
  Description of Artificial Sequence: Synthetic oligonucleotide
gagggcucgaacuuccguc

SEQ ID NO: 458337 - RNA, 19 nt, Artificial Sequence
  Description of Artificial Sequence: Synthetic oligonucleotide
cauugacuugucagugacc

SEQ ID NO: 458338 - RNA, 19 nt, Artificial Sequence
  Description of Artificial Sequence: Synthetic oligonucleotide
accugaguaagguguuaag

SEQ ID NO: 458339 - RNA, 19 nt, Artificial Sequence
  Description of Artificial Sequence: Synthetic oligonucleotide
uggcgaaugcacaggauuu

SEQ ID NO: 458340 - RNA, 19 nt, Artificial Sequence
  Description of Artificial Sequence: Synthetic oligonucleotide
auaguagcuaaagacucaa

SEQ ID NO: 458341 - RNA, 19 nt, Artificial Sequence
  Description of Artificial Sequence: Synthetic oligonucleotide
cuuuggugcuccgaacucc

SEQ ID NO: 458342 - RNA, 19 nt, Artificial Sequence
  Description of Artificial Sequence: Synthetic oligonucleotide
cauaguagcuaaagacuca

SEQ ID NO: 458343 - RNA, 19 nt, Artificial Sequence
  Description of Artificial Sequence: Synthetic oligonucleotide
aauugcacccugggcuuuc

SEQ ID NO: 458344 - RNA, 19 nt, Artificial Sequence
  Description of Artificial Sequence: Synthetic oligonucleotide
uggcaugguucuucaauac

SEQ ID NO: 458345 - RNA, 19 nt, Artificial Sequence
  Description of Artificial Sequence: Synthetic oligonucleotide
aacacacuuaaggacucaa

SEQ ID NO: 458346 - RNA, 19 nt, Artificial Sequence
  Description of Artificial Sequence: Synthetic oligonucleotide
guaagguguuaaguccugg

SEQ ID NO: 458347 - RNA, 19 nt, Artificial Sequence
  Description of Artificial Sequence: Synthetic oligonucleotide
agucuuagccguucacaca

SEQ ID NO: 458348 - RNA, 19 nt, Artificial Sequence
  Description of Artificial Sequence: Synthetic oligonucleotide
uccuuuggcagggucacac

SEQ ID NO: 458349 - RNA, 19 nt, Artificial Sequence
  Description of Artificial Sequence: Synthetic oligonucleotide
uguuucgaucugucagacc

SEQ ID NO: 458350 - RNA, 19 nt, Artificial Sequence
  Description of Artificial Sequence: Synthetic oligonucleotide
ucaguccacaaauuacauu

SEQ ID NO: 458351 - RNA, 19 nt, Artificial Sequence
  Description of Artificial Sequence: Synthetic oligonucleotide
uggagguacaagagaacuu

SEQ ID NO: 458352 - RNA, 19 nt, Artificial Sequence
  Description of Artificial Sequence: Synthetic oligonucleotide
agucgagcacuguccauug

SEQ ID NO: 458353 - RNA, 19 nt, Artificial Sequence
  Description of Artificial Sequence: Synthetic oligonucleotide
aguaucauucccagauaug

SEQ ID NO: 458354 - RNA, 19 nt, Artificial Sequence
  Description of Artificial Sequence: Synthetic oligonucleotide
uucucgaacucgccacaug

SEQ ID NO: 458355 - RNA, 19 nt, Artificial Sequence
  Description of Artificial Sequence: Synthetic oligonucleotide
gaacauggcacuuguuugu

SEQ ID NO: 458356 - RNA, 19 nt, Artificial Sequence
  Description of Artificial Sequence: Synthetic oligonucleotide
aggccuacaccacuucuga

SEQ ID NO: 458357 - RNA, 19 nt, Artificial Sequence
  Description of Artificial Sequence: Synthetic oligonucleotide
gauucucgaacucgccaca

SEQ ID NO: 458358 - RNA, 19 nt, Artificial Sequence
  Description of Artificial Sequence: Synthetic oligonucleotide
uguagcucggagacucaaa

SEQ ID NO: 458359 - RNA, 19 nt, Artificial Sequence
  Description of Artificial Sequence: Synthetic oligonucleotide
ggauucucgaacucgccac

SEQ ID NO: 458360 - RNA, 19 nt, Artificial Sequence
  Description of Artificial Sequence: Synthetic oligonucleotide
acugcgauuguaaagccuu

SEQ ID NO: 458361 - RNA, 19 nt, Artificial Sequence
  Description of Artificial Sequence: Synthetic oligonucleotide
uggcgauaacaacguuggg

SEQ ID NO: 458362 - RNA, 19 nt, Artificial Sequence
  Description of Artificial Sequence: Synthetic oligonucleotide
gcaagcugucaccacacag

SEQ ID NO: 458363 - RNA, 19 nt, Artificial Sequence
  Description of Artificial Sequence: Synthetic oligonucleotide
aggaacuaguucgcccagc

SEQ ID NO: 458364 - RNA, 19 nt, Artificial Sequence
  Description of Artificial Sequence: Synthetic oligonucleotide
uaaaggucuuccucucaau

SEQ ID NO: 458365 - RNA, 19 nt, Artificial Sequence
  Description of Artificial Sequence: Synthetic oligonucleotide
ugcugcuaucccgugaagu

SEQ ID NO: 458366 - RNA, 19 nt, Artificial Sequence
  Description of Artificial Sequence: Synthetic oligonucleotide
caggccuugcaccaaagca

SEQ ID NO: 458367 - RNA, 19 nt, Artificial Sequence
  Description of Artificial Sequence: Synthetic oligonucleotide
ucacgggacucaucauucc

SEQ ID NO: 458368 - RNA, 19 nt, Artificial Sequence
  Description of Artificial Sequence: Synthetic oligonucleotide
cagauaaagcuucuguucu

SEQ ID NO: 458369 - RNA, 19 nt, Artificial Sequence
  Description of Artificial Sequence: Synthetic oligonucleotide
gugaccaaugcauuccaaa

SEQ ID NO: 458370 - RNA, 19 nt, Artificial Sequence
  Description of Artificial Sequence: Synthetic oligonucleotide
uucgaucugucagaccacu

SEQ ID NO: 458371 - RNA, 19 nt, Artificial Sequence
  Description of Artificial Sequence: Synthetic oligonucleotide
cugcuaucccgugaagucc

SEQ ID NO: 458372 - RNA, 19 nt, Artificial Sequence
  Description of Artificial Sequence: Synthetic oligonucleotide
ugcgauuguaaagccuucu

SEQ ID NO: 458373 - RNA, 19 nt, Artificial Sequence
  Description of Artificial Sequence: Synthetic oligonucleotide
accacuaagcaaagcgcuc

SEQ ID NO: 458374 - RNA, 19 nt, Artificial Sequence
  Description of Artificial Sequence: Synthetic oligonucleotide
ucccagauauggagguaca

SEQ ID NO: 458375 - RNA, 19 nt, Artificial Sequence
  Description of Artificial Sequence: Synthetic oligonucleotide
agggcucgaacuuccguca

SEQ ID NO: 458376 - RNA, 19 nt, Artificial Sequence
  Description of Artificial Sequence: Synthetic oligonucleotide
agaacuaauucugcuguuu

SEQ ID NO: 458377 - RNA, 19 nt, Artificial Sequence
  Description of Artificial Sequence: Synthetic oligonucleotide
cuucugaucaguucacaua

SEQ ID NO: 458378 - RNA, 19 nt, Artificial Sequence
  Description of Artificial Sequence: Synthetic oligonucleotide
auacgaugacacuggcaca

SEQ ID NO: 458379 - RNA, 19 nt, Artificial Sequence
  Description of Artificial Sequence: Synthetic oligonucleotide
cuaaaggucuuccucucaa

SEQ ID NO: 458380 - RNA, 19 nt, Artificial Sequence
  Description of Artificial Sequence: Synthetic oligonucleotide
cuuagccguucacacauca

SEQ ID NO: 458381 - RNA, 19 nt, Artificial Sequence
  Description of Artificial Sequence: Synthetic oligonucleotide
uucuaacuccguacugcaa

SEQ ID NO: 458382 - RNA, 19 nt, Artificial Sequence
  Description of Artificial Sequence: Synthetic oligonucleotide
acacuguuucgaucuguca

SEQ ID NO: 458383 - RNA, 19 nt, Artificial Sequence
  Description of Artificial Sequence: Synthetic oligonucleotide
gcgcucauaaguuuaccug

SEQ ID NO: 458384 - RNA, 19 nt, Artificial Sequence
  Description of Artificial Sequence: Synthetic oligonucleotide
auaacaacguuggguuucu

SEQ ID NO: 458385 - RNA, 19 nt, Artificial Sequence
  Description of Artificial Sequence: Synthetic oligonucleotide
caaagcgcucauaaguuua

SEQ ID NO: 458386 - RNA, 19 nt, Artificial Sequence
  Description of Artificial Sequence: Synthetic oligonucleotide
ucuugaugagggguaugac

SEQ ID NO: 458387 - RNA, 19 nt, Artificial Sequence
  Description of Artificial Sequence: Synthetic oligonucleotide
gaacuaguucgcccagcac

SEQ ID NO: 458388 - RNA, 19 nt, Artificial Sequence
  Description of Artificial Sequence: Synthetic oligonucleotide
accaaagcacucaguauca

SEQ ID NO: 458389 - RNA, 19 nt, Artificial Sequence
  Description of Artificial Sequence: Synthetic oligonucleotide
acacacuuaaggacucaag

SEQ ID NO: 458390 - RNA, 19 nt, Artificial Sequence
  Description of Artificial Sequence: Synthetic oligonucleotide
cauguugcugguaagguuu

SEQ ID NO: 458391 - RNA, 19 nt, Artificial Sequence
  Description of Artificial Sequence: Synthetic oligonucleotide
uaccugaguaagguguuaa

SEQ ID NO: 458392 - RNA, 19 nt, Artificial Sequence
  Description of Artificial Sequence: Synthetic oligonucleotide
agcggucuuguagauaggu

SEQ ID NO: 458393 - RNA, 19 nt, Artificial Sequence
  Description of Artificial Sequence: Synthetic oligonucleotide
uacaucagggcuguaucuu

SEQ ID NO: 458394 - RNA, 19 nt, Artificial Sequence
  Description of Artificial Sequence: Synthetic oligonucleotide
gguguuaaugcugagggcu

SEQ ID NO: 458395 - RNA, 19 nt, Artificial Sequence
  Description of Artificial Sequence: Synthetic oligonucleotide
acuccguacugcaagcugu

SEQ ID NO: 458396 - RNA, 19 nt, Artificial Sequence
  Description of Artificial Sequence: Synthetic oligonucleotide
cuaaauggcccauggcgaa

SEQ ID NO: 458397 - RNA, 19 nt, Artificial Sequence
  Description of Artificial Sequence: Synthetic oligonucleotide
cacuuuugcugaucuucac

SEQ ID NO: 458398 - RNA, 19 nt, Artificial Sequence
  Description of Artificial Sequence: Synthetic oligonucleotide
gucuuagccguucacacau

SEQ ID NO: 458399 - RNA, 19 nt, Artificial Sequence
  Description of Artificial Sequence: Synthetic oligonucleotide
uuggcagcacugagucgag

SEQ ID NO: 458400 - RNA, 19 nt, Artificial Sequence
  Description of Artificial Sequence: Synthetic oligonucleotide
cugaguaguuaaggauacg

SEQ ID NO: 458401 - RNA, 19 nt, Artificial Sequence
  Description of Artificial Sequence: Synthetic oligonucleotide
gaacuaauucugcuguuuu

SEQ ID NO: 458402 - RNA, 19 nt, Artificial Sequence
  Description of Artificial Sequence: Synthetic oligonucleotide
cuuaguuccaaggccuaca

SEQ ID NO: 458403 - RNA, 19 nt, Artificial Sequence
  Description of Artificial Sequence: Synthetic oligonucleotide
acucaguaucauucccaga

SEQ ID NO: 458404 - RNA, 19 nt, Artificial Sequence
  Description of Artificial Sequence: Synthetic oligonucleotide
cuuccucucaauaaaucau

SEQ ID NO: 458405 - RNA, 19 nt, Artificial Sequence
  Description of Artificial Sequence: Synthetic oligonucleotide
augaguuuaggggcaugug

SEQ ID NO: 458406 - RNA, 19 nt, Artificial Sequence
  Description of Artificial Sequence: Synthetic oligonucleotide
gcucgaacuuccgucacgg

SEQ ID NO: 458407 - RNA, 19 nt, Artificial Sequence
  Description of Artificial Sequence: Synthetic oligonucleotide
uggugcuccgaacucccau

SEQ ID NO: 458408 - RNA, 19 nt, Artificial Sequence
  Description of Artificial Sequence: Synthetic oligonucleotide
ggagccagguacauuuucc

SEQ ID NO: 458409 - RNA, 19 nt, Artificial Sequence
  Description of Artificial Sequence: Synthetic oligonucleotide
ggcaugugguuucaacaug

SEQ ID NO: 458410 - RNA, 19 nt, Artificial Sequence
  Description of Artificial Sequence: Synthetic oligonucleotide
acauaaccuaggaacuagu

SEQ ID NO: 458411 - RNA, 19 nt, Artificial Sequence
  Description of Artificial Sequence: Synthetic oligonucleotide
gaaugaguugaggcaagaa

SEQ ID NO: 458412 - RNA, 19 nt, Artificial Sequence
  Description of Artificial Sequence: Synthetic oligonucleotide
cauagccugucgaauucca

SEQ ID NO: 458413 - RNA, 19 nt, Artificial Sequence
  Description of Artificial Sequence: Synthetic oligonucleotide
caguucacauaaccuagga

SEQ ID NO: 458414 - RNA, 19 nt, Artificial Sequence
  Description of Artificial Sequence: Synthetic oligonucleotide
ggggcaugugguuucaaca

SEQ ID NO: 458415 - RNA, 19 nt, Artificial Sequence
  Description of Artificial Sequence: Synthetic oligonucleotide
aacuuccgucacgggacuc

SEQ ID NO: 458416 - RNA, 19 nt, Artificial Sequence
  Description of Artificial Sequence: Synthetic oligonucleotide
ggcguucauugacuggagg

SEQ ID NO: 458417 - RNA, 19 nt, Artificial Sequence
  Description of Artificial Sequence: Synthetic oligonucleotide
gaccacuaagcaaagcgcu

SEQ ID NO: 458418 - RNA, 19 nt, Artificial Sequence
  Description of Artificial Sequence: Synthetic oligonucleotide
uaguucgcccagcaccgaa

SEQ ID NO: 458419 - RNA, 19 nt, Artificial Sequence
  Description of Artificial Sequence: Synthetic oligonucleotide
ggguaauagcaaucaacuc

SEQ ID NO: 458420 - RNA, 19 nt, Artificial Sequence
  Description of Artificial Sequence: Synthetic oligonucleotide
ccaauugcaugaauaguca

SEQ ID NO: 458421 - RNA, 19 nt, Artificial Sequence
  Description of Artificial Sequence: Synthetic oligonucleotide
uucgcccagcaccgaaaca

SEQ ID NO: 458422 - RNA, 19 nt, Artificial Sequence
  Description of Artificial Sequence: Synthetic oligonucleotide
aacucgccacauguugcug

SEQ ID NO: 458423 - RNA, 19 nt, Artificial Sequence
  Description of Artificial Sequence: Synthetic oligonucleotide
ucccgugaaguccgaacua

SEQ ID NO: 458424 - RNA, 19 nt, Artificial Sequence
  Description of Artificial Sequence: Synthetic oligonucleotide
gucgaaggaaugaguugag

SEQ ID NO: 458425 - RNA, 19 nt, Artificial Sequence
  Description of Artificial Sequence: Synthetic oligonucleotide
uacugcaagcugucaccac

SEQ ID NO: 458426 - RNA, 19 nt, Artificial Sequence
  Description of Artificial Sequence: Synthetic oligonucleotide
cucgaacuuccgucacggg

SEQ ID NO: 458427 - RNA, 19 nt, Artificial Sequence
  Description of Artificial Sequence: Synthetic oligonucleotide
cgaacuuccgucacgggac

SEQ ID NO: 458428 - RNA, 19 nt, Artificial Sequence
  Description of Artificial Sequence: Synthetic oligonucleotide
ccguucacacaucaguuug

SEQ ID NO: 458429 - RNA, 19 nt, Artificial Sequence
  Description of Artificial Sequence: Synthetic oligonucleotide
guucgcccagcaccgaaac

SEQ ID NO: 458430 - RNA, 19 nt, Artificial Sequence
  Description of Artificial Sequence: Synthetic oligonucleotide
cagcaccgaaacaucaaga

SEQ ID NO: 458431 - RNA, 19 nt, Artificial Sequence
  Description of Artificial Sequence: Synthetic oligonucleotide
cggucuuguagauagguuc

SEQ ID NO: 458432 - RNA, 19 nt, Artificial Sequence
  Description of Artificial Sequence: Synthetic oligonucleotide
gcucauaaguuuaccugag

SEQ ID NO: 458433 - RNA, 19 nt, Artificial Sequence
  Description of Artificial Sequence: Synthetic oligonucleotide
ggugcuccgaacucccaug

SEQ ID NO: 458434 - RNA, 19 nt, Artificial Sequence
  Description of Artificial Sequence: Synthetic oligonucleotide
gcacaagcggucuuguaga

SEQ ID NO: 458435 - RNA, 19 nt, Artificial Sequence
  Description of Artificial Sequence: Synthetic oligonucleotide
gccuaggaaggccaagggc

SEQ ID NO: 458436 - RNA, 19 nt, Artificial Sequence
  Description of Artificial Sequence: Synthetic oligonucleotide
ucuuagccguucacacauc

SEQ ID NO: 458437 - RNA, 19 nt, Artificial Sequence
  Description of Artificial Sequence: Synthetic oligonucleotide
acagaugaguaggucuuau

SEQ ID NO: 458438 - RNA, 19 nt, Artificial Sequence
  Description of Artificial Sequence: Synthetic oligonucleotide
gaacucgccacauguugcu

SEQ ID NO: 458439 - RNA, 19 nt, Artificial Sequence
  Description of Artificial Sequence: Synthetic oligonucleotide
aggacaccuagcugcacuu

SEQ ID NO: 458440 - RNA, 19 nt, Artificial Sequence
  Description of Artificial Sequence: Synthetic oligonucleotide
acuuccgucacgggacuca

SEQ ID NO: 458441 - RNA, 19 nt, Artificial Sequence
  Description of Artificial Sequence: Synthetic oligonucleotide
guagcucggagacucaaau

SEQ ID NO: 458442 - RNA, 19 nt, Artificial Sequence
  Description of Artificial Sequence: Synthetic oligonucleotide
caaucaacuccugaaggua

SEQ ID NO: 458443 - RNA, 19 nt, Artificial Sequence
  Description of Artificial Sequence: Synthetic oligonucleotide
ggcacauguugauugucuc

SEQ ID NO: 458444 - RNA, 19 nt, Artificial Sequence
  Description of Artificial Sequence: Synthetic oligonucleotide
ggcaugguucuucaauaca

SEQ ID NO: 458445 - RNA, 19 nt, Artificial Sequence
  Description of Artificial Sequence: Synthetic oligonucleotide
aagcacaagcggucuugua

SEQ ID NO: 458446 - RNA, 19 nt, Artificial Sequence
  Description of Artificial Sequence: Synthetic oligonucleotide
ucgaucugucagaccacua

SEQ ID NO: 458447 - RNA, 19 nt, Artificial Sequence
  Description of Artificial Sequence: Synthetic oligonucleotide
uccgaacucccaugcuuuc

SEQ ID NO: 458448 - RNA, 19 nt, Artificial Sequence
  Description of Artificial Sequence: Synthetic oligonucleotide
uuccaagacugcgauugua

SEQ ID NO: 458449 - RNA, 19 nt, Artificial Sequence
  Description of Artificial Sequence: Synthetic oligonucleotide
cuacaccacuucugaucag

SEQ ID NO: 458450 - RNA, 19 nt, Artificial Sequence
  Description of Artificial Sequence: Synthetic oligonucleotide
gaguaguuaaggauacgau

SEQ ID NO: 458451 - RNA, 19 nt, Artificial Sequence
  Description of Artificial Sequence: Synthetic oligonucleotide
aagcggucuuguagauagg

SEQ ID NO: 458452 - RNA, 19 nt, Artificial Sequence
  Description of Artificial Sequence: Synthetic oligonucleotide
ggcucgaacuuccgucacg

SEQ ID NO: 458453 - RNA, 19 nt, Artificial Sequence
  Description of Artificial Sequence: Synthetic oligonucleotide
cuccguacugcaagcuguc

SEQ ID NO: 458454 - RNA, 19 nt, Artificial Sequence
  Description of Artificial Sequence: Synthetic oligonucleotide
cugcgauuguaaagccuuc

SEQ ID NO: 458455 - RNA, 19 nt, Artificial Sequence
  Description of Artificial Sequence: Synthetic oligonucleotide
uggcuccugcacuuuugcu

SEQ ID NO: 458456 - RNA, 19 nt, Artificial Sequence
  Description of Artificial Sequence: Synthetic oligonucleotide
gguuucaacauggcuccug

SEQ ID NO: 458457 - RNA, 19 nt, Artificial Sequence
  Description of Artificial Sequence: Synthetic oligonucleotide
uuggugcuccgaacuccca

SEQ ID NO: 458458 - RNA, 19 nt, Artificial Sequence
  Description of Artificial Sequence: Synthetic oligonucleotide
ggguguuaaugcugagggc

SEQ ID NO: 458459 - RNA, 19 nt, Artificial Sequence
  Description of Artificial Sequence: Synthetic oligonucleotide
cagcuuuggugcuccgaac

SEQ ID NO: 458460 - RNA, 19 nt, Artificial Sequence
  Description of Artificial Sequence: Synthetic oligonucleotide
gcgauaacaacguuggguu

SEQ ID NO: 458461 - RNA, 19 nt, Artificial Sequence
  Description of Artificial Sequence: Synthetic oligonucleotide
ggcgauaacaacguugggu

SEQ ID NO: 458462 - RNA, 19 nt, Artificial Sequence
  Description of Artificial Sequence: Synthetic oligonucleotide
cgaacucgccacauguugc

SEQ ID NO: 458463 - RNA, 19 nt, Artificial Sequence
  Description of Artificial Sequence: Synthetic oligonucleotide
gcaauugaugccauagcaa

SEQ ID NO: 458464 - RNA, 19 nt, Artificial Sequence
  Description of Artificial Sequence: Synthetic oligonucleotide
gcuaaagacucaaccaaaa

SEQ ID NO: 458465 - RNA, 19 nt, Artificial Sequence
  Description of Artificial Sequence: Synthetic oligonucleotide
uccguacugcaagcuguca

SEQ ID NO: 458466 - RNA, 19 nt, Artificial Sequence
  Description of Artificial Sequence: Synthetic oligonucleotide
uccgaacuaaauggcccau

SEQ ID NO: 458467 - RNA, 19 nt, Artificial Sequence
  Description of Artificial Sequence: Synthetic oligonucleotide
cauaaccuaggaacuaguu

SEQ ID NO: 458468 - RNA, 19 nt, Artificial Sequence
  Description of Artificial Sequence: Synthetic oligonucleotide
ugguaacgauaaagucgaa

SEQ ID NO: 458469 - RNA, 19 nt, Artificial Sequence
  Description of Artificial Sequence: Synthetic oligonucleotide
guguuaaguccuggggaca

SEQ ID NO: 458470 - RNA, 19 nt, Artificial Sequence
  Description of Artificial Sequence: Synthetic oligonucleotide
gggacucaucauuccuuug

SEQ ID NO: 458471 - RNA, 19 nt, Artificial Sequence
  Description of Artificial Sequence: Synthetic oligonucleotide
cgcucauaaguuuaccuga

SEQ ID NO: 458472 - RNA, 19 nt, Artificial Sequence
  Description of Artificial Sequence: Synthetic oligonucleotide
acuaagcaaagcgcucaua

SEQ ID NO: 458473 - RNA, 19 nt, Artificial Sequence
  Description of Artificial Sequence: Synthetic oligonucleotide
cggagacucaaauaauuga

SEQ ID NO: 458474 - RNA, 19 nt, Artificial Sequence
  Description of Artificial Sequence: Synthetic oligonucleotide
gacugcgauuguaaagccu

SEQ ID NO: 458475 - RNA, 19 nt, Artificial Sequence
  Description of Artificial Sequence: Synthetic oligonucleotide
cucauaaguuuaccugagu

SEQ ID NO: 458476 - RNA, 19 nt, Artificial Sequence
  Description of Artificial Sequence: Synthetic oligonucleotide
gaacuuccgucacgggacu

SEQ ID NO: 458477 - RNA, 19 nt, Artificial Sequence
  Description of Artificial Sequence: Synthetic oligonucleotide
agccucccuuaguuccaag

SEQ ID NO: 458478 - RNA, 19 nt, Artificial Sequence
  Description of Artificial Sequence: Synthetic oligonucleotide
gcaccgaaacaucaagaua

SEQ ID NO: 458479 - RNA, 19 nt, Artificial Sequence
  Description of Artificial Sequence: Synthetic oligonucleotide
cgucaucuaaaggucuucc

SEQ ID NO: 458480 - RNA, 19 nt, Artificial Sequence
  Description of Artificial Sequence: Synthetic oligonucleotide
ggauacgaugacacuggca

SEQ ID NO: 458481 - RNA, 19 nt, Artificial Sequence
  Description of Artificial Sequence: Synthetic oligonucleotide
aggcuuugcccaagcucuc

SEQ ID NO: 458482 - RNA, 19 nt, Artificial Sequence
  Description of Artificial Sequence: Synthetic oligonucleotide
accgaaacaucaagauauu

SEQ ID NO: 458483 - RNA, 19 nt, Artificial Sequence
  Description of Artificial Sequence: Synthetic oligonucleotide
aguucgcccagcaccgaaa

SEQ ID NO: 458484 - RNA, 19 nt, Artificial Sequence
  Description of Artificial Sequence: Synthetic oligonucleotide
uuccgucacgggacucauc

SEQ ID NO: 458485 - RNA, 19 nt, Artificial Sequence
  Description of Artificial Sequence: Synthetic oligonucleotide
auucccagauauggaggua

SEQ ID NO: 458486 - RNA, 19 nt, Artificial Sequence
  Description of Artificial Sequence: Synthetic oligonucleotide
cccauggcgaaugcacagg

SEQ ID NO: 458487 - RNA, 19 nt, Artificial Sequence
  Description of Artificial Sequence: Synthetic oligonucleotide
gggcaugugguuucaacau

SEQ ID NO: 458488 - RNA, 19 nt, Artificial Sequence
  Description of Artificial Sequence: Synthetic oligonucleotide
ggcgaaugcacaggauuuc

SEQ ID NO: 458489 - RNA, 19 nt, Artificial Sequence
  Description of Artificial Sequence: Synthetic oligonucleotide
cacgggacucaucauuccu

SEQ ID NO: 458490 - RNA, 19 nt, Artificial Sequence
  Description of Artificial Sequence: Synthetic oligonucleotide
ccaagacugcgauuguaaa

SEQ ID NO: 458491 - RNA, 19 nt, Artificial Sequence
  Description of Artificial Sequence: Synthetic oligonucleotide
caguucaggucuguugucu

SEQ ID NO: 458492 - RNA, 19 nt, Artificial Sequence
  Description of Artificial Sequence: Synthetic oligonucleotide
ccacuaagcaaagcgcuca

SEQ ID NO: 458493 - RNA, 19 nt, Artificial Sequence
  Description of Artificial Sequence: Synthetic oligonucleotide
cuccgaacucccaugcuuu

SEQ ID NO: 458494 - RNA, 19 nt, Artificial Sequence
  Description of Artificial Sequence: Synthetic oligonucleotide
cgaauuccaagauugggau

SEQ ID NO: 458495 - RNA, 19 nt, Artificial Sequence
  Description of Artificial Sequence: Synthetic oligonucleotide
cuguagcucggagacucaa

SEQ ID NO: 458496 - RNA, 19 nt, Artificial Sequence
  Description of Artificial Sequence: Synthetic oligonucleotide
ccguacagauuccuuaaua

SEQ ID NO: 458497 - RNA, 19 nt, Artificial Sequence
  Description of Artificial Sequence: Synthetic oligonucleotide
cgaucugucagaccacuaa

SEQ ID NO: 458498 - RNA, 19 nt, Artificial Sequence
  Description of Artificial Sequence: Synthetic oligonucleotide
gcaauugcacccugggcuu

SEQ ID NO: 458499 - RNA, 19 nt, Artificial Sequence
  Description of Artificial Sequence: Synthetic oligonucleotide
ccgaacuaaauggcccaug

SEQ ID NO: 458500 - RNA, 19 nt, Artificial Sequence
  Description of Artificial Sequence: Synthetic oligonucleotide
guuuugcaauugaugccau

SEQ ID NO: 458501 - RNA, 19 nt, Artificial Sequence
  Description of Artificial Sequence: Synthetic oligonucleotide
cagaugaguaggucuuauu

SEQ ID NO: 458502 - RNA, 19 nt, Artificial Sequence
  Description of Artificial Sequence: Synthetic oligonucleotide
cauggcgaaugcacaggau

SEQ ID NO: 458503 - RNA, 19 nt, Artificial Sequence
  Description of Artificial Sequence: Synthetic oligonucleotide
cacaagcggucuuguagau

SEQ ID NO: 458504 - RNA, 19 nt, Artificial Sequence
  Description of Artificial Sequence: Synthetic oligonucleotide
gcaggcacauguugauugu

SEQ ID NO: 458505 - RNA, 19 nt, Artificial Sequence
  Description of Artificial Sequence: Synthetic oligonucleotide
cucgaacucgccacauguu

SEQ ID NO: 458506 - RNA, 19 nt, Artificial Sequence
  Description of Artificial Sequence: Synthetic oligonucleotide
cacuaagcaaagcgcucau

SEQ ID NO: 458507 - RNA, 19 nt, Artificial Sequence
  Description of Artificial Sequence: Synthetic oligonucleotide
gcuccgaacucccaugcuu

SEQ ID NO: 458508 - RNA, 19 nt, Artificial Sequence
  Description of Artificial Sequence: Synthetic oligonucleotide
cuaguucgcccagcaccga

SEQ ID NO: 458509 - RNA, 19 nt, Artificial Sequence
  Description of Artificial Sequence: Synthetic oligonucleotide
cuaucccgugaaguccgaa

SEQ ID NO: 458510 - RNA, 19 nt, Artificial Sequence
  Description of Artificial Sequence: Synthetic oligonucleotide
cccgugaaguccgaacuaa

SEQ ID NO: 458511 - RNA, 19 nt, Artificial Sequence
  Description of Artificial Sequence: Synthetic oligonucleotide
cugguugggcacagacuuu

SEQ ID NO: 458512 - RNA, 19 nt, Artificial Sequence
  Description of Artificial Sequence: Synthetic oligonucleotide
cuccuuuggcagggucaca

SEQ ID NO: 458513 - RNA, 19 nt, Artificial Sequence
  Description of Artificial Sequence: Synthetic oligonucleotide
ccgaacucccaugcuuuca

SEQ ID NO: 458514 - RNA, 19 nt, Artificial Sequence
  Description of Artificial Sequence: Synthetic oligonucleotide
gcucggagacucaaauaau

SEQ ID NO: 458515 - RNA, 19 nt, Artificial Sequence
  Description of Artificial Sequence: Synthetic oligonucleotide
cuuccgucacgggacucau

SEQ ID NO: 458516 - RNA, 19 nt, Artificial Sequence
  Description of Artificial Sequence: Synthetic oligonucleotide
ggccuacaccacuucugau

SEQ ID NO: 458517 - RNA, 19 nt, Artificial Sequence
  Description of Artificial Sequence: Synthetic oligonucleotide
caauugcacccugggcuuu

SEQ ID NO: 458518 - RNA, 19 nt, Artificial Sequence
  Description of Artificial Sequence: Synthetic oligonucleotide
gcggucuuguagauagguu

SEQ ID NO: 458519 - RNA, 19 nt, Artificial Sequence
  Description of Artificial Sequence: Synthetic oligonucleotide
cgucacgggacucaucauu

SEQ ID NO: 458520 - RNA, 19 nt, Artificial Sequence
  Description of Artificial Sequence: Synthetic oligonucleotide
cauuuguggugggcugguu

SEQ ID NO: 458521 - RNA, 19 nt, Artificial Sequence
  Description of Artificial Sequence: Synthetic oligonucleotide
cgauaacaacguuggguuu

SEQ ID NO: 458522 - RNA, 19 nt, Artificial Sequence
  Description of Artificial Sequence: Synthetic oligonucleotide
ggacaccuagcugcacuuu

SEQ ID NO: 458523 - RNA, 19 nt, Artificial Sequence
  Description of Artificial Sequence: Synthetic oligonucleotide
gugcugagucuuagccguu

SEQ ID NO: 458524 - RNA, 19 nt, Artificial Sequence
  Description of Artificial Sequence: Synthetic oligonucleotide
ccgucacgggacucaucau

SEQ ID NO: 458525 - RNA, 19 nt, Artificial Sequence
  Description of Artificial Sequence: Synthetic oligonucleotide
uucaguaucaagaaugugg

SEQ ID NO: 458526 - RNA, 19 nt, Artificial Sequence
  Description of Artificial Sequence: Synthetic oligonucleotide
agcgucaagaacuugaacc

SEQ ID NO: 458527 - RNA, 19 nt, Artificial Sequence
  Description of Artificial Sequence: Synthetic oligonucleotide
auugagaaccaucuuaccc

SEQ ID NO: 458528 - RNA, 19 nt, Artificial Sequence
  Description of Artificial Sequence: Synthetic oligonucleotide
ucaucuaaggcucuaauca

SEQ ID NO: 458529 - RNA, 19 nt, Artificial Sequence
  Description of Artificial Sequence: Synthetic oligonucleotide
uuuggauagccaaugaacc

SEQ ID NO: 458530 - RNA, 19 nt, Artificial Sequence
  Description of Artificial Sequence: Synthetic oligonucleotide
uccaaaaccauuuuaauau

SEQ ID NO: 458531 - RNA, 19 nt, Artificial Sequence
  Description of Artificial Sequence: Synthetic oligonucleotide
gaauauacgacgcaucaag

SEQ ID NO: 458532 - RNA, 19 nt, Artificial Sequence
  Description of Artificial Sequence: Synthetic oligonucleotide
uuauauaucucuucuugag

SEQ ID NO: 458533 - RNA, 19 nt, Artificial Sequence
  Description of Artificial Sequence: Synthetic oligonucleotide
uuauuuagaaacuucuggu

SEQ ID NO: 458534 - RNA, 19 nt, Artificial Sequence
  Description of Artificial Sequence: Synthetic oligonucleotide
auccgcagaaaacugaggc

SEQ ID NO: 458535 - RNA, 19 nt, Artificial Sequence
  Description of Artificial Sequence: Synthetic oligonucleotide
aauauggucuugaggagcc

SEQ ID NO: 458536 - RNA, 19 nt, Artificial Sequence
  Description of Artificial Sequence: Synthetic oligonucleotide
ucugacuuuucaacuaugg

SEQ ID NO: 458537 - RNA, 19 nt, Artificial Sequence
  Description of Artificial Sequence: Synthetic oligonucleotide
ugcauuaugaggcuggacu

SEQ ID NO: 458538 - RNA, 19 nt, Artificial Sequence
  Description of Artificial Sequence: Synthetic oligonucleotide
gacucgaucauguagaaga

SEQ ID NO: 458539 - RNA, 19 nt, Artificial Sequence
  Description of Artificial Sequence: Synthetic oligonucleotide
uuucaaguaagcuucgaug

SEQ ID NO: 458540 - RNA, 19 nt, Artificial Sequence
  Description of Artificial Sequence: Synthetic oligonucleotide
cuugccuacauuuggauag

SEQ ID NO: 458541 - RNA, 19 nt, Artificial Sequence
  Description of Artificial Sequence: Synthetic oligonucleotide
cagucaaucaggaauauac

SEQ ID NO: 458542 - RNA, 19 nt, Artificial Sequence
  Description of Artificial Sequence: Synthetic oligonucleotide
agugcggaaagcuagcuuc

SEQ ID NO: 458543 - RNA, 19 nt, Artificial Sequence
  Description of Artificial Sequence: Synthetic oligonucleotide
uaaggcucuaaucacagcu

SEQ ID NO: 458544 - RNA, 19 nt, Artificial Sequence
  Description of Artificial Sequence: Synthetic oligonucleotide
uucaaguaagcuucgaugu

SEQ ID NO: 458545 - RNA, 19 nt, Artificial Sequence
  Description of Artificial Sequence: Synthetic oligonucleotide
ucgaucauguagaagagac

SEQ ID NO: 458546 - RNA, 19 nt, Artificial Sequence
  Description of Artificial Sequence: Synthetic oligonucleotide
auguagaagagacauucgg

SEQ ID NO: 458547 - RNA, 19 nt, Artificial Sequence
  Description of Artificial Sequence: Synthetic oligonucleotide
uugauuuugccgaaguucu

SEQ ID NO: 458548 - RNA, 19 nt, Artificial Sequence
  Description of Artificial Sequence: Synthetic oligonucleotide
auuuggauagccaaugaac

SEQ ID NO: 458549 - RNA, 19 nt, Artificial Sequence
  Description of Artificial Sequence: Synthetic oligonucleotide
aucguaauguguuuaucac

SEQ ID NO: 458550 - RNA, 19 nt, Artificial Sequence
  Description of Artificial Sequence: Synthetic oligonucleotide
ucaacuaugguuuccgaga

SEQ ID NO: 458551 - RNA, 19 nt, Artificial Sequence
  Description of Artificial Sequence: Synthetic oligonucleotide
agaagagacauucgguaac

SEQ ID NO: 458552 - RNA, 19 nt, Artificial Sequence
  Description of Artificial Sequence: Synthetic oligonucleotide
uuuugcucguucaaggaca

SEQ ID NO: 458553 - RNA, 19 nt, Artificial Sequence
  Description of Artificial Sequence: Synthetic oligonucleotide
uguuuuggccuccagcucc

SEQ ID NO: 458554 - RNA, 19 nt, Artificial Sequence
  Description of Artificial Sequence: Synthetic oligonucleotide
caagguaauauacugccag

SEQ ID NO: 458555 - RNA, 19 nt, Artificial Sequence
  Description of Artificial Sequence: Synthetic oligonucleotide
ucgaguguuuccaaaacca

SEQ ID NO: 458556 - RNA, 19 nt, Artificial Sequence
  Description of Artificial Sequence: Synthetic oligonucleotide
uucaccauccugacgacag

SEQ ID NO: 458557 - RNA, 19 nt, Artificial Sequence
  Description of Artificial Sequence: Synthetic oligonucleotide
cugcauaucacuugcaaac

SEQ ID NO: 458558 - RNA, 19 nt, Artificial Sequence
  Description of Artificial Sequence: Synthetic oligonucleotide
acucgauccggguuggugc

SEQ ID NO: 458559 - RNA, 19 nt, Artificial Sequence
  Description of Artificial Sequence: Synthetic oligonucleotide
gcaaacuaaguuuuggccg

SEQ ID NO: 458560 - RNA, 19 nt, Artificial Sequence
  Description of Artificial Sequence: Synthetic oligonucleotide
ucucaguagacauuucagc

SEQ ID NO: 458561 - RNA, 19 nt, Artificial Sequence
  Description of Artificial Sequence: Synthetic oligonucleotide
aaccacaacaucugaugag

SEQ ID NO: 458562 - RNA, 19 nt, Artificial Sequence
  Description of Artificial Sequence: Synthetic oligonucleotide
caaacuaaguuuuggccgc

SEQ ID NO: 458563 - RNA, 19 nt, Artificial Sequence
  Description of Artificial Sequence: Synthetic oligonucleotide
uucaacuaugguuuccgag

SEQ ID NO: 458564 - RNA, 19 nt, Artificial Sequence
  Description of Artificial Sequence: Synthetic oligonucleotide
aaagggguuggugaggcuc

SEQ ID NO: 458565 - RNA, 19 nt, Artificial Sequence
  Description of Artificial Sequence: Synthetic oligonucleotide
acacuuauugaguacaaaa

SEQ ID NO: 458566 - RNA, 19 nt, Artificial Sequence
  Description of Artificial Sequence: Synthetic oligonucleotide
uuugccgaaguucugucga

SEQ ID NO: 458567 - RNA, 19 nt, Artificial Sequence
  Description of Artificial Sequence: Synthetic oligonucleotide
aacuuucuagauguuacug

SEQ ID NO: 458568 - RNA, 19 nt, Artificial Sequence
  Description of Artificial Sequence: Synthetic oligonucleotide
uugccuguacauauucagg

SEQ ID NO: 458569 - RNA, 19 nt, Artificial Sequence
  Description of Artificial Sequence: Synthetic oligonucleotide
ugagucuaucaccuuguag

SEQ ID NO: 458570 - RNA, 19 nt, Artificial Sequence
  Description of Artificial Sequence: Synthetic oligonucleotide
accacgauuguuccugcgc

SEQ ID NO: 458571 - RNA, 19 nt, Artificial Sequence
  Description of Artificial Sequence: Synthetic oligonucleotide
cauaguagcgcacaccaac

SEQ ID NO: 458572 - RNA, 19 nt, Artificial Sequence
  Description of Artificial Sequence: Synthetic oligonucleotide
uuguaaugaugccugcuug

SEQ ID NO: 458573 - RNA, 19 nt, Artificial Sequence
  Description of Artificial Sequence: Synthetic oligonucleotide
gacgacagaaccgacacug

SEQ ID NO: 458574 - RNA, 19 nt, Artificial Sequence
  Description of Artificial Sequence: Synthetic oligonucleotide
uuguauggauccuucauaa

SEQ ID NO: 458575 - RNA, 19 nt, Artificial Sequence
  Description of Artificial Sequence: Synthetic oligonucleotide
cacuuuaccacgauuguuc

SEQ ID NO: 458576 - RNA, 19 nt, Artificial Sequence
  Description of Artificial Sequence: Synthetic oligonucleotide
ucuagaagggacugcauau

SEQ ID NO: 458577 - RNA, 19 nt, Artificial Sequence
  Description of Artificial Sequence: Synthetic oligonucleotide
uuuucaaguaagcuucgau

SEQ ID NO: 458578 - RNA, 19 nt, Artificial Sequence
  Description of Artificial Sequence: Synthetic oligonucleotide
uuuugccgaaguucugucg

SEQ ID NO: 458579 - RNA, 19 nt, Artificial Sequence
  Description of Artificial Sequence: Synthetic oligonucleotide
uguaaugaugccugcuuga

SEQ ID NO: 458580 - RNA, 19 nt, Artificial Sequence
  Description of Artificial Sequence: Synthetic oligonucleotide
ucaugacaacuuuguaugg

SEQ ID NO: 458581 - RNA, 19 nt, Artificial Sequence
  Description of Artificial Sequence: Synthetic oligonucleotide
auugcaaacuuucuuggau

SEQ ID NO: 458582 - RNA, 19 nt, Artificial Sequence
  Description of Artificial Sequence: Synthetic oligonucleotide
agguaauauacugccagac

SEQ ID NO: 458583 - RNA, 19 nt, Artificial Sequence
  Description of Artificial Sequence: Synthetic oligonucleotide
uuuguaaugaugccugcuu

SEQ ID NO: 458584 - RNA, 19 nt, Artificial Sequence
  Description of Artificial Sequence: Synthetic oligonucleotide
uuuggauuguugcugccgu

SEQ ID NO: 458585 - RNA, 19 nt, Artificial Sequence
  Description of Artificial Sequence: Synthetic oligonucleotide
agggcagucaaucaggaau

SEQ ID NO: 458586 - RNA, 19 nt, Artificial Sequence
  Description of Artificial Sequence: Synthetic oligonucleotide
agaauguggaccuuugcau

SEQ ID NO: 458587 - RNA, 19 nt, Artificial Sequence
  Description of Artificial Sequence: Synthetic oligonucleotide
agggguaaaccacaccagg

SEQ ID NO: 458588 - RNA, 19 nt, Artificial Sequence
  Description of Artificial Sequence: Synthetic oligonucleotide
aagguaauauacugccaga

SEQ ID NO: 458589 - RNA, 19 nt, Artificial Sequence
  Description of Artificial Sequence: Synthetic oligonucleotide
ggaccuuugcauuaugagg

SEQ ID NO: 458590 - RNA, 19 nt, Artificial Sequence
  Description of Artificial Sequence: Synthetic oligonucleotide
acucgaguguuuccaaaac

SEQ ID NO: 458591 - RNA, 19 nt, Artificial Sequence
  Description of Artificial Sequence: Synthetic oligonucleotide
acauucgguaacuugcucu

SEQ ID NO: 458592 - RNA, 19 nt, Artificial Sequence
  Description of Artificial Sequence: Synthetic oligonucleotide
uauuuggcuccacucgugc

SEQ ID NO: 458593 - RNA, 19 nt, Artificial Sequence
  Description of Artificial Sequence: Synthetic oligonucleotide
ucguaauguguuuaucaca

SEQ ID NO: 458594 - RNA, 19 nt, Artificial Sequence
  Description of Artificial Sequence: Synthetic oligonucleotide
gcaaguguaggauaguccc

SEQ ID NO: 458595 - RNA, 19 nt, Artificial Sequence
  Description of Artificial Sequence: Synthetic oligonucleotide
cucucaguagacauuucag

SEQ ID NO: 458596 - RNA, 19 nt, Artificial Sequence
  Description of Artificial Sequence: Synthetic oligonucleotide
uaaaucaggcucuccgccc

SEQ ID NO: 458597 - RNA, 19 nt, Artificial Sequence
  Description of Artificial Sequence: Synthetic oligonucleotide
cucaguagacauuucagca

SEQ ID NO: 458598 - RNA, 19 nt, Artificial Sequence
  Description of Artificial Sequence: Synthetic oligonucleotide
agcaaguguaggauagucc

SEQ ID NO: 458599 - RNA, 19 nt, Artificial Sequence
  Description of Artificial Sequence: Synthetic oligonucleotide
uuugcucguucaaggacag

SEQ ID NO: 458600 - RNA, 19 nt, Artificial Sequence
  Description of Artificial Sequence: Synthetic oligonucleotide
uuccaugugugcacuacgc

SEQ ID NO: 458601 - RNA, 19 nt, Artificial Sequence
  Description of Artificial Sequence: Synthetic oligonucleotide
auagccaaugaacccaaca

SEQ ID NO: 458602 - RNA, 19 nt, Artificial Sequence
  Description of Artificial Sequence: Synthetic oligonucleotide
cuuccgucaccaaaucacg

SEQ ID NO: 458603 - RNA, 19 nt, Artificial Sequence
  Description of Artificial Sequence: Synthetic oligonucleotide
ucaagguaauauacugcca

SEQ ID NO: 458604 - RNA, 19 nt, Artificial Sequence
  Description of Artificial Sequence: Synthetic oligonucleotide
accaaaucacgguccuugc

SEQ ID NO: 458605 - RNA, 19 nt, Artificial Sequence
  Description of Artificial Sequence: Synthetic oligonucleotide
ucaaugacagagucugacu

SEQ ID NO: 458606 - RNA, 19 nt, Artificial Sequence
  Description of Artificial Sequence: Synthetic oligonucleotide
cauggaaagcaaguguagg

SEQ ID NO: 458607 - RNA, 19 nt, Artificial Sequence
  Description of Artificial Sequence: Synthetic oligonucleotide
uucuacagaucuuuucuuc

SEQ ID NO: 458608 - RNA, 19 nt, Artificial Sequence
  Description of Artificial Sequence: Synthetic oligonucleotide
aagaucacacuuauugagu

SEQ ID NO: 458609 - RNA, 19 nt, Artificial Sequence
  Description of Artificial Sequence: Synthetic oligonucleotide
ucaggcgccgaauuguggc

SEQ ID NO: 458610 - RNA, 19 nt, Artificial Sequence
  Description of Artificial Sequence: Synthetic oligonucleotide
aaaucaggcucuccgcccu

SEQ ID NO: 458611 - RNA, 19 nt, Artificial Sequence
  Description of Artificial Sequence: Synthetic oligonucleotide
ggcggcuugacaaagaaag

SEQ ID NO: 458612 - RNA, 19 nt, Artificial Sequence
  Description of Artificial Sequence: Synthetic oligonucleotide
uggaacaagaucacacuua

SEQ ID NO: 458613 - RNA, 19 nt, Artificial Sequence
  Description of Artificial Sequence: Synthetic oligonucleotide
uagaagagacauucgguaa

SEQ ID NO: 458614 - RNA, 19 nt, Artificial Sequence
  Description of Artificial Sequence: Synthetic oligonucleotide
cuguacauauucaggcgcc

SEQ ID NO: 458615 - RNA, 19 nt, Artificial Sequence
  Description of Artificial Sequence: Synthetic oligonucleotide
uguuucauaguagcgcaca

SEQ ID NO: 458616 - RNA, 19 nt, Artificial Sequence
  Description of Artificial Sequence: Synthetic oligonucleotide
cucgaguguuuccaaaacc

SEQ ID NO: 458617 - RNA, 19 nt, Artificial Sequence
  Description of Artificial Sequence: Synthetic oligonucleotide
ugcacuacgcuuccuuccc

SEQ ID NO: 458618 - RNA, 19 nt, Artificial Sequence
  Description of Artificial Sequence: Synthetic oligonucleotide
uuuggugggugcugcauca

SEQ ID NO: 458619 - RNA, 19 nt, Artificial Sequence
  Description of Artificial Sequence: Synthetic oligonucleotide
uccgcagaaaacugaggcc

SEQ ID NO: 458620 - RNA, 19 nt, Artificial Sequence
  Description of Artificial Sequence: Synthetic oligonucleotide
uuggaacaagaucacacuu

SEQ ID NO: 458621 - RNA, 19 nt, Artificial Sequence
  Description of Artificial Sequence: Synthetic oligonucleotide
ggaacgagugcccauuggg

SEQ ID NO: 458622 - RNA, 19 nt, Artificial Sequence
  Description of Artificial Sequence: Synthetic oligonucleotide
auauucaggcgccgaauug

SEQ ID NO: 458623 - RNA, 19 nt, Artificial Sequence
  Description of Artificial Sequence: Synthetic oligonucleotide
ucgcauggaaagcaagugu

SEQ ID NO: 458624 - RNA, 19 nt, Artificial Sequence
  Description of Artificial Sequence: Synthetic oligonucleotide
uagauguuacugcuucugu

SEQ ID NO: 458625 - RNA, 19 nt, Artificial Sequence
  Description of Artificial Sequence: Synthetic oligonucleotide
gguaauauacugccagacc

SEQ ID NO: 458626 - RNA, 19 nt, Artificial Sequence
  Description of Artificial Sequence: Synthetic oligonucleotide
uguacauauucaggcgccg

SEQ ID NO: 458627 - RNA, 19 nt, Artificial Sequence
  Description of Artificial Sequence: Synthetic oligonucleotide
acgcaucaagguaauauac

SEQ ID NO: 458628 - RNA, 19 nt, Artificial Sequence
  Description of Artificial Sequence: Synthetic oligonucleotide
cauucgguaacuugcucug

SEQ ID NO: 458629 - RNA, 19 nt, Artificial Sequence
  Description of Artificial Sequence: Synthetic oligonucleotide
acgauuguuccugcgcucc

SEQ ID NO: 458630 - RNA, 19 nt, Artificial Sequence
  Description of Artificial Sequence: Synthetic oligonucleotide
ugcccauugggucucuagc

SEQ ID NO: 458631 - RNA, 19 nt, Artificial Sequence
  Description of Artificial Sequence: Synthetic oligonucleotide
uccuuacacgucagcaucc

SEQ ID NO: 458632 - RNA, 19 nt, Artificial Sequence
  Description of Artificial Sequence: Synthetic oligonucleotide
cugucgaacgcgugcaagg

SEQ ID NO: 458633 - RNA, 19 nt, Artificial Sequence
  Description of Artificial Sequence: Synthetic oligonucleotide
uggucauagcucucaguag

SEQ ID NO: 458634 - RNA, 19 nt, Artificial Sequence
  Description of Artificial Sequence: Synthetic oligonucleotide
uccgagaucucuucuucug

SEQ ID NO: 458635 - RNA, 19 nt, Artificial Sequence
  Description of Artificial Sequence: Synthetic oligonucleotide
uaauauacugccagaccuu

SEQ ID NO: 458636 - RNA, 19 nt, Artificial Sequence
  Description of Artificial Sequence: Synthetic oligonucleotide
acuaugucggucucugagu

SEQ ID NO: 458637 - RNA, 19 nt, Artificial Sequence
  Description of Artificial Sequence: Synthetic oligonucleotide
caccaauauggucuugagg

SEQ ID NO: 458638 - RNA, 19 nt, Artificial Sequence
  Description of Artificial Sequence: Synthetic oligonucleotide
agaucacacuuauugagua

SEQ ID NO: 458639 - RNA, 19 nt, Artificial Sequence
  Description of Artificial Sequence: Synthetic oligonucleotide
cauuaugaggcuggacucg

SEQ ID NO: 458640 - RNA, 19 nt, Artificial Sequence
  Description of Artificial Sequence: Synthetic oligonucleotide
gaucauguagaagagacau

SEQ ID NO: 458641 - RNA, 19 nt, Artificial Sequence
  Description of Artificial Sequence: Synthetic oligonucleotide
cacgucagcauccucugag

SEQ ID NO: 458642 - RNA, 19 nt, Artificial Sequence
  Description of Artificial Sequence: Synthetic oligonucleotide
caaguuggaacaagaucac

SEQ ID NO: 458643 - RNA, 19 nt, Artificial Sequence
  Description of Artificial Sequence: Synthetic oligonucleotide
ugacaacuuuguauggauc

SEQ ID NO: 458644 - RNA, 19 nt, Artificial Sequence
  Description of Artificial Sequence: Synthetic oligonucleotide
cauuguguguuucauagua

SEQ ID NO: 458645 - RNA, 19 nt, Artificial Sequence
  Description of Artificial Sequence: Synthetic oligonucleotide
ggaacuuccaauggugagg

SEQ ID NO: 458646 - RNA, 19 nt, Artificial Sequence
  Description of Artificial Sequence: Synthetic oligonucleotide
uucaggcgccgaauugugg

SEQ ID NO: 458647 - RNA, 19 nt, Artificial Sequence
  Description of Artificial Sequence: Synthetic oligonucleotide
aguaagcuucgaugugagg

SEQ ID NO: 458648 - RNA, 19 nt, Artificial Sequence
  Description of Artificial Sequence: Synthetic oligonucleotide
aaagggauccggccccucu

SEQ ID NO: 458649 - RNA, 19 nt, Artificial Sequence
  Description of Artificial Sequence: Synthetic oligonucleotide
acucgugccacugugccag

SEQ ID NO: 458650 - RNA, 19 nt, Artificial Sequence
  Description of Artificial Sequence: Synthetic oligonucleotide
ugagcuuuacuugaagguu

SEQ ID NO: 458651 - RNA, 19 nt, Artificial Sequence
  Description of Artificial Sequence: Synthetic oligonucleotide
ugcccaaguuggaacaaga

SEQ ID NO: 458652 - RNA, 19 nt, Artificial Sequence
  Description of Artificial Sequence: Synthetic oligonucleotide
aucguuuuguugcccaagu

SEQ ID NO: 458653 - RNA, 19 nt, Artificial Sequence
  Description of Artificial Sequence: Synthetic oligonucleotide
uccggguuggugcuggcug

SEQ ID NO: 458654 - RNA, 19 nt, Artificial Sequence
  Description of Artificial Sequence: Synthetic oligonucleotide
cuaugucggucucugaguc

SEQ ID NO: 458655 - RNA, 19 nt, Artificial Sequence
  Description of Artificial Sequence: Synthetic oligonucleotide
guaaaccacaccagggcag

SEQ ID NO: 458656 - RNA, 19 nt, Artificial Sequence
  Description of Artificial Sequence: Synthetic oligonucleotide
uacaccagugucuuccguc

SEQ ID NO: 458657 - RNA, 19 nt, Artificial Sequence
  Description of Artificial Sequence: Synthetic oligonucleotide
auuguguguuucauaguag

SEQ ID NO: 458658 - RNA, 19 nt, Artificial Sequence
  Description of Artificial Sequence: Synthetic oligonucleotide
uguauggauccuucauaac

SEQ ID NO: 458659 - RNA, 19 nt, Artificial Sequence
  Description of Artificial Sequence: Synthetic oligonucleotide
accacaacaucugaugagu

SEQ ID NO: 458660 - RNA, 19 nt, Artificial Sequence
  Description of Artificial Sequence: Synthetic oligonucleotide
aacgcgugcaaggauuugu

SEQ ID NO: 458661 - RNA, 19 nt, Artificial Sequence
  Description of Artificial Sequence: Synthetic oligonucleotide
cuguacucgauccggguug

SEQ ID NO: 458662 - RNA, 19 nt, Artificial Sequence
  Description of Artificial Sequence: Synthetic oligonucleotide
uuucaguaucaagaaugug

SEQ ID NO: 458663 - RNA, 19 nt, Artificial Sequence
  Description of Artificial Sequence: Synthetic oligonucleotide
uguagagcucuccccaaau

SEQ ID NO: 458664 - RNA, 19 nt, Artificial Sequence
  Description of Artificial Sequence: Synthetic oligonucleotide
ugaucacucgaguguuucc

SEQ ID NO: 458665 - RNA, 19 nt, Artificial Sequence
  Description of Artificial Sequence: Synthetic oligonucleotide
aucaggaauauacgacgca

SEQ ID NO: 458666 - RNA, 19 nt, Artificial Sequence
  Description of Artificial Sequence: Synthetic oligonucleotide
uucgaugugaggggaacga

SEQ ID NO: 458667 - RNA, 19 nt, Artificial Sequence
  Description of Artificial Sequence: Synthetic oligonucleotide
aauuguggcccggucccuc

SEQ ID NO: 458668 - RNA, 19 nt, Artificial Sequence
  Description of Artificial Sequence: Synthetic oligonucleotide
ugcauaucacuugcaaacu

SEQ ID NO: 458669 - RNA, 19 nt, Artificial Sequence
  Description of Artificial Sequence: Synthetic oligonucleotide
aguguaggauagucccggg

SEQ ID NO: 458670 - RNA, 19 nt, Artificial Sequence
  Description of Artificial Sequence: Synthetic oligonucleotide
uuucaacuaugguuuccga

SEQ ID NO: 458671 - RNA, 19 nt, Artificial Sequence
  Description of Artificial Sequence: Synthetic oligonucleotide
cacagucggacugauacug

SEQ ID NO: 458672 - RNA, 19 nt, Artificial Sequence
  Description of Artificial Sequence: Synthetic oligonucleotide
gaagggacugcauaucacu

SEQ ID NO: 458673 - RNA, 19 nt, Artificial Sequence
  Description of Artificial Sequence: Synthetic oligonucleotide
uguacucgauccggguugg

SEQ ID NO: 458674 - RNA, 19 nt, Artificial Sequence
  Description of Artificial Sequence: Synthetic oligonucleotide
cugugggaacuuccaaugg

SEQ ID NO: 458675 - RNA, 19 nt, Artificial Sequence
  Description of Artificial Sequence: Synthetic oligonucleotide
cuugaaccacuccuuugag

SEQ ID NO: 458676 - RNA, 19 nt, Artificial Sequence
  Description of Artificial Sequence: Synthetic oligonucleotide
gacagaaccgacacuguuc

SEQ ID NO: 458677 - RNA, 19 nt, Artificial Sequence
  Description of Artificial Sequence: Synthetic oligonucleotide
gacgcaucaagguaauaua

SEQ ID NO: 458678 - RNA, 19 nt, Artificial Sequence
  Description of Artificial Sequence: Synthetic oligonucleotide
ucugucgaacgcgugcaag

SEQ ID NO: 458679 - RNA, 19 nt, Artificial Sequence
  Description of Artificial Sequence: Synthetic oligonucleotide
ucuugccuacauuuggaua

SEQ ID NO: 458680 - RNA, 19 nt, Artificial Sequence
  Description of Artificial Sequence: Synthetic oligonucleotide
ucgaacgcgugcaaggauu

SEQ ID NO: 458681 - RNA, 19 nt, Artificial Sequence
  Description of Artificial Sequence: Synthetic oligonucleotide
uaugucggucucugagucc

SEQ ID NO: 458682 - RNA, 19 nt, Artificial Sequence
  Description of Artificial Sequence: Synthetic oligonucleotide
gcucuaaucacagcuuugg

SEQ ID NO: 458683 - RNA, 19 nt, Artificial Sequence
  Description of Artificial Sequence: Synthetic oligonucleotide
ggucauagcucucaguaga

SEQ ID NO: 458684 - RNA, 19 nt, Artificial Sequence
  Description of Artificial Sequence: Synthetic oligonucleotide
caccaaaucacgguccuug

SEQ ID NO: 458685 - RNA, 19 nt, Artificial Sequence
  Description of Artificial Sequence: Synthetic oligonucleotide
agggauccggccccucugc

SEQ ID NO: 458686 - RNA, 19 nt, Artificial Sequence
  Description of Artificial Sequence: Synthetic oligonucleotide
guacuuggcgaucuuuuca

SEQ ID NO: 458687 - RNA, 19 nt, Artificial Sequence
  Description of Artificial Sequence: Synthetic oligonucleotide
gauagucccgggaaagcac

SEQ ID NO: 458688 - RNA, 19 nt, Artificial Sequence
  Description of Artificial Sequence: Synthetic oligonucleotide
ugugcacuacgcuuccuuc

SEQ ID NO: 458689 - RNA, 19 nt, Artificial Sequence
  Description of Artificial Sequence: Synthetic oligonucleotide
ucggacugauacugcagug

SEQ ID NO: 458690 - RNA, 19 nt, Artificial Sequence
  Description of Artificial Sequence: Synthetic oligonucleotide
ccuguacauauucaggcgc

SEQ ID NO: 458691 - RNA, 19 nt, Artificial Sequence
  Description of Artificial Sequence: Synthetic oligonucleotide
ugguacuuggcgaucuuuu

SEQ ID NO: 458692 - RNA, 19 nt, Artificial Sequence
  Description of Artificial Sequence: Synthetic oligonucleotide
gcgugcaaggauuuguugc

SEQ ID NO: 458693 - RNA, 19 nt, Artificial Sequence
  Description of Artificial Sequence: Synthetic oligonucleotide
cuaaggcucuaaucacagc

SEQ ID NO: 458694 - RNA, 19 nt, Artificial Sequence
  Description of Artificial Sequence: Synthetic oligonucleotide
ugucccucugagucguuug

SEQ ID NO: 458695 - RNA, 19 nt, Artificial Sequence
  Description of Artificial Sequence: Synthetic oligonucleotide
aaugaacccaacacugauu

SEQ ID NO: 458696 - RNA, 19 nt, Artificial Sequence
  Description of Artificial Sequence: Synthetic oligonucleotide
ucuguaaaucaggcucucc

SEQ ID NO: 458697 - RNA, 19 nt, Artificial Sequence
  Description of Artificial Sequence: Synthetic oligonucleotide
uccacucgugccacugugc

SEQ ID NO: 458698 - RNA, 19 nt, Artificial Sequence
  Description of Artificial Sequence: Synthetic oligonucleotide
uucgguaacuugcucuguu

SEQ ID NO: 458699 - RNA, 19 nt, Artificial Sequence
  Description of Artificial Sequence: Synthetic oligonucleotide
aguagcgcacaccaacuuu

SEQ ID NO: 458700 - RNA, 19 nt, Artificial Sequence
  Description of Artificial Sequence: Synthetic oligonucleotide
aaacuuucuuggaucguaa

SEQ ID NO: 458701 - RNA, 19 nt, Artificial Sequence
  Description of Artificial Sequence: Synthetic oligonucleotide
uguggaccuuugcauuaug

SEQ ID NO: 458702 - RNA, 19 nt, Artificial Sequence
  Description of Artificial Sequence: Synthetic oligonucleotide
guuggaacaagaucacacu

SEQ ID NO: 458703 - RNA, 19 nt, Artificial Sequence
  Description of Artificial Sequence: Synthetic oligonucleotide
gugcacuacgcuuccuucc

SEQ ID NO: 458704 - RNA, 19 nt, Artificial Sequence
  Description of Artificial Sequence: Synthetic oligonucleotide
ugaacccaacacugauuug

SEQ ID NO: 458705 - RNA, 19 nt, Artificial Sequence
  Description of Artificial Sequence: Synthetic oligonucleotide
acauuguguguuucauagu

SEQ ID NO: 458706 - RNA, 19 nt, Artificial Sequence
  Description of Artificial Sequence: Synthetic oligonucleotide
ucauagcucucaguagaca

SEQ ID NO: 458707 - RNA, 19 nt, Artificial Sequence
  Description of Artificial Sequence: Synthetic oligonucleotide
ugggcggcuugacaaagaa

SEQ ID NO: 458708 - RNA, 19 nt, Artificial Sequence
  Description of Artificial Sequence: Synthetic oligonucleotide
cucuccgcccuucaguaac

SEQ ID NO: 458709 - RNA, 19 nt, Artificial Sequence
  Description of Artificial Sequence: Synthetic oligonucleotide
cucgcauggaaagcaagug

SEQ ID NO: 458710 - RNA, 19 nt, Artificial Sequence
  Description of Artificial Sequence: Synthetic oligonucleotide
acagucggacugauacugc

SEQ ID NO: 458711 - RNA, 19 nt, Artificial Sequence
  Description of Artificial Sequence: Synthetic oligonucleotide
gccgaaguucugucgaacg

SEQ ID NO: 458712 - RNA, 19 nt, Artificial Sequence
  Description of Artificial Sequence: Synthetic oligonucleotide
uuauuucugugggaacuuc

SEQ ID NO: 458713 - RNA, 19 nt, Artificial Sequence
  Description of Artificial Sequence: Synthetic oligonucleotide
auuaugaggcuggacucga

SEQ ID NO: 458714 - RNA, 19 nt, Artificial Sequence
  Description of Artificial Sequence: Synthetic oligonucleotide
ugucgaacgcgugcaagga

SEQ ID NO: 458715 - RNA, 19 nt, Artificial Sequence
  Description of Artificial Sequence: Synthetic oligonucleotide
cuucgaugugaggggaacg

SEQ ID NO: 458716 - RNA, 19 nt, Artificial Sequence
  Description of Artificial Sequence: Synthetic oligonucleotide
uuguagagcucuccccaaa

SEQ ID NO: 458717 - RNA, 19 nt, Artificial Sequence
  Description of Artificial Sequence: Synthetic oligonucleotide
cacuccuuugagcacuaug

SEQ ID NO: 458718 - RNA, 19 nt, Artificial Sequence
  Description of Artificial Sequence: Synthetic oligonucleotide
ucgaugugaggggaacgag

SEQ ID NO: 458719 - RNA, 19 nt, Artificial Sequence
  Description of Artificial Sequence: Synthetic oligonucleotide
uuggaucguaauguguuua

SEQ ID NO: 458720 - RNA, 19 nt, Artificial Sequence
  Description of Artificial Sequence: Synthetic oligonucleotide
uugcugauauauucugguu

SEQ ID NO: 458721 - RNA, 19 nt, Artificial Sequence
  Description of Artificial Sequence: Synthetic oligonucleotide
uuggauuguugcugccgug

SEQ ID NO: 458722 - RNA, 19 nt, Artificial Sequence
  Description of Artificial Sequence: Synthetic oligonucleotide
uacucgauccggguuggug

SEQ ID NO: 458723 - RNA, 19 nt, Artificial Sequence
  Description of Artificial Sequence: Synthetic oligonucleotide
auacgacgcaucaagguaa

SEQ ID NO: 458724 - RNA, 19 nt, Artificial Sequence
  Description of Artificial Sequence: Synthetic oligonucleotide
uucugguacuuggcgaucu

SEQ ID NO: 458725 - RNA, 19 nt, Artificial Sequence
  Description of Artificial Sequence: Synthetic oligonucleotide
augagguguuuccaggguu

SEQ ID NO: 458726 - RNA, 19 nt, Artificial Sequence
  Description of Artificial Sequence: Synthetic oligonucleotide
auugggcggcuugacaaag

SEQ ID NO: 458727 - RNA, 19 nt, Artificial Sequence
  Description of Artificial Sequence: Synthetic oligonucleotide
uagucccgggaaagcacag

SEQ ID NO: 458728 - RNA, 19 nt, Artificial Sequence
  Description of Artificial Sequence: Synthetic oligonucleotide
ugaggcucgcauggaaagc

SEQ ID NO: 458729 - RNA, 19 nt, Artificial Sequence
  Description of Artificial Sequence: Synthetic oligonucleotide
ggucccucauguuuuggcc

SEQ ID NO: 458730 - RNA, 19 nt, Artificial Sequence
  Description of Artificial Sequence: Synthetic oligonucleotide
uuacaccagugucuuccgu

SEQ ID NO: 458731 - RNA, 19 nt, Artificial Sequence
  Description of Artificial Sequence: Synthetic oligonucleotide
caguaucaagaauguggac

SEQ ID NO: 458732 - RNA, 19 nt, Artificial Sequence
  Description of Artificial Sequence: Synthetic oligonucleotide
ccgcccuucaguaacuucc

SEQ ID NO: 458733 - RNA, 19 nt, Artificial Sequence
  Description of Artificial Sequence: Synthetic oligonucleotide
aucacgguccuugcccugg

SEQ ID NO: 458734 - RNA, 19 nt, Artificial Sequence
  Description of Artificial Sequence: Synthetic oligonucleotide
gcgucaagaacuugaacca

SEQ ID NO: 458735 - RNA, 19 nt, Artificial Sequence
  Description of Artificial Sequence: Synthetic oligonucleotide
ugggugcugcaucacugac

SEQ ID NO: 458736 - RNA, 19 nt, Artificial Sequence
  Description of Artificial Sequence: Synthetic oligonucleotide
ugccagucauugagaacca

SEQ ID NO: 458737 - RNA, 19 nt, Artificial Sequence
  Description of Artificial Sequence: Synthetic oligonucleotide
gaggcucgcauggaaagca

SEQ ID NO: 458738 - RNA, 19 nt, Artificial Sequence
  Description of Artificial Sequence: Synthetic oligonucleotide
gcauuaugaggcuggacuc

SEQ ID NO: 458739 - RNA, 19 nt, Artificial Sequence
  Description of Artificial Sequence: Synthetic oligonucleotide
uucugucccucugagucgu

SEQ ID NO: 458740 - RNA, 19 nt, Artificial Sequence
  Description of Artificial Sequence: Synthetic oligonucleotide
ccuacauuuggauagccaa

SEQ ID NO: 458741 - RNA, 19 nt, Artificial Sequence
  Description of Artificial Sequence: Synthetic oligonucleotide
uccugcgcuccuuuugccu

SEQ ID NO: 458742 - RNA, 19 nt, Artificial Sequence
  Description of Artificial Sequence: Synthetic oligonucleotide
auauuuggcuccacucgug

SEQ ID NO: 458743 - RNA, 19 nt, Artificial Sequence
  Description of Artificial Sequence: Synthetic oligonucleotide
aggcgccgaauuguggccc

SEQ ID NO: 458744 - RNA, 19 nt, Artificial Sequence
  Description of Artificial Sequence: Synthetic oligonucleotide
cauagcucucaguagacau

SEQ ID NO: 458745 - RNA, 19 nt, Artificial Sequence
  Description of Artificial Sequence: Synthetic oligonucleotide
ugacgacagaaccgacacu

SEQ ID NO: 458746 - RNA, 19 nt, Artificial Sequence
  Description of Artificial Sequence: Synthetic oligonucleotide
uacgacgcaucaagguaau

SEQ ID NO: 458747 - RNA, 19 nt, Artificial Sequence
  Description of Artificial Sequence: Synthetic oligonucleotide
cuugaagguucuucuucca

SEQ ID NO: 458748 - RNA, 19 nt, Artificial Sequence
  Description of Artificial Sequence: Synthetic oligonucleotide
gguugauggugcuccgucc

SEQ ID NO: 458749 - RNA, 19 nt, Artificial Sequence
  Description of Artificial Sequence: Synthetic oligonucleotide
aucaagaauguggaccuuu

SEQ ID NO: 458750 - RNA, 19 nt, Artificial Sequence
  Description of Artificial Sequence: Synthetic oligonucleotide
auagucccgggaaagcaca

SEQ ID NO: 458751 - RNA, 19 nt, Artificial Sequence
  Description of Artificial Sequence: Synthetic oligonucleotide
ucgguaacuugcucuguuu

SEQ ID NO: 458752 - RNA, 19 nt, Artificial Sequence
  Description of Artificial Sequence: Synthetic oligonucleotide
cucaguuauuucuguggga

SEQ ID NO: 458753 - RNA, 19 nt, Artificial Sequence
  Description of Artificial Sequence: Synthetic oligonucleotide
ucggucucugaguccucag

SEQ ID NO: 458754 - RNA, 19 nt, Artificial Sequence
  Description of Artificial Sequence: Synthetic oligonucleotide
cugauauauucugguuuug

SEQ ID NO: 458755 - RNA, 19 nt, Artificial Sequence
  Description of Artificial Sequence: Synthetic oligonucleotide
agucggacugauacugcag

SEQ ID NO: 458756 - RNA, 19 nt, Artificial Sequence
  Description of Artificial Sequence: Synthetic oligonucleotide
gcucucaguagacauuuca

SEQ ID NO: 458757 - RNA, 19 nt, Artificial Sequence
  Description of Artificial Sequence: Synthetic oligonucleotide
guaggauagucccgggaaa

SEQ ID NO: 458758 - RNA, 19 nt, Artificial Sequence
  Description of Artificial Sequence: Synthetic oligonucleotide
ugccuacauuuggauagcc

SEQ ID NO: 458759 - RNA, 19 nt, Artificial Sequence
  Description of Artificial Sequence: Synthetic oligonucleotide
gugcccauugggucucuag

SEQ ID NO: 458760 - RNA, 19 nt, Artificial Sequence
  Description of Artificial Sequence: Synthetic oligonucleotide
uauggucuugaggagccuu

SEQ ID NO: 458761 - RNA, 19 nt, Artificial Sequence
  Description of Artificial Sequence: Synthetic oligonucleotide
ggucucuagcgucaagaac

SEQ ID NO: 458762 - RNA, 19 nt, Artificial Sequence
  Description of Artificial Sequence: Synthetic oligonucleotide
ucuccgcccuucaguaacu

SEQ ID NO: 458763 - RNA, 19 nt, Artificial Sequence
  Description of Artificial Sequence: Synthetic oligonucleotide
caggcgccgaauuguggcc

SEQ ID NO: 458764 - RNA, 19 nt, Artificial Sequence
  Description of Artificial Sequence: Synthetic oligonucleotide
auuguggcccggucccuca

SEQ ID NO: 458765 - RNA, 19 nt, Artificial Sequence
  Description of Artificial Sequence: Synthetic oligonucleotide
cucauguuuuggccuccag

SEQ ID NO: 458766 - RNA, 19 nt, Artificial Sequence
  Description of Artificial Sequence: Synthetic oligonucleotide
acccaucguuuuguugccc

SEQ ID NO: 458767 - RNA, 19 nt, Artificial Sequence
  Description of Artificial Sequence: Synthetic oligonucleotide
caaacuuucuuggaucgua

SEQ ID NO: 458768 - RNA, 19 nt, Artificial Sequence
  Description of Artificial Sequence: Synthetic oligonucleotide
gucuuccgucaccaaauca

SEQ ID NO: 458769 - RNA, 19 nt, Artificial Sequence
  Description of Artificial Sequence: Synthetic oligonucleotide
auucaggcgccgaauugug

SEQ ID NO: 458770 - RNA, 19 nt, Artificial Sequence
  Description of Artificial Sequence: Synthetic oligonucleotide
ggaacaagaucacacuuau

SEQ ID NO: 458771 - RNA, 19 nt, Artificial Sequence
  Description of Artificial Sequence: Synthetic oligonucleotide
cacucgaguguuuccaaaa

SEQ ID NO: 458772 - RNA, 19 nt, Artificial Sequence
  Description of Artificial Sequence: Synthetic oligonucleotide
guucugucgaacgcgugca

SEQ ID NO: 458773 - RNA, 19 nt, Artificial Sequence
  Description of Artificial Sequence: Synthetic oligonucleotide
guguaggauagucccggga

SEQ ID NO: 458774 - RNA, 19 nt, Artificial Sequence
  Description of Artificial Sequence: Synthetic oligonucleotide
gcauugggcggcuugacaa

SEQ ID NO: 458775 - RNA, 19 nt, Artificial Sequence
  Description of Artificial Sequence: Synthetic oligonucleotide
cacgauuguuccugcgcuc

SEQ ID NO: 458776 - RNA, 19 nt, Artificial Sequence
  Description of Artificial Sequence: Synthetic oligonucleotide
ccucagagggguaaaccac

SEQ ID NO: 458777 - RNA, 19 nt, Artificial Sequence
  Description of Artificial Sequence: Synthetic oligonucleotide
gggaacgagugcccauugg

SEQ ID NO: 458778 - RNA, 19 nt, Artificial Sequence
  Description of Artificial Sequence: Synthetic oligonucleotide
uucugucgaacgcgugcaa

SEQ ID NO: 458779 - RNA, 19 nt, Artificial Sequence
  Description of Artificial Sequence: Synthetic oligonucleotide
ccgaauuguggcccggucc

SEQ ID NO: 458780 - RNA, 19 nt, Artificial Sequence
  Description of Artificial Sequence: Synthetic oligonucleotide
aacccaacacugauuuguu

SEQ ID NO: 458781 - RNA, 19 nt, Artificial Sequence
  Description of Artificial Sequence: Synthetic oligonucleotide
uugcauuaugaggcuggac

SEQ ID NO: 458782 - RNA, 19 nt, Artificial Sequence
  Description of Artificial Sequence: Synthetic oligonucleotide
cuugaggagccuuaauuuu

SEQ ID NO: 458783 - RNA, 19 nt, Artificial Sequence
  Description of Artificial Sequence: Synthetic oligonucleotide
ugccgaaguucugucgaac

SEQ ID NO: 458784 - RNA, 19 nt, Artificial Sequence
  Description of Artificial Sequence: Synthetic oligonucleotide
ccgaaguucugucgaacgc

SEQ ID NO: 458785 - RNA, 19 nt, Artificial Sequence
  Description of Artificial Sequence: Synthetic oligonucleotide
cacuuaaguccuuggauau

SEQ ID NO: 458786 - RNA, 19 nt, Artificial Sequence
  Description of Artificial Sequence: Synthetic oligonucleotide
ugccagaccuuuguuucuc

SEQ ID NO: 458787 - RNA, 19 nt, Artificial Sequence
  Description of Artificial Sequence: Synthetic oligonucleotide
gcaacccaucguuuuguug

SEQ ID NO: 458788 - RNA, 19 nt, Artificial Sequence
  Description of Artificial Sequence: Synthetic oligonucleotide
gucggacugauacugcagu

SEQ ID NO: 458789 - RNA, 19 nt, Artificial Sequence
  Description of Artificial Sequence: Synthetic oligonucleotide
ccaaaucacgguccuugcc

SEQ ID NO: 458790 - RNA, 19 nt, Artificial Sequence
  Description of Artificial Sequence: Synthetic oligonucleotide
acuacgcuuccuucccuuu

SEQ ID NO: 458791 - RNA, 19 nt, Artificial Sequence
  Description of Artificial Sequence: Synthetic oligonucleotide
augagucuaucaccuugua

SEQ ID NO: 458792 - RNA, 19 nt, Artificial Sequence
  Description of Artificial Sequence: Synthetic oligonucleotide
auacugccagaccuuuguu

SEQ ID NO: 458793 - RNA, 19 nt, Artificial Sequence
  Description of Artificial Sequence: Synthetic oligonucleotide
caaugaacccaacacugau

SEQ ID NO: 458794 - RNA, 19 nt, Artificial Sequence
  Description of Artificial Sequence: Synthetic oligonucleotide
gcucccuguacucgauccg

SEQ ID NO: 458795 - RNA, 19 nt, Artificial Sequence
  Description of Artificial Sequence: Synthetic oligonucleotide
gauagccaaugaacccaac

SEQ ID NO: 458796 - RNA, 19 nt, Artificial Sequence
  Description of Artificial Sequence: Synthetic oligonucleotide
ugccgaccgguugauggug

SEQ ID NO: 458797 - RNA, 19 nt, Artificial Sequence
  Description of Artificial Sequence: Synthetic oligonucleotide
guacauauucaggcgccga

SEQ ID NO: 458798 - RNA, 19 nt, Artificial Sequence
  Description of Artificial Sequence: Synthetic oligonucleotide
uccgcccuucaguaacuuc

SEQ ID NO: 458799 - RNA, 19 nt, Artificial Sequence
  Description of Artificial Sequence: Synthetic oligonucleotide
cugucugaguuucuugugu

SEQ ID NO: 458800 - RNA, 19 nt, Artificial Sequence
  Description of Artificial Sequence: Synthetic oligonucleotide
caacuuucuagauguuacu

SEQ ID NO: 458801 - RNA, 19 nt, Artificial Sequence
  Description of Artificial Sequence: Synthetic oligonucleotide
ccguccuuuguacuugggc

SEQ ID NO: 458802 - RNA, 19 nt, Artificial Sequence
  Description of Artificial Sequence: Synthetic oligonucleotide
gugugcaacuucccaaacu

SEQ ID NO: 458803 - RNA, 19 nt, Artificial Sequence
  Description of Artificial Sequence: Synthetic oligonucleotide
cuacauuuggauagccaau

SEQ ID NO: 458804 - RNA, 19 nt, Artificial Sequence
  Description of Artificial Sequence: Synthetic oligonucleotide
aacuaaguuuuggccgcuu

SEQ ID NO: 458805 - RNA, 19 nt, Artificial Sequence
  Description of Artificial Sequence: Synthetic oligonucleotide
ggauagucccgggaaagca

SEQ ID NO: 458806 - RNA, 19 nt, Artificial Sequence
  Description of Artificial Sequence: Synthetic oligonucleotide
uggucuugaggagccuuaa

SEQ ID NO: 458807 - RNA, 19 nt, Artificial Sequence
  Description of Artificial Sequence: Synthetic oligonucleotide
agcauucucccaggaguca

SEQ ID NO: 458808 - RNA, 19 nt, Artificial Sequence
  Description of Artificial Sequence: Synthetic oligonucleotide
guguuucauaguagcgcac

SEQ ID NO: 458809 - RNA, 19 nt, Artificial Sequence
  Description of Artificial Sequence: Synthetic oligonucleotide
gcggcuugacaaagaaagg

SEQ ID NO: 458810 - RNA, 19 nt, Artificial Sequence
  Description of Artificial Sequence: Synthetic oligonucleotide
gucugaguuucuugugucu

SEQ ID NO: 458811 - RNA, 19 nt, Artificial Sequence
  Description of Artificial Sequence: Synthetic oligonucleotide
agggguuggugaggcucgc

SEQ ID NO: 458812 - RNA, 19 nt, Artificial Sequence
  Description of Artificial Sequence: Synthetic oligonucleotide
gaacgcgugcaaggauuug

SEQ ID NO: 458813 - RNA, 19 nt, Artificial Sequence
  Description of Artificial Sequence: Synthetic oligonucleotide
agcaacccaucguuuuguu

SEQ ID NO: 458814 - RNA, 19 nt, Artificial Sequence
  Description of Artificial Sequence: Synthetic oligonucleotide
aguagacauuucagcauuu

SEQ ID NO: 458815 - RNA, 19 nt, Artificial Sequence
  Description of Artificial Sequence: Synthetic oligonucleotide
gucccucauguuuuggccu

SEQ ID NO: 458816 - RNA, 19 nt, Artificial Sequence
  Description of Artificial Sequence: Synthetic oligonucleotide
aucauguagaagagacauu

SEQ ID NO: 458817 - RNA, 19 nt, Artificial Sequence
  Description of Artificial Sequence: Synthetic oligonucleotide
ugcggaaagcuagcuucuc

SEQ ID NO: 458818 - RNA, 19 nt, Artificial Sequence
  Description of Artificial Sequence: Synthetic oligonucleotide
ccaaugaacccaacacuga

SEQ ID NO: 458819 - RNA, 19 nt, Artificial Sequence
  Description of Artificial Sequence: Synthetic oligonucleotide
ccugcgcuccuuuugccug

SEQ ID NO: 458820 - RNA, 19 nt, Artificial Sequence
  Description of Artificial Sequence: Synthetic oligonucleotide
cauugggcggcuugacaaa

SEQ ID NO: 458821 - RNA, 19 nt, Artificial Sequence
  Description of Artificial Sequence: Synthetic oligonucleotide
caacuaugguuuccgagau

SEQ ID NO: 458822 - RNA, 19 nt, Artificial Sequence
  Description of Artificial Sequence: Synthetic oligonucleotide
ccauugggucucuagcguc

SEQ ID NO: 458823 - RNA, 19 nt, Artificial Sequence
  Description of Artificial Sequence: Synthetic oligonucleotide
cauauucaggcgccgaauu

SEQ ID NO: 458824 - RNA, 19 nt, Artificial Sequence
  Description of Artificial Sequence: Synthetic oligonucleotide
uaucaagaauguggaccuu

SEQ ID NO: 458825 - RNA, 19 nt, Artificial Sequence
  Description of Artificial Sequence: Synthetic oligonucleotide
ggcucuaaucacagcuuug

SEQ ID NO: 458826 - RNA, 19 nt, Artificial Sequence
  Description of Artificial Sequence: Synthetic oligonucleotide
ggacucgaucauguagaag

SEQ ID NO: 458827 - RNA, 19 nt, Artificial Sequence
  Description of Artificial Sequence: Synthetic oligonucleotide
ggaauauacgacgcaucaa

SEQ ID NO: 458828 - RNA, 19 nt, Artificial Sequence
  Description of Artificial Sequence: Synthetic oligonucleotide
cggacugauacugcagugg

SEQ ID NO: 458829 - RNA, 19 nt, Artificial Sequence
  Description of Artificial Sequence: Synthetic oligonucleotide
cugccccuucuuauauauc

SEQ ID NO: 458830 - RNA, 19 nt, Artificial Sequence
  Description of Artificial Sequence: Synthetic oligonucleotide
auguggaccuuugcauuau

SEQ ID NO: 458831 - RNA, 19 nt, Artificial Sequence
  Description of Artificial Sequence: Synthetic oligonucleotide
ccacaacaucugaugaguc

SEQ ID NO: 458832 - RNA, 19 nt, Artificial Sequence
  Description of Artificial Sequence: Synthetic oligonucleotide
ccgucaccaaaucacgguc

SEQ ID NO: 458833 - RNA, 19 nt, Artificial Sequence
  Description of Artificial Sequence: Synthetic oligonucleotide
auauggucuugaggagccu

SEQ ID NO: 458834 - RNA, 19 nt, Artificial Sequence
  Description of Artificial Sequence: Synthetic oligonucleotide
cucuaaucacagcuuuggu

SEQ ID NO: 458835 - RNA, 19 nt, Artificial Sequence
  Description of Artificial Sequence: Synthetic oligonucleotide
cccagugcggaaagcuagc

SEQ ID NO: 458836 - RNA, 19 nt, Artificial Sequence
  Description of Artificial Sequence: Synthetic oligonucleotide
ggcucgcauggaaagcaag

SEQ ID NO: 458837 - RNA, 19 nt, Artificial Sequence
  Description of Artificial Sequence: Synthetic oligonucleotide
acgacagaaccgacacugu

SEQ ID NO: 458838 - RNA, 19 nt, Artificial Sequence
  Description of Artificial Sequence: Synthetic oligonucleotide
guuauuucugugggaacuu

SEQ ID NO: 458839 - RNA, 19 nt, Artificial Sequence
  Description of Artificial Sequence: Synthetic oligonucleotide
guagcgcacaccaacuuuu

SEQ ID NO: 458840 - RNA, 19 nt, Artificial Sequence
  Description of Artificial Sequence: Synthetic oligonucleotide
ggggaacgagugcccauug

SEQ ID NO: 458841 - RNA, 19 nt, Artificial Sequence
  Description of Artificial Sequence: Synthetic oligonucleotide
cucuagcgucaagaacuug

SEQ ID NO: 458842 - RNA, 19 nt, Artificial Sequence
  Description of Artificial Sequence: Synthetic oligonucleotide
gggucucuagcgucaagaa

SEQ ID NO: 458843 - RNA, 19 nt, Artificial Sequence
  Description of Artificial Sequence: Synthetic oligonucleotide
gaaggcgccuccucagcau

SEQ ID NO: 458844 - RNA, 19 nt, Artificial Sequence
  Description of Artificial Sequence: Synthetic oligonucleotide
auggucuugaggagccuua

SEQ ID NO: 458845 - RNA, 19 nt, Artificial Sequence
  Description of Artificial Sequence: Synthetic oligonucleotide
gacugauacugcaguggcu

SEQ ID NO: 458846 - RNA, 19 nt, Artificial Sequence
  Description of Artificial Sequence: Synthetic oligonucleotide
cucuugccuacauuuggau

SEQ ID NO: 458847 - RNA, 19 nt, Artificial Sequence
  Description of Artificial Sequence: Synthetic oligonucleotide
ggauccuucauaacuuuau

SEQ ID NO: 458848 - RNA, 19 nt, Artificial Sequence
  Description of Artificial Sequence: Synthetic oligonucleotide
cugcauugggcggcuugac

SEQ ID NO: 458849 - RNA, 19 nt, Artificial Sequence
  Description of Artificial Sequence: Synthetic oligonucleotide
gcuagcuucucaagaaagu

SEQ ID NO: 458850 - RNA, 19 nt, Artificial Sequence
  Description of Artificial Sequence: Synthetic oligonucleotide
ggcucuccgcccuucagua

SEQ ID NO: 458851 - RNA, 19 nt, Artificial Sequence
  Description of Artificial Sequence: Synthetic oligonucleotide
gccuacauuuggauagcca

SEQ ID NO: 458852 - RNA, 19 nt, Artificial Sequence
  Description of Artificial Sequence: Synthetic oligonucleotide
cccaucguuuuguugccca

SEQ ID NO: 458853 - RNA, 19 nt, Artificial Sequence
  Description of Artificial Sequence: Synthetic oligonucleotide
cucgauccggguuggugcu

SEQ ID NO: 458854 - RNA, 19 nt, Artificial Sequence
  Description of Artificial Sequence: Synthetic oligonucleotide
ggauccggccccucugcca

SEQ ID NO: 458855 - RNA, 19 nt, Artificial Sequence
  Description of Artificial Sequence: Synthetic oligonucleotide
gugugcacuacgcuuccuu

SEQ ID NO: 458856 - RNA, 19 nt, Artificial Sequence
  Description of Artificial Sequence: Synthetic oligonucleotide
acgcgugcaaggauuuguu

SEQ ID NO: 458857 - RNA, 19 nt, Artificial Sequence
  Description of Artificial Sequence: Synthetic oligonucleotide
gguguccuuuuccacuggu

SEQ ID NO: 458858 - RNA, 19 nt, Artificial Sequence
  Description of Artificial Sequence: Synthetic oligonucleotide
gucgaacgcgugcaaggau

SEQ ID NO: 458859 - RNA, 19 nt, Artificial Sequence
  Description of Artificial Sequence: Synthetic oligonucleotide
gauuguuccugcgcuccuu

SEQ ID NO: 458860 - RNA, 19 nt, Artificial Sequence
  Description of Artificial Sequence: Synthetic oligonucleotide
gccgaauuguggcccgguc

SEQ ID NO: 458861 - RNA, 19 nt, Artificial Sequence
  Description of Artificial Sequence: Synthetic oligonucleotide
cugccagaccuuuguuucu

SEQ ID NO: 458862 - RNA, 19 nt, Artificial Sequence
  Description of Artificial Sequence: Synthetic oligonucleotide
gaacaagaucacacuuauu

SEQ ID NO: 458863 - RNA, 19 nt, Artificial Sequence
  Description of Artificial Sequence: Synthetic oligonucleotide
cgcgugcaaggauuuguug

SEQ ID NO: 458864 - RNA, 19 nt, Artificial Sequence
  Description of Artificial Sequence: Synthetic oligonucleotide
gccgugcagcucuccuccg

SEQ ID NO: 458865 - RNA, 19 nt, Artificial Sequence
  Description of Artificial Sequence: Synthetic oligonucleotide
gcucgcauggaaagcaagu

SEQ ID NO: 458866 - RNA, 19 nt, Artificial Sequence
  Description of Artificial Sequence: Synthetic oligonucleotide
cgguugauggugcuccguc

SEQ ID NO: 458867 - RNA, 19 nt, Artificial Sequence
  Description of Artificial Sequence: Synthetic oligonucleotide
cugccgaccgguugauggu

SEQ ID NO: 458868 - RNA, 19 nt, Artificial Sequence
  Description of Artificial Sequence: Synthetic oligonucleotide
ccacgauuguuccugcgcu

SEQ ID NO: 458869 - RNA, 19 nt, Artificial Sequence
  Description of Artificial Sequence: Synthetic oligonucleotide
gccgaccgguugauggugc

SEQ ID NO: 458870 - RNA, 19 nt, Artificial Sequence
  Description of Artificial Sequence: Synthetic oligonucleotide
ugcgcuccuuuugccugua

SEQ ID NO: 458871 - RNA, 19 nt, Artificial Sequence
  Description of Artificial Sequence: Synthetic oligonucleotide
uggcccggucccucauguu

SEQ ID NO: 458872 - RNA, 19 nt, Artificial Sequence
  Description of Artificial Sequence: Synthetic oligonucleotide
acgacgcaucaagguaaua

SEQ ID NO: 458873 - RNA, 19 nt, Artificial Sequence
  Description of Artificial Sequence: Synthetic oligonucleotide
ggagucaaucuuguauguu

SEQ ID NO: 458874 - RNA, 19 nt, Artificial Sequence
  Description of Artificial Sequence: Synthetic oligonucleotide
cccggucccucauguuuug

SEQ ID NO: 458875 - RNA, 19 nt, Artificial Sequence
  Description of Artificial Sequence: Synthetic oligonucleotide
cagugcggaaagcuagcuu

SEQ ID NO: 458876 - RNA, 19 nt, Artificial Sequence
  Description of Artificial Sequence: Synthetic oligonucleotide
ggucuugaggagccuuaau

SEQ ID NO: 458877 - RNA, 19 nt, Artificial Sequence
  Description of Artificial Sequence: Synthetic oligonucleotide
cugcgcuccuuuugccugu

SEQ ID NO: 458878 - RNA, 19 nt, Artificial Sequence
  Description of Artificial Sequence: Synthetic oligonucleotide
cgaugugaggggaacgagu

SEQ ID NO: 458879 - RNA, 19 nt, Artificial Sequence
  Description of Artificial Sequence: Synthetic oligonucleotide
gcaaacuuucuuggaucgu

SEQ ID NO: 458880 - RNA, 19 nt, Artificial Sequence
  Description of Artificial Sequence: Synthetic oligonucleotide
ggcccggucccucauguuu

SEQ ID NO: 458881 - RNA, 19 nt, Artificial Sequence
  Description of Artificial Sequence: Synthetic oligonucleotide
agugcccauugggucucua

SEQ ID NO: 458882 - RNA, 19 nt, Artificial Sequence
  Description of Artificial Sequence: Synthetic oligonucleotide
ccggucccucauguuuugg

SEQ ID NO: 458883 - RNA, 19 nt, Artificial Sequence
  Description of Artificial Sequence: Synthetic oligonucleotide
cucgugccacugugccaga

SEQ ID NO: 458884 - RNA, 19 nt, Artificial Sequence
  Description of Artificial Sequence: Synthetic oligonucleotide
cgacgcaucaagguaauau

SEQ ID NO: 458885 - RNA, 19 nt, Artificial Sequence
  Description of Artificial Sequence: Synthetic oligonucleotide
gggcggcuugacaaagaaa

SEQ ID NO: 458886 - RNA, 19 nt, Artificial Sequence
  Description of Artificial Sequence: Synthetic oligonucleotide
gcucuccgcccuucaguaa

SEQ ID NO: 458887 - RNA, 19 nt, Artificial Sequence
  Description of Artificial Sequence: Synthetic oligonucleotide
gcgccgaauuguggcccgg

SEQ ID NO: 458888 - RNA, 19 nt, Artificial Sequence
  Description of Artificial Sequence: Synthetic oligonucleotide
ggcagucaaucaggaauau

SEQ ID NO: 458889 - RNA, 19 nt, Artificial Sequence
  Description of Artificial Sequence: Synthetic oligonucleotide
ccacagucggacugauacu

SEQ ID NO: 458890 - RNA, 19 nt, Artificial Sequence
  Description of Artificial Sequence: Synthetic oligonucleotide
ggccgcuuucucugugacu

SEQ ID NO: 458891 - RNA, 19 nt, Artificial Sequence
  Description of Artificial Sequence: Synthetic oligonucleotide
ccuguacucgauccggguu

SEQ ID NO: 458892 - RNA, 19 nt, Artificial Sequence
  Description of Artificial Sequence: Synthetic oligonucleotide
gggguuggugaggcucgca

SEQ ID NO: 458893 - RNA, 19 nt, Artificial Sequence
  Description of Artificial Sequence: Synthetic oligonucleotide
cgagugcccauugggucuc

SEQ ID NO: 458894 - RNA, 19 nt, Artificial Sequence
  Description of Artificial Sequence: Synthetic oligonucleotide
cccuguacucgauccgggu

SEQ ID NO: 458895 - RNA, 19 nt, Artificial Sequence
  Description of Artificial Sequence: Synthetic oligonucleotide
ccuuacacgucagcauccu

SEQ ID NO: 458896 - RNA, 19 nt, Artificial Sequence
  Description of Artificial Sequence: Synthetic oligonucleotide
guacucgauccggguuggu

SEQ ID NO: 458897 - RNA, 19 nt, Artificial Sequence
  Description of Artificial Sequence: Synthetic oligonucleotide
cgaccgguugauggugcuc

SEQ ID NO: 458898 - RNA, 19 nt, Artificial Sequence
  Description of Artificial Sequence: Synthetic oligonucleotide
cgacagaaccgacacuguu

SEQ ID NO: 458899 - RNA, 19 nt, Artificial Sequence
  Description of Artificial Sequence: Synthetic oligonucleotide
cgaacgcgugcaaggauuu

SEQ ID NO: 458900 - RNA, 19 nt, Artificial Sequence
  Description of Artificial Sequence: Synthetic oligonucleotide
ccgaccgguugauggugcu

SEQ ID NO: 458901 - RNA, 19 nt, Artificial Sequence
  Description of Artificial Sequence: Synthetic oligonucleotide
cuccgcccuucaguaacuu

SEQ ID NO: 458902 - RNA, 19 nt, Artificial Sequence
  Description of Artificial Sequence: Synthetic oligonucleotide
cgauuguuccugcgcuccu

SEQ ID NO: 458903 - RNA, 19 nt, Artificial Sequence
  Description of Artificial Sequence: Synthetic oligonucleotide
ccgguugauggugcuccgu

SEQ ID NO: 458904 - RNA, 19 nt, Artificial Sequence
  Description of Artificial Sequence: Synthetic oligonucleotide
cgccgaauuguggcccggu

SEQ ID NO: 458905 - RNA, 19 nt, Artificial Sequence
  Description of Artificial Sequence: Synthetic oligonucleotide
ccacuccuuugagcacuau

SEQ ID NO: 458906 - RNA, 19 nt, Artificial Sequence
  Description of Artificial Sequence: Synthetic oligonucleotide
ucuucuaaacgucuagggg

SEQ ID NO: 458907 - RNA, 19 nt, Artificial Sequence
  Description of Artificial Sequence: Synthetic oligonucleotide
ugaaaggcgaaugagcggg

SEQ ID NO: 458908 - RNA, 19 nt, Artificial Sequence
  Description of Artificial Sequence: Synthetic oligonucleotide
ucaaagacguuucuccucc

SEQ ID NO: 458909 - RNA, 19 nt, Artificial Sequence
  Description of Artificial Sequence: Synthetic oligonucleotide
gagaccuacagguuguagg

SEQ ID NO: 458910 - RNA, 19 nt, Artificial Sequence
  Description of Artificial Sequence: Synthetic oligonucleotide
ucugauaaccuccagggua

SEQ ID NO: 458911 - RNA, 19 nt, Artificial Sequence
  Description of Artificial Sequence: Synthetic oligonucleotide
uuaccguuaagugucgggg

SEQ ID NO: 458912 - RNA, 19 nt, Artificial Sequence
  Description of Artificial Sequence: Synthetic oligonucleotide
cuucuaaacgucuagggga

SEQ ID NO: 458913 - RNA, 19 nt, Artificial Sequence
  Description of Artificial Sequence: Synthetic oligonucleotide
uguuugaaauccaggggca

SEQ ID NO: 458914 - RNA, 19 nt, Artificial Sequence
  Description of Artificial Sequence: Synthetic oligonucleotide
aggguuaccguuaaguguc

SEQ ID NO: 458915 - RNA, 19 nt, Artificial Sequence
  Description of Artificial Sequence: Synthetic oligonucleotide
uaugcuaugccuccucuaa

SEQ ID NO: 458916 - RNA, 19 nt, Artificial Sequence
  Description of Artificial Sequence: Synthetic oligonucleotide
aauacggcuacggaguggu

SEQ ID NO: 458917 - RNA, 19 nt, Artificial Sequence
  Description of Artificial Sequence: Synthetic oligonucleotide
uucuaaacgucuaggggac

SEQ ID NO: 458918 - RNA, 19 nt, Artificial Sequence
  Description of Artificial Sequence: Synthetic oligonucleotide
uguugugggugaaaggcga

SEQ ID NO: 458919 - RNA, 19 nt, Artificial Sequence
  Description of Artificial Sequence: Synthetic oligonucleotide
acugcgagacagucuauac

SEQ ID NO: 458920 - RNA, 19 nt, Artificial Sequence
  Description of Artificial Sequence: Synthetic oligonucleotide
cugauaaccuccaggguag

SEQ ID NO: 458921 - RNA, 19 nt, Artificial Sequence
  Description of Artificial Sequence: Synthetic oligonucleotide
uguuagcuuguugacagcc

SEQ ID NO: 458922 - RNA, 19 nt, Artificial Sequence
  Description of Artificial Sequence: Synthetic oligonucleotide
ggugaaaggcgaaugagcg

SEQ ID NO: 458923 - RNA, 19 nt, Artificial Sequence
  Description of Artificial Sequence: Synthetic oligonucleotide
auaggcuacugcgagacag

SEQ ID NO: 458924 - RNA, 19 nt, Artificial Sequence
  Description of Artificial Sequence: Synthetic oligonucleotide
guuaccguuaagugucggg

SEQ ID NO: 458925 - RNA, 19 nt, Artificial Sequence
  Description of Artificial Sequence: Synthetic oligonucleotide
guaauguuagcuuguugac

SEQ ID NO: 458926 - RNA, 19 nt, Artificial Sequence
  Description of Artificial Sequence: Synthetic oligonucleotide
caaccagcuagguacagug

SEQ ID NO: 458927 - RNA, 19 nt, Artificial Sequence
  Description of Artificial Sequence: Synthetic oligonucleotide
uggggcaguagaaaggcac

SEQ ID NO: 458928 - RNA, 19 nt, Artificial Sequence
  Description of Artificial Sequence: Synthetic oligonucleotide
uguugccgcguucuguggg

SEQ ID NO: 458929 - RNA, 19 nt, Artificial Sequence
  Description of Artificial Sequence: Synthetic oligonucleotide
agugauucgguguuugaaa

SEQ ID NO: 458930 - RNA, 19 nt, Artificial Sequence
  Description of Artificial Sequence: Synthetic oligonucleotide
acguucacggcucaggccu

SEQ ID NO: 458931 - RNA, 19 nt, Artificial Sequence
  Description of Artificial Sequence: Synthetic oligonucleotide
guaugugggguguagcccc

SEQ ID NO: 458932 - RNA, 19 nt, Artificial Sequence
  Description of Artificial Sequence: Synthetic oligonucleotide
cguaguucgucaaagaggc

SEQ ID NO: 458933 - RNA, 19 nt, Artificial Sequence
  Description of Artificial Sequence: Synthetic oligonucleotide
agacguuucuccuccgguc

SEQ ID NO: 458934 - RNA, 19 nt, Artificial Sequence
  Description of Artificial Sequence: Synthetic oligonucleotide
uacggaguggugagggccg

SEQ ID NO: 458935 - RNA, 19 nt, Artificial Sequence
  Description of Artificial Sequence: Synthetic oligonucleotide
ggucaauacggcuacggag

SEQ ID NO: 458936 - RNA, 19 nt, Artificial Sequence
  Description of Artificial Sequence: Synthetic oligonucleotide
uccgcuuaaaggugccgcg

SEQ ID NO: 458937 - RNA, 19 nt, Artificial Sequence
  Description of Artificial Sequence: Synthetic oligonucleotide
gucuauaccacgguagggc

SEQ ID NO: 458938 - RNA, 19 nt, Artificial Sequence
  Description of Artificial Sequence: Synthetic oligonucleotide
uacgaguuuauuuggcuua

SEQ ID NO: 458939 - RNA, 19 nt, Artificial Sequence
  Description of Artificial Sequence: Synthetic oligonucleotide
agucccguggcaucucucg

SEQ ID NO: 458940 - RNA, 19 nt, Artificial Sequence
  Description of Artificial Sequence: Synthetic oligonucleotide
uauaccacgguagggcacc

SEQ ID NO: 458941 - RNA, 19 nt, Artificial Sequence
  Description of Artificial Sequence: Synthetic oligonucleotide
uguaugcuaugccuccucu

SEQ ID NO: 458942 - RNA, 19 nt, Artificial Sequence
  Description of Artificial Sequence: Synthetic oligonucleotide
ucaauacggcuacggagug

SEQ ID NO: 458943 - RNA, 19 nt, Artificial Sequence
  Description of Artificial Sequence: Synthetic oligonucleotide
gaugcguucuccgccgucg

SEQ ID NO: 458944 - RNA, 19 nt, Artificial Sequence
  Description of Artificial Sequence: Synthetic oligonucleotide
aucagaauccagguaccac

SEQ ID NO: 458945 - RNA, 19 nt, Artificial Sequence
  Description of Artificial Sequence: Synthetic oligonucleotide
ucggaagcgagggaaagug

SEQ ID NO: 458946 - RNA, 19 nt, Artificial Sequence
  Description of Artificial Sequence: Synthetic oligonucleotide
ugggucaauacggcuacgg

SEQ ID NO: 458947 - RNA, 19 nt, Artificial Sequence
  Description of Artificial Sequence: Synthetic oligonucleotide
caggucacguccgagaccc

SEQ ID NO: 458948 - RNA, 19 nt, Artificial Sequence
  Description of Artificial Sequence: Synthetic oligonucleotide
uggcaucucucguaggacc

SEQ ID NO: 458949 - RNA, 19 nt, Artificial Sequence
  Description of Artificial Sequence: Synthetic oligonucleotide
uuacgaguuuauuuggcuu

SEQ ID NO: 458950 - RNA, 19 nt, Artificial Sequence
  Description of Artificial Sequence: Synthetic oligonucleotide
gugaaaggcgaaugagcgg

SEQ ID NO: 458951 - RNA, 19 nt, Artificial Sequence
  Description of Artificial Sequence: Synthetic oligonucleotide
ugggugaaaggcgaaugag

SEQ ID NO: 458952 - RNA, 19 nt, Artificial Sequence
  Description of Artificial Sequence: Synthetic oligonucleotide
cucgcgcucaaacaccucc

SEQ ID NO: 458953 - RNA, 19 nt, Artificial Sequence
  Description of Artificial Sequence: Synthetic oligonucleotide
uggaucucgcguuuccagc

SEQ ID NO: 458954 - RNA, 19 nt, Artificial Sequence
  Description of Artificial Sequence: Synthetic oligonucleotide
ugcaggucacguccgagac

SEQ ID NO: 458955 - RNA, 19 nt, Artificial Sequence
  Description of Artificial Sequence: Synthetic oligonucleotide
agugggcgaguccccagcc

SEQ ID NO: 458956 - RNA, 19 nt, Artificial Sequence
  Description of Artificial Sequence: Synthetic oligonucleotide
uccggucaaggccaggaga

SEQ ID NO: 458957 - RNA, 19 nt, Artificial Sequence
  Description of Artificial Sequence: Synthetic oligonucleotide
acgucuaggggacuggcga

SEQ ID NO: 458958 - RNA, 19 nt, Artificial Sequence
  Description of Artificial Sequence: Synthetic oligonucleotide
accuacagguuguagguau

SEQ ID NO: 458959 - RNA, 19 nt, Artificial Sequence
  Description of Artificial Sequence: Synthetic oligonucleotide
acguccgagacccagggaa

SEQ ID NO: 458960 - RNA, 19 nt, Artificial Sequence
  Description of Artificial Sequence: Synthetic oligonucleotide
cucaaagacguuucuccuc

SEQ ID NO: 458961 - RNA, 19 nt, Artificial Sequence
  Description of Artificial Sequence: Synthetic oligonucleotide
ccgggaauaaaguccaagg

SEQ ID NO: 458962 - RNA, 19 nt, Artificial Sequence
  Description of Artificial Sequence: Synthetic oligonucleotide
ugggcgaguccccagcccc

SEQ ID NO: 458963 - RNA, 19 nt, Artificial Sequence
  Description of Artificial Sequence: Synthetic oligonucleotide
ugcggugaggguccugugc

SEQ ID NO: 458964 - RNA, 19 nt, Artificial Sequence
  Description of Artificial Sequence: Synthetic oligonucleotide
ccguaguucgucaaagagg

SEQ ID NO: 458965 - RNA, 19 nt, Artificial Sequence
  Description of Artificial Sequence: Synthetic oligonucleotide
aaugagcgggguggagggc

SEQ ID NO: 458966 - RNA, 19 nt, Artificial Sequence
  Description of Artificial Sequence: Synthetic oligonucleotide
gaaaggcacccagagaguc

SEQ ID NO: 458967 - RNA, 19 nt, Artificial Sequence
  Description of Artificial Sequence: Synthetic oligonucleotide
caccauaggcuacugcgag

SEQ ID NO: 458968 - RNA, 19 nt, Artificial Sequence
  Description of Artificial Sequence: Synthetic oligonucleotide
gagcgugauauuccuggug

SEQ ID NO: 458969 - RNA, 19 nt, Artificial Sequence
  Description of Artificial Sequence: Synthetic oligonucleotide
cuacggaguggugagggcc

SEQ ID NO: 458970 - RNA, 19 nt, Artificial Sequence
  Description of Artificial Sequence: Synthetic oligonucleotide
cuaaacgucuaggggacug

SEQ ID NO: 458971 - RNA, 19 nt, Artificial Sequence
  Description of Artificial Sequence: Synthetic oligonucleotide
cucgcggcucaguaguucc

SEQ ID NO: 458972 - RNA, 19 nt, Artificial Sequence
  Description of Artificial Sequence: Synthetic oligonucleotide
uacggcuacggagugguga

SEQ ID NO: 458973 - RNA, 19 nt, Artificial Sequence
  Description of Artificial Sequence: Synthetic oligonucleotide
ucaguuugggaguccccga

SEQ ID NO: 458974 - RNA, 19 nt, Artificial Sequence
  Description of Artificial Sequence: Synthetic oligonucleotide
cuccaugggucaauacggc

SEQ ID NO: 458975 - RNA, 19 nt, Artificial Sequence
  Description of Artificial Sequence: Synthetic oligonucleotide
augcuaugccuccucuaag

SEQ ID NO: 458976 - RNA, 19 nt, Artificial Sequence
  Description of Artificial Sequence: Synthetic oligonucleotide
agacagucuauaccacggu

SEQ ID NO: 458977 - RNA, 19 nt, Artificial Sequence
  Description of Artificial Sequence: Synthetic oligonucleotide
aaaggugccgcggcggcga

SEQ ID NO: 458978 - RNA, 19 nt, Artificial Sequence
  Description of Artificial Sequence: Synthetic oligonucleotide
guagguaugugggguguag

SEQ ID NO: 458979 - RNA, 19 nt, Artificial Sequence
  Description of Artificial Sequence: Synthetic oligonucleotide
ggaucucgcguuuccagcc

SEQ ID NO: 458980 - RNA, 19 nt, Artificial Sequence
  Description of Artificial Sequence: Synthetic oligonucleotide
cuuacgaguuuauuuggcu

SEQ ID NO: 458981 - RNA, 19 nt, Artificial Sequence
  Description of Artificial Sequence: Synthetic oligonucleotide
ugcguucuccgccgucgcg

SEQ ID NO: 458982 - RNA, 19 nt, Artificial Sequence
  Description of Artificial Sequence: Synthetic oligonucleotide
ucauccaugcgggaccuuc

SEQ ID NO: 458983 - RNA, 19 nt, Artificial Sequence
  Description of Artificial Sequence: Synthetic oligonucleotide
uaaaggugccgcggcggcg

SEQ ID NO: 458984 - RNA, 19 nt, Artificial Sequence
  Description of Artificial Sequence: Synthetic oligonucleotide
agaauccagguaccacgug

SEQ ID NO: 458985 - RNA, 19 nt, Artificial Sequence
  Description of Artificial Sequence: Synthetic oligonucleotide
aaaggcgaaugagcggggu

SEQ ID NO: 458986 - RNA, 19 nt, Artificial Sequence
  Description of Artificial Sequence: Synthetic oligonucleotide
cacguucacggcucaggcc

SEQ ID NO: 458987 - RNA, 19 nt, Artificial Sequence
  Description of Artificial Sequence: Synthetic oligonucleotide
ugggagcuccccacguuca

SEQ ID NO: 458988 - RNA, 19 nt, Artificial Sequence
  Description of Artificial Sequence: Synthetic oligonucleotide
cuccgcuuaaaggugccgc

SEQ ID NO: 458989 - RNA, 19 nt, Artificial Sequence
  Description of Artificial Sequence: Synthetic oligonucleotide
cacguuggaucaguuuggg

SEQ ID NO: 458990 - RNA, 19 nt, Artificial Sequence
  Description of Artificial Sequence: Synthetic oligonucleotide
acuggcgaccccaagucug

SEQ ID NO: 458991 - RNA, 19 nt, Artificial Sequence
  Description of Artificial Sequence: Synthetic oligonucleotide
uuguagguauguggggugu

SEQ ID NO: 458992 - RNA, 19 nt, Artificial Sequence
  Description of Artificial Sequence: Synthetic oligonucleotide
ucgcgcucaaacaccucca

SEQ ID NO: 458993 - RNA, 19 nt, Artificial Sequence
  Description of Artificial Sequence: Synthetic oligonucleotide
auaagggugucggguuggg

SEQ ID NO: 458994 - RNA, 19 nt, Artificial Sequence
  Description of Artificial Sequence: Synthetic oligonucleotide
gggugaaaggcgaaugagc

SEQ ID NO: 458995 - RNA, 19 nt, Artificial Sequence
  Description of Artificial Sequence: Synthetic oligonucleotide
cccguaguucgucaaagag

SEQ ID NO: 458996 - RNA, 19 nt, Artificial Sequence
  Description of Artificial Sequence: Synthetic oligonucleotide
uccaugcgggaccuucuuc

SEQ ID NO: 458997 - RNA, 19 nt, Artificial Sequence
  Description of Artificial Sequence: Synthetic oligonucleotide
cucgugucucuucccgccg

SEQ ID NO: 458998 - RNA, 19 nt, Artificial Sequence
  Description of Artificial Sequence: Synthetic oligonucleotide
caauacggcuacggagugg

SEQ ID NO: 458999 - RNA, 19 nt, Artificial Sequence
  Description of Artificial Sequence: Synthetic oligonucleotide
ucgagggguuccaggggug

SEQ ID NO: 459000 - RNA, 19 nt, Artificial Sequence
  Description of Artificial Sequence: Synthetic oligonucleotide
ggcuacggaguggugaggg

SEQ ID NO: 459001 - RNA, 19 nt, Artificial Sequence
  Description of Artificial Sequence: Synthetic oligonucleotide
gagacagcuuacgaguuua

SEQ ID NO: 459002 - RNA, 19 nt, Artificial Sequence
  Description of Artificial Sequence: Synthetic oligonucleotide
aggagauccuaguggggau

SEQ ID NO: 459003 - RNA, 19 nt, Artificial Sequence
  Description of Artificial Sequence: Synthetic oligonucleotide
ugucggguugggugggcca

SEQ ID NO: 459004 - RNA, 19 nt, Artificial Sequence
  Description of Artificial Sequence: Synthetic oligonucleotide
uacugcgagacagucuaua

SEQ ID NO: 459005 - RNA, 19 nt, Artificial Sequence
  Description of Artificial Sequence: Synthetic oligonucleotide
cuguugccgcguucugugg

SEQ ID NO: 459006 - RNA, 19 nt, Artificial Sequence
  Description of Artificial Sequence: Synthetic oligonucleotide
ccaguguaugcuaugccuc

SEQ ID NO: 459007 - RNA, 19 nt, Artificial Sequence
  Description of Artificial Sequence: Synthetic oligonucleotide
gagauccuaguggggauga

SEQ ID NO: 459008 - RNA, 19 nt, Artificial Sequence
  Description of Artificial Sequence: Synthetic oligonucleotide
acguuggaucaguuuggga

SEQ ID NO: 459009 - RNA, 19 nt, Artificial Sequence
  Description of Artificial Sequence: Synthetic oligonucleotide
gcuuacgaguuuauuuggc

SEQ ID NO: 459010 - RNA, 19 nt, Artificial Sequence
  Description of Artificial Sequence: Synthetic oligonucleotide
ggaucaguuugggaguccc

SEQ ID NO: 459011 - RNA, 19 nt, Artificial Sequence
  Description of Artificial Sequence: Synthetic oligonucleotide
uggucuguguccggcaguc

SEQ ID NO: 459012 - RNA, 19 nt, Artificial Sequence
  Description of Artificial Sequence: Synthetic oligonucleotide
guuagcuuguugacagcca

SEQ ID NO: 459013 - RNA, 19 nt, Artificial Sequence
  Description of Artificial Sequence: Synthetic oligonucleotide
aguguaugcuaugccuccu

SEQ ID NO: 459014 - RNA, 19 nt, Artificial Sequence
  Description of Artificial Sequence: Synthetic oligonucleotide
ucuaaacgucuaggggacu

SEQ ID NO: 459015 - RNA, 19 nt, Artificial Sequence
  Description of Artificial Sequence: Synthetic oligonucleotide
aaggugccgcggcggcgac

SEQ ID NO: 459016 - RNA, 19 nt, Artificial Sequence
  Description of Artificial Sequence: Synthetic oligonucleotide
agcagucggccaugaguug

SEQ ID NO: 459017 - RNA, 19 nt, Artificial Sequence
  Description of Artificial Sequence: Synthetic oligonucleotide
gugggagcuccccacguuc

SEQ ID NO: 459018 - RNA, 19 nt, Artificial Sequence
  Description of Artificial Sequence: Synthetic oligonucleotide
uggaucaguuugggagucc

SEQ ID NO: 459019 - RNA, 19 nt, Artificial Sequence
  Description of Artificial Sequence: Synthetic oligonucleotide
ggcgaagucgggccugcgg

SEQ ID NO: 459020 - RNA, 19 nt, Artificial Sequence
  Description of Artificial Sequence: Synthetic oligonucleotide
uuggcccguaguucgucaa

SEQ ID NO: 459021 - RNA, 19 nt, Artificial Sequence
  Description of Artificial Sequence: Synthetic oligonucleotide
ggacuggcgaccccaaguc

SEQ ID NO: 459022 - RNA, 19 nt, Artificial Sequence
  Description of Artificial Sequence: Synthetic oligonucleotide
guaggaccugcgccucuag

SEQ ID NO: 459023 - RNA, 19 nt, Artificial Sequence
  Description of Artificial Sequence: Synthetic oligonucleotide
gaacaccuagguccagcaa

SEQ ID NO: 459024 - RNA, 19 nt, Artificial Sequence
  Description of Artificial Sequence: Synthetic oligonucleotide
ugauaaccuccaggguaga

SEQ ID NO: 459025 - RNA, 19 nt, Artificial Sequence
  Description of Artificial Sequence: Synthetic oligonucleotide
ucgcgugccgcgcgaguca

SEQ ID NO: 459026 - RNA, 19 nt, Artificial Sequence
  Description of Artificial Sequence: Synthetic oligonucleotide
gggcaucggguguuguggg

SEQ ID NO: 459027 - RNA, 19 nt, Artificial Sequence
  Description of Artificial Sequence: Synthetic oligonucleotide
gauaaccuccaggguagaa

SEQ ID NO: 459028 - RNA, 19 nt, Artificial Sequence
  Description of Artificial Sequence: Synthetic oligonucleotide
uggcccguaguucgucaaa

SEQ ID NO: 459029 - RNA, 19 nt, Artificial Sequence
  Description of Artificial Sequence: Synthetic oligonucleotide
ucccgccgagggcucuugg

SEQ ID NO: 459030 - RNA, 19 nt, Artificial Sequence
  Description of Artificial Sequence: Synthetic oligonucleotide
cagcggggcagguaaguca

SEQ ID NO: 459031 - RNA, 19 nt, Artificial Sequence
  Description of Artificial Sequence: Synthetic oligonucleotide
ucguaggaccugcgccucu

SEQ ID NO: 459032 - RNA, 19 nt, Artificial Sequence
  Description of Artificial Sequence: Synthetic oligonucleotide
ucggguugggugggccacg

SEQ ID NO: 459033 - RNA, 19 nt, Artificial Sequence
  Description of Artificial Sequence: Synthetic oligonucleotide
ucgcggcucaguaguuccu

SEQ ID NO: 459034 - RNA, 19 nt, Artificial Sequence
  Description of Artificial Sequence: Synthetic oligonucleotide
ccacguucacggcucaggc

SEQ ID NO: 459035 - RNA, 19 nt, Artificial Sequence
  Description of Artificial Sequence: Synthetic oligonucleotide
ggggcaguagaaaggcacc

SEQ ID NO: 459036 - RNA, 19 nt, Artificial Sequence
  Description of Artificial Sequence: Synthetic oligonucleotide
gguuaccguuaagugucgg

SEQ ID NO: 459037 - RNA, 19 nt, Artificial Sequence
  Description of Artificial Sequence: Synthetic oligonucleotide
guccgagacccagggaagc

SEQ ID NO: 459038 - RNA, 19 nt, Artificial Sequence
  Description of Artificial Sequence: Synthetic oligonucleotide
ccgaggucggcugaugagg

SEQ ID NO: 459039 - RNA, 19 nt, Artificial Sequence
  Description of Artificial Sequence: Synthetic oligonucleotide
ggagauccuaguggggaug

SEQ ID NO: 459040 - RNA, 19 nt, Artificial Sequence
  Description of Artificial Sequence: Synthetic oligonucleotide
guaguucgucaaagaggcc

SEQ ID NO: 459041 - RNA, 19 nt, Artificial Sequence
  Description of Artificial Sequence: Synthetic oligonucleotide
gggucaauacggcuacgga

SEQ ID NO: 459042 - RNA, 19 nt, Artificial Sequence
  Description of Artificial Sequence: Synthetic oligonucleotide
gcggcggcgacgcacgugc

SEQ ID NO: 459043 - RNA, 19 nt, Artificial Sequence
  Description of Artificial Sequence: Synthetic oligonucleotide
gauggggauggguaauguu

SEQ ID NO: 459044 - RNA, 19 nt, Artificial Sequence
  Description of Artificial Sequence: Synthetic oligonucleotide
gugccgggagcugagcgug

SEQ ID NO: 459045 - RNA, 19 nt, Artificial Sequence
  Description of Artificial Sequence: Synthetic oligonucleotide
augggucaauacggcuacg

SEQ ID NO: 459046 - RNA, 19 nt, Artificial Sequence
  Description of Artificial Sequence: Synthetic oligonucleotide
cgaaugagcgggguggagg

SEQ ID NO: 459047 - RNA, 19 nt, Artificial Sequence
  Description of Artificial Sequence: Synthetic oligonucleotide
acguuucuccuccggucaa

SEQ ID NO: 459048 - RNA, 19 nt, Artificial Sequence
  Description of Artificial Sequence: Synthetic oligonucleotide
gggcaguagaaaggcaccc

SEQ ID NO: 459049 - RNA, 19 nt, Artificial Sequence
  Description of Artificial Sequence: Synthetic oligonucleotide
ggucacguccgagacccag

SEQ ID NO: 459050 - RNA, 19 nt, Artificial Sequence
  Description of Artificial Sequence: Synthetic oligonucleotide
ggcccguaguucgucaaag

SEQ ID NO: 459051 - RNA, 19 nt, Artificial Sequence
  Description of Artificial Sequence: Synthetic oligonucleotide
cuaggggacuggcgacccc

SEQ ID NO: 459052 - RNA, 19 nt, Artificial Sequence
  Description of Artificial Sequence: Synthetic oligonucleotide
auccaugcgggaccuucuu

SEQ ID NO: 459053 - RNA, 19 nt, Artificial Sequence
  Description of Artificial Sequence: Synthetic oligonucleotide
ggccugacucugcagguuc

SEQ ID NO: 459054 - RNA, 19 nt, Artificial Sequence
  Description of Artificial Sequence: Synthetic oligonucleotide
gcgcucaaacaccuccagc

SEQ ID NO: 459055 - RNA, 19 nt, Artificial Sequence
  Description of Artificial Sequence: Synthetic oligonucleotide
gcuacggaguggugagggc

SEQ ID NO: 459056 - RNA, 19 nt, Artificial Sequence
  Description of Artificial Sequence: Synthetic oligonucleotide
aucucgcguuuccagccuu

SEQ ID NO: 459057 - RNA, 19 nt, Artificial Sequence
  Description of Artificial Sequence: Synthetic oligonucleotide
gggaccgcugcucgcgugc

SEQ ID NO: 459058 - RNA, 19 nt, Artificial Sequence
  Description of Artificial Sequence: Synthetic oligonucleotide
ggcgaccccaagucuggcc

SEQ ID NO: 459059 - RNA, 19 nt, Artificial Sequence
  Description of Artificial Sequence: Synthetic oligonucleotide
acgcacgugcggccguucu

SEQ ID NO: 459060 - RNA, 19 nt, Artificial Sequence
  Description of Artificial Sequence: Synthetic oligonucleotide
gugcggccguucucggucc

SEQ ID NO: 459061 - RNA, 19 nt, Artificial Sequence
  Description of Artificial Sequence: Synthetic oligonucleotide
cgaggucggcugaugaggc

SEQ ID NO: 459062 - RNA, 19 nt, Artificial Sequence
  Description of Artificial Sequence: Synthetic oligonucleotide
ggggucggggucccugggg

SEQ ID NO: 459063 - RNA, 19 nt, Artificial Sequence
  Description of Artificial Sequence: Synthetic oligonucleotide
gacuggcgaccccaagucu

SEQ ID NO: 459064 - RNA, 19 nt, Artificial Sequence
  Description of Artificial Sequence: Synthetic oligonucleotide
ggguuaccguuaagugucg

SEQ ID NO: 459065 - RNA, 19 nt, Artificial Sequence
  Description of Artificial Sequence: Synthetic oligonucleotide
ggugaucgagggguuccag

SEQ ID NO: 459066 - RNA, 19 nt, Artificial Sequence
  Description of Artificial Sequence: Synthetic oligonucleotide
cucgcgugccgcgcgaguc

SEQ ID NO: 459067 - RNA, 19 nt, Artificial Sequence
  Description of Artificial Sequence: Synthetic oligonucleotide
gucggguugggugggccac

SEQ ID NO: 459068 - RNA, 19 nt, Artificial Sequence
  Description of Artificial Sequence: Synthetic oligonucleotide
ggaagcuaacagagcggug

SEQ ID NO: 459069 - RNA, 19 nt, Artificial Sequence
  Description of Artificial Sequence: Synthetic oligonucleotide
gggaagcuaacagagcggu

SEQ ID NO: 459070 - RNA, 19 nt, Artificial Sequence
  Description of Artificial Sequence: Synthetic oligonucleotide
ugccgggagcugagcguga

SEQ ID NO: 459071 - RNA, 19 nt, Artificial Sequence
  Description of Artificial Sequence: Synthetic oligonucleotide
cucguaggaccugcgccuc

SEQ ID NO: 459072 - RNA, 19 nt, Artificial Sequence
  Description of Artificial Sequence: Synthetic oligonucleotide
cauaggcuacugcgagaca

SEQ ID NO: 459073 - RNA, 19 nt, Artificial Sequence
  Description of Artificial Sequence: Synthetic oligonucleotide
gaccuacagguuguaggua

SEQ ID NO: 459074 - RNA, 19 nt, Artificial Sequence
  Description of Artificial Sequence: Synthetic oligonucleotide
ugcggccguucucggucca

SEQ ID NO: 459075 - RNA, 19 nt, Artificial Sequence
  Description of Artificial Sequence: Synthetic oligonucleotide
gcgagggaaagugggcgag

SEQ ID NO: 459076 - RNA, 19 nt, Artificial Sequence
  Description of Artificial Sequence: Synthetic oligonucleotide
cacucaaggcccugcuucu

SEQ ID NO: 459077 - RNA, 19 nt, Artificial Sequence
  Description of Artificial Sequence: Synthetic oligonucleotide
agugcacguuggaucaguu

SEQ ID NO: 459078 - RNA, 19 nt, Artificial Sequence
  Description of Artificial Sequence: Synthetic oligonucleotide
ccgcuuaaaggugccgcgg

SEQ ID NO: 459079 - RNA, 19 nt, Artificial Sequence
  Description of Artificial Sequence: Synthetic oligonucleotide
ugcucgcgugccgcgcgag

SEQ ID NO: 459080 - RNA, 19 nt, Artificial Sequence
  Description of Artificial Sequence: Synthetic oligonucleotide
gggagucccagaagggauc

SEQ ID NO: 459081 - RNA, 19 nt, Artificial Sequence
  Description of Artificial Sequence: Synthetic oligonucleotide
ggugccccgcagcagugca

SEQ ID NO: 459082 - RNA, 19 nt, Artificial Sequence
  Description of Artificial Sequence: Synthetic oligonucleotide
gcuccgcuuaaaggugccg

SEQ ID NO: 459083 - RNA, 19 nt, Artificial Sequence
  Description of Artificial Sequence: Synthetic oligonucleotide
cauccaugcgggaccuucu

SEQ ID NO: 459084 - RNA, 19 nt, Artificial Sequence
  Description of Artificial Sequence: Synthetic oligonucleotide
ccuaugucuuuggucugug

SEQ ID NO: 459085 - RNA, 19 nt, Artificial Sequence
  Description of Artificial Sequence: Synthetic oligonucleotide
ggacuuggucaaaagugcu

SEQ ID NO: 459086 - RNA, 19 nt, Artificial Sequence
  Description of Artificial Sequence: Synthetic oligonucleotide
auaccacgguagggcaccu

SEQ ID NO: 459087 - RNA, 19 nt, Artificial Sequence
  Description of Artificial Sequence: Synthetic oligonucleotide
cuaggccguggaggguuac

SEQ ID NO: 459088 - RNA, 19 nt, Artificial Sequence
  Description of Artificial Sequence: Synthetic oligonucleotide
cguucuccgccgucgcgcg

SEQ ID NO: 459089 - RNA, 19 nt, Artificial Sequence
  Description of Artificial Sequence: Synthetic oligonucleotide
gcgaccccaagucuggccu

SEQ ID NO: 459090 - RNA, 19 nt, Artificial Sequence
  Description of Artificial Sequence: Synthetic oligonucleotide
cgucuaggggacuggcgac

SEQ ID NO: 459091 - RNA, 19 nt, Artificial Sequence
  Description of Artificial Sequence: Synthetic oligonucleotide
acggaguggugagggccga

SEQ ID NO: 459092 - RNA, 19 nt, Artificial Sequence
  Description of Artificial Sequence: Synthetic oligonucleotide
ggugccgggagcugagcgu

SEQ ID NO: 459093 - RNA, 19 nt, Artificial Sequence
  Description of Artificial Sequence: Synthetic oligonucleotide
gcgaaugagcgggguggag

SEQ ID NO: 459094 - RNA, 19 nt, Artificial Sequence
  Description of Artificial Sequence: Synthetic oligonucleotide
cacguccgagacccaggga

SEQ ID NO: 459095 - RNA, 19 nt, Artificial Sequence
  Description of Artificial Sequence: Synthetic oligonucleotide
ccgcagcagugcacguugg

SEQ ID NO: 459096 - RNA, 19 nt, Artificial Sequence
  Description of Artificial Sequence: Synthetic oligonucleotide
gucccguggcaucucucgu

SEQ ID NO: 459097 - RNA, 19 nt, Artificial Sequence
  Description of Artificial Sequence: Synthetic oligonucleotide
ggagacagcuuacgaguuu

SEQ ID NO: 459098 - RNA, 19 nt, Artificial Sequence
  Description of Artificial Sequence: Synthetic oligonucleotide
ggcgaaugagcggggugga

SEQ ID NO: 459099 - RNA, 19 nt, Artificial Sequence
  Description of Artificial Sequence: Synthetic oligonucleotide
ggaccgcugcucgcgugcc

SEQ ID NO: 459100 - RNA, 19 nt, Artificial Sequence
  Description of Artificial Sequence: Synthetic oligonucleotide
cagugcacguuggaucagu

SEQ ID NO: 459101 - RNA, 19 nt, Artificial Sequence
  Description of Artificial Sequence: Synthetic oligonucleotide
gggaccuucuucucccauu

SEQ ID NO: 459102 - RNA, 19 nt, Artificial Sequence
  Description of Artificial Sequence: Synthetic oligonucleotide
ccagcggggcagguaaguc

SEQ ID NO: 459103 - RNA, 19 nt, Artificial Sequence
  Description of Artificial Sequence: Synthetic oligonucleotide
ggucggcugaugaggccca

SEQ ID NO: 459104 - RNA, 19 nt, Artificial Sequence
  Description of Artificial Sequence: Synthetic oligonucleotide
cgcgcgagucagcuccucc

SEQ ID NO: 459105 - RNA, 19 nt, Artificial Sequence
  Description of Artificial Sequence: Synthetic oligonucleotide
gccguggaggguuaccguu

SEQ ID NO: 459106 - RNA, 19 nt, Artificial Sequence
  Description of Artificial Sequence: Synthetic oligonucleotide
gcguucugugggcccagaa

SEQ ID NO: 459107 - RNA, 19 nt, Artificial Sequence
  Description of Artificial Sequence: Synthetic oligonucleotide
gugccgcgcgagucagcuc

SEQ ID NO: 459108 - RNA, 19 nt, Artificial Sequence
  Description of Artificial Sequence: Synthetic oligonucleotide
ccucgcggcucaguaguuc

SEQ ID NO: 459109 - RNA, 19 nt, Artificial Sequence
  Description of Artificial Sequence: Synthetic oligonucleotide
cugcucgcgugccgcgcga

SEQ ID NO: 459110 - RNA, 19 nt, Artificial Sequence
  Description of Artificial Sequence: Synthetic oligonucleotide
caccugaggucggccccuc

SEQ ID NO: 459111 - RNA, 19 nt, Artificial Sequence
  Description of Artificial Sequence: Synthetic oligonucleotide
ccuuggcccguaguucguc

SEQ ID NO: 459112 - RNA, 19 nt, Artificial Sequence
  Description of Artificial Sequence: Synthetic oligonucleotide
gggagacagcuuacgaguu

SEQ ID NO: 459113 - RNA, 19 nt, Artificial Sequence
  Description of Artificial Sequence: Synthetic oligonucleotide
cguucacggcucaggccuc

SEQ ID NO: 459114 - RNA, 19 nt, Artificial Sequence
  Description of Artificial Sequence: Synthetic oligonucleotide
cauggggccugagcaccua

SEQ ID NO: 459115 - RNA, 19 nt, Artificial Sequence
  Description of Artificial Sequence: Synthetic oligonucleotide
cguggaggguuaccguuaa

SEQ ID NO: 459116 - RNA, 19 nt, Artificial Sequence
  Description of Artificial Sequence: Synthetic oligonucleotide
aggucacguccgagaccca

SEQ ID NO: 459117 - RNA, 19 nt, Artificial Sequence
  Description of Artificial Sequence: Synthetic oligonucleotide
gcggugccccgcagcagug

SEQ ID NO: 459118 - RNA, 19 nt, Artificial Sequence
  Description of Artificial Sequence: Synthetic oligonucleotide
cggccguucucgguccacc

SEQ ID NO: 459119 - RNA, 19 nt, Artificial Sequence
  Description of Artificial Sequence: Synthetic oligonucleotide
cggcgacgcacgugcggcc

SEQ ID NO: 459120 - RNA, 19 nt, Artificial Sequence
  Description of Artificial Sequence: Synthetic oligonucleotide
gcucgcgcucaaacaccuc

SEQ ID NO: 459121 - RNA, 19 nt, Artificial Sequence
  Description of Artificial Sequence: Synthetic oligonucleotide
cgcgugccgcgcgagucag

SEQ ID NO: 459122 - RNA, 19 nt, Artificial Sequence
  Description of Artificial Sequence: Synthetic oligonucleotide
gcuaggccguggaggguua

SEQ ID NO: 459123 - RNA, 19 nt, Artificial Sequence
  Description of Artificial Sequence: Synthetic oligonucleotide
gcggccguucucgguccac

SEQ ID NO: 459124 - RNA, 19 nt, Artificial Sequence
  Description of Artificial Sequence: Synthetic oligonucleotide
ggugcccgucggggugcag

SEQ ID NO: 459125 - RNA, 19 nt, Artificial Sequence
  Description of Artificial Sequence: Synthetic oligonucleotide
ccgagggcucuuggcugac

SEQ ID NO: 459126 - RNA, 19 nt, Artificial Sequence
  Description of Artificial Sequence: Synthetic oligonucleotide
cacgggcaucggguguugu

SEQ ID NO: 459127 - RNA, 19 nt, Artificial Sequence
  Description of Artificial Sequence: Synthetic oligonucleotide
cgcugcucgcgugccgcgc

SEQ ID NO: 459128 - RNA, 19 nt, Artificial Sequence
  Description of Artificial Sequence: Synthetic oligonucleotide
gccacgggcaucggguguu

SEQ ID NO: 459129 - RNA, 19 nt, Artificial Sequence
  Description of Artificial Sequence: Synthetic oligonucleotide
cgugccgcgcgagucagcu

SEQ ID NO: 459130 - RNA, 19 nt, Artificial Sequence
  Description of Artificial Sequence: Synthetic oligonucleotide
gccugcggugaggguccug

SEQ ID NO: 459131 - RNA, 19 nt, Artificial Sequence
  Description of Artificial Sequence: Synthetic oligonucleotide
cccagcggggcagguaagu

SEQ ID NO: 459132 - RNA, 19 nt, Artificial Sequence
  Description of Artificial Sequence: Synthetic oligonucleotide
ccgggagcugagcgugaua

SEQ ID NO: 459133 - RNA, 19 nt, Artificial Sequence
  Description of Artificial Sequence: Synthetic oligonucleotide
cgucggggugcaggcugug

SEQ ID NO: 459134 - RNA, 19 nt, Artificial Sequence
  Description of Artificial Sequence: Synthetic oligonucleotide
cgcggcggcgacgcacgug

SEQ ID NO: 459135 - RNA, 19 nt, Artificial Sequence
  Description of Artificial Sequence: Synthetic oligonucleotide
gccgcgcgagucagcuccu

SEQ ID NO: 459136 - RNA, 19 nt, Artificial Sequence
  Description of Artificial Sequence: Synthetic oligonucleotide
gcccgucggggugcaggcu

SEQ ID NO: 459137 - RNA, 19 nt, Artificial Sequence
  Description of Artificial Sequence: Synthetic oligonucleotide
ccccgcagcagugcacguu

SEQ ID NO: 459138 - RNA, 19 nt, Artificial Sequence
  Description of Artificial Sequence: Synthetic oligonucleotide
ucagcgauaauuuucaugg

SEQ ID NO: 459139 - RNA, 19 nt, Artificial Sequence
  Description of Artificial Sequence: Synthetic oligonucleotide
aauguaaguauuucugacc

SEQ ID NO: 459140 - RNA, 19 nt, Artificial Sequence
  Description of Artificial Sequence: Synthetic oligonucleotide
acgaucauuagcuuuaugc

SEQ ID NO: 459141 - RNA, 19 nt, Artificial Sequence
  Description of Artificial Sequence: Synthetic oligonucleotide
aguauucuaacccaucugc

SEQ ID NO: 459142 - RNA, 19 nt, Artificial Sequence
  Description of Artificial Sequence: Synthetic oligonucleotide
ucaaauaggauuuuggugu

SEQ ID NO: 459143 - RNA, 19 nt, Artificial Sequence
  Description of Artificial Sequence: Synthetic oligonucleotide
auauauuggaaacaccagc

SEQ ID NO: 459144 - RNA, 19 nt, Artificial Sequence
  Description of Artificial Sequence: Synthetic oligonucleotide
auuaagugagcccaaaguc

SEQ ID NO: 459145 - RNA, 19 nt, Artificial Sequence
  Description of Artificial Sequence: Synthetic oligonucleotide
uuuacuaacucucuugaug

SEQ ID NO: 459146 - RNA, 19 nt, Artificial Sequence
  Description of Artificial Sequence: Synthetic oligonucleotide
aauacaagggcuuuauaga

SEQ ID NO: 459147 - RNA, 19 nt, Artificial Sequence
  Description of Artificial Sequence: Synthetic oligonucleotide
cuuauuuacuccaacaaug

SEQ ID NO: 459148 - RNA, 19 nt, Artificial Sequence
  Description of Artificial Sequence: Synthetic oligonucleotide
ugauguaucuuuuagucug

SEQ ID NO: 459149 - RNA, 19 nt, Artificial Sequence
  Description of Artificial Sequence: Synthetic oligonucleotide
aauucgagcacuuuucaca

SEQ ID NO: 459150 - RNA, 19 nt, Artificial Sequence
  Description of Artificial Sequence: Synthetic oligonucleotide
gauauugccaucuccagug

SEQ ID NO: 459151 - RNA, 19 nt, Artificial Sequence
  Description of Artificial Sequence: Synthetic oligonucleotide
aaaagacuaguauucuuag

SEQ ID NO: 459152 - RNA, 19 nt, Artificial Sequence
  Description of Artificial Sequence: Synthetic oligonucleotide
uguaugauccuccccaagg

SEQ ID NO: 459153 - RNA, 19 nt, Artificial Sequence
  Description of Artificial Sequence: Synthetic oligonucleotide
aauuuacuaacucucuuga

SEQ ID NO: 459154 - RNA, 19 nt, Artificial Sequence
  Description of Artificial Sequence: Synthetic oligonucleotide
augacaaggauaucuggcc

SEQ ID NO: 459155 - RNA, 19 nt, Artificial Sequence
  Description of Artificial Sequence: Synthetic oligonucleotide
aacacuucucaauaucauc

SEQ ID NO: 459156 - RNA, 19 nt, Artificial Sequence
  Description of Artificial Sequence: Synthetic oligonucleotide
uuauagagaucccuucugg

SEQ ID NO: 459157 - RNA, 19 nt, Artificial Sequence
  Description of Artificial Sequence: Synthetic oligonucleotide
ugaccauaaauucuuuuag

SEQ ID NO: 459158 - RNA, 19 nt, Artificial Sequence
  Description of Artificial Sequence: Synthetic oligonucleotide
uaggauaucguucugaauu

SEQ ID NO: 459159 - RNA, 19 nt, Artificial Sequence
  Description of Artificial Sequence: Synthetic oligonucleotide
uuacuauaaauguugccag

SEQ ID NO: 459160 - RNA, 19 nt, Artificial Sequence
  Description of Artificial Sequence: Synthetic oligonucleotide
uauagguauacaugguggg

SEQ ID NO: 459161 - RNA, 19 nt, Artificial Sequence
  Description of Artificial Sequence: Synthetic oligonucleotide
uauuaagugagcccaaagu

SEQ ID NO: 459162 - RNA, 19 nt, Artificial Sequence
  Description of Artificial Sequence: Synthetic oligonucleotide
auaugguacccacuaaucg

SEQ ID NO: 459163 - RNA, 19 nt, Artificial Sequence
  Description of Artificial Sequence: Synthetic oligonucleotide
gaauuuacuaacucucuug

SEQ ID NO: 459164 - RNA, 19 nt, Artificial Sequence
  Description of Artificial Sequence: Synthetic oligonucleotide
aguuacuauaaauguugcc

SEQ ID NO: 459165 - RNA, 19 nt, Artificial Sequence
  Description of Artificial Sequence: Synthetic oligonucleotide
uuauuuacuccaacaauga

SEQ ID NO: 459166 - RNA, 19 nt, Artificial Sequence
  Description of Artificial Sequence: Synthetic oligonucleotide
uucaaugcgaagcuuaggu

SEQ ID NO: 459167 - RNA, 19 nt, Artificial Sequence
  Description of Artificial Sequence: Synthetic oligonucleotide
uguguugccaggucaaagg

SEQ ID NO: 459168 - RNA, 19 nt, Artificial Sequence
  Description of Artificial Sequence: Synthetic oligonucleotide
uuuauagagaucccuucug

SEQ ID NO: 459169 - RNA, 19 nt, Artificial Sequence
  Description of Artificial Sequence: Synthetic oligonucleotide
uuucuauuaagugagccca

SEQ ID NO: 459170 - RNA, 19 nt, Artificial Sequence
  Description of Artificial Sequence: Synthetic oligonucleotide
gaccauaaauucuuuuagg

SEQ ID NO: 459171 - RNA, 19 nt, Artificial Sequence
  Description of Artificial Sequence: Synthetic oligonucleotide
ggucuauagguauacaugg

SEQ ID NO: 459172 - RNA, 19 nt, Artificial Sequence
  Description of Artificial Sequence: Synthetic oligonucleotide
cuaaagauccagauguuac

SEQ ID NO: 459173 - RNA, 19 nt, Artificial Sequence
  Description of Artificial Sequence: Synthetic oligonucleotide
auacaagggcuuuauagag

SEQ ID NO: 459174 - RNA, 19 nt, Artificial Sequence
  Description of Artificial Sequence: Synthetic oligonucleotide
auguaaguauuucugacca

SEQ ID NO: 459175 - RNA, 19 nt, Artificial Sequence
  Description of Artificial Sequence: Synthetic oligonucleotide
uucgcuauuuccauguaga

SEQ ID NO: 459176 - RNA, 19 nt, Artificial Sequence
  Description of Artificial Sequence: Synthetic oligonucleotide
accauaaauucuuuuagga

SEQ ID NO: 459177 - RNA, 19 nt, Artificial Sequence
  Description of Artificial Sequence: Synthetic oligonucleotide
ugugaguccagccuggagu

SEQ ID NO: 459178 - RNA, 19 nt, Artificial Sequence
  Description of Artificial Sequence: Synthetic oligonucleotide
uaugguacccacuaaucga

SEQ ID NO: 459179 - RNA, 19 nt, Artificial Sequence
  Description of Artificial Sequence: Synthetic oligonucleotide
ugaauugugcccgugagcu

SEQ ID NO: 459180 - RNA, 19 nt, Artificial Sequence
  Description of Artificial Sequence: Synthetic oligonucleotide
uacuuauuuacuccaacaa

SEQ ID NO: 459181 - RNA, 19 nt, Artificial Sequence
  Description of Artificial Sequence: Synthetic oligonucleotide
aucguucugaauugugccc

SEQ ID NO: 459182 - RNA, 19 nt, Artificial Sequence
  Description of Artificial Sequence: Synthetic oligonucleotide
uaucguucugaauugugcc

SEQ ID NO: 459183 - RNA, 19 nt, Artificial Sequence
  Description of Artificial Sequence: Synthetic oligonucleotide
uguguuucgggcaauucga

SEQ ID NO: 459184 - RNA, 19 nt, Artificial Sequence
  Description of Artificial Sequence: Synthetic oligonucleotide
uauuggaaacaccagcuuc

SEQ ID NO: 459185 - RNA, 19 nt, Artificial Sequence
  Description of Artificial Sequence: Synthetic oligonucleotide
uacccacuaaucgaaaugg

SEQ ID NO: 459186 - RNA, 19 nt, Artificial Sequence
  Description of Artificial Sequence: Synthetic oligonucleotide
auuugugagggauuccauc

SEQ ID NO: 459187 - RNA, 19 nt, Artificial Sequence
  Description of Artificial Sequence: Synthetic oligonucleotide
aauauuguccuuauagaau

SEQ ID NO: 459188 - RNA, 19 nt, Artificial Sequence
  Description of Artificial Sequence: Synthetic oligonucleotide
agaucagcaaauccuguag

SEQ ID NO: 459189 - RNA, 19 nt, Artificial Sequence
  Description of Artificial Sequence: Synthetic oligonucleotide
ugggauacgguccacgugu

SEQ ID NO: 459190 - RNA, 19 nt, Artificial Sequence
  Description of Artificial Sequence: Synthetic oligonucleotide
aauccugugguggaaucac

SEQ ID NO: 459191 - RNA, 19 nt, Artificial Sequence
  Description of Artificial Sequence: Synthetic oligonucleotide
ucugcaguauucuaaccca

SEQ ID NO: 459192 - RNA, 19 nt, Artificial Sequence
  Description of Artificial Sequence: Synthetic oligonucleotide
gaugguauaggccagcucu

SEQ ID NO: 459193 - RNA, 19 nt, Artificial Sequence
  Description of Artificial Sequence: Synthetic oligonucleotide
uguccgaaucguaaccacg

SEQ ID NO: 459194 - RNA, 19 nt, Artificial Sequence
  Description of Artificial Sequence: Synthetic oligonucleotide
auucgagcacuuuucacag

SEQ ID NO: 459195 - RNA, 19 nt, Artificial Sequence
  Description of Artificial Sequence: Synthetic oligonucleotide
gaagcuuagguauuccuuc

SEQ ID NO: 459196 - RNA, 19 nt, Artificial Sequence
  Description of Artificial Sequence: Synthetic oligonucleotide
ucuucaaugcgaagcuuag

SEQ ID NO: 459197 - RNA, 19 nt, Artificial Sequence
  Description of Artificial Sequence: Synthetic oligonucleotide
aacuccugccgauaugcuc

SEQ ID NO: 459198 - RNA, 19 nt, Artificial Sequence
  Description of Artificial Sequence: Synthetic oligonucleotide
uauucuaacccaucugcga

SEQ ID NO: 459199 - RNA, 19 nt, Artificial Sequence
  Description of Artificial Sequence: Synthetic oligonucleotide
aguaggcaagcccagagcu

SEQ ID NO: 459200 - RNA, 19 nt, Artificial Sequence
  Description of Artificial Sequence: Synthetic oligonucleotide
aguauugucaauggccagg

SEQ ID NO: 459201 - RNA, 19 nt, Artificial Sequence
  Description of Artificial Sequence: Synthetic oligonucleotide
ucauaacuaaagauccaga

SEQ ID NO: 459202 - RNA, 19 nt, Artificial Sequence
  Description of Artificial Sequence: Synthetic oligonucleotide
aaucguaaccacgaugugu

SEQ ID NO: 459203 - RNA, 19 nt, Artificial Sequence
  Description of Artificial Sequence: Synthetic oligonucleotide
aaagacuaguauucuuagu

SEQ ID NO: 459204 - RNA, 19 nt, Artificial Sequence
  Description of Artificial Sequence: Synthetic oligonucleotide
agggccuauauccacauca

SEQ ID NO: 459205 - RNA, 19 nt, Artificial Sequence
  Description of Artificial Sequence: Synthetic oligonucleotide
acuccugccgauaugcucc

SEQ ID NO: 459206 - RNA, 19 nt, Artificial Sequence
  Description of Artificial Sequence: Synthetic oligonucleotide
ucuugcacgggcugcaucc

SEQ ID NO: 459207 - RNA, 19 nt, Artificial Sequence
  Description of Artificial Sequence: Synthetic oligonucleotide
uuacauagauugcuguuuc

SEQ ID NO: 459208 - RNA, 19 nt, Artificial Sequence
  Description of Artificial Sequence: Synthetic oligonucleotide
aaaccaagaucagcaaauc

SEQ ID NO: 459209 - RNA, 19 nt, Artificial Sequence
  Description of Artificial Sequence: Synthetic oligonucleotide
ucgaggguuguccgaaucg

SEQ ID NO: 459210 - RNA, 19 nt, Artificial Sequence
  Description of Artificial Sequence: Synthetic oligonucleotide
guguguuucgggcaauucg

SEQ ID NO: 459211 - RNA, 19 nt, Artificial Sequence
  Description of Artificial Sequence: Synthetic oligonucleotide
agauugcuguuucucugcc

SEQ ID NO: 459212 - RNA, 19 nt, Artificial Sequence
  Description of Artificial Sequence: Synthetic oligonucleotide
agugcggacaauguuauug

SEQ ID NO: 459213 - RNA, 19 nt, Artificial Sequence
  Description of Artificial Sequence: Synthetic oligonucleotide
acuuauuuacuccaacaau

SEQ ID NO: 459214 - RNA, 19 nt, Artificial Sequence
  Description of Artificial Sequence: Synthetic oligonucleotide
uggguaagugccucaagag

SEQ ID NO: 459215 - RNA, 19 nt, Artificial Sequence
  Description of Artificial Sequence: Synthetic oligonucleotide
gucauaacuaaagauccag

SEQ ID NO: 459216 - RNA, 19 nt, Artificial Sequence
  Description of Artificial Sequence: Synthetic oligonucleotide
gauguuacauagauugcug

SEQ ID NO: 459217 - RNA, 19 nt, Artificial Sequence
  Description of Artificial Sequence: Synthetic oligonucleotide
ugacggaugguccaggguc

SEQ ID NO: 459218 - RNA, 19 nt, Artificial Sequence
  Description of Artificial Sequence: Synthetic oligonucleotide
caagauauugccaucucca

SEQ ID NO: 459219 - RNA, 19 nt, Artificial Sequence
  Description of Artificial Sequence: Synthetic oligonucleotide
uguaugcaaagacuguguc

SEQ ID NO: 459220 - RNA, 19 nt, Artificial Sequence
  Description of Artificial Sequence: Synthetic oligonucleotide
ugugcucgcagaagaagag

SEQ ID NO: 459221 - RNA, 19 nt, Artificial Sequence
  Description of Artificial Sequence: Synthetic oligonucleotide
uggaaaaugucagcgauaa

SEQ ID NO: 459222 - RNA, 19 nt, Artificial Sequence
  Description of Artificial Sequence: Synthetic oligonucleotide
agacuaguauucuuagucu

SEQ ID NO: 459223 - RNA, 19 nt, Artificial Sequence
  Description of Artificial Sequence: Synthetic oligonucleotide
aguaucaauagcaacucca

SEQ ID NO: 459224 - RNA, 19 nt, Artificial Sequence
  Description of Artificial Sequence: Synthetic oligonucleotide
caagagccaagauauugcc

SEQ ID NO: 459225 - RNA, 19 nt, Artificial Sequence
  Description of Artificial Sequence: Synthetic oligonucleotide
aaucgaaauggaauuaaau

SEQ ID NO: 459226 - RNA, 19 nt, Artificial Sequence
  Description of Artificial Sequence: Synthetic oligonucleotide
ucguucugaauugugcccg

SEQ ID NO: 459227 - RNA, 19 nt, Artificial Sequence
  Description of Artificial Sequence: Synthetic oligonucleotide
aggauaucguucugaauug

SEQ ID NO: 459228 - RNA, 19 nt, Artificial Sequence
  Description of Artificial Sequence: Synthetic oligonucleotide
cugacgucuggcaaugugc

SEQ ID NO: 459229 - RNA, 19 nt, Artificial Sequence
  Description of Artificial Sequence: Synthetic oligonucleotide
auaauccugugguggaauc

SEQ ID NO: 459230 - RNA, 19 nt, Artificial Sequence
  Description of Artificial Sequence: Synthetic oligonucleotide
ugcuccacucaccauacga

SEQ ID NO: 459231 - RNA, 19 nt, Artificial Sequence
  Description of Artificial Sequence: Synthetic oligonucleotide
uagauugcuguuucucugc

SEQ ID NO: 459232 - RNA, 19 nt, Artificial Sequence
  Description of Artificial Sequence: Synthetic oligonucleotide
guuucgggcaauucgagca

SEQ ID NO: 459233 - RNA, 19 nt, Artificial Sequence
  Description of Artificial Sequence: Synthetic oligonucleotide
ugcuacaagaagacggggu

SEQ ID NO: 459234 - RNA, 19 nt, Artificial Sequence
  Description of Artificial Sequence: Synthetic oligonucleotide
acgaacucgaggguugucc

SEQ ID NO: 459235 - RNA, 19 nt, Artificial Sequence
  Description of Artificial Sequence: Synthetic oligonucleotide
gacuaguauucuuagucuc

SEQ ID NO: 459236 - RNA, 19 nt, Artificial Sequence
  Description of Artificial Sequence: Synthetic oligonucleotide
uaaucgaaauggaauuaaa

SEQ ID NO: 459237 - RNA, 19 nt, Artificial Sequence
  Description of Artificial Sequence: Synthetic oligonucleotide
auggcuucgaucgcagugc

SEQ ID NO: 459238 - RNA, 19 nt, Artificial Sequence
  Description of Artificial Sequence: Synthetic oligonucleotide
uauuguagggauccugcuc

SEQ ID NO: 459239 - RNA, 19 nt, Artificial Sequence
  Description of Artificial Sequence: Synthetic oligonucleotide
aauugugaguccagccugg

SEQ ID NO: 459240 - RNA, 19 nt, Artificial Sequence
  Description of Artificial Sequence: Synthetic oligonucleotide
uacauggugggauacgguc

SEQ ID NO: 459241 - RNA, 19 nt, Artificial Sequence
  Description of Artificial Sequence: Synthetic oligonucleotide
ggaauuaaauuuuggcaug

SEQ ID NO: 459242 - RNA, 19 nt, Artificial Sequence
  Description of Artificial Sequence: Synthetic oligonucleotide
guaaccacgauguguugcc

SEQ ID NO: 459243 - RNA, 19 nt, Artificial Sequence
  Description of Artificial Sequence: Synthetic oligonucleotide
uggggugcgccauauuagg

SEQ ID NO: 459244 - RNA, 19 nt, Artificial Sequence
  Description of Artificial Sequence: Synthetic oligonucleotide
aucagcaaauccuguagca

SEQ ID NO: 459245 - RNA, 19 nt, Artificial Sequence
  Description of Artificial Sequence: Synthetic oligonucleotide
cauggucauggaaacagac

SEQ ID NO: 459246 - RNA, 19 nt, Artificial Sequence
  Description of Artificial Sequence: Synthetic oligonucleotide
cuauuaagugagcccaaag

SEQ ID NO: 459247 - RNA, 19 nt, Artificial Sequence
  Description of Artificial Sequence: Synthetic oligonucleotide
acgucuggcaaugugcucg

SEQ ID NO: 459248 - RNA, 19 nt, Artificial Sequence
  Description of Artificial Sequence: Synthetic oligonucleotide
aagcuuagguauuccuuca

SEQ ID NO: 459249 - RNA, 19 nt, Artificial Sequence
  Description of Artificial Sequence: Synthetic oligonucleotide
auucuaacccaucugcgau

SEQ ID NO: 459250 - RNA, 19 nt, Artificial Sequence
  Description of Artificial Sequence: Synthetic oligonucleotide
agcgauaauuuucauggau

SEQ ID NO: 459251 - RNA, 19 nt, Artificial Sequence
  Description of Artificial Sequence: Synthetic oligonucleotide
cacaugacaaggauaucug

SEQ ID NO: 459252 - RNA, 19 nt, Artificial Sequence
  Description of Artificial Sequence: Synthetic oligonucleotide
auagcaacuccagccauuc

SEQ ID NO: 459253 - RNA, 19 nt, Artificial Sequence
  Description of Artificial Sequence: Synthetic oligonucleotide
auguuacauagauugcugu

SEQ ID NO: 459254 - RNA, 19 nt, Artificial Sequence
  Description of Artificial Sequence: Synthetic oligonucleotide
gaugccagauucuuccuga

SEQ ID NO: 459255 - RNA, 19 nt, Artificial Sequence
  Description of Artificial Sequence: Synthetic oligonucleotide
ucgagcacuuuucacagua

SEQ ID NO: 459256 - RNA, 19 nt, Artificial Sequence
  Description of Artificial Sequence: Synthetic oligonucleotide
uuagguauuccuucagcua

SEQ ID NO: 459257 - RNA, 19 nt, Artificial Sequence
  Description of Artificial Sequence: Synthetic oligonucleotide
caauugugaguccagccug

SEQ ID NO: 459258 - RNA, 19 nt, Artificial Sequence
  Description of Artificial Sequence: Synthetic oligonucleotide
guacccacuaaucgaaaug

SEQ ID NO: 459259 - RNA, 19 nt, Artificial Sequence
  Description of Artificial Sequence: Synthetic oligonucleotide
uucugaauugugcccguga

SEQ ID NO: 459260 - RNA, 19 nt, Artificial Sequence
  Description of Artificial Sequence: Synthetic oligonucleotide
ugacgucuggcaaugugcu

SEQ ID NO: 459261 - RNA, 19 nt, Artificial Sequence
  Description of Artificial Sequence: Synthetic oligonucleotide
uguuucgggcaauucgagc

SEQ ID NO: 459262 - RNA, 19 nt, Artificial Sequence
  Description of Artificial Sequence: Synthetic oligonucleotide
ugcucgcagaagaagagau

SEQ ID NO: 459263 - RNA, 19 nt, Artificial Sequence
  Description of Artificial Sequence: Synthetic oligonucleotide
aaaagagggccuauaucca

SEQ ID NO: 459264 - RNA, 19 nt, Artificial Sequence
  Description of Artificial Sequence: Synthetic oligonucleotide
uccaacuguacaucuugca

SEQ ID NO: 459265 - RNA, 19 nt, Artificial Sequence
  Description of Artificial Sequence: Synthetic oligonucleotide
uccauaguaucugcccugg

SEQ ID NO: 459266 - RNA, 19 nt, Artificial Sequence
  Description of Artificial Sequence: Synthetic oligonucleotide
guauucuuagucucucaac

SEQ ID NO: 459267 - RNA, 19 nt, Artificial Sequence
  Description of Artificial Sequence: Synthetic oligonucleotide
agggcaguaaguucuuuga

SEQ ID NO: 459268 - RNA, 19 nt, Artificial Sequence
  Description of Artificial Sequence: Synthetic oligonucleotide
caucauguaugauccuccc

SEQ ID NO: 459269 - RNA, 19 nt, Artificial Sequence
  Description of Artificial Sequence: Synthetic oligonucleotide
aaugaugauuuguguguuu

SEQ ID NO: 459270 - RNA, 19 nt, Artificial Sequence
  Description of Artificial Sequence: Synthetic oligonucleotide
cuuauagaauuuuauugcu

SEQ ID NO: 459271 - RNA, 19 nt, Artificial Sequence
  Description of Artificial Sequence: Synthetic oligonucleotide
cuucgcuauuuccauguag

SEQ ID NO: 459272 - RNA, 19 nt, Artificial Sequence
  Description of Artificial Sequence: Synthetic oligonucleotide
ugaccagccuuaauauugu

SEQ ID NO: 459273 - RNA, 19 nt, Artificial Sequence
  Description of Artificial Sequence: Synthetic oligonucleotide
ucuuugggcacaccuugcu

SEQ ID NO: 459274 - RNA, 19 nt, Artificial Sequence
  Description of Artificial Sequence: Synthetic oligonucleotide
cauacgaucauuagcuuua

SEQ ID NO: 459275 - RNA, 19 nt, Artificial Sequence
  Description of Artificial Sequence: Synthetic oligonucleotide
uauuagguccucuggguuu

SEQ ID NO: 459276 - RNA, 19 nt, Artificial Sequence
  Description of Artificial Sequence: Synthetic oligonucleotide
caccauacgaucauuagcu

SEQ ID NO: 459277 - RNA, 19 nt, Artificial Sequence
  Description of Artificial Sequence: Synthetic oligonucleotide
acugacggaugguccaggg

SEQ ID NO: 459278 - RNA, 19 nt, Artificial Sequence
  Description of Artificial Sequence: Synthetic oligonucleotide
aaacuugaucccugcugga

SEQ ID NO: 459279 - RNA, 19 nt, Artificial Sequence
  Description of Artificial Sequence: Synthetic oligonucleotide
gccguuuccaucuggaggc

SEQ ID NO: 459280 - RNA, 19 nt, Artificial Sequence
  Description of Artificial Sequence: Synthetic oligonucleotide
uagguauacauggugggau

SEQ ID NO: 459281 - RNA, 19 nt, Artificial Sequence
  Description of Artificial Sequence: Synthetic oligonucleotide
ucaaugcgaagcuuaggua

SEQ ID NO: 459282 - RNA, 19 nt, Artificial Sequence
  Description of Artificial Sequence: Synthetic oligonucleotide
caauucgagcacuuuucac

SEQ ID NO: 459283 - RNA, 19 nt, Artificial Sequence
  Description of Artificial Sequence: Synthetic oligonucleotide
aaggguuuugugaccagca

SEQ ID NO: 459284 - RNA, 19 nt, Artificial Sequence
  Description of Artificial Sequence: Synthetic oligonucleotide
gucagugaccacccugacg

SEQ ID NO: 459285 - RNA, 19 nt, Artificial Sequence
  Description of Artificial Sequence: Synthetic oligonucleotide
ucuuacgcacugaaguauu

SEQ ID NO: 459286 - RNA, 19 nt, Artificial Sequence
  Description of Artificial Sequence: Synthetic oligonucleotide
auacgguccacgugugaag

SEQ ID NO: 459287 - RNA, 19 nt, Artificial Sequence
  Description of Artificial Sequence: Synthetic oligonucleotide
gcagcaagcgugcugacgc

SEQ ID NO: 459288 - RNA, 19 nt, Artificial Sequence
  Description of Artificial Sequence: Synthetic oligonucleotide
ccauauuagguccucuggg

SEQ ID NO: 459289 - RNA, 19 nt, Artificial Sequence
  Description of Artificial Sequence: Synthetic oligonucleotide
ucgcagaagaagagauuug

SEQ ID NO: 459290 - RNA, 19 nt, Artificial Sequence
  Description of Artificial Sequence: Synthetic oligonucleotide
auuuacuaacucucuugau

SEQ ID NO: 459291 - RNA, 19 nt, Artificial Sequence
  Description of Artificial Sequence: Synthetic oligonucleotide
uacuaacucucuugauggc

SEQ ID NO: 459292 - RNA, 19 nt, Artificial Sequence
  Description of Artificial Sequence: Synthetic oligonucleotide
auauuagguccucuggguu

SEQ ID NO: 459293 - RNA, 19 nt, Artificial Sequence
  Description of Artificial Sequence: Synthetic oligonucleotide
uuucgggcaauucgagcac

SEQ ID NO: 459294 - RNA, 19 nt, Artificial Sequence
  Description of Artificial Sequence: Synthetic oligonucleotide
cagcgcauucuucaaugcg

SEQ ID NO: 459295 - RNA, 19 nt, Artificial Sequence
  Description of Artificial Sequence: Synthetic oligonucleotide
caauguuauuguagggauc

SEQ ID NO: 459296 - RNA, 19 nt, Artificial Sequence
  Description of Artificial Sequence: Synthetic oligonucleotide
caucauuugugagggauuc

SEQ ID NO: 459297 - RNA, 19 nt, Artificial Sequence
  Description of Artificial Sequence: Synthetic oligonucleotide
uccugcauaugguacccac

SEQ ID NO: 459298 - RNA, 19 nt, Artificial Sequence
  Description of Artificial Sequence: Synthetic oligonucleotide
augaauuuacuaacucucu

SEQ ID NO: 459299 - RNA, 19 nt, Artificial Sequence
  Description of Artificial Sequence: Synthetic oligonucleotide
gccauauuagguccucugg

SEQ ID NO: 459300 - RNA, 19 nt, Artificial Sequence
  Description of Artificial Sequence: Synthetic oligonucleotide
uggcuucgaucgcagugcg

SEQ ID NO: 459301 - RNA, 19 nt, Artificial Sequence
  Description of Artificial Sequence: Synthetic oligonucleotide
uugggaauccgggugccag

SEQ ID NO: 459302 - RNA, 19 nt, Artificial Sequence
  Description of Artificial Sequence: Synthetic oligonucleotide
acuaguauucuuagucucu

SEQ ID NO: 459303 - RNA, 19 nt, Artificial Sequence
  Description of Artificial Sequence: Synthetic oligonucleotide
acuaaagccugcauacuga

SEQ ID NO: 459304 - RNA, 19 nt, Artificial Sequence
  Description of Artificial Sequence: Synthetic oligonucleotide
caguauucuaacccaucug

SEQ ID NO: 459305 - RNA, 19 nt, Artificial Sequence
  Description of Artificial Sequence: Synthetic oligonucleotide
uucuauuaagugagcccaa

SEQ ID NO: 459306 - RNA, 19 nt, Artificial Sequence
  Description of Artificial Sequence: Synthetic oligonucleotide
ggugcgccauauuaggucc

SEQ ID NO: 459307 - RNA, 19 nt, Artificial Sequence
  Description of Artificial Sequence: Synthetic oligonucleotide
guaugauccuccccaagga

SEQ ID NO: 459308 - RNA, 19 nt, Artificial Sequence
  Description of Artificial Sequence: Synthetic oligonucleotide
gaaucguaaccacgaugug

SEQ ID NO: 459309 - RNA, 19 nt, Artificial Sequence
  Description of Artificial Sequence: Synthetic oligonucleotide
cuggggugcgccauauuag

SEQ ID NO: 459310 - RNA, 19 nt, Artificial Sequence
  Description of Artificial Sequence: Synthetic oligonucleotide
gauugggauaacugcucca

SEQ ID NO: 459311 - RNA, 19 nt, Artificial Sequence
  Description of Artificial Sequence: Synthetic oligonucleotide
uuaggauaucguucugaau

SEQ ID NO: 459312 - RNA, 19 nt, Artificial Sequence
  Description of Artificial Sequence: Synthetic oligonucleotide
uucuuacgcacugaaguau

SEQ ID NO: 459313 - RNA, 19 nt, Artificial Sequence
  Description of Artificial Sequence: Synthetic oligonucleotide
aucacgccuccacacauga

SEQ ID NO: 459314 - RNA, 19 nt, Artificial Sequence
  Description of Artificial Sequence: Synthetic oligonucleotide
uuggccauuccacccauuu

SEQ ID NO: 459315 - RNA, 19 nt, Artificial Sequence
  Description of Artificial Sequence: Synthetic oligonucleotide
ucuauuaagugagcccaaa

SEQ ID NO: 459316 - RNA, 19 nt, Artificial Sequence
  Description of Artificial Sequence: Synthetic oligonucleotide
auagguauacaugguggga

SEQ ID NO: 459317 - RNA, 19 nt, Artificial Sequence
  Description of Artificial Sequence: Synthetic oligonucleotide
ugcauacugacggaugguc

SEQ ID NO: 459318 - RNA, 19 nt, Artificial Sequence
  Description of Artificial Sequence: Synthetic oligonucleotide
gguuguccgaaucguaacc

SEQ ID NO: 459319 - RNA, 19 nt, Artificial Sequence
  Description of Artificial Sequence: Synthetic oligonucleotide
uauuguccuuauagaauuu

SEQ ID NO: 459320 - RNA, 19 nt, Artificial Sequence
  Description of Artificial Sequence: Synthetic oligonucleotide
uuguccgaaucguaaccac

SEQ ID NO: 459321 - RNA, 19 nt, Artificial Sequence
  Description of Artificial Sequence: Synthetic oligonucleotide
caucaagcacuugaacggc

SEQ ID NO: 459322 - RNA, 19 nt, Artificial Sequence
  Description of Artificial Sequence: Synthetic oligonucleotide
cucuaucauggccaucuug

SEQ ID NO: 459323 - RNA, 19 nt, Artificial Sequence
  Description of Artificial Sequence: Synthetic oligonucleotide
agucagugaccacccugac

SEQ ID NO: 459324 - RNA, 19 nt, Artificial Sequence
  Description of Artificial Sequence: Synthetic oligonucleotide
guugccaggauugggauaa

SEQ ID NO: 459325 - RNA, 19 nt, Artificial Sequence
  Description of Artificial Sequence: Synthetic oligonucleotide
agcaagcgugcugacgccc

SEQ ID NO: 459326 - RNA, 19 nt, Artificial Sequence
  Description of Artificial Sequence: Synthetic oligonucleotide
uaggcaagcccagagcuuc

SEQ ID NO: 459327 - RNA, 19 nt, Artificial Sequence
  Description of Artificial Sequence: Synthetic oligonucleotide
aucguaaccacgauguguu

SEQ ID NO: 459328 - RNA, 19 nt, Artificial Sequence
  Description of Artificial Sequence: Synthetic oligonucleotide
ugcauaugguacccacuaa

SEQ ID NO: 459329 - RNA, 19 nt, Artificial Sequence
  Description of Artificial Sequence: Synthetic oligonucleotide
aagugccucaagagaccgc

SEQ ID NO: 459330 - RNA, 19 nt, Artificial Sequence
  Description of Artificial Sequence: Synthetic oligonucleotide
cauaguaucugcccuggaa

SEQ ID NO: 459331 - RNA, 19 nt, Artificial Sequence
  Description of Artificial Sequence: Synthetic oligonucleotide
guaagugccucaagagacc

SEQ ID NO: 459332 - RNA, 19 nt, Artificial Sequence
  Description of Artificial Sequence: Synthetic oligonucleotide
gauacgguccacgugugaa

SEQ ID NO: 459333 - RNA, 19 nt, Artificial Sequence
  Description of Artificial Sequence: Synthetic oligonucleotide
agcgcauucuucaaugcga

SEQ ID NO: 459334 - RNA, 19 nt, Artificial Sequence
  Description of Artificial Sequence: Synthetic oligonucleotide
caacggacaaucccugcug

SEQ ID NO: 459335 - RNA, 19 nt, Artificial Sequence
  Description of Artificial Sequence: Synthetic oligonucleotide
gcuucuuacgcacugaagu

SEQ ID NO: 459336 - RNA, 19 nt, Artificial Sequence
  Description of Artificial Sequence: Synthetic oligonucleotide
acuaaucgaaauggaauua

SEQ ID NO: 459337 - RNA, 19 nt, Artificial Sequence
  Description of Artificial Sequence: Synthetic oligonucleotide
gggucuauagguauacaug

SEQ ID NO: 459338 - RNA, 19 nt, Artificial Sequence
  Description of Artificial Sequence: Synthetic oligonucleotide
caaccuuggugcaaauuca

SEQ ID NO: 459339 - RNA, 19 nt, Artificial Sequence
  Description of Artificial Sequence: Synthetic oligonucleotide
cacgccuccacacaugaca

SEQ ID NO: 459340 - RNA, 19 nt, Artificial Sequence
  Description of Artificial Sequence: Synthetic oligonucleotide
ucgaucgcagugcggacaa

SEQ ID NO: 459341 - RNA, 19 nt, Artificial Sequence
  Description of Artificial Sequence: Synthetic oligonucleotide
ggauugggauaacugcucc

SEQ ID NO: 459342 - RNA, 19 nt, Artificial Sequence
  Description of Artificial Sequence: Synthetic oligonucleotide
ccaagauauugccaucucc

SEQ ID NO: 459343 - RNA, 19 nt, Artificial Sequence
  Description of Artificial Sequence: Synthetic oligonucleotide
ucgcuauuuccauguagaa

SEQ ID NO: 459344 - RNA, 19 nt, Artificial Sequence
  Description of Artificial Sequence: Synthetic oligonucleotide
caguaggcaagcccagagc

SEQ ID NO: 459345 - RNA, 19 nt, Artificial Sequence
  Description of Artificial Sequence: Synthetic oligonucleotide
aaugcgaagcuuagguauu

SEQ ID NO: 459346 - RNA, 19 nt, Artificial Sequence
  Description of Artificial Sequence: Synthetic oligonucleotide
cuugaacggcagcuuuggg

SEQ ID NO: 459347 - RNA, 19 nt, Artificial Sequence
  Description of Artificial Sequence: Synthetic oligonucleotide
cuaaucgaaauggaauuaa

SEQ ID NO: 459348 - RNA, 19 nt, Artificial Sequence
  Description of Artificial Sequence: Synthetic oligonucleotide
agcgugcugacgcccacag

SEQ ID NO: 459349 - RNA, 19 nt, Artificial Sequence
  Description of Artificial Sequence: Synthetic oligonucleotide
cuaucauggccaucuuguc

SEQ ID NO: 459350 - RNA, 19 nt, Artificial Sequence
  Description of Artificial Sequence: Synthetic oligonucleotide
gcuacaagaagacgggguc

SEQ ID NO: 459351 - RNA, 19 nt, Artificial Sequence
  Description of Artificial Sequence: Synthetic oligonucleotide
ugccgauaugcuccacuca

SEQ ID NO: 459352 - RNA, 19 nt, Artificial Sequence
  Description of Artificial Sequence: Synthetic oligonucleotide
aauccgggugccaggacca

SEQ ID NO: 459353 - RNA, 19 nt, Artificial Sequence
  Description of Artificial Sequence: Synthetic oligonucleotide
cuuuauagagaucccuucu

SEQ ID NO: 459354 - RNA, 19 nt, Artificial Sequence
  Description of Artificial Sequence: Synthetic oligonucleotide
caaugcgaagcuuagguau

SEQ ID NO: 459355 - RNA, 19 nt, Artificial Sequence
  Description of Artificial Sequence: Synthetic oligonucleotide
gagccguuuccaucuggag

SEQ ID NO: 459356 - RNA, 19 nt, Artificial Sequence
  Description of Artificial Sequence: Synthetic oligonucleotide
gcuuccugcauaugguacc

SEQ ID NO: 459357 - RNA, 19 nt, Artificial Sequence
  Description of Artificial Sequence: Synthetic oligonucleotide
gcaagagccaagauauugc

SEQ ID NO: 459358 - RNA, 19 nt, Artificial Sequence
  Description of Artificial Sequence: Synthetic oligonucleotide
ggcagcgcauucuucaaug

SEQ ID NO: 459359 - RNA, 19 nt, Artificial Sequence
  Description of Artificial Sequence: Synthetic oligonucleotide
uuguagggauccugcucag

SEQ ID NO: 459360 - RNA, 19 nt, Artificial Sequence
  Description of Artificial Sequence: Synthetic oligonucleotide
uucgaucgcagugcggaca

SEQ ID NO: 459361 - RNA, 19 nt, Artificial Sequence
  Description of Artificial Sequence: Synthetic oligonucleotide
uggugggauacgguccacg

SEQ ID NO: 459362 - RNA, 19 nt, Artificial Sequence
  Description of Artificial Sequence: Synthetic oligonucleotide
ugagggauuccaucaugua

SEQ ID NO: 459363 - RNA, 19 nt, Artificial Sequence
  Description of Artificial Sequence: Synthetic oligonucleotide
cauauuagguccucugggu

SEQ ID NO: 459364 - RNA, 19 nt, Artificial Sequence
  Description of Artificial Sequence: Synthetic oligonucleotide
aggagccguuuccaucugg

SEQ ID NO: 459365 - RNA, 19 nt, Artificial Sequence
  Description of Artificial Sequence: Synthetic oligonucleotide
cuucuuacgcacugaagua

SEQ ID NO: 459366 - RNA, 19 nt, Artificial Sequence
  Description of Artificial Sequence: Synthetic oligonucleotide
aaucacgccuccacacaug

SEQ ID NO: 459367 - RNA, 19 nt, Artificial Sequence
  Description of Artificial Sequence: Synthetic oligonucleotide
cuuugggcacaccuugcuc

SEQ ID NO: 459368 - RNA, 19 nt, Artificial Sequence
  Description of Artificial Sequence: Synthetic oligonucleotide
gccgauaugcuccacucac

SEQ ID NO: 459369 - RNA, 19 nt, Artificial Sequence
  Description of Artificial Sequence: Synthetic oligonucleotide
augcgaagcuuagguauuc

SEQ ID NO: 459370 - RNA, 19 nt, Artificial Sequence
  Description of Artificial Sequence: Synthetic oligonucleotide
agcagcaagcgugcugacg

SEQ ID NO: 459371 - RNA, 19 nt, Artificial Sequence
  Description of Artificial Sequence: Synthetic oligonucleotide
uacugacggaugguccagg

SEQ ID NO: 459372 - RNA, 19 nt, Artificial Sequence
  Description of Artificial Sequence: Synthetic oligonucleotide
acgguccacgugugaaggg

SEQ ID NO: 459373 - RNA, 19 nt, Artificial Sequence
  Description of Artificial Sequence: Synthetic oligonucleotide
ugcgaagcuuagguauucc

SEQ ID NO: 459374 - RNA, 19 nt, Artificial Sequence
  Description of Artificial Sequence: Synthetic oligonucleotide
accgcugagccaaaacuug

SEQ ID NO: 459375 - RNA, 19 nt, Artificial Sequence
  Description of Artificial Sequence: Synthetic oligonucleotide
acgcacugaaguauuguca

SEQ ID NO: 459376 - RNA, 19 nt, Artificial Sequence
  Description of Artificial Sequence: Synthetic oligonucleotide
agagggccuauauccacau

SEQ ID NO: 459377 - RNA, 19 nt, Artificial Sequence
  Description of Artificial Sequence: Synthetic oligonucleotide
aacuaaagauccagauguu

SEQ ID NO: 459378 - RNA, 19 nt, Artificial Sequence
  Description of Artificial Sequence: Synthetic oligonucleotide
uccgaaucguaaccacgau

SEQ ID NO: 459379 - RNA, 19 nt, Artificial Sequence
  Description of Artificial Sequence: Synthetic oligonucleotide
cacuaaucgaaauggaauu

SEQ ID NO: 459380 - RNA, 19 nt, Artificial Sequence
  Description of Artificial Sequence: Synthetic oligonucleotide
caacugauacuuauuuacu

SEQ ID NO: 459381 - RNA, 19 nt, Artificial Sequence
  Description of Artificial Sequence: Synthetic oligonucleotide
uguguguuucgggcaauuc

SEQ ID NO: 459382 - RNA, 19 nt, Artificial Sequence
  Description of Artificial Sequence: Synthetic oligonucleotide
uggccauuccacccauuuc

SEQ ID NO: 459383 - RNA, 19 nt, Artificial Sequence
  Description of Artificial Sequence: Synthetic oligonucleotide
gccuauauccacaucaaaa

SEQ ID NO: 459384 - RNA, 19 nt, Artificial Sequence
  Description of Artificial Sequence: Synthetic oligonucleotide
gacgcccacagcauguaca

SEQ ID NO: 459385 - RNA, 19 nt, Artificial Sequence
  Description of Artificial Sequence: Synthetic oligonucleotide
ucguaaccacgauguguug

SEQ ID NO: 459386 - RNA, 19 nt, Artificial Sequence
  Description of Artificial Sequence: Synthetic oligonucleotide
gugggauacgguccacgug

SEQ ID NO: 459387 - RNA, 19 nt, Artificial Sequence
  Description of Artificial Sequence: Synthetic oligonucleotide
cuuugggaauccgggugcc

SEQ ID NO: 459388 - RNA, 19 nt, Artificial Sequence
  Description of Artificial Sequence: Synthetic oligonucleotide
ggcaguaaguucuuugaua

SEQ ID NO: 459389 - RNA, 19 nt, Artificial Sequence
  Description of Artificial Sequence: Synthetic oligonucleotide
uugggauaacugcuccauu

SEQ ID NO: 459390 - RNA, 19 nt, Artificial Sequence
  Description of Artificial Sequence: Synthetic oligonucleotide
ugcggacaauguuauugua

SEQ ID NO: 459391 - RNA, 19 nt, Artificial Sequence
  Description of Artificial Sequence: Synthetic oligonucleotide
cucgcaucuucgcuauuuc

SEQ ID NO: 459392 - RNA, 19 nt, Artificial Sequence
  Description of Artificial Sequence: Synthetic oligonucleotide
ugguacccacuaaucgaaa

SEQ ID NO: 459393 - RNA, 19 nt, Artificial Sequence
  Description of Artificial Sequence: Synthetic oligonucleotide
ugugcccgugagcuucucu

SEQ ID NO: 459394 - RNA, 19 nt, Artificial Sequence
  Description of Artificial Sequence: Synthetic oligonucleotide
ucucuugauggcagauguu

SEQ ID NO: 459395 - RNA, 19 nt, Artificial Sequence
  Description of Artificial Sequence: Synthetic oligonucleotide
acgcccacagcauguacau

SEQ ID NO: 459396 - RNA, 19 nt, Artificial Sequence
  Description of Artificial Sequence: Synthetic oligonucleotide
guguuucgggcaauucgag

SEQ ID NO: 459397 - RNA, 19 nt, Artificial Sequence
  Description of Artificial Sequence: Synthetic oligonucleotide
ggauaucuggccgucccag

SEQ ID NO: 459398 - RNA, 19 nt, Artificial Sequence
  Description of Artificial Sequence: Synthetic oligonucleotide
guuacauagauugcuguuu

SEQ ID NO: 459399 - RNA, 19 nt, Artificial Sequence
  Description of Artificial Sequence: Synthetic oligonucleotide
aaacuccugccgauaugcu

SEQ ID NO: 459400 - RNA, 19 nt, Artificial Sequence
  Description of Artificial Sequence: Synthetic oligonucleotide
ugacgcccacagcauguac

SEQ ID NO: 459401 - RNA, 19 nt, Artificial Sequence
  Description of Artificial Sequence: Synthetic oligonucleotide
gaacucgaggguuguccga

SEQ ID NO: 459402 - RNA, 19 nt, Artificial Sequence
  Description of Artificial Sequence: Synthetic oligonucleotide
uucgagcacuuuucacagu

SEQ ID NO: 459403 - RNA, 19 nt, Artificial Sequence
  Description of Artificial Sequence: Synthetic oligonucleotide
gaaucacgccuccacacau

SEQ ID NO: 459404 - RNA, 19 nt, Artificial Sequence
  Description of Artificial Sequence: Synthetic oligonucleotide
accauacgaucauuagcuu

SEQ ID NO: 459405 - RNA, 19 nt, Artificial Sequence
  Description of Artificial Sequence: Synthetic oligonucleotide
cugcgaugguauaggccag

SEQ ID NO: 459406 - RNA, 19 nt, Artificial Sequence
  Description of Artificial Sequence: Synthetic oligonucleotide
cucgaggguuguccgaauc

SEQ ID NO: 459407 - RNA, 19 nt, Artificial Sequence
  Description of Artificial Sequence: Synthetic oligonucleotide
ugauaagcucagggacaag

SEQ ID NO: 459408 - RNA, 19 nt, Artificial Sequence
  Description of Artificial Sequence: Synthetic oligonucleotide
aggguuguccgaaucguaa

SEQ ID NO: 459409 - RNA, 19 nt, Artificial Sequence
  Description of Artificial Sequence: Synthetic oligonucleotide
cuucgaucgcagugcggac

SEQ ID NO: 459410 - RNA, 19 nt, Artificial Sequence
  Description of Artificial Sequence: Synthetic oligonucleotide
ucgcagugcggacaauguu

SEQ ID NO: 459411 - RNA, 19 nt, Artificial Sequence
  Description of Artificial Sequence: Synthetic oligonucleotide
ccaucugcgaugguauagg

SEQ ID NO: 459412 - RNA, 19 nt, Artificial Sequence
  Description of Artificial Sequence: Synthetic oligonucleotide
cauuagcuuuaugcucacc

SEQ ID NO: 459413 - RNA, 19 nt, Artificial Sequence
  Description of Artificial Sequence: Synthetic oligonucleotide
gcuucgaucgcagugcgga

SEQ ID NO: 459414 - RNA, 19 nt, Artificial Sequence
  Description of Artificial Sequence: Synthetic oligonucleotide
aucaagcacuugaacggca

SEQ ID NO: 459415 - RNA, 19 nt, Artificial Sequence
  Description of Artificial Sequence: Synthetic oligonucleotide
uucgggcaauucgagcacu

SEQ ID NO: 459416 - RNA, 19 nt, Artificial Sequence
  Description of Artificial Sequence: Synthetic oligonucleotide
ugcgaccuucacauuccau

SEQ ID NO: 459417 - RNA, 19 nt, Artificial Sequence
  Description of Artificial Sequence: Synthetic oligonucleotide
uaggagccguuuccaucug

SEQ ID NO: 459418 - RNA, 19 nt, Artificial Sequence
  Description of Artificial Sequence: Synthetic oligonucleotide
gcauacugacggauggucc

SEQ ID NO: 459419 - RNA, 19 nt, Artificial Sequence
  Description of Artificial Sequence: Synthetic oligonucleotide
ggaaucacgccuccacaca

SEQ ID NO: 459420 - RNA, 19 nt, Artificial Sequence
  Description of Artificial Sequence: Synthetic oligonucleotide
gggugcgccauauuagguc

SEQ ID NO: 459421 - RNA, 19 nt, Artificial Sequence
  Description of Artificial Sequence: Synthetic oligonucleotide
gauguaucuuuuagucugu

SEQ ID NO: 459422 - RNA, 19 nt, Artificial Sequence
  Description of Artificial Sequence: Synthetic oligonucleotide
ggguuguccgaaucguaac

SEQ ID NO: 459423 - RNA, 19 nt, Artificial Sequence
  Description of Artificial Sequence: Synthetic oligonucleotide
auacauggugggauacggu

SEQ ID NO: 459424 - RNA, 19 nt, Artificial Sequence
  Description of Artificial Sequence: Synthetic oligonucleotide
caaugugcucgcagaagaa

SEQ ID NO: 459425 - RNA, 19 nt, Artificial Sequence
  Description of Artificial Sequence: Synthetic oligonucleotide
acucaccauacgaucauua

SEQ ID NO: 459426 - RNA, 19 nt, Artificial Sequence
  Description of Artificial Sequence: Synthetic oligonucleotide
cgaaucguaaccacgaugu

SEQ ID NO: 459427 - RNA, 19 nt, Artificial Sequence
  Description of Artificial Sequence: Synthetic oligonucleotide
gacgucuggcaaugugcuc

SEQ ID NO: 459428 - RNA, 19 nt, Artificial Sequence
  Description of Artificial Sequence: Synthetic oligonucleotide
gugcggacaauguuauugu

SEQ ID NO: 459429 - RNA, 19 nt, Artificial Sequence
  Description of Artificial Sequence: Synthetic oligonucleotide
gcagcgcauucuucaaugc

SEQ ID NO: 459430 - RNA, 19 nt, Artificial Sequence
  Description of Artificial Sequence: Synthetic oligonucleotide
ccgaaucguaaccacgaug

SEQ ID NO: 459431 - RNA, 19 nt, Artificial Sequence
  Description of Artificial Sequence: Synthetic oligonucleotide
cagcaagcgugcugacgcc

SEQ ID NO: 459432 - RNA, 19 nt, Artificial Sequence
  Description of Artificial Sequence: Synthetic oligonucleotide
cgaacucgaggguuguccg

SEQ ID NO: 459433 - RNA, 19 nt, Artificial Sequence
  Description of Artificial Sequence: Synthetic oligonucleotide
gacggggucugcgaccuuc

SEQ ID NO: 459434 - RNA, 19 nt, Artificial Sequence
  Description of Artificial Sequence: Synthetic oligonucleotide
cucgcagaagaagagauuu

SEQ ID NO: 459435 - RNA, 19 nt, Artificial Sequence
  Description of Artificial Sequence: Synthetic oligonucleotide
gguauaggccagcucuaga

SEQ ID NO: 459436 - RNA, 19 nt, Artificial Sequence
  Description of Artificial Sequence: Synthetic oligonucleotide
agccacuuuggggaugcca

SEQ ID NO: 459437 - RNA, 19 nt, Artificial Sequence
  Description of Artificial Sequence: Synthetic oligonucleotide
ucgggcaauucgagcacuu

SEQ ID NO: 459438 - RNA, 19 nt, Artificial Sequence
  Description of Artificial Sequence: Synthetic oligonucleotide
gagccaaaacuugaucccu

SEQ ID NO: 459439 - RNA, 19 nt, Artificial Sequence
  Description of Artificial Sequence: Synthetic oligonucleotide
cuacagcuuuggccauucc

SEQ ID NO: 459440 - RNA, 19 nt, Artificial Sequence
  Description of Artificial Sequence: Synthetic oligonucleotide
auguuauuguagggauccu

SEQ ID NO: 459441 - RNA, 19 nt, Artificial Sequence
  Description of Artificial Sequence: Synthetic oligonucleotide
acccugacgucuggcaaug

SEQ ID NO: 459442 - RNA, 19 nt, Artificial Sequence
  Description of Artificial Sequence: Synthetic oligonucleotide
ccgauaugcuccacucacc

SEQ ID NO: 459443 - RNA, 19 nt, Artificial Sequence
  Description of Artificial Sequence: Synthetic oligonucleotide
gugagggauuccaucaugu

SEQ ID NO: 459444 - RNA, 19 nt, Artificial Sequence
  Description of Artificial Sequence: Synthetic oligonucleotide
acccacuaaucgaaaugga

SEQ ID NO: 459445 - RNA, 19 nt, Artificial Sequence
  Description of Artificial Sequence: Synthetic oligonucleotide
gccucaagagaccgcugag

SEQ ID NO: 459446 - RNA, 19 nt, Artificial Sequence
  Description of Artificial Sequence: Synthetic oligonucleotide
cguaaccacgauguguugc

SEQ ID NO: 459447 - RNA, 19 nt, Artificial Sequence
  Description of Artificial Sequence: Synthetic oligonucleotide
cagcgauaauuuucaugga

SEQ ID NO: 459448 - RNA, 19 nt, Artificial Sequence
  Description of Artificial Sequence: Synthetic oligonucleotide
gcauaugguacccacuaau

SEQ ID NO: 459449 - RNA, 19 nt, Artificial Sequence
  Description of Artificial Sequence: Synthetic oligonucleotide
ccacuaaucgaaauggaau

SEQ ID NO: 459450 - RNA, 19 nt, Artificial Sequence
  Description of Artificial Sequence: Synthetic oligonucleotide
ccugacgucuggcaaugug

SEQ ID NO: 459451 - RNA, 19 nt, Artificial Sequence
  Description of Artificial Sequence: Synthetic oligonucleotide
ucccuucuggggugcgcca

SEQ ID NO: 459452 - RNA, 19 nt, Artificial Sequence
  Description of Artificial Sequence: Synthetic oligonucleotide
ugcgccauauuagguccuc

SEQ ID NO: 459453 - RNA, 19 nt, Artificial Sequence
  Description of Artificial Sequence: Synthetic oligonucleotide
cgcuauuuccauguagaag

SEQ ID NO: 459454 - RNA, 19 nt, Artificial Sequence
  Description of Artificial Sequence: Synthetic oligonucleotide
ggcugauguaucuuuuagu

SEQ ID NO: 459455 - RNA, 19 nt, Artificial Sequence
  Description of Artificial Sequence: Synthetic oligonucleotide
uuguguguuucgggcaauu

SEQ ID NO: 459456 - RNA, 19 nt, Artificial Sequence
  Description of Artificial Sequence: Synthetic oligonucleotide
gugagcccaaagucuucuc

SEQ ID NO: 459457 - RNA, 19 nt, Artificial Sequence
  Description of Artificial Sequence: Synthetic oligonucleotide
ugguggaaucacgccucca

SEQ ID NO: 459458 - RNA, 19 nt, Artificial Sequence
  Description of Artificial Sequence: Synthetic oligonucleotide
caagcgugcugacgcccac

SEQ ID NO: 459459 - RNA, 19 nt, Artificial Sequence
  Description of Artificial Sequence: Synthetic oligonucleotide
gugcucgcagaagaagaga

SEQ ID NO: 459460 - RNA, 19 nt, Artificial Sequence
  Description of Artificial Sequence: Synthetic oligonucleotide
gagggccuauauccacauc

SEQ ID NO: 459461 - RNA, 19 nt, Artificial Sequence
  Description of Artificial Sequence: Synthetic oligonucleotide
acgccuccacacaugacaa

SEQ ID NO: 459462 - RNA, 19 nt, Artificial Sequence
  Description of Artificial Sequence: Synthetic oligonucleotide
cgaucauuagcuuuaugcu

SEQ ID NO: 459463 - RNA, 19 nt, Artificial Sequence
  Description of Artificial Sequence: Synthetic oligonucleotide
cuugaucccugcuggacuu

SEQ ID NO: 459464 - RNA, 19 nt, Artificial Sequence
  Description of Artificial Sequence: Synthetic oligonucleotide
acucgaggguuguccgaau

SEQ ID NO: 459465 - RNA, 19 nt, Artificial Sequence
  Description of Artificial Sequence: Synthetic oligonucleotide
gccaagauauugccaucuc

SEQ ID NO: 459466 - RNA, 19 nt, Artificial Sequence
  Description of Artificial Sequence: Synthetic oligonucleotide
augguauaggccagcucua

SEQ ID NO: 459467 - RNA, 19 nt, Artificial Sequence
  Description of Artificial Sequence: Synthetic oligonucleotide
cgauaugcuccacucacca

SEQ ID NO: 459468 - RNA, 19 nt, Artificial Sequence
  Description of Artificial Sequence: Synthetic oligonucleotide
gguacccacuaaucgaaau

SEQ ID NO: 459469 - RNA, 19 nt, Artificial Sequence
  Description of Artificial Sequence: Synthetic oligonucleotide
cauuugugagggauuccau

SEQ ID NO: 459470 - RNA, 19 nt, Artificial Sequence
  Description of Artificial Sequence: Synthetic oligonucleotide
ggagccguuuccaucugga

SEQ ID NO: 459471 - RNA, 19 nt, Artificial Sequence
  Description of Artificial Sequence: Synthetic oligonucleotide
ggugggauacgguccacgu

SEQ ID NO: 459472 - RNA, 19 nt, Artificial Sequence
  Description of Artificial Sequence: Synthetic oligonucleotide
gaggguuguccgaaucgua

SEQ ID NO: 459473 - RNA, 19 nt, Artificial Sequence
  Description of Artificial Sequence: Synthetic oligonucleotide
ccccaguuacuauaaaugu

SEQ ID NO: 459474 - RNA, 19 nt, Artificial Sequence
  Description of Artificial Sequence: Synthetic oligonucleotide
ggccuauauccacaucaaa

SEQ ID NO: 459475 - RNA, 19 nt, Artificial Sequence
  Description of Artificial Sequence: Synthetic oligonucleotide
cauaauccugugguggaau

SEQ ID NO: 459476 - RNA, 19 nt, Artificial Sequence
  Description of Artificial Sequence: Synthetic oligonucleotide
ggauaacugcuccauucau

SEQ ID NO: 459477 - RNA, 19 nt, Artificial Sequence
  Description of Artificial Sequence: Synthetic oligonucleotide
uucuggggugcgccauauu

SEQ ID NO: 459478 - RNA, 19 nt, Artificial Sequence
  Description of Artificial Sequence: Synthetic oligonucleotide
cauccacggccugcugagc

SEQ ID NO: 459479 - RNA, 19 nt, Artificial Sequence
  Description of Artificial Sequence: Synthetic oligonucleotide
uccgggugccaggaccaaa

SEQ ID NO: 459480 - RNA, 19 nt, Artificial Sequence
  Description of Artificial Sequence: Synthetic oligonucleotide
gaauugugcccgugagcuu

SEQ ID NO: 459481 - RNA, 19 nt, Artificial Sequence
  Description of Artificial Sequence: Synthetic oligonucleotide
agagaccgcugagccaaaa

SEQ ID NO: 459482 - RNA, 19 nt, Artificial Sequence
  Description of Artificial Sequence: Synthetic oligonucleotide
gcgaagcuuagguauuccu

SEQ ID NO: 459483 - RNA, 19 nt, Artificial Sequence
  Description of Artificial Sequence: Synthetic oligonucleotide
cuccugccgauaugcucca

SEQ ID NO: 459484 - RNA, 19 nt, Artificial Sequence
  Description of Artificial Sequence: Synthetic oligonucleotide
cugcgaccuucacauucca

SEQ ID NO: 459485 - RNA, 19 nt, Artificial Sequence
  Description of Artificial Sequence: Synthetic oligonucleotide
gggauacgguccacgugug

SEQ ID NO: 459486 - RNA, 19 nt, Artificial Sequence
  Description of Artificial Sequence: Synthetic oligonucleotide
ggcuucgaucgcagugcgg

SEQ ID NO: 459487 - RNA, 19 nt, Artificial Sequence
  Description of Artificial Sequence: Synthetic oligonucleotide
cacuggguaagugccucaa

SEQ ID NO: 459488 - RNA, 19 nt, Artificial Sequence
  Description of Artificial Sequence: Synthetic oligonucleotide
cgcagugcggacaauguua

SEQ ID NO: 459489 - RNA, 19 nt, Artificial Sequence
  Description of Artificial Sequence: Synthetic oligonucleotide
gggcaauucgagcacuuuu

SEQ ID NO: 459490 - RNA, 19 nt, Artificial Sequence
  Description of Artificial Sequence: Synthetic oligonucleotide
ccagcucgcaucuucgcua

SEQ ID NO: 459491 - RNA, 19 nt, Artificial Sequence
  Description of Artificial Sequence: Synthetic oligonucleotide
aagagaccgcugagccaaa

SEQ ID NO: 459492 - RNA, 19 nt, Artificial Sequence
  Description of Artificial Sequence: Synthetic oligonucleotide
cacgaacucgaggguuguc

SEQ ID NO: 459493 - RNA, 19 nt, Artificial Sequence
  Description of Artificial Sequence: Synthetic oligonucleotide
ggauaucguucugaauugu

SEQ ID NO: 459494 - RNA, 19 nt, Artificial Sequence
  Description of Artificial Sequence: Synthetic oligonucleotide
ggccaguacagcccauucu

SEQ ID NO: 459495 - RNA, 19 nt, Artificial Sequence
  Description of Artificial Sequence: Synthetic oligonucleotide
gggccuauauccacaucaa

SEQ ID NO: 459496 - RNA, 19 nt, Artificial Sequence
  Description of Artificial Sequence: Synthetic oligonucleotide
cugacggaugguccagggu

SEQ ID NO: 459497 - RNA, 19 nt, Artificial Sequence
  Description of Artificial Sequence: Synthetic oligonucleotide
ccauacgaucauuagcuuu

SEQ ID NO: 459498 - RNA, 19 nt, Artificial Sequence
  Description of Artificial Sequence: Synthetic oligonucleotide
cgguccacgugugaagggc

SEQ ID NO: 459499 - RNA, 19 nt, Artificial Sequence
  Description of Artificial Sequence: Synthetic oligonucleotide
gcgcauucuucaaugcgaa

SEQ ID NO: 459500 - RNA, 19 nt, Artificial Sequence
  Description of Artificial Sequence: Synthetic oligonucleotide
ccgcugagccaaaacuuga

SEQ ID NO: 459501 - RNA, 19 nt, Artificial Sequence
  Description of Artificial Sequence: Synthetic oligonucleotide
gggcaguaaguucuuugau

SEQ ID NO: 459502 - RNA, 19 nt, Artificial Sequence
  Description of Artificial Sequence: Synthetic oligonucleotide
cacccugacgucuggcaau

SEQ ID NO: 459503 - RNA, 19 nt, Artificial Sequence
  Description of Artificial Sequence: Synthetic oligonucleotide
gccagcucuagaauggcau

SEQ ID NO: 459504 - RNA, 19 nt, Artificial Sequence
  Description of Artificial Sequence: Synthetic oligonucleotide
cgauguguugccaggucaa

SEQ ID NO: 459505 - RNA, 19 nt, Artificial Sequence
  Description of Artificial Sequence: Synthetic oligonucleotide
gcaagcgugcugacgccca

SEQ ID NO: 459506 - RNA, 19 nt, Artificial Sequence
  Description of Artificial Sequence: Synthetic oligonucleotide
gugcuguguacuggaaaau

SEQ ID NO: 459507 - RNA, 19 nt, Artificial Sequence
  Description of Artificial Sequence: Synthetic oligonucleotide
cagcucgcaucuucgcuau

SEQ ID NO: 459508 - RNA, 19 nt, Artificial Sequence
  Description of Artificial Sequence: Synthetic oligonucleotide
gcuccacucaccauacgau

SEQ ID NO: 459509 - RNA, 19 nt, Artificial Sequence
  Description of Artificial Sequence: Synthetic oligonucleotide
gcagugcggacaauguuau

SEQ ID NO: 459510 - RNA, 19 nt, Artificial Sequence
  Description of Artificial Sequence: Synthetic oligonucleotide
uggccgucccagggcagua

SEQ ID NO: 459511 - RNA, 19 nt, Artificial Sequence
  Description of Artificial Sequence: Synthetic oligonucleotide
agcucgcaucuucgcuauu

SEQ ID NO: 459512 - RNA, 19 nt, Artificial Sequence
  Description of Artificial Sequence: Synthetic oligonucleotide
cucagucagugaccacccu

SEQ ID NO: 459513 - RNA, 19 nt, Artificial Sequence
  Description of Artificial Sequence: Synthetic oligonucleotide
gcgugcugacgcccacagc

SEQ ID NO: 459514 - RNA, 19 nt, Artificial Sequence
  Description of Artificial Sequence: Synthetic oligonucleotide
uugugcccgugagcuucuc

SEQ ID NO: 459515 - RNA, 19 nt, Artificial Sequence
  Description of Artificial Sequence: Synthetic oligonucleotide
gguccacgugugaagggcu

SEQ ID NO: 459516 - RNA, 19 nt, Artificial Sequence
  Description of Artificial Sequence: Synthetic oligonucleotide
cagccacuuuggggaugcc

SEQ ID NO: 459517 - RNA, 19 nt, Artificial Sequence
  Description of Artificial Sequence: Synthetic oligonucleotide
ccugccgauaugcuccacu

SEQ ID NO: 459518 - RNA, 19 nt, Artificial Sequence
  Description of Artificial Sequence: Synthetic oligonucleotide
cuucuggggugcgccauau

SEQ ID NO: 459519 - RNA, 19 nt, Artificial Sequence
  Description of Artificial Sequence: Synthetic oligonucleotide
gugcgccauauuagguccu

SEQ ID NO: 459520 - RNA, 19 nt, Artificial Sequence
  Description of Artificial Sequence: Synthetic oligonucleotide
ggggugcgccauauuaggu

SEQ ID NO: 459521 - RNA, 19 nt, Artificial Sequence
  Description of Artificial Sequence: Synthetic oligonucleotide
gcgaugguauaggccagcu

SEQ ID NO: 459522 - RNA, 19 nt, Artificial Sequence
  Description of Artificial Sequence: Synthetic oligonucleotide
agacggggucugcgaccuu

SEQ ID NO: 459523 - RNA, 19 nt, Artificial Sequence
  Description of Artificial Sequence: Synthetic oligonucleotide
cccagcucgcaucuucgcu

SEQ ID NO: 459524 - RNA, 19 nt, Artificial Sequence
  Description of Artificial Sequence: Synthetic oligonucleotide
cacucaccauacgaucauu

SEQ ID NO: 459525 - RNA, 19 nt, Artificial Sequence
  Description of Artificial Sequence: Synthetic oligonucleotide
ccacucaccauacgaucau

SEQ ID NO: 459526 - RNA, 19 nt, Artificial Sequence
  Description of Artificial Sequence: Synthetic oligonucleotide
ccgggugccaggaccaaau

SEQ ID NO: 459527 - RNA, 19 nt, Artificial Sequence
  Description of Artificial Sequence: Synthetic oligonucleotide
gcucgcagaagaagagauu

SEQ ID NO: 459528 - RNA, 19 nt, Artificial Sequence
  Description of Artificial Sequence: Synthetic oligonucleotide
cagugcggacaauguuauu

SEQ ID NO: 459529 - RNA, 19 nt, Artificial Sequence
  Description of Artificial Sequence: Synthetic oligonucleotide
cggggucugcgaccuucac

SEQ ID NO: 459530 - RNA, 19 nt, Artificial Sequence
  Description of Artificial Sequence: Synthetic oligonucleotide
ggucugcgaccuucacauu

SEQ ID NO: 459531 - RNA, 19 nt, Artificial Sequence
  Description of Artificial Sequence: Synthetic oligonucleotide
ccacgaacucgaggguugu

SEQ ID NO: 459532 - RNA, 19 nt, Artificial Sequence
  Description of Artificial Sequence: Synthetic oligonucleotide
ccguuuccaucuggaggcu

SEQ ID NO: 459533 - RNA, 19 nt, Artificial Sequence
  Description of Artificial Sequence: Synthetic oligonucleotide
cgggcaauucgagcacuuu

SEQ ID NO: 459534 - RNA, 19 nt, Artificial Sequence
  Description of Artificial Sequence: Synthetic oligonucleotide
uuuaaauggacagugaugg

SEQ ID NO: 459535 - RNA, 19 nt, Artificial Sequence
  Description of Artificial Sequence: Synthetic oligonucleotide
ugauucaacaauuaggaga

SEQ ID NO: 459536 - RNA, 19 nt, Artificial Sequence
  Description of Artificial Sequence: Synthetic oligonucleotide
uuauaaaggacuacaacac

SEQ ID NO: 459537 - RNA, 19 nt, Artificial Sequence
  Description of Artificial Sequence: Synthetic oligonucleotide
ugauauaaggcuuuaagau

SEQ ID NO: 459538 - RNA, 19 nt, Artificial Sequence
  Description of Artificial Sequence: Synthetic oligonucleotide
gacgugaagagucacaucc

SEQ ID NO: 459539 - RNA, 19 nt, Artificial Sequence
  Description of Artificial Sequence: Synthetic oligonucleotide
ugcuuagucaaaauaaucu

SEQ ID NO: 459540 - RNA, 19 nt, Artificial Sequence
  Description of Artificial Sequence: Synthetic oligonucleotide
gagcagaccacucaggugg

SEQ ID NO: 459541 - RNA, 19 nt, Artificial Sequence
  Description of Artificial Sequence: Synthetic oligonucleotide
agauccgagaaguauaagg

SEQ ID NO: 459542 - RNA, 19 nt, Artificial Sequence
  Description of Artificial Sequence: Synthetic oligonucleotide
agcguucacaaccucaucc

SEQ ID NO: 459543 - RNA, 19 nt, Artificial Sequence
  Description of Artificial Sequence: Synthetic oligonucleotide
aauguaagcuucguuguac

SEQ ID NO: 459544 - RNA, 19 nt, Artificial Sequence
  Description of Artificial Sequence: Synthetic oligonucleotide
aacgauacaaaaccuggug

SEQ ID NO: 459545 - RNA, 19 nt, Artificial Sequence
  Description of Artificial Sequence: Synthetic oligonucleotide
aaucucuuaucccaggaca

SEQ ID NO: 459546 - RNA, 19 nt, Artificial Sequence
  Description of Artificial Sequence: Synthetic oligonucleotide
aaucccaucgacuaacaga

SEQ ID NO: 459547 - RNA, 19 nt, Artificial Sequence
  Description of Artificial Sequence: Synthetic oligonucleotide
gaaccaugaagccaaaggc

SEQ ID NO: 459548 - RNA, 19 nt, Artificial Sequence
  Description of Artificial Sequence: Synthetic oligonucleotide
aaagugguaaaccccuauc

SEQ ID NO: 459549 - RNA, 19 nt, Artificial Sequence
  Description of Artificial Sequence: Synthetic oligonucleotide
gauccgagaaguauaaggg

SEQ ID NO: 459550 - RNA, 19 nt, Artificial Sequence
  Description of Artificial Sequence: Synthetic oligonucleotide
uuagcuugccugaugauca

SEQ ID NO: 459551 - RNA, 19 nt, Artificial Sequence
  Description of Artificial Sequence: Synthetic oligonucleotide
gauauaaggcuuuaagauc

SEQ ID NO: 459552 - RNA, 19 nt, Artificial Sequence
  Description of Artificial Sequence: Synthetic oligonucleotide
cauacacacacacacauac

SEQ ID NO: 459553 - RNA, 19 nt, Artificial Sequence
  Description of Artificial Sequence: Synthetic oligonucleotide
  modified_base (17)..(17): a, c, u, g, unknown or other
auucucuaucaacacanac

SEQ ID NO: 459554 - RNA, 19 nt, Artificial Sequence
  Description of Artificial Sequence: Synthetic oligonucleotide
uacacacacacacauacac

SEQ ID NO: 459555 - RNA, 19 nt, Artificial Sequence
  Description of Artificial Sequence: Synthetic oligonucleotide
cacacacacacauacaccc

SEQ ID NO: 459556 - RNA, 19 nt, Artificial Sequence
  Description of Artificial Sequence: Synthetic oligonucleotide
gagauaaguccacugacgc

SEQ ID NO: 459557 - RNA, 19 nt, Artificial Sequence
  Description of Artificial Sequence: Synthetic oligonucleotide
agcaguaaucaagaggugc

SEQ ID NO: 459558 - RNA, 19 nt, Artificial Sequence
  Description of Artificial Sequence: Synthetic oligonucleotide
uucaucgcuguuaagcgag

SEQ ID NO: 459559 - RNA, 19 nt, Artificial Sequence
  Description of Artificial Sequence: Synthetic oligonucleotide
ugucucauaaucacgccug

SEQ ID NO: 459560 - RNA, 19 nt, Artificial Sequence
  Description of Artificial Sequence: Synthetic oligonucleotide
uagcuauucucuaucaaca

SEQ ID NO: 459561 - RNA, 19 nt, Artificial Sequence
  Description of Artificial Sequence: Synthetic oligonucleotide
ucgacuaacagaagugcag

SEQ ID NO: 459562 - RNA, 19 nt, Artificial Sequence
  Description of Artificial Sequence: Synthetic oligonucleotide
uauaacuccgucuccuucc

SEQ ID NO: 459563 - RNA, 19 nt, Artificial Sequence
  Description of Artificial Sequence: Synthetic oligonucleotide
auccgagaaguauaagggc

SEQ ID NO: 459564 - RNA, 19 nt, Artificial Sequence
  Description of Artificial Sequence: Synthetic oligonucleotide
uuuucucuagcccuagugu

SEQ ID NO: 459565 - RNA, 19 nt, Artificial Sequence
  Description of Artificial Sequence: Synthetic oligonucleotide
ucaucaugccgacugagca

SEQ ID NO: 459566 - RNA, 19 nt, Artificial Sequence
  Description of Artificial Sequence: Synthetic oligonucleotide
cuagcuauucucuaucaac

SEQ ID NO: 459567 - RNA, 19 nt, Artificial Sequence
  Description of Artificial Sequence: Synthetic oligonucleotide
cuggucgugagauaagucc

SEQ ID NO: 459568 - RNA, 19 nt, Artificial Sequence
  Description of Artificial Sequence: Synthetic oligonucleotide
uugguccacagccagaucu

SEQ ID NO: 459569 - RNA, 19 nt, Artificial Sequence
  Description of Artificial Sequence: Synthetic oligonucleotide
uuaagauccgagaaguaua

SEQ ID NO: 459570 - RNA, 19 nt, Artificial Sequence
  Description of Artificial Sequence: Synthetic oligonucleotide
uguucgggagcucugaccu

SEQ ID NO: 459571 - RNA, 19 nt, Artificial Sequence
  Description of Artificial Sequence: Synthetic oligonucleotide
gaaguauaagggcugacga

SEQ ID NO: 459572 - RNA, 19 nt, Artificial Sequence
  Description of Artificial Sequence: Synthetic oligonucleotide
gaucagaugauagaucaug

SEQ ID NO: 459573 - RNA, 19 nt, Artificial Sequence
  Description of Artificial Sequence: Synthetic oligonucleotide
agaaguauaagggcugacg

SEQ ID NO: 459574 - RNA, 19 nt, Artificial Sequence
  Description of Artificial Sequence: Synthetic oligonucleotide
uagaucaugaauguggcaa

SEQ ID NO: 459575 - RNA, 19 nt, Artificial Sequence
  Description of Artificial Sequence: Synthetic oligonucleotide
uucugaucccaccaaacga

SEQ ID NO: 459576 - RNA, 19 nt, Artificial Sequence
  Description of Artificial Sequence: Synthetic oligonucleotide
ugagugaauuccuuauacc

SEQ ID NO: 459577 - RNA, 19 nt, Artificial Sequence
  Description of Artificial Sequence: Synthetic oligonucleotide
uccuucaucgcuguuaagc

SEQ ID NO: 459578 - RNA, 19 nt, Artificial Sequence
  Description of Artificial Sequence: Synthetic oligonucleotide
ucugguaccggucaaggau

SEQ ID NO: 459579 - RNA, 19 nt, Artificial Sequence
  Description of Artificial Sequence: Synthetic oligonucleotide
ggcuccauaaaucccaucg

SEQ ID NO: 459580 - RNA, 19 nt, Artificial Sequence
  Description of Artificial Sequence: Synthetic oligonucleotide
cugacugagaccuaaguca

SEQ ID NO: 459581 - RNA, 19 nt, Artificial Sequence
  Description of Artificial Sequence: Synthetic oligonucleotide
uuuaagauccgagaaguau

SEQ ID NO: 459582 - RNA, 19 nt, Artificial Sequence
  Description of Artificial Sequence: Synthetic oligonucleotide
  modified_base (3)..(3): a, c, u, g, unknown or other
canacccacauacacacac

SEQ ID NO: 459583 - RNA, 19 nt, Artificial Sequence
  Description of Artificial Sequence: Synthetic oligonucleotide
ucggacauagcaguaauca

SEQ ID NO: 459584 - RNA, 19 nt, Artificial Sequence
  Description of Artificial Sequence: Synthetic oligonucleotide
caugaauguggcaaucccc

SEQ ID NO: 459585 - RNA, 19 nt, Artificial Sequence
  Description of Artificial Sequence: Synthetic oligonucleotide
ugaagucuggauacugcag

SEQ ID NO: 459586 - RNA, 19 nt, Artificial Sequence
  Description of Artificial Sequence: Synthetic oligonucleotide
gacuaacagaagugcagcg

SEQ ID NO: 459587 - RNA, 19 nt, Artificial Sequence
  Description of Artificial Sequence: Synthetic oligonucleotide
uccgguauguagcuugucc

SEQ ID NO: 459588 - RNA, 19 nt, Artificial Sequence
  Description of Artificial Sequence: Synthetic oligonucleotide
acguccggaaccaugaagc

SEQ ID NO: 459589 - RNA, 19 nt, Artificial Sequence
  Description of Artificial Sequence: Synthetic oligonucleotide
uuaaauggacagugauggg

SEQ ID NO: 459590 - RNA, 19 nt, Artificial Sequence
  Description of Artificial Sequence: Synthetic oligonucleotide
uuuauucuuccugacugag

SEQ ID NO: 459591 - RNA, 19 nt, Artificial Sequence
  Description of Artificial Sequence: Synthetic oligonucleotide
augaauguggcaauccccg

SEQ ID NO: 459592 - RNA, 19 nt, Artificial Sequence
  Description of Artificial Sequence: Synthetic oligonucleotide
uggauguuacucuccauca

SEQ ID NO: 459593 - RNA, 19 nt, Artificial Sequence
  Description of Artificial Sequence: Synthetic oligonucleotide
ugaucacuccgucacgaag

SEQ ID NO: 459594 - RNA, 19 nt, Artificial Sequence
  Description of Artificial Sequence: Synthetic oligonucleotide
auaaucacgccugauauaa

SEQ ID NO: 459595 - RNA, 19 nt, Artificial Sequence
  Description of Artificial Sequence: Synthetic oligonucleotide
uauguagcuuguccagccg

SEQ ID NO: 459596 - RNA, 19 nt, Artificial Sequence
  Description of Artificial Sequence: Synthetic oligonucleotide
uucgcuaucuccauccauc

SEQ ID NO: 459597 - RNA, 19 nt, Artificial Sequence
  Description of Artificial Sequence: Synthetic oligonucleotide
aaucauuccugacaccuua

SEQ ID NO: 459598 - RNA, 19 nt, Artificial Sequence
  Description of Artificial Sequence: Synthetic oligonucleotide
uaagauccgagaaguauaa

SEQ ID NO: 459599 - RNA, 19 nt, Artificial Sequence
  Description of Artificial Sequence: Synthetic oligonucleotide
ucugaucccaccaaacgau

SEQ ID NO: 459600 - RNA, 19 nt, Artificial Sequence
  Description of Artificial Sequence: Synthetic oligonucleotide
  modified_base (19)..(19): a, c, u, g, unknown or other
cuauucucuaucaacacan

SEQ ID NO: 459601 - RNA, 19 nt, Artificial Sequence
  Description of Artificial Sequence: Synthetic oligonucleotide
accuaagcugguuuaaaug

SEQ ID NO: 459602 - RNA, 19 nt, Artificial Sequence
  Description of Artificial Sequence: Synthetic oligonucleotide
ucacaagcacaccuaagcu

SEQ ID NO: 459603 - RNA, 19 nt, Artificial Sequence
  Description of Artificial Sequence: Synthetic oligonucleotide
uuccugacaccuuauaauc

SEQ ID NO: 459604 - RNA, 19 nt, Artificial Sequence
  Description of Artificial Sequence: Synthetic oligonucleotide
uugcuuagucaaaauaauc

SEQ ID NO: 459605 - RNA, 19 nt, Artificial Sequence
  Description of Artificial Sequence: Synthetic oligonucleotide
aaagacgaauguuucuuuu

SEQ ID NO: 459606 - RNA, 19 nt, Artificial Sequence
  Description of Artificial Sequence: Synthetic oligonucleotide
uccggaaccaugaagccaa

SEQ ID NO: 459607 - RNA, 19 nt, Artificial Sequence
  Description of Artificial Sequence: Synthetic oligonucleotide
uccaugauacaucuccuuc

SEQ ID NO: 459608 - RNA, 19 nt, Artificial Sequence
  Description of Artificial Sequence: Synthetic oligonucleotide
gcugacgauacuuuggucc

SEQ ID NO: 459609 - RNA, 19 nt, Artificial Sequence
  Description of Artificial Sequence: Synthetic oligonucleotide
cagaacauacuccucaguc

SEQ ID NO: 459610 - RNA, 19 nt, Artificial Sequence
  Description of Artificial Sequence: Synthetic oligonucleotide
uauuggauguuccucucaa

SEQ ID NO: 459611 - RNA, 19 nt, Artificial Sequence
  Description of Artificial Sequence: Synthetic oligonucleotide
gaagucuggauacugcaga

SEQ ID NO: 459612 - RNA, 19 nt, Artificial Sequence
  Description of Artificial Sequence: Synthetic oligonucleotide
uggucgugagauaagucca

SEQ ID NO: 459613 - RNA, 19 nt, Artificial Sequence
  Description of Artificial Sequence: Synthetic oligonucleotide
aucacuccgucacgaagcc

SEQ ID NO: 459614 - RNA, 19 nt, Artificial Sequence
  Description of Artificial Sequence: Synthetic oligonucleotide
accccuaucccucuuagcu

SEQ ID NO: 459615 - RNA, 19 nt, Artificial Sequence
  Description of Artificial Sequence: Synthetic oligonucleotide
acgccugauccucugauuc

SEQ ID NO: 459616 - RNA, 19 nt, Artificial Sequence
  Description of Artificial Sequence: Synthetic oligonucleotide
aaaagacgaauguuucuuu

SEQ ID NO: 459617 - RNA, 19 nt, Artificial Sequence
  Description of Artificial Sequence: Synthetic oligonucleotide
ucaagcuauuuucccaaga

SEQ ID NO: 459618 - RNA, 19 nt, Artificial Sequence
  Description of Artificial Sequence: Synthetic oligonucleotide
aguugcuuagucaaaauaa

SEQ ID NO: 459619 - RNA, 19 nt, Artificial Sequence
  Description of Artificial Sequence: Synthetic oligonucleotide
uguuaagcgaguccccacu

SEQ ID NO: 459620 - RNA, 19 nt, Artificial Sequence
  Description of Artificial Sequence: Synthetic oligonucleotide
uggagacagacauugaauu

SEQ ID NO: 459621 - RNA, 19 nt, Artificial Sequence
  Description of Artificial Sequence: Synthetic oligonucleotide
gaucacuccgucacgaagc

SEQ ID NO: 459622 - RNA, 19 nt, Artificial Sequence
  Description of Artificial Sequence: Synthetic oligonucleotide
aaguauaagggcugacgau

SEQ ID NO: 459623 - RNA, 19 nt, Artificial Sequence
  Description of Artificial Sequence: Synthetic oligonucleotide
cacgccaugagugaauucc

SEQ ID NO: 459624 - RNA, 19 nt, Artificial Sequence
  Description of Artificial Sequence: Synthetic oligonucleotide
accgccuucgaacuccucg

SEQ ID NO: 459625 - RNA, 19 nt, Artificial Sequence
  Description of Artificial Sequence: Synthetic oligonucleotide
gaugauagaucaugaaugu

SEQ ID NO: 459626 - RNA, 19 nt, Artificial Sequence
  Description of Artificial Sequence: Synthetic oligonucleotide
guuuuaucuguucgggagc

SEQ ID NO: 459627 - RNA, 19 nt, Artificial Sequence
  Description of Artificial Sequence: Synthetic oligonucleotide
aaccccuaucccucuuagc

SEQ ID NO: 459628 - RNA, 19 nt, Artificial Sequence
  Description of Artificial Sequence: Synthetic oligonucleotide
cuuauaccaggucaguguc

SEQ ID NO: 459629 - RNA, 19 nt, Artificial Sequence
  Description of Artificial Sequence: Synthetic oligonucleotide
aaggcauguuuacacucug

SEQ ID NO: 459630 - RNA, 19 nt, Artificial Sequence
  Description of Artificial Sequence: Synthetic oligonucleotide
uggcuuugucucauaauca

SEQ ID NO: 459631 - RNA, 19 nt, Artificial Sequence
  Description of Artificial Sequence: Synthetic oligonucleotide
auuaggagaguuucucccu

SEQ ID NO: 459632 - RNA, 19 nt, Artificial Sequence
  Description of Artificial Sequence: Synthetic oligonucleotide
uccccaugaguucucuggg

SEQ ID NO: 459633 - RNA, 19 nt, Artificial Sequence
  Description of Artificial Sequence: Synthetic oligonucleotide
acucagguggauguuacuc

SEQ ID NO: 459634 - RNA, 19 nt, Artificial Sequence
  Description of Artificial Sequence: Synthetic oligonucleotide
agcuucguuguacuucacg

SEQ ID NO: 459635 - RNA, 19 nt, Artificial Sequence
  Description of Artificial Sequence: Synthetic oligonucleotide
ugggauguacuccaucccu

SEQ ID NO: 459636 - RNA, 19 nt, Artificial Sequence
  Description of Artificial Sequence: Synthetic oligonucleotide
aggucagugucccaauaag

SEQ ID NO: 459637 - RNA, 19 nt, Artificial Sequence
  Description of Artificial Sequence: Synthetic oligonucleotide
uuauuggauguuccucuca

SEQ ID NO: 459638 - RNA, 19 nt, Artificial Sequence
  Description of Artificial Sequence: Synthetic oligonucleotide
uagugugcaaagaaguguu

SEQ ID NO: 459639 - RNA, 19 nt, Artificial Sequence
  Description of Artificial Sequence: Synthetic oligonucleotide
uguuacucuccaucauucc

SEQ ID NO: 459640 - RNA, 19 nt, Artificial Sequence
  Description of Artificial Sequence: Synthetic oligonucleotide
caccuuauaaucucuuauc

SEQ ID NO: 459641 - RNA, 19 nt, Artificial Sequence
  Description of Artificial Sequence: Synthetic oligonucleotide
ugacaggagcuguaguuug

SEQ ID NO: 459642 - RNA, 19 nt, Artificial Sequence
  Description of Artificial Sequence: Synthetic oligonucleotide
acauggaguugaucguugg

SEQ ID NO: 459643 - RNA, 19 nt, Artificial Sequence
  Description of Artificial Sequence: Synthetic oligonucleotide
ucacuagcuauucucuauc

SEQ ID NO: 459644 - RNA, 19 nt, Artificial Sequence
  Description of Artificial Sequence: Synthetic oligonucleotide
acacacacacacauacacc

SEQ ID NO: 459645 - RNA, 19 nt, Artificial Sequence
  Description of Artificial Sequence: Synthetic oligonucleotide
cuccauaaaucccaucgac

SEQ ID NO: 459646 - RNA, 19 nt, Artificial Sequence
  Description of Artificial Sequence: Synthetic oligonucleotide
cugauucaacaauuaggag

SEQ ID NO: 459647 - RNA, 19 nt, Artificial Sequence
  Description of Artificial Sequence: Synthetic oligonucleotide
ugauccucugauucaacaa

SEQ ID NO: 459648 - RNA, 19 nt, Artificial Sequence
  Description of Artificial Sequence: Synthetic oligonucleotide
ucaaguugcuuagucaaaa

SEQ ID NO: 459649 - RNA, 19 nt, Artificial Sequence
  Description of Artificial Sequence: Synthetic oligonucleotide
ugcagcguucacaaccuca

SEQ ID NO: 459650 - RNA, 19 nt, Artificial Sequence
  Description of Artificial Sequence: Synthetic oligonucleotide
ugagacgugaagagucaca

SEQ ID NO: 459651 - RNA, 19 nt, Artificial Sequence
  Description of Artificial Sequence: Synthetic oligonucleotide
uucacuagcuauucucuau

SEQ ID NO: 459652 - RNA, 19 nt, Artificial Sequence
  Description of Artificial Sequence: Synthetic oligonucleotide
aauccuuuccugguuggca

SEQ ID NO: 459653 - RNA, 19 nt, Artificial Sequence
  Description of Artificial Sequence: Synthetic oligonucleotide
ucacgccugauauaaggcu

SEQ ID NO: 459654 - RNA, 19 nt, Artificial Sequence
  Description of Artificial Sequence: Synthetic oligonucleotide
ucucugggauucaaugaca

SEQ ID NO: 459655 - RNA, 19 nt, Artificial Sequence
  Description of Artificial Sequence: Synthetic oligonucleotide
caucgacuaacagaagugc

SEQ ID NO: 459656 - RNA, 19 nt, Artificial Sequence
  Description of Artificial Sequence: Synthetic oligonucleotide
ugguccgguauguagcuug

SEQ ID NO: 459657 - RNA, 19 nt, Artificial Sequence
  Description of Artificial Sequence: Synthetic oligonucleotide
ucgcuguuaagcgaguccc

SEQ ID NO: 459658 - RNA, 19 nt, Artificial Sequence
  Description of Artificial Sequence: Synthetic oligonucleotide
uuuauuggauguuccucuc

SEQ ID NO: 459659 - RNA, 19 nt, Artificial Sequence
  Description of Artificial Sequence: Synthetic oligonucleotide
ugccggaauccuuuccugg

SEQ ID NO: 459660 - RNA, 19 nt, Artificial Sequence
  Description of Artificial Sequence: Synthetic oligonucleotide
uuaucuguucgggagcucu

SEQ ID NO: 459661 - RNA, 19 nt, Artificial Sequence
  Description of Artificial Sequence: Synthetic oligonucleotide
aaacgauacaaaaccuggu

SEQ ID NO: 459662 - RNA, 19 nt, Artificial Sequence
  Description of Artificial Sequence: Synthetic oligonucleotide
uuaggagaguuucucccuc

SEQ ID NO: 459663 - RNA, 19 nt, Artificial Sequence
  Description of Artificial Sequence: Synthetic oligonucleotide
aguauaagggcugacgaua

SEQ ID NO: 459664 - RNA, 19 nt, Artificial Sequence
  Description of Artificial Sequence: Synthetic oligonucleotide
ucgugagauaaguccacug

SEQ ID NO: 459665 - RNA, 19 nt, Artificial Sequence
  Description of Artificial Sequence: Synthetic oligonucleotide
uccucgacauucccgcucc

SEQ ID NO: 459666 - RNA, 19 nt, Artificial Sequence
  Description of Artificial Sequence: Synthetic oligonucleotide
uguagcuuguccagccgga

SEQ ID NO: 459667 - RNA, 19 nt, Artificial Sequence
  Description of Artificial Sequence: Synthetic oligonucleotide
cccacauacacacacacac

SEQ ID NO: 459668 - RNA, 19 nt, Artificial Sequence
  Description of Artificial Sequence: Synthetic oligonucleotide
auuggauguuccucucaag

SEQ ID NO: 459669 - RNA, 19 nt, Artificial Sequence
  Description of Artificial Sequence: Synthetic oligonucleotide
ugggucuauaacuccgucu

SEQ ID NO: 459670 - RNA, 19 nt, Artificial Sequence
  Description of Artificial Sequence: Synthetic oligonucleotide
aucccaucgacuaacagaa

SEQ ID NO: 459671 - RNA, 19 nt, Artificial Sequence
  Description of Artificial Sequence: Synthetic oligonucleotide
ucugaucacuccgucacga

SEQ ID NO: 459672 - RNA, 19 nt, Artificial Sequence
  Description of Artificial Sequence: Synthetic oligonucleotide
uuaagcgaguccccacucu

SEQ ID NO: 459673 - RNA, 19 nt, Artificial Sequence
  Description of Artificial Sequence: Synthetic oligonucleotide
cauggaguugaucguuggg

SEQ ID NO: 459674 - RNA, 19 nt, Artificial Sequence
  Description of Artificial Sequence: Synthetic oligonucleotide
uugaucguugggaugugau

SEQ ID NO: 459675 - RNA, 19 nt, Artificial Sequence
  Description of Artificial Sequence: Synthetic oligonucleotide
ugagcagaccacucaggug

SEQ ID NO: 459676 - RNA, 19 nt, Artificial Sequence
  Description of Artificial Sequence: Synthetic oligonucleotide
aggugguccgguauguagc

SEQ ID NO: 459677 - RNA, 19 nt, Artificial Sequence
  Description of Artificial Sequence: Synthetic oligonucleotide
aggcuuuaagauccgagaa

SEQ ID NO: 459678 - RNA, 19 nt, Artificial Sequence
  Description of Artificial Sequence: Synthetic oligonucleotide
ucgcuaucuccauccaucc

SEQ ID NO: 459679 - RNA, 19 nt, Artificial Sequence
  Description of Artificial Sequence: Synthetic oligonucleotide
guacuucacguccggaacc

SEQ ID NO: 459680 - RNA, 19 nt, Artificial Sequence
  Description of Artificial Sequence: Synthetic oligonucleotide
uaaucacgccugauauaag

SEQ ID NO: 459681 - RNA, 19 nt, Artificial Sequence
  Description of Artificial Sequence: Synthetic oligonucleotide
uucaaguugcuuagucaaa

SEQ ID NO: 459682 - RNA, 19 nt, Artificial Sequence
  Description of Artificial Sequence: Synthetic oligonucleotide
uccugacugagaccuaagu

SEQ ID NO: 459683 - RNA, 19 nt, Artificial Sequence
  Description of Artificial Sequence: Synthetic oligonucleotide
ggcuuuaagauccgagaag

SEQ ID NO: 459684 - RNA, 19 nt, Artificial Sequence
  Description of Artificial Sequence: Synthetic oligonucleotide
auguaagcuucguuguacu

SEQ ID NO: 459685 - RNA, 19 nt, Artificial Sequence
  Description of Artificial Sequence: Synthetic oligonucleotide
uccgucuuuggcuccauaa

SEQ ID NO: 459686 - RNA, 19 nt, Artificial Sequence
  Description of Artificial Sequence: Synthetic oligonucleotide
caucaugccgacugagcag

SEQ ID NO: 459687 - RNA, 19 nt, Artificial Sequence
  Description of Artificial Sequence: Synthetic oligonucleotide
ccuucaucgcuguuaagcg

SEQ ID NO: 459688 - RNA, 19 nt, Artificial Sequence
  Description of Artificial Sequence: Synthetic oligonucleotide
auggaguugaucguuggga

SEQ ID NO: 459689 - RNA, 19 nt, Artificial Sequence
  Description of Artificial Sequence: Synthetic oligonucleotide
aggacuucaguuccccaug

SEQ ID NO: 459690 - RNA, 19 nt, Artificial Sequence
  Description of Artificial Sequence: Synthetic oligonucleotide
aggagcauaccugggcccc

SEQ ID NO: 459691 - RNA, 19 nt, Artificial Sequence
  Description of Artificial Sequence: Synthetic oligonucleotide
auaacagguagaucaggua

SEQ ID NO: 459692 - RNA, 19 nt, Artificial Sequence
  Description of Artificial Sequence: Synthetic oligonucleotide
ucagcgucggagccucagg

SEQ ID NO: 459693 - RNA, 19 nt, Artificial Sequence
  Description of Artificial Sequence: Synthetic oligonucleotide
uccuuauaccaggucagug

SEQ ID NO: 459694 - RNA, 19 nt, Artificial Sequence
  Description of Artificial Sequence: Synthetic oligonucleotide
aucucuuaucccaggacag

SEQ ID NO: 459695 - RNA, 19 nt, Artificial Sequence
  Description of Artificial Sequence: Synthetic oligonucleotide
gauaacagguagaucaggu

SEQ ID NO: 459696 - RNA, 19 nt, Artificial Sequence
  Description of Artificial Sequence: Synthetic oligonucleotide
cuucguuguacuucacguc

SEQ ID NO: 459697 - RNA, 19 nt, Artificial Sequence
  Description of Artificial Sequence: Synthetic oligonucleotide
aucguugggaugugauuug

SEQ ID NO: 459698 - RNA, 19 nt, Artificial Sequence
  Description of Artificial Sequence: Synthetic oligonucleotide
uuucacuagcuauucucua

SEQ ID NO: 459699 - RNA, 19 nt, Artificial Sequence
  Description of Artificial Sequence: Synthetic oligonucleotide
acuagcuauucucuaucaa

SEQ ID NO: 459700 - RNA, 19 nt, Artificial Sequence
  Description of Artificial Sequence: Synthetic oligonucleotide
agacgugaagagucacauc

SEQ ID NO: 459701 - RNA, 19 nt, Artificial Sequence
  Description of Artificial Sequence: Synthetic oligonucleotide
gggucuauaacuccgucuc

SEQ ID NO: 459702 - RNA, 19 nt, Artificial Sequence
  Description of Artificial Sequence: Synthetic oligonucleotide
aucagaugauagaucauga

SEQ ID NO: 459703 - RNA, 19 nt, Artificial Sequence
  Description of Artificial Sequence: Synthetic oligonucleotide
ucuuaucccaggacagcuc

SEQ ID NO: 459704 - RNA, 19 nt, Artificial Sequence
  Description of Artificial Sequence: Synthetic oligonucleotide
uauaagggcugacgauacu

SEQ ID NO: 459705 - RNA, 19 nt, Artificial Sequence
  Description of Artificial Sequence: Synthetic oligonucleotide
caggugguccgguauguag

SEQ ID NO: 459706 - RNA, 19 nt, Artificial Sequence
  Description of Artificial Sequence: Synthetic oligonucleotide
augauagaucaugaaugug

SEQ ID NO: 459707 - RNA, 19 nt, Artificial Sequence
  Description of Artificial Sequence: Synthetic oligonucleotide
cuauaacuccgucuccuuc

SEQ ID NO: 459708 - RNA, 19 nt, Artificial Sequence
  Description of Artificial Sequence: Synthetic oligonucleotide
gcuuucacuagcuauucuc

SEQ ID NO: 459709 - RNA, 19 nt, Artificial Sequence
  Description of Artificial Sequence: Synthetic oligonucleotide
ugguaccggucaaggaucc

SEQ ID NO: 459710 - RNA, 19 nt, Artificial Sequence
  Description of Artificial Sequence: Synthetic oligonucleotide
ucguugggaugugauuugg

SEQ ID NO: 459711 - RNA, 19 nt, Artificial Sequence
  Description of Artificial Sequence: Synthetic oligonucleotide
aucccugggucuauaacuc

SEQ ID NO: 459712 - RNA, 19 nt, Artificial Sequence
  Description of Artificial Sequence: Synthetic oligonucleotide
ccaagacacgccaugagug

SEQ ID NO: 459713 - RNA, 19 nt, Artificial Sequence
  Description of Artificial Sequence: Synthetic oligonucleotide
caccgagaggcccagcacc

SEQ ID NO: 459714 - RNA, 19 nt, Artificial Sequence
  Description of Artificial Sequence: Synthetic oligonucleotide
cugguaccggucaaggauc

SEQ ID NO: 459715 - RNA, 19 nt, Artificial Sequence
  Description of Artificial Sequence: Synthetic oligonucleotide
aagauccgagaaguauaag

SEQ ID NO: 459716 - RNA, 19 nt, Artificial Sequence
  Description of Artificial Sequence: Synthetic oligonucleotide
ucucuuaucccaggacagc

SEQ ID NO: 459717 - RNA, 19 nt, Artificial Sequence
  Description of Artificial Sequence: Synthetic oligonucleotide
uaagggcugacgauacuuu

SEQ ID NO: 459718 - RNA, 19 nt, Artificial Sequence
  Description of Artificial Sequence: Synthetic oligonucleotide
agcccuagugugcaaagaa

SEQ ID NO: 459719 - RNA, 19 nt, Artificial Sequence
  Description of Artificial Sequence: Synthetic oligonucleotide
ugcacgucuggaucagaug

SEQ ID NO: 459720 - RNA, 19 nt, Artificial Sequence
  Description of Artificial Sequence: Synthetic oligonucleotide
caguggguaguacuuauca

SEQ ID NO: 459721 - RNA, 19 nt, Artificial Sequence
  Description of Artificial Sequence: Synthetic oligonucleotide
agcacugccccaucaauuu

SEQ ID NO: 459722 - RNA, 19 nt, Artificial Sequence
  Description of Artificial Sequence: Synthetic oligonucleotide
cacauggaguugaucguug

SEQ ID NO: 459723 - RNA, 19 nt, Artificial Sequence
  Description of Artificial Sequence: Synthetic oligonucleotide
gggaacgaaucugugacag

SEQ ID NO: 459724 - RNA, 19 nt, Artificial Sequence
  Description of Artificial Sequence: Synthetic oligonucleotide
aggguugcuugcugagacg

SEQ ID NO: 459725 - RNA, 19 nt, Artificial Sequence
  Description of Artificial Sequence: Synthetic oligonucleotide
guauaagggcugacgauac

SEQ ID NO: 459726 - RNA, 19 nt, Artificial Sequence
  Description of Artificial Sequence: Synthetic oligonucleotide
aucaugccgacugagcaga

SEQ ID NO: 459727 - RNA, 19 nt, Artificial Sequence
  Description of Artificial Sequence: Synthetic oligonucleotide
uuuucccaagacacgccau

SEQ ID NO: 459728 - RNA, 19 nt, Artificial Sequence
  Description of Artificial Sequence: Synthetic oligonucleotide
aagcgaguccccacucugg

SEQ ID NO: 459729 - RNA, 19 nt, Artificial Sequence
  Description of Artificial Sequence: Synthetic oligonucleotide
cugacgauacuuuggucca

SEQ ID NO: 459730 - RNA, 19 nt, Artificial Sequence
  Description of Artificial Sequence: Synthetic oligonucleotide
cucaagcuauuuucccaag

SEQ ID NO: 459731 - RNA, 19 nt, Artificial Sequence
  Description of Artificial Sequence: Synthetic oligonucleotide
auaagggcugacgauacuu

SEQ ID NO: 459732 - RNA, 19 nt, Artificial Sequence
  Description of Artificial Sequence: Synthetic oligonucleotide
caaggagaaaugaaaugua

SEQ ID NO: 459733 - RNA, 19 nt, Artificial Sequence
  Description of Artificial Sequence: Synthetic oligonucleotide
acgauacuuugguccacag

SEQ ID NO: 459734 - RNA, 19 nt, Artificial Sequence
  Description of Artificial Sequence: Synthetic oligonucleotide
ucuauaacuccgucuccuu

SEQ ID NO: 459735 - RNA, 19 nt, Artificial Sequence
  Description of Artificial Sequence: Synthetic oligonucleotide
ccaccaaacgauacaaaac

SEQ ID NO: 459736 - RNA, 19 nt, Artificial Sequence
  Description of Artificial Sequence: Synthetic oligonucleotide
cacguccggaaccaugaag

SEQ ID NO: 459737 - RNA, 19 nt, Artificial Sequence
  Description of Artificial Sequence: Synthetic oligonucleotide
ugaucguugggaugugauu

SEQ ID NO: 459738 - RNA, 19 nt, Artificial Sequence
  Description of Artificial Sequence: Synthetic oligonucleotide
gcacgucuggaucagauga

SEQ ID NO: 459739 - RNA, 19 nt, Artificial Sequence
  Description of Artificial Sequence: Synthetic oligonucleotide
gagaugauaacagguagau

SEQ ID NO: 459740 - RNA, 19 nt, Artificial Sequence
  Description of Artificial Sequence: Synthetic oligonucleotide
agcacccacuguucucugg

SEQ ID NO: 459741 - RNA, 19 nt, Artificial Sequence
  Description of Artificial Sequence: Synthetic oligonucleotide
auaaucuguuucucccaaa

SEQ ID NO: 459742 - RNA, 19 nt, Artificial Sequence
  Description of Artificial Sequence: Synthetic oligonucleotide
ccaucgacuaacagaagug

SEQ ID NO: 459743 - RNA, 19 nt, Artificial Sequence
  Description of Artificial Sequence: Synthetic oligonucleotide
uguaagcuucguuguacuu

SEQ ID NO: 459744 - RNA, 19 nt, Artificial Sequence
  Description of Artificial Sequence: Synthetic oligonucleotide
gacaccuuauaaucucuua

SEQ ID NO: 459745 - RNA, 19 nt, Artificial Sequence
  Description of Artificial Sequence: Synthetic oligonucleotide
aucgacuaacagaagugca

SEQ ID NO: 459746 - RNA, 19 nt, Artificial Sequence
  Description of Artificial Sequence: Synthetic oligonucleotide
agcacaccuaagcugguuu

SEQ ID NO: 459747 - RNA, 19 nt, Artificial Sequence
  Description of Artificial Sequence: Synthetic oligonucleotide
acauucccgcucccggccg

SEQ ID NO: 459748 - RNA, 19 nt, Artificial Sequence
  Description of Artificial Sequence: Synthetic oligonucleotide
  modified_base (14)..(14): a, c, u, g, unknown or other
cucuaucaacacanaccca

SEQ ID NO: 459749 - RNA, 19 nt, Artificial Sequence
  Description of Artificial Sequence: Synthetic oligonucleotide
guugcuugcugagacguga

SEQ ID NO: 459750 - RNA, 19 nt, Artificial Sequence
  Description of Artificial Sequence: Synthetic oligonucleotide
aagacacgccaugagugaa

SEQ ID NO: 459751 - RNA, 19 nt, Artificial Sequence
  Description of Artificial Sequence: Synthetic oligonucleotide
ugacgccugauccucugau

SEQ ID NO: 459752 - RNA, 19 nt, Artificial Sequence
  Description of Artificial Sequence: Synthetic oligonucleotide
cuaagucagcaagagacaa

SEQ ID NO: 459753 - RNA, 19 nt, Artificial Sequence
  Description of Artificial Sequence: Synthetic oligonucleotide
cucugaucacuccgucacg

SEQ ID NO: 459754 - RNA, 19 nt, Artificial Sequence
  Description of Artificial Sequence: Synthetic oligonucleotide
caagacacgccaugaguga

SEQ ID NO: 459755 - RNA, 19 nt, Artificial Sequence
  Description of Artificial Sequence: Synthetic oligonucleotide
guuaagcgaguccccacuc

SEQ ID NO: 459756 - RNA, 19 nt, Artificial Sequence
  Description of Artificial Sequence: Synthetic oligonucleotide
acugacgccugauccucug

SEQ ID NO: 459757 - RNA, 19 nt, Artificial Sequence
  Description of Artificial Sequence: Synthetic oligonucleotide
agugcagcguucacaaccu

SEQ ID NO: 459758 - RNA, 19 nt, Artificial Sequence
  Description of Artificial Sequence: Synthetic oligonucleotide
cuucaucgcuguuaagcga

SEQ ID NO: 459759 - RNA, 19 nt, Artificial Sequence
  Description of Artificial Sequence: Synthetic oligonucleotide
cacgcuuccagccucuuaa

SEQ ID NO: 459760 - RNA, 19 nt, Artificial Sequence
  Description of Artificial Sequence: Synthetic oligonucleotide
ucccaauaaggagaugaua

SEQ ID NO: 459761 - RNA, 19 nt, Artificial Sequence
  Description of Artificial Sequence: Synthetic oligonucleotide
ccugacaccuuauaaucuc

SEQ ID NO: 459762 - RNA, 19 nt, Artificial Sequence
  Description of Artificial Sequence: Synthetic oligonucleotide
caucauucccugcucacaa

SEQ ID NO: 459763 - RNA, 19 nt, Artificial Sequence
  Description of Artificial Sequence: Synthetic oligonucleotide
cacuagcuauucucuauca

SEQ ID NO: 459764 - RNA, 19 nt, Artificial Sequence
  Description of Artificial Sequence: Synthetic oligonucleotide
agccucuuaagcagcagcu

SEQ ID NO: 459765 - RNA, 19 nt, Artificial Sequence
  Description of Artificial Sequence: Synthetic oligonucleotide
gagucauggccacagcacu

SEQ ID NO: 459766 - RNA, 19 nt, Artificial Sequence
  Description of Artificial Sequence: Synthetic oligonucleotide
gguuuaaauggacagugau

SEQ ID NO: 459767 - RNA, 19 nt, Artificial Sequence
  Description of Artificial Sequence: Synthetic oligonucleotide
acacgccaugagugaauuc

SEQ ID NO: 459768 - RNA, 19 nt, Artificial Sequence
  Description of Artificial Sequence: Synthetic oligonucleotide
cacauacacacacacacau

SEQ ID NO: 459769 - RNA, 19 nt, Artificial Sequence
  Description of Artificial Sequence: Synthetic oligonucleotide
ccugacugagaccuaaguc

SEQ ID NO: 459770 - RNA, 19 nt, Artificial Sequence
  Description of Artificial Sequence: Synthetic oligonucleotide
ucaucgcuguuaagcgagu

SEQ ID NO: 459771 - RNA, 19 nt, Artificial Sequence
  Description of Artificial Sequence: Synthetic oligonucleotide
cuugcccaugcacgucugg

SEQ ID NO: 459772 - RNA, 19 nt, Artificial Sequence
  Description of Artificial Sequence: Synthetic oligonucleotide
gucaaugccaggccagaaa

SEQ ID NO: 459773 - RNA, 19 nt, Artificial Sequence
  Description of Artificial Sequence: Synthetic oligonucleotide
agucacauccuugcccaug

SEQ ID NO: 459774 - RNA, 19 nt, Artificial Sequence
  Description of Artificial Sequence: Synthetic oligonucleotide
cucgacauucccgcucccg

SEQ ID NO: 459775 - RNA, 19 nt, Artificial Sequence
  Description of Artificial Sequence: Synthetic oligonucleotide
uugcccaugcacgucugga

SEQ ID NO: 459776 - RNA, 19 nt, Artificial Sequence
  Description of Artificial Sequence: Synthetic oligonucleotide
ccauaaaucccaucgacua

SEQ ID NO: 459777 - RNA, 19 nt, Artificial Sequence
  Description of Artificial Sequence: Synthetic oligonucleotide
uuggucggacauagcagua

SEQ ID NO: 459778 - RNA, 19 nt, Artificial Sequence
  Description of Artificial Sequence: Synthetic oligonucleotide
gacgauacuuugguccaca

SEQ ID NO: 459779 - RNA, 19 nt, Artificial Sequence
  Description of Artificial Sequence: Synthetic oligonucleotide
uuaucccaggacagcucuc

SEQ ID NO: 459780 - RNA, 19 nt, Artificial Sequence
  Description of Artificial Sequence: Synthetic oligonucleotide
uggggcacgcuuccagccu

SEQ ID NO: 459781 - RNA, 19 nt, Artificial Sequence
  Description of Artificial Sequence: Synthetic oligonucleotide
auacacacacacacauaca

SEQ ID NO: 459782 - RNA, 19 nt, Artificial Sequence
  Description of Artificial Sequence: Synthetic oligonucleotide
agucauggccacagcacug

SEQ ID NO: 459783 - RNA, 19 nt, Artificial Sequence
  Description of Artificial Sequence: Synthetic oligonucleotide
ggagaugauaacagguaga

SEQ ID NO: 459784 - RNA, 19 nt, Artificial Sequence
  Description of Artificial Sequence: Synthetic oligonucleotide
ggucuauaacuccgucucc

SEQ ID NO: 459785 - RNA, 19 nt, Artificial Sequence
  Description of Artificial Sequence: Synthetic oligonucleotide
guugcuuagucaaaauaau

SEQ ID NO: 459786 - RNA, 19 nt, Artificial Sequence
  Description of Artificial Sequence: Synthetic oligonucleotide
auacuuugguccacagcca

SEQ ID NO: 459787 - RNA, 19 nt, Artificial Sequence
  Description of Artificial Sequence: Synthetic oligonucleotide
acgcuuccagccucuuaag

SEQ ID NO: 459788 - RNA, 19 nt, Artificial Sequence
  Description of Artificial Sequence: Synthetic oligonucleotide
ccggaagccgggaagcucc

SEQ ID NO: 459789 - RNA, 19 nt, Artificial Sequence
  Description of Artificial Sequence: Synthetic oligonucleotide
uggucggacauagcaguaa

SEQ ID NO: 459790 - RNA, 19 nt, Artificial Sequence
  Description of Artificial Sequence: Synthetic oligonucleotide
gagacgugaagagucacau

SEQ ID NO: 459791 - RNA, 19 nt, Artificial Sequence
  Description of Artificial Sequence: Synthetic oligonucleotide
cccagcaccgccuucgaac

SEQ ID NO: 459792 - RNA, 19 nt, Artificial Sequence
  Description of Artificial Sequence: Synthetic oligonucleotide
agcccuucugagguggaug

SEQ ID NO: 459793 - RNA, 19 nt, Artificial Sequence
  Description of Artificial Sequence: Synthetic oligonucleotide
gcgucggagccucaggaag

SEQ ID NO: 459794 - RNA, 19 nt, Artificial Sequence
  Description of Artificial Sequence: Synthetic oligonucleotide
ccgagaaguauaagggcug

SEQ ID NO: 459795 - RNA, 19 nt, Artificial Sequence
  Description of Artificial Sequence: Synthetic oligonucleotide
acacauggaguugaucguu

SEQ ID NO: 459796 - RNA, 19 nt, Artificial Sequence
  Description of Artificial Sequence: Synthetic oligonucleotide
gggauucaaugacagcaca

SEQ ID NO: 459797 - RNA, 19 nt, Artificial Sequence
  Description of Artificial Sequence: Synthetic oligonucleotide
guuuccgcuuuagccuccg

SEQ ID NO: 459798 - RNA, 19 nt, Artificial Sequence
  Description of Artificial Sequence: Synthetic oligonucleotide
cugggucuauaacuccguc

SEQ ID NO: 459799 - RNA, 19 nt, Artificial Sequence
  Description of Artificial Sequence: Synthetic oligonucleotide
aauccccgcucuucuccau

SEQ ID NO: 459800 - RNA, 19 nt, Artificial Sequence
  Description of Artificial Sequence: Synthetic oligonucleotide
cugagacgugaagagucac

SEQ ID NO: 459801 - RNA, 19 nt, Artificial Sequence
  Description of Artificial Sequence: Synthetic oligonucleotide
uagcccuagugugcaaaga

SEQ ID NO: 459802 - RNA, 19 nt, Artificial Sequence
  Description of Artificial Sequence: Synthetic oligonucleotide
aagcuucguuguacuucac

SEQ ID NO: 459803 - RNA, 19 nt, Artificial Sequence
  Description of Artificial Sequence: Synthetic oligonucleotide
caugccgacugagcagacc

SEQ ID NO: 459804 - RNA, 19 nt, Artificial Sequence
  Description of Artificial Sequence: Synthetic oligonucleotide
gucuauaacuccgucuccu

SEQ ID NO: 459805 - RNA, 19 nt, Artificial Sequence
  Description of Artificial Sequence: Synthetic oligonucleotide
guuccccaugaguucucug

SEQ ID NO: 459806 - RNA, 19 nt, Artificial Sequence
  Description of Artificial Sequence: Synthetic oligonucleotide
uguggcaauccccgcucuu

SEQ ID NO: 459807 - RNA, 19 nt, Artificial Sequence
  Description of Artificial Sequence: Synthetic oligonucleotide
ugccgacugagcagaccac

SEQ ID NO: 459808 - RNA, 19 nt, Artificial Sequence
  Description of Artificial Sequence: Synthetic oligonucleotide
aucuguucgggagcucuga

SEQ ID NO: 459809 - RNA, 19 nt, Artificial Sequence
  Description of Artificial Sequence: Synthetic oligonucleotide
cuaucccucuuagcuugcc

SEQ ID NO: 459810 - RNA, 19 nt, Artificial Sequence
  Description of Artificial Sequence: Synthetic oligonucleotide
gcauaccugggccccuugg

SEQ ID NO: 459811 - RNA, 19 nt, Artificial Sequence
  Description of Artificial Sequence: Synthetic oligonucleotide
gaugaucaguuuccgcuuu

SEQ ID NO: 459812 - RNA, 19 nt, Artificial Sequence
  Description of Artificial Sequence: Synthetic oligonucleotide
ucaugccgacugagcagac

SEQ ID NO: 459813 - RNA, 19 nt, Artificial Sequence
  Description of Artificial Sequence: Synthetic oligonucleotide
ugacgauacuuugguccac

SEQ ID NO: 459814 - RNA, 19 nt, Artificial Sequence
  Description of Artificial Sequence: Synthetic oligonucleotide
auguggcaauccccgcucu

SEQ ID NO: 459815 - RNA, 19 nt, Artificial Sequence
  Description of Artificial Sequence: Synthetic oligonucleotide
cgucuggaucagaugauag

SEQ ID NO: 459816 - RNA, 19 nt, Artificial Sequence
  Description of Artificial Sequence: Synthetic oligonucleotide
agcgucggagccucaggaa

SEQ ID NO: 459817 - RNA, 19 nt, Artificial Sequence
  Description of Artificial Sequence: Synthetic oligonucleotide
ggggacggcuuucacuagc

SEQ ID NO: 459818 - RNA, 19 nt, Artificial Sequence
  Description of Artificial Sequence: Synthetic oligonucleotide
gcuccauaaaucccaucga

SEQ ID NO: 459819 - RNA, 19 nt, Artificial Sequence
  Description of Artificial Sequence: Synthetic oligonucleotide
aggggacggcuuucacuag

SEQ ID NO: 459820 - RNA, 19 nt, Artificial Sequence
  Description of Artificial Sequence: Synthetic oligonucleotide
ggcagucugguaccgguca

SEQ ID NO: 459821 - RNA, 19 nt, Artificial Sequence
  Description of Artificial Sequence: Synthetic oligonucleotide
acgugaagagucacauccu

SEQ ID NO: 459822 - RNA, 19 nt, Artificial Sequence
  Description of Artificial Sequence: Synthetic oligonucleotide
ccuaagucagcaagagaca

SEQ ID NO: 459823 - RNA, 19 nt, Artificial Sequence
  Description of Artificial Sequence: Synthetic oligonucleotide
agcauaccugggccccuug

SEQ ID NO: 459824 - RNA, 19 nt, Artificial Sequence
  Description of Artificial Sequence: Synthetic oligonucleotide
gcccuagugugcaaagaag

SEQ ID NO: 459825 - RNA, 19 nt, Artificial Sequence
  Description of Artificial Sequence: Synthetic oligonucleotide
cucagcgucggagccucag

SEQ ID NO: 459826 - RNA, 19 nt, Artificial Sequence
  Description of Artificial Sequence: Synthetic oligonucleotide
agaugcucacaggagcaua

SEQ ID NO: 459827 - RNA, 19 nt, Artificial Sequence
  Description of Artificial Sequence: Synthetic oligonucleotide
acauacacacacacacaua

SEQ ID NO: 459828 - RNA, 19 nt, Artificial Sequence
  Description of Artificial Sequence: Synthetic oligonucleotide
caucgcuguuaagcgaguc

SEQ ID NO: 459829 - RNA, 19 nt, Artificial Sequence
  Description of Artificial Sequence: Synthetic oligonucleotide
cgugagauaaguccacuga

SEQ ID NO: 459830 - RNA, 19 nt, Artificial Sequence
  Description of Artificial Sequence: Synthetic oligonucleotide
caauccccgcucuucucca

SEQ ID NO: 459831 - RNA, 19 nt, Artificial Sequence
  Description of Artificial Sequence: Synthetic oligonucleotide
ccuuauaccaggucagugu

SEQ ID NO: 459832 - RNA, 19 nt, Artificial Sequence
  Description of Artificial Sequence: Synthetic oligonucleotide
gcuucagaugcacgccggc

SEQ ID NO: 459833 - RNA, 19 nt, Artificial Sequence
  Description of Artificial Sequence: Synthetic oligonucleotide
acgccaugagugaauuccu

SEQ ID NO: 459834 - RNA, 19 nt, Artificial Sequence
  Description of Artificial Sequence: Synthetic oligonucleotide
aggcauguuuacacucugu

SEQ ID NO: 459835 - RNA, 19 nt, Artificial Sequence
  Description of Artificial Sequence: Synthetic oligonucleotide
cauucccgcucccggccgc

SEQ ID NO: 459836 - RNA, 19 nt, Artificial Sequence
  Description of Artificial Sequence: Synthetic oligonucleotide
cagcgucggagccucagga

SEQ ID NO: 459837 - RNA, 19 nt, Artificial Sequence
  Description of Artificial Sequence: Synthetic oligonucleotide
ggacaaggagaaaugaaau

SEQ ID NO: 459838 - RNA, 19 nt, Artificial Sequence
  Description of Artificial Sequence: Synthetic oligonucleotide
ccucucaaugucucugauc

SEQ ID NO: 459839 - RNA, 19 nt, Artificial Sequence
  Description of Artificial Sequence: Synthetic oligonucleotide
cuggugccggaauccuuuc

SEQ ID NO: 459840 - RNA, 19 nt, Artificial Sequence
  Description of Artificial Sequence: Synthetic oligonucleotide
cuuugguccacagccagau

SEQ ID NO: 459841 - RNA, 19 nt, Artificial Sequence
  Description of Artificial Sequence: Synthetic oligonucleotide
ggucgugagauaaguccac

SEQ ID NO: 459842 - RNA, 19 nt, Artificial Sequence
  Description of Artificial Sequence: Synthetic oligonucleotide
ggugccggaauccuuuccu

SEQ ID NO: 459843 - RNA, 19 nt, Artificial Sequence
  Description of Artificial Sequence: Synthetic oligonucleotide
gccaugagugaauuccuua

SEQ ID NO: 459844 - RNA, 19 nt, Artificial Sequence
  Description of Artificial Sequence: Synthetic oligonucleotide
accggucaaggauccugaa

SEQ ID NO: 459845 - RNA, 19 nt, Artificial Sequence
  Description of Artificial Sequence: Synthetic oligonucleotide
caccuaagcugguuuaaau

SEQ ID NO: 459846 - RNA, 19 nt, Artificial Sequence
  Description of Artificial Sequence: Synthetic oligonucleotide
cguuguacuucacguccgg

SEQ ID NO: 459847 - RNA, 19 nt, Artificial Sequence
  Description of Artificial Sequence: Synthetic oligonucleotide
cugaucacuccgucacgaa

SEQ ID NO: 459848 - RNA, 19 nt, Artificial Sequence
  Description of Artificial Sequence: Synthetic oligonucleotide
auucccgcucccggccgcg

SEQ ID NO: 459849 - RNA, 19 nt, Artificial Sequence
  Description of Artificial Sequence: Synthetic oligonucleotide
cccuagugugcaaagaagu

SEQ ID NO: 459850 - RNA, 19 nt, Artificial Sequence
  Description of Artificial Sequence: Synthetic oligonucleotide
ucacuccgucacgaagccu

SEQ ID NO: 459851 - RNA, 19 nt, Artificial Sequence
  Description of Artificial Sequence: Synthetic oligonucleotide
cagcguucacaaccucauc

SEQ ID NO: 459852 - RNA, 19 nt, Artificial Sequence
  Description of Artificial Sequence: Synthetic oligonucleotide
agacacgccaugagugaau

SEQ ID NO: 459853 - RNA, 19 nt, Artificial Sequence
  Description of Artificial Sequence: Synthetic oligonucleotide
ggaugugauuuggucggac

SEQ ID NO: 459854 - RNA, 19 nt, Artificial Sequence
  Description of Artificial Sequence: Synthetic oligonucleotide
cacgccugauauaaggcuu

SEQ ID NO: 459855 - RNA, 19 nt, Artificial Sequence
  Description of Artificial Sequence: Synthetic oligonucleotide
ccacauacacacacacaca

SEQ ID NO: 459856 - RNA, 19 nt, Artificial Sequence
  Description of Artificial Sequence: Synthetic oligonucleotide
cacaccuaagcugguuuaa

SEQ ID NO: 459857 - RNA, 19 nt, Artificial Sequence
  Description of Artificial Sequence: Synthetic oligonucleotide
cccaucgacuaacagaagu

SEQ ID NO: 459858 - RNA, 19 nt, Artificial Sequence
  Description of Artificial Sequence: Synthetic oligonucleotide
ccgucacgaagccucugcc

SEQ ID NO: 459859 - RNA, 19 nt, Artificial Sequence
  Description of Artificial Sequence: Synthetic oligonucleotide
cguccggaaccaugaagcc

SEQ ID NO: 459860 - RNA, 19 nt, Artificial Sequence
  Description of Artificial Sequence: Synthetic oligonucleotide
ggcugacgauacuuugguc

SEQ ID NO: 459861 - RNA, 19 nt, Artificial Sequence
  Description of Artificial Sequence: Synthetic oligonucleotide
gcugagacgugaagaguca

SEQ ID NO: 459862 - RNA, 19 nt, Artificial Sequence
  Description of Artificial Sequence: Synthetic oligonucleotide
ccuaucccucuuagcuugc

SEQ ID NO: 459863 - RNA, 19 nt, Artificial Sequence
  Description of Artificial Sequence: Synthetic oligonucleotide
gggcugacgauacuuuggu

SEQ ID NO: 459864 - RNA, 19 nt, Artificial Sequence
  Description of Artificial Sequence: Synthetic oligonucleotide
ggugguccgguauguagcu

SEQ ID NO: 459865 - RNA, 19 nt, Artificial Sequence
  Description of Artificial Sequence: Synthetic oligonucleotide
guguuugaaucugugucuu

SEQ ID NO: 459866 - RNA, 19 nt, Artificial Sequence
  Description of Artificial Sequence: Synthetic oligonucleotide
ggguaguacuuaucauaaa

SEQ ID NO: 459867 - RNA, 19 nt, Artificial Sequence
  Description of Artificial Sequence: Synthetic oligonucleotide
gccuucgaacuccucgaca

SEQ ID NO: 459868 - RNA, 19 nt, Artificial Sequence
  Description of Artificial Sequence: Synthetic oligonucleotide
ccucuuagcuugccugaug

SEQ ID NO: 459869 - RNA, 19 nt, Artificial Sequence
  Description of Artificial Sequence: Synthetic oligonucleotide
ccgacugagcagaccacuc

SEQ ID NO: 459870 - RNA, 19 nt, Artificial Sequence
  Description of Artificial Sequence: Synthetic oligonucleotide
guagcuuguccagccggaa

SEQ ID NO: 459871 - RNA, 19 nt, Artificial Sequence
  Description of Artificial Sequence: Synthetic oligonucleotide
ccuucgaacuccucgacau

SEQ ID NO: 459872 - RNA, 19 nt, Artificial Sequence
  Description of Artificial Sequence: Synthetic oligonucleotide
acuccgucacgaagccucu

SEQ ID NO: 459873 - RNA, 19 nt, Artificial Sequence
  Description of Artificial Sequence: Synthetic oligonucleotide
gacacgccaugagugaauu

SEQ ID NO: 459874 - RNA, 19 nt, Artificial Sequence
  Description of Artificial Sequence: Synthetic oligonucleotide
cugacgccugauccucuga

SEQ ID NO: 459875 - RNA, 19 nt, Artificial Sequence
  Description of Artificial Sequence: Synthetic oligonucleotide
ccaugagugaauuccuuau

SEQ ID NO: 459876 - RNA, 19 nt, Artificial Sequence
  Description of Artificial Sequence: Synthetic oligonucleotide
gcacaccuaagcugguuua

SEQ ID NO: 459877 - RNA, 19 nt, Artificial Sequence
  Description of Artificial Sequence: Synthetic oligonucleotide
gacgccugauccucugauu

SEQ ID NO: 459878 - RNA, 19 nt, Artificial Sequence
  Description of Artificial Sequence: Synthetic oligonucleotide
gucgugagauaaguccacu

SEQ ID NO: 459879 - RNA, 19 nt, Artificial Sequence
  Description of Artificial Sequence: Synthetic oligonucleotide
gaggugcaucaggcucagg

SEQ ID NO: 459880 - RNA, 19 nt, Artificial Sequence
  Description of Artificial Sequence: Synthetic oligonucleotide
agccggaagccgggaagcu

SEQ ID NO: 459881 - RNA, 19 nt, Artificial Sequence
  Description of Artificial Sequence: Synthetic oligonucleotide
ggguugcuugcugagacgu

SEQ ID NO: 459882 - RNA, 19 nt, Artificial Sequence
  Description of Artificial Sequence: Synthetic oligonucleotide
ggucggacauagcaguaau

SEQ ID NO: 459883 - RNA, 19 nt, Artificial Sequence
  Description of Artificial Sequence: Synthetic oligonucleotide
gcuuuagccuccgggcuuc

SEQ ID NO: 459884 - RNA, 19 nt, Artificial Sequence
  Description of Artificial Sequence: Synthetic oligonucleotide
caccguggccgccgucagc

SEQ ID NO: 459885 - RNA, 19 nt, Artificial Sequence
  Description of Artificial Sequence: Synthetic oligonucleotide
cuucgcuaucuccauccau

SEQ ID NO: 459886 - RNA, 19 nt, Artificial Sequence
  Description of Artificial Sequence: Synthetic oligonucleotide
caucaucacuggcugggau

SEQ ID NO: 459887 - RNA, 19 nt, Artificial Sequence
  Description of Artificial Sequence: Synthetic oligonucleotide
gucccaauaaggagaugau

SEQ ID NO: 459888 - RNA, 19 nt, Artificial Sequence
  Description of Artificial Sequence: Synthetic oligonucleotide
ggggcacgcuuccagccuc

SEQ ID NO: 459889 - RNA, 19 nt, Artificial Sequence
  Description of Artificial Sequence: Synthetic oligonucleotide
gugcagcguucacaaccuc

SEQ ID NO: 459890 - RNA, 19 nt, Artificial Sequence
  Description of Artificial Sequence: Synthetic oligonucleotide
cacgucuggaucagaugau

SEQ ID NO: 459891 - RNA, 19 nt, Artificial Sequence
  Description of Artificial Sequence: Synthetic oligonucleotide
gccggaauccuuuccuggu

SEQ ID NO: 459892 - RNA, 19 nt, Artificial Sequence
  Description of Artificial Sequence: Synthetic oligonucleotide
ccgcugcuucagaugcacg

SEQ ID NO: 459893 - RNA, 19 nt, Artificial Sequence
  Description of Artificial Sequence: Synthetic oligonucleotide
cagcaccgccuucgaacuc

SEQ ID NO: 459894 - RNA, 19 nt, Artificial Sequence
  Description of Artificial Sequence: Synthetic oligonucleotide
caguaaucaagaggugcau

SEQ ID NO: 459895 - RNA, 19 nt, Artificial Sequence
  Description of Artificial Sequence: Synthetic oligonucleotide
ccaugcacgucuggaucag

SEQ ID NO: 459896 - RNA, 19 nt, Artificial Sequence
  Description of Artificial Sequence: Synthetic oligonucleotide
ccgucuuuggcuccauaaa

SEQ ID NO: 459897 - RNA, 19 nt, Artificial Sequence
  Description of Artificial Sequence: Synthetic oligonucleotide
gggcuuccggagucauggc

SEQ ID NO: 459898 - RNA, 19 nt, Artificial Sequence
  Description of Artificial Sequence: Synthetic oligonucleotide
cuccgucacgaagccucug

SEQ ID NO: 459899 - RNA, 19 nt, Artificial Sequence
  Description of Artificial Sequence: Synthetic oligonucleotide
caugcacgucuggaucaga

SEQ ID NO: 459900 - RNA, 19 nt, Artificial Sequence
  Description of Artificial Sequence: Synthetic oligonucleotide
cacucagguggauguuacu

SEQ ID NO: 459901 - RNA, 19 nt, Artificial Sequence
  Description of Artificial Sequence: Synthetic oligonucleotide
cacccagcacugccccauc

SEQ ID NO: 459902 - RNA, 19 nt, Artificial Sequence
  Description of Artificial Sequence: Synthetic oligonucleotide
gcagucugguaccggucaa

SEQ ID NO: 459903 - RNA, 19 nt, Artificial Sequence
  Description of Artificial Sequence: Synthetic oligonucleotide
ggucaaugccaggccagaa

SEQ ID NO: 459904 - RNA, 19 nt, Artificial Sequence
  Description of Artificial Sequence: Synthetic oligonucleotide
gcgaguccccacucugguc

SEQ ID NO: 459905 - RNA, 19 nt, Artificial Sequence
  Description of Artificial Sequence: Synthetic oligonucleotide
cggacauagcaguaaucaa

SEQ ID NO: 459906 - RNA, 19 nt, Artificial Sequence
  Description of Artificial Sequence: Synthetic oligonucleotide
auguuccucucaagcuauu

SEQ ID NO: 459907 - RNA, 19 nt, Artificial Sequence
  Description of Artificial Sequence: Synthetic oligonucleotide
ccccaugaguucucuggga

SEQ ID NO: 459908 - RNA, 19 nt, Artificial Sequence
  Description of Artificial Sequence: Synthetic oligonucleotide
ccagcaccgccuucgaacu

SEQ ID NO: 459909 - RNA, 19 nt, Artificial Sequence
  Description of Artificial Sequence: Synthetic oligonucleotide
gcuugccugaugaucaguu

SEQ ID NO: 459910 - RNA, 19 nt, Artificial Sequence
  Description of Artificial Sequence: Synthetic oligonucleotide
cuucgaacuccucgacauu

SEQ ID NO: 459911 - RNA, 19 nt, Artificial Sequence
  Description of Artificial Sequence: Synthetic oligonucleotide
cgagaaguauaagggcuga

SEQ ID NO: 459912 - RNA, 19 nt, Artificial Sequence
  Description of Artificial Sequence: Synthetic oligonucleotide
gccugauauaaggcuuuaa

SEQ ID NO: 459913 - RNA, 19 nt, Artificial Sequence
  Description of Artificial Sequence: Synthetic oligonucleotide
ggaucagaugauagaucau

SEQ ID NO: 459914 - RNA, 19 nt, Artificial Sequence
  Description of Artificial Sequence: Synthetic oligonucleotide
cacugacgccugauccucu

SEQ ID NO: 459915 - RNA, 19 nt, Artificial Sequence
  Description of Artificial Sequence: Synthetic oligonucleotide
cccucagcgucggagccuc

SEQ ID NO: 459916 - RNA, 19 nt, Artificial Sequence
  Description of Artificial Sequence: Synthetic oligonucleotide
gccggaagccgggaagcuc

SEQ ID NO: 459917 - RNA, 19 nt, Artificial Sequence
  Description of Artificial Sequence: Synthetic oligonucleotide
gccgacugagcagaccacu

SEQ ID NO: 459918 - RNA, 19 nt, Artificial Sequence
  Description of Artificial Sequence: Synthetic oligonucleotide
ccaccguggccgccgucag

SEQ ID NO: 459919 - RNA, 19 nt, Artificial Sequence
  Description of Artificial Sequence: Synthetic oligonucleotide
ccucgacauucccgcuccc

SEQ ID NO: 459920 - RNA, 19 nt, Artificial Sequence
  Description of Artificial Sequence: Synthetic oligonucleotide
gguccgguauguagcuugu

SEQ ID NO: 459921 - RNA, 19 nt, Artificial Sequence
  Description of Artificial Sequence: Synthetic oligonucleotide
gcacgcuuccagccucuua

SEQ ID NO: 459922 - RNA, 19 nt, Artificial Sequence
  Description of Artificial Sequence: Synthetic oligonucleotide
gagcauaccugggccccuu

SEQ ID NO: 459923 - RNA, 19 nt, Artificial Sequence
  Description of Artificial Sequence: Synthetic oligonucleotide
gcacugccccaucaauuuu

SEQ ID NO: 459924 - RNA, 19 nt, Artificial Sequence
  Description of Artificial Sequence: Synthetic oligonucleotide
ggagcauaccugggccccu

SEQ ID NO: 459925 - RNA, 19 nt, Artificial Sequence
  Description of Artificial Sequence: Synthetic oligonucleotide
ccccuaucccucuuagcuu

SEQ ID NO: 459926 - RNA, 19 nt, Artificial Sequence
  Description of Artificial Sequence: Synthetic oligonucleotide
ccggaaccaugaagccaaa

SEQ ID NO: 459927 - RNA, 19 nt, Artificial Sequence
  Description of Artificial Sequence: Synthetic oligonucleotide
gggcacgcuuccagccucu

SEQ ID NO: 459928 - RNA, 19 nt, Artificial Sequence
  Description of Artificial Sequence: Synthetic oligonucleotide
cgccaugagugaauuccuu

SEQ ID NO: 459929 - RNA, 19 nt, Artificial Sequence
  Description of Artificial Sequence: Synthetic oligonucleotide
cgccugauauaaggcuuua

SEQ ID NO: 459930 - RNA, 19 nt, Artificial Sequence
  Description of Artificial Sequence: Synthetic oligonucleotide
cggaagccgggaagcuccu

SEQ ID NO: 459931 - RNA, 19 nt, Artificial Sequence
  Description of Artificial Sequence: Synthetic oligonucleotide
ggcacgcuuccagccucuu

SEQ ID NO: 459932 - RNA, 19 nt, Artificial Sequence
  Description of Artificial Sequence: Synthetic oligonucleotide
uguaauuuaauuaagaguc

SEQ ID NO: 459933 - RNA, 19 nt, Artificial Sequence
  Description of Artificial Sequence: Synthetic oligonucleotide
ugaaaauaaauccugauga

SEQ ID NO: 459934 - RNA, 19 nt, Artificial Sequence
  Description of Artificial Sequence: Synthetic oligonucleotide
uauauauugucgcagauug

SEQ ID NO: 459935 - RNA, 19 nt, Artificial Sequence
  Description of Artificial Sequence: Synthetic oligonucleotide
guuaaguuaauacaagugg

SEQ ID NO: 459936 - RNA, 19 nt, Artificial Sequence
  Description of Artificial Sequence: Synthetic oligonucleotide
aauguguucguccauuuac

SEQ ID NO: 459937 - RNA, 19 nt, Artificial Sequence
  Description of Artificial Sequence: Synthetic oligonucleotide
ugaaguaacuuucaaagcc

SEQ ID NO: 459938 - RNA, 19 nt, Artificial Sequence
  Description of Artificial Sequence: Synthetic oligonucleotide
cuauaugaaaugaauaagg

SEQ ID NO: 459939 - RNA, 19 nt, Artificial Sequence
  Description of Artificial Sequence: Synthetic oligonucleotide
uguuaaaagucauauauca

SEQ ID NO: 459940 - RNA, 19 nt, Artificial Sequence
  Description of Artificial Sequence: Synthetic oligonucleotide
uuagcaauuuuauugaccc

SEQ ID NO: 459941 - RNA, 19 nt, Artificial Sequence
  Description of Artificial Sequence: Synthetic oligonucleotide
agaacaaacaguucaaguc

SEQ ID NO: 459942 - RNA, 19 nt, Artificial Sequence
  Description of Artificial Sequence: Synthetic oligonucleotide
aacuacuaaaaucugaggu

SEQ ID NO: 459943 - RNA, 19 nt, Artificial Sequence
  Description of Artificial Sequence: Synthetic oligonucleotide
aagauaacuuaguaaacuc

SEQ ID NO: 459944 - RNA, 19 nt, Artificial Sequence
  Description of Artificial Sequence: Synthetic oligonucleotide
uacaagauaacuuaguaaa

SEQ ID NO: 459945 - RNA, 19 nt, Artificial Sequence
  Description of Artificial Sequence: Synthetic oligonucleotide
ugacauuugaaguaaaucu

SEQ ID NO: 459946 - RNA, 19 nt, Artificial Sequence
  Description of Artificial Sequence: Synthetic oligonucleotide
ugaacuacuagcuacaaaa

SEQ ID NO: 459947 - RNA, 19 nt, Artificial Sequence
  Description of Artificial Sequence: Synthetic oligonucleotide
auugacuuuauauauuguc

SEQ ID NO: 459948 - RNA, 19 nt, Artificial Sequence
  Description of Artificial Sequence: Synthetic oligonucleotide
uguucuauaucucucuuag

SEQ ID NO: 459949 - RNA, 19 nt, Artificial Sequence
  Description of Artificial Sequence: Synthetic oligonucleotide
guuaaugacaguuggcugg

SEQ ID NO: 459950 - RNA, 19 nt, Artificial Sequence
  Description of Artificial Sequence: Synthetic oligonucleotide
ucauucaauguacacacag

SEQ ID NO: 459951 - RNA, 19 nt, Artificial Sequence
  Description of Artificial Sequence: Synthetic oligonucleotide
cuugguagaaguuucuugg

SEQ ID NO: 459952 - RNA, 19 nt, Artificial Sequence
  Description of Artificial Sequence: Synthetic oligonucleotide
aauaaggugaaacaucuua

SEQ ID NO: 459953 - RNA, 19 nt, Artificial Sequence
  Description of Artificial Sequence: Synthetic oligonucleotide
uuaagagucagcauugacu

SEQ ID NO: 459954 - RNA, 19 nt, Artificial Sequence
  Description of Artificial Sequence: Synthetic oligonucleotide
aaugacuucgcuuucuaga

SEQ ID NO: 459955 - RNA, 19 nt, Artificial Sequence
  Description of Artificial Sequence: Synthetic oligonucleotide
aguuaauacaaguggacag

SEQ ID NO: 459956 - RNA, 19 nt, Artificial Sequence
  Description of Artificial Sequence: Synthetic oligonucleotide
uuaagaaugaauacucuuc

SEQ ID NO: 459957 - RNA, 19 nt, Artificial Sequence
  Description of Artificial Sequence: Synthetic oligonucleotide
uuauucaggaagcauacac

SEQ ID NO: 459958 - RNA, 19 nt, Artificial Sequence
  Description of Artificial Sequence: Synthetic oligonucleotide
ucauauaucacaagauaca

SEQ ID NO: 459959 - RNA, 19 nt, Artificial Sequence
  Description of Artificial Sequence: Synthetic oligonucleotide
ucuagaaucaccuugcauu

SEQ ID NO: 459960 - RNA, 19 nt, Artificial Sequence
  Description of Artificial Sequence: Synthetic oligonucleotide
ugugcuaugcccuuuauaa

SEQ ID NO: 459961 - RNA, 19 nt, Artificial Sequence
  Description of Artificial Sequence: Synthetic oligonucleotide
aauaaagcacuauaugaaa

SEQ ID NO: 459962 - RNA, 19 nt, Artificial Sequence
  Description of Artificial Sequence: Synthetic oligonucleotide
aaacuacuaaaaucugagg

SEQ ID NO: 459963 - RNA, 19 nt, Artificial Sequence
  Description of Artificial Sequence: Synthetic oligonucleotide
uaauuaagagucagcauug

SEQ ID NO: 459964 - RNA, 19 nt, Artificial Sequence
  Description of Artificial Sequence: Synthetic oligonucleotide
agagcauuaugaaagacac

SEQ ID NO: 459965 - RNA, 19 nt, Artificial Sequence
  Description of Artificial Sequence: Synthetic oligonucleotide
auaugaaaugaauaaggug

SEQ ID NO: 459966 - RNA, 19 nt, Artificial Sequence
  Description of Artificial Sequence: Synthetic oligonucleotide
ucaacugucauucgguuga

SEQ ID NO: 459967 - RNA, 19 nt, Artificial Sequence
  Description of Artificial Sequence: Synthetic oligonucleotide
uacaauacugagaauuccc

SEQ ID NO: 459968 - RNA, 19 nt, Artificial Sequence
  Description of Artificial Sequence: Synthetic oligonucleotide
ugagcuguaucauucaaug

SEQ ID NO: 459969 - RNA, 19 nt, Artificial Sequence
  Description of Artificial Sequence: Synthetic oligonucleotide
auuuaauuaagagucagca

SEQ ID NO: 459970 - RNA, 19 nt, Artificial Sequence
  Description of Artificial Sequence: Synthetic oligonucleotide
ugacuuuauauauugucgc

SEQ ID NO: 459971 - RNA, 19 nt, Artificial Sequence
  Description of Artificial Sequence: Synthetic oligonucleotide
ugagacuuacucuucaggc

SEQ ID NO: 459972 - RNA, 19 nt, Artificial Sequence
  Description of Artificial Sequence: Synthetic oligonucleotide
cuuuugaacuacuagcuac

SEQ ID NO: 459973 - RNA, 19 nt, Artificial Sequence
  Description of Artificial Sequence: Synthetic oligonucleotide
acuacaagaucuuuuauau

SEQ ID NO: 459974 - RNA, 19 nt, Artificial Sequence
  Description of Artificial Sequence: Synthetic oligonucleotide
aaugaauaaggugaaacau

SEQ ID NO: 459975 - RNA, 19 nt, Artificial Sequence
  Description of Artificial Sequence: Synthetic oligonucleotide
ugugaauuauuuccucagg

SEQ ID NO: 459976 - RNA, 19 nt, Artificial Sequence
  Description of Artificial Sequence: Synthetic oligonucleotide
auauccuggaaauuacagg

SEQ ID NO: 459977 - RNA, 19 nt, Artificial Sequence
  Description of Artificial Sequence: Synthetic oligonucleotide
aagaauucucguaaacuac

SEQ ID NO: 459978 - RNA, 19 nt, Artificial Sequence
  Description of Artificial Sequence: Synthetic oligonucleotide
uuuauugacccucucuaca

SEQ ID NO: 459979 - RNA, 19 nt, Artificial Sequence
  Description of Artificial Sequence: Synthetic oligonucleotide
aauauccuggaaauuacag

SEQ ID NO: 459980 - RNA, 19 nt, Artificial Sequence
  Description of Artificial Sequence: Synthetic oligonucleotide
acguauucaacugucauuc

SEQ ID NO: 459981 - RNA, 19 nt, Artificial Sequence
  Description of Artificial Sequence: Synthetic oligonucleotide
ucacguggcauuuacaaga

SEQ ID NO: 459982 - RNA, 19 nt, Artificial Sequence
  Description of Artificial Sequence: Synthetic oligonucleotide
aauucucguaaacuacaag

SEQ ID NO: 459983 - RNA, 19 nt, Artificial Sequence
  Description of Artificial Sequence: Synthetic oligonucleotide
augacaagcucauaauguc

SEQ ID NO: 459984 - RNA, 19 nt, Artificial Sequence
  Description of Artificial Sequence: Synthetic oligonucleotide
auuaagagucagcauugac

SEQ ID NO: 459985 - RNA, 19 nt, Artificial Sequence
  Description of Artificial Sequence: Synthetic oligonucleotide
acuauaugaaaugaauaag

SEQ ID NO: 459986 - RNA, 19 nt, Artificial Sequence
  Description of Artificial Sequence: Synthetic oligonucleotide
cucuuaauuugcuuggggc

SEQ ID NO: 459987 - RNA, 19 nt, Artificial Sequence
  Description of Artificial Sequence: Synthetic oligonucleotide
caucaaaucauaugauggc

SEQ ID NO: 459988 - RNA, 19 nt, Artificial Sequence
  Description of Artificial Sequence: Synthetic oligonucleotide
agcaauuuuauugacccuc

SEQ ID NO: 459989 - RNA, 19 nt, Artificial Sequence
  Description of Artificial Sequence: Synthetic oligonucleotide
auuggaagaauucucguaa

SEQ ID NO: 459990 - RNA, 19 nt, Artificial Sequence
  Description of Artificial Sequence: Synthetic oligonucleotide
uuacaagauaacuuaguaa

SEQ ID NO: 459991 - RNA, 19 nt, Artificial Sequence
  Description of Artificial Sequence: Synthetic oligonucleotide
uucaaccagaguauguagc

SEQ ID NO: 459992 - RNA, 19 nt, Artificial Sequence
  Description of Artificial Sequence: Synthetic oligonucleotide
ucagcauugacuuuauaua

SEQ ID NO: 459993 - RNA, 19 nt, Artificial Sequence
  Description of Artificial Sequence: Synthetic oligonucleotide
uuucaucaaagcaccaaug

SEQ ID NO: 459994 - RNA, 19 nt, Artificial Sequence
  Description of Artificial Sequence: Synthetic oligonucleotide
uucugauugaaucaagguu

SEQ ID NO: 459995 - RNA, 19 nt, Artificial Sequence
  Description of Artificial Sequence: Synthetic oligonucleotide
uggagaguugcucugaguc

SEQ ID NO: 459996 - RNA, 19 nt, Artificial Sequence
  Description of Artificial Sequence: Synthetic oligonucleotide
ucauagacguauucaacug

SEQ ID NO: 459997 - RNA, 19 nt, Artificial Sequence
  Description of Artificial Sequence: Synthetic oligonucleotide
uuuaccaggcucuaccaca

SEQ ID NO: 459998 - RNA, 19 nt, Artificial Sequence
  Description of Artificial Sequence: Synthetic oligonucleotide
ugaaagcuacaauggagag

SEQ ID NO: 459999 - RNA, 19 nt, Artificial Sequence
  Description of Artificial Sequence: Synthetic oligonucleotide
gauuuugaccaucguaggc

SEQ ID NO: 460000 - RNA, 19 nt, Artificial Sequence
  Description of Artificial Sequence: Synthetic oligonucleotide
uguuaaugacaguuggcug

SEQ ID NO: 460001 - RNA, 19 nt, Artificial Sequence
  Description of Artificial Sequence: Synthetic oligonucleotide
gcuguaauuuaauuaagag

SEQ ID NO: 460002 - RNA, 19 nt, Artificial Sequence
  Description of Artificial Sequence: Synthetic oligonucleotide
gagcaauaagcuuucugag

SEQ ID NO: 460003 - RNA, 19 nt, Artificial Sequence
  Description of Artificial Sequence: Synthetic oligonucleotide
acugucauucgguugaacu

SEQ ID NO: 460004 - RNA, 19 nt, Artificial Sequence
  Description of Artificial Sequence: Synthetic oligonucleotide
gguuguuaaugacaguugg

SEQ ID NO: 460005 - RNA, 19 nt, Artificial Sequence
  Description of Artificial Sequence: Synthetic oligonucleotide
uugugaaaauaaauccuga

SEQ ID NO: 460006 - RNA, 19 nt, Artificial Sequence
  Description of Artificial Sequence: Synthetic oligonucleotide
uuuaauuaagagucagcau

SEQ ID NO: 460007 - RNA, 19 nt, Artificial Sequence
  Description of Artificial Sequence: Synthetic oligonucleotide
aguaacugcacaauucauc

SEQ ID NO: 460008 - RNA, 19 nt, Artificial Sequence
  Description of Artificial Sequence: Synthetic oligonucleotide
gaugaaauugcacuuagau

SEQ ID NO: 460009 - RNA, 19 nt, Artificial Sequence
  Description of Artificial Sequence: Synthetic oligonucleotide
ucaaaucauaugauggcau

SEQ ID NO: 460010 - RNA, 19 nt, Artificial Sequence
  Description of Artificial Sequence: Synthetic oligonucleotide
uuugcuuccgcucaucauu

SEQ ID NO: 460011 - RNA, 19 nt, Artificial Sequence
  Description of Artificial Sequence: Synthetic oligonucleotide
acagaauucuccaggcucc

SEQ ID NO: 460012 - RNA, 19 nt, Artificial Sequence
  Description of Artificial Sequence: Synthetic oligonucleotide
acuacuaaaaucugaggua

SEQ ID NO: 460013 - RNA, 19 nt, Artificial Sequence
  Description of Artificial Sequence: Synthetic oligonucleotide
aauguucuauaacuggcuu

SEQ ID NO: 460014 - RNA, 19 nt, Artificial Sequence
  Description of Artificial Sequence: Synthetic oligonucleotide
uuauuguuaaauguucuau

SEQ ID NO: 460015 - RNA, 19 nt, Artificial Sequence
  Description of Artificial Sequence: Synthetic oligonucleotide
gcaucaaaucauaugaugg

SEQ ID NO: 460016 - RNA, 19 nt, Artificial Sequence
  Description of Artificial Sequence: Synthetic oligonucleotide
uauugucgcagauugcugu

SEQ ID NO: 460017 - RNA, 19 nt, Artificial Sequence
  Description of Artificial Sequence: Synthetic oligonucleotide
acucuuaauuugcuugggg

SEQ ID NO: 460018 - RNA, 19 nt, Artificial Sequence
  Description of Artificial Sequence: Synthetic oligonucleotide
uuaaugacaguuggcuggg

SEQ ID NO: 460019 - RNA, 19 nt, Artificial Sequence
  Description of Artificial Sequence: Synthetic oligonucleotide
cacuauaugaaaugaauaa

SEQ ID NO: 460020 - RNA, 19 nt, Artificial Sequence
  Description of Artificial Sequence: Synthetic oligonucleotide
cagacugugugaaagcuac

SEQ ID NO: 460021 - RNA, 19 nt, Artificial Sequence
  Description of Artificial Sequence: Synthetic oligonucleotide
agacuuacucuucaggcca

SEQ ID NO: 460022 - RNA, 19 nt, Artificial Sequence
  Description of Artificial Sequence: Synthetic oligonucleotide
caucauuuaguugguaagg

SEQ ID NO: 460023 - RNA, 19 nt, Artificial Sequence
  Description of Artificial Sequence: Synthetic oligonucleotide
gguaauacaaaaugaccug

SEQ ID NO: 460024 - RNA, 19 nt, Artificial Sequence
  Description of Artificial Sequence: Synthetic oligonucleotide
agucauauaucacaagaua

SEQ ID NO: 460025 - RNA, 19 nt, Artificial Sequence
  Description of Artificial Sequence: Synthetic oligonucleotide
uuuuauugacccucucuac

SEQ ID NO: 460026 - RNA, 19 nt, Artificial Sequence
  Description of Artificial Sequence: Synthetic oligonucleotide
ugcuggguuaaguuaauac

SEQ ID NO: 460027 - RNA, 19 nt, Artificial Sequence
  Description of Artificial Sequence: Synthetic oligonucleotide
ugucauccuuucauagacg

SEQ ID NO: 460028 - RNA, 19 nt, Artificial Sequence
  Description of Artificial Sequence: Synthetic oligonucleotide
uuggggagcaauaagcuuu

SEQ ID NO: 460029 - RNA, 19 nt, Artificial Sequence
  Description of Artificial Sequence: Synthetic oligonucleotide
ucuauaucucucuuagcaa

SEQ ID NO: 460030 - RNA, 19 nt, Artificial Sequence
  Description of Artificial Sequence: Synthetic oligonucleotide
uaugcccuuuauaauguga

SEQ ID NO: 460031 - RNA, 19 nt, Artificial Sequence
  Description of Artificial Sequence: Synthetic oligonucleotide
ucuuugacugagauaggcu

SEQ ID NO: 460032 - RNA, 19 nt, Artificial Sequence
  Description of Artificial Sequence: Synthetic oligonucleotide
gauguauuugcuuccgcuc

SEQ ID NO: 460033 - RNA, 19 nt, Artificial Sequence
  Description of Artificial Sequence: Synthetic oligonucleotide
ucguuuaugcugcucuuug

SEQ ID NO: 460034 - RNA, 19 nt, Artificial Sequence
  Description of Artificial Sequence: Synthetic oligonucleotide
ugaaagacacaaacaguaa

SEQ ID NO: 460035 - RNA, 19 nt, Artificial Sequence
  Description of Artificial Sequence: Synthetic oligonucleotide
ugagauaggcucccguaug

SEQ ID NO: 460036 - RNA, 19 nt, Artificial Sequence
  Description of Artificial Sequence: Synthetic oligonucleotide
cugucauccuuucauagac

SEQ ID NO: 460037 - RNA, 19 nt, Artificial Sequence
  Description of Artificial Sequence: Synthetic oligonucleotide
gagguaacagagcauuaug

SEQ ID NO: 460038 - RNA, 19 nt, Artificial Sequence
  Description of Artificial Sequence: Synthetic oligonucleotide
acaagauaacuuaguaaac

SEQ ID NO: 460039 - RNA, 19 nt, Artificial Sequence
  Description of Artificial Sequence: Synthetic oligonucleotide
ucuacccaccaccagguac

SEQ ID NO: 460040 - RNA, 19 nt, Artificial Sequence
  Description of Artificial Sequence: Synthetic oligonucleotide
ugcugagcgacccugaauu

SEQ ID NO: 460041 - RNA, 19 nt, Artificial Sequence
  Description of Artificial Sequence: Synthetic oligonucleotide
gaaauugcacuuagauggg

SEQ ID NO: 460042 - RNA, 19 nt, Artificial Sequence
  Description of Artificial Sequence: Synthetic oligonucleotide
ugagcgacccugaauuuca

SEQ ID NO: 460043 - RNA, 19 nt, Artificial Sequence
  Description of Artificial Sequence: Synthetic oligonucleotide
uuaccaggcucuaccacag

SEQ ID NO: 460044 - RNA, 19 nt, Artificial Sequence
  Description of Artificial Sequence: Synthetic oligonucleotide
aacgaggucucacauggaa

SEQ ID NO: 460045 - RNA, 19 nt, Artificial Sequence
  Description of Artificial Sequence: Synthetic oligonucleotide
gacuucgcuuucuagaauc

SEQ ID NO: 460046 - RNA, 19 nt, Artificial Sequence
  Description of Artificial Sequence: Synthetic oligonucleotide
uuugaggguuuucacggcu

SEQ ID NO: 460047 - RNA, 19 nt, Artificial Sequence
  Description of Artificial Sequence: Synthetic oligonucleotide
caccagauuuaccuaaacc

SEQ ID NO: 460048 - RNA, 19 nt, Artificial Sequence
  Description of Artificial Sequence: Synthetic oligonucleotide
caguaaaucacuucuaaua

SEQ ID NO: 460049 - RNA, 19 nt, Artificial Sequence
  Description of Artificial Sequence: Synthetic oligonucleotide
auagacguauucaacuguc

SEQ ID NO: 460050 - RNA, 19 nt, Artificial Sequence
  Description of Artificial Sequence: Synthetic oligonucleotide
ugucauucgguugaacuga

SEQ ID NO: 460051 - RNA, 19 nt, Artificial Sequence
  Description of Artificial Sequence: Synthetic oligonucleotide
uuauugacccucucuacau

SEQ ID NO: 460052 - RNA, 19 nt, Artificial Sequence
  Description of Artificial Sequence: Synthetic oligonucleotide
agauccucuaggugaagag

SEQ ID NO: 460053 - RNA, 19 nt, Artificial Sequence
  Description of Artificial Sequence: Synthetic oligonucleotide
acuaaaaucugagguaaca

SEQ ID NO: 460054 - RNA, 19 nt, Artificial Sequence
  Description of Artificial Sequence: Synthetic oligonucleotide
ucauuuaguugguaaggaa

SEQ ID NO: 460055 - RNA, 19 nt, Artificial Sequence
  Description of Artificial Sequence: Synthetic oligonucleotide
gauaggcucccguaugccc

SEQ ID NO: 460056 - RNA, 19 nt, Artificial Sequence
  Description of Artificial Sequence: Synthetic oligonucleotide
gacuuuauauauugucgca

SEQ ID NO: 460057 - RNA, 19 nt, Artificial Sequence
  Description of Artificial Sequence: Synthetic oligonucleotide
gcauugacuuuauauauug

SEQ ID NO: 460058 - RNA, 19 nt, Artificial Sequence
  Description of Artificial Sequence: Synthetic oligonucleotide
uuuguagaucugccucacg

SEQ ID NO: 460059 - RNA, 19 nt, Artificial Sequence
  Description of Artificial Sequence: Synthetic oligonucleotide
cuucaaccagaguauguag

SEQ ID NO: 460060 - RNA, 19 nt, Artificial Sequence
  Description of Artificial Sequence: Synthetic oligonucleotide
caccaauguaucuucaguc

SEQ ID NO: 460061 - RNA, 19 nt, Artificial Sequence
  Description of Artificial Sequence: Synthetic oligonucleotide
auguguucguccauuuacc

SEQ ID NO: 460062 - RNA, 19 nt, Artificial Sequence
  Description of Artificial Sequence: Synthetic oligonucleotide
augaauuacaauacugaga

SEQ ID NO: 460063 - RNA, 19 nt, Artificial Sequence
  Description of Artificial Sequence: Synthetic oligonucleotide
cugucauucgguugaacug

SEQ ID NO: 460064 - RNA, 19 nt, Artificial Sequence
  Description of Artificial Sequence: Synthetic oligonucleotide
guaucauucaauguacaca

SEQ ID NO: 460065 - RNA, 19 nt, Artificial Sequence
  Description of Artificial Sequence: Synthetic oligonucleotide
gcuuauacaaacuacuaaa

SEQ ID NO: 460066 - RNA, 19 nt, Artificial Sequence
  Description of Artificial Sequence: Synthetic oligonucleotide
gguuaaguuaauacaagug

SEQ ID NO: 460067 - RNA, 19 nt, Artificial Sequence
  Description of Artificial Sequence: Synthetic oligonucleotide
uggcauuuacaagauaacu

SEQ ID NO: 460068 - RNA, 19 nt, Artificial Sequence
  Description of Artificial Sequence: Synthetic oligonucleotide
guaacugcacaauucaucu

SEQ ID NO: 460069 - RNA, 19 nt, Artificial Sequence
  Description of Artificial Sequence: Synthetic oligonucleotide
caaaucauaugauggcauc

SEQ ID NO: 460070 - RNA, 19 nt, Artificial Sequence
  Description of Artificial Sequence: Synthetic oligonucleotide
aucaaaucauaugauggca

SEQ ID NO: 460071 - RNA, 19 nt, Artificial Sequence
  Description of Artificial Sequence: Synthetic oligonucleotide
uugguagaaguuucuuggc

SEQ ID NO: 460072 - RNA, 19 nt, Artificial Sequence
  Description of Artificial Sequence: Synthetic oligonucleotide
uuuuaccaggcucuaccac

SEQ ID NO: 460073 - RNA, 19 nt, Artificial Sequence
  Description of Artificial Sequence: Synthetic oligonucleotide
gagauaggcucccguaugc

SEQ ID NO: 460074 - RNA, 19 nt, Artificial Sequence
  Description of Artificial Sequence: Synthetic oligonucleotide
agauaacuuaguaaacucu

SEQ ID NO: 460075 - RNA, 19 nt, Artificial Sequence
  Description of Artificial Sequence: Synthetic oligonucleotide
gaccaucguaggcugaaag

SEQ ID NO: 460076 - RNA, 19 nt, Artificial Sequence
  Description of Artificial Sequence: Synthetic oligonucleotide
uggaauuagcuguaauuua

SEQ ID NO: 460077 - RNA, 19 nt, Artificial Sequence
  Description of Artificial Sequence: Synthetic oligonucleotide
cuuuugacagauggguagg

SEQ ID NO: 460078 - RNA, 19 nt, Artificial Sequence
  Description of Artificial Sequence: Synthetic oligonucleotide
guagaaguuucuuggcaug

SEQ ID NO: 460079 - RNA, 19 nt, Artificial Sequence
  Description of Artificial Sequence: Synthetic oligonucleotide
uacaggguagaaguuauaa

SEQ ID NO: 460080 - RNA, 19 nt, Artificial Sequence
  Description of Artificial Sequence: Synthetic oligonucleotide
cauaguuucugaugaucug

SEQ ID NO: 460081 - RNA, 19 nt, Artificial Sequence
  Description of Artificial Sequence: Synthetic oligonucleotide
cuggguuaaguuaauacaa

SEQ ID NO: 460082 - RNA, 19 nt, Artificial Sequence
  Description of Artificial Sequence: Synthetic oligonucleotide
augacaguuggcugggucu

SEQ ID NO: 460083 - RNA, 19 nt, Artificial Sequence
  Description of Artificial Sequence: Synthetic oligonucleotide
ccuaauaaagcacuauaug

SEQ ID NO: 460084 - RNA, 19 nt, Artificial Sequence
  Description of Artificial Sequence: Synthetic oligonucleotide
aacugagcuguaucauuca

SEQ ID NO: 460085 - RNA, 19 nt, Artificial Sequence
  Description of Artificial Sequence: Synthetic oligonucleotide
uuccgcucaucauugguca

SEQ ID NO: 460086 - RNA, 19 nt, Artificial Sequence
  Description of Artificial Sequence: Synthetic oligonucleotide
augacuucgcuuucuagaa

SEQ ID NO: 460087 - RNA, 19 nt, Artificial Sequence
  Description of Artificial Sequence: Synthetic oligonucleotide
acacgcuaaaauuacuuuu

SEQ ID NO: 460088 - RNA, 19 nt, Artificial Sequence
  Description of Artificial Sequence: Synthetic oligonucleotide
aauuaagagucagcauuga

SEQ ID NO: 460089 - RNA, 19 nt, Artificial Sequence
  Description of Artificial Sequence: Synthetic oligonucleotide
ggauguggugcacagacug

SEQ ID NO: 460090 - RNA, 19 nt, Artificial Sequence
  Description of Artificial Sequence: Synthetic oligonucleotide
acagagcauuaugaaagac

SEQ ID NO: 460091 - RNA, 19 nt, Artificial Sequence
  Description of Artificial Sequence: Synthetic oligonucleotide
guauaaucuugguagaagu

SEQ ID NO: 460092 - RNA, 19 nt, Artificial Sequence
  Description of Artificial Sequence: Synthetic oligonucleotide
auauauugucgcagauugc

SEQ ID NO: 460093 - RNA, 19 nt, Artificial Sequence
  Description of Artificial Sequence: Synthetic oligonucleotide
uguccaacccaucuuucuc

SEQ ID NO: 460094 - RNA, 19 nt, Artificial Sequence
  Description of Artificial Sequence: Synthetic oligonucleotide
ucaaagcaccaauguaucu

SEQ ID NO: 460095 - RNA, 19 nt, Artificial Sequence
  Description of Artificial Sequence: Synthetic oligonucleotide
uauaucucucuuagcaauu

SEQ ID NO: 460096 - RNA, 19 nt, Artificial Sequence
  Description of Artificial Sequence: Synthetic oligonucleotide
uuuugaggguuuucacggc

SEQ ID NO: 460097 - RNA, 19 nt, Artificial Sequence
  Description of Artificial Sequence: Synthetic oligonucleotide
uagacguauucaacuguca

SEQ ID NO: 460098 - RNA, 19 nt, Artificial Sequence
  Description of Artificial Sequence: Synthetic oligonucleotide
agaauucucguaaacuaca

SEQ ID NO: 460099 - RNA, 19 nt, Artificial Sequence
  Description of Artificial Sequence: Synthetic oligonucleotide
ucuugaguauaaucuuggu

SEQ ID NO: 460100 - RNA, 19 nt, Artificial Sequence
  Description of Artificial Sequence: Synthetic oligonucleotide
gauuggaagaauucucgua

SEQ ID NO: 460101 - RNA, 19 nt, Artificial Sequence
  Description of Artificial Sequence: Synthetic oligonucleotide
caagauacaguaaaucacu

SEQ ID NO: 460102 - RNA, 19 nt, Artificial Sequence
  Description of Artificial Sequence: Synthetic oligonucleotide
aaucugaguggcucucaga

SEQ ID NO: 460103 - RNA, 19 nt, Artificial Sequence
  Description of Artificial Sequence: Synthetic oligonucleotide
guuaauacaaguggacaga

SEQ ID NO: 460104 - RNA, 19 nt, Artificial Sequence
  Description of Artificial Sequence: Synthetic oligonucleotide
ggauuuugaccaucguagg

SEQ ID NO: 460105 - RNA, 19 nt, Artificial Sequence
  Description of Artificial Sequence: Synthetic oligonucleotide
gugaaagcuacaauggaga

SEQ ID NO: 460106 - RNA, 19 nt, Artificial Sequence
  Description of Artificial Sequence: Synthetic oligonucleotide
aucauuuaguugguaagga

SEQ ID NO: 460107 - RNA, 19 nt, Artificial Sequence
  Description of Artificial Sequence: Synthetic oligonucleotide
uuuucacggcuucuccagc

SEQ ID NO: 460108 - RNA, 19 nt, Artificial Sequence
  Description of Artificial Sequence: Synthetic oligonucleotide
guuguuaaugacaguuggc

SEQ ID NO: 460109 - RNA, 19 nt, Artificial Sequence
  Description of Artificial Sequence: Synthetic oligonucleotide
agcacuauaugaaaugaau

SEQ ID NO: 460110 - RNA, 19 nt, Artificial Sequence
  Description of Artificial Sequence: Synthetic oligonucleotide
agacguauucaacugucau

SEQ ID NO: 460111 - RNA, 19 nt, Artificial Sequence
  Description of Artificial Sequence: Synthetic oligonucleotide
aaauguguucguccauuua

SEQ ID NO: 460112 - RNA, 19 nt, Artificial Sequence
  Description of Artificial Sequence: Synthetic oligonucleotide
caugacaagcucauaaugu

SEQ ID NO: 460113 - RNA, 19 nt, Artificial Sequence
  Description of Artificial Sequence: Synthetic oligonucleotide
aauaccuaauaaagcacua

SEQ ID NO: 460114 - RNA, 19 nt, Artificial Sequence
  Description of Artificial Sequence: Synthetic oligonucleotide
ugaacugagcuguaucauu

SEQ ID NO: 460115 - RNA, 19 nt, Artificial Sequence
  Description of Artificial Sequence: Synthetic oligonucleotide
agauaggcucccguaugcc

SEQ ID NO: 460116 - RNA, 19 nt, Artificial Sequence
  Description of Artificial Sequence: Synthetic oligonucleotide
auaaggugaaacaucuuaa

SEQ ID NO: 460117 - RNA, 19 nt, Artificial Sequence
  Description of Artificial Sequence: Synthetic oligonucleotide
aucguaggcugaaagguag

SEQ ID NO: 460118 - RNA, 19 nt, Artificial Sequence
  Description of Artificial Sequence: Synthetic oligonucleotide
acaauacugagaauuccca

SEQ ID NO: 460119 - RNA, 19 nt, Artificial Sequence
  Description of Artificial Sequence: Synthetic oligonucleotide
uaauacaaguggacagaau

SEQ ID NO: 460120 - RNA, 19 nt, Artificial Sequence
  Description of Artificial Sequence: Synthetic oligonucleotide
ucaccagauuuaccuaaac

SEQ ID NO: 460121 - RNA, 19 nt, Artificial Sequence
  Description of Artificial Sequence: Synthetic oligonucleotide
acaggguagaaguuauaaa

SEQ ID NO: 460122 - RNA, 19 nt, Artificial Sequence
  Description of Artificial Sequence: Synthetic oligonucleotide
aaauugcacuuagaugggu

SEQ ID NO: 460123 - RNA, 19 nt, Artificial Sequence
  Description of Artificial Sequence: Synthetic oligonucleotide
gcuggguuaaguuaauaca

SEQ ID NO: 460124 - RNA, 19 nt, Artificial Sequence
  Description of Artificial Sequence: Synthetic oligonucleotide
uguuugaguugaucuagua

SEQ ID NO: 460125 - RNA, 19 nt, Artificial Sequence
  Description of Artificial Sequence: Synthetic oligonucleotide
caaugacuucgcuuucuag

SEQ ID NO: 460126 - RNA, 19 nt, Artificial Sequence
  Description of Artificial Sequence: Synthetic oligonucleotide
cuacuaaaaucugagguaa

SEQ ID NO: 460127 - RNA, 19 nt, Artificial Sequence
  Description of Artificial Sequence: Synthetic oligonucleotide
cuugaguauaaucuuggua

SEQ ID NO: 460128 - RNA, 19 nt, Artificial Sequence
  Description of Artificial Sequence: Synthetic oligonucleotide
cauacacuaacucuuauuu

SEQ ID NO: 460129 - RNA, 19 nt, Artificial Sequence
  Description of Artificial Sequence: Synthetic oligonucleotide
uuuggggagcaauaagcuu

SEQ ID NO: 460130 - RNA, 19 nt, Artificial Sequence
  Description of Artificial Sequence: Synthetic oligonucleotide
uauugacccucucuacauc

SEQ ID NO: 460131 - RNA, 19 nt, Artificial Sequence
  Description of Artificial Sequence: Synthetic oligonucleotide
auauaucacaagauacagu

SEQ ID NO: 460132 - RNA, 19 nt, Artificial Sequence
  Description of Artificial Sequence: Synthetic oligonucleotide
gaaguaacuuucaaagccu

SEQ ID NO: 460133 - RNA, 19 nt, Artificial Sequence
  Description of Artificial Sequence: Synthetic oligonucleotide
ucguaaacuacaagaucuu

SEQ ID NO: 460134 - RNA, 19 nt, Artificial Sequence
  Description of Artificial Sequence: Synthetic oligonucleotide
uucugcaaugacuucgcuu

SEQ ID NO: 460135 - RNA, 19 nt, Artificial Sequence
  Description of Artificial Sequence: Synthetic oligonucleotide
ugucgcagauugcugugcu

SEQ ID NO: 460136 - RNA, 19 nt, Artificial Sequence
  Description of Artificial Sequence: Synthetic oligonucleotide
uaccuaucauggcccaccc

SEQ ID NO: 460137 - RNA, 19 nt, Artificial Sequence
  Description of Artificial Sequence: Synthetic oligonucleotide
cagcaguugauuuccuaug

SEQ ID NO: 460138 - RNA, 19 nt, Artificial Sequence
  Description of Artificial Sequence: Synthetic oligonucleotide
guuuucuacccaccaccag

SEQ ID NO: 460139 - RNA, 19 nt, Artificial Sequence
  Description of Artificial Sequence: Synthetic oligonucleotide
aacugucauucgguugaac

SEQ ID NO: 460140 - RNA, 19 nt, Artificial Sequence
  Description of Artificial Sequence: Synthetic oligonucleotide
uugccuuggauguggugca

SEQ ID NO: 460141 - RNA, 19 nt, Artificial Sequence
  Description of Artificial Sequence: Synthetic oligonucleotide
acaaguggacagaauucuc

SEQ ID NO: 460142 - RNA, 19 nt, Artificial Sequence
  Description of Artificial Sequence: Synthetic oligonucleotide
auagcaguuuuaaguaugu

SEQ ID NO: 460143 - RNA, 19 nt, Artificial Sequence
  Description of Artificial Sequence: Synthetic oligonucleotide
acugagauaggcucccgua

SEQ ID NO: 460144 - RNA, 19 nt, Artificial Sequence
  Description of Artificial Sequence: Synthetic oligonucleotide
guaccuaucauggcccacc

SEQ ID NO: 460145 - RNA, 19 nt, Artificial Sequence
  Description of Artificial Sequence: Synthetic oligonucleotide
cagcuaagcagugaucuug

SEQ ID NO: 460146 - RNA, 19 nt, Artificial Sequence
  Description of Artificial Sequence: Synthetic oligonucleotide
agccaacuaaccuuuucau

SEQ ID NO: 460147 - RNA, 19 nt, Artificial Sequence
  Description of Artificial Sequence: Synthetic oligonucleotide
gaaagagucuugaguauaa

SEQ ID NO: 460148 - RNA, 19 nt, Artificial Sequence
  Description of Artificial Sequence: Synthetic oligonucleotide
accuaucauggcccacccc

SEQ ID NO: 460149 - RNA, 19 nt, Artificial Sequence
  Description of Artificial Sequence: Synthetic oligonucleotide
uuugaccaucguaggcuga

SEQ ID NO: 460150 - RNA, 19 nt, Artificial Sequence
  Description of Artificial Sequence: Synthetic oligonucleotide
uuugaacuacuagcuacaa

SEQ ID NO: 460151 - RNA, 19 nt, Artificial Sequence
  Description of Artificial Sequence: Synthetic oligonucleotide
ucguaggcugaaagguagc

SEQ ID NO: 460152 - RNA, 19 nt, Artificial Sequence
  Description of Artificial Sequence: Synthetic oligonucleotide
uucagucuuuuaccaggcu

SEQ ID NO: 460153 - RNA, 19 nt, Artificial Sequence
  Description of Artificial Sequence: Synthetic oligonucleotide
acagucccuuucuucaggu

SEQ ID NO: 460154 - RNA, 19 nt, Artificial Sequence
  Description of Artificial Sequence: Synthetic oligonucleotide
cuuuuaccaggcucuacca

SEQ ID NO: 460155 - RNA, 19 nt, Artificial Sequence
  Description of Artificial Sequence: Synthetic oligonucleotide
cacgcuaaaauuacuuuua

SEQ ID NO: 460156 - RNA, 19 nt, Artificial Sequence
  Description of Artificial Sequence: Synthetic oligonucleotide
uuuggccuuuggaagguuu

SEQ ID NO: 460157 - RNA, 19 nt, Artificial Sequence
  Description of Artificial Sequence: Synthetic oligonucleotide
caagauaacuuaguaaacu

SEQ ID NO: 460158 - RNA, 19 nt, Artificial Sequence
  Description of Artificial Sequence: Synthetic oligonucleotide
cuauaacuggcuucacaca

SEQ ID NO: 460159 - RNA, 19 nt, Artificial Sequence
  Description of Artificial Sequence: Synthetic oligonucleotide
uagcaauuuuauugacccu

SEQ ID NO: 460160 - RNA, 19 nt, Artificial Sequence
  Description of Artificial Sequence: Synthetic oligonucleotide
cuacaauggagaguugcuc

SEQ ID NO: 460161 - RNA, 19 nt, Artificial Sequence
  Description of Artificial Sequence: Synthetic oligonucleotide
aaagagucuugaguauaau

SEQ ID NO: 460162 - RNA, 19 nt, Artificial Sequence
  Description of Artificial Sequence: Synthetic oligonucleotide
uggggcaugacaagcucau

SEQ ID NO: 460163 - RNA, 19 nt, Artificial Sequence
  Description of Artificial Sequence: Synthetic oligonucleotide
cuuaagaaugaauacucuu

SEQ ID NO: 460164 - RNA, 19 nt, Artificial Sequence
  Description of Artificial Sequence: Synthetic oligonucleotide
acgcuaaaauuacuuuuaa

SEQ ID NO: 460165 - RNA, 19 nt, Artificial Sequence
  Description of Artificial Sequence: Synthetic oligonucleotide
auaagcuuucugagagagg

SEQ ID NO: 460166 - RNA, 19 nt, Artificial Sequence
  Description of Artificial Sequence: Synthetic oligonucleotide
uccgccguuuucuacccac

SEQ ID NO: 460167 - RNA, 19 nt, Artificial Sequence
  Description of Artificial Sequence: Synthetic oligonucleotide
cugacaaaauguguucguc

SEQ ID NO: 460168 - RNA, 19 nt, Artificial Sequence
  Description of Artificial Sequence: Synthetic oligonucleotide
auaccuaauaaagcacuau

SEQ ID NO: 460169 - RNA, 19 nt, Artificial Sequence
  Description of Artificial Sequence: Synthetic oligonucleotide
cuauaucucucuuagcaau

SEQ ID NO: 460170 - RNA, 19 nt, Artificial Sequence
  Description of Artificial Sequence: Synthetic oligonucleotide
uaucucucuuagcaauuuu

SEQ ID NO: 460171 - RNA, 19 nt, Artificial Sequence
  Description of Artificial Sequence: Synthetic oligonucleotide
ggccauaaggaucuuccug

SEQ ID NO: 460172 - RNA, 19 nt, Artificial Sequence
  Description of Artificial Sequence: Synthetic oligonucleotide
agguuguuaaugacaguug

SEQ ID NO: 460173 - RNA, 19 nt, Artificial Sequence
  Description of Artificial Sequence: Synthetic oligonucleotide
ggaauuagcuguaauuuaa

SEQ ID NO: 460174 - RNA, 19 nt, Artificial Sequence
  Description of Artificial Sequence: Synthetic oligonucleotide
ugccucacguggcauuuac

SEQ ID NO: 460175 - RNA, 19 nt, Artificial Sequence
  Description of Artificial Sequence: Synthetic oligonucleotide
ucgcagauugcugugcuau

SEQ ID NO: 460176 - RNA, 19 nt, Artificial Sequence
  Description of Artificial Sequence: Synthetic oligonucleotide
cuuccgccguuuucuaccc

SEQ ID NO: 460177 - RNA, 19 nt, Artificial Sequence
  Description of Artificial Sequence: Synthetic oligonucleotide
ccguuuucuacccaccacc

SEQ ID NO: 460178 - RNA, 19 nt, Artificial Sequence
  Description of Artificial Sequence: Synthetic oligonucleotide
gaauucucguaaacuacaa

SEQ ID NO: 460179 - RNA, 19 nt, Artificial Sequence
  Description of Artificial Sequence: Synthetic oligonucleotide
cuucugauugaaucaaggu

SEQ ID NO: 460180 - RNA, 19 nt, Artificial Sequence
  Description of Artificial Sequence: Synthetic oligonucleotide
cuaugcccuuuauaaugug

SEQ ID NO: 460181 - RNA, 19 nt, Artificial Sequence
  Description of Artificial Sequence: Synthetic oligonucleotide
auauugucgcagauugcug

SEQ ID NO: 460182 - RNA, 19 nt, Artificial Sequence
  Description of Artificial Sequence: Synthetic oligonucleotide
cuucagcuaagcagugauc

SEQ ID NO: 460183 - RNA, 19 nt, Artificial Sequence
  Description of Artificial Sequence: Synthetic oligonucleotide
ucauccuuucauagacgua

SEQ ID NO: 460184 - RNA, 19 nt, Artificial Sequence
  Description of Artificial Sequence: Synthetic oligonucleotide
agcauacacuaacucuuau

SEQ ID NO: 460185 - RNA, 19 nt, Artificial Sequence
  Description of Artificial Sequence: Synthetic oligonucleotide
agagcgggcauaguuucug

SEQ ID NO: 460186 - RNA, 19 nt, Artificial Sequence
  Description of Artificial Sequence: Synthetic oligonucleotide
cucaaguaaugcucucuca

SEQ ID NO: 460187 - RNA, 19 nt, Artificial Sequence
  Description of Artificial Sequence: Synthetic oligonucleotide
guguucguccauuuaccuc

SEQ ID NO: 460188 - RNA, 19 nt, Artificial Sequence
  Description of Artificial Sequence: Synthetic oligonucleotide
ugacuucgcuuucuagaau

SEQ ID NO: 460189 - RNA, 19 nt, Artificial Sequence
  Description of Artificial Sequence: Synthetic oligonucleotide
cuuacucuucaggccauac

SEQ ID NO: 460190 - RNA, 19 nt, Artificial Sequence
  Description of Artificial Sequence: Synthetic oligonucleotide
acucuucaaccagaguaug

SEQ ID NO: 460191 - RNA, 19 nt, Artificial Sequence
  Description of Artificial Sequence: Synthetic oligonucleotide
aggucucacauggaauuug

SEQ ID NO: 460192 - RNA, 19 nt, Artificial Sequence
  Description of Artificial Sequence: Synthetic oligonucleotide
agcucauaaugucccacuu

SEQ ID NO: 460193 - RNA, 19 nt, Artificial Sequence
  Description of Artificial Sequence: Synthetic oligonucleotide
ggaagguuugggcagcauc

SEQ ID NO: 460194 - RNA, 19 nt, Artificial Sequence
  Description of Artificial Sequence: Synthetic oligonucleotide
auaggcucccguaugcccu

SEQ ID NO: 460195 - RNA, 19 nt, Artificial Sequence
  Description of Artificial Sequence: Synthetic oligonucleotide
agcugcauguugcuuguuu

SEQ ID NO: 460196 - RNA, 19 nt, Artificial Sequence
  Description of Artificial Sequence: Synthetic oligonucleotide
uuccagcggaguccuguca

SEQ ID NO: 460197 - RNA, 19 nt, Artificial Sequence
  Description of Artificial Sequence: Synthetic oligonucleotide
auggagaguugcucugagu

SEQ ID NO: 460198 - RNA, 19 nt, Artificial Sequence
  Description of Artificial Sequence: Synthetic oligonucleotide
aucucucuuagcaauuuua

SEQ ID NO: 460199 - RNA, 19 nt, Artificial Sequence
  Description of Artificial Sequence: Synthetic oligonucleotide
aggcucaaaacgaggucuc

SEQ ID NO: 460200 - RNA, 19 nt, Artificial Sequence
  Description of Artificial Sequence: Synthetic oligonucleotide
ucagcuaagcagugaucuu

SEQ ID NO: 460201 - RNA, 19 nt, Artificial Sequence
  Description of Artificial Sequence: Synthetic oligonucleotide
uuuccagcggaguccuguc

SEQ ID NO: 460202 - RNA, 19 nt, Artificial Sequence
  Description of Artificial Sequence: Synthetic oligonucleotide
uuacaggguagaaguuaua

SEQ ID NO: 460203 - RNA, 19 nt, Artificial Sequence
  Description of Artificial Sequence: Synthetic oligonucleotide
cauccuuucauagacguau

SEQ ID NO: 460204 - RNA, 19 nt, Artificial Sequence
  Description of Artificial Sequence: Synthetic oligonucleotide
gacguauucaacugucauu

SEQ ID NO: 460205 - RNA, 19 nt, Artificial Sequence
  Description of Artificial Sequence: Synthetic oligonucleotide
auaucucucuuagcaauuu

SEQ ID NO: 460206 - RNA, 19 nt, Artificial Sequence
  Description of Artificial Sequence: Synthetic oligonucleotide
aagcauacacuaacucuua

SEQ ID NO: 460207 - RNA, 19 nt, Artificial Sequence
  Description of Artificial Sequence: Synthetic oligonucleotide
cauagacguauucaacugu

SEQ ID NO: 460208 - RNA, 19 nt, Artificial Sequence
  Description of Artificial Sequence: Synthetic oligonucleotide
gucauucgguugaacugag

SEQ ID NO: 460209 - RNA, 19 nt, Artificial Sequence
  Description of Artificial Sequence: Synthetic oligonucleotide
ggguuaaguuaauacaagu

SEQ ID NO: 460210 - RNA, 19 nt, Artificial Sequence
  Description of Artificial Sequence: Synthetic oligonucleotide
caacuaaccuuuucaucaa

SEQ ID NO: 460211 - RNA, 19 nt, Artificial Sequence
  Description of Artificial Sequence: Synthetic oligonucleotide
cagcggaguccugucaucc

SEQ ID NO: 460212 - RNA, 19 nt, Artificial Sequence
  Description of Artificial Sequence: Synthetic oligonucleotide
cuagaaucaccuugcauuu

SEQ ID NO: 460213 - RNA, 19 nt, Artificial Sequence
  Description of Artificial Sequence: Synthetic oligonucleotide
accuugcauuuccagcgga

SEQ ID NO: 460214 - RNA, 19 nt, Artificial Sequence
  Description of Artificial Sequence: Synthetic oligonucleotide
cugagcgacccugaauuuc

SEQ ID NO: 460215 - RNA, 19 nt, Artificial Sequence
  Description of Artificial Sequence: Synthetic oligonucleotide
cuggaauuagcuguaauuu

SEQ ID NO: 460216 - RNA, 19 nt, Artificial Sequence
  Description of Artificial Sequence: Synthetic oligonucleotide
gccaacuaaccuuuucauc

SEQ ID NO: 460217 - RNA, 19 nt, Artificial Sequence
  Description of Artificial Sequence: Synthetic oligonucleotide
acuucgcuuucuagaauca

SEQ ID NO: 460218 - RNA, 19 nt, Artificial Sequence
  Description of Artificial Sequence: Synthetic oligonucleotide
auacaguaaaucacuucua

SEQ ID NO: 460219 - RNA, 19 nt, Artificial Sequence
  Description of Artificial Sequence: Synthetic oligonucleotide
aggcuccaauaccuaauaa

SEQ ID NO: 460220 - RNA, 19 nt, Artificial Sequence
  Description of Artificial Sequence: Synthetic oligonucleotide
gcacagacugugugaaagc

SEQ ID NO: 460221 - RNA, 19 nt, Artificial Sequence
  Description of Artificial Sequence: Synthetic oligonucleotide
gagcuguaucauucaaugu

SEQ ID NO: 460222 - RNA, 19 nt, Artificial Sequence
  Description of Artificial Sequence: Synthetic oligonucleotide
uccuuccgccguuuucuac

SEQ ID NO: 460223 - RNA, 19 nt, Artificial Sequence
  Description of Artificial Sequence: Synthetic oligonucleotide
caucguaggcugaaaggua

SEQ ID NO: 460224 - RNA, 19 nt, Artificial Sequence
  Description of Artificial Sequence: Synthetic oligonucleotide
agcgggcauaguuucugau

SEQ ID NO: 460225 - RNA, 19 nt, Artificial Sequence
  Description of Artificial Sequence: Synthetic oligonucleotide
cauugacuuuauauauugu

SEQ ID NO: 460226 - RNA, 19 nt, Artificial Sequence
  Description of Artificial Sequence: Synthetic oligonucleotide
agcggaguccugucauccu

SEQ ID NO: 460227 - RNA, 19 nt, Artificial Sequence
  Description of Artificial Sequence: Synthetic oligonucleotide
gcacuauaugaaaugaaua

SEQ ID NO: 460228 - RNA, 19 nt, Artificial Sequence
  Description of Artificial Sequence: Synthetic oligonucleotide
acagcacaauuuauuguua

SEQ ID NO: 460229 - RNA, 19 nt, Artificial Sequence
  Description of Artificial Sequence: Synthetic oligonucleotide
aaacgaggucucacaugga

SEQ ID NO: 460230 - RNA, 19 nt, Artificial Sequence
  Description of Artificial Sequence: Synthetic oligonucleotide
acacuuuucuucaccccaa

SEQ ID NO: 460231 - RNA, 19 nt, Artificial Sequence
  Description of Artificial Sequence: Synthetic oligonucleotide
cauaaggaucuuccugucu

SEQ ID NO: 460232 - RNA, 19 nt, Artificial Sequence
  Description of Artificial Sequence: Synthetic oligonucleotide
acgaggucucacauggaau

SEQ ID NO: 460233 - RNA, 19 nt, Artificial Sequence
  Description of Artificial Sequence: Synthetic oligonucleotide
cugcaaugacuucgcuuuc

SEQ ID NO: 460234 - RNA, 19 nt, Artificial Sequence
  Description of Artificial Sequence: Synthetic oligonucleotide
ucgguugaacugagcugua

SEQ ID NO: 460235 - RNA, 19 nt, Artificial Sequence
  Description of Artificial Sequence: Synthetic oligonucleotide
guauuugcuuccgcucauc

SEQ ID NO: 460236 - RNA, 19 nt, Artificial Sequence
  Description of Artificial Sequence: Synthetic oligonucleotide
gcucaaaacgaggucucac

SEQ ID NO: 460237 - RNA, 19 nt, Artificial Sequence
  Description of Artificial Sequence: Synthetic oligonucleotide
guaugcccucaccagauuu

SEQ ID NO: 460238 - RNA, 19 nt, Artificial Sequence
  Description of Artificial Sequence: Synthetic oligonucleotide
uuccgccguuuucuaccca

SEQ ID NO: 460239 - RNA, 19 nt, Artificial Sequence
  Description of Artificial Sequence: Synthetic oligonucleotide
uaaugacaguuggcugggu

SEQ ID NO: 460240 - RNA, 19 nt, Artificial Sequence
  Description of Artificial Sequence: Synthetic oligonucleotide
gggaccagccaacuaaccu

SEQ ID NO: 460241 - RNA, 19 nt, Artificial Sequence
  Description of Artificial Sequence: Synthetic oligonucleotide
cugauugaaucaagguuuu

SEQ ID NO: 460242 - RNA, 19 nt, Artificial Sequence
  Description of Artificial Sequence: Synthetic oligonucleotide
gccguuuucuacccaccac

SEQ ID NO: 460243 - RNA, 19 nt, Artificial Sequence
  Description of Artificial Sequence: Synthetic oligonucleotide
accaccuguccaacccauc

SEQ ID NO: 460244 - RNA, 19 nt, Artificial Sequence
  Description of Artificial Sequence: Synthetic oligonucleotide
cuuuuauaucuuucuucuu

SEQ ID NO: 460245 - RNA, 19 nt, Artificial Sequence
  Description of Artificial Sequence: Synthetic oligonucleotide
ggagaguugcucugagucu

SEQ ID NO: 460246 - RNA, 19 nt, Artificial Sequence
  Description of Artificial Sequence: Synthetic oligonucleotide
cugagauaggcucccguau

SEQ ID NO: 460247 - RNA, 19 nt, Artificial Sequence
  Description of Artificial Sequence: Synthetic oligonucleotide
cugugcuaugcccuuuaua

SEQ ID NO: 460248 - RNA, 19 nt, Artificial Sequence
  Description of Artificial Sequence: Synthetic oligonucleotide
guaggcugaaagguagcgu

SEQ ID NO: 460249 - RNA, 19 nt, Artificial Sequence
  Description of Artificial Sequence: Synthetic oligonucleotide
ccaugagacuuacucuuca

SEQ ID NO: 460250 - RNA, 19 nt, Artificial Sequence
  Description of Artificial Sequence: Synthetic oligonucleotide
cccaugagacuuacucuuc

SEQ ID NO: 460251 - RNA, 19 nt, Artificial Sequence
  Description of Artificial Sequence: Synthetic oligonucleotide
accagaguauguagcuuuu

SEQ ID NO: 460252 - RNA, 19 nt, Artificial Sequence
  Description of Artificial Sequence: Synthetic oligonucleotide
gugcuaugcccuuuauaau

SEQ ID NO: 460253 - RNA, 19 nt, Artificial Sequence
  Description of Artificial Sequence: Synthetic oligonucleotide
cauuuccagcggaguccug

SEQ ID NO: 460254 - RNA, 19 nt, Artificial Sequence
  Description of Artificial Sequence: Synthetic oligonucleotide
acguggcauuuacaagaua

SEQ ID NO: 460255 - RNA, 19 nt, Artificial Sequence
  Description of Artificial Sequence: Synthetic oligonucleotide
agacugugugaaagcuaca

SEQ ID NO: 460256 - RNA, 19 nt, Artificial Sequence
  Description of Artificial Sequence: Synthetic oligonucleotide
caguaacugcacaauucau

SEQ ID NO: 460257 - RNA, 19 nt, Artificial Sequence
  Description of Artificial Sequence: Synthetic oligonucleotide
gcaaugacuucgcuuucua

SEQ ID NO: 460258 - RNA, 19 nt, Artificial Sequence
  Description of Artificial Sequence: Synthetic oligonucleotide
gguaaggaauuuacaugua

SEQ ID NO: 460259 - RNA, 19 nt, Artificial Sequence
  Description of Artificial Sequence: Synthetic oligonucleotide
gcaauuuuauugacccucu

SEQ ID NO: 460260 - RNA, 19 nt, Artificial Sequence
  Description of Artificial Sequence: Synthetic oligonucleotide
cagaauucuccaggcucca

SEQ ID NO: 460261 - RNA, 19 nt, Artificial Sequence
  Description of Artificial Sequence: Synthetic oligonucleotide
cugagcaaucugauguauu

SEQ ID NO: 460262 - RNA, 19 nt, Artificial Sequence
  Description of Artificial Sequence: Synthetic oligonucleotide
gcuacaauggagaguugcu

SEQ ID NO: 460263 - RNA, 19 nt, Artificial Sequence
  Description of Artificial Sequence: Synthetic oligonucleotide
cacguggcauuuacaagau

SEQ ID NO: 460264 - RNA, 19 nt, Artificial Sequence
  Description of Artificial Sequence: Synthetic oligonucleotide
ccgcucaucauuggucagc

SEQ ID NO: 460265 - RNA, 19 nt, Artificial Sequence
  Description of Artificial Sequence: Synthetic oligonucleotide
gguaccuaucauggcccac

SEQ ID NO: 460266 - RNA, 19 nt, Artificial Sequence
  Description of Artificial Sequence: Synthetic oligonucleotide
ccaucguaggcugaaaggu

SEQ ID NO: 460267 - RNA, 19 nt, Artificial Sequence
  Description of Artificial Sequence: Synthetic oligonucleotide
gcugcauguugcuuguuuu

SEQ ID NO: 460268 - RNA, 19 nt, Artificial Sequence
  Description of Artificial Sequence: Synthetic oligonucleotide
gguagguggguuguguuuu

SEQ ID NO: 460269 - RNA, 19 nt, Artificial Sequence
  Description of Artificial Sequence: Synthetic oligonucleotide
ccgccguuuucuacccacc

SEQ ID NO: 460270 - RNA, 19 nt, Artificial Sequence
  Description of Artificial Sequence: Synthetic oligonucleotide
cguuuaugcugcucuuuga

SEQ ID NO: 460271 - RNA, 19 nt, Artificial Sequence
  Description of Artificial Sequence: Synthetic oligonucleotide
gacuuacucuucaggccau

SEQ ID NO: 460272 - RNA, 19 nt, Artificial Sequence
  Description of Artificial Sequence: Synthetic oligonucleotide
ggcucaaaacgaggucuca

SEQ ID NO: 460273 - RNA, 19 nt, Artificial Sequence
  Description of Artificial Sequence: Synthetic oligonucleotide
ccagcggaguccugucauc

SEQ ID NO: 460274 - RNA, 19 nt, Artificial Sequence
  Description of Artificial Sequence: Synthetic oligonucleotide
cgcagauugcugugcuaug

SEQ ID NO: 460275 - RNA, 19 nt, Artificial Sequence
  Description of Artificial Sequence: Synthetic oligonucleotide
ccaccuguccaacccaucu

SEQ ID NO: 460276 - RNA, 19 nt, Artificial Sequence
  Description of Artificial Sequence: Synthetic oligonucleotide
cucguuuaugcugcucuuu

SEQ ID NO: 460277 - RNA, 19 nt, Artificial Sequence
  Description of Artificial Sequence: Synthetic oligonucleotide
cugcuggguuaaguuaaua

SEQ ID NO: 460278 - RNA, 19 nt, Artificial Sequence
  Description of Artificial Sequence: Synthetic oligonucleotide
caccuguccaacccaucuu

SEQ ID NO: 460279 - RNA, 19 nt, Artificial Sequence
  Description of Artificial Sequence: Synthetic oligonucleotide
gggcauaguuucugaugau

SEQ ID NO: 460280 - RNA, 19 nt, Artificial Sequence
  Description of Artificial Sequence: Synthetic oligonucleotide
gcugagcgacccugaauuu

SEQ ID NO: 460281 - RNA, 19 nt, Artificial Sequence
  Description of Artificial Sequence: Synthetic oligonucleotide
gcugugcuaugcccuuuau

SEQ ID NO: 460282 - RNA, 19 nt, Artificial Sequence
  Description of Artificial Sequence: Synthetic oligonucleotide
ggcccaccccaugagacuu

SEQ ID NO: 460283 - RNA, 19 nt, Artificial Sequence
  Description of Artificial Sequence: Synthetic oligonucleotide
cguaaacuacaagaucuuu

SEQ ID NO: 460284 - RNA, 19 nt, Artificial Sequence
  Description of Artificial Sequence: Synthetic oligonucleotide
ggggcaugacaagcucaua

SEQ ID NO: 460285 - RNA, 19 nt, Artificial Sequence
  Description of Artificial Sequence: Synthetic oligonucleotide
ggggagcaauaagcuuucu

SEQ ID NO: 460286 - RNA, 19 nt, Artificial Sequence
  Description of Artificial Sequence: Synthetic oligonucleotide
cgcuuucuagaaucaccuu

SEQ ID NO: 460287 - RNA, 19 nt, Artificial Sequence
  Description of Artificial Sequence: Synthetic oligonucleotide
aauaugauuguucucagcc

SEQ ID NO: 460288 - RNA, 19 nt, Artificial Sequence
  Description of Artificial Sequence: Synthetic oligonucleotide
auuguaaucauccuuaacc

SEQ ID NO: 460289 - RNA, 19 nt, Artificial Sequence
  Description of Artificial Sequence: Synthetic oligonucleotide
ucauauaucaauccuaugg

SEQ ID NO: 460290 - RNA, 19 nt, Artificial Sequence
  Description of Artificial Sequence: Synthetic oligonucleotide
auuaguguagucuugauac

SEQ ID NO: 460291 - RNA, 19 nt, Artificial Sequence
  Description of Artificial Sequence: Synthetic oligonucleotide
auaguuaaagccccgaacc

SEQ ID NO: 460292 - RNA, 19 nt, Artificial Sequence
  Description of Artificial Sequence: Synthetic oligonucleotide
aaccaauucaaucagccac

SEQ ID NO: 460293 - RNA, 19 nt, Artificial Sequence
  Description of Artificial Sequence: Synthetic oligonucleotide
aauagcagaauuaaaguac

SEQ ID NO: 460294 - RNA, 19 nt, Artificial Sequence
  Description of Artificial Sequence: Synthetic oligonucleotide
auaagaaccaccuauagga

SEQ ID NO: 460295 - RNA, 19 nt, Artificial Sequence
  Description of Artificial Sequence: Synthetic oligonucleotide
aauaagaaccaccuauagg

SEQ ID NO: 460296 - RNA, 19 nt, Artificial Sequence
  Description of Artificial Sequence: Synthetic oligonucleotide
acaggcguaacacacaacc

SEQ ID NO: 460297 - RNA, 19 nt, Artificial Sequence
  Description of Artificial Sequence: Synthetic oligonucleotide
cugcuuaugacaaagauug

SEQ ID NO: 460298 - RNA, 19 nt, Artificial Sequence
  Description of Artificial Sequence: Synthetic oligonucleotide
acuacaacuccccagaguc

SEQ ID NO: 460299 - RNA, 19 nt, Artificial Sequence
  Description of Artificial Sequence: Synthetic oligonucleotide
aauaaugccacuucauccu

SEQ ID NO: 460300 - RNA, 19 nt, Artificial Sequence
  Description of Artificial Sequence: Synthetic oligonucleotide
uguagaaauaagaaccacc

SEQ ID NO: 460301 - RNA, 19 nt, Artificial Sequence
  Description of Artificial Sequence: Synthetic oligonucleotide
ugauagagcagcaagguac

SEQ ID NO: 460302 - RNA, 19 nt, Artificial Sequence
  Description of Artificial Sequence: Synthetic oligonucleotide
aaauaagaaccaccuauag

SEQ ID NO: 460303 - RNA, 19 nt, Artificial Sequence
  Description of Artificial Sequence: Synthetic oligonucleotide
uaaaguguuagaacugggg

SEQ ID NO: 460304 - RNA, 19 nt, Artificial Sequence
  Description of Artificial Sequence: Synthetic oligonucleotide
uauaucaauccuaugguac

SEQ ID NO: 460305 - RNA, 19 nt, Artificial Sequence
  Description of Artificial Sequence: Synthetic oligonucleotide
aaaguguuagaacuggggu

SEQ ID NO: 460306 - RNA, 19 nt, Artificial Sequence
  Description of Artificial Sequence: Synthetic oligonucleotide
aauuacacauuuaugacca

SEQ ID NO: 460307 - RNA, 19 nt, Artificial Sequence
  Description of Artificial Sequence: Synthetic oligonucleotide
uuauguauuuacaaacugu

SEQ ID NO: 460308 - RNA, 19 nt, Artificial Sequence
  Description of Artificial Sequence: Synthetic oligonucleotide
uaaaucguaacguggaugu

SEQ ID NO: 460309 - RNA, 19 nt, Artificial Sequence
  Description of Artificial Sequence: Synthetic oligonucleotide
ucgcauuaauucuugauag

SEQ ID NO: 460310 - RNA, 19 nt, Artificial Sequence
  Description of Artificial Sequence: Synthetic oligonucleotide
uucauauacuuucauaguc

SEQ ID NO: 460311 - RNA, 19 nt, Artificial Sequence
  Description of Artificial Sequence: Synthetic oligonucleotide
aaucguaacguggauguac

SEQ ID NO: 460312 - RNA, 19 nt, Artificial Sequence
  Description of Artificial Sequence: Synthetic oligonucleotide
aguguuaucuucuugugca

SEQ ID NO: 460313 - RNA, 19 nt, Artificial Sequence
  Description of Artificial Sequence: Synthetic oligonucleotide
agcaauagauuucuccagc

SEQ ID NO: 460314 - RNA, 19 nt, Artificial Sequence
  Description of Artificial Sequence: Synthetic oligonucleotide
ucugugagcuuguacacgg

SEQ ID NO: 460315 - RNA, 19 nt, Artificial Sequence
  Description of Artificial Sequence: Synthetic oligonucleotide
aggcguaacacacaacccc

SEQ ID NO: 460316 - RNA, 19 nt, Artificial Sequence
  Description of Artificial Sequence: Synthetic oligonucleotide
aaucuuaugugcugucauc

SEQ ID NO: 460317 - RNA, 19 nt, Artificial Sequence
  Description of Artificial Sequence: Synthetic oligonucleotide
uucauuucgugcuucagug

SEQ ID NO: 460318 - RNA, 19 nt, Artificial Sequence
  Description of Artificial Sequence: Synthetic oligonucleotide
agauauugcaccagaaggc

SEQ ID NO: 460319 - RNA, 19 nt, Artificial Sequence
  Description of Artificial Sequence: Synthetic oligonucleotide
acuucuaguacuaagcguc

SEQ ID NO: 460320 - RNA, 19 nt, Artificial Sequence
  Description of Artificial Sequence: Synthetic oligonucleotide
gauacuggaaucugaauga

SEQ ID NO: 460321 - RNA, 19 nt, Artificial Sequence
  Description of Artificial Sequence: Synthetic oligonucleotide
accguccauaguuaaagcc

SEQ ID NO: 460322 - RNA, 19 nt, Artificial Sequence
  Description of Artificial Sequence: Synthetic oligonucleotide
uuguaaucauccuuaacca

SEQ ID NO: 460323 - RNA, 19 nt, Artificial Sequence
  Description of Artificial Sequence: Synthetic oligonucleotide
gacgaaagacuacagaaac

SEQ ID NO: 460324 - RNA, 19 nt, Artificial Sequence
  Description of Artificial Sequence: Synthetic oligonucleotide
caucuaaaucguaacgugg

SEQ ID NO: 460325 - RNA, 19 nt, Artificial Sequence
  Description of Artificial Sequence: Synthetic oligonucleotide
aagagauaauuuugguuug

SEQ ID NO: 460326 - RNA, 19 nt, Artificial Sequence
  Description of Artificial Sequence: Synthetic oligonucleotide
cauaccgagagucaucucc

SEQ ID NO: 460327 - RNA, 19 nt, Artificial Sequence
  Description of Artificial Sequence: Synthetic oligonucleotide
uaguuaaagccccgaaccg

SEQ ID NO: 460328 - RNA, 19 nt, Artificial Sequence
  Description of Artificial Sequence: Synthetic oligonucleotide
uuaaccacgccuuccaucu

SEQ ID NO: 460329 - RNA, 19 nt, Artificial Sequence
  Description of Artificial Sequence: Synthetic oligonucleotide
agucaaucgguccauuuuc

SEQ ID NO: 460330 - RNA, 19 nt, Artificial Sequence
  Description of Artificial Sequence: Synthetic oligonucleotide
uccuaugguacuuaggggu

SEQ ID NO: 460331 - RNA, 19 nt, Artificial Sequence
  Description of Artificial Sequence: Synthetic oligonucleotide
uggauguaaaucuuaugug

SEQ ID NO: 460332 - RNA, 19 nt, Artificial Sequence
  Description of Artificial Sequence: Synthetic oligonucleotide
caugguaaaaugucacucc

SEQ ID NO: 460333 - RNA, 19 nt, Artificial Sequence
  Description of Artificial Sequence: Synthetic oligonucleotide
uacgaggagaaccaaaauc

SEQ ID NO: 460334 - RNA, 19 nt, Artificial Sequence
  Description of Artificial Sequence: Synthetic oligonucleotide
acaauugaaaugauacugg

SEQ ID NO: 460335 - RNA, 19 nt, Artificial Sequence
  Description of Artificial Sequence: Synthetic oligonucleotide
uccuucguagauaaguucu

SEQ ID NO: 460336 - RNA, 19 nt, Artificial Sequence
  Description of Artificial Sequence: Synthetic oligonucleotide
acuaaaguguuagaacugg

SEQ ID NO: 460337 - RNA, 19 nt, Artificial Sequence
  Description of Artificial Sequence: Synthetic oligonucleotide
uagcuauggauguaaaucu

SEQ ID NO: 460338 - RNA, 19 nt, Artificial Sequence
  Description of Artificial Sequence: Synthetic oligonucleotide
acaaagauuggauuuuccu

SEQ ID NO: 460339 - RNA, 19 nt, Artificial Sequence
  Description of Artificial Sequence: Synthetic oligonucleotide
ucuacguucugccuugucu

SEQ ID NO: 460340 - RNA, 19 nt, Artificial Sequence
  Description of Artificial Sequence: Synthetic oligonucleotide
uuguaacucauuaguguag

SEQ ID NO: 460341 - RNA, 19 nt, Artificial Sequence
  Description of Artificial Sequence: Synthetic oligonucleotide
aacucauuaguguagucuu

SEQ ID NO: 460342 - RNA, 19 nt, Artificial Sequence
  Description of Artificial Sequence: Synthetic oligonucleotide
ugguauguaugucugaaau

SEQ ID NO: 460343 - RNA, 19 nt, Artificial Sequence
  Description of Artificial Sequence: Synthetic oligonucleotide
ugauuugaagagauaauuu

SEQ ID NO: 460344 - RNA, 19 nt, Artificial Sequence
  Description of Artificial Sequence: Synthetic oligonucleotide
aggagcguucauuucgugc

SEQ ID NO: 460345 - RNA, 19 nt, Artificial Sequence
  Description of Artificial Sequence: Synthetic oligonucleotide
uaagcgucguccuucguag

SEQ ID NO: 460346 - RNA, 19 nt, Artificial Sequence
  Description of Artificial Sequence: Synthetic oligonucleotide
uccacuaaaguguuagaac

SEQ ID NO: 460347 - RNA, 19 nt, Artificial Sequence
  Description of Artificial Sequence: Synthetic oligonucleotide
uguaagcuagucuacguuc

SEQ ID NO: 460348 - RNA, 19 nt, Artificial Sequence
  Description of Artificial Sequence: Synthetic oligonucleotide
caaagauuggauuuuccuc

SEQ ID NO: 460349 - RNA, 19 nt, Artificial Sequence
  Description of Artificial Sequence: Synthetic oligonucleotide
ucaugaaauagcagaauua

SEQ ID NO: 460350 - RNA, 19 nt, Artificial Sequence
  Description of Artificial Sequence: Synthetic oligonucleotide
aguguuagaacugggguag

SEQ ID NO: 460351 - RNA, 19 nt, Artificial Sequence
  Description of Artificial Sequence: Synthetic oligonucleotide
uaagaaccaccuauaggag

SEQ ID NO: 460352 - RNA, 19 nt, Artificial Sequence
  Description of Artificial Sequence: Synthetic oligonucleotide
aaagucucaacaauuuggu

SEQ ID NO: 460353 - RNA, 19 nt, Artificial Sequence
  Description of Artificial Sequence: Synthetic oligonucleotide
uuuaacgcacuccucugug

SEQ ID NO: 460354 - RNA, 19 nt, Artificial Sequence
  Description of Artificial Sequence: Synthetic oligonucleotide
aaaaugcugggcuagucuu

SEQ ID NO: 460355 - RNA, 19 nt, Artificial Sequence
  Description of Artificial Sequence: Synthetic oligonucleotide
uccccuuucgcauuaauuc

SEQ ID NO: 460356 - RNA, 19 nt, Artificial Sequence
  Description of Artificial Sequence: Synthetic oligonucleotide
auaucaauccuaugguacu

SEQ ID NO: 460357 - RNA, 19 nt, Artificial Sequence
  Description of Artificial Sequence: Synthetic oligonucleotide
auuuaacaggacuuguagu

SEQ ID NO: 460358 - RNA, 19 nt, Artificial Sequence
  Description of Artificial Sequence: Synthetic oligonucleotide
ugaacaguuucauuguaau

SEQ ID NO: 460359 - RNA, 19 nt, Artificial Sequence
  Description of Artificial Sequence: Synthetic oligonucleotide
guagcuauggauguaaauc

SEQ ID NO: 460360 - RNA, 19 nt, Artificial Sequence
  Description of Artificial Sequence: Synthetic oligonucleotide
uauagaccaguucauggaa

SEQ ID NO: 460361 - RNA, 19 nt, Artificial Sequence
  Description of Artificial Sequence: Synthetic oligonucleotide
uguaaaucuuaugugcugu

SEQ ID NO: 460362 - RNA, 19 nt, Artificial Sequence
  Description of Artificial Sequence: Synthetic oligonucleotide
cuaaaguguuagaacuggg

SEQ ID NO: 460363 - RNA, 19 nt, Artificial Sequence
  Description of Artificial Sequence: Synthetic oligonucleotide
gucuaaauggcagggaucc

SEQ ID NO: 460364 - RNA, 19 nt, Artificial Sequence
  Description of Artificial Sequence: Synthetic oligonucleotide
aaguguuagaacuggggua

SEQ ID NO: 460365 - RNA, 19 nt, Artificial Sequence
  Description of Artificial Sequence: Synthetic oligonucleotide
aaacauacgaggagaacca

SEQ ID NO: 460366 - RNA, 19 nt, Artificial Sequence
  Description of Artificial Sequence: Synthetic oligonucleotide
accaauucaaucagccacc

SEQ ID NO: 460367 - RNA, 19 nt, Artificial Sequence
  Description of Artificial Sequence: Synthetic oligonucleotide
aacuaucaguccuuucuga

SEQ ID NO: 460368 - RNA, 19 nt, Artificial Sequence
  Description of Artificial Sequence: Synthetic oligonucleotide
acaaaaucccgucacucca

SEQ ID NO: 460369 - RNA, 19 nt, Artificial Sequence
  Description of Artificial Sequence: Synthetic oligonucleotide
uuaaggaugcugauuuaaa

SEQ ID NO: 460370 - RNA, 19 nt, Artificial Sequence
  Description of Artificial Sequence: Synthetic oligonucleotide
ucaaagggucuaaauggca

SEQ ID NO: 460371 - RNA, 19 nt, Artificial Sequence
  Description of Artificial Sequence: Synthetic oligonucleotide
uucgcauccacucgucugc

SEQ ID NO: 460372 - RNA, 19 nt, Artificial Sequence
  Description of Artificial Sequence: Synthetic oligonucleotide
uccaccguucacaaggugu

SEQ ID NO: 460373 - RNA, 19 nt, Artificial Sequence
  Description of Artificial Sequence: Synthetic oligonucleotide
guacuggcaauucuacagg

SEQ ID NO: 460374 - RNA, 19 nt, Artificial Sequence
  Description of Artificial Sequence: Synthetic oligonucleotide
acgaggagaaccaaaaucu

SEQ ID NO: 460375 - RNA, 19 nt, Artificial Sequence
  Description of Artificial Sequence: Synthetic oligonucleotide
aacuguagccccguauuuc

SEQ ID NO: 460376 - RNA, 19 nt, Artificial Sequence
  Description of Artificial Sequence: Synthetic oligonucleotide
aagauuggauuuuccucug

SEQ ID NO: 460377 - RNA, 19 nt, Artificial Sequence
  Description of Artificial Sequence: Synthetic oligonucleotide
aaacuacaacuccccagag

SEQ ID NO: 460378 - RNA, 19 nt, Artificial Sequence
  Description of Artificial Sequence: Synthetic oligonucleotide
uuuaaggaugcugauuuaa

SEQ ID NO: 460379 - RNA, 19 nt, Artificial Sequence
  Description of Artificial Sequence: Synthetic oligonucleotide
ucgaugucaaagcacugac

SEQ ID NO: 460380 - RNA, 19 nt, Artificial Sequence
  Description of Artificial Sequence: Synthetic oligonucleotide
ugacugguuagagauaaca

SEQ ID NO: 460381 - RNA, 19 nt, Artificial Sequence
  Description of Artificial Sequence: Synthetic oligonucleotide
caaagcacugacugguuag

SEQ ID NO: 460382 - RNA, 19 nt, Artificial Sequence
  Description of Artificial Sequence: Synthetic oligonucleotide
auguaaaucuuaugugcug

SEQ ID NO: 460383 - RNA, 19 nt, Artificial Sequence
  Description of Artificial Sequence: Synthetic oligonucleotide
auuguaagcuagucuacgu

SEQ ID NO: 460384 - RNA, 19 nt, Artificial Sequence
  Description of Artificial Sequence: Synthetic oligonucleotide
aacgugaucacaacuucug

SEQ ID NO: 460385 - RNA, 19 nt, Artificial Sequence
  Description of Artificial Sequence: Synthetic oligonucleotide
ugauacuuggacacuuccu

SEQ ID NO: 460386 - RNA, 19 nt, Artificial Sequence
  Description of Artificial Sequence: Synthetic oligonucleotide
aaaucccgucacuccaccg

SEQ ID NO: 460387 - RNA, 19 nt, Artificial Sequence
  Description of Artificial Sequence: Synthetic oligonucleotide
ucgugcuucaguguuaucu

SEQ ID NO: 460388 - RNA, 19 nt, Artificial Sequence
  Description of Artificial Sequence: Synthetic oligonucleotide
aaucccgucacuccaccgu

SEQ ID NO: 460389 - RNA, 19 nt, Artificial Sequence
  Description of Artificial Sequence: Synthetic oligonucleotide
uuuuaacgcacuccucugu

SEQ ID NO: 460390 - RNA, 19 nt, Artificial Sequence
  Description of Artificial Sequence: Synthetic oligonucleotide
gacugguuagagauaacag

SEQ ID NO: 460391 - RNA, 19 nt, Artificial Sequence
  Description of Artificial Sequence: Synthetic oligonucleotide
augguaaaaugucacucca

SEQ ID NO: 460392 - RNA, 19 nt, Artificial Sequence
  Description of Artificial Sequence: Synthetic oligonucleotide
aacuacaacuccccagagu

SEQ ID NO: 460393 - RNA, 19 nt, Artificial Sequence
  Description of Artificial Sequence: Synthetic oligonucleotide
acguggauguacuuuaggu

SEQ ID NO: 460394 - RNA, 19 nt, Artificial Sequence
  Description of Artificial Sequence: Synthetic oligonucleotide
ucaguguuaucuucuugug

SEQ ID NO: 460395 - RNA, 19 nt, Artificial Sequence
  Description of Artificial Sequence: Synthetic oligonucleotide
uuugguauguaugucugaa

SEQ ID NO: 460396 - RNA, 19 nt, Artificial Sequence
  Description of Artificial Sequence: Synthetic oligonucleotide
ucuuggaugagugccuucc

SEQ ID NO: 460397 - RNA, 19 nt, Artificial Sequence
  Description of Artificial Sequence: Synthetic oligonucleotide
ugguuagagauaacagcug

SEQ ID NO: 460398 - RNA, 19 nt, Artificial Sequence
  Description of Artificial Sequence: Synthetic oligonucleotide
cuucuaguacuaagcgucg

SEQ ID NO: 460399 - RNA, 19 nt, Artificial Sequence
  Description of Artificial Sequence: Synthetic oligonucleotide
caccaucuaaaucguaacg

SEQ ID NO: 460400 - RNA, 19 nt, Artificial Sequence
  Description of Artificial Sequence: Synthetic oligonucleotide
auaugauuguucucagcca

SEQ ID NO: 460401 - RNA, 19 nt, Artificial Sequence
  Description of Artificial Sequence: Synthetic oligonucleotide
uccaacgugaucacaacuu

SEQ ID NO: 460402 - RNA, 19 nt, Artificial Sequence
  Description of Artificial Sequence: Synthetic oligonucleotide
cuaguacuaagcgucgucc

SEQ ID NO: 460403 - RNA, 19 nt, Artificial Sequence
  Description of Artificial Sequence: Synthetic oligonucleotide
ggauccaguagcugcaugg

SEQ ID NO: 460404 - RNA, 19 nt, Artificial Sequence
  Description of Artificial Sequence: Synthetic oligonucleotide
uuucgcauccacucgucug

SEQ ID NO: 460405 - RNA, 19 nt, Artificial Sequence
  Description of Artificial Sequence: Synthetic oligonucleotide
uuucgcauuaauucuugau

SEQ ID NO: 460406 - RNA, 19 nt, Artificial Sequence
  Description of Artificial Sequence: Synthetic oligonucleotide
uaggcaccgagcaauagau

SEQ ID NO: 460407 - RNA, 19 nt, Artificial Sequence
  Description of Artificial Sequence: Synthetic oligonucleotide
agagcacuaaagacagucc

SEQ ID NO: 460408 - RNA, 19 nt, Artificial Sequence
  Description of Artificial Sequence: Synthetic oligonucleotide
ccaacuucuaguacuaagc

SEQ ID NO: 460409 - RNA, 19 nt, Artificial Sequence
  Description of Artificial Sequence: Synthetic oligonucleotide
ucuaguacuaagcgucguc

SEQ ID NO: 460410 - RNA, 19 nt, Artificial Sequence
  Description of Artificial Sequence: Synthetic oligonucleotide
ccuagagcacuaaagacag

SEQ ID NO: 460411 - RNA, 19 nt, Artificial Sequence
  Description of Artificial Sequence: Synthetic oligonucleotide
uagcagaauuaaaguacag

SEQ ID NO: 460412 - RNA, 19 nt, Artificial Sequence
  Description of Artificial Sequence: Synthetic oligonucleotide
accaucuaaaucguaacgu

SEQ ID NO: 460413 - RNA, 19 nt, Artificial Sequence
  Description of Artificial Sequence: Synthetic oligonucleotide
ugugagcuuguacacggac

SEQ ID NO: 460414 - RNA, 19 nt, Artificial Sequence
  Description of Artificial Sequence: Synthetic oligonucleotide
aggcagaguuucuuguaac

SEQ ID NO: 460415 - RNA, 19 nt, Artificial Sequence
  Description of Artificial Sequence: Synthetic oligonucleotide
uucaaucagccaccgaauc

SEQ ID NO: 460416 - RNA, 19 nt, Artificial Sequence
  Description of Artificial Sequence: Synthetic oligonucleotide
cuaaaucguaacguggaug

SEQ ID NO: 460417 - RNA, 19 nt, Artificial Sequence
  Description of Artificial Sequence: Synthetic oligonucleotide
ucuaugguucccugagagc

SEQ ID NO: 460418 - RNA, 19 nt, Artificial Sequence
  Description of Artificial Sequence: Synthetic oligonucleotide
cacuaaaguguuagaacug

SEQ ID NO: 460419 - RNA, 19 nt, Artificial Sequence
  Description of Artificial Sequence: Synthetic oligonucleotide
uacuaagcgucguccuucg

SEQ ID NO: 460420 - RNA, 19 nt, Artificial Sequence
  Description of Artificial Sequence: Synthetic oligonucleotide
uccuuaaccacgccuucca

SEQ ID NO: 460421 - RNA, 19 nt, Artificial Sequence
  Description of Artificial Sequence: Synthetic oligonucleotide
ugcaugguaaaaugucacu

SEQ ID NO: 460422 - RNA, 19 nt, Artificial Sequence
  Description of Artificial Sequence: Synthetic oligonucleotide
ucuuaguacugcucucuca

SEQ ID NO: 460423 - RNA, 19 nt, Artificial Sequence
  Description of Artificial Sequence: Synthetic oligonucleotide
uuucuuaguacugcucucu

SEQ ID NO: 460424 - RNA, 19 nt, Artificial Sequence
  Description of Artificial Sequence: Synthetic oligonucleotide
uucuucauaccgagaguca

SEQ ID NO: 460425 - RNA, 19 nt, Artificial Sequence
  Description of Artificial Sequence: Synthetic oligonucleotide
ucuaaaucguaacguggau

SEQ ID NO: 460426 - RNA, 19 nt, Artificial Sequence
  Description of Artificial Sequence: Synthetic oligonucleotide
uucgaugucaaagcacuga

SEQ ID NO: 460427 - RNA, 19 nt, Artificial Sequence
  Description of Artificial Sequence: Synthetic oligonucleotide
ucguccuucguagauaagu

SEQ ID NO: 460428 - RNA, 19 nt, Artificial Sequence
  Description of Artificial Sequence: Synthetic oligonucleotide
auagcagaauuaaaguaca

SEQ ID NO: 460429 - RNA, 19 nt, Artificial Sequence
  Description of Artificial Sequence: Synthetic oligonucleotide
cauuuaugaccaaaggaaa

SEQ ID NO: 460430 - RNA, 19 nt, Artificial Sequence
  Description of Artificial Sequence: Synthetic oligonucleotide
ucacuucuuuauuccuacg

SEQ ID NO: 460431 - RNA, 19 nt, Artificial Sequence
  Description of Artificial Sequence: Synthetic oligonucleotide
caugggaaggaccccgacg

SEQ ID NO: 460432 - RNA, 19 nt, Artificial Sequence
  Description of Artificial Sequence: Synthetic oligonucleotide
cuacgaggcccuucaaagg

SEQ ID NO: 460433 - RNA, 19 nt, Artificial Sequence
  Description of Artificial Sequence: Synthetic oligonucleotide
agccguauuguagcuaugg

SEQ ID NO: 460434 - RNA, 19 nt, Artificial Sequence
  Description of Artificial Sequence: Synthetic oligonucleotide
aaagcaucagcuggucaug

SEQ ID NO: 460435 - RNA, 19 nt, Artificial Sequence
  Description of Artificial Sequence: Synthetic oligonucleotide
aucuuaugugcugucaucu

SEQ ID NO: 460436 - RNA, 19 nt, Artificial Sequence
  Description of Artificial Sequence: Synthetic oligonucleotide
auuccuacgaggcccuuca

SEQ ID NO: 460437 - RNA, 19 nt, Artificial Sequence
  Description of Artificial Sequence: Synthetic oligonucleotide
aggugucaacuaucagucc

SEQ ID NO: 460438 - RNA, 19 nt, Artificial Sequence
  Description of Artificial Sequence: Synthetic oligonucleotide
uaacguggauguacuuuag

SEQ ID NO: 460439 - RNA, 19 nt, Artificial Sequence
  Description of Artificial Sequence: Synthetic oligonucleotide
caguauccagaaaagcuuc

SEQ ID NO: 460440 - RNA, 19 nt, Artificial Sequence
  Description of Artificial Sequence: Synthetic oligonucleotide
guacuuagggguucccugc

SEQ ID NO: 460441 - RNA, 19 nt, Artificial Sequence
  Description of Artificial Sequence: Synthetic oligonucleotide
caucuuucgcauccacucg

SEQ ID NO: 460442 - RNA, 19 nt, Artificial Sequence
  Description of Artificial Sequence: Synthetic oligonucleotide
uuguaagcuagucuacguu

SEQ ID NO: 460443 - RNA, 19 nt, Artificial Sequence
  Description of Artificial Sequence: Synthetic oligonucleotide
cauacgaggagaaccaaaa

SEQ ID NO: 460444 - RNA, 19 nt, Artificial Sequence
  Description of Artificial Sequence: Synthetic oligonucleotide
gaaauaagaaccaccuaua

SEQ ID NO: 460445 - RNA, 19 nt, Artificial Sequence
  Description of Artificial Sequence: Synthetic oligonucleotide
uaagcuagucuacguucug

SEQ ID NO: 460446 - RNA, 19 nt, Artificial Sequence
  Description of Artificial Sequence: Synthetic oligonucleotide
ccuucaaagggucuaaaug

SEQ ID NO: 460447 - RNA, 19 nt, Artificial Sequence
  Description of Artificial Sequence: Synthetic oligonucleotide
ucucuggcggcaccgaagu

SEQ ID NO: 460448 - RNA, 19 nt, Artificial Sequence
  Description of Artificial Sequence: Synthetic oligonucleotide
aagcaucagcuggucaugg

SEQ ID NO: 460449 - RNA, 19 nt, Artificial Sequence
  Description of Artificial Sequence: Synthetic oligonucleotide
cucuucgaugucaaagcac

SEQ ID NO: 460450 - RNA, 19 nt, Artificial Sequence
  Description of Artificial Sequence: Synthetic oligonucleotide
uuucuaugguucccugaga

SEQ ID NO: 460451 - RNA, 19 nt, Artificial Sequence
  Description of Artificial Sequence: Synthetic oligonucleotide
ucacaaggugucaacuauc

SEQ ID NO: 460452 - RNA, 19 nt, Artificial Sequence
  Description of Artificial Sequence: Synthetic oligonucleotide
uuguagaaauaagaaccac

SEQ ID NO: 460453 - RNA, 19 nt, Artificial Sequence
  Description of Artificial Sequence: Synthetic oligonucleotide
uaacgcacuccucugugaa

SEQ ID NO: 460454 - RNA, 19 nt, Artificial Sequence
  Description of Artificial Sequence: Synthetic oligonucleotide
cauauaucaauccuauggu

SEQ ID NO: 460455 - RNA, 19 nt, Artificial Sequence
  Description of Artificial Sequence: Synthetic oligonucleotide
uguuucugaugcagaaauc

SEQ ID NO: 460456 - RNA, 19 nt, Artificial Sequence
  Description of Artificial Sequence: Synthetic oligonucleotide
gauguaaaucuuaugugcu

SEQ ID NO: 460457 - RNA, 19 nt, Artificial Sequence
  Description of Artificial Sequence: Synthetic oligonucleotide
ugauuguucucagccagcu

SEQ ID NO: 460458 - RNA, 19 nt, Artificial Sequence
  Description of Artificial Sequence: Synthetic oligonucleotide
agucccuagagcacuaaag

SEQ ID NO: 460459 - RNA, 19 nt, Artificial Sequence
  Description of Artificial Sequence: Synthetic oligonucleotide
ugguaaaaugucacuccaa

SEQ ID NO: 460460 - RNA, 19 nt, Artificial Sequence
  Description of Artificial Sequence: Synthetic oligonucleotide
gaaaaugcugggcuagucu

SEQ ID NO: 460461 - RNA, 19 nt, Artificial Sequence
  Description of Artificial Sequence: Synthetic oligonucleotide
gaaccaaaaucugggcacc

SEQ ID NO: 460462 - RNA, 19 nt, Artificial Sequence
  Description of Artificial Sequence: Synthetic oligonucleotide
uaaagccccgaaccguucu

SEQ ID NO: 460463 - RNA, 19 nt, Artificial Sequence
  Description of Artificial Sequence: Synthetic oligonucleotide
acaaggugucaacuaucag

SEQ ID NO: 460464 - RNA, 19 nt, Artificial Sequence
  Description of Artificial Sequence: Synthetic oligonucleotide
guaacguggauguacuuua

SEQ ID NO: 460465 - RNA, 19 nt, Artificial Sequence
  Description of Artificial Sequence: Synthetic oligonucleotide
gaucacaacuucugucuuc

SEQ ID NO: 460466 - RNA, 19 nt, Artificial Sequence
  Description of Artificial Sequence: Synthetic oligonucleotide
uagcaucaccaucuaaauc

SEQ ID NO: 460467 - RNA, 19 nt, Artificial Sequence
  Description of Artificial Sequence: Synthetic oligonucleotide
uaguacuaagcgucguccu

SEQ ID NO: 460468 - RNA, 19 nt, Artificial Sequence
  Description of Artificial Sequence: Synthetic oligonucleotide
auuugguauguaugucuga

SEQ ID NO: 460469 - RNA, 19 nt, Artificial Sequence
  Description of Artificial Sequence: Synthetic oligonucleotide
aguuaaagccccgaaccgu

SEQ ID NO: 460470 - RNA, 19 nt, Artificial Sequence
  Description of Artificial Sequence: Synthetic oligonucleotide
uaugguacuuagggguucc

SEQ ID NO: 460471 - RNA, 19 nt, Artificial Sequence
  Description of Artificial Sequence: Synthetic oligonucleotide
gguacuuagggguucccug

SEQ ID NO: 460472 - RNA, 19 nt, Artificial Sequence
  Description of Artificial Sequence: Synthetic oligonucleotide
ccuacgaggcccuucaaag

SEQ ID NO: 460473 - RNA, 19 nt, Artificial Sequence
  Description of Artificial Sequence: Synthetic oligonucleotide
cacaaggugucaacuauca

SEQ ID NO: 460474 - RNA, 19 nt, Artificial Sequence
  Description of Artificial Sequence: Synthetic oligonucleotide
aaggucaacuguagccccg

SEQ ID NO: 460475 - RNA, 19 nt, Artificial Sequence
  Description of Artificial Sequence: Synthetic oligonucleotide
gcaauagauuucuccagcc

SEQ ID NO: 460476 - RNA, 19 nt, Artificial Sequence
  Description of Artificial Sequence: Synthetic oligonucleotide
ccguccauaguuaaagccc

SEQ ID NO: 460477 - RNA, 19 nt, Artificial Sequence
  Description of Artificial Sequence: Synthetic oligonucleotide
auacuccaaaggucaacug

SEQ ID NO: 460478 - RNA, 19 nt, Artificial Sequence
  Description of Artificial Sequence: Synthetic oligonucleotide
caggcguaacacacaaccc

SEQ ID NO: 460479 - RNA, 19 nt, Artificial Sequence
  Description of Artificial Sequence: Synthetic oligonucleotide
caaaaucccgucacuccac

SEQ ID NO: 460480 - RNA, 19 nt, Artificial Sequence
  Description of Artificial Sequence: Synthetic oligonucleotide
cacuccagucaaucggucc

SEQ ID NO: 460481 - RNA, 19 nt, Artificial Sequence
  Description of Artificial Sequence: Synthetic oligonucleotide
aguguagucuugauacuug

SEQ ID NO: 460482 - RNA, 19 nt, Artificial Sequence
  Description of Artificial Sequence: Synthetic oligonucleotide
gcacuaaagacaguccacg

SEQ ID NO: 460483 - RNA, 19 nt, Artificial Sequence
  Description of Artificial Sequence: Synthetic oligonucleotide
uccuuaggcaccgagcaau

SEQ ID NO: 460484 - RNA, 19 nt, Artificial Sequence
  Description of Artificial Sequence: Synthetic oligonucleotide
uuuuaaggaugcugauuua

SEQ ID NO: 460485 - RNA, 19 nt, Artificial Sequence
  Description of Artificial Sequence: Synthetic oligonucleotide
ucuugauacuuggacacuu

SEQ ID NO: 460486 - RNA, 19 nt, Artificial Sequence
  Description of Artificial Sequence: Synthetic oligonucleotide
acaugggaaggaccccgac

SEQ ID NO: 460487 - RNA, 19 nt, Artificial Sequence
  Description of Artificial Sequence: Synthetic oligonucleotide
uugguauguaugucugaaa

SEQ ID NO: 460488 - RNA, 19 nt, Artificial Sequence
  Description of Artificial Sequence: Synthetic oligonucleotide
accguucuagaauaugauu

SEQ ID NO: 460489 - RNA, 19 nt, Artificial Sequence
  Description of Artificial Sequence: Synthetic oligonucleotide
accgaauccccuuucgcau

SEQ ID NO: 460490 - RNA, 19 nt, Artificial Sequence
  Description of Artificial Sequence: Synthetic oligonucleotide
uccuacgaggcccuucaaa

SEQ ID NO: 460491 - RNA, 19 nt, Artificial Sequence
  Description of Artificial Sequence: Synthetic oligonucleotide
cuucauaccgagagucauc

SEQ ID NO: 460492 - RNA, 19 nt, Artificial Sequence
  Description of Artificial Sequence: Synthetic oligonucleotide
acuuuagguagggaaauuu

SEQ ID NO: 460493 - RNA, 19 nt, Artificial Sequence
  Description of Artificial Sequence: Synthetic oligonucleotide
ccgagcaauagauuucucc

SEQ ID NO: 460494 - RNA, 19 nt, Artificial Sequence
  Description of Artificial Sequence: Synthetic oligonucleotide
cagggugcaaauacucuuc

SEQ ID NO: 460495 - RNA, 19 nt, Artificial Sequence
  Description of Artificial Sequence: Synthetic oligonucleotide
uccauaguuaaagccccga

SEQ ID NO: 460496 - RNA, 19 nt, Artificial Sequence
  Description of Artificial Sequence: Synthetic oligonucleotide
agacugcuuucuaugguuc

SEQ ID NO: 460497 - RNA, 19 nt, Artificial Sequence
  Description of Artificial Sequence: Synthetic oligonucleotide
acucgucugcaguauccag

SEQ ID NO: 460498 - RNA, 19 nt, Artificial Sequence
  Description of Artificial Sequence: Synthetic oligonucleotide
ccaucuaaaucguaacgug

SEQ ID NO: 460499 - RNA, 19 nt, Artificial Sequence
  Description of Artificial Sequence: Synthetic oligonucleotide
aaccguucuagaauaugau

SEQ ID NO: 460500 - RNA, 19 nt, Artificial Sequence
  Description of Artificial Sequence: Synthetic oligonucleotide
ucauuaguguagucuugau

SEQ ID NO: 460501 - RNA, 19 nt, Artificial Sequence
  Description of Artificial Sequence: Synthetic oligonucleotide
ucuccacuaaaguguuaga

SEQ ID NO: 460502 - RNA, 19 nt, Artificial Sequence
  Description of Artificial Sequence: Synthetic oligonucleotide
cuauaggagcguucauuuc

SEQ ID NO: 460503 - RNA, 19 nt, Artificial Sequence
  Description of Artificial Sequence: Synthetic oligonucleotide
agggugcaaauacucuucu

SEQ ID NO: 460504 - RNA, 19 nt, Artificial Sequence
  Description of Artificial Sequence: Synthetic oligonucleotide
caauuuaacaggacuugua

SEQ ID NO: 460505 - RNA, 19 nt, Artificial Sequence
  Description of Artificial Sequence: Synthetic oligonucleotide
uggccaugcuagcaucacc

SEQ ID NO: 460506 - RNA, 19 nt, Artificial Sequence
  Description of Artificial Sequence: Synthetic oligonucleotide
uuaaagccccgaaccguuc

SEQ ID NO: 460507 - RNA, 19 nt, Artificial Sequence
  Description of Artificial Sequence: Synthetic oligonucleotide
aguacuaagcgucguccuu

SEQ ID NO: 460508 - RNA, 19 nt, Artificial Sequence
  Description of Artificial Sequence: Synthetic oligonucleotide
aaguggcucauugcuuuug

SEQ ID NO: 460509 - RNA, 19 nt, Artificial Sequence
  Description of Artificial Sequence: Synthetic oligonucleotide
acgugaucacaacuucugu

SEQ ID NO: 460510 - RNA, 19 nt, Artificial Sequence
  Description of Artificial Sequence: Synthetic oligonucleotide
auacgaggagaaccaaaau

SEQ ID NO: 460511 - RNA, 19 nt, Artificial Sequence
  Description of Artificial Sequence: Synthetic oligonucleotide
ugaugugcccagguaucag

SEQ ID NO: 460512 - RNA, 19 nt, Artificial Sequence
  Description of Artificial Sequence: Synthetic oligonucleotide
ucuuucgcauccacucguc

SEQ ID NO: 460513 - RNA, 19 nt, Artificial Sequence
  Description of Artificial Sequence: Synthetic oligonucleotide
cugucucuuggaugagugc

SEQ ID NO: 460514 - RNA, 19 nt, Artificial Sequence
  Description of Artificial Sequence: Synthetic oligonucleotide
augcaauuuaacaggacuu

SEQ ID NO: 460515 - RNA, 19 nt, Artificial Sequence
  Description of Artificial Sequence: Synthetic oligonucleotide
cuaugguucccugagagcu

SEQ ID NO: 460516 - RNA, 19 nt, Artificial Sequence
  Description of Artificial Sequence: Synthetic oligonucleotide
guaaaucucugugaugcaa

SEQ ID NO: 460517 - RNA, 19 nt, Artificial Sequence
  Description of Artificial Sequence: Synthetic oligonucleotide
gcuuaugacaaagauugga

SEQ ID NO: 460518 - RNA, 19 nt, Artificial Sequence
  Description of Artificial Sequence: Synthetic oligonucleotide
ugugccguacagagacaca

SEQ ID NO: 460519 - RNA, 19 nt, Artificial Sequence
  Description of Artificial Sequence: Synthetic oligonucleotide
agauuggauuuuccucugu

SEQ ID NO: 460520 - RNA, 19 nt, Artificial Sequence
  Description of Artificial Sequence: Synthetic oligonucleotide
caccguccauaguuaaagc

SEQ ID NO: 460521 - RNA, 19 nt, Artificial Sequence
  Description of Artificial Sequence: Synthetic oligonucleotide
aucguaacguggauguacu

SEQ ID NO: 460522 - RNA, 19 nt, Artificial Sequence
  Description of Artificial Sequence: Synthetic oligonucleotide
auaaugccacuucauccuu

SEQ ID NO: 460523 - RNA, 19 nt, Artificial Sequence
  Description of Artificial Sequence: Synthetic oligonucleotide
ggaaggaccccgacgaaag

SEQ ID NO: 460524 - RNA, 19 nt, Artificial Sequence
  Description of Artificial Sequence: Synthetic oligonucleotide
guccuucguagauaaguuc

SEQ ID NO: 460525 - RNA, 19 nt, Artificial Sequence
  Description of Artificial Sequence: Synthetic oligonucleotide
acgaaagacuacagaaaca

SEQ ID NO: 460526 - RNA, 19 nt, Artificial Sequence
  Description of Artificial Sequence: Synthetic oligonucleotide
cucauuaguguagucuuga

SEQ ID NO: 460527 - RNA, 19 nt, Artificial Sequence
  Description of Artificial Sequence: Synthetic oligonucleotide
ugggcuagucuuccaacuu

SEQ ID NO: 460528 - RNA, 19 nt, Artificial Sequence
  Description of Artificial Sequence: Synthetic oligonucleotide
uggcaauucuacaggcgua

SEQ ID NO: 460529 - RNA, 19 nt, Artificial Sequence
  Description of Artificial Sequence: Synthetic oligonucleotide
cugcuucuaaguugauuuc

SEQ ID NO: 460530 - RNA, 19 nt, Artificial Sequence
  Description of Artificial Sequence: Synthetic oligonucleotide
aaccaaaaucugggcaccu

SEQ ID NO: 460531 - RNA, 19 nt, Artificial Sequence
  Description of Artificial Sequence: Synthetic oligonucleotide
uaucaauccuaugguacuu

SEQ ID NO: 460532 - RNA, 19 nt, Artificial Sequence
  Description of Artificial Sequence: Synthetic oligonucleotide
aagccccgaaccguucuag

SEQ ID NO: 460533 - RNA, 19 nt, Artificial Sequence
  Description of Artificial Sequence: Synthetic oligonucleotide
aacauacgaggagaaccaa

SEQ ID NO: 460534 - RNA, 19 nt, Artificial Sequence
  Description of Artificial Sequence: Synthetic oligonucleotide
cuuaguacugcucucucau

SEQ ID NO: 460535 - RNA, 19 nt, Artificial Sequence
  Description of Artificial Sequence: Synthetic oligonucleotide
gcuagcaucaccaucuaaa

SEQ ID NO: 460536 - RNA, 19 nt, Artificial Sequence
  Description of Artificial Sequence: Synthetic oligonucleotide
agcguucauuucgugcuuc

SEQ ID NO: 460537 - RNA, 19 nt, Artificial Sequence
  Description of Artificial Sequence: Synthetic oligonucleotide
caccgaauccccuuucgca

SEQ ID NO: 460538 - RNA, 19 nt, Artificial Sequence
  Description of Artificial Sequence: Synthetic oligonucleotide
auaccgagagucaucucca

SEQ ID NO: 460539 - RNA, 19 nt, Artificial Sequence
  Description of Artificial Sequence: Synthetic oligonucleotide
gaaauccaacgugaucaca

SEQ ID NO: 460540 - RNA, 19 nt, Artificial Sequence
  Description of Artificial Sequence: Synthetic oligonucleotide
ucggcucuguucuccacaa

SEQ ID NO: 460541 - RNA, 19 nt, Artificial Sequence
  Description of Artificial Sequence: Synthetic oligonucleotide
guacuaagcgucguccuuc

SEQ ID NO: 460542 - RNA, 19 nt, Artificial Sequence
  Description of Artificial Sequence: Synthetic oligonucleotide
ggugucaacuaucaguccu

SEQ ID NO: 460543 - RNA, 19 nt, Artificial Sequence
  Description of Artificial Sequence: Synthetic oligonucleotide
uucuaguacuaagcgucgu

SEQ ID NO: 460544 - RNA, 19 nt, Artificial Sequence
  Description of Artificial Sequence: Synthetic oligonucleotide
cugugccguacagagacac

SEQ ID NO: 460545 - RNA, 19 nt, Artificial Sequence
  Description of Artificial Sequence: Synthetic oligonucleotide
ugcuagcaucaccaucuaa

SEQ ID NO: 460546 - RNA, 19 nt, Artificial Sequence
  Description of Artificial Sequence: Synthetic oligonucleotide
auaggagcguucauuucgu

SEQ ID NO: 460547 - RNA, 19 nt, Artificial Sequence
  Description of Artificial Sequence: Synthetic oligonucleotide
aaagccccgaaccguucua

SEQ ID NO: 460548 - RNA, 19 nt, Artificial Sequence
  Description of Artificial Sequence: Synthetic oligonucleotide
uuccuuaggcaccgagcaa

SEQ ID NO: 460549 - RNA, 19 nt, Artificial Sequence
  Description of Artificial Sequence: Synthetic oligonucleotide
acucauuaguguagucuug

SEQ ID NO: 460550 - RNA, 19 nt, Artificial Sequence
  Description of Artificial Sequence: Synthetic oligonucleotide
ucugugccguacagagaca

SEQ ID NO: 460551 - RNA, 19 nt, Artificial Sequence
  Description of Artificial Sequence: Synthetic oligonucleotide
cuccacuaaaguguuagaa

SEQ ID NO: 460552 - RNA, 19 nt, Artificial Sequence
  Description of Artificial Sequence: Synthetic oligonucleotide
ugguacuuagggguucccu

SEQ ID NO: 460553 - RNA, 19 nt, Artificial Sequence
  Description of Artificial Sequence: Synthetic oligonucleotide
ucuaaauggcagggaucca

SEQ ID NO: 460554 - RNA, 19 nt, Artificial Sequence
  Description of Artificial Sequence: Synthetic oligonucleotide
accaccuauaggagcguuc

SEQ ID NO: 460555 - RNA, 19 nt, Artificial Sequence
  Description of Artificial Sequence: Synthetic oligonucleotide
cuugauagagcagcaaggu

SEQ ID NO: 460556 - RNA, 19 nt, Artificial Sequence
  Description of Artificial Sequence: Synthetic oligonucleotide
accccgacgaaagacuaca

SEQ ID NO: 460557 - RNA, 19 nt, Artificial Sequence
  Description of Artificial Sequence: Synthetic oligonucleotide
ggagcguucauuucgugcu

SEQ ID NO: 460558 - RNA, 19 nt, Artificial Sequence
  Description of Artificial Sequence: Synthetic oligonucleotide
cguccauaguuaaagcccc

SEQ ID NO: 460559 - RNA, 19 nt, Artificial Sequence
  Description of Artificial Sequence: Synthetic oligonucleotide
cuaagcgucguccuucgua

SEQ ID NO: 460560 - RNA, 19 nt, Artificial Sequence
  Description of Artificial Sequence: Synthetic oligonucleotide
ugccguacagagacacaaa

SEQ ID NO: 460561 - RNA, 19 nt, Artificial Sequence
  Description of Artificial Sequence: Synthetic oligonucleotide
cuggcaauucuacaggcgu

SEQ ID NO: 460562 - RNA, 19 nt, Artificial Sequence
  Description of Artificial Sequence: Synthetic oligonucleotide
uaggagcguucauuucgug

SEQ ID NO: 460563 - RNA, 19 nt, Artificial Sequence
  Description of Artificial Sequence: Synthetic oligonucleotide
ccgacgaaagacuacagaa

SEQ ID NO: 460564 - RNA, 19 nt, Artificial Sequence
  Description of Artificial Sequence: Synthetic oligonucleotide
aguggucggcucuguucuc

SEQ ID NO: 460565 - RNA, 19 nt, Artificial Sequence
  Description of Artificial Sequence: Synthetic oligonucleotide
ccacuaaaguguuagaacu

SEQ ID NO: 460566 - RNA, 19 nt, Artificial Sequence
  Description of Artificial Sequence: Synthetic oligonucleotide
cuuucgcauuaauucuuga

SEQ ID NO: 460567 - RNA, 19 nt, Artificial Sequence
  Description of Artificial Sequence: Synthetic oligonucleotide
uauuccuacgaggcccuuc

SEQ ID NO: 460568 - RNA, 19 nt, Artificial Sequence
  Description of Artificial Sequence: Synthetic oligonucleotide
aagcgucguccuucguaga

SEQ ID NO: 460569 - RNA, 19 nt, Artificial Sequence
  Description of Artificial Sequence: Synthetic oligonucleotide
ucugggcaccuuguaaaau

SEQ ID NO: 460570 - RNA, 19 nt, Artificial Sequence
  Description of Artificial Sequence: Synthetic oligonucleotide
ucccugagagcuggaaagu

SEQ ID NO: 460571 - RNA, 19 nt, Artificial Sequence
  Description of Artificial Sequence: Synthetic oligonucleotide
acauacgaggagaaccaaa

SEQ ID NO: 460572 - RNA, 19 nt, Artificial Sequence
  Description of Artificial Sequence: Synthetic oligonucleotide
ccuuucgcauuaauucuug

SEQ ID NO: 460573 - RNA, 19 nt, Artificial Sequence
  Description of Artificial Sequence: Synthetic oligonucleotide
uaccgagagucaucuccac

SEQ ID NO: 460574 - RNA, 19 nt, Artificial Sequence
  Description of Artificial Sequence: Synthetic oligonucleotide
gaaggaccccgacgaaaga

SEQ ID NO: 460575 - RNA, 19 nt, Artificial Sequence
  Description of Artificial Sequence: Synthetic oligonucleotide
aaaucguaacguggaugua

SEQ ID NO: 460576 - RNA, 19 nt, Artificial Sequence
  Description of Artificial Sequence: Synthetic oligonucleotide
uacguucugccuugucuuu

SEQ ID NO: 460577 - RNA, 19 nt, Artificial Sequence
  Description of Artificial Sequence: Synthetic oligonucleotide
ugucaacuaucaguccuuu

SEQ ID NO: 460578 - RNA, 19 nt, Artificial Sequence
  Description of Artificial Sequence: Synthetic oligonucleotide
guuagaacugggguagacu

SEQ ID NO: 460579 - RNA, 19 nt, Artificial Sequence
  Description of Artificial Sequence: Synthetic oligonucleotide
aucaauccuaugguacuua

SEQ ID NO: 460580 - RNA, 19 nt, Artificial Sequence
  Description of Artificial Sequence: Synthetic oligonucleotide
ccaauucaaucagccaccg

SEQ ID NO: 460581 - RNA, 19 nt, Artificial Sequence
  Description of Artificial Sequence: Synthetic oligonucleotide
cugacugguuagagauaac

SEQ ID NO: 460582 - RNA, 19 nt, Artificial Sequence
  Description of Artificial Sequence: Synthetic oligonucleotide
gccaccgaauccccuuucg

SEQ ID NO: 460583 - RNA, 19 nt, Artificial Sequence
  Description of Artificial Sequence: Synthetic oligonucleotide
ggccaugcuagcaucacca

SEQ ID NO: 460584 - RNA, 19 nt, Artificial Sequence
  Description of Artificial Sequence: Synthetic oligonucleotide
cuuagggguucccugcuua

SEQ ID NO: 460585 - RNA, 19 nt, Artificial Sequence
  Description of Artificial Sequence: Synthetic oligonucleotide
agcuauggauguaaaucuu

SEQ ID NO: 460586 - RNA, 19 nt, Artificial Sequence
  Description of Artificial Sequence: Synthetic oligonucleotide
cauuucgugcuucaguguu

SEQ ID NO: 460587 - RNA, 19 nt, Artificial Sequence
  Description of Artificial Sequence: Synthetic oligonucleotide
ucauaccgagagucaucuc

SEQ ID NO: 460588 - RNA, 19 nt, Artificial Sequence
  Description of Artificial Sequence: Synthetic oligonucleotide
gggcuagucuuccaacuuc

SEQ ID NO: 460589 - RNA, 19 nt, Artificial Sequence
  Description of Artificial Sequence: Synthetic oligonucleotide
gaccaccguccauaguuaa

SEQ ID NO: 460590 - RNA, 19 nt, Artificial Sequence
  Description of Artificial Sequence: Synthetic oligonucleotide
gggugcaaauacucuucug

SEQ ID NO: 460591 - RNA, 19 nt, Artificial Sequence
  Description of Artificial Sequence: Synthetic oligonucleotide
ggcaccgagcaauagauuu

SEQ ID NO: 460592 - RNA, 19 nt, Artificial Sequence
  Description of Artificial Sequence: Synthetic oligonucleotide
ccaccguucacaagguguc

SEQ ID NO: 460593 - RNA, 19 nt, Artificial Sequence
  Description of Artificial Sequence: Synthetic oligonucleotide
accguucacaaggugucaa

SEQ ID NO: 460594 - RNA, 19 nt, Artificial Sequence
  Description of Artificial Sequence: Synthetic oligonucleotide
ccuggugaacaguggucgg

SEQ ID NO: 460595 - RNA, 19 nt, Artificial Sequence
  Description of Artificial Sequence: Synthetic oligonucleotide
gugaacaguggucggcucu

SEQ ID NO: 460596 - RNA, 19 nt, Artificial Sequence
  Description of Artificial Sequence: Synthetic oligonucleotide
aucccgucacuccaccguu

SEQ ID NO: 460597 - RNA, 19 nt, Artificial Sequence
  Description of Artificial Sequence: Synthetic oligonucleotide
ggucuaaauggcagggauc

SEQ ID NO: 460598 - RNA, 19 nt, Artificial Sequence
  Description of Artificial Sequence: Synthetic oligonucleotide
guacuuuagguagggaaau

SEQ ID NO: 460599 - RNA, 19 nt, Artificial Sequence
  Description of Artificial Sequence: Synthetic oligonucleotide
aaccaccuauaggagcguu

SEQ ID NO: 460600 - RNA, 19 nt, Artificial Sequence
  Description of Artificial Sequence: Synthetic oligonucleotide
ucguaacguggauguacuu

SEQ ID NO: 460601 - RNA, 19 nt, Artificial Sequence
  Description of Artificial Sequence: Synthetic oligonucleotide
auccccuuucgcauuaauu

SEQ ID NO: 460602 - RNA, 19 nt, Artificial Sequence
  Description of Artificial Sequence: Synthetic oligonucleotide
gcugggcuagucuuccaac

SEQ ID NO: 460603 - RNA, 19 nt, Artificial Sequence
  Description of Artificial Sequence: Synthetic oligonucleotide
acuaagcgucguccuucgu

SEQ ID NO: 460604 - RNA, 19 nt, Artificial Sequence
  Description of Artificial Sequence: Synthetic oligonucleotide
caguuucuucauaccgaga

SEQ ID NO: 460605 - RNA, 19 nt, Artificial Sequence
  Description of Artificial Sequence: Synthetic oligonucleotide
guagccccguauuucuucu

SEQ ID NO: 460606 - RNA, 19 nt, Artificial Sequence
  Description of Artificial Sequence: Synthetic oligonucleotide
ucgguccauuuucuugcuu

SEQ ID NO: 460607 - RNA, 19 nt, Artificial Sequence
  Description of Artificial Sequence: Synthetic oligonucleotide
ucccgucacuccaccguuc

SEQ ID NO: 460608 - RNA, 19 nt, Artificial Sequence
  Description of Artificial Sequence: Synthetic oligonucleotide
caauucaaucagccaccga

SEQ ID NO: 460609 - RNA, 19 nt, Artificial Sequence
  Description of Artificial Sequence: Synthetic oligonucleotide
cuaucaguccuuucugauu

SEQ ID NO: 460610 - RNA, 19 nt, Artificial Sequence
  Description of Artificial Sequence: Synthetic oligonucleotide
auuucgugcuucaguguua

SEQ ID NO: 460611 - RNA, 19 nt, Artificial Sequence
  Description of Artificial Sequence: Synthetic oligonucleotide
acaugucagggugcaaaua

SEQ ID NO: 460612 - RNA, 19 nt, Artificial Sequence
  Description of Artificial Sequence: Synthetic oligonucleotide
accgagcaauagauuucuc

SEQ ID NO: 460613 - RNA, 19 nt, Artificial Sequence
  Description of Artificial Sequence: Synthetic oligonucleotide
gucaacuguagccccguau

SEQ ID NO: 460614 - RNA, 19 nt, Artificial Sequence
  Description of Artificial Sequence: Synthetic oligonucleotide
ugcggagaccaccguccau

SEQ ID NO: 460615 - RNA, 19 nt, Artificial Sequence
  Description of Artificial Sequence: Synthetic oligonucleotide
ccccguauuucuucugaug

SEQ ID NO: 460616 - RNA, 19 nt, Artificial Sequence
  Description of Artificial Sequence: Synthetic oligonucleotide
gaccccgacgaaagacuac

SEQ ID NO: 460617 - RNA, 19 nt, Artificial Sequence
  Description of Artificial Sequence: Synthetic oligonucleotide
ucgcauccacucgucugca

SEQ ID NO: 460618 - RNA, 19 nt, Artificial Sequence
  Description of Artificial Sequence: Synthetic oligonucleotide
uuccuacgaggcccuucaa

SEQ ID NO: 460619 - RNA, 19 nt, Artificial Sequence
  Description of Artificial Sequence: Synthetic oligonucleotide
cacaugggaaggaccccga

SEQ ID NO: 460620 - RNA, 19 nt, Artificial Sequence
  Description of Artificial Sequence: Synthetic oligonucleotide
guuaaagccccgaaccguu

SEQ ID NO: 460621 - RNA, 19 nt, Artificial Sequence
  Description of Artificial Sequence: Synthetic oligonucleotide
ccaccgaauccccuuucgc

SEQ ID NO: 460622 - RNA, 19 nt, Artificial Sequence
  Description of Artificial Sequence: Synthetic oligonucleotide
gccguauuguagcuaugga

SEQ ID NO: 460623 - RNA, 19 nt, Artificial Sequence
  Description of Artificial Sequence: Synthetic oligonucleotide
ccgagagucaucuccacua

SEQ ID NO: 460624 - RNA, 19 nt, Artificial Sequence
  Description of Artificial Sequence: Synthetic oligonucleotide
gucaaucgguccauuuucu

SEQ ID NO: 460625 - RNA, 19 nt, Artificial Sequence
  Description of Artificial Sequence: Synthetic oligonucleotide
cagccguauuguagcuaug

SEQ ID NO: 460626 - RNA, 19 nt, Artificial Sequence
  Description of Artificial Sequence: Synthetic oligonucleotide
gucuacguucugccuuguc

SEQ ID NO: 460627 - RNA, 19 nt, Artificial Sequence
  Description of Artificial Sequence: Synthetic oligonucleotide
ggugaacaguggucggcuc

SEQ ID NO: 460628 - RNA, 19 nt, Artificial Sequence
  Description of Artificial Sequence: Synthetic oligonucleotide
auccacucgucugcaguau

SEQ ID NO: 460629 - RNA, 19 nt, Artificial Sequence
  Description of Artificial Sequence: Synthetic oligonucleotide
cacucgucugcaguaucca

SEQ ID NO: 460630 - RNA, 19 nt, Artificial Sequence
  Description of Artificial Sequence: Synthetic oligonucleotide
ggcggcaccgaagucugug

SEQ ID NO: 460631 - RNA, 19 nt, Artificial Sequence
  Description of Artificial Sequence: Synthetic oligonucleotide
uucgugcuucaguguuauc

SEQ ID NO: 460632 - RNA, 19 nt, Artificial Sequence
  Description of Artificial Sequence: Synthetic oligonucleotide
ccuauaggagcguucauuu

SEQ ID NO: 460633 - RNA, 19 nt, Artificial Sequence
  Description of Artificial Sequence: Synthetic oligonucleotide
gcagccguauuguagcuau

SEQ ID NO: 460634 - RNA, 19 nt, Artificial Sequence
  Description of Artificial Sequence: Synthetic oligonucleotide
aggcccuucaaagggucua

SEQ ID NO: 460635 - RNA, 19 nt, Artificial Sequence
  Description of Artificial Sequence: Synthetic oligonucleotide
cuuucgcauccacucgucu

SEQ ID NO: 460636 - RNA, 19 nt, Artificial Sequence
  Description of Artificial Sequence: Synthetic oligonucleotide
gcaccgagcaauagauuuc

SEQ ID NO: 460637 - RNA, 19 nt, Artificial Sequence
  Description of Artificial Sequence: Synthetic oligonucleotide
ccaccuauaggagcguuca

SEQ ID NO: 460638 - RNA, 19 nt, Artificial Sequence
  Description of Artificial Sequence: Synthetic oligonucleotide
agagucccuagagcacuaa

SEQ ID NO: 460639 - RNA, 19 nt, Artificial Sequence
  Description of Artificial Sequence: Synthetic oligonucleotide
agcagccguauuguagcua

SEQ ID NO: 460640 - RNA, 19 nt, Artificial Sequence
  Description of Artificial Sequence: Synthetic oligonucleotide
cccgaaccguucuagaaua

SEQ ID NO: 460641 - RNA, 19 nt, Artificial Sequence
  Description of Artificial Sequence: Synthetic oligonucleotide
ccguauuguagcuauggau

SEQ ID NO: 460642 - RNA, 19 nt, Artificial Sequence
  Description of Artificial Sequence: Synthetic oligonucleotide
gcguucauuucgugcuuca

SEQ ID NO: 460643 - RNA, 19 nt, Artificial Sequence
  Description of Artificial Sequence: Synthetic oligonucleotide
ccauaguuaaagccccgaa

SEQ ID NO: 460644 - RNA, 19 nt, Artificial Sequence
  Description of Artificial Sequence: Synthetic oligonucleotide
cgcauuaauucuugauaga

SEQ ID NO: 460645 - RNA, 19 nt, Artificial Sequence
  Description of Artificial Sequence: Synthetic oligonucleotide
cccgacgaaagacuacaga

SEQ ID NO: 460646 - RNA, 19 nt, Artificial Sequence
  Description of Artificial Sequence: Synthetic oligonucleotide
agucuacguucugccuugu

SEQ ID NO: 460647 - RNA, 19 nt, Artificial Sequence
  Description of Artificial Sequence: Synthetic oligonucleotide
cgaaccguucuagaauaug

SEQ ID NO: 460648 - RNA, 19 nt, Artificial Sequence
  Description of Artificial Sequence: Synthetic oligonucleotide
uuauuccuacgaggcccuu

SEQ ID NO: 460649 - RNA, 19 nt, Artificial Sequence
  Description of Artificial Sequence: Synthetic oligonucleotide
gggaaggaccccgacgaaa

SEQ ID NO: 460650 - RNA, 19 nt, Artificial Sequence
  Description of Artificial Sequence: Synthetic oligonucleotide
cugcggagaccaccgucca

SEQ ID NO: 460651 - RNA, 19 nt, Artificial Sequence
  Description of Artificial Sequence: Synthetic oligonucleotide
ggcuagucuuccaacuucu

SEQ ID NO: 460652 - RNA, 19 nt, Artificial Sequence
  Description of Artificial Sequence: Synthetic oligonucleotide
cucuggcggcaccgaaguc

SEQ ID NO: 460653 - RNA, 19 nt, Artificial Sequence
  Description of Artificial Sequence: Synthetic oligonucleotide
gccccgaaccguucuagaa

SEQ ID NO: 460654 - RNA, 19 nt, Artificial Sequence
  Description of Artificial Sequence: Synthetic oligonucleotide
gugucaacuaucaguccuu

SEQ ID NO: 460655 - RNA, 19 nt, Artificial Sequence
  Description of Artificial Sequence: Synthetic oligonucleotide
ccaauacuccaaaggucaa

SEQ ID NO: 460656 - RNA, 19 nt, Artificial Sequence
  Description of Artificial Sequence: Synthetic oligonucleotide
cagagucccuagagcacua

SEQ ID NO: 460657 - RNA, 19 nt, Artificial Sequence
  Description of Artificial Sequence: Synthetic oligonucleotide
caccguucacaagguguca

SEQ ID NO: 460658 - RNA, 19 nt, Artificial Sequence
  Description of Artificial Sequence: Synthetic oligonucleotide
ccccuuucgcauuaauucu

SEQ ID NO: 460659 - RNA, 19 nt, Artificial Sequence
  Description of Artificial Sequence: Synthetic oligonucleotide
ggucggcucuguucuccac

SEQ ID NO: 460660 - RNA, 19 nt, Artificial Sequence
  Description of Artificial Sequence: Synthetic oligonucleotide
ccacuccagucaaucgguc

SEQ ID NO: 460661 - RNA, 19 nt, Artificial Sequence
  Description of Artificial Sequence: Synthetic oligonucleotide
acgcugcggagaccaccgu

SEQ ID NO: 460662 - RNA, 19 nt, Artificial Sequence
  Description of Artificial Sequence: Synthetic oligonucleotide
gcggagaccaccguccaua

SEQ ID NO: 460663 - RNA, 19 nt, Artificial Sequence
  Description of Artificial Sequence: Synthetic oligonucleotide
gcggcaccgaagucuguga

SEQ ID NO: 460664 - RNA, 19 nt, Artificial Sequence
  Description of Artificial Sequence: Synthetic oligonucleotide
cgucguccuucguagauaa

SEQ ID NO: 460665 - RNA, 19 nt, Artificial Sequence
  Description of Artificial Sequence: Synthetic oligonucleotide
cguagauaaguucuugauu

SEQ ID NO: 460666 - RNA, 19 nt, Artificial Sequence
  Description of Artificial Sequence: Synthetic oligonucleotide
cggcaccgaagucugugag

SEQ ID NO: 460667 - RNA, 19 nt, Artificial Sequence
  Description of Artificial Sequence: Synthetic oligonucleotide
aggcaccgagcaauagauu

SEQ ID NO: 460668 - RNA, 19 nt, Artificial Sequence
  Description of Artificial Sequence: Synthetic oligonucleotide
cagcagccguauuguagcu

SEQ ID NO: 460669 - RNA, 19 nt, Artificial Sequence
  Description of Artificial Sequence: Synthetic oligonucleotide
gucaaagcacugacugguu

SEQ ID NO: 460670 - RNA, 19 nt, Artificial Sequence
  Description of Artificial Sequence: Synthetic oligonucleotide
ccuaugguacuuagggguu

SEQ ID NO: 460671 - RNA, 19 nt, Artificial Sequence
  Description of Artificial Sequence: Synthetic oligonucleotide
ccuuaggcaccgagcaaua

SEQ ID NO: 460672 - RNA, 19 nt, Artificial Sequence
  Description of Artificial Sequence: Synthetic oligonucleotide
cccuuucgcauuaauucuu

SEQ ID NO: 460673 - RNA, 19 nt, Artificial Sequence
  Description of Artificial Sequence: Synthetic oligonucleotide
cgagagucaucuccacuaa

SEQ ID NO: 460674 - RNA, 19 nt, Artificial Sequence
  Description of Artificial Sequence: Synthetic oligonucleotide
cgcauccacucgucugcag

SEQ ID NO: 460675 - RNA, 19 nt, Artificial Sequence
  Description of Artificial Sequence: Synthetic oligonucleotide
ccuucguagauaaguucuu

SEQ ID NO: 460676 - RNA, 19 nt, Artificial Sequence
  Description of Artificial Sequence: Synthetic oligonucleotide
caccuauaggagcguucau

SEQ ID NO: 460677 - RNA, 19 nt, Artificial Sequence
  Description of Artificial Sequence: Synthetic oligonucleotide
cguccuucguagauaaguu

SEQ ID NO: 460678 - RNA, 19 nt, Artificial Sequence
  Description of Artificial Sequence: Synthetic oligonucleotide
ccccgaaccguucuagaau

SEQ ID NO: 460679 - RNA, 19 nt, Artificial Sequence
  Description of Artificial Sequence: Synthetic oligonucleotide
ggaacacagcagccguauu

SEQ ID NO: 460680 - RNA, 19 nt, Artificial Sequence
  Description of Artificial Sequence: Synthetic oligonucleotide
gcugacccuggugaacagu

SEQ ID NO: 460681 - RNA, 19 nt, Artificial Sequence
  Description of Artificial Sequence: Synthetic oligonucleotide
cguaacguggauguacuuu

SEQ ID NO: 460682 - RNA, 19 nt, Artificial Sequence
  Description of Artificial Sequence: Synthetic oligonucleotide
cgaauccccuuucgcauua

SEQ ID NO: 460683 - RNA, 19 nt, Artificial Sequence
  Description of Artificial Sequence: Synthetic oligonucleotide
ccgaauccccuuucgcauu

SEQ ID NO: 460684 - RNA, 19 nt, Artificial Sequence
  Description of Artificial Sequence: Synthetic oligonucleotide
ccgaaccguucuagaauau

SEQ ID NO: 460685 - RNA, 19 nt, Artificial Sequence
  Description of Artificial Sequence: Synthetic oligonucleotide
ccgucacugccuuggccau

SEQ ID NO: 460686 - RNA, 19 nt, Artificial Sequence
  Description of Artificial Sequence: Synthetic oligonucleotide
auauaauagagccuuaucc

SEQ ID NO: 460687 - RNA, 19 nt, Artificial Sequence
  Description of Artificial Sequence: Synthetic oligonucleotide
aaugauauuaaauccuggg

SEQ ID NO: 460688 - RNA, 19 nt, Artificial Sequence
  Description of Artificial Sequence: Synthetic oligonucleotide
ugugccagaaaauauauag

SEQ ID NO: 460689 - RNA, 19 nt, Artificial Sequence
  Description of Artificial Sequence: Synthetic oligonucleotide
uuuuagauuguuuaugugc

SEQ ID NO: 460690 - RNA, 19 nt, Artificial Sequence
  Description of Artificial Sequence: Synthetic oligonucleotide
aaugaauaucacuucaaug

SEQ ID NO: 460691 - RNA, 19 nt, Artificial Sequence
  Description of Artificial Sequence: Synthetic oligonucleotide
aauauaauagagccuuauc

SEQ ID NO: 460692 - RNA, 19 nt, Artificial Sequence
  Description of Artificial Sequence: Synthetic oligonucleotide
uuuaaguuucuguaggucc

SEQ ID NO: 460693 - RNA, 19 nt, Artificial Sequence
  Description of Artificial Sequence: Synthetic oligonucleotide
ugaauaucacuucaauggg

SEQ ID NO: 460694 - RNA, 19 nt, Artificial Sequence
  Description of Artificial Sequence: Synthetic oligonucleotide
aacagugucgaucuuaaca

SEQ ID NO: 460695 - RNA, 19 nt, Artificial Sequence
  Description of Artificial Sequence: Synthetic oligonucleotide
uaaaugauauuaaauccug

SEQ ID NO: 460696 - RNA, 19 nt, Artificial Sequence
  Description of Artificial Sequence: Synthetic oligonucleotide
uaacauagaguccagaguc

SEQ ID NO: 460697 - RNA, 19 nt, Artificial Sequence
  Description of Artificial Sequence: Synthetic oligonucleotide
uguaacauagaguccagag

SEQ ID NO: 460698 - RNA, 19 nt, Artificial Sequence
  Description of Artificial Sequence: Synthetic oligonucleotide
uuguuuaugugccagaaaa

SEQ ID NO: 460699 - RNA, 19 nt, Artificial Sequence
  Description of Artificial Sequence: Synthetic oligonucleotide
uccauaucuaucaauguca

SEQ ID NO: 460700 - RNA, 19 nt, Artificial Sequence
  Description of Artificial Sequence: Synthetic oligonucleotide
uaaucugccgcucagguac

SEQ ID NO: 460701 - RNA, 19 nt, Artificial Sequence
  Description of Artificial Sequence: Synthetic oligonucleotide
ucuguauaaaauguaaaug

SEQ ID NO: 460702 - RNA, 19 nt, Artificial Sequence
  Description of Artificial Sequence: Synthetic oligonucleotide
uaaugucccgauuauaaag

SEQ ID NO: 460703 - RNA, 19 nt, Artificial Sequence
  Description of Artificial Sequence: Synthetic oligonucleotide
uuauuaguuucaaucagac

SEQ ID NO: 460704 - RNA, 19 nt, Artificial Sequence
  Description of Artificial Sequence: Synthetic oligonucleotide
uugguaaguagccucuucg

SEQ ID NO: 460705 - RNA, 19 nt, Artificial Sequence
  Description of Artificial Sequence: Synthetic oligonucleotide
gacaaauccacucccaagc

SEQ ID NO: 460706 - RNA, 19 nt, Artificial Sequence
  Description of Artificial Sequence: Synthetic oligonucleotide
uuuauaugaguccacccca

SEQ ID NO: 460707 - RNA, 19 nt, Artificial Sequence
  Description of Artificial Sequence: Synthetic oligonucleotide
ugauauuaaauccuggguu

SEQ ID NO: 460708 - RNA, 19 nt, Artificial Sequence
  Description of Artificial Sequence: Synthetic oligonucleotide
auugguuguauauauuuug

SEQ ID NO: 460709 - RNA, 19 nt, Artificial Sequence
  Description of Artificial Sequence: Synthetic oligonucleotide
ugauccauuacauggauaa

SEQ ID NO: 460710 - RNA, 19 nt, Artificial Sequence
  Description of Artificial Sequence: Synthetic oligonucleotide
ugaacggaauguuggaugg

SEQ ID NO: 460711 - RNA, 19 nt, Artificial Sequence
  Description of Artificial Sequence: Synthetic oligonucleotide
uaggcuaucuauguggugg

SEQ ID NO: 460712 - RNA, 19 nt, Artificial Sequence
  Description of Artificial Sequence: Synthetic oligonucleotide
guuucaaucagacacaucu

SEQ ID NO: 460713 - RNA, 19 nt, Artificial Sequence
  Description of Artificial Sequence: Synthetic oligonucleotide
uggaggaucaguuucuuug

SEQ ID NO: 460714 - RNA, 19 nt, Artificial Sequence
  Description of Artificial Sequence: Synthetic oligonucleotide
guaagaugcaaaauaaggc

SEQ ID NO: 460715 - RNA, 19 nt, Artificial Sequence
  Description of Artificial Sequence: Synthetic oligonucleotide
uguucggcaaccuuuaagu

SEQ ID NO: 460716 - RNA, 19 nt, Artificial Sequence
  Description of Artificial Sequence: Synthetic oligonucleotide
aguuuuagauuguuuaugu

SEQ ID NO: 460717 - RNA, 19 nt, Artificial Sequence
  Description of Artificial Sequence: Synthetic oligonucleotide
ugugaguugugguaaaaug

SEQ ID NO: 460718 - RNA, 19 nt, Artificial Sequence
  Description of Artificial Sequence: Synthetic oligonucleotide
uauauauuuugagaaacac

SEQ ID NO: 460719 - RNA, 19 nt, Artificial Sequence
  Description of Artificial Sequence: Synthetic oligonucleotide
aucuccuuuccaaagaacc

SEQ ID NO: 460720 - RNA, 19 nt, Artificial Sequence
  Description of Artificial Sequence: Synthetic oligonucleotide
cauguugagaccuuugaac

SEQ ID NO: 460721 - RNA, 19 nt, Artificial Sequence
  Description of Artificial Sequence: Synthetic oligonucleotide
aaugucacagggauguuuc

SEQ ID NO: 460722 - RNA, 19 nt, Artificial Sequence
  Description of Artificial Sequence: Synthetic oligonucleotide
uuauccuucaauccugaga

SEQ ID NO: 460723 - RNA, 19 nt, Artificial Sequence
  Description of Artificial Sequence: Synthetic oligonucleotide
agagacagcaaauacuacu

SEQ ID NO: 460724 - RNA, 19 nt, Artificial Sequence
  Description of Artificial Sequence: Synthetic oligonucleotide
aucuaucaaugucacaggg

SEQ ID NO: 460725 - RNA, 19 nt, Artificial Sequence
  Description of Artificial Sequence: Synthetic oligonucleotide
ucuuuugccagcugaagca

SEQ ID NO: 460726 - RNA, 19 nt, Artificial Sequence
  Description of Artificial Sequence: Synthetic oligonucleotide
uuaguuucaaucagacaca

SEQ ID NO: 460727 - RNA, 19 nt, Artificial Sequence
  Description of Artificial Sequence: Synthetic oligonucleotide
uuacagcucacucuuaccu

SEQ ID NO: 460728 - RNA, 19 nt, Artificial Sequence
  Description of Artificial Sequence: Synthetic oligonucleotide
uauauuuaggucccacugu

SEQ ID NO: 460729 - RNA, 19 nt, Artificial Sequence
  Description of Artificial Sequence: Synthetic oligonucleotide
uucagagaagcaauaucag

SEQ ID NO: 460730 - RNA, 19 nt, Artificial Sequence
  Description of Artificial Sequence: Synthetic oligonucleotide
ucacuuauucuaaucugcc

SEQ ID NO: 460731 - RNA, 19 nt, Artificial Sequence
  Description of Artificial Sequence: Synthetic oligonucleotide
auauuuaggucccacugug

SEQ ID NO: 460732 - RNA, 19 nt, Artificial Sequence
  Description of Artificial Sequence: Synthetic oligonucleotide
aauacacaaaggaagcgug

SEQ ID NO: 460733 - RNA, 19 nt, Artificial Sequence
  Description of Artificial Sequence: Synthetic oligonucleotide
uucgaguucagagacagca

SEQ ID NO: 460734 - RNA, 19 nt, Artificial Sequence
  Description of Artificial Sequence: Synthetic oligonucleotide
ugacacgggauucuuaucu

SEQ ID NO: 460735 - RNA, 19 nt, Artificial Sequence
  Description of Artificial Sequence: Synthetic oligonucleotide
uaucuaucaaugucacagg

SEQ ID NO: 460736 - RNA, 19 nt, Artificial Sequence
  Description of Artificial Sequence: Synthetic oligonucleotide
aucagaacagugucgaucu

SEQ ID NO: 460737 - RNA, 19 nt, Artificial Sequence
  Description of Artificial Sequence: Synthetic oligonucleotide
agucuauuugcucugguga

SEQ ID NO: 460738 - RNA, 19 nt, Artificial Sequence
  Description of Artificial Sequence: Synthetic oligonucleotide
uccauuaaugucccgauua

SEQ ID NO: 460739 - RNA, 19 nt, Artificial Sequence
  Description of Artificial Sequence: Synthetic oligonucleotide
aauggguugugaguugugg

SEQ ID NO: 460740 - RNA, 19 nt, Artificial Sequence
  Description of Artificial Sequence: Synthetic oligonucleotide
guagguacggcaaugacug

SEQ ID NO: 460741 - RNA, 19 nt, Artificial Sequence
  Description of Artificial Sequence: Synthetic oligonucleotide
uauaaucagaucaucugua

SEQ ID NO: 460742 - RNA, 19 nt, Artificial Sequence
  Description of Artificial Sequence: Synthetic oligonucleotide
augauauuaaauccugggu

SEQ ID NO: 460743 - RNA, 19 nt, Artificial Sequence
  Description of Artificial Sequence: Synthetic oligonucleotide
ugucaauuuugcuucaccu

SEQ ID NO: 460744 - RNA, 19 nt, Artificial Sequence
  Description of Artificial Sequence: Synthetic oligonucleotide
gugaguugugguaaaaugg

SEQ ID NO: 460745 - RNA, 19 nt, Artificial Sequence
  Description of Artificial Sequence: Synthetic oligonucleotide
uguugagaccuuugaacgg

SEQ ID NO: 460746 - RNA, 19 nt, Artificial Sequence
  Description of Artificial Sequence: Synthetic oligonucleotide
ucaacgacaucguagaguu

SEQ ID NO: 460747 - RNA, 19 nt, Artificial Sequence
  Description of Artificial Sequence: Synthetic oligonucleotide
aagcacuuacagcucacuc

SEQ ID NO: 460748 - RNA, 19 nt, Artificial Sequence
  Description of Artificial Sequence: Synthetic oligonucleotide
aacggaauguuggauggac

SEQ ID NO: 460749 - RNA, 19 nt, Artificial Sequence
  Description of Artificial Sequence: Synthetic oligonucleotide
gacaucaacgacaucguag

SEQ ID NO: 460750 - RNA, 19 nt, Artificial Sequence
  Description of Artificial Sequence: Synthetic oligonucleotide
uugaacggaauguuggaug

SEQ ID NO: 460751 - RNA, 19 nt, Artificial Sequence
  Description of Artificial Sequence: Synthetic oligonucleotide
ucguuuugcagaauugaug

SEQ ID NO: 460752 - RNA, 19 nt, Artificial Sequence
  Description of Artificial Sequence: Synthetic oligonucleotide
auaccagagagauggggac

SEQ ID NO: 460753 - RNA, 19 nt, Artificial Sequence
  Description of Artificial Sequence: Synthetic oligonucleotide
aguauagaaagaguugaag

SEQ ID NO: 460754 - RNA, 19 nt, Artificial Sequence
  Description of Artificial Sequence: Synthetic oligonucleotide
uaugcaguucaguauggcc

SEQ ID NO: 460755 - RNA, 19 nt, Artificial Sequence
  Description of Artificial Sequence: Synthetic oligonucleotide
aagucuauuugcucuggug

SEQ ID NO: 460756 - RNA, 19 nt, Artificial Sequence
  Description of Artificial Sequence: Synthetic oligonucleotide
ucuucgaguucagagacag

SEQ ID NO: 460757 - RNA, 19 nt, Artificial Sequence
  Description of Artificial Sequence: Synthetic oligonucleotide
agcgaugugauccauuaca

SEQ ID NO: 460758 - RNA, 19 nt, Artificial Sequence
  Description of Artificial Sequence: Synthetic oligonucleotide
ugugagacuuucauugcug

SEQ ID NO: 460759 - RNA, 19 nt, Artificial Sequence
  Description of Artificial Sequence: Synthetic oligonucleotide
ugucgugggaguuuaauuc

SEQ ID NO: 460760 - RNA, 19 nt, Artificial Sequence
  Description of Artificial Sequence: Synthetic oligonucleotide
aauaccagagagaugggga

SEQ ID NO: 460761 - RNA, 19 nt, Artificial Sequence
  Description of Artificial Sequence: Synthetic oligonucleotide
auaaagaaaaggugaucug

SEQ ID NO: 460762 - RNA, 19 nt, Artificial Sequence
  Description of Artificial Sequence: Synthetic oligonucleotide
ucuaucaaugucacaggga

SEQ ID NO: 460763 - RNA, 19 nt, Artificial Sequence
  Description of Artificial Sequence: Synthetic oligonucleotide
ugguuguauauauuuugag

SEQ ID NO: 460764 - RNA, 19 nt, Artificial Sequence
  Description of Artificial Sequence: Synthetic oligonucleotide
ucgaucuuaacaaaccaua

SEQ ID NO: 460765 - RNA, 19 nt, Artificial Sequence
  Description of Artificial Sequence: Synthetic oligonucleotide
gauaaccucguuuugcaga

SEQ ID NO: 460766 - RNA, 19 nt, Artificial Sequence
  Description of Artificial Sequence: Synthetic oligonucleotide
ugucgaucuuaacaaacca

SEQ ID NO: 460767 - RNA, 19 nt, Artificial Sequence
  Description of Artificial Sequence: Synthetic oligonucleotide
auuuaggucccacugugug

SEQ ID NO: 460768 - RNA, 19 nt, Artificial Sequence
  Description of Artificial Sequence: Synthetic oligonucleotide
acagugucgaucuuaacaa

SEQ ID NO: 460769 - RNA, 19 nt, Artificial Sequence
  Description of Artificial Sequence: Synthetic oligonucleotide
uggccuaccaguuuuagau

SEQ ID NO: 460770 - RNA, 19 nt, Artificial Sequence
  Description of Artificial Sequence: Synthetic oligonucleotide
caaaucuggugauggaggg

SEQ ID NO: 460771 - RNA, 19 nt, Artificial Sequence
  Description of Artificial Sequence: Synthetic oligonucleotide
guauucacuggucagugug

SEQ ID NO: 460772 - RNA, 19 nt, Artificial Sequence
  Description of Artificial Sequence: Synthetic oligonucleotide
aaugucccgauuauaaaga

SEQ ID NO: 460773 - RNA, 19 nt, Artificial Sequence
  Description of Artificial Sequence: Synthetic oligonucleotide
cuugcuuggcauaaccagc

SEQ ID NO: 460774 - RNA, 19 nt, Artificial Sequence
  Description of Artificial Sequence: Synthetic oligonucleotide
gaaugggaacuucagcuug

SEQ ID NO: 460775 - RNA, 19 nt, Artificial Sequence
  Description of Artificial Sequence: Synthetic oligonucleotide
agagccauaaagacaaauc

SEQ ID NO: 460776 - RNA, 19 nt, Artificial Sequence
  Description of Artificial Sequence: Synthetic oligonucleotide
accaguuuuagauuguuua

SEQ ID NO: 460777 - RNA, 19 nt, Artificial Sequence
  Description of Artificial Sequence: Synthetic oligonucleotide
caggugauuguauucacug

SEQ ID NO: 460778 - RNA, 19 nt, Artificial Sequence
  Description of Artificial Sequence: Synthetic oligonucleotide
gaugugagcaacguuggug

SEQ ID NO: 460779 - RNA, 19 nt, Artificial Sequence
  Description of Artificial Sequence: Synthetic oligonucleotide
auuaaugucccgauuauaa

SEQ ID NO: 460780 - RNA, 19 nt, Artificial Sequence
  Description of Artificial Sequence: Synthetic oligonucleotide
gagaccuuugaacggaaug

SEQ ID NO: 460781 - RNA, 19 nt, Artificial Sequence
  Description of Artificial Sequence: Synthetic oligonucleotide
ucuccuuuccaaagaacca

SEQ ID NO: 460782 - RNA, 19 nt, Artificial Sequence
  Description of Artificial Sequence: Synthetic oligonucleotide
agugucgaucuuaacaaac

SEQ ID NO: 460783 - RNA, 19 nt, Artificial Sequence
  Description of Artificial Sequence: Synthetic oligonucleotide
uaaccagcgguuauaauuu

SEQ ID NO: 460784 - RNA, 19 nt, Artificial Sequence
  Description of Artificial Sequence: Synthetic oligonucleotide
uagauuguuuaugugccag

SEQ ID NO: 460785 - RNA, 19 nt, Artificial Sequence
  Description of Artificial Sequence: Synthetic oligonucleotide
uguaacagcuguacaggga

SEQ ID NO: 460786 - RNA, 19 nt, Artificial Sequence
  Description of Artificial Sequence: Synthetic oligonucleotide
gauauggcagaaaagagcu

SEQ ID NO: 460787 - RNA, 19 nt, Artificial Sequence
  Description of Artificial Sequence: Synthetic oligonucleotide
ggauaaaauauaauagagc

SEQ ID NO: 460788 - RNA, 19 nt, Artificial Sequence
  Description of Artificial Sequence: Synthetic oligonucleotide
uguaacagacaguccaaac

SEQ ID NO: 460789 - RNA, 19 nt, Artificial Sequence
  Description of Artificial Sequence: Synthetic oligonucleotide
uucuuuauaugaguccacc

SEQ ID NO: 460790 - RNA, 19 nt, Artificial Sequence
  Description of Artificial Sequence: Synthetic oligonucleotide
uaagagaugaugugagcaa

SEQ ID NO: 460791 - RNA, 19 nt, Artificial Sequence
  Description of Artificial Sequence: Synthetic oligonucleotide
augaagauacuuucugaca

SEQ ID NO: 460792 - RNA, 19 nt, Artificial Sequence
  Description of Artificial Sequence: Synthetic oligonucleotide
gagacuuucauugcuggug

SEQ ID NO: 460793 - RNA, 19 nt, Artificial Sequence
  Description of Artificial Sequence: Synthetic oligonucleotide
aauggaauuccuugaccaa

SEQ ID NO: 460794 - RNA, 19 nt, Artificial Sequence
  Description of Artificial Sequence: Synthetic oligonucleotide
uucagcauacauugguugu

SEQ ID NO: 460795 - RNA, 19 nt, Artificial Sequence
  Description of Artificial Sequence: Synthetic oligonucleotide
uguaggcuaucuauguggu

SEQ ID NO: 460796 - RNA, 19 nt, Artificial Sequence
  Description of Artificial Sequence: Synthetic oligonucleotide
uuaaauccuggguuugaga

SEQ ID NO: 460797 - RNA, 19 nt, Artificial Sequence
  Description of Artificial Sequence: Synthetic oligonucleotide
aggugauuguauucacugg

SEQ ID NO: 460798 - RNA, 19 nt, Artificial Sequence
  Description of Artificial Sequence: Synthetic oligonucleotide
uauccauaucuaucaaugu

SEQ ID NO: 460799 - RNA, 19 nt, Artificial Sequence
  Description of Artificial Sequence: Synthetic oligonucleotide
auauauuuugagaaacacu

SEQ ID NO: 460800 - RNA, 19 nt, Artificial Sequence
  Description of Artificial Sequence: Synthetic oligonucleotide
agccuuuugucaauuuugc

SEQ ID NO: 460801 - RNA, 19 nt, Artificial Sequence
  Description of Artificial Sequence: Synthetic oligonucleotide
aaaggaagcgugcacuguu

SEQ ID NO: 460802 - RNA, 19 nt, Artificial Sequence
  Description of Artificial Sequence: Synthetic oligonucleotide
cuuucagagaagcaauauc

SEQ ID NO: 460803 - RNA, 19 nt, Artificial Sequence
  Description of Artificial Sequence: Synthetic oligonucleotide
uuaaugucccgauuauaaa

SEQ ID NO: 460804 - RNA, 19 nt, Artificial Sequence
  Description of Artificial Sequence: Synthetic oligonucleotide
ugugaaugaugaaccgagc

SEQ ID NO: 460805 - RNA, 19 nt, Artificial Sequence
  Description of Artificial Sequence: Synthetic oligonucleotide
uggacaaaauaaacagccu

SEQ ID NO: 460806 - RNA, 19 nt, Artificial Sequence
  Description of Artificial Sequence: Synthetic oligonucleotide
agaaagcacuuacagcuca

SEQ ID NO: 460807 - RNA, 19 nt, Artificial Sequence
  Description of Artificial Sequence: Synthetic oligonucleotide
caucguagaguuucuuuag

SEQ ID NO: 460808 - RNA, 19 nt, Artificial Sequence
  Description of Artificial Sequence: Synthetic oligonucleotide
ccgagcaaaagcaugagag

SEQ ID NO: 460809 - RNA, 19 nt, Artificial Sequence
  Description of Artificial Sequence: Synthetic oligonucleotide
cuguaacagcuguacaggg

SEQ ID NO: 460810 - RNA, 19 nt, Artificial Sequence
  Description of Artificial Sequence: Synthetic oligonucleotide
ucccgauuauaaagaaaag

SEQ ID NO: 460811 - RNA, 19 nt, Artificial Sequence
  Description of Artificial Sequence: Synthetic oligonucleotide
uguuuaugugccagaaaau

SEQ ID NO: 460812 - RNA, 19 nt, Artificial Sequence
  Description of Artificial Sequence: Synthetic oligonucleotide
auacacaaaggaagcgugc

SEQ ID NO: 460813 - RNA, 19 nt, Artificial Sequence
  Description of Artificial Sequence: Synthetic oligonucleotide
guugaagauacagucuuug

SEQ ID NO: 460814 - RNA, 19 nt, Artificial Sequence
  Description of Artificial Sequence: Synthetic oligonucleotide
aauaucagacagguccuca

SEQ ID NO: 460815 - RNA, 19 nt, Artificial Sequence
  Description of Artificial Sequence: Synthetic oligonucleotide
uccauggaucucuaggaac

SEQ ID NO: 460816 - RNA, 19 nt, Artificial Sequence
  Description of Artificial Sequence: Synthetic oligonucleotide
auaaucagaucaucuguau

SEQ ID NO: 460817 - RNA, 19 nt, Artificial Sequence
  Description of Artificial Sequence: Synthetic oligonucleotide
auuuuauccuucaauccug

SEQ ID NO: 460818 - RNA, 19 nt, Artificial Sequence
  Description of Artificial Sequence: Synthetic oligonucleotide
accuugugccaccaaauug

SEQ ID NO: 460819 - RNA, 19 nt, Artificial Sequence
  Description of Artificial Sequence: Synthetic oligonucleotide
uaaucagaucaucuguaua

SEQ ID NO: 460820 - RNA, 19 nt, Artificial Sequence
  Description of Artificial Sequence: Synthetic oligonucleotide
uuuaggucccacuguguga

SEQ ID NO: 460821 - RNA, 19 nt, Artificial Sequence
  Description of Artificial Sequence: Synthetic oligonucleotide
ugugugaaugaugaaccga

SEQ ID NO: 460822 - RNA, 19 nt, Artificial Sequence
  Description of Artificial Sequence: Synthetic oligonucleotide
uguguaacagacaguccaa

SEQ ID NO: 460823 - RNA, 19 nt, Artificial Sequence
  Description of Artificial Sequence: Synthetic oligonucleotide
guuuaagagaugcugugaa

SEQ ID NO: 460824 - RNA, 19 nt, Artificial Sequence
  Description of Artificial Sequence: Synthetic oligonucleotide
auuaaauccuggguuugag

SEQ ID NO: 460825 - RNA, 19 nt, Artificial Sequence
  Description of Artificial Sequence: Synthetic oligonucleotide
ggaucaguuucuuugcuug

SEQ ID NO: 460826 - RNA, 19 nt, Artificial Sequence
  Description of Artificial Sequence: Synthetic oligonucleotide
aaccagcgguuauaauuuc

SEQ ID NO: 460827 - RNA, 19 nt, Artificial Sequence
  Description of Artificial Sequence: Synthetic oligonucleotide
cuuacagcucacucuuacc

SEQ ID NO: 460828 - RNA, 19 nt, Artificial Sequence
  Description of Artificial Sequence: Synthetic oligonucleotide
gugaaugaugaaccgagca

SEQ ID NO: 460829 - RNA, 19 nt, Artificial Sequence
  Description of Artificial Sequence: Synthetic oligonucleotide
ggaaccgccucacaguacg

SEQ ID NO: 460830 - RNA, 19 nt, Artificial Sequence
  Description of Artificial Sequence: Synthetic oligonucleotide
augaguauagaaagaguug

SEQ ID NO: 460831 - RNA, 19 nt, Artificial Sequence
  Description of Artificial Sequence: Synthetic oligonucleotide
cacaguacgaagcgcaaug

SEQ ID NO: 460832 - RNA, 19 nt, Artificial Sequence
  Description of Artificial Sequence: Synthetic oligonucleotide
ugaucugaugguguccucc

SEQ ID NO: 460833 - RNA, 19 nt, Artificial Sequence
  Description of Artificial Sequence: Synthetic oligonucleotide
cauucuuuauaugagucca

SEQ ID NO: 460834 - RNA, 19 nt, Artificial Sequence
  Description of Artificial Sequence: Synthetic oligonucleotide
uuuccauuaaugucccgau

SEQ ID NO: 460835 - RNA, 19 nt, Artificial Sequence
  Description of Artificial Sequence: Synthetic oligonucleotide
ucaaugguuucuccaugga

SEQ ID NO: 460836 - RNA, 19 nt, Artificial Sequence
  Description of Artificial Sequence: Synthetic oligonucleotide
cacuucaauggguugugag

SEQ ID NO: 460837 - RNA, 19 nt, Artificial Sequence
  Description of Artificial Sequence: Synthetic oligonucleotide
caagggauccauggaaugg

SEQ ID NO: 460838 - RNA, 19 nt, Artificial Sequence
  Description of Artificial Sequence: Synthetic oligonucleotide
agaccuuugaacggaaugu

SEQ ID NO: 460839 - RNA, 19 nt, Artificial Sequence
  Description of Artificial Sequence: Synthetic oligonucleotide
aguacgaagcgcaaugugu

SEQ ID NO: 460840 - RNA, 19 nt, Artificial Sequence
  Description of Artificial Sequence: Synthetic oligonucleotide
auuguauucacuggucagu

SEQ ID NO: 460841 - RNA, 19 nt, Artificial Sequence
  Description of Artificial Sequence: Synthetic oligonucleotide
uuaccuugugccaccaaau

SEQ ID NO: 460842 - RNA, 19 nt, Artificial Sequence
  Description of Artificial Sequence: Synthetic oligonucleotide
cccgcaagcaugaagauac

SEQ ID NO: 460843 - RNA, 19 nt, Artificial Sequence
  Description of Artificial Sequence: Synthetic oligonucleotide
ugguguaggcuaucuaugu

SEQ ID NO: 460844 - RNA, 19 nt, Artificial Sequence
  Description of Artificial Sequence: Synthetic oligonucleotide
uguucagcauacauugguu

SEQ ID NO: 460845 - RNA, 19 nt, Artificial Sequence
  Description of Artificial Sequence: Synthetic oligonucleotide
cagacaguccaaacugugc

SEQ ID NO: 460846 - RNA, 19 nt, Artificial Sequence
  Description of Artificial Sequence: Synthetic oligonucleotide
uggaggguaagaugcaaaa

SEQ ID NO: 460847 - RNA, 19 nt, Artificial Sequence
  Description of Artificial Sequence: Synthetic oligonucleotide
gaucuuaacaaaccauaua

SEQ ID NO: 460848 - RNA, 19 nt, Artificial Sequence
  Description of Artificial Sequence: Synthetic oligonucleotide
ugguaaguagccucuucga

SEQ ID NO: 460849 - RNA, 19 nt, Artificial Sequence
  Description of Artificial Sequence: Synthetic oligonucleotide
aaccucguuuugcagaauu

SEQ ID NO: 460850 - RNA, 19 nt, Artificial Sequence
  Description of Artificial Sequence: Synthetic oligonucleotide
cacuguaagagaugaugug

SEQ ID NO: 460851 - RNA, 19 nt, Artificial Sequence
  Description of Artificial Sequence: Synthetic oligonucleotide
agcagcuagauuaaagccu

SEQ ID NO: 460852 - RNA, 19 nt, Artificial Sequence
  Description of Artificial Sequence: Synthetic oligonucleotide
aauccagaaagcacuuaca

SEQ ID NO: 460853 - RNA, 19 nt, Artificial Sequence
  Description of Artificial Sequence: Synthetic oligonucleotide
ugcaaguccuauguuuugc

SEQ ID NO: 460854 - RNA, 19 nt, Artificial Sequence
  Description of Artificial Sequence: Synthetic oligonucleotide
gguaaguagccucuucgag

SEQ ID NO: 460855 - RNA, 19 nt, Artificial Sequence
  Description of Artificial Sequence: Synthetic oligonucleotide
uccuggacaauucuauauu

SEQ ID NO: 460856 - RNA, 19 nt, Artificial Sequence
  Description of Artificial Sequence: Synthetic oligonucleotide
ucccaagccgucauccuca

SEQ ID NO: 460857 - RNA, 19 nt, Artificial Sequence
  Description of Artificial Sequence: Synthetic oligonucleotide
agcucucuggaucuguaca

SEQ ID NO: 460858 - RNA, 19 nt, Artificial Sequence
  Description of Artificial Sequence: Synthetic oligonucleotide
uucacagcgaugugaucca

SEQ ID NO: 460859 - RNA, 19 nt, Artificial Sequence
  Description of Artificial Sequence: Synthetic oligonucleotide
augcaguucaguauggccu

SEQ ID NO: 460860 - RNA, 19 nt, Artificial Sequence
  Description of Artificial Sequence: Synthetic oligonucleotide
agcgugcacuguuuaagag

SEQ ID NO: 460861 - RNA, 19 nt, Artificial Sequence
  Description of Artificial Sequence: Synthetic oligonucleotide
aucaacgacaucguagagu

SEQ ID NO: 460862 - RNA, 19 nt, Artificial Sequence
  Description of Artificial Sequence: Synthetic oligonucleotide
cuuuaaguuucuguagguc

SEQ ID NO: 460863 - RNA, 19 nt, Artificial Sequence
  Description of Artificial Sequence: Synthetic oligonucleotide
uccgagcaaaagcaugaga

SEQ ID NO: 460864 - RNA, 19 nt, Artificial Sequence
  Description of Artificial Sequence: Synthetic oligonucleotide
cugguguaggcuaucuaug

SEQ ID NO: 460865 - RNA, 19 nt, Artificial Sequence
  Description of Artificial Sequence: Synthetic oligonucleotide
ugucccgauuauaaagaaa

SEQ ID NO: 460866 - RNA, 19 nt, Artificial Sequence
  Description of Artificial Sequence: Synthetic oligonucleotide
gacacgggauucuuaucug

SEQ ID NO: 460867 - RNA, 19 nt, Artificial Sequence
  Description of Artificial Sequence: Synthetic oligonucleotide
ccauggaucucuaggaacc

SEQ ID NO: 460868 - RNA, 19 nt, Artificial Sequence
  Description of Artificial Sequence: Synthetic oligonucleotide
guacgaagcgcaaugugug

SEQ ID NO: 460869 - RNA, 19 nt, Artificial Sequence
  Description of Artificial Sequence: Synthetic oligonucleotide
acagcgaugugauccauua

SEQ ID NO: 460870 - RNA, 19 nt, Artificial Sequence
  Description of Artificial Sequence: Synthetic oligonucleotide
ucacaauggcuguacaguu

SEQ ID NO: 460871 - RNA, 19 nt, Artificial Sequence
  Description of Artificial Sequence: Synthetic oligonucleotide
gacaacugucccuggagga

SEQ ID NO: 460872 - RNA, 19 nt, Artificial Sequence
  Description of Artificial Sequence: Synthetic oligonucleotide
gugucgaucuuaacaaacc

SEQ ID NO: 460873 - RNA, 19 nt, Artificial Sequence
  Description of Artificial Sequence: Synthetic oligonucleotide
cuguucggcaaccuuuaag

SEQ ID NO: 460874 - RNA, 19 nt, Artificial Sequence
  Description of Artificial Sequence: Synthetic oligonucleotide
cgauuauaaagaaaaggug

SEQ ID NO: 460875 - RNA, 19 nt, Artificial Sequence
  Description of Artificial Sequence: Synthetic oligonucleotide
ucacugugcggccacaguu

SEQ ID NO: 460876 - RNA, 19 nt, Artificial Sequence
  Description of Artificial Sequence: Synthetic oligonucleotide
ugagcaacguugguggccu

SEQ ID NO: 460877 - RNA, 19 nt, Artificial Sequence
  Description of Artificial Sequence: Synthetic oligonucleotide
ugucaauaucuccuuccau

SEQ ID NO: 460878 - RNA, 19 nt, Artificial Sequence
  Description of Artificial Sequence: Synthetic oligonucleotide
ugcuuggcauaaccagcgg

SEQ ID NO: 460879 - RNA, 19 nt, Artificial Sequence
  Description of Artificial Sequence: Synthetic oligonucleotide
ugucccuggaggaucaguu

SEQ ID NO: 460880 - RNA, 19 nt, Artificial Sequence
  Description of Artificial Sequence: Synthetic oligonucleotide
cauccgagcaaaagcauga

SEQ ID NO: 460881 - RNA, 19 nt, Artificial Sequence
  Description of Artificial Sequence: Synthetic oligonucleotide
uaggaaccgccucacagua

SEQ ID NO: 460882 - RNA, 19 nt, Artificial Sequence
  Description of Artificial Sequence: Synthetic oligonucleotide
gauuguuuaugugccagaa

SEQ ID NO: 460883 - RNA, 19 nt, Artificial Sequence
  Description of Artificial Sequence: Synthetic oligonucleotide
cagaauugaugacacagaa

SEQ ID NO: 460884 - RNA, 19 nt, Artificial Sequence
  Description of Artificial Sequence: Synthetic oligonucleotide
ugagacuuucauugcuggu

SEQ ID NO: 460885 - RNA, 19 nt, Artificial Sequence
  Description of Artificial Sequence: Synthetic oligonucleotide
uguauucacuggucagugu

SEQ ID NO: 460886 - RNA, 19 nt, Artificial Sequence
  Description of Artificial Sequence: Synthetic oligonucleotide
aguccuauguuuugcugaa

SEQ ID NO: 460887 - RNA, 19 nt, Artificial Sequence
  Description of Artificial Sequence: Synthetic oligonucleotide
guaacauagaguccagagu

SEQ ID NO: 460888 - RNA, 19 nt, Artificial Sequence
  Description of Artificial Sequence: Synthetic oligonucleotide
guaaguagccucuucgagu

SEQ ID NO: 460889 - RNA, 19 nt, Artificial Sequence
  Description of Artificial Sequence: Synthetic oligonucleotide
auguuggauggacaaaaua

SEQ ID NO: 460890 - RNA, 19 nt, Artificial Sequence
  Description of Artificial Sequence: Synthetic oligonucleotide
acggcaaugacuggcucuc

SEQ ID NO: 460891 - RNA, 19 nt, Artificial Sequence
  Description of Artificial Sequence: Synthetic oligonucleotide
gacagguccucagaucuug

SEQ ID NO: 460892 - RNA, 19 nt, Artificial Sequence
  Description of Artificial Sequence: Synthetic oligonucleotide
gcgguuauaauuucuuuga

SEQ ID NO: 460893 - RNA, 19 nt, Artificial Sequence
  Description of Artificial Sequence: Synthetic oligonucleotide
uccccauacuggaucagaa

SEQ ID NO: 460894 - RNA, 19 nt, Artificial Sequence
  Description of Artificial Sequence: Synthetic oligonucleotide
guuucuauuaaugcucuua

SEQ ID NO: 460895 - RNA, 19 nt, Artificial Sequence
  Description of Artificial Sequence: Synthetic oligonucleotide
aguagccucuucgaguuca

SEQ ID NO: 460896 - RNA, 19 nt, Artificial Sequence
  Description of Artificial Sequence: Synthetic oligonucleotide
aaucugccgcucagguacc

SEQ ID NO: 460897 - RNA, 19 nt, Artificial Sequence
  Description of Artificial Sequence: Synthetic oligonucleotide
ccagguuucucacuuauuc

SEQ ID NO: 460898 - RNA, 19 nt, Artificial Sequence
  Description of Artificial Sequence: Synthetic oligonucleotide
guugagaccuuugaacgga

SEQ ID NO: 460899 - RNA, 19 nt, Artificial Sequence
  Description of Artificial Sequence: Synthetic oligonucleotide
uacgaagcgcaaugugugu

SEQ ID NO: 460900 - RNA, 19 nt, Artificial Sequence
  Description of Artificial Sequence: Synthetic oligonucleotide
ccucuaggggauaaccucg

SEQ ID NO: 460901 - RNA, 19 nt, Artificial Sequence
  Description of Artificial Sequence: Synthetic oligonucleotide
cguuuugcagaauugauga

SEQ ID NO: 460902 - RNA, 19 nt, Artificial Sequence
  Description of Artificial Sequence: Synthetic oligonucleotide
gaagcgcaauguguguugc

SEQ ID NO: 460903 - RNA, 19 nt, Artificial Sequence
  Description of Artificial Sequence: Synthetic oligonucleotide
acaguccaaacugugcacu

SEQ ID NO: 460904 - RNA, 19 nt, Artificial Sequence
  Description of Artificial Sequence: Synthetic oligonucleotide
uuaaugaccuugggaagua

SEQ ID NO: 460905 - RNA, 19 nt, Artificial Sequence
  Description of Artificial Sequence: Synthetic oligonucleotide
gguauaaggcuuucagaga

SEQ ID NO: 460906 - RNA, 19 nt, Artificial Sequence
  Description of Artificial Sequence: Synthetic oligonucleotide
uaccuugugccaccaaauu

SEQ ID NO: 460907 - RNA, 19 nt, Artificial Sequence
  Description of Artificial Sequence: Synthetic oligonucleotide
uugugaguugugguaaaau

SEQ ID NO: 460908 - RNA, 19 nt, Artificial Sequence
  Description of Artificial Sequence: Synthetic oligonucleotide
ugaguccaccccagcuuag

SEQ ID NO: 460909 - RNA, 19 nt, Artificial Sequence
  Description of Artificial Sequence: Synthetic oligonucleotide
caguacgaagcgcaaugug

SEQ ID NO: 460910 - RNA, 19 nt, Artificial Sequence
  Description of Artificial Sequence: Synthetic oligonucleotide
uuguaacauagaguccaga

SEQ ID NO: 460911 - RNA, 19 nt, Artificial Sequence
  Description of Artificial Sequence: Synthetic oligonucleotide
cuuuugccagcugaagcac

SEQ ID NO: 460912 - RNA, 19 nt, Artificial Sequence
  Description of Artificial Sequence: Synthetic oligonucleotide
ugaaccgagcagcuagauu

SEQ ID NO: 460913 - RNA, 19 nt, Artificial Sequence
  Description of Artificial Sequence: Synthetic oligonucleotide
augucccgauuauaaagaa

SEQ ID NO: 460914 - RNA, 19 nt, Artificial Sequence
  Description of Artificial Sequence: Synthetic oligonucleotide
auacuggaucagaacagug

SEQ ID NO: 460915 - RNA, 19 nt, Artificial Sequence
  Description of Artificial Sequence: Synthetic oligonucleotide
ucgugggaguuuaauucau

SEQ ID NO: 460916 - RNA, 19 nt, Artificial Sequence
  Description of Artificial Sequence: Synthetic oligonucleotide
gaauaucacuucaaugggu

SEQ ID NO: 460917 - RNA, 19 nt, Artificial Sequence
  Description of Artificial Sequence: Synthetic oligonucleotide
ggugauuguauucacuggu

SEQ ID NO: 460918 - RNA, 19 nt, Artificial Sequence
  Description of Artificial Sequence: Synthetic oligonucleotide
ccaaauugcaaguccuaug

SEQ ID NO: 460919 - RNA, 19 nt, Artificial Sequence
  Description of Artificial Sequence: Synthetic oligonucleotide
uugagaccuuugaacggaa

SEQ ID NO: 460920 - RNA, 19 nt, Artificial Sequence
  Description of Artificial Sequence: Synthetic oligonucleotide
gguguaggcuaucuaugug

SEQ ID NO: 460921 - RNA, 19 nt, Artificial Sequence
  Description of Artificial Sequence: Synthetic oligonucleotide
ggguaagaugcaaaauaag

SEQ ID NO: 460922 - RNA, 19 nt, Artificial Sequence
  Description of Artificial Sequence: Synthetic oligonucleotide
auggccuaccaguuuuaga

SEQ ID NO: 460923 - RNA, 19 nt, Artificial Sequence
  Description of Artificial Sequence: Synthetic oligonucleotide
guguugcauccucuagggg

SEQ ID NO: 460924 - RNA, 19 nt, Artificial Sequence
  Description of Artificial Sequence: Synthetic oligonucleotide
aagcgcaauguguguugca

SEQ ID NO: 460925 - RNA, 19 nt, Artificial Sequence
  Description of Artificial Sequence: Synthetic oligonucleotide
guaucuguucagcauacau

SEQ ID NO: 460926 - RNA, 19 nt, Artificial Sequence
  Description of Artificial Sequence: Synthetic oligonucleotide
ccuuguaacauagagucca

SEQ ID NO: 460927 - RNA, 19 nt, Artificial Sequence
  Description of Artificial Sequence: Synthetic oligonucleotide
cuaucuaugugguggauuu

SEQ ID NO: 460928 - RNA, 19 nt, Artificial Sequence
  Description of Artificial Sequence: Synthetic oligonucleotide
caucaacgacaucguagag

SEQ ID NO: 460929 - RNA, 19 nt, Artificial Sequence
  Description of Artificial Sequence: Synthetic oligonucleotide
aguccaccccagcuuagca

SEQ ID NO: 460930 - RNA, 19 nt, Artificial Sequence
  Description of Artificial Sequence: Synthetic oligonucleotide
uggcauaaccagcgguuau

SEQ ID NO: 460931 - RNA, 19 nt, Artificial Sequence
  Description of Artificial Sequence: Synthetic oligonucleotide
guaggcuaucuauguggug

SEQ ID NO: 460932 - RNA, 19 nt, Artificial Sequence
  Description of Artificial Sequence: Synthetic oligonucleotide
aggcuaucuauguggugga

SEQ ID NO: 460933 - RNA, 19 nt, Artificial Sequence
  Description of Artificial Sequence: Synthetic oligonucleotide
gugugugaaaauauaccaa

SEQ ID NO: 460934 - RNA, 19 nt, Artificial Sequence
  Description of Artificial Sequence: Synthetic oligonucleotide
acaguacgaagcgcaaugu

SEQ ID NO: 460935 - RNA, 19 nt, Artificial Sequence
  Description of Artificial Sequence: Synthetic oligonucleotide
gaguauagaaagaguugaa

SEQ ID NO: 460936 - RNA, 19 nt, Artificial Sequence
  Description of Artificial Sequence: Synthetic oligonucleotide
guccgaguccaggugauug

SEQ ID NO: 460937 - RNA, 19 nt, Artificial Sequence
  Description of Artificial Sequence: Synthetic oligonucleotide
gugauuguauucacugguc

SEQ ID NO: 460938 - RNA, 19 nt, Artificial Sequence
  Description of Artificial Sequence: Synthetic oligonucleotide
auuuucccuggcaucauau

SEQ ID NO: 460939 - RNA, 19 nt, Artificial Sequence
  Description of Artificial Sequence: Synthetic oligonucleotide
uuccccauacuggaucaga

SEQ ID NO: 460940 - RNA, 19 nt, Artificial Sequence
  Description of Artificial Sequence: Synthetic oligonucleotide
cccauacuggaucagaaca

SEQ ID NO: 460941 - RNA, 19 nt, Artificial Sequence
  Description of Artificial Sequence: Synthetic oligonucleotide
accccagcuuagcagggug

SEQ ID NO: 460942 - RNA, 19 nt, Artificial Sequence
  Description of Artificial Sequence: Synthetic oligonucleotide
ggggauaaccucguuuugc

SEQ ID NO: 460943 - RNA, 19 nt, Artificial Sequence
  Description of Artificial Sequence: Synthetic oligonucleotide
cuuaaugaccuugggaagu

SEQ ID NO: 460944 - RNA, 19 nt, Artificial Sequence
  Description of Artificial Sequence: Synthetic oligonucleotide
gugagcaacguugguggcc

SEQ ID NO: 460945 - RNA, 19 nt, Artificial Sequence
  Description of Artificial Sequence: Synthetic oligonucleotide
agcgcaauguguguugcau

SEQ ID NO: 460946 - RNA, 19 nt, Artificial Sequence
  Description of Artificial Sequence: Synthetic oligonucleotide
gaacagugucgaucuuaac

SEQ ID NO: 460947 - RNA, 19 nt, Artificial Sequence
  Description of Artificial Sequence: Synthetic oligonucleotide
gccagaaaauauauaguca

SEQ ID NO: 460948 - RNA, 19 nt, Artificial Sequence
  Description of Artificial Sequence: Synthetic oligonucleotide
acaguucaguaaugccaca

SEQ ID NO: 460949 - RNA, 19 nt, Artificial Sequence
  Description of Artificial Sequence: Synthetic oligonucleotide
aucacugugcggccacagu

SEQ ID NO: 460950 - RNA, 19 nt, Artificial Sequence
  Description of Artificial Sequence: Synthetic oligonucleotide
gacaucguagaguuucuuu

SEQ ID NO: 460951 - RNA, 19 nt, Artificial Sequence
  Description of Artificial Sequence: Synthetic oligonucleotide
uuggcauaaccagcgguua

SEQ ID NO: 460952 - RNA, 19 nt, Artificial Sequence
  Description of Artificial Sequence: Synthetic oligonucleotide
auaccaacacauauuccuu

SEQ ID NO: 460953 - RNA, 19 nt, Artificial Sequence
  Description of Artificial Sequence: Synthetic oligonucleotide
gaugaaccgagcagcuaga

SEQ ID NO: 460954 - RNA, 19 nt, Artificial Sequence
  Description of Artificial Sequence: Synthetic oligonucleotide
cucccaagccgucauccuc

SEQ ID NO: 460955 - RNA, 19 nt, Artificial Sequence
  Description of Artificial Sequence: Synthetic oligonucleotide
auccgagcaaaagcaugag

SEQ ID NO: 460956 - RNA, 19 nt, Artificial Sequence
  Description of Artificial Sequence: Synthetic oligonucleotide
gaacucucugcggcagugc

SEQ ID NO: 460957 - RNA, 19 nt, Artificial Sequence
  Description of Artificial Sequence: Synthetic oligonucleotide
ccauccgagcaaaagcaug

SEQ ID NO: 460958 - RNA, 19 nt, Artificial Sequence
  Description of Artificial Sequence: Synthetic oligonucleotide
ucuuaccuugugccaccaa

SEQ ID NO: 460959 - RNA, 19 nt, Artificial Sequence
  Description of Artificial Sequence: Synthetic oligonucleotide
ucacaguacgaagcgcaau

SEQ ID NO: 460960 - RNA, 19 nt, Artificial Sequence
  Description of Artificial Sequence: Synthetic oligonucleotide
ucuaggggauaaccucguu

SEQ ID NO: 460961 - RNA, 19 nt, Artificial Sequence
  Description of Artificial Sequence: Synthetic oligonucleotide
aggcccauuuucccuggca

SEQ ID NO: 460962 - RNA, 19 nt, Artificial Sequence
  Description of Artificial Sequence: Synthetic oligonucleotide
cuaggaaccgccucacagu

SEQ ID NO: 460963 - RNA, 19 nt, Artificial Sequence
  Description of Artificial Sequence: Synthetic oligonucleotide
guccacaccuguuugguau

SEQ ID NO: 460964 - RNA, 19 nt, Artificial Sequence
  Description of Artificial Sequence: Synthetic oligonucleotide
cuuggcauaaccagcgguu

SEQ ID NO: 460965 - RNA, 19 nt, Artificial Sequence
  Description of Artificial Sequence: Synthetic oligonucleotide
aggaagcgugcacuguuua

SEQ ID NO: 460966 - RNA, 19 nt, Artificial Sequence
  Description of Artificial Sequence: Synthetic oligonucleotide
agcauacauugguuguaua

SEQ ID NO: 460967 - RNA, 19 nt, Artificial Sequence
  Description of Artificial Sequence: Synthetic oligonucleotide
gggauucuuaucugugaga

SEQ ID NO: 460968 - RNA, 19 nt, Artificial Sequence
  Description of Artificial Sequence: Synthetic oligonucleotide
uguccacaccuguuuggua

SEQ ID NO: 460969 - RNA, 19 nt, Artificial Sequence
  Description of Artificial Sequence: Synthetic oligonucleotide
aaccgccucacaguacgaa

SEQ ID NO: 460970 - RNA, 19 nt, Artificial Sequence
  Description of Artificial Sequence: Synthetic oligonucleotide
accagcgguuauaauuucu

SEQ ID NO: 460971 - RNA, 19 nt, Artificial Sequence
  Description of Artificial Sequence: Synthetic oligonucleotide
aaggaagcgugcacuguuu

SEQ ID NO: 460972 - RNA, 19 nt, Artificial Sequence
  Description of Artificial Sequence: Synthetic oligonucleotide
uuucugacacgggauucuu

SEQ ID NO: 460973 - RNA, 19 nt, Artificial Sequence
  Description of Artificial Sequence: Synthetic oligonucleotide
gcgugcacuguuuaagaga

SEQ ID NO: 460974 - RNA, 19 nt, Artificial Sequence
  Description of Artificial Sequence: Synthetic oligonucleotide
ccaagggauccauggaaug

SEQ ID NO: 460975 - RNA, 19 nt, Artificial Sequence
  Description of Artificial Sequence: Synthetic oligonucleotide
agcaacguugguggccuug

SEQ ID NO: 460976 - RNA, 19 nt, Artificial Sequence
  Description of Artificial Sequence: Synthetic oligonucleotide
aguugauccccaguuucua

SEQ ID NO: 460977 - RNA, 19 nt, Artificial Sequence
  Description of Artificial Sequence: Synthetic oligonucleotide
caguucaguauggccuacc

SEQ ID NO: 460978 - RNA, 19 nt, Artificial Sequence
  Description of Artificial Sequence: Synthetic oligonucleotide
ccgccucacaguacgaagc

SEQ ID NO: 460979 - RNA, 19 nt, Artificial Sequence
  Description of Artificial Sequence: Synthetic oligonucleotide
ggcucuccucccuuaauga

SEQ ID NO: 460980 - RNA, 19 nt, Artificial Sequence
  Description of Artificial Sequence: Synthetic oligonucleotide
acggaauguuggauggaca

SEQ ID NO: 460981 - RNA, 19 nt, Artificial Sequence
  Description of Artificial Sequence: Synthetic oligonucleotide
cucguuuugcagaauugau

SEQ ID NO: 460982 - RNA, 19 nt, Artificial Sequence
  Description of Artificial Sequence: Synthetic oligonucleotide
cugcggcagugcgauagcg

SEQ ID NO: 460983 - RNA, 19 nt, Artificial Sequence
  Description of Artificial Sequence: Synthetic oligonucleotide
ccuuccauccgagcaaaag

SEQ ID NO: 460984 - RNA, 19 nt, Artificial Sequence
  Description of Artificial Sequence: Synthetic oligonucleotide
gcugguguaggcuaucuau

SEQ ID NO: 460985 - RNA, 19 nt, Artificial Sequence
  Description of Artificial Sequence: Synthetic oligonucleotide
aguugaagauacagucuuu

SEQ ID NO: 460986 - RNA, 19 nt, Artificial Sequence
  Description of Artificial Sequence: Synthetic oligonucleotide
gguagguacggcaaugacu

SEQ ID NO: 460987 - RNA, 19 nt, Artificial Sequence
  Description of Artificial Sequence: Synthetic oligonucleotide
cagcgaugugauccauuac

SEQ ID NO: 460988 - RNA, 19 nt, Artificial Sequence
  Description of Artificial Sequence: Synthetic oligonucleotide
cucacaguacgaagcgcaa

SEQ ID NO: 460989 - RNA, 19 nt, Artificial Sequence
  Description of Artificial Sequence: Synthetic oligonucleotide
ggccccgcaagcaugaaga

SEQ ID NO: 460990 - RNA, 19 nt, Artificial Sequence
  Description of Artificial Sequence: Synthetic oligonucleotide
cauacuggaucagaacagu

SEQ ID NO: 460991 - RNA, 19 nt, Artificial Sequence
  Description of Artificial Sequence: Synthetic oligonucleotide
gugguaaaauggaauuccu

SEQ ID NO: 460992 - RNA, 19 nt, Artificial Sequence
  Description of Artificial Sequence: Synthetic oligonucleotide
cugugagacuuucauugcu

SEQ ID NO: 460993 - RNA, 19 nt, Artificial Sequence
  Description of Artificial Sequence: Synthetic oligonucleotide
cucuucgaguucagagaca

SEQ ID NO: 460994 - RNA, 19 nt, Artificial Sequence
  Description of Artificial Sequence: Synthetic oligonucleotide
gucgaucuuaacaaaccau

SEQ ID NO: 460995 - RNA, 19 nt, Artificial Sequence
  Description of Artificial Sequence: Synthetic oligonucleotide
cagaacagugucgaucuua

SEQ ID NO: 460996 - RNA, 19 nt, Artificial Sequence
  Description of Artificial Sequence: Synthetic oligonucleotide
guacggcaaugacuggcuc

SEQ ID NO: 460997 - RNA, 19 nt, Artificial Sequence
  Description of Artificial Sequence: Synthetic oligonucleotide
guuucuguagguccuccuu

SEQ ID NO: 460998 - RNA, 19 nt, Artificial Sequence
  Description of Artificial Sequence: Synthetic oligonucleotide
guagccucuucgaguucag

SEQ ID NO: 460999 - RNA, 19 nt, Artificial Sequence
  Description of Artificial Sequence: Synthetic oligonucleotide
agcugguguaggcuaucua

SEQ ID NO: 461000 - RNA, 19 nt, Artificial Sequence
  Description of Artificial Sequence: Synthetic oligonucleotide
cagugucgaucuuaacaaa

SEQ ID NO: 461001 - RNA, 19 nt, Artificial Sequence
  Description of Artificial Sequence: Synthetic oligonucleotide
augaaccgagcagcuagau

SEQ ID NO: 461002 - RNA, 19 nt, Artificial Sequence
  Description of Artificial Sequence: Synthetic oligonucleotide
cagggaacucucugcggca

SEQ ID NO: 461003 - RNA, 19 nt, Artificial Sequence
  Description of Artificial Sequence: Synthetic oligonucleotide
guugauccccaguuucuau

SEQ ID NO: 461004 - RNA, 19 nt, Artificial Sequence
  Description of Artificial Sequence: Synthetic oligonucleotide
cuaggggauaaccucguuu

SEQ ID NO: 461005 - RNA, 19 nt, Artificial Sequence
  Description of Artificial Sequence: Synthetic oligonucleotide
ucugccgcucagguaccac

SEQ ID NO: 461006 - RNA, 19 nt, Artificial Sequence
  Description of Artificial Sequence: Synthetic oligonucleotide
cagguagguacggcaauga

SEQ ID NO: 461007 - RNA, 19 nt, Artificial Sequence
  Description of Artificial Sequence: Synthetic oligonucleotide
ggaagcgugcacuguuuaa

SEQ ID NO: 461008 - RNA, 19 nt, Artificial Sequence
  Description of Artificial Sequence: Synthetic oligonucleotide
ccccauacuggaucagaac

SEQ ID NO: 461009 - RNA, 19 nt, Artificial Sequence
  Description of Artificial Sequence: Synthetic oligonucleotide
gguugugaguugugguaaa

SEQ ID NO: 461010 - RNA, 19 nt, Artificial Sequence
  Description of Artificial Sequence: Synthetic oligonucleotide
ucaaugucacagggauguu

SEQ ID NO: 461011 - RNA, 19 nt, Artificial Sequence
  Description of Artificial Sequence: Synthetic oligonucleotide
gccuuguaacauagagucc

SEQ ID NO: 461012 - RNA, 19 nt, Artificial Sequence
  Description of Artificial Sequence: Synthetic oligonucleotide
gaccuuugaacggaauguu

SEQ ID NO: 461013 - RNA, 19 nt, Artificial Sequence
  Description of Artificial Sequence: Synthetic oligonucleotide
accuguucggcaaccuuua

SEQ ID NO: 461014 - RNA, 19 nt, Artificial Sequence
  Description of Artificial Sequence: Synthetic oligonucleotide
cgccucacaguacgaagcg

SEQ ID NO: 461015 - RNA, 19 nt, Artificial Sequence
  Description of Artificial Sequence: Synthetic oligonucleotide
guucggcaaccuuuaaguu

SEQ ID NO: 461016 - RNA, 19 nt, Artificial Sequence
  Description of Artificial Sequence: Synthetic oligonucleotide
gcauaaccagcgguuauaa

SEQ ID NO: 461017 - RNA, 19 nt, Artificial Sequence
  Description of Artificial Sequence: Synthetic oligonucleotide
cuguuugguauaaggcuuu

SEQ ID NO: 461018 - RNA, 19 nt, Artificial Sequence
  Description of Artificial Sequence: Synthetic oligonucleotide
ccucguuuugcagaauuga

SEQ ID NO: 461019 - RNA, 19 nt, Artificial Sequence
  Description of Artificial Sequence: Synthetic oligonucleotide
gugauccauuacauggaua

SEQ ID NO: 461020 - RNA, 19 nt, Artificial Sequence
  Description of Artificial Sequence: Synthetic oligonucleotide
guagcagcuuuugguaagu

SEQ ID NO: 461021 - RNA, 19 nt, Artificial Sequence
  Description of Artificial Sequence: Synthetic oligonucleotide
cucuaggggauaaccucgu

SEQ ID NO: 461022 - RNA, 19 nt, Artificial Sequence
  Description of Artificial Sequence: Synthetic oligonucleotide
gcgcaauguguguugcauc

SEQ ID NO: 461023 - RNA, 19 nt, Artificial Sequence
  Description of Artificial Sequence: Synthetic oligonucleotide
cggaauguuggauggacaa

SEQ ID NO: 461024 - RNA, 19 nt, Artificial Sequence
  Description of Artificial Sequence: Synthetic oligonucleotide
ggcauaaccagcgguuaua

SEQ ID NO: 461025 - RNA, 19 nt, Artificial Sequence
  Description of Artificial Sequence: Synthetic oligonucleotide
gaaccgccucacaguacga

SEQ ID NO: 461026 - RNA, 19 nt, Artificial Sequence
  Description of Artificial Sequence: Synthetic oligonucleotide
cgaguucagagacagcaaa

SEQ ID NO: 461027 - RNA, 19 nt, Artificial Sequence
  Description of Artificial Sequence: Synthetic oligonucleotide
cauaaccagcgguuauaau

SEQ ID NO: 461028 - RNA, 19 nt, Artificial Sequence
  Description of Artificial Sequence: Synthetic oligonucleotide
gcagcuagauuaaagccuu

SEQ ID NO: 461029 - RNA, 19 nt, Artificial Sequence
  Description of Artificial Sequence: Synthetic oligonucleotide
gcggcagugcgauagcggu

SEQ ID NO: 461030 - RNA, 19 nt, Artificial Sequence
  Description of Artificial Sequence: Synthetic oligonucleotide
caaaggaagcgugcacugu

SEQ ID NO: 461031 - RNA, 19 nt, Artificial Sequence
  Description of Artificial Sequence: Synthetic oligonucleotide
gcaaaagcaugagagccau

SEQ ID NO: 461032 - RNA, 19 nt, Artificial Sequence
  Description of Artificial Sequence: Synthetic oligonucleotide
caaugucacagggauguuu

SEQ ID NO: 461033 - RNA, 19 nt, Artificial Sequence
  Description of Artificial Sequence: Synthetic oligonucleotide
ccuuauccauaucuaucaa

SEQ ID NO: 461034 - RNA, 19 nt, Artificial Sequence
  Description of Artificial Sequence: Synthetic oligonucleotide
cucuuaccuugugccacca

SEQ ID NO: 461035 - RNA, 19 nt, Artificial Sequence
  Description of Artificial Sequence: Synthetic oligonucleotide
agacagguccucagaucuu

SEQ ID NO: 461036 - RNA, 19 nt, Artificial Sequence
  Description of Artificial Sequence: Synthetic oligonucleotide
cagcgguuauaauuucuuu

SEQ ID NO: 461037 - RNA, 19 nt, Artificial Sequence
  Description of Artificial Sequence: Synthetic oligonucleotide
cagcuguacagggaacucu

SEQ ID NO: 461038 - RNA, 19 nt, Artificial Sequence
  Description of Artificial Sequence: Synthetic oligonucleotide
cguugguggccuuguaaca

SEQ ID NO: 461039 - RNA, 19 nt, Artificial Sequence
  Description of Artificial Sequence: Synthetic oligonucleotide
cgaucuuaacaaaccauau

SEQ ID NO: 461040 - RNA, 19 nt, Artificial Sequence
  Description of Artificial Sequence: Synthetic oligonucleotide
gcgaugugauccauuacau

SEQ ID NO: 461041 - RNA, 19 nt, Artificial Sequence
  Description of Artificial Sequence: Synthetic oligonucleotide
cagguaccacaggcucccc

SEQ ID NO: 461042 - RNA, 19 nt, Artificial Sequence
  Description of Artificial Sequence: Synthetic oligonucleotide
ucucugcggcagugcgaua

SEQ ID NO: 461043 - RNA, 19 nt, Artificial Sequence
  Description of Artificial Sequence: Synthetic oligonucleotide
ggcagugcgauagcgguuu

SEQ ID NO: 461044 - RNA, 19 nt, Artificial Sequence
  Description of Artificial Sequence: Synthetic oligonucleotide
ccagcgguuauaauuucuu

SEQ ID NO: 461045 - RNA, 19 nt, Artificial Sequence
  Description of Artificial Sequence: Synthetic oligonucleotide
cacagcgaugugauccauu

SEQ ID NO: 461046 - RNA, 19 nt, Artificial Sequence
  Description of Artificial Sequence: Synthetic oligonucleotide
caguauggccuaccaguuu

SEQ ID NO: 461047 - RNA, 19 nt, Artificial Sequence
  Description of Artificial Sequence: Synthetic oligonucleotide
ggugcacccaagggaucca

SEQ ID NO: 461048 - RNA, 19 nt, Artificial Sequence
  Description of Artificial Sequence: Synthetic oligonucleotide
cagcuagauuaaagccuuu

SEQ ID NO: 461049 - RNA, 19 nt, Artificial Sequence
  Description of Artificial Sequence: Synthetic oligonucleotide
ccuguucggcaaccuuuaa

SEQ ID NO: 461050 - RNA, 19 nt, Artificial Sequence
  Description of Artificial Sequence: Synthetic oligonucleotide
ccacaccuguuugguauaa

SEQ ID NO: 461051 - RNA, 19 nt, Artificial Sequence
  Description of Artificial Sequence: Synthetic oligonucleotide
ggcuaucuaugugguggau

SEQ ID NO: 461052 - RNA, 19 nt, Artificial Sequence
  Description of Artificial Sequence: Synthetic oligonucleotide
ccccgcaagcaugaagaua

SEQ ID NO: 461053 - RNA, 19 nt, Artificial Sequence
  Description of Artificial Sequence: Synthetic oligonucleotide
cgugggaguuuaauucauu

SEQ ID NO: 461054 - RNA, 19 nt, Artificial Sequence
  Description of Artificial Sequence: Synthetic oligonucleotide
ccgcaagcaugaagauacu

SEQ ID NO: 461055 - RNA, 19 nt, Artificial Sequence
  Description of Artificial Sequence: Synthetic oligonucleotide
cgcaagcaugaagauacuu

SEQ ID NO: 461056 - RNA, 19 nt, Artificial Sequence
  Description of Artificial Sequence: Synthetic oligonucleotide
gcagugcgauagcgguuuu

SEQ ID NO: 461057 - RNA, 19 nt, Artificial Sequence
  Description of Artificial Sequence: Synthetic oligonucleotide
aagacaugaacacugaacg

SEQ ID NO: 461058 - RNA, 19 nt, Artificial Sequence
  Description of Artificial Sequence: Synthetic oligonucleotide
uguaauauguucuagauuc

SEQ ID NO: 461059 - RNA, 19 nt, Artificial Sequence
  Description of Artificial Sequence: Synthetic oligonucleotide
auccuuaacagauagagac

SEQ ID NO: 461060 - RNA, 19 nt, Artificial Sequence
  Description of Artificial Sequence: Synthetic oligonucleotide
uuuauggcgagcuacaaag

SEQ ID NO: 461061 - RNA, 19 nt, Artificial Sequence
  Description of Artificial Sequence: Synthetic oligonucleotide
ugaaauaacaggacugacg

SEQ ID NO: 461062 - RNA, 19 nt, Artificial Sequence
  Description of Artificial Sequence: Synthetic oligonucleotide
uguugagugacuaacuuug
